United States Patent Application Publication US 2005/0255487 A1 - sequence listing, part 12

SEQ ID NO: 306626 - RNA, 19 nt, Homo sapiens
  misc_RNA (1)...(19): siRNA sense strand
gaucuccguggaagaauuu

SEQ ID NO: 306627 - RNA, 19 nt, Homo sapiens
  misc_RNA (1)...(19): siRNA sense strand
aaacaaacagagaccauga

SEQ ID NO: 306628 - RNA, 19 nt, Homo sapiens
  misc_RNA (1)...(19): siRNA sense strand
gagaggaacaagaugaaau

SEQ ID NO: 306629 - RNA, 19 nt, Homo sapiens
  misc_RNA (1)...(19): siRNA sense strand
ucacucacauacaaacuuc

SEQ ID NO: 306630 - RNA, 19 nt, Homo sapiens
  misc_RNA (1)...(19): siRNA sense strand
uggaaacguugaauacaug

SEQ ID NO: 306631 - RNA, 19 nt, Homo sapiens
  misc_RNA (1)...(19): siRNA sense strand
acaaacuucucccuccaaa

SEQ ID NO: 306632 - RNA, 19 nt, Homo sapiens
  misc_RNA (1)...(19): siRNA sense strand
uaagagagagagugauuuc

SEQ ID NO: 306633 - RNA, 19 nt, Homo sapiens
  misc_RNA (1)...(19): siRNA sense strand
acagagaccaugacacuga

SEQ ID NO: 306634 - RNA, 19 nt, Homo sapiens
  misc_RNA (1)...(19): siRNA sense strand
uaucagagaccacagacuu

SEQ ID NO: 306635 - RNA, 19 nt, Homo sapiens
  misc_RNA (1)...(19): siRNA sense strand
aaacagagaccaugacacu

SEQ ID NO: 306636 - RNA, 19 nt, Homo sapiens
  misc_RNA (1)...(19): siRNA sense strand
auaauggacuugaacaaag

SEQ ID NO: 306637 - RNA, 19 nt, Homo sapiens
  misc_RNA (1)...(19): siRNA sense strand
uaugaagacuugaugaaac

SEQ ID NO: 306638 - RNA, 19 nt, Homo sapiens
  misc_RNA (1)...(19): siRNA sense strand
cauugacacugaucacuca

SEQ ID NO: 306639 - RNA, 19 nt, Homo sapiens
  misc_RNA (1)...(19): siRNA sense strand
acaagaggcucauucuacu

SEQ ID NO: 306640 - RNA, 19 nt, Homo sapiens
  misc_RNA (1)...(19): siRNA sense strand
ccaacauaauggacuugaa

SEQ ID NO: 306641 - RNA, 19 nt, Homo sapiens
  misc_RNA (1)...(19): siRNA sense strand
gaugauucccaagucaaua

SEQ ID NO: 306642 - RNA, 19 nt, Homo sapiens
  misc_RNA (1)...(19): siRNA sense strand
cgaaucugguaaacauaga

SEQ ID NO: 306643 - RNA, 19 nt, Homo sapiens
  misc_RNA (1)...(19): siRNA sense strand
ggacuugaacaaagaugga

SEQ ID NO: 306644 - RNA, 19 nt, Homo sapiens
  misc_RNA (1)...(19): siRNA sense strand
ugaugaaucugagguaugg

SEQ ID NO: 306645 - RNA, 19 nt, Homo sapiens
  misc_RNA (1)...(19): siRNA sense strand
caagauauuaagagagaga

SEQ ID NO: 306646 - RNA, 19 nt, Homo sapiens
  misc_RNA (1)...(19): siRNA sense strand
uugaauacauguccagcuu

SEQ ID NO: 306647 - RNA, 19 nt, Homo sapiens
  misc_RNA (1)...(19): siRNA sense strand
ggaaacaaacagagaccau

SEQ ID NO: 306648 - RNA, 19 nt, Homo sapiens
  misc_RNA (1)...(19): siRNA sense strand
auggaagcauugacuuuaa

SEQ ID NO: 306649 - RNA, 19 nt, Homo sapiens
  misc_RNA (1)...(19): siRNA sense strand
cccaaucgguacaaucguu

SEQ ID NO: 306650 - RNA, 19 nt, Homo sapiens
  misc_RNA (1)...(19): siRNA sense strand
caacauaauggacuugaac

SEQ ID NO: 306651 - RNA, 19 nt, Homo sapiens
  misc_RNA (1)...(19): siRNA sense strand
ggauaucagagaccacaga

SEQ ID NO: 306652 - RNA, 19 nt, Homo sapiens
  misc_RNA (1)...(19): siRNA sense strand
uggaagcauugacuuuaau

SEQ ID NO: 306653 - RNA, 19 nt, Homo sapiens
  misc_RNA (1)...(19): siRNA sense strand
acagcgccaucaagauauu

SEQ ID NO: 306654 - RNA, 19 nt, Homo sapiens
  misc_RNA (1)...(19): siRNA sense strand
cgugccauguggaaacuuu

SEQ ID NO: 306655 - RNA, 19 nt, Homo sapiens
  misc_RNA (1)...(19): siRNA sense strand
gagguauggcuucacgaaa

SEQ ID NO: 306656 - RNA, 19 nt, Homo sapiens
  misc_RNA (1)...(19): siRNA sense strand
aaacauagaccaaaaugga

SEQ ID NO: 306657 - RNA, 19 nt, Homo sapiens
  misc_RNA (1)...(19): siRNA sense strand
uaugaugaaucugagguau

SEQ ID NO: 306658 - RNA, 19 nt, Homo sapiens
  misc_RNA (1)...(19): siRNA sense strand
gaggcucauucuacucuag

SEQ ID NO: 306659 - RNA, 19 nt, Homo sapiens
  misc_RNA (1)...(19): siRNA sense strand
caacuucaagaccacagaa

SEQ ID NO: 306660 - RNA, 19 nt, Homo sapiens
  misc_RNA (1)...(19): siRNA sense strand
ugaccuuacucgugcuuuc

SEQ ID NO: 306661 - RNA, 19 nt, Homo sapiens
  misc_RNA (1)...(19): siRNA sense strand
agaccacagacuugaauuu

SEQ ID NO: 306662 - RNA, 19 nt, Homo sapiens
  misc_RNA (1)...(19): siRNA sense strand
uaagcuugccaacauaaug

SEQ ID NO: 306663 - RNA, 19 nt, Homo sapiens
  misc_RNA (1)...(19): siRNA sense strand
ugaucuccguggaagaauu

SEQ ID NO: 306664 - RNA, 19 nt, Homo sapiens
  misc_RNA (1)...(19): siRNA sense strand
uacaagaggcucauucuac

SEQ ID NO: 306665 - RNA, 19 nt, Homo sapiens
  misc_RNA (1)...(19): siRNA sense strand
ucagagaccacagacuuga

SEQ ID NO: 306666 - RNA, 19 nt, Homo sapiens
  misc_RNA (1)...(19): siRNA sense strand
ucauucuacucuaguugaa

SEQ ID NO: 306667 - RNA, 19 nt, Homo sapiens
  misc_RNA (1)...(19): siRNA sense strand
aaauggaaacguugaauac

SEQ ID NO: 306668 - RNA, 19 nt, Homo sapiens
  misc_RNA (1)...(19): siRNA sense strand
ccacagaaaaucaggaaaa

SEQ ID NO: 306669 - RNA, 19 nt, Homo sapiens
  misc_RNA (1)...(19): siRNA sense strand
caaagagguaacaaucugu

SEQ ID NO: 306670 - RNA, 19 nt, Homo sapiens
  misc_RNA (1)...(19): siRNA sense strand
ucaguucgaaucugguaaa

SEQ ID NO: 306671 - RNA, 19 nt, Homo sapiens
  misc_RNA (1)...(19): siRNA sense strand
aauaagcuugccaacauaa

SEQ ID NO: 306672 - RNA, 19 nt, Homo sapiens
  misc_RNA (1)...(19): siRNA sense strand
ugaaaucugugcugauacc

SEQ ID NO: 306673 - RNA, 19 nt, Homo sapiens
  misc_RNA (1)...(19): siRNA sense strand
cagagaggaacccguaugu

SEQ ID NO: 306674 - RNA, 19 nt, Homo sapiens
  misc_RNA (1)...(19): siRNA sense strand
uccagaauauccgcauuga

SEQ ID NO: 306675 - RNA, 19 nt, Homo sapiens
  misc_RNA (1)...(19): siRNA sense strand
gguacaaucguugacaaug

SEQ ID NO: 306676 - RNA, 19 nt, Homo sapiens
  misc_RNA (1)...(19): siRNA sense strand
auguccagcuuccagaaua

SEQ ID NO: 306677 - RNA, 19 nt, Homo sapiens
  misc_RNA (1)...(19): siRNA sense strand
ggaaacguugaauacaugu

SEQ ID NO: 306678 - RNA, 19 nt, Homo sapiens
  misc_RNA (1)...(19): siRNA sense strand
cccaaugaccugcacuuga

SEQ ID NO: 306679 - RNA, 19 nt, Homo sapiens
  misc_RNA (1)...(19): siRNA sense strand
uagagaggaacaagaugaa

SEQ ID NO: 306680 - RNA, 19 nt, Homo sapiens
  misc_RNA (1)...(19): siRNA sense strand
gggaaacuggaugaucuuu

SEQ ID NO: 306681 - RNA, 19 nt, Homo sapiens
  misc_RNA (1)...(19): siRNA sense strand
ugagguauggcuucacgaa

SEQ ID NO: 306682 - RNA, 19 nt, Homo sapiens
  misc_RNA (1)...(19): siRNA sense strand
agauggaagcauugacuuu

SEQ ID NO: 306683 - RNA, 19 nt, Homo sapiens
  misc_RNA (1)...(19): siRNA sense strand
gaagaauuucgugccaugu

SEQ ID NO: 306684 - RNA, 19 nt, Homo sapiens
  misc_RNA (1)...(19): siRNA sense strand
cagaaaaucaggaaaacuu

SEQ ID NO: 306685 - RNA, 19 nt, Homo sapiens
  misc_RNA (1)...(19): siRNA sense strand
gaaccacgaagauuuuaug

SEQ ID NO: 306686 - RNA, 19 nt, Homo sapiens
  misc_RNA (1)...(19): siRNA sense strand
agguauggcuucacgaaag

SEQ ID NO: 306687 - RNA, 19 nt, Homo sapiens
  misc_RNA (1)...(19): siRNA sense strand
gaacaaagauggaagcauu

SEQ ID NO: 306688 - RNA, 19 nt, Homo sapiens
  misc_RNA (1)...(19): siRNA sense strand
gaugaaaucugugcugaua

SEQ ID NO: 306689 - RNA, 19 nt, Homo sapiens
  misc_RNA (1)...(19): siRNA sense strand
gaauuucacucacauacaa

SEQ ID NO: 306690 - RNA, 19 nt, Homo sapiens
  misc_RNA (1)...(19): siRNA sense strand
ccaaugaccugcacuugaa

SEQ ID NO: 306691 - RNA, 19 nt, Homo sapiens
  misc_RNA (1)...(19): siRNA sense strand
gagaggaacccguauguuu

SEQ ID NO: 306692 - RNA, 19 nt, Homo sapiens
  misc_RNA (1)...(19): siRNA sense strand
guacaaucguugacaauga

SEQ ID NO: 306693 - RNA, 19 nt, Homo sapiens
  misc_RNA (1)...(19): siRNA sense strand
ucaauaagcuugccaacau

SEQ ID NO: 306694 - RNA, 19 nt, Homo sapiens
  misc_RNA (1)...(19): siRNA sense strand
gcaguuauccaccuucuuu

SEQ ID NO: 306695 - RNA, 19 nt, Homo sapiens
  misc_RNA (1)...(19): siRNA sense strand
cgaauaugcugaugaacaa

SEQ ID NO: 306696 - RNA, 19 nt, Homo sapiens
  misc_RNA (1)...(19): siRNA sense strand
aaacagcgccaucaagaua

SEQ ID NO: 306697 - RNA, 19 nt, Homo sapiens
  misc_RNA (1)...(19): siRNA sense strand
uuacaaagcucgacugaag

SEQ ID NO: 306698 - RNA, 19 nt, Homo sapiens
  misc_RNA (1)...(19): siRNA sense strand
cagaauauccgcauugaaa

SEQ ID NO: 306699 - RNA, 19 nt, Homo sapiens
  misc_RNA (1)...(19): siRNA sense strand
caauaagcuugccaacaua

SEQ ID NO: 306700 - RNA, 19 nt, Homo sapiens
  misc_RNA (1)...(19): siRNA sense strand
gaacagagggaaccacgaa

SEQ ID NO: 306701 - RNA, 19 nt, Homo sapiens
  misc_RNA (1)...(19): siRNA sense strand
gaucugaccuggaaaucau

SEQ ID NO: 306702 - RNA, 19 nt, Homo sapiens
  misc_RNA (1)...(19): siRNA sense strand
caggagaucugacacauca

SEQ ID NO: 306703 - RNA, 19 nt, Homo sapiens
  misc_RNA (1)...(19): siRNA sense strand
ggagaucccucaguucgaa

SEQ ID NO: 306704 - RNA, 19 nt, Homo sapiens
  misc_RNA (1)...(19): siRNA sense strand
gggcugaacuuaccaugga

SEQ ID NO: 306705 - RNA, 19 nt, Homo sapiens
  misc_RNA (1)...(19): siRNA sense strand
auacagaucugaccuggaa

SEQ ID NO: 306706 - RNA, 19 nt, Homo sapiens
  misc_RNA (1)...(19): siRNA sense strand
gaccacagacuugaauuua

SEQ ID NO: 306707 - RNA, 19 nt, Homo sapiens
  misc_RNA (1)...(19): siRNA sense strand
gauggaagcauugacuuua

SEQ ID NO: 306708 - RNA, 19 nt, Homo sapiens
  misc_RNA (1)...(19): siRNA sense strand
ccaaagagguaacaaucug

SEQ ID NO: 306709 - RNA, 19 nt, Homo sapiens
  misc_RNA (1)...(19): siRNA sense strand
gaaagaauuccauagagau

SEQ ID NO: 306710 - RNA, 19 nt, Homo sapiens
  misc_RNA (1)...(19): siRNA sense strand
ccauagagauccuaaugau

SEQ ID NO: 306711 - RNA, 19 nt, Homo sapiens
  misc_RNA (1)...(19): siRNA sense strand
gagggaaccacgaagauuu

SEQ ID NO: 306712 - RNA, 19 nt, Homo sapiens
  misc_RNA (1)...(19): siRNA sense strand
ccaagaaaguccugaagca

SEQ ID NO: 306713 - RNA, 19 nt, Homo sapiens
  misc_RNA (1)...(19): siRNA sense strand
guucgaaucugguaaacau

SEQ ID NO: 306714 - RNA, 19 nt, Homo sapiens
  misc_RNA (1)...(19): siRNA sense strand
cuaaugauccuguguguga

SEQ ID NO: 306715 - RNA, 19 nt, Homo sapiens
  misc_RNA (1)...(19): siRNA sense strand
cagcaguucuucaacgaaa

SEQ ID NO: 306716 - RNA, 19 nt, Homo sapiens
  misc_RNA (1)...(19): siRNA sense strand
uaauggacuugaacaaaga

SEQ ID NO: 306717 - RNA, 19 nt, Homo sapiens
  misc_RNA (1)...(19): siRNA sense strand
guagaucgaggaaagaauu

SEQ ID NO: 306718 - RNA, 19 nt, Homo sapiens
  misc_RNA (1)...(19): siRNA sense strand
ccauggagaucccucaguu

SEQ ID NO: 306719 - RNA, 19 nt, Homo sapiens
  misc_RNA (1)...(19): siRNA sense strand
ucuuagaggugcuauuuga

SEQ ID NO: 306720 - RNA, 19 nt, Homo sapiens
  misc_RNA (1)...(19): siRNA sense strand
aaacuucucccuccaaaga

SEQ ID NO: 306721 - RNA, 19 nt, Homo sapiens
  misc_RNA (1)...(19): siRNA sense strand
agaaaguccugaagcaaau

SEQ ID NO: 306722 - RNA, 19 nt, Homo sapiens
  misc_RNA (1)...(19): siRNA sense strand
gauaugaagacuugaugaa

SEQ ID NO: 306723 - RNA, 19 nt, Homo sapiens
  misc_RNA (1)...(19): siRNA sense strand
guagagaggaacaagauga

SEQ ID NO: 306724 - RNA, 19 nt, Homo sapiens
  misc_RNA (1)...(19): siRNA sense strand
acacacauauacauaagga

SEQ ID NO: 306725 - RNA, 19 nt, Homo sapiens
  misc_RNA (1)...(19): siRNA sense strand
gaaaacagcgccaucaaga

SEQ ID NO: 306726 - RNA, 19 nt, Homo sapiens
  misc_RNA (1)...(19): siRNA sense strand
ccacagacuugaauuuacu

SEQ ID NO: 306727 - RNA, 19 nt, Homo sapiens
  misc_RNA (1)...(19): siRNA sense strand
gguauggcuucacgaaaga

SEQ ID NO: 306728 - RNA, 19 nt, Homo sapiens
  misc_RNA (1)...(19): siRNA sense strand
ccacgaagauuuuaugaug

SEQ ID NO: 306729 - RNA, 19 nt, Homo sapiens
  misc_RNA (1)...(19): siRNA sense strand
ucaugcccauuaugucuua

SEQ ID NO: 306730 - RNA, 19 nt, Homo sapiens
  misc_RNA (1)...(19): siRNA sense strand
guaccgagguuacaaagcu

SEQ ID NO: 306731 - RNA, 19 nt, Homo sapiens
  misc_RNA (1)...(19): siRNA sense strand
gaauuuacuccaccgugua

SEQ ID NO: 306732 - RNA, 19 nt, Homo sapiens
  misc_RNA (1)...(19): siRNA sense strand
caacggaaacaaacagaga

SEQ ID NO: 306733 - RNA, 19 nt, Homo sapiens
  misc_RNA (1)...(19): siRNA sense strand
gauacuucaugcccauuau

SEQ ID NO: 306734 - RNA, 19 nt, Homo sapiens
  misc_RNA (1)...(19): siRNA sense strand
guacaagaggcucauucua

SEQ ID NO: 306735 - RNA, 19 nt, Homo sapiens
  misc_RNA (1)...(19): siRNA sense strand
ccaucaagauauuaagaga

SEQ ID NO: 306736 - RNA, 19 nt, Homo sapiens
  misc_RNA (1)...(19): siRNA sense strand
uacaaucguugacaaugaa

SEQ ID NO: 306737 - RNA, 19 nt, Homo sapiens
  misc_RNA (1)...(19): siRNA sense strand
cauaauggacuugaacaaa

SEQ ID NO: 306738 - RNA, 19 nt, Homo sapiens
  misc_RNA (1)...(19): siRNA sense strand
gaucuccguggaagaauuu

SEQ ID NO: 306739 - RNA, 19 nt, Homo sapiens
  misc_RNA (1)...(19): siRNA sense strand
aaacaaacagagaccauga

SEQ ID NO: 306740 - RNA, 19 nt, Homo sapiens
  misc_RNA (1)...(19): siRNA sense strand
gagaggaacaagaugaaau

SEQ ID NO: 306741 - RNA, 19 nt, Homo sapiens
  misc_RNA (1)...(19): siRNA sense strand
ggaaaacuacacacauaua

SEQ ID NO: 306742 - RNA, 19 nt, Homo sapiens
  misc_RNA (1)...(19): siRNA sense strand
uggaaacguugaauacaug

SEQ ID NO: 306743 - RNA, 19 nt, Homo sapiens
  misc_RNA (1)...(19): siRNA sense strand
ucacucacauacaaacuuc

SEQ ID NO: 306744 - RNA, 19 nt, Homo sapiens
  misc_RNA (1)...(19): siRNA sense strand
acaaacuucucccuccaaa

SEQ ID NO: 306745 - RNA, 19 nt, Homo sapiens
  misc_RNA (1)...(19): siRNA sense strand
uaagagagagagugauuuc

SEQ ID NO: 306746 - RNA, 19 nt, Homo sapiens
  misc_RNA (1)...(19): siRNA sense strand
acagagaccaugacacuga

SEQ ID NO: 306747 - RNA, 19 nt, Homo sapiens
  misc_RNA (1)...(19): siRNA sense strand
uaucagagaccacagacuu

SEQ ID NO: 306748 - RNA, 19 nt, Homo sapiens
  misc_RNA (1)...(19): siRNA sense strand
aaacagagaccaugacacu

SEQ ID NO: 306749 - RNA, 19 nt, Homo sapiens
  misc_RNA (1)...(19): siRNA sense strand
auaauggacuugaacaaag

SEQ ID NO: 306750 - RNA, 19 nt, Homo sapiens
  misc_RNA (1)...(19): siRNA sense strand
uaugaagacuugaugaaac

SEQ ID NO: 306751 - RNA, 19 nt, Homo sapiens
  misc_RNA (1)...(19): siRNA sense strand
cuacacacauauacauaag

SEQ ID NO: 306752 - RNA, 19 nt, Homo sapiens
  misc_RNA (1)...(19): siRNA sense strand
cauugacacugaucacuca

SEQ ID NO: 306753 - RNA, 19 nt, Homo sapiens
  misc_RNA (1)...(19): siRNA sense strand
aagaaaguccugaagcaaa

SEQ ID NO: 306754 - RNA, 19 nt, Homo sapiens
  misc_RNA (1)...(19): siRNA sense strand
ccaacauaauggacuugaa

SEQ ID NO: 306755 - RNA, 19 nt, Homo sapiens
  misc_RNA (1)...(19): siRNA sense strand
gaugauucccaagucaaua

SEQ ID NO: 306756 - RNA, 19 nt, Homo sapiens
  misc_RNA (1)...(19): siRNA sense strand
acaagaggcucauucuacu

SEQ ID NO: 306757 - RNA, 19 nt, Homo sapiens
  misc_RNA (1)...(19): siRNA sense strand
gaacugguaccgagguuac

SEQ ID NO: 306758 - RNA, 19 nt, Homo sapiens
  misc_RNA (1)...(19): siRNA sense strand
cgaaucugguaaacauaga

SEQ ID NO: 306759 - RNA, 19 nt, Homo sapiens
  misc_RNA (1)...(19): siRNA sense strand
ggacuugaacaaagaugga

SEQ ID NO: 306760 - RNA, 19 nt, Homo sapiens
  misc_RNA (1)...(19): siRNA sense strand
caagaaaguccugaagcaa

SEQ ID NO: 306761 - RNA, 19 nt, Homo sapiens
  misc_RNA (1)...(19): siRNA sense strand
ggaugcagcaguucuucaa

SEQ ID NO: 306762 - RNA, 19 nt, Homo sapiens
  misc_RNA (1)...(19): siRNA sense strand
ugaugaaucugagguaugg

SEQ ID NO: 306763 - RNA, 19 nt, Homo sapiens
  misc_RNA (1)...(19): siRNA sense strand
caagauauuaagagagaga

SEQ ID NO: 306764 - RNA, 19 nt, Homo sapiens
  misc_RNA (1)...(19): siRNA sense strand
uugaauacauguccagcuu

SEQ ID NO: 306765 - RNA, 19 nt, Homo sapiens
  misc_RNA (1)...(19): siRNA sense strand
ggaaacaaacagagaccau

SEQ ID NO: 306766 - RNA, 19 nt, Homo sapiens
  misc_RNA (1)...(19): siRNA sense strand
auggaagcauugacuuuaa

SEQ ID NO: 306767 - RNA, 19 nt, Homo sapiens
  misc_RNA (1)...(19): siRNA sense strand
gaaggccagacaacacuau

SEQ ID NO: 306768 - RNA, 19 nt, Homo sapiens
  misc_RNA (1)...(19): siRNA sense strand
gagcugcguugaucaucca

SEQ ID NO: 306769 - RNA, 19 nt, Homo sapiens
  misc_RNA (1)...(19): siRNA sense strand
uuagaggugcuauuugaaa

SEQ ID NO: 306770 - RNA, 19 nt, Homo sapiens
  misc_RNA (1)...(19): siRNA sense strand
caacauaauggacuugaac

SEQ ID NO: 306771 - RNA, 19 nt, Homo sapiens
  misc_RNA (1)...(19): siRNA sense strand
cccaaucgguacaaucguu

SEQ ID NO: 306772 - RNA, 19 nt, Homo sapiens
  misc_RNA (1)...(19): siRNA sense strand
ugucuuagaggugcuauuu

SEQ ID NO: 306773 - RNA, 19 nt, Homo sapiens
  misc_RNA (1)...(19): siRNA sense strand
uggaagcauugacuuuaau

SEQ ID NO: 306774 - RNA, 19 nt, Homo sapiens
  misc_RNA (1)...(19): siRNA sense strand
ggauaucagagaccacaga

SEQ ID NO: 306775 - RNA, 19 nt, Homo sapiens
  misc_RNA (1)...(19): siRNA sense strand
acagcgccaucaagauauu

SEQ ID NO: 306776 - RNA, 19 nt, Homo sapiens
  misc_RNA (1)...(19): siRNA sense strand
cgugccauguggaaacuuu

SEQ ID NO: 306777 - RNA, 19 nt, Homo sapiens
  misc_RNA (1)...(19): siRNA sense strand
gagguauggcuucacgaaa

SEQ ID NO: 306778 - RNA, 19 nt, Homo sapiens
  misc_RNA (1)...(19): siRNA sense strand
aaacauagaccaaaaugga

SEQ ID NO: 306779 - RNA, 19 nt, Homo sapiens
  misc_RNA (1)...(19): siRNA sense strand
acugagagcugcguugauc

SEQ ID NO: 306780 - RNA, 19 nt, Homo sapiens
  misc_RNA (1)...(19): siRNA sense strand
gaggcucauucuacucuag

SEQ ID NO: 306781 - RNA, 19 nt, Homo sapiens
  misc_RNA (1)...(19): siRNA sense strand
caacuucaagaccacagaa

SEQ ID NO: 306782 - RNA, 19 nt, Homo sapiens
  misc_RNA (1)...(19): siRNA sense strand
ugaccuuacucgugcuuuc

SEQ ID NO: 306783 - RNA, 19 nt, Homo sapiens
  misc_RNA (1)...(19): siRNA sense strand
uaugaugaaucugagguau

SEQ ID NO: 306784 - RNA, 19 nt, Homo sapiens
  misc_RNA (1)...(19): siRNA sense strand
uacaagaggcucauucuac

SEQ ID NO: 306785 - RNA, 19 nt, Homo sapiens
  misc_RNA (1)...(19): siRNA sense strand
uaagcuugccaacauaaug

SEQ ID NO: 306786 - RNA, 19 nt, Homo sapiens
  misc_RNA (1)...(19): siRNA sense strand
ugaucuccguggaagaauu

SEQ ID NO: 306787 - RNA, 19 nt, Homo sapiens
  misc_RNA (1)...(19): siRNA sense strand
gaugaaaucugugcugaua

SEQ ID NO: 306788 - RNA, 19 nt, Homo sapiens
  misc_RNA (1)...(19): siRNA sense strand
gaauuucacucacauacaa

SEQ ID NO: 306789 - RNA, 19 nt, Homo sapiens
  misc_RNA (1)...(19): siRNA sense strand
ccaaugaccugcacuugaa

SEQ ID NO: 306790 - RNA, 19 nt, Homo sapiens
  misc_RNA (1)...(19): siRNA sense strand
gagaggaacccguauguuu

SEQ ID NO: 306791 - RNA, 19 nt, Homo sapiens
  misc_RNA (1)...(19): siRNA sense strand
guacaaucguugacaauga

SEQ ID NO: 306792 - RNA, 19 nt, Homo sapiens
  misc_RNA (1)...(19): siRNA sense strand
gcaguuauccaccuucuuu

SEQ ID NO: 306793 - RNA, 19 nt, Homo sapiens
  misc_RNA (1)...(19): siRNA sense strand
cgaauaugcugaugaacaa

SEQ ID NO: 306794 - RNA, 19 nt, Homo sapiens
  misc_RNA (1)...(19): siRNA sense strand
aaacagcgccaucaagaua

SEQ ID NO: 306795 - RNA, 19 nt, Homo sapiens
  misc_RNA (1)...(19): siRNA sense strand
uuacaaagcucgacugaag

SEQ ID NO: 306796 - RNA, 19 nt, Homo sapiens
  misc_RNA (1)...(19): siRNA sense strand
gaacagagggaaccacgaa

SEQ ID NO: 306797 - RNA, 19 nt, Homo sapiens
  misc_RNA (1)...(19): siRNA sense strand
caggagaucugacacauca

SEQ ID NO: 306798 - RNA, 19 nt, Homo sapiens
  misc_RNA (1)...(19): siRNA sense strand
gaccacagacuugaauuua

SEQ ID NO: 306799 - RNA, 19 nt, Homo sapiens
  misc_RNA (1)...(19): siRNA sense strand
ccaaagagguaacaaucug

SEQ ID NO: 306800 - RNA, 19 nt, Homo sapiens
  misc_RNA (1)...(19): siRNA sense strand
gaaagaauuccauagagau

SEQ ID NO: 306801 - RNA, 19 nt, Homo sapiens
  misc_RNA (1)...(19): siRNA sense strand
ccauagagauccuaaugau

SEQ ID NO: 306802 - RNA, 19 nt, Homo sapiens
  misc_RNA (1)...(19): siRNA sense strand
gagggaaccacgaagauuu

SEQ ID NO: 306803 - RNA, 19 nt, Homo sapiens
  misc_RNA (1)...(19): siRNA sense strand
ccaagaaaguccugaagca

SEQ ID NO: 306804 - RNA, 19 nt, Homo sapiens
  misc_RNA (1)...(19): siRNA sense strand
cuaaugauccuguguguga

SEQ ID NO: 306805 - RNA, 19 nt, Homo sapiens
  misc_RNA (1)...(19): siRNA sense strand
cagcaguucuucaacgaaa

SEQ ID NO: 306806 - RNA, 19 nt, Homo sapiens
  misc_RNA (1)...(19): siRNA sense strand
guagaucgaggaaagaauu

SEQ ID NO: 306807 - RNA, 19 nt, Homo sapiens
  misc_RNA (1)...(19): siRNA sense strand
ucuuagaggugcuauuuga

SEQ ID NO: 306808 - RNA, 19 nt, Homo sapiens
  misc_RNA (1)...(19): siRNA sense strand
aaacuucucccuccaaaga

SEQ ID NO: 306809 - RNA, 19 nt, Homo sapiens
  misc_RNA (1)...(19): siRNA sense strand
agaaaguccugaagcaaau

SEQ ID NO: 306810 - RNA, 19 nt, Homo sapiens
  misc_RNA (1)...(19): siRNA sense strand
guagagaggaacaagauga

SEQ ID NO: 306811 - RNA, 19 nt, Homo sapiens
  misc_RNA (1)...(19): siRNA sense strand
acacacauauacauaagga

SEQ ID NO: 306812 - RNA, 19 nt, Homo sapiens
  misc_RNA (1)...(19): siRNA sense strand
gaaaacagcgccaucaaga

SEQ ID NO: 306813 - RNA, 19 nt, Homo sapiens
  misc_RNA (1)...(19): siRNA sense strand
ccacagacuugaauuuacu

SEQ ID NO: 306814 - RNA, 19 nt, Homo sapiens
  misc_RNA (1)...(19): siRNA sense strand
gguauggcuucacgaaaga

SEQ ID NO: 306815 - RNA, 19 nt, Homo sapiens
  misc_RNA (1)...(19): siRNA sense strand
ccacgaagauuuuaugaug

SEQ ID NO: 306816 - RNA, 19 nt, Homo sapiens
  misc_RNA (1)...(19): siRNA sense strand
ucaugcccauuaugucuua

SEQ ID NO: 306817 - RNA, 19 nt, Homo sapiens
  misc_RNA (1)...(19): siRNA sense strand
guaccgagguuacaaagcu

SEQ ID NO: 306818 - RNA, 19 nt, Homo sapiens
  misc_RNA (1)...(19): siRNA sense strand
gaauuuacuccaccgugua

SEQ ID NO: 306819 - RNA, 19 nt, Homo sapiens
  misc_RNA (1)...(19): siRNA sense strand
caacggaaacaaacagaga

SEQ ID NO: 306820 - RNA, 19 nt, Homo sapiens
  misc_RNA (1)...(19): siRNA sense strand
gauacuucaugcccauuau

SEQ ID NO: 306821 - RNA, 19 nt, Homo sapiens
  misc_RNA (1)...(19): siRNA sense strand
ccaucaagauauuaagaga

SEQ ID NO: 306822 - RNA, 19 nt, Homo sapiens
  misc_RNA (1)...(19): siRNA sense strand
uacaaucguugacaaugaa

SEQ ID NO: 306823 - RNA, 19 nt, Homo sapiens
  misc_RNA (1)...(19): siRNA sense strand
aaacaaacagagaccauga

SEQ ID NO: 306824 - RNA, 19 nt, Homo sapiens
  misc_RNA (1)...(19): siRNA sense strand
gagaggaacaagaugaaau

SEQ ID NO: 306825 - RNA, 19 nt, Homo sapiens
  misc_RNA (1)...(19): siRNA sense strand
ggaaaacuacacacauaua

SEQ ID NO: 306826 - RNA, 19 nt, Homo sapiens
  misc_RNA (1)...(19): siRNA sense strand
ucacucacauacaaacuuc

SEQ ID NO: 306827 - RNA, 19 nt, Homo sapiens
  misc_RNA (1)...(19): siRNA sense strand
acaaacuucucccuccaaa

SEQ ID NO: 306828 - RNA, 19 nt, Homo sapiens
  misc_RNA (1)...(19): siRNA sense strand
uaagagagagagugauuuc

SEQ ID NO: 306829 - RNA, 19 nt, Homo sapiens
  misc_RNA (1)...(19): siRNA sense strand
acagagaccaugacacuga

SEQ ID NO: 306830 - RNA, 19 nt, Homo sapiens
  misc_RNA (1)...(19): siRNA sense strand
uaucagagaccacagacuu

SEQ ID NO: 306831 - RNA, 19 nt, Homo sapiens
  misc_RNA (1)...(19): siRNA sense strand
aaacagagaccaugacacu

SEQ ID NO: 306832 - RNA, 19 nt, Homo sapiens
  misc_RNA (1)...(19): siRNA sense strand
cuacacacauauacauaag

SEQ ID NO: 306833 - RNA, 19 nt, Homo sapiens
  misc_RNA (1)...(19): siRNA sense strand
aagaaaguccugaagcaaa

SEQ ID NO: 306834 - RNA, 19 nt, Homo sapiens
  misc_RNA (1)...(19): siRNA sense strand
gaacugguaccgagguuac

SEQ ID NO: 306835 - RNA, 19 nt, Homo sapiens
  misc_RNA (1)...(19): siRNA sense strand
caagaaaguccugaagcaa

SEQ ID NO: 306836 - RNA, 19 nt, Homo sapiens
  misc_RNA (1)...(19): siRNA sense strand
ugaugaaucugagguaugg

SEQ ID NO: 306837 - RNA, 19 nt, Homo sapiens
  misc_RNA (1)...(19): siRNA sense strand
ggaugcagcaguucuucaa

SEQ ID NO: 306838 - RNA, 19 nt, Homo sapiens
  misc_RNA (1)...(19): siRNA sense strand
caagauauuaagagagaga

SEQ ID NO: 306839 - RNA, 19 nt, Homo sapiens
  misc_RNA (1)...(19): siRNA sense strand
gaaggccagacaacacuau

SEQ ID NO: 306840 - RNA, 19 nt, Homo sapiens
  misc_RNA (1)...(19): siRNA sense strand
ggaaacaaacagagaccau

SEQ ID NO: 306841 - RNA, 19 nt, Homo sapiens
  misc_RNA (1)...(19): siRNA sense strand
gagcugcguugaucaucca

SEQ ID NO: 306842 - RNA, 19 nt, Homo sapiens
  misc_RNA (1)...(19): siRNA sense strand
uuagaggugcuauuugaaa

SEQ ID NO: 306843 - RNA, 19 nt, Homo sapiens
  misc_RNA (1)...(19): siRNA sense strand
cccaaucgguacaaucguu

SEQ ID NO: 306844 - RNA, 19 nt, Homo sapiens
  misc_RNA (1)...(19): siRNA sense strand
ugucuuagaggugcuauuu

SEQ ID NO: 306845 - RNA, 19 nt, Homo sapiens
  misc_RNA (1)...(19): siRNA sense strand
ggauaucagagaccacaga

SEQ ID NO: 306846 - RNA, 19 nt, Homo sapiens
  misc_RNA (1)...(19): siRNA sense strand
acagcgccaucaagauauu

SEQ ID NO: 306847 - RNA, 19 nt, Homo sapiens
  misc_RNA (1)...(19): siRNA sense strand
gagguauggcuucacgaaa

SEQ ID NO: 306848 - RNA, 19 nt, Homo sapiens
  misc_RNA (1)...(19): siRNA sense strand
uaugaugaaucugagguau

SEQ ID NO: 306849 - RNA, 19 nt, Homo sapiens
  misc_RNA (1)...(19): siRNA sense strand
acugagagcugcguugauc

SEQ ID NO: 306850 - RNA, 19 nt, Homo sapiens
  misc_RNA (1)...(19): siRNA sense strand
agaccacagacuugaauuu

SEQ ID NO: 306851 - RNA, 19 nt, Homo sapiens
  misc_RNA (1)...(19): siRNA sense strand
caaagagguaacaaucugu

SEQ ID NO: 306852 - RNA, 19 nt, Homo sapiens
  misc_RNA (1)...(19): siRNA sense strand
ucagagaccacagacuuga

SEQ ID NO: 306853 - RNA, 19 nt, Homo sapiens
  misc_RNA (1)...(19): siRNA sense strand
ucgaauaugcugaugaaca

SEQ ID NO: 306854 - RNA, 19 nt, Homo sapiens
  misc_RNA (1)...(19): siRNA sense strand
acuaugcccucaccaucuu

SEQ ID NO: 306855 - RNA, 19 nt, Homo sapiens
  misc_RNA (1)...(19): siRNA sense strand
cagaacugguaccgagguu

SEQ ID NO: 306856 - RNA, 19 nt, Homo sapiens
  misc_RNA (1)...(19): siRNA sense strand
gaaaguccugaagcaaaug

SEQ ID NO: 306857 - RNA, 19 nt, Homo sapiens
  misc_RNA (1)...(19): siRNA sense strand
gcuauuugaaaccaagaaa

SEQ ID NO: 306858 - RNA, 19 nt, Homo sapiens
  misc_RNA (1)...(19): siRNA sense strand
uuggaaaacuacacacaua

SEQ ID NO: 306859 - RNA, 19 nt, Homo sapiens
  misc_RNA (1)...(19): siRNA sense strand
ugaaaucugugcugauacc

SEQ ID NO: 306860 - RNA, 19 nt, Homo sapiens
  misc_RNA (1)...(19): siRNA sense strand
cagagaggaacccguaugu

SEQ ID NO: 306861 - RNA, 19 nt, Homo sapiens
  misc_RNA (1)...(19): siRNA sense strand
gaggugcuauuugaaacca

SEQ ID NO: 306862 - RNA, 19 nt, Homo sapiens
  misc_RNA (1)...(19): siRNA sense strand
uagaggugcuauuugaaac

SEQ ID NO: 306863 - RNA, 19 nt, Homo sapiens
  misc_RNA (1)...(19): siRNA sense strand
uagagaggaacaagaugaa

SEQ ID NO: 306864 - RNA, 19 nt, Homo sapiens
  misc_RNA (1)...(19): siRNA sense strand
gguacaaucguugacaaug

SEQ ID NO: 306865 - RNA, 19 nt, Homo sapiens
  misc_RNA (1)...(19): siRNA sense strand
cccaaugaccugcacuuga

SEQ ID NO: 306866 - RNA, 19 nt, Homo sapiens
  misc_RNA (1)...(19): siRNA sense strand
gcagcaguucuucaacgaa

SEQ ID NO: 306867 - RNA, 19 nt, Homo sapiens
  misc_RNA (1)...(19): siRNA sense strand
gggaaacuggaugaucuuu

SEQ ID NO: 306868 - RNA, 19 nt, Homo sapiens
  misc_RNA (1)...(19): siRNA sense strand
gaaccacgaagauuuuaug

SEQ ID NO: 306869 - RNA, 19 nt, Homo sapiens
  misc_RNA (1)...(19): siRNA sense strand
ucacugagagcugcguuga

SEQ ID NO: 306870 - RNA, 19 nt, Homo sapiens
  misc_RNA (1)...(19): siRNA sense strand
cugcguugaucauccagaa

SEQ ID NO: 306871 - RNA, 19 nt, Homo sapiens
  misc_RNA (1)...(19): siRNA sense strand
agguauggcuucacgaaag

SEQ ID NO: 306872 - RNA, 19 nt, Homo sapiens
  misc_RNA (1)...(19): siRNA sense strand
ugagguauggcuucacgaa

SEQ ID NO: 306873 - RNA, 19 nt, Homo sapiens
  misc_RNA (1)...(19): siRNA sense strand
agauacuucaugcccauua

SEQ ID NO: 306874 - RNA, 19 nt, Homo sapiens
  misc_RNA (1)...(19): siRNA sense strand
ugacucgaagcacaauaaa

SEQ ID NO: 306875 - RNA, 19 nt, Homo sapiens
  misc_RNA (1)...(19): siRNA sense strand
gguuacaaagcucgacuga

SEQ ID NO: 306876 - RNA, 19 nt, Homo sapiens
  misc_RNA (1)...(19): siRNA sense strand
gaugaacaaggccaaaugc

SEQ ID NO: 306877 - RNA, 19 nt, Homo sapiens
  misc_RNA (1)...(19): siRNA sense strand
ggagaucugacacaucacu

SEQ ID NO: 306878 - RNA, 19 nt, Homo sapiens
  misc_RNA (1)...(19): siRNA sense strand
gaaaacuacacacauauac

SEQ ID NO: 306879 - RNA, 19 nt, Homo sapiens
  misc_RNA (1)...(19): siRNA sense strand
guguagagaggaacaagau

SEQ ID NO: 306880 - RNA, 19 nt, Homo sapiens
  misc_RNA (1)...(19): siRNA sense strand
gagaccacagacuugaauu

SEQ ID NO: 306881 - RNA, 19 nt, Homo sapiens
  misc_RNA (1)...(19): siRNA sense strand
uggcuucacgaaagaaauu

SEQ ID NO: 306882 - RNA, 19 nt, Homo sapiens
  misc_RNA (1)...(19): siRNA sense strand
aaucugagguauggcuuca

SEQ ID NO: 306883 - RNA, 19 nt, Homo sapiens
  misc_RNA (1)...(19): siRNA sense strand
aaagaauuccauagagauc

SEQ ID NO: 306884 - RNA, 19 nt, Homo sapiens
  misc_RNA (1)...(19): siRNA sense strand
acagagggaaccacgaaga

SEQ ID NO: 306885 - RNA, 19 nt, Homo sapiens
  misc_RNA (1)...(19): siRNA sense strand
agaggaacaagaugaaauc

SEQ ID NO: 306886 - RNA, 19 nt, Homo sapiens
  misc_RNA (1)...(19): siRNA sense strand
aaaugcaguuauccaccuu

SEQ ID NO: 306887 - RNA, 19 nt, Homo sapiens
  misc_RNA (1)...(19): siRNA sense strand
gaacaaagauggaagcauu

SEQ ID NO: 306888 - RNA, 19 nt, Homo sapiens
  misc_RNA (1)...(19): siRNA sense strand
gaugaaaucugugcugaua

SEQ ID NO: 306889 - RNA, 19 nt, Homo sapiens
  misc_RNA (1)...(19): siRNA sense strand
gaauuucacucacauacaa

SEQ ID NO: 306890 - RNA, 19 nt, Homo sapiens
  misc_RNA (1)...(19): siRNA sense strand
ccaaugaccugcacuugaa

SEQ ID NO: 306891 - RNA, 19 nt, Homo sapiens
  misc_RNA (1)...(19): siRNA sense strand
gagaggaacccguauguuu

SEQ ID NO: 306892 - RNA, 19 nt, Homo sapiens
  misc_RNA (1)...(19): siRNA sense strand
guacaaucguugacaauga

SEQ ID NO: 306893 - RNA, 19 nt, Homo sapiens
  misc_RNA (1)...(19): siRNA sense strand
ucaauaagcuugccaacau

SEQ ID NO: 306894 - RNA, 19 nt, Homo sapiens
  misc_RNA (1)...(19): siRNA sense strand
gcaguuauccaccuucuuu

SEQ ID NO: 306895 - RNA, 19 nt, Homo sapiens
  misc_RNA (1)...(19): siRNA sense strand
cgaauaugcugaugaacaa

SEQ ID NO: 306896 - RNA, 19 nt, Homo sapiens
  misc_RNA (1)...(19): siRNA sense strand
aaacagcgccaucaagaua

SEQ ID NO: 306897 - RNA, 19 nt, Homo sapiens
  misc_RNA (1)...(19): siRNA sense strand
uuacaaagcucgacugaag

SEQ ID NO: 306898 - RNA, 19 nt, Homo sapiens
  misc_RNA (1)...(19): siRNA sense strand
cagaauauccgcauugaaa

SEQ ID NO: 306899 - RNA, 19 nt, Homo sapiens
  misc_RNA (1)...(19): siRNA sense strand
caauaagcuugccaacaua

SEQ ID NO: 306900 - RNA, 19 nt, Homo sapiens
  misc_RNA (1)...(19): siRNA sense strand
gaacagagggaaccacgaa

SEQ ID NO: 306901 - RNA, 19 nt, Homo sapiens
  misc_RNA (1)...(19): siRNA sense strand
gaucugaccuggaaaucau

SEQ ID NO: 306902 - RNA, 19 nt, Homo sapiens
  misc_RNA (1)...(19): siRNA sense strand
caggagaucugacacauca

SEQ ID NO: 306903 - RNA, 19 nt, Homo sapiens
  misc_RNA (1)...(19): siRNA sense strand
ggagaucccucaguucgaa

SEQ ID NO: 306904 - RNA, 19 nt, Homo sapiens
  misc_RNA (1)...(19): siRNA sense strand
gggcugaacuuaccaugga

SEQ ID NO: 306905 - RNA, 19 nt, Homo sapiens
  misc_RNA (1)...(19): siRNA sense strand
auacagaucugaccuggaa

SEQ ID NO: 306906 - RNA, 19 nt, Homo sapiens
  misc_RNA (1)...(19): siRNA sense strand
gaccacagacuugaauuua

SEQ ID NO: 306907 - RNA, 19 nt, Homo sapiens
  misc_RNA (1)...(19): siRNA sense strand
gauggaagcauugacuuua

SEQ ID NO: 306908 - RNA, 19 nt, Homo sapiens
  misc_RNA (1)...(19): siRNA sense strand
ccaaagagguaacaaucug

SEQ ID NO: 306909 - RNA, 19 nt, Homo sapiens
  misc_RNA (1)...(19): siRNA sense strand
gaaagaauuccauagagau

SEQ ID NO: 306910 - RNA, 19 nt, Homo sapiens
  misc_RNA (1)...(19): siRNA sense strand
ccauagagauccuaaugau

SEQ ID NO: 306911 - RNA, 19 nt, Homo sapiens
  misc_RNA (1)...(19): siRNA sense strand
gagggaaccacgaagauuu

SEQ ID NO: 306912 - RNA, 19 nt, Homo sapiens
  misc_RNA (1)...(19): siRNA sense strand
ccaagaaaguccugaagca

SEQ ID NO: 306913 - RNA, 19 nt, Homo sapiens
  misc_RNA (1)...(19): siRNA sense strand
guucgaaucugguaaacau

SEQ ID NO: 306914 - RNA, 19 nt, Homo sapiens
  misc_RNA (1)...(19): siRNA sense strand
cuaaugauccuguguguga

SEQ ID NO: 306915 - RNA, 19 nt, Homo sapiens
  misc_RNA (1)...(19): siRNA sense strand
cagcaguucuucaacgaaa

SEQ ID NO: 306916 - RNA, 19 nt, Homo sapiens
  misc_RNA (1)...(19): siRNA sense strand
uaauggacuugaacaaaga

SEQ ID NO: 306917 - RNA, 19 nt, Homo sapiens
  misc_RNA (1)...(19): siRNA sense strand
guagaucgaggaaagaauu

SEQ ID NO: 306918 - RNA, 19 nt, Homo sapiens
  misc_RNA (1)...(19): siRNA sense strand
ccauggagaucccucaguu

SEQ ID NO: 306919 - RNA, 19 nt, Homo sapiens
  misc_RNA (1)...(19): siRNA sense strand
ucuuagaggugcuauuuga

SEQ ID NO: 306920 - RNA, 19 nt, Homo sapiens
  misc_RNA (1)...(19): siRNA sense strand
aaacuucucccuccaaaga

SEQ ID NO: 306921 - RNA, 19 nt, Homo sapiens
  misc_RNA (1)...(19): siRNA sense strand
agaaaguccugaagcaaau

SEQ ID NO: 306922 - RNA, 19 nt, Homo sapiens
  misc_RNA (1)...(19): siRNA sense strand
gauaugaagacuugaugaa

SEQ ID NO: 306923 - RNA, 19 nt, Homo sapiens
  misc_RNA (1)...(19): siRNA sense strand
guagagaggaacaagauga

SEQ ID NO: 306924 - RNA, 19 nt, Homo sapiens
  misc_RNA (1)...(19): siRNA sense strand
acacacauauacauaagga

SEQ ID NO: 306925 - RNA, 19 nt, Homo sapiens
  misc_RNA (1)...(19): siRNA sense strand
gaaaacagcgccaucaaga

SEQ ID NO: 306926 - RNA, 19 nt, Homo sapiens
  misc_RNA (1)...(19): siRNA sense strand
ccacagacuugaauuuacu

SEQ ID NO: 306927 - RNA, 19 nt, Homo sapiens
  misc_RNA (1)...(19): siRNA sense strand
gguauggcuucacgaaaga

SEQ ID NO: 306928 - RNA, 19 nt, Homo sapiens
  misc_RNA (1)...(19): siRNA sense strand
ccacgaagauuuuaugaug

SEQ ID NO: 306929 - RNA, 19 nt, Homo sapiens
  misc_RNA (1)...(19): siRNA sense strand
ucaugcccauuaugucuua

SEQ ID NO: 306930 - RNA, 19 nt, Homo sapiens
  misc_RNA (1)...(19): siRNA sense strand
guaccgagguuacaaagcu

SEQ ID NO: 306931 - RNA, 19 nt, Homo sapiens
  misc_RNA (1)...(19): siRNA sense strand
gaauuuacuccaccgugua

SEQ ID NO: 306932 - RNA, 19 nt, Homo sapiens
  misc_RNA (1)...(19): siRNA sense strand
caacggaaacaaacagaga

SEQ ID NO: 306933 - RNA, 19 nt, Homo sapiens
  misc_RNA (1)...(19): siRNA sense strand
gauacuucaugcccauuau

SEQ ID NO: 306934 - RNA, 19 nt, Homo sapiens
  misc_RNA (1)...(19): siRNA sense strand
guacaagaggcucauucua

SEQ ID NO: 306935 - RNA, 19 nt, Homo sapiens
  misc_RNA (1)...(19): siRNA sense strand
ccaucaagauauuaagaga

SEQ ID NO: 306936 - RNA, 19 nt, Homo sapiens
  misc_RNA (1)...(19): siRNA sense strand
uacaaucguugacaaugaa

SEQ ID NO: 306937 - RNA, 19 nt, Homo sapiens
  misc_RNA (1)...(19): siRNA sense strand
cauaauggacuugaacaaa

SEQ ID NO: 306938 - RNA, 19 nt, Homo sapiens
  misc_RNA (1)...(19): siRNA sense strand
gaucuccguggaagaauuu

SEQ ID NO: 306939 - RNA, 19 nt, Homo sapiens
  misc_RNA (1)...(19): siRNA sense strand
aaacaaacagagaccauga

SEQ ID NO: 306940 - RNA, 19 nt, Homo sapiens
  misc_RNA (1)...(19): siRNA sense strand
gagaggaacaagaugaaau

SEQ ID NO: 306941 - RNA, 19 nt, Homo sapiens
  misc_RNA (1)...(19): siRNA sense strand
ggaaaacuacacacauaua

SEQ ID NO: 306942 - RNA, 19 nt, Homo sapiens
  misc_RNA (1)...(19): siRNA sense strand
uggaaacguugaauacaug

SEQ ID NO: 306943 - RNA, 19 nt, Homo sapiens
  misc_RNA (1)...(19): siRNA sense strand
ucacucacauacaaacuuc

SEQ ID NO: 306944 - RNA, 19 nt, Homo sapiens
  misc_RNA (1)...(19): siRNA sense strand
acaaacuucucccuccaaa

SEQ ID NO: 306945 - RNA, 19 nt, Homo sapiens
  misc_RNA (1)...(19): siRNA sense strand
uaagagagagagugauuuc

SEQ ID NO: 306946 - RNA, 19 nt, Homo sapiens
  misc_RNA (1)...(19): siRNA sense strand
acagagaccaugacacuga

SEQ ID NO: 306947 - RNA, 19 nt, Homo sapiens
  misc_RNA (1)...(19): siRNA sense strand
uaucagagaccacagacuu

SEQ ID NO: 306948 - RNA, 19 nt, Homo sapiens
  misc_RNA (1)...(19): siRNA sense strand
aaacagagaccaugacacu

SEQ ID NO: 306949 - RNA, 19 nt, Homo sapiens
  misc_RNA (1)...(19): siRNA sense strand
auaauggacuugaacaaag

SEQ ID NO: 306950 - RNA, 19 nt, Homo sapiens
  misc_RNA (1)...(19): siRNA sense strand
uaugaagacuugaugaaac

SEQ ID NO: 306951 - RNA, 19 nt, Homo sapiens
  misc_RNA (1)...(19): siRNA sense strand
cuacacacauauacauaag

SEQ ID NO: 306952 - RNA, 19 nt, Homo sapiens
  misc_RNA (1)...(19): siRNA sense strand
cauugacacugaucacuca

SEQ ID NO: 306953 - RNA, 19 nt, Homo sapiens
  misc_RNA (1)...(19): siRNA sense strand
aagaaaguccugaagcaaa

SEQ ID NO: 306954 - RNA, 19 nt, Homo sapiens
  misc_RNA (1)...(19): siRNA sense strand
ccaacauaauggacuugaa

SEQ ID NO: 306955 - RNA, 19 nt, Homo sapiens
  misc_RNA (1)...(19): siRNA sense strand
gaugauucccaagucaaua

SEQ ID NO: 306956 - RNA, 19 nt, Homo sapiens
  misc_RNA (1)...(19): siRNA sense strand
acaagaggcucauucuacu

SEQ ID NO: 306957 - RNA, 19 nt, Homo sapiens
  misc_RNA (1)...(19): siRNA sense strand
gaacugguaccgagguuac

SEQ ID NO: 306958 - RNA, 19 nt, Homo sapiens
  misc_RNA (1)...(19): siRNA sense strand
cgaaucugguaaacauaga

SEQ ID NO: 306959 - RNA, 19 nt, Homo sapiens
  misc_RNA (1)...(19): siRNA sense strand
ggacuugaacaaagaugga

SEQ ID NO: 306960 - RNA, 19 nt, Homo sapiens
  misc_RNA (1)...(19): siRNA sense strand
caagaaaguccugaagcaa

SEQ ID NO: 306961 - RNA, 19 nt, Homo sapiens
  misc_RNA (1)...(19): siRNA sense strand
ggaugcagcaguucuucaa

SEQ ID NO: 306962 - RNA, 19 nt, Homo sapiens
  misc_RNA (1)...(19): siRNA sense strand
ugaugaaucugagguaugg

SEQ ID NO: 306963 - RNA, 19 nt, Homo sapiens
  misc_RNA (1)...(19): siRNA sense strand
caagauauuaagagagaga

SEQ ID NO: 306964 - RNA, 19 nt, Homo sapiens
  misc_RNA (1)...(19): siRNA sense strand
uugaauacauguccagcuu

SEQ ID NO: 306965 - RNA, 19 nt, Homo sapiens
  misc_RNA (1)...(19): siRNA sense strand
ggaaacaaacagagaccau

SEQ ID NO: 306966 - RNA, 19 nt, Homo sapiens
  misc_RNA (1)...(19): siRNA sense strand
auggaagcauugacuuuaa

SEQ ID NO: 306967 - RNA, 19 nt, Homo sapiens
  misc_RNA (1)...(19): siRNA sense strand
gaaggccagacaacacuau

SEQ ID NO: 306968 - RNA, 19 nt, Homo sapiens
  misc_RNA (1)...(19): siRNA sense strand
gagcugcguugaucaucca

SEQ ID NO: 306969 - RNA, 19 nt, Homo sapiens
  misc_RNA (1)...(19): siRNA sense strand
uuagaggugcuauuugaaa

SEQ ID NO: 306970 - RNA, 19 nt, Homo sapiens
  misc_RNA (1)...(19): siRNA sense strand
caacauaauggacuugaac

SEQ ID NO: 306971 - RNA, 19 nt, Homo sapiens
  misc_RNA (1)...(19): siRNA sense strand
cccaaucgguacaaucguu

SEQ ID NO: 306972 - RNA, 19 nt, Homo sapiens
  misc_RNA (1)...(19): siRNA sense strand
ugucuuagaggugcuauuu

SEQ ID NO: 306973 - RNA, 19 nt, Homo sapiens
  misc_RNA (1)...(19): siRNA sense strand
uggaagcauugacuuuaau

SEQ ID NO: 306974 - RNA, 19 nt, Homo sapiens
  misc_RNA (1)...(19): siRNA sense strand
ggauaucagagaccacaga

SEQ ID NO: 306975 - RNA, 19 nt, Homo sapiens
  misc_RNA (1)...(19): siRNA sense strand
acagcgccaucaagauauu

SEQ ID NO: 306976 - RNA, 19 nt, Homo sapiens
  misc_RNA (1)...(19): siRNA sense strand
cgugccauguggaaacuuu

SEQ ID NO: 306977 - RNA, 19 nt, Homo sapiens
  misc_RNA (1)...(19): siRNA sense strand
gagguauggcuucacgaaa

SEQ ID NO: 306978 - RNA, 19 nt, Homo sapiens
  misc_RNA (1)...(19): siRNA sense strand
aaacauagaccaaaaugga

SEQ ID NO: 306979 - RNA, 19 nt, Homo sapiens
  misc_RNA (1)...(19): siRNA sense strand
acugagagcugcguugauc

SEQ ID NO: 306980 - RNA, 19 nt, Homo sapiens
  misc_RNA (1)...(19): siRNA sense strand
gaggcucauucuacucuag

SEQ ID NO: 306981 - RNA, 19 nt, Homo sapiens
  misc_RNA (1)...(19): siRNA sense strand
caacuucaagaccacagaa

SEQ ID NO: 306982 - RNA, 19 nt, Homo sapiens
  misc_RNA (1)...(19): siRNA sense strand
ugaccuuacucgugcuuuc

SEQ ID NO: 306983 - RNA, 19 nt, Homo sapiens
  misc_RNA (1)...(19): siRNA sense strand
uaugaugaaucugagguau

SEQ ID NO: 306984 - RNA, 19 nt, Homo sapiens
  misc_RNA (1)...(19): siRNA sense strand
uacaagaggcucauucuac

SEQ ID NO: 306985 - RNA, 19 nt, Homo sapiens
  misc_RNA (1)...(19): siRNA sense strand
uaagcuugccaacauaaug

SEQ ID NO: 306986 - RNA, 19 nt, Homo sapiens
  misc_RNA (1)...(19): siRNA sense strand
ugaucuccguggaagaauu

SEQ ID NO: 306987 - RNA, 19 nt, Homo sapiens
  misc_RNA (1)...(19): siRNA sense strand
caacaaagauggccacauu

SEQ ID NO: 306988 - RNA, 19 nt, Homo sapiens
  misc_RNA (1)...(19): siRNA sense strand
ccaaggaagugaugaauaa

SEQ ID NO: 306989 - RNA, 19 nt, Homo sapiens
  misc_RNA (1)...(19): siRNA sense strand
gaaaugcagugacuaugaa

SEQ ID NO: 306990 - RNA, 19 nt, Homo sapiens
  misc_RNA (1)...(19): siRNA sense strand
gaacauacaaucaaguuug

SEQ ID NO: 306991 - RNA, 19 nt, Homo sapiens
  misc_RNA (1)...(19): siRNA sense strand
ggaggcagguuguagauau

SEQ ID NO: 306992 - RNA, 19 nt, Homo sapiens
  misc_RNA (1)...(19): siRNA sense strand
ccaauuggaugacuuaauc

SEQ ID NO: 306993 - RNA, 19 nt, Homo sapiens
  misc_RNA (1)...(19): siRNA sense strand
gaagaaaugcagugacuau

SEQ ID NO: 306994 - RNA, 19 nt, Homo sapiens
  misc_RNA (1)...(19): siRNA sense strand
gagaggagcaagauaguuu

SEQ ID NO: 306995 - RNA, 19 nt, Homo sapiens
  misc_RNA (1)...(19): siRNA sense strand
agacuuacauggccaauug

SEQ ID NO: 306996 - RNA, 19 nt, Homo sapiens
  misc_RNA (1)...(19): siRNA sense strand
uaagaacccugcaagaugu

SEQ ID NO: 306997 - RNA, 19 nt, Homo sapiens
  misc_RNA (1)...(19): siRNA sense strand
cuucagaucuucucaguga

SEQ ID NO: 306998 - RNA, 19 nt, Homo sapiens
  misc_RNA (1)...(19): siRNA sense strand
guagagauccugaugauuc

SEQ ID NO: 306999 - RNA, 19 nt, Homo sapiens
  misc_RNA (1)...(19): siRNA sense strand
aaagauggccacauugaua

SEQ ID NO: 307000 - RNA, 19 nt, Homo sapiens
  misc_RNA (1)...(19): siRNA sense strand
gagaagcuguuugcucauu

SEQ ID NO: 307001 - RNA, 19 nt, Homo sapiens
  misc_RNA (1)...(19): siRNA sense strand
ccagaacggucauaugugu

SEQ ID NO: 307002 - RNA, 19 nt, Homo sapiens
  misc_RNA (1)...(19): siRNA sense strand
ucacaugaauaucgacauu

SEQ ID NO: 307003 - RNA, 19 nt, Homo sapiens
  misc_RNA (1)...(19): siRNA sense strand
gaucuucucagugaauuua

SEQ ID NO: 307004 - RNA, 19 nt, Homo sapiens
  misc_RNA (1)...(19): siRNA sense strand
ggaaggaaauacuaagaac

SEQ ID NO: 307005 - RNA, 19 nt, Homo sapiens
  misc_RNA (1)...(19): siRNA sense strand
uaacugaucuggagcuuuu

SEQ ID NO: 307006 - RNA, 19 nt, Homo sapiens
  misc_RNA (1)...(19): siRNA sense strand
ggaggaggcuguuauuuug

SEQ ID NO: 307007 - RNA, 19 nt, Homo sapiens
  misc_RNA (1)...(19): siRNA sense strand
gagaagagccaaccagaag

SEQ ID NO: 307008 - RNA, 19 nt, Homo sapiens
  misc_RNA (1)...(19): siRNA sense strand
cagacaacaugcuggagua

SEQ ID NO: 307009 - RNA, 19 nt, Homo sapiens
  misc_RNA (1)...(19): siRNA sense strand
gagaacauacaaucaaguu

SEQ ID NO: 307010 - RNA, 19 nt, Homo sapiens
  misc_RNA (1)...(19): siRNA sense strand
ucagcuaucucauggauca

SEQ ID NO: 307011 - RNA, 19 nt, Homo sapiens
  misc_RNA (1)...(19): siRNA sense strand
ccaugcaacugcccuggua

SEQ ID NO: 307012 - RNA, 19 nt, Homo sapiens
  misc_RNA (1)...(19): siRNA sense strand
gauauggcuucaccaagga

SEQ ID NO: 307013 - RNA, 19 nt, Homo sapiens
  misc_RNA (1)...(19): siRNA sense strand
caaucaaguuugcuggaaa

SEQ ID NO: 307014 - RNA, 19 nt, Homo sapiens
  misc_RNA (1)...(19): siRNA sense strand
agaagcagauggaggagaa

SEQ ID NO: 307015 - RNA, 19 nt, Homo sapiens
  misc_RNA (1)...(19): siRNA sense strand
guucaacggugacuuugug

SEQ ID NO: 307016 - RNA, 19 nt, Homo sapiens
  misc_RNA (1)...(19): siRNA sense strand
ugaaggcuaugaauucugu

SEQ ID NO: 307017 - RNA, 19 nt, Homo sapiens
  misc_RNA (1)...(19): siRNA sense strand
ucugauagaugagaaaguu

SEQ ID NO: 307018 - RNA, 19 nt, Homo sapiens
  misc_RNA (1)...(19): siRNA sense strand
cagcagcgguggagucugu

SEQ ID NO: 307019 - RNA, 19 nt, Homo sapiens
  misc_RNA (1)...(19): siRNA sense strand
gaacagcucagcagacaac

SEQ ID NO: 307020 - RNA, 19 nt, Homo sapiens
  misc_RNA (1)...(19): siRNA sense strand
cauagacagugaucauuca

SEQ ID NO: 307021 - RNA, 19 nt, Homo sapiens
  misc_RNA (1)...(19): siRNA sense strand
guacagcugccaaacauca

SEQ ID NO: 307022 - RNA, 19 nt, Homo sapiens
  misc_RNA (1)...(19): siRNA sense strand
gaauaucgacauuacagau

SEQ ID NO: 307023 - RNA, 19 nt, Homo sapiens
  misc_RNA (1)...(19): siRNA sense strand
gcuguuugcucauucuuca

SEQ ID NO: 307024 - RNA, 19 nt, Homo sapiens
  misc_RNA (1)...(19): siRNA sense strand
cauauucacugaggacaga

SEQ ID NO: 307025 - RNA, 19 nt, Homo sapiens
  misc_RNA (1)...(19): siRNA sense strand
ucacaaccgcaagguauua

SEQ ID NO: 307026 - RNA, 19 nt, Homo sapiens
  misc_RNA (1)...(19): siRNA sense strand
cuaagaacccugcaagaug

SEQ ID NO: 307027 - RNA, 19 nt, Homo sapiens
  misc_RNA (1)...(19): siRNA sense strand
gaaaccaugaggaccauau

SEQ ID NO: 307028 - RNA, 19 nt, Homo sapiens
  misc_RNA (1)...(19): siRNA sense strand
caguagagauccugaugau

SEQ ID NO: 307029 - RNA, 19 nt, Homo sapiens
  misc_RNA (1)...(19): siRNA sense strand
gcccaggacuccgagauga

SEQ ID NO: 307030 - RNA, 19 nt, Homo sapiens
  misc_RNA (1)...(19): siRNA sense strand
caagcuccaugacuucuuc

SEQ ID NO: 307031 - RNA, 19 nt, Homo sapiens
  misc_RNA (1)...(19): siRNA sense strand
gcgagaacauacaaucaag

SEQ ID NO: 307032 - RNA, 19 nt, Homo sapiens
  misc_RNA (1)...(19): siRNA sense strand
gggaaggaaauacuaagaa

SEQ ID NO: 307033 - RNA, 19 nt, Homo sapiens
  misc_RNA (1)...(19): siRNA sense strand
caagaaacaucugguacag

SEQ ID NO: 307034 - RNA, 19 nt, Homo sapiens
  misc_RNA (1)...(19): siRNA sense strand
gcaagauaguuuccaccau

SEQ ID NO: 307035 - RNA, 19 nt, Homo sapiens
  misc_RNA (1)...(19): siRNA sense strand
gauccaaccuagagaccau

SEQ ID NO: 307036 - RNA, 19 nt, Homo sapiens
  misc_RNA (1)...(19): siRNA sense strand
gugaacagcucagcagaca

SEQ ID NO: 307037 - RNA, 19 nt, Homo sapiens
  misc_RNA (1)...(19): siRNA sense strand
ggccacagcuggugaacag

SEQ ID NO: 307038 - RNA, 19 nt, Homo sapiens
  misc_RNA (1)...(19): siRNA sense strand
aaacgagacagaagaguga

SEQ ID NO: 307039 - RNA, 19 nt, Homo sapiens
  misc_RNA (1)...(19): siRNA sense strand
ucucauggaucacuucauc

SEQ ID NO: 307040 - RNA, 19 nt, Homo sapiens
  misc_RNA (1)...(19): siRNA sense strand
acaaagauggccacauuga

SEQ ID NO: 307041 - RNA, 19 nt, Homo sapiens
  misc_RNA (1)...(19): siRNA sense strand
cuggaaacauuguaucgaa

SEQ ID NO: 307042 - RNA, 19 nt, Homo sapiens
  misc_RNA (1)...(19): siRNA sense strand
acaacaugcuggaguacaa

SEQ ID NO: 307043 - RNA, 19 nt, Homo sapiens
  misc_RNA (1)...(19): siRNA sense strand
ugagagcucugagggagaa

SEQ ID NO: 307044 - RNA, 19 nt, Homo sapiens
  misc_RNA (1)...(19): siRNA sense strand
gauauccuguggagugauc

SEQ ID NO: 307045 - RNA, 19 nt, Homo sapiens
  misc_RNA (1)...(19): siRNA sense strand
agaaaugcagugacuauga

SEQ ID NO: 307046 - RNA, 19 nt, Homo sapiens
  misc_RNA (1)...(19): siRNA sense strand
acuccgagaugaagaaaug

SEQ ID NO: 307047 - RNA, 19 nt, Homo sapiens
  misc_RNA (1)...(19): siRNA sense strand
gcucucacaugaauaucga

SEQ ID NO: 307048 - RNA, 19 nt, Homo sapiens
  misc_RNA (1)...(19): siRNA sense strand
ucagugaauuuaagaagca

SEQ ID NO: 307049 - RNA, 19 nt, Homo sapiens
  misc_RNA (1)...(19): siRNA sense strand
augcaaaccugaaggcuau

SEQ ID NO: 307050 - RNA, 19 nt, Homo sapiens
  misc_RNA (1)...(19): siRNA sense strand
uagagguacccgacaguua

SEQ ID NO: 307051 - RNA, 19 nt, Homo sapiens
  misc_RNA (1)...(19): siRNA sense strand
gagauccugaugauucuuu

SEQ ID NO: 307052 - RNA, 19 nt, Homo sapiens
  misc_RNA (1)...(19): siRNA sense strand
ucagaaugcccacaagcua

SEQ ID NO: 307053 - RNA, 19 nt, Homo sapiens
  misc_RNA (1)...(19): siRNA sense strand
gaauuuaagaagcaugaug

SEQ ID NO: 307054 - RNA, 19 nt, Homo sapiens
  misc_RNA (1)...(19): siRNA sense strand
gaagcuguuugcucauucu

SEQ ID NO: 307055 - RNA, 19 nt, Homo sapiens
  misc_RNA (1)...(19): siRNA sense strand
agaguuccaucuuaacaga

SEQ ID NO: 307056 - RNA, 19 nt, Homo sapiens
  misc_RNA (1)...(19): siRNA sense strand
gcaagguauuaacaaucuu

SEQ ID NO: 307057 - RNA, 19 nt, Homo sapiens
  misc_RNA (1)...(19): siRNA sense strand
uggccacucugauagauga

SEQ ID NO: 307058 - RNA, 19 nt, Homo sapiens
  misc_RNA (1)...(19): siRNA sense strand
uggaaacauuguaucgaaa

SEQ ID NO: 307059 - RNA, 19 nt, Homo sapiens
  misc_RNA (1)...(19): siRNA sense strand
gagcaucuuccagucuaua

SEQ ID NO: 307060 - RNA, 19 nt, Homo sapiens
  misc_RNA (1)...(19): siRNA sense strand
gcuaugaauucugucacaa

SEQ ID NO: 307061 - RNA, 19 nt, Homo sapiens
  misc_RNA (1)...(19): siRNA sense strand
caacaugcaauuccugauc

SEQ ID NO: 307062 - RNA, 19 nt, Homo sapiens
  misc_RNA (1)...(19): siRNA sense strand
gcagcaagaccaagucaag

SEQ ID NO: 307063 - RNA, 19 nt, Homo sapiens
  misc_RNA (1)...(19): siRNA sense strand
gaggaggaggcuguuauuu

SEQ ID NO: 307064 - RNA, 19 nt, Homo sapiens
  misc_RNA (1)...(19): siRNA sense strand
ggaggagucggcucugaga

SEQ ID NO: 307065 - RNA, 19 nt, Homo sapiens
  misc_RNA (1)...(19): siRNA sense strand
aagauaguuuccaccauga

SEQ ID NO: 307066 - RNA, 19 nt, Homo sapiens
  misc_RNA (1)...(19): siRNA sense strand
caguccaggugcacacuaa

SEQ ID NO: 307067 - RNA, 19 nt, Homo sapiens
  misc_RNA (1)...(19): siRNA sense strand
gaagagccaaccagaagag

SEQ ID NO: 307068 - RNA, 19 nt, Homo sapiens
  misc_RNA (1)...(19): siRNA sense strand
ccaagaaacaucugguaca

SEQ ID NO: 307069 - RNA, 19 nt, Homo sapiens
  misc_RNA (1)...(19): siRNA sense strand
cuguucagcucucacauga

SEQ ID NO: 307070 - RNA, 19 nt, Homo sapiens
  misc_RNA (1)...(19): siRNA sense strand
gcagauggaggagaagaga

SEQ ID NO: 307071 - RNA, 19 nt, Homo sapiens
  misc_RNA (1)...(19): siRNA sense strand
ccacucugauagaugagaa

SEQ ID NO: 307072 - RNA, 19 nt, Homo sapiens
  misc_RNA (1)...(19): siRNA sense strand
gcaaggauucaguagagau

SEQ ID NO: 307073 - RNA, 19 nt, Homo sapiens
  misc_RNA (1)...(19): siRNA sense strand
acaaucaaguuugcuggaa

SEQ ID NO: 307074 - RNA, 19 nt, Homo sapiens
  misc_RNA (1)...(19): siRNA sense strand
cuuccagucuauagaauau

SEQ ID NO: 307075 - RNA, 19 nt, Homo sapiens
  misc_RNA (1)...(19): siRNA sense strand
ggcaaaggauuagcagagu

SEQ ID NO: 307076 - RNA, 19 nt, Homo sapiens
  misc_RNA (1)...(19): siRNA sense strand
cgcaagguauuaacaaucu

SEQ ID NO: 307077 - RNA, 19 nt, Homo sapiens
  misc_RNA (1)...(19): siRNA sense strand
gcaccuccacccaacauca

SEQ ID NO: 307078 - RNA, 19 nt, Homo sapiens
  misc_RNA (1)...(19): siRNA sense strand
cagcucagcagacaacaug

SEQ ID NO: 307079 - RNA, 19 nt, Homo sapiens
  misc_RNA (1)...(19): siRNA sense strand
gcugcaaggccaacacuau

SEQ ID NO: 307080 - RNA, 19 nt, Homo sapiens
  misc_RNA (1)...(19): siRNA sense strand
uagauauccuguggaguga

SEQ ID NO: 307081 - RNA, 19 nt, Homo sapiens
  misc_RNA (1)...(19): siRNA sense strand
gaggcagguuguagauauc

SEQ ID NO: 307082 - RNA, 19 nt, Homo sapiens
  misc_RNA (1)...(19): siRNA sense strand
gacagaagagugagaagca

SEQ ID NO: 307083 - RNA, 19 nt, Homo sapiens
  misc_RNA (1)...(19): siRNA sense strand
ggagcaucuuccagucuau

SEQ ID NO: 307084 - RNA, 19 nt, Homo sapiens
  misc_RNA (1)...(19): siRNA sense strand
caaagauggccacauugau

SEQ ID NO: 307085 - RNA, 19 nt, Homo sapiens
  misc_RNA (1)...(19): siRNA sense strand
uacaaaugcuaaagacagu

SEQ ID NO: 307086 - RNA, 19 nt, Homo sapiens
  misc_RNA (1)...(19): siRNA sense strand
ccacaagcuacaaaugcua

SEQ ID NO: 307087 - RNA, 19 nt, Homo sapiens
  misc_RNA (1)...(19): siRNA sense strand
ccaaggaagugaugaauaa

SEQ ID NO: 307088 - RNA, 19 nt, Homo sapiens
  misc_RNA (1)...(19): siRNA sense strand
gaaaugcagugacuaugaa

SEQ ID NO: 307089 - RNA, 19 nt, Homo sapiens
  misc_RNA (1)...(19): siRNA sense strand
ggaggcagguuguagauau

SEQ ID NO: 307090 - RNA, 19 nt, Homo sapiens
  misc_RNA (1)...(19): siRNA sense strand
ccaauuggaugacuuaauc

SEQ ID NO: 307091 - RNA, 19 nt, Homo sapiens
  misc_RNA (1)...(19): siRNA sense strand
gaagaaaugcagugacuau

SEQ ID NO: 307092 - RNA, 19 nt, Homo sapiens
  misc_RNA (1)...(19): siRNA sense strand
gagaggagcaagauaguuu

SEQ ID NO: 307093 - RNA, 19 nt, Homo sapiens
  misc_RNA (1)...(19): siRNA sense strand
agacuuacauggccaauug

SEQ ID NO: 307094 - RNA, 19 nt, Homo sapiens
  misc_RNA (1)...(19): siRNA sense strand
uaagaacccugcaagaugu

SEQ ID NO: 307095 - RNA, 19 nt, Homo sapiens
  misc_RNA (1)...(19): siRNA sense strand
cuucagaucuucucaguga

SEQ ID NO: 307096 - RNA, 19 nt, Homo sapiens
  misc_RNA (1)...(19): siRNA sense strand
guagagauccugaugauuc

SEQ ID NO: 307097 - RNA, 19 nt, Homo sapiens
  misc_RNA (1)...(19): siRNA sense strand
gagaagcuguuugcucauu

SEQ ID NO: 307098 - RNA, 19 nt, Homo sapiens
  misc_RNA (1)...(19): siRNA sense strand
ccagaacggucauaugugu

SEQ ID NO: 307099 - RNA, 19 nt, Homo sapiens
  misc_RNA (1)...(19): siRNA sense strand
gaucuucucagugaauuua

SEQ ID NO: 307100 - RNA, 19 nt, Homo sapiens
  misc_RNA (1)...(19): siRNA sense strand
ggaaggaaauacuaagaac

SEQ ID NO: 307101 - RNA, 19 nt, Homo sapiens
  misc_RNA (1)...(19): siRNA sense strand
uaacugaucuggagcuuuu

SEQ ID NO: 307102 - RNA, 19 nt, Homo sapiens
  misc_RNA (1)...(19): siRNA sense strand
ggaggaggcuguuauuuug

SEQ ID NO: 307103 - RNA, 19 nt, Homo sapiens
  misc_RNA (1)...(19): siRNA sense strand
gagaagagccaaccagaag

SEQ ID NO: 307104 - RNA, 19 nt, Homo sapiens
  misc_RNA (1)...(19): siRNA sense strand
ucagcuaucucauggauca

SEQ ID NO: 307105 - RNA, 19 nt, Homo sapiens
  misc_RNA (1)...(19): siRNA sense strand
ccaugcaacugcccuggua

SEQ ID NO: 307106 - RNA, 19 nt, Homo sapiens
  misc_RNA (1)...(19): siRNA sense strand
gauauggcuucaccaagga

SEQ ID NO: 307107 - RNA, 19 nt, Homo sapiens
  misc_RNA (1)...(19): siRNA sense strand
agaagcagauggaggagaa

SEQ ID NO: 307108 - RNA, 19 nt, Homo sapiens
  misc_RNA (1)...(19): siRNA sense strand
guucaacggugacuuugug

SEQ ID NO: 307109 - RNA, 19 nt, Homo sapiens
  misc_RNA (1)...(19): siRNA sense strand
ugaaggcuaugaauucugu

SEQ ID NO: 307110 - RNA, 19 nt, Homo sapiens
  misc_RNA (1)...(19): siRNA sense strand
ucugauagaugagaaaguu

SEQ ID NO: 307111 - RNA, 19 nt, Homo sapiens
  misc_RNA (1)...(19): siRNA sense strand
guacagcugccaaacauca

SEQ ID NO: 307112 - RNA, 19 nt, Homo sapiens
  misc_RNA (1)...(19): siRNA sense strand
gcuguuugcucauucuuca

SEQ ID NO: 307113 - RNA, 19 nt, Homo sapiens
  misc_RNA (1)...(19): siRNA sense strand
cauauucacugaggacaga

SEQ ID NO: 307114 - RNA, 19 nt, Homo sapiens
  misc_RNA (1)...(19): siRNA sense strand
ucacaaccgcaagguauua

SEQ ID NO: 307115 - RNA, 19 nt, Homo sapiens
  misc_RNA (1)...(19): siRNA sense strand
cuaagaacccugcaagaug

SEQ ID NO: 307116 - RNA, 19 nt, Homo sapiens
  misc_RNA (1)...(19): siRNA sense strand
gaaaccaugaggaccauau

SEQ ID NO: 307117 - RNA, 19 nt, Homo sapiens
  misc_RNA (1)...(19): siRNA sense strand
caguagagauccugaugau

SEQ ID NO: 307118 - RNA, 19 nt, Homo sapiens
  misc_RNA (1)...(19): siRNA sense strand
gcccaggacuccgagauga

SEQ ID NO: 307119 - RNA, 19 nt, Homo sapiens
  misc_RNA (1)...(19): siRNA sense strand
caagcuccaugacuucuuc

SEQ ID NO: 307120 - RNA, 19 nt, Homo sapiens
  misc_RNA (1)...(19): siRNA sense strand
gggaaggaaauacuaagaa

SEQ ID NO: 307121 - RNA, 19 nt, Homo sapiens
  misc_RNA (1)...(19): siRNA sense strand
caagaaacaucugguacag

SEQ ID NO: 307122 - RNA, 19 nt, Homo sapiens
  misc_RNA (1)...(19): siRNA sense strand
gcaagauaguuuccaccau

SEQ ID NO: 307123 - RNA, 19 nt, Homo sapiens
  misc_RNA (1)...(19): siRNA sense strand
aaacgagacagaagaguga

SEQ ID NO: 307124 - RNA, 19 nt, Homo sapiens
  misc_RNA (1)...(19): siRNA sense strand
ucucauggaucacuucauc

SEQ ID NO: 307125 - RNA, 19 nt, Homo sapiens
  misc_RNA (1)...(19): siRNA sense strand
ugagagcucugagggagaa

SEQ ID NO: 307126 - RNA, 19 nt, Homo sapiens
  misc_RNA (1)...(19): siRNA sense strand
gauauccuguggagugauc

SEQ ID NO: 307127 - RNA, 19 nt, Homo sapiens
  misc_RNA (1)...(19): siRNA sense strand
agaaaugcagugacuauga

SEQ ID NO: 307128 - RNA, 19 nt, Homo sapiens
  misc_RNA (1)...(19): siRNA sense strand
acuccgagaugaagaaaug

SEQ ID NO: 307129 - RNA, 19 nt, Homo sapiens
  misc_RNA (1)...(19): siRNA sense strand
ucagugaauuuaagaagca

SEQ ID NO: 307130 - RNA, 19 nt, Homo sapiens
  misc_RNA (1)...(19): siRNA sense strand
augcaaaccugaaggcuau

SEQ ID NO: 307131 - RNA, 19 nt, Homo sapiens
  misc_RNA (1)...(19): siRNA sense strand
uagagguacccgacaguua

SEQ ID NO: 307132 - RNA, 19 nt, Homo sapiens
  misc_RNA (1)...(19): siRNA sense strand
gagauccugaugauucuuu

SEQ ID NO: 307133 - RNA, 19 nt, Homo sapiens
  misc_RNA (1)...(19): siRNA sense strand
gaauuuaagaagcaugaug

SEQ ID NO: 307134 - RNA, 19 nt, Homo sapiens
  misc_RNA (1)...(19): siRNA sense strand
gaagcuguuugcucauucu

SEQ ID NO: 307135 - RNA, 19 nt, Homo sapiens
  misc_RNA (1)...(19): siRNA sense strand
agaguuccaucuuaacaga

SEQ ID NO: 307136 - RNA, 19 nt, Homo sapiens
  misc_RNA (1)...(19): siRNA sense strand
gcaagguauuaacaaucuu

SEQ ID NO: 307137 - RNA, 19 nt, Homo sapiens
  misc_RNA (1)...(19): siRNA sense strand
uggccacucugauagauga

SEQ ID NO: 307138 - RNA, 19 nt, Homo sapiens
  misc_RNA (1)...(19): siRNA sense strand
gagcaucuuccagucuaua

SEQ ID NO: 307139 - RNA, 19 nt, Homo sapiens
  misc_RNA (1)...(19): siRNA sense strand
gcuaugaauucugucacaa

SEQ ID NO: 307140 - RNA, 19 nt, Homo sapiens
  misc_RNA (1)...(19): siRNA sense strand
gcagcaagaccaagucaag

SEQ ID NO: 307141 - RNA, 19 nt, Homo sapiens
  misc_RNA (1)...(19): siRNA sense strand
caacaugcaauuccugauc

SEQ ID NO: 307142 - RNA, 19 nt, Homo sapiens
  misc_RNA (1)...(19): siRNA sense strand
gaggaggaggcuguuauuu

SEQ ID NO: 307143 - RNA, 19 nt, Homo sapiens
  misc_RNA (1)...(19): siRNA sense strand
ggaggagucggcucugaga

SEQ ID NO: 307144 - RNA, 19 nt, Homo sapiens
  misc_RNA (1)...(19): siRNA sense strand
aagauaguuuccaccauga

SEQ ID NO: 307145 - RNA, 19 nt, Homo sapiens
  misc_RNA (1)...(19): siRNA sense strand
gaagagccaaccagaagag

SEQ ID NO: 307146 - RNA, 19 nt, Homo sapiens
  misc_RNA (1)...(19): siRNA sense strand
ccaagaaacaucugguaca

SEQ ID NO: 307147 - RNA, 19 nt, Homo sapiens
  misc_RNA (1)...(19): siRNA sense strand
gcagauggaggagaagaga

SEQ ID NO: 307148 - RNA, 19 nt, Homo sapiens
  misc_RNA (1)...(19): siRNA sense strand
ccacucugauagaugagaa

SEQ ID NO: 307149 - RNA, 19 nt, Homo sapiens
  misc_RNA (1)...(19): siRNA sense strand
cuuccagucuauagaauau

SEQ ID NO: 307150 - RNA, 19 nt, Homo sapiens
  misc_RNA (1)...(19): siRNA sense strand
ggcaaaggauuagcagagu

SEQ ID NO: 307151 - RNA, 19 nt, Homo sapiens
  misc_RNA (1)...(19): siRNA sense strand
cgcaagguauuaacaaucu

SEQ ID NO: 307152 - RNA, 19 nt, Homo sapiens
  misc_RNA (1)...(19): siRNA sense strand
gcaaggauucaguagagau

SEQ ID NO: 307153 - RNA, 19 nt, Homo sapiens
  misc_RNA (1)...(19): siRNA sense strand
ggagcaucuuccagucuau

SEQ ID NO: 307154 - RNA, 19 nt, Homo sapiens
  misc_RNA (1)...(19): siRNA sense strand
gcugcaaggccaacacuau

SEQ ID NO: 307155 - RNA, 19 nt, Homo sapiens
  misc_RNA (1)...(19): siRNA sense strand
uagauauccuguggaguga

SEQ ID NO: 307156 - RNA, 19 nt, Homo sapiens
  misc_RNA (1)...(19): siRNA sense strand
gaggcagguuguagauauc

SEQ ID NO: 307157 - RNA, 19 nt, Homo sapiens
  misc_RNA (1)...(19): siRNA sense strand
gcaccuccacccaacauca

SEQ ID NO: 307158 - RNA, 19 nt, Homo sapiens
  misc_RNA (1)...(19): siRNA sense strand
gacagaagagugagaagca

SEQ ID NO: 307159 - RNA, 19 nt, Homo sapiens
  misc_RNA (1)...(19): siRNA sense strand
cagaucuucucagugaauu

SEQ ID NO: 307160 - RNA, 19 nt, Homo sapiens
  misc_RNA (1)...(19): siRNA sense strand
caaggcagcagcccugauc

SEQ ID NO: 307161 - RNA, 19 nt, Homo sapiens
  misc_RNA (1)...(19): siRNA sense strand
accaugaggcaaaggauua

SEQ ID NO: 307162 - RNA, 19 nt, Homo sapiens
  misc_RNA (1)...(19): siRNA sense strand
cgaggaggaggcuguuauu

SEQ ID NO: 307163 - RNA, 19 nt, Homo sapiens
  misc_RNA (1)...(19): siRNA sense strand
auggugaacuuacgauaug

SEQ ID NO: 307164 - RNA, 19 nt, Homo sapiens
  misc_RNA (1)...(19): siRNA sense strand
uaacagaggaaaccaugag

SEQ ID NO: 307165 - RNA, 19 nt, Homo sapiens
  misc_RNA (1)...(19): siRNA sense strand
caucuuccagucuauagaa

SEQ ID NO: 307166 - RNA, 19 nt, Homo sapiens
  misc_RNA (1)...(19): siRNA sense strand
aggcaaggauucaguagag

SEQ ID NO: 307167 - RNA, 19 nt, Homo sapiens
  misc_RNA (1)...(19): siRNA sense strand
caacggugacuuuguggau

SEQ ID NO: 307168 - RNA, 19 nt, Homo sapiens
  misc_RNA (1)...(19): siRNA sense strand
uagagauccugaugauucu

SEQ ID NO: 307169 - RNA, 19 nt, Homo sapiens
  misc_RNA (1)...(19): siRNA sense strand
gcaaaccugaaggcuauga

SEQ ID NO: 307170 - RNA, 19 nt, Homo sapiens
  misc_RNA (1)...(19): siRNA sense strand
caagguacacgggaaggaa

SEQ ID NO: 307171 - RNA, 19 nt, Homo sapiens
  misc_RNA (1)...(19): siRNA sense strand
ugguacagcugccaaacau

SEQ ID NO: 307172 - RNA, 19 nt, Homo sapiens
  misc_RNA (1)...(19): siRNA sense strand
gugaucccauggcucaaga

SEQ ID NO: 307173 - RNA, 19 nt, Homo sapiens
  misc_RNA (1)...(19): siRNA sense strand
cccgaaagccgcucucuuc

SEQ ID NO: 307174 - RNA, 19 nt, Homo sapiens
  misc_RNA (1)...(19): siRNA sense strand
ccacuggccacucugauag

SEQ ID NO: 307175 - RNA, 19 nt, Homo sapiens
  misc_RNA (1)...(19): siRNA sense strand
ggaagugaugaauaaauac

SEQ ID NO: 307176 - RNA, 19 nt, Homo sapiens
  misc_RNA (1)...(19): siRNA sense strand
caaggaagugaugaauaaa

SEQ ID NO: 307177 - RNA, 19 nt, Homo sapiens
  misc_RNA (1)...(19): siRNA sense strand
ggacuuccugacccgcaua

SEQ ID NO: 307178 - RNA, 19 nt, Homo sapiens
  misc_RNA (1)...(19): siRNA sense strand
cgccagaacggucauaugu

SEQ ID NO: 307179 - RNA, 19 nt, Homo sapiens
  misc_RNA (1)...(19): siRNA sense strand
uguaugaaaccaagaaaca

SEQ ID NO: 307180 - RNA, 19 nt, Homo sapiens
  misc_RNA (1)...(19): siRNA sense strand
gcucauucuucagaucuuc

SEQ ID NO: 307181 - RNA, 19 nt, Homo sapiens
  misc_RNA (1)...(19): siRNA sense strand
ccguggaacuggagcuaga

SEQ ID NO: 307182 - RNA, 19 nt, Homo sapiens
  misc_RNA (1)...(19): siRNA sense strand
uccaugacuucuucagcua

SEQ ID NO: 307183 - RNA, 19 nt, Homo sapiens
  misc_RNA (1)...(19): siRNA sense strand
acacgggaaggaaauacua

SEQ ID NO: 307184 - RNA, 19 nt, Homo sapiens
  misc_RNA (1)...(19): siRNA sense strand
ggcaaggauucaguagaga

SEQ ID NO: 307185 - RNA, 19 nt, Homo sapiens
  misc_RNA (1)...(19): siRNA sense strand
ugucacaaccgcaagguau

SEQ ID NO: 307186 - RNA, 19 nt, Homo sapiens
  misc_RNA (1)...(19): siRNA sense strand
caaccgcaagguauuaaca

SEQ ID NO: 307187 - RNA, 19 nt, Homo sapiens
  misc_RNA (1)...(19): siRNA sense strand
gaaaugcagugacuaugaa

SEQ ID NO: 307188 - RNA, 19 nt, Homo sapiens
  misc_RNA (1)...(19): siRNA sense strand
gaagaaaugcagugacuau

SEQ ID NO: 307189 - RNA, 19 nt, Homo sapiens
  misc_RNA (1)...(19): siRNA sense strand
ucagcuaucucauggauca

SEQ ID NO: 307190 - RNA, 19 nt, Homo sapiens
  misc_RNA (1)...(19): siRNA sense strand
ccaugcaacugcccuggua

SEQ ID NO: 307191 - RNA, 19 nt, Homo sapiens
  misc_RNA (1)...(19): siRNA sense strand
cauauucacugaggacaga

SEQ ID NO: 307192 - RNA, 19 nt, Homo sapiens
  misc_RNA (1)...(19): siRNA sense strand
gcccaggacuccgagauga

SEQ ID NO: 307193 - RNA, 19 nt, Homo sapiens
  misc_RNA (1)...(19): siRNA sense strand
caagcuccaugacuucuuc

SEQ ID NO: 307194 - RNA, 19 nt, Homo sapiens
  misc_RNA (1)...(19): siRNA sense strand
ucucauggaucacuucauc

SEQ ID NO: 307195 - RNA, 19 nt, Homo sapiens
  misc_RNA (1)...(19): siRNA sense strand
agaaaugcagugacuauga

SEQ ID NO: 307196 - RNA, 19 nt, Homo sapiens
  misc_RNA (1)...(19): siRNA sense strand
acuccgagaugaagaaaug

SEQ ID NO: 307197 - RNA, 19 nt, Homo sapiens
  misc_RNA (1)...(19): siRNA sense strand
uagagguacccgacaguua

SEQ ID NO: 307198 - RNA, 19 nt, Homo sapiens
  misc_RNA (1)...(19): siRNA sense strand
gagcaucuuccagucuaua

SEQ ID NO: 307199 - RNA, 19 nt, Homo sapiens
  misc_RNA (1)...(19): siRNA sense strand
gcagcaagaccaagucaag

SEQ ID NO: 307200 - RNA, 19 nt, Homo sapiens
  misc_RNA (1)...(19): siRNA sense strand
cuuccagucuauagaauau

SEQ ID NO: 307201 - RNA, 19 nt, Homo sapiens
  misc_RNA (1)...(19): siRNA sense strand
ggagcaucuuccagucuau

SEQ ID NO: 307202 - RNA, 19 nt, Homo sapiens
  misc_RNA (1)...(19): siRNA sense strand
gcaccuccacccaacauca

SEQ ID NO: 307203 - RNA, 19 nt, Homo sapiens
  misc_RNA (1)...(19): siRNA sense strand
caaggcagcagcccugauc

SEQ ID NO: 307204 - RNA, 19 nt, Homo sapiens
  misc_RNA (1)...(19): siRNA sense strand
caucuuccagucuauagaa

SEQ ID NO: 307205 - RNA, 19 nt, Homo sapiens
  misc_RNA (1)...(19): siRNA sense strand
ggacuuccugacccgcaua

SEQ ID NO: 307206 - RNA, 19 nt, Homo sapiens
  misc_RNA (1)...(19): siRNA sense strand
uccaugacuucuucagcua

SEQ ID NO: 307207 - RNA, 19 nt, Homo sapiens
  misc_RNA (1)...(19): siRNA sense strand
cuucagcuaucucauggau

SEQ ID NO: 307208 - RNA, 19 nt, Homo sapiens
  misc_RNA (1)...(19): siRNA sense strand
gcuaucucauggaucacuu

SEQ ID NO: 307209 - RNA, 19 nt, Homo sapiens
  misc_RNA (1)...(19): siRNA sense strand
ugacccgcauauucacuga

SEQ ID NO: 307210 - RNA, 19 nt, Homo sapiens
  misc_RNA (1)...(19): siRNA sense strand
ggacuccgagaugaagaaa

SEQ ID NO: 307211 - RNA, 19 nt, Homo sapiens
  misc_RNA (1)...(19): siRNA sense strand
caugacuucuucagcuauc

SEQ ID NO: 307212 - RNA, 19 nt, Homo sapiens
  misc_RNA (1)...(19): siRNA sense strand
ccacaacgacagggacuuc

SEQ ID NO: 307213 - RNA, 19 nt, Homo sapiens
  misc_RNA (1)...(19): siRNA sense strand
gcaacugcccugguagaag

SEQ ID NO: 307214 - RNA, 19 nt, Homo sapiens
  misc_RNA (1)...(19): siRNA sense strand
gcagugacuaugaauccau

SEQ ID NO: 307215 - RNA, 19 nt, Homo sapiens
  misc_RNA (1)...(19): siRNA sense strand
ccugguagaagcauucaga

SEQ ID NO: 307216 - RNA, 19 nt, Homo sapiens
  misc_RNA (1)...(19): siRNA sense strand
ggagaaagauacaacacua

SEQ ID NO: 307217 - RNA, 19 nt, Homo sapiens
  misc_RNA (1)...(19): siRNA sense strand
ugaaugaacugguugagua

SEQ ID NO: 307218 - RNA, 19 nt, Homo sapiens
  misc_RNA (1)...(19): siRNA sense strand
gaauagugcuuacaacaug

SEQ ID NO: 307219 - RNA, 19 nt, Homo sapiens
  misc_RNA (1)...(19): siRNA sense strand
caauacaagugccgaauaa

SEQ ID NO: 307220 - RNA, 19 nt, Homo sapiens
  misc_RNA (1)...(19): siRNA sense strand
gcauuguacuucuggaaua

SEQ ID NO: 307221 - RNA, 19 nt, Homo sapiens
  misc_RNA (1)...(19): siRNA sense strand
ggaaaugaauggcaagcuu

SEQ ID NO: 307222 - RNA, 19 nt, Homo sapiens
  misc_RNA (1)...(19): siRNA sense strand
gcucaaagaugccacuuca

SEQ ID NO: 307223 - RNA, 19 nt, Homo sapiens
  misc_RNA (1)...(19): siRNA sense strand
gaucagugcuaacaucuuc

SEQ ID NO: 307224 - RNA, 19 nt, Homo sapiens
  misc_RNA (1)...(19): siRNA sense strand
gaaagcagaacauaaacaa

SEQ ID NO: 307225 - RNA, 19 nt, Homo sapiens
  misc_RNA (1)...(19): siRNA sense strand
gcuagcauauuguguugua

SEQ ID NO: 307226 - RNA, 19 nt, Homo sapiens
  misc_RNA (1)...(19): siRNA sense strand
gcaccgaauuuaugggaaa

SEQ ID NO: 307227 - RNA, 19 nt, Homo sapiens
  misc_RNA (1)...(19): siRNA sense strand
gaaaugaauggcaagcuuu

SEQ ID NO: 307228 - RNA, 19 nt, Homo sapiens
  misc_RNA (1)...(19): siRNA sense strand
ugggaaauuucuuggauua

SEQ ID NO: 307229 - RNA, 19 nt, Homo sapiens
  misc_RNA (1)...(19): siRNA sense strand
gagcaacacugaaugaacu

SEQ ID NO: 307230 - RNA, 19 nt, Homo sapiens
  misc_RNA (1)...(19): siRNA sense strand
gcaauacaagugccgaaua

SEQ ID NO: 307231 - RNA, 19 nt, Homo sapiens
  misc_RNA (1)...(19): siRNA sense strand
uaagagcauucaucagaaa

SEQ ID NO: 307232 - RNA, 19 nt, Homo sapiens
  misc_RNA (1)...(19): siRNA sense strand
gaaagggcauuguacuucu

SEQ ID NO: 307233 - RNA, 19 nt, Homo sapiens
  misc_RNA (1)...(19): siRNA sense strand
ggaaauuucuuggauuaag

SEQ ID NO: 307234 - RNA, 19 nt, Homo sapiens
  misc_RNA (1)...(19): siRNA sense strand
ggaauuggaacgugaagaa

SEQ ID NO: 307235 - RNA, 19 nt, Homo sapiens
  misc_RNA (1)...(19): siRNA sense strand
ucaaagaugccacuucaaa

SEQ ID NO: 307236 - RNA, 19 nt, Homo sapiens
  misc_RNA (1)...(19): siRNA sense strand
ccaauuauguuugccaguu

SEQ ID NO: 307237 - RNA, 19 nt, Homo sapiens
  misc_RNA (1)...(19): siRNA sense strand
gcagauauccaagugugua

SEQ ID NO: 307238 - RNA, 19 nt, Homo sapiens
  misc_RNA (1)...(19): siRNA sense strand
caauuauguuugccaguuu

SEQ ID NO: 307239 - RNA, 19 nt, Homo sapiens
  misc_RNA (1)...(19): siRNA sense strand
cauauuguguuguacaguu

SEQ ID NO: 307240 - RNA, 19 nt, Homo sapiens
  misc_RNA (1)...(19): siRNA sense strand
auuggaacgugaagaauua

SEQ ID NO: 307241 - RNA, 19 nt, Homo sapiens
  misc_RNA (1)...(19): siRNA sense strand
gagaaagauacaacacuaa

SEQ ID NO: 307242 - RNA, 19 nt, Homo sapiens
  misc_RNA (1)...(19): siRNA sense strand
ugaagguucuuauuccuau

SEQ ID NO: 307243 - RNA, 19 nt, Homo sapiens
  misc_RNA (1)...(19): siRNA sense strand
guugguauaugaauucuuc

SEQ ID NO: 307244 - RNA, 19 nt, Homo sapiens
  misc_RNA (1)...(19): siRNA sense strand
gaacugguugaguauguuu

SEQ ID NO: 307245 - RNA, 19 nt, Homo sapiens
  misc_RNA (1)...(19): siRNA sense strand
cuaaagaaagcucuagaaa

SEQ ID NO: 307246 - RNA, 19 nt, Homo sapiens
  misc_RNA (1)...(19): siRNA sense strand
gguauacaaugugcugaaa

SEQ ID NO: 307247 - RNA, 19 nt, Homo sapiens
  misc_RNA (1)...(19): siRNA sense strand
ucaagcagauauccaagug

SEQ ID NO: 307248 - RNA, 19 nt, Homo sapiens
  misc_RNA (1)...(19): siRNA sense strand
gcacaguauucucagcaau

SEQ ID NO: 307249 - RNA, 19 nt, Homo sapiens
  misc_RNA (1)...(19): siRNA sense strand
gaguauguuucaacuaauc

SEQ ID NO: 307250 - RNA, 19 nt, Homo sapiens
  misc_RNA (1)...(19): siRNA sense strand
ggauuagcuuuguuucaug

SEQ ID NO: 307251 - RNA, 19 nt, Homo sapiens
  misc_RNA (1)...(19): siRNA sense strand
ggauuaagagcauucauca

SEQ ID NO: 307252 - RNA, 19 nt, Homo sapiens
  misc_RNA (1)...(19): siRNA sense strand
gcuaacaucuuccguacac

SEQ ID NO: 307253 - RNA, 19 nt, Homo sapiens
  misc_RNA (1)...(19): siRNA sense strand
uuaagagcauucaucagaa

SEQ ID NO: 307254 - RNA, 19 nt, Homo sapiens
  misc_RNA (1)...(19): siRNA sense strand
gcaaaacgauacauugauc

SEQ ID NO: 307255 - RNA, 19 nt, Homo sapiens
  misc_RNA (1)...(19): siRNA sense strand
gaaagauacaacacuaaca

SEQ ID NO: 307256 - RNA, 19 nt, Homo sapiens
  misc_RNA (1)...(19): siRNA sense strand
uugcugaacuucuugaaau

SEQ ID NO: 307257 - RNA, 19 nt, Homo sapiens
  misc_RNA (1)...(19): siRNA sense strand
gcuaaagaaagcucuagaa

SEQ ID NO: 307258 - RNA, 19 nt, Homo sapiens
  misc_RNA (1)...(19): siRNA sense strand
aaagaugccacuucaaaug

SEQ ID NO: 307259 - RNA, 19 nt, Homo sapiens
  misc_RNA (1)...(19): siRNA sense strand
ccaaguguguauccaguuc

SEQ ID NO: 307260 - RNA, 19 nt, Homo sapiens
  misc_RNA (1)...(19): siRNA sense strand
ucagaaagaggugauguuu

SEQ ID NO: 307261 - RNA, 19 nt, Homo sapiens
  misc_RNA (1)...(19): siRNA sense strand
cagcuagcauauuguguug

SEQ ID NO: 307262 - RNA, 19 nt, Homo sapiens
  misc_RNA (1)...(19): siRNA sense strand
caaagaugccacuucaaau

SEQ ID NO: 307263 - RNA, 19 nt, Homo sapiens
  misc_RNA (1)...(19): siRNA sense strand
ccacugaaagcagaacaua

SEQ ID NO: 307264 - RNA, 19 nt, Homo sapiens
  misc_RNA (1)...(19): siRNA sense strand
uaggaaguauuaucaaugg

SEQ ID NO: 307265 - RNA, 19 nt, Homo sapiens
  misc_RNA (1)...(19): siRNA sense strand
gaaugaacugguugaguau

SEQ ID NO: 307266 - RNA, 19 nt, Homo sapiens
  misc_RNA (1)...(19): siRNA sense strand
gcugaaagacagagagaga

SEQ ID NO: 307267 - RNA, 19 nt, Homo sapiens
  misc_RNA (1)...(19): siRNA sense strand
cauuguacuucuggaauaa

SEQ ID NO: 307268 - RNA, 19 nt, Homo sapiens
  misc_RNA (1)...(19): siRNA sense strand
guucuuauuccuaugcaua

SEQ ID NO: 307269 - RNA, 19 nt, Homo sapiens
  misc_RNA (1)...(19): siRNA sense strand
uagugaagaucccagagaa

SEQ ID NO: 307270 - RNA, 19 nt, Homo sapiens
  misc_RNA (1)...(19): siRNA sense strand
aacgauacauugaucagaa

SEQ ID NO: 307271 - RNA, 19 nt, Homo sapiens
  misc_RNA (1)...(19): siRNA sense strand
ugaaagacagagagagaaa

SEQ ID NO: 307272 - RNA, 19 nt, Homo sapiens
  misc_RNA (1)...(19): siRNA sense strand
cuaaugaagguucuuauuc

SEQ ID NO: 307273 - RNA, 19 nt, Homo sapiens
  misc_RNA (1)...(19): siRNA sense strand
acugaaagcagaacauaaa

SEQ ID NO: 307274 - RNA, 19 nt, Homo sapiens
  misc_RNA (1)...(19): siRNA sense strand
gaacgugaagaauuaugga

SEQ ID NO: 307275 - RNA, 19 nt, Homo sapiens
  misc_RNA (1)...(19): siRNA sense strand
gaaggaauuggaacgugaa

SEQ ID NO: 307276 - RNA, 19 nt, Homo sapiens
  misc_RNA (1)...(19): siRNA sense strand
uaacagagccagugaucag

SEQ ID NO: 307277 - RNA, 19 nt, Homo sapiens
  misc_RNA (1)...(19): siRNA sense strand
aaagagcaacacugaauga

SEQ ID NO: 307278 - RNA, 19 nt, Homo sapiens
  misc_RNA (1)...(19): siRNA sense strand
gcaaggcgcagaggcagaa

SEQ ID NO: 307279 - RNA, 19 nt, Homo sapiens
  misc_RNA (1)...(19): siRNA sense strand
uaaugaagguucuuauucc

SEQ ID NO: 307280 - RNA, 19 nt, Homo sapiens
  misc_RNA (1)...(19): siRNA sense strand
uaugggaaauuucuuggau

SEQ ID NO: 307281 - RNA, 19 nt, Homo sapiens
  misc_RNA (1)...(19): siRNA sense strand
gcuuacaacaugcacagua

SEQ ID NO: 307282 - RNA, 19 nt, Homo sapiens
  misc_RNA (1)...(19): siRNA sense strand
caacuaaucgugguguaau

SEQ ID NO: 307283 - RNA, 19 nt, Homo sapiens
  misc_RNA (1)...(19): siRNA sense strand
gaagguucuuauuccuaug

SEQ ID NO: 307284 - RNA, 19 nt, Homo sapiens
  misc_RNA (1)...(19): siRNA sense strand
gguauaugaauucuucuug

SEQ ID NO: 307285 - RNA, 19 nt, Homo sapiens
  misc_RNA (1)...(19): siRNA sense strand
uacaguuccuggagaaaga

SEQ ID NO: 307286 - RNA, 19 nt, Homo sapiens
  misc_RNA (1)...(19): siRNA sense strand
gcagaaagggcauuguacu

SEQ ID NO: 307287 - RNA, 19 nt, Homo sapiens
  misc_RNA (1)...(19): siRNA sense strand
uuaguuugauugaggagaa

SEQ ID NO: 307288 - RNA, 19 nt, Homo sapiens
  misc_RNA (1)...(19): siRNA sense strand
uaacaucuuccguacacuu

SEQ ID NO: 307289 - RNA, 19 nt, Homo sapiens
  misc_RNA (1)...(19): siRNA sense strand
cuuacaacaugcacaguau

SEQ ID NO: 307290 - RNA, 19 nt, Homo sapiens
  misc_RNA (1)...(19): siRNA sense strand
aacaagagcuuuucuguca

SEQ ID NO: 307291 - RNA, 19 nt, Homo sapiens
  misc_RNA (1)...(19): siRNA sense strand
cagaaagggcauuguacuu

SEQ ID NO: 307292 - RNA, 19 nt, Homo sapiens
  misc_RNA (1)...(19): siRNA sense strand
ugcugaacuucuugaaaua

SEQ ID NO: 307293 - RNA, 19 nt, Homo sapiens
  misc_RNA (1)...(19): siRNA sense strand
caaugguguugcugaacuu

SEQ ID NO: 307294 - RNA, 19 nt, Homo sapiens
  misc_RNA (1)...(19): siRNA sense strand
ccucagguuuauauaugaa

SEQ ID NO: 307295 - RNA, 19 nt, Homo sapiens
  misc_RNA (1)...(19): siRNA sense strand
guucugcaccgaauuuaug

SEQ ID NO: 307296 - RNA, 19 nt, Homo sapiens
  misc_RNA (1)...(19): siRNA sense strand
cuucuggaauaacgaauau

SEQ ID NO: 307297 - RNA, 19 nt, Homo sapiens
  misc_RNA (1)...(19): siRNA sense strand
cagaauagugcuuacaaca

SEQ ID NO: 307298 - RNA, 19 nt, Homo sapiens
  misc_RNA (1)...(19): siRNA sense strand
ugauugaggagaacauuga

SEQ ID NO: 307299 - RNA, 19 nt, Homo sapiens
  misc_RNA (1)...(19): siRNA sense strand
auuaagagcauucaucaga

SEQ ID NO: 307300 - RNA, 19 nt, Homo sapiens
  misc_RNA (1)...(19): siRNA sense strand
aagaugccacuucaaauga

SEQ ID NO: 307301 - RNA, 19 nt, Homo sapiens
  misc_RNA (1)...(19): siRNA sense strand
uugaggagaacauugauaa

SEQ ID NO: 307302 - RNA, 19 nt, Homo sapiens
  misc_RNA (1)...(19): siRNA sense strand
aggagaaauugaagaaauc

SEQ ID NO: 307303 - RNA, 19 nt, Homo sapiens
  misc_RNA (1)...(19): siRNA sense strand
uaaucgugguguaauuguu

SEQ ID NO: 307304 - RNA, 19 nt, Homo sapiens
  misc_RNA (1)...(19): siRNA sense strand
ucaaugguguugcugaacu

SEQ ID NO: 307305 - RNA, 19 nt, Homo sapiens
  misc_RNA (1)...(19): siRNA sense strand
ugaaaacccuaauggaaau

SEQ ID NO: 307306 - RNA, 19 nt, Homo sapiens
  misc_RNA (1)...(19): siRNA sense strand
uagcacugguauacaaugu

SEQ ID NO: 307307 - RNA, 19 nt, Homo sapiens
  misc_RNA (1)...(19): siRNA sense strand
acgauacauugaucagaaa

SEQ ID NO: 307308 - RNA, 19 nt, Homo sapiens
  misc_RNA (1)...(19): siRNA sense strand
uaaaagagcaacacugaau

SEQ ID NO: 307309 - RNA, 19 nt, Homo sapiens
  misc_RNA (1)...(19): siRNA sense strand
gaggagaacauugauaaaa

SEQ ID NO: 307310 - RNA, 19 nt, Homo sapiens
  misc_RNA (1)...(19): siRNA sense strand
agaaagggcauuguacuuc

SEQ ID NO: 307311 - RNA, 19 nt, Homo sapiens
  misc_RNA (1)...(19): siRNA sense strand
ucagcuagcauauuguguu

SEQ ID NO: 307312 - RNA, 19 nt, Homo sapiens
  misc_RNA (1)...(19): siRNA sense strand
aggauuagcuuuguuucau

SEQ ID NO: 307313 - RNA, 19 nt, Homo sapiens
  misc_RNA (1)...(19): siRNA sense strand
gcagaacauaaacaauuuc

SEQ ID NO: 307314 - RNA, 19 nt, Homo sapiens
  misc_RNA (1)...(19): siRNA sense strand
agcguauucugauauagua

SEQ ID NO: 307315 - RNA, 19 nt, Homo sapiens
  misc_RNA (1)...(19): siRNA sense strand
agacuguucugcaccgaau

SEQ ID NO: 307316 - RNA, 19 nt, Homo sapiens
  misc_RNA (1)...(19): siRNA sense strand
gaacaaugaguauauccua

SEQ ID NO: 307317 - RNA, 19 nt, Homo sapiens
  misc_RNA (1)...(19): siRNA sense strand
gaaccaaaccaucguauca

SEQ ID NO: 307318 - RNA, 19 nt, Homo sapiens
  misc_RNA (1)...(19): siRNA sense strand
gcagguggcucgcuguguu

SEQ ID NO: 307319 - RNA, 19 nt, Homo sapiens
  misc_RNA (1)...(19): siRNA sense strand
caagagauauguggaucaa

SEQ ID NO: 307320 - RNA, 19 nt, Homo sapiens
  misc_RNA (1)...(19): siRNA sense strand
cgcaugaucucagugaaua

SEQ ID NO: 307321 - RNA, 19 nt, Homo sapiens
  misc_RNA (1)...(19): siRNA sense strand
ucaagucgcugucugucuu

SEQ ID NO: 307322 - RNA, 19 nt, Homo sapiens
  misc_RNA (1)...(19): siRNA sense strand
ggugauguuugacuucuug

SEQ ID NO: 307323 - RNA, 19 nt, Homo sapiens
  misc_RNA (1)...(19): siRNA sense strand
gugagaacccugaauuuga

SEQ ID NO: 307324 - RNA, 19 nt, Homo sapiens
  misc_RNA (1)...(19): siRNA sense strand
ccaggagcgucaggaguua

SEQ ID NO: 307325 - RNA, 19 nt, Homo sapiens
  misc_RNA (1)...(19): siRNA sense strand
ccacagcuccucucaguuc

SEQ ID NO: 307326 - RNA, 19 nt, Homo sapiens
  misc_RNA (1)...(19): siRNA sense strand
gcacaagcaguuccugguu

SEQ ID NO: 307327 - RNA, 19 nt, Homo sapiens
  misc_RNA (1)...(19): siRNA sense strand
caaaccaucguaucacuga

SEQ ID NO: 307328 - RNA, 19 nt, Homo sapiens
  misc_RNA (1)...(19): siRNA sense strand
acaaugugcucaagaccuu

SEQ ID NO: 307329 - RNA, 19 nt, Homo sapiens
  misc_RNA (1)...(19): siRNA sense strand
augggaagcuguuugauga

SEQ ID NO: 307330 - RNA, 19 nt, Homo sapiens
  misc_RNA (1)...(19): siRNA sense strand
gaggaugagcccaaucuug

SEQ ID NO: 307331 - RNA, 19 nt, Homo sapiens
  misc_RNA (1)...(19): siRNA sense strand
gcucacagccuccuacaag

SEQ ID NO: 307332 - RNA, 19 nt, Homo sapiens
  misc_RNA (1)...(19): siRNA sense strand
ccagugagaacccugaauu

SEQ ID NO: 307333 - RNA, 19 nt, Homo sapiens
  misc_RNA (1)...(19): siRNA sense strand
aaggagcacuggaaccaaa

SEQ ID NO: 307334 - RNA, 19 nt, Homo sapiens
  misc_RNA (1)...(19): siRNA sense strand
caucgagcccucccaguuu

SEQ ID NO: 307335 - RNA, 19 nt, Homo sapiens
  misc_RNA (1)...(19): siRNA sense strand
uggcugagcugcuggagau

SEQ ID NO: 307336 - RNA, 19 nt, Homo sapiens
  misc_RNA (1)...(19): siRNA sense strand
cuaggaagcaucaucaaug

SEQ ID NO: 307337 - RNA, 19 nt, Homo sapiens
  misc_RNA (1)...(19): siRNA sense strand
agacggagcacaagcaguu

SEQ ID NO: 307338 - RNA, 19 nt, Homo sapiens
  misc_RNA (1)...(19): siRNA sense strand
gcagcugguauaugaguuu

SEQ ID NO: 307339 - RNA, 19 nt, Homo sapiens
  misc_RNA (1)...(19): siRNA sense strand
gaucuacaaugugcucaag

SEQ ID NO: 307340 - RNA, 19 nt, Homo sapiens
  misc_RNA (1)...(19): siRNA sense strand
ugaaugggaagcuguuuga

SEQ ID NO: 307341 - RNA, 19 nt, Homo sapiens
  misc_RNA (1)...(19): siRNA sense strand
ugagaacccugaauuugac

SEQ ID NO: 307342 - RNA, 19 nt, Homo sapiens
  misc_RNA (1)...(19): siRNA sense strand
gaaggaugccacucugaca

SEQ ID NO: 307343 - RNA, 19 nt, Homo sapiens
  misc_RNA (1)...(19): siRNA sense strand
uaggaagcaucaucaaugg

SEQ ID NO: 307344 - RNA, 19 nt, Homo sapiens
  misc_RNA (1)...(19): siRNA sense strand
agagauauguggaucaaaa

SEQ ID NO: 307345 - RNA, 19 nt, Homo sapiens
  misc_RNA (1)...(19): siRNA sense strand
gagaaggaugccacucuga

SEQ ID NO: 307346 - RNA, 19 nt, Homo sapiens
  misc_RNA (1)...(19): siRNA sense strand
aggaugagcccaaucuuga

SEQ ID NO: 307347 - RNA, 19 nt, Homo sapiens
  misc_RNA (1)...(19): siRNA sense strand
ccagaaggaggugauguuu

SEQ ID NO: 307348 - RNA, 19 nt, Homo sapiens
  misc_RNA (1)...(19): siRNA sense strand
gcaaacagugcaaccacau

SEQ ID NO: 307349 - RNA, 19 nt, Homo sapiens
  misc_RNA (1)...(19): siRNA sense strand
ugaagaggaugagcccaau

SEQ ID NO: 307350 - RNA, 19 nt, Homo sapiens
  misc_RNA (1)...(19): siRNA sense strand
ugugcugccugcuguguuu

SEQ ID NO: 307351 - RNA, 19 nt, Homo sapiens
  misc_RNA (1)...(19): siRNA sense strand
ucccacagcuccucucagu

SEQ ID NO: 307352 - RNA, 19 nt, Homo sapiens
  misc_RNA (1)...(19): siRNA sense strand
ucaagaccuucauggagau

SEQ ID NO: 307353 - RNA, 19 nt, Homo sapiens
  misc_RNA (1)...(19): siRNA sense strand
cagugagaacccugaauuu

SEQ ID NO: 307354 - RNA, 19 nt, Homo sapiens
  misc_RNA (1)...(19): siRNA sense strand
ucuaugaauucgagcacuu

SEQ ID NO: 307355 - RNA, 19 nt, Homo sapiens
  misc_RNA (1)...(19): siRNA sense strand
gggccuacauccgcaaaca

SEQ ID NO: 307356 - RNA, 19 nt, Homo sapiens
  misc_RNA (1)...(19): siRNA sense strand
accugcagcugguauauga

SEQ ID NO: 307357 - RNA, 19 nt, Homo sapiens
  misc_RNA (1)...(19): siRNA sense strand
gaucucagugaauaucuuc

SEQ ID NO: 307358 - RNA, 19 nt, Homo sapiens
  misc_RNA (1)...(19): siRNA sense strand
ggaaccaaaccaucguauc

SEQ ID NO: 307359 - RNA, 19 nt, Homo sapiens
  misc_RNA (1)...(19): siRNA sense strand
gcucuguauuucuggaaca

SEQ ID NO: 307360 - RNA, 19 nt, Homo sapiens
  misc_RNA (1)...(19): siRNA sense strand
ucaucgagcccucccaguu

SEQ ID NO: 307361 - RNA, 19 nt, Homo sapiens
  misc_RNA (1)...(19): siRNA sense strand
ccucucaguuccgcuauca

SEQ ID NO: 307362 - RNA, 19 nt, Homo sapiens
  misc_RNA (1)...(19): siRNA sense strand
gaauucgagcacuucaaug

SEQ ID NO: 307363 - RNA, 19 nt, Homo sapiens
  misc_RNA (1)...(19): siRNA sense strand
caaugaguauauccuaagc

SEQ ID NO: 307364 - RNA, 19 nt, Homo sapiens
  misc_RNA (1)...(19): siRNA sense strand
gauccuaggaagcaucauc

SEQ ID NO: 307365 - RNA, 19 nt, Homo sapiens
  misc_RNA (1)...(19): siRNA sense strand
ccgggucuauggcaaguuc

SEQ ID NO: 307366 - RNA, 19 nt, Homo sapiens
  misc_RNA (1)...(19): siRNA sense strand
ccucccaguuugugaagau

SEQ ID NO: 307367 - RNA, 19 nt, Homo sapiens
  misc_RNA (1)...(19): siRNA sense strand
gaagaggaugagcccaauc

SEQ ID NO: 307368 - RNA, 19 nt, Homo sapiens
  misc_RNA (1)...(19): siRNA sense strand
gaugaaugggaagcuguuu

SEQ ID NO: 307369 - RNA, 19 nt, Homo sapiens
  misc_RNA (1)...(19): siRNA sense strand
ccaaggagcacuggaacca

SEQ ID NO: 307370 - RNA, 19 nt, Homo sapiens
  misc_RNA (1)...(19): siRNA sense strand
ucuggaacaaugaguauau

SEQ ID NO: 307371 - RNA, 19 nt, Homo sapiens
  misc_RNA (1)...(19): siRNA sense strand
gagauccuaggaagcauca

SEQ ID NO: 307372 - RNA, 19 nt, Homo sapiens
  misc_RNA (1)...(19): siRNA sense strand
agugagaacccugaauuug

SEQ ID NO: 307373 - RNA, 19 nt, Homo sapiens
  misc_RNA (1)...(19): siRNA sense strand
cccaggagcgucaggaguu

SEQ ID NO: 307374 - RNA, 19 nt, Homo sapiens
  misc_RNA (1)...(19): siRNA sense strand
ugaucucagugaauaucuu

SEQ ID NO: 307375 - RNA, 19 nt, Homo sapiens
  misc_RNA (1)...(19): siRNA sense strand
ucuaccaagucuccaagga

SEQ ID NO: 307376 - RNA, 19 nt, Homo sapiens
  misc_RNA (1)...(19): siRNA sense strand
cuguauuucuggaacaaug

SEQ ID NO: 307377 - RNA, 19 nt, Homo sapiens
  misc_RNA (1)...(19): siRNA sense strand
ccaagagauauguggauca

SEQ ID NO: 307378 - RNA, 19 nt, Homo sapiens
  misc_RNA (1)...(19): siRNA sense strand
aaacagugcaaccacaucu

SEQ ID NO: 307379 - RNA, 19 nt, Homo sapiens
  misc_RNA (1)...(19): siRNA sense strand
ccuacaagcuggaaaagca

SEQ ID NO: 307380 - RNA, 19 nt, Homo sapiens
  misc_RNA (1)...(19): siRNA sense strand
gcuguuugaugagcucaca

SEQ ID NO: 307381 - RNA, 19 nt, Homo sapiens
  misc_RNA (1)...(19): siRNA sense strand
ucucaguuccgcuaucaga

SEQ ID NO: 307382 - RNA, 19 nt, Homo sapiens
  misc_RNA (1)...(19): siRNA sense strand
cagaaggaggugauguuuc

SEQ ID NO: 307383 - RNA, 19 nt, Homo sapiens
  misc_RNA (1)...(19): siRNA sense strand
ugaauuugacccugaagag

SEQ ID NO: 307384 - RNA, 19 nt, Homo sapiens
  misc_RNA (1)...(19): siRNA sense strand
aaaccugcacccagaagga

SEQ ID NO: 307385 - RNA, 19 nt, Homo sapiens
  misc_RNA (1)...(19): siRNA sense strand
gaagaaauauuggauguga

SEQ ID NO: 307386 - RNA, 19 nt, Homo sapiens
  misc_RNA (1)...(19): siRNA sense strand
caaaguuccucacaguuua

SEQ ID NO: 307387 - RNA, 19 nt, Homo sapiens
  misc_RNA (1)...(19): siRNA sense strand
uacaagcgcuccacucuua

SEQ ID NO: 307388 - RNA, 19 nt, Homo sapiens
  misc_RNA (1)...(19): siRNA sense strand
cagaagaggucgcaaaguu

SEQ ID NO: 307389 - RNA, 19 nt, Homo sapiens
  misc_RNA (1)...(19): siRNA sense strand
ccaagaaccuuuguuuaaa

SEQ ID NO: 307390 - RNA, 19 nt, Homo sapiens
  misc_RNA (1)...(19): siRNA sense strand
gcaaaguuccucacaguuu

SEQ ID NO: 307391 - RNA, 19 nt, Homo sapiens
  misc_RNA (1)...(19): siRNA sense strand
gaaagauccuucacucaca

SEQ ID NO: 307392 - RNA, 19 nt, Homo sapiens
  misc_RNA (1)...(19): siRNA sense strand
gaaaugaacagcaccaugu

SEQ ID NO: 307393 - RNA, 19 nt, Homo sapiens
  misc_RNA (1)...(19): siRNA sense strand
uuaaugaacugguggacua

SEQ ID NO: 307394 - RNA, 19 nt, Homo sapiens
  misc_RNA (1)...(19): siRNA sense strand
agaaugguaucuugcaaua

SEQ ID NO: 307395 - RNA, 19 nt, Homo sapiens
  misc_RNA (1)...(19): siRNA sense strand
ugaaguaguuagaauggua

SEQ ID NO: 307396 - RNA, 19 nt, Homo sapiens
  misc_RNA (1)...(19): siRNA sense strand
gaacugguggacuacauua

SEQ ID NO: 307397 - RNA, 19 nt, Homo sapiens
  misc_RNA (1)...(19): siRNA sense strand
gcuggcauauuguauagua

SEQ ID NO: 307398 - RNA, 19 nt, Homo sapiens
  misc_RNA (1)...(19): siRNA sense strand
gaauacaucaugaguuuga

SEQ ID NO: 307399 - RNA, 19 nt, Homo sapiens
  misc_RNA (1)...(19): siRNA sense strand
cagaauuuauggcaaguuu

SEQ ID NO: 307400 - RNA, 19 nt, Homo sapiens
  misc_RNA (1)...(19): siRNA sense strand
ggauaaaguagacggauuu

SEQ ID NO: 307401 - RNA, 19 nt, Homo sapiens
  misc_RNA (1)...(19): siRNA sense strand
gcacagcuggcauauugua

SEQ ID NO: 307402 - RNA, 19 nt, Homo sapiens
  misc_RNA (1)...(19): siRNA sense strand
ugaauuugauccagaagaa

SEQ ID NO: 307403 - RNA, 19 nt, Homo sapiens
  misc_RNA (1)...(19): siRNA sense strand
ggaacuggaagaaauauug

SEQ ID NO: 307404 - RNA, 19 nt, Homo sapiens
  misc_RNA (1)...(19): siRNA sense strand
uggaggaucuggaguuaaa

SEQ ID NO: 307405 - RNA, 19 nt, Homo sapiens
  misc_RNA (1)...(19): siRNA sense strand
uagcugaacugcuggaaau

SEQ ID NO: 307406 - RNA, 19 nt, Homo sapiens
  misc_RNA (1)...(19): siRNA sense strand
aaaggagcgugaagaauug

SEQ ID NO: 307407 - RNA, 19 nt, Homo sapiens
  misc_RNA (1)...(19): siRNA sense strand
caaugaauuugauccagaa

SEQ ID NO: 307408 - RNA, 19 nt, Homo sapiens
  misc_RNA (1)...(19): siRNA sense strand
ugacagcaaugaauuugau

SEQ ID NO: 307409 - RNA, 19 nt, Homo sapiens
  misc_RNA (1)...(19): siRNA sense strand
aaacagaacacuucaaugg

SEQ ID NO: 307410 - RNA, 19 nt, Homo sapiens
  misc_RNA (1)...(19): siRNA sense strand
gacacgcuaucugaucuua

SEQ ID NO: 307411 - RNA, 19 nt, Homo sapiens
  misc_RNA (1)...(19): siRNA sense strand
ucuuagacgugauggaaua

SEQ ID NO: 307412 - RNA, 19 nt, Homo sapiens
  misc_RNA (1)...(19): siRNA sense strand
gaacucucccuccuaguga

SEQ ID NO: 307413 - RNA, 19 nt, Homo sapiens
  misc_RNA (1)...(19): siRNA sense strand
gcgcuccacucuuaaugaa

SEQ ID NO: 307414 - RNA, 19 nt, Homo sapiens
  misc_RNA (1)...(19): siRNA sense strand
uccaagaaccuuuguuuaa

SEQ ID NO: 307415 - RNA, 19 nt, Homo sapiens
  misc_RNA (1)...(19): siRNA sense strand
caagaaccuuuguuuaaac

SEQ ID NO: 307416 - RNA, 19 nt, Homo sapiens
  misc_RNA (1)...(19): siRNA sense strand
uuaaacaaaucgccaagug

SEQ ID NO: 307417 - RNA, 19 nt, Homo sapiens
  misc_RNA (1)...(19): siRNA sense strand
cacgcuaucugaucuuaaa

SEQ ID NO: 307418 - RNA, 19 nt, Homo sapiens
  misc_RNA (1)...(19): siRNA sense strand
ucacagaaccaguuauuag

SEQ ID NO: 307419 - RNA, 19 nt, Homo sapiens
  misc_RNA (1)...(19): siRNA sense strand
uaucaauggcuuugcuuua

SEQ ID NO: 307420 - RNA, 19 nt, Homo sapiens
  misc_RNA (1)...(19): siRNA sense strand
gucaggagcuuaucacucu

SEQ ID NO: 307421 - RNA, 19 nt, Homo sapiens
  misc_RNA (1)...(19): siRNA sense strand
cuggaaauauuaggaagua

SEQ ID NO: 307422 - RNA, 19 nt, Homo sapiens
  misc_RNA (1)...(19): siRNA sense strand
gagcagacuuacccugaag

SEQ ID NO: 307423 - RNA, 19 nt, Homo sapiens
  misc_RNA (1)...(19): siRNA sense strand
uagacgugauggaauaauu

SEQ ID NO: 307424 - RNA, 19 nt, Homo sapiens
  misc_RNA (1)...(19): siRNA sense strand
gcaagccuauugaguuaac

SEQ ID NO: 307425 - RNA, 19 nt, Homo sapiens
  misc_RNA (1)...(19): siRNA sense strand
caacuacuccuccaucagu

SEQ ID NO: 307426 - RNA, 19 nt, Homo sapiens
  misc_RNA (1)...(19): siRNA sense strand
gaaacagaacacuucaaug

SEQ ID NO: 307427 - RNA, 19 nt, Homo sapiens
  misc_RNA (1)...(19): siRNA sense strand
uaggaaguauuaucaaugg

SEQ ID NO: 307428 - RNA, 19 nt, Homo sapiens
  misc_RNA (1)...(19): siRNA sense strand
uggaagaaauauuggaugu

SEQ ID NO: 307429 - RNA, 19 nt, Homo sapiens
  misc_RNA (1)...(19): siRNA sense strand
cugaacugcuggaaauauu

SEQ ID NO: 307430 - RNA, 19 nt, Homo sapiens
  misc_RNA (1)...(19): siRNA sense strand
gaacugcuggaaauauuag

SEQ ID NO: 307431 - RNA, 19 nt, Homo sapiens
  misc_RNA (1)...(19): siRNA sense strand
ggcuuugcuuuaccucuua

SEQ ID NO: 307432 - RNA, 19 nt, Homo sapiens
  misc_RNA (1)...(19): siRNA sense strand
gagaaagauccuucacuca

SEQ ID NO: 307433 - RNA, 19 nt, Homo sapiens
  misc_RNA (1)...(19): siRNA sense strand
ugaacugcuggaaauauua

SEQ ID NO: 307434 - RNA, 19 nt, Homo sapiens
  misc_RNA (1)...(19): siRNA sense strand
ccuaaaacauguagucaaa

SEQ ID NO: 307435 - RNA, 19 nt, Homo sapiens
  misc_RNA (1)...(19): siRNA sense strand
cagcuggcauauuguauag

SEQ ID NO: 307436 - RNA, 19 nt, Homo sapiens
  misc_RNA (1)...(19): siRNA sense strand
guauugaucccuuuacaca

SEQ ID NO: 307437 - RNA, 19 nt, Homo sapiens
  misc_RNA (1)...(19): siRNA sense strand
ggacuacauuacaauaagc

SEQ ID NO: 307438 - RNA, 19 nt, Homo sapiens
  misc_RNA (1)...(19): siRNA sense strand
guugaaggcauuuauggaa

SEQ ID NO: 307439 - RNA, 19 nt, Homo sapiens
  misc_RNA (1)...(19): siRNA sense strand
gaaguaguuagaaugguau

SEQ ID NO: 307440 - RNA, 19 nt, Homo sapiens
  misc_RNA (1)...(19): siRNA sense strand
gagcuuaucacucuuccau

SEQ ID NO: 307441 - RNA, 19 nt, Homo sapiens
  misc_RNA (1)...(19): siRNA sense strand
gaauuuauggcaaguuucu

SEQ ID NO: 307442 - RNA, 19 nt, Homo sapiens
  misc_RNA (1)...(19): siRNA sense strand
gguggacuacauuacaaua

SEQ ID NO: 307443 - RNA, 19 nt, Homo sapiens
  misc_RNA (1)...(19): siRNA sense strand
ucgcaaaguuccucacagu

SEQ ID NO: 307444 - RNA, 19 nt, Homo sapiens
  misc_RNA (1)...(19): siRNA sense strand
ucacucacagaaccaguua

SEQ ID NO: 307445 - RNA, 19 nt, Homo sapiens
  misc_RNA (1)...(19): siRNA sense strand
uuagagcauuuauccgaaa

SEQ ID NO: 307446 - RNA, 19 nt, Homo sapiens
  misc_RNA (1)...(19): siRNA sense strand
gaauuccaacccagcauug

SEQ ID NO: 307447 - RNA, 19 nt, Homo sapiens
  misc_RNA (1)...(19): siRNA sense strand
aagaugaaccuacccuuga

SEQ ID NO: 307448 - RNA, 19 nt, Homo sapiens
  misc_RNA (1)...(19): siRNA sense strand
gcuccacucuuaaugaacu

SEQ ID NO: 307449 - RNA, 19 nt, Homo sapiens
  misc_RNA (1)...(19): siRNA sense strand
uugaaggcauuuauggaaa

SEQ ID NO: 307450 - RNA, 19 nt, Homo sapiens
  misc_RNA (1)...(19): siRNA sense strand
gaacuggaagaaauauugg

SEQ ID NO: 307451 - RNA, 19 nt, Homo sapiens
  misc_RNA (1)...(19): siRNA sense strand
gggaacgggacuacuuaaa

SEQ ID NO: 307452 - RNA, 19 nt, Homo sapiens
  misc_RNA (1)...(19): siRNA sense strand
uggauaaaguagacggauu

SEQ ID NO: 307453 - RNA, 19 nt, Homo sapiens
  misc_RNA (1)...(19): siRNA sense strand
cagagcagccugaacuguu

SEQ ID NO: 307454 - RNA, 19 nt, Homo sapiens
  misc_RNA (1)...(19): siRNA sense strand
ggaacgggacuacuuaaaa

SEQ ID NO: 307455 - RNA, 19 nt, Homo sapiens
  misc_RNA (1)...(19): siRNA sense strand
uaguuagaaugguaucuug

SEQ ID NO: 307456 - RNA, 19 nt, Homo sapiens
  misc_RNA (1)...(19): siRNA sense strand
aauccaagaaccuuuguuu

SEQ ID NO: 307457 - RNA, 19 nt, Homo sapiens
  misc_RNA (1)...(19): siRNA sense strand
aaaaggagcgugaagaauu

SEQ ID NO: 307458 - RNA, 19 nt, Homo sapiens
  misc_RNA (1)...(19): siRNA sense strand
acaaaucgccaagugugua

SEQ ID NO: 307459 - RNA, 19 nt, Homo sapiens
  misc_RNA (1)...(19): siRNA sense strand
ugcaauauauucagaacuc

SEQ ID NO: 307460 - RNA, 19 nt, Homo sapiens
  misc_RNA (1)...(19): siRNA sense strand
gaggaucuggaguuaaaga

SEQ ID NO: 307461 - RNA, 19 nt, Homo sapiens
  misc_RNA (1)...(19): siRNA sense strand
cgucauccuucccaucaug

SEQ ID NO: 307462 - RNA, 19 nt, Homo sapiens
  misc_RNA (1)...(19): siRNA sense strand
agacagaagaggucgcaaa

SEQ ID NO: 307463 - RNA, 19 nt, Homo sapiens
  misc_RNA (1)...(19): siRNA sense strand
aagcagaggcuguuugaca

SEQ ID NO: 307464 - RNA, 19 nt, Homo sapiens
  misc_RNA (1)...(19): siRNA sense strand
caaaucgccaaguguguau

SEQ ID NO: 307465 - RNA, 19 nt, Homo sapiens
  misc_RNA (1)...(19): siRNA sense strand
acagcuggcauauuguaua

SEQ ID NO: 307466 - RNA, 19 nt, Homo sapiens
  misc_RNA (1)...(19): siRNA sense strand
aaacagucuuacacagaau

SEQ ID NO: 307467 - RNA, 19 nt, Homo sapiens
  misc_RNA (1)...(19): siRNA sense strand
gcaauauauucagaacucu

SEQ ID NO: 307468 - RNA, 19 nt, Homo sapiens
  misc_RNA (1)...(19): siRNA sense strand
guggacuacauuacaauaa

SEQ ID NO: 307469 - RNA, 19 nt, Homo sapiens
  misc_RNA (1)...(19): siRNA sense strand
ucaugaguuugauagaaga

SEQ ID NO: 307470 - RNA, 19 nt, Homo sapiens
  misc_RNA (1)...(19): siRNA sense strand
uaaacaaaucgccaagugu

SEQ ID NO: 307471 - RNA, 19 nt, Homo sapiens
  misc_RNA (1)...(19): siRNA sense strand
gaaauauuggaugugauug

SEQ ID NO: 307472 - RNA, 19 nt, Homo sapiens
  misc_RNA (1)...(19): siRNA sense strand
gcugaacugcuggaaauau

SEQ ID NO: 307473 - RNA, 19 nt, Homo sapiens
  misc_RNA (1)...(19): siRNA sense strand
gcauuuauccgaaaacaga

SEQ ID NO: 307474 - RNA, 19 nt, Homo sapiens
  misc_RNA (1)...(19): siRNA sense strand
aaaacagucuuacacagaa

SEQ ID NO: 307475 - RNA, 19 nt, Homo sapiens
  misc_RNA (1)...(19): siRNA sense strand
cuagugacagcaaugaauu

SEQ ID NO: 307476 - RNA, 19 nt, Homo sapiens
  misc_RNA (1)...(19): siRNA sense strand
ccucacaguuuaggucuca

SEQ ID NO: 307477 - RNA, 19 nt, Homo sapiens
  misc_RNA (1)...(19): siRNA sense strand
uggcguugguguacaaugu

SEQ ID NO: 307478 - RNA, 19 nt, Homo sapiens
  misc_RNA (1)...(19): siRNA sense strand
agagcagacuuacccugaa

SEQ ID NO: 307479 - RNA, 19 nt, Homo sapiens
  misc_RNA (1)...(19): siRNA sense strand
gacagaagaggucgcaaag

SEQ ID NO: 307480 - RNA, 19 nt, Homo sapiens
  misc_RNA (1)...(19): siRNA sense strand
ucauggacacgcuaucuga

SEQ ID NO: 307481 - RNA, 19 nt, Homo sapiens
  misc_RNA (1)...(19): siRNA sense strand
guaguuagaaugguaucuu

SEQ ID NO: 307482 - RNA, 19 nt, Homo sapiens
  misc_RNA (1)...(19): siRNA sense strand
aggcagaacacaaacaguu

SEQ ID NO: 307483 - RNA, 19 nt, Homo sapiens
  misc_RNA (1)...(19): siRNA sense strand
ggaucuggaguuaaagaga

SEQ ID NO: 307484 - RNA, 19 nt, Homo sapiens
  misc_RNA (1)...(19): siRNA sense strand
ggaagaaauauuggaugug

SEQ ID NO: 307485 - RNA, 19 nt, Homo sapiens
  misc_RNA (1)...(19): siRNA sense strand
acagagaggucacuuauua

SEQ ID NO: 307486 - RNA, 19 nt, Homo sapiens
  misc_RNA (1)...(19): siRNA sense strand
gcacaaagauuauugaaac

SEQ ID NO: 307487 - RNA, 19 nt, Homo sapiens
  misc_RNA (1)...(19): siRNA sense strand
gaagcacagucucaacuua

SEQ ID NO: 307488 - RNA, 19 nt, Homo sapiens
  misc_RNA (1)...(19): siRNA sense strand
gcuauagccuuccuugaua

SEQ ID NO: 307489 - RNA, 19 nt, Homo sapiens
  misc_RNA (1)...(19): siRNA sense strand
guacgaaggugcugaaugu

SEQ ID NO: 307490 - RNA, 19 nt, Homo sapiens
  misc_RNA (1)...(19): siRNA sense strand
ugagaaacaucuugaauug

SEQ ID NO: 307491 - RNA, 19 nt, Homo sapiens
  misc_RNA (1)...(19): siRNA sense strand
ggacuucacugcagcaaga

SEQ ID NO: 307492 - RNA, 19 nt, Homo sapiens
  misc_RNA (1)...(19): siRNA sense strand
ccagauaacuuccagaaug

SEQ ID NO: 307493 - RNA, 19 nt, Homo sapiens
  misc_RNA (1)...(19): siRNA sense strand
gggaaugucuuaaacuuga

SEQ ID NO: 307494 - RNA, 19 nt, Homo sapiens
  misc_RNA (1)...(19): siRNA sense strand
agagaaagcacaaagauua

SEQ ID NO: 307495 - RNA, 19 nt, Homo sapiens
  misc_RNA (1)...(19): siRNA sense strand
cuaaagaaguccucucuga

SEQ ID NO: 307496 - RNA, 19 nt, Homo sapiens
  misc_RNA (1)...(19): siRNA sense strand
gaaguucgggaaugucuua

SEQ ID NO: 307497 - RNA, 19 nt, Homo sapiens
  misc_RNA (1)...(19): siRNA sense strand
gaaaugagaaagaaguuug

SEQ ID NO: 307498 - RNA, 19 nt, Homo sapiens
  misc_RNA (1)...(19): siRNA sense strand
gcucaaaucuaauccaagu

SEQ ID NO: 307499 - RNA, 19 nt, Homo sapiens
  misc_RNA (1)...(19): siRNA sense strand
gauggaaccugacaaugug

SEQ ID NO: 307500 - RNA, 19 nt, Homo sapiens
  misc_RNA (1)...(19): siRNA sense strand
cagauaacuuccagaauga

SEQ ID NO: 307501 - RNA, 19 nt, Homo sapiens
  misc_RNA (1)...(19): siRNA sense strand
uagaggaaauguaugauga

SEQ ID NO: 307502 - RNA, 19 nt, Homo sapiens
  misc_RNA (1)...(19): siRNA sense strand
ggaaauguaugaugaagcu

SEQ ID NO: 307503 - RNA, 19 nt, Homo sapiens
  misc_RNA (1)...(19): siRNA sense strand
gcagaaacgagauuauuau

SEQ ID NO: 307504 - RNA, 19 nt, Homo sapiens
  misc_RNA (1)...(19): siRNA sense strand
gaaagcacaaagauuauug

SEQ ID NO: 307505 - RNA, 19 nt, Homo sapiens
  misc_RNA (1)...(19): siRNA sense strand
gaaccuaggaaagcuauaa

SEQ ID NO: 307506 - RNA, 19 nt, Homo sapiens
  misc_RNA (1)...(19): siRNA sense strand
ggcggaccauuuagauuua

SEQ ID NO: 307507 - RNA, 19 nt, Homo sapiens
  misc_RNA (1)...(19): siRNA sense strand
aagcugcacuuccugauuu

SEQ ID NO: 307508 - RNA, 19 nt, Homo sapiens
  misc_RNA (1)...(19): siRNA sense strand
ucgagaaggucuagagaaa

SEQ ID NO: 307509 - RNA, 19 nt, Homo sapiens
  misc_RNA (1)...(19): siRNA sense strand
aaaugcagauguugagaaa

SEQ ID NO: 307510 - RNA, 19 nt, Homo sapiens
  misc_RNA (1)...(19): siRNA sense strand
gagcagaggccuauuugau

SEQ ID NO: 307511 - RNA, 19 nt, Homo sapiens
  misc_RNA (1)...(19): siRNA sense strand
caaugugaaugcccugaaa

SEQ ID NO: 307512 - RNA, 19 nt, Homo sapiens
  misc_RNA (1)...(19): siRNA sense strand
gcacagucucaacuuauaa

SEQ ID NO: 307513 - RNA, 19 nt, Homo sapiens
  misc_RNA (1)...(19): siRNA sense strand
gagauuauacugcugcuau

SEQ ID NO: 307514 - RNA, 19 nt, Homo sapiens
  misc_RNA (1)...(19): siRNA sense strand
ugauaauacugaagcguuu

SEQ ID NO: 307515 - RNA, 19 nt, Homo sapiens
  misc_RNA (1)...(19): siRNA sense strand
gaauauacaguucguucaa

SEQ ID NO: 307516 - RNA, 19 nt, Homo sapiens
  misc_RNA (1)...(19): siRNA sense strand
gagaaggucuagagaaagc

SEQ ID NO: 307517 - RNA, 19 nt, Homo sapiens
  misc_RNA (1)...(19): siRNA sense strand
gauggcagauacacagaug

SEQ ID NO: 307518 - RNA, 19 nt, Homo sapiens
  misc_RNA (1)...(19): siRNA sense strand
ccugauaacuauauugcuu

SEQ ID NO: 307519 - RNA, 19 nt, Homo sapiens
  misc_RNA (1)...(19): siRNA sense strand
gagaaagcacaaagauuau

SEQ ID NO: 307520 - RNA, 19 nt, Homo sapiens
  misc_RNA (1)...(19): siRNA sense strand
agaggucacuuauuacuca

SEQ ID NO: 307521 - RNA, 19 nt, Homo sapiens
  misc_RNA (1)...(19): siRNA sense strand
ucggagggcuacugucuuu

SEQ ID NO: 307522 - RNA, 19 nt, Homo sapiens
  misc_RNA (1)...(19): siRNA sense strand
gaaguuugacgacggagaa

SEQ ID NO: 307523 - RNA, 19 nt, Homo sapiens
  misc_RNA (1)...(19): siRNA sense strand
gaacuucgagcugaauguu

SEQ ID NO: 307524 - RNA, 19 nt, Homo sapiens
  misc_RNA (1)...(19): siRNA sense strand
uuaugaaacugcucaggaa

SEQ ID NO: 307525 - RNA, 19 nt, Homo sapiens
  misc_RNA (1)...(19): siRNA sense strand
cgcagaaacgagauuauua

SEQ ID NO: 307526 - RNA, 19 nt, Homo sapiens
  misc_RNA (1)...(19): siRNA sense strand
cugaugaaaugcagcguuu

SEQ ID NO: 307527 - RNA, 19 nt, Homo sapiens
  misc_RNA (1)...(19): siRNA sense strand
ucaaaucuaauccaaguga

SEQ ID NO: 307528 - RNA, 19 nt, Homo sapiens
  misc_RNA (1)...(19): siRNA sense strand
cuauagccuuccuugauaa

SEQ ID NO: 307529 - RNA, 19 nt, Homo sapiens
  misc_RNA (1)...(19): siRNA sense strand
uggaguaaaugcagauguu

SEQ ID NO: 307530 - RNA, 19 nt, Homo sapiens
  misc_RNA (1)...(19): siRNA sense strand
caaaucuaauccaagugaa

SEQ ID NO: 307531 - RNA, 19 nt, Homo sapiens
  misc_RNA (1)...(19): siRNA sense strand
cgagaagccuguugaagcu

SEQ ID NO: 307532 - RNA, 19 nt, Homo sapiens
  misc_RNA (1)...(19): siRNA sense strand
cgacggagaagauccuuug

SEQ ID NO: 307533 - RNA, 19 nt, Homo sapiens
  misc_RNA (1)...(19): siRNA sense strand
ggaagcacagucucaacuu

SEQ ID NO: 307534 - RNA, 19 nt, Homo sapiens
  misc_RNA (1)...(19): siRNA sense strand
cagcucaggcggaccauuu

SEQ ID NO: 307535 - RNA, 19 nt, Homo sapiens
  misc_RNA (1)...(19): siRNA sense strand
gaggaaauguaugaugaag

SEQ ID NO: 307536 - RNA, 19 nt, Homo sapiens
  misc_RNA (1)...(19): siRNA sense strand
ugauagaggaaauguauga

SEQ ID NO: 307537 - RNA, 19 nt, Homo sapiens
  misc_RNA (1)...(19): siRNA sense strand
gugcucaaaucuaauccaa

SEQ ID NO: 307538 - RNA, 19 nt, Homo sapiens
  misc_RNA (1)...(19): siRNA sense strand
cacagaagcuggaacucau

SEQ ID NO: 307539 - RNA, 19 nt, Homo sapiens
  misc_RNA (1)...(19): siRNA sense strand
gcucaggaacacaaugaaa

SEQ ID NO: 307540 - RNA, 19 nt, Homo sapiens
  misc_RNA (1)...(19): siRNA sense strand
gaaaacagagccaagcauu

SEQ ID NO: 307541 - RNA, 19 nt, Homo sapiens
  misc_RNA (1)...(19): siRNA sense strand
aaacuugaccaggaucaua

SEQ ID NO: 307542 - RNA, 19 nt, Homo sapiens
  misc_RNA (1)...(19): siRNA sense strand
cuaggaaagcuauaaguga

SEQ ID NO: 307543 - RNA, 19 nt, Homo sapiens
  misc_RNA (1)...(19): siRNA sense strand
gaaggagaaccuaggaaag

SEQ ID NO: 307544 - RNA, 19 nt, Homo sapiens
  misc_RNA (1)...(19): siRNA sense strand
gcacuuccugauuuaacua

SEQ ID NO: 307545 - RNA, 19 nt, Homo sapiens
  misc_RNA (1)...(19): siRNA sense strand
gaagccuguugaagcuauu

SEQ ID NO: 307546 - RNA, 19 nt, Homo sapiens
  misc_RNA (1)...(19): siRNA sense strand
ggacgagaagccuguugaa

SEQ ID NO: 307547 - RNA, 19 nt, Homo sapiens
  misc_RNA (1)...(19): siRNA sense strand
uuacagagaggucacuuau

SEQ ID NO: 307548 - RNA, 19 nt, Homo sapiens
  misc_RNA (1)...(19): siRNA sense strand
guagauggugacccugaua

SEQ ID NO: 307549 - RNA, 19 nt, Homo sapiens
  misc_RNA (1)...(19): siRNA sense strand
gcacuuaacgcuuuuggaa

SEQ ID NO: 307550 - RNA, 19 nt, Homo sapiens
  misc_RNA (1)...(19): siRNA sense strand
gcggaccauuuagauuuaa

SEQ ID NO: 307551 - RNA, 19 nt, Homo sapiens
  misc_RNA (1)...(19): siRNA sense strand
aaagaaguccucucugauc

SEQ ID NO: 307552 - RNA, 19 nt, Homo sapiens
  misc_RNA (1)...(19): siRNA sense strand
gaguaaaugcagauguuga

SEQ ID NO: 307553 - RNA, 19 nt, Homo sapiens
  misc_RNA (1)...(19): siRNA sense strand
uaaaugcagauguugagaa

SEQ ID NO: 307554 - RNA, 19 nt, Homo sapiens
  misc_RNA (1)...(19): siRNA sense strand
ggaaguggagauuauacug

SEQ ID NO: 307555 - RNA, 19 nt, Homo sapiens
  misc_RNA (1)...(19): siRNA sense strand
agcacagucucaacuuaua

SEQ ID NO: 307556 - RNA, 19 nt, Homo sapiens
  misc_RNA (1)...(19): siRNA sense strand
ucgggaaugucuuaaacuu

SEQ ID NO: 307557 - RNA, 19 nt, Homo sapiens
  misc_RNA (1)...(19): siRNA sense strand
uaagcacacuguacuacca

SEQ ID NO: 307558 - RNA, 19 nt, Homo sapiens
  misc_RNA (1)...(19): siRNA sense strand
ggagaaccuaggaaagcua

SEQ ID NO: 307559 - RNA, 19 nt, Homo sapiens
  misc_RNA (1)...(19): siRNA sense strand
agaaggagaaccuaggaaa

SEQ ID NO: 307560 - RNA, 19 nt, Homo sapiens
  misc_RNA (1)...(19): siRNA sense strand
cgagcugaauguuuuauaa

SEQ ID NO: 307561 - RNA, 19 nt, Homo sapiens
  misc_RNA (1)...(19): siRNA sense strand
ccacagaagcuggaacuca

SEQ ID NO: 307562 - RNA, 19 nt, Homo sapiens
  misc_RNA (1)...(19): siRNA sense strand
uaaagaaguccucucugau

SEQ ID NO: 307563 - RNA, 19 nt, Homo sapiens
  misc_RNA (1)...(19): siRNA sense strand
gcuagcugaugcuuuaucu

SEQ ID NO: 307564 - RNA, 19 nt, Homo sapiens
  misc_RNA (1)...(19): siRNA sense strand
gaggauuugccacugcuuu

SEQ ID NO: 307565 - RNA, 19 nt, Homo sapiens
  misc_RNA (1)...(19): siRNA sense strand
ucagugaaguucgggaaug

SEQ ID NO: 307566 - RNA, 19 nt, Homo sapiens
  misc_RNA (1)...(19): siRNA sense strand
cuauuaggguuuguucuga

SEQ ID NO: 307567 - RNA, 19 nt, Homo sapiens
  misc_RNA (1)...(19): siRNA sense strand
gauccagaaaugagaaaga

SEQ ID NO: 307568 - RNA, 19 nt, Homo sapiens
  misc_RNA (1)...(19): siRNA sense strand
agcagaggccuauuugaua

SEQ ID NO: 307569 - RNA, 19 nt, Homo sapiens
  misc_RNA (1)...(19): siRNA sense strand
gguuuguucugaaguuuua

SEQ ID NO: 307570 - RNA, 19 nt, Homo sapiens
  misc_RNA (1)...(19): siRNA sense strand
uagcugaugcuuuaucuca

SEQ ID NO: 307571 - RNA, 19 nt, Homo sapiens
  misc_RNA (1)...(19): siRNA sense strand
gcaguacgaaggugcugaa

SEQ ID NO: 307572 - RNA, 19 nt, Homo sapiens
  misc_RNA (1)...(19): siRNA sense strand
ggugcugaauguggaguaa

SEQ ID NO: 307573 - RNA, 19 nt, Homo sapiens
  misc_RNA (1)...(19): siRNA sense strand
uagagaaagcacaaagauu

SEQ ID NO: 307574 - RNA, 19 nt, Homo sapiens
  misc_RNA (1)...(19): siRNA sense strand
gugaaugcccugaaagauc

SEQ ID NO: 307575 - RNA, 19 nt, Homo sapiens
  misc_RNA (1)...(19): siRNA sense strand
ccaacuaggagaccacgaa

SEQ ID NO: 307576 - RNA, 19 nt, Homo sapiens
  misc_RNA (1)...(19): siRNA sense strand
gcagaacuacgggaacuuc

SEQ ID NO: 307577 - RNA, 19 nt, Homo sapiens
  misc_RNA (1)...(19): siRNA sense strand
uguuugggaugcagaacua

SEQ ID NO: 307578 - RNA, 19 nt, Homo sapiens
  misc_RNA (1)...(19): siRNA sense strand
guucgggaaugucuuaaac

SEQ ID NO: 307579 - RNA, 19 nt, Homo sapiens
  misc_RNA (1)...(19): siRNA sense strand
aggcggaccauuuagauuu

SEQ ID NO: 307580 - RNA, 19 nt, Homo sapiens
  misc_RNA (1)...(19): siRNA sense strand
ccagaaaugagaaagaagu

SEQ ID NO: 307581 - RNA, 19 nt, Homo sapiens
  misc_RNA (1)...(19): siRNA sense strand
gcuauuaggguuuguucug

SEQ ID NO: 307582 - RNA, 19 nt, Homo sapiens
  misc_RNA (1)...(19): siRNA sense strand
agaagccuguugaagcuau

SEQ ID NO: 307583 - RNA, 19 nt, Homo sapiens
  misc_RNA (1)...(19): siRNA sense strand
gaaacagucgcagaaacga

SEQ ID NO: 307584 - RNA, 19 nt, Homo sapiens
  misc_RNA (1)...(19): siRNA sense strand
agauggaaccugacaaugu

SEQ ID NO: 307585 - RNA, 19 nt, Homo sapiens
  misc_RNA (1)...(19): siRNA sense strand
ugaagcaucucaucuauua

SEQ ID NO: 307586 - RNA, 19 nt, Homo sapiens
  misc_RNA (1)...(19): siRNA sense strand
gcagauggauugcaguaua

SEQ ID NO: 307587 - RNA, 19 nt, Homo sapiens
  misc_RNA (1)...(19): siRNA sense strand
gaagauaacugaugcuuac

SEQ ID NO: 307588 - RNA, 19 nt, Homo sapiens
  misc_RNA (1)...(19): siRNA sense strand
caaaugacuuucucaguuu

SEQ ID NO: 307589 - RNA, 19 nt, Homo sapiens
  misc_RNA (1)...(19): siRNA sense strand
ggaagaagcuaacuaaugc

SEQ ID NO: 307590 - RNA, 19 nt, Homo sapiens
  misc_RNA (1)...(19): siRNA sense strand
caacauagccgacuacaug

SEQ ID NO: 307591 - RNA, 19 nt, Homo sapiens
  misc_RNA (1)...(19): siRNA sense strand
ggacuuaugucagguguuu

SEQ ID NO: 307592 - RNA, 19 nt, Homo sapiens
  misc_RNA (1)...(19): siRNA sense strand
gauaagggcuggcguguca

SEQ ID NO: 307593 - RNA, 19 nt, Homo sapiens
  misc_RNA (1)...(19): siRNA sense strand
ccaaaugacuuucucaguu

SEQ ID NO: 307594 - RNA, 19 nt, Homo sapiens
  misc_RNA (1)...(19): siRNA sense strand
gaacagacgccugacuuua

SEQ ID NO: 307595 - RNA, 19 nt, Homo sapiens
  misc_RNA (1)...(19): siRNA sense strand
ccauugaccuggccuauaa

SEQ ID NO: 307596 - RNA, 19 nt, Homo sapiens
  misc_RNA (1)...(19): siRNA sense strand
ccaagaaugugcuuaagaa

SEQ ID NO: 307597 - RNA, 19 nt, Homo sapiens
  misc_RNA (1)...(19): siRNA sense strand
gcaaggaccugaagcaucu

SEQ ID NO: 307598 - RNA, 19 nt, Homo sapiens
  misc_RNA (1)...(19): siRNA sense strand
gaagggaacuugacaacca

SEQ ID NO: 307599 - RNA, 19 nt, Homo sapiens
  misc_RNA (1)...(19): siRNA sense strand
gagauccgcugcauuguga

SEQ ID NO: 307600 - RNA, 19 nt, Homo sapiens
  misc_RNA (1)...(19): siRNA sense strand
gaugaagacuggaaugaau

SEQ ID NO: 307601 - RNA, 19 nt, Homo sapiens
  misc_RNA (1)...(19): siRNA sense strand
ccacaucacuggagccauu

SEQ ID NO: 307602 - RNA, 19 nt, Homo sapiens
  misc_RNA (1)...(19): siRNA sense strand
caauguauauguaggcuuu

SEQ ID NO: 307603 - RNA, 19 nt, Homo sapiens
  misc_RNA (1)...(19): siRNA sense strand
ggacuaugcugacaacauc

SEQ ID NO: 307604 - RNA, 19 nt, Homo sapiens
  misc_RNA (1)...(19): siRNA sense strand
agaaugagguuacuaagga

SEQ ID NO: 307605 - RNA, 19 nt, Homo sapiens
  misc_RNA (1)...(19): siRNA sense strand
ggacgggccuuacaucaca

SEQ ID NO: 307606 - RNA, 19 nt, Homo sapiens
  misc_RNA (1)...(19): siRNA sense strand
gaagauccaugagagcauu

SEQ ID NO: 307607 - RNA, 19 nt, Homo sapiens
  misc_RNA (1)...(19): siRNA sense strand
ggagaaagcucgaaaaugg

SEQ ID NO: 307608 - RNA, 19 nt, Homo sapiens
  misc_RNA (1)...(19): siRNA sense strand
ugacagacuugguggauga

SEQ ID NO: 307609 - RNA, 19 nt, Homo sapiens
  misc_RNA (1)...(19): siRNA sense strand
agaaugugcuuaagaaguu

SEQ ID NO: 307610 - RNA, 19 nt, Homo sapiens
  misc_RNA (1)...(19): siRNA sense strand
cagcaagccucucauacaa

SEQ ID NO: 307611 - RNA, 19 nt, Homo sapiens
  misc_RNA (1)...(19): siRNA sense strand
gaagauguaugagaagauc

SEQ ID NO: 307612 - RNA, 19 nt, Homo sapiens
  misc_RNA (1)...(19): siRNA sense strand
ccagacaagacuacuauua

SEQ ID NO: 307613 - RNA, 19 nt, Homo sapiens
  misc_RNA (1)...(19): siRNA sense strand
gcaagccucucauacaaca

SEQ ID NO: 307614 - RNA, 19 nt, Homo sapiens
  misc_RNA (1)...(19): siRNA sense strand
ucaauacccucuuccagaa

SEQ ID NO: 307615 - RNA, 19 nt, Homo sapiens
  misc_RNA (1)...(19): siRNA sense strand
uagaagaccuagaagauuc

SEQ ID NO: 307616 - RNA, 19 nt, Homo sapiens
  misc_RNA (1)...(19): siRNA sense strand
gggcagcugugaugcauga

SEQ ID NO: 307617 - RNA, 19 nt, Homo sapiens
  misc_RNA (1)...(19): siRNA sense strand
gagcauuguuauggacuua

SEQ ID NO: 307618 - RNA, 19 nt, Homo sapiens
  misc_RNA (1)...(19): siRNA sense strand
aaacaucguuggcuauaau

SEQ ID NO: 307619 - RNA, 19 nt, Homo sapiens
  misc_RNA (1)...(19): siRNA sense strand
gagauucccugggucauug

SEQ ID NO: 307620 - RNA, 19 nt, Homo sapiens
  misc_RNA (1)...(19): siRNA sense strand
gcacaggcccucucacuuc

SEQ ID NO: 307621 - RNA, 19 nt, Homo sapiens
  misc_RNA (1)...(19): siRNA sense strand
gaacuauggugagcucuuc

SEQ ID NO: 307622 - RNA, 19 nt, Homo sapiens
  misc_RNA (1)...(19): siRNA sense strand
gcaccaccacccagaaaua

SEQ ID NO: 307623 - RNA, 19 nt, Homo sapiens
  misc_RNA (1)...(19): siRNA sense strand
gagaagauguaugagaaga

SEQ ID NO: 307624 - RNA, 19 nt, Homo sapiens
  misc_RNA (1)...(19): siRNA sense strand
ggaugaugaugaggaauuu

SEQ ID NO: 307625 - RNA, 19 nt, Homo sapiens
  misc_RNA (1)...(19): siRNA sense strand
gaacacacacucuuuaagg

SEQ ID NO: 307626 - RNA, 19 nt, Homo sapiens
  misc_RNA (1)...(19): siRNA sense strand
gaagaagaccagcucauuc

SEQ ID NO: 307627 - RNA, 19 nt, Homo sapiens
  misc_RNA (1)...(19): siRNA sense strand
ggugauggauuugcuugua

SEQ ID NO: 307628 - RNA, 19 nt, Homo sapiens
  misc_RNA (1)...(19): siRNA sense strand
gaaagaaagaaaucucguu

SEQ ID NO: 307629 - RNA, 19 nt, Homo sapiens
  misc_RNA (1)...(19): siRNA sense strand
gaacguggcaucacugaca

SEQ ID NO: 307630 - RNA, 19 nt, Homo sapiens
  misc_RNA (1)...(19): siRNA sense strand
gagagcgaguucauugauu

SEQ ID NO: 307631 - RNA, 19 nt, Homo sapiens
  misc_RNA (1)...(19): siRNA sense strand
agaauaugauccuucgaua

SEQ ID NO: 307632 - RNA, 19 nt, Homo sapiens
  misc_RNA (1)...(19): siRNA sense strand
ugacgggcauguaucgaua

SEQ ID NO: 307633 - RNA, 19 nt, Homo sapiens
  misc_RNA (1)...(19): siRNA sense strand
gaaguuccgccaugacaaa

SEQ ID NO: 307634 - RNA, 19 nt, Homo sapiens
  misc_RNA (1)...(19): siRNA sense strand
gaacaacgaucgggcaaaa

SEQ ID NO: 307635 - RNA, 19 nt, Homo sapiens
  misc_RNA (1)...(19): siRNA sense strand
ggaacuugaugcacuggaa

SEQ ID NO: 307636 - RNA, 19 nt, Homo sapiens
  misc_RNA (1)...(19): siRNA sense strand
guauauauuugcccauguu

SEQ ID NO: 307637 - RNA, 19 nt, Homo sapiens
  misc_RNA (1)...(19): siRNA sense strand
gaaguucugcguuugacua

SEQ ID NO: 307638 - RNA, 19 nt, Homo sapiens
  misc_RNA (1)...(19): siRNA sense strand
ggauugcaguauauauuug

SEQ ID NO: 307639 - RNA, 19 nt, Homo sapiens
  misc_RNA (1)...(19): siRNA sense strand
gaaggcgagugcaauguca

SEQ ID NO: 307640 - RNA, 19 nt, Homo sapiens
  misc_RNA (1)...(19): siRNA sense strand
caacaugaaauaugagcua

SEQ ID NO: 307641 - RNA, 19 nt, Homo sapiens
  misc_RNA (1)...(19): siRNA sense strand
ucuggaaccugaacaacua

SEQ ID NO: 307642 - RNA, 19 nt, Homo sapiens
  misc_RNA (1)...(19): siRNA sense strand
caucucaucuauuaucguu

SEQ ID NO: 307643 - RNA, 19 nt, Homo sapiens
  misc_RNA (1)...(19): siRNA sense strand
gcucaagacuauuucaucu

SEQ ID NO: 307644 - RNA, 19 nt, Homo sapiens
  misc_RNA (1)...(19): siRNA sense strand
gggcagcuguuccucaaga

SEQ ID NO: 307645 - RNA, 19 nt, Homo sapiens
  misc_RNA (1)...(19): siRNA sense strand
ggagccaucuucaucuuca

SEQ ID NO: 307646 - RNA, 19 nt, Homo sapiens
  misc_RNA (1)...(19): siRNA sense strand
gauaggaggcauuucaaga

SEQ ID NO: 307647 - RNA, 19 nt, Homo sapiens
  misc_RNA (1)...(19): siRNA sense strand
caacggagccaucuucauc

SEQ ID NO: 307648 - RNA, 19 nt, Homo sapiens
  misc_RNA (1)...(19): siRNA sense strand
ggcacacacuggcuuauga

SEQ ID NO: 307649 - RNA, 19 nt, Homo sapiens
  misc_RNA (1)...(19): siRNA sense strand
ccagacacguaucaagauu

SEQ ID NO: 307650 - RNA, 19 nt, Homo sapiens
  misc_RNA (1)...(19): siRNA sense strand
gacaugaaccauacgaauu

SEQ ID NO: 307651 - RNA, 19 nt, Homo sapiens
  misc_RNA (1)...(19): siRNA sense strand
ccaccucguuccaguauau

SEQ ID NO: 307652 - RNA, 19 nt, Homo sapiens
  misc_RNA (1)...(19): siRNA sense strand
caccucaccugguaccaua

SEQ ID NO: 307653 - RNA, 19 nt, Homo sapiens
  misc_RNA (1)...(19): siRNA sense strand
caacuacuucuaccuguuu

SEQ ID NO: 307654 - RNA, 19 nt, Homo sapiens
  misc_RNA (1)...(19): siRNA sense strand
gaccaacacugcccacuac

SEQ ID NO: 307655 - RNA, 19 nt, Homo sapiens
  misc_RNA (1)...(19): siRNA sense strand
caacuaccguacagacaug

SEQ ID NO: 307656 - RNA, 19 nt, Homo sapiens
  misc_RNA (1)...(19): siRNA sense strand
gcgcacagcucaguguuuc

SEQ ID NO: 307657 - RNA, 19 nt, Homo sapiens
  misc_RNA (1)...(19): siRNA sense strand
caccuccacugcuuguuua

SEQ ID NO: 307658 - RNA, 19 nt, Homo sapiens
  misc_RNA (1)...(19): siRNA sense strand
gauuaagccugcagacaca

SEQ ID NO: 307659 - RNA, 19 nt, Homo sapiens
  misc_RNA (1)...(19): siRNA sense strand
gcauugaguucauggaucu

SEQ ID NO: 307660 - RNA, 19 nt, Homo sapiens
  misc_RNA (1)...(19): siRNA sense strand
ggaggcauuucaagagaau

SEQ ID NO: 307661 - RNA, 19 nt, Homo sapiens
  misc_RNA (1)...(19): siRNA sense strand
caagacuacuauuacagaa

SEQ ID NO: 307662 - RNA, 19 nt, Homo sapiens
  misc_RNA (1)...(19): siRNA sense strand
ccacugagccuuauuuguc

SEQ ID NO: 307663 - RNA, 19 nt, Homo sapiens
  misc_RNA (1)...(19): siRNA sense strand
aggagaagcugcaggagaa

SEQ ID NO: 307664 - RNA, 19 nt, Homo sapiens
  misc_RNA (1)...(19): siRNA sense strand
gaaauugagacaguacaaa

SEQ ID NO: 307665 - RNA, 19 nt, Homo sapiens
  misc_RNA (1)...(19): siRNA sense strand
ggacaugaaccauacgaau

SEQ ID NO: 307666 - RNA, 19 nt, Homo sapiens
  misc_RNA (1)...(19): siRNA sense strand
gggucaauguggauuauga

SEQ ID NO: 307667 - RNA, 19 nt, Homo sapiens
  misc_RNA (1)...(19): siRNA sense strand
caacaagcauggcgaugag

SEQ ID NO: 307668 - RNA, 19 nt, Homo sapiens
  misc_RNA (1)...(19): siRNA sense strand
agacaagacuacuauuaca

SEQ ID NO: 307669 - RNA, 19 nt, Homo sapiens
  misc_RNA (1)...(19): siRNA sense strand
gcagcaagccucucauaca

SEQ ID NO: 307670 - RNA, 19 nt, Homo sapiens
  misc_RNA (1)...(19): siRNA sense strand
gcaaugucaugcuggaauc

SEQ ID NO: 307671 - RNA, 19 nt, Homo sapiens
  misc_RNA (1)...(19): siRNA sense strand
caaagacaguaacaaagca

SEQ ID NO: 307672 - RNA, 19 nt, Homo sapiens
  misc_RNA (1)...(19): siRNA sense strand
cagauggauugcaguauau

SEQ ID NO: 307673 - RNA, 19 nt, Homo sapiens
  misc_RNA (1)...(19): siRNA sense strand
gauccugacuugccagcuu

SEQ ID NO: 307674 - RNA, 19 nt, Homo sapiens
  misc_RNA (1)...(19): siRNA sense strand
guaccauacucccaauguu

SEQ ID NO: 307675 - RNA, 19 nt, Homo sapiens
  misc_RNA (1)...(19): siRNA sense strand
ccaaauugcaggauaccua

SEQ ID NO: 307676 - RNA, 19 nt, Homo sapiens
  misc_RNA (1)...(19): siRNA sense strand
gggcccaaauugcaggaua

SEQ ID NO: 307677 - RNA, 19 nt, Homo sapiens
  misc_RNA (1)...(19): siRNA sense strand
gggccaaguuccuggacua

SEQ ID NO: 307678 - RNA, 19 nt, Homo sapiens
  misc_RNA (1)...(19): siRNA sense strand
cagaaauacuggauugaca

SEQ ID NO: 307679 - RNA, 19 nt, Homo sapiens
  misc_RNA (1)...(19): siRNA sense strand
gaucguggcauuccucgaa

SEQ ID NO: 307680 - RNA, 19 nt, Homo sapiens
  misc_RNA (1)...(19): siRNA sense strand
gccaagcgcuaugcagaaa

SEQ ID NO: 307681 - RNA, 19 nt, Homo sapiens
  misc_RNA (1)...(19): siRNA sense strand
gaacaacgucgucaucaac

SEQ ID NO: 307682 - RNA, 19 nt, Homo sapiens
  misc_RNA (1)...(19): siRNA sense strand
uauaaggacaugaaccaua

SEQ ID NO: 307683 - RNA, 19 nt, Homo sapiens
  misc_RNA (1)...(19): siRNA sense strand
ccaagauugugaauaagug

SEQ ID NO: 307684 - RNA, 19 nt, Homo sapiens
  misc_RNA (1)...(19): siRNA sense strand
caucagaggccugcaguuu

SEQ ID NO: 307685 - RNA, 19 nt, Homo sapiens
  misc_RNA (1)...(19): siRNA sense strand
gcagugagcuggacaaguc

SEQ ID NO: 307686 - RNA, 19 nt, Homo sapiens
  misc_RNA (1)...(19): siRNA sense strand
ggaagacgguucugaucaa

SEQ ID NO: 307687 - RNA, 19 nt, Homo sapiens
  misc_RNA (1)...(19): siRNA sense strand
gaacuagagcgcaagauug

SEQ ID NO: 307688 - RNA, 19 nt, Homo sapiens
  misc_RNA (1)...(19): siRNA sense strand
ggaacuagagcgcaagauu

SEQ ID NO: 307689 - RNA, 19 nt, Homo sapiens
  misc_RNA (1)...(19): siRNA sense strand
ugacagagucccagaagga

SEQ ID NO: 307690 - RNA, 19 nt, Homo sapiens
  misc_RNA (1)...(19): siRNA sense strand
gaagacgguucugaucaag

SEQ ID NO: 307691 - RNA, 19 nt, Homo sapiens
  misc_RNA (1)...(19): siRNA sense strand
uugagucucugauggauga

SEQ ID NO: 307692 - RNA, 19 nt, Homo sapiens
  misc_RNA (1)...(19): siRNA sense strand
cgccagauccagagucuaa

SEQ ID NO: 307693 - RNA, 19 nt, Homo sapiens
  misc_RNA (1)...(19): siRNA sense strand
caagauugagucucugaug

SEQ ID NO: 307694 - RNA, 19 nt, Homo sapiens
  misc_RNA (1)...(19): siRNA sense strand
gcggaggagugguacaagu

SEQ ID NO: 307695 - RNA, 19 nt, Homo sapiens
  misc_RNA (1)...(19): siRNA sense strand
acaucgagaucgccaccua

SEQ ID NO: 307696 - RNA, 19 nt, Homo sapiens
  misc_RNA (1)...(19): siRNA sense strand
guucugaucaagaccauug

SEQ ID NO: 307697 - RNA, 19 nt, Homo sapiens
  misc_RNA (1)...(19): siRNA sense strand
gauugagucucugauggau

SEQ ID NO: 307698 - RNA, 19 nt, Homo sapiens
  misc_RNA (1)...(19): siRNA sense strand
agaaggagcagcgcaguga

SEQ ID NO: 307699 - RNA, 19 nt, Homo sapiens
  misc_RNA (1)...(19): siRNA sense strand
caagucuucugcccacagu

SEQ ID NO: 307700 - RNA, 19 nt, Homo sapiens
  misc_RNA (1)...(19): siRNA sense strand
agucuucugcccacaguua

SEQ ID NO: 307701 - RNA, 19 nt, Homo sapiens
  misc_RNA (1)...(19): siRNA sense strand
ccaagcaggagaugaacga

SEQ ID NO: 307702 - RNA, 19 nt, Homo sapiens
  misc_RNA (1)...(19): siRNA sense strand
caucgagaagguacgcuuu

SEQ ID NO: 307703 - RNA, 19 nt, Homo sapiens
  misc_RNA (1)...(19): siRNA sense strand
ucuuuugccuccuuaaaua

SEQ ID NO: 307704 - RNA, 19 nt, Homo sapiens
  misc_RNA (1)...(19): siRNA sense strand
aacuagagcgcaagauuga

SEQ ID NO: 307705 - RNA, 19 nt, Homo sapiens
  misc_RNA (1)...(19): siRNA sense strand
cggaagacgguucugauca

SEQ ID NO: 307706 - RNA, 19 nt, Homo sapiens
  misc_RNA (1)...(19): siRNA sense strand
agacgguucugaucaagac

SEQ ID NO: 307707 - RNA, 19 nt, Homo sapiens
  misc_RNA (1)...(19): siRNA sense strand
gacgccagauccagagucu

SEQ ID NO: 307708 - RNA, 19 nt, Homo sapiens
  misc_RNA (1)...(19): siRNA sense strand
ucgccaacuucaucgagaa

SEQ ID NO: 307709 - RNA, 19 nt, Homo sapiens
  misc_RNA (1)...(19): siRNA sense strand
gcuccucaacgucaagaug

SEQ ID NO: 307710 - RNA, 19 nt, Homo sapiens
  misc_RNA (1)...(19): siRNA sense strand
uggaugagauugaguuccu

SEQ ID NO: 307711 - RNA, 19 nt, Homo sapiens
  misc_RNA (1)...(19): siRNA sense strand
gaagaccucuguaccaaga

SEQ ID NO: 307712 - RNA, 19 nt, Homo sapiens
  misc_RNA (1)...(19): siRNA sense strand
acacucaaaucucuaagua

SEQ ID NO: 307713 - RNA, 19 nt, Homo sapiens
  misc_RNA (1)...(19): siRNA sense strand
ggaagaaacagcaggagaa

SEQ ID NO: 307714 - RNA, 19 nt, Homo sapiens
  misc_RNA (1)...(19): siRNA sense strand
gcagauaccucggauugag

SEQ ID NO: 307715 - RNA, 19 nt, Homo sapiens
  misc_RNA (1)...(19): siRNA sense strand
gaagauuucugagcuggau

SEQ ID NO: 307716 - RNA, 19 nt, Homo sapiens
  misc_RNA (1)...(19): siRNA sense strand
gaaagaggagcggaagaaa

SEQ ID NO: 307717 - RNA, 19 nt, Homo sapiens
  misc_RNA (1)...(19): siRNA sense strand
uuucugagcuggaugcauu

SEQ ID NO: 307718 - RNA, 19 nt, Homo sapiens
  misc_RNA (1)...(19): siRNA sense strand
gugaagaccucuguaccaa

SEQ ID NO: 307719 - RNA, 19 nt, Homo sapiens
  misc_RNA (1)...(19): siRNA sense strand
gaaggaagacaaggaugaa

SEQ ID NO: 307720 - RNA, 19 nt, Homo sapiens
  misc_RNA (1)...(19): siRNA sense strand
gaacugcaaugaaaagauc

SEQ ID NO: 307721 - RNA, 19 nt, Homo sapiens
  misc_RNA (1)...(19): siRNA sense strand
gaagguguuugagcugaug

SEQ ID NO: 307722 - RNA, 19 nt, Homo sapiens
  misc_RNA (1)...(19): siRNA sense strand
agaaacagcaggagaagga

SEQ ID NO: 307723 - RNA, 19 nt, Homo sapiens
  misc_RNA (1)...(19): siRNA sense strand
ucaaggagaaagagaaaga

SEQ ID NO: 307724 - RNA, 19 nt, Homo sapiens
  misc_RNA (1)...(19): siRNA sense strand
ggagaaggaagacaaggau

SEQ ID NO: 307725 - RNA, 19 nt, Homo sapiens
  misc_RNA (1)...(19): siRNA sense strand
gaagaaacagcaggagaag

SEQ ID NO: 307726 - RNA, 19 nt, Homo sapiens
  misc_RNA (1)...(19): siRNA sense strand
ggagauccgcaaugcuuau

SEQ ID NO: 307727 - RNA, 19 nt, Homo sapiens
  misc_RNA (1)...(19): siRNA sense strand
ugaccagccuccacaccaa

SEQ ID NO: 307728 - RNA, 19 nt, Homo sapiens
  misc_RNA (1)...(19): siRNA sense strand
gaguggcuguccaggagaa

SEQ ID NO: 307729 - RNA, 19 nt, Homo sapiens
  misc_RNA (1)...(19): siRNA sense strand
agaaggaagacaaggauga

SEQ ID NO: 307730 - RNA, 19 nt, Homo sapiens
  misc_RNA (1)...(19): siRNA sense strand
aagccaagguggauguguu

SEQ ID NO: 307731 - RNA, 19 nt, Homo sapiens
  misc_RNA (1)...(19): siRNA sense strand
agaaagaggagcggaagaa

SEQ ID NO: 307732 - RNA, 19 nt, Homo sapiens
  misc_RNA (1)...(19): siRNA sense strand
aagaggagcggaagaaaca

SEQ ID NO: 307733 - RNA, 19 nt, Homo sapiens
  misc_RNA (1)...(19): siRNA sense strand
ugagaucaaggaugucauu

SEQ ID NO: 307734 - RNA, 19 nt, Homo sapiens
  misc_RNA (1)...(19): siRNA sense strand
ggauugaggaugguaacaa

SEQ ID NO: 307735 - RNA, 19 nt, Homo sapiens
  misc_RNA (1)...(19): siRNA sense strand
guggauguguuucgugaag

SEQ ID NO: 307736 - RNA, 19 nt, Homo sapiens
  misc_RNA (1)...(19): siRNA sense strand
ggagcuauuuccccaagaa

SEQ ID NO: 307737 - RNA, 19 nt, Homo sapiens
  misc_RNA (1)...(19): siRNA sense strand
uugaggaugguaacaauuu

SEQ ID NO: 307738 - RNA, 19 nt, Homo sapiens
  misc_RNA (1)...(19): siRNA sense strand
agccugagaucaaggaugu

SEQ ID NO: 307739 - RNA, 19 nt, Homo sapiens
  misc_RNA (1)...(19): siRNA sense strand
gagaaagaggagcggaaga

SEQ ID NO: 307740 - RNA, 19 nt, Homo sapiens
  misc_RNA (1)...(19): siRNA sense strand
ucucuaaguauuucucuga

SEQ ID NO: 307741 - RNA, 19 nt, Homo sapiens
  misc_RNA (1)...(19): siRNA sense strand
cugcagauaccucggauug

SEQ ID NO: 307742 - RNA, 19 nt, Homo sapiens
  misc_RNA (1)...(19): siRNA sense strand
gaaacagcaggagaaggaa

SEQ ID NO: 307743 - RNA, 19 nt, Homo sapiens
  misc_RNA (1)...(19): siRNA sense strand
guggugaugcagugacuaa

SEQ ID NO: 307744 - RNA, 19 nt, Homo sapiens
  misc_RNA (1)...(19): siRNA sense strand
ggauguguuucgugaagac

SEQ ID NO: 307745 - RNA, 19 nt, Homo sapiens
  misc_RNA (1)...(19): siRNA sense strand
caagguggauguguuucgu

SEQ ID NO: 307746 - RNA, 19 nt, Homo sapiens
  misc_RNA (1)...(19): siRNA sense strand
agacaaggaugaaaagaag

SEQ ID NO: 307747 - RNA, 19 nt, Homo sapiens
  misc_RNA (1)...(19): siRNA sense strand
ggacaucccagugccugau

SEQ ID NO: 307748 - RNA, 19 nt, Homo sapiens
  misc_RNA (1)...(19): siRNA sense strand
gugaugcagugacuaaagc

SEQ ID NO: 307749 - RNA, 19 nt, Homo sapiens
  misc_RNA (1)...(19): siRNA sense strand
gcaggagaaggaagacaag

SEQ ID NO: 307750 - RNA, 19 nt, Homo sapiens
  misc_RNA (1)...(19): siRNA sense strand
aaagggaaugaucuauuga

SEQ ID NO: 307751 - RNA, 19 nt, Homo sapiens
  misc_RNA (1)...(19): siRNA sense strand
ucauggagauccgcaaugc

SEQ ID NO: 307752 - RNA, 19 nt, Homo sapiens
  misc_RNA (1)...(19): siRNA sense strand
ggaggaugaagacaaaggu

SEQ ID NO: 307753 - RNA, 19 nt, Homo sapiens
  misc_RNA (1)...(19): siRNA sense strand
ugacuaaagcagccaagca

SEQ ID NO: 307754 - RNA, 19 nt, Homo sapiens
  misc_RNA (1)...(19): siRNA sense strand
ggugaugcagugacuaaag

SEQ ID NO: 307755 - RNA, 19 nt, Homo sapiens
  misc_RNA (1)...(19): siRNA sense strand
uggagauccgcaaugcuua

SEQ ID NO: 307756 - RNA, 19 nt, Homo sapiens
  misc_RNA (1)...(19): siRNA sense strand
gagaucaaggaugucauug

SEQ ID NO: 307757 - RNA, 19 nt, Homo sapiens
  misc_RNA (1)...(19): siRNA sense strand
ggucauggagauccgcaau

SEQ ID NO: 307758 - RNA, 19 nt, Homo sapiens
  misc_RNA (1)...(19): siRNA sense strand
gaagaccucuguaccaaga

SEQ ID NO: 307759 - RNA, 19 nt, Homo sapiens
  misc_RNA (1)...(19): siRNA sense strand
acacucaaaucucuaagua

SEQ ID NO: 307760 - RNA, 19 nt, Homo sapiens
  misc_RNA (1)...(19): siRNA sense strand
ggaagaaacagcaggagaa

SEQ ID NO: 307761 - RNA, 19 nt, Homo sapiens
  misc_RNA (1)...(19): siRNA sense strand
gcagauaccucggauugag

SEQ ID NO: 307762 - RNA, 19 nt, Homo sapiens
  misc_RNA (1)...(19): siRNA sense strand
gaagauuucugagcuggau

SEQ ID NO: 307763 - RNA, 19 nt, Homo sapiens
  misc_RNA (1)...(19): siRNA sense strand
gaaagaggagcggaagaaa

SEQ ID NO: 307764 - RNA, 19 nt, Homo sapiens
  misc_RNA (1)...(19): siRNA sense strand
uuucugagcuggaugcauu

SEQ ID NO: 307765 - RNA, 19 nt, Homo sapiens
  misc_RNA (1)...(19): siRNA sense strand
gugaagaccucuguaccaa

SEQ ID NO: 307766 - RNA, 19 nt, Homo sapiens
  misc_RNA (1)...(19): siRNA sense strand
gaaggaagacaaggaugaa

SEQ ID NO: 307767 - RNA, 19 nt, Homo sapiens
  misc_RNA (1)...(19): siRNA sense strand
gaacugcaaugaaaagauc

SEQ ID NO: 307768 - RNA, 19 nt, Homo sapiens
  misc_RNA (1)...(19): siRNA sense strand
gaagguguuugagcugaug

SEQ ID NO: 307769 - RNA, 19 nt, Homo sapiens
  misc_RNA (1)...(19): siRNA sense strand
agaaacagcaggagaagga

SEQ ID NO: 307770 - RNA, 19 nt, Homo sapiens
  misc_RNA (1)...(19): siRNA sense strand
ucaaggagaaagagaaaga

SEQ ID NO: 307771 - RNA, 19 nt, Homo sapiens
  misc_RNA (1)...(19): siRNA sense strand
ggagaaggaagacaaggau

SEQ ID NO: 307772 - RNA, 19 nt, Homo sapiens
  misc_RNA (1)...(19): siRNA sense strand
gaagaaacagcaggagaag

SEQ ID NO: 307773 - RNA, 19 nt, Homo sapiens
  misc_RNA (1)...(19): siRNA sense strand
ggagauccgcaaugcuuau

SEQ ID NO: 307774 - RNA, 19 nt, Homo sapiens
  misc_RNA (1)...(19): siRNA sense strand
ugaccagccuccacaccaa

SEQ ID NO: 307775 - RNA, 19 nt, Homo sapiens
  misc_RNA (1)...(19): siRNA sense strand
gaguggcuguccaggagaa

SEQ ID NO: 307776 - RNA, 19 nt, Homo sapiens
  misc_RNA (1)...(19): siRNA sense strand
agaaggaagacaaggauga

SEQ ID NO: 307777 - RNA, 19 nt, Homo sapiens
  misc_RNA (1)...(19): siRNA sense strand
aagccaagguggauguguu

SEQ ID NO: 307778 - RNA, 19 nt, Homo sapiens
  misc_RNA (1)...(19): siRNA sense strand
agaaagaggagcggaagaa

SEQ ID NO: 307779 - RNA, 19 nt, Homo sapiens
  misc_RNA (1)...(19): siRNA sense strand
aagaggagcggaagaaaca

SEQ ID NO: 307780 - RNA, 19 nt, Homo sapiens
  misc_RNA (1)...(19): siRNA sense strand
ugagaucaaggaugucauu

SEQ ID NO: 307781 - RNA, 19 nt, Homo sapiens
  misc_RNA (1)...(19): siRNA sense strand
ggauugaggaugguaacaa

SEQ ID NO: 307782 - RNA, 19 nt, Homo sapiens
  misc_RNA (1)...(19): siRNA sense strand
guggauguguuucgugaag

SEQ ID NO: 307783 - RNA, 19 nt, Homo sapiens
  misc_RNA (1)...(19): siRNA sense strand
ggagcuauuuccccaagaa

SEQ ID NO: 307784 - RNA, 19 nt, Homo sapiens
  misc_RNA (1)...(19): siRNA sense strand
uugaggaugguaacaauuu

SEQ ID NO: 307785 - RNA, 19 nt, Homo sapiens
  misc_RNA (1)...(19): siRNA sense strand
agccugagaucaaggaugu

SEQ ID NO: 307786 - RNA, 19 nt, Homo sapiens
  misc_RNA (1)...(19): siRNA sense strand
gagaaagaggagcggaaga

SEQ ID NO: 307787 - RNA, 19 nt, Homo sapiens
  misc_RNA (1)...(19): siRNA sense strand
ucucuaaguauuucucuga

SEQ ID NO: 307788 - RNA, 19 nt, Homo sapiens
  misc_RNA (1)...(19): siRNA sense strand
cugcagauaccucggauug

SEQ ID NO: 307789 - RNA, 19 nt, Homo sapiens
  misc_RNA (1)...(19): siRNA sense strand
gaaacagcaggagaaggaa

SEQ ID NO: 307790 - RNA, 19 nt, Homo sapiens
  misc_RNA (1)...(19): siRNA sense strand
guggugaugcagugacuaa

SEQ ID NO: 307791 - RNA, 19 nt, Homo sapiens
  misc_RNA (1)...(19): siRNA sense strand
ggauguguuucgugaagac

SEQ ID NO: 307792 - RNA, 19 nt, Homo sapiens
  misc_RNA (1)...(19): siRNA sense strand
caagguggauguguuucgu

SEQ ID NO: 307793 - RNA, 19 nt, Homo sapiens
  misc_RNA (1)...(19): siRNA sense strand
agacaaggaugaaaagaag

SEQ ID NO: 307794 - RNA, 19 nt, Homo sapiens
  misc_RNA (1)...(19): siRNA sense strand
ggacaucccagugccugau

SEQ ID NO: 307795 - RNA, 19 nt, Homo sapiens
  misc_RNA (1)...(19): siRNA sense strand
gugaugcagugacuaaagc

SEQ ID NO: 307796 - RNA, 19 nt, Homo sapiens
  misc_RNA (1)...(19): siRNA sense strand
gcaggagaaggaagacaag

SEQ ID NO: 307797 - RNA, 19 nt, Homo sapiens
  misc_RNA (1)...(19): siRNA sense strand
ucauggagauccgcaaugc

SEQ ID NO: 307798 - RNA, 19 nt, Homo sapiens
  misc_RNA (1)...(19): siRNA sense strand
ggaggaugaagacaaaggu

SEQ ID NO: 307799 - RNA, 19 nt, Homo sapiens
  misc_RNA (1)...(19): siRNA sense strand
ugacuaaagcagccaagca

SEQ ID NO: 307800 - RNA, 19 nt, Homo sapiens
  misc_RNA (1)...(19): siRNA sense strand
ggugaugcagugacuaaag

SEQ ID NO: 307801 - RNA, 19 nt, Homo sapiens
  misc_RNA (1)...(19): siRNA sense strand
uggagauccgcaaugcuua

SEQ ID NO: 307802 - RNA, 19 nt, Homo sapiens
  misc_RNA (1)...(19): siRNA sense strand
gagaucaaggaugucauug

SEQ ID NO: 307803 - RNA, 19 nt, Homo sapiens
  misc_RNA (1)...(19): siRNA sense strand
ggucauggagauccgcaau

SEQ ID NO: 307804 - RNA, 19 nt, Homo sapiens
  misc_RNA (1)...(19): siRNA sense strand
gauguuaucuugaaaguga

SEQ ID NO: 307805 - RNA, 19 nt, Homo sapiens
  misc_RNA (1)...(19): siRNA sense strand
gaaggcaacuuaauuaauc

SEQ ID NO: 307806 - RNA, 19 nt, Homo sapiens
  misc_RNA (1)...(19): siRNA sense strand
gaaagaagaaccaaagaaa

SEQ ID NO: 307807 - RNA, 19 nt, Homo sapiens
  misc_RNA (1)...(19): siRNA sense strand
gaacaaaccaugaagauuc

SEQ ID NO: 307808 - RNA, 19 nt, Homo sapiens
  misc_RNA (1)...(19): siRNA sense strand
gaagaaauaugggcuguau

SEQ ID NO: 307809 - RNA, 19 nt, Homo sapiens
  misc_RNA (1)...(19): siRNA sense strand
ggaaagaagaguucguuua

SEQ ID NO: 307810 - RNA, 19 nt, Homo sapiens
  misc_RNA (1)...(19): siRNA sense strand
gaagguggcuauaucaaug

SEQ ID NO: 307811 - RNA, 19 nt, Homo sapiens
  misc_RNA (1)...(19): siRNA sense strand
cagaucagcuuuccuguaa

SEQ ID NO: 307812 - RNA, 19 nt, Homo sapiens
  misc_RNA (1)...(19): siRNA sense strand
gcauugaugugcuuucuaa

SEQ ID NO: 307813 - RNA, 19 nt, Homo sapiens
  misc_RNA (1)...(19): siRNA sense strand
gccaaagacugacagaaua

SEQ ID NO: 307814 - RNA, 19 nt, Homo sapiens
  misc_RNA (1)...(19): siRNA sense strand
gaaguagaacuccucauua

SEQ ID NO: 307815 - RNA, 19 nt, Homo sapiens
  misc_RNA (1)...(19): siRNA sense strand
gaauggagccucuuugaaa

SEQ ID NO: 307816 - RNA, 19 nt, Homo sapiens
  misc_RNA (1)...(19): siRNA sense strand
gaagaugugacacuuguua

SEQ ID NO: 307817 - RNA, 19 nt, Homo sapiens
  misc_RNA (1)...(19): siRNA sense strand
ccaagaagcugaaguuauc

SEQ ID NO: 307818 - RNA, 19 nt, Homo sapiens
  misc_RNA (1)...(19): siRNA sense strand
caacucaggucaaagacua

SEQ ID NO: 307819 - RNA, 19 nt, Homo sapiens
  misc_RNA (1)...(19): siRNA sense strand
caugaugacucaagaagua

SEQ ID NO: 307820 - RNA, 19 nt, Homo sapiens
  misc_RNA (1)...(19): siRNA sense strand
caucagaccuuucuuaaca

SEQ ID NO: 307821 - RNA, 19 nt, Homo sapiens
  misc_RNA (1)...(19): siRNA sense strand
gcaaugacccuugaagaua

SEQ ID NO: 307822 - RNA, 19 nt, Homo sapiens
  misc_RNA (1)...(19): siRNA sense strand
gaagagagaacagaagaua

SEQ ID NO: 307823 - RNA, 19 nt, Homo sapiens
  misc_RNA (1)...(19): siRNA sense strand
gaugaaaccuuaagucaag

SEQ ID NO: 307824 - RNA, 19 nt, Homo sapiens
  misc_RNA (1)...(19): siRNA sense strand
ucaaagaggucugcuguuu

SEQ ID NO: 307825 - RNA, 19 nt, Homo sapiens
  misc_RNA (1)...(19): siRNA sense strand
ccucagagccaaccuauua

SEQ ID NO: 307826 - RNA, 19 nt, Homo sapiens
  misc_RNA (1)...(19): siRNA sense strand
gaaggaagaacagauauaa

SEQ ID NO: 307827 - RNA, 19 nt, Homo sapiens
  misc_RNA (1)...(19): siRNA sense strand
gcccuuggcuucaucauuu

SEQ ID NO: 307828 - RNA, 19 nt, Homo sapiens
  misc_RNA (1)...(19): siRNA sense strand
gcuaucaagucauccuuua

SEQ ID NO: 307829 - RNA, 19 nt, Homo sapiens
  misc_RNA (1)...(19): siRNA sense strand
gaauggcugugaagaauau

SEQ ID NO: 307830 - RNA, 19 nt, Homo sapiens
  misc_RNA (1)...(19): siRNA sense strand
gcaaacauaucaaauucga

SEQ ID NO: 307831 - RNA, 19 nt, Homo sapiens
  misc_RNA (1)...(19): siRNA sense strand
cauaguaucuucaccagaa

SEQ ID NO: 307832 - RNA, 19 nt, Homo sapiens
  misc_RNA (1)...(19): siRNA sense strand
gacagaggaucaauauauu

SEQ ID NO: 307833 - RNA, 19 nt, Homo sapiens
  misc_RNA (1)...(19): siRNA sense strand
gagaauugguuguuauguu

SEQ ID NO: 307834 - RNA, 19 nt, Homo sapiens
  misc_RNA (1)...(19): siRNA sense strand
gggaacugcuccagaagua

SEQ ID NO: 307835 - RNA, 19 nt, Homo sapiens
  misc_RNA (1)...(19): siRNA sense strand
uaacagagcauuagacaug

SEQ ID NO: 307836 - RNA, 19 nt, Homo sapiens
  misc_RNA (1)...(19): siRNA sense strand
gaagagacaguuacaguga

SEQ ID NO: 307837 - RNA, 19 nt, Homo sapiens
  misc_RNA (1)...(19): siRNA sense strand
ccagguacauuaaagauga

SEQ ID NO: 307838 - RNA, 19 nt, Homo sapiens
  misc_RNA (1)...(19): siRNA sense strand
ccaugaagauucugauaaa

SEQ ID NO: 307839 - RNA, 19 nt, Homo sapiens
  misc_RNA (1)...(19): siRNA sense strand
gaagacugaugaugaugaa

SEQ ID NO: 307840 - RNA, 19 nt, Homo sapiens
  misc_RNA (1)...(19): siRNA sense strand
uaacuucucucucagaugu

SEQ ID NO: 307841 - RNA, 19 nt, Homo sapiens
  misc_RNA (1)...(19): siRNA sense strand
gaaguuaucagaagagaga

SEQ ID NO: 307842 - RNA, 19 nt, Homo sapiens
  misc_RNA (1)...(19): siRNA sense strand
gaagaugacauuuaugaug

SEQ ID NO: 307843 - RNA, 19 nt, Homo sapiens
  misc_RNA (1)...(19): siRNA sense strand
ggaaguagaacuccucauu

SEQ ID NO: 307844 - RNA, 19 nt, Homo sapiens
  misc_RNA (1)...(19): siRNA sense strand
gaacugaccugugauacca

SEQ ID NO: 307845 - RNA, 19 nt, Homo sapiens
  misc_RNA (1)...(19): siRNA sense strand
uagcuacccucaaagauaa

SEQ ID NO: 307846 - RNA, 19 nt, Homo sapiens
  misc_RNA (1)...(19): siRNA sense strand
aaagaugaaugggaaguua

SEQ ID NO: 307847 - RNA, 19 nt, Homo sapiens
  misc_RNA (1)...(19): siRNA sense strand
gcaagacagugcuauagau

SEQ ID NO: 307848 - RNA, 19 nt, Homo sapiens
  misc_RNA (1)...(19): siRNA sense strand
ccaaagccacuguuaauuu

SEQ ID NO: 307849 - RNA, 19 nt, Homo sapiens
  misc_RNA (1)...(19): siRNA sense strand
caaccaagaugcccaagau

SEQ ID NO: 307850 - RNA, 19 nt, Homo sapiens
  misc_RNA (1)...(19): siRNA sense strand
cuaaggagcuggagaaucu

SEQ ID NO: 307851 - RNA, 19 nt, Homo sapiens
  misc_RNA (1)...(19): siRNA sense strand
cuaguucgauggauaagua

SEQ ID NO: 307852 - RNA, 19 nt, Homo sapiens
  misc_RNA (1)...(19): siRNA sense strand
cagcaaacauaucaaauuc

SEQ ID NO: 307853 - RNA, 19 nt, Homo sapiens
  misc_RNA (1)...(19): siRNA sense strand
caucaaagauacacaagau

SEQ ID NO: 307854 - RNA, 19 nt, Homo sapiens
  misc_RNA (1)...(19): siRNA sense strand
gaucauuccuuucugacaa

SEQ ID NO: 307855 - RNA, 19 nt, Homo sapiens
  misc_RNA (1)...(19): siRNA sense strand
ggaaguauagccuuggaua

SEQ ID NO: 307856 - RNA, 19 nt, Homo sapiens
  misc_RNA (1)...(19): siRNA sense strand
uaagagaaauugcccuaga

SEQ ID NO: 307857 - RNA, 19 nt, Homo sapiens
  misc_RNA (1)...(19): siRNA sense strand
uggacgaguucuagaauua

SEQ ID NO: 307858 - RNA, 19 nt, Homo sapiens
  misc_RNA (1)...(19): siRNA sense strand
gaaaacaacucaggucaaa

SEQ ID NO: 307859 - RNA, 19 nt, Homo sapiens
  misc_RNA (1)...(19): siRNA sense strand
gugaauacauccaacaaga

SEQ ID NO: 307860 - RNA, 19 nt, Homo sapiens
  misc_RNA (1)...(19): siRNA sense strand
uaacaaagggcuuaguaaa

SEQ ID NO: 307861 - RNA, 19 nt, Homo sapiens
  misc_RNA (1)...(19): siRNA sense strand
caaugacccuugaagauau

SEQ ID NO: 307862 - RNA, 19 nt, Homo sapiens
  misc_RNA (1)...(19): siRNA sense strand
gaaagaagaguucguuuac

SEQ ID NO: 307863 - RNA, 19 nt, Homo sapiens
  misc_RNA (1)...(19): siRNA sense strand
gagaagaagucacaaacag

SEQ ID NO: 307864 - RNA, 19 nt, Homo sapiens
  misc_RNA (1)...(19): siRNA sense strand
ggaaagaagaaccaaagaa

SEQ ID NO: 307865 - RNA, 19 nt, Homo sapiens
  misc_RNA (1)...(19): siRNA sense strand
gaagaguucguuuacauug

SEQ ID NO: 307866 - RNA, 19 nt, Homo sapiens
  misc_RNA (1)...(19): siRNA sense strand
ccaggucaaugguuucuuu

SEQ ID NO: 307867 - RNA, 19 nt, Homo sapiens
  misc_RNA (1)...(19): siRNA sense strand
cgagaucgauugcgaggaa

SEQ ID NO: 307868 - RNA, 19 nt, Homo sapiens
  misc_RNA (1)...(19): siRNA sense strand
auacacgggugccaacuua

SEQ ID NO: 307869 - RNA, 19 nt, Homo sapiens
  misc_RNA (1)...(19): siRNA sense strand
aaagaggucugcuguuuca

SEQ ID NO: 307870 - RNA, 19 nt, Homo sapiens
  misc_RNA (1)...(19): siRNA sense strand
gaacuccucauuacccuaa

SEQ ID NO: 307871 - RNA, 19 nt, Homo sapiens
  misc_RNA (1)...(19): siRNA sense strand
gaagauaccauuuguacca

SEQ ID NO: 307872 - RNA, 19 nt, Homo sapiens
  misc_RNA (1)...(19): siRNA sense strand
ucaagaagauaccauuugu

SEQ ID NO: 307873 - RNA, 19 nt, Homo sapiens
  misc_RNA (1)...(19): siRNA sense strand
gaacugcuccagaaguauu

SEQ ID NO: 307874 - RNA, 19 nt, Homo sapiens
  misc_RNA (1)...(19): siRNA sense strand
caaagaagaguuacccaaa

SEQ ID NO: 307875 - RNA, 19 nt, Homo sapiens
  misc_RNA (1)...(19): siRNA sense strand
acaaagggcuuaguaaauc

SEQ ID NO: 307876 - RNA, 19 nt, Homo sapiens
  misc_RNA (1)...(19): siRNA sense strand
gacugaugaugaugaaaua

SEQ ID NO: 307877 - RNA, 19 nt, Homo sapiens
  misc_RNA (1)...(19): siRNA sense strand
caaaggcaaucagagaauu

SEQ ID NO: 307878 - RNA, 19 nt, Homo sapiens
  misc_RNA (1)...(19): siRNA sense strand
guggaaacacugagaaaua

SEQ ID NO: 307879 - RNA, 19 nt, Homo sapiens
  misc_RNA (1)...(19): siRNA sense strand
caaaggugaucgcguccua

SEQ ID NO: 307880 - RNA, 19 nt, Homo sapiens
  misc_RNA (1)...(19): siRNA sense strand
gauaacagcuuggggauaa

SEQ ID NO: 307881 - RNA, 19 nt, Homo sapiens
  misc_RNA (1)...(19): siRNA sense strand
aagaagaguuacccaaauu

SEQ ID NO: 307882 - RNA, 19 nt, Homo sapiens
  misc_RNA (1)...(19): siRNA sense strand
cgaaggaaaguaaacauaa

SEQ ID NO: 307883 - RNA, 19 nt, Homo sapiens
  misc_RNA (1)...(19): siRNA sense strand
gaaacagccaugacucaaa

SEQ ID NO: 307884 - RNA, 19 nt, Homo sapiens
  misc_RNA (1)...(19): siRNA sense strand
gaucagcuuuccuguaaca

SEQ ID NO: 307885 - RNA, 19 nt, Homo sapiens
  misc_RNA (1)...(19): siRNA sense strand
gaguggagaagaugacuua

SEQ ID NO: 307886 - RNA, 19 nt, Homo sapiens
  misc_RNA (1)...(19): siRNA sense strand
gcacaaguacuuccaaaca

SEQ ID NO: 307887 - RNA, 19 nt, Homo sapiens
  misc_RNA (1)...(19): siRNA sense strand
gacaaucuccaacaucuaa

SEQ ID NO: 307888 - RNA, 19 nt, Homo sapiens
  misc_RNA (1)...(19): siRNA sense strand
gaaucuuccucuucaguga

SEQ ID NO: 307889 - RNA, 19 nt, Homo sapiens
  misc_RNA (1)...(19): siRNA sense strand
cauggugugucuuacuuua

SEQ ID NO: 307890 - RNA, 19 nt, Homo sapiens
  misc_RNA (1)...(19): siRNA sense strand
ugaugagacuuccuuauug

SEQ ID NO: 307891 - RNA, 19 nt, Homo sapiens
  misc_RNA (1)...(19): siRNA sense strand
caggagagacugccacaua

SEQ ID NO: 307892 - RNA, 19 nt, Homo sapiens
  misc_RNA (1)...(19): siRNA sense strand
agacagaggaucaauauau

SEQ ID NO: 307893 - RNA, 19 nt, Homo sapiens
  misc_RNA (1)...(19): siRNA sense strand
aaagaagacugaugaugau

SEQ ID NO: 307894 - RNA, 19 nt, Homo sapiens
  misc_RNA (1)...(19): siRNA sense strand
ggaaguuaacagagcauua

SEQ ID NO: 307895 - RNA, 19 nt, Homo sapiens
  misc_RNA (1)...(19): siRNA sense strand
gaaaggaugcacugugaug

SEQ ID NO: 307896 - RNA, 19 nt, Homo sapiens
  misc_RNA (1)...(19): siRNA sense strand
gauaaccgaaggaaaguaa

SEQ ID NO: 307897 - RNA, 19 nt, Homo sapiens
  misc_RNA (1)...(19): siRNA sense strand
gcaagauacucagauggaa

SEQ ID NO: 307898 - RNA, 19 nt, Homo sapiens
  misc_RNA (1)...(19): siRNA sense strand
gacuggaacugaccuguga

SEQ ID NO: 307899 - RNA, 19 nt, Homo sapiens
  misc_RNA (1)...(19): siRNA sense strand
aaacaacaauggucagcaa

SEQ ID NO: 307900 - RNA, 19 nt, Homo sapiens
  misc_RNA (1)...(19): siRNA sense strand
gaagucauaucugcucuca

SEQ ID NO: 307901 - RNA, 19 nt, Homo sapiens
  misc_RNA (1)...(19): siRNA sense strand
caauggaguuagucuagaa

SEQ ID NO: 307902 - RNA, 19 nt, Homo sapiens
  misc_RNA (1)...(19): siRNA sense strand
ggagaaacuugauuuaucc

SEQ ID NO: 307903 - RNA, 19 nt, Homo sapiens
  misc_RNA (1)...(19): siRNA sense strand
gaaagucuccaagaauuau

SEQ ID NO: 307904 - RNA, 19 nt, Homo sapiens
  misc_RNA (1)...(19): siRNA sense strand
gauguuaucuugaaaguga

SEQ ID NO: 307905 - RNA, 19 nt, Homo sapiens
  misc_RNA (1)...(19): siRNA sense strand
gaaggcaacuuaauuaauc

SEQ ID NO: 307906 - RNA, 19 nt, Homo sapiens
  misc_RNA (1)...(19): siRNA sense strand
gaaagaagaaccaaagaaa

SEQ ID NO: 307907 - RNA, 19 nt, Homo sapiens
  misc_RNA (1)...(19): siRNA sense strand
gaacaaaccaugaagauuc

SEQ ID NO: 307908 - RNA, 19 nt, Homo sapiens
  misc_RNA (1)...(19): siRNA sense strand
gaagaaauaugggcuguau

SEQ ID NO: 307909 - RNA, 19 nt, Homo sapiens
  misc_RNA (1)...(19): siRNA sense strand
ggaaagaagaguucguuua

SEQ ID NO: 307910 - RNA, 19 nt, Homo sapiens
  misc_RNA (1)...(19): siRNA sense strand
gaagguggcuauaucaaug

SEQ ID NO: 307911 - RNA, 19 nt, Homo sapiens
  misc_RNA (1)...(19): siRNA sense strand
cagaucagcuuuccuguaa

SEQ ID NO: 307912 - RNA, 19 nt, Homo sapiens
  misc_RNA (1)...(19): siRNA sense strand
gcauugaugugcuuucuaa

SEQ ID NO: 307913 - RNA, 19 nt, Homo sapiens
  misc_RNA (1)...(19): siRNA sense strand
gccaaagacugacagaaua

SEQ ID NO: 307914 - RNA, 19 nt, Homo sapiens
  misc_RNA (1)...(19): siRNA sense strand
gaaguagaacuccucauua

SEQ ID NO: 307915 - RNA, 19 nt, Homo sapiens
  misc_RNA (1)...(19): siRNA sense strand
gaauggagccucuuugaaa

SEQ ID NO: 307916 - RNA, 19 nt, Homo sapiens
  misc_RNA (1)...(19): siRNA sense strand
gaagaugugacacuuguua

SEQ ID NO: 307917 - RNA, 19 nt, Homo sapiens
  misc_RNA (1)...(19): siRNA sense strand
ccaagaagcugaaguuauc

SEQ ID NO: 307918 - RNA, 19 nt, Homo sapiens
  misc_RNA (1)...(19): siRNA sense strand
caacucaggucaaagacua

SEQ ID NO: 307919 - RNA, 19 nt, Homo sapiens
  misc_RNA (1)...(19): siRNA sense strand
caugaugacucaagaagua

SEQ ID NO: 307920 - RNA, 19 nt, Homo sapiens
  misc_RNA (1)...(19): siRNA sense strand
caucagaccuuucuuaaca

SEQ ID NO: 307921 - RNA, 19 nt, Homo sapiens
  misc_RNA (1)...(19): siRNA sense strand
gcaaugacccuugaagaua

SEQ ID NO: 307922 - RNA, 19 nt, Homo sapiens
  misc_RNA (1)...(19): siRNA sense strand
gaagagagaacagaagaua

SEQ ID NO: 307923 - RNA, 19 nt, Homo sapiens
  misc_RNA (1)...(19): siRNA sense strand
gaugaaaccuuaagucaag

SEQ ID NO: 307924 - RNA, 19 nt, Homo sapiens
  misc_RNA (1)...(19): siRNA sense strand
ucaaagaggucugcuguuu

SEQ ID NO: 307925 - RNA, 19 nt, Homo sapiens
  misc_RNA (1)...(19): siRNA sense strand
ccucagagccaaccuauua

SEQ ID NO: 307926 - RNA, 19 nt, Homo sapiens
  misc_RNA (1)...(19): siRNA sense strand
gaaggaagaacagauauaa

SEQ ID NO: 307927 - RNA, 19 nt, Homo sapiens
  misc_RNA (1)...(19): siRNA sense strand
gcccuuggcuucaucauuu

SEQ ID NO: 307928 - RNA, 19 nt, Homo sapiens
  misc_RNA (1)...(19): siRNA sense strand
gcuaucaagucauccuuua

SEQ ID NO: 307929 - RNA, 19 nt, Homo sapiens
  misc_RNA (1)...(19): siRNA sense strand
gaauggcugugaagaauau

SEQ ID NO: 307930 - RNA, 19 nt, Homo sapiens
  misc_RNA (1)...(19): siRNA sense strand
gcaaacauaucaaauucga

SEQ ID NO: 307931 - RNA, 19 nt, Homo sapiens
  misc_RNA (1)...(19): siRNA sense strand
cauaguaucuucaccagaa

SEQ ID NO: 307932 - RNA, 19 nt, Homo sapiens
  misc_RNA (1)...(19): siRNA sense strand
gacagaggaucaauauauu

SEQ ID NO: 307933 - RNA, 19 nt, Homo sapiens
  misc_RNA (1)...(19): siRNA sense strand
gagaauugguuguuauguu

SEQ ID NO: 307934 - RNA, 19 nt, Homo sapiens
  misc_RNA (1)...(19): siRNA sense strand
gggaacugcuccagaagua

SEQ ID NO: 307935 - RNA, 19 nt, Homo sapiens
  misc_RNA (1)...(19): siRNA sense strand
uaacagagcauuagacaug

SEQ ID NO: 307936 - RNA, 19 nt, Homo sapiens
  misc_RNA (1)...(19): siRNA sense strand
gaagagacaguuacaguga

SEQ ID NO: 307937 - RNA, 19 nt, Homo sapiens
  misc_RNA (1)...(19): siRNA sense strand
ccagguacauuaaagauga

SEQ ID NO: 307938 - RNA, 19 nt, Homo sapiens
  misc_RNA (1)...(19): siRNA sense strand
ccaugaagauucugauaaa

SEQ ID NO: 307939 - RNA, 19 nt, Homo sapiens
  misc_RNA (1)...(19): siRNA sense strand
gaagacugaugaugaugaa

SEQ ID NO: 307940 - RNA, 19 nt, Homo sapiens
  misc_RNA (1)...(19): siRNA sense strand
uaacuucucucucagaugu

SEQ ID NO: 307941 - RNA, 19 nt, Homo sapiens
  misc_RNA (1)...(19): siRNA sense strand
gaaguuaucagaagagaga

SEQ ID NO: 307942 - RNA, 19 nt, Homo sapiens
  misc_RNA (1)...(19): siRNA sense strand
gaagaugacauuuaugaug

SEQ ID NO: 307943 - RNA, 19 nt, Homo sapiens
  misc_RNA (1)...(19): siRNA sense strand
ggaaguagaacuccucauu

SEQ ID NO: 307944 - RNA, 19 nt, Homo sapiens
  misc_RNA (1)...(19): siRNA sense strand
gaacugaccugugauacca

SEQ ID NO: 307945 - RNA, 19 nt, Homo sapiens
  misc_RNA (1)...(19): siRNA sense strand
uagcuacccucaaagauaa

SEQ ID NO: 307946 - RNA, 19 nt, Homo sapiens
  misc_RNA (1)...(19): siRNA sense strand
aaagaugaaugggaaguua

SEQ ID NO: 307947 - RNA, 19 nt, Homo sapiens
  misc_RNA (1)...(19): siRNA sense strand
gcaagacagugcuauagau

SEQ ID NO: 307948 - RNA, 19 nt, Homo sapiens
  misc_RNA (1)...(19): siRNA sense strand
ccaaagccacuguuaauuu

SEQ ID NO: 307949 - RNA, 19 nt, Homo sapiens
  misc_RNA (1)...(19): siRNA sense strand
caaccaagaugcccaagau

SEQ ID NO: 307950 - RNA, 19 nt, Homo sapiens
  misc_RNA (1)...(19): siRNA sense strand
cuaaggagcuggagaaucu

SEQ ID NO: 307951 - RNA, 19 nt, Homo sapiens
  misc_RNA (1)...(19): siRNA sense strand
cuaguucgauggauaagua

SEQ ID NO: 307952 - RNA, 19 nt, Homo sapiens
  misc_RNA (1)...(19): siRNA sense strand
cagcaaacauaucaaauuc

SEQ ID NO: 307953 - RNA, 19 nt, Homo sapiens
  misc_RNA (1)...(19): siRNA sense strand
caucaaagauacacaagau

SEQ ID NO: 307954 - RNA, 19 nt, Homo sapiens
  misc_RNA (1)...(19): siRNA sense strand
gaucauuccuuucugacaa

SEQ ID NO: 307955 - RNA, 19 nt, Homo sapiens
  misc_RNA (1)...(19): siRNA sense strand
ggaaguauagccuuggaua

SEQ ID NO: 307956 - RNA, 19 nt, Homo sapiens
  misc_RNA (1)...(19): siRNA sense strand
uaagagaaauugcccuaga

SEQ ID NO: 307957 - RNA, 19 nt, Homo sapiens
  misc_RNA (1)...(19): siRNA sense strand
uggacgaguucuagaauua

SEQ ID NO: 307958 - RNA, 19 nt, Homo sapiens
  misc_RNA (1)...(19): siRNA sense strand
gaaaacaacucaggucaaa

SEQ ID NO: 307959 - RNA, 19 nt, Homo sapiens
  misc_RNA (1)...(19): siRNA sense strand
gugaauacauccaacaaga

SEQ ID NO: 307960 - RNA, 19 nt, Homo sapiens
  misc_RNA (1)...(19): siRNA sense strand
uaacaaagggcuuaguaaa

SEQ ID NO: 307961 - RNA, 19 nt, Homo sapiens
  misc_RNA (1)...(19): siRNA sense strand
caaugacccuugaagauau

SEQ ID NO: 307962 - RNA, 19 nt, Homo sapiens
  misc_RNA (1)...(19): siRNA sense strand
gaaagaagaguucguuuac

SEQ ID NO: 307963 - RNA, 19 nt, Homo sapiens
  misc_RNA (1)...(19): siRNA sense strand
gagaagaagucacaaacag

SEQ ID NO: 307964 - RNA, 19 nt, Homo sapiens
  misc_RNA (1)...(19): siRNA sense strand
ggaaagaagaaccaaagaa

SEQ ID NO: 307965 - RNA, 19 nt, Homo sapiens
  misc_RNA (1)...(19): siRNA sense strand
gaagaguucguuuacauug

SEQ ID NO: 307966 - RNA, 19 nt, Homo sapiens
  misc_RNA (1)...(19): siRNA sense strand
ccaggucaaugguuucuuu

SEQ ID NO: 307967 - RNA, 19 nt, Homo sapiens
  misc_RNA (1)...(19): siRNA sense strand
cgagaucgauugcgaggaa

SEQ ID NO: 307968 - RNA, 19 nt, Homo sapiens
  misc_RNA (1)...(19): siRNA sense strand
auacacgggugccaacuua

SEQ ID NO: 307969 - RNA, 19 nt, Homo sapiens
  misc_RNA (1)...(19): siRNA sense strand
aaagaggucugcuguuuca

SEQ ID NO: 307970 - RNA, 19 nt, Homo sapiens
  misc_RNA (1)...(19): siRNA sense strand
gaacuccucauuacccuaa

SEQ ID NO: 307971 - RNA, 19 nt, Homo sapiens
  misc_RNA (1)...(19): siRNA sense strand
gaagauaccauuuguacca

SEQ ID NO: 307972 - RNA, 19 nt, Homo sapiens
  misc_RNA (1)...(19): siRNA sense strand
ucaagaagauaccauuugu

SEQ ID NO: 307973 - RNA, 19 nt, Homo sapiens
  misc_RNA (1)...(19): siRNA sense strand
gaacugcuccagaaguauu

SEQ ID NO: 307974 - RNA, 19 nt, Homo sapiens
  misc_RNA (1)...(19): siRNA sense strand
caaagaagaguuacccaaa

SEQ ID NO: 307975 - RNA, 19 nt, Homo sapiens
  misc_RNA (1)...(19): siRNA sense strand
acaaagggcuuaguaaauc

SEQ ID NO: 307976 - RNA, 19 nt, Homo sapiens
  misc_RNA (1)...(19): siRNA sense strand
gacugaugaugaugaaaua

SEQ ID NO: 307977 - RNA, 19 nt, Homo sapiens
  misc_RNA (1)...(19): siRNA sense strand
caaaggcaaucagagaauu

SEQ ID NO: 307978 - RNA, 19 nt, Homo sapiens
  misc_RNA (1)...(19): siRNA sense strand
guggaaacacugagaaaua

SEQ ID NO: 307979 - RNA, 19 nt, Homo sapiens
  misc_RNA (1)...(19): siRNA sense strand
caaaggugaucgcguccua

SEQ ID NO: 307980 - RNA, 19 nt, Homo sapiens
  misc_RNA (1)...(19): siRNA sense strand
gauaacagcuuggggauaa

SEQ ID NO: 307981 - RNA, 19 nt, Homo sapiens
  misc_RNA (1)...(19): siRNA sense strand
aagaagaguuacccaaauu

SEQ ID NO: 307982 - RNA, 19 nt, Homo sapiens
  misc_RNA (1)...(19): siRNA sense strand
cgaaggaaaguaaacauaa

SEQ ID NO: 307983 - RNA, 19 nt, Homo sapiens
  misc_RNA (1)...(19): siRNA sense strand
gaaacagccaugacucaaa

SEQ ID NO: 307984 - RNA, 19 nt, Homo sapiens
  misc_RNA (1)...(19): siRNA sense strand
gaucagcuuuccuguaaca

SEQ ID NO: 307985 - RNA, 19 nt, Homo sapiens
  misc_RNA (1)...(19): siRNA sense strand
gaguggagaagaugacuua

SEQ ID NO: 307986 - RNA, 19 nt, Homo sapiens
  misc_RNA (1)...(19): siRNA sense strand
gcacaaguacuuccaaaca

SEQ ID NO: 307987 - RNA, 19 nt, Homo sapiens
  misc_RNA (1)...(19): siRNA sense strand
gacaaucuccaacaucuaa

SEQ ID NO: 307988 - RNA, 19 nt, Homo sapiens
  misc_RNA (1)...(19): siRNA sense strand
gaaucuuccucuucaguga

SEQ ID NO: 307989 - RNA, 19 nt, Homo sapiens
  misc_RNA (1)...(19): siRNA sense strand
cauggugugucuuacuuua

SEQ ID NO: 307990 - RNA, 19 nt, Homo sapiens
  misc_RNA (1)...(19): siRNA sense strand
ugaugagacuuccuuauug

SEQ ID NO: 307991 - RNA, 19 nt, Homo sapiens
  misc_RNA (1)...(19): siRNA sense strand
caggagagacugccacaua

SEQ ID NO: 307992 - RNA, 19 nt, Homo sapiens
  misc_RNA (1)...(19): siRNA sense strand
agacagaggaucaauauau

SEQ ID NO: 307993 - RNA, 19 nt, Homo sapiens
  misc_RNA (1)...(19): siRNA sense strand
aaagaagacugaugaugau

SEQ ID NO: 307994 - RNA, 19 nt, Homo sapiens
  misc_RNA (1)...(19): siRNA sense strand
ggaaguuaacagagcauua

SEQ ID NO: 307995 - RNA, 19 nt, Homo sapiens
  misc_RNA (1)...(19): siRNA sense strand
gaaaggaugcacugugaug

SEQ ID NO: 307996 - RNA, 19 nt, Homo sapiens
  misc_RNA (1)...(19): siRNA sense strand
gauaaccgaaggaaaguaa

SEQ ID NO: 307997 - RNA, 19 nt, Homo sapiens
  misc_RNA (1)...(19): siRNA sense strand
gcaagauacucagauggaa

SEQ ID NO: 307998 - RNA, 19 nt, Homo sapiens
  misc_RNA (1)...(19): siRNA sense strand
gacuggaacugaccuguga

SEQ ID NO: 307999 - RNA, 19 nt, Homo sapiens
  misc_RNA (1)...(19): siRNA sense strand
aaacaacaauggucagcaa

SEQ ID NO: 308000 - RNA, 19 nt, Homo sapiens
  misc_RNA (1)...(19): siRNA sense strand
gaagucauaucugcucuca

SEQ ID NO: 308001 - RNA, 19 nt, Homo sapiens
  misc_RNA (1)...(19): siRNA sense strand
caauggaguuagucuagaa

SEQ ID NO: 308002 - RNA, 19 nt, Homo sapiens
  misc_RNA (1)...(19): siRNA sense strand
ggagaaacuugauuuaucc

SEQ ID NO: 308003 - RNA, 19 nt, Homo sapiens
  misc_RNA (1)...(19): siRNA sense strand
gaaagucuccaagaauuau

SEQ ID NO: 308004 - RNA, 19 nt, Homo sapiens
  misc_RNA (1)...(19): siRNA sense strand
gauguuaucuugaaaguga

SEQ ID NO: 308005 - RNA, 19 nt, Homo sapiens
  misc_RNA (1)...(19): siRNA sense strand
gaaggcaacuuaauuaauc

SEQ ID NO: 308006 - RNA, 19 nt, Homo sapiens
  misc_RNA (1)...(19): siRNA sense strand
gaaagaagaaccaaagaaa

SEQ ID NO: 308007 - RNA, 19 nt, Homo sapiens
  misc_RNA (1)...(19): siRNA sense strand
gaacaaaccaugaagauuc

SEQ ID NO: 308008 - RNA, 19 nt, Homo sapiens
  misc_RNA (1)...(19): siRNA sense strand
gaagaaauaugggcuguau

SEQ ID NO: 308009 - RNA, 19 nt, Homo sapiens
  misc_RNA (1)...(19): siRNA sense strand
ggaaagaagaguucguuua

SEQ ID NO: 308010 - RNA, 19 nt, Homo sapiens
  misc_RNA (1)...(19): siRNA sense strand
gaagguggcuauaucaaug

SEQ ID NO: 308011 - RNA, 19 nt, Homo sapiens
  misc_RNA (1)...(19): siRNA sense strand
cagaucagcuuuccuguaa

SEQ ID NO: 308012 - RNA, 19 nt, Homo sapiens
  misc_RNA (1)...(19): siRNA sense strand
gcauugaugugcuuucuaa

SEQ ID NO: 308013 - RNA, 19 nt, Homo sapiens
  misc_RNA (1)...(19): siRNA sense strand
gccaaagacugacagaaua

SEQ ID NO: 308014 - RNA, 19 nt, Homo sapiens
  misc_RNA (1)...(19): siRNA sense strand
gaaguagaacuccucauua

SEQ ID NO: 308015 - RNA, 19 nt, Homo sapiens
  misc_RNA (1)...(19): siRNA sense strand
gaauggagccucuuugaaa

SEQ ID NO: 308016 - RNA, 19 nt, Homo sapiens
  misc_RNA (1)...(19): siRNA sense strand
gaagaugugacacuuguua

SEQ ID NO: 308017 - RNA, 19 nt, Homo sapiens
  misc_RNA (1)...(19): siRNA sense strand
ccaagaagcugaaguuauc

SEQ ID NO: 308018 - RNA, 19 nt, Homo sapiens
  misc_RNA (1)...(19): siRNA sense strand
caacucaggucaaagacua

SEQ ID NO: 308019 - RNA, 19 nt, Homo sapiens
  misc_RNA (1)...(19): siRNA sense strand
caugaugacucaagaagua

SEQ ID NO: 308020 - RNA, 19 nt, Homo sapiens
  misc_RNA (1)...(19): siRNA sense strand
caucagaccuuucuuaaca

SEQ ID NO: 308021 - RNA, 19 nt, Homo sapiens
  misc_RNA (1)...(19): siRNA sense strand
gcaaugacccuugaagaua

SEQ ID NO: 308022 - RNA, 19 nt, Homo sapiens
  misc_RNA (1)...(19): siRNA sense strand
gaagagagaacagaagaua

SEQ ID NO: 308023 - RNA, 19 nt, Homo sapiens
  misc_RNA (1)...(19): siRNA sense strand
gaugaaaccuuaagucaag

SEQ ID NO: 308024 - RNA, 19 nt, Homo sapiens
  misc_RNA (1)...(19): siRNA sense strand
ucaaagaggucugcuguuu

SEQ ID NO: 308025 - RNA, 19 nt, Homo sapiens
  misc_RNA (1)...(19): siRNA sense strand
ccucagagccaaccuauua

SEQ ID NO: 308026 - RNA, 19 nt, Homo sapiens
  misc_RNA (1)...(19): siRNA sense strand
gaaggaagaacagauauaa

SEQ ID NO: 308027 - RNA, 19 nt, Homo sapiens
  misc_RNA (1)...(19): siRNA sense strand
gcccuuggcuucaucauuu

SEQ ID NO: 308028 - RNA, 19 nt, Homo sapiens
  misc_RNA (1)...(19): siRNA sense strand
gcuaucaagucauccuuua

SEQ ID NO: 308029 - RNA, 19 nt, Homo sapiens
  misc_RNA (1)...(19): siRNA sense strand
gaauggcugugaagaauau

SEQ ID NO: 308030 - RNA, 19 nt, Homo sapiens
  misc_RNA (1)...(19): siRNA sense strand
gcaaacauaucaaauucga

SEQ ID NO: 308031 - RNA, 19 nt, Homo sapiens
  misc_RNA (1)...(19): siRNA sense strand
cauaguaucuucaccagaa

SEQ ID NO: 308032 - RNA, 19 nt, Homo sapiens
  misc_RNA (1)...(19): siRNA sense strand
gacagaggaucaauauauu

SEQ ID NO: 308033 - RNA, 19 nt, Homo sapiens
  misc_RNA (1)...(19): siRNA sense strand
gagaauugguuguuauguu

SEQ ID NO: 308034 - RNA, 19 nt, Homo sapiens
  misc_RNA (1)...(19): siRNA sense strand
gggaacugcuccagaagua

SEQ ID NO: 308035 - RNA, 19 nt, Homo sapiens
  misc_RNA (1)...(19): siRNA sense strand
uaacagagcauuagacaug

SEQ ID NO: 308036 - RNA, 19 nt, Homo sapiens
  misc_RNA (1)...(19): siRNA sense strand
gaagagacaguuacaguga

SEQ ID NO: 308037 - RNA, 19 nt, Homo sapiens
  misc_RNA (1)...(19): siRNA sense strand
ccagguacauuaaagauga

SEQ ID NO: 308038 - RNA, 19 nt, Homo sapiens
  misc_RNA (1)...(19): siRNA sense strand
ccaugaagauucugauaaa

SEQ ID NO: 308039 - RNA, 19 nt, Homo sapiens
  misc_RNA (1)...(19): siRNA sense strand
gaagacugaugaugaugaa

SEQ ID NO: 308040 - RNA, 19 nt, Homo sapiens
  misc_RNA (1)...(19): siRNA sense strand
uaacuucucucucagaugu

SEQ ID NO: 308041 - RNA, 19 nt, Homo sapiens
  misc_RNA (1)...(19): siRNA sense strand
gaaguuaucagaagagaga

SEQ ID NO: 308042 - RNA, 19 nt, Homo sapiens
  misc_RNA (1)...(19): siRNA sense strand
gaagaugacauuuaugaug

SEQ ID NO: 308043 - RNA, 19 nt, Homo sapiens
  misc_RNA (1)...(19): siRNA sense strand
ggaaguagaacuccucauu

SEQ ID NO: 308044 - RNA, 19 nt, Homo sapiens
  misc_RNA (1)...(19): siRNA sense strand
gaacugaccugugauacca

SEQ ID NO: 308045 - RNA, 19 nt, Homo sapiens
  misc_RNA (1)...(19): siRNA sense strand
uagcuacccucaaagauaa

SEQ ID NO: 308046 - RNA, 19 nt, Homo sapiens
  misc_RNA (1)...(19): siRNA sense strand
aaagaugaaugggaaguua

SEQ ID NO: 308047 - RNA, 19 nt, Homo sapiens
  misc_RNA (1)...(19): siRNA sense strand
gcaagacagugcuauagau

SEQ ID NO: 308048 - RNA, 19 nt, Homo sapiens
  misc_RNA (1)...(19): siRNA sense strand
ccaaagccacuguuaauuu

SEQ ID NO: 308049 - RNA, 19 nt, Homo sapiens
  misc_RNA (1)...(19): siRNA sense strand
caaccaagaugcccaagau

SEQ ID NO: 308050 - RNA, 19 nt, Homo sapiens
  misc_RNA (1)...(19): siRNA sense strand
cuaaggagcuggagaaucu

SEQ ID NO: 308051 - RNA, 19 nt, Homo sapiens
  misc_RNA (1)...(19): siRNA sense strand
cuaguucgauggauaagua

SEQ ID NO: 308052 - RNA, 19 nt, Homo sapiens
  misc_RNA (1)...(19): siRNA sense strand
cagcaaacauaucaaauuc

SEQ ID NO: 308053 - RNA, 19 nt, Homo sapiens
  misc_RNA (1)...(19): siRNA sense strand
caucaaagauacacaagau

SEQ ID NO: 308054 - RNA, 19 nt, Homo sapiens
  misc_RNA (1)...(19): siRNA sense strand
gaucauuccuuucugacaa

SEQ ID NO: 308055 - RNA, 19 nt, Homo sapiens
  misc_RNA (1)...(19): siRNA sense strand
ggaaguauagccuuggaua

SEQ ID NO: 308056 - RNA, 19 nt, Homo sapiens
  misc_RNA (1)...(19): siRNA sense strand
uaagagaaauugcccuaga

SEQ ID NO: 308057 - RNA, 19 nt, Homo sapiens
  misc_RNA (1)...(19): siRNA sense strand
uggacgaguucuagaauua

SEQ ID NO: 308058 - RNA, 19 nt, Homo sapiens
  misc_RNA (1)...(19): siRNA sense strand
gaaaacaacucaggucaaa

SEQ ID NO: 308059 - RNA, 19 nt, Homo sapiens
  misc_RNA (1)...(19): siRNA sense strand
gugaauacauccaacaaga

SEQ ID NO: 308060 - RNA, 19 nt, Homo sapiens
  misc_RNA (1)...(19): siRNA sense strand
uaacaaagggcuuaguaaa

SEQ ID NO: 308061 - RNA, 19 nt, Homo sapiens
  misc_RNA (1)...(19): siRNA sense strand
caaugacccuugaagauau

SEQ ID NO: 308062 - RNA, 19 nt, Homo sapiens
  misc_RNA (1)...(19): siRNA sense strand
gaaagaagaguucguuuac

SEQ ID NO: 308063 - RNA, 19 nt, Homo sapiens
  misc_RNA (1)...(19): siRNA sense strand
gagaagaagucacaaacag

SEQ ID NO: 308064 - RNA, 19 nt, Homo sapiens
  misc_RNA (1)...(19): siRNA sense strand
ggaaagaagaaccaaagaa

SEQ ID NO: 308065 - RNA, 19 nt, Homo sapiens
  misc_RNA (1)...(19): siRNA sense strand
gaagaguucguuuacauug

SEQ ID NO: 308066 - RNA, 19 nt, Homo sapiens
  misc_RNA (1)...(19): siRNA sense strand
ccaggucaaugguuucuuu

SEQ ID NO: 308067 - RNA, 19 nt, Homo sapiens
  misc_RNA (1)...(19): siRNA sense strand
cgagaucgauugcgaggaa

SEQ ID NO: 308068 - RNA, 19 nt, Homo sapiens
  misc_RNA (1)...(19): siRNA sense strand
auacacgggugccaacuua

SEQ ID NO: 308069 - RNA, 19 nt, Homo sapiens
  misc_RNA (1)...(19): siRNA sense strand
aaagaggucugcuguuuca

SEQ ID NO: 308070 - RNA, 19 nt, Homo sapiens
  misc_RNA (1)...(19): siRNA sense strand
gaacuccucauuacccuaa

SEQ ID NO: 308071 - RNA, 19 nt, Homo sapiens
  misc_RNA (1)...(19): siRNA sense strand
gaagauaccauuuguacca

SEQ ID NO: 308072 - RNA, 19 nt, Homo sapiens
  misc_RNA (1)...(19): siRNA sense strand
ucaagaagauaccauuugu

SEQ ID NO: 308073 - RNA, 19 nt, Homo sapiens
  misc_RNA (1)...(19): siRNA sense strand
gaacugcuccagaaguauu

SEQ ID NO: 308074 - RNA, 19 nt, Homo sapiens
  misc_RNA (1)...(19): siRNA sense strand
caaagaagaguuacccaaa

SEQ ID NO: 308075 - RNA, 19 nt, Homo sapiens
  misc_RNA (1)...(19): siRNA sense strand
acaaagggcuuaguaaauc

SEQ ID NO: 308076 - RNA, 19 nt, Homo sapiens
  misc_RNA (1)...(19): siRNA sense strand
gacugaugaugaugaaaua

SEQ ID NO: 308077 - RNA, 19 nt, Homo sapiens
  misc_RNA (1)...(19): siRNA sense strand
caaaggcaaucagagaauu

SEQ ID NO: 308078 - RNA, 19 nt, Homo sapiens
  misc_RNA (1)...(19): siRNA sense strand
guggaaacacugagaaaua

SEQ ID NO: 308079 - RNA, 19 nt, Homo sapiens
  misc_RNA (1)...(19): siRNA sense strand
caaaggugaucgcguccua

SEQ ID NO: 308080 - RNA, 19 nt, Homo sapiens
  misc_RNA (1)...(19): siRNA sense strand
gauaacagcuuggggauaa

SEQ ID NO: 308081 - RNA, 19 nt, Homo sapiens
  misc_RNA (1)...(19): siRNA sense strand
aagaagaguuacccaaauu

SEQ ID NO: 308082 - RNA, 19 nt, Homo sapiens
  misc_RNA (1)...(19): siRNA sense strand
cgaaggaaaguaaacauaa

SEQ ID NO: 308083 - RNA, 19 nt, Homo sapiens
  misc_RNA (1)...(19): siRNA sense strand
gaaacagccaugacucaaa

SEQ ID NO: 308084 - RNA, 19 nt, Homo sapiens
  misc_RNA (1)...(19): siRNA sense strand
gaucagcuuuccuguaaca

SEQ ID NO: 308085 - RNA, 19 nt, Homo sapiens
  misc_RNA (1)...(19): siRNA sense strand
gaguggagaagaugacuua

SEQ ID NO: 308086 - RNA, 19 nt, Homo sapiens
  misc_RNA (1)...(19): siRNA sense strand
gcacaaguacuuccaaaca

SEQ ID NO: 308087 - RNA, 19 nt, Homo sapiens
  misc_RNA (1)...(19): siRNA sense strand
gacaaucuccaacaucuaa

SEQ ID NO: 308088 - RNA, 19 nt, Homo sapiens
  misc_RNA (1)...(19): siRNA sense strand
gaaucuuccucuucaguga

SEQ ID NO: 308089 - RNA, 19 nt, Homo sapiens
  misc_RNA (1)...(19): siRNA sense strand
cauggugugucuuacuuua

SEQ ID NO: 308090 - RNA, 19 nt, Homo sapiens
  misc_RNA (1)...(19): siRNA sense strand
ugaugagacuuccuuauug

SEQ ID NO: 308091 - RNA, 19 nt, Homo sapiens
  misc_RNA (1)...(19): siRNA sense strand
caggagagacugccacaua

SEQ ID NO: 308092 - RNA, 19 nt, Homo sapiens
  misc_RNA (1)...(19): siRNA sense strand
agacagaggaucaauauau

SEQ ID NO: 308093 - RNA, 19 nt, Homo sapiens
  misc_RNA (1)...(19): siRNA sense strand
aaagaagacugaugaugau

SEQ ID NO: 308094 - RNA, 19 nt, Homo sapiens
  misc_RNA (1)...(19): siRNA sense strand
ggaaguuaacagagcauua

SEQ ID NO: 308095 - RNA, 19 nt, Homo sapiens
  misc_RNA (1)...(19): siRNA sense strand
gaaaggaugcacugugaug

SEQ ID NO: 308096 - RNA, 19 nt, Homo sapiens
  misc_RNA (1)...(19): siRNA sense strand
gauaaccgaaggaaaguaa

SEQ ID NO: 308097 - RNA, 19 nt, Homo sapiens
  misc_RNA (1)...(19): siRNA sense strand
gcaagauacucagauggaa

SEQ ID NO: 308098 - RNA, 19 nt, Homo sapiens
  misc_RNA (1)...(19): siRNA sense strand
gacuggaacugaccuguga

SEQ ID NO: 308099 - RNA, 19 nt, Homo sapiens
  misc_RNA (1)...(19): siRNA sense strand
aaacaacaauggucagcaa

SEQ ID NO: 308100 - RNA, 19 nt, Homo sapiens
  misc_RNA (1)...(19): siRNA sense strand
gaagucauaucugcucuca

SEQ ID NO: 308101 - RNA, 19 nt, Homo sapiens
  misc_RNA (1)...(19): siRNA sense strand
caauggaguuagucuagaa

SEQ ID NO: 308102 - RNA, 19 nt, Homo sapiens
  misc_RNA (1)...(19): siRNA sense strand
ggagaaacuugauuuaucc

SEQ ID NO: 308103 - RNA, 19 nt, Homo sapiens
  misc_RNA (1)...(19): siRNA sense strand
gaaagucuccaagaauuau

SEQ ID NO: 308104 - RNA, 19 nt, Homo sapiens
  misc_RNA (1)...(19): siRNA sense strand
gauguuaucuugaaaguga

SEQ ID NO: 308105 - RNA, 19 nt, Homo sapiens
  misc_RNA (1)...(19): siRNA sense strand
gaaggcaacuuaauuaauc

SEQ ID NO: 308106 - RNA, 19 nt, Homo sapiens
  misc_RNA (1)...(19): siRNA sense strand
gaaagaagaaccaaagaaa

SEQ ID NO: 308107 - RNA, 19 nt, Homo sapiens
  misc_RNA (1)...(19): siRNA sense strand
gaacaaaccaugaagauuc

SEQ ID NO: 308108 - RNA, 19 nt, Homo sapiens
  misc_RNA (1)...(19): siRNA sense strand
gaagaaauaugggcuguau

SEQ ID NO: 308109 - RNA, 19 nt, Homo sapiens
  misc_RNA (1)...(19): siRNA sense strand
ggaaagaagaguucguuua

SEQ ID NO: 308110 - RNA, 19 nt, Homo sapiens
  misc_RNA (1)...(19): siRNA sense strand
gaagguggcuauaucaaug

SEQ ID NO: 308111 - RNA, 19 nt, Homo sapiens
  misc_RNA (1)...(19): siRNA sense strand
cagaucagcuuuccuguaa

SEQ ID NO: 308112 - RNA, 19 nt, Homo sapiens
  misc_RNA (1)...(19): siRNA sense strand
gcauugaugugcuuucuaa

SEQ ID NO: 308113 - RNA, 19 nt, Homo sapiens
  misc_RNA (1)...(19): siRNA sense strand
gccaaagacugacagaaua

SEQ ID NO: 308114 - RNA, 19 nt, Homo sapiens
  misc_RNA (1)...(19): siRNA sense strand
gaaguagaacuccucauua

SEQ ID NO: 308115 - RNA, 19 nt, Homo sapiens
  misc_RNA (1)...(19): siRNA sense strand
gaauggagccucuuugaaa

SEQ ID NO: 308116 - RNA, 19 nt, Homo sapiens
  misc_RNA (1)...(19): siRNA sense strand
gaagaugugacacuuguua

SEQ ID NO: 308117 - RNA, 19 nt, Homo sapiens
  misc_RNA (1)...(19): siRNA sense strand
ccaagaagcugaaguuauc

SEQ ID NO: 308118 - RNA, 19 nt, Homo sapiens
  misc_RNA (1)...(19): siRNA sense strand
caacucaggucaaagacua

SEQ ID NO: 308119 - RNA, 19 nt, Homo sapiens
  misc_RNA (1)...(19): siRNA sense strand
caugaugacucaagaagua

SEQ ID NO: 308120 - RNA, 19 nt, Homo sapiens
  misc_RNA (1)...(19): siRNA sense strand
caucagaccuuucuuaaca

SEQ ID NO: 308121 - RNA, 19 nt, Homo sapiens
  misc_RNA (1)...(19): siRNA sense strand
gcaaugacccuugaagaua

SEQ ID NO: 308122 - RNA, 19 nt, Homo sapiens
  misc_RNA (1)...(19): siRNA sense strand
gaagagagaacagaagaua

SEQ ID NO: 308123 - RNA, 19 nt, Homo sapiens
  misc_RNA (1)...(19): siRNA sense strand
gaugaaaccuuaagucaag

SEQ ID NO: 308124 - RNA, 19 nt, Homo sapiens
  misc_RNA (1)...(19): siRNA sense strand
ucaaagaggucugcuguuu

SEQ ID NO: 308125 - RNA, 19 nt, Homo sapiens
  misc_RNA (1)...(19): siRNA sense strand
ccucagagccaaccuauua

SEQ ID NO: 308126 - RNA, 19 nt, Homo sapiens
  misc_RNA (1)...(19): siRNA sense strand
gaaggaagaacagauauaa

SEQ ID NO: 308127 - RNA, 19 nt, Homo sapiens
  misc_RNA (1)...(19): siRNA sense strand
gcccuuggcuucaucauuu

SEQ ID NO: 308128 - RNA, 19 nt, Homo sapiens
  misc_RNA (1)...(19): siRNA sense strand
gcuaucaagucauccuuua

SEQ ID NO: 308129 - RNA, 19 nt, Homo sapiens
  misc_RNA (1)...(19): siRNA sense strand
gaauggcugugaagaauau

SEQ ID NO: 308130 - RNA, 19 nt, Homo sapiens
  misc_RNA (1)...(19): siRNA sense strand
gcaaacauaucaaauucga

SEQ ID NO: 308131 - RNA, 19 nt, Homo sapiens
  misc_RNA (1)...(19): siRNA sense strand
cauaguaucuucaccagaa

SEQ ID NO: 308132 - RNA, 19 nt, Homo sapiens
  misc_RNA (1)...(19): siRNA sense strand
gacagaggaucaauauauu

SEQ ID NO: 308133 - RNA, 19 nt, Homo sapiens
  misc_RNA (1)...(19): siRNA sense strand
gagaauugguuguuauguu

SEQ ID NO: 308134 - RNA, 19 nt, Homo sapiens
  misc_RNA (1)...(19): siRNA sense strand
gggaacugcuccagaagua

SEQ ID NO: 308135 - RNA, 19 nt, Homo sapiens
  misc_RNA (1)...(19): siRNA sense strand
uaacagagcauuagacaug

SEQ ID NO: 308136 - RNA, 19 nt, Homo sapiens
  misc_RNA (1)...(19): siRNA sense strand
gaagagacaguuacaguga

SEQ ID NO: 308137 - RNA, 19 nt, Homo sapiens
  misc_RNA (1)...(19): siRNA sense strand
ccagguacauuaaagauga

SEQ ID NO: 308138 - RNA, 19 nt, Homo sapiens
  misc_RNA (1)...(19): siRNA sense strand
ccaugaagauucugauaaa

SEQ ID NO: 308139 - RNA, 19 nt, Homo sapiens
  misc_RNA (1)...(19): siRNA sense strand
gaagacugaugaugaugaa

SEQ ID NO: 308140 - RNA, 19 nt, Homo sapiens
  misc_RNA (1)...(19): siRNA sense strand
uaacuucucucucagaugu

SEQ ID NO: 308141 - RNA, 19 nt, Homo sapiens
  misc_RNA (1)...(19): siRNA sense strand
gaaguuaucagaagagaga

SEQ ID NO: 308142 - RNA, 19 nt, Homo sapiens
  misc_RNA (1)...(19): siRNA sense strand
gaagaugacauuuaugaug

SEQ ID NO: 308143 - RNA, 19 nt, Homo sapiens
  misc_RNA (1)...(19): siRNA sense strand
ggaaguagaacuccucauu

SEQ ID NO: 308144 - RNA, 19 nt, Homo sapiens
  misc_RNA (1)...(19): siRNA sense strand
gaacugaccugugauacca

SEQ ID NO: 308145 - RNA, 19 nt, Homo sapiens
  misc_RNA (1)...(19): siRNA sense strand
uagcuacccucaaagauaa

SEQ ID NO: 308146 - RNA, 19 nt, Homo sapiens
  misc_RNA (1)...(19): siRNA sense strand
aaagaugaaugggaaguua

SEQ ID NO: 308147 - RNA, 19 nt, Homo sapiens
  misc_RNA (1)...(19): siRNA sense strand
gcaagacagugcuauagau

SEQ ID NO: 308148 - RNA, 19 nt, Homo sapiens
  misc_RNA (1)...(19): siRNA sense strand
ccaaagccacuguuaauuu

SEQ ID NO: 308149 - RNA, 19 nt, Homo sapiens
  misc_RNA (1)...(19): siRNA sense strand
caaccaagaugcccaagau

SEQ ID NO: 308150 - RNA, 19 nt, Homo sapiens
  misc_RNA (1)...(19): siRNA sense strand
cuaaggagcuggagaaucu

SEQ ID NO: 308151 - RNA, 19 nt, Homo sapiens
  misc_RNA (1)...(19): siRNA sense strand
cuaguucgauggauaagua

SEQ ID NO: 308152 - RNA, 19 nt, Homo sapiens
  misc_RNA (1)...(19): siRNA sense strand
cagcaaacauaucaaauuc

SEQ ID NO: 308153 - RNA, 19 nt, Homo sapiens
  misc_RNA (1)...(19): siRNA sense strand
caucaaagauacacaagau

SEQ ID NO: 308154 - RNA, 19 nt, Homo sapiens
  misc_RNA (1)...(19): siRNA sense strand
gaucauuccuuucugacaa

SEQ ID NO: 308155 - RNA, 19 nt, Homo sapiens
  misc_RNA (1)...(19): siRNA sense strand
ggaaguauagccuuggaua

SEQ ID NO: 308156 - RNA, 19 nt, Homo sapiens
  misc_RNA (1)...(19): siRNA sense strand
uaagagaaauugcccuaga

SEQ ID NO: 308157 - RNA, 19 nt, Homo sapiens
  misc_RNA (1)...(19): siRNA sense strand
uggacgaguucuagaauua

SEQ ID NO: 308158 - RNA, 19 nt, Homo sapiens
  misc_RNA (1)...(19): siRNA sense strand
gaaaacaacucaggucaaa

SEQ ID NO: 308159 - RNA, 19 nt, Homo sapiens
  misc_RNA (1)...(19): siRNA sense strand
gugaauacauccaacaaga

SEQ ID NO: 308160 - RNA, 19 nt, Homo sapiens
  misc_RNA (1)...(19): siRNA sense strand
uaacaaagggcuuaguaaa

SEQ ID NO: 308161 - RNA, 19 nt, Homo sapiens
  misc_RNA (1)...(19): siRNA sense strand
caaugacccuugaagauau

SEQ ID NO: 308162 - RNA, 19 nt, Homo sapiens
  misc_RNA (1)...(19): siRNA sense strand
gaaagaagaguucguuuac

SEQ ID NO: 308163 - RNA, 19 nt, Homo sapiens
  misc_RNA (1)...(19): siRNA sense strand
gagaagaagucacaaacag

SEQ ID NO: 308164 - RNA, 19 nt, Homo sapiens
  misc_RNA (1)...(19): siRNA sense strand
ggaaagaagaaccaaagaa

SEQ ID NO: 308165 - RNA, 19 nt, Homo sapiens
  misc_RNA (1)...(19): siRNA sense strand
gaagaguucguuuacauug

SEQ ID NO: 308166 - RNA, 19 nt, Homo sapiens
  misc_RNA (1)...(19): siRNA sense strand
ccaggucaaugguuucuuu

SEQ ID NO: 308167 - RNA, 19 nt, Homo sapiens
  misc_RNA (1)...(19): siRNA sense strand
cgagaucgauugcgaggaa

SEQ ID NO: 308168 - RNA, 19 nt, Homo sapiens
  misc_RNA (1)...(19): siRNA sense strand
auacacgggugccaacuua

SEQ ID NO: 308169 - RNA, 19 nt, Homo sapiens
  misc_RNA (1)...(19): siRNA sense strand
aaagaggucugcuguuuca

SEQ ID NO: 308170 - RNA, 19 nt, Homo sapiens
  misc_RNA (1)...(19): siRNA sense strand
gaacuccucauuacccuaa

SEQ ID NO: 308171 - RNA, 19 nt, Homo sapiens
  misc_RNA (1)...(19): siRNA sense strand
gaagauaccauuuguacca

SEQ ID NO: 308172 - RNA, 19 nt, Homo sapiens
  misc_RNA (1)...(19): siRNA sense strand
ucaagaagauaccauuugu

SEQ ID NO: 308173 - RNA, 19 nt, Homo sapiens
  misc_RNA (1)...(19): siRNA sense strand
gaacugcuccagaaguauu

SEQ ID NO: 308174 - RNA, 19 nt, Homo sapiens
  misc_RNA (1)...(19): siRNA sense strand
caaagaagaguuacccaaa

SEQ ID NO: 308175 - RNA, 19 nt, Homo sapiens
  misc_RNA (1)...(19): siRNA sense strand
acaaagggcuuaguaaauc

SEQ ID NO: 308176 - RNA, 19 nt, Homo sapiens
  misc_RNA (1)...(19): siRNA sense strand
gacugaugaugaugaaaua

SEQ ID NO: 308177 - RNA, 19 nt, Homo sapiens
  misc_RNA (1)...(19): siRNA sense strand
caaaggcaaucagagaauu

SEQ ID NO: 308178 - RNA, 19 nt, Homo sapiens
  misc_RNA (1)...(19): siRNA sense strand
guggaaacacugagaaaua

SEQ ID NO: 308179 - RNA, 19 nt, Homo sapiens
  misc_RNA (1)...(19): siRNA sense strand
caaaggugaucgcguccua

SEQ ID NO: 308180 - RNA, 19 nt, Homo sapiens
  misc_RNA (1)...(19): siRNA sense strand
gauaacagcuuggggauaa

SEQ ID NO: 308181 - RNA, 19 nt, Homo sapiens
  misc_RNA (1)...(19): siRNA sense strand
aagaagaguuacccaaauu

SEQ ID NO: 308182 - RNA, 19 nt, Homo sapiens
  misc_RNA (1)...(19): siRNA sense strand
cgaaggaaaguaaacauaa

SEQ ID NO: 308183 - RNA, 19 nt, Homo sapiens
  misc_RNA (1)...(19): siRNA sense strand
gaaacagccaugacucaaa

SEQ ID NO: 308184 - RNA, 19 nt, Homo sapiens
  misc_RNA (1)...(19): siRNA sense strand
gaucagcuuuccuguaaca

SEQ ID NO: 308185 - RNA, 19 nt, Homo sapiens
  misc_RNA (1)...(19): siRNA sense strand
gaguggagaagaugacuua

SEQ ID NO: 308186 - RNA, 19 nt, Homo sapiens
  misc_RNA (1)...(19): siRNA sense strand
gcacaaguacuuccaaaca

SEQ ID NO: 308187 - RNA, 19 nt, Homo sapiens
  misc_RNA (1)...(19): siRNA sense strand
gacaaucuccaacaucuaa

SEQ ID NO: 308188 - RNA, 19 nt, Homo sapiens
  misc_RNA (1)...(19): siRNA sense strand
gaaucuuccucuucaguga

SEQ ID NO: 308189 - RNA, 19 nt, Homo sapiens
  misc_RNA (1)...(19): siRNA sense strand
cauggugugucuuacuuua

SEQ ID NO: 308190 - RNA, 19 nt, Homo sapiens
  misc_RNA (1)...(19): siRNA sense strand
ugaugagacuuccuuauug

SEQ ID NO: 308191 - RNA, 19 nt, Homo sapiens
  misc_RNA (1)...(19): siRNA sense strand
caggagagacugccacaua

SEQ ID NO: 308192 - RNA, 19 nt, Homo sapiens
  misc_RNA (1)...(19): siRNA sense strand
agacagaggaucaauauau

SEQ ID NO: 308193 - RNA, 19 nt, Homo sapiens
  misc_RNA (1)...(19): siRNA sense strand
aaagaagacugaugaugau

SEQ ID NO: 308194 - RNA, 19 nt, Homo sapiens
  misc_RNA (1)...(19): siRNA sense strand
ggaaguuaacagagcauua

SEQ ID NO: 308195 - RNA, 19 nt, Homo sapiens
  misc_RNA (1)...(19): siRNA sense strand
gaaaggaugcacugugaug

SEQ ID NO: 308196 - RNA, 19 nt, Homo sapiens
  misc_RNA (1)...(19): siRNA sense strand
gauaaccgaaggaaaguaa

SEQ ID NO: 308197 - RNA, 19 nt, Homo sapiens
  misc_RNA (1)...(19): siRNA sense strand
gcaagauacucagauggaa

SEQ ID NO: 308198 - RNA, 19 nt, Homo sapiens
  misc_RNA (1)...(19): siRNA sense strand
gacuggaacugaccuguga

SEQ ID NO: 308199 - RNA, 19 nt, Homo sapiens
  misc_RNA (1)...(19): siRNA sense strand
aaacaacaauggucagcaa

SEQ ID NO: 308200 - RNA, 19 nt, Homo sapiens
  misc_RNA (1)...(19): siRNA sense strand
gaagucauaucugcucuca

SEQ ID NO: 308201 - RNA, 19 nt, Homo sapiens
  misc_RNA (1)...(19): siRNA sense strand
caauggaguuagucuagaa

SEQ ID NO: 308202 - RNA, 19 nt, Homo sapiens
  misc_RNA (1)...(19): siRNA sense strand
ggagaaacuugauuuaucc

SEQ ID NO: 308203 - RNA, 19 nt, Homo sapiens
  misc_RNA (1)...(19): siRNA sense strand
gaaagucuccaagaauuau

SEQ ID NO: 308204 - RNA, 19 nt, Homo sapiens
  misc_RNA (1)...(19): siRNA sense strand
ggaccaagguuccauauua

SEQ ID NO: 308205 - RNA, 19 nt, Homo sapiens
  misc_RNA (1)...(19): siRNA sense strand
ccaaauaucugucagcuaa

SEQ ID NO: 308206 - RNA, 19 nt, Homo sapiens
  misc_RNA (1)...(19): siRNA sense strand
gaaagaagauggaacaaaa

SEQ ID NO: 308207 - RNA, 19 nt, Homo sapiens
  misc_RNA (1)...(19): siRNA sense strand
ggaagaagcauuugcauug

SEQ ID NO: 308208 - RNA, 19 nt, Homo sapiens
  misc_RNA (1)...(19): siRNA sense strand
gaacagagcaccagcaauc

SEQ ID NO: 308209 - RNA, 19 nt, Homo sapiens
  misc_RNA (1)...(19): siRNA sense strand
ggaugaggaugauaaugua

SEQ ID NO: 308210 - RNA, 19 nt, Homo sapiens
  misc_RNA (1)...(19): siRNA sense strand
gagcccaacuuagugauua

SEQ ID NO: 308211 - RNA, 19 nt, Homo sapiens
  misc_RNA (1)...(19): siRNA sense strand
gaaagagacaggaggagua

SEQ ID NO: 308212 - RNA, 19 nt, Homo sapiens
  misc_RNA (1)...(19): siRNA sense strand
gaggagaggcagauaauuu

SEQ ID NO: 308213 - RNA, 19 nt, Homo sapiens
  misc_RNA (1)...(19): siRNA sense strand
cagaagaaccuccaaauau

SEQ ID NO: 308214 - RNA, 19 nt, Homo sapiens
  misc_RNA (1)...(19): siRNA sense strand
gggaguaguucgaaucuau

SEQ ID NO: 308215 - RNA, 19 nt, Homo sapiens
  misc_RNA (1)...(19): siRNA sense strand
gcucagccuuuguggaaua

SEQ ID NO: 308216 - RNA, 19 nt, Homo sapiens
  misc_RNA (1)...(19): siRNA sense strand
gaaccaaugccaaccauga

SEQ ID NO: 308217 - RNA, 19 nt, Homo sapiens
  misc_RNA (1)...(19): siRNA sense strand
gaagaaagaagauggaaca

SEQ ID NO: 308218 - RNA, 19 nt, Homo sapiens
  misc_RNA (1)...(19): siRNA sense strand
ucaaagaguuggauagcaa

SEQ ID NO: 308219 - RNA, 19 nt, Homo sapiens
  misc_RNA (1)...(19): siRNA sense strand
gaccaagguuccauauuau

SEQ ID NO: 308220 - RNA, 19 nt, Homo sapiens
  misc_RNA (1)...(19): siRNA sense strand
acaauuagagcccaacuua

SEQ ID NO: 308221 - RNA, 19 nt, Homo sapiens
  misc_RNA (1)...(19): siRNA sense strand
ggaagaggaugaagaugca

SEQ ID NO: 308222 - RNA, 19 nt, Homo sapiens
  misc_RNA (1)...(19): siRNA sense strand
ccagcaaucugaaugagaa

SEQ ID NO: 308223 - RNA, 19 nt, Homo sapiens
  misc_RNA (1)...(19): siRNA sense strand
ccagaagaaccuccaaaua

SEQ ID NO: 308224 - RNA, 19 nt, Homo sapiens
  misc_RNA (1)...(19): siRNA sense strand
gcagauaauuuggaugaau

SEQ ID NO: 308225 - RNA, 19 nt, Homo sapiens
  misc_RNA (1)...(19): siRNA sense strand
gaaaugaugguggaauauu

SEQ ID NO: 308226 - RNA, 19 nt, Homo sapiens
  misc_RNA (1)...(19): siRNA sense strand
agaagaaccuccaaauauc

SEQ ID NO: 308227 - RNA, 19 nt, Homo sapiens
  misc_RNA (1)...(19): siRNA sense strand
ggaaauaccaccuguagag

SEQ ID NO: 308228 - RNA, 19 nt, Homo sapiens
  misc_RNA (1)...(19): siRNA sense strand
agaggaagcuaauuguuga

SEQ ID NO: 308229 - RNA, 19 nt, Homo sapiens
  misc_RNA (1)...(19): siRNA sense strand
gaagaaccguacagugaca

SEQ ID NO: 308230 - RNA, 19 nt, Homo sapiens
  misc_RNA (1)...(19): siRNA sense strand
gacaucaggacaucucuua

SEQ ID NO: 308231 - RNA, 19 nt, Homo sapiens
  misc_RNA (1)...(19): siRNA sense strand
gaagaagcauuugcauugg

SEQ ID NO: 308232 - RNA, 19 nt, Homo sapiens
  misc_RNA (1)...(19): siRNA sense strand
agaaauugaugauguggaa

SEQ ID NO: 308233 - RNA, 19 nt, Homo sapiens
  misc_RNA (1)...(19): siRNA sense strand
gaagcuaauuguugacagu

SEQ ID NO: 308234 - RNA, 19 nt, Homo sapiens
  misc_RNA (1)...(19): siRNA sense strand
gagaagaaguugggaacau

SEQ ID NO: 308235 - RNA, 19 nt, Homo sapiens
  misc_RNA (1)...(19): siRNA sense strand
gcagaacaaacauagauga

SEQ ID NO: 308236 - RNA, 19 nt, Homo sapiens
  misc_RNA (1)...(19): siRNA sense strand
gaagaggaagcuaauuguu

SEQ ID NO: 308237 - RNA, 19 nt, Homo sapiens
  misc_RNA (1)...(19): siRNA sense strand
gaaguugggaacaucagua

SEQ ID NO: 308238 - RNA, 19 nt, Homo sapiens
  misc_RNA (1)...(19): siRNA sense strand
gauaagaagcuaaccaaag

SEQ ID NO: 308239 - RNA, 19 nt, Homo sapiens
  misc_RNA (1)...(19): siRNA sense strand
ccaagaaauugaugaugug

SEQ ID NO: 308240 - RNA, 19 nt, Homo sapiens
  misc_RNA (1)...(19): siRNA sense strand
gaguagaguggaagagaua

SEQ ID NO: 308241 - RNA, 19 nt, Homo sapiens
  misc_RNA (1)...(19): siRNA sense strand
ucaguuugcuugaguuaug

SEQ ID NO: 308242 - RNA, 19 nt, Homo sapiens
  misc_RNA (1)...(19): siRNA sense strand
gcauuggagccuauugaua

SEQ ID NO: 308243 - RNA, 19 nt, Homo sapiens
  misc_RNA (1)...(19): siRNA sense strand
gaugacgacauguuaguaa

SEQ ID NO: 308244 - RNA, 19 nt, Homo sapiens
  misc_RNA (1)...(19): siRNA sense strand
aggaaaugaugguggaaua

SEQ ID NO: 308245 - RNA, 19 nt, Homo sapiens
  misc_RNA (1)...(19): siRNA sense strand
guugggaacaucaguauuu

SEQ ID NO: 308246 - RNA, 19 nt, Homo sapiens
  misc_RNA (1)...(19): siRNA sense strand
gcaaaguucuacagcuucu

SEQ ID NO: 308247 - RNA, 19 nt, Homo sapiens
  misc_RNA (1)...(19): siRNA sense strand
ucgaugagcccauuauuga

SEQ ID NO: 308248 - RNA, 19 nt, Homo sapiens
  misc_RNA (1)...(19): siRNA sense strand
ggaagaggaagcuaauugu

SEQ ID NO: 308249 - RNA, 19 nt, Homo sapiens
  misc_RNA (1)...(19): siRNA sense strand
gaagaaccuccaaauaucu

SEQ ID NO: 308250 - RNA, 19 nt, Homo sapiens
  misc_RNA (1)...(19): siRNA sense strand
uuggauagcaagacaauua

SEQ ID NO: 308251 - RNA, 19 nt, Homo sapiens
  misc_RNA (1)...(19): siRNA sense strand
ccgcaaaguucuacagcuu

SEQ ID NO: 308252 - RNA, 19 nt, Homo sapiens
  misc_RNA (1)...(19): siRNA sense strand
cauuggagccuauugauau

SEQ ID NO: 308253 - RNA, 19 nt, Homo sapiens
  misc_RNA (1)...(19): siRNA sense strand
gcagaugcuucauggucuu

SEQ ID NO: 308254 - RNA, 19 nt, Homo sapiens
  misc_RNA (1)...(19): siRNA sense strand
ggaugaauuccucaaagaa

SEQ ID NO: 308255 - RNA, 19 nt, Homo sapiens
  misc_RNA (1)...(19): siRNA sense strand
gagauaaccaugagagaag

SEQ ID NO: 308256 - RNA, 19 nt, Homo sapiens
  misc_RNA (1)...(19): siRNA sense strand
cuugaguuaugucgaaaua

SEQ ID NO: 308257 - RNA, 19 nt, Homo sapiens
  misc_RNA (1)...(19): siRNA sense strand
agaagaugaugaagaggaa

SEQ ID NO: 308258 - RNA, 19 nt, Homo sapiens
  misc_RNA (1)...(19): siRNA sense strand
gcaccagcaaucugaauga

SEQ ID NO: 308259 - RNA, 19 nt, Homo sapiens
  misc_RNA (1)...(19): siRNA sense strand
ucgaaucuaucacaggaaa

SEQ ID NO: 308260 - RNA, 19 nt, Homo sapiens
  misc_RNA (1)...(19): siRNA sense strand
uggaauaacagacuacuga

SEQ ID NO: 308261 - RNA, 19 nt, Homo sapiens
  misc_RNA (1)...(19): siRNA sense strand
aaccaugacugaucaaaca

SEQ ID NO: 308262 - RNA, 19 nt, Homo sapiens
  misc_RNA (1)...(19): siRNA sense strand
ugaggaugacgacauguua

SEQ ID NO: 308263 - RNA, 19 nt, Homo sapiens
  misc_RNA (1)...(19): siRNA sense strand
gcccagcaguucagcuuga

SEQ ID NO: 308264 - RNA, 19 nt, Homo sapiens
  misc_RNA (1)...(19): siRNA sense strand
gaaucagaguagaguggaa

SEQ ID NO: 308265 - RNA, 19 nt, Homo sapiens
  misc_RNA (1)...(19): siRNA sense strand
gagagcagcguggagagua

SEQ ID NO: 308266 - RNA, 19 nt, Homo sapiens
  misc_RNA (1)...(19): siRNA sense strand
uggaugaauuccucaaaga

SEQ ID NO: 308267 - RNA, 19 nt, Homo sapiens
  misc_RNA (1)...(19): siRNA sense strand
aauggaugaucgugagaua

SEQ ID NO: 308268 - RNA, 19 nt, Homo sapiens
  misc_RNA (1)...(19): siRNA sense strand
gaagaaguugggaacauca

SEQ ID NO: 308269 - RNA, 19 nt, Homo sapiens
  misc_RNA (1)...(19): siRNA sense strand
gaugaucgugagauaauga

SEQ ID NO: 308270 - RNA, 19 nt, Homo sapiens
  misc_RNA (1)...(19): siRNA sense strand
ggaauaacagacuacugaa

SEQ ID NO: 308271 - RNA, 19 nt, Homo sapiens
  misc_RNA (1)...(19): siRNA sense strand
ggaaaugaugguggaauau

SEQ ID NO: 308272 - RNA, 19 nt, Homo sapiens
  misc_RNA (1)...(19): siRNA sense strand
caggaaagccaaauaccuu

SEQ ID NO: 308273 - RNA, 19 nt, Homo sapiens
  misc_RNA (1)...(19): siRNA sense strand
aggaagaaccguacaguga

SEQ ID NO: 308274 - RNA, 19 nt, Homo sapiens
  misc_RNA (1)...(19): siRNA sense strand
gaaaggaggagaggcagau

SEQ ID NO: 308275 - RNA, 19 nt, Homo sapiens
  misc_RNA (1)...(19): siRNA sense strand
uaagcacuacuacuucuaa

SEQ ID NO: 308276 - RNA, 19 nt, Homo sapiens
  misc_RNA (1)...(19): siRNA sense strand
aaccaaagcccauguguuc

SEQ ID NO: 308277 - RNA, 19 nt, Homo sapiens
  misc_RNA (1)...(19): siRNA sense strand
ccaacuuagugauuauuca

SEQ ID NO: 308278 - RNA, 19 nt, Homo sapiens
  misc_RNA (1)...(19): siRNA sense strand
aaacuggagcugaaucuau

SEQ ID NO: 308279 - RNA, 19 nt, Homo sapiens
  misc_RNA (1)...(19): siRNA sense strand
ggauaagaagcuaaccaaa

SEQ ID NO: 308280 - RNA, 19 nt, Homo sapiens
  misc_RNA (1)...(19): siRNA sense strand
auaagaagcuaaccaaagc

SEQ ID NO: 308281 - RNA, 19 nt, Homo sapiens
  misc_RNA (1)...(19): siRNA sense strand
gaugguggaauauuagaug

SEQ ID NO: 308282 - RNA, 19 nt, Homo sapiens
  misc_RNA (1)...(19): siRNA sense strand
gcagcgugauguuaucgau

SEQ ID NO: 308283 - RNA, 19 nt, Homo sapiens
  misc_RNA (1)...(19): siRNA sense strand
ggaugacgacauguuagua

SEQ ID NO: 308284 - RNA, 19 nt, Homo sapiens
  misc_RNA (1)...(19): siRNA sense strand
gaaaacaagcugccgcaaa

SEQ ID NO: 308285 - RNA, 19 nt, Homo sapiens
  misc_RNA (1)...(19): siRNA sense strand
ucagcgugcucuugcuaaa

SEQ ID NO: 308286 - RNA, 19 nt, Homo sapiens
  misc_RNA (1)...(19): siRNA sense strand
caaaaggacucagcagaug

SEQ ID NO: 308287 - RNA, 19 nt, Homo sapiens
  misc_RNA (1)...(19): siRNA sense strand
gaaagccaaauaccuucuu

SEQ ID NO: 308288 - RNA, 19 nt, Homo sapiens
  misc_RNA (1)...(19): siRNA sense strand
aaaagaagaugaugaagag

SEQ ID NO: 308289 - RNA, 19 nt, Homo sapiens
  misc_RNA (1)...(19): siRNA sense strand
gcagguagagcagauggaa

SEQ ID NO: 308290 - RNA, 19 nt, Homo sapiens
  misc_RNA (1)...(19): siRNA sense strand
cagcagaacaaacauagau

SEQ ID NO: 308291 - RNA, 19 nt, Homo sapiens
  misc_RNA (1)...(19): siRNA sense strand
accaagaaauugaugaugu

SEQ ID NO: 308292 - RNA, 19 nt, Homo sapiens
  misc_RNA (1)...(19): siRNA sense strand
gguggaauauuagaugaca

SEQ ID NO: 308293 - RNA, 19 nt, Homo sapiens
  misc_RNA (1)...(19): siRNA sense strand
gcccauguguucgagugua

SEQ ID NO: 308294 - RNA, 19 nt, Homo sapiens
  misc_RNA (1)...(19): siRNA sense strand
gccauuacuuuaccugaag

SEQ ID NO: 308295 - RNA, 19 nt, Homo sapiens
  misc_RNA (1)...(19): siRNA sense strand
gaugagcccauuauugaag

SEQ ID NO: 308296 - RNA, 19 nt, Homo sapiens
  misc_RNA (1)...(19): siRNA sense strand
gaauaacagacuacugaag

SEQ ID NO: 308297 - RNA, 19 nt, Homo sapiens
  misc_RNA (1)...(19): siRNA sense strand
uugaugauguggaaagaga

SEQ ID NO: 308298 - RNA, 19 nt, Homo sapiens
  misc_RNA (1)...(19): siRNA sense strand
aagaggaagcuaauuguug

SEQ ID NO: 308299 - RNA, 19 nt, Homo sapiens
  misc_RNA (1)...(19): siRNA sense strand
uguguucgaguguaauuua

SEQ ID NO: 308300 - RNA, 19 nt, Homo sapiens
  misc_RNA (1)...(19): siRNA sense strand
gccacugccugacuuagau

SEQ ID NO: 308301 - RNA, 19 nt, Homo sapiens
  misc_RNA (1)...(19): siRNA sense strand
ucaaugggugggccugaua

SEQ ID NO: 308302 - RNA, 19 nt, Homo sapiens
  misc_RNA (1)...(19): siRNA sense strand
gucgaaauacgaacagaaa

SEQ ID NO: 308303 - RNA, 19 nt, Homo sapiens
  misc_RNA (1)...(19): siRNA sense strand
aaagccaaauaccuucuug

SEQ ID NO: 308304 - RNA, 19 nt, Homo sapiens
  misc_RNA (1)...(19): siRNA sense strand
gaagaugucugauugauga

SEQ ID NO: 308305 - RNA, 19 nt, Homo sapiens
  misc_RNA (1)...(19): siRNA sense strand
gcacacaagucucugaauu

SEQ ID NO: 308306 - RNA, 19 nt, Homo sapiens
  misc_RNA (1)...(19): siRNA sense strand
gaacagggauguaccuaau

SEQ ID NO: 308307 - RNA, 19 nt, Homo sapiens
  misc_RNA (1)...(19): siRNA sense strand
ggaagaagaugaugcugaa

SEQ ID NO: 308308 - RNA, 19 nt, Homo sapiens
  misc_RNA (1)...(19): siRNA sense strand
aaucuucgcuucccuaaua

SEQ ID NO: 308309 - RNA, 19 nt, Homo sapiens
  misc_RNA (1)...(19): siRNA sense strand
gcaagaauauuuggagauu

SEQ ID NO: 308310 - RNA, 19 nt, Homo sapiens
  misc_RNA (1)...(19): siRNA sense strand
gaagugggccuuacauauu

SEQ ID NO: 308311 - RNA, 19 nt, Homo sapiens
  misc_RNA (1)...(19): siRNA sense strand
gaagaucgccauuguauuc

SEQ ID NO: 308312 - RNA, 19 nt, Homo sapiens
  misc_RNA (1)...(19): siRNA sense strand
ggaagcagccuuagaaaga

SEQ ID NO: 308313 - RNA, 19 nt, Homo sapiens
  misc_RNA (1)...(19): siRNA sense strand
caagagagguuaagacaag

SEQ ID NO: 308314 - RNA, 19 nt, Homo sapiens
  misc_RNA (1)...(19): siRNA sense strand
gcauaugauuggcucuuua

SEQ ID NO: 308315 - RNA, 19 nt, Homo sapiens
  misc_RNA (1)...(19): siRNA sense strand
acaagaagaugucugauug

SEQ ID NO: 308316 - RNA, 19 nt, Homo sapiens
  misc_RNA (1)...(19): siRNA sense strand
caacagaaccugacagaau

SEQ ID NO: 308317 - RNA, 19 nt, Homo sapiens
  misc_RNA (1)...(19): siRNA sense strand
caacaagugucuccacaga

SEQ ID NO: 308318 - RNA, 19 nt, Homo sapiens
  misc_RNA (1)...(19): siRNA sense strand
gcaagaagacccuuacgaa

SEQ ID NO: 308319 - RNA, 19 nt, Homo sapiens
  misc_RNA (1)...(19): siRNA sense strand
gaagauaacccuguugaug

SEQ ID NO: 308320 - RNA, 19 nt, Homo sapiens
  misc_RNA (1)...(19): siRNA sense strand
agaagacccuuacgaauau

SEQ ID NO: 308321 - RNA, 19 nt, Homo sapiens
  misc_RNA (1)...(19): siRNA sense strand
ggauguaccuaaugaaaca

SEQ ID NO: 308322 - RNA, 19 nt, Homo sapiens
  misc_RNA (1)...(19): siRNA sense strand
gaauacauguugcagaauc

SEQ ID NO: 308323 - RNA, 19 nt, Homo sapiens
  misc_RNA (1)...(19): siRNA sense strand
ggaaagagguacugcaaaa

SEQ ID NO: 308324 - RNA, 19 nt, Homo sapiens
  misc_RNA (1)...(19): siRNA sense strand
caaauucagugcuccaguu

SEQ ID NO: 308325 - RNA, 19 nt, Homo sapiens
  misc_RNA (1)...(19): siRNA sense strand
gaucuucuaugcucuuguu

SEQ ID NO: 308326 - RNA, 19 nt, Homo sapiens
  misc_RNA (1)...(19): siRNA sense strand
caauugcagcuuuguauua

SEQ ID NO: 308327 - RNA, 19 nt, Homo sapiens
  misc_RNA (1)...(19): siRNA sense strand
gcuggguacuucacuauuu

SEQ ID NO: 308328 - RNA, 19 nt, Homo sapiens
  misc_RNA (1)...(19): siRNA sense strand
aagaagacccuuacgaaua

SEQ ID NO: 308329 - RNA, 19 nt, Homo sapiens
  misc_RNA (1)...(19): siRNA sense strand
gaaccugacagaauggaua

SEQ ID NO: 308330 - RNA, 19 nt, Homo sapiens
  misc_RNA (1)...(19): siRNA sense strand
ucaaacagccuuagagcua

SEQ ID NO: 308331 - RNA, 19 nt, Homo sapiens
  misc_RNA (1)...(19): siRNA sense strand
uagaaagacugacaagaga

SEQ ID NO: 308332 - RNA, 19 nt, Homo sapiens
  misc_RNA (1)...(19): siRNA sense strand
gaagaagaucgccauugua

SEQ ID NO: 308333 - RNA, 19 nt, Homo sapiens
  misc_RNA (1)...(19): siRNA sense strand
gaacagauaccccaaguuu

SEQ ID NO: 308334 - RNA, 19 nt, Homo sapiens
  misc_RNA (1)...(19): siRNA sense strand
ggguacagcuuacuacaug

SEQ ID NO: 308335 - RNA, 19 nt, Homo sapiens
  misc_RNA (1)...(19): siRNA sense strand
gugaagaaguuacuccuau

SEQ ID NO: 308336 - RNA, 19 nt, Homo sapiens
  misc_RNA (1)...(19): siRNA sense strand
gaagauuucauuucuccua

SEQ ID NO: 308337 - RNA, 19 nt, Homo sapiens
  misc_RNA (1)...(19): siRNA sense strand
gaaguuugauguguuugaa

SEQ ID NO: 308338 - RNA, 19 nt, Homo sapiens
  misc_RNA (1)...(19): siRNA sense strand
gaauucuucuuugccuuua

SEQ ID NO: 308339 - RNA, 19 nt, Homo sapiens
  misc_RNA (1)...(19): siRNA sense strand
gcaugaaguuugauguguu

SEQ ID NO: 308340 - RNA, 19 nt, Homo sapiens
  misc_RNA (1)...(19): siRNA sense strand
agaagaagaucgccauugu

SEQ ID NO: 308341 - RNA, 19 nt, Homo sapiens
  misc_RNA (1)...(19): siRNA sense strand
gaagaaguuacuccuauug

SEQ ID NO: 308342 - RNA, 19 nt, Homo sapiens
  misc_RNA (1)...(19): siRNA sense strand
gaaaguggaagcugccauu

SEQ ID NO: 308343 - RNA, 19 nt, Homo sapiens
  misc_RNA (1)...(19): siRNA sense strand
caacacugcuccagauuac

SEQ ID NO: 308344 - RNA, 19 nt, Homo sapiens
  misc_RNA (1)...(19): siRNA sense strand
gcaaagggcguggcauuga

SEQ ID NO: 308345 - RNA, 19 nt, Homo sapiens
  misc_RNA (1)...(19): siRNA sense strand
caugaaguuugauguguuu

SEQ ID NO: 308346 - RNA, 19 nt, Homo sapiens
  misc_RNA (1)...(19): siRNA sense strand
gaauauauacgcaugaagu

SEQ ID NO: 308347 - RNA, 19 nt, Homo sapiens
  misc_RNA (1)...(19): siRNA sense strand
ucuaugcucuuguucagua

SEQ ID NO: 308348 - RNA, 19 nt, Homo sapiens
  misc_RNA (1)...(19): siRNA sense strand
ggagcggaguccauuggua

SEQ ID NO: 308349 - RNA, 19 nt, Homo sapiens
  misc_RNA (1)...(19): siRNA sense strand
gaagacccuuacgaauaua

SEQ ID NO: 308350 - RNA, 19 nt, Homo sapiens
  misc_RNA (1)...(19): siRNA sense strand
gaacugauaaaccaacaga

SEQ ID NO: 308351 - RNA, 19 nt, Homo sapiens
  misc_RNA (1)...(19): siRNA sense strand
gaucagaaccuucaaacag

SEQ ID NO: 308352 - RNA, 19 nt, Homo sapiens
  misc_RNA (1)...(19): siRNA sense strand
uagcaacucuggcugauca

SEQ ID NO: 308353 - RNA, 19 nt, Homo sapiens
  misc_RNA (1)...(19): siRNA sense strand
ugaagaaguuacuccuauu

SEQ ID NO: 308354 - RNA, 19 nt, Homo sapiens
  misc_RNA (1)...(19): siRNA sense strand
gagaaaugccugugaaagu

SEQ ID NO: 308355 - RNA, 19 nt, Homo sapiens
  misc_RNA (1)...(19): siRNA sense strand
ggaauucuucuuugccuuu

SEQ ID NO: 308356 - RNA, 19 nt, Homo sapiens
  misc_RNA (1)...(19): siRNA sense strand
gaagaugggcaagaauauu

SEQ ID NO: 308357 - RNA, 19 nt, Homo sapiens
  misc_RNA (1)...(19): siRNA sense strand
ugaugaagcugaagaugau

SEQ ID NO: 308358 - RNA, 19 nt, Homo sapiens
  misc_RNA (1)...(19): siRNA sense strand
gaaugacagugaugaugau

SEQ ID NO: 308359 - RNA, 19 nt, Homo sapiens
  misc_RNA (1)...(19): siRNA sense strand
cacaguggcuuaaugaugu

SEQ ID NO: 308360 - RNA, 19 nt, Homo sapiens
  misc_RNA (1)...(19): siRNA sense strand
caagauggcuuugauuacu

SEQ ID NO: 308361 - RNA, 19 nt, Homo sapiens
  misc_RNA (1)...(19): siRNA sense strand
uggaauacauguugcagaa

SEQ ID NO: 308362 - RNA, 19 nt, Homo sapiens
  misc_RNA (1)...(19): siRNA sense strand
gauggagcccugcauauga

SEQ ID NO: 308363 - RNA, 19 nt, Homo sapiens
  misc_RNA (1)...(19): siRNA sense strand
gcaaaagacuaugggauuu

SEQ ID NO: 308364 - RNA, 19 nt, Homo sapiens
  misc_RNA (1)...(19): siRNA sense strand
uaagcaggcuggugaagau

SEQ ID NO: 308365 - RNA, 19 nt, Homo sapiens
  misc_RNA (1)...(19): siRNA sense strand
ccacaccuacuacucaaua

SEQ ID NO: 308366 - RNA, 19 nt, Homo sapiens
  misc_RNA (1)...(19): siRNA sense strand
guauuggccugaucgagaa

SEQ ID NO: 308367 - RNA, 19 nt, Homo sapiens
  misc_RNA (1)...(19): siRNA sense strand
gugccaaguucuuucaauu

SEQ ID NO: 308368 - RNA, 19 nt, Homo sapiens
  misc_RNA (1)...(19): siRNA sense strand
acaagugucuccacagaug

SEQ ID NO: 308369 - RNA, 19 nt, Homo sapiens
  misc_RNA (1)...(19): siRNA sense strand
gcucucaccuggaagaauc

SEQ ID NO: 308370 - RNA, 19 nt, Homo sapiens
  misc_RNA (1)...(19): siRNA sense strand
uagaagccauuauccauuc

SEQ ID NO: 308371 - RNA, 19 nt, Homo sapiens
  misc_RNA (1)...(19): siRNA sense strand
gcauggaggauacaaauuc

SEQ ID NO: 308372 - RNA, 19 nt, Homo sapiens
  misc_RNA (1)...(19): siRNA sense strand
ccaaggaguauaaugaauu

SEQ ID NO: 308373 - RNA, 19 nt, Homo sapiens
  misc_RNA (1)...(19): siRNA sense strand
acagggauguaccuaauga

SEQ ID NO: 308374 - RNA, 19 nt, Homo sapiens
  misc_RNA (1)...(19): siRNA sense strand
acaaggagaagcaauauau

SEQ ID NO: 308375 - RNA, 19 nt, Homo sapiens
  misc_RNA (1)...(19): siRNA sense strand
aagugggccuuacauauuu

SEQ ID NO: 308376 - RNA, 19 nt, Homo sapiens
  misc_RNA (1)...(19): siRNA sense strand
ccauugcccuucaaguauu

SEQ ID NO: 308377 - RNA, 19 nt, Homo sapiens
  misc_RNA (1)...(19): siRNA sense strand
agaaaugccugugaaagug

SEQ ID NO: 308378 - RNA, 19 nt, Homo sapiens
  misc_RNA (1)...(19): siRNA sense strand
gauuggcucuuuagcugaa

SEQ ID NO: 308379 - RNA, 19 nt, Homo sapiens
  misc_RNA (1)...(19): siRNA sense strand
ggcauuauccaagauguua

SEQ ID NO: 308380 - RNA, 19 nt, Homo sapiens
  misc_RNA (1)...(19): siRNA sense strand
cuauaaagaucagauggaa

SEQ ID NO: 308381 - RNA, 19 nt, Homo sapiens
  misc_RNA (1)...(19): siRNA sense strand
gaagagcagcccaugaauc

SEQ ID NO: 308382 - RNA, 19 nt, Homo sapiens
  misc_RNA (1)...(19): siRNA sense strand
gcacugacucacggucuua

SEQ ID NO: 308383 - RNA, 19 nt, Homo sapiens
  misc_RNA (1)...(19): siRNA sense strand
acaggcagguguuaucuau

SEQ ID NO: 308384 - RNA, 19 nt, Homo sapiens
  misc_RNA (1)...(19): siRNA sense strand
auaaagagauaacccaaca

SEQ ID NO: 308385 - RNA, 19 nt, Homo sapiens
  misc_RNA (1)...(19): siRNA sense strand
guagaagccauuauccauu

SEQ ID NO: 308386 - RNA, 19 nt, Homo sapiens
  misc_RNA (1)...(19): siRNA sense strand
aagauaacccuguugauga

SEQ ID NO: 308387 - RNA, 19 nt, Homo sapiens
  misc_RNA (1)...(19): siRNA sense strand
ugaugaagauugggaagaa

SEQ ID NO: 308388 - RNA, 19 nt, Homo sapiens
  misc_RNA (1)...(19): siRNA sense strand
ugacagugaugaugaugau

SEQ ID NO: 308389 - RNA, 19 nt, Homo sapiens
  misc_RNA (1)...(19): siRNA sense strand
gcaauugcagcuuuguauu

SEQ ID NO: 308390 - RNA, 19 nt, Homo sapiens
  misc_RNA (1)...(19): siRNA sense strand
gagaagaugcagaguguca

SEQ ID NO: 308391 - RNA, 19 nt, Homo sapiens
  misc_RNA (1)...(19): siRNA sense strand
gcagugaacuaggcuacau

SEQ ID NO: 308392 - RNA, 19 nt, Homo sapiens
  misc_RNA (1)...(19): siRNA sense strand
caagaagacccuuacgaau

SEQ ID NO: 308393 - RNA, 19 nt, Homo sapiens
  misc_RNA (1)...(19): siRNA sense strand
guuaccagauucuuacaga

SEQ ID NO: 308394 - RNA, 19 nt, Homo sapiens
  misc_RNA (1)...(19): siRNA sense strand
gaaggcuauuccacaauca

SEQ ID NO: 308395 - RNA, 19 nt, Homo sapiens
  misc_RNA (1)...(19): siRNA sense strand
aacagaaccugacagaaug

SEQ ID NO: 308396 - RNA, 19 nt, Homo sapiens
  misc_RNA (1)...(19): siRNA sense strand
ucaacacugcuccagauua

SEQ ID NO: 308397 - RNA, 19 nt, Homo sapiens
  misc_RNA (1)...(19): siRNA sense strand
gaaccaguuacaaaucauu

SEQ ID NO: 308398 - RNA, 19 nt, Homo sapiens
  misc_RNA (1)...(19): siRNA sense strand
ggucauugguacuguuuua

SEQ ID NO: 308399 - RNA, 19 nt, Homo sapiens
  misc_RNA (1)...(19): siRNA sense strand
gaggaaagagguacugcaa

SEQ ID NO: 308400 - RNA, 19 nt, Homo sapiens
  misc_RNA (1)...(19): siRNA sense strand
ugaagguguuauaucagua

SEQ ID NO: 308401 - RNA, 19 nt, Homo sapiens
  misc_RNA (1)...(19): siRNA sense strand
ucugugcucuuauugauau

SEQ ID NO: 308402 - RNA, 19 nt, Homo sapiens
  misc_RNA (1)...(19): siRNA sense strand
agauggagaugaugaagau

SEQ ID NO: 308403 - RNA, 19 nt, Homo sapiens
  misc_RNA (1)...(19): siRNA sense strand
ugaugaagaugggcaagaa

SEQ ID NO: 308404 - RNA, 19 nt, Homo sapiens
  misc_RNA (1)...(19): siRNA sense strand
gcaaaguucuucaaaguga

SEQ ID NO: 308405 - RNA, 19 nt, Homo sapiens
  misc_RNA (1)...(19): siRNA sense strand
gcagaaacauguaauugaa

SEQ ID NO: 308406 - RNA, 19 nt, Homo sapiens
  misc_RNA (1)...(19): siRNA sense strand
gcgaauacgugauaacauu

SEQ ID NO: 308407 - RNA, 19 nt, Homo sapiens
  misc_RNA (1)...(19): siRNA sense strand
gcaaugcagucaaauaaug

SEQ ID NO: 308408 - RNA, 19 nt, Homo sapiens
  misc_RNA (1)...(19): siRNA sense strand
gcucuucagucuuuaauuu

SEQ ID NO: 308409 - RNA, 19 nt, Homo sapiens
  misc_RNA (1)...(19): siRNA sense strand
gaagaaguauuggaagaaa

SEQ ID NO: 308410 - RNA, 19 nt, Homo sapiens
  misc_RNA (1)...(19): siRNA sense strand
gaaaagagguguugccaaa

SEQ ID NO: 308411 - RNA, 19 nt, Homo sapiens
  misc_RNA (1)...(19): siRNA sense strand
agagaaagcugauauggaa

SEQ ID NO: 308412 - RNA, 19 nt, Homo sapiens
  misc_RNA (1)...(19): siRNA sense strand
gaagauguguauaauagga

SEQ ID NO: 308413 - RNA, 19 nt, Homo sapiens
  misc_RNA (1)...(19): siRNA sense strand
gaagcaauauuuccauuca

SEQ ID NO: 308414 - RNA, 19 nt, Homo sapiens
  misc_RNA (1)...(19): siRNA sense strand
ugacugggaugaagaagua

SEQ ID NO: 308415 - RNA, 19 nt, Homo sapiens
  misc_RNA (1)...(19): siRNA sense strand
gaagaagaguuuauucaag

SEQ ID NO: 308416 - RNA, 19 nt, Homo sapiens
  misc_RNA (1)...(19): siRNA sense strand
caacauggauggagaucuu

SEQ ID NO: 308417 - RNA, 19 nt, Homo sapiens
  misc_RNA (1)...(19): siRNA sense strand
gcaagaagauccauaugag

SEQ ID NO: 308418 - RNA, 19 nt, Homo sapiens
  misc_RNA (1)...(19): siRNA sense strand
gauacaagcuaaggaauau

SEQ ID NO: 308419 - RNA, 19 nt, Homo sapiens
  misc_RNA (1)...(19): siRNA sense strand
ugaagaaguugaagacaaa

SEQ ID NO: 308420 - RNA, 19 nt, Homo sapiens
  misc_RNA (1)...(19): siRNA sense strand
gaagauccauaugaguaua

SEQ ID NO: 308421 - RNA, 19 nt, Homo sapiens
  misc_RNA (1)...(19): siRNA sense strand
acacuuggcugagauauuu

SEQ ID NO: 308422 - RNA, 19 nt, Homo sapiens
  misc_RNA (1)...(19): siRNA sense strand
gaagaggagacaaauguaa

SEQ ID NO: 308423 - RNA, 19 nt, Homo sapiens
  misc_RNA (1)...(19): siRNA sense strand
gaugauaugugaauacagu

SEQ ID NO: 308424 - RNA, 19 nt, Homo sapiens
  misc_RNA (1)...(19): siRNA sense strand
gaacugguaugguggaagu

SEQ ID NO: 308425 - RNA, 19 nt, Homo sapiens
  misc_RNA (1)...(19): siRNA sense strand
acaauaguguggaugaaua

SEQ ID NO: 308426 - RNA, 19 nt, Homo sapiens
  misc_RNA (1)...(19): siRNA sense strand
aagaaaugccguugaauua

SEQ ID NO: 308427 - RNA, 19 nt, Homo sapiens
  misc_RNA (1)...(19): siRNA sense strand
gagaagcaauauuuccauu

SEQ ID NO: 308428 - RNA, 19 nt, Homo sapiens
  misc_RNA (1)...(19): siRNA sense strand
gaacuguugcacauuguua

SEQ ID NO: 308429 - RNA, 19 nt, Homo sapiens
  misc_RNA (1)...(19): siRNA sense strand
gagaucuuccgaacuauua

SEQ ID NO: 308430 - RNA, 19 nt, Homo sapiens
  misc_RNA (1)...(19): siRNA sense strand
uaagaaagcagaagagaga

SEQ ID NO: 308431 - RNA, 19 nt, Homo sapiens
  misc_RNA (1)...(19): siRNA sense strand
ggauugcuuugaauacuuu

SEQ ID NO: 308432 - RNA, 19 nt, Homo sapiens
  misc_RNA (1)...(19): siRNA sense strand
ugaauacagucaagaggua

SEQ ID NO: 308433 - RNA, 19 nt, Homo sapiens
  misc_RNA (1)...(19): siRNA sense strand
ccacaugugaggccuauua

SEQ ID NO: 308434 - RNA, 19 nt, Homo sapiens
  misc_RNA (1)...(19): siRNA sense strand
ugacagacccgaacuuuga

SEQ ID NO: 308435 - RNA, 19 nt, Homo sapiens
  misc_RNA (1)...(19): siRNA sense strand
gaagagcuguggcaagaag

SEQ ID NO: 308436 - RNA, 19 nt, Homo sapiens
  misc_RNA (1)...(19): siRNA sense strand
cggaagauguguauaauag

SEQ ID NO: 308437 - RNA, 19 nt, Homo sapiens
  misc_RNA (1)...(19): siRNA sense strand
gaggagauuucaagugaug

SEQ ID NO: 308438 - RNA, 19 nt, Homo sapiens
  misc_RNA (1)...(19): siRNA sense strand
uaagaaaugccguugaauu

SEQ ID NO: 308439 - RNA, 19 nt, Homo sapiens
  misc_RNA (1)...(19): siRNA sense strand
agaagaagauugaacaaca

SEQ ID NO: 308440 - RNA, 19 nt, Homo sapiens
  misc_RNA (1)...(19): siRNA sense strand
agagaugccugucaaaguu

SEQ ID NO: 308441 - RNA, 19 nt, Homo sapiens
  misc_RNA (1)...(19): siRNA sense strand
gcauuuaguucuuugaagu

SEQ ID NO: 308442 - RNA, 19 nt, Homo sapiens
  misc_RNA (1)...(19): siRNA sense strand
guacuccacuugaccuuga

SEQ ID NO: 308443 - RNA, 19 nt, Homo sapiens
  misc_RNA (1)...(19): siRNA sense strand
gcagaugaagccacacaua

SEQ ID NO: 308444 - RNA, 19 nt, Homo sapiens
  misc_RNA (1)...(19): siRNA sense strand
gauugaagauaaagagaug

SEQ ID NO: 308445 - RNA, 19 nt, Homo sapiens
  misc_RNA (1)...(19): siRNA sense strand
gcagucaaauaauggaaga

SEQ ID NO: 308446 - RNA, 19 nt, Homo sapiens
  misc_RNA (1)...(19): siRNA sense strand
gaagaagauugaacaacag

SEQ ID NO: 308447 - RNA, 19 nt, Homo sapiens
  misc_RNA (1)...(19): siRNA sense strand
cauaaugagcucaaucuaa

SEQ ID NO: 308448 - RNA, 19 nt, Homo sapiens
  misc_RNA (1)...(19): siRNA sense strand
gaauucaguugccucacaa

SEQ ID NO: 308449 - RNA, 19 nt, Homo sapiens
  misc_RNA (1)...(19): siRNA sense strand
uuacuaaugucauccagaa

SEQ ID NO: 308450 - RNA, 19 nt, Homo sapiens
  misc_RNA (1)...(19): siRNA sense strand
agaagagccugauugaaga

SEQ ID NO: 308451 - RNA, 19 nt, Homo sapiens
  misc_RNA (1)...(19): siRNA sense strand
gaaaugccguugaauuagc

SEQ ID NO: 308452 - RNA, 19 nt, Homo sapiens
  misc_RNA (1)...(19): siRNA sense strand
gugaauaaccaaaccauga

SEQ ID NO: 308453 - RNA, 19 nt, Homo sapiens
  misc_RNA (1)...(19): siRNA sense strand
caaagaagaagauugaaca

SEQ ID NO: 308454 - RNA, 19 nt, Homo sapiens
  misc_RNA (1)...(19): siRNA sense strand
caagcaaugcagucaaaua

SEQ ID NO: 308455 - RNA, 19 nt, Homo sapiens
  misc_RNA (1)...(19): siRNA sense strand
gaccggaagauguguauaa

SEQ ID NO: 308456 - RNA, 19 nt, Homo sapiens
  misc_RNA (1)...(19): siRNA sense strand
ucuaagaaaugccguugaa

SEQ ID NO: 308457 - RNA, 19 nt, Homo sapiens
  misc_RNA (1)...(19): siRNA sense strand
cacaagcucugauaacugu

SEQ ID NO: 308458 - RNA, 19 nt, Homo sapiens
  misc_RNA (1)...(19): siRNA sense strand
gaaagcugauauggaagaa

SEQ ID NO: 308459 - RNA, 19 nt, Homo sapiens
  misc_RNA (1)...(19): siRNA sense strand
aaaucgaccuccugcagua

SEQ ID NO: 308460 - RNA, 19 nt, Homo sapiens
  misc_RNA (1)...(19): siRNA sense strand
cgaagaagagccugauuga

SEQ ID NO: 308461 - RNA, 19 nt, Homo sapiens
  misc_RNA (1)...(19): siRNA sense strand
caaccaguccuacaagauu

SEQ ID NO: 308462 - RNA, 19 nt, Homo sapiens
  misc_RNA (1)...(19): siRNA sense strand
gcacauugaugaggaugau

SEQ ID NO: 308463 - RNA, 19 nt, Homo sapiens
  misc_RNA (1)...(19): siRNA sense strand
ccacuugaccuugacaaua

SEQ ID NO: 308464 - RNA, 19 nt, Homo sapiens
  misc_RNA (1)...(19): siRNA sense strand
gcaggucugugcuacuaga

SEQ ID NO: 308465 - RNA, 19 nt, Homo sapiens
  misc_RNA (1)...(19): siRNA sense strand
ugaagaacauggugacaca

SEQ ID NO: 308466 - RNA, 19 nt, Homo sapiens
  misc_RNA (1)...(19): siRNA sense strand
uccagaagaugauauguga

SEQ ID NO: 308467 - RNA, 19 nt, Homo sapiens
  misc_RNA (1)...(19): siRNA sense strand
gagccugauugaagauaaa

SEQ ID NO: 308468 - RNA, 19 nt, Homo sapiens
  misc_RNA (1)...(19): siRNA sense strand
ccauuuaccugaagaacau

SEQ ID NO: 308469 - RNA, 19 nt, Homo sapiens
  misc_RNA (1)...(19): siRNA sense strand
auaaugagcucaaucuaag

SEQ ID NO: 308470 - RNA, 19 nt, Homo sapiens
  misc_RNA (1)...(19): siRNA sense strand
aaauggagcuguuucuaca

SEQ ID NO: 308471 - RNA, 19 nt, Homo sapiens
  misc_RNA (1)...(19): siRNA sense strand
auaauucggucuccagauu

SEQ ID NO: 308472 - RNA, 19 nt, Homo sapiens
  misc_RNA (1)...(19): siRNA sense strand
gaugaaugauacagauugu

SEQ ID NO: 308473 - RNA, 19 nt, Homo sapiens
  misc_RNA (1)...(19): siRNA sense strand
caggaacuguugcacauug

SEQ ID NO: 308474 - RNA, 19 nt, Homo sapiens
  misc_RNA (1)...(19): siRNA sense strand
agaacauggugacacaaua

SEQ ID NO: 308475 - RNA, 19 nt, Homo sapiens
  misc_RNA (1)...(19): siRNA sense strand
aagaagauccauaugagua

SEQ ID NO: 308476 - RNA, 19 nt, Homo sapiens
  misc_RNA (1)...(19): siRNA sense strand
uauuguagcucggcucuuu

SEQ ID NO: 308477 - RNA, 19 nt, Homo sapiens
  misc_RNA (1)...(19): siRNA sense strand
uaacauuguggaaggaaua

SEQ ID NO: 308478 - RNA, 19 nt, Homo sapiens
  misc_RNA (1)...(19): siRNA sense strand
cagggaggcuucaccuuug

SEQ ID NO: 308479 - RNA, 19 nt, Homo sapiens
  misc_RNA (1)...(19): siRNA sense strand
gacccgaaguugcggauug

SEQ ID NO: 308480 - RNA, 19 nt, Homo sapiens
  misc_RNA (1)...(19): siRNA sense strand
gcacauuguuagagagaca

SEQ ID NO: 308481 - RNA, 19 nt, Homo sapiens
  misc_RNA (1)...(19): siRNA sense strand
auaaagagaugccugucaa

SEQ ID NO: 308482 - RNA, 19 nt, Homo sapiens
  misc_RNA (1)...(19): siRNA sense strand
gcccagacucucuuauaua

SEQ ID NO: 308483 - RNA, 19 nt, Homo sapiens
  misc_RNA (1)...(19): siRNA sense strand
gagaaccucuuauaauagc

SEQ ID NO: 308484 - RNA, 19 nt, Homo sapiens
  misc_RNA (1)...(19): siRNA sense strand
uuuaugcacuuguucagua

SEQ ID NO: 308485 - RNA, 19 nt, Homo sapiens
  misc_RNA (1)...(19): siRNA sense strand
ggaugaagaaguauuggaa

SEQ ID NO: 308486 - RNA, 19 nt, Homo sapiens
  misc_RNA (1)...(19): siRNA sense strand
ucacaacccuggaccuauc

SEQ ID NO: 308487 - RNA, 19 nt, Homo sapiens
  misc_RNA (1)...(19): siRNA sense strand
agauacagauaccuuacua

SEQ ID NO: 308488 - RNA, 19 nt, Homo sapiens
  misc_RNA (1)...(19): siRNA sense strand
uaacaguuguagaagauca

SEQ ID NO: 308489 - RNA, 19 nt, Homo sapiens
  misc_RNA (1)...(19): siRNA sense strand
uggcaaaguucuucaaagu

SEQ ID NO: 308490 - RNA, 19 nt, Homo sapiens
  misc_RNA (1)...(19): siRNA sense strand
gaaagcagaagagagagaa

SEQ ID NO: 308491 - RNA, 19 nt, Homo sapiens
  misc_RNA (1)...(19): siRNA sense strand
aagcaaugcagucaaauaa

SEQ ID NO: 308492 - RNA, 19 nt, Homo sapiens
  misc_RNA (1)...(19): siRNA sense strand
cuacauacuuuagaacgaa

SEQ ID NO: 308493 - RNA, 19 nt, Homo sapiens
  misc_RNA (1)...(19): siRNA sense strand
guacuacaacccugauuug

SEQ ID NO: 308494 - RNA, 19 nt, Homo sapiens
  misc_RNA (1)...(19): siRNA sense strand
ggcaagaagauccauauga

SEQ ID NO: 308495 - RNA, 19 nt, Homo sapiens
  misc_RNA (1)...(19): siRNA sense strand
aaccaguccuacaagauua

SEQ ID NO: 308496 - RNA, 19 nt, Homo sapiens
  misc_RNA (1)...(19): siRNA sense strand
guuaucaaauccugacaga

SEQ ID NO: 308497 - RNA, 19 nt, Homo sapiens
  misc_RNA (1)...(19): siRNA sense strand
ggaagaaaaugaggagauu

SEQ ID NO: 308498 - RNA, 19 nt, Homo sapiens
  misc_RNA (1)...(19): siRNA sense strand
gagaagaugcagaguguca

SEQ ID NO: 308499 - RNA, 19 nt, Homo sapiens
  misc_RNA (1)...(19): siRNA sense strand
uguagaagaucauaaagag

SEQ ID NO: 308500 - RNA, 19 nt, Homo sapiens
  misc_RNA (1)...(19): siRNA sense strand
gaagaagagccugauugaa

SEQ ID NO: 308501 - RNA, 19 nt, Homo sapiens
  misc_RNA (1)...(19): siRNA sense strand
gaacauggugacacaauac

SEQ ID NO: 308502 - RNA, 19 nt, Homo sapiens
  misc_RNA (1)...(19): siRNA sense strand
ggaugaaugauacagauug

SEQ ID NO: 308503 - RNA, 19 nt, Homo sapiens
  misc_RNA (1)...(19): siRNA sense strand
gaugaugacugggaugaag

SEQ ID NO: 308504 - RNA, 19 nt, Homo sapiens
  misc_RNA (1)...(19): siRNA sense strand
ggucguggcagaagugaca

SEQ ID NO: 308505 - RNA, 19 nt, Homo sapiens
  misc_RNA (1)...(19): siRNA sense strand
ggacguggucguggcagaa

SEQ ID NO: 308506 - RNA, 19 nt, Homo sapiens
  misc_RNA (1)...(19): siRNA sense strand
ccugcuggaucgauacuuc

SEQ ID NO: 308507 - RNA, 19 nt, Homo sapiens
  misc_RNA (1)...(19): siRNA sense strand
guacuucugcgggagcauu

SEQ ID NO: 308508 - RNA, 19 nt, Homo sapiens
  misc_RNA (1)...(19): siRNA sense strand
gcgaauaacuaaauggaaa

SEQ ID NO: 308509 - RNA, 19 nt, Homo sapiens
  misc_RNA (1)...(19): siRNA sense strand
uuaagaaucuccaguguuu

SEQ ID NO: 308510 - RNA, 19 nt, Homo sapiens
  misc_RNA (1)...(19): siRNA sense strand
gaagagcaaugaacucaag

SEQ ID NO: 308511 - RNA, 19 nt, Homo sapiens
  misc_RNA (1)...(19): siRNA sense strand
gcacuggcaugaagcaaga

SEQ ID NO: 308512 - RNA, 19 nt, Homo sapiens
  misc_RNA (1)...(19): siRNA sense strand
agaaauugcugcagaaugu

SEQ ID NO: 308513 - RNA, 19 nt, Homo sapiens
  misc_RNA (1)...(19): siRNA sense strand
gaaugugaaugacacuuug

SEQ ID NO: 308514 - RNA, 19 nt, Homo sapiens
  misc_RNA (1)...(19): siRNA sense strand
gaagcaacuugaagacaga

SEQ ID NO: 308515 - RNA, 19 nt, Homo sapiens
  misc_RNA (1)...(19): siRNA sense strand
caccacagcucuuguugaa

SEQ ID NO: 308516 - RNA, 19 nt, Homo sapiens
  misc_RNA (1)...(19): siRNA sense strand
gaaagagaagguacagauu

SEQ ID NO: 308517 - RNA, 19 nt, Homo sapiens
  misc_RNA (1)...(19): siRNA sense strand
gcaaugcgaauaacuaaau

SEQ ID NO: 308518 - RNA, 19 nt, Homo sapiens
  misc_RNA (1)...(19): siRNA sense strand
ggaaagagaagguacagau

SEQ ID NO: 308519 - RNA, 19 nt, Homo sapiens
  misc_RNA (1)...(19): siRNA sense strand
guuaaggagucaucaaguu

SEQ ID NO: 308520 - RNA, 19 nt, Homo sapiens
  misc_RNA (1)...(19): siRNA sense strand
gaaggaaccggaugggauu

SEQ ID NO: 308521 - RNA, 19 nt, Homo sapiens
  misc_RNA (1)...(19): siRNA sense strand
ucaaagagacggaucaaga

SEQ ID NO: 308522 - RNA, 19 nt, Homo sapiens
  misc_RNA (1)...(19): siRNA sense strand
caaagagacggaucaagaa

SEQ ID NO: 308523 - RNA, 19 nt, Homo sapiens
  misc_RNA (1)...(19): siRNA sense strand
gaaagaagaacaacagacu

SEQ ID NO: 308524 - RNA, 19 nt, Homo sapiens
  misc_RNA (1)...(19): siRNA sense strand
agauacagcucaucacgaa

SEQ ID NO: 308525 - RNA, 19 nt, Homo sapiens
  misc_RNA (1)...(19): siRNA sense strand
gaagccaccugcuccaucu

SEQ ID NO: 308526 - RNA, 19 nt, Homo sapiens
  misc_RNA (1)...(19): siRNA sense strand
ggaagacguuacuuugaag

SEQ ID NO: 308527 - RNA, 19 nt, Homo sapiens
  misc_RNA (1)...(19): siRNA sense strand
gcaauguuuccaagcuuua

SEQ ID NO: 308528 - RNA, 19 nt, Homo sapiens
  misc_RNA (1)...(19): siRNA sense strand
ggucugacuuuaagaaucu

SEQ ID NO: 308529 - RNA, 19 nt, Homo sapiens
  misc_RNA (1)...(19): siRNA sense strand
guacagauucagagacaaa

SEQ ID NO: 308530 - RNA, 19 nt, Homo sapiens
  misc_RNA (1)...(19): siRNA sense strand
ccagaaagcugugacaaaa

SEQ ID NO: 308531 - RNA, 19 nt, Homo sapiens
  misc_RNA (1)...(19): siRNA sense strand
uuaaggagucaucaaguua

SEQ ID NO: 308532 - RNA, 19 nt, Homo sapiens
  misc_RNA (1)...(19): siRNA sense strand
agagacggaucaagaaaug

SEQ ID NO: 308533 - RNA, 19 nt, Homo sapiens
  misc_RNA (1)...(19): siRNA sense strand
ggcccuauuuccagguuua

SEQ ID NO: 308534 - RNA, 19 nt, Homo sapiens
  misc_RNA (1)...(19): siRNA sense strand
gcugccacaucuuuacuuu

SEQ ID NO: 308535 - RNA, 19 nt, Homo sapiens
  misc_RNA (1)...(19): siRNA sense strand
gagagcaguuccaccuguu

SEQ ID NO: 308536 - RNA, 19 nt, Homo sapiens
  misc_RNA (1)...(19): siRNA sense strand
ccuuggaacuucauacuau

SEQ ID NO: 308537 - RNA, 19 nt, Homo sapiens
  misc_RNA (1)...(19): siRNA sense strand
aggaagacguuacuuugaa

SEQ ID NO: 308538 - RNA, 19 nt, Homo sapiens
  misc_RNA (1)...(19): siRNA sense strand
gcacaccacagcucuuguu

SEQ ID NO: 308539 - RNA, 19 nt, Homo sapiens
  misc_RNA (1)...(19): siRNA sense strand
ggagaaagaagaacaacag

SEQ ID NO: 308540 - RNA, 19 nt, Homo sapiens
  misc_RNA (1)...(19): siRNA sense strand
gaagguacagauucagaga

SEQ ID NO: 308541 - RNA, 19 nt, Homo sapiens
  misc_RNA (1)...(19): siRNA sense strand
guguauaacagacuucuuu

SEQ ID NO: 308542 - RNA, 19 nt, Homo sapiens
  misc_RNA (1)...(19): siRNA sense strand
cggaugggauuuaggaguu

SEQ ID NO: 308543 - RNA, 19 nt, Homo sapiens
  misc_RNA (1)...(19): siRNA sense strand
gaggaucggagacaaguga

SEQ ID NO: 308544 - RNA, 19 nt, Homo sapiens
  misc_RNA (1)...(19): siRNA sense strand
ucuggaggcuggagaaaga

SEQ ID NO: 308545 - RNA, 19 nt, Homo sapiens
  misc_RNA (1)...(19): siRNA sense strand
gcaccaagaagaugaugga

SEQ ID NO: 308546 - RNA, 19 nt, Homo sapiens
  misc_RNA (1)...(19): siRNA sense strand
ggaugggauuuaggaguuu

SEQ ID NO: 308547 - RNA, 19 nt, Homo sapiens
  misc_RNA (1)...(19): siRNA sense strand
aagagaagguacagauuca

SEQ ID NO: 308548 - RNA, 19 nt, Homo sapiens
  misc_RNA (1)...(19): siRNA sense strand
cagcaaugcgaauaacuaa

SEQ ID NO: 308549 - RNA, 19 nt, Homo sapiens
  misc_RNA (1)...(19): siRNA sense strand
gagaagguacagauucaga

SEQ ID NO: 308550 - RNA, 19 nt, Homo sapiens
  misc_RNA (1)...(19): siRNA sense strand
ucaggaagacguuacuuug

SEQ ID NO: 308551 - RNA, 19 nt, Homo sapiens
  misc_RNA (1)...(19): siRNA sense strand
acaagugacucguggauac

SEQ ID NO: 308552 - RNA, 19 nt, Homo sapiens
  misc_RNA (1)...(19): siRNA sense strand
gcucaucacgaacuaauuc

SEQ ID NO: 308553 - RNA, 19 nt, Homo sapiens
  misc_RNA (1)...(19): siRNA sense strand
caucagaggcugucuccuu

SEQ ID NO: 308554 - RNA, 19 nt, Homo sapiens
  misc_RNA (1)...(19): siRNA sense strand
caacuugaagacagaugua

SEQ ID NO: 308555 - RNA, 19 nt, Homo sapiens
  misc_RNA (1)...(19): siRNA sense strand
ggauuuaggaguuuguaug

SEQ ID NO: 308556 - RNA, 19 nt, Homo sapiens
  misc_RNA (1)...(19): siRNA sense strand
ugaguagacugagggacua

SEQ ID NO: 308557 - RNA, 19 nt, Homo sapiens
  misc_RNA (1)...(19): siRNA sense strand
agaaaugucaugugaggaa

SEQ ID NO: 308558 - RNA, 19 nt, Homo sapiens
  misc_RNA (1)...(19): siRNA sense strand
caaugcgaauaacuaaaug

SEQ ID NO: 308559 - RNA, 19 nt, Homo sapiens
  misc_RNA (1)...(19): siRNA sense strand
gaucaagaaaugucaugug

SEQ ID NO: 308560 - RNA, 19 nt, Homo sapiens
  misc_RNA (1)...(19): siRNA sense strand
uuuaggaguuuguauggaa

SEQ ID NO: 308561 - RNA, 19 nt, Homo sapiens
  misc_RNA (1)...(19): siRNA sense strand
caggaagacguuacuuuga

SEQ ID NO: 308562 - RNA, 19 nt, Homo sapiens
  misc_RNA (1)...(19): siRNA sense strand
aaagagaagguacagauuc

SEQ ID NO: 308563 - RNA, 19 nt, Homo sapiens
  misc_RNA (1)...(19): siRNA sense strand
aucaagaaaugucauguga

SEQ ID NO: 308564 - RNA, 19 nt, Homo sapiens
  misc_RNA (1)...(19): siRNA sense strand
ggaaccggaugggauuuag

SEQ ID NO: 308565 - RNA, 19 nt, Homo sapiens
  misc_RNA (1)...(19): siRNA sense strand
gauacacccaggagaauca

SEQ ID NO: 308566 - RNA, 19 nt, Homo sapiens
  misc_RNA (1)...(19): siRNA sense strand
gagaaagaagaacaacaga

SEQ ID NO: 308567 - RNA, 19 nt, Homo sapiens
  misc_RNA (1)...(19): siRNA sense strand
uacugccacuuguguauaa

SEQ ID NO: 308568 - RNA, 19 nt, Homo sapiens
  misc_RNA (1)...(19): siRNA sense strand
gaagcaagagccucagucu

SEQ ID NO: 308569 - RNA, 19 nt, Homo sapiens
  misc_RNA (1)...(19): siRNA sense strand
aaagagacggaucaagaaa

SEQ ID NO: 308570 - RNA, 19 nt, Homo sapiens
  misc_RNA (1)...(19): siRNA sense strand
ugccagggcuacaaggaaa

SEQ ID NO: 308571 - RNA, 19 nt, Homo sapiens
  misc_RNA (1)...(19): siRNA sense strand
acacagcuacugccacuug

SEQ ID NO: 308572 - RNA, 19 nt, Homo sapiens
  misc_RNA (1)...(19): siRNA sense strand
ggagucaucaaguuagugu

SEQ ID NO: 308573 - RNA, 19 nt, Homo sapiens
  misc_RNA (1)...(19): siRNA sense strand
ugacaaaacugaagcaacu

SEQ ID NO: 308574 - RNA, 19 nt, Homo sapiens
  misc_RNA (1)...(19): siRNA sense strand
uaaauggaaagagaaggua

SEQ ID NO: 308575 - RNA, 19 nt, Homo sapiens
  misc_RNA (1)...(19): siRNA sense strand
guagacugagggacuauga

SEQ ID NO: 308576 - RNA, 19 nt, Homo sapiens
  misc_RNA (1)...(19): siRNA sense strand
gacaagugacucguggaua

SEQ ID NO: 308577 - RNA, 19 nt, Homo sapiens
  misc_RNA (1)...(19): siRNA sense strand
gugcaauguuuccaagcuu

SEQ ID NO: 308578 - RNA, 19 nt, Homo sapiens
  misc_RNA (1)...(19): siRNA sense strand
cagaggcugucuccuugga

SEQ ID NO: 308579 - RNA, 19 nt, Homo sapiens
  misc_RNA (1)...(19): siRNA sense strand
agaaugugaaugacacuuu

SEQ ID NO: 308580 - RNA, 19 nt, Homo sapiens
  misc_RNA (1)...(19): siRNA sense strand
gcugggaagccucauugaa

SEQ ID NO: 308581 - RNA, 19 nt, Homo sapiens
  misc_RNA (1)...(19): siRNA sense strand
gaugggauuuaggaguuug

SEQ ID NO: 308582 - RNA, 19 nt, Homo sapiens
  misc_RNA (1)...(19): siRNA sense strand
uuuccaagcuuuacuucga

SEQ ID NO: 308583 - RNA, 19 nt, Homo sapiens
  misc_RNA (1)...(19): siRNA sense strand
ugcaauguuuccaagcuuu

SEQ ID NO: 308584 - RNA, 19 nt, Homo sapiens
  misc_RNA (1)...(19): siRNA sense strand
caagagccacauccuggaa

SEQ ID NO: 308585 - RNA, 19 nt, Homo sapiens
  misc_RNA (1)...(19): siRNA sense strand
ccacagcaaugcgaauaac

SEQ ID NO: 308586 - RNA, 19 nt, Homo sapiens
  misc_RNA (1)...(19): siRNA sense strand
ccagguuuaucaauauucu

SEQ ID NO: 308587 - RNA, 19 nt, Homo sapiens
  misc_RNA (1)...(19): siRNA sense strand
aagcuuuacuucgauguga

SEQ ID NO: 308588 - RNA, 19 nt, Homo sapiens
  misc_RNA (1)...(19): siRNA sense strand
cugugaagcuggaaacauc

SEQ ID NO: 308589 - RNA, 19 nt, Homo sapiens
  misc_RNA (1)...(19): siRNA sense strand
acagcaaugcgaauaacua

SEQ ID NO: 308590 - RNA, 19 nt, Homo sapiens
  misc_RNA (1)...(19): siRNA sense strand
gaaucuccaguguuuccua

SEQ ID NO: 308591 - RNA, 19 nt, Homo sapiens
  misc_RNA (1)...(19): siRNA sense strand
uuaggaguuuguauggaaa

SEQ ID NO: 308592 - RNA, 19 nt, Homo sapiens
  misc_RNA (1)...(19): siRNA sense strand
guggauacacccaggagaa

SEQ ID NO: 308593 - RNA, 19 nt, Homo sapiens
  misc_RNA (1)...(19): siRNA sense strand
gccugagccugaugacgaa

SEQ ID NO: 308594 - RNA, 19 nt, Homo sapiens
  misc_RNA (1)...(19): siRNA sense strand
caaccaccagcaccaagaa

SEQ ID NO: 308595 - RNA, 19 nt, Homo sapiens
  misc_RNA (1)...(19): siRNA sense strand
gcaacuugaagacagaugu

SEQ ID NO: 308596 - RNA, 19 nt, Homo sapiens
  misc_RNA (1)...(19): siRNA sense strand
cccagaaauugcugcagaa

SEQ ID NO: 308597 - RNA, 19 nt, Homo sapiens
  misc_RNA (1)...(19): siRNA sense strand
aaaauccggucugacuuua

SEQ ID NO: 308598 - RNA, 19 nt, Homo sapiens
  misc_RNA (1)...(19): siRNA sense strand
gauagccuccgacccaaca

SEQ ID NO: 308599 - RNA, 19 nt, Homo sapiens
  misc_RNA (1)...(19): siRNA sense strand
gcuacugccacuuguguau

SEQ ID NO: 308600 - RNA, 19 nt, Homo sapiens
  misc_RNA (1)...(19): siRNA sense strand
gggcacaccacagcucuug

SEQ ID NO: 308601 - RNA, 19 nt, Homo sapiens
  misc_RNA (1)...(19): siRNA sense strand
gauuuaggaguuuguaugg

SEQ ID NO: 308602 - RNA, 19 nt, Homo sapiens
  misc_RNA (1)...(19): siRNA sense strand
uaaggagucaucaaguuag

SEQ ID NO: 308603 - RNA, 19 nt, Homo sapiens
  misc_RNA (1)...(19): siRNA sense strand
cagcugggaagccucauug

SEQ ID NO: 308604 - RNA, 19 nt, Homo sapiens
  misc_RNA (1)...(19): siRNA sense strand
ggaguugggcugugaagcu

SEQ ID NO: 308605 - RNA, 19 nt, Homo sapiens
  misc_RNA (1)...(19): siRNA sense strand
aaacugaagcaacuugaag

SEQ ID NO: 308606 - RNA, 19 nt, Homo sapiens
  misc_RNA (1)...(19): siRNA sense strand
gagaaucaggacacaucuu

SEQ ID NO: 308607 - RNA, 19 nt, Homo sapiens
  misc_RNA (1)...(19): siRNA sense strand
agaaucaggacacaucuuc

SEQ ID NO: 308608 - RNA, 19 nt, Homo sapiens
  misc_RNA (1)...(19): siRNA sense strand
ugaaggagcuagacgagaa

SEQ ID NO: 308609 - RNA, 19 nt, Homo sapiens
  misc_RNA (1)...(19): siRNA sense strand
gcaagaaggagcugaaaga

SEQ ID NO: 308610 - RNA, 19 nt, Homo sapiens
  misc_RNA (1)...(19): siRNA sense strand
aguacaagcugagcaagaa

SEQ ID NO: 308611 - RNA, 19 nt, Homo sapiens
  misc_RNA (1)...(19): siRNA sense strand
uggacaaggugaugaagga

SEQ ID NO: 308612 - RNA, 19 nt, Homo sapiens
  misc_RNA (1)...(19): siRNA sense strand
gagcaagaaggagcugaaa

SEQ ID NO: 308613 - RNA, 19 nt, Homo sapiens
  misc_RNA (1)...(19): siRNA sense strand
gaaggagcuagacgagaau

SEQ ID NO: 308614 - RNA, 19 nt, Homo sapiens
  misc_RNA (1)...(19): siRNA sense strand
ggagcuagacgagaaugga

SEQ ID NO: 308615 - RNA, 19 nt, Homo sapiens
  misc_RNA (1)...(19): siRNA sense strand
aggaguauguggugcuugu

SEQ ID NO: 308616 - RNA, 19 nt, Homo sapiens
  misc_RNA (1)...(19): siRNA sense strand
ccaggaguauguggugcuu

SEQ ID NO: 308617 - RNA, 19 nt, Homo sapiens
  misc_RNA (1)...(19): siRNA sense strand
caagaaggagcugaaagag

SEQ ID NO: 308618 - RNA, 19 nt, Homo sapiens
  misc_RNA (1)...(19): siRNA sense strand
acaaguacaagcugagcaa

SEQ ID NO: 308619 - RNA, 19 nt, Homo sapiens
  misc_RNA (1)...(19): siRNA sense strand
uggagacccucaucaacgu

SEQ ID NO: 308620 - RNA, 19 nt, Homo sapiens
  misc_RNA (1)...(19): siRNA sense strand
ccagaaggauguggaugcu

SEQ ID NO: 308621 - RNA, 19 nt, Homo sapiens
  misc_RNA (1)...(19): siRNA sense strand
ggacuuccaggaguaugug

SEQ ID NO: 308622 - RNA, 19 nt, Homo sapiens
  misc_RNA (1)...(19): siRNA sense strand
uggaaacacuggacaauga

SEQ ID NO: 308623 - RNA, 19 nt, Homo sapiens
  misc_RNA (1)...(19): siRNA sense strand
ucaaagagcaggagguugu

SEQ ID NO: 308624 - RNA, 19 nt, Homo sapiens
  misc_RNA (1)...(19): siRNA sense strand
gagacaagcacaagcugaa

SEQ ID NO: 308625 - RNA, 19 nt, Homo sapiens
  misc_RNA (1)...(19): siRNA sense strand
ggacaaagucauggaaaca

SEQ ID NO: 308626 - RNA, 19 nt, Homo sapiens
  misc_RNA (1)...(19): siRNA sense strand
gaauucauggccuuuguug

SEQ ID NO: 308627 - RNA, 19 nt, Homo sapiens
  misc_RNA (1)...(19): siRNA sense strand
ugagcuuucccauuucuua

SEQ ID NO: 308628 - RNA, 19 nt, Homo sapiens
  misc_RNA (1)...(19): siRNA sense strand
gaagggagggagacaagca

SEQ ID NO: 308629 - RNA, 19 nt, Homo sapiens
  misc_RNA (1)...(19): siRNA sense strand
agcacaagcugaagaaauc

SEQ ID NO: 308630 - RNA, 19 nt, Homo sapiens
  misc_RNA (1)...(19): siRNA sense strand
ggaauucauggccuuuguu

SEQ ID NO: 308631 - RNA, 19 nt, Homo sapiens
  misc_RNA (1)...(19): siRNA sense strand
ggaaacacuggacaaugau

SEQ ID NO: 308632 - RNA, 19 nt, Homo sapiens
  misc_RNA (1)...(19): siRNA sense strand
gaaacacuggacaaugaug

SEQ ID NO: 308633 - RNA, 19 nt, Homo sapiens
  misc_RNA (1)...(19): siRNA sense strand
gacaagcacaagcugaaga

SEQ ID NO: 308634 - RNA, 19 nt, Homo sapiens
  misc_RNA (1)...(19): siRNA sense strand
ugauggagacggcgaaugu

SEQ ID NO: 308635 - RNA, 19 nt, Homo sapiens
  misc_RNA (1)...(19): siRNA sense strand
ggccuuuguugccaugguu

SEQ ID NO: 308636 - RNA, 19 nt, Homo sapiens
  misc_RNA (1)...(19): siRNA sense strand
acaaagucauggaaacacu

SEQ ID NO: 308637 - RNA, 19 nt, Homo sapiens
  misc_RNA (1)...(19): siRNA sense strand
acaagcacaagcugaagaa

SEQ ID NO: 308638 - RNA, 19 nt, Homo sapiens
  misc_RNA (1)...(19): siRNA sense strand
aagcacaagcugaagaaau

SEQ ID NO: 308639 - RNA, 19 nt, Homo sapiens
  misc_RNA (1)...(19): siRNA sense strand
gagcuuucccauuucuuag

SEQ ID NO: 308640 - RNA, 19 nt, Homo sapiens
  misc_RNA (1)...(19): siRNA sense strand
ggagggagacaagcacaag

SEQ ID NO: 308641 - RNA, 19 nt, Homo sapiens
  misc_RNA (1)...(19): siRNA sense strand
aaucaaagagcaggagguu

SEQ ID NO: 308642 - RNA, 19 nt, Homo sapiens
  misc_RNA (1)...(19): siRNA sense strand
agacggcgaaugugacuuc

SEQ ID NO: 308643 - RNA, 19 nt, Homo sapiens
  misc_RNA (1)...(19): siRNA sense strand
aggaauucauggccuuugu

SEQ ID NO: 308644 - RNA, 19 nt, Homo sapiens
  misc_RNA (1)...(19): siRNA sense strand
gcaccaaugaugcugaaga

SEQ ID NO: 308645 - RNA, 19 nt, Homo sapiens
  misc_RNA (1)...(19): siRNA sense strand
gaacuuccacuaccuucuc

SEQ ID NO: 308646 - RNA, 19 nt, Homo sapiens
  misc_RNA (1)...(19): siRNA sense strand
ggaccucagccaagaugaa

SEQ ID NO: 308647 - RNA, 19 nt, Homo sapiens
  misc_RNA (1)...(19): siRNA sense strand
ccacuaccuucucaucaag

SEQ ID NO: 308648 - RNA, 19 nt, Homo sapiens
  misc_RNA (1)...(19): siRNA sense strand
uccacuaccuucucaucaa

SEQ ID NO: 308649 - RNA, 19 nt, Homo sapiens
  misc_RNA (1)...(19): siRNA sense strand
cuggguacaucgugaggaa

SEQ ID NO: 308650 - RNA, 19 nt, Homo sapiens
  misc_RNA (1)...(19): siRNA sense strand
ggugccugcuguaguguuc

SEQ ID NO: 308651 - RNA, 19 nt, Homo sapiens
  misc_RNA (1)...(19): siRNA sense strand
caccaaugaugcugaagac

SEQ ID NO: 308652 - RNA, 19 nt, Homo sapiens
  misc_RNA (1)...(19): siRNA sense strand
uggcaccaaugaugcugaa

SEQ ID NO: 308653 - RNA, 19 nt, Homo sapiens
  misc_RNA (1)...(19): siRNA sense strand
cauggaagaugaagauuua

SEQ ID NO: 308654 - RNA, 19 nt, Homo sapiens
  misc_RNA (1)...(19): siRNA sense strand
caagauacauugacacuga

SEQ ID NO: 308655 - RNA, 19 nt, Homo sapiens
  misc_RNA (1)...(19): siRNA sense strand
gaagauauguggacuuagu

SEQ ID NO: 308656 - RNA, 19 nt, Homo sapiens
  misc_RNA (1)...(19): siRNA sense strand
caaagacaaugccaaauau

SEQ ID NO: 308657 - RNA, 19 nt, Homo sapiens
  misc_RNA (1)...(19): siRNA sense strand
gaaagagagaccugacuua

SEQ ID NO: 308658 - RNA, 19 nt, Homo sapiens
  misc_RNA (1)...(19): siRNA sense strand
ccaaacaacugcaggaaau

SEQ ID NO: 308659 - RNA, 19 nt, Homo sapiens
  misc_RNA (1)...(19): siRNA sense strand
gaaaugcugucccaaccuu

SEQ ID NO: 308660 - RNA, 19 nt, Homo sapiens
  misc_RNA (1)...(19): siRNA sense strand
cgauuuaguuggaauguuu

SEQ ID NO: 308661 - RNA, 19 nt, Homo sapiens
  misc_RNA (1)...(19): siRNA sense strand
gauguuaguuuacaagugu

SEQ ID NO: 308662 - RNA, 19 nt, Homo sapiens
  misc_RNA (1)...(19): siRNA sense strand
auaaagaccucaagggaaa

SEQ ID NO: 308663 - RNA, 19 nt, Homo sapiens
  misc_RNA (1)...(19): siRNA sense strand
agacaugcauggacaguuu

SEQ ID NO: 308664 - RNA, 19 nt, Homo sapiens
  misc_RNA (1)...(19): siRNA sense strand
gaucugacccagucucuaa

SEQ ID NO: 308665 - RNA, 19 nt, Homo sapiens
  misc_RNA (1)...(19): siRNA sense strand
gguaaugggugauucuuuc

SEQ ID NO: 308666 - RNA, 19 nt, Homo sapiens
  misc_RNA (1)...(19): siRNA sense strand
acaaagacaaugccaaaua

SEQ ID NO: 308667 - RNA, 19 nt, Homo sapiens
  misc_RNA (1)...(19): siRNA sense strand
uggaagauauguggacuua

SEQ ID NO: 308668 - RNA, 19 nt, Homo sapiens
  misc_RNA (1)...(19): siRNA sense strand
gacaaugccaaauauguua

SEQ ID NO: 308669 - RNA, 19 nt, Homo sapiens
  misc_RNA (1)...(19): siRNA sense strand
ggcaugacauugacaaaga

SEQ ID NO: 308670 - RNA, 19 nt, Homo sapiens
  misc_RNA (1)...(19): siRNA sense strand
gagcaccuauucuuacaga

SEQ ID NO: 308671 - RNA, 19 nt, Homo sapiens
  misc_RNA (1)...(19): siRNA sense strand
cauauuaucgucaccauuu

SEQ ID NO: 308672 - RNA, 19 nt, Homo sapiens
  misc_RNA (1)...(19): siRNA sense strand
cgagauggaguccgauuua

SEQ ID NO: 308673 - RNA, 19 nt, Homo sapiens
  misc_RNA (1)...(19): siRNA sense strand
ggauaugccugaguaugaa

SEQ ID NO: 308674 - RNA, 19 nt, Homo sapiens
  misc_RNA (1)...(19): siRNA sense strand
gaaagaauccaugcagaug

SEQ ID NO: 308675 - RNA, 19 nt, Homo sapiens
  misc_RNA (1)...(19): siRNA sense strand
ggacacauucuuccagauu

SEQ ID NO: 308676 - RNA, 19 nt, Homo sapiens
  misc_RNA (1)...(19): siRNA sense strand
gaucguggcaugacauuga

SEQ ID NO: 308677 - RNA, 19 nt, Homo sapiens
  misc_RNA (1)...(19): siRNA sense strand
ggagaaugguucagguuca

SEQ ID NO: 308678 - RNA, 19 nt, Homo sapiens
  misc_RNA (1)...(19): siRNA sense strand
gacacauucuuccagauuu

SEQ ID NO: 308679 - RNA, 19 nt, Homo sapiens
  misc_RNA (1)...(19): siRNA sense strand
ucagaugccuuugauauuc

SEQ ID NO: 308680 - RNA, 19 nt, Homo sapiens
  misc_RNA (1)...(19): siRNA sense strand
caacuggccauguuauuga

SEQ ID NO: 308681 - RNA, 19 nt, Homo sapiens
  misc_RNA (1)...(19): siRNA sense strand
cagaugucauuaagucuuu

SEQ ID NO: 308682 - RNA, 19 nt, Homo sapiens
  misc_RNA (1)...(19): siRNA sense strand
gauuuccaaugccaagaua

SEQ ID NO: 308683 - RNA, 19 nt, Homo sapiens
  misc_RNA (1)...(19): siRNA sense strand
cuacaaccuuagccauaua

SEQ ID NO: 308684 - RNA, 19 nt, Homo sapiens
  misc_RNA (1)...(19): siRNA sense strand
gaacagguggcacauguca

SEQ ID NO: 308685 - RNA, 19 nt, Homo sapiens
  misc_RNA (1)...(19): siRNA sense strand
gugguacgcuagaaauaaa

SEQ ID NO: 308686 - RNA, 19 nt, Homo sapiens
  misc_RNA (1)...(19): siRNA sense strand
ggaguccgauuuaguugga

SEQ ID NO: 308687 - RNA, 19 nt, Homo sapiens
  misc_RNA (1)...(19): siRNA sense strand
gugugucacucaauucuaa

SEQ ID NO: 308688 - RNA, 19 nt, Homo sapiens
  misc_RNA (1)...(19): siRNA sense strand
agaagaagguccagaugug

SEQ ID NO: 308689 - RNA, 19 nt, Homo sapiens
  misc_RNA (1)...(19): siRNA sense strand
gaacugggcagaugcucaa

SEQ ID NO: 308690 - RNA, 19 nt, Homo sapiens
  misc_RNA (1)...(19): siRNA sense strand
gcauggaagaugaagauuu

SEQ ID NO: 308691 - RNA, 19 nt, Homo sapiens
  misc_RNA (1)...(19): siRNA sense strand
cuucacagacucauaauaa

SEQ ID NO: 308692 - RNA, 19 nt, Homo sapiens
  misc_RNA (1)...(19): siRNA sense strand
gacccagucucuaauuaug

SEQ ID NO: 308693 - RNA, 19 nt, Homo sapiens
  misc_RNA (1)...(19): siRNA sense strand
gcuaggaacugggcagaug

SEQ ID NO: 308694 - RNA, 19 nt, Homo sapiens
  misc_RNA (1)...(19): siRNA sense strand
gauggaguccgauuuaguu

SEQ ID NO: 308695 - RNA, 19 nt, Homo sapiens
  misc_RNA (1)...(19): siRNA sense strand
ugacaaagacaaugccaaa

SEQ ID NO: 308696 - RNA, 19 nt, Homo sapiens
  misc_RNA (1)...(19): siRNA sense strand
gcugguauaucugaacuga

SEQ ID NO: 308697 - RNA, 19 nt, Homo sapiens
  misc_RNA (1)...(19): siRNA sense strand
aaacauugcugcaucuuuu

SEQ ID NO: 308698 - RNA, 19 nt, Homo sapiens
  misc_RNA (1)...(19): siRNA sense strand
gaauggugguuggagauga

SEQ ID NO: 308699 - RNA, 19 nt, Homo sapiens
  misc_RNA (1)...(19): siRNA sense strand
gaguugaagacaccuauaa

SEQ ID NO: 308700 - RNA, 19 nt, Homo sapiens
  misc_RNA (1)...(19): siRNA sense strand
caaccuuagccauauauuu

SEQ ID NO: 308701 - RNA, 19 nt, Homo sapiens
  misc_RNA (1)...(19): siRNA sense strand
agagagaccugacuuacca

SEQ ID NO: 308702 - RNA, 19 nt, Homo sapiens
  misc_RNA (1)...(19): siRNA sense strand
caccuauucuuacagauga

SEQ ID NO: 308703 - RNA, 19 nt, Homo sapiens
  misc_RNA (1)...(19): siRNA sense strand
ggaagaugaagauuuacaa

SEQ ID NO: 308704 - RNA, 19 nt, Homo sapiens
  misc_RNA (1)...(19): siRNA sense strand
agaccugacuuaccaccua

SEQ ID NO: 308705 - RNA, 19 nt, Homo sapiens
  misc_RNA (1)...(19): siRNA sense strand
gggcagaugcucaaacuca

SEQ ID NO: 308706 - RNA, 19 nt, Homo sapiens
  misc_RNA (1)...(19): siRNA sense strand
ugguauaucugaacugaau

SEQ ID NO: 308707 - RNA, 19 nt, Homo sapiens
  misc_RNA (1)...(19): siRNA sense strand
uaaaggacccugugugucu

SEQ ID NO: 308708 - RNA, 19 nt, Homo sapiens
  misc_RNA (1)...(19): siRNA sense strand
gacaaccuauuuggaauuc

SEQ ID NO: 308709 - RNA, 19 nt, Homo sapiens
  misc_RNA (1)...(19): siRNA sense strand
auacuugcauggaagauga

SEQ ID NO: 308710 - RNA, 19 nt, Homo sapiens
  misc_RNA (1)...(19): siRNA sense strand
gcaccuauucuuacagaug

SEQ ID NO: 308711 - RNA, 19 nt, Homo sapiens
  misc_RNA (1)...(19): siRNA sense strand
caauaguccugaugagagu

SEQ ID NO: 308712 - RNA, 19 nt, Homo sapiens
  misc_RNA (1)...(19): siRNA sense strand
ggacagacagcucauucga

SEQ ID NO: 308713 - RNA, 19 nt, Homo sapiens
  misc_RNA (1)...(19): siRNA sense strand
caaccuauuuggaauucau

SEQ ID NO: 308714 - RNA, 19 nt, Homo sapiens
  misc_RNA (1)...(19): siRNA sense strand
ugguuggacuuauuacuuu

SEQ ID NO: 308715 - RNA, 19 nt, Homo sapiens
  misc_RNA (1)...(19): siRNA sense strand
gcagaugucauuaagucuu

SEQ ID NO: 308716 - RNA, 19 nt, Homo sapiens
  misc_RNA (1)...(19): siRNA sense strand
caacagauucuuacaacca

SEQ ID NO: 308717 - RNA, 19 nt, Homo sapiens
  misc_RNA (1)...(19): siRNA sense strand
gcagaucguauucuucuca

SEQ ID NO: 308718 - RNA, 19 nt, Homo sapiens
  misc_RNA (1)...(19): siRNA sense strand
gaucuucuuuccugcaagu

SEQ ID NO: 308719 - RNA, 19 nt, Homo sapiens
  misc_RNA (1)...(19): siRNA sense strand
gucagaaauuuggagaaua

SEQ ID NO: 308720 - RNA, 19 nt, Homo sapiens
  misc_RNA (1)...(19): siRNA sense strand
ggugguacgcuagaaauaa

SEQ ID NO: 308721 - RNA, 19 nt, Homo sapiens
  misc_RNA (1)...(19): siRNA sense strand
gcgagacccuuggccugua

SEQ ID NO: 308722 - RNA, 19 nt, Homo sapiens
  misc_RNA (1)...(19): siRNA sense strand
uacaagcccugaaagaauc

SEQ ID NO: 308723 - RNA, 19 nt, Homo sapiens
  misc_RNA (1)...(19): siRNA sense strand
gcacaugucaguggaagau

SEQ ID NO: 308724 - RNA, 19 nt, Homo sapiens
  misc_RNA (1)...(19): siRNA sense strand
acuuugggcuugcaacuuu

SEQ ID NO: 308725 - RNA, 19 nt, Homo sapiens
  misc_RNA (1)...(19): siRNA sense strand
gauagcaguagcauucuug

SEQ ID NO: 308726 - RNA, 19 nt, Homo sapiens
  misc_RNA (1)...(19): siRNA sense strand
cagagccgguucuucuuga

SEQ ID NO: 308727 - RNA, 19 nt, Homo sapiens
  misc_RNA (1)...(19): siRNA sense strand
gagauggaguccgauuuag

SEQ ID NO: 308728 - RNA, 19 nt, Homo sapiens
  misc_RNA (1)...(19): siRNA sense strand
ccaaguuccuucagauuuu

SEQ ID NO: 308729 - RNA, 19 nt, Homo sapiens
  misc_RNA (1)...(19): siRNA sense strand
gcagaugcucaaacucaaa

SEQ ID NO: 308730 - RNA, 19 nt, Homo sapiens
  misc_RNA (1)...(19): siRNA sense strand
caaccuuacuggaggauac

SEQ ID NO: 308731 - RNA, 19 nt, Homo sapiens
  misc_RNA (1)...(19): siRNA sense strand
gccauguuauugauaucua

SEQ ID NO: 308732 - RNA, 19 nt, Homo sapiens
  misc_RNA (1)...(19): siRNA sense strand
uaaucgagcugcuacaacu

SEQ ID NO: 308733 - RNA, 19 nt, Homo sapiens
  misc_RNA (1)...(19): siRNA sense strand
gaaugguucagguucauga

SEQ ID NO: 308734 - RNA, 19 nt, Homo sapiens
  misc_RNA (1)...(19): siRNA sense strand
ccucagaugccuuugauau

SEQ ID NO: 308735 - RNA, 19 nt, Homo sapiens
  misc_RNA (1)...(19): siRNA sense strand
ccaccuaguuaugcuggua

SEQ ID NO: 308736 - RNA, 19 nt, Homo sapiens
  misc_RNA (1)...(19): siRNA sense strand
caacacuggugcucguauc

SEQ ID NO: 308737 - RNA, 19 nt, Homo sapiens
  misc_RNA (1)...(19): siRNA sense strand
cagaugauguuaguuuaca

SEQ ID NO: 308738 - RNA, 19 nt, Homo sapiens
  misc_RNA (1)...(19): siRNA sense strand
gaagucaggauaccaggau

SEQ ID NO: 308739 - RNA, 19 nt, Homo sapiens
  misc_RNA (1)...(19): siRNA sense strand
uaacaauaguccugaugag

SEQ ID NO: 308740 - RNA, 19 nt, Homo sapiens
  misc_RNA (1)...(19): siRNA sense strand
cgagugaccaccauugcua

SEQ ID NO: 308741 - RNA, 19 nt, Homo sapiens
  misc_RNA (1)...(19): siRNA sense strand
gugauucuuucaauacuuc

SEQ ID NO: 308742 - RNA, 19 nt, Homo sapiens
  misc_RNA (1)...(19): siRNA sense strand
ucuaugugguugauacuug

SEQ ID NO: 308743 - RNA, 19 nt, Homo sapiens
  misc_RNA (1)...(19): siRNA sense strand
gccaucaagucgacuggaa

SEQ ID NO: 308744 - RNA, 19 nt, Homo sapiens
  misc_RNA (1)...(19): siRNA sense strand
gacccaaguuccuucagau

SEQ ID NO: 308745 - RNA, 19 nt, Homo sapiens
  misc_RNA (1)...(19): siRNA sense strand
ugacuuaccaccuauucaa

SEQ ID NO: 308746 - RNA, 19 nt, Homo sapiens
  misc_RNA (1)...(19): siRNA sense strand
aaaaugggcuuugguggua

SEQ ID NO: 308747 - RNA, 19 nt, Homo sapiens
  misc_RNA (1)...(19): siRNA sense strand
gcuacaacuggccauguua

SEQ ID NO: 308748 - RNA, 19 nt, Homo sapiens
  misc_RNA (1)...(19): siRNA sense strand
gcucguaucaugauguuca

SEQ ID NO: 308749 - RNA, 19 nt, Homo sapiens
  misc_RNA (1)...(19): siRNA sense strand
gaagaugaagauuuacaag

SEQ ID NO: 308750 - RNA, 19 nt, Homo sapiens
  misc_RNA (1)...(19): siRNA sense strand
gauucagccuauccuguau

SEQ ID NO: 308751 - RNA, 19 nt, Homo sapiens
  misc_RNA (1)...(19): siRNA sense strand
acuggaagcuacaagaaug

SEQ ID NO: 308752 - RNA, 19 nt, Homo sapiens
  misc_RNA (1)...(19): siRNA sense strand
gagccgguucuucuugaua

SEQ ID NO: 308753 - RNA, 19 nt, Homo sapiens
  misc_RNA (1)...(19): siRNA sense strand
gaaagaacguccagaccua

SEQ ID NO: 308754 - RNA, 19 nt, Homo sapiens
  misc_RNA (1)...(19): siRNA sense strand
gcacauagaagcagcauuu

SEQ ID NO: 308755 - RNA, 19 nt, Homo sapiens
  misc_RNA (1)...(19): siRNA sense strand
gaaucaaccugccgaauug

SEQ ID NO: 308756 - RNA, 19 nt, Homo sapiens
  misc_RNA (1)...(19): siRNA sense strand
ggaugaugcucaagaaauu

SEQ ID NO: 308757 - RNA, 19 nt, Homo sapiens
  misc_RNA (1)...(19): siRNA sense strand
gcaaauacaggauauguug

SEQ ID NO: 308758 - RNA, 19 nt, Homo sapiens
  misc_RNA (1)...(19): siRNA sense strand
gaaccucacugaucuucuu

SEQ ID NO: 308759 - RNA, 19 nt, Homo sapiens
  misc_RNA (1)...(19): siRNA sense strand
gaaggaaucuccaaaaguu

SEQ ID NO: 308760 - RNA, 19 nt, Homo sapiens
  misc_RNA (1)...(19): siRNA sense strand
ggauuuaacugcaaagcaa

SEQ ID NO: 308761 - RNA, 19 nt, Homo sapiens
  misc_RNA (1)...(19): siRNA sense strand
gaaagauaaugcacgauuc

SEQ ID NO: 308762 - RNA, 19 nt, Homo sapiens
  misc_RNA (1)...(19): siRNA sense strand
gauccuacaucuacacuug

SEQ ID NO: 308763 - RNA, 19 nt, Homo sapiens
  misc_RNA (1)...(19): siRNA sense strand
gcugauggauacuuucuuu

SEQ ID NO: 308764 - RNA, 19 nt, Homo sapiens
  misc_RNA (1)...(19): siRNA sense strand
gaaaggaccguguguguca

SEQ ID NO: 308765 - RNA, 19 nt, Homo sapiens
  misc_RNA (1)...(19): siRNA sense strand
gcaaagcaaauacaggaua

SEQ ID NO: 308766 - RNA, 19 nt, Homo sapiens
  misc_RNA (1)...(19): siRNA sense strand
gagaugaaguguugugcaa

SEQ ID NO: 308767 - RNA, 19 nt, Homo sapiens
  misc_RNA (1)...(19): siRNA sense strand
cgacauaccuggaguucau

SEQ ID NO: 308768 - RNA, 19 nt, Homo sapiens
  misc_RNA (1)...(19): siRNA sense strand
caaagcaaauacaggauau

SEQ ID NO: 308769 - RNA, 19 nt, Homo sapiens
  misc_RNA (1)...(19): siRNA sense strand
ggcaugauauugagaaaga

SEQ ID NO: 308770 - RNA, 19 nt, Homo sapiens
  misc_RNA (1)...(19): siRNA sense strand
gauaaugcacgauucauga

SEQ ID NO: 308771 - RNA, 19 nt, Homo sapiens
  misc_RNA (1)...(19): siRNA sense strand
gagcacccauccuaacuga

SEQ ID NO: 308772 - RNA, 19 nt, Homo sapiens
  misc_RNA (1)...(19): siRNA sense strand
uaauggagauuuccgaaug

SEQ ID NO: 308773 - RNA, 19 nt, Homo sapiens
  misc_RNA (1)...(19): siRNA sense strand
aagcagacauuccaaagaa

SEQ ID NO: 308774 - RNA, 19 nt, Homo sapiens
  misc_RNA (1)...(19): siRNA sense strand
gaugaaguguugugcaaau

SEQ ID NO: 308775 - RNA, 19 nt, Homo sapiens
  misc_RNA (1)...(19): siRNA sense strand
acacaugccuggaggaaga

SEQ ID NO: 308776 - RNA, 19 nt, Homo sapiens
  misc_RNA (1)...(19): siRNA sense strand
gauaugaaccucacugauc

SEQ ID NO: 308777 - RNA, 19 nt, Homo sapiens
  misc_RNA (1)...(19): siRNA sense strand
gaagauugcaggagccauu

SEQ ID NO: 308778 - RNA, 19 nt, Homo sapiens
  misc_RNA (1)...(19): siRNA sense strand
acuaugagaugcuugcuaa

SEQ ID NO: 308779 - RNA, 19 nt, Homo sapiens
  misc_RNA (1)...(19): siRNA sense strand
gagauucuuucaacacuuc

SEQ ID NO: 308780 - RNA, 19 nt, Homo sapiens
  misc_RNA (1)...(19): siRNA sense strand
gaaggauggugcagguuca

SEQ ID NO: 308781 - RNA, 19 nt, Homo sapiens
  misc_RNA (1)...(19): siRNA sense strand
gggcagauguacagaguca

SEQ ID NO: 308782 - RNA, 19 nt, Homo sapiens
  misc_RNA (1)...(19): siRNA sense strand
cagaggagccauccaguuu

SEQ ID NO: 308783 - RNA, 19 nt, Homo sapiens
  misc_RNA (1)...(19): siRNA sense strand
gaaguguugugcaaaucuu

SEQ ID NO: 308784 - RNA, 19 nt, Homo sapiens
  misc_RNA (1)...(19): siRNA sense strand
gguuggagaugaauuaaag

SEQ ID NO: 308785 - RNA, 19 nt, Homo sapiens
  misc_RNA (1)...(19): siRNA sense strand
gcagcaggccaacuuguaa

SEQ ID NO: 308786 - RNA, 19 nt, Homo sapiens
  misc_RNA (1)...(19): siRNA sense strand
ucucuacucuuacuccuuu

SEQ ID NO: 308787 - RNA, 19 nt, Homo sapiens
  misc_RNA (1)...(19): siRNA sense strand
ccucugaucuuucucuaug

SEQ ID NO: 308788 - RNA, 19 nt, Homo sapiens
  misc_RNA (1)...(19): siRNA sense strand
agaccuaccuccuguacaa

SEQ ID NO: 308789 - RNA, 19 nt, Homo sapiens
  misc_RNA (1)...(19): siRNA sense strand
ggacaugcccgaguaugaa

SEQ ID NO: 308790 - RNA, 19 nt, Homo sapiens
  misc_RNA (1)...(19): siRNA sense strand
gauggauacuuucuuucaa

SEQ ID NO: 308791 - RNA, 19 nt, Homo sapiens
  misc_RNA (1)...(19): siRNA sense strand
gaggagccauccaguuugu

SEQ ID NO: 308792 - RNA, 19 nt, Homo sapiens
  misc_RNA (1)...(19): siRNA sense strand
caacacuucucucuucaag

SEQ ID NO: 308793 - RNA, 19 nt, Homo sapiens
  misc_RNA (1)...(19): siRNA sense strand
gucacugcauugauauuua

SEQ ID NO: 308794 - RNA, 19 nt, Homo sapiens
  misc_RNA (1)...(19): siRNA sense strand
ccaaggauuuaacugcaaa

SEQ ID NO: 308795 - RNA, 19 nt, Homo sapiens
  misc_RNA (1)...(19): siRNA sense strand
gcuaagcugugaaggaauc

SEQ ID NO: 308796 - RNA, 19 nt, Homo sapiens
  misc_RNA (1)...(19): siRNA sense strand
gccaggaucaugcuguuua

SEQ ID NO: 308797 - RNA, 19 nt, Homo sapiens
  misc_RNA (1)...(19): siRNA sense strand
gcuggaggcuacaagaaug

SEQ ID NO: 308798 - RNA, 19 nt, Homo sapiens
  misc_RNA (1)...(19): siRNA sense strand
caucucagacacacaauaa

SEQ ID NO: 308799 - RNA, 19 nt, Homo sapiens
  misc_RNA (1)...(19): siRNA sense strand
caguuuauguuccaucuga

SEQ ID NO: 308800 - RNA, 19 nt, Homo sapiens
  misc_RNA (1)...(19): siRNA sense strand
gcguaucucugaaugugaa

SEQ ID NO: 308801 - RNA, 19 nt, Homo sapiens
  misc_RNA (1)...(19): siRNA sense strand
uaacaacaguccugaugag

SEQ ID NO: 308802 - RNA, 19 nt, Homo sapiens
  misc_RNA (1)...(19): siRNA sense strand
ugaaucaaccugccgaauu

SEQ ID NO: 308803 - RNA, 19 nt, Homo sapiens
  misc_RNA (1)...(19): siRNA sense strand
gauagcagcagcauucuag

SEQ ID NO: 308804 - RNA, 19 nt, Homo sapiens
  misc_RNA (1)...(19): siRNA sense strand
gagccaggaucaugcuguu

SEQ ID NO: 308805 - RNA, 19 nt, Homo sapiens
  misc_RNA (1)...(19): siRNA sense strand
ggucugaucacauuuggaa

SEQ ID NO: 308806 - RNA, 19 nt, Homo sapiens
  misc_RNA (1)...(19): siRNA sense strand
caaccaagcacuaugagau

SEQ ID NO: 308807 - RNA, 19 nt, Homo sapiens
  misc_RNA (1)...(19): siRNA sense strand
aaagugaacccaucucaga

SEQ ID NO: 308808 - RNA, 19 nt, Homo sapiens
  misc_RNA (1)...(19): siRNA sense strand
caucuacacuuggcaucua

SEQ ID NO: 308809 - RNA, 19 nt, Homo sapiens
  misc_RNA (1)...(19): siRNA sense strand
acacuucucucuucaagca

SEQ ID NO: 308810 - RNA, 19 nt, Homo sapiens
  misc_RNA (1)...(19): siRNA sense strand
ggagauucuuucaacacuu

SEQ ID NO: 308811 - RNA, 19 nt, Homo sapiens
  misc_RNA (1)...(19): siRNA sense strand
ggugguuggagaugaauua

SEQ ID NO: 308812 - RNA, 19 nt, Homo sapiens
  misc_RNA (1)...(19): siRNA sense strand
gaaauugggcagauguaca

SEQ ID NO: 308813 - RNA, 19 nt, Homo sapiens
  misc_RNA (1)...(19): siRNA sense strand
guucuuggcaugauauuga

SEQ ID NO: 308814 - RNA, 19 nt, Homo sapiens
  misc_RNA (1)...(19): siRNA sense strand
gcagaggagccauccaguu

SEQ ID NO: 308815 - RNA, 19 nt, Homo sapiens
  misc_RNA (1)...(19): siRNA sense strand
uuucaacacuucucucuuc

SEQ ID NO: 308816 - RNA, 19 nt, Homo sapiens
  misc_RNA (1)...(19): siRNA sense strand
cacaauaaccuguaugcuu

SEQ ID NO: 308817 - RNA, 19 nt, Homo sapiens
  misc_RNA (1)...(19): siRNA sense strand
gacaguauaacaaagaaga

SEQ ID NO: 308818 - RNA, 19 nt, Homo sapiens
  misc_RNA (1)...(19): siRNA sense strand
gagccaguacucuuggaua

SEQ ID NO: 308819 - RNA, 19 nt, Homo sapiens
  misc_RNA (1)...(19): siRNA sense strand
agaaagauaaugcacgauu

SEQ ID NO: 308820 - RNA, 19 nt, Homo sapiens
  misc_RNA (1)...(19): siRNA sense strand
ggucacugcauugauauuu

SEQ ID NO: 308821 - RNA, 19 nt, Homo sapiens
  misc_RNA (1)...(19): siRNA sense strand
ucgaacagcugcaaauggu

SEQ ID NO: 308822 - RNA, 19 nt, Homo sapiens
  misc_RNA (1)...(19): siRNA sense strand
gcauaucugaggugaauca

SEQ ID NO: 308823 - RNA, 19 nt, Homo sapiens
  misc_RNA (1)...(19): siRNA sense strand
cgacaacucauccgacugu

SEQ ID NO: 308824 - RNA, 19 nt, Homo sapiens
  misc_RNA (1)...(19): siRNA sense strand
aauaugaaccugugcuuug

SEQ ID NO: 308825 - RNA, 19 nt, Homo sapiens
  misc_RNA (1)...(19): siRNA sense strand
gcauggugguuggagauga

SEQ ID NO: 308826 - RNA, 19 nt, Homo sapiens
  misc_RNA (1)...(19): siRNA sense strand
ucacaagauugauaugaac

SEQ ID NO: 308827 - RNA, 19 nt, Homo sapiens
  misc_RNA (1)...(19): siRNA sense strand
gacacacaauaaccuguau

SEQ ID NO: 308828 - RNA, 19 nt, Homo sapiens
  misc_RNA (1)...(19): siRNA sense strand
uagguuaucagauuccuuu

SEQ ID NO: 308829 - RNA, 19 nt, Homo sapiens
  misc_RNA (1)...(19): siRNA sense strand
ggcauuuggugcuacuuug

SEQ ID NO: 308830 - RNA, 19 nt, Homo sapiens
  misc_RNA (1)...(19): siRNA sense strand
gguguggcuuuguccauug

SEQ ID NO: 308831 - RNA, 19 nt, Homo sapiens
  misc_RNA (1)...(19): siRNA sense strand
aaacuuugggccuguaauu

SEQ ID NO: 308832 - RNA, 19 nt, Homo sapiens
  misc_RNA (1)...(19): siRNA sense strand
caagcagacauuccaaaga

SEQ ID NO: 308833 - RNA, 19 nt, Homo sapiens
  misc_RNA (1)...(19): siRNA sense strand
caaagagucccugcagaug

SEQ ID NO: 308834 - RNA, 19 nt, Homo sapiens
  misc_RNA (1)...(19): siRNA sense strand
aggcauaucugaggugaau

SEQ ID NO: 308835 - RNA, 19 nt, Homo sapiens
  misc_RNA (1)...(19): siRNA sense strand
ucaguuuccuccagcuuau

SEQ ID NO: 308836 - RNA, 19 nt, Homo sapiens
  misc_RNA (1)...(19): siRNA sense strand
ucaaagagucccugcagau

SEQ ID NO: 308837 - RNA, 19 nt, Homo sapiens
  misc_RNA (1)...(19): siRNA sense strand
gaucuccauuucuucaagu

SEQ ID NO: 308838 - RNA, 19 nt, Homo sapiens
  misc_RNA (1)...(19): siRNA sense strand
gguaaugggagauucuuuc

SEQ ID NO: 308839 - RNA, 19 nt, Homo sapiens
  misc_RNA (1)...(19): siRNA sense strand
cauggugguuggagaugaa

SEQ ID NO: 308840 - RNA, 19 nt, Homo sapiens
  misc_RNA (1)...(19): siRNA sense strand
ggauggugcagguucauga

SEQ ID NO: 308841 - RNA, 19 nt, Homo sapiens
  misc_RNA (1)...(19): siRNA sense strand
gcagccuguucacaagauu

SEQ ID NO: 308842 - RNA, 19 nt, Homo sapiens
  misc_RNA (1)...(19): siRNA sense strand
ccaguacucuuggauagca

SEQ ID NO: 308843 - RNA, 19 nt, Homo sapiens
  misc_RNA (1)...(19): siRNA sense strand
ggugcagguucaugagcua

SEQ ID NO: 308844 - RNA, 19 nt, Homo sapiens
  misc_RNA (1)...(19): siRNA sense strand
gcuucccgaugccacguua

SEQ ID NO: 308845 - RNA, 19 nt, Homo sapiens
  misc_RNA (1)...(19): siRNA sense strand
uccaguuugucacgcauua

SEQ ID NO: 308846 - RNA, 19 nt, Homo sapiens
  misc_RNA (1)...(19): siRNA sense strand
gugcuacuuuggacguaaa

SEQ ID NO: 308847 - RNA, 19 nt, Homo sapiens
  misc_RNA (1)...(19): siRNA sense strand
gggagauucuuucaacacu

SEQ ID NO: 308848 - RNA, 19 nt, Homo sapiens
  misc_RNA (1)...(19): siRNA sense strand
guaaugggagauucuuuca

SEQ ID NO: 308849 - RNA, 19 nt, Homo sapiens
  misc_RNA (1)...(19): siRNA sense strand
gaugcuugcuaaucgaaca

SEQ ID NO: 308850 - RNA, 19 nt, Homo sapiens
  misc_RNA (1)...(19): siRNA sense strand
acuggaggcuacaugguaa

SEQ ID NO: 308851 - RNA, 19 nt, Homo sapiens
  misc_RNA (1)...(19): siRNA sense strand
gaauuuugcugauggauac

SEQ ID NO: 308852 - RNA, 19 nt, Homo sapiens
  misc_RNA (1)...(19): siRNA sense strand
ggauagcagcagcauucua

SEQ ID NO: 308853 - RNA, 19 nt, Homo sapiens
  misc_RNA (1)...(19): siRNA sense strand
gaaagaacguccagaccua

SEQ ID NO: 308854 - RNA, 19 nt, Homo sapiens
  misc_RNA (1)...(19): siRNA sense strand
gcacauagaagcagcauuu

SEQ ID NO: 308855 - RNA, 19 nt, Homo sapiens
  misc_RNA (1)...(19): siRNA sense strand
gaaucaaccugccgaauug

SEQ ID NO: 308856 - RNA, 19 nt, Homo sapiens
  misc_RNA (1)...(19): siRNA sense strand
ggaugaugcucaagaaauu

SEQ ID NO: 308857 - RNA, 19 nt, Homo sapiens
  misc_RNA (1)...(19): siRNA sense strand
gcaaauacaggauauguug

SEQ ID NO: 308858 - RNA, 19 nt, Homo sapiens
  misc_RNA (1)...(19): siRNA sense strand
gaaccucacugaucuucuu

SEQ ID NO: 308859 - RNA, 19 nt, Homo sapiens
  misc_RNA (1)...(19): siRNA sense strand
gaaggaaucuccaaaaguu

SEQ ID NO: 308860 - RNA, 19 nt, Homo sapiens
  misc_RNA (1)...(19): siRNA sense strand
ggauuuaacugcaaagcaa

SEQ ID NO: 308861 - RNA, 19 nt, Homo sapiens
  misc_RNA (1)...(19): siRNA sense strand
gaaagauaaugcacgauuc

SEQ ID NO: 308862 - RNA, 19 nt, Homo sapiens
  misc_RNA (1)...(19): siRNA sense strand
gauccuacaucuacacuug

SEQ ID NO: 308863 - RNA, 19 nt, Homo sapiens
  misc_RNA (1)...(19): siRNA sense strand
gcugauggauacuuucuuu

SEQ ID NO: 308864 - RNA, 19 nt, Homo sapiens
  misc_RNA (1)...(19): siRNA sense strand
gaaaggaccguguguguca

SEQ ID NO: 308865 - RNA, 19 nt, Homo sapiens
  misc_RNA (1)...(19): siRNA sense strand
gcaaagcaaauacaggaua

SEQ ID NO: 308866 - RNA, 19 nt, Homo sapiens
  misc_RNA (1)...(19): siRNA sense strand
gagaugaaguguugugcaa

SEQ ID NO: 308867 - RNA, 19 nt, Homo sapiens
  misc_RNA (1)...(19): siRNA sense strand
cgacauaccuggaguucau

SEQ ID NO: 308868 - RNA, 19 nt, Homo sapiens
  misc_RNA (1)...(19): siRNA sense strand
caaagcaaauacaggauau

SEQ ID NO: 308869 - RNA, 19 nt, Homo sapiens
  misc_RNA (1)...(19): siRNA sense strand
ggcaugauauugagaaaga

SEQ ID NO: 308870 - RNA, 19 nt, Homo sapiens
  misc_RNA (1)...(19): siRNA sense strand
gauaaugcacgauucauga

SEQ ID NO: 308871 - RNA, 19 nt, Homo sapiens
  misc_RNA (1)...(19): siRNA sense strand
gagcacccauccuaacuga

SEQ ID NO: 308872 - RNA, 19 nt, Homo sapiens
  misc_RNA (1)...(19): siRNA sense strand
uaauggagauuuccgaaug

SEQ ID NO: 308873 - RNA, 19 nt, Homo sapiens
  misc_RNA (1)...(19): siRNA sense strand
aagcagacauuccaaagaa

SEQ ID NO: 308874 - RNA, 19 nt, Homo sapiens
  misc_RNA (1)...(19): siRNA sense strand
gaugaaguguugugcaaau

SEQ ID NO: 308875 - RNA, 19 nt, Homo sapiens
  misc_RNA (1)...(19): siRNA sense strand
acacaugccuggaggaaga

SEQ ID NO: 308876 - RNA, 19 nt, Homo sapiens
  misc_RNA (1)...(19): siRNA sense strand
gauaugaaccucacugauc

SEQ ID NO: 308877 - RNA, 19 nt, Homo sapiens
  misc_RNA (1)...(19): siRNA sense strand
gaagauugcaggagccauu

SEQ ID NO: 308878 - RNA, 19 nt, Homo sapiens
  misc_RNA (1)...(19): siRNA sense strand
acuaugagaugcuugcuaa

SEQ ID NO: 308879 - RNA, 19 nt, Homo sapiens
  misc_RNA (1)...(19): siRNA sense strand
gagauucuuucaacacuuc

SEQ ID NO: 308880 - RNA, 19 nt, Homo sapiens
  misc_RNA (1)...(19): siRNA sense strand
gaaggauggugcagguuca

SEQ ID NO: 308881 - RNA, 19 nt, Homo sapiens
  misc_RNA (1)...(19): siRNA sense strand
gggcagauguacagaguca

SEQ ID NO: 308882 - RNA, 19 nt, Homo sapiens
  misc_RNA (1)...(19): siRNA sense strand
cagaggagccauccaguuu

SEQ ID NO: 308883 - RNA, 19 nt, Homo sapiens
  misc_RNA (1)...(19): siRNA sense strand
gaaguguugugcaaaucuu

SEQ ID NO: 308884 - RNA, 19 nt, Homo sapiens
  misc_RNA (1)...(19): siRNA sense strand
gguuggagaugaauuaaag

SEQ ID NO: 308885 - RNA, 19 nt, Homo sapiens
  misc_RNA (1)...(19): siRNA sense strand
gcagcaggccaacuuguaa

SEQ ID NO: 308886 - RNA, 19 nt, Homo sapiens
  misc_RNA (1)...(19): siRNA sense strand
ucucuacucuuacuccuuu

SEQ ID NO: 308887 - RNA, 19 nt, Homo sapiens
  misc_RNA (1)...(19): siRNA sense strand
ccucugaucuuucucuaug

SEQ ID NO: 308888 - RNA, 19 nt, Homo sapiens
  misc_RNA (1)...(19): siRNA sense strand
agaccuaccuccuguacaa

SEQ ID NO: 308889 - RNA, 19 nt, Homo sapiens
  misc_RNA (1)...(19): siRNA sense strand
ggacaugcccgaguaugaa

SEQ ID NO: 308890 - RNA, 19 nt, Homo sapiens
  misc_RNA (1)...(19): siRNA sense strand
gauggauacuuucuuucaa

SEQ ID NO: 308891 - RNA, 19 nt, Homo sapiens
  misc_RNA (1)...(19): siRNA sense strand
gaggagccauccaguuugu

SEQ ID NO: 308892 - RNA, 19 nt, Homo sapiens
  misc_RNA (1)...(19): siRNA sense strand
caacacuucucucuucaag

SEQ ID NO: 308893 - RNA, 19 nt, Homo sapiens
  misc_RNA (1)...(19): siRNA sense strand
gucacugcauugauauuua

SEQ ID NO: 308894 - RNA, 19 nt, Homo sapiens
  misc_RNA (1)...(19): siRNA sense strand
ccaaggauuuaacugcaaa

SEQ ID NO: 308895 - RNA, 19 nt, Homo sapiens
  misc_RNA (1)...(19): siRNA sense strand
gcuaagcugugaaggaauc

SEQ ID NO: 308896 - RNA, 19 nt, Homo sapiens
  misc_RNA (1)...(19): siRNA sense strand
gccaggaucaugcuguuua

SEQ ID NO: 308897 - RNA, 19 nt, Homo sapiens
  misc_RNA (1)...(19): siRNA sense strand
gcuggaggcuacaagaaug

SEQ ID NO: 308898 - RNA, 19 nt, Homo sapiens
  misc_RNA (1)...(19): siRNA sense strand
caucucagacacacaauaa

SEQ ID NO: 308899 - RNA, 19 nt, Homo sapiens
  misc_RNA (1)...(19): siRNA sense strand
caguuuauguuccaucuga

SEQ ID NO: 308900 - RNA, 19 nt, Homo sapiens
  misc_RNA (1)...(19): siRNA sense strand
gcguaucucugaaugugaa

SEQ ID NO: 308901 - RNA, 19 nt, Homo sapiens
  misc_RNA (1)...(19): siRNA sense strand
uaacaacaguccugaugag

SEQ ID NO: 308902 - RNA, 19 nt, Homo sapiens
  misc_RNA (1)...(19): siRNA sense strand
ugaaucaaccugccgaauu

SEQ ID NO: 308903 - RNA, 19 nt, Homo sapiens
  misc_RNA (1)...(19): siRNA sense strand
gauagcagcagcauucuag

SEQ ID NO: 308904 - RNA, 19 nt, Homo sapiens
  misc_RNA (1)...(19): siRNA sense strand
gagccaggaucaugcuguu

SEQ ID NO: 308905 - RNA, 19 nt, Homo sapiens
  misc_RNA (1)...(19): siRNA sense strand
ggucugaucacauuuggaa

SEQ ID NO: 308906 - RNA, 19 nt, Homo sapiens
  misc_RNA (1)...(19): siRNA sense strand
caaccaagcacuaugagau

SEQ ID NO: 308907 - RNA, 19 nt, Homo sapiens
  misc_RNA (1)...(19): siRNA sense strand
aaagugaacccaucucaga

SEQ ID NO: 308908 - RNA, 19 nt, Homo sapiens
  misc_RNA (1)...(19): siRNA sense strand
caucuacacuuggcaucua

SEQ ID NO: 308909 - RNA, 19 nt, Homo sapiens
  misc_RNA (1)...(19): siRNA sense strand
acacuucucucuucaagca

SEQ ID NO: 308910 - RNA, 19 nt, Homo sapiens
  misc_RNA (1)...(19): siRNA sense strand
ggagauucuuucaacacuu

SEQ ID NO: 308911 - RNA, 19 nt, Homo sapiens
  misc_RNA (1)...(19): siRNA sense strand
ggugguuggagaugaauua

SEQ ID NO: 308912 - RNA, 19 nt, Homo sapiens
  misc_RNA (1)...(19): siRNA sense strand
gaaauugggcagauguaca

SEQ ID NO: 308913 - RNA, 19 nt, Homo sapiens
  misc_RNA (1)...(19): siRNA sense strand
guucuuggcaugauauuga

SEQ ID NO: 308914 - RNA, 19 nt, Homo sapiens
  misc_RNA (1)...(19): siRNA sense strand
gcagaggagccauccaguu

SEQ ID NO: 308915 - RNA, 19 nt, Homo sapiens
  misc_RNA (1)...(19): siRNA sense strand
uuucaacacuucucucuuc

SEQ ID NO: 308916 - RNA, 19 nt, Homo sapiens
  misc_RNA (1)...(19): siRNA sense strand
cacaauaaccuguaugcuu

SEQ ID NO: 308917 - RNA, 19 nt, Homo sapiens
  misc_RNA (1)...(19): siRNA sense strand
gacaguauaacaaagaaga

SEQ ID NO: 308918 - RNA, 19 nt, Homo sapiens
  misc_RNA (1)...(19): siRNA sense strand
gagccaguacucuuggaua

SEQ ID NO: 308919 - RNA, 19 nt, Homo sapiens
  misc_RNA (1)...(19): siRNA sense strand
agaaagauaaugcacgauu

SEQ ID NO: 308920 - RNA, 19 nt, Homo sapiens
  misc_RNA (1)...(19): siRNA sense strand
ggucacugcauugauauuu

SEQ ID NO: 308921 - RNA, 19 nt, Homo sapiens
  misc_RNA (1)...(19): siRNA sense strand
ucgaacagcugcaaauggu

SEQ ID NO: 308922 - RNA, 19 nt, Homo sapiens
  misc_RNA (1)...(19): siRNA sense strand
gcauaucugaggugaauca

SEQ ID NO: 308923 - RNA, 19 nt, Homo sapiens
  misc_RNA (1)...(19): siRNA sense strand
cgacaacucauccgacugu

SEQ ID NO: 308924 - RNA, 19 nt, Homo sapiens
  misc_RNA (1)...(19): siRNA sense strand
aauaugaaccugugcuuug

SEQ ID NO: 308925 - RNA, 19 nt, Homo sapiens
  misc_RNA (1)...(19): siRNA sense strand
gcauggugguuggagauga

SEQ ID NO: 308926 - RNA, 19 nt, Homo sapiens
  misc_RNA (1)...(19): siRNA sense strand
ucacaagauugauaugaac

SEQ ID NO: 308927 - RNA, 19 nt, Homo sapiens
  misc_RNA (1)...(19): siRNA sense strand
gacacacaauaaccuguau

SEQ ID NO: 308928 - RNA, 19 nt, Homo sapiens
  misc_RNA (1)...(19): siRNA sense strand
uagguuaucagauuccuuu

SEQ ID NO: 308929 - RNA, 19 nt, Homo sapiens
  misc_RNA (1)...(19): siRNA sense strand
ggcauuuggugcuacuuug

SEQ ID NO: 308930 - RNA, 19 nt, Homo sapiens
  misc_RNA (1)...(19): siRNA sense strand
gguguggcuuuguccauug

SEQ ID NO: 308931 - RNA, 19 nt, Homo sapiens
  misc_RNA (1)...(19): siRNA sense strand
aaacuuugggccuguaauu

SEQ ID NO: 308932 - RNA, 19 nt, Homo sapiens
  misc_RNA (1)...(19): siRNA sense strand
caagcagacauuccaaaga

SEQ ID NO: 308933 - RNA, 19 nt, Homo sapiens
  misc_RNA (1)...(19): siRNA sense strand
caaagagucccugcagaug

SEQ ID NO: 308934 - RNA, 19 nt, Homo sapiens
  misc_RNA (1)...(19): siRNA sense strand
aggcauaucugaggugaau

SEQ ID NO: 308935 - RNA, 19 nt, Homo sapiens
  misc_RNA (1)...(19): siRNA sense strand
ucaguuuccuccagcuuau

SEQ ID NO: 308936 - RNA, 19 nt, Homo sapiens
  misc_RNA (1)...(19): siRNA sense strand
ucaaagagucccugcagau

SEQ ID NO: 308937 - RNA, 19 nt, Homo sapiens
  misc_RNA (1)...(19): siRNA sense strand
gaucuccauuucuucaagu

SEQ ID NO: 308938 - RNA, 19 nt, Homo sapiens
  misc_RNA (1)...(19): siRNA sense strand
gguaaugggagauucuuuc

SEQ ID NO: 308939 - RNA, 19 nt, Homo sapiens
  misc_RNA (1)...(19): siRNA sense strand
cauggugguuggagaugaa

SEQ ID NO: 308940 - RNA, 19 nt, Homo sapiens
  misc_RNA (1)...(19): siRNA sense strand
ggauggugcagguucauga

SEQ ID NO: 308941 - RNA, 19 nt, Homo sapiens
  misc_RNA (1)...(19): siRNA sense strand
gcagccuguucacaagauu

SEQ ID NO: 308942 - RNA, 19 nt, Homo sapiens
  misc_RNA (1)...(19): siRNA sense strand
ccaguacucuuggauagca

SEQ ID NO: 308943 - RNA, 19 nt, Homo sapiens
  misc_RNA (1)...(19): siRNA sense strand
ggugcagguucaugagcua

SEQ ID NO: 308944 - RNA, 19 nt, Homo sapiens
  misc_RNA (1)...(19): siRNA sense strand
gcuucccgaugccacguua

SEQ ID NO: 308945 - RNA, 19 nt, Homo sapiens
  misc_RNA (1)...(19): siRNA sense strand
uccaguuugucacgcauua

SEQ ID NO: 308946 - RNA, 19 nt, Homo sapiens
  misc_RNA (1)...(19): siRNA sense strand
gugcuacuuuggacguaaa

SEQ ID NO: 308947 - RNA, 19 nt, Homo sapiens
  misc_RNA (1)...(19): siRNA sense strand
gggagauucuuucaacacu

SEQ ID NO: 308948 - RNA, 19 nt, Homo sapiens
  misc_RNA (1)...(19): siRNA sense strand
guaaugggagauucuuuca

SEQ ID NO: 308949 - RNA, 19 nt, Homo sapiens
  misc_RNA (1)...(19): siRNA sense strand
gaugcuugcuaaucgaaca

SEQ ID NO: 308950 - RNA, 19 nt, Homo sapiens
  misc_RNA (1)...(19): siRNA sense strand
acuggaggcuacaugguaa

SEQ ID NO: 308951 - RNA, 19 nt, Homo sapiens
  misc_RNA (1)...(19): siRNA sense strand
gaauuuugcugauggauac

SEQ ID NO: 308952 - RNA, 19 nt, Homo sapiens
  misc_RNA (1)...(19): siRNA sense strand
ggauagcagcagcauucua

SEQ ID NO: 308953 - RNA, 19 nt, Homo sapiens
  misc_RNA (1)...(19): siRNA sense strand
gaaagaacguccagaccua

SEQ ID NO: 308954 - RNA, 19 nt, Homo sapiens
  misc_RNA (1)...(19): siRNA sense strand
gcacauagaagcagcauuu

SEQ ID NO: 308955 - RNA, 19 nt, Homo sapiens
  misc_RNA (1)...(19): siRNA sense strand
gaaucaaccugccgaauug

SEQ ID NO: 308956 - RNA, 19 nt, Homo sapiens
  misc_RNA (1)...(19): siRNA sense strand
ggaugaugcucaagaaauu

SEQ ID NO: 308957 - RNA, 19 nt, Homo sapiens
  misc_RNA (1)...(19): siRNA sense strand
gcaaauacaggauauguug

SEQ ID NO: 308958 - RNA, 19 nt, Homo sapiens
  misc_RNA (1)...(19): siRNA sense strand
gaaccucacugaucuucuu

SEQ ID NO: 308959 - RNA, 19 nt, Homo sapiens
  misc_RNA (1)...(19): siRNA sense strand
gaaggaaucuccaaaaguu

SEQ ID NO: 308960 - RNA, 19 nt, Homo sapiens
  misc_RNA (1)...(19): siRNA sense strand
ggauuuaacugcaaagcaa

SEQ ID NO: 308961 - RNA, 19 nt, Homo sapiens
  misc_RNA (1)...(19): siRNA sense strand
gaaagauaaugcacgauuc

SEQ ID NO: 308962 - RNA, 19 nt, Homo sapiens
  misc_RNA (1)...(19): siRNA sense strand
gauccuacaucuacacuug

SEQ ID NO: 308963 - RNA, 19 nt, Homo sapiens
  misc_RNA (1)...(19): siRNA sense strand
gcugauggauacuuucuuu

SEQ ID NO: 308964 - RNA, 19 nt, Homo sapiens
  misc_RNA (1)...(19): siRNA sense strand
gaaaggaccguguguguca

SEQ ID NO: 308965 - RNA, 19 nt, Homo sapiens
  misc_RNA (1)...(19): siRNA sense strand
gcaaagcaaauacaggaua

SEQ ID NO: 308966 - RNA, 19 nt, Homo sapiens
  misc_RNA (1)...(19): siRNA sense strand
gagaugaaguguugugcaa

SEQ ID NO: 308967 - RNA, 19 nt, Homo sapiens
  misc_RNA (1)...(19): siRNA sense strand
cgacauaccuggaguucau

SEQ ID NO: 308968 - RNA, 19 nt, Homo sapiens
  misc_RNA (1)...(19): siRNA sense strand
caaagcaaauacaggauau

SEQ ID NO: 308969 - RNA, 19 nt, Homo sapiens
  misc_RNA (1)...(19): siRNA sense strand
ggcaugauauugagaaaga

SEQ ID NO: 308970 - RNA, 19 nt, Homo sapiens
  misc_RNA (1)...(19): siRNA sense strand
gauaaugcacgauucauga

SEQ ID NO: 308971 - RNA, 19 nt, Homo sapiens
  misc_RNA (1)...(19): siRNA sense strand
gagcacccauccuaacuga

SEQ ID NO: 308972 - RNA, 19 nt, Homo sapiens
  misc_RNA (1)...(19): siRNA sense strand
uaauggagauuuccgaaug

SEQ ID NO: 308973 - RNA, 19 nt, Homo sapiens
  misc_RNA (1)...(19): siRNA sense strand
aagcagacauuccaaagaa

SEQ ID NO: 308974 - RNA, 19 nt, Homo sapiens
  misc_RNA (1)...(19): siRNA sense strand
gaugaaguguugugcaaau

SEQ ID NO: 308975 - RNA, 19 nt, Homo sapiens
  misc_RNA (1)...(19): siRNA sense strand
acacaugccuggaggaaga

SEQ ID NO: 308976 - RNA, 19 nt, Homo sapiens
  misc_RNA (1)...(19): siRNA sense strand
gauaugaaccucacugauc

SEQ ID NO: 308977 - RNA, 19 nt, Homo sapiens
  misc_RNA (1)...(19): siRNA sense strand
gaagauugcaggagccauu

SEQ ID NO: 308978 - RNA, 19 nt, Homo sapiens
  misc_RNA (1)...(19): siRNA sense strand
acuaugagaugcuugcuaa

SEQ ID NO: 308979 - RNA, 19 nt, Homo sapiens
  misc_RNA (1)...(19): siRNA sense strand
gagauucuuucaacacuuc

SEQ ID NO: 308980 - RNA, 19 nt, Homo sapiens
  misc_RNA (1)...(19): siRNA sense strand
gaaggauggugcagguuca

SEQ ID NO: 308981 - RNA, 19 nt, Homo sapiens
  misc_RNA (1)...(19): siRNA sense strand
gggcagauguacagaguca

SEQ ID NO: 308982 - RNA, 19 nt, Homo sapiens
  misc_RNA (1)...(19): siRNA sense strand
cagaggagccauccaguuu

SEQ ID NO: 308983 - RNA, 19 nt, Homo sapiens
  misc_RNA (1)...(19): siRNA sense strand
gaaguguugugcaaaucuu

SEQ ID NO: 308984 - RNA, 19 nt, Homo sapiens
  misc_RNA (1)...(19): siRNA sense strand
gguuggagaugaauuaaag

SEQ ID NO: 308985 - RNA, 19 nt, Homo sapiens
  misc_RNA (1)...(19): siRNA sense strand
gcagcaggccaacuuguaa

SEQ ID NO: 308986 - RNA, 19 nt, Homo sapiens
  misc_RNA (1)...(19): siRNA sense strand
ucucuacucuuacuccuuu

SEQ ID NO: 308987 - RNA, 19 nt, Homo sapiens
  misc_RNA (1)...(19): siRNA sense strand
ccucugaucuuucucuaug

SEQ ID NO: 308988 - RNA, 19 nt, Homo sapiens
  misc_RNA (1)...(19): siRNA sense strand
agaccuaccuccuguacaa

SEQ ID NO: 308989 - RNA, 19 nt, Homo sapiens
  misc_RNA (1)...(19): siRNA sense strand
ggacaugcccgaguaugaa

SEQ ID NO: 308990 - RNA, 19 nt, Homo sapiens
  misc_RNA (1)...(19): siRNA sense strand
gauggauacuuucuuucaa

SEQ ID NO: 308991 - RNA, 19 nt, Homo sapiens
  misc_RNA (1)...(19): siRNA sense strand
gaggagccauccaguuugu

SEQ ID NO: 308992 - RNA, 19 nt, Homo sapiens
  misc_RNA (1)...(19): siRNA sense strand
caacacuucucucuucaag

SEQ ID NO: 308993 - RNA, 19 nt, Homo sapiens
  misc_RNA (1)...(19): siRNA sense strand
gucacugcauugauauuua

SEQ ID NO: 308994 - RNA, 19 nt, Homo sapiens
  misc_RNA (1)...(19): siRNA sense strand
ccaaggauuuaacugcaaa

SEQ ID NO: 308995 - RNA, 19 nt, Homo sapiens
  misc_RNA (1)...(19): siRNA sense strand
gcuaagcugugaaggaauc

SEQ ID NO: 308996 - RNA, 19 nt, Homo sapiens
  misc_RNA (1)...(19): siRNA sense strand
gccaggaucaugcuguuua

SEQ ID NO: 308997 - RNA, 19 nt, Homo sapiens
  misc_RNA (1)...(19): siRNA sense strand
gcuggaggcuacaagaaug

SEQ ID NO: 308998 - RNA, 19 nt, Homo sapiens
  misc_RNA (1)...(19): siRNA sense strand
caucucagacacacaauaa

SEQ ID NO: 308999 - RNA, 19 nt, Homo sapiens
  misc_RNA (1)...(19): siRNA sense strand
caguuuauguuccaucuga

SEQ ID NO: 309000 - RNA, 19 nt, Homo sapiens
  misc_RNA (1)...(19): siRNA sense strand
gcguaucucugaaugugaa

SEQ ID NO: 309001 - RNA, 19 nt, Homo sapiens
  misc_RNA (1)...(19): siRNA sense strand
uaacaacaguccugaugag

SEQ ID NO: 309002 - RNA, 19 nt, Homo sapiens
  misc_RNA (1)...(19): siRNA sense strand
ugaaucaaccugccgaauu

SEQ ID NO: 309003 - RNA, 19 nt, Homo sapiens
  misc_RNA (1)...(19): siRNA sense strand
gauagcagcagcauucuag

SEQ ID NO: 309004 - RNA, 19 nt, Homo sapiens
  misc_RNA (1)...(19): siRNA sense strand
gagccaggaucaugcuguu

SEQ ID NO: 309005 - RNA, 19 nt, Homo sapiens
  misc_RNA (1)...(19): siRNA sense strand
ggucugaucacauuuggaa

SEQ ID NO: 309006 - RNA, 19 nt, Homo sapiens
  misc_RNA (1)...(19): siRNA sense strand
caaccaagcacuaugagau

SEQ ID NO: 309007 - RNA, 19 nt, Homo sapiens
  misc_RNA (1)...(19): siRNA sense strand
aaagugaacccaucucaga

SEQ ID NO: 309008 - RNA, 19 nt, Homo sapiens
  misc_RNA (1)...(19): siRNA sense strand
caucuacacuuggcaucua

SEQ ID NO: 309009 - RNA, 19 nt, Homo sapiens
  misc_RNA (1)...(19): siRNA sense strand
acacuucucucuucaagca

SEQ ID NO: 309010 - RNA, 19 nt, Homo sapiens
  misc_RNA (1)...(19): siRNA sense strand
ggagauucuuucaacacuu

SEQ ID NO: 309011 - RNA, 19 nt, Homo sapiens
  misc_RNA (1)...(19): siRNA sense strand
ggugguuggagaugaauua

SEQ ID NO: 309012 - RNA, 19 nt, Homo sapiens
  misc_RNA (1)...(19): siRNA sense strand
gaaauugggcagauguaca

SEQ ID NO: 309013 - RNA, 19 nt, Homo sapiens
  misc_RNA (1)...(19): siRNA sense strand
guucuuggcaugauauuga

SEQ ID NO: 309014 - RNA, 19 nt, Homo sapiens
  misc_RNA (1)...(19): siRNA sense strand
gcagaggagccauccaguu

SEQ ID NO: 309015 - RNA, 19 nt, Homo sapiens
  misc_RNA (1)...(19): siRNA sense strand
uuucaacacuucucucuuc

SEQ ID NO: 309016 - RNA, 19 nt, Homo sapiens
  misc_RNA (1)...(19): siRNA sense strand
cacaauaaccuguaugcuu

SEQ ID NO: 309017 - RNA, 19 nt, Homo sapiens
  misc_RNA (1)...(19): siRNA sense strand
gacaguauaacaaagaaga

SEQ ID NO: 309018 - RNA, 19 nt, Homo sapiens
  misc_RNA (1)...(19): siRNA sense strand
gagccaguacucuuggaua

SEQ ID NO: 309019 - RNA, 19 nt, Homo sapiens
  misc_RNA (1)...(19): siRNA sense strand
agaaagauaaugcacgauu

SEQ ID NO: 309020 - RNA, 19 nt, Homo sapiens
  misc_RNA (1)...(19): siRNA sense strand
ggucacugcauugauauuu

SEQ ID NO: 309021 - RNA, 19 nt, Homo sapiens
  misc_RNA (1)...(19): siRNA sense strand
ucgaacagcugcaaauggu

SEQ ID NO: 309022 - RNA, 19 nt, Homo sapiens
  misc_RNA (1)...(19): siRNA sense strand
gcauaucugaggugaauca

SEQ ID NO: 309023 - RNA, 19 nt, Homo sapiens
  misc_RNA (1)...(19): siRNA sense strand
cgacaacucauccgacugu

SEQ ID NO: 309024 - RNA, 19 nt, Homo sapiens
  misc_RNA (1)...(19): siRNA sense strand
aauaugaaccugugcuuug

SEQ ID NO: 309025 - RNA, 19 nt, Homo sapiens
  misc_RNA (1)...(19): siRNA sense strand
gcauggugguuggagauga

SEQ ID NO: 309026 - RNA, 19 nt, Homo sapiens
  misc_RNA (1)...(19): siRNA sense strand
ucacaagauugauaugaac

SEQ ID NO: 309027 - RNA, 19 nt, Homo sapiens
  misc_RNA (1)...(19): siRNA sense strand
gacacacaauaaccuguau

SEQ ID NO: 309028 - RNA, 19 nt, Homo sapiens
  misc_RNA (1)...(19): siRNA sense strand
uagguuaucagauuccuuu

SEQ ID NO: 309029 - RNA, 19 nt, Homo sapiens
  misc_RNA (1)...(19): siRNA sense strand
ggcauuuggugcuacuuug

SEQ ID NO: 309030 - RNA, 19 nt, Homo sapiens
  misc_RNA (1)...(19): siRNA sense strand
gguguggcuuuguccauug

SEQ ID NO: 309031 - RNA, 19 nt, Homo sapiens
  misc_RNA (1)...(19): siRNA sense strand
aaacuuugggccuguaauu

SEQ ID NO: 309032 - RNA, 19 nt, Homo sapiens
  misc_RNA (1)...(19): siRNA sense strand
caagcagacauuccaaaga

SEQ ID NO: 309033 - RNA, 19 nt, Homo sapiens
  misc_RNA (1)...(19): siRNA sense strand
caaagagucccugcagaug

SEQ ID NO: 309034 - RNA, 19 nt, Homo sapiens
  misc_RNA (1)...(19): siRNA sense strand
aggcauaucugaggugaau

SEQ ID NO: 309035 - RNA, 19 nt, Homo sapiens
  misc_RNA (1)...(19): siRNA sense strand
ucaguuuccuccagcuuau

SEQ ID NO: 309036 - RNA, 19 nt, Homo sapiens
  misc_RNA (1)...(19): siRNA sense strand
ucaaagagucccugcagau

SEQ ID NO: 309037 - RNA, 19 nt, Homo sapiens
  misc_RNA (1)...(19): siRNA sense strand
gaucuccauuucuucaagu

SEQ ID NO: 309038 - RNA, 19 nt, Homo sapiens
  misc_RNA (1)...(19): siRNA sense strand
gguaaugggagauucuuuc

SEQ ID NO: 309039 - RNA, 19 nt, Homo sapiens
  misc_RNA (1)...(19): siRNA sense strand
cauggugguuggagaugaa

SEQ ID NO: 309040 - RNA, 19 nt, Homo sapiens
  misc_RNA (1)...(19): siRNA sense strand
ggauggugcagguucauga

SEQ ID NO: 309041 - RNA, 19 nt, Homo sapiens
  misc_RNA (1)...(19): siRNA sense strand
gcagccuguucacaagauu

SEQ ID NO: 309042 - RNA, 19 nt, Homo sapiens
  misc_RNA (1)...(19): siRNA sense strand
ccaguacucuuggauagca

SEQ ID NO: 309043 - RNA, 19 nt, Homo sapiens
  misc_RNA (1)...(19): siRNA sense strand
ggugcagguucaugagcua

SEQ ID NO: 309044 - RNA, 19 nt, Homo sapiens
  misc_RNA (1)...(19): siRNA sense strand
gcuucccgaugccacguua

SEQ ID NO: 309045 - RNA, 19 nt, Homo sapiens
  misc_RNA (1)...(19): siRNA sense strand
uccaguuugucacgcauua

SEQ ID NO: 309046 - RNA, 19 nt, Homo sapiens
  misc_RNA (1)...(19): siRNA sense strand
gugcuacuuuggacguaaa

SEQ ID NO: 309047 - RNA, 19 nt, Homo sapiens
  misc_RNA (1)...(19): siRNA sense strand
gggagauucuuucaacacu

SEQ ID NO: 309048 - RNA, 19 nt, Homo sapiens
  misc_RNA (1)...(19): siRNA sense strand
guaaugggagauucuuuca

SEQ ID NO: 309049 - RNA, 19 nt, Homo sapiens
  misc_RNA (1)...(19): siRNA sense strand
gaugcuugcuaaucgaaca

SEQ ID NO: 309050 - RNA, 19 nt, Homo sapiens
  misc_RNA (1)...(19): siRNA sense strand
acuggaggcuacaugguaa

SEQ ID NO: 309051 - RNA, 19 nt, Homo sapiens
  misc_RNA (1)...(19): siRNA sense strand
gaauuuugcugauggauac

SEQ ID NO: 309052 - RNA, 19 nt, Homo sapiens
  misc_RNA (1)...(19): siRNA sense strand
ggauagcagcagcauucua

SEQ ID NO: 309053 - RNA, 19 nt, Homo sapiens
  misc_RNA (1)...(19): siRNA sense strand
ccaaacauguucaccaaua

SEQ ID NO: 309054 - RNA, 19 nt, Homo sapiens
  misc_RNA (1)...(19): siRNA sense strand
gcucaacugucucaaauuu

SEQ ID NO: 309055 - RNA, 19 nt, Homo sapiens
  misc_RNA (1)...(19): siRNA sense strand
gcaguuuacuuguuuguuu

SEQ ID NO: 309056 - RNA, 19 nt, Homo sapiens
  misc_RNA (1)...(19): siRNA sense strand
gggaaaggcugugacaaua

SEQ ID NO: 309057 - RNA, 19 nt, Homo sapiens
  misc_RNA (1)...(19): siRNA sense strand
gaccagaaguucagaauuc

SEQ ID NO: 309058 - RNA, 19 nt, Homo sapiens
  misc_RNA (1)...(19): siRNA sense strand
cagagaagcugacaagaga

SEQ ID NO: 309059 - RNA, 19 nt, Homo sapiens
  misc_RNA (1)...(19): siRNA sense strand
ucaaacagcccuauuauau

SEQ ID NO: 309060 - RNA, 19 nt, Homo sapiens
  misc_RNA (1)...(19): siRNA sense strand
cagggugcaucuauuauua

SEQ ID NO: 309061 - RNA, 19 nt, Homo sapiens
  misc_RNA (1)...(19): siRNA sense strand
caucagagcuauuacaaca

SEQ ID NO: 309062 - RNA, 19 nt, Homo sapiens
  misc_RNA (1)...(19): siRNA sense strand
gaacaacaacccaaccauu

SEQ ID NO: 309063 - RNA, 19 nt, Homo sapiens
  misc_RNA (1)...(19): siRNA sense strand
caaacagcccuauuauaua

SEQ ID NO: 309064 - RNA, 19 nt, Homo sapiens
  misc_RNA (1)...(19): siRNA sense strand
caacguagauggaaaugca

SEQ ID NO: 309065 - RNA, 19 nt, Homo sapiens
  misc_RNA (1)...(19): siRNA sense strand
ucagagaccuaacgcaauu

SEQ ID NO: 309066 - RNA, 19 nt, Homo sapiens
  misc_RNA (1)...(19): siRNA sense strand
gcauauggcucaacugucu

SEQ ID NO: 309067 - RNA, 19 nt, Homo sapiens
  misc_RNA (1)...(19): siRNA sense strand
aaucagagaucaaguacaa

SEQ ID NO: 309068 - RNA, 19 nt, Homo sapiens
  misc_RNA (1)...(19): siRNA sense strand
gcaguauccucaacaguau

SEQ ID NO: 309069 - RNA, 19 nt, Homo sapiens
  misc_RNA (1)...(19): siRNA sense strand
gaacaccucccacugcaaa

SEQ ID NO: 309070 - RNA, 19 nt, Homo sapiens
  misc_RNA (1)...(19): siRNA sense strand
agaauaagguguacuaaag

SEQ ID NO: 309071 - RNA, 19 nt, Homo sapiens
  misc_RNA (1)...(19): siRNA sense strand
ggaggcaguuacccagaua

SEQ ID NO: 309072 - RNA, 19 nt, Homo sapiens
  misc_RNA (1)...(19): siRNA sense strand
ggauauggauugcaucauc

SEQ ID NO: 309073 - RNA, 19 nt, Homo sapiens
  misc_RNA (1)...(19): siRNA sense strand
ggaaaggcugugacaauaa

SEQ ID NO: 309074 - RNA, 19 nt, Homo sapiens
  misc_RNA (1)...(19): siRNA sense strand
ucagagcuauuacaacaaa

SEQ ID NO: 309075 - RNA, 19 nt, Homo sapiens
  misc_RNA (1)...(19): siRNA sense strand
aaacagcccuauuauauac

SEQ ID NO: 309076 - RNA, 19 nt, Homo sapiens
  misc_RNA (1)...(19): siRNA sense strand
acacaggcuuuacugaaua

SEQ ID NO: 309077 - RNA, 19 nt, Homo sapiens
  misc_RNA (1)...(19): siRNA sense strand
gcaguauggugaauauguu

SEQ ID NO: 309078 - RNA, 19 nt, Homo sapiens
  misc_RNA (1)...(19): siRNA sense strand
uaaacgauguuccugaaga

SEQ ID NO: 309079 - RNA, 19 nt, Homo sapiens
  misc_RNA (1)...(19): siRNA sense strand
gaaaggcugugacaauaac

SEQ ID NO: 309080 - RNA, 19 nt, Homo sapiens
  misc_RNA (1)...(19): siRNA sense strand
gcaguggauuuguuccuuu

SEQ ID NO: 309081 - RNA, 19 nt, Homo sapiens
  misc_RNA (1)...(19): siRNA sense strand
uagaggaugugcuuggaua

SEQ ID NO: 309082 - RNA, 19 nt, Homo sapiens
  misc_RNA (1)...(19): siRNA sense strand
cgauguuccugaagaauuu

SEQ ID NO: 309083 - RNA, 19 nt, Homo sapiens
  misc_RNA (1)...(19): siRNA sense strand
gugcuuggauauacuaauu

SEQ ID NO: 309084 - RNA, 19 nt, Homo sapiens
  misc_RNA (1)...(19): siRNA sense strand
guuugaagcuguuaugaga

SEQ ID NO: 309085 - RNA, 19 nt, Homo sapiens
  misc_RNA (1)...(19): siRNA sense strand
gagaauaagguguacuaaa

SEQ ID NO: 309086 - RNA, 19 nt, Homo sapiens
  misc_RNA (1)...(19): siRNA sense strand
gacacaggcuuuacugaau

SEQ ID NO: 309087 - RNA, 19 nt, Homo sapiens
  misc_RNA (1)...(19): siRNA sense strand
uagauacacuuucaucaga

SEQ ID NO: 309088 - RNA, 19 nt, Homo sapiens
  misc_RNA (1)...(19): siRNA sense strand
gaagcuggauauuugacaa

SEQ ID NO: 309089 - RNA, 19 nt, Homo sapiens
  misc_RNA (1)...(19): siRNA sense strand
gauugugucugauauagau

SEQ ID NO: 309090 - RNA, 19 nt, Homo sapiens
  misc_RNA (1)...(19): siRNA sense strand
ccggauaguuuacuuguga

SEQ ID NO: 309091 - RNA, 19 nt, Homo sapiens
  misc_RNA (1)...(19): siRNA sense strand
uuacuacucugcucucuau

SEQ ID NO: 309092 - RNA, 19 nt, Homo sapiens
  misc_RNA (1)...(19): siRNA sense strand
ggauuucccucuacuugug

SEQ ID NO: 309093 - RNA, 19 nt, Homo sapiens
  misc_RNA (1)...(19): siRNA sense strand
ccagauccuucauaacuug

SEQ ID NO: 309094 - RNA, 19 nt, Homo sapiens
  misc_RNA (1)...(19): siRNA sense strand
gauauggauugcaucauca

SEQ ID NO: 309095 - RNA, 19 nt, Homo sapiens
  misc_RNA (1)...(19): siRNA sense strand
aaaggugagcggagaauua

SEQ ID NO: 309096 - RNA, 19 nt, Homo sapiens
  misc_RNA (1)...(19): siRNA sense strand
gauugagucuucagaguuc

SEQ ID NO: 309097 - RNA, 19 nt, Homo sapiens
  misc_RNA (1)...(19): siRNA sense strand
ccaguaacccgguauauuc

SEQ ID NO: 309098 - RNA, 19 nt, Homo sapiens
  misc_RNA (1)...(19): siRNA sense strand
caaguuguuuccucucuau

SEQ ID NO: 309099 - RNA, 19 nt, Homo sapiens
  misc_RNA (1)...(19): siRNA sense strand
aaacugcaguggauuuguu

SEQ ID NO: 309100 - RNA, 19 nt, Homo sapiens
  misc_RNA (1)...(19): siRNA sense strand
aguggaagcuggauauuug

SEQ ID NO: 309101 - RNA, 19 nt, Homo sapiens
  misc_RNA (1)...(19): siRNA sense strand
gaaagccugagaccuguaa

SEQ ID NO: 309102 - RNA, 19 nt, Homo sapiens
  misc_RNA (1)...(19): siRNA sense strand
gcagcagauuuguaaguga

SEQ ID NO: 309103 - RNA, 19 nt, Homo sapiens
  misc_RNA (1)...(19): siRNA sense strand
gcggugcaguugucaauug

SEQ ID NO: 309104 - RNA, 19 nt, Homo sapiens
  misc_RNA (1)...(19): siRNA sense strand
gcaauuaccagugauaaca

SEQ ID NO: 309105 - RNA, 19 nt, Homo sapiens
  misc_RNA (1)...(19): siRNA sense strand
gaaagagccagauccuuca

SEQ ID NO: 309106 - RNA, 19 nt, Homo sapiens
  misc_RNA (1)...(19): siRNA sense strand
gcuggaugaucguguauau

SEQ ID NO: 309107 - RNA, 19 nt, Homo sapiens
  misc_RNA (1)...(19): siRNA sense strand
uaacagauacuuccuuagu

SEQ ID NO: 309108 - RNA, 19 nt, Homo sapiens
  misc_RNA (1)...(19): siRNA sense strand
guucauugcuucuucagau

SEQ ID NO: 309109 - RNA, 19 nt, Homo sapiens
  misc_RNA (1)...(19): siRNA sense strand
uaugcuaugucaacuguuu

SEQ ID NO: 309110 - RNA, 19 nt, Homo sapiens
  misc_RNA (1)...(19): siRNA sense strand
uuacagcacucugcauuga

SEQ ID NO: 309111 - RNA, 19 nt, Homo sapiens
  misc_RNA (1)...(19): siRNA sense strand
uaaguucacuagcagaugu

SEQ ID NO: 309112 - RNA, 19 nt, Homo sapiens
  misc_RNA (1)...(19): siRNA sense strand
uaucacagccucaaauguu

SEQ ID NO: 309113 - RNA, 19 nt, Homo sapiens
  misc_RNA (1)...(19): siRNA sense strand
uuagaugugucucauaaug

SEQ ID NO: 309114 - RNA, 19 nt, Homo sapiens
  misc_RNA (1)...(19): siRNA sense strand
ucauuucgguguacuuuga

SEQ ID NO: 309115 - RNA, 19 nt, Homo sapiens
  misc_RNA (1)...(19): siRNA sense strand
cagauaugcuuucuucauc

SEQ ID NO: 309116 - RNA, 19 nt, Homo sapiens
  misc_RNA (1)...(19): siRNA sense strand
aacaacaacccaaccauua

SEQ ID NO: 309117 - RNA, 19 nt, Homo sapiens
  misc_RNA (1)...(19): siRNA sense strand
ccugagaccuguaaaccuu

SEQ ID NO: 309118 - RNA, 19 nt, Homo sapiens
  misc_RNA (1)...(19): siRNA sense strand
caagagaugccuuagugaa

SEQ ID NO: 309119 - RNA, 19 nt, Homo sapiens
  misc_RNA (1)...(19): siRNA sense strand
gcuggauauuugacaauuu

SEQ ID NO: 309120 - RNA, 19 nt, Homo sapiens
  misc_RNA (1)...(19): siRNA sense strand
aaacgauguuccugaagaa

SEQ ID NO: 309121 - RNA, 19 nt, Homo sapiens
  misc_RNA (1)...(19): siRNA sense strand
aagacaaucucauccgaaa

SEQ ID NO: 309122 - RNA, 19 nt, Homo sapiens
  misc_RNA (1)...(19): siRNA sense strand
agagacagcagaccauuaa

SEQ ID NO: 309123 - RNA, 19 nt, Homo sapiens
  misc_RNA (1)...(19): siRNA sense strand
agagccagauccuucauaa

SEQ ID NO: 309124 - RNA, 19 nt, Homo sapiens
  misc_RNA (1)...(19): siRNA sense strand
ucacaauccuucacaagca

SEQ ID NO: 309125 - RNA, 19 nt, Homo sapiens
  misc_RNA (1)...(19): siRNA sense strand
gcagggugcaucuauuauu

SEQ ID NO: 309126 - RNA, 19 nt, Homo sapiens
  misc_RNA (1)...(19): siRNA sense strand
gcacuauucauuucuacaa

SEQ ID NO: 309127 - RNA, 19 nt, Homo sapiens
  misc_RNA (1)...(19): siRNA sense strand
ccagauucauuucggugua

SEQ ID NO: 309128 - RNA, 19 nt, Homo sapiens
  misc_RNA (1)...(19): siRNA sense strand
caacacuucagccugguua

SEQ ID NO: 309129 - RNA, 19 nt, Homo sapiens
  misc_RNA (1)...(19): siRNA sense strand
cagaaugcuccgacuguua

SEQ ID NO: 309130 - RNA, 19 nt, Homo sapiens
  misc_RNA (1)...(19): siRNA sense strand
gagggugcaguacauguua

SEQ ID NO: 309131 - RNA, 19 nt, Homo sapiens
  misc_RNA (1)...(19): siRNA sense strand
ggagauucacgaacaagaa

SEQ ID NO: 309132 - RNA, 19 nt, Homo sapiens
  misc_RNA (1)...(19): siRNA sense strand
ccagcuauccuccaguaua

SEQ ID NO: 309133 - RNA, 19 nt, Homo sapiens
  misc_RNA (1)...(19): siRNA sense strand
ccaacucccuugucaucaa

SEQ ID NO: 309134 - RNA, 19 nt, Homo sapiens
  misc_RNA (1)...(19): siRNA sense strand
caagcuagcuccgcaccaa

SEQ ID NO: 309135 - RNA, 19 nt, Homo sapiens
  misc_RNA (1)...(19): siRNA sense strand
gcucuucuguugcgucuca

SEQ ID NO: 309136 - RNA, 19 nt, Homo sapiens
  misc_RNA (1)...(19): siRNA sense strand
gcagagaagcugacaagag

SEQ ID NO: 309137 - RNA, 19 nt, Homo sapiens
  misc_RNA (1)...(19): siRNA sense strand
ccacagccaccucuucaaa

SEQ ID NO: 309138 - RNA, 19 nt, Homo sapiens
  misc_RNA (1)...(19): siRNA sense strand
gcaguugucaauugaagaa

SEQ ID NO: 309139 - RNA, 19 nt, Homo sapiens
  misc_RNA (1)...(19): siRNA sense strand
aacgguaucucacaagaaa

SEQ ID NO: 309140 - RNA, 19 nt, Homo sapiens
  misc_RNA (1)...(19): siRNA sense strand
uaaguucacaguauucuga

SEQ ID NO: 309141 - RNA, 19 nt, Homo sapiens
  misc_RNA (1)...(19): siRNA sense strand
ggaguucauugcuucuuca

SEQ ID NO: 309142 - RNA, 19 nt, Homo sapiens
  misc_RNA (1)...(19): siRNA sense strand
guuguuacaucccuucaga

SEQ ID NO: 309143 - RNA, 19 nt, Homo sapiens
  misc_RNA (1)...(19): siRNA sense strand
cuucauaacuuggcuuaga

SEQ ID NO: 309144 - RNA, 19 nt, Homo sapiens
  misc_RNA (1)...(19): siRNA sense strand
ugauucaucccaacuuaua

SEQ ID NO: 309145 - RNA, 19 nt, Homo sapiens
  misc_RNA (1)...(19): siRNA sense strand
ucaacugucucaaauuuac

SEQ ID NO: 309146 - RNA, 19 nt, Homo sapiens
  misc_RNA (1)...(19): siRNA sense strand
ugcaagagaugccuuagug

SEQ ID NO: 309147 - RNA, 19 nt, Homo sapiens
  misc_RNA (1)...(19): siRNA sense strand
guacauacacuuuguuugc

SEQ ID NO: 309148 - RNA, 19 nt, Homo sapiens
  misc_RNA (1)...(19): siRNA sense strand
gaucuugcuucucuagcuu

SEQ ID NO: 309149 - RNA, 19 nt, Homo sapiens
  misc_RNA (1)...(19): siRNA sense strand
ggauucaugaccuuugaua

SEQ ID NO: 309150 - RNA, 19 nt, Homo sapiens
  misc_RNA (1)...(19): siRNA sense strand
uaccaaacauguucaccaa

SEQ ID NO: 309151 - RNA, 19 nt, Homo sapiens
  misc_RNA (1)...(19): siRNA sense strand
gaggaugugcuuggauaua

SEQ ID NO: 309152 - RNA, 19 nt, Homo sapiens
  misc_RNA (1)...(19): siRNA sense strand
auagacagauugacagaug

SEQ ID NO: 309153 - RNA, 19 nt, Homo sapiens
  misc_RNA (1)...(19): siRNA sense strand
cagaagaaauuaccaguua

SEQ ID NO: 309154 - RNA, 19 nt, Homo sapiens
  misc_RNA (1)...(19): siRNA sense strand
ggacaacucauuaauguua

SEQ ID NO: 309155 - RNA, 19 nt, Homo sapiens
  misc_RNA (1)...(19): siRNA sense strand
gaacaaagaugauccugau

SEQ ID NO: 309156 - RNA, 19 nt, Homo sapiens
  misc_RNA (1)...(19): siRNA sense strand
gaucaaacgugacaaguug

SEQ ID NO: 309157 - RNA, 19 nt, Homo sapiens
  misc_RNA (1)...(19): siRNA sense strand
gacaggagcuucucaauca

SEQ ID NO: 309158 - RNA, 19 nt, Homo sapiens
  misc_RNA (1)...(19): siRNA sense strand
ggacagccauuaccacuga

SEQ ID NO: 309159 - RNA, 19 nt, Homo sapiens
  misc_RNA (1)...(19): siRNA sense strand
cacagaaggugaagaaaua

SEQ ID NO: 309160 - RNA, 19 nt, Homo sapiens
  misc_RNA (1)...(19): siRNA sense strand
ccaaacaugugggcuauua

SEQ ID NO: 309161 - RNA, 19 nt, Homo sapiens
  misc_RNA (1)...(19): siRNA sense strand
gaaggaaauugaaaggaaa

SEQ ID NO: 309162 - RNA, 19 nt, Homo sapiens
  misc_RNA (1)...(19): siRNA sense strand
caucuaagcugucagaaau

SEQ ID NO: 309163 - RNA, 19 nt, Homo sapiens
  misc_RNA (1)...(19): siRNA sense strand
aaacucagcuggcuacuau

SEQ ID NO: 309164 - RNA, 19 nt, Homo sapiens
  misc_RNA (1)...(19): siRNA sense strand
gaacaagaauggaagaaac

SEQ ID NO: 309165 - RNA, 19 nt, Homo sapiens
  misc_RNA (1)...(19): siRNA sense strand
aaagaaagauaaccacuug

SEQ ID NO: 309166 - RNA, 19 nt, Homo sapiens
  misc_RNA (1)...(19): siRNA sense strand
ggauaaggauacuuugaaa

SEQ ID NO: 309167 - RNA, 19 nt, Homo sapiens
  misc_RNA (1)...(19): siRNA sense strand
gaacagcuuuauaagauca

SEQ ID NO: 309168 - RNA, 19 nt, Homo sapiens
  misc_RNA (1)...(19): siRNA sense strand
gaauagagaacaagaagaa

SEQ ID NO: 309169 - RNA, 19 nt, Homo sapiens
  misc_RNA (1)...(19): siRNA sense strand
ccucaugggucaucuuaua

SEQ ID NO: 309170 - RNA, 19 nt, Homo sapiens
  misc_RNA (1)...(19): siRNA sense strand
caaacuaugucaaaccaaa

SEQ ID NO: 309171 - RNA, 19 nt, Homo sapiens
  misc_RNA (1)...(19): siRNA sense strand
guggauaucucucagguuu

SEQ ID NO: 309172 - RNA, 19 nt, Homo sapiens
  misc_RNA (1)...(19): siRNA sense strand
ggagauagaaguggaauuu

SEQ ID NO: 309173 - RNA, 19 nt, Homo sapiens
  misc_RNA (1)...(19): siRNA sense strand
gaauuaugccaaagacuua

SEQ ID NO: 309174 - RNA, 19 nt, Homo sapiens
  misc_RNA (1)...(19): siRNA sense strand
gaaagcaaauugauuccau

SEQ ID NO: 309175 - RNA, 19 nt, Homo sapiens
  misc_RNA (1)...(19): siRNA sense strand
ucagguaacuucagcauau

SEQ ID NO: 309176 - RNA, 19 nt, Homo sapiens
  misc_RNA (1)...(19): siRNA sense strand
agaagaaauugucagguua

SEQ ID NO: 309177 - RNA, 19 nt, Homo sapiens
  misc_RNA (1)...(19): siRNA sense strand
caagaguucuccauagcua

SEQ ID NO: 309178 - RNA, 19 nt, Homo sapiens
  misc_RNA (1)...(19): siRNA sense strand
ggaagaaacaacuugaauu

SEQ ID NO: 309179 - RNA, 19 nt, Homo sapiens
  misc_RNA (1)...(19): siRNA sense strand
ugaaggaaauugaaaggaa

SEQ ID NO: 309180 - RNA, 19 nt, Homo sapiens
  misc_RNA (1)...(19): siRNA sense strand
gaagaaauugucagguuaa

SEQ ID NO: 309181 - RNA, 19 nt, Homo sapiens
  misc_RNA (1)...(19): siRNA sense strand
aacaggaacuucaggaaua

SEQ ID NO: 309182 - RNA, 19 nt, Homo sapiens
  misc_RNA (1)...(19): siRNA sense strand
gagaaacaacguaaggaua

SEQ ID NO: 309183 - RNA, 19 nt, Homo sapiens
  misc_RNA (1)...(19): siRNA sense strand
gaacucugccuucauauca

SEQ ID NO: 309184 - RNA, 19 nt, Homo sapiens
  misc_RNA (1)...(19): siRNA sense strand
caaaggaucaagagaguuu

SEQ ID NO: 309185 - RNA, 19 nt, Homo sapiens
  misc_RNA (1)...(19): siRNA sense strand
uaucagaccuaaacaagga

SEQ ID NO: 309186 - RNA, 19 nt, Homo sapiens
  misc_RNA (1)...(19): siRNA sense strand
gaaccacuuucuucaaauc

SEQ ID NO: 309187 - RNA, 19 nt, Homo sapiens
  misc_RNA (1)...(19): siRNA sense strand
gaccaaccuuccucccuua

SEQ ID NO: 309188 - RNA, 19 nt, Homo sapiens
  misc_RNA (1)...(19): siRNA sense strand
gaagauggaucagcaagag

SEQ ID NO: 309189 - RNA, 19 nt, Homo sapiens
  misc_RNA (1)...(19): siRNA sense strand
agacagggcuauauucaug

SEQ ID NO: 309190 - RNA, 19 nt, Homo sapiens
  misc_RNA (1)...(19): siRNA sense strand
ggaagaaccagaagcuuug

SEQ ID NO: 309191 - RNA, 19 nt, Homo sapiens
  misc_RNA (1)...(19): siRNA sense strand
ggugaauuauagagcauua

SEQ ID NO: 309192 - RNA, 19 nt, Homo sapiens
  misc_RNA (1)...(19): siRNA sense strand
guaaggauaaggauacuuu

SEQ ID NO: 309193 - RNA, 19 nt, Homo sapiens
  misc_RNA (1)...(19): siRNA sense strand
ggacugcaaagaaagauaa

SEQ ID NO: 309194 - RNA, 19 nt, Homo sapiens
  misc_RNA (1)...(19): siRNA sense strand
ggagagugguggacaggaa

SEQ ID NO: 309195 - RNA, 19 nt, Homo sapiens
  misc_RNA (1)...(19): siRNA sense strand
gaugguuucccaaaucuua

SEQ ID NO: 309196 - RNA, 19 nt, Homo sapiens
  misc_RNA (1)...(19): siRNA sense strand
cagugugacuuggaaauua

SEQ ID NO: 309197 - RNA, 19 nt, Homo sapiens
  misc_RNA (1)...(19): siRNA sense strand
ucagggaacucacccaaga

SEQ ID NO: 309198 - RNA, 19 nt, Homo sapiens
  misc_RNA (1)...(19): siRNA sense strand
gggaagaaccagaagcuuu

SEQ ID NO: 309199 - RNA, 19 nt, Homo sapiens
  misc_RNA (1)...(19): siRNA sense strand
gaggaugguuucccaaauc

SEQ ID NO: 309200 - RNA, 19 nt, Homo sapiens
  misc_RNA (1)...(19): siRNA sense strand
acaguuagaugcucuugaa

SEQ ID NO: 309201 - RNA, 19 nt, Homo sapiens
  misc_RNA (1)...(19): siRNA sense strand
gccaaagacuuaaagaaca

SEQ ID NO: 309202 - RNA, 19 nt, Homo sapiens
  misc_RNA (1)...(19): siRNA sense strand
aagaagaaauugucagguu

SEQ ID NO: 309203 - RNA, 19 nt, Homo sapiens
  misc_RNA (1)...(19): siRNA sense strand
caaccuuccucccuuaaug

SEQ ID NO: 309204 - RNA, 19 nt, Homo sapiens
  misc_RNA (1)...(19): siRNA sense strand
gagauauaauucagguuga

SEQ ID NO: 309205 - RNA, 19 nt, Homo sapiens
  misc_RNA (1)...(19): siRNA sense strand
gaggaaagcaaauugauuc

SEQ ID NO: 309206 - RNA, 19 nt, Homo sapiens
  misc_RNA (1)...(19): siRNA sense strand
gaaauugucagguuaaacu

SEQ ID NO: 309207 - RNA, 19 nt, Homo sapiens
  misc_RNA (1)...(19): siRNA sense strand
ggaggugcauggaggaaga

SEQ ID NO: 309208 - RNA, 19 nt, Homo sapiens
  misc_RNA (1)...(19): siRNA sense strand
agaaacaacguaaggauaa

SEQ ID NO: 309209 - RNA, 19 nt, Homo sapiens
  misc_RNA (1)...(19): siRNA sense strand
gagagaaaccuacaacaca

SEQ ID NO: 309210 - RNA, 19 nt, Homo sapiens
  misc_RNA (1)...(19): siRNA sense strand
cauaacaggugaucaagca

SEQ ID NO: 309211 - RNA, 19 nt, Homo sapiens
  misc_RNA (1)...(19): siRNA sense strand
gcugaaauaugggcuuuau

SEQ ID NO: 309212 - RNA, 19 nt, Homo sapiens
  misc_RNA (1)...(19): siRNA sense strand
uagcaagucuggagcauca

SEQ ID NO: 309213 - RNA, 19 nt, Homo sapiens
  misc_RNA (1)...(19): siRNA sense strand
guaugcagcuguaaauaag

SEQ ID NO: 309214 - RNA, 19 nt, Homo sapiens
  misc_RNA (1)...(19): siRNA sense strand
gauaaccacuugaacuucu

SEQ ID NO: 309215 - RNA, 19 nt, Homo sapiens
  misc_RNA (1)...(19): siRNA sense strand
ggaagaauuaugccaaaga

SEQ ID NO: 309216 - RNA, 19 nt, Homo sapiens
  misc_RNA (1)...(19): siRNA sense strand
aaacaaggaugggaagaug

SEQ ID NO: 309217 - RNA, 19 nt, Homo sapiens
  misc_RNA (1)...(19): siRNA sense strand
gugguucucccuccuauua

SEQ ID NO: 309218 - RNA, 19 nt, Homo sapiens
  misc_RNA (1)...(19): siRNA sense strand
gcaaggaaaagaaaacuua

SEQ ID NO: 309219 - RNA, 19 nt, Homo sapiens
  misc_RNA (1)...(19): siRNA sense strand
gaagaauuaugccaaagac

SEQ ID NO: 309220 - RNA, 19 nt, Homo sapiens
  misc_RNA (1)...(19): siRNA sense strand
ggaggaaagcaaauugauu

SEQ ID NO: 309221 - RNA, 19 nt, Homo sapiens
  misc_RNA (1)...(19): siRNA sense strand
cgcagucucugauugauuu

SEQ ID NO: 309222 - RNA, 19 nt, Homo sapiens
  misc_RNA (1)...(19): siRNA sense strand
ggaaagcaaagcaaggaaa

SEQ ID NO: 309223 - RNA, 19 nt, Homo sapiens
  misc_RNA (1)...(19): siRNA sense strand
gcaaugcaccuuacugaca

SEQ ID NO: 309224 - RNA, 19 nt, Homo sapiens
  misc_RNA (1)...(19): siRNA sense strand
agacugagcuggaaguucu

SEQ ID NO: 309225 - RNA, 19 nt, Homo sapiens
  misc_RNA (1)...(19): siRNA sense strand
caaagaugauccugauugg

SEQ ID NO: 309226 - RNA, 19 nt, Homo sapiens
  misc_RNA (1)...(19): siRNA sense strand
caacguaaggauaaggaua

SEQ ID NO: 309227 - RNA, 19 nt, Homo sapiens
  misc_RNA (1)...(19): siRNA sense strand
gcaguuagcccuugaacag

SEQ ID NO: 309228 - RNA, 19 nt, Homo sapiens
  misc_RNA (1)...(19): siRNA sense strand
ugaaauaugggcuuuauca

SEQ ID NO: 309229 - RNA, 19 nt, Homo sapiens
  misc_RNA (1)...(19): siRNA sense strand
gcaccaggacaguuaauau

SEQ ID NO: 309230 - RNA, 19 nt, Homo sapiens
  misc_RNA (1)...(19): siRNA sense strand
cagcaaauaaugaagauga

SEQ ID NO: 309231 - RNA, 19 nt, Homo sapiens
  misc_RNA (1)...(19): siRNA sense strand
gcuaaaagcagaagaguuu

SEQ ID NO: 309232 - RNA, 19 nt, Homo sapiens
  misc_RNA (1)...(19): siRNA sense strand
ggaucuguaucaccuauuc

SEQ ID NO: 309233 - RNA, 19 nt, Homo sapiens
  misc_RNA (1)...(19): siRNA sense strand
gaaucuucaucuugaguug

SEQ ID NO: 309234 - RNA, 19 nt, Homo sapiens
  misc_RNA (1)...(19): siRNA sense strand
gaacguaaagcccagaaag

SEQ ID NO: 309235 - RNA, 19 nt, Homo sapiens
  misc_RNA (1)...(19): siRNA sense strand
cagcaagaguucuccauag

SEQ ID NO: 309236 - RNA, 19 nt, Homo sapiens
  misc_RNA (1)...(19): siRNA sense strand
gaaaagacagggcuauauu

SEQ ID NO: 309237 - RNA, 19 nt, Homo sapiens
  misc_RNA (1)...(19): siRNA sense strand
cuucaggaauaucagaaua

SEQ ID NO: 309238 - RNA, 19 nt, Homo sapiens
  misc_RNA (1)...(19): siRNA sense strand
caagcaacuucaacaggaa

SEQ ID NO: 309239 - RNA, 19 nt, Homo sapiens
  misc_RNA (1)...(19): siRNA sense strand
ggaaaucaagcaacuucaa

SEQ ID NO: 309240 - RNA, 19 nt, Homo sapiens
  misc_RNA (1)...(19): siRNA sense strand
ggagagacaacgagaggaa

SEQ ID NO: 309241 - RNA, 19 nt, Homo sapiens
  misc_RNA (1)...(19): siRNA sense strand
acagagagaauuacaagaa

SEQ ID NO: 309242 - RNA, 19 nt, Homo sapiens
  misc_RNA (1)...(19): siRNA sense strand
gaagaugagcucaguuucu

SEQ ID NO: 309243 - RNA, 19 nt, Homo sapiens
  misc_RNA (1)...(19): siRNA sense strand
uguggaaccuggagauuug

SEQ ID NO: 309244 - RNA, 19 nt, Homo sapiens
  misc_RNA (1)...(19): siRNA sense strand
gcaagaaaauuggugguuu

SEQ ID NO: 309245 - RNA, 19 nt, Homo sapiens
  misc_RNA (1)...(19): siRNA sense strand
gcaaggaaccaugaugaga

SEQ ID NO: 309246 - RNA, 19 nt, Homo sapiens
  misc_RNA (1)...(19): siRNA sense strand
gaaacaacguaaggauaag

SEQ ID NO: 309247 - RNA, 19 nt, Homo sapiens
  misc_RNA (1)...(19): siRNA sense strand
gaauggagggccaaacaug

SEQ ID NO: 309248 - RNA, 19 nt, Homo sapiens
  misc_RNA (1)...(19): siRNA sense strand
gaacuucaggaauaucaga

SEQ ID NO: 309249 - RNA, 19 nt, Homo sapiens
  misc_RNA (1)...(19): siRNA sense strand
uuugaaagcugaggagaaa

SEQ ID NO: 309250 - RNA, 19 nt, Homo sapiens
  misc_RNA (1)...(19): siRNA sense strand
ggaaagcugaggagaaaca

SEQ ID NO: 309251 - RNA, 19 nt, Homo sapiens
  misc_RNA (1)...(19): siRNA sense strand
cuacaacacacagcaguua

SEQ ID NO: 309252 - RNA, 19 nt, Homo sapiens
  misc_RNA (1)...(19): siRNA sense strand
gaacugagagaaaccuaca

SEQ ID NO: 309253 - RNA, 19 nt, Homo sapiens
  misc_RNA (1)...(19): siRNA sense strand
cagaagaaauuaccaguua

SEQ ID NO: 309254 - RNA, 19 nt, Homo sapiens
  misc_RNA (1)...(19): siRNA sense strand
ggacaacucauuaauguua

SEQ ID NO: 309255 - RNA, 19 nt, Homo sapiens
  misc_RNA (1)...(19): siRNA sense strand
gaacaaagaugauccugau

SEQ ID NO: 309256 - RNA, 19 nt, Homo sapiens
  misc_RNA (1)...(19): siRNA sense strand
gaucaaacgugacaaguug

SEQ ID NO: 309257 - RNA, 19 nt, Homo sapiens
  misc_RNA (1)...(19): siRNA sense strand
gacaggagcuucucaauca

SEQ ID NO: 309258 - RNA, 19 nt, Homo sapiens
  misc_RNA (1)...(19): siRNA sense strand
ggacagccauuaccacuga

SEQ ID NO: 309259 - RNA, 19 nt, Homo sapiens
  misc_RNA (1)...(19): siRNA sense strand
cacagaaggugaagaaaua

SEQ ID NO: 309260 - RNA, 19 nt, Homo sapiens
  misc_RNA (1)...(19): siRNA sense strand
ccaaacaugugggcuauua

SEQ ID NO: 309261 - RNA, 19 nt, Homo sapiens
  misc_RNA (1)...(19): siRNA sense strand
gaaggaaauugaaaggaaa

SEQ ID NO: 309262 - RNA, 19 nt, Homo sapiens
  misc_RNA (1)...(19): siRNA sense strand
caucuaagcugucagaaau

SEQ ID NO: 309263 - RNA, 19 nt, Homo sapiens
  misc_RNA (1)...(19): siRNA sense strand
aaacucagcuggcuacuau

SEQ ID NO: 309264 - RNA, 19 nt, Homo sapiens
  misc_RNA (1)...(19): siRNA sense strand
gaacaagaauggaagaaac

SEQ ID NO: 309265 - RNA, 19 nt, Homo sapiens
  misc_RNA (1)...(19): siRNA sense strand
aaagaaagauaaccacuug

SEQ ID NO: 309266 - RNA, 19 nt, Homo sapiens
  misc_RNA (1)...(19): siRNA sense strand
ggauaaggauacuuugaaa

SEQ ID NO: 309267 - RNA, 19 nt, Homo sapiens
  misc_RNA (1)...(19): siRNA sense strand
gaacagcuuuauaagauca

SEQ ID NO: 309268 - RNA, 19 nt, Homo sapiens
  misc_RNA (1)...(19): siRNA sense strand
gaauagagaacaagaagaa

SEQ ID NO: 309269 - RNA, 19 nt, Homo sapiens
  misc_RNA (1)...(19): siRNA sense strand
ccucaugggucaucuuaua

SEQ ID NO: 309270 - RNA, 19 nt, Homo sapiens
  misc_RNA (1)...(19): siRNA sense strand
caaacuaugucaaaccaaa

SEQ ID NO: 309271 - RNA, 19 nt, Homo sapiens
  misc_RNA (1)...(19): siRNA sense strand
guggauaucucucagguuu

SEQ ID NO: 309272 - RNA, 19 nt, Homo sapiens
  misc_RNA (1)...(19): siRNA sense strand
ggagauagaaguggaauuu

SEQ ID NO: 309273 - RNA, 19 nt, Homo sapiens
  misc_RNA (1)...(19): siRNA sense strand
gaauuaugccaaagacuua

SEQ ID NO: 309274 - RNA, 19 nt, Homo sapiens
  misc_RNA (1)...(19): siRNA sense strand
gaaagcaaauugauuccau

SEQ ID NO: 309275 - RNA, 19 nt, Homo sapiens
  misc_RNA (1)...(19): siRNA sense strand
ucagguaacuucagcauau

SEQ ID NO: 309276 - RNA, 19 nt, Homo sapiens
  misc_RNA (1)...(19): siRNA sense strand
agaagaaauugucagguua

SEQ ID NO: 309277 - RNA, 19 nt, Homo sapiens
  misc_RNA (1)...(19): siRNA sense strand
caagaguucuccauagcua

SEQ ID NO: 309278 - RNA, 19 nt, Homo sapiens
  misc_RNA (1)...(19): siRNA sense strand
ggaagaaacaacuugaauu

SEQ ID NO: 309279 - RNA, 19 nt, Homo sapiens
  misc_RNA (1)...(19): siRNA sense strand
ugaaggaaauugaaaggaa

SEQ ID NO: 309280 - RNA, 19 nt, Homo sapiens
  misc_RNA (1)...(19): siRNA sense strand
gaagaaauugucagguuaa

SEQ ID NO: 309281 - RNA, 19 nt, Homo sapiens
  misc_RNA (1)...(19): siRNA sense strand
aacaggaacuucaggaaua

SEQ ID NO: 309282 - RNA, 19 nt, Homo sapiens
  misc_RNA (1)...(19): siRNA sense strand
gagaaacaacguaaggaua

SEQ ID NO: 309283 - RNA, 19 nt, Homo sapiens
  misc_RNA (1)...(19): siRNA sense strand
gaacucugccuucauauca

SEQ ID NO: 309284 - RNA, 19 nt, Homo sapiens
  misc_RNA (1)...(19): siRNA sense strand
caaaggaucaagagaguuu

SEQ ID NO: 309285 - RNA, 19 nt, Homo sapiens
  misc_RNA (1)...(19): siRNA sense strand
uaucagaccuaaacaagga

SEQ ID NO: 309286 - RNA, 19 nt, Homo sapiens
  misc_RNA (1)...(19): siRNA sense strand
gaaccacuuucuucaaauc

SEQ ID NO: 309287 - RNA, 19 nt, Homo sapiens
  misc_RNA (1)...(19): siRNA sense strand
gaccaaccuuccucccuua

SEQ ID NO: 309288 - RNA, 19 nt, Homo sapiens
  misc_RNA (1)...(19): siRNA sense strand
gaagauggaucagcaagag

SEQ ID NO: 309289 - RNA, 19 nt, Homo sapiens
  misc_RNA (1)...(19): siRNA sense strand
agacagggcuauauucaug

SEQ ID NO: 309290 - RNA, 19 nt, Homo sapiens
  misc_RNA (1)...(19): siRNA sense strand
ggaagaaccagaagcuuug

SEQ ID NO: 309291 - RNA, 19 nt, Homo sapiens
  misc_RNA (1)...(19): siRNA sense strand
ggugaauuauagagcauua

SEQ ID NO: 309292 - RNA, 19 nt, Homo sapiens
  misc_RNA (1)...(19): siRNA sense strand
guaaggauaaggauacuuu

SEQ ID NO: 309293 - RNA, 19 nt, Homo sapiens
  misc_RNA (1)...(19): siRNA sense strand
ggacugcaaagaaagauaa

SEQ ID NO: 309294 - RNA, 19 nt, Homo sapiens
  misc_RNA (1)...(19): siRNA sense strand
ggagagugguggacaggaa

SEQ ID NO: 309295 - RNA, 19 nt, Homo sapiens
  misc_RNA (1)...(19): siRNA sense strand
gaugguuucccaaaucuua

SEQ ID NO: 309296 - RNA, 19 nt, Homo sapiens
  misc_RNA (1)...(19): siRNA sense strand
cagugugacuuggaaauua

SEQ ID NO: 309297 - RNA, 19 nt, Homo sapiens
  misc_RNA (1)...(19): siRNA sense strand
ucagggaacucacccaaga

SEQ ID NO: 309298 - RNA, 19 nt, Homo sapiens
  misc_RNA (1)...(19): siRNA sense strand
gggaagaaccagaagcuuu

SEQ ID NO: 309299 - RNA, 19 nt, Homo sapiens
  misc_RNA (1)...(19): siRNA sense strand
gaggaugguuucccaaauc

SEQ ID NO: 309300 - RNA, 19 nt, Homo sapiens
  misc_RNA (1)...(19): siRNA sense strand
acaguuagaugcucuugaa

SEQ ID NO: 309301 - RNA, 19 nt, Homo sapiens
  misc_RNA (1)...(19): siRNA sense strand
gccaaagacuuaaagaaca

SEQ ID NO: 309302 - RNA, 19 nt, Homo sapiens
  misc_RNA (1)...(19): siRNA sense strand
aagaagaaauugucagguu

SEQ ID NO: 309303 - RNA, 19 nt, Homo sapiens
  misc_RNA (1)...(19): siRNA sense strand
caaccuuccucccuuaaug

SEQ ID NO: 309304 - RNA, 19 nt, Homo sapiens
  misc_RNA (1)...(19): siRNA sense strand
gagauauaauucagguuga

SEQ ID NO: 309305 - RNA, 19 nt, Homo sapiens
  misc_RNA (1)...(19): siRNA sense strand
gaggaaagcaaauugauuc

SEQ ID NO: 309306 - RNA, 19 nt, Homo sapiens
  misc_RNA (1)...(19): siRNA sense strand
gaaauugucagguuaaacu

SEQ ID NO: 309307 - RNA, 19 nt, Homo sapiens
  misc_RNA (1)...(19): siRNA sense strand
ggaggugcauggaggaaga

SEQ ID NO: 309308 - RNA, 19 nt, Homo sapiens
  misc_RNA (1)...(19): siRNA sense strand
agaaacaacguaaggauaa

SEQ ID NO: 309309 - RNA, 19 nt, Homo sapiens
  misc_RNA (1)...(19): siRNA sense strand
gagagaaaccuacaacaca

SEQ ID NO: 309310 - RNA, 19 nt, Homo sapiens
  misc_RNA (1)...(19): siRNA sense strand
cauaacaggugaucaagca

SEQ ID NO: 309311 - RNA, 19 nt, Homo sapiens
  misc_RNA (1)...(19): siRNA sense strand
gcugaaauaugggcuuuau

SEQ ID NO: 309312 - RNA, 19 nt, Homo sapiens
  misc_RNA (1)...(19): siRNA sense strand
uagcaagucuggagcauca

SEQ ID NO: 309313 - RNA, 19 nt, Homo sapiens
  misc_RNA (1)...(19): siRNA sense strand
guaugcagcuguaaauaag

SEQ ID NO: 309314 - RNA, 19 nt, Homo sapiens
  misc_RNA (1)...(19): siRNA sense strand
gauaaccacuugaacuucu

SEQ ID NO: 309315 - RNA, 19 nt, Homo sapiens
  misc_RNA (1)...(19): siRNA sense strand
ggaagaauuaugccaaaga

SEQ ID NO: 309316 - RNA, 19 nt, Homo sapiens
  misc_RNA (1)...(19): siRNA sense strand
aaacaaggaugggaagaug

SEQ ID NO: 309317 - RNA, 19 nt, Homo sapiens
  misc_RNA (1)...(19): siRNA sense strand
gugguucucccuccuauua

SEQ ID NO: 309318 - RNA, 19 nt, Homo sapiens
  misc_RNA (1)...(19): siRNA sense strand
gcaaggaaaagaaaacuua

SEQ ID NO: 309319 - RNA, 19 nt, Homo sapiens
  misc_RNA (1)...(19): siRNA sense strand
gaagaauuaugccaaagac

SEQ ID NO: 309320 - RNA, 19 nt, Homo sapiens
  misc_RNA (1)...(19): siRNA sense strand
ggaggaaagcaaauugauu

SEQ ID NO: 309321 - RNA, 19 nt, Homo sapiens
  misc_RNA (1)...(19): siRNA sense strand
cgcagucucugauugauuu

SEQ ID NO: 309322 - RNA, 19 nt, Homo sapiens
  misc_RNA (1)...(19): siRNA sense strand
ggaaagcaaagcaaggaaa

SEQ ID NO: 309323 - RNA, 19 nt, Homo sapiens
  misc_RNA (1)...(19): siRNA sense strand
gcaaugcaccuuacugaca

SEQ ID NO: 309324 - RNA, 19 nt, Homo sapiens
  misc_RNA (1)...(19): siRNA sense strand
agacugagcuggaaguucu

SEQ ID NO: 309325 - RNA, 19 nt, Homo sapiens
  misc_RNA (1)...(19): siRNA sense strand
caaagaugauccugauugg

SEQ ID NO: 309326 - RNA, 19 nt, Homo sapiens
  misc_RNA (1)...(19): siRNA sense strand
caacguaaggauaaggaua

SEQ ID NO: 309327 - RNA, 19 nt, Homo sapiens
  misc_RNA (1)...(19): siRNA sense strand
gcaguuagcccuugaacag

SEQ ID NO: 309328 - RNA, 19 nt, Homo sapiens
  misc_RNA (1)...(19): siRNA sense strand
ugaaauaugggcuuuauca

SEQ ID NO: 309329 - RNA, 19 nt, Homo sapiens
  misc_RNA (1)...(19): siRNA sense strand
gcaccaggacaguuaauau

SEQ ID NO: 309330 - RNA, 19 nt, Homo sapiens
  misc_RNA (1)...(19): siRNA sense strand
cagcaaauaaugaagauga

SEQ ID NO: 309331 - RNA, 19 nt, Homo sapiens
  misc_RNA (1)...(19): siRNA sense strand
gcuaaaagcagaagaguuu

SEQ ID NO: 309332 - RNA, 19 nt, Homo sapiens
  misc_RNA (1)...(19): siRNA sense strand
ggaucuguaucaccuauuc

SEQ ID NO: 309333 - RNA, 19 nt, Homo sapiens
  misc_RNA (1)...(19): siRNA sense strand
gaaucuucaucuugaguug

SEQ ID NO: 309334 - RNA, 19 nt, Homo sapiens
  misc_RNA (1)...(19): siRNA sense strand
gaacguaaagcccagaaag

SEQ ID NO: 309335 - RNA, 19 nt, Homo sapiens
  misc_RNA (1)...(19): siRNA sense strand
cagcaagaguucuccauag

SEQ ID NO: 309336 - RNA, 19 nt, Homo sapiens
  misc_RNA (1)...(19): siRNA sense strand
gaaaagacagggcuauauu

SEQ ID NO: 309337 - RNA, 19 nt, Homo sapiens
  misc_RNA (1)...(19): siRNA sense strand
cuucaggaauaucagaaua

SEQ ID NO: 309338 - RNA, 19 nt, Homo sapiens
  misc_RNA (1)...(19): siRNA sense strand
caagcaacuucaacaggaa

SEQ ID NO: 309339 - RNA, 19 nt, Homo sapiens
  misc_RNA (1)...(19): siRNA sense strand
ggaaaucaagcaacuucaa

SEQ ID NO: 309340 - RNA, 19 nt, Homo sapiens
  misc_RNA (1)...(19): siRNA sense strand
ggagagacaacgagaggaa

SEQ ID NO: 309341 - RNA, 19 nt, Homo sapiens
  misc_RNA (1)...(19): siRNA sense strand
acagagagaauuacaagaa

SEQ ID NO: 309342 - RNA, 19 nt, Homo sapiens
  misc_RNA (1)...(19): siRNA sense strand
gaagaugagcucaguuucu

SEQ ID NO: 309343 - RNA, 19 nt, Homo sapiens
  misc_RNA (1)...(19): siRNA sense strand
uguggaaccuggagauuug

SEQ ID NO: 309344 - RNA, 19 nt, Homo sapiens
  misc_RNA (1)...(19): siRNA sense strand
gcaagaaaauuggugguuu

SEQ ID NO: 309345 - RNA, 19 nt, Homo sapiens
  misc_RNA (1)...(19): siRNA sense strand
gcaaggaaccaugaugaga

SEQ ID NO: 309346 - RNA, 19 nt, Homo sapiens
  misc_RNA (1)...(19): siRNA sense strand
gaaacaacguaaggauaag

SEQ ID NO: 309347 - RNA, 19 nt, Homo sapiens
  misc_RNA (1)...(19): siRNA sense strand
gaauggagggccaaacaug

SEQ ID NO: 309348 - RNA, 19 nt, Homo sapiens
  misc_RNA (1)...(19): siRNA sense strand
gaacuucaggaauaucaga

SEQ ID NO: 309349 - RNA, 19 nt, Homo sapiens
  misc_RNA (1)...(19): siRNA sense strand
uuugaaagcugaggagaaa

SEQ ID NO: 309350 - RNA, 19 nt, Homo sapiens
  misc_RNA (1)...(19): siRNA sense strand
ggaaagcugaggagaaaca

SEQ ID NO: 309351 - RNA, 19 nt, Homo sapiens
  misc_RNA (1)...(19): siRNA sense strand
cuacaacacacagcaguua

SEQ ID NO: 309352 - RNA, 19 nt, Homo sapiens
  misc_RNA (1)...(19): siRNA sense strand
gaacugagagaaaccuaca

SEQ ID NO: 309353 - RNA, 19 nt, Homo sapiens
  misc_RNA (1)...(19): siRNA sense strand
cagaagaaauuaccaguua

SEQ ID NO: 309354 - RNA, 19 nt, Homo sapiens
  misc_RNA (1)...(19): siRNA sense strand
ggacaacucauuaauguua

SEQ ID NO: 309355 - RNA, 19 nt, Homo sapiens
  misc_RNA (1)...(19): siRNA sense strand
gaacaaagaugauccugau

SEQ ID NO: 309356 - RNA, 19 nt, Homo sapiens
  misc_RNA (1)...(19): siRNA sense strand
gaucaaacgugacaaguug

SEQ ID NO: 309357 - RNA, 19 nt, Homo sapiens
  misc_RNA (1)...(19): siRNA sense strand
gacaggagcuucucaauca

SEQ ID NO: 309358 - RNA, 19 nt, Homo sapiens
  misc_RNA (1)...(19): siRNA sense strand
ggacagccauuaccacuga

SEQ ID NO: 309359 - RNA, 19 nt, Homo sapiens
  misc_RNA (1)...(19): siRNA sense strand
cacagaaggugaagaaaua

SEQ ID NO: 309360 - RNA, 19 nt, Homo sapiens
  misc_RNA (1)...(19): siRNA sense strand
ccaaacaugugggcuauua

SEQ ID NO: 309361 - RNA, 19 nt, Homo sapiens
  misc_RNA (1)...(19): siRNA sense strand
gaaggaaauugaaaggaaa

SEQ ID NO: 309362 - RNA, 19 nt, Homo sapiens
  misc_RNA (1)...(19): siRNA sense strand
caucuaagcugucagaaau

SEQ ID NO: 309363 - RNA, 19 nt, Homo sapiens
  misc_RNA (1)...(19): siRNA sense strand
aaacucagcuggcuacuau

SEQ ID NO: 309364 - RNA, 19 nt, Homo sapiens
  misc_RNA (1)...(19): siRNA sense strand
gaacaagaauggaagaaac

SEQ ID NO: 309365 - RNA, 19 nt, Homo sapiens
  misc_RNA (1)...(19): siRNA sense strand
aaagaaagauaaccacuug

SEQ ID NO: 309366 - RNA, 19 nt, Homo sapiens
  misc_RNA (1)...(19): siRNA sense strand
ggauaaggauacuuugaaa

SEQ ID NO: 309367 - RNA, 19 nt, Homo sapiens
  misc_RNA (1)...(19): siRNA sense strand
gaacagcuuuauaagauca

SEQ ID NO: 309368 - RNA, 19 nt, Homo sapiens
  misc_RNA (1)...(19): siRNA sense strand
gaauagagaacaagaagaa

SEQ ID NO: 309369 - RNA, 19 nt, Homo sapiens
  misc_RNA (1)...(19): siRNA sense strand
ccucaugggucaucuuaua

SEQ ID NO: 309370 - RNA, 19 nt, Homo sapiens
  misc_RNA (1)...(19): siRNA sense strand
caaacuaugucaaaccaaa

SEQ ID NO: 309371 - RNA, 19 nt, Homo sapiens
  misc_RNA (1)...(19): siRNA sense strand
guggauaucucucagguuu

SEQ ID NO: 309372 - RNA, 19 nt, Homo sapiens
  misc_RNA (1)...(19): siRNA sense strand
ggagauagaaguggaauuu

SEQ ID NO: 309373 - RNA, 19 nt, Homo sapiens
  misc_RNA (1)...(19): siRNA sense strand
gaauuaugccaaagacuua

SEQ ID NO: 309374 - RNA, 19 nt, Homo sapiens
  misc_RNA (1)...(19): siRNA sense strand
gaaagcaaauugauuccau

SEQ ID NO: 309375 - RNA, 19 nt, Homo sapiens
  misc_RNA (1)...(19): siRNA sense strand
ucagguaacuucagcauau

SEQ ID NO: 309376 - RNA, 19 nt, Homo sapiens
  misc_RNA (1)...(19): siRNA sense strand
agaagaaauugucagguua

SEQ ID NO: 309377 - RNA, 19 nt, Homo sapiens
  misc_RNA (1)...(19): siRNA sense strand
caagaguucuccauagcua

SEQ ID NO: 309378 - RNA, 19 nt, Homo sapiens
  misc_RNA (1)...(19): siRNA sense strand
ggaagaaacaacuugaauu

SEQ ID NO: 309379 - RNA, 19 nt, Homo sapiens
  misc_RNA (1)...(19): siRNA sense strand
ugaaggaaauugaaaggaa

SEQ ID NO: 309380 - RNA, 19 nt, Homo sapiens
  misc_RNA (1)...(19): siRNA sense strand
gaagaaauugucagguuaa

SEQ ID NO: 309381 - RNA, 19 nt, Homo sapiens
  misc_RNA (1)...(19): siRNA sense strand
aacaggaacuucaggaaua

SEQ ID NO: 309382 - RNA, 19 nt, Homo sapiens
  misc_RNA (1)...(19): siRNA sense strand
gagaaacaacguaaggaua

SEQ ID NO: 309383 - RNA, 19 nt, Homo sapiens
  misc_RNA (1)...(19): siRNA sense strand
gaacucugccuucauauca

SEQ ID NO: 309384 - RNA, 19 nt, Homo sapiens
  misc_RNA (1)...(19): siRNA sense strand
caaaggaucaagagaguuu

SEQ ID NO: 309385 - RNA, 19 nt, Homo sapiens
  misc_RNA (1)...(19): siRNA sense strand
uaucagaccuaaacaagga

SEQ ID NO: 309386 - RNA, 19 nt, Homo sapiens
  misc_RNA (1)...(19): siRNA sense strand
gaaccacuuucuucaaauc

SEQ ID NO: 309387 - RNA, 19 nt, Homo sapiens
  misc_RNA (1)...(19): siRNA sense strand
gaccaaccuuccucccuua

SEQ ID NO: 309388 - RNA, 19 nt, Homo sapiens
  misc_RNA (1)...(19): siRNA sense strand
gaagauggaucagcaagag

SEQ ID NO: 309389 - RNA, 19 nt, Homo sapiens
  misc_RNA (1)...(19): siRNA sense strand
agacagggcuauauucaug

SEQ ID NO: 309390 - RNA, 19 nt, Homo sapiens
  misc_RNA (1)...(19): siRNA sense strand
ggaagaaccagaagcuuug

SEQ ID NO: 309391 - RNA, 19 nt, Homo sapiens
  misc_RNA (1)...(19): siRNA sense strand
ggugaauuauagagcauua

SEQ ID NO: 309392 - RNA, 19 nt, Homo sapiens
  misc_RNA (1)...(19): siRNA sense strand
guaaggauaaggauacuuu

SEQ ID NO: 309393 - RNA, 19 nt, Homo sapiens
  misc_RNA (1)...(19): siRNA sense strand
ggacugcaaagaaagauaa

SEQ ID NO: 309394 - RNA, 19 nt, Homo sapiens
  misc_RNA (1)...(19): siRNA sense strand
ggagagugguggacaggaa

SEQ ID NO: 309395 - RNA, 19 nt, Homo sapiens
  misc_RNA (1)...(19): siRNA sense strand
gaugguuucccaaaucuua

SEQ ID NO: 309396 - RNA, 19 nt, Homo sapiens
  misc_RNA (1)...(19): siRNA sense strand
cagugugacuuggaaauua

SEQ ID NO: 309397 - RNA, 19 nt, Homo sapiens
  misc_RNA (1)...(19): siRNA sense strand
ucagggaacucacccaaga

SEQ ID NO: 309398 - RNA, 19 nt, Homo sapiens
  misc_RNA (1)...(19): siRNA sense strand
gggaagaaccagaagcuuu

SEQ ID NO: 309399 - RNA, 19 nt, Homo sapiens
  misc_RNA (1)...(19): siRNA sense strand
gaggaugguuucccaaauc

SEQ ID NO: 309400 - RNA, 19 nt, Homo sapiens
  misc_RNA (1)...(19): siRNA sense strand
acaguuagaugcucuugaa

SEQ ID NO: 309401 - RNA, 19 nt, Homo sapiens
  misc_RNA (1)...(19): siRNA sense strand
gccaaagacuuaaagaaca

SEQ ID NO: 309402 - RNA, 19 nt, Homo sapiens
  misc_RNA (1)...(19): siRNA sense strand
aagaagaaauugucagguu

SEQ ID NO: 309403 - RNA, 19 nt, Homo sapiens
  misc_RNA (1)...(19): siRNA sense strand
caaccuuccucccuuaaug

SEQ ID NO: 309404 - RNA, 19 nt, Homo sapiens
  misc_RNA (1)...(19): siRNA sense strand
gagauauaauucagguuga

SEQ ID NO: 309405 - RNA, 19 nt, Homo sapiens
  misc_RNA (1)...(19): siRNA sense strand
gaggaaagcaaauugauuc

SEQ ID NO: 309406 - RNA, 19 nt, Homo sapiens
  misc_RNA (1)...(19): siRNA sense strand
gaaauugucagguuaaacu

SEQ ID NO: 309407 - RNA, 19 nt, Homo sapiens
  misc_RNA (1)...(19): siRNA sense strand
ggaggugcauggaggaaga

SEQ ID NO: 309408 - RNA, 19 nt, Homo sapiens
  misc_RNA (1)...(19): siRNA sense strand
agaaacaacguaaggauaa

SEQ ID NO: 309409 - RNA, 19 nt, Homo sapiens
  misc_RNA (1)...(19): siRNA sense strand
gagagaaaccuacaacaca

SEQ ID NO: 309410 - RNA, 19 nt, Homo sapiens
  misc_RNA (1)...(19): siRNA sense strand
cauaacaggugaucaagca

SEQ ID NO: 309411 - RNA, 19 nt, Homo sapiens
  misc_RNA (1)...(19): siRNA sense strand
gcugaaauaugggcuuuau

SEQ ID NO: 309412 - RNA, 19 nt, Homo sapiens
  misc_RNA (1)...(19): siRNA sense strand
uagcaagucuggagcauca

SEQ ID NO: 309413 - RNA, 19 nt, Homo sapiens
  misc_RNA (1)...(19): siRNA sense strand
guaugcagcuguaaauaag

SEQ ID NO: 309414 - RNA, 19 nt, Homo sapiens
  misc_RNA (1)...(19): siRNA sense strand
gauaaccacuugaacuucu

SEQ ID NO: 309415 - RNA, 19 nt, Homo sapiens
  misc_RNA (1)...(19): siRNA sense strand
ggaagaauuaugccaaaga

SEQ ID NO: 309416 - RNA, 19 nt, Homo sapiens
  misc_RNA (1)...(19): siRNA sense strand
aaacaaggaugggaagaug

SEQ ID NO: 309417 - RNA, 19 nt, Homo sapiens
  misc_RNA (1)...(19): siRNA sense strand
gugguucucccuccuauua

SEQ ID NO: 309418 - RNA, 19 nt, Homo sapiens
  misc_RNA (1)...(19): siRNA sense strand
gcaaggaaaagaaaacuua

SEQ ID NO: 309419 - RNA, 19 nt, Homo sapiens
  misc_RNA (1)...(19): siRNA sense strand
gaagaauuaugccaaagac

SEQ ID NO: 309420 - RNA, 19 nt, Homo sapiens
  misc_RNA (1)...(19): siRNA sense strand
ggaggaaagcaaauugauu

SEQ ID NO: 309421 - RNA, 19 nt, Homo sapiens
  misc_RNA (1)...(19): siRNA sense strand
cgcagucucugauugauuu

SEQ ID NO: 309422 - RNA, 19 nt, Homo sapiens
  misc_RNA (1)...(19): siRNA sense strand
ggaaagcaaagcaaggaaa

SEQ ID NO: 309423 - RNA, 19 nt, Homo sapiens
  misc_RNA (1)...(19): siRNA sense strand
gcaaugcaccuuacugaca

SEQ ID NO: 309424 - RNA, 19 nt, Homo sapiens
  misc_RNA (1)...(19): siRNA sense strand
agacugagcuggaaguucu

SEQ ID NO: 309425 - RNA, 19 nt, Homo sapiens
  misc_RNA (1)...(19): siRNA sense strand
caaagaugauccugauugg

SEQ ID NO: 309426 - RNA, 19 nt, Homo sapiens
  misc_RNA (1)...(19): siRNA sense strand
caacguaaggauaaggaua

SEQ ID NO: 309427 - RNA, 19 nt, Homo sapiens
  misc_RNA (1)...(19): siRNA sense strand
gcaguuagcccuugaacag

SEQ ID NO: 309428 - RNA, 19 nt, Homo sapiens
  misc_RNA (1)...(19): siRNA sense strand
ugaaauaugggcuuuauca

SEQ ID NO: 309429 - RNA, 19 nt, Homo sapiens
  misc_RNA (1)...(19): siRNA sense strand
gcaccaggacaguuaauau

SEQ ID NO: 309430 - RNA, 19 nt, Homo sapiens
  misc_RNA (1)...(19): siRNA sense strand
cagcaaauaaugaagauga

SEQ ID NO: 309431 - RNA, 19 nt, Homo sapiens
  misc_RNA (1)...(19): siRNA sense strand
gcuaaaagcagaagaguuu

SEQ ID NO: 309432 - RNA, 19 nt, Homo sapiens
  misc_RNA (1)...(19): siRNA sense strand
ggaucuguaucaccuauuc

SEQ ID NO: 309433 - RNA, 19 nt, Homo sapiens
  misc_RNA (1)...(19): siRNA sense strand
gaaucuucaucuugaguug

SEQ ID NO: 309434 - RNA, 19 nt, Homo sapiens
  misc_RNA (1)...(19): siRNA sense strand
gaacguaaagcccagaaag

SEQ ID NO: 309435 - RNA, 19 nt, Homo sapiens
  misc_RNA (1)...(19): siRNA sense strand
cagcaagaguucuccauag

SEQ ID NO: 309436 - RNA, 19 nt, Homo sapiens
  misc_RNA (1)...(19): siRNA sense strand
gaaaagacagggcuauauu

SEQ ID NO: 309437 - RNA, 19 nt, Homo sapiens
  misc_RNA (1)...(19): siRNA sense strand
cuucaggaauaucagaaua

SEQ ID NO: 309438 - RNA, 19 nt, Homo sapiens
  misc_RNA (1)...(19): siRNA sense strand
caagcaacuucaacaggaa

SEQ ID NO: 309439 - RNA, 19 nt, Homo sapiens
  misc_RNA (1)...(19): siRNA sense strand
ggaaaucaagcaacuucaa

SEQ ID NO: 309440 - RNA, 19 nt, Homo sapiens
  misc_RNA (1)...(19): siRNA sense strand
ggagagacaacgagaggaa

SEQ ID NO: 309441 - RNA, 19 nt, Homo sapiens
  misc_RNA (1)...(19): siRNA sense strand
acagagagaauuacaagaa

SEQ ID NO: 309442 - RNA, 19 nt, Homo sapiens
  misc_RNA (1)...(19): siRNA sense strand
gaagaugagcucaguuucu

SEQ ID NO: 309443 - RNA, 19 nt, Homo sapiens
  misc_RNA (1)...(19): siRNA sense strand
uguggaaccuggagauuug

SEQ ID NO: 309444 - RNA, 19 nt, Homo sapiens
  misc_RNA (1)...(19): siRNA sense strand
gcaagaaaauuggugguuu

SEQ ID NO: 309445 - RNA, 19 nt, Homo sapiens
  misc_RNA (1)...(19): siRNA sense strand
gcaaggaaccaugaugaga

SEQ ID NO: 309446 - RNA, 19 nt, Homo sapiens
  misc_RNA (1)...(19): siRNA sense strand
gaaacaacguaaggauaag

SEQ ID NO: 309447 - RNA, 19 nt, Homo sapiens
  misc_RNA (1)...(19): siRNA sense strand
gaauggagggccaaacaug

SEQ ID NO: 309448 - RNA, 19 nt, Homo sapiens
  misc_RNA (1)...(19): siRNA sense strand
gaacuucaggaauaucaga

SEQ ID NO: 309449 - RNA, 19 nt, Homo sapiens
  misc_RNA (1)...(19): siRNA sense strand
uuugaaagcugaggagaaa

SEQ ID NO: 309450 - RNA, 19 nt, Homo sapiens
  misc_RNA (1)...(19): siRNA sense strand
ggaaagcugaggagaaaca

SEQ ID NO: 309451 - RNA, 19 nt, Homo sapiens
  misc_RNA (1)...(19): siRNA sense strand
cuacaacacacagcaguua

SEQ ID NO: 309452 - RNA, 19 nt, Homo sapiens
  misc_RNA (1)...(19): siRNA sense strand
gaacugagagaaaccuaca

SEQ ID NO: 309453 - RNA, 19 nt, Homo sapiens
  misc_RNA (1)...(19): siRNA sense strand
ggugaaagcucgcgucauc

SEQ ID NO: 309454 - RNA, 19 nt, Homo sapiens
  misc_RNA (1)...(19): siRNA sense strand
guuccuggaugacuccuuu

SEQ ID NO: 309455 - RNA, 19 nt, Homo sapiens
  misc_RNA (1)...(19): siRNA sense strand
ucuaagcaguggcaucuga

SEQ ID NO: 309456 - RNA, 19 nt, Homo sapiens
  misc_RNA (1)...(19): siRNA sense strand
ugaauuagccaccaaguac

SEQ ID NO: 309457 - RNA, 19 nt, Homo sapiens
  misc_RNA (1)...(19): siRNA sense strand
uccugaaucuggacucuaa

SEQ ID NO: 309458 - RNA, 19 nt, Homo sapiens
  misc_RNA (1)...(19): siRNA sense strand
gaugacuccuuucgcaagu

SEQ ID NO: 309459 - RNA, 19 nt, Homo sapiens
  misc_RNA (1)...(19): siRNA sense strand
gggaguucgugccgccuuu

SEQ ID NO: 309460 - RNA, 19 nt, Homo sapiens
  misc_RNA (1)...(19): siRNA sense strand
cacaauauccagcgagaga

SEQ ID NO: 309461 - RNA, 19 nt, Homo sapiens
  misc_RNA (1)...(19): siRNA sense strand
gaucuaagcaguggcaucu

SEQ ID NO: 309462 - RNA, 19 nt, Homo sapiens
  misc_RNA (1)...(19): siRNA sense strand
caauauccagcgagagaaa

SEQ ID NO: 309463 - RNA, 19 nt, Homo sapiens
  misc_RNA (1)...(19): siRNA sense strand
gggcuagaauccgggaguu

SEQ ID NO: 309464 - RNA, 19 nt, Homo sapiens
  misc_RNA (1)...(19): siRNA sense strand
ccagcgagagaaagaguuu

SEQ ID NO: 309465 - RNA, 19 nt, Homo sapiens
  misc_RNA (1)...(19): siRNA sense strand
caagccagcacccauguuc

SEQ ID NO: 309466 - RNA, 19 nt, Homo sapiens
  misc_RNA (1)...(19): siRNA sense strand
cguggaagcuacacuuacu

SEQ ID NO: 309467 - RNA, 19 nt, Homo sapiens
  misc_RNA (1)...(19): siRNA sense strand
aagcucgcgucaucacuga

SEQ ID NO: 309468 - RNA, 19 nt, Homo sapiens
  misc_RNA (1)...(19): siRNA sense strand
cugaauuagccaccaagua

SEQ ID NO: 309469 - RNA, 19 nt, Homo sapiens
  misc_RNA (1)...(19): siRNA sense strand
gcuagcccucugccucuuu

SEQ ID NO: 309470 - RNA, 19 nt, Homo sapiens
  misc_RNA (1)...(19): siRNA sense strand
uguauuauucugcguggaa

SEQ ID NO: 309471 - RNA, 19 nt, Homo sapiens
  misc_RNA (1)...(19): siRNA sense strand
ugcggaagcuggugaaagc

SEQ ID NO: 309472 - RNA, 19 nt, Homo sapiens
  misc_RNA (1)...(19): siRNA sense strand
ggugaaagcucgcgucauc

SEQ ID NO: 309473 - RNA, 19 nt, Homo sapiens
  misc_RNA (1)...(19): siRNA sense strand
guuccuggaugacuccuuu

SEQ ID NO: 309474 - RNA, 19 nt, Homo sapiens
  misc_RNA (1)...(19): siRNA sense strand
ucuaagcaguggcaucuga

SEQ ID NO: 309475 - RNA, 19 nt, Homo sapiens
  misc_RNA (1)...(19): siRNA sense strand
ugaauuagccaccaaguac

SEQ ID NO: 309476 - RNA, 19 nt, Homo sapiens
  misc_RNA (1)...(19): siRNA sense strand
uccugaaucuggacucuaa

SEQ ID NO: 309477 - RNA, 19 nt, Homo sapiens
  misc_RNA (1)...(19): siRNA sense strand
gaugacuccuuucgcaagu

SEQ ID NO: 309478 - RNA, 19 nt, Homo sapiens
  misc_RNA (1)...(19): siRNA sense strand
gggaguucgugccgccuuu

SEQ ID NO: 309479 - RNA, 19 nt, Homo sapiens
  misc_RNA (1)...(19): siRNA sense strand
cacaauauccagcgagaga

SEQ ID NO: 309480 - RNA, 19 nt, Homo sapiens
  misc_RNA (1)...(19): siRNA sense strand
gaucuaagcaguggcaucu

SEQ ID NO: 309481 - RNA, 19 nt, Homo sapiens
  misc_RNA (1)...(19): siRNA sense strand
caauauccagcgagagaaa

SEQ ID NO: 309482 - RNA, 19 nt, Homo sapiens
  misc_RNA (1)...(19): siRNA sense strand
gggcuagaauccgggaguu

SEQ ID NO: 309483 - RNA, 19 nt, Homo sapiens
  misc_RNA (1)...(19): siRNA sense strand
ccagcgagagaaagaguuu

SEQ ID NO: 309484 - RNA, 19 nt, Homo sapiens
  misc_RNA (1)...(19): siRNA sense strand
caagccagcacccauguuc

SEQ ID NO: 309485 - RNA, 19 nt, Homo sapiens
  misc_RNA (1)...(19): siRNA sense strand
cguggaagcuacacuuacu

SEQ ID NO: 309486 - RNA, 19 nt, Homo sapiens
  misc_RNA (1)...(19): siRNA sense strand
aagcucgcgucaucacuga

SEQ ID NO: 309487 - RNA, 19 nt, Homo sapiens
  misc_RNA (1)...(19): siRNA sense strand
cugaauuagccaccaagua

SEQ ID NO: 309488 - RNA, 19 nt, Homo sapiens
  misc_RNA (1)...(19): siRNA sense strand
gcuagcccucugccucuuu

SEQ ID NO: 309489 - RNA, 19 nt, Homo sapiens
  misc_RNA (1)...(19): siRNA sense strand
uguauuauucugcguggaa

SEQ ID NO: 309490 - RNA, 19 nt, Homo sapiens
  misc_RNA (1)...(19): siRNA sense strand
ugcggaagcuggugaaagc

SEQ ID NO: 309491 - RNA, 19 nt, Homo sapiens
  misc_RNA (1)...(19): siRNA sense strand
ggugaaagcucgcgucauc

SEQ ID NO: 309492 - RNA, 19 nt, Homo sapiens
  misc_RNA (1)...(19): siRNA sense strand
guuccuggaugacuccuuu

SEQ ID NO: 309493 - RNA, 19 nt, Homo sapiens
  misc_RNA (1)...(19): siRNA sense strand
ucuaagcaguggcaucuga

SEQ ID NO: 309494 - RNA, 19 nt, Homo sapiens
  misc_RNA (1)...(19): siRNA sense strand
ugaauuagccaccaaguac

SEQ ID NO: 309495 - RNA, 19 nt, Homo sapiens
  misc_RNA (1)...(19): siRNA sense strand
uccugaaucuggacucuaa

SEQ ID NO: 309496 - RNA, 19 nt, Homo sapiens
  misc_RNA (1)...(19): siRNA sense strand
gaugacuccuuucgcaagu

SEQ ID NO: 309497 - RNA, 19 nt, Homo sapiens
  misc_RNA (1)...(19): siRNA sense strand
gggaguucgugccgccuuu

SEQ ID NO: 309498 - RNA, 19 nt, Homo sapiens
  misc_RNA (1)...(19): siRNA sense strand
cacaauauccagcgagaga

SEQ ID NO: 309499 - RNA, 19 nt, Homo sapiens
  misc_RNA (1)...(19): siRNA sense strand
gaucuaagcaguggcaucu

SEQ ID NO: 309500 - RNA, 19 nt, Homo sapiens
  misc_RNA (1)...(19): siRNA sense strand
caauauccagcgagagaaa

SEQ ID NO: 309501 - RNA, 19 nt, Homo sapiens
  misc_RNA (1)...(19): siRNA sense strand
gggcuagaauccgggaguu

SEQ ID NO: 309502 - RNA, 19 nt, Homo sapiens
  misc_RNA (1)...(19): siRNA sense strand
ccagcgagagaaagaguuu

SEQ ID NO: 309503 - RNA, 19 nt, Homo sapiens
  misc_RNA (1)...(19): siRNA sense strand
caagccagcacccauguuc

SEQ ID NO: 309504 - RNA, 19 nt, Homo sapiens
  misc_RNA (1)...(19): siRNA sense strand
cguggaagcuacacuuacu

SEQ ID NO: 309505 - RNA, 19 nt, Homo sapiens
  misc_RNA (1)...(19): siRNA sense strand
aagcucgcgucaucacuga

SEQ ID NO: 309506 - RNA, 19 nt, Homo sapiens
  misc_RNA (1)...(19): siRNA sense strand
cugaauuagccaccaagua

SEQ ID NO: 309507 - RNA, 19 nt, Homo sapiens
  misc_RNA (1)...(19): siRNA sense strand
gcuagcccucugccucuuu

SEQ ID NO: 309508 - RNA, 19 nt, Homo sapiens
  misc_RNA (1)...(19): siRNA sense strand
uguauuauucugcguggaa

SEQ ID NO: 309509 - RNA, 19 nt, Homo sapiens
  misc_RNA (1)...(19): siRNA sense strand
ugcggaagcuggugaaagc

SEQ ID NO: 309510 - RNA, 19 nt, Homo sapiens
  misc_RNA (1)...(19): siRNA sense strand
ggugaaagcucgcgucauc

SEQ ID NO: 309511 - RNA, 19 nt, Homo sapiens
  misc_RNA (1)...(19): siRNA sense strand
guuccuggaugacuccuuu

SEQ ID NO: 309512 - RNA, 19 nt, Homo sapiens
  misc_RNA (1)...(19): siRNA sense strand
ugaauuagccaccaaguac

SEQ ID NO: 309513 - RNA, 19 nt, Homo sapiens
  misc_RNA (1)...(19): siRNA sense strand
uccugaaucuggacucuaa

SEQ ID NO: 309514 - RNA, 19 nt, Homo sapiens
  misc_RNA (1)...(19): siRNA sense strand
gaugacuccuuucgcaagu

SEQ ID NO: 309515 - RNA, 19 nt, Homo sapiens
  misc_RNA (1)...(19): siRNA sense strand
gggaguucgugccgccuuu

SEQ ID NO: 309516 - RNA, 19 nt, Homo sapiens
  misc_RNA (1)...(19): siRNA sense strand
cacaauauccagcgagaga

SEQ ID NO: 309517 - RNA, 19 nt, Homo sapiens
  misc_RNA (1)...(19): siRNA sense strand
caauauccagcgagagaaa

SEQ ID NO: 309518 - RNA, 19 nt, Homo sapiens
  misc_RNA (1)...(19): siRNA sense strand
gggcuagaauccgggaguu

SEQ ID NO: 309519 - RNA, 19 nt, Homo sapiens
  misc_RNA (1)...(19): siRNA sense strand
ccagcgagagaaagaguuu

SEQ ID NO: 309520 - RNA, 19 nt, Homo sapiens
  misc_RNA (1)...(19): siRNA sense strand
caagccagcacccauguuc

SEQ ID NO: 309521 - RNA, 19 nt, Homo sapiens
  misc_RNA (1)...(19): siRNA sense strand
cguggaagcuacacuuacu

SEQ ID NO: 309522 - RNA, 19 nt, Homo sapiens
  misc_RNA (1)...(19): siRNA sense strand
aagcucgcgucaucacuga

SEQ ID NO: 309523 - RNA, 19 nt, Homo sapiens
  misc_RNA (1)...(19): siRNA sense strand
cugaauuagccaccaagua

SEQ ID NO: 309524 - RNA, 19 nt, Homo sapiens
  misc_RNA (1)...(19): siRNA sense strand
gcuagcccucugccucuuu

SEQ ID NO: 309525 - RNA, 19 nt, Homo sapiens
  misc_RNA (1)...(19): siRNA sense strand
uguauuauucugcguggaa

SEQ ID NO: 309526 - RNA, 19 nt, Homo sapiens
  misc_RNA (1)...(19): siRNA sense strand
ugcggaagcuggugaaagc

SEQ ID NO: 309527 - RNA, 19 nt, Homo sapiens
  misc_RNA (1)...(19): siRNA sense strand
ggugaaagcucgcgucauc

SEQ ID NO: 309528 - RNA, 19 nt, Homo sapiens
  misc_RNA (1)...(19): siRNA sense strand
guuccuggaugacuccuuu

SEQ ID NO: 309529 - RNA, 19 nt, Homo sapiens
  misc_RNA (1)...(19): siRNA sense strand
ucuaagcaguggcaucuga

SEQ ID NO: 309530 - RNA, 19 nt, Homo sapiens
  misc_RNA (1)...(19): siRNA sense strand
ugaauuagccaccaaguac

SEQ ID NO: 309531 - RNA, 19 nt, Homo sapiens
  misc_RNA (1)...(19): siRNA sense strand
uccugaaucuggacucuaa

SEQ ID NO: 309532 - RNA, 19 nt, Homo sapiens
  misc_RNA (1)...(19): siRNA sense strand
gaugacuccuuucgcaagu

SEQ ID NO: 309533 - RNA, 19 nt, Homo sapiens
  misc_RNA (1)...(19): siRNA sense strand
gggaguucgugccgccuuu

SEQ ID NO: 309534 - RNA, 19 nt, Homo sapiens
  misc_RNA (1)...(19): siRNA sense strand
cacaauauccagcgagaga

SEQ ID NO: 309535 - RNA, 19 nt, Homo sapiens
  misc_RNA (1)...(19): siRNA sense strand
gaucuaagcaguggcaucu

SEQ ID NO: 309536 - RNA, 19 nt, Homo sapiens
  misc_RNA (1)...(19): siRNA sense strand
caauauccagcgagagaaa

SEQ ID NO: 309537 - RNA, 19 nt, Homo sapiens
  misc_RNA (1)...(19): siRNA sense strand
gggcuagaauccgggaguu

SEQ ID NO: 309538 - RNA, 19 nt, Homo sapiens
  misc_RNA (1)...(19): siRNA sense strand
ccagcgagagaaagaguuu

SEQ ID NO: 309539 - RNA, 19 nt, Homo sapiens
  misc_RNA (1)...(19): siRNA sense strand
caagccagcacccauguuc

SEQ ID NO: 309540 - RNA, 19 nt, Homo sapiens
  misc_RNA (1)...(19): siRNA sense strand
cguggaagcuacacuuacu

SEQ ID NO: 309541 - RNA, 19 nt, Homo sapiens
  misc_RNA (1)...(19): siRNA sense strand
aagcucgcgucaucacuga

SEQ ID NO: 309542 - RNA, 19 nt, Homo sapiens
  misc_RNA (1)...(19): siRNA sense strand
cugaauuagccaccaagua

SEQ ID NO: 309543 - RNA, 19 nt, Homo sapiens
  misc_RNA (1)...(19): siRNA sense strand
gcuagcccucugccucuuu

SEQ ID NO: 309544 - RNA, 19 nt, Homo sapiens
  misc_RNA (1)...(19): siRNA sense strand
uguauuauucugcguggaa

SEQ ID NO: 309545 - RNA, 19 nt, Homo sapiens
  misc_RNA (1)...(19): siRNA sense strand
ugcggaagcuggugaaagc

SEQ ID NO: 309546 - RNA, 19 nt, Homo sapiens
  misc_RNA (1)...(19): siRNA sense strand
ggugaaagcucgcgucauc

SEQ ID NO: 309547 - RNA, 19 nt, Homo sapiens
  misc_RNA (1)...(19): siRNA sense strand
guuccuggaugacuccuuu

SEQ ID NO: 309548 - RNA, 19 nt, Homo sapiens
  misc_RNA (1)...(19): siRNA sense strand
ugaauuagccaccaaguac

SEQ ID NO: 309549 - RNA, 19 nt, Homo sapiens
  misc_RNA (1)...(19): siRNA sense strand
uccugaaucuggacucuaa

SEQ ID NO: 309550 - RNA, 19 nt, Homo sapiens
  misc_RNA (1)...(19): siRNA sense strand
gaugacuccuuucgcaagu

SEQ ID NO: 309551 - RNA, 19 nt, Homo sapiens
  misc_RNA (1)...(19): siRNA sense strand
gggaguucgugccgccuuu

SEQ ID NO: 309552 - RNA, 19 nt, Homo sapiens
  misc_RNA (1)...(19): siRNA sense strand
cacaauauccagcgagaga

SEQ ID NO: 309553 - RNA, 19 nt, Homo sapiens
  misc_RNA (1)...(19): siRNA sense strand
caauauccagcgagagaaa

SEQ ID NO: 309554 - RNA, 19 nt, Homo sapiens
  misc_RNA (1)...(19): siRNA sense strand
gggcuagaauccgggaguu

SEQ ID NO: 309555 - RNA, 19 nt, Homo sapiens
  misc_RNA (1)...(19): siRNA sense strand
ccagcgagagaaagaguuu

SEQ ID NO: 309556 - RNA, 19 nt, Homo sapiens
  misc_RNA (1)...(19): siRNA sense strand
caagccagcacccauguuc

SEQ ID NO: 309557 - RNA, 19 nt, Homo sapiens
  misc_RNA (1)...(19): siRNA sense strand
cguggaagcuacacuuacu

SEQ ID NO: 309558 - RNA, 19 nt, Homo sapiens
  misc_RNA (1)...(19): siRNA sense strand
aagcucgcgucaucacuga

SEQ ID NO: 309559 - RNA, 19 nt, Homo sapiens
  misc_RNA (1)...(19): siRNA sense strand
cugaauuagccaccaagua

SEQ ID NO: 309560 - RNA, 19 nt, Homo sapiens
  misc_RNA (1)...(19): siRNA sense strand
gcuagcccucugccucuuu

SEQ ID NO: 309561 - RNA, 19 nt, Homo sapiens
  misc_RNA (1)...(19): siRNA sense strand
uguauuauucugcguggaa

SEQ ID NO: 309562 - RNA, 19 nt, Homo sapiens
  misc_RNA (1)...(19): siRNA sense strand
ugcggaagcuggugaaagc

SEQ ID NO: 309563 - RNA, 19 nt, Homo sapiens
  misc_RNA (1)...(19): siRNA sense strand
ggugaaagcucgcgucauc

SEQ ID NO: 309564 - RNA, 19 nt, Homo sapiens
  misc_RNA (1)...(19): siRNA sense strand
guuccuggaugacuccuuu

SEQ ID NO: 309565 - RNA, 19 nt, Homo sapiens
  misc_RNA (1)...(19): siRNA sense strand
ucuaagcaguggcaucuga

SEQ ID NO: 309566 - RNA, 19 nt, Homo sapiens
  misc_RNA (1)...(19): siRNA sense strand
ugaauuagccaccaaguac

SEQ ID NO: 309567 - RNA, 19 nt, Homo sapiens
  misc_RNA (1)...(19): siRNA sense strand
uccugaaucuggacucuaa

SEQ ID NO: 309568 - RNA, 19 nt, Homo sapiens
  misc_RNA (1)...(19): siRNA sense strand
gaugacuccuuucgcaagu

SEQ ID NO: 309569 - RNA, 19 nt, Homo sapiens
  misc_RNA (1)...(19): siRNA sense strand
gggaguucgugccgccuuu

SEQ ID NO: 309570 - RNA, 19 nt, Homo sapiens
  misc_RNA (1)...(19): siRNA sense strand
cacaauauccagcgagaga

SEQ ID NO: 309571 - RNA, 19 nt, Homo sapiens
  misc_RNA (1)...(19): siRNA sense strand
gaucuaagcaguggcaucu

SEQ ID NO: 309572 - RNA, 19 nt, Homo sapiens
  misc_RNA (1)...(19): siRNA sense strand
caauauccagcgagagaaa

SEQ ID NO: 309573 - RNA, 19 nt, Homo sapiens
  misc_RNA (1)...(19): siRNA sense strand
gggcuagaauccgggaguu

SEQ ID NO: 309574 - RNA, 19 nt, Homo sapiens
  misc_RNA (1)...(19): siRNA sense strand
ccagcgagagaaagaguuu

SEQ ID NO: 309575 - RNA, 19 nt, Homo sapiens
  misc_RNA (1)...(19): siRNA sense strand
caagccagcacccauguuc

SEQ ID NO: 309576 - RNA, 19 nt, Homo sapiens
  misc_RNA (1)...(19): siRNA sense strand
cguggaagcuacacuuacu

SEQ ID NO: 309577 - RNA, 19 nt, Homo sapiens
  misc_RNA (1)...(19): siRNA sense strand
aagcucgcgucaucacuga

SEQ ID NO: 309578 - RNA, 19 nt, Homo sapiens
  misc_RNA (1)...(19): siRNA sense strand
cugaauuagccaccaagua

SEQ ID NO: 309579 - RNA, 19 nt, Homo sapiens
  misc_RNA (1)...(19): siRNA sense strand
gcuagcccucugccucuuu

SEQ ID NO: 309580 - RNA, 19 nt, Homo sapiens
  misc_RNA (1)...(19): siRNA sense strand
uguauuauucugcguggaa

SEQ ID NO: 309581 - RNA, 19 nt, Homo sapiens
  misc_RNA (1)...(19): siRNA sense strand
ugcggaagcuggugaaagc

SEQ ID NO: 309582 - RNA, 19 nt, Homo sapiens
  misc_RNA (1)...(19): siRNA sense strand
ggugaaagcucgcgucauc

SEQ ID NO: 309583 - RNA, 19 nt, Homo sapiens
  misc_RNA (1)...(19): siRNA sense strand
guuccuggaugacuccuuu

SEQ ID NO: 309584 - RNA, 19 nt, Homo sapiens
  misc_RNA (1)...(19): siRNA sense strand
ucuaagcaguggcaucuga

SEQ ID NO: 309585 - RNA, 19 nt, Homo sapiens
  misc_RNA (1)...(19): siRNA sense strand
ugaauuagccaccaaguac

SEQ ID NO: 309586 - RNA, 19 nt, Homo sapiens
  misc_RNA (1)...(19): siRNA sense strand
uccugaaucuggacucuaa

SEQ ID NO: 309587 - RNA, 19 nt, Homo sapiens
  misc_RNA (1)...(19): siRNA sense strand
gaugacuccuuucgcaagu

SEQ ID NO: 309588 - RNA, 19 nt, Homo sapiens
  misc_RNA (1)...(19): siRNA sense strand
gggaguucgugccgccuuu

SEQ ID NO: 309589 - RNA, 19 nt, Homo sapiens
  misc_RNA (1)...(19): siRNA sense strand
cacaauauccagcgagaga

SEQ ID NO: 309590 - RNA, 19 nt, Homo sapiens
  misc_RNA (1)...(19): siRNA sense strand
gaucuaagcaguggcaucu

SEQ ID NO: 309591 - RNA, 19 nt, Homo sapiens
  misc_RNA (1)...(19): siRNA sense strand
caauauccagcgagagaaa

SEQ ID NO: 309592 - RNA, 19 nt, Homo sapiens
  misc_RNA (1)...(19): siRNA sense strand
gggcuagaauccgggaguu

SEQ ID NO: 309593 - RNA, 19 nt, Homo sapiens
  misc_RNA (1)...(19): siRNA sense strand
ccagcgagagaaagaguuu

SEQ ID NO: 309594 - RNA, 19 nt, Homo sapiens
  misc_RNA (1)...(19): siRNA sense strand
caagccagcacccauguuc

SEQ ID NO: 309595 - RNA, 19 nt, Homo sapiens
  misc_RNA (1)...(19): siRNA sense strand
cguggaagcuacacuuacu

SEQ ID NO: 309596 - RNA, 19 nt, Homo sapiens
  misc_RNA (1)...(19): siRNA sense strand
aagcucgcgucaucacuga

SEQ ID NO: 309597 - RNA, 19 nt, Homo sapiens
  misc_RNA (1)...(19): siRNA sense strand
cugaauuagccaccaagua

SEQ ID NO: 309598 - RNA, 19 nt, Homo sapiens
  misc_RNA (1)...(19): siRNA sense strand
gcuagcccucugccucuuu

SEQ ID NO: 309599 - RNA, 19 nt, Homo sapiens
  misc_RNA (1)...(19): siRNA sense strand
uguauuauucugcguggaa

SEQ ID NO: 309600 - RNA, 19 nt, Homo sapiens
  misc_RNA (1)...(19): siRNA sense strand
ugcggaagcuggugaaagc

SEQ ID NO: 309601 - RNA, 19 nt, Homo sapiens
  misc_RNA (1)...(19): siRNA sense strand
ggugaaagcucgcgucauc

SEQ ID NO: 309602 - RNA, 19 nt, Homo sapiens
  misc_RNA (1)...(19): siRNA sense strand
guuccuggaugacuccuuu

SEQ ID NO: 309603 - RNA, 19 nt, Homo sapiens
  misc_RNA (1)...(19): siRNA sense strand
ugaauuagccaccaaguac

SEQ ID NO: 309604 - RNA, 19 nt, Homo sapiens
  misc_RNA (1)...(19): siRNA sense strand
uccugaaucuggacucuaa

SEQ ID NO: 309605 - RNA, 19 nt, Homo sapiens
  misc_RNA (1)...(19): siRNA sense strand
gaugacuccuuucgcaagu

SEQ ID NO: 309606 - RNA, 19 nt, Homo sapiens
  misc_RNA (1)...(19): siRNA sense strand
gggaguucgugccgccuuu

SEQ ID NO: 309607 - RNA, 19 nt, Homo sapiens
  misc_RNA (1)...(19): siRNA sense strand
cacaauauccagcgagaga

SEQ ID NO: 309608 - RNA, 19 nt, Homo sapiens
  misc_RNA (1)...(19): siRNA sense strand
caauauccagcgagagaaa

SEQ ID NO: 309609 - RNA, 19 nt, Homo sapiens
  misc_RNA (1)...(19): siRNA sense strand
gggcuagaauccgggaguu

SEQ ID NO: 309610 - RNA, 19 nt, Homo sapiens
  misc_RNA (1)...(19): siRNA sense strand
ccagcgagagaaagaguuu

SEQ ID NO: 309611 - RNA, 19 nt, Homo sapiens
  misc_RNA (1)...(19): siRNA sense strand
caagccagcacccauguuc

SEQ ID NO: 309612 - RNA, 19 nt, Homo sapiens
  misc_RNA (1)...(19): siRNA sense strand
cguggaagcuacacuuacu

SEQ ID NO: 309613 - RNA, 19 nt, Homo sapiens
  misc_RNA (1)...(19): siRNA sense strand
aagcucgcgucaucacuga

SEQ ID NO: 309614 - RNA, 19 nt, Homo sapiens
  misc_RNA (1)...(19): siRNA sense strand
cugaauuagccaccaagua

SEQ ID NO: 309615 - RNA, 19 nt, Homo sapiens
  misc_RNA (1)...(19): siRNA sense strand
gcuagcccucugccucuuu

SEQ ID NO: 309616 - RNA, 19 nt, Homo sapiens
  misc_RNA (1)...(19): siRNA sense strand
uguauuauucugcguggaa

SEQ ID NO: 309617 - RNA, 19 nt, Homo sapiens
  misc_RNA (1)...(19): siRNA sense strand
ugcggaagcuggugaaagc

SEQ ID NO: 309618 - RNA, 19 nt, Homo sapiens
  misc_RNA (1)...(19): siRNA sense strand
ggugaaagcucgcgucauc

SEQ ID NO: 309619 - RNA, 19 nt, Homo sapiens
  misc_RNA (1)...(19): siRNA sense strand
guuccuggaugacuccuuu

SEQ ID NO: 309620 - RNA, 19 nt, Homo sapiens
  misc_RNA (1)...(19): siRNA sense strand
ucuaagcaguggcaucuga

SEQ ID NO: 309621 - RNA, 19 nt, Homo sapiens
  misc_RNA (1)...(19): siRNA sense strand
ugaauuagccaccaaguac

SEQ ID NO: 309622 - RNA, 19 nt, Homo sapiens
  misc_RNA (1)...(19): siRNA sense strand
uccugaaucuggacucuaa

SEQ ID NO: 309623 - RNA, 19 nt, Homo sapiens
  misc_RNA (1)...(19): siRNA sense strand
gaugacuccuuucgcaagu

SEQ ID NO: 309624 - RNA, 19 nt, Homo sapiens
  misc_RNA (1)...(19): siRNA sense strand
gggaguucgugccgccuuu

SEQ ID NO: 309625 - RNA, 19 nt, Homo sapiens
  misc_RNA (1)...(19): siRNA sense strand
cacaauauccagcgagaga

SEQ ID NO: 309626 - RNA, 19 nt, Homo sapiens
  misc_RNA (1)...(19): siRNA sense strand
gaucuaagcaguggcaucu

SEQ ID NO: 309627 - RNA, 19 nt, Homo sapiens
  misc_RNA (1)...(19): siRNA sense strand
caauauccagcgagagaaa

SEQ ID NO: 309628 - RNA, 19 nt, Homo sapiens
  misc_RNA (1)...(19): siRNA sense strand
gggcuagaauccgggaguu

SEQ ID NO: 309629 - RNA, 19 nt, Homo sapiens
  misc_RNA (1)...(19): siRNA sense strand
ccagcgagagaaagaguuu

SEQ ID NO: 309630 - RNA, 19 nt, Homo sapiens
  misc_RNA (1)...(19): siRNA sense strand
caagccagcacccauguuc

SEQ ID NO: 309631 - RNA, 19 nt, Homo sapiens
  misc_RNA (1)...(19): siRNA sense strand
cguggaagcuacacuuacu

SEQ ID NO: 309632 - RNA, 19 nt, Homo sapiens
  misc_RNA (1)...(19): siRNA sense strand
aagcucgcgucaucacuga

SEQ ID NO: 309633 - RNA, 19 nt, Homo sapiens
  misc_RNA (1)...(19): siRNA sense strand
cugaauuagccaccaagua

SEQ ID NO: 309634 - RNA, 19 nt, Homo sapiens
  misc_RNA (1)...(19): siRNA sense strand
gcuagcccucugccucuuu

SEQ ID NO: 309635 - RNA, 19 nt, Homo sapiens
  misc_RNA (1)...(19): siRNA sense strand
uguauuauucugcguggaa

SEQ ID NO: 309636 - RNA, 19 nt, Homo sapiens
  misc_RNA (1)...(19): siRNA sense strand
ugcggaagcuggugaaagc

SEQ ID NO: 309637 - RNA, 19 nt, Homo sapiens
  misc_RNA (1)...(19): siRNA sense strand
guuccuggaugacuccuuu

SEQ ID NO: 309638 - RNA, 19 nt, Homo sapiens
  misc_RNA (1)...(19): siRNA sense strand
ugaauuagccaccaaguac

SEQ ID NO: 309639 - RNA, 19 nt, Homo sapiens
  misc_RNA (1)...(19): siRNA sense strand
uccugaaucuggacucuaa

SEQ ID NO: 309640 - RNA, 19 nt, Homo sapiens
  misc_RNA (1)...(19): siRNA sense strand
gaugacuccuuucgcaagu

SEQ ID NO: 309641 - RNA, 19 nt, Homo sapiens
  misc_RNA (1)...(19): siRNA sense strand
gggaguucgugccgccuuu

SEQ ID NO: 309642 - RNA, 19 nt, Homo sapiens
  misc_RNA (1)...(19): siRNA sense strand
gggcuagaauccgggaguu

SEQ ID NO: 309643 - RNA, 19 nt, Homo sapiens
  misc_RNA (1)...(19): siRNA sense strand
caagccagcacccauguuc

SEQ ID NO: 309644 - RNA, 19 nt, Homo sapiens
  misc_RNA (1)...(19): siRNA sense strand
cguggaagcuacacuuacu

SEQ ID NO: 309645 - RNA, 19 nt, Homo sapiens
  misc_RNA (1)...(19): siRNA sense strand
cugaauuagccaccaagua

SEQ ID NO: 309646 - RNA, 19 nt, Homo sapiens
  misc_RNA (1)...(19): siRNA sense strand
gcuagcccucugccucuuu

SEQ ID NO: 309647 - RNA, 19 nt, Homo sapiens
  misc_RNA (1)...(19): siRNA sense strand
uguauuauucugcguggaa

SEQ ID NO: 309648 - RNA, 19 nt, Homo sapiens
  misc_RNA (1)...(19): siRNA sense strand
ugaagcagcucaucgacaa

SEQ ID NO: 309649 - RNA, 19 nt, Homo sapiens
  misc_RNA (1)...(19): siRNA sense strand
gcagucgccuguccaagga

SEQ ID NO: 309650 - RNA, 19 nt, Homo sapiens
  misc_RNA (1)...(19): siRNA sense strand
gacaucaagucccauuaug

SEQ ID NO: 309651 - RNA, 19 nt, Homo sapiens
  misc_RNA (1)...(19): siRNA sense strand
ccaucaaccucucugaguu

SEQ ID NO: 309652 - RNA, 19 nt, Homo sapiens
  misc_RNA (1)...(19): siRNA sense strand
ggaggagucugacauugac

SEQ ID NO: 309653 - RNA, 19 nt, Homo sapiens
  misc_RNA (1)...(19): siRNA sense strand
gaugaugacggaaccuuga

SEQ ID NO: 309654 - RNA, 19 nt, Homo sapiens
  misc_RNA (1)...(19): siRNA sense strand
ccaaagacagccuuagcuu

SEQ ID NO: 309655 - RNA, 19 nt, Homo sapiens
  misc_RNA (1)...(19): siRNA sense strand
gccagcuccuuuaagauug

SEQ ID NO: 309656 - RNA, 19 nt, Homo sapiens
  misc_RNA (1)...(19): siRNA sense strand
ugacggaaccuugaacaga

SEQ ID NO: 309657 - RNA, 19 nt, Homo sapiens
  misc_RNA (1)...(19): siRNA sense strand
ugacguuccugacgaagca

SEQ ID NO: 309658 - RNA, 19 nt, Homo sapiens
  misc_RNA (1)...(19): siRNA sense strand
gaaccaucaaccucucuga

SEQ ID NO: 309659 - RNA, 19 nt, Homo sapiens
  misc_RNA (1)...(19): siRNA sense strand
gaggacacacggcuuagug

SEQ ID NO: 309660 - RNA, 19 nt, Homo sapiens
  misc_RNA (1)...(19): siRNA sense strand
ggcgaggacacacggcuua

SEQ ID NO: 309661 - RNA, 19 nt, Homo sapiens
  misc_RNA (1)...(19): siRNA sense strand
gacuuugccagcuccuuua

SEQ ID NO: 309662 - RNA, 19 nt, Homo sapiens
  misc_RNA (1)...(19): siRNA sense strand
agacaucaagucccauuau

SEQ ID NO: 309663 - RNA, 19 nt, Homo sapiens
  misc_RNA (1)...(19): siRNA sense strand
uuugccagcuccuuuaaga

SEQ ID NO: 309664 - RNA, 19 nt, Homo sapiens
  misc_RNA (1)...(19): siRNA sense strand
ucuuugacuuugaugauga

SEQ ID NO: 309665 - RNA, 19 nt, Homo sapiens
  misc_RNA (1)...(19): siRNA sense strand
aagacagccuuagcuuuga

SEQ ID NO: 309666 - RNA, 19 nt, Homo sapiens
  misc_RNA (1)...(19): siRNA sense strand
ugccagcuccuuuaagauu

SEQ ID NO: 309667 - RNA, 19 nt, Homo sapiens
  misc_RNA (1)...(19): siRNA sense strand
gcagggucuucuccacauc

SEQ ID NO: 309668 - RNA, 19 nt, Homo sapiens
  misc_RNA (1)...(19): siRNA sense strand
agacuuugccagcuccuuu

SEQ ID NO: 309669 - RNA, 19 nt, Homo sapiens
  misc_RNA (1)...(19): siRNA sense strand
uggaggagucugacauuga

SEQ ID NO: 309670 - RNA, 19 nt, Homo sapiens
  misc_RNA (1)...(19): siRNA sense strand
ccgcaucuuugacuuugau

SEQ ID NO: 309671 - RNA, 19 nt, Homo sapiens
  misc_RNA (1)...(19): siRNA sense strand
ccagacaucaagucccauu

SEQ ID NO: 309672 - RNA, 19 nt, Homo sapiens
  misc_RNA (1)...(19): siRNA sense strand
gaaccuugaacagagaaga

SEQ ID NO: 309673 - RNA, 19 nt, Homo sapiens
  misc_RNA (1)...(19): siRNA sense strand
ccagcuccuuuaagauugu

SEQ ID NO: 309674 - RNA, 19 nt, Homo sapiens
  misc_RNA (1)...(19): siRNA sense strand
caucaaccucucugaguuc

SEQ ID NO: 309675 - RNA, 19 nt, Homo sapiens
  misc_RNA (1)...(19): siRNA sense strand
ugagccggcuggugaacug

SEQ ID NO: 309676 - RNA, 19 nt, Homo sapiens
  misc_RNA (1)...(19): siRNA sense strand
aggagcugcuggccgagua

SEQ ID NO: 309677 - RNA, 19 nt, Homo sapiens
  misc_RNA (1)...(19): siRNA sense strand
gaugacggaaccuugaaca

SEQ ID NO: 309678 - RNA, 19 nt, Homo sapiens
  misc_RNA (1)...(19): siRNA sense strand
cagacaucaagucccauua

SEQ ID NO: 309679 - RNA, 19 nt, Homo sapiens
  misc_RNA (1)...(19): siRNA sense strand
cuuuaagauuguccuguga

SEQ ID NO: 309680 - RNA, 19 nt, Homo sapiens
  misc_RNA (1)...(19): siRNA sense strand
gcuuagugcgucugagaug

SEQ ID NO: 309681 - RNA, 19 nt, Homo sapiens
  misc_RNA (1)...(19): siRNA sense strand
gacauugacagggauggaa

SEQ ID NO: 309682 - RNA, 19 nt, Homo sapiens
  misc_RNA (1)...(19): siRNA sense strand
cuuagugcgucugagauga

SEQ ID NO: 309683 - RNA, 19 nt, Homo sapiens
  misc_RNA (1)...(19): siRNA sense strand
gcagugacauguacgagaa

SEQ ID NO: 309684 - RNA, 19 nt, Homo sapiens
  misc_RNA (1)...(19): siRNA sense strand
ggacugcagugacauguac

SEQ ID NO: 309685 - RNA, 19 nt, Homo sapiens
  misc_RNA (1)...(19): siRNA sense strand
caccagcugugccauguuc

SEQ ID NO: 309686 - RNA, 19 nt, Homo sapiens
  misc_RNA (1)...(19): siRNA sense strand
uagcguccauugccuguuc

SEQ ID NO: 309687 - RNA, 19 nt, Homo sapiens
  misc_RNA (1)...(19): siRNA sense strand
ugacauguacgagaaagug

SEQ ID NO: 309688 - RNA, 19 nt, Homo sapiens
  misc_RNA (1)...(19): siRNA sense strand
gcagugacauguacgagaa

SEQ ID NO: 309689 - RNA, 19 nt, Homo sapiens
  misc_RNA (1)...(19): siRNA sense strand
ggacugcagugacauguac

SEQ ID NO: 309690 - RNA, 19 nt, Homo sapiens
  misc_RNA (1)...(19): siRNA sense strand
caccagcugugccauguuc

SEQ ID NO: 309691 - RNA, 19 nt, Homo sapiens
  misc_RNA (1)...(19): siRNA sense strand
uagcguccauugccuguuc

SEQ ID NO: 309692 - RNA, 19 nt, Homo sapiens
  misc_RNA (1)...(19): siRNA sense strand
ugacauguacgagaaagug

SEQ ID NO: 309693 - RNA, 19 nt, Homo sapiens
  misc_RNA (1)...(19): siRNA sense strand
gcaaagagaucaaugagaa

SEQ ID NO: 309694 - RNA, 19 nt, Homo sapiens
  misc_RNA (1)...(19): siRNA sense strand
caucagagcuugugaauga

SEQ ID NO: 309695 - RNA, 19 nt, Homo sapiens
  misc_RNA (1)...(19): siRNA sense strand
uaaggaagcuguacaaugu

SEQ ID NO: 309696 - RNA, 19 nt, Homo sapiens
  misc_RNA (1)...(19): siRNA sense strand
gauaggaaguugugugaaa

SEQ ID NO: 309697 - RNA, 19 nt, Homo sapiens
  misc_RNA (1)...(19): siRNA sense strand
gaagaucgauggcucugaa

SEQ ID NO: 309698 - RNA, 19 nt, Homo sapiens
  misc_RNA (1)...(19): siRNA sense strand
gggcuuaccuuguggcaua

SEQ ID NO: 309699 - RNA, 19 nt, Homo sapiens
  misc_RNA (1)...(19): siRNA sense strand
acacaaagguuucucugua

SEQ ID NO: 309700 - RNA, 19 nt, Homo sapiens
  misc_RNA (1)...(19): siRNA sense strand
gaauguaaaucucuagguu

SEQ ID NO: 309701 - RNA, 19 nt, Homo sapiens
  misc_RNA (1)...(19): siRNA sense strand
caucagacauuuccuuuga

SEQ ID NO: 309702 - RNA, 19 nt, Homo sapiens
  misc_RNA (1)...(19): siRNA sense strand
gcagagaccuggagaagag

SEQ ID NO: 309703 - RNA, 19 nt, Homo sapiens
  misc_RNA (1)...(19): siRNA sense strand
cagagaaaccugagaauuu

SEQ ID NO: 309704 - RNA, 19 nt, Homo sapiens
  misc_RNA (1)...(19): siRNA sense strand
ggaggagacuugugcgaaa

SEQ ID NO: 309705 - RNA, 19 nt, Homo sapiens
  misc_RNA (1)...(19): siRNA sense strand
caagggcacuccagaaaga

SEQ ID NO: 309706 - RNA, 19 nt, Homo sapiens
  misc_RNA (1)...(19): siRNA sense strand
gaagcugugugucaucauu

SEQ ID NO: 309707 - RNA, 19 nt, Homo sapiens
  misc_RNA (1)...(19): siRNA sense strand
caacuuuccugccaaugaa

SEQ ID NO: 309708 - RNA, 19 nt, Homo sapiens
  misc_RNA (1)...(19): siRNA sense strand
gcagaaagaauguaaaucu

SEQ ID NO: 309709 - RNA, 19 nt, Homo sapiens
  misc_RNA (1)...(19): siRNA sense strand
ccagauaguuuauaugagu

SEQ ID NO: 309710 - RNA, 19 nt, Homo sapiens
  misc_RNA (1)...(19): siRNA sense strand
gugaagggaucaugaccua

SEQ ID NO: 309711 - RNA, 19 nt, Homo sapiens
  misc_RNA (1)...(19): siRNA sense strand
ugaguacccugaagauauu

SEQ ID NO: 309712 - RNA, 19 nt, Homo sapiens
  misc_RNA (1)...(19): siRNA sense strand
cagaaugccuaucaagcua

SEQ ID NO: 309713 - RNA, 19 nt, Homo sapiens
  misc_RNA (1)...(19): siRNA sense strand
cagcagaguuccaagaugu

SEQ ID NO: 309714 - RNA, 19 nt, Homo sapiens
  misc_RNA (1)...(19): siRNA sense strand
ggagagcaccaaagaaaga

SEQ ID NO: 309715 - RNA, 19 nt, Homo sapiens
  misc_RNA (1)...(19): siRNA sense strand
uaagucugcucccauugua

SEQ ID NO: 309716 - RNA, 19 nt, Homo sapiens
  misc_RNA (1)...(19): siRNA sense strand
gaaagucccugagcauguc

SEQ ID NO: 309717 - RNA, 19 nt, Homo sapiens
  misc_RNA (1)...(19): siRNA sense strand
ggagaugccaguaggcuaa

SEQ ID NO: 309718 - RNA, 19 nt, Homo sapiens
  misc_RNA (1)...(19): siRNA sense strand
gaucgugucugcccugcuu

SEQ ID NO: 309719 - RNA, 19 nt, Homo sapiens
  misc_RNA (1)...(19): siRNA sense strand
aaaccgaaaugugaacuuu

SEQ ID NO: 309720 - RNA, 19 nt, Homo sapiens
  misc_RNA (1)...(19): siRNA sense strand
uaagauagcaucagagcuu

SEQ ID NO: 309721 - RNA, 19 nt, Homo sapiens
  misc_RNA (1)...(19): siRNA sense strand
caaaguugaugucuauucu

SEQ ID NO: 309722 - RNA, 19 nt, Homo sapiens
  misc_RNA (1)...(19): siRNA sense strand
uggcagagcugggagauga

SEQ ID NO: 309723 - RNA, 19 nt, Homo sapiens
  misc_RNA (1)...(19): siRNA sense strand
uaaggaagauaggaaguug

SEQ ID NO: 309724 - RNA, 19 nt, Homo sapiens
  misc_RNA (1)...(19): siRNA sense strand
cauuguaggugaccaagaa

SEQ ID NO: 309725 - RNA, 19 nt, Homo sapiens
  misc_RNA (1)...(19): siRNA sense strand
gaagggaucaugaccuaug

SEQ ID NO: 309726 - RNA, 19 nt, Homo sapiens
  misc_RNA (1)...(19): siRNA sense strand
ucaguaagauagcaucaga

SEQ ID NO: 309727 - RNA, 19 nt, Homo sapiens
  misc_RNA (1)...(19): siRNA sense strand
ccagaaagauugcauuuug

SEQ ID NO: 309728 - RNA, 19 nt, Homo sapiens
  misc_RNA (1)...(19): siRNA sense strand
guucaaacccggagaauca

SEQ ID NO: 309729 - RNA, 19 nt, Homo sapiens
  misc_RNA (1)...(19): siRNA sense strand
ccucacgaaucuagucaua

SEQ ID NO: 309730 - RNA, 19 nt, Homo sapiens
  misc_RNA (1)...(19): siRNA sense strand
agacaaggcugagaguuau

SEQ ID NO: 309731 - RNA, 19 nt, Homo sapiens
  misc_RNA (1)...(19): siRNA sense strand
gccaugaaaucugaaacua

SEQ ID NO: 309732 - RNA, 19 nt, Homo sapiens
  misc_RNA (1)...(19): siRNA sense strand
gugagcacauuaucaaaga

SEQ ID NO: 309733 - RNA, 19 nt, Homo sapiens
  misc_RNA (1)...(19): siRNA sense strand
aaacaaaugugucuaucag

SEQ ID NO: 309734 - RNA, 19 nt, Homo sapiens
  misc_RNA (1)...(19): siRNA sense strand
caagcuauccauaaugaaa

SEQ ID NO: 309735 - RNA, 19 nt, Homo sapiens
  misc_RNA (1)...(19): siRNA sense strand
cagaagcuguccugcagaa

SEQ ID NO: 309736 - RNA, 19 nt, Homo sapiens
  misc_RNA (1)...(19): siRNA sense strand
gcaaaguugaugucuauuc

SEQ ID NO: 309737 - RNA, 19 nt, Homo sapiens
  misc_RNA (1)...(19): siRNA sense strand
cgaugaaucuugccuuaag

SEQ ID NO: 309738 - RNA, 19 nt, Homo sapiens
  misc_RNA (1)...(19): siRNA sense strand
gcauaaaacucagcagaaa

SEQ ID NO: 309739 - RNA, 19 nt, Homo sapiens
  misc_RNA (1)...(19): siRNA sense strand
ugacaagccuccuucuaag

SEQ ID NO: 309740 - RNA, 19 nt, Homo sapiens
  misc_RNA (1)...(19): siRNA sense strand
gaagaguacagcagaguuc

SEQ ID NO: 309741 - RNA, 19 nt, Homo sapiens
  misc_RNA (1)...(19): siRNA sense strand
gaagcuguccugcagaaug

SEQ ID NO: 309742 - RNA, 19 nt, Homo sapiens
  misc_RNA (1)...(19): siRNA sense strand
aagacaaggcugagaguua

SEQ ID NO: 309743 - RNA, 19 nt, Homo sapiens
  misc_RNA (1)...(19): siRNA sense strand
aagguugacugguuacaaa

SEQ ID NO: 309744 - RNA, 19 nt, Homo sapiens
  misc_RNA (1)...(19): siRNA sense strand
gcugggagaugacaagucu

SEQ ID NO: 309745 - RNA, 19 nt, Homo sapiens
  misc_RNA (1)...(19): siRNA sense strand
aaacucagcagaaagaaug

SEQ ID NO: 309746 - RNA, 19 nt, Homo sapiens
  misc_RNA (1)...(19): siRNA sense strand
gaaagacaggguccagaug

SEQ ID NO: 309747 - RNA, 19 nt, Homo sapiens
  misc_RNA (1)...(19): siRNA sense strand
ucaaggagagcaccaaaga

SEQ ID NO: 309748 - RNA, 19 nt, Homo sapiens
  misc_RNA (1)...(19): siRNA sense strand
caaccuaacggacacaguu

SEQ ID NO: 309749 - RNA, 19 nt, Homo sapiens
  misc_RNA (1)...(19): siRNA sense strand
caaugaaccuccuguagcu

SEQ ID NO: 309750 - RNA, 19 nt, Homo sapiens
  misc_RNA (1)...(19): siRNA sense strand
gaugacaagucuggagaug

SEQ ID NO: 309751 - RNA, 19 nt, Homo sapiens
  misc_RNA (1)...(19): siRNA sense strand
gagcucaaugucccuauuu

SEQ ID NO: 309752 - RNA, 19 nt, Homo sapiens
  misc_RNA (1)...(19): siRNA sense strand
gaaaugagaggcacaucag

SEQ ID NO: 309753 - RNA, 19 nt, Homo sapiens
  misc_RNA (1)...(19): siRNA sense strand
cagaaaagguugacugguu

SEQ ID NO: 309754 - RNA, 19 nt, Homo sapiens
  misc_RNA (1)...(19): siRNA sense strand
ugucagcaaucacaaccua

SEQ ID NO: 309755 - RNA, 19 nt, Homo sapiens
  misc_RNA (1)...(19): siRNA sense strand
cccgaugaaucuugccuua

SEQ ID NO: 309756 - RNA, 19 nt, Homo sapiens
  misc_RNA (1)...(19): siRNA sense strand
aaugugaacuuugccauga

SEQ ID NO: 309757 - RNA, 19 nt, Homo sapiens
  misc_RNA (1)...(19): siRNA sense strand
uguaauguuugccaagaaa

SEQ ID NO: 309758 - RNA, 19 nt, Homo sapiens
  misc_RNA (1)...(19): siRNA sense strand
cuaacagugugguaucuga

SEQ ID NO: 309759 - RNA, 19 nt, Homo sapiens
  misc_RNA (1)...(19): siRNA sense strand
agaaaagguugacugguua

SEQ ID NO: 309760 - RNA, 19 nt, Homo sapiens
  misc_RNA (1)...(19): siRNA sense strand
ggaacagccaguuaaggaa

SEQ ID NO: 309761 - RNA, 19 nt, Homo sapiens
  misc_RNA (1)...(19): siRNA sense strand
guuugaaucucguaaugga

SEQ ID NO: 309762 - RNA, 19 nt, Homo sapiens
  misc_RNA (1)...(19): siRNA sense strand
gaugacaagccuccuucua

SEQ ID NO: 309763 - RNA, 19 nt, Homo sapiens
  misc_RNA (1)...(19): siRNA sense strand
aaggagagcaccaaagaaa

SEQ ID NO: 309764 - RNA, 19 nt, Homo sapiens
  misc_RNA (1)...(19): siRNA sense strand
cacaaagguuucucuguag

SEQ ID NO: 309765 - RNA, 19 nt, Homo sapiens
  misc_RNA (1)...(19): siRNA sense strand
ccacggugauugucagcaa

SEQ ID NO: 309766 - RNA, 19 nt, Homo sapiens
  misc_RNA (1)...(19): siRNA sense strand
gaacuuugccaugaaaucu

SEQ ID NO: 309767 - RNA, 19 nt, Homo sapiens
  misc_RNA (1)...(19): siRNA sense strand
caggaaagcccaagacaag

SEQ ID NO: 309768 - RNA, 19 nt, Homo sapiens
  misc_RNA (1)...(19): siRNA sense strand
auaaggaaguguuugaauc

SEQ ID NO: 309769 - RNA, 19 nt, Homo sapiens
  misc_RNA (1)...(19): siRNA sense strand
augcaaaguugaugucuau

SEQ ID NO: 309770 - RNA, 19 nt, Homo sapiens
  misc_RNA (1)...(19): siRNA sense strand
guuucucuguagacuauua

SEQ ID NO: 309771 - RNA, 19 nt, Homo sapiens
  misc_RNA (1)...(19): siRNA sense strand
ggccuucccagauaguuua

SEQ ID NO: 309772 - RNA, 19 nt, Homo sapiens
  misc_RNA (1)...(19): siRNA sense strand
ccaugaaaucugaaacuaa

SEQ ID NO: 309773 - RNA, 19 nt, Homo sapiens
  misc_RNA (1)...(19): siRNA sense strand
gagguggucucggaucuca

SEQ ID NO: 309774 - RNA, 19 nt, Homo sapiens
  misc_RNA (1)...(19): siRNA sense strand
gugaaagacacaaccauug

SEQ ID NO: 309775 - RNA, 19 nt, Homo sapiens
  misc_RNA (1)...(19): siRNA sense strand
gacuuuacggcuucuguua

SEQ ID NO: 309776 - RNA, 19 nt, Homo sapiens
  misc_RNA (1)...(19): siRNA sense strand
acaaagguuucucuguaga

SEQ ID NO: 309777 - RNA, 19 nt, Homo sapiens
  misc_RNA (1)...(19): siRNA sense strand
uaacggacacaguucagaa

SEQ ID NO: 309778 - RNA, 19 nt, Homo sapiens
  misc_RNA (1)...(19): siRNA sense strand
ccacggauccugucagagu

SEQ ID NO: 309779 - RNA, 19 nt, Homo sapiens
  misc_RNA (1)...(19): siRNA sense strand
gaugaaucuugccuuaagu

SEQ ID NO: 309780 - RNA, 19 nt, Homo sapiens
  misc_RNA (1)...(19): siRNA sense strand
ccagagaaaccugagaauu

SEQ ID NO: 309781 - RNA, 19 nt, Homo sapiens
  misc_RNA (1)...(19): siRNA sense strand
cagaaagaauguaaaucuc

SEQ ID NO: 309782 - RNA, 19 nt, Homo sapiens
  misc_RNA (1)...(19): siRNA sense strand
ccaccauccuacugaagaa

SEQ ID NO: 309783 - RNA, 19 nt, Homo sapiens
  misc_RNA (1)...(19): siRNA sense strand
gaucaaggagagcaccaaa

SEQ ID NO: 309784 - RNA, 19 nt, Homo sapiens
  misc_RNA (1)...(19): siRNA sense strand
guacagcagaguuccaaga

SEQ ID NO: 309785 - RNA, 19 nt, Homo sapiens
  misc_RNA (1)...(19): siRNA sense strand
cuaucaagcuauccauaau

SEQ ID NO: 309786 - RNA, 19 nt, Homo sapiens
  misc_RNA (1)...(19): siRNA sense strand
gcagaaugccuaucaagcu

SEQ ID NO: 309787 - RNA, 19 nt, Homo sapiens
  misc_RNA (1)...(19): siRNA sense strand
agagaaaccugagaauuuu

SEQ ID NO: 309788 - RNA, 19 nt, Homo sapiens
  misc_RNA (1)...(19): siRNA sense strand
ugaagacacugaagaucca

SEQ ID NO: 309789 - RNA, 19 nt, Homo sapiens
  misc_RNA (1)...(19): siRNA sense strand
aaagacaggguccagauga

SEQ ID NO: 309790 - RNA, 19 nt, Homo sapiens
  misc_RNA (1)...(19): siRNA sense strand
caaacccggagaaucauuu

SEQ ID NO: 309791 - RNA, 19 nt, Homo sapiens
  misc_RNA (1)...(19): siRNA sense strand
ccaacuuuccugccaauga

SEQ ID NO: 309792 - RNA, 19 nt, Homo sapiens
  misc_RNA (1)...(19): siRNA sense strand
gaaugccuaucaagcuauc

SEQ ID NO: 309793 - RNA, 19 nt, Homo sapiens
  misc_RNA (1)...(19): siRNA sense strand
gcaagauugucgcaaauuu

SEQ ID NO: 309794 - RNA, 19 nt, Homo sapiens
  misc_RNA (1)...(19): siRNA sense strand
ucacucaagucucuauuua

SEQ ID NO: 309795 - RNA, 19 nt, Homo sapiens
  misc_RNA (1)...(19): siRNA sense strand
gcccaaugcucuuuaacua

SEQ ID NO: 309796 - RNA, 19 nt, Homo sapiens
  misc_RNA (1)...(19): siRNA sense strand
gcacgacucauuucuguuu

SEQ ID NO: 309797 - RNA, 19 nt, Homo sapiens
  misc_RNA (1)...(19): siRNA sense strand
ggugaaagcucaugaacuc

SEQ ID NO: 309798 - RNA, 19 nt, Homo sapiens
  misc_RNA (1)...(19): siRNA sense strand
caagcaagauugucgcaaa

SEQ ID NO: 309799 - RNA, 19 nt, Homo sapiens
  misc_RNA (1)...(19): siRNA sense strand
gaagugcacaucuauaaga

SEQ ID NO: 309800 - RNA, 19 nt, Homo sapiens
  misc_RNA (1)...(19): siRNA sense strand
gagcacgacucauuucugu

SEQ ID NO: 309801 - RNA, 19 nt, Homo sapiens
  misc_RNA (1)...(19): siRNA sense strand
gugcaggucucgacucuga

SEQ ID NO: 309802 - RNA, 19 nt, Homo sapiens
  misc_RNA (1)...(19): siRNA sense strand
ggacacaucacagguauug

SEQ ID NO: 309803 - RNA, 19 nt, Homo sapiens
  misc_RNA (1)...(19): siRNA sense strand
ucagaaagaugguguuugg

SEQ ID NO: 309804 - RNA, 19 nt, Homo sapiens
  misc_RNA (1)...(19): siRNA sense strand
gugcacaucuauaagaaga

SEQ ID NO: 309805 - RNA, 19 nt, Homo sapiens
  misc_RNA (1)...(19): siRNA sense strand
gaccuucgucuccaaguua

SEQ ID NO: 309806 - RNA, 19 nt, Homo sapiens
  misc_RNA (1)...(19): siRNA sense strand
gcuccuaagugugucauuu

SEQ ID NO: 309807 - RNA, 19 nt, Homo sapiens
  misc_RNA (1)...(19): siRNA sense strand
cuggugauccugagaauua

SEQ ID NO: 309808 - RNA, 19 nt, Homo sapiens
  misc_RNA (1)...(19): siRNA sense strand
gaucaugugacuucaaaug

SEQ ID NO: 309809 - RNA, 19 nt, Homo sapiens
  misc_RNA (1)...(19): siRNA sense strand
acucaagucucuauuuaug

SEQ ID NO: 309810 - RNA, 19 nt, Homo sapiens
  misc_RNA (1)...(19): siRNA sense strand
caaauuugcugugggaagu

SEQ ID NO: 309811 - RNA, 19 nt, Homo sapiens
  misc_RNA (1)...(19): siRNA sense strand
gaaagcucaugaacucaag

SEQ ID NO: 309812 - RNA, 19 nt, Homo sapiens
  misc_RNA (1)...(19): siRNA sense strand
gagcacaacggacacauca

SEQ ID NO: 309813 - RNA, 19 nt, Homo sapiens
  misc_RNA (1)...(19): siRNA sense strand
uagcaucacucaagucucu

SEQ ID NO: 309814 - RNA, 19 nt, Homo sapiens
  misc_RNA (1)...(19): siRNA sense strand
cagaauagcaucacucaag

SEQ ID NO: 309815 - RNA, 19 nt, Homo sapiens
  misc_RNA (1)...(19): siRNA sense strand
gcacaacggacacaucaca

SEQ ID NO: 309816 - RNA, 19 nt, Homo sapiens
  misc_RNA (1)...(19): siRNA sense strand
ggaaguggagcacgacuca

SEQ ID NO: 309817 - RNA, 19 nt, Homo sapiens
  misc_RNA (1)...(19): siRNA sense strand
uggagacgcugcaccagaa

SEQ ID NO: 309818 - RNA, 19 nt, Homo sapiens
  misc_RNA (1)...(19): siRNA sense strand
gcacaucuauaagaagaac

SEQ ID NO: 309819 - RNA, 19 nt, Homo sapiens
  misc_RNA (1)...(19): siRNA sense strand
ccaugacaauuugggauuu

SEQ ID NO: 309820 - RNA, 19 nt, Homo sapiens
  misc_RNA (1)...(19): siRNA sense strand
ucaagucucuauuuaugag

SEQ ID NO: 309821 - RNA, 19 nt, Homo sapiens
  misc_RNA (1)...(19): siRNA sense strand
agaaagaugguguuuggaa

SEQ ID NO: 309822 - RNA, 19 nt, Homo sapiens
  misc_RNA (1)...(19): siRNA sense strand
gacaagagagccacaacug

SEQ ID NO: 309823 - RNA, 19 nt, Homo sapiens
  misc_RNA (1)...(19): siRNA sense strand
gagccaaucaccugucaug

SEQ ID NO: 309824 - RNA, 19 nt, Homo sapiens
  misc_RNA (1)...(19): siRNA sense strand
gcagcaggaucaugugacu

SEQ ID NO: 309825 - RNA, 19 nt, Homo sapiens
  misc_RNA (1)...(19): siRNA sense strand
acgaagugcacaucuauaa

SEQ ID NO: 309826 - RNA, 19 nt, Homo sapiens
  misc_RNA (1)...(19): siRNA sense strand
agaauagcaucacucaagu

SEQ ID NO: 309827 - RNA, 19 nt, Homo sapiens
  misc_RNA (1)...(19): siRNA sense strand
cuaagugugucauuugucu

SEQ ID NO: 309828 - RNA, 19 nt, Homo sapiens
  misc_RNA (1)...(19): siRNA sense strand
ugggugagcaagcacauua

SEQ ID NO: 309829 - RNA, 19 nt, Homo sapiens
  misc_RNA (1)...(19): siRNA sense strand
cgacucauuucuguuuguu

SEQ ID NO: 309830 - RNA, 19 nt, Homo sapiens
  misc_RNA (1)...(19): siRNA sense strand
ucacgaagugcacaucuau

SEQ ID NO: 309831 - RNA, 19 nt, Homo sapiens
  misc_RNA (1)...(19): siRNA sense strand
gagcauccaacgcaacaug

SEQ ID NO: 309832 - RNA, 19 nt, Homo sapiens
  misc_RNA (1)...(19): siRNA sense strand
gcugcccaaugcucuuuaa

SEQ ID NO: 309833 - RNA, 19 nt, Homo sapiens
  misc_RNA (1)...(19): siRNA sense strand
aggaucaugugacuucaaa

SEQ ID NO: 309834 - RNA, 19 nt, Homo sapiens
  misc_RNA (1)...(19): siRNA sense strand
ccacaguccucagcuugga

SEQ ID NO: 309835 - RNA, 19 nt, Homo sapiens
  misc_RNA (1)...(19): siRNA sense strand
gagacgcugcaccagaaua

SEQ ID NO: 309836 - RNA, 19 nt, Homo sapiens
  misc_RNA (1)...(19): siRNA sense strand
ggugagcaagcacauuaaa

SEQ ID NO: 309837 - RNA, 19 nt, Homo sapiens
  misc_RNA (1)...(19): siRNA sense strand
cuucaaaugcagaguguuu

SEQ ID NO: 309838 - RNA, 19 nt, Homo sapiens
  misc_RNA (1)...(19): siRNA sense strand
caagagcgaccgcauuguc

SEQ ID NO: 309839 - RNA, 19 nt, Homo sapiens
  misc_RNA (1)...(19): siRNA sense strand
aagcaagauugucgcaaau

SEQ ID NO: 309840 - RNA, 19 nt, Homo sapiens
  misc_RNA (1)...(19): siRNA sense strand
uuuaugagguggacaagca

SEQ ID NO: 309841 - RNA, 19 nt, Homo sapiens
  misc_RNA (1)...(19): siRNA sense strand
gcgaccgcauugucacuug

SEQ ID NO: 309842 - RNA, 19 nt, Homo sapiens
  misc_RNA (1)...(19): siRNA sense strand
ucaugugacuucaaaugca

SEQ ID NO: 309843 - RNA, 19 nt, Homo sapiens
  misc_RNA (1)...(19): siRNA sense strand
ugaccuucgucuccaaguu

SEQ ID NO: 309844 - RNA, 19 nt, Homo sapiens
  misc_RNA (1)...(19): siRNA sense strand
gacuucaaaugcagagugu

SEQ ID NO: 309845 - RNA, 19 nt, Homo sapiens
  misc_RNA (1)...(19): siRNA sense strand
ugaaagcucaugaacucaa

SEQ ID NO: 309846 - RNA, 19 nt, Homo sapiens
  misc_RNA (1)...(19): siRNA sense strand
acaagagagccacaacuga

SEQ ID NO: 309847 - RNA, 19 nt, Homo sapiens
  misc_RNA (1)...(19): siRNA sense strand
gagguggacaagcaagauu

SEQ ID NO: 309848 - RNA, 19 nt, Homo sapiens
  misc_RNA (1)...(19): siRNA sense strand
gcaccagaauagcaucacu

SEQ ID NO: 309849 - RNA, 19 nt, Homo sapiens
  misc_RNA (1)...(19): siRNA sense strand
aagugcacaucuauaagaa

SEQ ID NO: 309850 - RNA, 19 nt, Homo sapiens
  misc_RNA (1)...(19): siRNA sense strand
uuuguuacuuugagucuga

SEQ ID NO: 309851 - RNA, 19 nt, Homo sapiens
  misc_RNA (1)...(19): siRNA sense strand
gcuccacaguccucagcuu

SEQ ID NO: 309852 - RNA, 19 nt, Homo sapiens
  misc_RNA (1)...(19): siRNA sense strand
gcaggaucaugugacuuca

SEQ ID NO: 309853 - RNA, 19 nt, Homo sapiens
  misc_RNA (1)...(19): siRNA sense strand
ggacaagagagccacaacu

SEQ ID NO: 309854 - RNA, 19 nt, Homo sapiens
  misc_RNA (1)...(19): siRNA sense strand
gcagcaagaugccuuuugg

SEQ ID NO: 309855 - RNA, 19 nt, Homo sapiens
  misc_RNA (1)...(19): siRNA sense strand
caugacugcugcccaaugc

SEQ ID NO: 309856 - RNA, 19 nt, Homo sapiens
  misc_RNA (1)...(19): siRNA sense strand
caugacaauuugggauuuc

SEQ ID NO: 309857 - RNA, 19 nt, Homo sapiens
  misc_RNA (1)...(19): siRNA sense strand
gccaugacaauuugggauu

SEQ ID NO: 309858 - RNA, 19 nt, Homo sapiens
  misc_RNA (1)...(19): siRNA sense strand
uagagccaaucaccuguca

SEQ ID NO: 309859 - RNA, 19 nt, Homo sapiens
  misc_RNA (1)...(19): siRNA sense strand
cccaagagcgaccgcauug

SEQ ID NO: 309860 - RNA, 19 nt, Homo sapiens
  misc_RNA (1)...(19): siRNA sense strand
gaauagcaucacucaaguc

SEQ ID NO: 309861 - RNA, 19 nt, Homo sapiens
  misc_RNA (1)...(19): siRNA sense strand
caccgugucuguugcugau

SEQ ID NO: 309862 - RNA, 19 nt, Homo sapiens
  misc_RNA (1)...(19): siRNA sense strand
gaagccaacccuggugauc

SEQ ID NO: 309863 - RNA, 19 nt, Homo sapiens
  misc_RNA (1)...(19): siRNA sense strand
ccaaguuagauauuccaaa

SEQ ID NO: 309864 - RNA, 19 nt, Homo sapiens
  misc_RNA (1)...(19): siRNA sense strand
ggagcacgacucauuucug

SEQ ID NO: 309865 - RNA, 19 nt, Homo sapiens
  misc_RNA (1)...(19): siRNA sense strand
cgaccgcauugucacuugu

SEQ ID NO: 309866 - RNA, 19 nt, Homo sapiens
  misc_RNA (1)...(19): siRNA sense strand
caagauugucgcaaauuuu

SEQ ID NO: 309867 - RNA, 19 nt, Homo sapiens
  misc_RNA (1)...(19): siRNA sense strand
ggaacagggaucguacuca

SEQ ID NO: 309868 - RNA, 19 nt, Homo sapiens
  misc_RNA (1)...(19): siRNA sense strand
acucauuucuguuuguuac

SEQ ID NO: 309869 - RNA, 19 nt, Homo sapiens
  misc_RNA (1)...(19): siRNA sense strand
aaguggagcacgacucauu

SEQ ID NO: 309870 - RNA, 19 nt, Homo sapiens
  misc_RNA (1)...(19): siRNA sense strand
cugccuacauuaaagaagu

SEQ ID NO: 309871 - RNA, 19 nt, Homo sapiens
  misc_RNA (1)...(19): siRNA sense strand
cagggaucguacucagauu

SEQ ID NO: 309872 - RNA, 19 nt, Homo sapiens
  misc_RNA (1)...(19): siRNA sense strand
acggacacaucacagguau

SEQ ID NO: 309873 - RNA, 19 nt, Homo sapiens
  misc_RNA (1)...(19): siRNA sense strand
gcaucacucaagucucuau

SEQ ID NO: 309874 - RNA, 19 nt, Homo sapiens
  misc_RNA (1)...(19): siRNA sense strand
cauuaaagaaguggaugaa

SEQ ID NO: 309875 - RNA, 19 nt, Homo sapiens
  misc_RNA (1)...(19): siRNA sense strand
ggagcacaacggacacauc

SEQ ID NO: 309876 - RNA, 19 nt, Homo sapiens
  misc_RNA (1)...(19): siRNA sense strand
gcaggucucgacucugaag

SEQ ID NO: 309877 - RNA, 19 nt, Homo sapiens
  misc_RNA (1)...(19): siRNA sense strand
gcccucagucccaauaauc

SEQ ID NO: 309878 - RNA, 19 nt, Homo sapiens
  misc_RNA (1)...(19): siRNA sense strand
ucaccugucaugccuggaa

SEQ ID NO: 309879 - RNA, 19 nt, Homo sapiens
  misc_RNA (1)...(19): siRNA sense strand
cacgaagugcacaucuaua

SEQ ID NO: 309880 - RNA, 19 nt, Homo sapiens
  misc_RNA (1)...(19): siRNA sense strand
gggugagcaagcacauuaa

SEQ ID NO: 309881 - RNA, 19 nt, Homo sapiens
  misc_RNA (1)...(19): siRNA sense strand
ucccaauaaucacgaagug

SEQ ID NO: 309882 - RNA, 19 nt, Homo sapiens
  misc_RNA (1)...(19): siRNA sense strand
uagcaucucuaaagaagua

SEQ ID NO: 309883 - RNA, 19 nt, Homo sapiens
  misc_RNA (1)...(19): siRNA sense strand
aagaagaacugauugaaga

SEQ ID NO: 309884 - RNA, 19 nt, Homo sapiens
  misc_RNA (1)...(19): siRNA sense strand
guauaaacuucgccucauu

SEQ ID NO: 309885 - RNA, 19 nt, Homo sapiens
  misc_RNA (1)...(19): siRNA sense strand
aaacuucgccucauuuaau

SEQ ID NO: 309886 - RNA, 19 nt, Homo sapiens
  misc_RNA (1)...(19): siRNA sense strand
aaacuguggugaauggaaa

SEQ ID NO: 309887 - RNA, 19 nt, Homo sapiens
  misc_RNA (1)...(19): siRNA sense strand
gguuaaggcagcagcuuua

SEQ ID NO: 309888 - RNA, 19 nt, Homo sapiens
  misc_RNA (1)...(19): siRNA sense strand
gaucuuacagucaaggaaa

SEQ ID NO: 309889 - RNA, 19 nt, Homo sapiens
  misc_RNA (1)...(19): siRNA sense strand
uuucuuggauuguuggaua

SEQ ID NO: 309890 - RNA, 19 nt, Homo sapiens
  misc_RNA (1)...(19): siRNA sense strand
gcuccugcuuaccaucuua

SEQ ID NO: 309891 - RNA, 19 nt, Homo sapiens
  misc_RNA (1)...(19): siRNA sense strand
ggcagcagcuuuagcaucu

SEQ ID NO: 309892 - RNA, 19 nt, Homo sapiens
  misc_RNA (1)...(19): siRNA sense strand
uggauaaucagacuucuuu

SEQ ID NO: 309893 - RNA, 19 nt, Homo sapiens
  misc_RNA (1)...(19): siRNA sense strand
caaauuacaagaacgaucu

SEQ ID NO: 309894 - RNA, 19 nt, Homo sapiens
  misc_RNA (1)...(19): siRNA sense strand
gcaaccagaaccucuuguu

SEQ ID NO: 309895 - RNA, 19 nt, Homo sapiens
  misc_RNA (1)...(19): siRNA sense strand
uauaaacuucgccucauuu

SEQ ID NO: 309896 - RNA, 19 nt, Homo sapiens
  misc_RNA (1)...(19): siRNA sense strand
caacuacaacaucguuuca

SEQ ID NO: 309897 - RNA, 19 nt, Homo sapiens
  misc_RNA (1)...(19): siRNA sense strand
uuacgaggcuccugcuuac

SEQ ID NO: 309898 - RNA, 19 nt, Homo sapiens
  misc_RNA (1)...(19): siRNA sense strand
gaagaacugauugaagagu

SEQ ID NO: 309899 - RNA, 19 nt, Homo sapiens
  misc_RNA (1)...(19): siRNA sense strand
uaaggcagcagcuuuagca

SEQ ID NO: 309900 - RNA, 19 nt, Homo sapiens
  misc_RNA (1)...(19): siRNA sense strand
ucagacuucuuuucucuaa

SEQ ID NO: 309901 - RNA, 19 nt, Homo sapiens
  misc_RNA (1)...(19): siRNA sense strand
aaagaagaacugauugaag

SEQ ID NO: 309902 - RNA, 19 nt, Homo sapiens
  misc_RNA (1)...(19): siRNA sense strand
ggguuaaggcagcagcuuu

SEQ ID NO: 309903 - RNA, 19 nt, Homo sapiens
  misc_RNA (1)...(19): siRNA sense strand
uuuacgaggcuccugcuua

SEQ ID NO: 309904 - RNA, 19 nt, Homo sapiens
  misc_RNA (1)...(19): siRNA sense strand
gaagaguggcaaccagaac

SEQ ID NO: 309905 - RNA, 19 nt, Homo sapiens
  misc_RNA (1)...(19): siRNA sense strand
aacuucgccucauuuaauu

SEQ ID NO: 309906 - RNA, 19 nt, Homo sapiens
  misc_RNA (1)...(19): siRNA sense strand
ugaagaguggcaaccagaa

SEQ ID NO: 309907 - RNA, 19 nt, Homo sapiens
  misc_RNA (1)...(19): siRNA sense strand
cagcagcuuuagcaucucu

SEQ ID NO: 309908 - RNA, 19 nt, Homo sapiens
  misc_RNA (1)...(19): siRNA sense strand
gagaugguacaggcgcuuu

SEQ ID NO: 309909 - RNA, 19 nt, Homo sapiens
  misc_RNA (1)...(19): siRNA sense strand
acaaaacuguggugaaugg

SEQ ID NO: 309910 - RNA, 19 nt, Homo sapiens
  misc_RNA (1)...(19): siRNA sense strand
ucaacuacaacaucguuuc

SEQ ID NO: 309911 - RNA, 19 nt, Homo sapiens
  misc_RNA (1)...(19): siRNA sense strand
uguauaaacuucgccucau

SEQ ID NO: 309912 - RNA, 19 nt, Homo sapiens
  misc_RNA (1)...(19): siRNA sense strand
uagcaucucuaaagaagua

SEQ ID NO: 309913 - RNA, 19 nt, Homo sapiens
  misc_RNA (1)...(19): siRNA sense strand
aagaagaacugauugaaga

SEQ ID NO: 309914 - RNA, 19 nt, Homo sapiens
  misc_RNA (1)...(19): siRNA sense strand
guauaaacuucgccucauu

SEQ ID NO: 309915 - RNA, 19 nt, Homo sapiens
  misc_RNA (1)...(19): siRNA sense strand
aaacuucgccucauuuaau

SEQ ID NO: 309916 - RNA, 19 nt, Homo sapiens
  misc_RNA (1)...(19): siRNA sense strand
aaacuguggugaauggaaa

SEQ ID NO: 309917 - RNA, 19 nt, Homo sapiens
  misc_RNA (1)...(19): siRNA sense strand
gguuaaggcagcagcuuua

SEQ ID NO: 309918 - RNA, 19 nt, Homo sapiens
  misc_RNA (1)...(19): siRNA sense strand
gaucuuacagucaaggaaa

SEQ ID NO: 309919 - RNA, 19 nt, Homo sapiens
  misc_RNA (1)...(19): siRNA sense strand
uuucuuggauuguuggaua

SEQ ID NO: 309920 - RNA, 19 nt, Homo sapiens
  misc_RNA (1)...(19): siRNA sense strand
gcuccugcuuaccaucuua

SEQ ID NO: 309921 - RNA, 19 nt, Homo sapiens
  misc_RNA (1)...(19): siRNA sense strand
ggcagcagcuuuagcaucu

SEQ ID NO: 309922 - RNA, 19 nt, Homo sapiens
  misc_RNA (1)...(19): siRNA sense strand
uggauaaucagacuucuuu

SEQ ID NO: 309923 - RNA, 19 nt, Homo sapiens
  misc_RNA (1)...(19): siRNA sense strand
caaauuacaagaacgaucu

SEQ ID NO: 309924 - RNA, 19 nt, Homo sapiens
  misc_RNA (1)...(19): siRNA sense strand
gcaaccagaaccucuuguu

SEQ ID NO: 309925 - RNA, 19 nt, Homo sapiens
  misc_RNA (1)...(19): siRNA sense strand
uauaaacuucgccucauuu

SEQ ID NO: 309926 - RNA, 19 nt, Homo sapiens
  misc_RNA (1)...(19): siRNA sense strand
caacuacaacaucguuuca

SEQ ID NO: 309927 - RNA, 19 nt, Homo sapiens
  misc_RNA (1)...(19): siRNA sense strand
uuacgaggcuccugcuuac

SEQ ID NO: 309928 - RNA, 19 nt, Homo sapiens
  misc_RNA (1)...(19): siRNA sense strand
gaagaacugauugaagagu

SEQ ID NO: 309929 - RNA, 19 nt, Homo sapiens
  misc_RNA (1)...(19): siRNA sense strand
uaaggcagcagcuuuagca

SEQ ID NO: 309930 - RNA, 19 nt, Homo sapiens
  misc_RNA (1)...(19): siRNA sense strand
ucagacuucuuuucucuaa

SEQ ID NO: 309931 - RNA, 19 nt, Homo sapiens
  misc_RNA (1)...(19): siRNA sense strand
aaagaagaacugauugaag

SEQ ID NO: 309932 - RNA, 19 nt, Homo sapiens
  misc_RNA (1)...(19): siRNA sense strand
ggguuaaggcagcagcuuu

SEQ ID NO: 309933 - RNA, 19 nt, Homo sapiens
  misc_RNA (1)...(19): siRNA sense strand
uuuacgaggcuccugcuua

SEQ ID NO: 309934 - RNA, 19 nt, Homo sapiens
  misc_RNA (1)...(19): siRNA sense strand
gaagaguggcaaccagaac

SEQ ID NO: 309935 - RNA, 19 nt, Homo sapiens
  misc_RNA (1)...(19): siRNA sense strand
aacuucgccucauuuaauu

SEQ ID NO: 309936 - RNA, 19 nt, Homo sapiens
  misc_RNA (1)...(19): siRNA sense strand
ugaagaguggcaaccagaa

SEQ ID NO: 309937 - RNA, 19 nt, Homo sapiens
  misc_RNA (1)...(19): siRNA sense strand
cagcagcuuuagcaucucu

SEQ ID NO: 309938 - RNA, 19 nt, Homo sapiens
  misc_RNA (1)...(19): siRNA sense strand
gagaugguacaggcgcuuu

SEQ ID NO: 309939 - RNA, 19 nt, Homo sapiens
  misc_RNA (1)...(19): siRNA sense strand
acaaaacuguggugaaugg

SEQ ID NO: 309940 - RNA, 19 nt, Homo sapiens
  misc_RNA (1)...(19): siRNA sense strand
ucaacuacaacaucguuuc

SEQ ID NO: 309941 - RNA, 19 nt, Homo sapiens
  misc_RNA (1)...(19): siRNA sense strand
uguauaaacuucgccucau

SEQ ID NO: 309942 - RNA, 19 nt, Homo sapiens
  misc_RNA (1)...(19): siRNA sense strand
gaacauggcucucuaugcu

SEQ ID NO: 309943 - RNA, 19 nt, Homo sapiens
  misc_RNA (1)...(19): siRNA sense strand
ggaaggcucagaggaauaa

SEQ ID NO: 309944 - RNA, 19 nt, Homo sapiens
  misc_RNA (1)...(19): siRNA sense strand
ggaauaacgaggacauuuc

SEQ ID NO: 309945 - RNA, 19 nt, Homo sapiens
  misc_RNA (1)...(19): siRNA sense strand
gcaagaacaggguccagaa

SEQ ID NO: 309946 - RNA, 19 nt, Homo sapiens
  misc_RNA (1)...(19): siRNA sense strand
gaacaggguccagaacaug

SEQ ID NO: 309947 - RNA, 19 nt, Homo sapiens
  misc_RNA (1)...(19): siRNA sense strand
caucaucccgccucuguuu

SEQ ID NO: 309948 - RNA, 19 nt, Homo sapiens
  misc_RNA (1)...(19): siRNA sense strand
ucaggaaggcucagaggaa

SEQ ID NO: 309949 - RNA, 19 nt, Homo sapiens
  misc_RNA (1)...(19): siRNA sense strand
caggaaggcucagaggaau

SEQ ID NO: 309950 - RNA, 19 nt, Homo sapiens
  misc_RNA (1)...(19): siRNA sense strand
gcugucauuuccacugaga

SEQ ID NO: 309951 - RNA, 19 nt, Homo sapiens
  misc_RNA (1)...(19): siRNA sense strand
cgaggacauuuccaucauc

SEQ ID NO: 309952 - RNA, 19 nt, Homo sapiens
  misc_RNA (1)...(19): siRNA sense strand
agaacaggguccagaacau

SEQ ID NO: 309953 - RNA, 19 nt, Homo sapiens
  misc_RNA (1)...(19): siRNA sense strand
uccagaacauggcucucua

SEQ ID NO: 309954 - RNA, 19 nt, Homo sapiens
  misc_RNA (1)...(19): siRNA sense strand
gaauaacgaggacauuucc

SEQ ID NO: 309955 - RNA, 19 nt, Homo sapiens
  misc_RNA (1)...(19): siRNA sense strand
ugacgucgguggaaaacaa

SEQ ID NO: 309956 - RNA, 19 nt, Homo sapiens
  misc_RNA (1)...(19): siRNA sense strand
gaucaccccuuccuacuac

SEQ ID NO: 309957 - RNA, 19 nt, Homo sapiens
  misc_RNA (1)...(19): siRNA sense strand
ccuacuacaccacuucuga

SEQ ID NO: 309958 - RNA, 19 nt, Homo sapiens
  misc_RNA (1)...(19): siRNA sense strand
ccuggagccuggaccacaa

SEQ ID NO: 309959 - RNA, 19 nt, Homo sapiens
  misc_RNA (1)...(19): siRNA sense strand
gaggaauaacgaggacauu

SEQ ID NO: 309960 - RNA, 19 nt, Homo sapiens
  misc_RNA (1)...(19): siRNA sense strand
ucccugacaugcaagaaca

SEQ ID NO: 309961 - RNA, 19 nt, Homo sapiens
  misc_RNA (1)...(19): siRNA sense strand
ccagaacauggcucucuau

SEQ ID NO: 309962 - RNA, 19 nt, Homo sapiens
  misc_RNA (1)...(19): siRNA sense strand
aggaauaacgaggacauuu

SEQ ID NO: 309963 - RNA, 19 nt, Homo sapiens
  misc_RNA (1)...(19): siRNA sense strand
acgcugucauuuccacuga

SEQ ID NO: 309964 - RNA, 19 nt, Homo sapiens
  misc_RNA (1)...(19): siRNA sense strand
agaucucccugacaugcaa

SEQ ID NO: 309965 - RNA, 19 nt, Homo sapiens
  misc_RNA (1)...(19): siRNA sense strand
acgaggacauuuccaucau

SEQ ID NO: 309966 - RNA, 19 nt, Homo sapiens
  misc_RNA (1)...(19): siRNA sense strand
cagaacauggcucucuaug

SEQ ID NO: 309967 - RNA, 19 nt, Homo sapiens
  misc_RNA (1)...(19): siRNA sense strand
gaacaaaggacaaguauga

SEQ ID NO: 309968 - RNA, 19 nt, Homo sapiens
  misc_RNA (1)...(19): siRNA sense strand
gaacacaaguccuuugcua

SEQ ID NO: 309969 - RNA, 19 nt, Homo sapiens
  misc_RNA (1)...(19): siRNA sense strand
gaagaagccuugaagaaau

SEQ ID NO: 309970 - RNA, 19 nt, Homo sapiens
  misc_RNA (1)...(19): siRNA sense strand
gcaaaugaauggaagaaga

SEQ ID NO: 309971 - RNA, 19 nt, Homo sapiens
  misc_RNA (1)...(19): siRNA sense strand
gagaagaaccugaacauga

SEQ ID NO: 309972 - RNA, 19 nt, Homo sapiens
  misc_RNA (1)...(19): siRNA sense strand
gaagaaaugugcucaggau

SEQ ID NO: 309973 - RNA, 19 nt, Homo sapiens
  misc_RNA (1)...(19): siRNA sense strand
cuaaagagauugaagcaaa

SEQ ID NO: 309974 - RNA, 19 nt, Homo sapiens
  misc_RNA (1)...(19): siRNA sense strand
ggacaaguaugaccucuca

SEQ ID NO: 309975 - RNA, 19 nt, Homo sapiens
  misc_RNA (1)...(19): siRNA sense strand
gugaugagcugauugcaaa

SEQ ID NO: 309976 - RNA, 19 nt, Homo sapiens
  misc_RNA (1)...(19): siRNA sense strand
gcaaagucgcguuuaauaa

SEQ ID NO: 309977 - RNA, 19 nt, Homo sapiens
  misc_RNA (1)...(19): siRNA sense strand
gcaaagagcagaugaaggu

SEQ ID NO: 309978 - RNA, 19 nt, Homo sapiens
  misc_RNA (1)...(19): siRNA sense strand
ggacaaagccaaugaagag

SEQ ID NO: 309979 - RNA, 19 nt, Homo sapiens
  misc_RNA (1)...(19): siRNA sense strand
gcagaagaaccaagaaauu

SEQ ID NO: 309980 - RNA, 19 nt, Homo sapiens
  misc_RNA (1)...(19): siRNA sense strand
caaagccaaugaagagauu

SEQ ID NO: 309981 - RNA, 19 nt, Homo sapiens
  misc_RNA (1)...(19): siRNA sense strand
gaaccaagaaauugaagaa

SEQ ID NO: 309982 - RNA, 19 nt, Homo sapiens
  misc_RNA (1)...(19): siRNA sense strand
gaagauacaggaaacauag

SEQ ID NO: 309983 - RNA, 19 nt, Homo sapiens
  misc_RNA (1)...(19): siRNA sense strand
gaaaugugcucaggauuac

SEQ ID NO: 309984 - RNA, 19 nt, Homo sapiens
  misc_RNA (1)...(19): siRNA sense strand
gaagagacccggcaagaag

SEQ ID NO: 309985 - RNA, 19 nt, Homo sapiens
  misc_RNA (1)...(19): siRNA sense strand
gacuauugcucaaaugauu

SEQ ID NO: 309986 - RNA, 19 nt, Homo sapiens
  misc_RNA (1)...(19): siRNA sense strand
uaccauaaaucaugcguuu

SEQ ID NO: 309987 - RNA, 19 nt, Homo sapiens
  misc_RNA (1)...(19): siRNA sense strand
gccagaagauggaagaaga

SEQ ID NO: 309988 - RNA, 19 nt, Homo sapiens
  misc_RNA (1)...(19): siRNA sense strand
gaccuuaacucuguggaaa

SEQ ID NO: 309989 - RNA, 19 nt, Homo sapiens
  misc_RNA (1)...(19): siRNA sense strand
agaaaugugcucaggauua

SEQ ID NO: 309990 - RNA, 19 nt, Homo sapiens
  misc_RNA (1)...(19): siRNA sense strand
gaagaagcaagcugagaaa

SEQ ID NO: 309991 - RNA, 19 nt, Homo sapiens
  misc_RNA (1)...(19): siRNA sense strand
ggcaaagucgcguuuaaua

SEQ ID NO: 309992 - RNA, 19 nt, Homo sapiens
  misc_RNA (1)...(19): siRNA sense strand
gguaaucacguuaaugaaa

SEQ ID NO: 309993 - RNA, 19 nt, Homo sapiens
  misc_RNA (1)...(19): siRNA sense strand
gaagaaccaagaaauugaa

SEQ ID NO: 309994 - RNA, 19 nt, Homo sapiens
  misc_RNA (1)...(19): siRNA sense strand
acaagaagcugaugaacag

SEQ ID NO: 309995 - RNA, 19 nt, Homo sapiens
  misc_RNA (1)...(19): siRNA sense strand
ugaagaagccuugaagaaa

SEQ ID NO: 309996 - RNA, 19 nt, Homo sapiens
  misc_RNA (1)...(19): siRNA sense strand
ggaagaagaaauacgaaga

SEQ ID NO: 309997 - RNA, 19 nt, Homo sapiens
  misc_RNA (1)...(19): siRNA sense strand
ccagauaacuuugacgaau

SEQ ID NO: 309998 - RNA, 19 nt, Homo sapiens
  misc_RNA (1)...(19): siRNA sense strand
agaagaaccugaacaugau

SEQ ID NO: 309999 - RNA, 19 nt, Homo sapiens
  misc_RNA (1)...(19): siRNA sense strand
uaaaccaacuacgaccuua

SEQ ID NO: 310000 - RNA, 19 nt, Homo sapiens
  misc_RNA (1)...(19): siRNA sense strand
ccugaaagguguucuggaa

SEQ ID NO: 310001 - RNA, 19 nt, Homo sapiens
  misc_RNA (1)...(19): siRNA sense strand
gauugaagaugaacaaagg

SEQ ID NO: 310002 - RNA, 19 nt, Homo sapiens
  misc_RNA (1)...(19): siRNA sense strand
gcucauggcuguguaacug

SEQ ID NO: 310003 - RNA, 19 nt, Homo sapiens
  misc_RNA (1)...(19): siRNA sense strand
gcuguaaggugaagaagca

SEQ ID NO: 310004 - RNA, 19 nt, Homo sapiens
  misc_RNA (1)...(19): siRNA sense strand
ccaagaaauugaagaacug

SEQ ID NO: 310005 - RNA, 19 nt, Homo sapiens
  misc_RNA (1)...(19): siRNA sense strand
gaugaacaaaggacaagua

SEQ ID NO: 310006 - RNA, 19 nt, Homo sapiens
  misc_RNA (1)...(19): siRNA sense strand
ugaagaagcaugaaacuca

SEQ ID NO: 310007 - RNA, 19 nt, Homo sapiens
  misc_RNA (1)...(19): siRNA sense strand
caucuaagacuuguucuaa

SEQ ID NO: 310008 - RNA, 19 nt, Homo sapiens
  misc_RNA (1)...(19): siRNA sense strand
aaacauagaggccaggaaa

SEQ ID NO: 310009 - RNA, 19 nt, Homo sapiens
  misc_RNA (1)...(19): siRNA sense strand
cacacugacucccaagaua

SEQ ID NO: 310010 - RNA, 19 nt, Homo sapiens
  misc_RNA (1)...(19): siRNA sense strand
uuacuuagccagaguuaaa

SEQ ID NO: 310011 - RNA, 19 nt, Homo sapiens
  misc_RNA (1)...(19): siRNA sense strand
caaaugaauggaagaagaa

SEQ ID NO: 310012 - RNA, 19 nt, Homo sapiens
  misc_RNA (1)...(19): siRNA sense strand
gagaccaaauccuugaguu

SEQ ID NO: 310013 - RNA, 19 nt, Homo sapiens
  misc_RNA (1)...(19): siRNA sense strand
uaagucagcagguuuagaa

SEQ ID NO: 310014 - RNA, 19 nt, Homo sapiens
  misc_RNA (1)...(19): siRNA sense strand
aggaagaccuggaguacuu

SEQ ID NO: 310015 - RNA, 19 nt, Homo sapiens
  misc_RNA (1)...(19): siRNA sense strand
ggaaaauuguagcugaaua

SEQ ID NO: 310016 - RNA, 19 nt, Homo sapiens
  misc_RNA (1)...(19): siRNA sense strand
caauagaaacgaaggauuc

SEQ ID NO: 310017 - RNA, 19 nt, Homo sapiens
  misc_RNA (1)...(19): siRNA sense strand
cagaagaaccaagaaauug

SEQ ID NO: 310018 - RNA, 19 nt, Homo sapiens
  misc_RNA (1)...(19): siRNA sense strand
gaugagaacacaaguccuu

SEQ ID NO: 310019 - RNA, 19 nt, Homo sapiens
  misc_RNA (1)...(19): siRNA sense strand
aguaugaccucucagaaga

SEQ ID NO: 310020 - RNA, 19 nt, Homo sapiens
  misc_RNA (1)...(19): siRNA sense strand
gaagaugaacaaaggacaa

SEQ ID NO: 310021 - RNA, 19 nt, Homo sapiens
  misc_RNA (1)...(19): siRNA sense strand
cugaagaguuggaugagaa

SEQ ID NO: 310022 - RNA, 19 nt, Homo sapiens
  misc_RNA (1)...(19): siRNA sense strand
gaagagaaacuggacaaag

SEQ ID NO: 310023 - RNA, 19 nt, Homo sapiens
  misc_RNA (1)...(19): siRNA sense strand
uggaaggguucaagaagaa

SEQ ID NO: 310024 - RNA, 19 nt, Homo sapiens
  misc_RNA (1)...(19): siRNA sense strand
uggcugaccuuaacucugu

SEQ ID NO: 310025 - RNA, 19 nt, Homo sapiens
  misc_RNA (1)...(19): siRNA sense strand
guuccugugucuaccauaa

SEQ ID NO: 310026 - RNA, 19 nt, Homo sapiens
  misc_RNA (1)...(19): siRNA sense strand
caaggcauccuaucacuuc

SEQ ID NO: 310027 - RNA, 19 nt, Homo sapiens
  misc_RNA (1)...(19): siRNA sense strand
gaagguggagucccuggaa

SEQ ID NO: 310028 - RNA, 19 nt, Homo sapiens
  misc_RNA (1)...(19): siRNA sense strand
ugaguuugauuucacagaa

SEQ ID NO: 310029 - RNA, 19 nt, Homo sapiens
  misc_RNA (1)...(19): siRNA sense strand
caacuacgaccuuaacaag

SEQ ID NO: 310030 - RNA, 19 nt, Homo sapiens
  misc_RNA (1)...(19): siRNA sense strand
gaagaagaaauacgaagag

SEQ ID NO: 310031 - RNA, 19 nt, Homo sapiens
  misc_RNA (1)...(19): siRNA sense strand
gaaaggugagccagaggaa

SEQ ID NO: 310032 - RNA, 19 nt, Homo sapiens
  misc_RNA (1)...(19): siRNA sense strand
gaaggcaaagucgcguuua

SEQ ID NO: 310033 - RNA, 19 nt, Homo sapiens
  misc_RNA (1)...(19): siRNA sense strand
ucaagaauuucagagaaga

SEQ ID NO: 310034 - RNA, 19 nt, Homo sapiens
  misc_RNA (1)...(19): siRNA sense strand
cagauaacuuugacgaauc

SEQ ID NO: 310035 - RNA, 19 nt, Homo sapiens
  misc_RNA (1)...(19): siRNA sense strand
ucacagaagauacaggaaa

SEQ ID NO: 310036 - RNA, 19 nt, Homo sapiens
  misc_RNA (1)...(19): siRNA sense strand
gaaacucccggcacucuca

SEQ ID NO: 310037 - RNA, 19 nt, Homo sapiens
  misc_RNA (1)...(19): siRNA sense strand
gaagaaccugaacaugauu

SEQ ID NO: 310038 - RNA, 19 nt, Homo sapiens
  misc_RNA (1)...(19): siRNA sense strand
gaaauugaagaacugacaa

SEQ ID NO: 310039 - RNA, 19 nt, Homo sapiens
  misc_RNA (1)...(19): siRNA sense strand
gaaugaagaagccuugaag

SEQ ID NO: 310040 - RNA, 19 nt, Homo sapiens
  misc_RNA (1)...(19): siRNA sense strand
gauaugagaaccugaaagg

SEQ ID NO: 310041 - RNA, 19 nt, Homo sapiens
  misc_RNA (1)...(19): siRNA sense strand
caaagucgcguuuaauaac

SEQ ID NO: 310042 - RNA, 19 nt, Homo sapiens
  misc_RNA (1)...(19): siRNA sense strand
cgcagaagcugaucuaaaa

SEQ ID NO: 310043 - RNA, 19 nt, Homo sapiens
  misc_RNA (1)...(19): siRNA sense strand
aagaagccuugaagaaaug

SEQ ID NO: 310044 - RNA, 19 nt, Homo sapiens
  misc_RNA (1)...(19): siRNA sense strand
caacuccuguccagagcuu

SEQ ID NO: 310045 - RNA, 19 nt, Homo sapiens
  misc_RNA (1)...(19): siRNA sense strand
agucaagaauuucagagaa

SEQ ID NO: 310046 - RNA, 19 nt, Homo sapiens
  misc_RNA (1)...(19): siRNA sense strand
ugaagagauugcucagguu

SEQ ID NO: 310047 - RNA, 19 nt, Homo sapiens
  misc_RNA (1)...(19): siRNA sense strand
gaccaaauccuugaguuuc

SEQ ID NO: 310048 - RNA, 19 nt, Homo sapiens
  misc_RNA (1)...(19): siRNA sense strand
ugagggcuccuaccacuuu

SEQ ID NO: 310049 - RNA, 19 nt, Homo sapiens
  misc_RNA (1)...(19): siRNA sense strand
gcucggauucugaagguaa

SEQ ID NO: 310050 - RNA, 19 nt, Homo sapiens
  misc_RNA (1)...(19): siRNA sense strand
gaaacuggacaaagccaau

SEQ ID NO: 310051 - RNA, 19 nt, Homo sapiens
  misc_RNA (1)...(19): siRNA sense strand
agaagaaccaagaaauuga

SEQ ID NO: 310052 - RNA, 19 nt, Homo sapiens
  misc_RNA (1)...(19): siRNA sense strand
cgaaggauuccacggauau

SEQ ID NO: 310053 - RNA, 19 nt, Homo sapiens
  misc_RNA (1)...(19): siRNA sense strand
aaggagacgugccagaaga

SEQ ID NO: 310054 - RNA, 19 nt, Homo sapiens
  misc_RNA (1)...(19): siRNA sense strand
aaggcaaagucgcguuuaa

SEQ ID NO: 310055 - RNA, 19 nt, Homo sapiens
  misc_RNA (1)...(19): siRNA sense strand
agaagauacaggaaacaua

SEQ ID NO: 310056 - RNA, 19 nt, Homo sapiens
  misc_RNA (1)...(19): siRNA sense strand
aagagaaacuggacaaagc

SEQ ID NO: 310057 - RNA, 19 nt, Homo sapiens
  misc_RNA (1)...(19): siRNA sense strand
uagcagaagugguugaaaa

SEQ ID NO: 310058 - RNA, 19 nt, Homo sapiens
  misc_RNA (1)...(19): siRNA sense strand
gcaagaaguuuuggagaug

SEQ ID NO: 310059 - RNA, 19 nt, Homo sapiens
  misc_RNA (1)...(19): siRNA sense strand
gaccuggaguacuuugaau

SEQ ID NO: 310060 - RNA, 19 nt, Homo sapiens
  misc_RNA (1)...(19): siRNA sense strand
guaaggugaagaagcauga

SEQ ID NO: 310061 - RNA, 19 nt, Homo sapiens
  misc_RNA (1)...(19): siRNA sense strand
gcacacugacucccaagau

SEQ ID NO: 310062 - RNA, 19 nt, Homo sapiens
  misc_RNA (1)...(19): siRNA sense strand
agaagaagcaagcugagaa

SEQ ID NO: 310063 - RNA, 19 nt, Homo sapiens
  misc_RNA (1)...(19): siRNA sense strand
gagauugaagcaaaugaau

SEQ ID NO: 310064 - RNA, 19 nt, Homo sapiens
  misc_RNA (1)...(19): siRNA sense strand
gaaggagacgugccagaag

SEQ ID NO: 310065 - RNA, 19 nt, Homo sapiens
  misc_RNA (1)...(19): siRNA sense strand
caguaagucagcagguuua

SEQ ID NO: 310066 - RNA, 19 nt, Homo sapiens
  misc_RNA (1)...(19): siRNA sense strand
gaugccagguuccagaagu

SEQ ID NO: 310067 - RNA, 19 nt, Homo sapiens
  misc_RNA (1)...(19): siRNA sense strand
ggaccuggaugcaguggua

SEQ ID NO: 310068 - RNA, 19 nt, Homo sapiens
  misc_RNA (1)...(19): siRNA sense strand
ccacagaucugaacuccau

SEQ ID NO: 310069 - RNA, 19 nt, Homo sapiens
  misc_RNA (1)...(19): siRNA sense strand
agaagugcguggaggauua

SEQ ID NO: 310070 - RNA, 19 nt, Homo sapiens
  misc_RNA (1)...(19): siRNA sense strand
gcacggagccgaggaagaa

SEQ ID NO: 310071 - RNA, 19 nt, Homo sapiens
  misc_RNA (1)...(19): siRNA sense strand
caaauggugucuccaggaa

SEQ ID NO: 310072 - RNA, 19 nt, Homo sapiens
  misc_RNA (1)...(19): siRNA sense strand
gagcggaccuguaaaacua

SEQ ID NO: 310073 - RNA, 19 nt, Homo sapiens
  misc_RNA (1)...(19): siRNA sense strand
gcaccucgcuucccacaag

SEQ ID NO: 310074 - RNA, 19 nt, Homo sapiens
  misc_RNA (1)...(19): siRNA sense strand
gaacgaagagucacugaag

SEQ ID NO: 310075 - RNA, 19 nt, Homo sapiens
  misc_RNA (1)...(19): siRNA sense strand
ggaagaucauggacagguu

SEQ ID NO: 310076 - RNA, 19 nt, Homo sapiens
  misc_RNA (1)...(19): siRNA sense strand
gcagaagacuaaagagaac

SEQ ID NO: 310077 - RNA, 19 nt, Homo sapiens
  misc_RNA (1)...(19): siRNA sense strand
gagcagaagacuaaagaga

SEQ ID NO: 310078 - RNA, 19 nt, Homo sapiens
  misc_RNA (1)...(19): siRNA sense strand
ccaagaaccuggccaaagc

SEQ ID NO: 310079 - RNA, 19 nt, Homo sapiens
  misc_RNA (1)...(19): siRNA sense strand
caacuuaccacagaucuga

SEQ ID NO: 310080 - RNA, 19 nt, Homo sapiens
  misc_RNA (1)...(19): siRNA sense strand
gaaagaggagagcuucaga

SEQ ID NO: 310081 - RNA, 19 nt, Homo sapiens
  misc_RNA (1)...(19): siRNA sense strand
gcgacgaccucaucuccaa

SEQ ID NO: 310082 - RNA, 19 nt, Homo sapiens
  misc_RNA (1)...(19): siRNA sense strand
uggauuaccuggagcaguu

SEQ ID NO: 310083 - RNA, 19 nt, Homo sapiens
  misc_RNA (1)...(19): siRNA sense strand
gaaccuggccaaagcuaug

SEQ ID NO: 310084 - RNA, 19 nt, Homo sapiens
  misc_RNA (1)...(19): siRNA sense strand
ggacagguucgaagagguu

SEQ ID NO: 310085 - RNA, 19 nt, Homo sapiens
  misc_RNA (1)...(19): siRNA sense strand
gcugaaauccagaaaguuc

SEQ ID NO: 310086 - RNA, 19 nt, Homo sapiens
  misc_RNA (1)...(19): siRNA sense strand
gaaggugacuuuucagaca

SEQ ID NO: 310087 - RNA, 19 nt, Homo sapiens
  misc_RNA (1)...(19): siRNA sense strand
caaaacuacucauggaauu

SEQ ID NO: 310088 - RNA, 19 nt, Homo sapiens
  misc_RNA (1)...(19): siRNA sense strand
aagcugaaauccagaaagu

SEQ ID NO: 310089 - RNA, 19 nt, Homo sapiens
  misc_RNA (1)...(19): siRNA sense strand
accaacagcucaucaagga

SEQ ID NO: 310090 - RNA, 19 nt, Homo sapiens
  misc_RNA (1)...(19): siRNA sense strand
caguggagcagaagacuaa

SEQ ID NO: 310091 - RNA, 19 nt, Homo sapiens
  misc_RNA (1)...(19): siRNA sense strand
agaagacaguggagcagaa

SEQ ID NO: 310092 - RNA, 19 nt, Homo sapiens
  misc_RNA (1)...(19): siRNA sense strand
ucgaagagguuguguacca

SEQ ID NO: 310093 - RNA, 19 nt, Homo sapiens
  misc_RNA (1)...(19): siRNA sense strand
gaaccaacagcucaucaag

SEQ ID NO: 310094 - RNA, 19 nt, Homo sapiens
  misc_RNA (1)...(19): siRNA sense strand
aaauugcgacuuccuguuu

SEQ ID NO: 310095 - RNA, 19 nt, Homo sapiens
  misc_RNA (1)...(19): siRNA sense strand
ucgaggagcggaccuguaa

SEQ ID NO: 310096 - RNA, 19 nt, Homo sapiens
  misc_RNA (1)...(19): siRNA sense strand
gaaguuaccggaagaucgu

SEQ ID NO: 310097 - RNA, 19 nt, Homo sapiens
  misc_RNA (1)...(19): siRNA sense strand
gaagagucacugaagaagu

SEQ ID NO: 310098 - RNA, 19 nt, Homo sapiens
  misc_RNA (1)...(19): siRNA sense strand
caaggaaguggaugccaaa

SEQ ID NO: 310099 - RNA, 19 nt, Homo sapiens
  misc_RNA (1)...(19): siRNA sense strand
ccacagacgcacaggauuc

SEQ ID NO: 310100 - RNA, 19 nt, Homo sapiens
  misc_RNA (1)...(19): siRNA sense strand
acgaggagcugaccaggau

SEQ ID NO: 310101 - RNA, 19 nt, Homo sapiens
  misc_RNA (1)...(19): siRNA sense strand
ccuuauaccucaaguucga

SEQ ID NO: 310102 - RNA, 19 nt, Homo sapiens
  misc_RNA (1)...(19): siRNA sense strand
gaaaaugugccacccaaga

SEQ ID NO: 310103 - RNA, 19 nt, Homo sapiens
  misc_RNA (1)...(19): siRNA sense strand
aagaccaacuuaccacaga

SEQ ID NO: 310104 - RNA, 19 nt, Homo sapiens
  misc_RNA (1)...(19): siRNA sense strand
gaucugcgacgaccucauc

SEQ ID NO: 310105 - RNA, 19 nt, Homo sapiens
  misc_RNA (1)...(19): siRNA sense strand
uagcauggccagcaaacuu

SEQ ID NO: 310106 - RNA, 19 nt, Homo sapiens
  misc_RNA (1)...(19): siRNA sense strand
caaaauggaugacccaaac

SEQ ID NO: 310107 - RNA, 19 nt, Homo sapiens
  misc_RNA (1)...(19): siRNA sense strand
ccaaggagacugggagaga

SEQ ID NO: 310108 - RNA, 19 nt, Homo sapiens
  misc_RNA (1)...(19): siRNA sense strand
gaccuggacugcucaagcu

SEQ ID NO: 310109 - RNA, 19 nt, Homo sapiens
  misc_RNA (1)...(19): siRNA sense strand
ggaaguggaugccaaaacu

SEQ ID NO: 310110 - RNA, 19 nt, Homo sapiens
  misc_RNA (1)...(19): siRNA sense strand
gcaaacuugaggcuccuuu

SEQ ID NO: 310111 - RNA, 19 nt, Homo sapiens
  misc_RNA (1)...(19): siRNA sense strand
aggauuaccuggcaaggau

SEQ ID NO: 310112 - RNA, 19 nt, Homo sapiens
  misc_RNA (1)...(19): siRNA sense strand
gaucauggacagguucgaa

SEQ ID NO: 310113 - RNA, 19 nt, Homo sapiens
  misc_RNA (1)...(19): siRNA sense strand
ccucugagacccuagaaga

SEQ ID NO: 310114 - RNA, 19 nt, Homo sapiens
  misc_RNA (1)...(19): siRNA sense strand
ugacacccuuggacuggaa

SEQ ID NO: 310115 - RNA, 19 nt, Homo sapiens
  misc_RNA (1)...(19): siRNA sense strand
ggacacagaaagagaacca

SEQ ID NO: 310116 - RNA, 19 nt, Homo sapiens
  misc_RNA (1)...(19): siRNA sense strand
ggaugcaagcccagccuuu

SEQ ID NO: 310117 - RNA, 19 nt, Homo sapiens
  misc_RNA (1)...(19): siRNA sense strand
gaugcaagcccagccuuug

SEQ ID NO: 310118 - RNA, 19 nt, Homo sapiens
  misc_RNA (1)...(19): siRNA sense strand
gaauuugauguaucugaug

SEQ ID NO: 310119 - RNA, 19 nt, Homo sapiens
  misc_RNA (1)...(19): siRNA sense strand
gagugacacccgccucuga

SEQ ID NO: 310120 - RNA, 19 nt, Homo sapiens
  misc_RNA (1)...(19): siRNA sense strand
gagcaagccguggaggaaa

SEQ ID NO: 310121 - RNA, 19 nt, Homo sapiens
  misc_RNA (1)...(19): siRNA sense strand
cagacgcacaggauucuaa

SEQ ID NO: 310122 - RNA, 19 nt, Homo sapiens
  misc_RNA (1)...(19): siRNA sense strand
gaagaagugcguggaggau

SEQ ID NO: 310123 - RNA, 19 nt, Homo sapiens
  misc_RNA (1)...(19): siRNA sense strand
uggaggaaguucagaagca

SEQ ID NO: 310124 - RNA, 19 nt, Homo sapiens
  misc_RNA (1)...(19): siRNA sense strand
gacagagucccagcacaaa

SEQ ID NO: 310125 - RNA, 19 nt, Homo sapiens
  misc_RNA (1)...(19): siRNA sense strand
ccuuaguuccuauuccuua

SEQ ID NO: 310126 - RNA, 19 nt, Homo sapiens
  misc_RNA (1)...(19): siRNA sense strand
ccaaagcugaaauccagaa

SEQ ID NO: 310127 - RNA, 19 nt, Homo sapiens
  misc_RNA (1)...(19): siRNA sense strand
gagaaccaacagcucauca

SEQ ID NO: 310128 - RNA, 19 nt, Homo sapiens
  misc_RNA (1)...(19): siRNA sense strand
caacagcagagagcaagga

SEQ ID NO: 310129 - RNA, 19 nt, Homo sapiens
  misc_RNA (1)...(19): siRNA sense strand
acacgccuguggugcaguu

SEQ ID NO: 310130 - RNA, 19 nt, Homo sapiens
  misc_RNA (1)...(19): siRNA sense strand
aacgaagagucacugaaga

SEQ ID NO: 310131 - RNA, 19 nt, Homo sapiens
  misc_RNA (1)...(19): siRNA sense strand
ucccagagcccaggaaguu

SEQ ID NO: 310132 - RNA, 19 nt, Homo sapiens
  misc_RNA (1)...(19): siRNA sense strand
caaagcugaaauccagaaa

SEQ ID NO: 310133 - RNA, 19 nt, Homo sapiens
  misc_RNA (1)...(19): siRNA sense strand
guccuuauaccucaaguuc

SEQ ID NO: 310134 - RNA, 19 nt, Homo sapiens
  misc_RNA (1)...(19): siRNA sense strand
ggaagcaguccuuauaccu

SEQ ID NO: 310135 - RNA, 19 nt, Homo sapiens
  misc_RNA (1)...(19): siRNA sense strand
aagaggagagcuucagaga

SEQ ID NO: 310136 - RNA, 19 nt, Homo sapiens
  misc_RNA (1)...(19): siRNA sense strand
gcaggucuuaaacgacaaa

SEQ ID NO: 310137 - RNA, 19 nt, Homo sapiens
  misc_RNA (1)...(19): siRNA sense strand
aaacuugaggcuccuuuca

SEQ ID NO: 310138 - RNA, 19 nt, Homo sapiens
  misc_RNA (1)...(19): siRNA sense strand
gaagacaguggagcagaag

SEQ ID NO: 310139 - RNA, 19 nt, Homo sapiens
  misc_RNA (1)...(19): siRNA sense strand
gaggauuaccuggcaagga

SEQ ID NO: 310140 - RNA, 19 nt, Homo sapiens
  misc_RNA (1)...(19): siRNA sense strand
gcucaucaaggaaguggau

SEQ ID NO: 310141 - RNA, 19 nt, Homo sapiens
  misc_RNA (1)...(19): siRNA sense strand
gcauggccagcaaacuuga

SEQ ID NO: 310142 - RNA, 19 nt, Homo sapiens
  misc_RNA (1)...(19): siRNA sense strand
acgaagagucacugaagaa

SEQ ID NO: 310143 - RNA, 19 nt, Homo sapiens
  misc_RNA (1)...(19): siRNA sense strand
gcaagaacgaagagucacu

SEQ ID NO: 310144 - RNA, 19 nt, Homo sapiens
  misc_RNA (1)...(19): siRNA sense strand
guucgaagagguuguguac

SEQ ID NO: 310145 - RNA, 19 nt, Homo sapiens
  misc_RNA (1)...(19): siRNA sense strand
ugagcaagccguggaggaa

SEQ ID NO: 310146 - RNA, 19 nt, Homo sapiens
  misc_RNA (1)...(19): siRNA sense strand
ccgcaagaacgaagaguca

SEQ ID NO: 310147 - RNA, 19 nt, Homo sapiens
  misc_RNA (1)...(19): siRNA sense strand
gaaacagaaagaggugauc

SEQ ID NO: 310148 - RNA, 19 nt, Homo sapiens
  misc_RNA (1)...(19): siRNA sense strand
ccaccucgacugggacaaa

SEQ ID NO: 310149 - RNA, 19 nt, Homo sapiens
  misc_RNA (1)...(19): siRNA sense strand
accggaagaucgucuguuc

SEQ ID NO: 310150 - RNA, 19 nt, Homo sapiens
  misc_RNA (1)...(19): siRNA sense strand
gagccgaggaagaaugcaa

SEQ ID NO: 310151 - RNA, 19 nt, Homo sapiens
  misc_RNA (1)...(19): siRNA sense strand
gaggagcggaccuguaaaa

SEQ ID NO: 310152 - RNA, 19 nt, Homo sapiens
  misc_RNA (1)...(19): siRNA sense strand
gacgaccucaucuccaaga

SEQ ID NO: 310153 - RNA, 19 nt, Homo sapiens
  misc_RNA (1)...(19): siRNA sense strand
agcagaagacuaaagagaa

SEQ ID NO: 310154 - RNA, 19 nt, Homo sapiens
  misc_RNA (1)...(19): siRNA sense strand
uggagcagaagacuaaaga

SEQ ID NO: 310155 - RNA, 19 nt, Homo sapiens
  misc_RNA (1)...(19): siRNA sense strand
guaccaggccauggaggaa

SEQ ID NO: 310156 - RNA, 19 nt, Homo sapiens
  misc_RNA (1)...(19): siRNA sense strand
acucauggaauucuacaga

SEQ ID NO: 310157 - RNA, 19 nt, Homo sapiens
  misc_RNA (1)...(19): siRNA sense strand
gaggagcuccacgggaaga

SEQ ID NO: 310158 - RNA, 19 nt, Homo sapiens
  misc_RNA (1)...(19): siRNA sense strand
aagcuaugaaggugacuuu

SEQ ID NO: 310159 - RNA, 19 nt, Homo sapiens
  misc_RNA (1)...(19): siRNA sense strand
gcagcagugaggcagcaaa

SEQ ID NO: 310160 - RNA, 19 nt, Homo sapiens
  misc_RNA (1)...(19): siRNA sense strand
guccuagcauggccagcaa

SEQ ID NO: 310161 - RNA, 19 nt, Homo sapiens
  misc_RNA (1)...(19): siRNA sense strand
agaagcagaaggaacuuuc

SEQ ID NO: 310162 - RNA, 19 nt, Homo sapiens
  misc_RNA (1)...(19): siRNA sense strand
ccauggaggaaguucagaa

SEQ ID NO: 310163 - RNA, 19 nt, Homo sapiens
  misc_RNA (1)...(19): siRNA sense strand
ccaagucugguugcaguga

SEQ ID NO: 310164 - RNA, 19 nt, Homo sapiens
  misc_RNA (1)...(19): siRNA sense strand
aaauggaugacccaaacuu

SEQ ID NO: 310165 - RNA, 19 nt, Homo sapiens
  misc_RNA (1)...(19): siRNA sense strand
ugaugcagcuggaagauua

SEQ ID NO: 310166 - RNA, 19 nt, Homo sapiens
  misc_RNA (1)...(19): siRNA sense strand
ugaagaagccgcacuacuu

SEQ ID NO: 310167 - RNA, 19 nt, Homo sapiens
  misc_RNA (1)...(19): siRNA sense strand
gaccgcaaguacacucuaa

SEQ ID NO: 310168 - RNA, 19 nt, Homo sapiens
  misc_RNA (1)...(19): siRNA sense strand
gaaccgugcuggcuuugag

SEQ ID NO: 310169 - RNA, 19 nt, Homo sapiens
  misc_RNA (1)...(19): siRNA sense strand
gaguauggcaucaauguga

SEQ ID NO: 310170 - RNA, 19 nt, Homo sapiens
  misc_RNA (1)...(19): siRNA sense strand
cuccuuagcugcccagaaa

SEQ ID NO: 310171 - RNA, 19 nt, Homo sapiens
  misc_RNA (1)...(19): siRNA sense strand
cuacagcacugcaaaauga

SEQ ID NO: 310172 - RNA, 19 nt, Homo sapiens
  misc_RNA (1)...(19): siRNA sense strand
gcaaguacacucuaaccau

SEQ ID NO: 310173 - RNA, 19 nt, Homo sapiens
  misc_RNA (1)...(19): siRNA sense strand
uaauucggcucaucuccuu

SEQ ID NO: 310174 - RNA, 19 nt, Homo sapiens
  misc_RNA (1)...(19): siRNA sense strand
gaagauuacacgccuacga

SEQ ID NO: 310175 - RNA, 19 nt, Homo sapiens
  misc_RNA (1)...(19): siRNA sense strand
gagcaaggaccgcaaguac

SEQ ID NO: 310176 - RNA, 19 nt, Homo sapiens
  misc_RNA (1)...(19): siRNA sense strand
cagcgaguauggcaucaau

SEQ ID NO: 310177 - RNA, 19 nt, Homo sapiens
  misc_RNA (1)...(19): siRNA sense strand
ccugaaccgugcuggcuuu

SEQ ID NO: 310178 - RNA, 19 nt, Homo sapiens
  misc_RNA (1)...(19): siRNA sense strand
gcgaguauggcaucaaugu

SEQ ID NO: 310179 - RNA, 19 nt, Homo sapiens
  misc_RNA (1)...(19): siRNA sense strand
gaucccagaugcagugacu

SEQ ID NO: 310180 - RNA, 19 nt, Homo sapiens
  misc_RNA (1)...(19): siRNA sense strand
ggccucagacccacgcaua

SEQ ID NO: 310181 - RNA, 19 nt, Homo sapiens
  misc_RNA (1)...(19): siRNA sense strand
gcaaggaccgcaaguacac

SEQ ID NO: 310182 - RNA, 19 nt, Homo sapiens
  misc_RNA (1)...(19): siRNA sense strand
cccagaaauucaucucaga

SEQ ID NO: 310183 - RNA, 19 nt, Homo sapiens
  misc_RNA (1)...(19): siRNA sense strand
ggaccgcaaguacacucua

SEQ ID NO: 310184 - RNA, 19 nt, Homo sapiens
  misc_RNA (1)...(19): siRNA sense strand
ucagacccacgcauaauuc

SEQ ID NO: 310185 - RNA, 19 nt, Homo sapiens
  misc_RNA (1)...(19): siRNA sense strand
aguauggcaucaaugugaa

SEQ ID NO: 310186 - RNA, 19 nt, Homo sapiens
  misc_RNA (1)...(19): siRNA sense strand
ccuuagcugcccagaaauu

SEQ ID NO: 310187 - RNA, 19 nt, Homo sapiens
  misc_RNA (1)...(19): siRNA sense strand
uaacgggguuuacguacug

SEQ ID NO: 310188 - RNA, 19 nt, Homo sapiens
  misc_RNA (1)...(19): siRNA sense strand
ugagaaggcugaugucuuu

SEQ ID NO: 310189 - RNA, 19 nt, Homo sapiens
  misc_RNA (1)...(19): siRNA sense strand
ggaccgcccugacacacaa

SEQ ID NO: 310190 - RNA, 19 nt, Homo sapiens
  misc_RNA (1)...(19): siRNA sense strand
gcacuccaaagguguauuu

SEQ ID NO: 310191 - RNA, 19 nt, Homo sapiens
  misc_RNA (1)...(19): siRNA sense strand
ggacagcugcacgcucuua

SEQ ID NO: 310192 - RNA, 19 nt, Homo sapiens
  misc_RNA (1)...(19): siRNA sense strand
ugaacaagcuccccaguaa

SEQ ID NO: 310193 - RNA, 19 nt, Homo sapiens
  misc_RNA (1)...(19): siRNA sense strand
ggggugagcuguaugauga

SEQ ID NO: 310194 - RNA, 19 nt, Homo sapiens
  misc_RNA (1)...(19): siRNA sense strand
ccacucagcugcccuuggu

SEQ ID NO: 310195 - RNA, 19 nt, Homo sapiens
  misc_RNA (1)...(19): siRNA sense strand
ucagggcucuguugcaaga

SEQ ID NO: 310196 - RNA, 19 nt, Homo sapiens
  misc_RNA (1)...(19): siRNA sense strand
gaaaagauuccuguguaua

SEQ ID NO: 310197 - RNA, 19 nt, Homo sapiens
  misc_RNA (1)...(19): siRNA sense strand
ccgaaaagauuccugugua

SEQ ID NO: 310198 - RNA, 19 nt, Homo sapiens
  misc_RNA (1)...(19): siRNA sense strand
aaucagggcucuguugcaa

SEQ ID NO: 310199 - RNA, 19 nt, Homo sapiens
  misc_RNA (1)...(19): siRNA sense strand
ucucugaggucuacaaggu

SEQ ID NO: 310200 - RNA, 19 nt, Homo sapiens
  misc_RNA (1)...(19): siRNA sense strand
gacccguccucaauaacaa

SEQ ID NO: 310201 - RNA, 19 nt, Homo sapiens
  misc_RNA (1)...(19): siRNA sense strand
gggaagugcagcugaugaa

SEQ ID NO: 310202 - RNA, 19 nt, Homo sapiens
  misc_RNA (1)...(19): siRNA sense strand
gggcaaggaaggagccauu

SEQ ID NO: 310203 - RNA, 19 nt, Homo sapiens
  misc_RNA (1)...(19): siRNA sense strand
gaucaagcucuuagacaca

SEQ ID NO: 310204 - RNA, 19 nt, Homo sapiens
  misc_RNA (1)...(19): siRNA sense strand
gccuggaugugccugcuuu

SEQ ID NO: 310205 - RNA, 19 nt, Homo sapiens
  misc_RNA (1)...(19): siRNA sense strand
gcaacacacuacgggaagu

SEQ ID NO: 310206 - RNA, 19 nt, Homo sapiens
  misc_RNA (1)...(19): siRNA sense strand
uuacagaguauaugaaugg

SEQ ID NO: 310207 - RNA, 19 nt, Homo sapiens
  misc_RNA (1)...(19): siRNA sense strand
cgaaaagauuccuguguau

SEQ ID NO: 310208 - RNA, 19 nt, Homo sapiens
  misc_RNA (1)...(19): siRNA sense strand
ugcagacccugacuaccua

SEQ ID NO: 310209 - RNA, 19 nt, Homo sapiens
  misc_RNA (1)...(19): siRNA sense strand
gaccucacauccaagaacu

SEQ ID NO: 310210 - RNA, 19 nt, Homo sapiens
  misc_RNA (1)...(19): siRNA sense strand
ggcaagucauggugcugaa

SEQ ID NO: 310211 - RNA, 19 nt, Homo sapiens
  misc_RNA (1)...(19): siRNA sense strand
ggugagcuguaugaugaga

SEQ ID NO: 310212 - RNA, 19 nt, Homo sapiens
  misc_RNA (1)...(19): siRNA sense strand
ccaccuggcccuggacauu

SEQ ID NO: 310213 - RNA, 19 nt, Homo sapiens
  misc_RNA (1)...(19): siRNA sense strand
caagucauggugcugaaga

SEQ ID NO: 310214 - RNA, 19 nt, Homo sapiens
  misc_RNA (1)...(19): siRNA sense strand
uggcgcguguggacgauuu

SEQ ID NO: 310215 - RNA, 19 nt, Homo sapiens
  misc_RNA (1)...(19): siRNA sense strand
gcaaggaaggagccauugg

SEQ ID NO: 310216 - RNA, 19 nt, Homo sapiens
  misc_RNA (1)...(19): siRNA sense strand
gcucaucgcccgaguaccu

SEQ ID NO: 310217 - RNA, 19 nt, Homo sapiens
  misc_RNA (1)...(19): siRNA sense strand
gagcucaucgcccgaguac

SEQ ID NO: 310218 - RNA, 19 nt, Homo sapiens
  misc_RNA (1)...(19): siRNA sense strand
aaagauuccuguguauagg

SEQ ID NO: 310219 - RNA, 19 nt, Homo sapiens
  misc_RNA (1)...(19): siRNA sense strand
ugagcuguaugaugagaag

SEQ ID NO: 310220 - RNA, 19 nt, Homo sapiens
  misc_RNA (1)...(19): siRNA sense strand
cagcugugguggugaacuc

SEQ ID NO: 310221 - RNA, 19 nt, Homo sapiens
  misc_RNA (1)...(19): siRNA sense strand
accgcaaccugaacuguga

SEQ ID NO: 310222 - RNA, 19 nt, Homo sapiens
  misc_RNA (1)...(19): siRNA sense strand
ugcgguaccugcacuccaa

SEQ ID NO: 310223 - RNA, 19 nt, Homo sapiens
  misc_RNA (1)...(19): siRNA sense strand
ccacagacaacuucaucag

SEQ ID NO: 310224 - RNA, 19 nt, Homo sapiens
  misc_RNA (1)...(19): siRNA sense strand
ccacugcugcaaccuggaa

SEQ ID NO: 310225 - RNA, 19 nt, Homo sapiens
  misc_RNA (1)...(19): siRNA sense strand
ggacuuuggccuggaugug

SEQ ID NO: 310226 - RNA, 19 nt, Homo sapiens
  misc_RNA (1)...(19): siRNA sense strand
ggauggcuccagagguguu

SEQ ID NO: 310227 - RNA, 19 nt, Homo sapiens
  misc_RNA (1)...(19): siRNA sense strand
gauggcuccagagguguua

SEQ ID NO: 310228 - RNA, 19 nt, Homo sapiens
  misc_RNA (1)...(19): siRNA sense strand
ggccacagacaacuucauc

SEQ ID NO: 310229 - RNA, 19 nt, Homo sapiens
  misc_RNA (1)...(19): siRNA sense strand
cacaaucagggcucuguug

SEQ ID NO: 310230 - RNA, 19 nt, Homo sapiens
  misc_RNA (1)...(19): siRNA sense strand
cccaacauccuaagguuca

SEQ ID NO: 310231 - RNA, 19 nt, Homo sapiens
  misc_RNA (1)...(19): siRNA sense strand
ugucuuugccuucgggauu

SEQ ID NO: 310232 - RNA, 19 nt, Homo sapiens
  misc_RNA (1)...(19): siRNA sense strand
ucacauccaagaacugucu

SEQ ID NO: 310233 - RNA, 19 nt, Homo sapiens
  misc_RNA (1)...(19): siRNA sense strand
ggacagcucugauggaaua

SEQ ID NO: 310234 - RNA, 19 nt, Homo sapiens
  misc_RNA (1)...(19): siRNA sense strand
gcuaugaacucuccaaagu

SEQ ID NO: 310235 - RNA, 19 nt, Homo sapiens
  misc_RNA (1)...(19): siRNA sense strand
caacaaacgucuggaugaa

SEQ ID NO: 310236 - RNA, 19 nt, Homo sapiens
  misc_RNA (1)...(19): siRNA sense strand
auaagacacuguacuauga

SEQ ID NO: 310237 - RNA, 19 nt, Homo sapiens
  misc_RNA (1)...(19): siRNA sense strand
gaaaucaccagcaucaaga

SEQ ID NO: 310238 - RNA, 19 nt, Homo sapiens
  misc_RNA (1)...(19): siRNA sense strand
gcaagcugcugaucgaguu

SEQ ID NO: 310239 - RNA, 19 nt, Homo sapiens
  misc_RNA (1)...(19): siRNA sense strand
gacguaagaacaagaguua

SEQ ID NO: 310240 - RNA, 19 nt, Homo sapiens
  misc_RNA (1)...(19): siRNA sense strand
cacaggaacucaccacauu

SEQ ID NO: 310241 - RNA, 19 nt, Homo sapiens
  misc_RNA (1)...(19): siRNA sense strand
gaagaacauugagugcauu

SEQ ID NO: 310242 - RNA, 19 nt, Homo sapiens
  misc_RNA (1)...(19): siRNA sense strand
ccacagaucaccaucaaug

SEQ ID NO: 310243 - RNA, 19 nt, Homo sapiens
  misc_RNA (1)...(19): siRNA sense strand
acaaacgucuggaugaaug

SEQ ID NO: 310244 - RNA, 19 nt, Homo sapiens
  misc_RNA (1)...(19): siRNA sense strand
caacggaagacuacaaugu

SEQ ID NO: 310245 - RNA, 19 nt, Homo sapiens
  misc_RNA (1)...(19): siRNA sense strand
caggacagcucugauggaa

SEQ ID NO: 310246 - RNA, 19 nt, Homo sapiens
  misc_RNA (1)...(19): siRNA sense strand
ggccacagaucaccaucaa

SEQ ID NO: 310247 - RNA, 19 nt, Homo sapiens
  misc_RNA (1)...(19): siRNA sense strand
gaccaagugugaccuacga

SEQ ID NO: 310248 - RNA, 19 nt, Homo sapiens
  misc_RNA (1)...(19): siRNA sense strand
ugaagaacauugagugcau

SEQ ID NO: 310249 - RNA, 19 nt, Homo sapiens
  misc_RNA (1)...(19): siRNA sense strand
caauguggccugcauccua

SEQ ID NO: 310250 - RNA, 19 nt, Homo sapiens
  misc_RNA (1)...(19): siRNA sense strand
ccacauugccuguccucua

SEQ ID NO: 310251 - RNA, 19 nt, Homo sapiens
  misc_RNA (1)...(19): siRNA sense strand
ggacguaagaacaagaguu

SEQ ID NO: 310252 - RNA, 19 nt, Homo sapiens
  misc_RNA (1)...(19): siRNA sense strand
ucaaucucaucaacuacua

SEQ ID NO: 310253 - RNA, 19 nt, Homo sapiens
  misc_RNA (1)...(19): siRNA sense strand
gaaccaggacaacgaagau

SEQ ID NO: 310254 - RNA, 19 nt, Homo sapiens
  misc_RNA (1)...(19): siRNA sense strand
ucaacaaacgucuggauga

SEQ ID NO: 310255 - RNA, 19 nt, Homo sapiens
  misc_RNA (1)...(19): siRNA sense strand
aauguggccugcauccuaa

SEQ ID NO: 310256 - RNA, 19 nt, Homo sapiens
  misc_RNA (1)...(19): siRNA sense strand
cacagacccuuuccucuuc

SEQ ID NO: 310257 - RNA, 19 nt, Homo sapiens
  misc_RNA (1)...(19): siRNA sense strand
ucccagaaccugugucuuu

SEQ ID NO: 310258 - RNA, 19 nt, Homo sapiens
  misc_RNA (1)...(19): siRNA sense strand
gaacauugagugcauugag

SEQ ID NO: 310259 - RNA, 19 nt, Homo sapiens
  misc_RNA (1)...(19): siRNA sense strand
guaagaacaagaguuauuc

SEQ ID NO: 310260 - RNA, 19 nt, Homo sapiens
  misc_RNA (1)...(19): siRNA sense strand
cguaagaacaagaguuauu

SEQ ID NO: 310261 - RNA, 19 nt, Homo sapiens
  misc_RNA (1)...(19): siRNA sense strand
cccaaggacuggagcaaga

SEQ ID NO: 310262 - RNA, 19 nt, Homo sapiens
  misc_RNA (1)...(19): siRNA sense strand
cgaauuguuugggcacuga

SEQ ID NO: 310263 - RNA, 19 nt, Homo sapiens
  misc_RNA (1)...(19): siRNA sense strand
ggcaccaucuccuucuuug

SEQ ID NO: 310264 - RNA, 19 nt, Homo sapiens
  misc_RNA (1)...(19): siRNA sense strand
ggaaccaggacaacgaaga

SEQ ID NO: 310265 - RNA, 19 nt, Homo sapiens
  misc_RNA (1)...(19): siRNA sense strand
ucaccagcaucaagaagga

SEQ ID NO: 310266 - RNA, 19 nt, Homo sapiens
  misc_RNA (1)...(19): siRNA sense strand
augaaugggugacgcauga

SEQ ID NO: 310267 - RNA, 19 nt, Homo sapiens
  misc_RNA (1)...(19): siRNA sense strand
acacagacccuuuccucuu

SEQ ID NO: 310268 - RNA, 19 nt, Homo sapiens
  misc_RNA (1)...(19): siRNA sense strand
caagaguuauucccagaac

SEQ ID NO: 310269 - RNA, 19 nt, Homo sapiens
  misc_RNA (1)...(19): siRNA sense strand
aguguuuccuugaccauaa

SEQ ID NO: 310270 - RNA, 19 nt, Homo sapiens
  misc_RNA (1)...(19): siRNA sense strand
guaccucaaucucaucaac

SEQ ID NO: 310271 - RNA, 19 nt, Homo sapiens
  misc_RNA (1)...(19): siRNA sense strand
gagauugauggacguaaga

SEQ ID NO: 310272 - RNA, 19 nt, Homo sapiens
  misc_RNA (1)...(19): siRNA sense strand
gaagguggaggugguuuca

SEQ ID NO: 310273 - RNA, 19 nt, Homo sapiens
  misc_RNA (1)...(19): siRNA sense strand
ugaucgaguucagcuauga

SEQ ID NO: 310274 - RNA, 19 nt, Homo sapiens
  misc_RNA (1)...(19): siRNA sense strand
gaaagaaucaacggaagac

SEQ ID NO: 310275 - RNA, 19 nt, Homo sapiens
  misc_RNA (1)...(19): siRNA sense strand
cacauugccuguccucuac

SEQ ID NO: 310276 - RNA, 19 nt, Homo sapiens
  misc_RNA (1)...(19): siRNA sense strand
gggcaccaucuccuucuuu

SEQ ID NO: 310277 - RNA, 19 nt, Homo sapiens
  misc_RNA (1)...(19): siRNA sense strand
gaucaccaucaaugagauu

SEQ ID NO: 310278 - RNA, 19 nt, Homo sapiens
  misc_RNA (1)...(19): siRNA sense strand
cagaucaccaucaaugaga

SEQ ID NO: 310279 - RNA, 19 nt, Homo sapiens
  misc_RNA (1)...(19): siRNA sense strand
ggcuggaccuaaagaagau

SEQ ID NO: 310280 - RNA, 19 nt, Homo sapiens
  misc_RNA (1)...(19): siRNA sense strand
ugaaaucaccagcaucaag

SEQ ID NO: 310281 - RNA, 19 nt, Homo sapiens
  misc_RNA (1)...(19): siRNA sense strand
aagaaucaacggaagacua

SEQ ID NO: 310282 - RNA, 19 nt, Homo sapiens
  misc_RNA (1)...(19): siRNA sense strand
ugagauugauggacguaag

SEQ ID NO: 310283 - RNA, 19 nt, Homo sapiens
  misc_RNA (1)...(19): siRNA sense strand
gccguagucucaagugucu

SEQ ID NO: 310284 - RNA, 19 nt, Homo sapiens
  misc_RNA (1)...(19): siRNA sense strand
gccaguacauccucacacu

SEQ ID NO: 310285 - RNA, 19 nt, Homo sapiens
  misc_RNA (1)...(19): siRNA sense strand
ggccuccuauccuaucgaa

SEQ ID NO: 310286 - RNA, 19 nt, Homo sapiens
  misc_RNA (1)...(19): siRNA sense strand
agaaagaaucaacggaaga

SEQ ID NO: 310287 - RNA, 19 nt, Homo sapiens
  misc_RNA (1)...(19): siRNA sense strand
guacauccucacacuguca

SEQ ID NO: 310288 - RNA, 19 nt, Homo sapiens
  misc_RNA (1)...(19): siRNA sense strand
cggcuggaccuaaagaaga

SEQ ID NO: 310289 - RNA, 19 nt, Homo sapiens
  misc_RNA (1)...(19): siRNA sense strand
gcaccaucuccuucuuuga

SEQ ID NO: 310290 - RNA, 19 nt, Homo sapiens
  misc_RNA (1)...(19): siRNA sense strand
ggaagguggaggugguuuc

SEQ ID NO: 310291 - RNA, 19 nt, Homo sapiens
  misc_RNA (1)...(19): siRNA sense strand
ucacccggaugaagaacau

SEQ ID NO: 310292 - RNA, 19 nt, Homo sapiens
  misc_RNA (1)...(19): siRNA sense strand
ccacaggaacucaccacau

SEQ ID NO: 310293 - RNA, 19 nt, Homo sapiens
  misc_RNA (1)...(19): siRNA sense strand
caccaucaaugagauuagu

SEQ ID NO: 310294 - RNA, 19 nt, Homo sapiens
  misc_RNA (1)...(19): siRNA sense strand
gagcggcuggaccuaaaga

SEQ ID NO: 310295 - RNA, 19 nt, Homo sapiens
  misc_RNA (1)...(19): siRNA sense strand
ccauaagacacuguacuau

SEQ ID NO: 310296 - RNA, 19 nt, Homo sapiens
  misc_RNA (1)...(19): siRNA sense strand
accucaaucucaucaacua

SEQ ID NO: 310297 - RNA, 19 nt, Homo sapiens
  misc_RNA (1)...(19): siRNA sense strand
caugagcggcuggaccuaa

SEQ ID NO: 310298 - RNA, 19 nt, Homo sapiens
  misc_RNA (1)...(19): siRNA sense strand
ccaucaaugagauuaguga

SEQ ID NO: 310299 - RNA, 19 nt, Homo sapiens
  misc_RNA (1)...(19): siRNA sense strand
cuacguccauuacauugac

SEQ ID NO: 310300 - RNA, 19 nt, Homo sapiens
  misc_RNA (1)...(19): siRNA sense strand
guaagggcuuccacaucgu

SEQ ID NO: 310301 - RNA, 19 nt, Homo sapiens
  misc_RNA (1)...(19): siRNA sense strand
cuccaggcaaugagauuua

SEQ ID NO: 310302 - RNA, 19 nt, Homo sapiens
  misc_RNA (1)...(19): siRNA sense strand
ccaaggagaaagaaucaac

SEQ ID NO: 310303 - RNA, 19 nt, Homo sapiens
  misc_RNA (1)...(19): siRNA sense strand
ucuacgucaugacagagua

SEQ ID NO: 310304 - RNA, 19 nt, Homo sapiens
  misc_RNA (1)...(19): siRNA sense strand
ugucuucagcgucauuuga

SEQ ID NO: 310305 - RNA, 19 nt, Homo sapiens
  misc_RNA (1)...(19): siRNA sense strand
cacagaucaccaucaauga

SEQ ID NO: 310306 - RNA, 19 nt, Homo sapiens
  misc_RNA (1)...(19): siRNA sense strand
aagcgaaaaucgaauuguu

SEQ ID NO: 310307 - RNA, 19 nt, Homo sapiens
  misc_RNA (1)...(19): siRNA sense strand
ugcaguaccucaaucucau

SEQ ID NO: 310308 - RNA, 19 nt, Homo sapiens
  misc_RNA (1)...(19): siRNA sense strand
gcggaaccaggacaacgaa

SEQ ID NO: 310309 - RNA, 19 nt, Homo sapiens
  misc_RNA (1)...(19): siRNA sense strand
augagcggcuggaccuaaa

SEQ ID NO: 310310 - RNA, 19 nt, Homo sapiens
  misc_RNA (1)...(19): siRNA sense strand
accauaagacacuguacua

SEQ ID NO: 310311 - RNA, 19 nt, Homo sapiens
  misc_RNA (1)...(19): siRNA sense strand
gagcgugaaggacaucagu

SEQ ID NO: 310312 - RNA, 19 nt, Homo sapiens
  misc_RNA (1)...(19): siRNA sense strand
gcgaaaaucgaauuguuug

SEQ ID NO: 310313 - RNA, 19 nt, Homo sapiens
  misc_RNA (1)...(19): siRNA sense strand
gacauccuccaggcaauga

SEQ ID NO: 310314 - RNA, 19 nt, Homo sapiens
  misc_RNA (1)...(19): siRNA sense strand
caucuccacucugcaguac

SEQ ID NO: 310315 - RNA, 19 nt, Homo sapiens
  misc_RNA (1)...(19): siRNA sense strand
agaaucaacggaagacuac

SEQ ID NO: 310316 - RNA, 19 nt, Homo sapiens
  misc_RNA (1)...(19): siRNA sense strand
cagacccuuuccucuucua

SEQ ID NO: 310317 - RNA, 19 nt, Homo sapiens
  misc_RNA (1)...(19): siRNA sense strand
ggacagcucugauggaaua

SEQ ID NO: 310318 - RNA, 19 nt, Homo sapiens
  misc_RNA (1)...(19): siRNA sense strand
gcuaugaacucuccaaagu

SEQ ID NO: 310319 - RNA, 19 nt, Homo sapiens
  misc_RNA (1)...(19): siRNA sense strand
caacaaacgucuggaugaa

SEQ ID NO: 310320 - RNA, 19 nt, Homo sapiens
  misc_RNA (1)...(19): siRNA sense strand
auaagacacuguacuauga

SEQ ID NO: 310321 - RNA, 19 nt, Homo sapiens
  misc_RNA (1)...(19): siRNA sense strand
gaaaucaccagcaucaaga

SEQ ID NO: 310322 - RNA, 19 nt, Homo sapiens
  misc_RNA (1)...(19): siRNA sense strand
gcaagcugcugaucgaguu

SEQ ID NO: 310323 - RNA, 19 nt, Homo sapiens
  misc_RNA (1)...(19): siRNA sense strand
gacguaagaacaagaguua

SEQ ID NO: 310324 - RNA, 19 nt, Homo sapiens
  misc_RNA (1)...(19): siRNA sense strand
cacaggaacucaccacauu

SEQ ID NO: 310325 - RNA, 19 nt, Homo sapiens
  misc_RNA (1)...(19): siRNA sense strand
gaagaacauugagugcauu

SEQ ID NO: 310326 - RNA, 19 nt, Homo sapiens
  misc_RNA (1)...(19): siRNA sense strand
ccacagaucaccaucaaug

SEQ ID NO: 310327 - RNA, 19 nt, Homo sapiens
  misc_RNA (1)...(19): siRNA sense strand
acaaacgucuggaugaaug

SEQ ID NO: 310328 - RNA, 19 nt, Homo sapiens
  misc_RNA (1)...(19): siRNA sense strand
caacggaagacuacaaugu

SEQ ID NO: 310329 - RNA, 19 nt, Homo sapiens
  misc_RNA (1)...(19): siRNA sense strand
caggacagcucugauggaa

SEQ ID NO: 310330 - RNA, 19 nt, Homo sapiens
  misc_RNA (1)...(19): siRNA sense strand
ggccacagaucaccaucaa

SEQ ID NO: 310331 - RNA, 19 nt, Homo sapiens
  misc_RNA (1)...(19): siRNA sense strand
gaccaagugugaccuacga

SEQ ID NO: 310332 - RNA, 19 nt, Homo sapiens
  misc_RNA (1)...(19): siRNA sense strand
ugaagaacauugagugcau

SEQ ID NO: 310333 - RNA, 19 nt, Homo sapiens
  misc_RNA (1)...(19): siRNA sense strand
caauguggccugcauccua

SEQ ID NO: 310334 - RNA, 19 nt, Homo sapiens
  misc_RNA (1)...(19): siRNA sense strand
ccacauugccuguccucua

SEQ ID NO: 310335 - RNA, 19 nt, Homo sapiens
  misc_RNA (1)...(19): siRNA sense strand
ggacguaagaacaagaguu

SEQ ID NO: 310336 - RNA, 19 nt, Homo sapiens
  misc_RNA (1)...(19): siRNA sense strand
ucaaucucaucaacuacua

SEQ ID NO: 310337 - RNA, 19 nt, Homo sapiens
  misc_RNA (1)...(19): siRNA sense strand
gaaccaggacaacgaagau

SEQ ID NO: 310338 - RNA, 19 nt, Homo sapiens
  misc_RNA (1)...(19): siRNA sense strand
ucaacaaacgucuggauga

SEQ ID NO: 310339 - RNA, 19 nt, Homo sapiens
  misc_RNA (1)...(19): siRNA sense strand
aauguggccugcauccuaa

SEQ ID NO: 310340 - RNA, 19 nt, Homo sapiens
  misc_RNA (1)...(19): siRNA sense strand
cacagacccuuuccucuuc

SEQ ID NO: 310341 - RNA, 19 nt, Homo sapiens
  misc_RNA (1)...(19): siRNA sense strand
ucccagaaccugugucuuu

SEQ ID NO: 310342 - RNA, 19 nt, Homo sapiens
  misc_RNA (1)...(19): siRNA sense strand
gaacauugagugcauugag

SEQ ID NO: 310343 - RNA, 19 nt, Homo sapiens
  misc_RNA (1)...(19): siRNA sense strand
guaagaacaagaguuauuc

SEQ ID NO: 310344 - RNA, 19 nt, Homo sapiens
  misc_RNA (1)...(19): siRNA sense strand
cguaagaacaagaguuauu

SEQ ID NO: 310345 - RNA, 19 nt, Homo sapiens
  misc_RNA (1)...(19): siRNA sense strand
cccaaggacuggagcaaga

SEQ ID NO: 310346 - RNA, 19 nt, Homo sapiens
  misc_RNA (1)...(19): siRNA sense strand
cgaauuguuugggcacuga

SEQ ID NO: 310347 - RNA, 19 nt, Homo sapiens
  misc_RNA (1)...(19): siRNA sense strand
ggcaccaucuccuucuuug

SEQ ID NO: 310348 - RNA, 19 nt, Homo sapiens
  misc_RNA (1)...(19): siRNA sense strand
ggaaccaggacaacgaaga

SEQ ID NO: 310349 - RNA, 19 nt, Homo sapiens
  misc_RNA (1)...(19): siRNA sense strand
ucaccagcaucaagaagga

SEQ ID NO: 310350 - RNA, 19 nt, Homo sapiens
  misc_RNA (1)...(19): siRNA sense strand
augaaugggugacgcauga

SEQ ID NO: 310351 - RNA, 19 nt, Homo sapiens
  misc_RNA (1)...(19): siRNA sense strand
acacagacccuuuccucuu

SEQ ID NO: 310352 - RNA, 19 nt, Homo sapiens
  misc_RNA (1)...(19): siRNA sense strand
caagaguuauucccagaac

SEQ ID NO: 310353 - RNA, 19 nt, Homo sapiens
  misc_RNA (1)...(19): siRNA sense strand
aguguuuccuugaccauaa

SEQ ID NO: 310354 - RNA, 19 nt, Homo sapiens
  misc_RNA (1)...(19): siRNA sense strand
guaccucaaucucaucaac

SEQ ID NO: 310355 - RNA, 19 nt, Homo sapiens
  misc_RNA (1)...(19): siRNA sense strand
gagauugauggacguaaga

SEQ ID NO: 310356 - RNA, 19 nt, Homo sapiens
  misc_RNA (1)...(19): siRNA sense strand
gaagguggaggugguuuca

SEQ ID NO: 310357 - RNA, 19 nt, Homo sapiens
  misc_RNA (1)...(19): siRNA sense strand
ugaucgaguucagcuauga

SEQ ID NO: 310358 - RNA, 19 nt, Homo sapiens
  misc_RNA (1)...(19): siRNA sense strand
gaaagaaucaacggaagac

SEQ ID NO: 310359 - RNA, 19 nt, Homo sapiens
  misc_RNA (1)...(19): siRNA sense strand
cacauugccuguccucuac

SEQ ID NO: 310360 - RNA, 19 nt, Homo sapiens
  misc_RNA (1)...(19): siRNA sense strand
gggcaccaucuccuucuuu

SEQ ID NO: 310361 - RNA, 19 nt, Homo sapiens
  misc_RNA (1)...(19): siRNA sense strand
gaucaccaucaaugagauu

SEQ ID NO: 310362 - RNA, 19 nt, Homo sapiens
  misc_RNA (1)...(19): siRNA sense strand
cagaucaccaucaaugaga

SEQ ID NO: 310363 - RNA, 19 nt, Homo sapiens
  misc_RNA (1)...(19): siRNA sense strand
ggcuggaccuaaagaagau

SEQ ID NO: 310364 - RNA, 19 nt, Homo sapiens
  misc_RNA (1)...(19): siRNA sense strand
ugaaaucaccagcaucaag

SEQ ID NO: 310365 - RNA, 19 nt, Homo sapiens
  misc_RNA (1)...(19): siRNA sense strand
aagaaucaacggaagacua

SEQ ID NO: 310366 - RNA, 19 nt, Homo sapiens
  misc_RNA (1)...(19): siRNA sense strand
ugagauugauggacguaag

SEQ ID NO: 310367 - RNA, 19 nt, Homo sapiens
  misc_RNA (1)...(19): siRNA sense strand
gccguagucucaagugucu

SEQ ID NO: 310368 - RNA, 19 nt, Homo sapiens
  misc_RNA (1)...(19): siRNA sense strand
gccaguacauccucacacu

SEQ ID NO: 310369 - RNA, 19 nt, Homo sapiens
  misc_RNA (1)...(19): siRNA sense strand
ggccuccuauccuaucgaa

SEQ ID NO: 310370 - RNA, 19 nt, Homo sapiens
  misc_RNA (1)...(19): siRNA sense strand
agaaagaaucaacggaaga

SEQ ID NO: 310371 - RNA, 19 nt, Homo sapiens
  misc_RNA (1)...(19): siRNA sense strand
guacauccucacacuguca

SEQ ID NO: 310372 - RNA, 19 nt, Homo sapiens
  misc_RNA (1)...(19): siRNA sense strand
cggcuggaccuaaagaaga

SEQ ID NO: 310373 - RNA, 19 nt, Homo sapiens
  misc_RNA (1)...(19): siRNA sense strand
gcaccaucuccuucuuuga

SEQ ID NO: 310374 - RNA, 19 nt, Homo sapiens
  misc_RNA (1)...(19): siRNA sense strand
ggaagguggaggugguuuc

SEQ ID NO: 310375 - RNA, 19 nt, Homo sapiens
  misc_RNA (1)...(19): siRNA sense strand
ucacccggaugaagaacau

SEQ ID NO: 310376 - RNA, 19 nt, Homo sapiens
  misc_RNA (1)...(19): siRNA sense strand
ccacaggaacucaccacau

SEQ ID NO: 310377 - RNA, 19 nt, Homo sapiens
  misc_RNA (1)...(19): siRNA sense strand
caccaucaaugagauuagu

SEQ ID NO: 310378 - RNA, 19 nt, Homo sapiens
  misc_RNA (1)...(19): siRNA sense strand
gagcggcuggaccuaaaga

SEQ ID NO: 310379 - RNA, 19 nt, Homo sapiens
  misc_RNA (1)...(19): siRNA sense strand
ccauaagacacuguacuau

SEQ ID NO: 310380 - RNA, 19 nt, Homo sapiens
  misc_RNA (1)...(19): siRNA sense strand
accucaaucucaucaacua

SEQ ID NO: 310381 - RNA, 19 nt, Homo sapiens
  misc_RNA (1)...(19): siRNA sense strand
caugagcggcuggaccuaa

SEQ ID NO: 310382 - RNA, 19 nt, Homo sapiens
  misc_RNA (1)...(19): siRNA sense strand
ccaucaaugagauuaguga

SEQ ID NO: 310383 - RNA, 19 nt, Homo sapiens
  misc_RNA (1)...(19): siRNA sense strand
cuacguccauuacauugac

SEQ ID NO: 310384 - RNA, 19 nt, Homo sapiens
  misc_RNA (1)...(19): siRNA sense strand
guaagggcuuccacaucgu

SEQ ID NO: 310385 - RNA, 19 nt, Homo sapiens
  misc_RNA (1)...(19): siRNA sense strand
cuccaggcaaugagauuua

SEQ ID NO: 310386 - RNA, 19 nt, Homo sapiens
  misc_RNA (1)...(19): siRNA sense strand
ccaaggagaaagaaucaac

SEQ ID NO: 310387 - RNA, 19 nt, Homo sapiens
  misc_RNA (1)...(19): siRNA sense strand
ucuacgucaugacagagua

SEQ ID NO: 310388 - RNA, 19 nt, Homo sapiens
  misc_RNA (1)...(19): siRNA sense strand
ugucuucagcgucauuuga

SEQ ID NO: 310389 - RNA, 19 nt, Homo sapiens
  misc_RNA (1)...(19): siRNA sense strand
cacagaucaccaucaauga

SEQ ID NO: 310390 - RNA, 19 nt, Homo sapiens
  misc_RNA (1)...(19): siRNA sense strand
aagcgaaaaucgaauuguu

SEQ ID NO: 310391 - RNA, 19 nt, Homo sapiens
  misc_RNA (1)...(19): siRNA sense strand
ugcaguaccucaaucucau

SEQ ID NO: 310392 - RNA, 19 nt, Homo sapiens
  misc_RNA (1)...(19): siRNA sense strand
gcggaaccaggacaacgaa

SEQ ID NO: 310393 - RNA, 19 nt, Homo sapiens
  misc_RNA (1)...(19): siRNA sense strand
augagcggcuggaccuaaa

SEQ ID NO: 310394 - RNA, 19 nt, Homo sapiens
  misc_RNA (1)...(19): siRNA sense strand
accauaagacacuguacua

SEQ ID NO: 310395 - RNA, 19 nt, Homo sapiens
  misc_RNA (1)...(19): siRNA sense strand
gagcgugaaggacaucagu

SEQ ID NO: 310396 - RNA, 19 nt, Homo sapiens
  misc_RNA (1)...(19): siRNA sense strand
gcgaaaaucgaauuguuug

SEQ ID NO: 310397 - RNA, 19 nt, Homo sapiens
  misc_RNA (1)...(19): siRNA sense strand
gacauccuccaggcaauga

SEQ ID NO: 310398 - RNA, 19 nt, Homo sapiens
  misc_RNA (1)...(19): siRNA sense strand
caucuccacucugcaguac

SEQ ID NO: 310399 - RNA, 19 nt, Homo sapiens
  misc_RNA (1)...(19): siRNA sense strand
agaaucaacggaagacuac

SEQ ID NO: 310400 - RNA, 19 nt, Homo sapiens
  misc_RNA (1)...(19): siRNA sense strand
cagacccuuuccucuucua

SEQ ID NO: 310401 - RNA, 19 nt, Homo sapiens
  misc_RNA (1)...(19): siRNA sense strand
ggacagcucugauggaaua

SEQ ID NO: 310402 - RNA, 19 nt, Homo sapiens
  misc_RNA (1)...(19): siRNA sense strand
gcuaugaacucuccaaagu

SEQ ID NO: 310403 - RNA, 19 nt, Homo sapiens
  misc_RNA (1)...(19): siRNA sense strand
caacaaacgucuggaugaa

SEQ ID NO: 310404 - RNA, 19 nt, Homo sapiens
  misc_RNA (1)...(19): siRNA sense strand
auaagacacuguacuauga

SEQ ID NO: 310405 - RNA, 19 nt, Homo sapiens
  misc_RNA (1)...(19): siRNA sense strand
gaaaucaccagcaucaaga

SEQ ID NO: 310406 - RNA, 19 nt, Homo sapiens
  misc_RNA (1)...(19): siRNA sense strand
gcaagcugcugaucgaguu

SEQ ID NO: 310407 - RNA, 19 nt, Homo sapiens
  misc_RNA (1)...(19): siRNA sense strand
gacguaagaacaagaguua

SEQ ID NO: 310408 - RNA, 19 nt, Homo sapiens
  misc_RNA (1)...(19): siRNA sense strand
cacaggaacucaccacauu

SEQ ID NO: 310409 - RNA, 19 nt, Homo sapiens
  misc_RNA (1)...(19): siRNA sense strand
gaagaacauugagugcauu

SEQ ID NO: 310410 - RNA, 19 nt, Homo sapiens
  misc_RNA (1)...(19): siRNA sense strand
ccacagaucaccaucaaug

SEQ ID NO: 310411 - RNA, 19 nt, Homo sapiens
  misc_RNA (1)...(19): siRNA sense strand
acaaacgucuggaugaaug

SEQ ID NO: 310412 - RNA, 19 nt, Homo sapiens
  misc_RNA (1)...(19): siRNA sense strand
caacggaagacuacaaugu

SEQ ID NO: 310413 - RNA, 19 nt, Homo sapiens
  misc_RNA (1)...(19): siRNA sense strand
caggacagcucugauggaa

SEQ ID NO: 310414 - RNA, 19 nt, Homo sapiens
  misc_RNA (1)...(19): siRNA sense strand
ggccacagaucaccaucaa

SEQ ID NO: 310415 - RNA, 19 nt, Homo sapiens
  misc_RNA (1)...(19): siRNA sense strand
gaccaagugugaccuacga

SEQ ID NO: 310416 - RNA, 19 nt, Homo sapiens
  misc_RNA (1)...(19): siRNA sense strand
ugaagaacauugagugcau

SEQ ID NO: 310417 - RNA, 19 nt, Homo sapiens
  misc_RNA (1)...(19): siRNA sense strand
caauguggccugcauccua

SEQ ID NO: 310418 - RNA, 19 nt, Homo sapiens
  misc_RNA (1)...(19): siRNA sense strand
ccacauugccuguccucua

SEQ ID NO: 310419 - RNA, 19 nt, Homo sapiens
  misc_RNA (1)...(19): siRNA sense strand
ggacguaagaacaagaguu

SEQ ID NO: 310420 - RNA, 19 nt, Homo sapiens
  misc_RNA (1)...(19): siRNA sense strand
ucaaucucaucaacuacua

SEQ ID NO: 310421 - RNA, 19 nt, Homo sapiens
  misc_RNA (1)...(19): siRNA sense strand
gaaccaggacaacgaagau

SEQ ID NO: 310422 - RNA, 19 nt, Homo sapiens
  misc_RNA (1)...(19): siRNA sense strand
ucaacaaacgucuggauga

SEQ ID NO: 310423 - RNA, 19 nt, Homo sapiens
  misc_RNA (1)...(19): siRNA sense strand
aauguggccugcauccuaa

SEQ ID NO: 310424 - RNA, 19 nt, Homo sapiens
  misc_RNA (1)...(19): siRNA sense strand
cacagacccuuuccucuuc

SEQ ID NO: 310425 - RNA, 19 nt, Homo sapiens
  misc_RNA (1)...(19): siRNA sense strand
ucccagaaccugugucuuu

SEQ ID NO: 310426 - RNA, 19 nt, Homo sapiens
  misc_RNA (1)...(19): siRNA sense strand
gaacauugagugcauugag

SEQ ID NO: 310427 - RNA, 19 nt, Homo sapiens
  misc_RNA (1)...(19): siRNA sense strand
guaagaacaagaguuauuc

SEQ ID NO: 310428 - RNA, 19 nt, Homo sapiens
  misc_RNA (1)...(19): siRNA sense strand
cguaagaacaagaguuauu

SEQ ID NO: 310429 - RNA, 19 nt, Homo sapiens
  misc_RNA (1)...(19): siRNA sense strand
cccaaggacuggagcaaga

SEQ ID NO: 310430 - RNA, 19 nt, Homo sapiens
  misc_RNA (1)...(19): siRNA sense strand
cgaauuguuugggcacuga

SEQ ID NO: 310431 - RNA, 19 nt, Homo sapiens
  misc_RNA (1)...(19): siRNA sense strand
ggcaccaucuccuucuuug

SEQ ID NO: 310432 - RNA, 19 nt, Homo sapiens
  misc_RNA (1)...(19): siRNA sense strand
ggaaccaggacaacgaaga

SEQ ID NO: 310433 - RNA, 19 nt, Homo sapiens
  misc_RNA (1)...(19): siRNA sense strand
ucaccagcaucaagaagga

SEQ ID NO: 310434 - RNA, 19 nt, Homo sapiens
  misc_RNA (1)...(19): siRNA sense strand
augaaugggugacgcauga

SEQ ID NO: 310435 - RNA, 19 nt, Homo sapiens
  misc_RNA (1)...(19): siRNA sense strand
acacagacccuuuccucuu

SEQ ID NO: 310436 - RNA, 19 nt, Homo sapiens
  misc_RNA (1)...(19): siRNA sense strand
caagaguuauucccagaac

SEQ ID NO: 310437 - RNA, 19 nt, Homo sapiens
  misc_RNA (1)...(19): siRNA sense strand
aguguuuccuugaccauaa

SEQ ID NO: 310438 - RNA, 19 nt, Homo sapiens
  misc_RNA (1)...(19): siRNA sense strand
guaccucaaucucaucaac

SEQ ID NO: 310439 - RNA, 19 nt, Homo sapiens
  misc_RNA (1)...(19): siRNA sense strand
gagauugauggacguaaga

SEQ ID NO: 310440 - RNA, 19 nt, Homo sapiens
  misc_RNA (1)...(19): siRNA sense strand
gaagguggaggugguuuca

SEQ ID NO: 310441 - RNA, 19 nt, Homo sapiens
  misc_RNA (1)...(19): siRNA sense strand
ugaucgaguucagcuauga

SEQ ID NO: 310442 - RNA, 19 nt, Homo sapiens
  misc_RNA (1)...(19): siRNA sense strand
gaaagaaucaacggaagac

SEQ ID NO: 310443 - RNA, 19 nt, Homo sapiens
  misc_RNA (1)...(19): siRNA sense strand
cacauugccuguccucuac

SEQ ID NO: 310444 - RNA, 19 nt, Homo sapiens
  misc_RNA (1)...(19): siRNA sense strand
gggcaccaucuccuucuuu

SEQ ID NO: 310445 - RNA, 19 nt, Homo sapiens
  misc_RNA (1)...(19): siRNA sense strand
gaucaccaucaaugagauu

SEQ ID NO: 310446 - RNA, 19 nt, Homo sapiens
  misc_RNA (1)...(19): siRNA sense strand
cagaucaccaucaaugaga

SEQ ID NO: 310447 - RNA, 19 nt, Homo sapiens
  misc_RNA (1)...(19): siRNA sense strand
ggcuggaccuaaagaagau

SEQ ID NO: 310448 - RNA, 19 nt, Homo sapiens
  misc_RNA (1)...(19): siRNA sense strand
ugaaaucaccagcaucaag

SEQ ID NO: 310449 - RNA, 19 nt, Homo sapiens
  misc_RNA (1)...(19): siRNA sense strand
aagaaucaacggaagacua

SEQ ID NO: 310450 - RNA, 19 nt, Homo sapiens
  misc_RNA (1)...(19): siRNA sense strand
ugagauugauggacguaag

SEQ ID NO: 310451 - RNA, 19 nt, Homo sapiens
  misc_RNA (1)...(19): siRNA sense strand
gccguagucucaagugucu

SEQ ID NO: 310452 - RNA, 19 nt, Homo sapiens
  misc_RNA (1)...(19): siRNA sense strand
gccaguacauccucacacu

SEQ ID NO: 310453 - RNA, 19 nt, Homo sapiens
  misc_RNA (1)...(19): siRNA sense strand
ggccuccuauccuaucgaa

SEQ ID NO: 310454 - RNA, 19 nt, Homo sapiens
  misc_RNA (1)...(19): siRNA sense strand
agaaagaaucaacggaaga

SEQ ID NO: 310455 - RNA, 19 nt, Homo sapiens
  misc_RNA (1)...(19): siRNA sense strand
guacauccucacacuguca

SEQ ID NO: 310456 - RNA, 19 nt, Homo sapiens
  misc_RNA (1)...(19): siRNA sense strand
cggcuggaccuaaagaaga

SEQ ID NO: 310457 - RNA, 19 nt, Homo sapiens
  misc_RNA (1)...(19): siRNA sense strand
gcaccaucuccuucuuuga

SEQ ID NO: 310458 - RNA, 19 nt, Homo sapiens
  misc_RNA (1)...(19): siRNA sense strand
ggaagguggaggugguuuc

SEQ ID NO: 310459 - RNA, 19 nt, Homo sapiens
  misc_RNA (1)...(19): siRNA sense strand
ucacccggaugaagaacau

SEQ ID NO: 310460 - RNA, 19 nt, Homo sapiens
  misc_RNA (1)...(19): siRNA sense strand
ccacaggaacucaccacau

SEQ ID NO: 310461 - RNA, 19 nt, Homo sapiens
  misc_RNA (1)...(19): siRNA sense strand
caccaucaaugagauuagu

SEQ ID NO: 310462 - RNA, 19 nt, Homo sapiens
  misc_RNA (1)...(19): siRNA sense strand
gagcggcuggaccuaaaga

SEQ ID NO: 310463 - RNA, 19 nt, Homo sapiens
  misc_RNA (1)...(19): siRNA sense strand
ccauaagacacuguacuau

SEQ ID NO: 310464 - RNA, 19 nt, Homo sapiens
  misc_RNA (1)...(19): siRNA sense strand
accucaaucucaucaacua

SEQ ID NO: 310465 - RNA, 19 nt, Homo sapiens
  misc_RNA (1)...(19): siRNA sense strand
caugagcggcuggaccuaa

SEQ ID NO: 310466 - RNA, 19 nt, Homo sapiens
  misc_RNA (1)...(19): siRNA sense strand
ccaucaaugagauuaguga

SEQ ID NO: 310467 - RNA, 19 nt, Homo sapiens
  misc_RNA (1)...(19): siRNA sense strand
cuacguccauuacauugac

SEQ ID NO: 310468 - RNA, 19 nt, Homo sapiens
  misc_RNA (1)...(19): siRNA sense strand
guaagggcuuccacaucgu

SEQ ID NO: 310469 - RNA, 19 nt, Homo sapiens
  misc_RNA (1)...(19): siRNA sense strand
cuccaggcaaugagauuua

SEQ ID NO: 310470 - RNA, 19 nt, Homo sapiens
  misc_RNA (1)...(19): siRNA sense strand
ccaaggagaaagaaucaac

SEQ ID NO: 310471 - RNA, 19 nt, Homo sapiens
  misc_RNA (1)...(19): siRNA sense strand
ucuacgucaugacagagua

SEQ ID NO: 310472 - RNA, 19 nt, Homo sapiens
  misc_RNA (1)...(19): siRNA sense strand
ugucuucagcgucauuuga

SEQ ID NO: 310473 - RNA, 19 nt, Homo sapiens
  misc_RNA (1)...(19): siRNA sense strand
cacagaucaccaucaauga

SEQ ID NO: 310474 - RNA, 19 nt, Homo sapiens
  misc_RNA (1)...(19): siRNA sense strand
aagcgaaaaucgaauuguu

SEQ ID NO: 310475 - RNA, 19 nt, Homo sapiens
  misc_RNA (1)...(19): siRNA sense strand
ugcaguaccucaaucucau

SEQ ID NO: 310476 - RNA, 19 nt, Homo sapiens
  misc_RNA (1)...(19): siRNA sense strand
gcggaaccaggacaacgaa

SEQ ID NO: 310477 - RNA, 19 nt, Homo sapiens
  misc_RNA (1)...(19): siRNA sense strand
augagcggcuggaccuaaa

SEQ ID NO: 310478 - RNA, 19 nt, Homo sapiens
  misc_RNA (1)...(19): siRNA sense strand
accauaagacacuguacua

SEQ ID NO: 310479 - RNA, 19 nt, Homo sapiens
  misc_RNA (1)...(19): siRNA sense strand
gagcgugaaggacaucagu

SEQ ID NO: 310480 - RNA, 19 nt, Homo sapiens
  misc_RNA (1)...(19): siRNA sense strand
gcgaaaaucgaauuguuug

SEQ ID NO: 310481 - RNA, 19 nt, Homo sapiens
  misc_RNA (1)...(19): siRNA sense strand
gacauccuccaggcaauga

SEQ ID NO: 310482 - RNA, 19 nt, Homo sapiens
  misc_RNA (1)...(19): siRNA sense strand
caucuccacucugcaguac

SEQ ID NO: 310483 - RNA, 19 nt, Homo sapiens
  misc_RNA (1)...(19): siRNA sense strand
agaaucaacggaagacuac

SEQ ID NO: 310484 - RNA, 19 nt, Homo sapiens
  misc_RNA (1)...(19): siRNA sense strand
cagacccuuuccucuucua

SEQ ID NO: 310485 - RNA, 19 nt, Homo sapiens
  misc_RNA (1)...(19): siRNA sense strand
gggaagauuugaagacuua

SEQ ID NO: 310486 - RNA, 19 nt, Homo sapiens
  misc_RNA (1)...(19): siRNA sense strand
gcggaaagcugugaagaua

SEQ ID NO: 310487 - RNA, 19 nt, Homo sapiens
  misc_RNA (1)...(19): siRNA sense strand
gaaaguggguggaauuuac

SEQ ID NO: 310488 - RNA, 19 nt, Homo sapiens
  misc_RNA (1)...(19): siRNA sense strand
gaacuggaaugaugaaugg

SEQ ID NO: 310489 - RNA, 19 nt, Homo sapiens
  misc_RNA (1)...(19): siRNA sense strand
gcuaagaaguuuggaauca

SEQ ID NO: 310490 - RNA, 19 nt, Homo sapiens
  misc_RNA (1)...(19): siRNA sense strand
caacucaucucaucaaugc

SEQ ID NO: 310491 - RNA, 19 nt, Homo sapiens
  misc_RNA (1)...(19): siRNA sense strand
gauacacacuggaaauguu

SEQ ID NO: 310492 - RNA, 19 nt, Homo sapiens
  misc_RNA (1)...(19): siRNA sense strand
ucugguagaugauuacuuu

SEQ ID NO: 310493 - RNA, 19 nt, Homo sapiens
  misc_RNA (1)...(19): siRNA sense strand
gcaccauguuugaaggaua

SEQ ID NO: 310494 - RNA, 19 nt, Homo sapiens
  misc_RNA (1)...(19): siRNA sense strand
gaugauuacuuugaacuug

SEQ ID NO: 310495 - RNA, 19 nt, Homo sapiens
  misc_RNA (1)...(19): siRNA sense strand
ggaugaagcuaacuuacca

SEQ ID NO: 310496 - RNA, 19 nt, Homo sapiens
  misc_RNA (1)...(19): siRNA sense strand
gaaggauacugccagaagu

SEQ ID NO: 310497 - RNA, 19 nt, Homo sapiens
  misc_RNA (1)...(19): siRNA sense strand
gguagaugauuacuuugaa

SEQ ID NO: 310498 - RNA, 19 nt, Homo sapiens
  misc_RNA (1)...(19): siRNA sense strand
gcacaacucaucucaucaa

SEQ ID NO: 310499 - RNA, 19 nt, Homo sapiens
  misc_RNA (1)...(19): siRNA sense strand
caacgaaugcuuucaguuc

SEQ ID NO: 310500 - RNA, 19 nt, Homo sapiens
  misc_RNA (1)...(19): siRNA sense strand
caacucacuggaagaaaua

SEQ ID NO: 310501 - RNA, 19 nt, Homo sapiens
  misc_RNA (1)...(19): siRNA sense strand
caacuggugucgagaaguc

SEQ ID NO: 310502 - RNA, 19 nt, Homo sapiens
  misc_RNA (1)...(19): siRNA sense strand
gcgaggagcucugcaugga

SEQ ID NO: 310503 - RNA, 19 nt, Homo sapiens
  misc_RNA (1)...(19): siRNA sense strand
uacaagaaauggcaggaaa

SEQ ID NO: 310504 - RNA, 19 nt, Homo sapiens
  misc_RNA (1)...(19): siRNA sense strand
gaagcuaacuuaccaaaag

SEQ ID NO: 310505 - RNA, 19 nt, Homo sapiens
  misc_RNA (1)...(19): siRNA sense strand
ggaaagcugugaagauacg

SEQ ID NO: 310506 - RNA, 19 nt, Homo sapiens
  misc_RNA (1)...(19): siRNA sense strand
ucccaaagcugaacuccaa

SEQ ID NO: 310507 - RNA, 19 nt, Homo sapiens
  misc_RNA (1)...(19): siRNA sense strand
ugaaggagaagcucuuaaa

SEQ ID NO: 310508 - RNA, 19 nt, Homo sapiens
  misc_RNA (1)...(19): siRNA sense strand
gaugaaugggacaaucuua

SEQ ID NO: 310509 - RNA, 19 nt, Homo sapiens
  misc_RNA (1)...(19): siRNA sense strand
aaaaugagaugaaggagaa

SEQ ID NO: 310510 - RNA, 19 nt, Homo sapiens
  misc_RNA (1)...(19): siRNA sense strand
gauacugccagaaguguuu

SEQ ID NO: 310511 - RNA, 19 nt, Homo sapiens
  misc_RNA (1)...(19): siRNA sense strand
caucaaugccgcaaaguug

SEQ ID NO: 310512 - RNA, 19 nt, Homo sapiens
  misc_RNA (1)...(19): siRNA sense strand
ugacagauccugaaaauga

SEQ ID NO: 310513 - RNA, 19 nt, Homo sapiens
  misc_RNA (1)...(19): siRNA sense strand
ugccagaaguguuucauug

SEQ ID NO: 310514 - RNA, 19 nt, Homo sapiens
  misc_RNA (1)...(19): siRNA sense strand
aaugggaucugcaguacuu

SEQ ID NO: 310515 - RNA, 19 nt, Homo sapiens
  misc_RNA (1)...(19): siRNA sense strand
guacaacucacuggaagaa

SEQ ID NO: 310516 - RNA, 19 nt, Homo sapiens
  misc_RNA (1)...(19): siRNA sense strand
gaagagcaacugagaucga

SEQ ID NO: 310517 - RNA, 19 nt, Homo sapiens
  misc_RNA (1)...(19): siRNA sense strand
ccucaggcuuuguauuuga

SEQ ID NO: 310518 - RNA, 19 nt, Homo sapiens
  misc_RNA (1)...(19): siRNA sense strand
caaaguuggaugaagcuaa

SEQ ID NO: 310519 - RNA, 19 nt, Homo sapiens
  misc_RNA (1)...(19): siRNA sense strand
gacacagacuugguacuga

SEQ ID NO: 310520 - RNA, 19 nt, Homo sapiens
  misc_RNA (1)...(19): siRNA sense strand
cagcaugaguacaagaaau

SEQ ID NO: 310521 - RNA, 19 nt, Homo sapiens
  misc_RNA (1)...(19): siRNA sense strand
gaugaaggagaagcucuua

SEQ ID NO: 310522 - RNA, 19 nt, Homo sapiens
  misc_RNA (1)...(19): siRNA sense strand
aauccgagcuguuccacuu

SEQ ID NO: 310523 - RNA, 19 nt, Homo sapiens
  misc_RNA (1)...(19): siRNA sense strand
acaacucacuggaagaaau

SEQ ID NO: 310524 - RNA, 19 nt, Homo sapiens
  misc_RNA (1)...(19): siRNA sense strand
acucggaacuggaaugaug

SEQ ID NO: 310525 - RNA, 19 nt, Homo sapiens
  misc_RNA (1)...(19): siRNA sense strand
ggacacagacuugguacug

SEQ ID NO: 310526 - RNA, 19 nt, Homo sapiens
  misc_RNA (1)...(19): siRNA sense strand
gaaggacagugggccugaa

SEQ ID NO: 310527 - RNA, 19 nt, Homo sapiens
  misc_RNA (1)...(19): siRNA sense strand
gggacaaucuuaucaaaau

SEQ ID NO: 310528 - RNA, 19 nt, Homo sapiens
  misc_RNA (1)...(19): siRNA sense strand
gaaugggacaaucuuauca

SEQ ID NO: 310529 - RNA, 19 nt, Homo sapiens
  misc_RNA (1)...(19): siRNA sense strand
ggaacuggaaugaugaaug

SEQ ID NO: 310530 - RNA, 19 nt, Homo sapiens
  misc_RNA (1)...(19): siRNA sense strand
acagacacacgcaacuuua

SEQ ID NO: 310531 - RNA, 19 nt, Homo sapiens
  misc_RNA (1)...(19): siRNA sense strand
gacagaagagcaacugaga

SEQ ID NO: 310532 - RNA, 19 nt, Homo sapiens
  misc_RNA (1)...(19): siRNA sense strand
ggaagcaccauguuugaag

SEQ ID NO: 310533 - RNA, 19 nt, Homo sapiens
  misc_RNA (1)...(19): siRNA sense strand
cugcaguacuugcuucaaa

SEQ ID NO: 310534 - RNA, 19 nt, Homo sapiens
  misc_RNA (1)...(19): siRNA sense strand
ugacagccaucauuuugua

SEQ ID NO: 310535 - RNA, 19 nt, Homo sapiens
  misc_RNA (1)...(19): siRNA sense strand
caacggcuacugcaacgaa

SEQ ID NO: 310536 - RNA, 19 nt, Homo sapiens
  misc_RNA (1)...(19): siRNA sense strand
uggcacaacucaucucauc

SEQ ID NO: 310537 - RNA, 19 nt, Homo sapiens
  misc_RNA (1)...(19): siRNA sense strand
ugaaaguggguggaauuua

SEQ ID NO: 310538 - RNA, 19 nt, Homo sapiens
  misc_RNA (1)...(19): siRNA sense strand
ggacagugggccugaaauc

SEQ ID NO: 310539 - RNA, 19 nt, Homo sapiens
  misc_RNA (1)...(19): siRNA sense strand
gcaugccacuucucaguac

SEQ ID NO: 310540 - RNA, 19 nt, Homo sapiens
  misc_RNA (1)...(19): siRNA sense strand
gaccauggcacaacucauc

SEQ ID NO: 310541 - RNA, 19 nt, Homo sapiens
  misc_RNA (1)...(19): siRNA sense strand
gagcuguuccacuuguuaa

SEQ ID NO: 310542 - RNA, 19 nt, Homo sapiens
  misc_RNA (1)...(19): siRNA sense strand
acacauauuuguccuuugc

SEQ ID NO: 310543 - RNA, 19 nt, Homo sapiens
  misc_RNA (1)...(19): siRNA sense strand
aaacggggcuuugcuauga

SEQ ID NO: 310544 - RNA, 19 nt, Homo sapiens
  misc_RNA (1)...(19): siRNA sense strand
ucucaggaauuuguugaaa

SEQ ID NO: 310545 - RNA, 19 nt, Homo sapiens
  misc_RNA (1)...(19): siRNA sense strand
cgacagcacccagcccuuu

SEQ ID NO: 310546 - RNA, 19 nt, Homo sapiens
  misc_RNA (1)...(19): siRNA sense strand
gcaccgauacacacuggaa

SEQ ID NO: 310547 - RNA, 19 nt, Homo sapiens
  misc_RNA (1)...(19): siRNA sense strand
gagaacuccagaagacauu

SEQ ID NO: 310548 - RNA, 19 nt, Homo sapiens
  misc_RNA (1)...(19): siRNA sense strand
cagaagagcaacugagauc

SEQ ID NO: 310549 - RNA, 19 nt, Homo sapiens
  misc_RNA (1)...(19): siRNA sense strand
gagauuucaugaggccaaa

SEQ ID NO: 310550 - RNA, 19 nt, Homo sapiens
  misc_RNA (1)...(19): siRNA sense strand
gcccaggaaugcuacagau

SEQ ID NO: 310551 - RNA, 19 nt, Homo sapiens
  misc_RNA (1)...(19): siRNA sense strand
gcaacgaaugcuuucaguu

SEQ ID NO: 310552 - RNA, 19 nt, Homo sapiens
  misc_RNA (1)...(19): siRNA sense strand
gaaugcggcacccuuggaa

SEQ ID NO: 310553 - RNA, 19 nt, Homo sapiens
  misc_RNA (1)...(19): siRNA sense strand
ggaagcuuguggcgcugaa

SEQ ID NO: 310554 - RNA, 19 nt, Homo sapiens
  misc_RNA (1)...(19): siRNA sense strand
ugagaccacugccaugaag

SEQ ID NO: 310555 - RNA, 19 nt, Homo sapiens
  misc_RNA (1)...(19): siRNA sense strand
gaacacccagccuuuaugc

SEQ ID NO: 310556 - RNA, 19 nt, Homo sapiens
  misc_RNA (1)...(19): siRNA sense strand
ccauuguucucggcuauga

SEQ ID NO: 310557 - RNA, 19 nt, Homo sapiens
  misc_RNA (1)...(19): siRNA sense strand
cagacacacgcaacuuuaa

SEQ ID NO: 310558 - RNA, 19 nt, Homo sapiens
  misc_RNA (1)...(19): siRNA sense strand
cuacugcaacgaaugcuuu

SEQ ID NO: 310559 - RNA, 19 nt, Homo sapiens
  misc_RNA (1)...(19): siRNA sense strand
gccagaaguguuucauuga

SEQ ID NO: 310560 - RNA, 19 nt, Homo sapiens
  misc_RNA (1)...(19): siRNA sense strand
ggaaugcggcacccuugga

SEQ ID NO: 310561 - RNA, 19 nt, Homo sapiens
  misc_RNA (1)...(19): siRNA sense strand
guacuuaauggugauagaa

SEQ ID NO: 310562 - RNA, 19 nt, Homo sapiens
  misc_RNA (1)...(19): siRNA sense strand
ucaggacacagacuuggua

SEQ ID NO: 310563 - RNA, 19 nt, Homo sapiens
  misc_RNA (1)...(19): siRNA sense strand
ucaccagcguuccaaguca

SEQ ID NO: 310564 - RNA, 19 nt, Homo sapiens
  misc_RNA (1)...(19): siRNA sense strand
gaaucagguuccaauuucg

SEQ ID NO: 310565 - RNA, 19 nt, Homo sapiens
  misc_RNA (1)...(19): siRNA sense strand
gacaaaaugcuaagaaguu

SEQ ID NO: 310566 - RNA, 19 nt, Homo sapiens
  misc_RNA (1)...(19): siRNA sense strand
ccucagaaggccaaucauu

SEQ ID NO: 310567 - RNA, 19 nt, Homo sapiens
  misc_RNA (1)...(19): siRNA sense strand
gaacggugacggcaauugc

SEQ ID NO: 310568 - RNA, 19 nt, Homo sapiens
  misc_RNA (1)...(19): siRNA sense strand
gugaacacccagccuuuau

SEQ ID NO: 310569 - RNA, 19 nt, Homo sapiens
  misc_RNA (1)...(19): siRNA sense strand
aaaguuggaugaagcuaac

SEQ ID NO: 310570 - RNA, 19 nt, Homo sapiens
  misc_RNA (1)...(19): siRNA sense strand
cgagcuguuccacuuguua

SEQ ID NO: 310571 - RNA, 19 nt, Homo sapiens
  misc_RNA (1)...(19): siRNA sense strand
acacgcaacuuuaaauucc

SEQ ID NO: 310572 - RNA, 19 nt, Homo sapiens
  misc_RNA (1)...(19): siRNA sense strand
acacacgcaacuuuaaauu

SEQ ID NO: 310573 - RNA, 19 nt, Homo sapiens
  misc_RNA (1)...(19): siRNA sense strand
agacacacgcaacuuuaaa

SEQ ID NO: 310574 - RNA, 19 nt, Homo sapiens
  misc_RNA (1)...(19): siRNA sense strand
uuaaaaccaugcaccgaua

SEQ ID NO: 310575 - RNA, 19 nt, Homo sapiens
  misc_RNA (1)...(19): siRNA sense strand
ucauugaagcucagaauca

SEQ ID NO: 310576 - RNA, 19 nt, Homo sapiens
  misc_RNA (1)...(19): siRNA sense strand
ggacgagcaagugcagaaa

SEQ ID NO: 310577 - RNA, 19 nt, Homo sapiens
  misc_RNA (1)...(19): siRNA sense strand
guagaugauuacuuugaac

SEQ ID NO: 310578 - RNA, 19 nt, Homo sapiens
  misc_RNA (1)...(19): siRNA sense strand
guuggaugaagcuaacuua

SEQ ID NO: 310579 - RNA, 19 nt, Homo sapiens
  misc_RNA (1)...(19): siRNA sense strand
gaaggagaagcucuuaaaa

SEQ ID NO: 310580 - RNA, 19 nt, Homo sapiens
  misc_RNA (1)...(19): siRNA sense strand
gaaagccagaagaaacuca

SEQ ID NO: 310581 - RNA, 19 nt, Homo sapiens
  misc_RNA (1)...(19): siRNA sense strand
ggacaaucuuaucaaaaug

SEQ ID NO: 310582 - RNA, 19 nt, Homo sapiens
  misc_RNA (1)...(19): siRNA sense strand
gaaacagacacacgcaacu

SEQ ID NO: 310583 - RNA, 19 nt, Homo sapiens
  misc_RNA (1)...(19): siRNA sense strand
ccacuucucaguacaugug

SEQ ID NO: 310584 - RNA, 19 nt, Homo sapiens
  misc_RNA (1)...(19): siRNA sense strand
gacacacgcaacuuuaaau

SEQ ID NO: 310585 - RNA, 19 nt, Homo sapiens
  misc_RNA (1)...(19): siRNA sense strand
gcaagcagcugacgaauua

SEQ ID NO: 310586 - RNA, 19 nt, Homo sapiens
  misc_RNA (1)...(19): siRNA sense strand
ggacuugggcucacagaua

SEQ ID NO: 310587 - RNA, 19 nt, Homo sapiens
  misc_RNA (1)...(19): siRNA sense strand
ccacauuccuguccaguga

SEQ ID NO: 310588 - RNA, 19 nt, Homo sapiens
  misc_RNA (1)...(19): siRNA sense strand
agauugagguggccacuua

SEQ ID NO: 310589 - RNA, 19 nt, Homo sapiens
  misc_RNA (1)...(19): siRNA sense strand
gacuugggcucacagauaa

SEQ ID NO: 310590 - RNA, 19 nt, Homo sapiens
  misc_RNA (1)...(19): siRNA sense strand
ccaaagggaagaagaagaa

SEQ ID NO: 310591 - RNA, 19 nt, Homo sapiens
  misc_RNA (1)...(19): siRNA sense strand
cgaagaagaagaaggagaa

SEQ ID NO: 310592 - RNA, 19 nt, Homo sapiens
  misc_RNA (1)...(19): siRNA sense strand
ggauguccauggagcagaa

SEQ ID NO: 310593 - RNA, 19 nt, Homo sapiens
  misc_RNA (1)...(19): siRNA sense strand
uuacagggccaauguuauu

SEQ ID NO: 310594 - RNA, 19 nt, Homo sapiens
  misc_RNA (1)...(19): siRNA sense strand
ccacuuaugccaccugcua

SEQ ID NO: 310595 - RNA, 19 nt, Homo sapiens
  misc_RNA (1)...(19): siRNA sense strand
agaaggagaagaagaagaa

SEQ ID NO: 310596 - RNA, 19 nt, Homo sapiens
  misc_RNA (1)...(19): siRNA sense strand
ggagcagaauuggcaggua

SEQ ID NO: 310597 - RNA, 19 nt, Homo sapiens
  misc_RNA (1)...(19): siRNA sense strand
agaagaaggagaagaagaa

SEQ ID NO: 310598 - RNA, 19 nt, Homo sapiens
  misc_RNA (1)...(19): siRNA sense strand
agaagaagaaggagaagaa

SEQ ID NO: 310599 - RNA, 19 nt, Homo sapiens
  misc_RNA (1)...(19): siRNA sense strand
ugggugagcugcaggguau

SEQ ID NO: 310600 - RNA, 19 nt, Homo sapiens
  misc_RNA (1)...(19): siRNA sense strand
gagcgucuuucugcacuug

SEQ ID NO: 310601 - RNA, 19 nt, Homo sapiens
  misc_RNA (1)...(19): siRNA sense strand
cgaauuacagggccaaugu

SEQ ID NO: 310602 - RNA, 19 nt, Homo sapiens
  misc_RNA (1)...(19): siRNA sense strand
gagcaucacgcuggacuug

SEQ ID NO: 310603 - RNA, 19 nt, Homo sapiens
  misc_RNA (1)...(19): siRNA sense strand
gaggcaagcagcugacgaa

SEQ ID NO: 310604 - RNA, 19 nt, Homo sapiens
  misc_RNA (1)...(19): siRNA sense strand
gaaggaguacaucauccaa

SEQ ID NO: 310605 - RNA, 19 nt, Homo sapiens
  misc_RNA (1)...(19): siRNA sense strand
gcgcuauccuggccaucaa

SEQ ID NO: 310606 - RNA, 19 nt, Homo sapiens
  misc_RNA (1)...(19): siRNA sense strand
aaacaucaucgccacugua

SEQ ID NO: 310607 - RNA, 19 nt, Homo sapiens
  misc_RNA (1)...(19): siRNA sense strand
uaaugaauuucuggagaga

SEQ ID NO: 310608 - RNA, 19 nt, Homo sapiens
  misc_RNA (1)...(19): siRNA sense strand
gaauuacagggccaauguu

SEQ ID NO: 310609 - RNA, 19 nt, Homo sapiens
  misc_RNA (1)...(19): siRNA sense strand
gcaagguggaggcgcugua

SEQ ID NO: 310610 - RNA, 19 nt, Homo sapiens
  misc_RNA (1)...(19): siRNA sense strand
aauuacagggccaauguua

SEQ ID NO: 310611 - RNA, 19 nt, Homo sapiens
  misc_RNA (1)...(19): siRNA sense strand
ggcaagcagcugacgaauu

SEQ ID NO: 310612 - RNA, 19 nt, Homo sapiens
  misc_RNA (1)...(19): siRNA sense strand
gaagaagaagaaguccaaa

SEQ ID NO: 310613 - RNA, 19 nt, Homo sapiens
  misc_RNA (1)...(19): siRNA sense strand
agaagaagaagaaguccaa

SEQ ID NO: 310614 - RNA, 19 nt, Homo sapiens
  misc_RNA (1)...(19): siRNA sense strand
ucaccaaagggaagaagaa

SEQ ID NO: 310615 - RNA, 19 nt, Homo sapiens
  misc_RNA (1)...(19): siRNA sense strand
gaagaagaaggagaagaag

SEQ ID NO: 310616 - RNA, 19 nt, Homo sapiens
  misc_RNA (1)...(19): siRNA sense strand
gaagaaggagaagaagaag

SEQ ID NO: 310617 - RNA, 19 nt, Homo sapiens
  misc_RNA (1)...(19): siRNA sense strand
ccaucgacaucauccagau

SEQ ID NO: 310618 - RNA, 19 nt, Homo sapiens
  misc_RNA (1)...(19): siRNA sense strand
ggugaaggaguacaucauc

SEQ ID NO: 310619 - RNA, 19 nt, Homo sapiens
  misc_RNA (1)...(19): siRNA sense strand
ggaccugaagccacuguuc

SEQ ID NO: 310620 - RNA, 19 nt, Homo sapiens
  misc_RNA (1)...(19): siRNA sense strand
cauauagggaggaggaaga

SEQ ID NO: 310621 - RNA, 19 nt, Homo sapiens
  misc_RNA (1)...(19): siRNA sense strand
cggcgaagaagaagaagga

SEQ ID NO: 310622 - RNA, 19 nt, Homo sapiens
  misc_RNA (1)...(19): siRNA sense strand
agaagaagaaguccaaagg

SEQ ID NO: 310623 - RNA, 19 nt, Homo sapiens
  misc_RNA (1)...(19): siRNA sense strand
gguacauccuggccaaugc

SEQ ID NO: 310624 - RNA, 19 nt, Homo sapiens
  misc_RNA (1)...(19): siRNA sense strand
caucaucgccacuguagac

SEQ ID NO: 310625 - RNA, 19 nt, Homo sapiens
  misc_RNA (1)...(19): siRNA sense strand
guucugcgucuucaccaaa

SEQ ID NO: 310626 - RNA, 19 nt, Homo sapiens
  misc_RNA (1)...(19): siRNA sense strand
gagcuggccaucgacauca

SEQ ID NO: 310627 - RNA, 19 nt, Homo sapiens
  misc_RNA (1)...(19): siRNA sense strand
gccccuauuuucccuuaua

SEQ ID NO: 310628 - RNA, 19 nt, Homo sapiens
  misc_RNA (1)...(19): siRNA sense strand
gagcuaccaccagcacuuc

SEQ ID NO: 310629 - RNA, 19 nt, Homo sapiens
  misc_RNA (1)...(19): siRNA sense strand
gcgcauccggagcaucuug

SEQ ID NO: 310630 - RNA, 19 nt, Homo sapiens
  misc_RNA (1)...(19): siRNA sense strand
ucccuacgcuggccgagau

SEQ ID NO: 310631 - RNA, 19 nt, Homo sapiens
  misc_RNA (1)...(19): siRNA sense strand
gaagaagaagaaggagaag

SEQ ID NO: 310632 - RNA, 19 nt, Homo sapiens
  misc_RNA (1)...(19): siRNA sense strand
aagaagaaggagaagaaga

SEQ ID NO: 310633 - RNA, 19 nt, Homo sapiens
  misc_RNA (1)...(19): siRNA sense strand
cgaaguuacucaaggauuu

SEQ ID NO: 310634 - RNA, 19 nt, Homo sapiens
  misc_RNA (1)...(19): siRNA sense strand
gaagauggcagaagcuguu

SEQ ID NO: 310635 - RNA, 19 nt, Homo sapiens
  misc_RNA (1)...(19): siRNA sense strand
gaucacaucaucauugcua

SEQ ID NO: 310636 - RNA, 19 nt, Homo sapiens
  misc_RNA (1)...(19): siRNA sense strand
gaaagagauucugcuguca

SEQ ID NO: 310637 - RNA, 19 nt, Homo sapiens
  misc_RNA (1)...(19): siRNA sense strand
gagaugcaucccaguguua

SEQ ID NO: 310638 - RNA, 19 nt, Homo sapiens
  misc_RNA (1)...(19): siRNA sense strand
gaauauggaaucacaagug

SEQ ID NO: 310639 - RNA, 19 nt, Homo sapiens
  misc_RNA (1)...(19): siRNA sense strand
ccgcaugacuggaggaaga

SEQ ID NO: 310640 - RNA, 19 nt, Homo sapiens
  misc_RNA (1)...(19): siRNA sense strand
gaaggaauccccuggaaaa

SEQ ID NO: 310641 - RNA, 19 nt, Homo sapiens
  misc_RNA (1)...(19): siRNA sense strand
gcaucccaguguuauguaa

SEQ ID NO: 310642 - RNA, 19 nt, Homo sapiens
  misc_RNA (1)...(19): siRNA sense strand
ggcagaagcuguucaaaau

SEQ ID NO: 310643 - RNA, 19 nt, Homo sapiens
  misc_RNA (1)...(19): siRNA sense strand
gucaaguacuuuaacauca

SEQ ID NO: 310644 - RNA, 19 nt, Homo sapiens
  misc_RNA (1)...(19): siRNA sense strand
cgagaugcaucccaguguu

SEQ ID NO: 310645 - RNA, 19 nt, Homo sapiens
  misc_RNA (1)...(19): siRNA sense strand
ggaggacacgggcaccuuu

SEQ ID NO: 310646 - RNA, 19 nt, Homo sapiens
  misc_RNA (1)...(19): siRNA sense strand
ccaguguuauguaaagaug

SEQ ID NO: 310647 - RNA, 19 nt, Homo sapiens
  misc_RNA (1)...(19): siRNA sense strand
gaaguuacucaaggauuug

SEQ ID NO: 310648 - RNA, 19 nt, Homo sapiens
  misc_RNA (1)...(19): siRNA sense strand
cacaugcucugaggaggua

SEQ ID NO: 310649 - RNA, 19 nt, Homo sapiens
  misc_RNA (1)...(19): siRNA sense strand
caggucagcgggacuauga

SEQ ID NO: 310650 - RNA, 19 nt, Homo sapiens
  misc_RNA (1)...(19): siRNA sense strand
uagagcacauggcaucuca

SEQ ID NO: 310651 - RNA, 19 nt, Homo sapiens
  misc_RNA (1)...(19): siRNA sense strand
ucuaucacgcccauuauaa

SEQ ID NO: 310652 - RNA, 19 nt, Homo sapiens
  misc_RNA (1)...(19): siRNA sense strand
ugggaggccugauccaaga

SEQ ID NO: 310653 - RNA, 19 nt, Homo sapiens
  misc_RNA (1)...(19): siRNA sense strand
ggagaaggcugggguagau

SEQ ID NO: 310654 - RNA, 19 nt, Homo sapiens
  misc_RNA (1)...(19): siRNA sense strand
gaagucugaauuuggagaa

SEQ ID NO: 310655 - RNA, 19 nt, Homo sapiens
  misc_RNA (1)...(19): siRNA sense strand
gauggacuacgacaauguu

SEQ ID NO: 310656 - RNA, 19 nt, Homo sapiens
  misc_RNA (1)...(19): siRNA sense strand
cagaagcuguucaaaauca

SEQ ID NO: 310657 - RNA, 19 nt, Homo sapiens
  misc_RNA (1)...(19): siRNA sense strand
gacaggcugcugaggguaa

SEQ ID NO: 310658 - RNA, 19 nt, Homo sapiens
  misc_RNA (1)...(19): siRNA sense strand
caaaggugggaaagagauu

SEQ ID NO: 310659 - RNA, 19 nt, Homo sapiens
  misc_RNA (1)...(19): siRNA sense strand
gcgaaguuacucaaggauu

SEQ ID NO: 310660 - RNA, 19 nt, Homo sapiens
  misc_RNA (1)...(19): siRNA sense strand
gccgaucacaucaucauug

SEQ ID NO: 310661 - RNA, 19 nt, Homo sapiens
  misc_RNA (1)...(19): siRNA sense strand
caacgcaggcgaaguuacu

SEQ ID NO: 310662 - RNA, 19 nt, Homo sapiens
  misc_RNA (1)...(19): siRNA sense strand
ggagcauguugaggucuau

SEQ ID NO: 310663 - RNA, 19 nt, Homo sapiens
  misc_RNA (1)...(19): siRNA sense strand
cuaucacgcccauuauaaa

SEQ ID NO: 310664 - RNA, 19 nt, Homo sapiens
  misc_RNA (1)...(19): siRNA sense strand
cacgguggcuggacgagau

SEQ ID NO: 310665 - RNA, 19 nt, Homo sapiens
  misc_RNA (1)...(19): siRNA sense strand
gcucugaggagguagucaa

SEQ ID NO: 310666 - RNA, 19 nt, Homo sapiens
  misc_RNA (1)...(19): siRNA sense strand
gauggcagaagcuguucaa

SEQ ID NO: 310667 - RNA, 19 nt, Homo sapiens
  misc_RNA (1)...(19): siRNA sense strand
ucacgcccauuauaaacca

SEQ ID NO: 310668 - RNA, 19 nt, Homo sapiens
  misc_RNA (1)...(19): siRNA sense strand
cagaucugauggacuacga

SEQ ID NO: 310669 - RNA, 19 nt, Homo sapiens
  misc_RNA (1)...(19): siRNA sense strand
cuuggaauauggaaucaca

SEQ ID NO: 310670 - RNA, 19 nt, Homo sapiens
  misc_RNA (1)...(19): siRNA sense strand
ccaaaggugggaaagagau

SEQ ID NO: 310671 - RNA, 19 nt, Homo sapiens
  misc_RNA (1)...(19): siRNA sense strand
ggaauauggaaucacaagu

SEQ ID NO: 310672 - RNA, 19 nt, Homo sapiens
  misc_RNA (1)...(19): siRNA sense strand
aggcgaaguuacucaagga

SEQ ID NO: 310673 - RNA, 19 nt, Homo sapiens
  misc_RNA (1)...(19): siRNA sense strand
gggcuggacaccaccauca

SEQ ID NO: 310674 - RNA, 19 nt, Homo sapiens
  misc_RNA (1)...(19): siRNA sense strand
gaggacacgggcaccuuug

SEQ ID NO: 310675 - RNA, 19 nt, Homo sapiens
  misc_RNA (1)...(19): siRNA sense strand
gucuaucacgcccauuaua

SEQ ID NO: 310676 - RNA, 19 nt, Homo sapiens
  misc_RNA (1)...(19): siRNA sense strand
ccacaucuacgccauuggu

SEQ ID NO: 310677 - RNA, 19 nt, Homo sapiens
  misc_RNA (1)...(19): siRNA sense strand
ggacagaaaagucaaguac

SEQ ID NO: 310678 - RNA, 19 nt, Homo sapiens
  misc_RNA (1)...(19): siRNA sense strand
ggucuaucacgcccauuau

SEQ ID NO: 310679 - RNA, 19 nt, Homo sapiens
  misc_RNA (1)...(19): siRNA sense strand
aaaaucacgugaaauccuu

SEQ ID NO: 310680 - RNA, 19 nt, Homo sapiens
  misc_RNA (1)...(19): siRNA sense strand
cacgugaaauccuugaacu

SEQ ID NO: 310681 - RNA, 19 nt, Homo sapiens
  misc_RNA (1)...(19): siRNA sense strand
aggagcauguugaggucua

SEQ ID NO: 310682 - RNA, 19 nt, Homo sapiens
  misc_RNA (1)...(19): siRNA sense strand
ggacuacguggaaccuucu

SEQ ID NO: 310683 - RNA, 19 nt, Homo sapiens
  misc_RNA (1)...(19): siRNA sense strand
gccaaaggugggaaagaga

SEQ ID NO: 310684 - RNA, 19 nt, Homo sapiens
  misc_RNA (1)...(19): siRNA sense strand
ugccaaaggugggaaagag

SEQ ID NO: 310685 - RNA, 19 nt, Homo sapiens
  misc_RNA (1)...(19): siRNA sense strand
uguccuccauggucauaga

SEQ ID NO: 310686 - RNA, 19 nt, Homo sapiens
  misc_RNA (1)...(19): siRNA sense strand
gcuggacaccaccaucaug

SEQ ID NO: 310687 - RNA, 19 nt, Homo sapiens
  misc_RNA (1)...(19): siRNA sense strand
ccgaucacaucaucauugc

SEQ ID NO: 310688 - RNA, 19 nt, Homo sapiens
  misc_RNA (1)...(19): siRNA sense strand
gucagccgaucacaucauc

SEQ ID NO: 310689 - RNA, 19 nt, Homo sapiens
  misc_RNA (1)...(19): siRNA sense strand
ggucagcgggacuaugauc

SEQ ID NO: 310690 - RNA, 19 nt, Homo sapiens
  misc_RNA (1)...(19): siRNA sense strand
ucugauggacuacgacaau

SEQ ID NO: 310691 - RNA, 19 nt, Homo sapiens
  misc_RNA (1)...(19): siRNA sense strand
cgaaguuacucaaggauuu

SEQ ID NO: 310692 - RNA, 19 nt, Homo sapiens
  misc_RNA (1)...(19): siRNA sense strand
gaagauggcagaagcuguu

SEQ ID NO: 310693 - RNA, 19 nt, Homo sapiens
  misc_RNA (1)...(19): siRNA sense strand
gaucacaucaucauugcua

SEQ ID NO: 310694 - RNA, 19 nt, Homo sapiens
  misc_RNA (1)...(19): siRNA sense strand
gaaagagauucugcuguca

SEQ ID NO: 310695 - RNA, 19 nt, Homo sapiens
  misc_RNA (1)...(19): siRNA sense strand
gagaugcaucccaguguua

SEQ ID NO: 310696 - RNA, 19 nt, Homo sapiens
  misc_RNA (1)...(19): siRNA sense strand
gaauauggaaucacaagug

SEQ ID NO: 310697 - RNA, 19 nt, Homo sapiens
  misc_RNA (1)...(19): siRNA sense strand
ccgcaugacuggaggaaga

SEQ ID NO: 310698 - RNA, 19 nt, Homo sapiens
  misc_RNA (1)...(19): siRNA sense strand
gaaggaauccccuggaaaa

SEQ ID NO: 310699 - RNA, 19 nt, Homo sapiens
  misc_RNA (1)...(19): siRNA sense strand
gcaucccaguguuauguaa

SEQ ID NO: 310700 - RNA, 19 nt, Homo sapiens
  misc_RNA (1)...(19): siRNA sense strand
ggcagaagcuguucaaaau

SEQ ID NO: 310701 - RNA, 19 nt, Homo sapiens
  misc_RNA (1)...(19): siRNA sense strand
gucaaguacuuuaacauca

SEQ ID NO: 310702 - RNA, 19 nt, Homo sapiens
  misc_RNA (1)...(19): siRNA sense strand
cgagaugcaucccaguguu

SEQ ID NO: 310703 - RNA, 19 nt, Homo sapiens
  misc_RNA (1)...(19): siRNA sense strand
ggaggacacgggcaccuuu

SEQ ID NO: 310704 - RNA, 19 nt, Homo sapiens
  misc_RNA (1)...(19): siRNA sense strand
ccaguguuauguaaagaug

SEQ ID NO: 310705 - RNA, 19 nt, Homo sapiens
  misc_RNA (1)...(19): siRNA sense strand
gaaguuacucaaggauuug

SEQ ID NO: 310706 - RNA, 19 nt, Homo sapiens
  misc_RNA (1)...(19): siRNA sense strand
cacaugcucugaggaggua

SEQ ID NO: 310707 - RNA, 19 nt, Homo sapiens
  misc_RNA (1)...(19): siRNA sense strand
uagagcacauggcaucuca

SEQ ID NO: 310708 - RNA, 19 nt, Homo sapiens
  misc_RNA (1)...(19): siRNA sense strand
ucuaucacgcccauuauaa

SEQ ID NO: 310709 - RNA, 19 nt, Homo sapiens
  misc_RNA (1)...(19): siRNA sense strand
gaagucugaauuuggagaa

SEQ ID NO: 310710 - RNA, 19 nt, Homo sapiens
  misc_RNA (1)...(19): siRNA sense strand
ugggaggccugauccaaga

SEQ ID NO: 310711 - RNA, 19 nt, Homo sapiens
  misc_RNA (1)...(19): siRNA sense strand
ggagaaggcugggguagau

SEQ ID NO: 310712 - RNA, 19 nt, Homo sapiens
  misc_RNA (1)...(19): siRNA sense strand
gauggacuacgacaauguu

SEQ ID NO: 310713 - RNA, 19 nt, Homo sapiens
  misc_RNA (1)...(19): siRNA sense strand
cagaagcuguucaaaauca

SEQ ID NO: 310714 - RNA, 19 nt, Homo sapiens
  misc_RNA (1)...(19): siRNA sense strand
gacaggcugcugaggguaa

SEQ ID NO: 310715 - RNA, 19 nt, Homo sapiens
  misc_RNA (1)...(19): siRNA sense strand
caaaggugggaaagagauu

SEQ ID NO: 310716 - RNA, 19 nt, Homo sapiens
  misc_RNA (1)...(19): siRNA sense strand
gcgaaguuacucaaggauu

SEQ ID NO: 310717 - RNA, 19 nt, Homo sapiens
  misc_RNA (1)...(19): siRNA sense strand
gccgaucacaucaucauug

SEQ ID NO: 310718 - RNA, 19 nt, Homo sapiens
  misc_RNA (1)...(19): siRNA sense strand
caacgcaggcgaaguuacu

SEQ ID NO: 310719 - RNA, 19 nt, Homo sapiens
  misc_RNA (1)...(19): siRNA sense strand
ggagcauguugaggucuau

SEQ ID NO: 310720 - RNA, 19 nt, Homo sapiens
  misc_RNA (1)...(19): siRNA sense strand
cuaucacgcccauuauaaa

SEQ ID NO: 310721 - RNA, 19 nt, Homo sapiens
  misc_RNA (1)...(19): siRNA sense strand
cacgguggcuggacgagau

SEQ ID NO: 310722 - RNA, 19 nt, Homo sapiens
  misc_RNA (1)...(19): siRNA sense strand
gcucugaggagguagucaa

SEQ ID NO: 310723 - RNA, 19 nt, Homo sapiens
  misc_RNA (1)...(19): siRNA sense strand
ccaaaggugggaaagagau

SEQ ID NO: 310724 - RNA, 19 nt, Homo sapiens
  misc_RNA (1)...(19): siRNA sense strand
ucacgcccauuauaaacca

SEQ ID NO: 310725 - RNA, 19 nt, Homo sapiens
  misc_RNA (1)...(19): siRNA sense strand
cagaucugauggacuacga

SEQ ID NO: 310726 - RNA, 19 nt, Homo sapiens
  misc_RNA (1)...(19): siRNA sense strand
gauggcagaagcuguucaa

SEQ ID NO: 310727 - RNA, 19 nt, Homo sapiens
  misc_RNA (1)...(19): siRNA sense strand
cuuggaauauggaaucaca

SEQ ID NO: 310728 - RNA, 19 nt, Homo sapiens
  misc_RNA (1)...(19): siRNA sense strand
ggaauauggaaucacaagu

SEQ ID NO: 310729 - RNA, 19 nt, Homo sapiens
  misc_RNA (1)...(19): siRNA sense strand
aggcgaaguuacucaagga

SEQ ID NO: 310730 - RNA, 19 nt, Homo sapiens
  misc_RNA (1)...(19): siRNA sense strand
gggcuggacaccaccauca

SEQ ID NO: 310731 - RNA, 19 nt, Homo sapiens
  misc_RNA (1)...(19): siRNA sense strand
gaggacacgggcaccuuug

SEQ ID NO: 310732 - RNA, 19 nt, Homo sapiens
  misc_RNA (1)...(19): siRNA sense strand
gucuaucacgcccauuaua

SEQ ID NO: 310733 - RNA, 19 nt, Homo sapiens
  misc_RNA (1)...(19): siRNA sense strand
ccacaucuacgccauuggu

SEQ ID NO: 310734 - RNA, 19 nt, Homo sapiens
  misc_RNA (1)...(19): siRNA sense strand
ggacagaaaagucaaguac

SEQ ID NO: 310735 - RNA, 19 nt, Homo sapiens
  misc_RNA (1)...(19): siRNA sense strand
ggucuaucacgcccauuau

SEQ ID NO: 310736 - RNA, 19 nt, Homo sapiens
  misc_RNA (1)...(19): siRNA sense strand
aaaaucacgugaaauccuu

SEQ ID NO: 310737 - RNA, 19 nt, Homo sapiens
  misc_RNA (1)...(19): siRNA sense strand
gccaaaggugggaaagaga

SEQ ID NO: 310738 - RNA, 19 nt, Homo sapiens
  misc_RNA (1)...(19): siRNA sense strand
cacgugaaauccuugaacu

SEQ ID NO: 310739 - RNA, 19 nt, Homo sapiens
  misc_RNA (1)...(19): siRNA sense strand
aggagcauguugaggucua

SEQ ID NO: 310740 - RNA, 19 nt, Homo sapiens
  misc_RNA (1)...(19): siRNA sense strand
ugccaaaggugggaaagag

SEQ ID NO: 310741 - RNA, 19 nt, Homo sapiens
  misc_RNA (1)...(19): siRNA sense strand
uguccuccauggucauaga

SEQ ID NO: 310742 - RNA, 19 nt, Homo sapiens
  misc_RNA (1)...(19): siRNA sense strand
gcuggacaccaccaucaug

SEQ ID NO: 310743 - RNA, 19 nt, Homo sapiens
  misc_RNA (1)...(19): siRNA sense strand
ccgaucacaucaucauugc

SEQ ID NO: 310744 - RNA, 19 nt, Homo sapiens
  misc_RNA (1)...(19): siRNA sense strand
gucagccgaucacaucauc

SEQ ID NO: 310745 - RNA, 19 nt, Homo sapiens
  misc_RNA (1)...(19): siRNA sense strand
ucugauggacuacgacaau

SEQ ID NO: 310746 - RNA, 19 nt, Homo sapiens
  misc_RNA (1)...(19): siRNA sense strand
cgaaguuacucaaggauuu

SEQ ID NO: 310747 - RNA, 19 nt, Homo sapiens
  misc_RNA (1)...(19): siRNA sense strand
gaagauggcagaagcuguu

SEQ ID NO: 310748 - RNA, 19 nt, Homo sapiens
  misc_RNA (1)...(19): siRNA sense strand
gaucacaucaucauugcua

SEQ ID NO: 310749 - RNA, 19 nt, Homo sapiens
  misc_RNA (1)...(19): siRNA sense strand
gaaagagauucugcuguca

SEQ ID NO: 310750 - RNA, 19 nt, Homo sapiens
  misc_RNA (1)...(19): siRNA sense strand
gagaugcaucccaguguua

SEQ ID NO: 310751 - RNA, 19 nt, Homo sapiens
  misc_RNA (1)...(19): siRNA sense strand
gaauauggaaucacaagug

SEQ ID NO: 310752 - RNA, 19 nt, Homo sapiens
  misc_RNA (1)...(19): siRNA sense strand
ccgcaugacuggaggaaga

SEQ ID NO: 310753 - RNA, 19 nt, Homo sapiens
  misc_RNA (1)...(19): siRNA sense strand
gaaggaauccccuggaaaa

SEQ ID NO: 310754 - RNA, 19 nt, Homo sapiens
  misc_RNA (1)...(19): siRNA sense strand
gcaucccaguguuauguaa

SEQ ID NO: 310755 - RNA, 19 nt, Homo sapiens
  misc_RNA (1)...(19): siRNA sense strand
ggcagaagcuguucaaaau

SEQ ID NO: 310756 - RNA, 19 nt, Homo sapiens
  misc_RNA (1)...(19): siRNA sense strand
gucaaguacuuuaacauca

SEQ ID NO: 310757 - RNA, 19 nt, Homo sapiens
  misc_RNA (1)...(19): siRNA sense strand
cgagaugcaucccaguguu

SEQ ID NO: 310758 - RNA, 19 nt, Homo sapiens
  misc_RNA (1)...(19): siRNA sense strand
ggaggacacgggcaccuuu

SEQ ID NO: 310759 - RNA, 19 nt, Homo sapiens
  misc_RNA (1)...(19): siRNA sense strand
ccaguguuauguaaagaug

SEQ ID NO: 310760 - RNA, 19 nt, Homo sapiens
  misc_RNA (1)...(19): siRNA sense strand
gaaguuacucaaggauuug

SEQ ID NO: 310761 - RNA, 19 nt, Homo sapiens
  misc_RNA (1)...(19): siRNA sense strand
cacaugcucugaggaggua

SEQ ID NO: 310762 - RNA, 19 nt, Homo sapiens
  misc_RNA (1)...(19): siRNA sense strand
caggucagcgggacuauga

SEQ ID NO: 310763 - RNA, 19 nt, Homo sapiens
  misc_RNA (1)...(19): siRNA sense strand
uagagcacauggcaucuca

SEQ ID NO: 310764 - RNA, 19 nt, Homo sapiens
  misc_RNA (1)...(19): siRNA sense strand
ucuaucacgcccauuauaa

SEQ ID NO: 310765 - RNA, 19 nt, Homo sapiens
  misc_RNA (1)...(19): siRNA sense strand
ugggaggccugauccaaga

SEQ ID NO: 310766 - RNA, 19 nt, Homo sapiens
  misc_RNA (1)...(19): siRNA sense strand
ggagaaggcugggguagau

SEQ ID NO: 310767 - RNA, 19 nt, Homo sapiens
  misc_RNA (1)...(19): siRNA sense strand
gaagucugaauuuggagaa

SEQ ID NO: 310768 - RNA, 19 nt, Homo sapiens
  misc_RNA (1)...(19): siRNA sense strand
gauggacuacgacaauguu

SEQ ID NO: 310769 - RNA, 19 nt, Homo sapiens
  misc_RNA (1)...(19): siRNA sense strand
cagaagcuguucaaaauca

SEQ ID NO: 310770 - RNA, 19 nt, Homo sapiens
  misc_RNA (1)...(19): siRNA sense strand
gacaggcugcugaggguaa

SEQ ID NO: 310771 - RNA, 19 nt, Homo sapiens
  misc_RNA (1)...(19): siRNA sense strand
caaaggugggaaagagauu

SEQ ID NO: 310772 - RNA, 19 nt, Homo sapiens
  misc_RNA (1)...(19): siRNA sense strand
gcgaaguuacucaaggauu

SEQ ID NO: 310773 - RNA, 19 nt, Homo sapiens
  misc_RNA (1)...(19): siRNA sense strand
gccgaucacaucaucauug

SEQ ID NO: 310774 - RNA, 19 nt, Homo sapiens
  misc_RNA (1)...(19): siRNA sense strand
caacgcaggcgaaguuacu

SEQ ID NO: 310775 - RNA, 19 nt, Homo sapiens
  misc_RNA (1)...(19): siRNA sense strand
ggagcauguugaggucuau

SEQ ID NO: 310776 - RNA, 19 nt, Homo sapiens
  misc_RNA (1)...(19): siRNA sense strand
cuaucacgcccauuauaaa

SEQ ID NO: 310777 - RNA, 19 nt, Homo sapiens
  misc_RNA (1)...(19): siRNA sense strand
cacgguggcuggacgagau

SEQ ID NO: 310778 - RNA, 19 nt, Homo sapiens
  misc_RNA (1)...(19): siRNA sense strand
gcucugaggagguagucaa

SEQ ID NO: 310779 - RNA, 19 nt, Homo sapiens
  misc_RNA (1)...(19): siRNA sense strand
gauggcagaagcuguucaa

SEQ ID NO: 310780 - RNA, 19 nt, Homo sapiens
  misc_RNA (1)...(19): siRNA sense strand
ucacgcccauuauaaacca

SEQ ID NO: 310781 - RNA, 19 nt, Homo sapiens
  misc_RNA (1)...(19): siRNA sense strand
cagaucugauggacuacga

SEQ ID NO: 310782 - RNA, 19 nt, Homo sapiens
  misc_RNA (1)...(19): siRNA sense strand
cuuggaauauggaaucaca

SEQ ID NO: 310783 - RNA, 19 nt, Homo sapiens
  misc_RNA (1)...(19): siRNA sense strand
ccaaaggugggaaagagau

SEQ ID NO: 310784 - RNA, 19 nt, Homo sapiens
  misc_RNA (1)...(19): siRNA sense strand
ggaauauggaaucacaagu

SEQ ID NO: 310785 - RNA, 19 nt, Homo sapiens
  misc_RNA (1)...(19): siRNA sense strand
aggcgaaguuacucaagga

SEQ ID NO: 310786 - RNA, 19 nt, Homo sapiens
  misc_RNA (1)...(19): siRNA sense strand
gggcuggacaccaccauca

SEQ ID NO: 310787 - RNA, 19 nt, Homo sapiens
  misc_RNA (1)...(19): siRNA sense strand
gaggacacgggcaccuuug

SEQ ID NO: 310788 - RNA, 19 nt, Homo sapiens
  misc_RNA (1)...(19): siRNA sense strand
gucuaucacgcccauuaua

SEQ ID NO: 310789 - RNA, 19 nt, Homo sapiens
  misc_RNA (1)...(19): siRNA sense strand
ccacaucuacgccauuggu

SEQ ID NO: 310790 - RNA, 19 nt, Homo sapiens
  misc_RNA (1)...(19): siRNA sense strand
ggacagaaaagucaaguac

SEQ ID NO: 310791 - RNA, 19 nt, Homo sapiens
  misc_RNA (1)...(19): siRNA sense strand
ggucuaucacgcccauuau

SEQ ID NO: 310792 - RNA, 19 nt, Homo sapiens
  misc_RNA (1)...(19): siRNA sense strand
aaaaucacgugaaauccuu

SEQ ID NO: 310793 - RNA, 19 nt, Homo sapiens
  misc_RNA (1)...(19): siRNA sense strand
cacgugaaauccuugaacu

SEQ ID NO: 310794 - RNA, 19 nt, Homo sapiens
  misc_RNA (1)...(19): siRNA sense strand
aggagcauguugaggucua

SEQ ID NO: 310795 - RNA, 19 nt, Homo sapiens
  misc_RNA (1)...(19): siRNA sense strand
ggacuacguggaaccuucu

SEQ ID NO: 310796 - RNA, 19 nt, Homo sapiens
  misc_RNA (1)...(19): siRNA sense strand
gccaaaggugggaaagaga

SEQ ID NO: 310797 - RNA, 19 nt, Homo sapiens
  misc_RNA (1)...(19): siRNA sense strand
ugccaaaggugggaaagag

SEQ ID NO: 310798 - RNA, 19 nt, Homo sapiens
  misc_RNA (1)...(19): siRNA sense strand
uguccuccauggucauaga

SEQ ID NO: 310799 - RNA, 19 nt, Homo sapiens
  misc_RNA (1)...(19): siRNA sense strand
gcuggacaccaccaucaug

SEQ ID NO: 310800 - RNA, 19 nt, Homo sapiens
  misc_RNA (1)...(19): siRNA sense strand
ccgaucacaucaucauugc

SEQ ID NO: 310801 - RNA, 19 nt, Homo sapiens
  misc_RNA (1)...(19): siRNA sense strand
gucagccgaucacaucauc

SEQ ID NO: 310802 - RNA, 19 nt, Homo sapiens
  misc_RNA (1)...(19): siRNA sense strand
ggucagcgggacuaugauc

SEQ ID NO: 310803 - RNA, 19 nt, Homo sapiens
  misc_RNA (1)...(19): siRNA sense strand
ucugauggacuacgacaau

SEQ ID NO: 310804 - RNA, 19 nt, Homo sapiens
  misc_RNA (1)...(19): siRNA sense strand
gaucacaucugucaaauua

SEQ ID NO: 310805 - RNA, 19 nt, Homo sapiens
  misc_RNA (1)...(19): siRNA sense strand
gaacguggcucucaaaguu

SEQ ID NO: 310806 - RNA, 19 nt, Homo sapiens
  misc_RNA (1)...(19): siRNA sense strand
gaaaggaaaucgacacuga

SEQ ID NO: 310807 - RNA, 19 nt, Homo sapiens
  misc_RNA (1)...(19): siRNA sense strand
gaagagaucuguucagugu

SEQ ID NO: 310808 - RNA, 19 nt, Homo sapiens
  misc_RNA (1)...(19): siRNA sense strand
gcaugaagcugccagguua

SEQ ID NO: 310809 - RNA, 19 nt, Homo sapiens
  misc_RNA (1)...(19): siRNA sense strand
gaacucaccuucugcuuug

SEQ ID NO: 310810 - RNA, 19 nt, Homo sapiens
  misc_RNA (1)...(19): siRNA sense strand
gaagaaaucaugcaagaaa

SEQ ID NO: 310811 - RNA, 19 nt, Homo sapiens
  misc_RNA (1)...(19): siRNA sense strand
ggugguagcucagcaaaua

SEQ ID NO: 310812 - RNA, 19 nt, Homo sapiens
  misc_RNA (1)...(19): siRNA sense strand
gcaaauaaaugcccaaagg

SEQ ID NO: 310813 - RNA, 19 nt, Homo sapiens
  misc_RNA (1)...(19): siRNA sense strand
aaagaaagaugaagaggaa

SEQ ID NO: 310814 - RNA, 19 nt, Homo sapiens
  misc_RNA (1)...(19): siRNA sense strand
aaagaagacuccaaagaaa

SEQ ID NO: 310815 - RNA, 19 nt, Homo sapiens
  misc_RNA (1)...(19): siRNA sense strand
gaagauggccuuaaauauc

SEQ ID NO: 310816 - RNA, 19 nt, Homo sapiens
  misc_RNA (1)...(19): siRNA sense strand
gcacuuauuugacuucuca

SEQ ID NO: 310817 - RNA, 19 nt, Homo sapiens
  misc_RNA (1)...(19): siRNA sense strand
caauaugccuccaacaauu

SEQ ID NO: 310818 - RNA, 19 nt, Homo sapiens
  misc_RNA (1)...(19): siRNA sense strand
ccaaaggccauguuauuua

SEQ ID NO: 310819 - RNA, 19 nt, Homo sapiens
  misc_RNA (1)...(19): siRNA sense strand
gaaaggagaacuaguuaug

SEQ ID NO: 310820 - RNA, 19 nt, Homo sapiens
  misc_RNA (1)...(19): siRNA sense strand
caaaggccauguuauuuau

SEQ ID NO: 310821 - RNA, 19 nt, Homo sapiens
  misc_RNA (1)...(19): siRNA sense strand
gacaagaacagauagauuu

SEQ ID NO: 310822 - RNA, 19 nt, Homo sapiens
  misc_RNA (1)...(19): siRNA sense strand
gacagacaaucuuaaauga

SEQ ID NO: 310823 - RNA, 19 nt, Homo sapiens
  misc_RNA (1)...(19): siRNA sense strand
gcacacggccgauaauuga

SEQ ID NO: 310824 - RNA, 19 nt, Homo sapiens
  misc_RNA (1)...(19): siRNA sense strand
ggaaggaaauauaaagcaa

SEQ ID NO: 310825 - RNA, 19 nt, Homo sapiens
  misc_RNA (1)...(19): siRNA sense strand
gcagagacaagaacagaua

SEQ ID NO: 310826 - RNA, 19 nt, Homo sapiens
  misc_RNA (1)...(19): siRNA sense strand
gaacaccaggcacuuauuu

SEQ ID NO: 310827 - RNA, 19 nt, Homo sapiens
  misc_RNA (1)...(19): siRNA sense strand
gaacggcccucuucagucu

SEQ ID NO: 310828 - RNA, 19 nt, Homo sapiens
  misc_RNA (1)...(19): siRNA sense strand
gcaugaagcucccaaagca

SEQ ID NO: 310829 - RNA, 19 nt, Homo sapiens
  misc_RNA (1)...(19): siRNA sense strand
gcacaccaauaaaguuuga

SEQ ID NO: 310830 - RNA, 19 nt, Homo sapiens
  misc_RNA (1)...(19): siRNA sense strand
caacugagcccugggauuu

SEQ ID NO: 310831 - RNA, 19 nt, Homo sapiens
  misc_RNA (1)...(19): siRNA sense strand
uaagaaggauccagcauuc

SEQ ID NO: 310832 - RNA, 19 nt, Homo sapiens
  misc_RNA (1)...(19): siRNA sense strand
gggcaaggcuacuuaggaa

SEQ ID NO: 310833 - RNA, 19 nt, Homo sapiens
  misc_RNA (1)...(19): siRNA sense strand
gaacuugcguccagaugug

SEQ ID NO: 310834 - RNA, 19 nt, Homo sapiens
  misc_RNA (1)...(19): siRNA sense strand
ggaaaguccucccauacga

SEQ ID NO: 310835 - RNA, 19 nt, Homo sapiens
  misc_RNA (1)...(19): siRNA sense strand
gcacagaacaaagucguua

SEQ ID NO: 310836 - RNA, 19 nt, Homo sapiens
  misc_RNA (1)...(19): siRNA sense strand
gaagacagcaguccugaga

SEQ ID NO: 310837 - RNA, 19 nt, Homo sapiens
  misc_RNA (1)...(19): siRNA sense strand
gaaagagacuuggauagag

SEQ ID NO: 310838 - RNA, 19 nt, Homo sapiens
  misc_RNA (1)...(19): siRNA sense strand
caagaaaggagaacuaguu

SEQ ID NO: 310839 - RNA, 19 nt, Homo sapiens
  misc_RNA (1)...(19): siRNA sense strand
ucaagggucucuccagaaa

SEQ ID NO: 310840 - RNA, 19 nt, Homo sapiens
  misc_RNA (1)...(19): siRNA sense strand
gagaagagaucuguucagu

SEQ ID NO: 310841 - RNA, 19 nt, Homo sapiens
  misc_RNA (1)...(19): siRNA sense strand
gaagugagggugccagaaa

SEQ ID NO: 310842 - RNA, 19 nt, Homo sapiens
  misc_RNA (1)...(19): siRNA sense strand
gauaggcaguuuaugaaug

SEQ ID NO: 310843 - RNA, 19 nt, Homo sapiens
  misc_RNA (1)...(19): siRNA sense strand
guauaaagauaggcaguuu

SEQ ID NO: 310844 - RNA, 19 nt, Homo sapiens
  misc_RNA (1)...(19): siRNA sense strand
gaggaaagcuaaagaaagc

SEQ ID NO: 310845 - RNA, 19 nt, Homo sapiens
  misc_RNA (1)...(19): siRNA sense strand
cagcagauccuuaaacuga

SEQ ID NO: 310846 - RNA, 19 nt, Homo sapiens
  misc_RNA (1)...(19): siRNA sense strand
gcaggagaauaaugagaaa

SEQ ID NO: 310847 - RNA, 19 nt, Homo sapiens
  misc_RNA (1)...(19): siRNA sense strand
aagaacagcucaugaaauc

SEQ ID NO: 310848 - RNA, 19 nt, Homo sapiens
  misc_RNA (1)...(19): siRNA sense strand
agaggaagcugcauccaaa

SEQ ID NO: 310849 - RNA, 19 nt, Homo sapiens
  misc_RNA (1)...(19): siRNA sense strand
caacagaggcuuuggugaa

SEQ ID NO: 310850 - RNA, 19 nt, Homo sapiens
  misc_RNA (1)...(19): siRNA sense strand
gaagaguguuccugauugu

SEQ ID NO: 310851 - RNA, 19 nt, Homo sapiens
  misc_RNA (1)...(19): siRNA sense strand
gaacaaagacgagucaagu

SEQ ID NO: 310852 - RNA, 19 nt, Homo sapiens
  misc_RNA (1)...(19): siRNA sense strand
gcagauccuuaaacugaaa

SEQ ID NO: 310853 - RNA, 19 nt, Homo sapiens
  misc_RNA (1)...(19): siRNA sense strand
ggacagaaucacuuauauu

SEQ ID NO: 310854 - RNA, 19 nt, Homo sapiens
  misc_RNA (1)...(19): siRNA sense strand
caguacaucucccuccuua

SEQ ID NO: 310855 - RNA, 19 nt, Homo sapiens
  misc_RNA (1)...(19): siRNA sense strand
caaaccaggugaugaggaa

SEQ ID NO: 310856 - RNA, 19 nt, Homo sapiens
  misc_RNA (1)...(19): siRNA sense strand
ccaagcagcuccucaccaa

SEQ ID NO: 310857 - RNA, 19 nt, Homo sapiens
  misc_RNA (1)...(19): siRNA sense strand
gaacggaacggcccucuuc

SEQ ID NO: 310858 - RNA, 19 nt, Homo sapiens
  misc_RNA (1)...(19): siRNA sense strand
acaggaaucugccaaauca

SEQ ID NO: 310859 - RNA, 19 nt, Homo sapiens
  misc_RNA (1)...(19): siRNA sense strand
aaagauaggcaguuuauga

SEQ ID NO: 310860 - RNA, 19 nt, Homo sapiens
  misc_RNA (1)...(19): siRNA sense strand
ggagugagcaugagauuuc

SEQ ID NO: 310861 - RNA, 19 nt, Homo sapiens
  misc_RNA (1)...(19): siRNA sense strand
gagaacagcaagaaagauu

SEQ ID NO: 310862 - RNA, 19 nt, Homo sapiens
  misc_RNA (1)...(19): siRNA sense strand
gccaggaacugagaucuuu

SEQ ID NO: 310863 - RNA, 19 nt, Homo sapiens
  misc_RNA (1)...(19): siRNA sense strand
cucaaagccuucacuguua

SEQ ID NO: 310864 - RNA, 19 nt, Homo sapiens
  misc_RNA (1)...(19): siRNA sense strand
agaagaaacugaggaaaga

SEQ ID NO: 310865 - RNA, 19 nt, Homo sapiens
  misc_RNA (1)...(19): siRNA sense strand
gcaguauuguccaaauuau

SEQ ID NO: 310866 - RNA, 19 nt, Homo sapiens
  misc_RNA (1)...(19): siRNA sense strand
agagaucuguucaguguuu

SEQ ID NO: 310867 - RNA, 19 nt, Homo sapiens
  misc_RNA (1)...(19): siRNA sense strand
gcaucgagcugcuguuauc

SEQ ID NO: 310868 - RNA, 19 nt, Homo sapiens
  misc_RNA (1)...(19): siRNA sense strand
gcuccauccucuccaauuu

SEQ ID NO: 310869 - RNA, 19 nt, Homo sapiens
  misc_RNA (1)...(19): siRNA sense strand
ucaaagccuucacuguuaa

SEQ ID NO: 310870 - RNA, 19 nt, Homo sapiens
  misc_RNA (1)...(19): siRNA sense strand
ucaggaggaugaagauauu

SEQ ID NO: 310871 - RNA, 19 nt, Homo sapiens
  misc_RNA (1)...(19): siRNA sense strand
cagaaggaauuaugggaaa

SEQ ID NO: 310872 - RNA, 19 nt, Homo sapiens
  misc_RNA (1)...(19): siRNA sense strand
gaaaguguauaaagauagg

SEQ ID NO: 310873 - RNA, 19 nt, Homo sapiens
  misc_RNA (1)...(19): siRNA sense strand
aagaagaaaucaugcaaga

SEQ ID NO: 310874 - RNA, 19 nt, Homo sapiens
  misc_RNA (1)...(19): siRNA sense strand
gcagaaacaccgcaguauu

SEQ ID NO: 310875 - RNA, 19 nt, Homo sapiens
  misc_RNA (1)...(19): siRNA sense strand
acagauagauuuggaaugu

SEQ ID NO: 310876 - RNA, 19 nt, Homo sapiens
  misc_RNA (1)...(19): siRNA sense strand
gcaacgagaggaaucauug

SEQ ID NO: 310877 - RNA, 19 nt, Homo sapiens
  misc_RNA (1)...(19): siRNA sense strand
gcccugggauuuaugauga

SEQ ID NO: 310878 - RNA, 19 nt, Homo sapiens
  misc_RNA (1)...(19): siRNA sense strand
gaagaguuaauacagagua

SEQ ID NO: 310879 - RNA, 19 nt, Homo sapiens
  misc_RNA (1)...(19): siRNA sense strand
cuacuugccuucauucuuc

SEQ ID NO: 310880 - RNA, 19 nt, Homo sapiens
  misc_RNA (1)...(19): siRNA sense strand
gaucaucacccggcaaauu

SEQ ID NO: 310881 - RNA, 19 nt, Homo sapiens
  misc_RNA (1)...(19): siRNA sense strand
gaacucaggagaccauguu

SEQ ID NO: 310882 - RNA, 19 nt, Homo sapiens
  misc_RNA (1)...(19): siRNA sense strand
gaacagauagauuuggaau

SEQ ID NO: 310883 - RNA, 19 nt, Homo sapiens
  misc_RNA (1)...(19): siRNA sense strand
caucauacuuggagaggaa

SEQ ID NO: 310884 - RNA, 19 nt, Homo sapiens
  misc_RNA (1)...(19): siRNA sense strand
cagaaacaccgcaguauug

SEQ ID NO: 310885 - RNA, 19 nt, Homo sapiens
  misc_RNA (1)...(19): siRNA sense strand
gaguauggaucguguagau

SEQ ID NO: 310886 - RNA, 19 nt, Homo sapiens
  misc_RNA (1)...(19): siRNA sense strand
aacaacagcuugaagaaga

SEQ ID NO: 310887 - RNA, 19 nt, Homo sapiens
  misc_RNA (1)...(19): siRNA sense strand
ucaaacagcaggaaaucua

SEQ ID NO: 310888 - RNA, 19 nt, Homo sapiens
  misc_RNA (1)...(19): siRNA sense strand
ucacaucugucaaauuauc

SEQ ID NO: 310889 - RNA, 19 nt, Homo sapiens
  misc_RNA (1)...(19): siRNA sense strand
agacagcaguccugagaaa

SEQ ID NO: 310890 - RNA, 19 nt, Homo sapiens
  misc_RNA (1)...(19): siRNA sense strand
gauuuggaauguagaaguu

SEQ ID NO: 310891 - RNA, 19 nt, Homo sapiens
  misc_RNA (1)...(19): siRNA sense strand
gaagaggguucuguuugug

SEQ ID NO: 310892 - RNA, 19 nt, Homo sapiens
  misc_RNA (1)...(19): siRNA sense strand
gagcagaaacaccgcagua

SEQ ID NO: 310893 - RNA, 19 nt, Homo sapiens
  misc_RNA (1)...(19): siRNA sense strand
gcugagggcuucugcagau

SEQ ID NO: 310894 - RNA, 19 nt, Homo sapiens
  misc_RNA (1)...(19): siRNA sense strand
uacauuaccucacaacaga

SEQ ID NO: 310895 - RNA, 19 nt, Homo sapiens
  misc_RNA (1)...(19): siRNA sense strand
gaaaguaucccagcgaagu

SEQ ID NO: 310896 - RNA, 19 nt, Homo sapiens
  misc_RNA (1)...(19): siRNA sense strand
uaacaagucuaccaaucau

SEQ ID NO: 310897 - RNA, 19 nt, Homo sapiens
  misc_RNA (1)...(19): siRNA sense strand
caacaggaaucugccaaau

SEQ ID NO: 310898 - RNA, 19 nt, Homo sapiens
  misc_RNA (1)...(19): siRNA sense strand
ugaagaggguucuguuugu

SEQ ID NO: 310899 - RNA, 19 nt, Homo sapiens
  misc_RNA (1)...(19): siRNA sense strand
aaagugaagcucaauguaa

SEQ ID NO: 310900 - RNA, 19 nt, Homo sapiens
  misc_RNA (1)...(19): siRNA sense strand
uguauugucuggcuccaua

SEQ ID NO: 310901 - RNA, 19 nt, Homo sapiens
  misc_RNA (1)...(19): siRNA sense strand
ccaagucaguaucagcuuu

SEQ ID NO: 310902 - RNA, 19 nt, Homo sapiens
  misc_RNA (1)...(19): siRNA sense strand
gaacuucugauguuacaau

SEQ ID NO: 310903 - RNA, 19 nt, Homo sapiens
  misc_RNA (1)...(19): siRNA sense strand
caaacuaucccguggaaug

SEQ ID NO: 310904 - RNA, 19 nt, Homo sapiens
  misc_RNA (1)...(19): siRNA sense strand
gaacaaucccugugccuua

SEQ ID NO: 310905 - RNA, 19 nt, Homo sapiens
  misc_RNA (1)...(19): siRNA sense strand
aaacugagauggcggauga

SEQ ID NO: 310906 - RNA, 19 nt, Homo sapiens
  misc_RNA (1)...(19): siRNA sense strand
gaaccucacuggaacaauc

SEQ ID NO: 310907 - RNA, 19 nt, Homo sapiens
  misc_RNA (1)...(19): siRNA sense strand
ggucaugauugugguauuu

SEQ ID NO: 310908 - RNA, 19 nt, Homo sapiens
  misc_RNA (1)...(19): siRNA sense strand
ccguuuagaucaagaagua

SEQ ID NO: 310909 - RNA, 19 nt, Homo sapiens
  misc_RNA (1)...(19): siRNA sense strand
ggacacauacccauauaau

SEQ ID NO: 310910 - RNA, 19 nt, Homo sapiens
  misc_RNA (1)...(19): siRNA sense strand
guacaaauacagagaccua

SEQ ID NO: 310911 - RNA, 19 nt, Homo sapiens
  misc_RNA (1)...(19): siRNA sense strand
gaacagaagaagaccugaa

SEQ ID NO: 310912 - RNA, 19 nt, Homo sapiens
  misc_RNA (1)...(19): siRNA sense strand
ccacagcucccuuauacaa

SEQ ID NO: 310913 - RNA, 19 nt, Homo sapiens
  misc_RNA (1)...(19): siRNA sense strand
gugaaacugucaauguuau

SEQ ID NO: 310914 - RNA, 19 nt, Homo sapiens
  misc_RNA (1)...(19): siRNA sense strand
agagaugguuacccguuua

SEQ ID NO: 310915 - RNA, 19 nt, Homo sapiens
  misc_RNA (1)...(19): siRNA sense strand
aaagaaggaugaagaacuc

SEQ ID NO: 310916 - RNA, 19 nt, Homo sapiens
  misc_RNA (1)...(19): siRNA sense strand
acaaugauaucgaugaagu

SEQ ID NO: 310917 - RNA, 19 nt, Homo sapiens
  misc_RNA (1)...(19): siRNA sense strand
agaccuaacuguacgugaa

SEQ ID NO: 310918 - RNA, 19 nt, Homo sapiens
  misc_RNA (1)...(19): siRNA sense strand
ccacaacaaguucucagua

SEQ ID NO: 310919 - RNA, 19 nt, Homo sapiens
  misc_RNA (1)...(19): siRNA sense strand
cuaaugaaccucacuggaa

SEQ ID NO: 310920 - RNA, 19 nt, Homo sapiens
  misc_RNA (1)...(19): siRNA sense strand
gagaugaaccuccagucuu

SEQ ID NO: 310921 - RNA, 19 nt, Homo sapiens
  misc_RNA (1)...(19): siRNA sense strand
gcaaaugggaagauauauc

SEQ ID NO: 310922 - RNA, 19 nt, Homo sapiens
  misc_RNA (1)...(19): siRNA sense strand
gaaguagccgagguugaua

SEQ ID NO: 310923 - RNA, 19 nt, Homo sapiens
  misc_RNA (1)...(19): siRNA sense strand
gaaacgaacagaagaagac

SEQ ID NO: 310924 - RNA, 19 nt, Homo sapiens
  misc_RNA (1)...(19): siRNA sense strand
agaugaaccuccagucuuc

SEQ ID NO: 310925 - RNA, 19 nt, Homo sapiens
  misc_RNA (1)...(19): siRNA sense strand
cgugaaacugucaauguua

SEQ ID NO: 310926 - RNA, 19 nt, Homo sapiens
  misc_RNA (1)...(19): siRNA sense strand
ucccacagcucccuuauac

SEQ ID NO: 310927 - RNA, 19 nt, Homo sapiens
  misc_RNA (1)...(19): siRNA sense strand
auacaaagaucucaaaccu

SEQ ID NO: 310928 - RNA, 19 nt, Homo sapiens
  misc_RNA (1)...(19): siRNA sense strand
agaaaaugguguccaagua

SEQ ID NO: 310929 - RNA, 19 nt, Homo sapiens
  misc_RNA (1)...(19): siRNA sense strand
ugaugcaaaugggaagaua

SEQ ID NO: 310930 - RNA, 19 nt, Homo sapiens
  misc_RNA (1)...(19): siRNA sense strand
aagagaugguuacccguuu

SEQ ID NO: 310931 - RNA, 19 nt, Homo sapiens
  misc_RNA (1)...(19): siRNA sense strand
ugagauggcggaugaagga

SEQ ID NO: 310932 - RNA, 19 nt, Homo sapiens
  misc_RNA (1)...(19): siRNA sense strand
gaaacuggaagagaugguu

SEQ ID NO: 310933 - RNA, 19 nt, Homo sapiens
  misc_RNA (1)...(19): siRNA sense strand
gaagaaaacgcuauugaag

SEQ ID NO: 310934 - RNA, 19 nt, Homo sapiens
  misc_RNA (1)...(19): siRNA sense strand
ccagucuucucucguccua

SEQ ID NO: 310935 - RNA, 19 nt, Homo sapiens
  misc_RNA (1)...(19): siRNA sense strand
aaacuggaagagaugguua

SEQ ID NO: 310936 - RNA, 19 nt, Homo sapiens
  misc_RNA (1)...(19): siRNA sense strand
ggaugaaggaggaaaugga

SEQ ID NO: 310937 - RNA, 19 nt, Homo sapiens
  misc_RNA (1)...(19): siRNA sense strand
agucuucucucguccuauu

SEQ ID NO: 310938 - RNA, 19 nt, Homo sapiens
  misc_RNA (1)...(19): siRNA sense strand
cacaacaaguucucaguac

SEQ ID NO: 310939 - RNA, 19 nt, Homo sapiens
  misc_RNA (1)...(19): siRNA sense strand
cuggacacauacccauaua

SEQ ID NO: 310940 - RNA, 19 nt, Homo sapiens
  misc_RNA (1)...(19): siRNA sense strand
gaugaaggaggaaauggau

SEQ ID NO: 310941 - RNA, 19 nt, Homo sapiens
  misc_RNA (1)...(19): siRNA sense strand
ccaaguacaaauacagaga

SEQ ID NO: 310942 - RNA, 19 nt, Homo sapiens
  misc_RNA (1)...(19): siRNA sense strand
caguagggauggcacaauc

SEQ ID NO: 310943 - RNA, 19 nt, Homo sapiens
  misc_RNA (1)...(19): siRNA sense strand
gaccuaacuguacgugaaa

SEQ ID NO: 310944 - RNA, 19 nt, Homo sapiens
  misc_RNA (1)...(19): siRNA sense strand
uuauucaggucaugauugu

SEQ ID NO: 310945 - RNA, 19 nt, Homo sapiens
  misc_RNA (1)...(19): siRNA sense strand
cauccgagccucucucauc

SEQ ID NO: 310946 - RNA, 19 nt, Homo sapiens
  misc_RNA (1)...(19): siRNA sense strand
ccagggaacuaaugaaccu

SEQ ID NO: 310947 - RNA, 19 nt, Homo sapiens
  misc_RNA (1)...(19): siRNA sense strand
acucaguucugcucuggaa

SEQ ID NO: 310948 - RNA, 19 nt, Homo sapiens
  misc_RNA (1)...(19): siRNA sense strand
gaaggaugaagaacucagu

SEQ ID NO: 310949 - RNA, 19 nt, Homo sapiens
  misc_RNA (1)...(19): siRNA sense strand
acgugaaacugucaauguu

SEQ ID NO: 310950 - RNA, 19 nt, Homo sapiens
  misc_RNA (1)...(19): siRNA sense strand
uaacuguacgugaaacugu

SEQ ID NO: 310951 - RNA, 19 nt, Homo sapiens
  misc_RNA (1)...(19): siRNA sense strand
gaugguuacccguuuagau

SEQ ID NO: 310952 - RNA, 19 nt, Homo sapiens
  misc_RNA (1)...(19): siRNA sense strand
ucaagaaguagccgagguu

SEQ ID NO: 310953 - RNA, 19 nt, Homo sapiens
  misc_RNA (1)...(19): siRNA sense strand
acacauacccauauaaucc

SEQ ID NO: 310954 - RNA, 19 nt, Homo sapiens
  misc_RNA (1)...(19): siRNA sense strand
caccaaauacuuccuacau

SEQ ID NO: 310955 - RNA, 19 nt, Homo sapiens
  misc_RNA (1)...(19): siRNA sense strand
ugugguauuuggagaugaa

SEQ ID NO: 310956 - RNA, 19 nt, Homo sapiens
  misc_RNA (1)...(19): siRNA sense strand
uuccuuaucuacaugaaug

SEQ ID NO: 310957 - RNA, 19 nt, Homo sapiens
  misc_RNA (1)...(19): siRNA sense strand
augcaaaugggaagauaua

SEQ ID NO: 310958 - RNA, 19 nt, Homo sapiens
  misc_RNA (1)...(19): siRNA sense strand
caaucccugugccuuauag

SEQ ID NO: 310959 - RNA, 19 nt, Homo sapiens
  misc_RNA (1)...(19): siRNA sense strand
agaaguagccgagguugau

SEQ ID NO: 310960 - RNA, 19 nt, Homo sapiens
  misc_RNA (1)...(19): siRNA sense strand
gguuacccguuuagaucaa

SEQ ID NO: 310961 - RNA, 19 nt, Homo sapiens
  misc_RNA (1)...(19): siRNA sense strand
uaucuuccuuaucuacaug

SEQ ID NO: 310962 - RNA, 19 nt, Homo sapiens
  misc_RNA (1)...(19): siRNA sense strand
ucaagaaaaugguguccaa

SEQ ID NO: 310963 - RNA, 19 nt, Homo sapiens
  misc_RNA (1)...(19): siRNA sense strand
caaauacagagaccuaacu

SEQ ID NO: 310964 - RNA, 19 nt, Homo sapiens
  misc_RNA (1)...(19): siRNA sense strand
accaaauacuuccuacaug

SEQ ID NO: 310965 - RNA, 19 nt, Homo sapiens
  misc_RNA (1)...(19): siRNA sense strand
aacaaucccugugccuuau

SEQ ID NO: 310966 - RNA, 19 nt, Homo sapiens
  misc_RNA (1)...(19): siRNA sense strand
aacagaagaagaccugaaa

SEQ ID NO: 310967 - RNA, 19 nt, Homo sapiens
  misc_RNA (1)...(19): siRNA sense strand
gacacauacccauauaauc

SEQ ID NO: 310968 - RNA, 19 nt, Homo sapiens
  misc_RNA (1)...(19): siRNA sense strand
gaugcaaaugggaagauau

SEQ ID NO: 310969 - RNA, 19 nt, Homo sapiens
  misc_RNA (1)...(19): siRNA sense strand
cuccauacccauccggaua

SEQ ID NO: 310970 - RNA, 19 nt, Homo sapiens
  misc_RNA (1)...(19): siRNA sense strand
gauccugaaucuguaugca

SEQ ID NO: 310971 - RNA, 19 nt, Homo sapiens
  misc_RNA (1)...(19): siRNA sense strand
uauacaaacagauccugaa

SEQ ID NO: 310972 - RNA, 19 nt, Homo sapiens
  misc_RNA (1)...(19): siRNA sense strand
ugaaacgaacagaagaaga

SEQ ID NO: 310973 - RNA, 19 nt, Homo sapiens
  misc_RNA (1)...(19): siRNA sense strand
uaagccuacuaguucaaug

SEQ ID NO: 310974 - RNA, 19 nt, Homo sapiens
  misc_RNA (1)...(19): siRNA sense strand
cgucuucugucccguaaac

SEQ ID NO: 310975 - RNA, 19 nt, Homo sapiens
  misc_RNA (1)...(19): siRNA sense strand
ccugaagcauguacgucuu

SEQ ID NO: 310976 - RNA, 19 nt, Homo sapiens
  misc_RNA (1)...(19): siRNA sense strand
gaaaaugguguccaaguac

SEQ ID NO: 310977 - RNA, 19 nt, Homo sapiens
  misc_RNA (1)...(19): siRNA sense strand
ucucaucucugcggucagu

SEQ ID NO: 310978 - RNA, 19 nt, Homo sapiens
  misc_RNA (1)...(19): siRNA sense strand
ccugugccuuauagaggua

SEQ ID NO: 310979 - RNA, 19 nt, Homo sapiens
  misc_RNA (1)...(19): siRNA sense strand
aagcauguacgucuucugu

SEQ ID NO: 310980 - RNA, 19 nt, Homo sapiens
  misc_RNA (1)...(19): siRNA sense strand
acagcucccuuauacaaac

SEQ ID NO: 310981 - RNA, 19 nt, Homo sapiens
  misc_RNA (1)...(19): siRNA sense strand
guccauauccugccacaac

SEQ ID NO: 310982 - RNA, 19 nt, Homo sapiens
  misc_RNA (1)...(19): siRNA sense strand
caugccagguggaaucucu

SEQ ID NO: 310983 - RNA, 19 nt, Homo sapiens
  misc_RNA (1)...(19): siRNA sense strand
uacgugaaacugucaaugu

SEQ ID NO: 310984 - RNA, 19 nt, Homo sapiens
  misc_RNA (1)...(19): siRNA sense strand
caaugauaucgaugaaguu

SEQ ID NO: 310985 - RNA, 19 nt, Homo sapiens
  misc_RNA (1)...(19): siRNA sense strand
guacgugaaacugucaaug

SEQ ID NO: 310986 - RNA, 19 nt, Homo sapiens
  misc_RNA (1)...(19): siRNA sense strand
ccgagccucucucaucucu

SEQ ID NO: 310987 - RNA, 19 nt, Homo sapiens
  misc_RNA (1)...(19): siRNA sense strand
uauccugccacaacaaguu

SEQ ID NO: 310988 - RNA, 19 nt, Homo sapiens
  misc_RNA (1)...(19): siRNA sense strand
uguuaagccuacuaguuca

SEQ ID NO: 310989 - RNA, 19 nt, Homo sapiens
  misc_RNA (1)...(19): siRNA sense strand
agaaaacgcuauugaagac

SEQ ID NO: 310990 - RNA, 19 nt, Homo sapiens
  misc_RNA (1)...(19): siRNA sense strand
gagaugguuacccguuuag

SEQ ID NO: 310991 - RNA, 19 nt, Homo sapiens
  misc_RNA (1)...(19): siRNA sense strand
cauccuauccgccauacca

SEQ ID NO: 310992 - RNA, 19 nt, Homo sapiens
  misc_RNA (1)...(19): siRNA sense strand
gaauggagaucaacuauac

SEQ ID NO: 310993 - RNA, 19 nt, Homo sapiens
  misc_RNA (1)...(19): siRNA sense strand
caagagauacgcaacauaa

SEQ ID NO: 310994 - RNA, 19 nt, Homo sapiens
  misc_RNA (1)...(19): siRNA sense strand
caaaaccacugcuaaguua

SEQ ID NO: 310995 - RNA, 19 nt, Homo sapiens
  misc_RNA (1)...(19): siRNA sense strand
gcauagccacucaguauuu

SEQ ID NO: 310996 - RNA, 19 nt, Homo sapiens
  misc_RNA (1)...(19): siRNA sense strand
agaaggagcuagcugaaau

SEQ ID NO: 310997 - RNA, 19 nt, Homo sapiens
  misc_RNA (1)...(19): siRNA sense strand
gaaggagcuagcugaaaua

SEQ ID NO: 310998 - RNA, 19 nt, Homo sapiens
  misc_RNA (1)...(19): siRNA sense strand
caacuggagucccgcuuug

SEQ ID NO: 310999 - RNA, 19 nt, Homo sapiens
  misc_RNA (1)...(19): siRNA sense strand
gacaguggaccaagagaua

SEQ ID NO: 311000 - RNA, 19 nt, Homo sapiens
  misc_RNA (1)...(19): siRNA sense strand
ggagcuagcugaaauaacc

SEQ ID NO: 311001 - RNA, 19 nt, Homo sapiens
  misc_RNA (1)...(19): siRNA sense strand
gcuaaguuauccacuagug

SEQ ID NO: 311002 - RNA, 19 nt, Homo sapiens
  misc_RNA (1)...(19): siRNA sense strand
auaugaaggugguguguuu

SEQ ID NO: 311003 - RNA, 19 nt, Homo sapiens
  misc_RNA (1)...(19): siRNA sense strand
acaccaaacucucuagcaa

SEQ ID NO: 311004 - RNA, 19 nt, Homo sapiens
  misc_RNA (1)...(19): siRNA sense strand
gcaaagguccgaugaugag

SEQ ID NO: 311005 - RNA, 19 nt, Homo sapiens
  misc_RNA (1)...(19): siRNA sense strand
gagaucaacuauacuuggu

SEQ ID NO: 311006 - RNA, 19 nt, Homo sapiens
  misc_RNA (1)...(19): siRNA sense strand
gagcagaacacgacaggau

SEQ ID NO: 311007 - RNA, 19 nt, Homo sapiens
  misc_RNA (1)...(19): siRNA sense strand
aagcauagccacucaguau

SEQ ID NO: 311008 - RNA, 19 nt, Homo sapiens
  misc_RNA (1)...(19): siRNA sense strand
uagcugaaauaacccuuga

SEQ ID NO: 311009 - RNA, 19 nt, Homo sapiens
  misc_RNA (1)...(19): siRNA sense strand
ggacauccuuaaagacaac

SEQ ID NO: 311010 - RNA, 19 nt, Homo sapiens
  misc_RNA (1)...(19): siRNA sense strand
cauagccacucaguauuug

SEQ ID NO: 311011 - RNA, 19 nt, Homo sapiens
  misc_RNA (1)...(19): siRNA sense strand
gaagaacaagaggaaagaa

SEQ ID NO: 311012 - RNA, 19 nt, Homo sapiens
  misc_RNA (1)...(19): siRNA sense strand
gaagcauagccacucagua

SEQ ID NO: 311013 - RNA, 19 nt, Homo sapiens
  misc_RNA (1)...(19): siRNA sense strand
ccuaaaggagauaacauuu

SEQ ID NO: 311014 - RNA, 19 nt, Homo sapiens
  misc_RNA (1)...(19): siRNA sense strand
ugaauggagaucaacuaua

SEQ ID NO: 311015 - RNA, 19 nt, Homo sapiens
  misc_RNA (1)...(19): siRNA sense strand
gcaaaaccacugcuaaguu

SEQ ID NO: 311016 - RNA, 19 nt, Homo sapiens
  misc_RNA (1)...(19): siRNA sense strand
ccaagagauacgcaacaua

SEQ ID NO: 311017 - RNA, 19 nt, Homo sapiens
  misc_RNA (1)...(19): siRNA sense strand
gcagaacacgacaggauag

SEQ ID NO: 311018 - RNA, 19 nt, Homo sapiens
  misc_RNA (1)...(19): siRNA sense strand
guuauccacuagugcuaaa

SEQ ID NO: 311019 - RNA, 19 nt, Homo sapiens
  misc_RNA (1)...(19): siRNA sense strand
gccagacaguggaccaaga

SEQ ID NO: 311020 - RNA, 19 nt, Homo sapiens
  misc_RNA (1)...(19): siRNA sense strand
ggcaaagguccgaugauga

SEQ ID NO: 311021 - RNA, 19 nt, Homo sapiens
  misc_RNA (1)...(19): siRNA sense strand
gccuaaaggagauaacauu

SEQ ID NO: 311022 - RNA, 19 nt, Homo sapiens
  misc_RNA (1)...(19): siRNA sense strand
aggcaaagguccgaugaug

SEQ ID NO: 311023 - RNA, 19 nt, Homo sapiens
  misc_RNA (1)...(19): siRNA sense strand
gucuggacauccuuaaaga

SEQ ID NO: 311024 - RNA, 19 nt, Homo sapiens
  misc_RNA (1)...(19): siRNA sense strand
cuaaaagaauucagaagga

SEQ ID NO: 311025 - RNA, 19 nt, Homo sapiens
  misc_RNA (1)...(19): siRNA sense strand
uuuaagccaccaaagguua

SEQ ID NO: 311026 - RNA, 19 nt, Homo sapiens
  misc_RNA (1)...(19): siRNA sense strand
ugaaauaacccuugauccu

SEQ ID NO: 311027 - RNA, 19 nt, Homo sapiens
  misc_RNA (1)...(19): siRNA sense strand
uccagagccugaagaacaa

SEQ ID NO: 311028 - RNA, 19 nt, Homo sapiens
  misc_RNA (1)...(19): siRNA sense strand
gcugaaauaacccuugauc

SEQ ID NO: 311029 - RNA, 19 nt, Homo sapiens
  misc_RNA (1)...(19): siRNA sense strand
ggaagcauagccacucagu

SEQ ID NO: 311030 - RNA, 19 nt, Homo sapiens
  misc_RNA (1)...(19): siRNA sense strand
caccagcaguggcaguuca

SEQ ID NO: 311031 - RNA, 19 nt, Homo sapiens
  misc_RNA (1)...(19): siRNA sense strand
ugaagaacaagaggaaaga

SEQ ID NO: 311032 - RNA, 19 nt, Homo sapiens
  misc_RNA (1)...(19): siRNA sense strand
caccaaacucucuagcaaa

SEQ ID NO: 311033 - RNA, 19 nt, Homo sapiens
  misc_RNA (1)...(19): siRNA sense strand
aagaacaagaggaaagaaa

SEQ ID NO: 311034 - RNA, 19 nt, Homo sapiens
  misc_RNA (1)...(19): siRNA sense strand
cagaaggagcuagcugaaa

SEQ ID NO: 311035 - RNA, 19 nt, Homo sapiens
  misc_RNA (1)...(19): siRNA sense strand
ccaccggguucuguauaug

SEQ ID NO: 311036 - RNA, 19 nt, Homo sapiens
  misc_RNA (1)...(19): siRNA sense strand
acugcuaaguuauccacua

SEQ ID NO: 311037 - RNA, 19 nt, Homo sapiens
  misc_RNA (1)...(19): siRNA sense strand
uaugaauggagaucaacua

SEQ ID NO: 311038 - RNA, 19 nt, Homo sapiens
  misc_RNA (1)...(19): siRNA sense strand
cugcuaaguuauccacuag

SEQ ID NO: 311039 - RNA, 19 nt, Homo sapiens
  misc_RNA (1)...(19): siRNA sense strand
gaaucuaucacugcaacau

SEQ ID NO: 311040 - RNA, 19 nt, Homo sapiens
  misc_RNA (1)...(19): siRNA sense strand
ccacucaguauuugaccaa

SEQ ID NO: 311041 - RNA, 19 nt, Homo sapiens
  misc_RNA (1)...(19): siRNA sense strand
cuccagagccugaagaaca

SEQ ID NO: 311042 - RNA, 19 nt, Homo sapiens
  misc_RNA (1)...(19): siRNA sense strand
caacagucagggagucauc

SEQ ID NO: 311043 - RNA, 19 nt, Homo sapiens
  misc_RNA (1)...(19): siRNA sense strand
gaccaagagauacgcaaca

SEQ ID NO: 311044 - RNA, 19 nt, Homo sapiens
  misc_RNA (1)...(19): siRNA sense strand
caccggguucuguauauga

SEQ ID NO: 311045 - RNA, 19 nt, Homo sapiens
  misc_RNA (1)...(19): siRNA sense strand
cauuuaagccaccaaaggu

SEQ ID NO: 311046 - RNA, 19 nt, Homo sapiens
  misc_RNA (1)...(19): siRNA sense strand
ggauaucacauuuucauca

SEQ ID NO: 311047 - RNA, 19 nt, Homo sapiens
  misc_RNA (1)...(19): siRNA sense strand
gacaggauagccagacagu

SEQ ID NO: 311048 - RNA, 19 nt, Homo sapiens
  misc_RNA (1)...(19): siRNA sense strand
aaaccacugcuaaguuauc

SEQ ID NO: 311049 - RNA, 19 nt, Homo sapiens
  misc_RNA (1)...(19): siRNA sense strand
uggacauccuuaaagacaa

SEQ ID NO: 311050 - RNA, 19 nt, Homo sapiens
  misc_RNA (1)...(19): siRNA sense strand
gaauggagaucaacuauac

SEQ ID NO: 311051 - RNA, 19 nt, Homo sapiens
  misc_RNA (1)...(19): siRNA sense strand
caagagauacgcaacauaa

SEQ ID NO: 311052 - RNA, 19 nt, Homo sapiens
  misc_RNA (1)...(19): siRNA sense strand
caaaaccacugcuaaguua

SEQ ID NO: 311053 - RNA, 19 nt, Homo sapiens
  misc_RNA (1)...(19): siRNA sense strand
gcauagccacucaguauuu

SEQ ID NO: 311054 - RNA, 19 nt, Homo sapiens
  misc_RNA (1)...(19): siRNA sense strand
agaaggagcuagcugaaau

SEQ ID NO: 311055 - RNA, 19 nt, Homo sapiens
  misc_RNA (1)...(19): siRNA sense strand
gaaggagcuagcugaaaua

SEQ ID NO: 311056 - RNA, 19 nt, Homo sapiens
  misc_RNA (1)...(19): siRNA sense strand
caacuggagucccgcuuug

SEQ ID NO: 311057 - RNA, 19 nt, Homo sapiens
  misc_RNA (1)...(19): siRNA sense strand
gacaguggaccaagagaua

SEQ ID NO: 311058 - RNA, 19 nt, Homo sapiens
  misc_RNA (1)...(19): siRNA sense strand
ggagcuagcugaaauaacc

SEQ ID NO: 311059 - RNA, 19 nt, Homo sapiens
  misc_RNA (1)...(19): siRNA sense strand
gcuaaguuauccacuagug

SEQ ID NO: 311060 - RNA, 19 nt, Homo sapiens
  misc_RNA (1)...(19): siRNA sense strand
auaugaaggugguguguuu

SEQ ID NO: 311061 - RNA, 19 nt, Homo sapiens
  misc_RNA (1)...(19): siRNA sense strand
acaccaaacucucuagcaa

SEQ ID NO: 311062 - RNA, 19 nt, Homo sapiens
  misc_RNA (1)...(19): siRNA sense strand
gcaaagguccgaugaugag

SEQ ID NO: 311063 - RNA, 19 nt, Homo sapiens
  misc_RNA (1)...(19): siRNA sense strand
gagaucaacuauacuuggu

SEQ ID NO: 311064 - RNA, 19 nt, Homo sapiens
  misc_RNA (1)...(19): siRNA sense strand
gagcagaacacgacaggau

SEQ ID NO: 311065 - RNA, 19 nt, Homo sapiens
  misc_RNA (1)...(19): siRNA sense strand
aagcauagccacucaguau

SEQ ID NO: 311066 - RNA, 19 nt, Homo sapiens
  misc_RNA (1)...(19): siRNA sense strand
uagcugaaauaacccuuga

SEQ ID NO: 311067 - RNA, 19 nt, Homo sapiens
  misc_RNA (1)...(19): siRNA sense strand
ggacauccuuaaagacaac

SEQ ID NO: 311068 - RNA, 19 nt, Homo sapiens
  misc_RNA (1)...(19): siRNA sense strand
cauagccacucaguauuug

SEQ ID NO: 311069 - RNA, 19 nt, Homo sapiens
  misc_RNA (1)...(19): siRNA sense strand
gaagaacaagaggaaagaa

SEQ ID NO: 311070 - RNA, 19 nt, Homo sapiens
  misc_RNA (1)...(19): siRNA sense strand
gaagcauagccacucagua

SEQ ID NO: 311071 - RNA, 19 nt, Homo sapiens
  misc_RNA (1)...(19): siRNA sense strand
ccuaaaggagauaacauuu

SEQ ID NO: 311072 - RNA, 19 nt, Homo sapiens
  misc_RNA (1)...(19): siRNA sense strand
ugaauggagaucaacuaua

SEQ ID NO: 311073 - RNA, 19 nt, Homo sapiens
  misc_RNA (1)...(19): siRNA sense strand
gcaaaaccacugcuaaguu

SEQ ID NO: 311074 - RNA, 19 nt, Homo sapiens
  misc_RNA (1)...(19): siRNA sense strand
ccaagagauacgcaacaua

SEQ ID NO: 311075 - RNA, 19 nt, Homo sapiens
  misc_RNA (1)...(19): siRNA sense strand
gcagaacacgacaggauag

SEQ ID NO: 311076 - RNA, 19 nt, Homo sapiens
  misc_RNA (1)...(19): siRNA sense strand
guuauccacuagugcuaaa

SEQ ID NO: 311077 - RNA, 19 nt, Homo sapiens
  misc_RNA (1)...(19): siRNA sense strand
gccagacaguggaccaaga

SEQ ID NO: 311078 - RNA, 19 nt, Homo sapiens
  misc_RNA (1)...(19): siRNA sense strand
ggcaaagguccgaugauga

SEQ ID NO: 311079 - RNA, 19 nt, Homo sapiens
  misc_RNA (1)...(19): siRNA sense strand
gccuaaaggagauaacauu

SEQ ID NO: 311080 - RNA, 19 nt, Homo sapiens
  misc_RNA (1)...(19): siRNA sense strand
aggcaaagguccgaugaug

SEQ ID NO: 311081 - RNA, 19 nt, Homo sapiens
  misc_RNA (1)...(19): siRNA sense strand
gucuggacauccuuaaaga

SEQ ID NO: 311082 - RNA, 19 nt, Homo sapiens
  misc_RNA (1)...(19): siRNA sense strand
cuaaaagaauucagaagga

SEQ ID NO: 311083 - RNA, 19 nt, Homo sapiens
  misc_RNA (1)...(19): siRNA sense strand
uuuaagccaccaaagguua

SEQ ID NO: 311084 - RNA, 19 nt, Homo sapiens
  misc_RNA (1)...(19): siRNA sense strand
ugaaauaacccuugauccu

SEQ ID NO: 311085 - RNA, 19 nt, Homo sapiens
  misc_RNA (1)...(19): siRNA sense strand
uccagagccugaagaacaa

SEQ ID NO: 311086 - RNA, 19 nt, Homo sapiens
  misc_RNA (1)...(19): siRNA sense strand
gcugaaauaacccuugauc

SEQ ID NO: 311087 - RNA, 19 nt, Homo sapiens
  misc_RNA (1)...(19): siRNA sense strand
ggaagcauagccacucagu

SEQ ID NO: 311088 - RNA, 19 nt, Homo sapiens
  misc_RNA (1)...(19): siRNA sense strand
caccagcaguggcaguuca

SEQ ID NO: 311089 - RNA, 19 nt, Homo sapiens
  misc_RNA (1)...(19): siRNA sense strand
ugaagaacaagaggaaaga

SEQ ID NO: 311090 - RNA, 19 nt, Homo sapiens
  misc_RNA (1)...(19): siRNA sense strand
caccaaacucucuagcaaa

SEQ ID NO: 311091 - RNA, 19 nt, Homo sapiens
  misc_RNA (1)...(19): siRNA sense strand
aagaacaagaggaaagaaa

SEQ ID NO: 311092 - RNA, 19 nt, Homo sapiens
  misc_RNA (1)...(19): siRNA sense strand
cagaaggagcuagcugaaa

SEQ ID NO: 311093 - RNA, 19 nt, Homo sapiens
  misc_RNA (1)...(19): siRNA sense strand
ccaccggguucuguauaug

SEQ ID NO: 311094 - RNA, 19 nt, Homo sapiens
  misc_RNA (1)...(19): siRNA sense strand
acugcuaaguuauccacua

SEQ ID NO: 311095 - RNA, 19 nt, Homo sapiens
  misc_RNA (1)...(19): siRNA sense strand
uaugaauggagaucaacua

SEQ ID NO: 311096 - RNA, 19 nt, Homo sapiens
  misc_RNA (1)...(19): siRNA sense strand
cugcuaaguuauccacuag

SEQ ID NO: 311097 - RNA, 19 nt, Homo sapiens
  misc_RNA (1)...(19): siRNA sense strand
gaaucuaucacugcaacau

SEQ ID NO: 311098 - RNA, 19 nt, Homo sapiens
  misc_RNA (1)...(19): siRNA sense strand
ccacucaguauuugaccaa

SEQ ID NO: 311099 - RNA, 19 nt, Homo sapiens
  misc_RNA (1)...(19): siRNA sense strand
cuccagagccugaagaaca

SEQ ID NO: 311100 - RNA, 19 nt, Homo sapiens
  misc_RNA (1)...(19): siRNA sense strand
caacagucagggagucauc

SEQ ID NO: 311101 - RNA, 19 nt, Homo sapiens
  misc_RNA (1)...(19): siRNA sense strand
gaccaagagauacgcaaca

SEQ ID NO: 311102 - RNA, 19 nt, Homo sapiens
  misc_RNA (1)...(19): siRNA sense strand
caccggguucuguauauga

SEQ ID NO: 311103 - RNA, 19 nt, Homo sapiens
  misc_RNA (1)...(19): siRNA sense strand
cauuuaagccaccaaaggu

SEQ ID NO: 311104 - RNA, 19 nt, Homo sapiens
  misc_RNA (1)...(19): siRNA sense strand
ggauaucacauuuucauca

SEQ ID NO: 311105 - RNA, 19 nt, Homo sapiens
  misc_RNA (1)...(19): siRNA sense strand
gacaggauagccagacagu

SEQ ID NO: 311106 - RNA, 19 nt, Homo sapiens
  misc_RNA (1)...(19): siRNA sense strand
aaaccacugcuaaguuauc

SEQ ID NO: 311107 - RNA, 19 nt, Homo sapiens
  misc_RNA (1)...(19): siRNA sense strand
uggacauccuuaaagacaa

SEQ ID NO: 311108 - RNA, 19 nt, Homo sapiens
  misc_RNA (1)...(19): siRNA sense strand
gaacaaagcugcccaugug

SEQ ID NO: 311109 - RNA, 19 nt, Homo sapiens
  misc_RNA (1)...(19): siRNA sense strand
gaaaagagcuguaaacaug

SEQ ID NO: 311110 - RNA, 19 nt, Homo sapiens
  misc_RNA (1)...(19): siRNA sense strand
ccagagaucuuugaaguua

SEQ ID NO: 311111 - RNA, 19 nt, Homo sapiens
  misc_RNA (1)...(19): siRNA sense strand
ggaaggugcugaugcagua

SEQ ID NO: 311112 - RNA, 19 nt, Homo sapiens
  misc_RNA (1)...(19): siRNA sense strand
gaugagaucuguggaacua

SEQ ID NO: 311113 - RNA, 19 nt, Homo sapiens
  misc_RNA (1)...(19): siRNA sense strand
ggaucgaccucucuacaua

SEQ ID NO: 311114 - RNA, 19 nt, Homo sapiens
  misc_RNA (1)...(19): siRNA sense strand
gaagugauguggcauuugu

SEQ ID NO: 311115 - RNA, 19 nt, Homo sapiens
  misc_RNA (1)...(19): siRNA sense strand
ccaaggagaugaaagaaga

SEQ ID NO: 311116 - RNA, 19 nt, Homo sapiens
  misc_RNA (1)...(19): siRNA sense strand
gaaauaagccagagaucuu

SEQ ID NO: 311117 - RNA, 19 nt, Homo sapiens
  misc_RNA (1)...(19): siRNA sense strand
uaagugaacuagaccagua

SEQ ID NO: 311118 - RNA, 19 nt, Homo sapiens
  misc_RNA (1)...(19): siRNA sense strand
caacaacugccacgacuua

SEQ ID NO: 311119 - RNA, 19 nt, Homo sapiens
  misc_RNA (1)...(19): siRNA sense strand
ggauugcgcugaagacuau

SEQ ID NO: 311120 - RNA, 19 nt, Homo sapiens
  misc_RNA (1)...(19): siRNA sense strand
gcagagacguuaaugaaag

SEQ ID NO: 311121 - RNA, 19 nt, Homo sapiens
  misc_RNA (1)...(19): siRNA sense strand
gaaagacgaugagaucugu

SEQ ID NO: 311122 - RNA, 19 nt, Homo sapiens
  misc_RNA (1)...(19): siRNA sense strand
gacaucaagucaagaguaa

SEQ ID NO: 311123 - RNA, 19 nt, Homo sapiens
  misc_RNA (1)...(19): siRNA sense strand
gaacaagggcccagcauuc

SEQ ID NO: 311124 - RNA, 19 nt, Homo sapiens
  misc_RNA (1)...(19): siRNA sense strand
gaagaggacagacaaauca

SEQ ID NO: 311125 - RNA, 19 nt, Homo sapiens
  misc_RNA (1)...(19): siRNA sense strand
ugaaggagcugcaggugaa

SEQ ID NO: 311126 - RNA, 19 nt, Homo sapiens
  misc_RNA (1)...(19): siRNA sense strand
ggaaagagagauuuguaaa

SEQ ID NO: 311127 - RNA, 19 nt, Homo sapiens
  misc_RNA (1)...(19): siRNA sense strand
ugaauacgguucuggauga

SEQ ID NO: 311128 - RNA, 19 nt, Homo sapiens
  misc_RNA (1)...(19): siRNA sense strand
gagacggacucgauucauu

SEQ ID NO: 311129 - RNA, 19 nt, Homo sapiens
  misc_RNA (1)...(19): siRNA sense strand
ugaaaucccacguguauaa

SEQ ID NO: 311130 - RNA, 19 nt, Homo sapiens
  misc_RNA (1)...(19): siRNA sense strand
ugagacagcccaagaaauu

SEQ ID NO: 311131 - RNA, 19 nt, Homo sapiens
  misc_RNA (1)...(19): siRNA sense strand
gcuaugcccugucucugua

SEQ ID NO: 311132 - RNA, 19 nt, Homo sapiens
  misc_RNA (1)...(19): siRNA sense strand
aaacccaacuccucauaaa

SEQ ID NO: 311133 - RNA, 19 nt, Homo sapiens
  misc_RNA (1)...(19): siRNA sense strand
gaccggacccagaacauua

SEQ ID NO: 311134 - RNA, 19 nt, Homo sapiens
  misc_RNA (1)...(19): siRNA sense strand
gauauuggaccuacaaaug

SEQ ID NO: 311135 - RNA, 19 nt, Homo sapiens
  misc_RNA (1)...(19): siRNA sense strand
agauaugcgugaaggauua

SEQ ID NO: 311136 - RNA, 19 nt, Homo sapiens
  misc_RNA (1)...(19): siRNA sense strand
gguaaaggauugugugaag

SEQ ID NO: 311137 - RNA, 19 nt, Homo sapiens
  misc_RNA (1)...(19): siRNA sense strand
gcgagagucugaugauuuc

SEQ ID NO: 311138 - RNA, 19 nt, Homo sapiens
  misc_RNA (1)...(19): siRNA sense strand
gcaaaguuaugaccuugau

SEQ ID NO: 311139 - RNA, 19 nt, Homo sapiens
  misc_RNA (1)...(19): siRNA sense strand
cgagguggcccgagaauuu

SEQ ID NO: 311140 - RNA, 19 nt, Homo sapiens
  misc_RNA (1)...(19): siRNA sense strand
aaucagagcuuugagauca

SEQ ID NO: 311141 - RNA, 19 nt, Homo sapiens
  misc_RNA (1)...(19): siRNA sense strand
gcacuuugcauguuuauca

SEQ ID NO: 311142 - RNA, 19 nt, Homo sapiens
  misc_RNA (1)...(19): siRNA sense strand
caacuccucugaccgcauu

SEQ ID NO: 311143 - RNA, 19 nt, Homo sapiens
  misc_RNA (1)...(19): siRNA sense strand
ggagucaagugccaugaga

SEQ ID NO: 311144 - RNA, 19 nt, Homo sapiens
  misc_RNA (1)...(19): siRNA sense strand
uacaauggcuggaugagaa

SEQ ID NO: 311145 - RNA, 19 nt, Homo sapiens
  misc_RNA (1)...(19): siRNA sense strand
agaaagaccaccuguguaa

SEQ ID NO: 311146 - RNA, 19 nt, Homo sapiens
  misc_RNA (1)...(19): siRNA sense strand
uguaaugacucuaugcaaa

SEQ ID NO: 311147 - RNA, 19 nt, Homo sapiens
  misc_RNA (1)...(19): siRNA sense strand
cagcauuacuuucuucaga

SEQ ID NO: 311148 - RNA, 19 nt, Homo sapiens
  misc_RNA (1)...(19): siRNA sense strand
gcuacacgcacuucucuua

SEQ ID NO: 311149 - RNA, 19 nt, Homo sapiens
  misc_RNA (1)...(19): siRNA sense strand
caacaucaacgccuacuau

SEQ ID NO: 311150 - RNA, 19 nt, Homo sapiens
  misc_RNA (1)...(19): siRNA sense strand
gcugaaaucccacguguau

SEQ ID NO: 311151 - RNA, 19 nt, Homo sapiens
  misc_RNA (1)...(19): siRNA sense strand
gcagacagcggguauguuc

SEQ ID NO: 311152 - RNA, 19 nt, Homo sapiens
  misc_RNA (1)...(19): siRNA sense strand
gagauaagaaggauggauu

SEQ ID NO: 311153 - RNA, 19 nt, Homo sapiens
  misc_RNA (1)...(19): siRNA sense strand
gaaacccaacuccucauaa

SEQ ID NO: 311154 - RNA, 19 nt, Homo sapiens
  misc_RNA (1)...(19): siRNA sense strand
cgugaaggauuacugcuuu

SEQ ID NO: 311155 - RNA, 19 nt, Homo sapiens
  misc_RNA (1)...(19): siRNA sense strand
gaaugaagguacaagaacu

SEQ ID NO: 311156 - RNA, 19 nt, Homo sapiens
  misc_RNA (1)...(19): siRNA sense strand
cccaagaaauuguggauga

SEQ ID NO: 311157 - RNA, 19 nt, Homo sapiens
  misc_RNA (1)...(19): siRNA sense strand
gggaggagaaguuccauuu

SEQ ID NO: 311158 - RNA, 19 nt, Homo sapiens
  misc_RNA (1)...(19): siRNA sense strand
ccuggaagguguacuuuga

SEQ ID NO: 311159 - RNA, 19 nt, Homo sapiens
  misc_RNA (1)...(19): siRNA sense strand
acucaaggaucacauggua

SEQ ID NO: 311160 - RNA, 19 nt, Homo sapiens
  misc_RNA (1)...(19): siRNA sense strand
ugacgcacuuugcauguuu

SEQ ID NO: 311161 - RNA, 19 nt, Homo sapiens
  misc_RNA (1)...(19): siRNA sense strand
gagaaugcaucuucaccau

SEQ ID NO: 311162 - RNA, 19 nt, Homo sapiens
  misc_RNA (1)...(19): siRNA sense strand
gagaaagaccaccugugua

SEQ ID NO: 311163 - RNA, 19 nt, Homo sapiens
  misc_RNA (1)...(19): siRNA sense strand
gcauugaguccauauauca

SEQ ID NO: 311164 - RNA, 19 nt, Homo sapiens
  misc_RNA (1)...(19): siRNA sense strand
gaaggaggcagcaugugaa

SEQ ID NO: 311165 - RNA, 19 nt, Homo sapiens
  misc_RNA (1)...(19): siRNA sense strand
gcccagaucugcagucucu

SEQ ID NO: 311166 - RNA, 19 nt, Homo sapiens
  misc_RNA (1)...(19): siRNA sense strand
gcugagccaucuuuccaaa

SEQ ID NO: 311167 - RNA, 19 nt, Homo sapiens
  misc_RNA (1)...(19): siRNA sense strand
ccaaggagcugagccaucu

SEQ ID NO: 311168 - RNA, 19 nt, Homo sapiens
  misc_RNA (1)...(19): siRNA sense strand
gggaaagagagauuuguaa

SEQ ID NO: 311169 - RNA, 19 nt, Homo sapiens
  misc_RNA (1)...(19): siRNA sense strand
gagaauuugugaaacucaa

SEQ ID NO: 311170 - RNA, 19 nt, Homo sapiens
  misc_RNA (1)...(19): siRNA sense strand
cagaagugauguggcauuu

SEQ ID NO: 311171 - RNA, 19 nt, Homo sapiens
  misc_RNA (1)...(19): siRNA sense strand
gagcugacaaugaguauuc

SEQ ID NO: 311172 - RNA, 19 nt, Homo sapiens
  misc_RNA (1)...(19): siRNA sense strand
ggaugagaaugaggaugua

SEQ ID NO: 311173 - RNA, 19 nt, Homo sapiens
  misc_RNA (1)...(19): siRNA sense strand
gcaccacuccucauaacuu

SEQ ID NO: 311174 - RNA, 19 nt, Homo sapiens
  misc_RNA (1)...(19): siRNA sense strand
ggaggaagccagauauugg

SEQ ID NO: 311175 - RNA, 19 nt, Homo sapiens
  misc_RNA (1)...(19): siRNA sense strand
ggacgauccugugggagaa

SEQ ID NO: 311176 - RNA, 19 nt, Homo sapiens
  misc_RNA (1)...(19): siRNA sense strand
gaggaaacacggaaucuca

SEQ ID NO: 311177 - RNA, 19 nt, Homo sapiens
  misc_RNA (1)...(19): siRNA sense strand
gaugagacagcccaagaaa

SEQ ID NO: 311178 - RNA, 19 nt, Homo sapiens
  misc_RNA (1)...(19): siRNA sense strand
gcauuaaggugcguguaug

SEQ ID NO: 311179 - RNA, 19 nt, Homo sapiens
  misc_RNA (1)...(19): siRNA sense strand
gaagcagaguguacuggau

SEQ ID NO: 311180 - RNA, 19 nt, Homo sapiens
  misc_RNA (1)...(19): siRNA sense strand
ggagggcucuauggcauug

SEQ ID NO: 311181 - RNA, 19 nt, Homo sapiens
  misc_RNA (1)...(19): siRNA sense strand
guuaugaccuugauuaucc

SEQ ID NO: 311182 - RNA, 19 nt, Homo sapiens
  misc_RNA (1)...(19): siRNA sense strand
ccuaugaguugcagauaug

SEQ ID NO: 311183 - RNA, 19 nt, Homo sapiens
  misc_RNA (1)...(19): siRNA sense strand
gcaaugggcugaagaaaac

SEQ ID NO: 311184 - RNA, 19 nt, Homo sapiens
  misc_RNA (1)...(19): siRNA sense strand
cacggaaucucacuccaaa

SEQ ID NO: 311185 - RNA, 19 nt, Homo sapiens
  misc_RNA (1)...(19): siRNA sense strand
gcaguaugcagacaucuug

SEQ ID NO: 311186 - RNA, 19 nt, Homo sapiens
  misc_RNA (1)...(19): siRNA sense strand
gaagguacaagaacugcaa

SEQ ID NO: 311187 - RNA, 19 nt, Homo sapiens
  misc_RNA (1)...(19): siRNA sense strand
gaggagaaguuccauuuug

SEQ ID NO: 311188 - RNA, 19 nt, Homo sapiens
  misc_RNA (1)...(19): siRNA sense strand
cagagacguuaaugaaaga

SEQ ID NO: 311189 - RNA, 19 nt, Homo sapiens
  misc_RNA (1)...(19): siRNA sense strand
gauaagaagaggaaguuca

SEQ ID NO: 311190 - RNA, 19 nt, Homo sapiens
  misc_RNA (1)...(19): siRNA sense strand
ggaacgagauaagaaggau

SEQ ID NO: 311191 - RNA, 19 nt, Homo sapiens
  misc_RNA (1)...(19): siRNA sense strand
uaaaagugcugacuacaug

SEQ ID NO: 311192 - RNA, 19 nt, Homo sapiens
  misc_RNA (1)...(19): siRNA sense strand
gaaagaccaccuguguaaa

SEQ ID NO: 311193 - RNA, 19 nt, Homo sapiens
  misc_RNA (1)...(19): siRNA sense strand
gugaagagcacaacuguag

SEQ ID NO: 311194 - RNA, 19 nt, Homo sapiens
  misc_RNA (1)...(19): siRNA sense strand
ccaagaaauuguggaugaa

SEQ ID NO: 311195 - RNA, 19 nt, Homo sapiens
  misc_RNA (1)...(19): siRNA sense strand
caccacuccucauaacuuu

SEQ ID NO: 311196 - RNA, 19 nt, Homo sapiens
  misc_RNA (1)...(19): siRNA sense strand
caaaugggagcaaaucaau

SEQ ID NO: 311197 - RNA, 19 nt, Homo sapiens
  misc_RNA (1)...(19): siRNA sense strand
ggacgucugguacaacuug

SEQ ID NO: 311198 - RNA, 19 nt, Homo sapiens
  misc_RNA (1)...(19): siRNA sense strand
gccaggaucugcucaaugc

SEQ ID NO: 311199 - RNA, 19 nt, Homo sapiens
  misc_RNA (1)...(19): siRNA sense strand
gaaaguacagaaugugaag

SEQ ID NO: 311200 - RNA, 19 nt, Homo sapiens
  misc_RNA (1)...(19): siRNA sense strand
ugcaggagauuccagauga

SEQ ID NO: 311201 - RNA, 19 nt, Homo sapiens
  misc_RNA (1)...(19): siRNA sense strand
cgaacaagaugacgaccau

SEQ ID NO: 311202 - RNA, 19 nt, Homo sapiens
  misc_RNA (1)...(19): siRNA sense strand
gacaaugaguauucuaguc

SEQ ID NO: 311203 - RNA, 19 nt, Homo sapiens
  misc_RNA (1)...(19): siRNA sense strand
ugacagcaugccagauuua

SEQ ID NO: 311204 - RNA, 19 nt, Homo sapiens
  misc_RNA (1)...(19): siRNA sense strand
ggaacaagggcccagcauu

SEQ ID NO: 311205 - RNA, 19 nt, Homo sapiens
  misc_RNA (1)...(19): siRNA sense strand
aggaaucacuucugcaaug

SEQ ID NO: 311206 - RNA, 19 nt, Homo sapiens
  misc_RNA (1)...(19): siRNA sense strand
gagacaggccugaccauuc

SEQ ID NO: 311207 - RNA, 19 nt, Homo sapiens
  misc_RNA (1)...(19): siRNA sense strand
agacaggccugaccauucu

SEQ ID NO: 311208 - RNA, 19 nt, Homo sapiens
  misc_RNA (1)...(19): siRNA sense strand
gggagaagcuagagaaauu

SEQ ID NO: 311209 - RNA, 19 nt, Homo sapiens
  misc_RNA (1)...(19): siRNA sense strand
ggagaaaggugaccggauu

SEQ ID NO: 311210 - RNA, 19 nt, Homo sapiens
  misc_RNA (1)...(19): siRNA sense strand
gagcaagucucuaggcaau

SEQ ID NO: 311211 - RNA, 19 nt, Homo sapiens
  misc_RNA (1)...(19): siRNA sense strand
caagaaagaggcaaagaaa

SEQ ID NO: 311212 - RNA, 19 nt, Homo sapiens
  misc_RNA (1)...(19): siRNA sense strand
gcaacaagcucuggaaugc

SEQ ID NO: 311213 - RNA, 19 nt, Homo sapiens
  misc_RNA (1)...(19): siRNA sense strand
cuagagaaauuccaacaga

SEQ ID NO: 311214 - RNA, 19 nt, Homo sapiens
  misc_RNA (1)...(19): siRNA sense strand
gcaagucucuaggcaaugu

SEQ ID NO: 311215 - RNA, 19 nt, Homo sapiens
  misc_RNA (1)...(19): siRNA sense strand
uaaugugacucgcugguuu

SEQ ID NO: 311216 - RNA, 19 nt, Homo sapiens
  misc_RNA (1)...(19): siRNA sense strand
caagaucagucuccagcaa

SEQ ID NO: 311217 - RNA, 19 nt, Homo sapiens
  misc_RNA (1)...(19): siRNA sense strand
ccugaaaccuguacugaau

SEQ ID NO: 311218 - RNA, 19 nt, Homo sapiens
  misc_RNA (1)...(19): siRNA sense strand
acauugagguggauaagaa

SEQ ID NO: 311219 - RNA, 19 nt, Homo sapiens
  misc_RNA (1)...(19): siRNA sense strand
gcucugugaugucuacuug

SEQ ID NO: 311220 - RNA, 19 nt, Homo sapiens
  misc_RNA (1)...(19): siRNA sense strand
ggagaccggucaugacauc

SEQ ID NO: 311221 - RNA, 19 nt, Homo sapiens
  misc_RNA (1)...(19): siRNA sense strand
gcaagaugaggauguauug

SEQ ID NO: 311222 - RNA, 19 nt, Homo sapiens
  misc_RNA (1)...(19): siRNA sense strand
cgaggugucuucaugaugu

SEQ ID NO: 311223 - RNA, 19 nt, Homo sapiens
  misc_RNA (1)...(19): siRNA sense strand
ggcaucaucuaucgcagua

SEQ ID NO: 311224 - RNA, 19 nt, Homo sapiens
  misc_RNA (1)...(19): siRNA sense strand
gccagacccuguacacuug

SEQ ID NO: 311225 - RNA, 19 nt, Homo sapiens
  misc_RNA (1)...(19): siRNA sense strand
cugcucagcucaagaaaga

SEQ ID NO: 311226 - RNA, 19 nt, Homo sapiens
  misc_RNA (1)...(19): siRNA sense strand
cagaagaccugaguguguu

SEQ ID NO: 311227 - RNA, 19 nt, Homo sapiens
  misc_RNA (1)...(19): siRNA sense strand
ccagcaagaugaggaugua

SEQ ID NO: 311228 - RNA, 19 nt, Homo sapiens
  misc_RNA (1)...(19): siRNA sense strand
cgccggaucuggaauaaug

SEQ ID NO: 311229 - RNA, 19 nt, Homo sapiens
  misc_RNA (1)...(19): siRNA sense strand
gcaguacccgccuuguuaa

SEQ ID NO: 311230 - RNA, 19 nt, Homo sapiens
  misc_RNA (1)...(19): siRNA sense strand
uagagaaauuccaacagaa

SEQ ID NO: 311231 - RNA, 19 nt, Homo sapiens
  misc_RNA (1)...(19): siRNA sense strand
ggaaguggaaggaggagaa

SEQ ID NO: 311232 - RNA, 19 nt, Homo sapiens
  misc_RNA (1)...(19): siRNA sense strand
ggauuuaccaccaguugaa

SEQ ID NO: 311233 - RNA, 19 nt, Homo sapiens
  misc_RNA (1)...(19): siRNA sense strand
gauccggccugacuguuuc

SEQ ID NO: 311234 - RNA, 19 nt, Homo sapiens
  misc_RNA (1)...(19): siRNA sense strand
cgcaguacccgccuuguua

SEQ ID NO: 311235 - RNA, 19 nt, Homo sapiens
  misc_RNA (1)...(19): siRNA sense strand
gaacgugauccacccauuc

SEQ ID NO: 311236 - RNA, 19 nt, Homo sapiens
  misc_RNA (1)...(19): siRNA sense strand
gcugggagauguggcugua

SEQ ID NO: 311237 - RNA, 19 nt, Homo sapiens
  misc_RNA (1)...(19): siRNA sense strand
ucuaugagcucugugaugu

SEQ ID NO: 311238 - RNA, 19 nt, Homo sapiens
  misc_RNA (1)...(19): siRNA sense strand
gagaaaggugaccggauuu

SEQ ID NO: 311239 - RNA, 19 nt, Homo sapiens
  misc_RNA (1)...(19): siRNA sense strand
caaaaugacuaugaaguug

SEQ ID NO: 311240 - RNA, 19 nt, Homo sapiens
  misc_RNA (1)...(19): siRNA sense strand
ucaagaaagaggcaaagaa

SEQ ID NO: 311241 - RNA, 19 nt, Homo sapiens
  misc_RNA (1)...(19): siRNA sense strand
aagcagagcucaggaaggu

SEQ ID NO: 311242 - RNA, 19 nt, Homo sapiens
  misc_RNA (1)...(19): siRNA sense strand
gaguaugggcguccuaaug

SEQ ID NO: 311243 - RNA, 19 nt, Homo sapiens
  misc_RNA (1)...(19): siRNA sense strand
gaagcuagagaaauuccaa

SEQ ID NO: 311244 - RNA, 19 nt, Homo sapiens
  misc_RNA (1)...(19): siRNA sense strand
ucucggagccuucccauug

SEQ ID NO: 311245 - RNA, 19 nt, Homo sapiens
  misc_RNA (1)...(19): siRNA sense strand
gagccaggccucucucuca

SEQ ID NO: 311246 - RNA, 19 nt, Homo sapiens
  misc_RNA (1)...(19): siRNA sense strand
gaugaggauguauuggaua

SEQ ID NO: 311247 - RNA, 19 nt, Homo sapiens
  misc_RNA (1)...(19): siRNA sense strand
gaaggcagccaaggaguuc

SEQ ID NO: 311248 - RNA, 19 nt, Homo sapiens
  misc_RNA (1)...(19): siRNA sense strand
agacaaugcugggagaugu

SEQ ID NO: 311249 - RNA, 19 nt, Homo sapiens
  misc_RNA (1)...(19): siRNA sense strand
ccaggccucucucucauca

SEQ ID NO: 311250 - RNA, 19 nt, Homo sapiens
  misc_RNA (1)...(19): siRNA sense strand
cgaggaaggcaucaucuau

SEQ ID NO: 311251 - RNA, 19 nt, Homo sapiens
  misc_RNA (1)...(19): siRNA sense strand
ggauccggccugacuguuu

SEQ ID NO: 311252 - RNA, 19 nt, Homo sapiens
  misc_RNA (1)...(19): siRNA sense strand
guacccgccuuguuaacug

SEQ ID NO: 311253 - RNA, 19 nt, Homo sapiens
  misc_RNA (1)...(19): siRNA sense strand
ccagauaccagcaccugaa

SEQ ID NO: 311254 - RNA, 19 nt, Homo sapiens
  misc_RNA (1)...(19): siRNA sense strand
gaagccaagcuccaacaga

SEQ ID NO: 311255 - RNA, 19 nt, Homo sapiens
  misc_RNA (1)...(19): siRNA sense strand
gcucuccgguuuggauuau

SEQ ID NO: 311256 - RNA, 19 nt, Homo sapiens
  misc_RNA (1)...(19): siRNA sense strand
caaagaaacgggagaagcu

SEQ ID NO: 311257 - RNA, 19 nt, Homo sapiens
  misc_RNA (1)...(19): siRNA sense strand
ugucuucgaugaauuugug

SEQ ID NO: 311258 - RNA, 19 nt, Homo sapiens
  misc_RNA (1)...(19): siRNA sense strand
gaggaaggcaucaucuauc

SEQ ID NO: 311259 - RNA, 19 nt, Homo sapiens
  misc_RNA (1)...(19): siRNA sense strand
cauggacccuaaacucuca

SEQ ID NO: 311260 - RNA, 19 nt, Homo sapiens
  misc_RNA (1)...(19): siRNA sense strand
gaucuggaauaaugugacu

SEQ ID NO: 311261 - RNA, 19 nt, Homo sapiens
  misc_RNA (1)...(19): siRNA sense strand
ggacuguuccguggcauug

SEQ ID NO: 311262 - RNA, 19 nt, Homo sapiens
  misc_RNA (1)...(19): siRNA sense strand
cuacagcccucgguaugug

SEQ ID NO: 311263 - RNA, 19 nt, Homo sapiens
  misc_RNA (1)...(19): siRNA sense strand
ugaaaccuguacugaaugg

SEQ ID NO: 311264 - RNA, 19 nt, Homo sapiens
  misc_RNA (1)...(19): siRNA sense strand
gucaugacauccucuucuu

SEQ ID NO: 311265 - RNA, 19 nt, Homo sapiens
  misc_RNA (1)...(19): siRNA sense strand
guucuccucuggccucuuc

SEQ ID NO: 311266 - RNA, 19 nt, Homo sapiens
  misc_RNA (1)...(19): siRNA sense strand
gaaguggaaggaggagaaa

SEQ ID NO: 311267 - RNA, 19 nt, Homo sapiens
  misc_RNA (1)...(19): siRNA sense strand
gaagaugagcaagucucua

SEQ ID NO: 311268 - RNA, 19 nt, Homo sapiens
  misc_RNA (1)...(19): siRNA sense strand
agaaaggugaccggauuua

SEQ ID NO: 311269 - RNA, 19 nt, Homo sapiens
  misc_RNA (1)...(19): siRNA sense strand
gagcuggcgcuaagcauca

SEQ ID NO: 311270 - RNA, 19 nt, Homo sapiens
  misc_RNA (1)...(19): siRNA sense strand
gggagaaggcagccaagga

SEQ ID NO: 311271 - RNA, 19 nt, Homo sapiens
  misc_RNA (1)...(19): siRNA sense strand
acaaggagaagguggaguu

SEQ ID NO: 311272 - RNA, 19 nt, Homo sapiens
  misc_RNA (1)...(19): siRNA sense strand
cuacuuggagugccugaaa

SEQ ID NO: 311273 - RNA, 19 nt, Homo sapiens
  misc_RNA (1)...(19): siRNA sense strand
cagccuacuuugucacugu

SEQ ID NO: 311274 - RNA, 19 nt, Homo sapiens
  misc_RNA (1)...(19): siRNA sense strand
gagccuguuucaccaugga

SEQ ID NO: 311275 - RNA, 19 nt, Homo sapiens
  misc_RNA (1)...(19): siRNA sense strand
gcuccugcccucccaaaga

SEQ ID NO: 311276 - RNA, 19 nt, Homo sapiens
  misc_RNA (1)...(19): siRNA sense strand
guaugggcguccuaaugug

SEQ ID NO: 311277 - RNA, 19 nt, Homo sapiens
  misc_RNA (1)...(19): siRNA sense strand
cggcugcucucacccuuca

SEQ ID NO: 311278 - RNA, 19 nt, Homo sapiens
  misc_RNA (1)...(19): siRNA sense strand
ggaaugccaccaaguuugc

SEQ ID NO: 311279 - RNA, 19 nt, Homo sapiens
  misc_RNA (1)...(19): siRNA sense strand
ggccaaagaagggcagaaa

SEQ ID NO: 311280 - RNA, 19 nt, Homo sapiens
  misc_RNA (1)...(19): siRNA sense strand
ucgcaucccagccuacuuu

SEQ ID NO: 311281 - RNA, 19 nt, Homo sapiens
  misc_RNA (1)...(19): siRNA sense strand
ggucgaaggacgugguaga

SEQ ID NO: 311282 - RNA, 19 nt, Homo sapiens
  misc_RNA (1)...(19): siRNA sense strand
gaaaggugaccggauuuac

SEQ ID NO: 311283 - RNA, 19 nt, Homo sapiens
  misc_RNA (1)...(19): siRNA sense strand
gcugugaccaugcagguau

SEQ ID NO: 311284 - RNA, 19 nt, Homo sapiens
  misc_RNA (1)...(19): siRNA sense strand
ggcuucggcugcacaccua

SEQ ID NO: 311285 - RNA, 19 nt, Homo sapiens
  misc_RNA (1)...(19): siRNA sense strand
ucugugaugucuacuugga

SEQ ID NO: 311286 - RNA, 19 nt, Homo sapiens
  misc_RNA (1)...(19): siRNA sense strand
agaugaggauguauuggau

SEQ ID NO: 311287 - RNA, 19 nt, Homo sapiens
  misc_RNA (1)...(19): siRNA sense strand
agaacgugauccacccauu

SEQ ID NO: 311288 - RNA, 19 nt, Homo sapiens
  misc_RNA (1)...(19): siRNA sense strand
gcugcugccuuuccgauac

SEQ ID NO: 311289 - RNA, 19 nt, Homo sapiens
  misc_RNA (1)...(19): siRNA sense strand
ggagaagcuagagaaauuc

SEQ ID NO: 311290 - RNA, 19 nt, Homo sapiens
  misc_RNA (1)...(19): siRNA sense strand
guacagcuucuggcucuau

SEQ ID NO: 311291 - RNA, 19 nt, Homo sapiens
  misc_RNA (1)...(19): siRNA sense strand
ggaagaugagcaagucucu

SEQ ID NO: 311292 - RNA, 19 nt, Homo sapiens
  misc_RNA (1)...(19): siRNA sense strand
ccauugucuucgaugaauu

SEQ ID NO: 311293 - RNA, 19 nt, Homo sapiens
  misc_RNA (1)...(19): siRNA sense strand
ccaaagauaccagauacca

SEQ ID NO: 311294 - RNA, 19 nt, Homo sapiens
  misc_RNA (1)...(19): siRNA sense strand
gagcagcagggcuucuuca

SEQ ID NO: 311295 - RNA, 19 nt, Homo sapiens
  misc_RNA (1)...(19): siRNA sense strand
ccagguggcagcugagugu

SEQ ID NO: 311296 - RNA, 19 nt, Homo sapiens
  misc_RNA (1)...(19): siRNA sense strand
gccaaggaguucggagugu

SEQ ID NO: 311297 - RNA, 19 nt, Homo sapiens
  misc_RNA (1)...(19): siRNA sense strand
ugaccaaaaugacuaugaa

SEQ ID NO: 311298 - RNA, 19 nt, Homo sapiens
  misc_RNA (1)...(19): siRNA sense strand
cgaugaauuuguggacaug

SEQ ID NO: 311299 - RNA, 19 nt, Homo sapiens
  misc_RNA (1)...(19): siRNA sense strand
cauugucuucgaugaauuu

SEQ ID NO: 311300 - RNA, 19 nt, Homo sapiens
  misc_RNA (1)...(19): siRNA sense strand
ucguguccuuugccuauaa

SEQ ID NO: 311301 - RNA, 19 nt, Homo sapiens
  misc_RNA (1)...(19): siRNA sense strand
ccaucgcccuauuccagaa

SEQ ID NO: 311302 - RNA, 19 nt, Homo sapiens
  misc_RNA (1)...(19): siRNA sense strand
uaugagcucugugaugucu

SEQ ID NO: 311303 - RNA, 19 nt, Homo sapiens
  misc_RNA (1)...(19): siRNA sense strand
ccaaagaagggcagaaagc

SEQ ID NO: 311304 - RNA, 19 nt, Homo sapiens
  misc_RNA (1)...(19): siRNA sense strand
gccggaagaugagcaaguc

SEQ ID NO: 311305 - RNA, 19 nt, Homo sapiens
  misc_RNA (1)...(19): siRNA sense strand
agaucagucuccagcaaga

SEQ ID NO: 311306 - RNA, 19 nt, Homo sapiens
  misc_RNA (1)...(19): siRNA sense strand
ccaaaaugacuaugaaguu

SEQ ID NO: 311307 - RNA, 19 nt, Homo sapiens
  misc_RNA (1)...(19): siRNA sense strand
aaagaaacgggagaagcua

SEQ ID NO: 311308 - RNA, 19 nt, Homo sapiens
  misc_RNA (1)...(19): siRNA sense strand
cgacagagaugcugaaggu

SEQ ID NO: 311309 - RNA, 19 nt, Homo sapiens
  misc_RNA (1)...(19): siRNA sense strand
ggacagugccuaccucuau

SEQ ID NO: 311310 - RNA, 19 nt, Homo sapiens
  misc_RNA (1)...(19): siRNA sense strand
caagggauggugcuucuuu

SEQ ID NO: 311311 - RNA, 19 nt, Homo sapiens
  misc_RNA (1)...(19): siRNA sense strand
gaguucaccugcccugugu

SEQ ID NO: 311312 - RNA, 19 nt, Homo sapiens
  misc_RNA (1)...(19): siRNA sense strand
gaccugggcaucuccauug

SEQ ID NO: 311313 - RNA, 19 nt, Homo sapiens
  misc_RNA (1)...(19): siRNA sense strand
ggacgagaagaccaagaaa

SEQ ID NO: 311314 - RNA, 19 nt, Homo sapiens
  misc_RNA (1)...(19): siRNA sense strand
ucaacugccugcucugcaa

SEQ ID NO: 311315 - RNA, 19 nt, Homo sapiens
  misc_RNA (1)...(19): siRNA sense strand
ucaccugcccuguguguuu

SEQ ID NO: 311316 - RNA, 19 nt, Homo sapiens
  misc_RNA (1)...(19): siRNA sense strand
aggaugaugucaaugaguu

SEQ ID NO: 311317 - RNA, 19 nt, Homo sapiens
  misc_RNA (1)...(19): siRNA sense strand
ucacagugcgcccugauau

SEQ ID NO: 311318 - RNA, 19 nt, Homo sapiens
  misc_RNA (1)...(19): siRNA sense strand
cagagaugcugaaggugau

SEQ ID NO: 311319 - RNA, 19 nt, Homo sapiens
  misc_RNA (1)...(19): siRNA sense strand
gacagugccuaccucuauc

SEQ ID NO: 311320 - RNA, 19 nt, Homo sapiens
  misc_RNA (1)...(19): siRNA sense strand
gggugcaccuucaucaaca

SEQ ID NO: 311321 - RNA, 19 nt, Homo sapiens
  misc_RNA (1)...(19): siRNA sense strand
gggcaucuccauugcugaa

SEQ ID NO: 311322 - RNA, 19 nt, Homo sapiens
  misc_RNA (1)...(19): siRNA sense strand
cacccaagcugucagaacu

SEQ ID NO: 311323 - RNA, 19 nt, Homo sapiens
  misc_RNA (1)...(19): siRNA sense strand
acagugcgcccugauauga

SEQ ID NO: 311324 - RNA, 19 nt, Homo sapiens
  misc_RNA (1)...(19): siRNA sense strand
cguggaggaugcucagaug

SEQ ID NO: 311325 - RNA, 19 nt, Homo sapiens
  misc_RNA (1)...(19): siRNA sense strand
aggaggcgcugcgucagua

SEQ ID NO: 311326 - RNA, 19 nt, Homo sapiens
  misc_RNA (1)...(19): siRNA sense strand
ggauuaccagcgauuucua

SEQ ID NO: 311327 - RNA, 19 nt, Homo sapiens
  misc_RNA (1)...(19): siRNA sense strand
gaggauuaccagcgauuuc

SEQ ID NO: 311328 - RNA, 19 nt, Homo sapiens
  misc_RNA (1)...(19): siRNA sense strand
gccagaucgugguacagaa

SEQ ID NO: 311329 - RNA, 19 nt, Homo sapiens
  misc_RNA (1)...(19): siRNA sense strand
gacaguggcgucucucaag

SEQ ID NO: 311330 - RNA, 19 nt, Homo sapiens
  misc_RNA (1)...(19): siRNA sense strand
ggugcaccuucaucaacaa

SEQ ID NO: 311331 - RNA, 19 nt, Homo sapiens
  misc_RNA (1)...(19): siRNA sense strand
ugaggaugaugucaaugag

SEQ ID NO: 311332 - RNA, 19 nt, Homo sapiens
  misc_RNA (1)...(19): siRNA sense strand
gaugaacugcaaggaguau

SEQ ID NO: 311333 - RNA, 19 nt, Homo sapiens
  misc_RNA (1)...(19): siRNA sense strand
gcaucuccauugcugaaaa

SEQ ID NO: 311334 - RNA, 19 nt, Homo sapiens
  misc_RNA (1)...(19): siRNA sense strand
gacgagaagaccaagaaag

SEQ ID NO: 311335 - RNA, 19 nt, Homo sapiens
  misc_RNA (1)...(19): siRNA sense strand
uggcgucucucaaggacau

SEQ ID NO: 311336 - RNA, 19 nt, Homo sapiens
  misc_RNA (1)...(19): siRNA sense strand
ggugcuucuuugaggauga

SEQ ID NO: 311337 - RNA, 19 nt, Homo sapiens
  misc_RNA (1)...(19): siRNA sense strand
aagggauggugcuucuuug

SEQ ID NO: 311338 - RNA, 19 nt, Homo sapiens
  misc_RNA (1)...(19): siRNA sense strand
gauuaccagcgauuucuag

SEQ ID NO: 311339 - RNA, 19 nt, Homo sapiens
  misc_RNA (1)...(19): siRNA sense strand
cggccuggcugugagaugu

SEQ ID NO: 311340 - RNA, 19 nt, Homo sapiens
  misc_RNA (1)...(19): siRNA sense strand
cacgccagauggacgagaa

SEQ ID NO: 311341 - RNA, 19 nt, Homo sapiens
  misc_RNA (1)...(19): siRNA sense strand
cuaccucuaucugcuguca

SEQ ID NO: 311342 - RNA, 19 nt, Homo sapiens
  misc_RNA (1)...(19): siRNA sense strand
caccugcccuguguguuuc

SEQ ID NO: 311343 - RNA, 19 nt, Homo sapiens
  misc_RNA (1)...(19): siRNA sense strand
ggacagugccuaccucuau

SEQ ID NO: 311344 - RNA, 19 nt, Homo sapiens
  misc_RNA (1)...(19): siRNA sense strand
ggacgagaagaccaagaaa

SEQ ID NO: 311345 - RNA, 19 nt, Homo sapiens
  misc_RNA (1)...(19): siRNA sense strand
ucacagugcgcccugauau

SEQ ID NO: 311346 - RNA, 19 nt, Homo sapiens
  misc_RNA (1)...(19): siRNA sense strand
gacagugccuaccucuauc

SEQ ID NO: 311347 - RNA, 19 nt, Homo sapiens
  misc_RNA (1)...(19): siRNA sense strand
gggugcaccuucaucaaca

SEQ ID NO: 311348 - RNA, 19 nt, Homo sapiens
  misc_RNA (1)...(19): siRNA sense strand
cguggaggaugcucagaug

SEQ ID NO: 311349 - RNA, 19 nt, Homo sapiens
  misc_RNA (1)...(19): siRNA sense strand
aggaggcgcugcgucagua

SEQ ID NO: 311350 - RNA, 19 nt, Homo sapiens
  misc_RNA (1)...(19): siRNA sense strand
acagugcgcccugauauga

SEQ ID NO: 311351 - RNA, 19 nt, Homo sapiens
  misc_RNA (1)...(19): siRNA sense strand
gacaguggcgucucucaag

SEQ ID NO: 311352 - RNA, 19 nt, Homo sapiens
  misc_RNA (1)...(19): siRNA sense strand
ggugcaccuucaucaacaa

SEQ ID NO: 311353 - RNA, 19 nt, Homo sapiens
  misc_RNA (1)...(19): siRNA sense strand
gacgagaagaccaagaaag

SEQ ID NO: 311354 - RNA, 19 nt, Homo sapiens
  misc_RNA (1)...(19): siRNA sense strand
cacgccagauggacgagaa

SEQ ID NO: 311355 - RNA, 19 nt, Homo sapiens
  misc_RNA (1)...(19): siRNA sense strand
cggccuggcugugagaugu

SEQ ID NO: 311356 - RNA, 19 nt, Homo sapiens
  misc_RNA (1)...(19): siRNA sense strand
uggcgucucucaaggacau

SEQ ID NO: 311357 - RNA, 19 nt, Homo sapiens
  misc_RNA (1)...(19): siRNA sense strand
cuaccucuaucugcuguca

SEQ ID NO: 311358 - RNA, 19 nt, Homo sapiens
  misc_RNA (1)...(19): siRNA sense strand
ggacagugccuaccucuau

SEQ ID NO: 311359 - RNA, 19 nt, Homo sapiens
  misc_RNA (1)...(19): siRNA sense strand
ucacagugcgcccugauau

SEQ ID NO: 311360 - RNA, 19 nt, Homo sapiens
  misc_RNA (1)...(19): siRNA sense strand
gacagugccuaccucuauc

SEQ ID NO: 311361 - RNA, 19 nt, Homo sapiens
  misc_RNA (1)...(19): siRNA sense strand
gggugcaccuucaucaaca

SEQ ID NO: 311362 - RNA, 19 nt, Homo sapiens
  misc_RNA (1)...(19): siRNA sense strand
acagugcgcccugauauga

SEQ ID NO: 311363 - RNA, 19 nt, Homo sapiens
  misc_RNA (1)...(19): siRNA sense strand
aggaggcgcugcgucagua

SEQ ID NO: 311364 - RNA, 19 nt, Homo sapiens
  misc_RNA (1)...(19): siRNA sense strand
cguggaggaugcucagaug

SEQ ID NO: 311365 - RNA, 19 nt, Homo sapiens
  misc_RNA (1)...(19): siRNA sense strand
gacaguggcgucucucaag

SEQ ID NO: 311366 - RNA, 19 nt, Homo sapiens
  misc_RNA (1)...(19): siRNA sense strand
ggugcaccuucaucaacaa

SEQ ID NO: 311367 - RNA, 19 nt, Homo sapiens
  misc_RNA (1)...(19): siRNA sense strand
uggcgucucucaaggacau

SEQ ID NO: 311368 - RNA, 19 nt, Homo sapiens
  misc_RNA (1)...(19): siRNA sense strand
cggccuggcugugagaugu

SEQ ID NO: 311369 - RNA, 19 nt, Homo sapiens
  misc_RNA (1)...(19): siRNA sense strand
cuaccucuaucugcuguca

SEQ ID NO: 311370 - RNA, 19 nt, Homo sapiens
  misc_RNA (1)...(19): siRNA sense strand
cgacagagaugcugaaggu

SEQ ID NO: 311371 - RNA, 19 nt, Homo sapiens
  misc_RNA (1)...(19): siRNA sense strand
ggacagugccuaccucuau

SEQ ID NO: 311372 - RNA, 19 nt, Homo sapiens
  misc_RNA (1)...(19): siRNA sense strand
caagggauggugcuucuuu

SEQ ID NO: 311373 - RNA, 19 nt, Homo sapiens
  misc_RNA (1)...(19): siRNA sense strand
gaguucaccugcccugugu

SEQ ID NO: 311374 - RNA, 19 nt, Homo sapiens
  misc_RNA (1)...(19): siRNA sense strand
gaccugggcaucuccauug

SEQ ID NO: 311375 - RNA, 19 nt, Homo sapiens
  misc_RNA (1)...(19): siRNA sense strand
aggaugaugucaaugaguu

SEQ ID NO: 311376 - RNA, 19 nt, Homo sapiens
  misc_RNA (1)...(19): siRNA sense strand
ucaacugccugcucugcaa

SEQ ID NO: 311377 - RNA, 19 nt, Homo sapiens
  misc_RNA (1)...(19): siRNA sense strand
ucaccugcccuguguguuu

SEQ ID NO: 311378 - RNA, 19 nt, Homo sapiens
  misc_RNA (1)...(19): siRNA sense strand
ucacagugcgcccugauau

SEQ ID NO: 311379 - RNA, 19 nt, Homo sapiens
  misc_RNA (1)...(19): siRNA sense strand
cagagaugcugaaggugau

SEQ ID NO: 311380 - RNA, 19 nt, Homo sapiens
  misc_RNA (1)...(19): siRNA sense strand
gacagugccuaccucuauc

SEQ ID NO: 311381 - RNA, 19 nt, Homo sapiens
  misc_RNA (1)...(19): siRNA sense strand
gggugcaccuucaucaaca

SEQ ID NO: 311382 - RNA, 19 nt, Homo sapiens
  misc_RNA (1)...(19): siRNA sense strand
gggcaucuccauugcugaa

SEQ ID NO: 311383 - RNA, 19 nt, Homo sapiens
  misc_RNA (1)...(19): siRNA sense strand
cacccaagcugucagaacu

SEQ ID NO: 311384 - RNA, 19 nt, Homo sapiens
  misc_RNA (1)...(19): siRNA sense strand
acagugcgcccugauauga

SEQ ID NO: 311385 - RNA, 19 nt, Homo sapiens
  misc_RNA (1)...(19): siRNA sense strand
cguggaggaugcucagaug

SEQ ID NO: 311386 - RNA, 19 nt, Homo sapiens
  misc_RNA (1)...(19): siRNA sense strand
aggaggcgcugcgucagua

SEQ ID NO: 311387 - RNA, 19 nt, Homo sapiens
  misc_RNA (1)...(19): siRNA sense strand
ggauuaccagcgauuucua

SEQ ID NO: 311388 - RNA, 19 nt, Homo sapiens
  misc_RNA (1)...(19): siRNA sense strand
gaggauuaccagcgauuuc

SEQ ID NO: 311389 - RNA, 19 nt, Homo sapiens
  misc_RNA (1)...(19): siRNA sense strand
gccagaucgugguacagaa

SEQ ID NO: 311390 - RNA, 19 nt, Homo sapiens
  misc_RNA (1)...(19): siRNA sense strand
gacaguggcgucucucaag

SEQ ID NO: 311391 - RNA, 19 nt, Homo sapiens
  misc_RNA (1)...(19): siRNA sense strand
ggugcaccuucaucaacaa

SEQ ID NO: 311392 - RNA, 19 nt, Homo sapiens
  misc_RNA (1)...(19): siRNA sense strand
ugaggaugaugucaaugag

SEQ ID NO: 311393 - RNA, 19 nt, Homo sapiens
  misc_RNA (1)...(19): siRNA sense strand
gaugaacugcaaggaguau

SEQ ID NO: 311394 - RNA, 19 nt, Homo sapiens
  misc_RNA (1)...(19): siRNA sense strand
gcaucuccauugcugaaaa

SEQ ID NO: 311395 - RNA, 19 nt, Homo sapiens
  misc_RNA (1)...(19): siRNA sense strand
cggccuggcugugagaugu

SEQ ID NO: 311396 - RNA, 19 nt, Homo sapiens
  misc_RNA (1)...(19): siRNA sense strand
ggugcuucuuugaggauga

SEQ ID NO: 311397 - RNA, 19 nt, Homo sapiens
  misc_RNA (1)...(19): siRNA sense strand
aagggauggugcuucuuug

SEQ ID NO: 311398 - RNA, 19 nt, Homo sapiens
  misc_RNA (1)...(19): siRNA sense strand
uggcgucucucaaggacau

SEQ ID NO: 311399 - RNA, 19 nt, Homo sapiens
  misc_RNA (1)...(19): siRNA sense strand
gauuaccagcgauuucuag

SEQ ID NO: 311400 - RNA, 19 nt, Homo sapiens
  misc_RNA (1)...(19): siRNA sense strand
cuaccucuaucugcuguca

SEQ ID NO: 311401 - RNA, 19 nt, Homo sapiens
  misc_RNA (1)...(19): siRNA sense strand
caccugcccuguguguuuc

SEQ ID NO: 311402 - RNA, 19 nt, Homo sapiens
  misc_RNA (1)...(19): siRNA sense strand
aagaaucccuccauuguug

SEQ ID NO: 311403 - RNA, 19 nt, Homo sapiens
  misc_RNA (1)...(19): siRNA sense strand
gaagaaucccuccauuguu

SEQ ID NO: 311404 - RNA, 19 nt, Homo sapiens
  misc_RNA (1)...(19): siRNA sense strand
gugcacagauucacaagga

SEQ ID NO: 311405 - RNA, 19 nt, Homo sapiens
  misc_RNA (1)...(19): siRNA sense strand
ggagugauaucuguucuag

SEQ ID NO: 311406 - RNA, 19 nt, Homo sapiens
  misc_RNA (1)...(19): siRNA sense strand
gcagugauguuuuccagua

SEQ ID NO: 311407 - RNA, 19 nt, Homo sapiens
  misc_RNA (1)...(19): siRNA sense strand
ugagcaugcuggagugaua

SEQ ID NO: 311408 - RNA, 19 nt, Homo sapiens
  misc_RNA (1)...(19): siRNA sense strand
ggaacauuaugauccagaa

SEQ ID NO: 311409 - RNA, 19 nt, Homo sapiens
  misc_RNA (1)...(19): siRNA sense strand
gagcagcacuuggaagaca

SEQ ID NO: 311410 - RNA, 19 nt, Homo sapiens
  misc_RNA (1)...(19): siRNA sense strand
gcgggacccugucagauga

SEQ ID NO: 311411 - RNA, 19 nt, Homo sapiens
  misc_RNA (1)...(19): siRNA sense strand
gcacuuggaagacacaaug

SEQ ID NO: 311412 - RNA, 19 nt, Homo sapiens
  misc_RNA (1)...(19): siRNA sense strand
gaagacacaaugaagaauc

SEQ ID NO: 311413 - RNA, 19 nt, Homo sapiens
  misc_RNA (1)...(19): siRNA sense strand
ugaagaaucccuccauugu

SEQ ID NO: 311414 - RNA, 19 nt, Homo sapiens
  misc_RNA (1)...(19): siRNA sense strand
guugcaccgugaucaauuu

SEQ ID NO: 311415 - RNA, 19 nt, Homo sapiens
  misc_RNA (1)...(19): siRNA sense strand
gaacauuaugauccagaaa

SEQ ID NO: 311416 - RNA, 19 nt, Homo sapiens
  misc_RNA (1)...(19): siRNA sense strand
ggauggaggcgaccuugga

SEQ ID NO: 311417 - RNA, 19 nt, Homo sapiens
  misc_RNA (1)...(19): siRNA sense strand
cgacggaagcgcagugaug

SEQ ID NO: 311418 - RNA, 19 nt, Homo sapiens
  misc_RNA (1)...(19): siRNA sense strand
cggaagcgcagugauguuu

SEQ ID NO: 311419 - RNA, 19 nt, Homo sapiens
  misc_RNA (1)...(19): siRNA sense strand
uggaagacacaaugaagaa

SEQ ID NO: 311420 - RNA, 19 nt, Homo sapiens
  misc_RNA (1)...(19): siRNA sense strand
ggccugugguggagaagga

SEQ ID NO: 311421 - RNA, 19 nt, Homo sapiens
  misc_RNA (1)...(19): siRNA sense strand
ugucuagaaucagauaaug

SEQ ID NO: 311422 - RNA, 19 nt, Homo sapiens
  misc_RNA (1)...(19): siRNA sense strand
ggaagacacaaugaagaau

SEQ ID NO: 311423 - RNA, 19 nt, Homo sapiens
  misc_RNA (1)...(19): siRNA sense strand
uguggugugucuagaauca

SEQ ID NO: 311424 - RNA, 19 nt, Homo sapiens
  misc_RNA (1)...(19): siRNA sense strand
gaagcgcagugauguuuuc

SEQ ID NO: 311425 - RNA, 19 nt, Homo sapiens
  misc_RNA (1)...(19): siRNA sense strand
ggacguugcaccgugauca

SEQ ID NO: 311426 - RNA, 19 nt, Homo sapiens
  misc_RNA (1)...(19): siRNA sense strand
acauuaugauccagaaaca

SEQ ID NO: 311427 - RNA, 19 nt, Homo sapiens
  misc_RNA (1)...(19): siRNA sense strand
gcaccgugaucaauuuugu

SEQ ID NO: 311428 - RNA, 19 nt, Homo sapiens
  misc_RNA (1)...(19): siRNA sense strand
ugaggccugugguggagaa

SEQ ID NO: 311429 - RNA, 19 nt, Homo sapiens
  misc_RNA (1)...(19): siRNA sense strand
ccuguggugugucuagaau

SEQ ID NO: 311430 - RNA, 19 nt, Homo sapiens
  misc_RNA (1)...(19): siRNA sense strand
ugauauuccuguggugugu

SEQ ID NO: 311431 - RNA, 19 nt, Homo sapiens
  misc_RNA (1)...(19): siRNA sense strand
gcacaaaauggccucuuga

SEQ ID NO: 311432 - RNA, 19 nt, Homo sapiens
  misc_RNA (1)...(19): siRNA sense strand
gaucaauuuugucccuuug

SEQ ID NO: 311433 - RNA, 19 nt, Homo sapiens
  misc_RNA (1)...(19): siRNA sense strand
caaugaagaaucccuccau

SEQ ID NO: 311434 - RNA, 19 nt, Homo sapiens
  misc_RNA (1)...(19): siRNA sense strand
gacggaagcgcagugaugu

SEQ ID NO: 311435 - RNA, 19 nt, Homo sapiens
  misc_RNA (1)...(19): siRNA sense strand
gagcaugcuggagugauau

SEQ ID NO: 311436 - RNA, 19 nt, Homo sapiens
  misc_RNA (1)...(19): siRNA sense strand
uggagcagcacuuggaaga

SEQ ID NO: 311437 - RNA, 19 nt, Homo sapiens
  misc_RNA (1)...(19): siRNA sense strand
gaccuuggagcagcacuug

SEQ ID NO: 311438 - RNA, 19 nt, Homo sapiens
  misc_RNA (1)...(19): siRNA sense strand
gcaagcacuucuuucuuua

SEQ ID NO: 311439 - RNA, 19 nt, Homo sapiens
  misc_RNA (1)...(19): siRNA sense strand
ggcaagcacuucuuucuuu

SEQ ID NO: 311440 - RNA, 19 nt, Homo sapiens
  misc_RNA (1)...(19): siRNA sense strand
gcaaugagaagcagaaguu

SEQ ID NO: 311441 - RNA, 19 nt, Homo sapiens
  misc_RNA (1)...(19): siRNA sense strand
ccaggaagauauagacauu

SEQ ID NO: 311442 - RNA, 19 nt, Homo sapiens
  misc_RNA (1)...(19): siRNA sense strand
ggaagaggaaguuggauuu

SEQ ID NO: 311443 - RNA, 19 nt, Homo sapiens
  misc_RNA (1)...(19): siRNA sense strand
ggaaugauggcucagcuuu

SEQ ID NO: 311444 - RNA, 19 nt, Homo sapiens
  misc_RNA (1)...(19): siRNA sense strand
ucccugagcucccagauuu

SEQ ID NO: 311445 - RNA, 19 nt, Homo sapiens
  misc_RNA (1)...(19): siRNA sense strand
gaacacggacagugaggaa

SEQ ID NO: 311446 - RNA, 19 nt, Homo sapiens
  misc_RNA (1)...(19): siRNA sense strand
agaggaaguuggauuugaa

SEQ ID NO: 311447 - RNA, 19 nt, Homo sapiens
  misc_RNA (1)...(19): siRNA sense strand
gcaagacuaugagguccuu

SEQ ID NO: 311448 - RNA, 19 nt, Homo sapiens
  misc_RNA (1)...(19): siRNA sense strand
aggaagauauagacauuga

SEQ ID NO: 311449 - RNA, 19 nt, Homo sapiens
  misc_RNA (1)...(19): siRNA sense strand
gaagaggaaguuggauuug

SEQ ID NO: 311450 - RNA, 19 nt, Homo sapiens
  misc_RNA (1)...(19): siRNA sense strand
gaucuacaguugcaaugag

SEQ ID NO: 311451 - RNA, 19 nt, Homo sapiens
  misc_RNA (1)...(19): siRNA sense strand
caccagugcuccaggaaga

SEQ ID NO: 311452 - RNA, 19 nt, Homo sapiens
  misc_RNA (1)...(19): siRNA sense strand
ggacagcacgcaccucauc

SEQ ID NO: 311453 - RNA, 19 nt, Homo sapiens
  misc_RNA (1)...(19): siRNA sense strand
ggauuugaaccaagaagaa

SEQ ID NO: 311454 - RNA, 19 nt, Homo sapiens
  misc_RNA (1)...(19): siRNA sense strand
gggaagaggaaguuggauu

SEQ ID NO: 311455 - RNA, 19 nt, Homo sapiens
  misc_RNA (1)...(19): siRNA sense strand
aagaggaaguuggauuuga

SEQ ID NO: 311456 - RNA, 19 nt, Homo sapiens
  misc_RNA (1)...(19): siRNA sense strand
gaucacagcacaggaaugg

SEQ ID NO: 311457 - RNA, 19 nt, Homo sapiens
  misc_RNA (1)...(19): siRNA sense strand
cccgauggaucuacaguug

SEQ ID NO: 311458 - RNA, 19 nt, Homo sapiens
  misc_RNA (1)...(19): siRNA sense strand
gcagccagcccuacagcaa

SEQ ID NO: 311459 - RNA, 19 nt, Homo sapiens
  misc_RNA (1)...(19): siRNA sense strand
ccaaagggaagaggaaguu

SEQ ID NO: 311460 - RNA, 19 nt, Homo sapiens
  misc_RNA (1)...(19): siRNA sense strand
gauuugaaccaagaagaaa

SEQ ID NO: 311461 - RNA, 19 nt, Homo sapiens
  misc_RNA (1)...(19): siRNA sense strand
caaugagaagcagaaguua

SEQ ID NO: 311462 - RNA, 19 nt, Homo sapiens
  misc_RNA (1)...(19): siRNA sense strand
ggucaccucaucuuucaug

SEQ ID NO: 311463 - RNA, 19 nt, Homo sapiens
  misc_RNA (1)...(19): siRNA sense strand
cgauggaucuacaguugca

SEQ ID NO: 311464 - RNA, 19 nt, Homo sapiens
  misc_RNA (1)...(19): siRNA sense strand
gggcaagcacuucuuucuu

SEQ ID NO: 311465 - RNA, 19 nt, Homo sapiens
  misc_RNA (1)...(19): siRNA sense strand
gcucgaggacuauaugagu

SEQ ID NO: 311466 - RNA, 19 nt, Homo sapiens
  misc_RNA (1)...(19): siRNA sense strand
gaaugauggcucagcuuuc

SEQ ID NO: 311467 - RNA, 19 nt, Homo sapiens
  misc_RNA (1)...(19): siRNA sense strand
ugagugaccggguucaguu

SEQ ID NO: 311468 - RNA, 19 nt, Homo sapiens
  misc_RNA (1)...(19): siRNA sense strand
cagaaggacaggacaaugg

SEQ ID NO: 311469 - RNA, 19 nt, Homo sapiens
  misc_RNA (1)...(19): siRNA sense strand
ggcagacacuuaccgaaaa

SEQ ID NO: 311470 - RNA, 19 nt, Homo sapiens
  misc_RNA (1)...(19): siRNA sense strand
ggagcucgaggacuauaug

SEQ ID NO: 311471 - RNA, 19 nt, Homo sapiens
  misc_RNA (1)...(19): siRNA sense strand
ccagggcaagcacuucuuu

SEQ ID NO: 311472 - RNA, 19 nt, Homo sapiens
  misc_RNA (1)...(19): siRNA sense strand
caccucaucugugccuuug

SEQ ID NO: 311473 - RNA, 19 nt, Homo sapiens
  misc_RNA (1)...(19): siRNA sense strand
uggcagagcagaaggaaca

SEQ ID NO: 311474 - RNA, 19 nt, Homo sapiens
  misc_RNA (1)...(19): siRNA sense strand
ccagugcuccaggaagaua

SEQ ID NO: 311475 - RNA, 19 nt, Homo sapiens
  misc_RNA (1)...(19): siRNA sense strand
ggaucuacaguugcaauga

SEQ ID NO: 311476 - RNA, 19 nt, Homo sapiens
  misc_RNA (1)...(19): siRNA sense strand
cuggucaccucaucuuuca

SEQ ID NO: 311477 - RNA, 19 nt, Homo sapiens
  misc_RNA (1)...(19): siRNA sense strand
gagcucgaggacuauauga

SEQ ID NO: 311478 - RNA, 19 nt, Homo sapiens
  misc_RNA (1)...(19): siRNA sense strand
ggaaguuggauuugaacca

SEQ ID NO: 311479 - RNA, 19 nt, Homo sapiens
  misc_RNA (1)...(19): siRNA sense strand
agauaaggcccuagagcuu

SEQ ID NO: 311480 - RNA, 19 nt, Homo sapiens
  misc_RNA (1)...(19): siRNA sense strand
gcagacacuuaccgaaaau

SEQ ID NO: 311481 - RNA, 19 nt, Homo sapiens
  misc_RNA (1)...(19): siRNA sense strand
gaaccaagaagaaaagaag

SEQ ID NO: 311482 - RNA, 19 nt, Homo sapiens
  misc_RNA (1)...(19): siRNA sense strand
gagugaccggguucaguuu

SEQ ID NO: 311483 - RNA, 19 nt, Homo sapiens
  misc_RNA (1)...(19): siRNA sense strand
ggaaacucauccgauacgu

SEQ ID NO: 311484 - RNA, 19 nt, Homo sapiens
  misc_RNA (1)...(19): siRNA sense strand
aggcagacacuuaccgaaa

SEQ ID NO: 311485 - RNA, 19 nt, Homo sapiens
  misc_RNA (1)...(19): siRNA sense strand
ucgacucacugugcagaaa

SEQ ID NO: 311486 - RNA, 19 nt, Homo sapiens
  misc_RNA (1)...(19): siRNA sense strand
uaaauugccagcuccaacu

SEQ ID NO: 311487 - RNA, 19 nt, Homo sapiens
  misc_RNA (1)...(19): siRNA sense strand
aggaggcccugauggacaa

SEQ ID NO: 311488 - RNA, 19 nt, Homo sapiens
  misc_RNA (1)...(19): siRNA sense strand
gugaccggguucaguuugu

SEQ ID NO: 311489 - RNA, 19 nt, Homo sapiens
  misc_RNA (1)...(19): siRNA sense strand
gcagccaggacucgacuca

SEQ ID NO: 311490 - RNA, 19 nt, Homo sapiens
  misc_RNA (1)...(19): siRNA sense strand
caaguacagccagguccua

SEQ ID NO: 311491 - RNA, 19 nt, Homo sapiens
  misc_RNA (1)...(19): siRNA sense strand
ggaggguggcagagcagaa

SEQ ID NO: 311492 - RNA, 19 nt, Homo sapiens
  misc_RNA (1)...(19): siRNA sense strand
cagaggagcuggggaagau

SEQ ID NO: 311493 - RNA, 19 nt, Homo sapiens
  misc_RNA (1)...(19): siRNA sense strand
gugugaaggaggaggauga

SEQ ID NO: 311494 - RNA, 19 nt, Homo sapiens
  misc_RNA (1)...(19): siRNA sense strand
aaugauggcucagcuuucg

SEQ ID NO: 311495 - RNA, 19 nt, Homo sapiens
  misc_RNA (1)...(19): siRNA sense strand
gauccuucaggguguggua

SEQ ID NO: 311496 - RNA, 19 nt, Homo sapiens
  misc_RNA (1)...(19): siRNA sense strand
cgccaucuguucccaagag

SEQ ID NO: 311497 - RNA, 19 nt, Homo sapiens
  misc_RNA (1)...(19): siRNA sense strand
caaagggaagaggaaguug

SEQ ID NO: 311498 - RNA, 19 nt, Homo sapiens
  misc_RNA (1)...(19): siRNA sense strand
gcaaugaaccugugucuga

SEQ ID NO: 311499 - RNA, 19 nt, Homo sapiens
  misc_RNA (1)...(19): siRNA sense strand
ggaaccaccuccuccagua

SEQ ID NO: 311500 - RNA, 19 nt, Homo sapiens
  misc_RNA (1)...(19): siRNA sense strand
uggagaagcuuaucaagaa

SEQ ID NO: 311501 - RNA, 19 nt, Homo sapiens
  misc_RNA (1)...(19): siRNA sense strand
guagauuccucagccauua

SEQ ID NO: 311502 - RNA, 19 nt, Homo sapiens
  misc_RNA (1)...(19): siRNA sense strand
ccacagggaucucaaguca

SEQ ID NO: 311503 - RNA, 19 nt, Homo sapiens
  misc_RNA (1)...(19): siRNA sense strand
ccaacaaccuguauaugga

SEQ ID NO: 311504 - RNA, 19 nt, Homo sapiens
  misc_RNA (1)...(19): siRNA sense strand
ccaaggagcugagugacaa

SEQ ID NO: 311505 - RNA, 19 nt, Homo sapiens
  misc_RNA (1)...(19): siRNA sense strand
gcaccaagauguccuuugc

SEQ ID NO: 311506 - RNA, 19 nt, Homo sapiens
  misc_RNA (1)...(19): siRNA sense strand
caaagaaaccgacaucaag

SEQ ID NO: 311507 - RNA, 19 nt, Homo sapiens
  misc_RNA (1)...(19): siRNA sense strand
gacaagagcaccaagaugu

SEQ ID NO: 311508 - RNA, 19 nt, Homo sapiens
  misc_RNA (1)...(19): siRNA sense strand
gcacugaauuggacaacuc

SEQ ID NO: 311509 - RNA, 19 nt, Homo sapiens
  misc_RNA (1)...(19): siRNA sense strand
ucagaaacguggcaucuca

SEQ ID NO: 311510 - RNA, 19 nt, Homo sapiens
  misc_RNA (1)...(19): siRNA sense strand
gggaggagguggcugugaa

SEQ ID NO: 311511 - RNA, 19 nt, Homo sapiens
  misc_RNA (1)...(19): siRNA sense strand
ggucaucccuggcccugaa

SEQ ID NO: 311512 - RNA, 19 nt, Homo sapiens
  misc_RNA (1)...(19): siRNA sense strand
gaacaugcgccagucacua

SEQ ID NO: 311513 - RNA, 19 nt, Homo sapiens
  misc_RNA (1)...(19): siRNA sense strand
gcagcugggucaccugaga

SEQ ID NO: 311514 - RNA, 19 nt, Homo sapiens
  misc_RNA (1)...(19): siRNA sense strand
gaagaggaacuggugauga

SEQ ID NO: 311515 - RNA, 19 nt, Homo sapiens
  misc_RNA (1)...(19): siRNA sense strand
ggagguggcugugaagaag

SEQ ID NO: 311516 - RNA, 19 nt, Homo sapiens
  misc_RNA (1)...(19): siRNA sense strand
gcucagagaauccaucaga

SEQ ID NO: 311517 - RNA, 19 nt, Homo sapiens
  misc_RNA (1)...(19): siRNA sense strand
gaaacacaauggagaagcu

SEQ ID NO: 311518 - RNA, 19 nt, Homo sapiens
  misc_RNA (1)...(19): siRNA sense strand
gaacuuaaugcccucaugu

SEQ ID NO: 311519 - RNA, 19 nt, Homo sapiens
  misc_RNA (1)...(19): siRNA sense strand
gaucucaagucacccaaca

SEQ ID NO: 311520 - RNA, 19 nt, Homo sapiens
  misc_RNA (1)...(19): siRNA sense strand
ccaacaugcuaaucaccua

SEQ ID NO: 311521 - RNA, 19 nt, Homo sapiens
  misc_RNA (1)...(19): siRNA sense strand
ggaaggagagguagacagu

SEQ ID NO: 311522 - RNA, 19 nt, Homo sapiens
  misc_RNA (1)...(19): siRNA sense strand
aaggagagguagacaguga

SEQ ID NO: 311523 - RNA, 19 nt, Homo sapiens
  misc_RNA (1)...(19): siRNA sense strand
ggaacuuaaugcccucaug

SEQ ID NO: 311524 - RNA, 19 nt, Homo sapiens
  misc_RNA (1)...(19): siRNA sense strand
ggacauugccucagcugau

SEQ ID NO: 311525 - RNA, 19 nt, Homo sapiens
  misc_RNA (1)...(19): siRNA sense strand
gaaguagagcugacaucaa

SEQ ID NO: 311526 - RNA, 19 nt, Homo sapiens
  misc_RNA (1)...(19): siRNA sense strand
gcaaagccuacuccacuga

SEQ ID NO: 311527 - RNA, 19 nt, Homo sapiens
  misc_RNA (1)...(19): siRNA sense strand
aaaccgacaucaagcacuu

SEQ ID NO: 311528 - RNA, 19 nt, Homo sapiens
  misc_RNA (1)...(19): siRNA sense strand
ucaaagaaaccgacaucaa

SEQ ID NO: 311529 - RNA, 19 nt, Homo sapiens
  misc_RNA (1)...(19): siRNA sense strand
aaguagagcugacaucaag

SEQ ID NO: 311530 - RNA, 19 nt, Homo sapiens
  misc_RNA (1)...(19): siRNA sense strand
gacauugccucagcugaug

SEQ ID NO: 311531 - RNA, 19 nt, Homo sapiens
  misc_RNA (1)...(19): siRNA sense strand
gaugagcggucugaugaca

SEQ ID NO: 311532 - RNA, 19 nt, Homo sapiens
  misc_RNA (1)...(19): siRNA sense strand
ggaaggcacagcuagugaa

SEQ ID NO: 311533 - RNA, 19 nt, Homo sapiens
  misc_RNA (1)...(19): siRNA sense strand
agagguagacagugaagua

SEQ ID NO: 311534 - RNA, 19 nt, Homo sapiens
  misc_RNA (1)...(19): siRNA sense strand
ggagaagcuuaucaagaag

SEQ ID NO: 311535 - RNA, 19 nt, Homo sapiens
  misc_RNA (1)...(19): siRNA sense strand
gagccaacaaccuguauau

SEQ ID NO: 311536 - RNA, 19 nt, Homo sapiens
  misc_RNA (1)...(19): siRNA sense strand
cccaggagacuuacuuuaa

SEQ ID NO: 311537 - RNA, 19 nt, Homo sapiens
  misc_RNA (1)...(19): siRNA sense strand
ugacugcacucccgagaag

SEQ ID NO: 311538 - RNA, 19 nt, Homo sapiens
  misc_RNA (1)...(19): siRNA sense strand
gcuaaucaccuacgacgau

SEQ ID NO: 311539 - RNA, 19 nt, Homo sapiens
  misc_RNA (1)...(19): siRNA sense strand
gguagacagugaaguagag

SEQ ID NO: 311540 - RNA, 19 nt, Homo sapiens
  misc_RNA (1)...(19): siRNA sense strand
caacaaccuguauauggaa

SEQ ID NO: 311541 - RNA, 19 nt, Homo sapiens
  misc_RNA (1)...(19): siRNA sense strand
gaauagcaaaccacgaaau

SEQ ID NO: 311542 - RNA, 19 nt, Homo sapiens
  misc_RNA (1)...(19): siRNA sense strand
caagucacccaacaugcua

SEQ ID NO: 311543 - RNA, 19 nt, Homo sapiens
  misc_RNA (1)...(19): siRNA sense strand
gugcgagaccucaaagaaa

SEQ ID NO: 311544 - RNA, 19 nt, Homo sapiens
  misc_RNA (1)...(19): siRNA sense strand
ggccagauauccucaagac

SEQ ID NO: 311545 - RNA, 19 nt, Homo sapiens
  misc_RNA (1)...(19): siRNA sense strand
gucgacaucugguccuuug

SEQ ID NO: 311546 - RNA, 19 nt, Homo sapiens
  misc_RNA (1)...(19): siRNA sense strand
gccaacaaccuguauaugg

SEQ ID NO: 311547 - RNA, 19 nt, Homo sapiens
  misc_RNA (1)...(19): siRNA sense strand
ggugcgagaccucaaagaa

SEQ ID NO: 311548 - RNA, 19 nt, Homo sapiens
  misc_RNA (1)...(19): siRNA sense strand
ugagcggucugaugacaug

SEQ ID NO: 311549 - RNA, 19 nt, Homo sapiens
  misc_RNA (1)...(19): siRNA sense strand
gagaagcuuaucaagaaga

SEQ ID NO: 311550 - RNA, 19 nt, Homo sapiens
  misc_RNA (1)...(19): siRNA sense strand
gaacacccucuccuuccuu

SEQ ID NO: 311551 - RNA, 19 nt, Homo sapiens
  misc_RNA (1)...(19): siRNA sense strand
ggacaucagggagcacuau

SEQ ID NO: 311552 - RNA, 19 nt, Homo sapiens
  misc_RNA (1)...(19): siRNA sense strand
ggaauagcaaaccacgaaa

SEQ ID NO: 311553 - RNA, 19 nt, Homo sapiens
  misc_RNA (1)...(19): siRNA sense strand
gccagucacuaucuaccuu

SEQ ID NO: 311554 - RNA, 19 nt, Homo sapiens
  misc_RNA (1)...(19): siRNA sense strand
uuaaugcccucauguugca

SEQ ID NO: 311555 - RNA, 19 nt, Homo sapiens
  misc_RNA (1)...(19): siRNA sense strand
ggagggaggagcucagaca

SEQ ID NO: 311556 - RNA, 19 nt, Homo sapiens
  misc_RNA (1)...(19): siRNA sense strand
aagaggaacuggugaugag

SEQ ID NO: 311557 - RNA, 19 nt, Homo sapiens
  misc_RNA (1)...(19): siRNA sense strand
cacgaaaucgcccaucauu

SEQ ID NO: 311558 - RNA, 19 nt, Homo sapiens
  misc_RNA (1)...(19): siRNA sense strand
gcagcuacaugagcaggau

SEQ ID NO: 311559 - RNA, 19 nt, Homo sapiens
  misc_RNA (1)...(19): siRNA sense strand
caauggagaagcuuaucaa

SEQ ID NO: 311560 - RNA, 19 nt, Homo sapiens
  misc_RNA (1)...(19): siRNA sense strand
caucagggagcacuaugaa

SEQ ID NO: 311561 - RNA, 19 nt, Homo sapiens
  misc_RNA (1)...(19): siRNA sense strand
cgaaaucgcccaucauucc

SEQ ID NO: 311562 - RNA, 19 nt, Homo sapiens
  misc_RNA (1)...(19): siRNA sense strand
gaggugauccgcaaugaac

SEQ ID NO: 311563 - RNA, 19 nt, Homo sapiens
  misc_RNA (1)...(19): siRNA sense strand
caaccuguauauggaacuu

SEQ ID NO: 311564 - RNA, 19 nt, Homo sapiens
  misc_RNA (1)...(19): siRNA sense strand
uggaauagcaaaccacgaa

SEQ ID NO: 311565 - RNA, 19 nt, Homo sapiens
  misc_RNA (1)...(19): siRNA sense strand
gaacugcugacuggugaga

SEQ ID NO: 311566 - RNA, 19 nt, Homo sapiens
  misc_RNA (1)...(19): siRNA sense strand
gcuacugcauccucaugga

SEQ ID NO: 311567 - RNA, 19 nt, Homo sapiens
  misc_RNA (1)...(19): siRNA sense strand
caggcgagagcaagcuuua

SEQ ID NO: 311568 - RNA, 19 nt, Homo sapiens
  misc_RNA (1)...(19): siRNA sense strand
ccaguugcccagaugguuu

SEQ ID NO: 311569 - RNA, 19 nt, Homo sapiens
  misc_RNA (1)...(19): siRNA sense strand
ggcuuugugucuacccuaa

SEQ ID NO: 311570 - RNA, 19 nt, Homo sapiens
  misc_RNA (1)...(19): siRNA sense strand
gaggaaggcacagcuagug

SEQ ID NO: 311571 - RNA, 19 nt, Homo sapiens
  misc_RNA (1)...(19): siRNA sense strand
gcacaagcagcagcaggaa

SEQ ID NO: 311572 - RNA, 19 nt, Homo sapiens
  misc_RNA (1)...(19): siRNA sense strand
ucagggagcacuaugaaag

SEQ ID NO: 311573 - RNA, 19 nt, Homo sapiens
  misc_RNA (1)...(19): siRNA sense strand
acaagcagcagcaggaaga

SEQ ID NO: 311574 - RNA, 19 nt, Homo sapiens
  misc_RNA (1)...(19): siRNA sense strand
ccaacaucaucacuuucaa

SEQ ID NO: 311575 - RNA, 19 nt, Homo sapiens
  misc_RNA (1)...(19): siRNA sense strand
gaagcaacagucuccaucu

SEQ ID NO: 311576 - RNA, 19 nt, Homo sapiens
  misc_RNA (1)...(19): siRNA sense strand
ccacuggacccaccuccuu

SEQ ID NO: 311577 - RNA, 19 nt, Homo sapiens
  misc_RNA (1)...(19): siRNA sense strand
cugaugagcggccagauga

SEQ ID NO: 311578 - RNA, 19 nt, Homo sapiens
  misc_RNA (1)...(19): siRNA sense strand
gaaccaccuccuccaguag

SEQ ID NO: 311579 - RNA, 19 nt, Homo sapiens
  misc_RNA (1)...(19): siRNA sense strand
cagaagcugucaccccaua

SEQ ID NO: 311580 - RNA, 19 nt, Homo sapiens
  misc_RNA (1)...(19): siRNA sense strand
ggcgagagcaagcuuuaga

SEQ ID NO: 311581 - RNA, 19 nt, Homo sapiens
  misc_RNA (1)...(19): siRNA sense strand
caacaucaucacuuucaag

SEQ ID NO: 311582 - RNA, 19 nt, Homo sapiens
  misc_RNA (1)...(19): siRNA sense strand
gcagcaccaacacugauga

SEQ ID NO: 311583 - RNA, 19 nt, Homo sapiens
  misc_RNA (1)...(19): siRNA sense strand
ggaggaaggcacagcuagu

SEQ ID NO: 311584 - RNA, 19 nt, Homo sapiens
  misc_RNA (1)...(19): siRNA sense strand
gaguggcaguggcuuccuu

SEQ ID NO: 311585 - RNA, 19 nt, Homo sapiens
  misc_RNA (1)...(19): siRNA sense strand
gcccagaugguuucaagau

SEQ ID NO: 311586 - RNA, 19 nt, Homo sapiens
  misc_RNA (1)...(19): siRNA sense strand
ucacccaacaugcuaauca

SEQ ID NO: 311587 - RNA, 19 nt, Homo sapiens
  misc_RNA (1)...(19): siRNA sense strand
cugagaaggucgacaucug

SEQ ID NO: 311588 - RNA, 19 nt, Homo sapiens
  misc_RNA (1)...(19): siRNA sense strand
ugaaguagagcugacauca

SEQ ID NO: 311589 - RNA, 19 nt, Homo sapiens
  misc_RNA (1)...(19): siRNA sense strand
ugacaagagcaccaagaug

SEQ ID NO: 311590 - RNA, 19 nt, Homo sapiens
  misc_RNA (1)...(19): siRNA sense strand
cgcccugucuggaccauga

SEQ ID NO: 311591 - RNA, 19 nt, Homo sapiens
  misc_RNA (1)...(19): siRNA sense strand
cuacgacgauguggugaag

SEQ ID NO: 311592 - RNA, 19 nt, Homo sapiens
  misc_RNA (1)...(19): siRNA sense strand
aagcaacagucuccaucug

SEQ ID NO: 311593 - RNA, 19 nt, Homo sapiens
  misc_RNA (1)...(19): siRNA sense strand
ccacaccccaggagacuua

SEQ ID NO: 311594 - RNA, 19 nt, Homo sapiens
  misc_RNA (1)...(19): siRNA sense strand
gagagccaacaaccuguau

SEQ ID NO: 311595 - RNA, 19 nt, Homo sapiens
  misc_RNA (1)...(19): siRNA sense strand
ugcgagaccucaaagaaac

SEQ ID NO: 311596 - RNA, 19 nt, Homo sapiens
  misc_RNA (1)...(19): siRNA sense strand
guaaaacugcacuuugaaa

SEQ ID NO: 311597 - RNA, 19 nt, Homo sapiens
  misc_RNA (1)...(19): siRNA sense strand
gaaggcacagcuagugaac

SEQ ID NO: 311598 - RNA, 19 nt, Homo sapiens
  misc_RNA (1)...(19): siRNA sense strand
gcaaauggcuucugaaaga

SEQ ID NO: 311599 - RNA, 19 nt, Homo sapiens
  misc_RNA (1)...(19): siRNA sense strand
ggagaggucuguucacuua

SEQ ID NO: 311600 - RNA, 19 nt, Homo sapiens
  misc_RNA (1)...(19): siRNA sense strand
gcaagccacugaagaauua

SEQ ID NO: 311601 - RNA, 19 nt, Homo sapiens
  misc_RNA (1)...(19): siRNA sense strand
gaacaaaucucaaccaagu

SEQ ID NO: 311602 - RNA, 19 nt, Homo sapiens
  misc_RNA (1)...(19): siRNA sense strand
caacaaaucuucagaaaca

SEQ ID NO: 311603 - RNA, 19 nt, Homo sapiens
  misc_RNA (1)...(19): siRNA sense strand
gaauaaggcuuguuuccua

SEQ ID NO: 311604 - RNA, 19 nt, Homo sapiens
  misc_RNA (1)...(19): siRNA sense strand
gaacagguaucuaguaguu

SEQ ID NO: 311605 - RNA, 19 nt, Homo sapiens
  misc_RNA (1)...(19): siRNA sense strand
gaucagacuucuaugaaua

SEQ ID NO: 311606 - RNA, 19 nt, Homo sapiens
  misc_RNA (1)...(19): siRNA sense strand
caagauaagugugauguua

SEQ ID NO: 311607 - RNA, 19 nt, Homo sapiens
  misc_RNA (1)...(19): siRNA sense strand
guugagaccuccuuaaaua

SEQ ID NO: 311608 - RNA, 19 nt, Homo sapiens
  misc_RNA (1)...(19): siRNA sense strand
gaaagucgaucaucugguu

SEQ ID NO: 311609 - RNA, 19 nt, Homo sapiens
  misc_RNA (1)...(19): siRNA sense strand
gcauauacuuccuuugaua

SEQ ID NO: 311610 - RNA, 19 nt, Homo sapiens
  misc_RNA (1)...(19): siRNA sense strand
ggaagaggaagacauauua

SEQ ID NO: 311611 - RNA, 19 nt, Homo sapiens
  misc_RNA (1)...(19): siRNA sense strand
gaagcugacucuuuggaua

SEQ ID NO: 311612 - RNA, 19 nt, Homo sapiens
  misc_RNA (1)...(19): siRNA sense strand
caauagaucuuucugcaaa

SEQ ID NO: 311613 - RNA, 19 nt, Homo sapiens
  misc_RNA (1)...(19): siRNA sense strand
ggaagaagguaauuuaaag

SEQ ID NO: 311614 - RNA, 19 nt, Homo sapiens
  misc_RNA (1)...(19): siRNA sense strand
ugacagacccugaauauaa

SEQ ID NO: 311615 - RNA, 19 nt, Homo sapiens
  misc_RNA (1)...(19): siRNA sense strand
gaacauaaauccauaucca

SEQ ID NO: 311616 - RNA, 19 nt, Homo sapiens
  misc_RNA (1)...(19): siRNA sense strand
ucaaguagauccuauagaa

SEQ ID NO: 311617 - RNA, 19 nt, Homo sapiens
  misc_RNA (1)...(19): siRNA sense strand
gcaaagaagaguuuaguuu

SEQ ID NO: 311618 - RNA, 19 nt, Homo sapiens
  misc_RNA (1)...(19): siRNA sense strand
gaauggaguuguucaaaug

SEQ ID NO: 311619 - RNA, 19 nt, Homo sapiens
  misc_RNA (1)...(19): siRNA sense strand
gaaauaaaccuagcuagaa

SEQ ID NO: 311620 - RNA, 19 nt, Homo sapiens
  misc_RNA (1)...(19): siRNA sense strand
agaaagaggugaugacauu

SEQ ID NO: 311621 - RNA, 19 nt, Homo sapiens
  misc_RNA (1)...(19): siRNA sense strand
gcacaucugucacucauuc

SEQ ID NO: 311622 - RNA, 19 nt, Homo sapiens
  misc_RNA (1)...(19): siRNA sense strand
gagaccuccuuaaauauua

SEQ ID NO: 311623 - RNA, 19 nt, Homo sapiens
  misc_RNA (1)...(19): siRNA sense strand
gaaugaugcuuauuugguu

SEQ ID NO: 311624 - RNA, 19 nt, Homo sapiens
  misc_RNA (1)...(19): siRNA sense strand
gcagugagguaccauauuc

SEQ ID NO: 311625 - RNA, 19 nt, Homo sapiens
  misc_RNA (1)...(19): siRNA sense strand
aaacauaguucucuagaug

SEQ ID NO: 311626 - RNA, 19 nt, Homo sapiens
  misc_RNA (1)...(19): siRNA sense strand
aagcagaacuugauaagaa

SEQ ID NO: 311627 - RNA, 19 nt, Homo sapiens
  misc_RNA (1)...(19): siRNA sense strand
aaacugagguucaagagaa

SEQ ID NO: 311628 - RNA, 19 nt, Homo sapiens
  misc_RNA (1)...(19): siRNA sense strand
gcaaagaaucugauauuga

SEQ ID NO: 311629 - RNA, 19 nt, Homo sapiens
  misc_RNA (1)...(19): siRNA sense strand
ucacaaggcuaccaacaaa

SEQ ID NO: 311630 - RNA, 19 nt, Homo sapiens
  misc_RNA (1)...(19): siRNA sense strand
gaaaugauagugcaagauu

SEQ ID NO: 311631 - RNA, 19 nt, Homo sapiens
  misc_RNA (1)...(19): siRNA sense strand
gaagaaccaggcucaauaa

SEQ ID NO: 311632 - RNA, 19 nt, Homo sapiens
  misc_RNA (1)...(19): siRNA sense strand
ucagaaagcagaaagauaa

SEQ ID NO: 311633 - RNA, 19 nt, Homo sapiens
  misc_RNA (1)...(19): siRNA sense strand
caacugucauuacuucuuu

SEQ ID NO: 311634 - RNA, 19 nt, Homo sapiens
  misc_RNA (1)...(19): siRNA sense strand
gaaccaggcucaauaacca

SEQ ID NO: 311635 - RNA, 19 nt, Homo sapiens
  misc_RNA (1)...(19): siRNA sense strand
gacagacccugaauauaaa

SEQ ID NO: 311636 - RNA, 19 nt, Homo sapiens
  misc_RNA (1)...(19): siRNA sense strand
ugagggagcuugcccaauu

SEQ ID NO: 311637 - RNA, 19 nt, Homo sapiens
  misc_RNA (1)...(19): siRNA sense strand
ggaggaagauguaguugau

SEQ ID NO: 311638 - RNA, 19 nt, Homo sapiens
  misc_RNA (1)...(19): siRNA sense strand
ggucaacccucgcuccuuu

SEQ ID NO: 311639 - RNA, 19 nt, Homo sapiens
  misc_RNA (1)...(19): siRNA sense strand
uaaggaaguuucaggauga

SEQ ID NO: 311640 - RNA, 19 nt, Homo sapiens
  misc_RNA (1)...(19): siRNA sense strand
gcacacauaugucuucaag

SEQ ID NO: 311641 - RNA, 19 nt, Homo sapiens
  misc_RNA (1)...(19): siRNA sense strand
agaggaagcugaugacuug

SEQ ID NO: 311642 - RNA, 19 nt, Homo sapiens
  misc_RNA (1)...(19): siRNA sense strand
aaacugguccuucuaauaa

SEQ ID NO: 311643 - RNA, 19 nt, Homo sapiens
  misc_RNA (1)...(19): siRNA sense strand
gaaauuacaagucagaaga

SEQ ID NO: 311644 - RNA, 19 nt, Homo sapiens
  misc_RNA (1)...(19): siRNA sense strand
gaaaaugauuggacaguuu

SEQ ID NO: 311645 - RNA, 19 nt, Homo sapiens
  misc_RNA (1)...(19): siRNA sense strand
ggaaauaaaccuagcuaga

SEQ ID NO: 311646 - RNA, 19 nt, Homo sapiens
  misc_RNA (1)...(19): siRNA sense strand
aaacgagugugguaaauug

SEQ ID NO: 311647 - RNA, 19 nt, Homo sapiens
  misc_RNA (1)...(19): siRNA sense strand
ggaaaguaauaagcacaua

SEQ ID NO: 311648 - RNA, 19 nt, Homo sapiens
  misc_RNA (1)...(19): siRNA sense strand
caagggaaaugcaaaguca

SEQ ID NO: 311649 - RNA, 19 nt, Homo sapiens
  misc_RNA (1)...(19): siRNA sense strand
gaaagaguaugcacaucug

SEQ ID NO: 311650 - RNA, 19 nt, Homo sapiens
  misc_RNA (1)...(19): siRNA sense strand
ccaugacacugauaucuuu

SEQ ID NO: 311651 - RNA, 19 nt, Homo sapiens
  misc_RNA (1)...(19): siRNA sense strand
ggaagcugaugacuugaaa

SEQ ID NO: 311652 - RNA, 19 nt, Homo sapiens
  misc_RNA (1)...(19): siRNA sense strand
gcucaucauucaauucaaa

SEQ ID NO: 311653 - RNA, 19 nt, Homo sapiens
  misc_RNA (1)...(19): siRNA sense strand
gcaauaagugcugguguua

SEQ ID NO: 311654 - RNA, 19 nt, Homo sapiens
  misc_RNA (1)...(19): siRNA sense strand
gauaaacuguaugcucuuu

SEQ ID NO: 311655 - RNA, 19 nt, Homo sapiens
  misc_RNA (1)...(19): siRNA sense strand
gaaagaacaagacaugguu

SEQ ID NO: 311656 - RNA, 19 nt, Homo sapiens
  misc_RNA (1)...(19): siRNA sense strand
gaaagcugcuguugccaau

SEQ ID NO: 311657 - RNA, 19 nt, Homo sapiens
  misc_RNA (1)...(19): siRNA sense strand
caaugacacuggugaagaa

SEQ ID NO: 311658 - RNA, 19 nt, Homo sapiens
  misc_RNA (1)...(19): siRNA sense strand
gauaaaguguuuccucaca

SEQ ID NO: 311659 - RNA, 19 nt, Homo sapiens
  misc_RNA (1)...(19): siRNA sense strand
gcaggaagggagccauuua

SEQ ID NO: 311660 - RNA, 19 nt, Homo sapiens
  misc_RNA (1)...(19): siRNA sense strand
guagagaacaagaagauuu

SEQ ID NO: 311661 - RNA, 19 nt, Homo sapiens
  misc_RNA (1)...(19): siRNA sense strand
uaacacauuugacuugaug

SEQ ID NO: 311662 - RNA, 19 nt, Homo sapiens
  misc_RNA (1)...(19): siRNA sense strand
gaagagaacaauaaagcaa

SEQ ID NO: 311663 - RNA, 19 nt, Homo sapiens
  misc_RNA (1)...(19): siRNA sense strand
gugaugacauucagaaaga

SEQ ID NO: 311664 - RNA, 19 nt, Homo sapiens
  misc_RNA (1)...(19): siRNA sense strand
gcagaugugucaccuaugg

SEQ ID NO: 311665 - RNA, 19 nt, Homo sapiens
  misc_RNA (1)...(19): siRNA sense strand
gcucaaggucccagauuua

SEQ ID NO: 311666 - RNA, 19 nt, Homo sapiens
  misc_RNA (1)...(19): siRNA sense strand
gcaauaaauuccagguauc

SEQ ID NO: 311667 - RNA, 19 nt, Homo sapiens
  misc_RNA (1)...(19): siRNA sense strand
gaagaggaagacauauuaa

SEQ ID NO: 311668 - RNA, 19 nt, Homo sapiens
  misc_RNA (1)...(19): siRNA sense strand
gaaagaauagcaaaucauc

SEQ ID NO: 311669 - RNA, 19 nt, Homo sapiens
  misc_RNA (1)...(19): siRNA sense strand
ggaaagacaagauaagugu

SEQ ID NO: 311670 - RNA, 19 nt, Homo sapiens
  misc_RNA (1)...(19): siRNA sense strand
gcaaccaaaggaauucuua

SEQ ID NO: 311671 - RNA, 19 nt, Homo sapiens
  misc_RNA (1)...(19): siRNA sense strand
cgaaucaguuucuacaaga

SEQ ID NO: 311672 - RNA, 19 nt, Homo sapiens
  misc_RNA (1)...(19): siRNA sense strand
gaaaucggucaaagagaua

SEQ ID NO: 311673 - RNA, 19 nt, Homo sapiens
  misc_RNA (1)...(19): siRNA sense strand
gaggagucaucauuagaaa

SEQ ID NO: 311674 - RNA, 19 nt, Homo sapiens
  misc_RNA (1)...(19): siRNA sense strand
ggagaccaaugaaggagaa

SEQ ID NO: 311675 - RNA, 19 nt, Homo sapiens
  misc_RNA (1)...(19): siRNA sense strand
ugaagaaccaggcucaaua

SEQ ID NO: 311676 - RNA, 19 nt, Homo sapiens
  misc_RNA (1)...(19): siRNA sense strand
gaaacauaguucucuagau

SEQ ID NO: 311677 - RNA, 19 nt, Homo sapiens
  misc_RNA (1)...(19): siRNA sense strand
gcagaaagauaagcacaca

SEQ ID NO: 311678 - RNA, 19 nt, Homo sapiens
  misc_RNA (1)...(19): siRNA sense strand
cgaugagaauaacaacuua

SEQ ID NO: 311679 - RNA, 19 nt, Homo sapiens
  misc_RNA (1)...(19): siRNA sense strand
ccagggaacucaagaccaa

SEQ ID NO: 311680 - RNA, 19 nt, Homo sapiens
  misc_RNA (1)...(19): siRNA sense strand
gcacacaucauuguuaguu

SEQ ID NO: 311681 - RNA, 19 nt, Homo sapiens
  misc_RNA (1)...(19): siRNA sense strand
acagugagcagccauauaa

SEQ ID NO: 311682 - RNA, 19 nt, Homo sapiens
  misc_RNA (1)...(19): siRNA sense strand
cuaaagggaaguaugaaua

SEQ ID NO: 311683 - RNA, 19 nt, Homo sapiens
  misc_RNA (1)...(19): siRNA sense strand
agaaagauaagcacacaua

SEQ ID NO: 311684 - RNA, 19 nt, Homo sapiens
  misc_RNA (1)...(19): siRNA sense strand
gaugugcacuguaaauaag

SEQ ID NO: 311685 - RNA, 19 nt, Homo sapiens
  misc_RNA (1)...(19): siRNA sense strand
caugaacacuguacuuugu

SEQ ID NO: 311686 - RNA, 19 nt, Homo sapiens
  misc_RNA (1)...(19): siRNA sense strand
ugagaggaauggcaaagaa

SEQ ID NO: 311687 - RNA, 19 nt, Homo sapiens
  misc_RNA (1)...(19): siRNA sense strand
gaagcauccucuacuguca

SEQ ID NO: 311688 - RNA, 19 nt, Homo sapiens
  misc_RNA (1)...(19): siRNA sense strand
aaacugguaucaagaacuu

SEQ ID NO: 311689 - RNA, 19 nt, Homo sapiens
  misc_RNA (1)...(19): siRNA sense strand
caacaaaacugguaucaag

SEQ ID NO: 311690 - RNA, 19 nt, Homo sapiens
  misc_RNA (1)...(19): siRNA sense strand
ggagucaucauuagaaaga

SEQ ID NO: 311691 - RNA, 19 nt, Homo sapiens
  misc_RNA (1)...(19): siRNA sense strand
cagaggagauaaacauuca

SEQ ID NO: 311692 - RNA, 19 nt, Homo sapiens
  misc_RNA (1)...(19): siRNA sense strand
caaagaagaguuuaguuuc

SEQ ID NO: 311693 - RNA, 19 nt, Homo sapiens
  misc_RNA (1)...(19): siRNA sense strand
agaggaagaagguaauuua

SEQ ID NO: 311694 - RNA, 19 nt, Homo sapiens
  misc_RNA (1)...(19): siRNA sense strand
gaaggguagucaucaguca

SEQ ID NO: 311695 - RNA, 19 nt, Homo sapiens
  misc_RNA (1)...(19): siRNA sense strand
ugugagaugugcacuguaa

SEQ ID NO: 311696 - RNA, 19 nt, Homo sapiens
  misc_RNA (1)...(19): siRNA sense strand
gagaaaauaucaacuguca

SEQ ID NO: 311697 - RNA, 19 nt, Homo sapiens
  misc_RNA (1)...(19): siRNA sense strand
uggucaagcuugccucuua

SEQ ID NO: 311698 - RNA, 19 nt, Homo sapiens
  misc_RNA (1)...(19): siRNA sense strand
gcaaugaugugugcaagua

SEQ ID NO: 311699 - RNA, 19 nt, Homo sapiens
  misc_RNA (1)...(19): siRNA sense strand
ggacagcuauauuguguuc

SEQ ID NO: 311700 - RNA, 19 nt, Homo sapiens
  misc_RNA (1)...(19): siRNA sense strand
gaggacagcuauauugugu

SEQ ID NO: 311701 - RNA, 19 nt, Homo sapiens
  misc_RNA (1)...(19): siRNA sense strand
gggagaagaucauccugaa

SEQ ID NO: 311702 - RNA, 19 nt, Homo sapiens
  misc_RNA (1)...(19): siRNA sense strand
caucaaagcugcaguucca

SEQ ID NO: 311703 - RNA, 19 nt, Homo sapiens
  misc_RNA (1)...(19): siRNA sense strand
ccaacuacccagacgauua

SEQ ID NO: 311704 - RNA, 19 nt, Homo sapiens
  misc_RNA (1)...(19): siRNA sense strand
gagcagcggugccucaaca

SEQ ID NO: 311705 - RNA, 19 nt, Homo sapiens
  misc_RNA (1)...(19): siRNA sense strand
gcucguaaguccuccauca

SEQ ID NO: 311706 - RNA, 19 nt, Homo sapiens
  misc_RNA (1)...(19): siRNA sense strand
ggagagacccugcaagaca

SEQ ID NO: 311707 - RNA, 19 nt, Homo sapiens
  misc_RNA (1)...(19): siRNA sense strand
gcaucucccugcaguuuga

SEQ ID NO: 311708 - RNA, 19 nt, Homo sapiens
  misc_RNA (1)...(19): siRNA sense strand
aaaggacuauggccacauu

SEQ ID NO: 311709 - RNA, 19 nt, Homo sapiens
  misc_RNA (1)...(19): siRNA sense strand
gggcuuugccgucaacuuu

SEQ ID NO: 311710 - RNA, 19 nt, Homo sapiens
  misc_RNA (1)...(19): siRNA sense strand
gcuaugagaagccugauga

SEQ ID NO: 311711 - RNA, 19 nt, Homo sapiens
  misc_RNA (1)...(19): siRNA sense strand
gcacugacgaggacagcua

SEQ ID NO: 311712 - RNA, 19 nt, Homo sapiens
  misc_RNA (1)...(19): siRNA sense strand
gcuauauuguguucaccua

SEQ ID NO: 311713 - RNA, 19 nt, Homo sapiens
  misc_RNA (1)...(19): siRNA sense strand
ugugggagauggagaggua

SEQ ID NO: 311714 - RNA, 19 nt, Homo sapiens
  misc_RNA (1)...(19): siRNA sense strand
ggacauugcccuggacgaa

SEQ ID NO: 311715 - RNA, 19 nt, Homo sapiens
  misc_RNA (1)...(19): siRNA sense strand
ggcaagaacugugacaagu

SEQ ID NO: 311716 - RNA, 19 nt, Homo sapiens
  misc_RNA (1)...(19): siRNA sense strand
gcauuacgcucggaacaca

SEQ ID NO: 311717 - RNA, 19 nt, Homo sapiens
  misc_RNA (1)...(19): siRNA sense strand
gacgaggacagcuauauug

SEQ ID NO: 311718 - RNA, 19 nt, Homo sapiens
  misc_RNA (1)...(19): siRNA sense strand
gagaagaucauccugaacu

SEQ ID NO: 311719 - RNA, 19 nt, Homo sapiens
  misc_RNA (1)...(19): siRNA sense strand
caguuugacuucuuugaga

SEQ ID NO: 311720 - RNA, 19 nt, Homo sapiens
  misc_RNA (1)...(19): siRNA sense strand
caagcugcauggcaaguuc

SEQ ID NO: 311721 - RNA, 19 nt, Homo sapiens
  misc_RNA (1)...(19): siRNA sense strand
ggacuauggccacauucaa

SEQ ID NO: 311722 - RNA, 19 nt, Homo sapiens
  misc_RNA (1)...(19): siRNA sense strand
ugacggguccauuaacaaa

SEQ ID NO: 311723 - RNA, 19 nt, Homo sapiens
  misc_RNA (1)...(19): siRNA sense strand
agacagagggcaaugaugu

SEQ ID NO: 311724 - RNA, 19 nt, Homo sapiens
  misc_RNA (1)...(19): siRNA sense strand
uggcuacucugcucacaug

SEQ ID NO: 311725 - RNA, 19 nt, Homo sapiens
  misc_RNA (1)...(19): siRNA sense strand
ucacauuccaguccuuuga

SEQ ID NO: 311726 - RNA, 19 nt, Homo sapiens
  misc_RNA (1)...(19): siRNA sense strand
cauggcaaguucugugguu

SEQ ID NO: 311727 - RNA, 19 nt, Homo sapiens
  misc_RNA (1)...(19): siRNA sense strand
ugacgaggacagcuauauu

SEQ ID NO: 311728 - RNA, 19 nt, Homo sapiens
  misc_RNA (1)...(19): siRNA sense strand
ggucaucaccucccaguac

SEQ ID NO: 311729 - RNA, 19 nt, Homo sapiens
  misc_RNA (1)...(19): siRNA sense strand
ccacgugggccucacauuc

SEQ ID NO: 311730 - RNA, 19 nt, Homo sapiens
  misc_RNA (1)...(19): siRNA sense strand
guggagagacccugcaaga

SEQ ID NO: 311731 - RNA, 19 nt, Homo sapiens
  misc_RNA (1)...(19): siRNA sense strand
cccgcaagcuuuacaagug

SEQ ID NO: 311732 - RNA, 19 nt, Homo sapiens
  misc_RNA (1)...(19): siRNA sense strand
agaagaucauccugaacuu

SEQ ID NO: 311733 - RNA, 19 nt, Homo sapiens
  misc_RNA (1)...(19): siRNA sense strand
caacuacccagacgauuac

SEQ ID NO: 311734 - RNA, 19 nt, Homo sapiens
  misc_RNA (1)...(19): siRNA sense strand
gagauggcuucuggaggaa

SEQ ID NO: 311735 - RNA, 19 nt, Homo sapiens
  misc_RNA (1)...(19): siRNA sense strand
cguaaguccuccaucaaag

SEQ ID NO: 311736 - RNA, 19 nt, Homo sapiens
  misc_RNA (1)...(19): siRNA sense strand
cagcugugccuacgacuau

SEQ ID NO: 311737 - RNA, 19 nt, Homo sapiens
  misc_RNA (1)...(19): siRNA sense strand
uauauuguguucaccuauc

SEQ ID NO: 311738 - RNA, 19 nt, Homo sapiens
  misc_RNA (1)...(19): siRNA sense strand
acauugcccuggacgaaga

SEQ ID NO: 311739 - RNA, 19 nt, Homo sapiens
  misc_RNA (1)...(19): siRNA sense strand
ucaacacccugggcagcua

SEQ ID NO: 311740 - RNA, 19 nt, Homo sapiens
  misc_RNA (1)...(19): siRNA sense strand
caaacucccugagccuauc

SEQ ID NO: 311741 - RNA, 19 nt, Homo sapiens
  misc_RNA (1)...(19): siRNA sense strand
caacaugcgcguggaguuc

SEQ ID NO: 311742 - RNA, 19 nt, Homo sapiens
  misc_RNA (1)...(19): siRNA sense strand
cuucaaggcccacuucuuc

SEQ ID NO: 311743 - RNA, 19 nt, Homo sapiens
  misc_RNA (1)...(19): siRNA sense strand
agacagcacaggcaacuuc

SEQ ID NO: 311744 - RNA, 19 nt, Homo sapiens
  misc_RNA (1)...(19): siRNA sense strand
ccgcaucucccugcaguuu

SEQ ID NO: 311745 - RNA, 19 nt, Homo sapiens
  misc_RNA (1)...(19): siRNA sense strand
gacuauggccacauucaau

SEQ ID NO: 311746 - RNA, 19 nt, Homo sapiens
  misc_RNA (1)...(19): siRNA sense strand
gggcuucuuugcagucuac

SEQ ID NO: 311747 - RNA, 19 nt, Homo sapiens
  misc_RNA (1)...(19): siRNA sense strand
cagcagcaauuggguugga

SEQ ID NO: 311748 - RNA, 19 nt, Homo sapiens
  misc_RNA (1)...(19): siRNA sense strand
gcgcuacuguggcuaugag

SEQ ID NO: 311749 - RNA, 19 nt, Homo sapiens
  misc_RNA (1)...(19): siRNA sense strand
ggcucaaguucgucucuga

SEQ ID NO: 311750 - RNA, 19 nt, Homo sapiens
  misc_RNA (1)...(19): siRNA sense strand
ggucauccccuuugucauu

SEQ ID NO: 311751 - RNA, 19 nt, Homo sapiens
  misc_RNA (1)...(19): siRNA sense strand
ugacuucgacagcaucaug

SEQ ID NO: 311752 - RNA, 19 nt, Homo sapiens
  misc_RNA (1)...(19): siRNA sense strand
ccaaacucccugagccuau

SEQ ID NO: 311753 - RNA, 19 nt, Homo sapiens
  misc_RNA (1)...(19): siRNA sense strand
ucugacggguccauuaaca

SEQ ID NO: 311754 - RNA, 19 nt, Homo sapiens
  misc_RNA (1)...(19): siRNA sense strand
gcagcaauuggguuggaaa

SEQ ID NO: 311755 - RNA, 19 nt, Homo sapiens
  misc_RNA (1)...(19): siRNA sense strand
ccuaucgucuccacugaca

SEQ ID NO: 311756 - RNA, 19 nt, Homo sapiens
  misc_RNA (1)...(19): siRNA sense strand
ucucugacggguccauuaa

SEQ ID NO: 311757 - RNA, 19 nt, Homo sapiens
  misc_RNA (1)...(19): siRNA sense strand
gcaguuugacuucuuugag

SEQ ID NO: 311758 - RNA, 19 nt, Homo sapiens
  misc_RNA (1)...(19): siRNA sense strand
ccugcaguuugacuucuuu

SEQ ID NO: 311759 - RNA, 19 nt, Homo sapiens
  misc_RNA (1)...(19): siRNA sense strand
gcggauuccucaccaagcu

SEQ ID NO: 311760 - RNA, 19 nt, Homo sapiens
  misc_RNA (1)...(19): siRNA sense strand
gcaucuuccuggauaccau

SEQ ID NO: 311761 - RNA, 19 nt, Homo sapiens
  misc_RNA (1)...(19): siRNA sense strand
gucaucaccucccaguaca

SEQ ID NO: 311762 - RNA, 19 nt, Homo sapiens
  misc_RNA (1)...(19): siRNA sense strand
ugugacaaguucggcauug

SEQ ID NO: 311763 - RNA, 19 nt, Homo sapiens
  misc_RNA (1)...(19): siRNA sense strand
ucguaaguccuccaucaaa

SEQ ID NO: 311764 - RNA, 19 nt, Homo sapiens
  misc_RNA (1)...(19): siRNA sense strand
caaggcccacuucuucuca

SEQ ID NO: 311765 - RNA, 19 nt, Homo sapiens
  misc_RNA (1)...(19): siRNA sense strand
cgaggacagcuauauugug

SEQ ID NO: 311766 - RNA, 19 nt, Homo sapiens
  misc_RNA (1)...(19): siRNA sense strand
ucaccucccaguacaacaa

SEQ ID NO: 311767 - RNA, 19 nt, Homo sapiens
  misc_RNA (1)...(19): siRNA sense strand
gagaagcccgaggucauca

SEQ ID NO: 311768 - RNA, 19 nt, Homo sapiens
  misc_RNA (1)...(19): siRNA sense strand
uccaguccuuugagauuga

SEQ ID NO: 311769 - RNA, 19 nt, Homo sapiens
  misc_RNA (1)...(19): siRNA sense strand
ccuaugacuucgacagcau

SEQ ID NO: 311770 - RNA, 19 nt, Homo sapiens
  misc_RNA (1)...(19): siRNA sense strand
ccgccacguuuccaucguu

SEQ ID NO: 311771 - RNA, 19 nt, Homo sapiens
  misc_RNA (1)...(19): siRNA sense strand
gggugaaaccucccauugg

SEQ ID NO: 311772 - RNA, 19 nt, Homo sapiens
  misc_RNA (1)...(19): siRNA sense strand
gaguucaaguccgacaaca

SEQ ID NO: 311773 - RNA, 19 nt, Homo sapiens
  misc_RNA (1)...(19): siRNA sense strand
gaggugcgcaguggacuca

SEQ ID NO: 311774 - RNA, 19 nt, Homo sapiens
  misc_RNA (1)...(19): siRNA sense strand
gacagagggcaaugaugug

SEQ ID NO: 311775 - RNA, 19 nt, Homo sapiens
  misc_RNA (1)...(19): siRNA sense strand
gagacagagggcaaugaug

SEQ ID NO: 311776 - RNA, 19 nt, Homo sapiens
  misc_RNA (1)...(19): siRNA sense strand
caagacagcacaggcaacu

SEQ ID NO: 311777 - RNA, 19 nt, Homo sapiens
  misc_RNA (1)...(19): siRNA sense strand
ugagacagagggcaaugau

SEQ ID NO: 311778 - RNA, 19 nt, Homo sapiens
  misc_RNA (1)...(19): siRNA sense strand
gcaaugaugugugcaagua

SEQ ID NO: 311779 - RNA, 19 nt, Homo sapiens
  misc_RNA (1)...(19): siRNA sense strand
ggacagcuauauuguguuc

SEQ ID NO: 311780 - RNA, 19 nt, Homo sapiens
  misc_RNA (1)...(19): siRNA sense strand
gaggacagcuauauugugu

SEQ ID NO: 311781 - RNA, 19 nt, Homo sapiens
  misc_RNA (1)...(19): siRNA sense strand
gggagaagaucauccugaa

SEQ ID NO: 311782 - RNA, 19 nt, Homo sapiens
  misc_RNA (1)...(19): siRNA sense strand
caucaaagcugcaguucca

SEQ ID NO: 311783 - RNA, 19 nt, Homo sapiens
  misc_RNA (1)...(19): siRNA sense strand
ccaacuacccagacgauua

SEQ ID NO: 311784 - RNA, 19 nt, Homo sapiens
  misc_RNA (1)...(19): siRNA sense strand
gagcagcggugccucaaca

SEQ ID NO: 311785 - RNA, 19 nt, Homo sapiens
  misc_RNA (1)...(19): siRNA sense strand
gcucguaaguccuccauca

SEQ ID NO: 311786 - RNA, 19 nt, Homo sapiens
  misc_RNA (1)...(19): siRNA sense strand
ggagagacccugcaagaca

SEQ ID NO: 311787 - RNA, 19 nt, Homo sapiens
  misc_RNA (1)...(19): siRNA sense strand
gcaucucccugcaguuuga

SEQ ID NO: 311788 - RNA, 19 nt, Homo sapiens
  misc_RNA (1)...(19): siRNA sense strand
aaaggacuauggccacauu

SEQ ID NO: 311789 - RNA, 19 nt, Homo sapiens
  misc_RNA (1)...(19): siRNA sense strand
gggcuuugccgucaacuuu

SEQ ID NO: 311790 - RNA, 19 nt, Homo sapiens
  misc_RNA (1)...(19): siRNA sense strand
gcuaugagaagccugauga

SEQ ID NO: 311791 - RNA, 19 nt, Homo sapiens
  misc_RNA (1)...(19): siRNA sense strand
gcacugacgaggacagcua

SEQ ID NO: 311792 - RNA, 19 nt, Homo sapiens
  misc_RNA (1)...(19): siRNA sense strand
gcuauauuguguucaccua

SEQ ID NO: 311793 - RNA, 19 nt, Homo sapiens
  misc_RNA (1)...(19): siRNA sense strand
ugugggagauggagaggua

SEQ ID NO: 311794 - RNA, 19 nt, Homo sapiens
  misc_RNA (1)...(19): siRNA sense strand
ggacauugcccuggacgaa

SEQ ID NO: 311795 - RNA, 19 nt, Homo sapiens
  misc_RNA (1)...(19): siRNA sense strand
ggcaagaacugugacaagu

SEQ ID NO: 311796 - RNA, 19 nt, Homo sapiens
  misc_RNA (1)...(19): siRNA sense strand
gcauuacgcucggaacaca

SEQ ID NO: 311797 - RNA, 19 nt, Homo sapiens
  misc_RNA (1)...(19): siRNA sense strand
gacgaggacagcuauauug

SEQ ID NO: 311798 - RNA, 19 nt, Homo sapiens
  misc_RNA (1)...(19): siRNA sense strand
gagaagaucauccugaacu

SEQ ID NO: 311799 - RNA, 19 nt, Homo sapiens
  misc_RNA (1)...(19): siRNA sense strand
caguuugacuucuuugaga

SEQ ID NO: 311800 - RNA, 19 nt, Homo sapiens
  misc_RNA (1)...(19): siRNA sense strand
caagcugcauggcaaguuc

SEQ ID NO: 311801 - RNA, 19 nt, Homo sapiens
  misc_RNA (1)...(19): siRNA sense strand
ggacuauggccacauucaa

SEQ ID NO: 311802 - RNA, 19 nt, Homo sapiens
  misc_RNA (1)...(19): siRNA sense strand
ugacggguccauuaacaaa

SEQ ID NO: 311803 - RNA, 19 nt, Homo sapiens
  misc_RNA (1)...(19): siRNA sense strand
agacagagggcaaugaugu

SEQ ID NO: 311804 - RNA, 19 nt, Homo sapiens
  misc_RNA (1)...(19): siRNA sense strand
uggcuacucugcucacaug

SEQ ID NO: 311805 - RNA, 19 nt, Homo sapiens
  misc_RNA (1)...(19): siRNA sense strand
ucacauuccaguccuuuga

SEQ ID NO: 311806 - RNA, 19 nt, Homo sapiens
  misc_RNA (1)...(19): siRNA sense strand
cauggcaaguucugugguu

SEQ ID NO: 311807 - RNA, 19 nt, Homo sapiens
  misc_RNA (1)...(19): siRNA sense strand
ugacgaggacagcuauauu

SEQ ID NO: 311808 - RNA, 19 nt, Homo sapiens
  misc_RNA (1)...(19): siRNA sense strand
ggucaucaccucccaguac

SEQ ID NO: 311809 - RNA, 19 nt, Homo sapiens
  misc_RNA (1)...(19): siRNA sense strand
ccacgugggccucacauuc

SEQ ID NO: 311810 - RNA, 19 nt, Homo sapiens
  misc_RNA (1)...(19): siRNA sense strand
guggagagacccugcaaga

SEQ ID NO: 311811 - RNA, 19 nt, Homo sapiens
  misc_RNA (1)...(19): siRNA sense strand
cccgcaagcuuuacaagug

SEQ ID NO: 311812 - RNA, 19 nt, Homo sapiens
  misc_RNA (1)...(19): siRNA sense strand
agaagaucauccugaacuu

SEQ ID NO: 311813 - RNA, 19 nt, Homo sapiens
  misc_RNA (1)...(19): siRNA sense strand
caacuacccagacgauuac

SEQ ID NO: 311814 - RNA, 19 nt, Homo sapiens
  misc_RNA (1)...(19): siRNA sense strand
gagauggcuucuggaggaa

SEQ ID NO: 311815 - RNA, 19 nt, Homo sapiens
  misc_RNA (1)...(19): siRNA sense strand
cguaaguccuccaucaaag

SEQ ID NO: 311816 - RNA, 19 nt, Homo sapiens
  misc_RNA (1)...(19): siRNA sense strand
cagcugugccuacgacuau

SEQ ID NO: 311817 - RNA, 19 nt, Homo sapiens
  misc_RNA (1)...(19): siRNA sense strand
uauauuguguucaccuauc

SEQ ID NO: 311818 - RNA, 19 nt, Homo sapiens
  misc_RNA (1)...(19): siRNA sense strand
acauugcccuggacgaaga

SEQ ID NO: 311819 - RNA, 19 nt, Homo sapiens
  misc_RNA (1)...(19): siRNA sense strand
ucaacacccugggcagcua

SEQ ID NO: 311820 - RNA, 19 nt, Homo sapiens
  misc_RNA (1)...(19): siRNA sense strand
caaacucccugagccuauc

SEQ ID NO: 311821 - RNA, 19 nt, Homo sapiens
  misc_RNA (1)...(19): siRNA sense strand
caacaugcgcguggaguuc

SEQ ID NO: 311822 - RNA, 19 nt, Homo sapiens
  misc_RNA (1)...(19): siRNA sense strand
cuucaaggcccacuucuuc

SEQ ID NO: 311823 - RNA, 19 nt, Homo sapiens
  misc_RNA (1)...(19): siRNA sense strand
agacagcacaggcaacuuc

SEQ ID NO: 311824 - RNA, 19 nt, Homo sapiens
  misc_RNA (1)...(19): siRNA sense strand
ccgcaucucccugcaguuu

SEQ ID NO: 311825 - RNA, 19 nt, Homo sapiens
  misc_RNA (1)...(19): siRNA sense strand
gacuauggccacauucaau

SEQ ID NO: 311826 - RNA, 19 nt, Homo sapiens
  misc_RNA (1)...(19): siRNA sense strand
gggcuucuuugcagucuac

SEQ ID NO: 311827 - RNA, 19 nt, Homo sapiens
  misc_RNA (1)...(19): siRNA sense strand
cagcagcaauuggguugga

SEQ ID NO: 311828 - RNA, 19 nt, Homo sapiens
  misc_RNA (1)...(19): siRNA sense strand
gcgcuacuguggcuaugag

SEQ ID NO: 311829 - RNA, 19 nt, Homo sapiens
  misc_RNA (1)...(19): siRNA sense strand
ggcucaaguucgucucuga

SEQ ID NO: 311830 - RNA, 19 nt, Homo sapiens
  misc_RNA (1)...(19): siRNA sense strand
ggucauccccuuugucauu

SEQ ID NO: 311831 - RNA, 19 nt, Homo sapiens
  misc_RNA (1)...(19): siRNA sense strand
ugacuucgacagcaucaug

SEQ ID NO: 311832 - RNA, 19 nt, Homo sapiens
  misc_RNA (1)...(19): siRNA sense strand
ccaaacucccugagccuau

SEQ ID NO: 311833 - RNA, 19 nt, Homo sapiens
  misc_RNA (1)...(19): siRNA sense strand
ucugacggguccauuaaca

SEQ ID NO: 311834 - RNA, 19 nt, Homo sapiens
  misc_RNA (1)...(19): siRNA sense strand
gcagcaauuggguuggaaa

SEQ ID NO: 311835 - RNA, 19 nt, Homo sapiens
  misc_RNA (1)...(19): siRNA sense strand
ccuaucgucuccacugaca

SEQ ID NO: 311836 - RNA, 19 nt, Homo sapiens
  misc_RNA (1)...(19): siRNA sense strand
ucucugacggguccauuaa

SEQ ID NO: 311837 - RNA, 19 nt, Homo sapiens
  misc_RNA (1)...(19): siRNA sense strand
gcaguuugacuucuuugag

SEQ ID NO: 311838 - RNA, 19 nt, Homo sapiens
  misc_RNA (1)...(19): siRNA sense strand
ccugcaguuugacuucuuu

SEQ ID NO: 311839 - RNA, 19 nt, Homo sapiens
  misc_RNA (1)...(19): siRNA sense strand
gcggauuccucaccaagcu

SEQ ID NO: 311840 - RNA, 19 nt, Homo sapiens
  misc_RNA (1)...(19): siRNA sense strand
gcaucuuccuggauaccau

SEQ ID NO: 311841 - RNA, 19 nt, Homo sapiens
  misc_RNA (1)...(19): siRNA sense strand
gucaucaccucccaguaca

SEQ ID NO: 311842 - RNA, 19 nt, Homo sapiens
  misc_RNA (1)...(19): siRNA sense strand
ugugacaaguucggcauug

SEQ ID NO: 311843 - RNA, 19 nt, Homo sapiens
  misc_RNA (1)...(19): siRNA sense strand
ucguaaguccuccaucaaa

SEQ ID NO: 311844 - RNA, 19 nt, Homo sapiens
  misc_RNA (1)...(19): siRNA sense strand
caaggcccacuucuucuca

SEQ ID NO: 311845 - RNA, 19 nt, Homo sapiens
  misc_RNA (1)...(19): siRNA sense strand
cgaggacagcuauauugug

SEQ ID NO: 311846 - RNA, 19 nt, Homo sapiens
  misc_RNA (1)...(19): siRNA sense strand
ucaccucccaguacaacaa

SEQ ID NO: 311847 - RNA, 19 nt, Homo sapiens
  misc_RNA (1)...(19): siRNA sense strand
gagaagcccgaggucauca

SEQ ID NO: 311848 - RNA, 19 nt, Homo sapiens
  misc_RNA (1)...(19): siRNA sense strand
uccaguccuuugagauuga

SEQ ID NO: 311849 - RNA, 19 nt, Homo sapiens
  misc_RNA (1)...(19): siRNA sense strand
ccuaugacuucgacagcau

SEQ ID NO: 311850 - RNA, 19 nt, Homo sapiens
  misc_RNA (1)...(19): siRNA sense strand
ccgccacguuuccaucguu

SEQ ID NO: 311851 - RNA, 19 nt, Homo sapiens
  misc_RNA (1)...(19): siRNA sense strand
gggugaaaccucccauugg

SEQ ID NO: 311852 - RNA, 19 nt, Homo sapiens
  misc_RNA (1)...(19): siRNA sense strand
gaguucaaguccgacaaca

SEQ ID NO: 311853 - RNA, 19 nt, Homo sapiens
  misc_RNA (1)...(19): siRNA sense strand
gaggugcgcaguggacuca

SEQ ID NO: 311854 - RNA, 19 nt, Homo sapiens
  misc_RNA (1)...(19): siRNA sense strand
gacagagggcaaugaugug

SEQ ID NO: 311855 - RNA, 19 nt, Homo sapiens
  misc_RNA (1)...(19): siRNA sense strand
gagacagagggcaaugaug

SEQ ID NO: 311856 - RNA, 19 nt, Homo sapiens
  misc_RNA (1)...(19): siRNA sense strand
caagacagcacaggcaacu

SEQ ID NO: 311857 - RNA, 19 nt, Homo sapiens
  misc_RNA (1)...(19): siRNA sense strand
ugagacagagggcaaugau

SEQ ID NO: 311858 - RNA, 19 nt, Homo sapiens
  misc_RNA (1)...(19): siRNA sense strand
gcaaugaugugugcaagua

SEQ ID NO: 311859 - RNA, 19 nt, Homo sapiens
  misc_RNA (1)...(19): siRNA sense strand
ggacagcuauauuguguuc

SEQ ID NO: 311860 - RNA, 19 nt, Homo sapiens
  misc_RNA (1)...(19): siRNA sense strand
gaggacagcuauauugugu

SEQ ID NO: 311861 - RNA, 19 nt, Homo sapiens
  misc_RNA (1)...(19): siRNA sense strand
gggagaagaucauccugaa

SEQ ID NO: 311862 - RNA, 19 nt, Homo sapiens
  misc_RNA (1)...(19): siRNA sense strand
caucaaagcugcaguucca

SEQ ID NO: 311863 - RNA, 19 nt, Homo sapiens
  misc_RNA (1)...(19): siRNA sense strand
ccaacuacccagacgauua

SEQ ID NO: 311864 - RNA, 19 nt, Homo sapiens
  misc_RNA (1)...(19): siRNA sense strand
gagcagcggugccucaaca

SEQ ID NO: 311865 - RNA, 19 nt, Homo sapiens
  misc_RNA (1)...(19): siRNA sense strand
gcucguaaguccuccauca

SEQ ID NO: 311866 - RNA, 19 nt, Homo sapiens
  misc_RNA (1)...(19): siRNA sense strand
ggagagacccugcaagaca

SEQ ID NO: 311867 - RNA, 19 nt, Homo sapiens
  misc_RNA (1)...(19): siRNA sense strand
gcaucucccugcaguuuga

SEQ ID NO: 311868 - RNA, 19 nt, Homo sapiens
  misc_RNA (1)...(19): siRNA sense strand
aaaggacuauggccacauu

SEQ ID NO: 311869 - RNA, 19 nt, Homo sapiens
  misc_RNA (1)...(19): siRNA sense strand
gggcuuugccgucaacuuu

SEQ ID NO: 311870 - RNA, 19 nt, Homo sapiens
  misc_RNA (1)...(19): siRNA sense strand
gcuaugagaagccugauga

SEQ ID NO: 311871 - RNA, 19 nt, Homo sapiens
  misc_RNA (1)...(19): siRNA sense strand
gcacugacgaggacagcua

SEQ ID NO: 311872 - RNA, 19 nt, Homo sapiens
  misc_RNA (1)...(19): siRNA sense strand
gcuauauuguguucaccua

SEQ ID NO: 311873 - RNA, 19 nt, Homo sapiens
  misc_RNA (1)...(19): siRNA sense strand
ugugggagauggagaggua

SEQ ID NO: 311874 - RNA, 19 nt, Homo sapiens
  misc_RNA (1)...(19): siRNA sense strand
ggacauugcccuggacgaa

SEQ ID NO: 311875 - RNA, 19 nt, Homo sapiens
  misc_RNA (1)...(19): siRNA sense strand
ggcaagaacugugacaagu

SEQ ID NO: 311876 - RNA, 19 nt, Homo sapiens
  misc_RNA (1)...(19): siRNA sense strand
gcauuacgcucggaacaca

SEQ ID NO: 311877 - RNA, 19 nt, Homo sapiens
  misc_RNA (1)...(19): siRNA sense strand
gacgaggacagcuauauug

SEQ ID NO: 311878 - RNA, 19 nt, Homo sapiens
  misc_RNA (1)...(19): siRNA sense strand
gagaagaucauccugaacu

SEQ ID NO: 311879 - RNA, 19 nt, Homo sapiens
  misc_RNA (1)...(19): siRNA sense strand
caguuugacuucuuugaga

SEQ ID NO: 311880 - RNA, 19 nt, Homo sapiens
  misc_RNA (1)...(19): siRNA sense strand
caagcugcauggcaaguuc

SEQ ID NO: 311881 - RNA, 19 nt, Homo sapiens
  misc_RNA (1)...(19): siRNA sense strand
ggacuauggccacauucaa

SEQ ID NO: 311882 - RNA, 19 nt, Homo sapiens
  misc_RNA (1)...(19): siRNA sense strand
ugacggguccauuaacaaa

SEQ ID NO: 311883 - RNA, 19 nt, Homo sapiens
  misc_RNA (1)...(19): siRNA sense strand
agacagagggcaaugaugu

SEQ ID NO: 311884 - RNA, 19 nt, Homo sapiens
  misc_RNA (1)...(19): siRNA sense strand
uggcuacucugcucacaug

SEQ ID NO: 311885 - RNA, 19 nt, Homo sapiens
  misc_RNA (1)...(19): siRNA sense strand
ucacauuccaguccuuuga

SEQ ID NO: 311886 - RNA, 19 nt, Homo sapiens
  misc_RNA (1)...(19): siRNA sense strand
cauggcaaguucugugguu

SEQ ID NO: 311887 - RNA, 19 nt, Homo sapiens
  misc_RNA (1)...(19): siRNA sense strand
ugacgaggacagcuauauu

SEQ ID NO: 311888 - RNA, 19 nt, Homo sapiens
  misc_RNA (1)...(19): siRNA sense strand
ggucaucaccucccaguac

SEQ ID NO: 311889 - RNA, 19 nt, Homo sapiens
  misc_RNA (1)...(19): siRNA sense strand
ccacgugggccucacauuc

SEQ ID NO: 311890 - RNA, 19 nt, Homo sapiens
  misc_RNA (1)...(19): siRNA sense strand
guggagagacccugcaaga

SEQ ID NO: 311891 - RNA, 19 nt, Homo sapiens
  misc_RNA (1)...(19): siRNA sense strand
cccgcaagcuuuacaagug

SEQ ID NO: 311892 - RNA, 19 nt, Homo sapiens
  misc_RNA (1)...(19): siRNA sense strand
agaagaucauccugaacuu

SEQ ID NO: 311893 - RNA, 19 nt, Homo sapiens
  misc_RNA (1)...(19): siRNA sense strand
caacuacccagacgauuac

SEQ ID NO: 311894 - RNA, 19 nt, Homo sapiens
  misc_RNA (1)...(19): siRNA sense strand
gagauggcuucuggaggaa

SEQ ID NO: 311895 - RNA, 19 nt, Homo sapiens
  misc_RNA (1)...(19): siRNA sense strand
cguaaguccuccaucaaag

SEQ ID NO: 311896 - RNA, 19 nt, Homo sapiens
  misc_RNA (1)...(19): siRNA sense strand
cagcugugccuacgacuau

SEQ ID NO: 311897 - RNA, 19 nt, Homo sapiens
  misc_RNA (1)...(19): siRNA sense strand
uauauuguguucaccuauc

SEQ ID NO: 311898 - RNA, 19 nt, Homo sapiens
  misc_RNA (1)...(19): siRNA sense strand
acauugcccuggacgaaga

SEQ ID NO: 311899 - RNA, 19 nt, Homo sapiens
  misc_RNA (1)...(19): siRNA sense strand
ucaacacccugggcagcua

SEQ ID NO: 311900 - RNA, 19 nt, Homo sapiens
  misc_RNA (1)...(19): siRNA sense strand
caaacucccugagccuauc

SEQ ID NO: 311901 - RNA, 19 nt, Homo sapiens
  misc_RNA (1)...(19): siRNA sense strand
caacaugcgcguggaguuc

SEQ ID NO: 311902 - RNA, 19 nt, Homo sapiens
  misc_RNA (1)...(19): siRNA sense strand
cuucaaggcccacuucuuc

SEQ ID NO: 311903 - RNA, 19 nt, Homo sapiens
  misc_RNA (1)...(19): siRNA sense strand
agacagcacaggcaacuuc

SEQ ID NO: 311904 - RNA, 19 nt, Homo sapiens
  misc_RNA (1)...(19): siRNA sense strand
ccgcaucucccugcaguuu

SEQ ID NO: 311905 - RNA, 19 nt, Homo sapiens
  misc_RNA (1)...(19): siRNA sense strand
gacuauggccacauucaau

SEQ ID NO: 311906 - RNA, 19 nt, Homo sapiens
  misc_RNA (1)...(19): siRNA sense strand
gggcuucuuugcagucuac

SEQ ID NO: 311907 - RNA, 19 nt, Homo sapiens
  misc_RNA (1)...(19): siRNA sense strand
cagcagcaauuggguugga

SEQ ID NO: 311908 - RNA, 19 nt, Homo sapiens
  misc_RNA (1)...(19): siRNA sense strand
gcgcuacuguggcuaugag

SEQ ID NO: 311909 - RNA, 19 nt, Homo sapiens
  misc_RNA (1)...(19): siRNA sense strand
ggcucaaguucgucucuga

SEQ ID NO: 311910 - RNA, 19 nt, Homo sapiens
  misc_RNA (1)...(19): siRNA sense strand
ggucauccccuuugucauu

SEQ ID NO: 311911 - RNA, 19 nt, Homo sapiens
  misc_RNA (1)...(19): siRNA sense strand
ugacuucgacagcaucaug

SEQ ID NO: 311912 - RNA, 19 nt, Homo sapiens
  misc_RNA (1)...(19): siRNA sense strand
ccaaacucccugagccuau

SEQ ID NO: 311913 - RNA, 19 nt, Homo sapiens
  misc_RNA (1)...(19): siRNA sense strand
ucugacggguccauuaaca

SEQ ID NO: 311914 - RNA, 19 nt, Homo sapiens
  misc_RNA (1)...(19): siRNA sense strand
gcagcaauuggguuggaaa

SEQ ID NO: 311915 - RNA, 19 nt, Homo sapiens
  misc_RNA (1)...(19): siRNA sense strand
ccuaucgucuccacugaca

SEQ ID NO: 311916 - RNA, 19 nt, Homo sapiens
  misc_RNA (1)...(19): siRNA sense strand
ucucugacggguccauuaa

SEQ ID NO: 311917 - RNA, 19 nt, Homo sapiens
  misc_RNA (1)...(19): siRNA sense strand
gcaguuugacuucuuugag

SEQ ID NO: 311918 - RNA, 19 nt, Homo sapiens
  misc_RNA (1)...(19): siRNA sense strand
ccugcaguuugacuucuuu

SEQ ID NO: 311919 - RNA, 19 nt, Homo sapiens
  misc_RNA (1)...(19): siRNA sense strand
gcggauuccucaccaagcu

SEQ ID NO: 311920 - RNA, 19 nt, Homo sapiens
  misc_RNA (1)...(19): siRNA sense strand
gcaucuuccuggauaccau

SEQ ID NO: 311921 - RNA, 19 nt, Homo sapiens
  misc_RNA (1)...(19): siRNA sense strand
gucaucaccucccaguaca

SEQ ID NO: 311922 - RNA, 19 nt, Homo sapiens
  misc_RNA (1)...(19): siRNA sense strand
ugugacaaguucggcauug

SEQ ID NO: 311923 - RNA, 19 nt, Homo sapiens
  misc_RNA (1)...(19): siRNA sense strand
ucguaaguccuccaucaaa

SEQ ID NO: 311924 - RNA, 19 nt, Homo sapiens
  misc_RNA (1)...(19): siRNA sense strand
caaggcccacuucuucuca

SEQ ID NO: 311925 - RNA, 19 nt, Homo sapiens
  misc_RNA (1)...(19): siRNA sense strand
cgaggacagcuauauugug

SEQ ID NO: 311926 - RNA, 19 nt, Homo sapiens
  misc_RNA (1)...(19): siRNA sense strand
ucaccucccaguacaacaa

SEQ ID NO: 311927 - RNA, 19 nt, Homo sapiens
  misc_RNA (1)...(19): siRNA sense strand
gagaagcccgaggucauca

SEQ ID NO: 311928 - RNA, 19 nt, Homo sapiens
  misc_RNA (1)...(19): siRNA sense strand
uccaguccuuugagauuga

SEQ ID NO: 311929 - RNA, 19 nt, Homo sapiens
  misc_RNA (1)...(19): siRNA sense strand
ccuaugacuucgacagcau

SEQ ID NO: 311930 - RNA, 19 nt, Homo sapiens
  misc_RNA (1)...(19): siRNA sense strand
ccgccacguuuccaucguu

SEQ ID NO: 311931 - RNA, 19 nt, Homo sapiens
  misc_RNA (1)...(19): siRNA sense strand
gggugaaaccucccauugg

SEQ ID NO: 311932 - RNA, 19 nt, Homo sapiens
  misc_RNA (1)...(19): siRNA sense strand
gaguucaaguccgacaaca

SEQ ID NO: 311933 - RNA, 19 nt, Homo sapiens
  misc_RNA (1)...(19): siRNA sense strand
gaggugcgcaguggacuca

SEQ ID NO: 311934 - RNA, 19 nt, Homo sapiens
  misc_RNA (1)...(19): siRNA sense strand
gacagagggcaaugaugug

SEQ ID NO: 311935 - RNA, 19 nt, Homo sapiens
  misc_RNA (1)...(19): siRNA sense strand
gagacagagggcaaugaug

SEQ ID NO: 311936 - RNA, 19 nt, Homo sapiens
  misc_RNA (1)...(19): siRNA sense strand
caagacagcacaggcaacu

SEQ ID NO: 311937 - RNA, 19 nt, Homo sapiens
  misc_RNA (1)...(19): siRNA sense strand
ugagacagagggcaaugau

SEQ ID NO: 311938 - RNA, 19 nt, Homo sapiens
  misc_RNA (1)...(19): siRNA sense strand
gcaaugaugugugcaagua

SEQ ID NO: 311939 - RNA, 19 nt, Homo sapiens
  misc_RNA (1)...(19): siRNA sense strand
ggacagcuauauuguguuc

SEQ ID NO: 311940 - RNA, 19 nt, Homo sapiens
  misc_RNA (1)...(19): siRNA sense strand
gaggacagcuauauugugu

SEQ ID NO: 311941 - RNA, 19 nt, Homo sapiens
  misc_RNA (1)...(19): siRNA sense strand
gggagaagaucauccugaa

SEQ ID NO: 311942 - RNA, 19 nt, Homo sapiens
  misc_RNA (1)...(19): siRNA sense strand
caucaaagcugcaguucca

SEQ ID NO: 311943 - RNA, 19 nt, Homo sapiens
  misc_RNA (1)...(19): siRNA sense strand
ccaacuacccagacgauua

SEQ ID NO: 311944 - RNA, 19 nt, Homo sapiens
  misc_RNA (1)...(19): siRNA sense strand
gagcagcggugccucaaca

SEQ ID NO: 311945 - RNA, 19 nt, Homo sapiens
  misc_RNA (1)...(19): siRNA sense strand
gcucguaaguccuccauca

SEQ ID NO: 311946 - RNA, 19 nt, Homo sapiens
  misc_RNA (1)...(19): siRNA sense strand
ggagagacccugcaagaca

SEQ ID NO: 311947 - RNA, 19 nt, Homo sapiens
  misc_RNA (1)...(19): siRNA sense strand
gcaucucccugcaguuuga

SEQ ID NO: 311948 - RNA, 19 nt, Homo sapiens
  misc_RNA (1)...(19): siRNA sense strand
aaaggacuauggccacauu

SEQ ID NO: 311949 - RNA, 19 nt, Homo sapiens
  misc_RNA (1)...(19): siRNA sense strand
gggcuuugccgucaacuuu

SEQ ID NO: 311950 - RNA, 19 nt, Homo sapiens
  misc_RNA (1)...(19): siRNA sense strand
gcuaugagaagccugauga

SEQ ID NO: 311951 - RNA, 19 nt, Homo sapiens
  misc_RNA (1)...(19): siRNA sense strand
gcacugacgaggacagcua

SEQ ID NO: 311952 - RNA, 19 nt, Homo sapiens
  misc_RNA (1)...(19): siRNA sense strand
gcuauauuguguucaccua

SEQ ID NO: 311953 - RNA, 19 nt, Homo sapiens
  misc_RNA (1)...(19): siRNA sense strand
ugugggagauggagaggua

SEQ ID NO: 311954 - RNA, 19 nt, Homo sapiens
  misc_RNA (1)...(19): siRNA sense strand
ggacauugcccuggacgaa

SEQ ID NO: 311955 - RNA, 19 nt, Homo sapiens
  misc_RNA (1)...(19): siRNA sense strand
ggcaagaacugugacaagu

SEQ ID NO: 311956 - RNA, 19 nt, Homo sapiens
  misc_RNA (1)...(19): siRNA sense strand
gcauuacgcucggaacaca

SEQ ID NO: 311957 - RNA, 19 nt, Homo sapiens
  misc_RNA (1)...(19): siRNA sense strand
gacgaggacagcuauauug

SEQ ID NO: 311958 - RNA, 19 nt, Homo sapiens
  misc_RNA (1)...(19): siRNA sense strand
gagaagaucauccugaacu

SEQ ID NO: 311959 - RNA, 19 nt, Homo sapiens
  misc_RNA (1)...(19): siRNA sense strand
caguuugacuucuuugaga

SEQ ID NO: 311960 - RNA, 19 nt, Homo sapiens
  misc_RNA (1)...(19): siRNA sense strand
caagcugcauggcaaguuc

SEQ ID NO: 311961 - RNA, 19 nt, Homo sapiens
  misc_RNA (1)...(19): siRNA sense strand
ggacuauggccacauucaa

SEQ ID NO: 311962 - RNA, 19 nt, Homo sapiens
  misc_RNA (1)...(19): siRNA sense strand
ugacggguccauuaacaaa

SEQ ID NO: 311963 - RNA, 19 nt, Homo sapiens
  misc_RNA (1)...(19): siRNA sense strand
agacagagggcaaugaugu

SEQ ID NO: 311964 - RNA, 19 nt, Homo sapiens
  misc_RNA (1)...(19): siRNA sense strand
uggcuacucugcucacaug

SEQ ID NO: 311965 - RNA, 19 nt, Homo sapiens
  misc_RNA (1)...(19): siRNA sense strand
ucacauuccaguccuuuga

SEQ ID NO: 311966 - RNA, 19 nt, Homo sapiens
  misc_RNA (1)...(19): siRNA sense strand
cauggcaaguucugugguu

SEQ ID NO: 311967 - RNA, 19 nt, Homo sapiens
  misc_RNA (1)...(19): siRNA sense strand
ugacgaggacagcuauauu

SEQ ID NO: 311968 - RNA, 19 nt, Homo sapiens
  misc_RNA (1)...(19): siRNA sense strand
ggucaucaccucccaguac

SEQ ID NO: 311969 - RNA, 19 nt, Homo sapiens
  misc_RNA (1)...(19): siRNA sense strand
ccacgugggccucacauuc

SEQ ID NO: 311970 - RNA, 19 nt, Homo sapiens
  misc_RNA (1)...(19): siRNA sense strand
guggagagacccugcaaga

SEQ ID NO: 311971 - RNA, 19 nt, Homo sapiens
  misc_RNA (1)...(19): siRNA sense strand
cccgcaagcuuuacaagug

SEQ ID NO: 311972 - RNA, 19 nt, Homo sapiens
  misc_RNA (1)...(19): siRNA sense strand
agaagaucauccugaacuu

SEQ ID NO: 311973 - RNA, 19 nt, Homo sapiens
  misc_RNA (1)...(19): siRNA sense strand
caacuacccagacgauuac

SEQ ID NO: 311974 - RNA, 19 nt, Homo sapiens
  misc_RNA (1)...(19): siRNA sense strand
gagauggcuucuggaggaa

SEQ ID NO: 311975 - RNA, 19 nt, Homo sapiens
  misc_RNA (1)...(19): siRNA sense strand
cguaaguccuccaucaaag

SEQ ID NO: 311976 - RNA, 19 nt, Homo sapiens
  misc_RNA (1)...(19): siRNA sense strand
cagcugugccuacgacuau

SEQ ID NO: 311977 - RNA, 19 nt, Homo sapiens
  misc_RNA (1)...(19): siRNA sense strand
uauauuguguucaccuauc

SEQ ID NO: 311978 - RNA, 19 nt, Homo sapiens
  misc_RNA (1)...(19): siRNA sense strand
acauugcccuggacgaaga

SEQ ID NO: 311979 - RNA, 19 nt, Homo sapiens
  misc_RNA (1)...(19): siRNA sense strand
ucaacacccugggcagcua

SEQ ID NO: 311980 - RNA, 19 nt, Homo sapiens
  misc_RNA (1)...(19): siRNA sense strand
caaacucccugagccuauc

SEQ ID NO: 311981 - RNA, 19 nt, Homo sapiens
  misc_RNA (1)...(19): siRNA sense strand
caacaugcgcguggaguuc

SEQ ID NO: 311982 - RNA, 19 nt, Homo sapiens
  misc_RNA (1)...(19): siRNA sense strand
cuucaaggcccacuucuuc

SEQ ID NO: 311983 - RNA, 19 nt, Homo sapiens
  misc_RNA (1)...(19): siRNA sense strand
agacagcacaggcaacuuc

SEQ ID NO: 311984 - RNA, 19 nt, Homo sapiens
  misc_RNA (1)...(19): siRNA sense strand
ccgcaucucccugcaguuu

SEQ ID NO: 311985 - RNA, 19 nt, Homo sapiens
  misc_RNA (1)...(19): siRNA sense strand
gacuauggccacauucaau

SEQ ID NO: 311986 - RNA, 19 nt, Homo sapiens
  misc_RNA (1)...(19): siRNA sense strand
gggcuucuuugcagucuac

SEQ ID NO: 311987 - RNA, 19 nt, Homo sapiens
  misc_RNA (1)...(19): siRNA sense strand
cagcagcaauuggguugga

SEQ ID NO: 311988 - RNA, 19 nt, Homo sapiens
  misc_RNA (1)...(19): siRNA sense strand
gcgcuacuguggcuaugag

SEQ ID NO: 311989 - RNA, 19 nt, Homo sapiens
  misc_RNA (1)...(19): siRNA sense strand
ggcucaaguucgucucuga

SEQ ID NO: 311990 - RNA, 19 nt, Homo sapiens
  misc_RNA (1)...(19): siRNA sense strand
ggucauccccuuugucauu

SEQ ID NO: 311991 - RNA, 19 nt, Homo sapiens
  misc_RNA (1)...(19): siRNA sense strand
ugacuucgacagcaucaug

SEQ ID NO: 311992 - RNA, 19 nt, Homo sapiens
  misc_RNA (1)...(19): siRNA sense strand
ccaaacucccugagccuau

SEQ ID NO: 311993 - RNA, 19 nt, Homo sapiens
  misc_RNA (1)...(19): siRNA sense strand
ucugacggguccauuaaca

SEQ ID NO: 311994 - RNA, 19 nt, Homo sapiens
  misc_RNA (1)...(19): siRNA sense strand
gcagcaauuggguuggaaa

SEQ ID NO: 311995 - RNA, 19 nt, Homo sapiens
  misc_RNA (1)...(19): siRNA sense strand
ccuaucgucuccacugaca

SEQ ID NO: 311996 - RNA, 19 nt, Homo sapiens
  misc_RNA (1)...(19): siRNA sense strand
ucucugacggguccauuaa

SEQ ID NO: 311997 - RNA, 19 nt, Homo sapiens
  misc_RNA (1)...(19): siRNA sense strand
gcaguuugacuucuuugag

SEQ ID NO: 311998 - RNA, 19 nt, Homo sapiens
  misc_RNA (1)...(19): siRNA sense strand
ccugcaguuugacuucuuu

SEQ ID NO: 311999 - RNA, 19 nt, Homo sapiens
  misc_RNA (1)...(19): siRNA sense strand
gcggauuccucaccaagcu

SEQ ID NO: 312000 - RNA, 19 nt, Homo sapiens
  misc_RNA (1)...(19): siRNA sense strand
gcaucuuccuggauaccau

SEQ ID NO: 312001 - RNA, 19 nt, Homo sapiens
  misc_RNA (1)...(19): siRNA sense strand
gucaucaccucccaguaca

SEQ ID NO: 312002 - RNA, 19 nt, Homo sapiens
  misc_RNA (1)...(19): siRNA sense strand
ugugacaaguucggcauug

SEQ ID NO: 312003 - RNA, 19 nt, Homo sapiens
  misc_RNA (1)...(19): siRNA sense strand
ucguaaguccuccaucaaa

SEQ ID NO: 312004 - RNA, 19 nt, Homo sapiens
  misc_RNA (1)...(19): siRNA sense strand
caaggcccacuucuucuca

SEQ ID NO: 312005 - RNA, 19 nt, Homo sapiens
  misc_RNA (1)...(19): siRNA sense strand
cgaggacagcuauauugug

SEQ ID NO: 312006 - RNA, 19 nt, Homo sapiens
  misc_RNA (1)...(19): siRNA sense strand
ucaccucccaguacaacaa

SEQ ID NO: 312007 - RNA, 19 nt, Homo sapiens
  misc_RNA (1)...(19): siRNA sense strand
gagaagcccgaggucauca

SEQ ID NO: 312008 - RNA, 19 nt, Homo sapiens
  misc_RNA (1)...(19): siRNA sense strand
uccaguccuuugagauuga

SEQ ID NO: 312009 - RNA, 19 nt, Homo sapiens
  misc_RNA (1)...(19): siRNA sense strand
ccuaugacuucgacagcau

SEQ ID NO: 312010 - RNA, 19 nt, Homo sapiens
  misc_RNA (1)...(19): siRNA sense strand
ccgccacguuuccaucguu

SEQ ID NO: 312011 - RNA, 19 nt, Homo sapiens
  misc_RNA (1)...(19): siRNA sense strand
gggugaaaccucccauugg

SEQ ID NO: 312012 - RNA, 19 nt, Homo sapiens
  misc_RNA (1)...(19): siRNA sense strand
gaguucaaguccgacaaca

SEQ ID NO: 312013 - RNA, 19 nt, Homo sapiens
  misc_RNA (1)...(19): siRNA sense strand
gaggugcgcaguggacuca

SEQ ID NO: 312014 - RNA, 19 nt, Homo sapiens
  misc_RNA (1)...(19): siRNA sense strand
gacagagggcaaugaugug

SEQ ID NO: 312015 - RNA, 19 nt, Homo sapiens
  misc_RNA (1)...(19): siRNA sense strand
gagacagagggcaaugaug

SEQ ID NO: 312016 - RNA, 19 nt, Homo sapiens
  misc_RNA (1)...(19): siRNA sense strand
caagacagcacaggcaacu

SEQ ID NO: 312017 - RNA, 19 nt, Homo sapiens
  misc_RNA (1)...(19): siRNA sense strand
ugagacagagggcaaugau

SEQ ID NO: 312018 - RNA, 19 nt, Homo sapiens
  misc_RNA (1)...(19): siRNA sense strand
ggacagcuauauuguguuc

SEQ ID NO: 312019 - RNA, 19 nt, Homo sapiens
  misc_RNA (1)...(19): siRNA sense strand
gaggacagcuauauugugu

SEQ ID NO: 312020 - RNA, 19 nt, Homo sapiens
  misc_RNA (1)...(19): siRNA sense strand
gggagaagaucauccugaa

SEQ ID NO: 312021 - RNA, 19 nt, Homo sapiens
  misc_RNA (1)...(19): siRNA sense strand
caucaaagcugcaguucca

SEQ ID NO: 312022 - RNA, 19 nt, Homo sapiens
  misc_RNA (1)...(19): siRNA sense strand
ccaacuacccagacgauua

SEQ ID NO: 312023 - RNA, 19 nt, Homo sapiens
  misc_RNA (1)...(19): siRNA sense strand
gagcagcggugccucaaca

SEQ ID NO: 312024 - RNA, 19 nt, Homo sapiens
  misc_RNA (1)...(19): siRNA sense strand
gcucguaaguccuccauca

SEQ ID NO: 312025 - RNA, 19 nt, Homo sapiens
  misc_RNA (1)...(19): siRNA sense strand
ggagagacccugcaagaca

SEQ ID NO: 312026 - RNA, 19 nt, Homo sapiens
  misc_RNA (1)...(19): siRNA sense strand
aaaggacuauggccacauu

SEQ ID NO: 312027 - RNA, 19 nt, Homo sapiens
  misc_RNA (1)...(19): siRNA sense strand
gggcuuugccgucaacuuu

SEQ ID NO: 312028 - RNA, 19 nt, Homo sapiens
  misc_RNA (1)...(19): siRNA sense strand
gcuaugagaagccugauga

SEQ ID NO: 312029 - RNA, 19 nt, Homo sapiens
  misc_RNA (1)...(19): siRNA sense strand
gcacugacgaggacagcua

SEQ ID NO: 312030 - RNA, 19 nt, Homo sapiens
  misc_RNA (1)...(19): siRNA sense strand
gcuauauuguguucaccua

SEQ ID NO: 312031 - RNA, 19 nt, Homo sapiens
  misc_RNA (1)...(19): siRNA sense strand
ugugggagauggagaggua

SEQ ID NO: 312032 - RNA, 19 nt, Homo sapiens
  misc_RNA (1)...(19): siRNA sense strand
ggacauugcccuggacgaa

SEQ ID NO: 312033 - RNA, 19 nt, Homo sapiens
  misc_RNA (1)...(19): siRNA sense strand
ggcaagaacugugacaagu

SEQ ID NO: 312034 - RNA, 19 nt, Homo sapiens
  misc_RNA (1)...(19): siRNA sense strand
gcauuacgcucggaacaca

SEQ ID NO: 312035 - RNA, 19 nt, Homo sapiens
  misc_RNA (1)...(19): siRNA sense strand
gacgaggacagcuauauug

SEQ ID NO: 312036 - RNA, 19 nt, Homo sapiens
  misc_RNA (1)...(19): siRNA sense strand
gagaagaucauccugaacu

SEQ ID NO: 312037 - RNA, 19 nt, Homo sapiens
  misc_RNA (1)...(19): siRNA sense strand
ggacuauggccacauucaa

SEQ ID NO: 312038 - RNA, 19 nt, Homo sapiens
  misc_RNA (1)...(19): siRNA sense strand
ugacggguccauuaacaaa

SEQ ID NO: 312039 - RNA, 19 nt, Homo sapiens
  misc_RNA (1)...(19): siRNA sense strand
uggcuacucugcucacaug

SEQ ID NO: 312040 - RNA, 19 nt, Homo sapiens
  misc_RNA (1)...(19): siRNA sense strand
ucacauuccaguccuuuga

SEQ ID NO: 312041 - RNA, 19 nt, Homo sapiens
  misc_RNA (1)...(19): siRNA sense strand
ugacgaggacagcuauauu

SEQ ID NO: 312042 - RNA, 19 nt, Homo sapiens
  misc_RNA (1)...(19): siRNA sense strand
ccacgugggccucacauuc

SEQ ID NO: 312043 - RNA, 19 nt, Homo sapiens
  misc_RNA (1)...(19): siRNA sense strand
guggagagacccugcaaga

SEQ ID NO: 312044 - RNA, 19 nt, Homo sapiens
  misc_RNA (1)...(19): siRNA sense strand
cccgcaagcuuuacaagug

SEQ ID NO: 312045 - RNA, 19 nt, Homo sapiens
  misc_RNA (1)...(19): siRNA sense strand
agaagaucauccugaacuu

SEQ ID NO: 312046 - RNA, 19 nt, Homo sapiens
  misc_RNA (1)...(19): siRNA sense strand
caacuacccagacgauuac

SEQ ID NO: 312047 - RNA, 19 nt, Homo sapiens
  misc_RNA (1)...(19): siRNA sense strand
gagauggcuucuggaggaa

SEQ ID NO: 312048 - RNA, 19 nt, Homo sapiens
  misc_RNA (1)...(19): siRNA sense strand
cguaaguccuccaucaaag

SEQ ID NO: 312049 - RNA, 19 nt, Homo sapiens
  misc_RNA (1)...(19): siRNA sense strand
cagcugugccuacgacuau

SEQ ID NO: 312050 - RNA, 19 nt, Homo sapiens
  misc_RNA (1)...(19): siRNA sense strand
uauauuguguucaccuauc

SEQ ID NO: 312051 - RNA, 19 nt, Homo sapiens
  misc_RNA (1)...(19): siRNA sense strand
ucaacacccugggcagcua

SEQ ID NO: 312052 - RNA, 19 nt, Homo sapiens
  misc_RNA (1)...(19): siRNA sense strand
caaacucccugagccuauc

SEQ ID NO: 312053 - RNA, 19 nt, Homo sapiens
  misc_RNA (1)...(19): siRNA sense strand
acauugcccuggacgaaga

SEQ ID NO: 312054 - RNA, 19 nt, Homo sapiens
  misc_RNA (1)...(19): siRNA sense strand
agacagcacaggcaacuuc

SEQ ID NO: 312055 - RNA, 19 nt, Homo sapiens
  misc_RNA (1)...(19): siRNA sense strand
gacuauggccacauucaau

SEQ ID NO: 312056 - RNA, 19 nt, Homo sapiens
  misc_RNA (1)...(19): siRNA sense strand
gggcuucuuugcagucuac

SEQ ID NO: 312057 - RNA, 19 nt, Homo sapiens
  misc_RNA (1)...(19): siRNA sense strand
cagcagcaauuggguugga

SEQ ID NO: 312058 - RNA, 19 nt, Homo sapiens
  misc_RNA (1)...(19): siRNA sense strand
gcgcuacuguggcuaugag

SEQ ID NO: 312059 - RNA, 19 nt, Homo sapiens
  misc_RNA (1)...(19): siRNA sense strand
ggcucaaguucgucucuga

SEQ ID NO: 312060 - RNA, 19 nt, Homo sapiens
  misc_RNA (1)...(19): siRNA sense strand
ggucauccccuuugucauu

SEQ ID NO: 312061 - RNA, 19 nt, Homo sapiens
  misc_RNA (1)...(19): siRNA sense strand
ugacuucgacagcaucaug

SEQ ID NO: 312062 - RNA, 19 nt, Homo sapiens
  misc_RNA (1)...(19): siRNA sense strand
ccaaacucccugagccuau

SEQ ID NO: 312063 - RNA, 19 nt, Homo sapiens
  misc_RNA (1)...(19): siRNA sense strand
ucugacggguccauuaaca

SEQ ID NO: 312064 - RNA, 19 nt, Homo sapiens
  misc_RNA (1)...(19): siRNA sense strand
gcagcaauuggguuggaaa

SEQ ID NO: 312065 - RNA, 19 nt, Homo sapiens
  misc_RNA (1)...(19): siRNA sense strand
ccuaucgucuccacugaca

SEQ ID NO: 312066 - RNA, 19 nt, Homo sapiens
  misc_RNA (1)...(19): siRNA sense strand
ucucugacggguccauuaa

SEQ ID NO: 312067 - RNA, 19 nt, Homo sapiens
  misc_RNA (1)...(19): siRNA sense strand
gcaucuuccuggauaccau

SEQ ID NO: 312068 - RNA, 19 nt, Homo sapiens
  misc_RNA (1)...(19): siRNA sense strand
ugugacaaguucggcauug

SEQ ID NO: 312069 - RNA, 19 nt, Homo sapiens
  misc_RNA (1)...(19): siRNA sense strand
ucguaaguccuccaucaaa

SEQ ID NO: 312070 - RNA, 19 nt, Homo sapiens
  misc_RNA (1)...(19): siRNA sense strand
cgaggacagcuauauugug

SEQ ID NO: 312071 - RNA, 19 nt, Homo sapiens
  misc_RNA (1)...(19): siRNA sense strand
uccaguccuuugagauuga

SEQ ID NO: 312072 - RNA, 19 nt, Homo sapiens
  misc_RNA (1)...(19): siRNA sense strand
ccuaugacuucgacagcau

SEQ ID NO: 312073 - RNA, 19 nt, Homo sapiens
  misc_RNA (1)...(19): siRNA sense strand
ccgccacguuuccaucguu

SEQ ID NO: 312074 - RNA, 19 nt, Homo sapiens
  misc_RNA (1)...(19): siRNA sense strand
gggugaaaccucccauugg

SEQ ID NO: 312075 - RNA, 19 nt, Homo sapiens
  misc_RNA (1)...(19): siRNA sense strand
caagacagcacaggcaacu

SEQ ID NO: 312076 - RNA, 19 nt, Homo sapiens
  misc_RNA (1)...(19): siRNA sense strand
ggacagcuauauuguguuc

SEQ ID NO: 312077 - RNA, 19 nt, Homo sapiens
  misc_RNA (1)...(19): siRNA sense strand
gaggacagcuauauugugu

SEQ ID NO: 312078 - RNA, 19 nt, Homo sapiens
  misc_RNA (1)...(19): siRNA sense strand
caucaaagcugcaguucca

SEQ ID NO: 312079 - RNA, 19 nt, Homo sapiens
  misc_RNA (1)...(19): siRNA sense strand
gcucguaaguccuccauca

SEQ ID NO: 312080 - RNA, 19 nt, Homo sapiens
  misc_RNA (1)...(19): siRNA sense strand
gcacugacgaggacagcua

SEQ ID NO: 312081 - RNA, 19 nt, Homo sapiens
  misc_RNA (1)...(19): siRNA sense strand
gcuauauuguguucaccua

SEQ ID NO: 312082 - RNA, 19 nt, Homo sapiens
  misc_RNA (1)...(19): siRNA sense strand
ugugggagauggagaggua

SEQ ID NO: 312083 - RNA, 19 nt, Homo sapiens
  misc_RNA (1)...(19): siRNA sense strand
ggacauugcccuggacgaa

SEQ ID NO: 312084 - RNA, 19 nt, Homo sapiens
  misc_RNA (1)...(19): siRNA sense strand
ggcaagaacugugacaagu

SEQ ID NO: 312085 - RNA, 19 nt, Homo sapiens
  misc_RNA (1)...(19): siRNA sense strand
gacgaggacagcuauauug

SEQ ID NO: 312086 - RNA, 19 nt, Homo sapiens
  misc_RNA (1)...(19): siRNA sense strand
ugacgaggacagcuauauu

SEQ ID NO: 312087 - RNA, 19 nt, Homo sapiens
  misc_RNA (1)...(19): siRNA sense strand
cguaaguccuccaucaaag

SEQ ID NO: 312088 - RNA, 19 nt, Homo sapiens
  misc_RNA (1)...(19): siRNA sense strand
acauugcccuggacgaaga

SEQ ID NO: 312089 - RNA, 19 nt, Homo sapiens
  misc_RNA (1)...(19): siRNA sense strand
uauauuguguucaccuauc

SEQ ID NO: 312090 - RNA, 19 nt, Homo sapiens
  misc_RNA (1)...(19): siRNA sense strand
ggucauccccuuugucauu

SEQ ID NO: 312091 - RNA, 19 nt, Homo sapiens
  misc_RNA (1)...(19): siRNA sense strand
ugugacaaguucggcauug

SEQ ID NO: 312092 - RNA, 19 nt, Homo sapiens
  misc_RNA (1)...(19): siRNA sense strand
ucguaaguccuccaucaaa

SEQ ID NO: 312093 - RNA, 19 nt, Homo sapiens
  misc_RNA (1)...(19): siRNA sense strand
cgaggacagcuauauugug

SEQ ID NO: 312094 - RNA, 19 nt, Homo sapiens
  misc_RNA (1)...(19): siRNA sense strand
ccgccacguuuccaucguu

SEQ ID NO: 312095 - RNA, 19 nt, Homo sapiens
  misc_RNA (1)...(19): siRNA sense strand
gcaaugaugugugcaagua

SEQ ID NO: 312096 - RNA, 19 nt, Homo sapiens
  misc_RNA (1)...(19): siRNA sense strand
ggacagcuauauuguguuc

SEQ ID NO: 312097 - RNA, 19 nt, Homo sapiens
  misc_RNA (1)...(19): siRNA sense strand
gaggacagcuauauugugu

SEQ ID NO: 312098 - RNA, 19 nt, Homo sapiens
  misc_RNA (1)...(19): siRNA sense strand
gggagaagaucauccugaa

SEQ ID NO: 312099 - RNA, 19 nt, Homo sapiens
  misc_RNA (1)...(19): siRNA sense strand
caucaaagcugcaguucca

SEQ ID NO: 312100 - RNA, 19 nt, Homo sapiens
  misc_RNA (1)...(19): siRNA sense strand
ccaacuacccagacgauua

SEQ ID NO: 312101 - RNA, 19 nt, Homo sapiens
  misc_RNA (1)...(19): siRNA sense strand
gagcagcggugccucaaca

SEQ ID NO: 312102 - RNA, 19 nt, Homo sapiens
  misc_RNA (1)...(19): siRNA sense strand
gcucguaaguccuccauca

SEQ ID NO: 312103 - RNA, 19 nt, Homo sapiens
  misc_RNA (1)...(19): siRNA sense strand
ggagagacccugcaagaca

SEQ ID NO: 312104 - RNA, 19 nt, Homo sapiens
  misc_RNA (1)...(19): siRNA sense strand
gcaucucccugcaguuuga

SEQ ID NO: 312105 - RNA, 19 nt, Homo sapiens
  misc_RNA (1)...(19): siRNA sense strand
aaaggacuauggccacauu

SEQ ID NO: 312106 - RNA, 19 nt, Homo sapiens
  misc_RNA (1)...(19): siRNA sense strand
gggcuuugccgucaacuuu

SEQ ID NO: 312107 - RNA, 19 nt, Homo sapiens
  misc_RNA (1)...(19): siRNA sense strand
gcuaugagaagccugauga

SEQ ID NO: 312108 - RNA, 19 nt, Homo sapiens
  misc_RNA (1)...(19): siRNA sense strand
gcacugacgaggacagcua

SEQ ID NO: 312109 - RNA, 19 nt, Homo sapiens
  misc_RNA (1)...(19): siRNA sense strand
gcuauauuguguucaccua

SEQ ID NO: 312110 - RNA, 19 nt, Homo sapiens
  misc_RNA (1)...(19): siRNA sense strand
ugugggagauggagaggua

SEQ ID NO: 312111 - RNA, 19 nt, Homo sapiens
  misc_RNA (1)...(19): siRNA sense strand
ggacauugcccuggacgaa

SEQ ID NO: 312112 - RNA, 19 nt, Homo sapiens
  misc_RNA (1)...(19): siRNA sense strand
ggcaagaacugugacaagu

SEQ ID NO: 312113 - RNA, 19 nt, Homo sapiens
  misc_RNA (1)...(19): siRNA sense strand
gcauuacgcucggaacaca

SEQ ID NO: 312114 - RNA, 19 nt, Homo sapiens
  misc_RNA (1)...(19): siRNA sense strand
gacgaggacagcuauauug

SEQ ID NO: 312115 - RNA, 19 nt, Homo sapiens
  misc_RNA (1)...(19): siRNA sense strand
gagaagaucauccugaacu

SEQ ID NO: 312116 - RNA, 19 nt, Homo sapiens
  misc_RNA (1)...(19): siRNA sense strand
caguuugacuucuuugaga

SEQ ID NO: 312117 - RNA, 19 nt, Homo sapiens
  misc_RNA (1)...(19): siRNA sense strand
caagcugcauggcaaguuc

SEQ ID NO: 312118 - RNA, 19 nt, Homo sapiens
  misc_RNA (1)...(19): siRNA sense strand
ggacuauggccacauucaa

SEQ ID NO: 312119 - RNA, 19 nt, Homo sapiens
  misc_RNA (1)...(19): siRNA sense strand
ugacggguccauuaacaaa

SEQ ID NO: 312120 - RNA, 19 nt, Homo sapiens
  misc_RNA (1)...(19): siRNA sense strand
agacagagggcaaugaugu

SEQ ID NO: 312121 - RNA, 19 nt, Homo sapiens
  misc_RNA (1)...(19): siRNA sense strand
uggcuacucugcucacaug

SEQ ID NO: 312122 - RNA, 19 nt, Homo sapiens
  misc_RNA (1)...(19): siRNA sense strand
ucacauuccaguccuuuga

SEQ ID NO: 312123 - RNA, 19 nt, Homo sapiens
  misc_RNA (1)...(19): siRNA sense strand
cauggcaaguucugugguu

SEQ ID NO: 312124 - RNA, 19 nt, Homo sapiens
  misc_RNA (1)...(19): siRNA sense strand
ugacgaggacagcuauauu

SEQ ID NO: 312125 - RNA, 19 nt, Homo sapiens
  misc_RNA (1)...(19): siRNA sense strand
ggucaucaccucccaguac

SEQ ID NO: 312126 - RNA, 19 nt, Homo sapiens
  misc_RNA (1)...(19): siRNA sense strand
ccacgugggccucacauuc

SEQ ID NO: 312127 - RNA, 19 nt, Homo sapiens
  misc_RNA (1)...(19): siRNA sense strand
guggagagacccugcaaga

SEQ ID NO: 312128 - RNA, 19 nt, Homo sapiens
  misc_RNA (1)...(19): siRNA sense strand
cccgcaagcuuuacaagug

SEQ ID NO: 312129 - RNA, 19 nt, Homo sapiens
  misc_RNA (1)...(19): siRNA sense strand
agaagaucauccugaacuu

SEQ ID NO: 312130 - RNA, 19 nt, Homo sapiens
  misc_RNA (1)...(19): siRNA sense strand
caacuacccagacgauuac

SEQ ID NO: 312131 - RNA, 19 nt, Homo sapiens
  misc_RNA (1)...(19): siRNA sense strand
gagauggcuucuggaggaa

SEQ ID NO: 312132 - RNA, 19 nt, Homo sapiens
  misc_RNA (1)...(19): siRNA sense strand
cguaaguccuccaucaaag

SEQ ID NO: 312133 - RNA, 19 nt, Homo sapiens
  misc_RNA (1)...(19): siRNA sense strand
cagcugugccuacgacuau

SEQ ID NO: 312134 - RNA, 19 nt, Homo sapiens
  misc_RNA (1)...(19): siRNA sense strand
uauauuguguucaccuauc

SEQ ID NO: 312135 - RNA, 19 nt, Homo sapiens
  misc_RNA (1)...(19): siRNA sense strand
acauugcccuggacgaaga

SEQ ID NO: 312136 - RNA, 19 nt, Homo sapiens
  misc_RNA (1)...(19): siRNA sense strand
ucaacacccugggcagcua

SEQ ID NO: 312137 - RNA, 19 nt, Homo sapiens
  misc_RNA (1)...(19): siRNA sense strand
caaacucccugagccuauc

SEQ ID NO: 312138 - RNA, 19 nt, Homo sapiens
  misc_RNA (1)...(19): siRNA sense strand
caacaugcgcguggaguuc

SEQ ID NO: 312139 - RNA, 19 nt, Homo sapiens
  misc_RNA (1)...(19): siRNA sense strand
cuucaaggcccacuucuuc

SEQ ID NO: 312140 - RNA, 19 nt, Homo sapiens
  misc_RNA (1)...(19): siRNA sense strand
agacagcacaggcaacuuc

SEQ ID NO: 312141 - RNA, 19 nt, Homo sapiens
  misc_RNA (1)...(19): siRNA sense strand
ccgcaucucccugcaguuu

SEQ ID NO: 312142 - RNA, 19 nt, Homo sapiens
  misc_RNA (1)...(19): siRNA sense strand
gacuauggccacauucaau

SEQ ID NO: 312143 - RNA, 19 nt, Homo sapiens
  misc_RNA (1)...(19): siRNA sense strand
gggcuucuuugcagucuac

SEQ ID NO: 312144 - RNA, 19 nt, Homo sapiens
  misc_RNA (1)...(19): siRNA sense strand
cagcagcaauuggguugga

SEQ ID NO: 312145 - RNA, 19 nt, Homo sapiens
  misc_RNA (1)...(19): siRNA sense strand
gcgcuacuguggcuaugag

SEQ ID NO: 312146 - RNA, 19 nt, Homo sapiens
  misc_RNA (1)...(19): siRNA sense strand
ggcucaaguucgucucuga

SEQ ID NO: 312147 - RNA, 19 nt, Homo sapiens
  misc_RNA (1)...(19): siRNA sense strand
ggucauccccuuugucauu

SEQ ID NO: 312148 - RNA, 19 nt, Homo sapiens
  misc_RNA (1)...(19): siRNA sense strand
ugacuucgacagcaucaug

SEQ ID NO: 312149 - RNA, 19 nt, Homo sapiens
  misc_RNA (1)...(19): siRNA sense strand
ccaaacucccugagccuau

SEQ ID NO: 312150 - RNA, 19 nt, Homo sapiens
  misc_RNA (1)...(19): siRNA sense strand
ucugacggguccauuaaca

SEQ ID NO: 312151 - RNA, 19 nt, Homo sapiens
  misc_RNA (1)...(19): siRNA sense strand
gcagcaauuggguuggaaa

SEQ ID NO: 312152 - RNA, 19 nt, Homo sapiens
  misc_RNA (1)...(19): siRNA sense strand
ccuaucgucuccacugaca

SEQ ID NO: 312153 - RNA, 19 nt, Homo sapiens
  misc_RNA (1)...(19): siRNA sense strand
ucucugacggguccauuaa

SEQ ID NO: 312154 - RNA, 19 nt, Homo sapiens
  misc_RNA (1)...(19): siRNA sense strand
gcaguuugacuucuuugag

SEQ ID NO: 312155 - RNA, 19 nt, Homo sapiens
  misc_RNA (1)...(19): siRNA sense strand
ccugcaguuugacuucuuu

SEQ ID NO: 312156 - RNA, 19 nt, Homo sapiens
  misc_RNA (1)...(19): siRNA sense strand
gcggauuccucaccaagcu

SEQ ID NO: 312157 - RNA, 19 nt, Homo sapiens
  misc_RNA (1)...(19): siRNA sense strand
gcaucuuccuggauaccau

SEQ ID NO: 312158 - RNA, 19 nt, Homo sapiens
  misc_RNA (1)...(19): siRNA sense strand
gucaucaccucccaguaca

SEQ ID NO: 312159 - RNA, 19 nt, Homo sapiens
  misc_RNA (1)...(19): siRNA sense strand
ugugacaaguucggcauug

SEQ ID NO: 312160 - RNA, 19 nt, Homo sapiens
  misc_RNA (1)...(19): siRNA sense strand
ucguaaguccuccaucaaa

SEQ ID NO: 312161 - RNA, 19 nt, Homo sapiens
  misc_RNA (1)...(19): siRNA sense strand
caaggcccacuucuucuca

SEQ ID NO: 312162 - RNA, 19 nt, Homo sapiens
  misc_RNA (1)...(19): siRNA sense strand
cgaggacagcuauauugug

SEQ ID NO: 312163 - RNA, 19 nt, Homo sapiens
  misc_RNA (1)...(19): siRNA sense strand
ucaccucccaguacaacaa

SEQ ID NO: 312164 - RNA, 19 nt, Homo sapiens
  misc_RNA (1)...(19): siRNA sense strand
gagaagcccgaggucauca

SEQ ID NO: 312165 - RNA, 19 nt, Homo sapiens
  misc_RNA (1)...(19): siRNA sense strand
uccaguccuuugagauuga

SEQ ID NO: 312166 - RNA, 19 nt, Homo sapiens
  misc_RNA (1)...(19): siRNA sense strand
ccuaugacuucgacagcau

SEQ ID NO: 312167 - RNA, 19 nt, Homo sapiens
  misc_RNA (1)...(19): siRNA sense strand
ccgccacguuuccaucguu

SEQ ID NO: 312168 - RNA, 19 nt, Homo sapiens
  misc_RNA (1)...(19): siRNA sense strand
gggugaaaccucccauugg

SEQ ID NO: 312169 - RNA, 19 nt, Homo sapiens
  misc_RNA (1)...(19): siRNA sense strand
gaguucaaguccgacaaca

SEQ ID NO: 312170 - RNA, 19 nt, Homo sapiens
  misc_RNA (1)...(19): siRNA sense strand
gaggugcgcaguggacuca

SEQ ID NO: 312171 - RNA, 19 nt, Homo sapiens
  misc_RNA (1)...(19): siRNA sense strand
gacagagggcaaugaugug

SEQ ID NO: 312172 - RNA, 19 nt, Homo sapiens
  misc_RNA (1)...(19): siRNA sense strand
gagacagagggcaaugaug

SEQ ID NO: 312173 - RNA, 19 nt, Homo sapiens
  misc_RNA (1)...(19): siRNA sense strand
caagacagcacaggcaacu

SEQ ID NO: 312174 - RNA, 19 nt, Homo sapiens
  misc_RNA (1)...(19): siRNA sense strand
ugagacagagggcaaugau

SEQ ID NO: 312175 - RNA, 19 nt, Homo sapiens
  misc_RNA (1)...(19): siRNA sense strand
gcaaugaugugugcaagua

SEQ ID NO: 312176 - RNA, 19 nt, Homo sapiens
  misc_RNA (1)...(19): siRNA sense strand
ggacagcuauauuguguuc

SEQ ID NO: 312177 - RNA, 19 nt, Homo sapiens
  misc_RNA (1)...(19): siRNA sense strand
gaggacagcuauauugugu

SEQ ID NO: 312178 - RNA, 19 nt, Homo sapiens
  misc_RNA (1)...(19): siRNA sense strand
gggagaagaucauccugaa

SEQ ID NO: 312179 - RNA, 19 nt, Homo sapiens
  misc_RNA (1)...(19): siRNA sense strand
caucaaagcugcaguucca

SEQ ID NO: 312180 - RNA, 19 nt, Homo sapiens
  misc_RNA (1)...(19): siRNA sense strand
ccaacuacccagacgauua

SEQ ID NO: 312181 - RNA, 19 nt, Homo sapiens
  misc_RNA (1)...(19): siRNA sense strand
gagcagcggugccucaaca

SEQ ID NO: 312182 - RNA, 19 nt, Homo sapiens
  misc_RNA (1)...(19): siRNA sense strand
gcucguaaguccuccauca

SEQ ID NO: 312183 - RNA, 19 nt, Homo sapiens
  misc_RNA (1)...(19): siRNA sense strand
ggagagacccugcaagaca

SEQ ID NO: 312184 - RNA, 19 nt, Homo sapiens
  misc_RNA (1)...(19): siRNA sense strand
gcaucucccugcaguuuga

SEQ ID NO: 312185 - RNA, 19 nt, Homo sapiens
  misc_RNA (1)...(19): siRNA sense strand
aaaggacuauggccacauu

SEQ ID NO: 312186 - RNA, 19 nt, Homo sapiens
  misc_RNA (1)...(19): siRNA sense strand
gggcuuugccgucaacuuu

SEQ ID NO: 312187 - RNA, 19 nt, Homo sapiens
  misc_RNA (1)...(19): siRNA sense strand
gcuaugagaagccugauga

SEQ ID NO: 312188 - RNA, 19 nt, Homo sapiens
  misc_RNA (1)...(19): siRNA sense strand
gcacugacgaggacagcua

SEQ ID NO: 312189 - RNA, 19 nt, Homo sapiens
  misc_RNA (1)...(19): siRNA sense strand
gcuauauuguguucaccua

SEQ ID NO: 312190 - RNA, 19 nt, Homo sapiens
  misc_RNA (1)...(19): siRNA sense strand
ugugggagauggagaggua

SEQ ID NO: 312191 - RNA, 19 nt, Homo sapiens
  misc_RNA (1)...(19): siRNA sense strand
ggacauugcccuggacgaa

SEQ ID NO: 312192 - RNA, 19 nt, Homo sapiens
  misc_RNA (1)...(19): siRNA sense strand
ggcaagaacugugacaagu

SEQ ID NO: 312193 - RNA, 19 nt, Homo sapiens
  misc_RNA (1)...(19): siRNA sense strand
gcauuacgcucggaacaca

SEQ ID NO: 312194 - RNA, 19 nt, Homo sapiens
  misc_RNA (1)...(19): siRNA sense strand
gacgaggacagcuauauug

SEQ ID NO: 312195 - RNA, 19 nt, Homo sapiens
  misc_RNA (1)...(19): siRNA sense strand
gagaagaucauccugaacu

SEQ ID NO: 312196 - RNA, 19 nt, Homo sapiens
  misc_RNA (1)...(19): siRNA sense strand
caguuugacuucuuugaga

SEQ ID NO: 312197 - RNA, 19 nt, Homo sapiens
  misc_RNA (1)...(19): siRNA sense strand
caagcugcauggcaaguuc

SEQ ID NO: 312198 - RNA, 19 nt, Homo sapiens
  misc_RNA (1)...(19): siRNA sense strand
ggacuauggccacauucaa

SEQ ID NO: 312199 - RNA, 19 nt, Homo sapiens
  misc_RNA (1)...(19): siRNA sense strand
ugacggguccauuaacaaa

SEQ ID NO: 312200 - RNA, 19 nt, Homo sapiens
  misc_RNA (1)...(19): siRNA sense strand
agacagagggcaaugaugu

SEQ ID NO: 312201 - RNA, 19 nt, Homo sapiens
  misc_RNA (1)...(19): siRNA sense strand
uggcuacucugcucacaug

SEQ ID NO: 312202 - RNA, 19 nt, Homo sapiens
  misc_RNA (1)...(19): siRNA sense strand
ucacauuccaguccuuuga

SEQ ID NO: 312203 - RNA, 19 nt, Homo sapiens
  misc_RNA (1)...(19): siRNA sense strand
cauggcaaguucugugguu

SEQ ID NO: 312204 - RNA, 19 nt, Homo sapiens
  misc_RNA (1)...(19): siRNA sense strand
ugacgaggacagcuauauu

SEQ ID NO: 312205 - RNA, 19 nt, Homo sapiens
  misc_RNA (1)...(19): siRNA sense strand
ggucaucaccucccaguac

SEQ ID NO: 312206 - RNA, 19 nt, Homo sapiens
  misc_RNA (1)...(19): siRNA sense strand
ccacgugggccucacauuc

SEQ ID NO: 312207 - RNA, 19 nt, Homo sapiens
  misc_RNA (1)...(19): siRNA sense strand
guggagagacccugcaaga

SEQ ID NO: 312208 - RNA, 19 nt, Homo sapiens
  misc_RNA (1)...(19): siRNA sense strand
cccgcaagcuuuacaagug

SEQ ID NO: 312209 - RNA, 19 nt, Homo sapiens
  misc_RNA (1)...(19): siRNA sense strand
agaagaucauccugaacuu

SEQ ID NO: 312210 - RNA, 19 nt, Homo sapiens
  misc_RNA (1)...(19): siRNA sense strand
caacuacccagacgauuac

SEQ ID NO: 312211 - RNA, 19 nt, Homo sapiens
  misc_RNA (1)...(19): siRNA sense strand
gagauggcuucuggaggaa

SEQ ID NO: 312212 - RNA, 19 nt, Homo sapiens
  misc_RNA (1)...(19): siRNA sense strand
cguaaguccuccaucaaag

SEQ ID NO: 312213 - RNA, 19 nt, Homo sapiens
  misc_RNA (1)...(19): siRNA sense strand
cagcugugccuacgacuau

SEQ ID NO: 312214 - RNA, 19 nt, Homo sapiens
  misc_RNA (1)...(19): siRNA sense strand
uauauuguguucaccuauc

SEQ ID NO: 312215 - RNA, 19 nt, Homo sapiens
  misc_RNA (1)...(19): siRNA sense strand
acauugcccuggacgaaga

SEQ ID NO: 312216 - RNA, 19 nt, Homo sapiens
  misc_RNA (1)...(19): siRNA sense strand
ucaacacccugggcagcua

SEQ ID NO: 312217 - RNA, 19 nt, Homo sapiens
  misc_RNA (1)...(19): siRNA sense strand
caaacucccugagccuauc

SEQ ID NO: 312218 - RNA, 19 nt, Homo sapiens
  misc_RNA (1)...(19): siRNA sense strand
caacaugcgcguggaguuc

SEQ ID NO: 312219 - RNA, 19 nt, Homo sapiens
  misc_RNA (1)...(19): siRNA sense strand
cuucaaggcccacuucuuc

SEQ ID NO: 312220 - RNA, 19 nt, Homo sapiens
  misc_RNA (1)...(19): siRNA sense strand
agacagcacaggcaacuuc

SEQ ID NO: 312221 - RNA, 19 nt, Homo sapiens
  misc_RNA (1)...(19): siRNA sense strand
ccgcaucucccugcaguuu

SEQ ID NO: 312222 - RNA, 19 nt, Homo sapiens
  misc_RNA (1)...(19): siRNA sense strand
gacuauggccacauucaau

SEQ ID NO: 312223 - RNA, 19 nt, Homo sapiens
  misc_RNA (1)...(19): siRNA sense strand
gggcuucuuugcagucuac

SEQ ID NO: 312224 - RNA, 19 nt, Homo sapiens
  misc_RNA (1)...(19): siRNA sense strand
cagcagcaauuggguugga

SEQ ID NO: 312225 - RNA, 19 nt, Homo sapiens
  misc_RNA (1)...(19): siRNA sense strand
gcgcuacuguggcuaugag

SEQ ID NO: 312226 - RNA, 19 nt, Homo sapiens
  misc_RNA (1)...(19): siRNA sense strand
ggcucaaguucgucucuga

SEQ ID NO: 312227 - RNA, 19 nt, Homo sapiens
  misc_RNA (1)...(19): siRNA sense strand
ggucauccccuuugucauu

SEQ ID NO: 312228 - RNA, 19 nt, Homo sapiens
  misc_RNA (1)...(19): siRNA sense strand
ugacuucgacagcaucaug

SEQ ID NO: 312229 - RNA, 19 nt, Homo sapiens
  misc_RNA (1)...(19): siRNA sense strand
ccaaacucccugagccuau

SEQ ID NO: 312230 - RNA, 19 nt, Homo sapiens
  misc_RNA (1)...(19): siRNA sense strand
ucugacggguccauuaaca

SEQ ID NO: 312231 - RNA, 19 nt, Homo sapiens
  misc_RNA (1)...(19): siRNA sense strand
gcagcaauuggguuggaaa

SEQ ID NO: 312232 - RNA, 19 nt, Homo sapiens
  misc_RNA (1)...(19): siRNA sense strand
ccuaucgucuccacugaca

SEQ ID NO: 312233 - RNA, 19 nt, Homo sapiens
  misc_RNA (1)...(19): siRNA sense strand
ucucugacggguccauuaa

SEQ ID NO: 312234 - RNA, 19 nt, Homo sapiens
  misc_RNA (1)...(19): siRNA sense strand
gcaguuugacuucuuugag

SEQ ID NO: 312235 - RNA, 19 nt, Homo sapiens
  misc_RNA (1)...(19): siRNA sense strand
ccugcaguuugacuucuuu

SEQ ID NO: 312236 - RNA, 19 nt, Homo sapiens
  misc_RNA (1)...(19): siRNA sense strand
gcggauuccucaccaagcu

SEQ ID NO: 312237 - RNA, 19 nt, Homo sapiens
  misc_RNA (1)...(19): siRNA sense strand
gcaucuuccuggauaccau

SEQ ID NO: 312238 - RNA, 19 nt, Homo sapiens
  misc_RNA (1)...(19): siRNA sense strand
gucaucaccucccaguaca

SEQ ID NO: 312239 - RNA, 19 nt, Homo sapiens
  misc_RNA (1)...(19): siRNA sense strand
ugugacaaguucggcauug

SEQ ID NO: 312240 - RNA, 19 nt, Homo sapiens
  misc_RNA (1)...(19): siRNA sense strand
ucguaaguccuccaucaaa

SEQ ID NO: 312241 - RNA, 19 nt, Homo sapiens
  misc_RNA (1)...(19): siRNA sense strand
caaggcccacuucuucuca

SEQ ID NO: 312242 - RNA, 19 nt, Homo sapiens
  misc_RNA (1)...(19): siRNA sense strand
cgaggacagcuauauugug

SEQ ID NO: 312243 - RNA, 19 nt, Homo sapiens
  misc_RNA (1)...(19): siRNA sense strand
ucaccucccaguacaacaa

SEQ ID NO: 312244 - RNA, 19 nt, Homo sapiens
  misc_RNA (1)...(19): siRNA sense strand
gagaagcccgaggucauca

SEQ ID NO: 312245 - RNA, 19 nt, Homo sapiens
  misc_RNA (1)...(19): siRNA sense strand
uccaguccuuugagauuga

SEQ ID NO: 312246 - RNA, 19 nt, Homo sapiens
  misc_RNA (1)...(19): siRNA sense strand
ccuaugacuucgacagcau

SEQ ID NO: 312247 - RNA, 19 nt, Homo sapiens
  misc_RNA (1)...(19): siRNA sense strand
ccgccacguuuccaucguu

SEQ ID NO: 312248 - RNA, 19 nt, Homo sapiens
  misc_RNA (1)...(19): siRNA sense strand
gggugaaaccucccauugg

SEQ ID NO: 312249 - RNA, 19 nt, Homo sapiens
  misc_RNA (1)...(19): siRNA sense strand
gaguucaaguccgacaaca

SEQ ID NO: 312250 - RNA, 19 nt, Homo sapiens
  misc_RNA (1)...(19): siRNA sense strand
gaggugcgcaguggacuca

SEQ ID NO: 312251 - RNA, 19 nt, Homo sapiens
  misc_RNA (1)...(19): siRNA sense strand
gacagagggcaaugaugug

SEQ ID NO: 312252 - RNA, 19 nt, Homo sapiens
  misc_RNA (1)...(19): siRNA sense strand
gagacagagggcaaugaug

SEQ ID NO: 312253 - RNA, 19 nt, Homo sapiens
  misc_RNA (1)...(19): siRNA sense strand
caagacagcacaggcaacu

SEQ ID NO: 312254 - RNA, 19 nt, Homo sapiens
  misc_RNA (1)...(19): siRNA sense strand
ugagacagagggcaaugau

SEQ ID NO: 312255 - RNA, 19 nt, Homo sapiens
  misc_RNA (1)...(19): siRNA sense strand
gcaaugaugugugcaagua

SEQ ID NO: 312256 - RNA, 19 nt, Homo sapiens
  misc_RNA (1)...(19): siRNA sense strand
ggacagcuauauuguguuc

SEQ ID NO: 312257 - RNA, 19 nt, Homo sapiens
  misc_RNA (1)...(19): siRNA sense strand
gaggacagcuauauugugu

SEQ ID NO: 312258 - RNA, 19 nt, Homo sapiens
  misc_RNA (1)...(19): siRNA sense strand
gggagaagaucauccugaa

SEQ ID NO: 312259 - RNA, 19 nt, Homo sapiens
  misc_RNA (1)...(19): siRNA sense strand
caucaaagcugcaguucca

SEQ ID NO: 312260 - RNA, 19 nt, Homo sapiens
  misc_RNA (1)...(19): siRNA sense strand
ccaacuacccagacgauua

SEQ ID NO: 312261 - RNA, 19 nt, Homo sapiens
  misc_RNA (1)...(19): siRNA sense strand
gagcagcggugccucaaca

SEQ ID NO: 312262 - RNA, 19 nt, Homo sapiens
  misc_RNA (1)...(19): siRNA sense strand
gcucguaaguccuccauca

SEQ ID NO: 312263 - RNA, 19 nt, Homo sapiens
  misc_RNA (1)...(19): siRNA sense strand
ggagagacccugcaagaca

SEQ ID NO: 312264 - RNA, 19 nt, Homo sapiens
  misc_RNA (1)...(19): siRNA sense strand
gcaucucccugcaguuuga

SEQ ID NO: 312265 - RNA, 19 nt, Homo sapiens
  misc_RNA (1)...(19): siRNA sense strand
aaaggacuauggccacauu

SEQ ID NO: 312266 - RNA, 19 nt, Homo sapiens
  misc_RNA (1)...(19): siRNA sense strand
gggcuuugccgucaacuuu

SEQ ID NO: 312267 - RNA, 19 nt, Homo sapiens
  misc_RNA (1)...(19): siRNA sense strand
gcuaugagaagccugauga

SEQ ID NO: 312268 - RNA, 19 nt, Homo sapiens
  misc_RNA (1)...(19): siRNA sense strand
gcacugacgaggacagcua

SEQ ID NO: 312269 - RNA, 19 nt, Homo sapiens
  misc_RNA (1)...(19): siRNA sense strand
gcuauauuguguucaccua

SEQ ID NO: 312270 - RNA, 19 nt, Homo sapiens
  misc_RNA (1)...(19): siRNA sense strand
ugugggagauggagaggua

SEQ ID NO: 312271 - RNA, 19 nt, Homo sapiens
  misc_RNA (1)...(19): siRNA sense strand
ggacauugcccuggacgaa

SEQ ID NO: 312272 - RNA, 19 nt, Homo sapiens
  misc_RNA (1)...(19): siRNA sense strand
ggcaagaacugugacaagu

SEQ ID NO: 312273 - RNA, 19 nt, Homo sapiens
  misc_RNA (1)...(19): siRNA sense strand
gcauuacgcucggaacaca

SEQ ID NO: 312274 - RNA, 19 nt, Homo sapiens
  misc_RNA (1)...(19): siRNA sense strand
gacgaggacagcuauauug

SEQ ID NO: 312275 - RNA, 19 nt, Homo sapiens
  misc_RNA (1)...(19): siRNA sense strand
gagaagaucauccugaacu

SEQ ID NO: 312276 - RNA, 19 nt, Homo sapiens
  misc_RNA (1)...(19): siRNA sense strand
caguuugacuucuuugaga

SEQ ID NO: 312277 - RNA, 19 nt, Homo sapiens
  misc_RNA (1)...(19): siRNA sense strand
caagcugcauggcaaguuc

SEQ ID NO: 312278 - RNA, 19 nt, Homo sapiens
  misc_RNA (1)...(19): siRNA sense strand
ggacuauggccacauucaa

SEQ ID NO: 312279 - RNA, 19 nt, Homo sapiens
  misc_RNA (1)...(19): siRNA sense strand
ugacggguccauuaacaaa

SEQ ID NO: 312280 - RNA, 19 nt, Homo sapiens
  misc_RNA (1)...(19): siRNA sense strand
agacagagggcaaugaugu

SEQ ID NO: 312281 - RNA, 19 nt, Homo sapiens
  misc_RNA (1)...(19): siRNA sense strand
uggcuacucugcucacaug

SEQ ID NO: 312282 - RNA, 19 nt, Homo sapiens
  misc_RNA (1)...(19): siRNA sense strand
ucacauuccaguccuuuga

SEQ ID NO: 312283 - RNA, 19 nt, Homo sapiens
  misc_RNA (1)...(19): siRNA sense strand
cauggcaaguucugugguu

SEQ ID NO: 312284 - RNA, 19 nt, Homo sapiens
  misc_RNA (1)...(19): siRNA sense strand
ugacgaggacagcuauauu

SEQ ID NO: 312285 - RNA, 19 nt, Homo sapiens
  misc_RNA (1)...(19): siRNA sense strand
ggucaucaccucccaguac

SEQ ID NO: 312286 - RNA, 19 nt, Homo sapiens
  misc_RNA (1)...(19): siRNA sense strand
ccacgugggccucacauuc

SEQ ID NO: 312287 - RNA, 19 nt, Homo sapiens
  misc_RNA (1)...(19): siRNA sense strand
guggagagacccugcaaga

SEQ ID NO: 312288 - RNA, 19 nt, Homo sapiens
  misc_RNA (1)...(19): siRNA sense strand
cccgcaagcuuuacaagug

SEQ ID NO: 312289 - RNA, 19 nt, Homo sapiens
  misc_RNA (1)...(19): siRNA sense strand
agaagaucauccugaacuu

SEQ ID NO: 312290 - RNA, 19 nt, Homo sapiens
  misc_RNA (1)...(19): siRNA sense strand
caacuacccagacgauuac

SEQ ID NO: 312291 - RNA, 19 nt, Homo sapiens
  misc_RNA (1)...(19): siRNA sense strand
gagauggcuucuggaggaa

SEQ ID NO: 312292 - RNA, 19 nt, Homo sapiens
  misc_RNA (1)...(19): siRNA sense strand
cguaaguccuccaucaaag

SEQ ID NO: 312293 - RNA, 19 nt, Homo sapiens
  misc_RNA (1)...(19): siRNA sense strand
cagcugugccuacgacuau

SEQ ID NO: 312294 - RNA, 19 nt, Homo sapiens
  misc_RNA (1)...(19): siRNA sense strand
uauauuguguucaccuauc

SEQ ID NO: 312295 - RNA, 19 nt, Homo sapiens
  misc_RNA (1)...(19): siRNA sense strand
acauugcccuggacgaaga

SEQ ID NO: 312296 - RNA, 19 nt, Homo sapiens
  misc_RNA (1)...(19): siRNA sense strand
ucaacacccugggcagcua

SEQ ID NO: 312297 - RNA, 19 nt, Homo sapiens
  misc_RNA (1)...(19): siRNA sense strand
caaacucccugagccuauc

SEQ ID NO: 312298 - RNA, 19 nt, Homo sapiens
  misc_RNA (1)...(19): siRNA sense strand
caacaugcgcguggaguuc

SEQ ID NO: 312299 - RNA, 19 nt, Homo sapiens
  misc_RNA (1)...(19): siRNA sense strand
cuucaaggcccacuucuuc

SEQ ID NO: 312300 - RNA, 19 nt, Homo sapiens
  misc_RNA (1)...(19): siRNA sense strand
agacagcacaggcaacuuc

SEQ ID NO: 312301 - RNA, 19 nt, Homo sapiens
  misc_RNA (1)...(19): siRNA sense strand
ccgcaucucccugcaguuu

SEQ ID NO: 312302 - RNA, 19 nt, Homo sapiens
  misc_RNA (1)...(19): siRNA sense strand
gacuauggccacauucaau

SEQ ID NO: 312303 - RNA, 19 nt, Homo sapiens
  misc_RNA (1)...(19): siRNA sense strand
gggcuucuuugcagucuac

SEQ ID NO: 312304 - RNA, 19 nt, Homo sapiens
  misc_RNA (1)...(19): siRNA sense strand
cagcagcaauuggguugga

SEQ ID NO: 312305 - RNA, 19 nt, Homo sapiens
  misc_RNA (1)...(19): siRNA sense strand
gcgcuacuguggcuaugag

SEQ ID NO: 312306 - RNA, 19 nt, Homo sapiens
  misc_RNA (1)...(19): siRNA sense strand
ggcucaaguucgucucuga

SEQ ID NO: 312307 - RNA, 19 nt, Homo sapiens
  misc_RNA (1)...(19): siRNA sense strand
ggucauccccuuugucauu

SEQ ID NO: 312308 - RNA, 19 nt, Homo sapiens
  misc_RNA (1)...(19): siRNA sense strand
ugacuucgacagcaucaug

SEQ ID NO: 312309 - RNA, 19 nt, Homo sapiens
  misc_RNA (1)...(19): siRNA sense strand
ccaaacucccugagccuau

SEQ ID NO: 312310 - RNA, 19 nt, Homo sapiens
  misc_RNA (1)...(19): siRNA sense strand
ucugacggguccauuaaca

SEQ ID NO: 312311 - RNA, 19 nt, Homo sapiens
  misc_RNA (1)...(19): siRNA sense strand
gcagcaauuggguuggaaa

SEQ ID NO: 312312 - RNA, 19 nt, Homo sapiens
  misc_RNA (1)...(19): siRNA sense strand
ccuaucgucuccacugaca

SEQ ID NO: 312313 - RNA, 19 nt, Homo sapiens
  misc_RNA (1)...(19): siRNA sense strand
ucucugacggguccauuaa

SEQ ID NO: 312314 - RNA, 19 nt, Homo sapiens
  misc_RNA (1)...(19): siRNA sense strand
gcaguuugacuucuuugag

SEQ ID NO: 312315 - RNA, 19 nt, Homo sapiens
  misc_RNA (1)...(19): siRNA sense strand
ccugcaguuugacuucuuu

SEQ ID NO: 312316 - RNA, 19 nt, Homo sapiens
  misc_RNA (1)...(19): siRNA sense strand
gcggauuccucaccaagcu

SEQ ID NO: 312317 - RNA, 19 nt, Homo sapiens
  misc_RNA (1)...(19): siRNA sense strand
gcaucuuccuggauaccau

SEQ ID NO: 312318 - RNA, 19 nt, Homo sapiens
  misc_RNA (1)...(19): siRNA sense strand
gucaucaccucccaguaca

SEQ ID NO: 312319 - RNA, 19 nt, Homo sapiens
  misc_RNA (1)...(19): siRNA sense strand
ugugacaaguucggcauug

SEQ ID NO: 312320 - RNA, 19 nt, Homo sapiens
  misc_RNA (1)...(19): siRNA sense strand
ucguaaguccuccaucaaa

SEQ ID NO: 312321 - RNA, 19 nt, Homo sapiens
  misc_RNA (1)...(19): siRNA sense strand
caaggcccacuucuucuca

SEQ ID NO: 312322 - RNA, 19 nt, Homo sapiens
  misc_RNA (1)...(19): siRNA sense strand
cgaggacagcuauauugug

SEQ ID NO: 312323 - RNA, 19 nt, Homo sapiens
  misc_RNA (1)...(19): siRNA sense strand
ucaccucccaguacaacaa

SEQ ID NO: 312324 - RNA, 19 nt, Homo sapiens
  misc_RNA (1)...(19): siRNA sense strand
gagaagcccgaggucauca

SEQ ID NO: 312325 - RNA, 19 nt, Homo sapiens
  misc_RNA (1)...(19): siRNA sense strand
uccaguccuuugagauuga

SEQ ID NO: 312326 - RNA, 19 nt, Homo sapiens
  misc_RNA (1)...(19): siRNA sense strand
ccuaugacuucgacagcau

SEQ ID NO: 312327 - RNA, 19 nt, Homo sapiens
  misc_RNA (1)...(19): siRNA sense strand
ccgccacguuuccaucguu

SEQ ID NO: 312328 - RNA, 19 nt, Homo sapiens
  misc_RNA (1)...(19): siRNA sense strand
gggugaaaccucccauugg

SEQ ID NO: 312329 - RNA, 19 nt, Homo sapiens
  misc_RNA (1)...(19): siRNA sense strand
gaguucaaguccgacaaca

SEQ ID NO: 312330 - RNA, 19 nt, Homo sapiens
  misc_RNA (1)...(19): siRNA sense strand
gaggugcgcaguggacuca

SEQ ID NO: 312331 - RNA, 19 nt, Homo sapiens
  misc_RNA (1)...(19): siRNA sense strand
gacagagggcaaugaugug

SEQ ID NO: 312332 - RNA, 19 nt, Homo sapiens
  misc_RNA (1)...(19): siRNA sense strand
gagacagagggcaaugaug

SEQ ID NO: 312333 - RNA, 19 nt, Homo sapiens
  misc_RNA (1)...(19): siRNA sense strand
caagacagcacaggcaacu

SEQ ID NO: 312334 - RNA, 19 nt, Homo sapiens
  misc_RNA (1)...(19): siRNA sense strand
ugagacagagggcaaugau

SEQ ID NO: 312335 - RNA, 19 nt, Homo sapiens
  misc_RNA (1)...(19): siRNA sense strand
gcaaugaugugugcaagua

SEQ ID NO: 312336 - RNA, 19 nt, Homo sapiens
  misc_RNA (1)...(19): siRNA sense strand
ggacagcuauauuguguuc

SEQ ID NO: 312337 - RNA, 19 nt, Homo sapiens
  misc_RNA (1)...(19): siRNA sense strand
gaggacagcuauauugugu

SEQ ID NO: 312338 - RNA, 19 nt, Homo sapiens
  misc_RNA (1)...(19): siRNA sense strand
gggagaagaucauccugaa

SEQ ID NO: 312339 - RNA, 19 nt, Homo sapiens
  misc_RNA (1)...(19): siRNA sense strand
caucaaagcugcaguucca

SEQ ID NO: 312340 - RNA, 19 nt, Homo sapiens
  misc_RNA (1)...(19): siRNA sense strand
ccaacuacccagacgauua

SEQ ID NO: 312341 - RNA, 19 nt, Homo sapiens
  misc_RNA (1)...(19): siRNA sense strand
gagcagcggugccucaaca

SEQ ID NO: 312342 - RNA, 19 nt, Homo sapiens
  misc_RNA (1)...(19): siRNA sense strand
gcucguaaguccuccauca

SEQ ID NO: 312343 - RNA, 19 nt, Homo sapiens
  misc_RNA (1)...(19): siRNA sense strand
ggagagacccugcaagaca

SEQ ID NO: 312344 - RNA, 19 nt, Homo sapiens
  misc_RNA (1)...(19): siRNA sense strand
gcaucucccugcaguuuga

SEQ ID NO: 312345 - RNA, 19 nt, Homo sapiens
  misc_RNA (1)...(19): siRNA sense strand
aaaggacuauggccacauu

SEQ ID NO: 312346 - RNA, 19 nt, Homo sapiens
  misc_RNA (1)...(19): siRNA sense strand
gggcuuugccgucaacuuu

SEQ ID NO: 312347 - RNA, 19 nt, Homo sapiens
  misc_RNA (1)...(19): siRNA sense strand
gcuaugagaagccugauga

SEQ ID NO: 312348 - RNA, 19 nt, Homo sapiens
  misc_RNA (1)...(19): siRNA sense strand
gcacugacgaggacagcua

SEQ ID NO: 312349 - RNA, 19 nt, Homo sapiens
  misc_RNA (1)...(19): siRNA sense strand
gcuauauuguguucaccua

SEQ ID NO: 312350 - RNA, 19 nt, Homo sapiens
  misc_RNA (1)...(19): siRNA sense strand
ugugggagauggagaggua

SEQ ID NO: 312351 - RNA, 19 nt, Homo sapiens
  misc_RNA (1)...(19): siRNA sense strand
ggacauugcccuggacgaa

SEQ ID NO: 312352 - RNA, 19 nt, Homo sapiens
  misc_RNA (1)...(19): siRNA sense strand
ggcaagaacugugacaagu

SEQ ID NO: 312353 - RNA, 19 nt, Homo sapiens
  misc_RNA (1)...(19): siRNA sense strand
gcauuacgcucggaacaca

SEQ ID NO: 312354 - RNA, 19 nt, Homo sapiens
  misc_RNA (1)...(19): siRNA sense strand
gacgaggacagcuauauug

SEQ ID NO: 312355 - RNA, 19 nt, Homo sapiens
  misc_RNA (1)...(19): siRNA sense strand
gagaagaucauccugaacu

SEQ ID NO: 312356 - RNA, 19 nt, Homo sapiens
  misc_RNA (1)...(19): siRNA sense strand
caguuugacuucuuugaga

SEQ ID NO: 312357 - RNA, 19 nt, Homo sapiens
  misc_RNA (1)...(19): siRNA sense strand
caagcugcauggcaaguuc

SEQ ID NO: 312358 - RNA, 19 nt, Homo sapiens
  misc_RNA (1)...(19): siRNA sense strand
ggacuauggccacauucaa

SEQ ID NO: 312359 - RNA, 19 nt, Homo sapiens
  misc_RNA (1)...(19): siRNA sense strand
ugacggguccauuaacaaa

SEQ ID NO: 312360 - RNA, 19 nt, Homo sapiens
  misc_RNA (1)...(19): siRNA sense strand
agacagagggcaaugaugu

SEQ ID NO: 312361 - RNA, 19 nt, Homo sapiens
  misc_RNA (1)...(19): siRNA sense strand
uggcuacucugcucacaug

SEQ ID NO: 312362 - RNA, 19 nt, Homo sapiens
  misc_RNA (1)...(19): siRNA sense strand
ucacauuccaguccuuuga

SEQ ID NO: 312363 - RNA, 19 nt, Homo sapiens
  misc_RNA (1)...(19): siRNA sense strand
cauggcaaguucugugguu

SEQ ID NO: 312364 - RNA, 19 nt, Homo sapiens
  misc_RNA (1)...(19): siRNA sense strand
ugacgaggacagcuauauu

SEQ ID NO: 312365 - RNA, 19 nt, Homo sapiens
  misc_RNA (1)...(19): siRNA sense strand
ggucaucaccucccaguac

SEQ ID NO: 312366 - RNA, 19 nt, Homo sapiens
  misc_RNA (1)...(19): siRNA sense strand
ccacgugggccucacauuc

SEQ ID NO: 312367 - RNA, 19 nt, Homo sapiens
  misc_RNA (1)...(19): siRNA sense strand
guggagagacccugcaaga

SEQ ID NO: 312368 - RNA, 19 nt, Homo sapiens
  misc_RNA (1)...(19): siRNA sense strand
cccgcaagcuuuacaagug

SEQ ID NO: 312369 - RNA, 19 nt, Homo sapiens
  misc_RNA (1)...(19): siRNA sense strand
agaagaucauccugaacuu

SEQ ID NO: 312370 - RNA, 19 nt, Homo sapiens
  misc_RNA (1)...(19): siRNA sense strand
caacuacccagacgauuac

SEQ ID NO: 312371 - RNA, 19 nt, Homo sapiens
  misc_RNA (1)...(19): siRNA sense strand
gagauggcuucuggaggaa

SEQ ID NO: 312372 - RNA, 19 nt, Homo sapiens
  misc_RNA (1)...(19): siRNA sense strand
cguaaguccuccaucaaag

SEQ ID NO: 312373 - RNA, 19 nt, Homo sapiens
  misc_RNA (1)...(19): siRNA sense strand
cagcugugccuacgacuau

SEQ ID NO: 312374 - RNA, 19 nt, Homo sapiens
  misc_RNA (1)...(19): siRNA sense strand
uauauuguguucaccuauc

SEQ ID NO: 312375 - RNA, 19 nt, Homo sapiens
  misc_RNA (1)...(19): siRNA sense strand
acauugcccuggacgaaga

SEQ ID NO: 312376 - RNA, 19 nt, Homo sapiens
  misc_RNA (1)...(19): siRNA sense strand
ucaacacccugggcagcua

SEQ ID NO: 312377 - RNA, 19 nt, Homo sapiens
  misc_RNA (1)...(19): siRNA sense strand
caaacucccugagccuauc

SEQ ID NO: 312378 - RNA, 19 nt, Homo sapiens
  misc_RNA (1)...(19): siRNA sense strand
caacaugcgcguggaguuc

SEQ ID NO: 312379 - RNA, 19 nt, Homo sapiens
  misc_RNA (1)...(19): siRNA sense strand
cuucaaggcccacuucuuc

SEQ ID NO: 312380 - RNA, 19 nt, Homo sapiens
  misc_RNA (1)...(19): siRNA sense strand
agacagcacaggcaacuuc

SEQ ID NO: 312381 - RNA, 19 nt, Homo sapiens
  misc_RNA (1)...(19): siRNA sense strand
ccgcaucucccugcaguuu

SEQ ID NO: 312382 - RNA, 19 nt, Homo sapiens
  misc_RNA (1)...(19): siRNA sense strand
gacuauggccacauucaau

SEQ ID NO: 312383 - RNA, 19 nt, Homo sapiens
  misc_RNA (1)...(19): siRNA sense strand
gggcuucuuugcagucuac

SEQ ID NO: 312384 - RNA, 19 nt, Homo sapiens
  misc_RNA (1)...(19): siRNA sense strand
cagcagcaauuggguugga

SEQ ID NO: 312385 - RNA, 19 nt, Homo sapiens
  misc_RNA (1)...(19): siRNA sense strand
gcgcuacuguggcuaugag

SEQ ID NO: 312386 - RNA, 19 nt, Homo sapiens
  misc_RNA (1)...(19): siRNA sense strand
ggcucaaguucgucucuga

SEQ ID NO: 312387 - RNA, 19 nt, Homo sapiens
  misc_RNA (1)...(19): siRNA sense strand
ggucauccccuuugucauu

SEQ ID NO: 312388 - RNA, 19 nt, Homo sapiens
  misc_RNA (1)...(19): siRNA sense strand
ugacuucgacagcaucaug

SEQ ID NO: 312389 - RNA, 19 nt, Homo sapiens
  misc_RNA (1)...(19): siRNA sense strand
ccaaacucccugagccuau

SEQ ID NO: 312390 - RNA, 19 nt, Homo sapiens
  misc_RNA (1)...(19): siRNA sense strand
ucugacggguccauuaaca

SEQ ID NO: 312391 - RNA, 19 nt, Homo sapiens
  misc_RNA (1)...(19): siRNA sense strand
gcagcaauuggguuggaaa

SEQ ID NO: 312392 - RNA, 19 nt, Homo sapiens
  misc_RNA (1)...(19): siRNA sense strand
ccuaucgucuccacugaca

SEQ ID NO: 312393 - RNA, 19 nt, Homo sapiens
  misc_RNA (1)...(19): siRNA sense strand
ucucugacggguccauuaa

SEQ ID NO: 312394 - RNA, 19 nt, Homo sapiens
  misc_RNA (1)...(19): siRNA sense strand
gcaguuugacuucuuugag

SEQ ID NO: 312395 - RNA, 19 nt, Homo sapiens
  misc_RNA (1)...(19): siRNA sense strand
ccugcaguuugacuucuuu

SEQ ID NO: 312396 - RNA, 19 nt, Homo sapiens
  misc_RNA (1)...(19): siRNA sense strand
gcggauuccucaccaagcu

SEQ ID NO: 312397 - RNA, 19 nt, Homo sapiens
  misc_RNA (1)...(19): siRNA sense strand
gcaucuuccuggauaccau

SEQ ID NO: 312398 - RNA, 19 nt, Homo sapiens
  misc_RNA (1)...(19): siRNA sense strand
gucaucaccucccaguaca

SEQ ID NO: 312399 - RNA, 19 nt, Homo sapiens
  misc_RNA (1)...(19): siRNA sense strand
ugugacaaguucggcauug

SEQ ID NO: 312400 - RNA, 19 nt, Homo sapiens
  misc_RNA (1)...(19): siRNA sense strand
ucguaaguccuccaucaaa

SEQ ID NO: 312401 - RNA, 19 nt, Homo sapiens
  misc_RNA (1)...(19): siRNA sense strand
caaggcccacuucuucuca

SEQ ID NO: 312402 - RNA, 19 nt, Homo sapiens
  misc_RNA (1)...(19): siRNA sense strand
cgaggacagcuauauugug

SEQ ID NO: 312403 - RNA, 19 nt, Homo sapiens
  misc_RNA (1)...(19): siRNA sense strand
ucaccucccaguacaacaa

SEQ ID NO: 312404 - RNA, 19 nt, Homo sapiens
  misc_RNA (1)...(19): siRNA sense strand
gagaagcccgaggucauca

SEQ ID NO: 312405 - RNA, 19 nt, Homo sapiens
  misc_RNA (1)...(19): siRNA sense strand
uccaguccuuugagauuga

SEQ ID NO: 312406 - RNA, 19 nt, Homo sapiens
  misc_RNA (1)...(19): siRNA sense strand
ccuaugacuucgacagcau

SEQ ID NO: 312407 - RNA, 19 nt, Homo sapiens
  misc_RNA (1)...(19): siRNA sense strand
ccgccacguuuccaucguu

SEQ ID NO: 312408 - RNA, 19 nt, Homo sapiens
  misc_RNA (1)...(19): siRNA sense strand
gggugaaaccucccauugg

SEQ ID NO: 312409 - RNA, 19 nt, Homo sapiens
  misc_RNA (1)...(19): siRNA sense strand
gaguucaaguccgacaaca

SEQ ID NO: 312410 - RNA, 19 nt, Homo sapiens
  misc_RNA (1)...(19): siRNA sense strand
gaggugcgcaguggacuca

SEQ ID NO: 312411 - RNA, 19 nt, Homo sapiens
  misc_RNA (1)...(19): siRNA sense strand
gacagagggcaaugaugug

SEQ ID NO: 312412 - RNA, 19 nt, Homo sapiens
  misc_RNA (1)...(19): siRNA sense strand
gagacagagggcaaugaug

SEQ ID NO: 312413 - RNA, 19 nt, Homo sapiens
  misc_RNA (1)...(19): siRNA sense strand
caagacagcacaggcaacu

SEQ ID NO: 312414 - RNA, 19 nt, Homo sapiens
  misc_RNA (1)...(19): siRNA sense strand
ugagacagagggcaaugau

SEQ ID NO: 312415 - RNA, 19 nt, Homo sapiens
  misc_RNA (1)...(19): siRNA sense strand
ggacagcuauauuguguuc

SEQ ID NO: 312416 - RNA, 19 nt, Homo sapiens
  misc_RNA (1)...(19): siRNA sense strand
gaggacagcuauauugugu

SEQ ID NO: 312417 - RNA, 19 nt, Homo sapiens
  misc_RNA (1)...(19): siRNA sense strand
gggagaagaucauccugaa

SEQ ID NO: 312418 - RNA, 19 nt, Homo sapiens
  misc_RNA (1)...(19): siRNA sense strand
caucaaagcugcaguucca

SEQ ID NO: 312419 - RNA, 19 nt, Homo sapiens
  misc_RNA (1)...(19): siRNA sense strand
ccaacuacccagacgauua

SEQ ID NO: 312420 - RNA, 19 nt, Homo sapiens
  misc_RNA (1)...(19): siRNA sense strand
gagcagcggugccucaaca

SEQ ID NO: 312421 - RNA, 19 nt, Homo sapiens
  misc_RNA (1)...(19): siRNA sense strand
gcucguaaguccuccauca

SEQ ID NO: 312422 - RNA, 19 nt, Homo sapiens
  misc_RNA (1)...(19): siRNA sense strand
ggagagacccugcaagaca

SEQ ID NO: 312423 - RNA, 19 nt, Homo sapiens
  misc_RNA (1)...(19): siRNA sense strand
aaaggacuauggccacauu

SEQ ID NO: 312424 - RNA, 19 nt, Homo sapiens
  misc_RNA (1)...(19): siRNA sense strand
gggcuuugccgucaacuuu

SEQ ID NO: 312425 - RNA, 19 nt, Homo sapiens
  misc_RNA (1)...(19): siRNA sense strand
gcuaugagaagccugauga

SEQ ID NO: 312426 - RNA, 19 nt, Homo sapiens
  misc_RNA (1)...(19): siRNA sense strand
gcacugacgaggacagcua

SEQ ID NO: 312427 - RNA, 19 nt, Homo sapiens
  misc_RNA (1)...(19): siRNA sense strand
gcuauauuguguucaccua

SEQ ID NO: 312428 - RNA, 19 nt, Homo sapiens
  misc_RNA (1)...(19): siRNA sense strand
ugugggagauggagaggua

SEQ ID NO: 312429 - RNA, 19 nt, Homo sapiens
  misc_RNA (1)...(19): siRNA sense strand
ggacauugcccuggacgaa

SEQ ID NO: 312430 - RNA, 19 nt, Homo sapiens
  misc_RNA (1)...(19): siRNA sense strand
ggcaagaacugugacaagu

SEQ ID NO: 312431 - RNA, 19 nt, Homo sapiens
  misc_RNA (1)...(19): siRNA sense strand
gcauuacgcucggaacaca

SEQ ID NO: 312432 - RNA, 19 nt, Homo sapiens
  misc_RNA (1)...(19): siRNA sense strand
gacgaggacagcuauauug

SEQ ID NO: 312433 - RNA, 19 nt, Homo sapiens
  misc_RNA (1)...(19): siRNA sense strand
gagaagaucauccugaacu

SEQ ID NO: 312434 - RNA, 19 nt, Homo sapiens
  misc_RNA (1)...(19): siRNA sense strand
ggacuauggccacauucaa

SEQ ID NO: 312435 - RNA, 19 nt, Homo sapiens
  misc_RNA (1)...(19): siRNA sense strand
ugacggguccauuaacaaa

SEQ ID NO: 312436 - RNA, 19 nt, Homo sapiens
  misc_RNA (1)...(19): siRNA sense strand
uggcuacucugcucacaug

SEQ ID NO: 312437 - RNA, 19 nt, Homo sapiens
  misc_RNA (1)...(19): siRNA sense strand
ucacauuccaguccuuuga

SEQ ID NO: 312438 - RNA, 19 nt, Homo sapiens
  misc_RNA (1)...(19): siRNA sense strand
ugacgaggacagcuauauu

SEQ ID NO: 312439 - RNA, 19 nt, Homo sapiens
  misc_RNA (1)...(19): siRNA sense strand
ccacgugggccucacauuc

SEQ ID NO: 312440 - RNA, 19 nt, Homo sapiens
  misc_RNA (1)...(19): siRNA sense strand
guggagagacccugcaaga

SEQ ID NO: 312441 - RNA, 19 nt, Homo sapiens
  misc_RNA (1)...(19): siRNA sense strand
cccgcaagcuuuacaagug

SEQ ID NO: 312442 - RNA, 19 nt, Homo sapiens
  misc_RNA (1)...(19): siRNA sense strand
agaagaucauccugaacuu

SEQ ID NO: 312443 - RNA, 19 nt, Homo sapiens
  misc_RNA (1)...(19): siRNA sense strand
caacuacccagacgauuac

SEQ ID NO: 312444 - RNA, 19 nt, Homo sapiens
  misc_RNA (1)...(19): siRNA sense strand
gagauggcuucuggaggaa

SEQ ID NO: 312445 - RNA, 19 nt, Homo sapiens
  misc_RNA (1)...(19): siRNA sense strand
cguaaguccuccaucaaag

SEQ ID NO: 312446 - RNA, 19 nt, Homo sapiens
  misc_RNA (1)...(19): siRNA sense strand
cagcugugccuacgacuau

SEQ ID NO: 312447 - RNA, 19 nt, Homo sapiens
  misc_RNA (1)...(19): siRNA sense strand
uauauuguguucaccuauc

SEQ ID NO: 312448 - RNA, 19 nt, Homo sapiens
  misc_RNA (1)...(19): siRNA sense strand
ucaacacccugggcagcua

SEQ ID NO: 312449 - RNA, 19 nt, Homo sapiens
  misc_RNA (1)...(19): siRNA sense strand
caaacucccugagccuauc

SEQ ID NO: 312450 - RNA, 19 nt, Homo sapiens
  misc_RNA (1)...(19): siRNA sense strand
acauugcccuggacgaaga

SEQ ID NO: 312451 - RNA, 19 nt, Homo sapiens
  misc_RNA (1)...(19): siRNA sense strand
agacagcacaggcaacuuc

SEQ ID NO: 312452 - RNA, 19 nt, Homo sapiens
  misc_RNA (1)...(19): siRNA sense strand
gacuauggccacauucaau

SEQ ID NO: 312453 - RNA, 19 nt, Homo sapiens
  misc_RNA (1)...(19): siRNA sense strand
gggcuucuuugcagucuac

SEQ ID NO: 312454 - RNA, 19 nt, Homo sapiens
  misc_RNA (1)...(19): siRNA sense strand
cagcagcaauuggguugga

SEQ ID NO: 312455 - RNA, 19 nt, Homo sapiens
  misc_RNA (1)...(19): siRNA sense strand
gcgcuacuguggcuaugag

SEQ ID NO: 312456 - RNA, 19 nt, Homo sapiens
  misc_RNA (1)...(19): siRNA sense strand
ggcucaaguucgucucuga

SEQ ID NO: 312457 - RNA, 19 nt, Homo sapiens
  misc_RNA (1)...(19): siRNA sense strand
ggucauccccuuugucauu

SEQ ID NO: 312458 - RNA, 19 nt, Homo sapiens
  misc_RNA (1)...(19): siRNA sense strand
ugacuucgacagcaucaug

SEQ ID NO: 312459 - RNA, 19 nt, Homo sapiens
  misc_RNA (1)...(19): siRNA sense strand
ccaaacucccugagccuau

SEQ ID NO: 312460 - RNA, 19 nt, Homo sapiens
  misc_RNA (1)...(19): siRNA sense strand
ucugacggguccauuaaca

SEQ ID NO: 312461 - RNA, 19 nt, Homo sapiens
  misc_RNA (1)...(19): siRNA sense strand
gcagcaauuggguuggaaa

SEQ ID NO: 312462 - RNA, 19 nt, Homo sapiens
  misc_RNA (1)...(19): siRNA sense strand
ccuaucgucuccacugaca

SEQ ID NO: 312463 - RNA, 19 nt, Homo sapiens
  misc_RNA (1)...(19): siRNA sense strand
ucucugacggguccauuaa

SEQ ID NO: 312464 - RNA, 19 nt, Homo sapiens
  misc_RNA (1)...(19): siRNA sense strand
gcaucuuccuggauaccau

SEQ ID NO: 312465 - RNA, 19 nt, Homo sapiens
  misc_RNA (1)...(19): siRNA sense strand
ugugacaaguucggcauug

SEQ ID NO: 312466 - RNA, 19 nt, Homo sapiens
  misc_RNA (1)...(19): siRNA sense strand
ucguaaguccuccaucaaa

SEQ ID NO: 312467 - RNA, 19 nt, Homo sapiens
  misc_RNA (1)...(19): siRNA sense strand
cgaggacagcuauauugug

SEQ ID NO: 312468 - RNA, 19 nt, Homo sapiens
  misc_RNA (1)...(19): siRNA sense strand
uccaguccuuugagauuga

SEQ ID NO: 312469 - RNA, 19 nt, Homo sapiens
  misc_RNA (1)...(19): siRNA sense strand
ccuaugacuucgacagcau

SEQ ID NO: 312470 - RNA, 19 nt, Homo sapiens
  misc_RNA (1)...(19): siRNA sense strand
ccgccacguuuccaucguu

SEQ ID NO: 312471 - RNA, 19 nt, Homo sapiens
  misc_RNA (1)...(19): siRNA sense strand
gggugaaaccucccauugg

SEQ ID NO: 312472 - RNA, 19 nt, Homo sapiens
  misc_RNA (1)...(19): siRNA sense strand
caagacagcacaggcaacu

SEQ ID NO: 312473 - RNA, 19 nt, Homo sapiens
  misc_RNA (1)...(19): siRNA sense strand
ggacagcuauauuguguuc

SEQ ID NO: 312474 - RNA, 19 nt, Homo sapiens
  misc_RNA (1)...(19): siRNA sense strand
gaggacagcuauauugugu

SEQ ID NO: 312475 - RNA, 19 nt, Homo sapiens
  misc_RNA (1)...(19): siRNA sense strand
caucaaagcugcaguucca

SEQ ID NO: 312476 - RNA, 19 nt, Homo sapiens
  misc_RNA (1)...(19): siRNA sense strand
gcucguaaguccuccauca

SEQ ID NO: 312477 - RNA, 19 nt, Homo sapiens
  misc_RNA (1)...(19): siRNA sense strand
gcacugacgaggacagcua

SEQ ID NO: 312478 - RNA, 19 nt, Homo sapiens
  misc_RNA (1)...(19): siRNA sense strand
gcuauauuguguucaccua

SEQ ID NO: 312479 - RNA, 19 nt, Homo sapiens
  misc_RNA (1)...(19): siRNA sense strand
ugugggagauggagaggua

SEQ ID NO: 312480 - RNA, 19 nt, Homo sapiens
  misc_RNA (1)...(19): siRNA sense strand
ggacauugcccuggacgaa

SEQ ID NO: 312481 - RNA, 19 nt, Homo sapiens
  misc_RNA (1)...(19): siRNA sense strand
ggcaagaacugugacaagu

SEQ ID NO: 312482 - RNA, 19 nt, Homo sapiens
  misc_RNA (1)...(19): siRNA sense strand
gacgaggacagcuauauug

SEQ ID NO: 312483 - RNA, 19 nt, Homo sapiens
  misc_RNA (1)...(19): siRNA sense strand
ugacgaggacagcuauauu

SEQ ID NO: 312484 - RNA, 19 nt, Homo sapiens
  misc_RNA (1)...(19): siRNA sense strand
cguaaguccuccaucaaag

SEQ ID NO: 312485 - RNA, 19 nt, Homo sapiens
  misc_RNA (1)...(19): siRNA sense strand
acauugcccuggacgaaga

SEQ ID NO: 312486 - RNA, 19 nt, Homo sapiens
  misc_RNA (1)...(19): siRNA sense strand
uauauuguguucaccuauc

SEQ ID NO: 312487 - RNA, 19 nt, Homo sapiens
  misc_RNA (1)...(19): siRNA sense strand
ggucauccccuuugucauu

SEQ ID NO: 312488 - RNA, 19 nt, Homo sapiens
  misc_RNA (1)...(19): siRNA sense strand
ugugacaaguucggcauug

SEQ ID NO: 312489 - RNA, 19 nt, Homo sapiens
  misc_RNA (1)...(19): siRNA sense strand
ucguaaguccuccaucaaa

SEQ ID NO: 312490 - RNA, 19 nt, Homo sapiens
  misc_RNA (1)...(19): siRNA sense strand
cgaggacagcuauauugug

SEQ ID NO: 312491 - RNA, 19 nt, Homo sapiens
  misc_RNA (1)...(19): siRNA sense strand
ccgccacguuuccaucguu

SEQ ID NO: 312492 - RNA, 19 nt, Homo sapiens
  misc_RNA (1)...(19): siRNA sense strand
gcaaugaugugugcaagua

SEQ ID NO: 312493 - RNA, 19 nt, Homo sapiens
  misc_RNA (1)...(19): siRNA sense strand
ggacagcuauauuguguuc

SEQ ID NO: 312494 - RNA, 19 nt, Homo sapiens
  misc_RNA (1)...(19): siRNA sense strand
gaggacagcuauauugugu

SEQ ID NO: 312495 - RNA, 19 nt, Homo sapiens
  misc_RNA (1)...(19): siRNA sense strand
gggagaagaucauccugaa

SEQ ID NO: 312496 - RNA, 19 nt, Homo sapiens
  misc_RNA (1)...(19): siRNA sense strand
caucaaagcugcaguucca

SEQ ID NO: 312497 - RNA, 19 nt, Homo sapiens
  misc_RNA (1)...(19): siRNA sense strand
ccaacuacccagacgauua

SEQ ID NO: 312498 - RNA, 19 nt, Homo sapiens
  misc_RNA (1)...(19): siRNA sense strand
gagcagcggugccucaaca

SEQ ID NO: 312499 - RNA, 19 nt, Homo sapiens
  misc_RNA (1)...(19): siRNA sense strand
gcucguaaguccuccauca

SEQ ID NO: 312500 - RNA, 19 nt, Homo sapiens
  misc_RNA (1)...(19): siRNA sense strand
ggagagacccugcaagaca

SEQ ID NO: 312501 - RNA, 19 nt, Homo sapiens
  misc_RNA (1)...(19): siRNA sense strand
gcaucucccugcaguuuga

SEQ ID NO: 312502 - RNA, 19 nt, Homo sapiens
  misc_RNA (1)...(19): siRNA sense strand
aaaggacuauggccacauu

SEQ ID NO: 312503 - RNA, 19 nt, Homo sapiens
  misc_RNA (1)...(19): siRNA sense strand
gggcuuugccgucaacuuu

SEQ ID NO: 312504 - RNA, 19 nt, Homo sapiens
  misc_RNA (1)...(19): siRNA sense strand
gcuaugagaagccugauga

SEQ ID NO: 312505 - RNA, 19 nt, Homo sapiens
  misc_RNA (1)...(19): siRNA sense strand
gcacugacgaggacagcua

SEQ ID NO: 312506 - RNA, 19 nt, Homo sapiens
  misc_RNA (1)...(19): siRNA sense strand
gcuauauuguguucaccua

SEQ ID NO: 312507 - RNA, 19 nt, Homo sapiens
  misc_RNA (1)...(19): siRNA sense strand
ugugggagauggagaggua

SEQ ID NO: 312508 - RNA, 19 nt, Homo sapiens
  misc_RNA (1)...(19): siRNA sense strand
ggacauugcccuggacgaa

SEQ ID NO: 312509 - RNA, 19 nt, Homo sapiens
  misc_RNA (1)...(19): siRNA sense strand
ggcaagaacugugacaagu

SEQ ID NO: 312510 - RNA, 19 nt, Homo sapiens
  misc_RNA (1)...(19): siRNA sense strand
gcauuacgcucggaacaca

SEQ ID NO: 312511 - RNA, 19 nt, Homo sapiens
  misc_RNA (1)...(19): siRNA sense strand
gacgaggacagcuauauug

SEQ ID NO: 312512 - RNA, 19 nt, Homo sapiens
  misc_RNA (1)...(19): siRNA sense strand
gagaagaucauccugaacu

SEQ ID NO: 312513 - RNA, 19 nt, Homo sapiens
  misc_RNA (1)...(19): siRNA sense strand
caguuugacuucuuugaga

SEQ ID NO: 312514 - RNA, 19 nt, Homo sapiens
  misc_RNA (1)...(19): siRNA sense strand
caagcugcauggcaaguuc

SEQ ID NO: 312515 - RNA, 19 nt, Homo sapiens
  misc_RNA (1)...(19): siRNA sense strand
ggacuauggccacauucaa

SEQ ID NO: 312516 - RNA, 19 nt, Homo sapiens
  misc_RNA (1)...(19): siRNA sense strand
ugacggguccauuaacaaa

SEQ ID NO: 312517 - RNA, 19 nt, Homo sapiens
  misc_RNA (1)...(19): siRNA sense strand
agacagagggcaaugaugu

SEQ ID NO: 312518 - RNA, 19 nt, Homo sapiens
  misc_RNA (1)...(19): siRNA sense strand
uggcuacucugcucacaug

SEQ ID NO: 312519 - RNA, 19 nt, Homo sapiens
  misc_RNA (1)...(19): siRNA sense strand
ucacauuccaguccuuuga

SEQ ID NO: 312520 - RNA, 19 nt, Homo sapiens
  misc_RNA (1)...(19): siRNA sense strand
cauggcaaguucugugguu

SEQ ID NO: 312521 - RNA, 19 nt, Homo sapiens
  misc_RNA (1)...(19): siRNA sense strand
ugacgaggacagcuauauu

SEQ ID NO: 312522 - RNA, 19 nt, Homo sapiens
  misc_RNA (1)...(19): siRNA sense strand
ggucaucaccucccaguac

SEQ ID NO: 312523 - RNA, 19 nt, Homo sapiens
  misc_RNA (1)...(19): siRNA sense strand
ccacgugggccucacauuc

SEQ ID NO: 312524 - RNA, 19 nt, Homo sapiens
  misc_RNA (1)...(19): siRNA sense strand
guggagagacccugcaaga

SEQ ID NO: 312525 - RNA, 19 nt, Homo sapiens
  misc_RNA (1)...(19): siRNA sense strand
cccgcaagcuuuacaagug

SEQ ID NO: 312526 - RNA, 19 nt, Homo sapiens
  misc_RNA (1)...(19): siRNA sense strand
agaagaucauccugaacuu

SEQ ID NO: 312527 - RNA, 19 nt, Homo sapiens
  misc_RNA (1)...(19): siRNA sense strand
caacuacccagacgauuac

SEQ ID NO: 312528 - RNA, 19 nt, Homo sapiens
  misc_RNA (1)...(19): siRNA sense strand
gagauggcuucuggaggaa

SEQ ID NO: 312529 - RNA, 19 nt, Homo sapiens
  misc_RNA (1)...(19): siRNA sense strand
cguaaguccuccaucaaag

SEQ ID NO: 312530 - RNA, 19 nt, Homo sapiens
  misc_RNA (1)...(19): siRNA sense strand
cagcugugccuacgacuau

SEQ ID NO: 312531 - RNA, 19 nt, Homo sapiens
  misc_RNA (1)...(19): siRNA sense strand
uauauuguguucaccuauc

SEQ ID NO: 312532 - RNA, 19 nt, Homo sapiens
  misc_RNA (1)...(19): siRNA sense strand
acauugcccuggacgaaga

SEQ ID NO: 312533 - RNA, 19 nt, Homo sapiens
  misc_RNA (1)...(19): siRNA sense strand
ucaacacccugggcagcua

SEQ ID NO: 312534 - RNA, 19 nt, Homo sapiens
  misc_RNA (1)...(19): siRNA sense strand
caaacucccugagccuauc

SEQ ID NO: 312535 - RNA, 19 nt, Homo sapiens
  misc_RNA (1)...(19): siRNA sense strand
caacaugcgcguggaguuc

SEQ ID NO: 312536 - RNA, 19 nt, Homo sapiens
  misc_RNA (1)...(19): siRNA sense strand
cuucaaggcccacuucuuc

SEQ ID NO: 312537 - RNA, 19 nt, Homo sapiens
  misc_RNA (1)...(19): siRNA sense strand
agacagcacaggcaacuuc

SEQ ID NO: 312538 - RNA, 19 nt, Homo sapiens
  misc_RNA (1)...(19): siRNA sense strand
ccgcaucucccugcaguuu

SEQ ID NO: 312539 - RNA, 19 nt, Homo sapiens
  misc_RNA (1)...(19): siRNA sense strand
gacuauggccacauucaau

SEQ ID NO: 312540 - RNA, 19 nt, Homo sapiens
  misc_RNA (1)...(19): siRNA sense strand
gggcuucuuugcagucuac

SEQ ID NO: 312541 - RNA, 19 nt, Homo sapiens
  misc_RNA (1)...(19): siRNA sense strand
cagcagcaauuggguugga

SEQ ID NO: 312542 - RNA, 19 nt, Homo sapiens
  misc_RNA (1)...(19): siRNA sense strand
gcgcuacuguggcuaugag

SEQ ID NO: 312543 - RNA, 19 nt, Homo sapiens
  misc_RNA (1)...(19): siRNA sense strand
ggcucaaguucgucucuga

SEQ ID NO: 312544 - RNA, 19 nt, Homo sapiens
  misc_RNA (1)...(19): siRNA sense strand
ggucauccccuuugucauu

SEQ ID NO: 312545 - RNA, 19 nt, Homo sapiens
  misc_RNA (1)...(19): siRNA sense strand
ugacuucgacagcaucaug

SEQ ID NO: 312546 - RNA, 19 nt, Homo sapiens
  misc_RNA (1)...(19): siRNA sense strand
ccaaacucccugagccuau

SEQ ID NO: 312547 - RNA, 19 nt, Homo sapiens
  misc_RNA (1)...(19): siRNA sense strand
ucugacggguccauuaaca

SEQ ID NO: 312548 - RNA, 19 nt, Homo sapiens
  misc_RNA (1)...(19): siRNA sense strand
gcagcaauuggguuggaaa

SEQ ID NO: 312549 - RNA, 19 nt, Homo sapiens
  misc_RNA (1)...(19): siRNA sense strand
ccuaucgucuccacugaca

SEQ ID NO: 312550 - RNA, 19 nt, Homo sapiens
  misc_RNA (1)...(19): siRNA sense strand
ucucugacggguccauuaa

SEQ ID NO: 312551 - RNA, 19 nt, Homo sapiens
  misc_RNA (1)...(19): siRNA sense strand
gcaguuugacuucuuugag

SEQ ID NO: 312552 - RNA, 19 nt, Homo sapiens
  misc_RNA (1)...(19): siRNA sense strand
ccugcaguuugacuucuuu

SEQ ID NO: 312553 - RNA, 19 nt, Homo sapiens
  misc_RNA (1)...(19): siRNA sense strand
gcggauuccucaccaagcu

SEQ ID NO: 312554 - RNA, 19 nt, Homo sapiens
  misc_RNA (1)...(19): siRNA sense strand
gcaucuuccuggauaccau

SEQ ID NO: 312555 - RNA, 19 nt, Homo sapiens
  misc_RNA (1)...(19): siRNA sense strand
gucaucaccucccaguaca

SEQ ID NO: 312556 - RNA, 19 nt, Homo sapiens
  misc_RNA (1)...(19): siRNA sense strand
ugugacaaguucggcauug

SEQ ID NO: 312557 - RNA, 19 nt, Homo sapiens
  misc_RNA (1)...(19): siRNA sense strand
ucguaaguccuccaucaaa

SEQ ID NO: 312558 - RNA, 19 nt, Homo sapiens
  misc_RNA (1)...(19): siRNA sense strand
caaggcccacuucuucuca

SEQ ID NO: 312559 - RNA, 19 nt, Homo sapiens
  misc_RNA (1)...(19): siRNA sense strand
cgaggacagcuauauugug

SEQ ID NO: 312560 - RNA, 19 nt, Homo sapiens
  misc_RNA (1)...(19): siRNA sense strand
ucaccucccaguacaacaa

SEQ ID NO: 312561 - RNA, 19 nt, Homo sapiens
  misc_RNA (1)...(19): siRNA sense strand
gagaagcccgaggucauca

SEQ ID NO: 312562 - RNA, 19 nt, Homo sapiens
  misc_RNA (1)...(19): siRNA sense strand
uccaguccuuugagauuga

SEQ ID NO: 312563 - RNA, 19 nt, Homo sapiens
  misc_RNA (1)...(19): siRNA sense strand
ccuaugacuucgacagcau

SEQ ID NO: 312564 - RNA, 19 nt, Homo sapiens
  misc_RNA (1)...(19): siRNA sense strand
ccgccacguuuccaucguu

SEQ ID NO: 312565 - RNA, 19 nt, Homo sapiens
  misc_RNA (1)...(19): siRNA sense strand
gggugaaaccucccauugg

SEQ ID NO: 312566 - RNA, 19 nt, Homo sapiens
  misc_RNA (1)...(19): siRNA sense strand
gaguucaaguccgacaaca

SEQ ID NO: 312567 - RNA, 19 nt, Homo sapiens
  misc_RNA (1)...(19): siRNA sense strand
gaggugcgcaguggacuca

SEQ ID NO: 312568 - RNA, 19 nt, Homo sapiens
  misc_RNA (1)...(19): siRNA sense strand
gacagagggcaaugaugug

SEQ ID NO: 312569 - RNA, 19 nt, Homo sapiens
  misc_RNA (1)...(19): siRNA sense strand
gagacagagggcaaugaug

SEQ ID NO: 312570 - RNA, 19 nt, Homo sapiens
  misc_RNA (1)...(19): siRNA sense strand
caagacagcacaggcaacu

SEQ ID NO: 312571 - RNA, 19 nt, Homo sapiens
  misc_RNA (1)...(19): siRNA sense strand
ugagacagagggcaaugau

SEQ ID NO: 312572 - RNA, 19 nt, Homo sapiens
  misc_RNA (1)...(19): siRNA sense strand
gcaaugaugugugcaagua

SEQ ID NO: 312573 - RNA, 19 nt, Homo sapiens
  misc_RNA (1)...(19): siRNA sense strand
ggacagcuauauuguguuc

SEQ ID NO: 312574 - RNA, 19 nt, Homo sapiens
  misc_RNA (1)...(19): siRNA sense strand
gaggacagcuauauugugu

SEQ ID NO: 312575 - RNA, 19 nt, Homo sapiens
  misc_RNA (1)...(19): siRNA sense strand
gggagaagaucauccugaa

SEQ ID NO: 312576 - RNA, 19 nt, Homo sapiens
  misc_RNA (1)...(19): siRNA sense strand
caucaaagcugcaguucca

SEQ ID NO: 312577 - RNA, 19 nt, Homo sapiens
  misc_RNA (1)...(19): siRNA sense strand
ccaacuacccagacgauua

SEQ ID NO: 312578 - RNA, 19 nt, Homo sapiens
  misc_RNA (1)...(19): siRNA sense strand
gagcagcggugccucaaca

SEQ ID NO: 312579 - RNA, 19 nt, Homo sapiens
  misc_RNA (1)...(19): siRNA sense strand
gcucguaaguccuccauca

SEQ ID NO: 312580 - RNA, 19 nt, Homo sapiens
  misc_RNA (1)...(19): siRNA sense strand
ggagagacccugcaagaca

SEQ ID NO: 312581 - RNA, 19 nt, Homo sapiens
  misc_RNA (1)...(19): siRNA sense strand
gcaucucccugcaguuuga

SEQ ID NO: 312582 - RNA, 19 nt, Homo sapiens
  misc_RNA (1)...(19): siRNA sense strand
aaaggacuauggccacauu

SEQ ID NO: 312583 - RNA, 19 nt, Homo sapiens
  misc_RNA (1)...(19): siRNA sense strand
gggcuuugccgucaacuuu

SEQ ID NO: 312584 - RNA, 19 nt, Homo sapiens
  misc_RNA (1)...(19): siRNA sense strand
gcuaugagaagccugauga

SEQ ID NO: 312585 - RNA, 19 nt, Homo sapiens
  misc_RNA (1)...(19): siRNA sense strand
gcacugacgaggacagcua

SEQ ID NO: 312586 - RNA, 19 nt, Homo sapiens
  misc_RNA (1)...(19): siRNA sense strand
gcuauauuguguucaccua

SEQ ID NO: 312587 - RNA, 19 nt, Homo sapiens
  misc_RNA (1)...(19): siRNA sense strand
ugugggagauggagaggua

SEQ ID NO: 312588 - RNA, 19 nt, Homo sapiens
  misc_RNA (1)...(19): siRNA sense strand
ggacauugcccuggacgaa

SEQ ID NO: 312589 - RNA, 19 nt, Homo sapiens
  misc_RNA (1)...(19): siRNA sense strand
ggcaagaacugugacaagu

SEQ ID NO: 312590 - RNA, 19 nt, Homo sapiens
  misc_RNA (1)...(19): siRNA sense strand
gcauuacgcucggaacaca

SEQ ID NO: 312591 - RNA, 19 nt, Homo sapiens
  misc_RNA (1)...(19): siRNA sense strand
gacgaggacagcuauauug

SEQ ID NO: 312592 - RNA, 19 nt, Homo sapiens
  misc_RNA (1)...(19): siRNA sense strand
gagaagaucauccugaacu

SEQ ID NO: 312593 - RNA, 19 nt, Homo sapiens
  misc_RNA (1)...(19): siRNA sense strand
caguuugacuucuuugaga

SEQ ID NO: 312594 - RNA, 19 nt, Homo sapiens
  misc_RNA (1)...(19): siRNA sense strand
caagcugcauggcaaguuc

SEQ ID NO: 312595 - RNA, 19 nt, Homo sapiens
  misc_RNA (1)...(19): siRNA sense strand
ggacuauggccacauucaa

SEQ ID NO: 312596 - RNA, 19 nt, Homo sapiens
  misc_RNA (1)...(19): siRNA sense strand
ugacggguccauuaacaaa

SEQ ID NO: 312597 - RNA, 19 nt, Homo sapiens
  misc_RNA (1)...(19): siRNA sense strand
agacagagggcaaugaugu

SEQ ID NO: 312598 - RNA, 19 nt, Homo sapiens
  misc_RNA (1)...(19): siRNA sense strand
uggcuacucugcucacaug

SEQ ID NO: 312599 - RNA, 19 nt, Homo sapiens
  misc_RNA (1)...(19): siRNA sense strand
ucacauuccaguccuuuga

SEQ ID NO: 312600 - RNA, 19 nt, Homo sapiens
  misc_RNA (1)...(19): siRNA sense strand
cauggcaaguucugugguu

SEQ ID NO: 312601 - RNA, 19 nt, Homo sapiens
  misc_RNA (1)...(19): siRNA sense strand
ugacgaggacagcuauauu

SEQ ID NO: 312602 - RNA, 19 nt, Homo sapiens
  misc_RNA (1)...(19): siRNA sense strand
ggucaucaccucccaguac

SEQ ID NO: 312603 - RNA, 19 nt, Homo sapiens
  misc_RNA (1)...(19): siRNA sense strand
ccacgugggccucacauuc

SEQ ID NO: 312604 - RNA, 19 nt, Homo sapiens
  misc_RNA (1)...(19): siRNA sense strand
guggagagacccugcaaga

SEQ ID NO: 312605 - RNA, 19 nt, Homo sapiens
  misc_RNA (1)...(19): siRNA sense strand
cccgcaagcuuuacaagug

SEQ ID NO: 312606 - RNA, 19 nt, Homo sapiens
  misc_RNA (1)...(19): siRNA sense strand
agaagaucauccugaacuu

SEQ ID NO: 312607 - RNA, 19 nt, Homo sapiens
  misc_RNA (1)...(19): siRNA sense strand
caacuacccagacgauuac

SEQ ID NO: 312608 - RNA, 19 nt, Homo sapiens
  misc_RNA (1)...(19): siRNA sense strand
gagauggcuucuggaggaa

SEQ ID NO: 312609 - RNA, 19 nt, Homo sapiens
  misc_RNA (1)...(19): siRNA sense strand
cguaaguccuccaucaaag

SEQ ID NO: 312610 - RNA, 19 nt, Homo sapiens
  misc_RNA (1)...(19): siRNA sense strand
cagcugugccuacgacuau

SEQ ID NO: 312611 - RNA, 19 nt, Homo sapiens
  misc_RNA (1)...(19): siRNA sense strand
uauauuguguucaccuauc

SEQ ID NO: 312612 - RNA, 19 nt, Homo sapiens
  misc_RNA (1)...(19): siRNA sense strand
acauugcccuggacgaaga

SEQ ID NO: 312613 - RNA, 19 nt, Homo sapiens
  misc_RNA (1)...(19): siRNA sense strand
ucaacacccugggcagcua

SEQ ID NO: 312614 - RNA, 19 nt, Homo sapiens
  misc_RNA (1)...(19): siRNA sense strand
caaacucccugagccuauc

SEQ ID NO: 312615 - RNA, 19 nt, Homo sapiens
  misc_RNA (1)...(19): siRNA sense strand
caacaugcgcguggaguuc

SEQ ID NO: 312616 - RNA, 19 nt, Homo sapiens
  misc_RNA (1)...(19): siRNA sense strand
cuucaaggcccacuucuuc

SEQ ID NO: 312617 - RNA, 19 nt, Homo sapiens
  misc_RNA (1)...(19): siRNA sense strand
agacagcacaggcaacuuc

SEQ ID NO: 312618 - RNA, 19 nt, Homo sapiens
  misc_RNA (1)...(19): siRNA sense strand
ccgcaucucccugcaguuu

SEQ ID NO: 312619 - RNA, 19 nt, Homo sapiens
  misc_RNA (1)...(19): siRNA sense strand
gacuauggccacauucaau

SEQ ID NO: 312620 - RNA, 19 nt, Homo sapiens
  misc_RNA (1)...(19): siRNA sense strand
gggcuucuuugcagucuac

SEQ ID NO: 312621 - RNA, 19 nt, Homo sapiens
  misc_RNA (1)...(19): siRNA sense strand
cagcagcaauuggguugga

SEQ ID NO: 312622 - RNA, 19 nt, Homo sapiens
  misc_RNA (1)...(19): siRNA sense strand
gcgcuacuguggcuaugag

SEQ ID NO: 312623 - RNA, 19 nt, Homo sapiens
  misc_RNA (1)...(19): siRNA sense strand
ggcucaaguucgucucuga

SEQ ID NO: 312624 - RNA, 19 nt, Homo sapiens
  misc_RNA (1)...(19): siRNA sense strand
ggucauccccuuugucauu

SEQ ID NO: 312625 - RNA, 19 nt, Homo sapiens
  misc_RNA (1)...(19): siRNA sense strand
ugacuucgacagcaucaug

SEQ ID NO: 312626 - RNA, 19 nt, Homo sapiens
  misc_RNA (1)...(19): siRNA sense strand
ccaaacucccugagccuau

SEQ ID NO: 312627 - RNA, 19 nt, Homo sapiens
  misc_RNA (1)...(19): siRNA sense strand
ucugacggguccauuaaca

SEQ ID NO: 312628 - RNA, 19 nt, Homo sapiens
  misc_RNA (1)...(19): siRNA sense strand
gcagcaauuggguuggaaa

SEQ ID NO: 312629 - RNA, 19 nt, Homo sapiens
  misc_RNA (1)...(19): siRNA sense strand
ccuaucgucuccacugaca

SEQ ID NO: 312630 - RNA, 19 nt, Homo sapiens
  misc_RNA (1)...(19): siRNA sense strand
ucucugacggguccauuaa

SEQ ID NO: 312631 - RNA, 19 nt, Homo sapiens
  misc_RNA (1)...(19): siRNA sense strand
gcaguuugacuucuuugag

SEQ ID NO: 312632 - RNA, 19 nt, Homo sapiens
  misc_RNA (1)...(19): siRNA sense strand
ccugcaguuugacuucuuu

SEQ ID NO: 312633 - RNA, 19 nt, Homo sapiens
  misc_RNA (1)...(19): siRNA sense strand
gcggauuccucaccaagcu

SEQ ID NO: 312634 - RNA, 19 nt, Homo sapiens
  misc_RNA (1)...(19): siRNA sense strand
gcaucuuccuggauaccau

SEQ ID NO: 312635 - RNA, 19 nt, Homo sapiens
  misc_RNA (1)...(19): siRNA sense strand
gucaucaccucccaguaca

SEQ ID NO: 312636 - RNA, 19 nt, Homo sapiens
  misc_RNA (1)...(19): siRNA sense strand
ugugacaaguucggcauug

SEQ ID NO: 312637 - RNA, 19 nt, Homo sapiens
  misc_RNA (1)...(19): siRNA sense strand
ucguaaguccuccaucaaa

SEQ ID NO: 312638 - RNA, 19 nt, Homo sapiens
  misc_RNA (1)...(19): siRNA sense strand
caaggcccacuucuucuca

SEQ ID NO: 312639 - RNA, 19 nt, Homo sapiens
  misc_RNA (1)...(19): siRNA sense strand
cgaggacagcuauauugug

SEQ ID NO: 312640 - RNA, 19 nt, Homo sapiens
  misc_RNA (1)...(19): siRNA sense strand
ucaccucccaguacaacaa

SEQ ID NO: 312641 - RNA, 19 nt, Homo sapiens
  misc_RNA (1)...(19): siRNA sense strand
gagaagcccgaggucauca

SEQ ID NO: 312642 - RNA, 19 nt, Homo sapiens
  misc_RNA (1)...(19): siRNA sense strand
uccaguccuuugagauuga

SEQ ID NO: 312643 - RNA, 19 nt, Homo sapiens
  misc_RNA (1)...(19): siRNA sense strand
ccuaugacuucgacagcau

SEQ ID NO: 312644 - RNA, 19 nt, Homo sapiens
  misc_RNA (1)...(19): siRNA sense strand
ccgccacguuuccaucguu

SEQ ID NO: 312645 - RNA, 19 nt, Homo sapiens
  misc_RNA (1)...(19): siRNA sense strand
gggugaaaccucccauugg

SEQ ID NO: 312646 - RNA, 19 nt, Homo sapiens
  misc_RNA (1)...(19): siRNA sense strand
gaguucaaguccgacaaca

SEQ ID NO: 312647 - RNA, 19 nt, Homo sapiens
  misc_RNA (1)...(19): siRNA sense strand
gaggugcgcaguggacuca

SEQ ID NO: 312648 - RNA, 19 nt, Homo sapiens
  misc_RNA (1)...(19): siRNA sense strand
gacagagggcaaugaugug

SEQ ID NO: 312649 - RNA, 19 nt, Homo sapiens
  misc_RNA (1)...(19): siRNA sense strand
gagacagagggcaaugaug

SEQ ID NO: 312650 - RNA, 19 nt, Homo sapiens
  misc_RNA (1)...(19): siRNA sense strand
caagacagcacaggcaacu

SEQ ID NO: 312651 - RNA, 19 nt, Homo sapiens
  misc_RNA (1)...(19): siRNA sense strand
ugagacagagggcaaugau

SEQ ID NO: 312652 - RNA, 19 nt, Homo sapiens
  misc_RNA (1)...(19): siRNA sense strand
gcaaugaugugugcaagua

SEQ ID NO: 312653 - RNA, 19 nt, Homo sapiens
  misc_RNA (1)...(19): siRNA sense strand
ggacagcuauauuguguuc

SEQ ID NO: 312654 - RNA, 19 nt, Homo sapiens
  misc_RNA (1)...(19): siRNA sense strand
gaggacagcuauauugugu

SEQ ID NO: 312655 - RNA, 19 nt, Homo sapiens
  misc_RNA (1)...(19): siRNA sense strand
gggagaagaucauccugaa

SEQ ID NO: 312656 - RNA, 19 nt, Homo sapiens
  misc_RNA (1)...(19): siRNA sense strand
caucaaagcugcaguucca

SEQ ID NO: 312657 - RNA, 19 nt, Homo sapiens
  misc_RNA (1)...(19): siRNA sense strand
ccaacuacccagacgauua

SEQ ID NO: 312658 - RNA, 19 nt, Homo sapiens
  misc_RNA (1)...(19): siRNA sense strand
gagcagcggugccucaaca

SEQ ID NO: 312659 - RNA, 19 nt, Homo sapiens
  misc_RNA (1)...(19): siRNA sense strand
gcucguaaguccuccauca

SEQ ID NO: 312660 - RNA, 19 nt, Homo sapiens
  misc_RNA (1)...(19): siRNA sense strand
ggagagacccugcaagaca

SEQ ID NO: 312661 - RNA, 19 nt, Homo sapiens
  misc_RNA (1)...(19): siRNA sense strand
gcaucucccugcaguuuga

SEQ ID NO: 312662 - RNA, 19 nt, Homo sapiens
  misc_RNA (1)...(19): siRNA sense strand
aaaggacuauggccacauu

SEQ ID NO: 312663 - RNA, 19 nt, Homo sapiens
  misc_RNA (1)...(19): siRNA sense strand
gggcuuugccgucaacuuu

SEQ ID NO: 312664 - RNA, 19 nt, Homo sapiens
  misc_RNA (1)...(19): siRNA sense strand
gcuaugagaagccugauga

SEQ ID NO: 312665 - RNA, 19 nt, Homo sapiens
  misc_RNA (1)...(19): siRNA sense strand
gcacugacgaggacagcua

SEQ ID NO: 312666 - RNA, 19 nt, Homo sapiens
  misc_RNA (1)...(19): siRNA sense strand
gcuauauuguguucaccua

SEQ ID NO: 312667 - RNA, 19 nt, Homo sapiens
  misc_RNA (1)...(19): siRNA sense strand
ugugggagauggagaggua

SEQ ID NO: 312668 - RNA, 19 nt, Homo sapiens
  misc_RNA (1)...(19): siRNA sense strand
ggacauugcccuggacgaa

SEQ ID NO: 312669 - RNA, 19 nt, Homo sapiens
  misc_RNA (1)...(19): siRNA sense strand
ggcaagaacugugacaagu

SEQ ID NO: 312670 - RNA, 19 nt, Homo sapiens
  misc_RNA (1)...(19): siRNA sense strand
gcauuacgcucggaacaca

SEQ ID NO: 312671 - RNA, 19 nt, Homo sapiens
  misc_RNA (1)...(19): siRNA sense strand
gacgaggacagcuauauug

SEQ ID NO: 312672 - RNA, 19 nt, Homo sapiens
  misc_RNA (1)...(19): siRNA sense strand
gagaagaucauccugaacu

SEQ ID NO: 312673 - RNA, 19 nt, Homo sapiens
  misc_RNA (1)...(19): siRNA sense strand
caguuugacuucuuugaga

SEQ ID NO: 312674 - RNA, 19 nt, Homo sapiens
  misc_RNA (1)...(19): siRNA sense strand
caagcugcauggcaaguuc

SEQ ID NO: 312675 - RNA, 19 nt, Homo sapiens
  misc_RNA (1)...(19): siRNA sense strand
ggacuauggccacauucaa

SEQ ID NO: 312676 - RNA, 19 nt, Homo sapiens
  misc_RNA (1)...(19): siRNA sense strand
ugacggguccauuaacaaa

SEQ ID NO: 312677 - RNA, 19 nt, Homo sapiens
  misc_RNA (1)...(19): siRNA sense strand
agacagagggcaaugaugu

SEQ ID NO: 312678 - RNA, 19 nt, Homo sapiens
  misc_RNA (1)...(19): siRNA sense strand
uggcuacucugcucacaug

SEQ ID NO: 312679 - RNA, 19 nt, Homo sapiens
  misc_RNA (1)...(19): siRNA sense strand
ucacauuccaguccuuuga

SEQ ID NO: 312680 - RNA, 19 nt, Homo sapiens
  misc_RNA (1)...(19): siRNA sense strand
cauggcaaguucugugguu

SEQ ID NO: 312681 - RNA, 19 nt, Homo sapiens
  misc_RNA (1)...(19): siRNA sense strand
ugacgaggacagcuauauu

SEQ ID NO: 312682 - RNA, 19 nt, Homo sapiens
  misc_RNA (1)...(19): siRNA sense strand
ggucaucaccucccaguac

SEQ ID NO: 312683 - RNA, 19 nt, Homo sapiens
  misc_RNA (1)...(19): siRNA sense strand
ccacgugggccucacauuc

SEQ ID NO: 312684 - RNA, 19 nt, Homo sapiens
  misc_RNA (1)...(19): siRNA sense strand
guggagagacccugcaaga

SEQ ID NO: 312685 - RNA, 19 nt, Homo sapiens
  misc_RNA (1)...(19): siRNA sense strand
cccgcaagcuuuacaagug

SEQ ID NO: 312686 - RNA, 19 nt, Homo sapiens
  misc_RNA (1)...(19): siRNA sense strand
agaagaucauccugaacuu

SEQ ID NO: 312687 - RNA, 19 nt, Homo sapiens
  misc_RNA (1)...(19): siRNA sense strand
caacuacccagacgauuac

SEQ ID NO: 312688 - RNA, 19 nt, Homo sapiens
  misc_RNA (1)...(19): siRNA sense strand
gagauggcuucuggaggaa

SEQ ID NO: 312689 - RNA, 19 nt, Homo sapiens
  misc_RNA (1)...(19): siRNA sense strand
cguaaguccuccaucaaag

SEQ ID NO: 312690 - RNA, 19 nt, Homo sapiens
  misc_RNA (1)...(19): siRNA sense strand
cagcugugccuacgacuau

SEQ ID NO: 312691 - RNA, 19 nt, Homo sapiens
  misc_RNA (1)...(19): siRNA sense strand
uauauuguguucaccuauc

SEQ ID NO: 312692 - RNA, 19 nt, Homo sapiens
  misc_RNA (1)...(19): siRNA sense strand
acauugcccuggacgaaga

SEQ ID NO: 312693 - RNA, 19 nt, Homo sapiens
  misc_RNA (1)...(19): siRNA sense strand
ucaacacccugggcagcua

SEQ ID NO: 312694 - RNA, 19 nt, Homo sapiens
  misc_RNA (1)...(19): siRNA sense strand
caaacucccugagccuauc

SEQ ID NO: 312695 - RNA, 19 nt, Homo sapiens
  misc_RNA (1)...(19): siRNA sense strand
caacaugcgcguggaguuc

SEQ ID NO: 312696 - RNA, 19 nt, Homo sapiens
  misc_RNA (1)...(19): siRNA sense strand
cuucaaggcccacuucuuc

SEQ ID NO: 312697 - RNA, 19 nt, Homo sapiens
  misc_RNA (1)...(19): siRNA sense strand
agacagcacaggcaacuuc

SEQ ID NO: 312698 - RNA, 19 nt, Homo sapiens
  misc_RNA (1)...(19): siRNA sense strand
ccgcaucucccugcaguuu

SEQ ID NO: 312699 - RNA, 19 nt, Homo sapiens
  misc_RNA (1)...(19): siRNA sense strand
gacuauggccacauucaau

SEQ ID NO: 312700 - RNA, 19 nt, Homo sapiens
  misc_RNA (1)...(19): siRNA sense strand
gggcuucuuugcagucuac

SEQ ID NO: 312701 - RNA, 19 nt, Homo sapiens
  misc_RNA (1)...(19): siRNA sense strand
cagcagcaauuggguugga

SEQ ID NO: 312702 - RNA, 19 nt, Homo sapiens
  misc_RNA (1)...(19): siRNA sense strand
gcgcuacuguggcuaugag

SEQ ID NO: 312703 - RNA, 19 nt, Homo sapiens
  misc_RNA (1)...(19): siRNA sense strand
ggcucaaguucgucucuga

SEQ ID NO: 312704 - RNA, 19 nt, Homo sapiens
  misc_RNA (1)...(19): siRNA sense strand
ggucauccccuuugucauu

SEQ ID NO: 312705 - RNA, 19 nt, Homo sapiens
  misc_RNA (1)...(19): siRNA sense strand
ugacuucgacagcaucaug

SEQ ID NO: 312706 - RNA, 19 nt, Homo sapiens
  misc_RNA (1)...(19): siRNA sense strand
ccaaacucccugagccuau

SEQ ID NO: 312707 - RNA, 19 nt, Homo sapiens
  misc_RNA (1)...(19): siRNA sense strand
ucugacggguccauuaaca

SEQ ID NO: 312708 - RNA, 19 nt, Homo sapiens
  misc_RNA (1)...(19): siRNA sense strand
gcagcaauuggguuggaaa

SEQ ID NO: 312709 - RNA, 19 nt, Homo sapiens
  misc_RNA (1)...(19): siRNA sense strand
ccuaucgucuccacugaca

SEQ ID NO: 312710 - RNA, 19 nt, Homo sapiens
  misc_RNA (1)...(19): siRNA sense strand
ucucugacggguccauuaa

SEQ ID NO: 312711 - RNA, 19 nt, Homo sapiens
  misc_RNA (1)...(19): siRNA sense strand
gcaguuugacuucuuugag

SEQ ID NO: 312712 - RNA, 19 nt, Homo sapiens
  misc_RNA (1)...(19): siRNA sense strand
ccugcaguuugacuucuuu

SEQ ID NO: 312713 - RNA, 19 nt, Homo sapiens
  misc_RNA (1)...(19): siRNA sense strand
gcggauuccucaccaagcu

SEQ ID NO: 312714 - RNA, 19 nt, Homo sapiens
  misc_RNA (1)...(19): siRNA sense strand
gcaucuuccuggauaccau

SEQ ID NO: 312715 - RNA, 19 nt, Homo sapiens
  misc_RNA (1)...(19): siRNA sense strand
gucaucaccucccaguaca

SEQ ID NO: 312716 - RNA, 19 nt, Homo sapiens
  misc_RNA (1)...(19): siRNA sense strand
ugugacaaguucggcauug

SEQ ID NO: 312717 - RNA, 19 nt, Homo sapiens
  misc_RNA (1)...(19): siRNA sense strand
ucguaaguccuccaucaaa

SEQ ID NO: 312718 - RNA, 19 nt, Homo sapiens
  misc_RNA (1)...(19): siRNA sense strand
caaggcccacuucuucuca

SEQ ID NO: 312719 - RNA, 19 nt, Homo sapiens
  misc_RNA (1)...(19): siRNA sense strand
cgaggacagcuauauugug

SEQ ID NO: 312720 - RNA, 19 nt, Homo sapiens
  misc_RNA (1)...(19): siRNA sense strand
ucaccucccaguacaacaa

SEQ ID NO: 312721 - RNA, 19 nt, Homo sapiens
  misc_RNA (1)...(19): siRNA sense strand
gagaagcccgaggucauca

SEQ ID NO: 312722 - RNA, 19 nt, Homo sapiens
  misc_RNA (1)...(19): siRNA sense strand
uccaguccuuugagauuga

SEQ ID NO: 312723 - RNA, 19 nt, Homo sapiens
  misc_RNA (1)...(19): siRNA sense strand
ccuaugacuucgacagcau

SEQ ID NO: 312724 - RNA, 19 nt, Homo sapiens
  misc_RNA (1)...(19): siRNA sense strand
ccgccacguuuccaucguu

SEQ ID NO: 312725 - RNA, 19 nt, Homo sapiens
  misc_RNA (1)...(19): siRNA sense strand
gggugaaaccucccauugg

SEQ ID NO: 312726 - RNA, 19 nt, Homo sapiens
  misc_RNA (1)...(19): siRNA sense strand
gaguucaaguccgacaaca

SEQ ID NO: 312727 - RNA, 19 nt, Homo sapiens
  misc_RNA (1)...(19): siRNA sense strand
gaggugcgcaguggacuca

SEQ ID NO: 312728 - RNA, 19 nt, Homo sapiens
  misc_RNA (1)...(19): siRNA sense strand
gacagagggcaaugaugug

SEQ ID NO: 312729 - RNA, 19 nt, Homo sapiens
  misc_RNA (1)...(19): siRNA sense strand
gagacagagggcaaugaug

SEQ ID NO: 312730 - RNA, 19 nt, Homo sapiens
  misc_RNA (1)...(19): siRNA sense strand
caagacagcacaggcaacu

SEQ ID NO: 312731 - RNA, 19 nt, Homo sapiens
  misc_RNA (1)...(19): siRNA sense strand
ugagacagagggcaaugau

SEQ ID NO: 312732 - RNA, 19 nt, Homo sapiens
  misc_RNA (1)...(19): siRNA sense strand
gcaaugaugugugcaagua

SEQ ID NO: 312733 - RNA, 19 nt, Homo sapiens
  misc_RNA (1)...(19): siRNA sense strand
ggacagcuauauuguguuc

SEQ ID NO: 312734 - RNA, 19 nt, Homo sapiens
  misc_RNA (1)...(19): siRNA sense strand
gaggacagcuauauugugu

SEQ ID NO: 312735 - RNA, 19 nt, Homo sapiens
  misc_RNA (1)...(19): siRNA sense strand
gggagaagaucauccugaa

SEQ ID NO: 312736 - RNA, 19 nt, Homo sapiens
  misc_RNA (1)...(19): siRNA sense strand
caucaaagcugcaguucca

SEQ ID NO: 312737 - RNA, 19 nt, Homo sapiens
  misc_RNA (1)...(19): siRNA sense strand
ccaacuacccagacgauua

SEQ ID NO: 312738 - RNA, 19 nt, Homo sapiens
  misc_RNA (1)...(19): siRNA sense strand
gagcagcggugccucaaca

SEQ ID NO: 312739 - RNA, 19 nt, Homo sapiens
  misc_RNA (1)...(19): siRNA sense strand
gcucguaaguccuccauca

SEQ ID NO: 312740 - RNA, 19 nt, Homo sapiens
  misc_RNA (1)...(19): siRNA sense strand
ggagagacccugcaagaca

SEQ ID NO: 312741 - RNA, 19 nt, Homo sapiens
  misc_RNA (1)...(19): siRNA sense strand
gcaucucccugcaguuuga

SEQ ID NO: 312742 - RNA, 19 nt, Homo sapiens
  misc_RNA (1)...(19): siRNA sense strand
aaaggacuauggccacauu

SEQ ID NO: 312743 - RNA, 19 nt, Homo sapiens
  misc_RNA (1)...(19): siRNA sense strand
gggcuuugccgucaacuuu

SEQ ID NO: 312744 - RNA, 19 nt, Homo sapiens
  misc_RNA (1)...(19): siRNA sense strand
gcuaugagaagccugauga

SEQ ID NO: 312745 - RNA, 19 nt, Homo sapiens
  misc_RNA (1)...(19): siRNA sense strand
gcacugacgaggacagcua

SEQ ID NO: 312746 - RNA, 19 nt, Homo sapiens
  misc_RNA (1)...(19): siRNA sense strand
gcuauauuguguucaccua

SEQ ID NO: 312747 - RNA, 19 nt, Homo sapiens
  misc_RNA (1)...(19): siRNA sense strand
ugugggagauggagaggua

SEQ ID NO: 312748 - RNA, 19 nt, Homo sapiens
  misc_RNA (1)...(19): siRNA sense strand
ggacauugcccuggacgaa

SEQ ID NO: 312749 - RNA, 19 nt, Homo sapiens
  misc_RNA (1)...(19): siRNA sense strand
ggcaagaacugugacaagu

SEQ ID NO: 312750 - RNA, 19 nt, Homo sapiens
  misc_RNA (1)...(19): siRNA sense strand
gcauuacgcucggaacaca

SEQ ID NO: 312751 - RNA, 19 nt, Homo sapiens
  misc_RNA (1)...(19): siRNA sense strand
gacgaggacagcuauauug

SEQ ID NO: 312752 - RNA, 19 nt, Homo sapiens
  misc_RNA (1)...(19): siRNA sense strand
gagaagaucauccugaacu

SEQ ID NO: 312753 - RNA, 19 nt, Homo sapiens
  misc_RNA (1)...(19): siRNA sense strand
caguuugacuucuuugaga

SEQ ID NO: 312754 - RNA, 19 nt, Homo sapiens
  misc_RNA (1)...(19): siRNA sense strand
caagcugcauggcaaguuc

SEQ ID NO: 312755 - RNA, 19 nt, Homo sapiens
  misc_RNA (1)...(19): siRNA sense strand
ggacuauggccacauucaa

SEQ ID NO: 312756 - RNA, 19 nt, Homo sapiens
  misc_RNA (1)...(19): siRNA sense strand
ugacggguccauuaacaaa

SEQ ID NO: 312757 - RNA, 19 nt, Homo sapiens
  misc_RNA (1)...(19): siRNA sense strand
agacagagggcaaugaugu

SEQ ID NO: 312758 - RNA, 19 nt, Homo sapiens
  misc_RNA (1)...(19): siRNA sense strand
uggcuacucugcucacaug

SEQ ID NO: 312759 - RNA, 19 nt, Homo sapiens
  misc_RNA (1)...(19): siRNA sense strand
ucacauuccaguccuuuga

SEQ ID NO: 312760 - RNA, 19 nt, Homo sapiens
  misc_RNA (1)...(19): siRNA sense strand
cauggcaaguucugugguu

SEQ ID NO: 312761 - RNA, 19 nt, Homo sapiens
  misc_RNA (1)...(19): siRNA sense strand
ugacgaggacagcuauauu

SEQ ID NO: 312762 - RNA, 19 nt, Homo sapiens
  misc_RNA (1)...(19): siRNA sense strand
ggucaucaccucccaguac

SEQ ID NO: 312763 - RNA, 19 nt, Homo sapiens
  misc_RNA (1)...(19): siRNA sense strand
ccacgugggccucacauuc

SEQ ID NO: 312764 - RNA, 19 nt, Homo sapiens
  misc_RNA (1)...(19): siRNA sense strand
guggagagacccugcaaga

SEQ ID NO: 312765 - RNA, 19 nt, Homo sapiens
  misc_RNA (1)...(19): siRNA sense strand
cccgcaagcuuuacaagug

SEQ ID NO: 312766 - RNA, 19 nt, Homo sapiens
  misc_RNA (1)...(19): siRNA sense strand
agaagaucauccugaacuu

SEQ ID NO: 312767 - RNA, 19 nt, Homo sapiens
  misc_RNA (1)...(19): siRNA sense strand
caacuacccagacgauuac

SEQ ID NO: 312768 - RNA, 19 nt, Homo sapiens
  misc_RNA (1)...(19): siRNA sense strand
gagauggcuucuggaggaa

SEQ ID NO: 312769 - RNA, 19 nt, Homo sapiens
  misc_RNA (1)...(19): siRNA sense strand
cguaaguccuccaucaaag

SEQ ID NO: 312770 - RNA, 19 nt, Homo sapiens
  misc_RNA (1)...(19): siRNA sense strand
cagcugugccuacgacuau

SEQ ID NO: 312771 - RNA, 19 nt, Homo sapiens
  misc_RNA (1)...(19): siRNA sense strand
uauauuguguucaccuauc

SEQ ID NO: 312772 - RNA, 19 nt, Homo sapiens
  misc_RNA (1)...(19): siRNA sense strand
acauugcccuggacgaaga

SEQ ID NO: 312773 - RNA, 19 nt, Homo sapiens
  misc_RNA (1)...(19): siRNA sense strand
ucaacacccugggcagcua

SEQ ID NO: 312774 - RNA, 19 nt, Homo sapiens
  misc_RNA (1)...(19): siRNA sense strand
caaacucccugagccuauc

SEQ ID NO: 312775 - RNA, 19 nt, Homo sapiens
  misc_RNA (1)...(19): siRNA sense strand
caacaugcgcguggaguuc

SEQ ID NO: 312776 - RNA, 19 nt, Homo sapiens
  misc_RNA (1)...(19): siRNA sense strand
cuucaaggcccacuucuuc

SEQ ID NO: 312777 - RNA, 19 nt, Homo sapiens
  misc_RNA (1)...(19): siRNA sense strand
agacagcacaggcaacuuc

SEQ ID NO: 312778 - RNA, 19 nt, Homo sapiens
  misc_RNA (1)...(19): siRNA sense strand
ccgcaucucccugcaguuu

SEQ ID NO: 312779 - RNA, 19 nt, Homo sapiens
  misc_RNA (1)...(19): siRNA sense strand
gacuauggccacauucaau

SEQ ID NO: 312780 - RNA, 19 nt, Homo sapiens
  misc_RNA (1)...(19): siRNA sense strand
gggcuucuuugcagucuac

SEQ ID NO: 312781 - RNA, 19 nt, Homo sapiens
  misc_RNA (1)...(19): siRNA sense strand
cagcagcaauuggguugga

SEQ ID NO: 312782 - RNA, 19 nt, Homo sapiens
  misc_RNA (1)...(19): siRNA sense strand
gcgcuacuguggcuaugag

SEQ ID NO: 312783 - RNA, 19 nt, Homo sapiens
  misc_RNA (1)...(19): siRNA sense strand
ggcucaaguucgucucuga

SEQ ID NO: 312784 - RNA, 19 nt, Homo sapiens
  misc_RNA (1)...(19): siRNA sense strand
ggucauccccuuugucauu

SEQ ID NO: 312785 - RNA, 19 nt, Homo sapiens
  misc_RNA (1)...(19): siRNA sense strand
ugacuucgacagcaucaug

SEQ ID NO: 312786 - RNA, 19 nt, Homo sapiens
  misc_RNA (1)...(19): siRNA sense strand
ccaaacucccugagccuau

SEQ ID NO: 312787 - RNA, 19 nt, Homo sapiens
  misc_RNA (1)...(19): siRNA sense strand
ucugacggguccauuaaca

SEQ ID NO: 312788 - RNA, 19 nt, Homo sapiens
  misc_RNA (1)...(19): siRNA sense strand
gcagcaauuggguuggaaa

SEQ ID NO: 312789 - RNA, 19 nt, Homo sapiens
  misc_RNA (1)...(19): siRNA sense strand
ccuaucgucuccacugaca

SEQ ID NO: 312790 - RNA, 19 nt, Homo sapiens
  misc_RNA (1)...(19): siRNA sense strand
ucucugacggguccauuaa

SEQ ID NO: 312791 - RNA, 19 nt, Homo sapiens
  misc_RNA (1)...(19): siRNA sense strand
gcaguuugacuucuuugag

SEQ ID NO: 312792 - RNA, 19 nt, Homo sapiens
  misc_RNA (1)...(19): siRNA sense strand
ccugcaguuugacuucuuu

SEQ ID NO: 312793 - RNA, 19 nt, Homo sapiens
  misc_RNA (1)...(19): siRNA sense strand
gcggauuccucaccaagcu

SEQ ID NO: 312794 - RNA, 19 nt, Homo sapiens
  misc_RNA (1)...(19): siRNA sense strand
gcaucuuccuggauaccau

SEQ ID NO: 312795 - RNA, 19 nt, Homo sapiens
  misc_RNA (1)...(19): siRNA sense strand
gucaucaccucccaguaca

SEQ ID NO: 312796 - RNA, 19 nt, Homo sapiens
  misc_RNA (1)...(19): siRNA sense strand
ugugacaaguucggcauug

SEQ ID NO: 312797 - RNA, 19 nt, Homo sapiens
  misc_RNA (1)...(19): siRNA sense strand
ucguaaguccuccaucaaa

SEQ ID NO: 312798 - RNA, 19 nt, Homo sapiens
  misc_RNA (1)...(19): siRNA sense strand
caaggcccacuucuucuca

SEQ ID NO: 312799 - RNA, 19 nt, Homo sapiens
  misc_RNA (1)...(19): siRNA sense strand
cgaggacagcuauauugug

SEQ ID NO: 312800 - RNA, 19 nt, Homo sapiens
  misc_RNA (1)...(19): siRNA sense strand
ucaccucccaguacaacaa

SEQ ID NO: 312801 - RNA, 19 nt, Homo sapiens
  misc_RNA (1)...(19): siRNA sense strand
gagaagcccgaggucauca

SEQ ID NO: 312802 - RNA, 19 nt, Homo sapiens
  misc_RNA (1)...(19): siRNA sense strand
uccaguccuuugagauuga

SEQ ID NO: 312803 - RNA, 19 nt, Homo sapiens
  misc_RNA (1)...(19): siRNA sense strand
ccuaugacuucgacagcau

SEQ ID NO: 312804 - RNA, 19 nt, Homo sapiens
  misc_RNA (1)...(19): siRNA sense strand
ccgccacguuuccaucguu

SEQ ID NO: 312805 - RNA, 19 nt, Homo sapiens
  misc_RNA (1)...(19): siRNA sense strand
gggugaaaccucccauugg

SEQ ID NO: 312806 - RNA, 19 nt, Homo sapiens
  misc_RNA (1)...(19): siRNA sense strand
gaguucaaguccgacaaca

SEQ ID NO: 312807 - RNA, 19 nt, Homo sapiens
  misc_RNA (1)...(19): siRNA sense strand
gaggugcgcaguggacuca

SEQ ID NO: 312808 - RNA, 19 nt, Homo sapiens
  misc_RNA (1)...(19): siRNA sense strand
gacagagggcaaugaugug

SEQ ID NO: 312809 - RNA, 19 nt, Homo sapiens
  misc_RNA (1)...(19): siRNA sense strand
gagacagagggcaaugaug

SEQ ID NO: 312810 - RNA, 19 nt, Homo sapiens
  misc_RNA (1)...(19): siRNA sense strand
caagacagcacaggcaacu

SEQ ID NO: 312811 - RNA, 19 nt, Homo sapiens
  misc_RNA (1)...(19): siRNA sense strand
ugagacagagggcaaugau

SEQ ID NO: 312812 - RNA, 19 nt, Homo sapiens
  misc_RNA (1)...(19): siRNA sense strand
ggacagcuauauuguguuc

SEQ ID NO: 312813 - RNA, 19 nt, Homo sapiens
  misc_RNA (1)...(19): siRNA sense strand
gaggacagcuauauugugu

SEQ ID NO: 312814 - RNA, 19 nt, Homo sapiens
  misc_RNA (1)...(19): siRNA sense strand
gggagaagaucauccugaa

SEQ ID NO: 312815 - RNA, 19 nt, Homo sapiens
  misc_RNA (1)...(19): siRNA sense strand
caucaaagcugcaguucca

SEQ ID NO: 312816 - RNA, 19 nt, Homo sapiens
  misc_RNA (1)...(19): siRNA sense strand
ccaacuacccagacgauua

SEQ ID NO: 312817 - RNA, 19 nt, Homo sapiens
  misc_RNA (1)...(19): siRNA sense strand
gagcagcggugccucaaca

SEQ ID NO: 312818 - RNA, 19 nt, Homo sapiens
  misc_RNA (1)...(19): siRNA sense strand
gcucguaaguccuccauca

SEQ ID NO: 312819 - RNA, 19 nt, Homo sapiens
  misc_RNA (1)...(19): siRNA sense strand
ggagagacccugcaagaca

SEQ ID NO: 312820 - RNA, 19 nt, Homo sapiens
  misc_RNA (1)...(19): siRNA sense strand
aaaggacuauggccacauu

SEQ ID NO: 312821 - RNA, 19 nt, Homo sapiens
  misc_RNA (1)...(19): siRNA sense strand
gggcuuugccgucaacuuu

SEQ ID NO: 312822 - RNA, 19 nt, Homo sapiens
  misc_RNA (1)...(19): siRNA sense strand
gcuaugagaagccugauga

SEQ ID NO: 312823 - RNA, 19 nt, Homo sapiens
  misc_RNA (1)...(19): siRNA sense strand
gcacugacgaggacagcua

SEQ ID NO: 312824 - RNA, 19 nt, Homo sapiens
  misc_RNA (1)...(19): siRNA sense strand
gcuauauuguguucaccua

SEQ ID NO: 312825 - RNA, 19 nt, Homo sapiens
  misc_RNA (1)...(19): siRNA sense strand
ugugggagauggagaggua

SEQ ID NO: 312826 - RNA, 19 nt, Homo sapiens
  misc_RNA (1)...(19): siRNA sense strand
ggacauugcccuggacgaa

SEQ ID NO: 312827 - RNA, 19 nt, Homo sapiens
  misc_RNA (1)...(19): siRNA sense strand
ggcaagaacugugacaagu

SEQ ID NO: 312828 - RNA, 19 nt, Homo sapiens
  misc_RNA (1)...(19): siRNA sense strand
gcauuacgcucggaacaca

SEQ ID NO: 312829 - RNA, 19 nt, Homo sapiens
  misc_RNA (1)...(19): siRNA sense strand
gacgaggacagcuauauug

SEQ ID NO: 312830 - RNA, 19 nt, Homo sapiens
  misc_RNA (1)...(19): siRNA sense strand
gagaagaucauccugaacu

SEQ ID NO: 312831 - RNA, 19 nt, Homo sapiens
  misc_RNA (1)...(19): siRNA sense strand
ggacuauggccacauucaa

SEQ ID NO: 312832 - RNA, 19 nt, Homo sapiens
  misc_RNA (1)...(19): siRNA sense strand
ugacggguccauuaacaaa

SEQ ID NO: 312833 - RNA, 19 nt, Homo sapiens
  misc_RNA (1)...(19): siRNA sense strand
uggcuacucugcucacaug

SEQ ID NO: 312834 - RNA, 19 nt, Homo sapiens
  misc_RNA (1)...(19): siRNA sense strand
ucacauuccaguccuuuga

SEQ ID NO: 312835 - RNA, 19 nt, Homo sapiens
  misc_RNA (1)...(19): siRNA sense strand
ugacgaggacagcuauauu

SEQ ID NO: 312836 - RNA, 19 nt, Homo sapiens
  misc_RNA (1)...(19): siRNA sense strand
ccacgugggccucacauuc

SEQ ID NO: 312837 - RNA, 19 nt, Homo sapiens
  misc_RNA (1)...(19): siRNA sense strand
guggagagacccugcaaga

SEQ ID NO: 312838 - RNA, 19 nt, Homo sapiens
  misc_RNA (1)...(19): siRNA sense strand
cccgcaagcuuuacaagug

SEQ ID NO: 312839 - RNA, 19 nt, Homo sapiens
  misc_RNA (1)...(19): siRNA sense strand
agaagaucauccugaacuu

SEQ ID NO: 312840 - RNA, 19 nt, Homo sapiens
  misc_RNA (1)...(19): siRNA sense strand
caacuacccagacgauuac

SEQ ID NO: 312841 - RNA, 19 nt, Homo sapiens
  misc_RNA (1)...(19): siRNA sense strand
gagauggcuucuggaggaa

SEQ ID NO: 312842 - RNA, 19 nt, Homo sapiens
  misc_RNA (1)...(19): siRNA sense strand
cguaaguccuccaucaaag

SEQ ID NO: 312843 - RNA, 19 nt, Homo sapiens
  misc_RNA (1)...(19): siRNA sense strand
cagcugugccuacgacuau

SEQ ID NO: 312844 - RNA, 19 nt, Homo sapiens
  misc_RNA (1)...(19): siRNA sense strand
uauauuguguucaccuauc

SEQ ID NO: 312845 - RNA, 19 nt, Homo sapiens
  misc_RNA (1)...(19): siRNA sense strand
ucaacacccugggcagcua

SEQ ID NO: 312846 - RNA, 19 nt, Homo sapiens
  misc_RNA (1)...(19): siRNA sense strand
caaacucccugagccuauc

SEQ ID NO: 312847 - RNA, 19 nt, Homo sapiens
  misc_RNA (1)...(19): siRNA sense strand
acauugcccuggacgaaga

SEQ ID NO: 312848 - RNA, 19 nt, Homo sapiens
  misc_RNA (1)...(19): siRNA sense strand
agacagcacaggcaacuuc

SEQ ID NO: 312849 - RNA, 19 nt, Homo sapiens
  misc_RNA (1)...(19): siRNA sense strand
gacuauggccacauucaau

SEQ ID NO: 312850 - RNA, 19 nt, Homo sapiens
  misc_RNA (1)...(19): siRNA sense strand
gggcuucuuugcagucuac

SEQ ID NO: 312851 - RNA, 19 nt, Homo sapiens
  misc_RNA (1)...(19): siRNA sense strand
cagcagcaauuggguugga

SEQ ID NO: 312852 - RNA, 19 nt, Homo sapiens
  misc_RNA (1)...(19): siRNA sense strand
gcgcuacuguggcuaugag

SEQ ID NO: 312853 - RNA, 19 nt, Homo sapiens
  misc_RNA (1)...(19): siRNA sense strand
ggcucaaguucgucucuga

SEQ ID NO: 312854 - RNA, 19 nt, Homo sapiens
  misc_RNA (1)...(19): siRNA sense strand
ggucauccccuuugucauu

SEQ ID NO: 312855 - RNA, 19 nt, Homo sapiens
  misc_RNA (1)...(19): siRNA sense strand
ugacuucgacagcaucaug

SEQ ID NO: 312856 - RNA, 19 nt, Homo sapiens
  misc_RNA (1)...(19): siRNA sense strand
ccaaacucccugagccuau

SEQ ID NO: 312857 - RNA, 19 nt, Homo sapiens
  misc_RNA (1)...(19): siRNA sense strand
ucugacggguccauuaaca

SEQ ID NO: 312858 - RNA, 19 nt, Homo sapiens
  misc_RNA (1)...(19): siRNA sense strand
gcagcaauuggguuggaaa

SEQ ID NO: 312859 - RNA, 19 nt, Homo sapiens
  misc_RNA (1)...(19): siRNA sense strand
ccuaucgucuccacugaca

SEQ ID NO: 312860 - RNA, 19 nt, Homo sapiens
  misc_RNA (1)...(19): siRNA sense strand
ucucugacggguccauuaa

SEQ ID NO: 312861 - RNA, 19 nt, Homo sapiens
  misc_RNA (1)...(19): siRNA sense strand
gcaucuuccuggauaccau

SEQ ID NO: 312862 - RNA, 19 nt, Homo sapiens
  misc_RNA (1)...(19): siRNA sense strand
ugugacaaguucggcauug

SEQ ID NO: 312863 - RNA, 19 nt, Homo sapiens
  misc_RNA (1)...(19): siRNA sense strand
ucguaaguccuccaucaaa

SEQ ID NO: 312864 - RNA, 19 nt, Homo sapiens
  misc_RNA (1)...(19): siRNA sense strand
cgaggacagcuauauugug

SEQ ID NO: 312865 - RNA, 19 nt, Homo sapiens
  misc_RNA (1)...(19): siRNA sense strand
uccaguccuuugagauuga

SEQ ID NO: 312866 - RNA, 19 nt, Homo sapiens
  misc_RNA (1)...(19): siRNA sense strand
ccuaugacuucgacagcau

SEQ ID NO: 312867 - RNA, 19 nt, Homo sapiens
  misc_RNA (1)...(19): siRNA sense strand
ccgccacguuuccaucguu

SEQ ID NO: 312868 - RNA, 19 nt, Homo sapiens
  misc_RNA (1)...(19): siRNA sense strand
gggugaaaccucccauugg

SEQ ID NO: 312869 - RNA, 19 nt, Homo sapiens
  misc_RNA (1)...(19): siRNA sense strand
caagacagcacaggcaacu

SEQ ID NO: 312870 - RNA, 19 nt, Homo sapiens
  misc_RNA (1)...(19): siRNA sense strand
ggacagcuauauuguguuc

SEQ ID NO: 312871 - RNA, 19 nt, Homo sapiens
  misc_RNA (1)...(19): siRNA sense strand
gaggacagcuauauugugu

SEQ ID NO: 312872 - RNA, 19 nt, Homo sapiens
  misc_RNA (1)...(19): siRNA sense strand
caucaaagcugcaguucca

SEQ ID NO: 312873 - RNA, 19 nt, Homo sapiens
  misc_RNA (1)...(19): siRNA sense strand
gcucguaaguccuccauca

SEQ ID NO: 312874 - RNA, 19 nt, Homo sapiens
  misc_RNA (1)...(19): siRNA sense strand
gcacugacgaggacagcua

SEQ ID NO: 312875 - RNA, 19 nt, Homo sapiens
  misc_RNA (1)...(19): siRNA sense strand
gcuauauuguguucaccua

SEQ ID NO: 312876 - RNA, 19 nt, Homo sapiens
  misc_RNA (1)...(19): siRNA sense strand
ugugggagauggagaggua

SEQ ID NO: 312877 - RNA, 19 nt, Homo sapiens
  misc_RNA (1)...(19): siRNA sense strand
ggacauugcccuggacgaa

SEQ ID NO: 312878 - RNA, 19 nt, Homo sapiens
  misc_RNA (1)...(19): siRNA sense strand
ggcaagaacugugacaagu

SEQ ID NO: 312879 - RNA, 19 nt, Homo sapiens
  misc_RNA (1)...(19): siRNA sense strand
gacgaggacagcuauauug

SEQ ID NO: 312880 - RNA, 19 nt, Homo sapiens
  misc_RNA (1)...(19): siRNA sense strand
ugacgaggacagcuauauu

SEQ ID NO: 312881 - RNA, 19 nt, Homo sapiens
  misc_RNA (1)...(19): siRNA sense strand
cguaaguccuccaucaaag

SEQ ID NO: 312882 - RNA, 19 nt, Homo sapiens
  misc_RNA (1)...(19): siRNA sense strand
acauugcccuggacgaaga

SEQ ID NO: 312883 - RNA, 19 nt, Homo sapiens
  misc_RNA (1)...(19): siRNA sense strand
uauauuguguucaccuauc

SEQ ID NO: 312884 - RNA, 19 nt, Homo sapiens
  misc_RNA (1)...(19): siRNA sense strand
ggucauccccuuugucauu

SEQ ID NO: 312885 - RNA, 19 nt, Homo sapiens
  misc_RNA (1)...(19): siRNA sense strand
ugugacaaguucggcauug

SEQ ID NO: 312886 - RNA, 19 nt, Homo sapiens
  misc_RNA (1)...(19): siRNA sense strand
ucguaaguccuccaucaaa

SEQ ID NO: 312887 - RNA, 19 nt, Homo sapiens
  misc_RNA (1)...(19): siRNA sense strand
cgaggacagcuauauugug

SEQ ID NO: 312888 - RNA, 19 nt, Homo sapiens
  misc_RNA (1)...(19): siRNA sense strand
ccgccacguuuccaucguu

SEQ ID NO: 312889 - RNA, 19 nt, Homo sapiens
  misc_RNA (1)...(19): siRNA sense strand
gcaaugaugugugcaagua

SEQ ID NO: 312890 - RNA, 19 nt, Homo sapiens
  misc_RNA (1)...(19): siRNA sense strand
ggacagcuauauuguguuc

SEQ ID NO: 312891 - RNA, 19 nt, Homo sapiens
  misc_RNA (1)...(19): siRNA sense strand
gaggacagcuauauugugu

SEQ ID NO: 312892 - RNA, 19 nt, Homo sapiens
  misc_RNA (1)...(19): siRNA sense strand
gggagaagaucauccugaa

SEQ ID NO: 312893 - RNA, 19 nt, Homo sapiens
  misc_RNA (1)...(19): siRNA sense strand
caucaaagcugcaguucca

SEQ ID NO: 312894 - RNA, 19 nt, Homo sapiens
  misc_RNA (1)...(19): siRNA sense strand
ccaacuacccagacgauua

SEQ ID NO: 312895 - RNA, 19 nt, Homo sapiens
  misc_RNA (1)...(19): siRNA sense strand
gagcagcggugccucaaca

SEQ ID NO: 312896 - RNA, 19 nt, Homo sapiens
  misc_RNA (1)...(19): siRNA sense strand
gcucguaaguccuccauca

SEQ ID NO: 312897 - RNA, 19 nt, Homo sapiens
  misc_RNA (1)...(19): siRNA sense strand
ggagagacccugcaagaca

SEQ ID NO: 312898 - RNA, 19 nt, Homo sapiens
  misc_RNA (1)...(19): siRNA sense strand
gcaucucccugcaguuuga

SEQ ID NO: 312899 - RNA, 19 nt, Homo sapiens
  misc_RNA (1)...(19): siRNA sense strand
aaaggacuauggccacauu

SEQ ID NO: 312900 - RNA, 19 nt, Homo sapiens
  misc_RNA (1)...(19): siRNA sense strand
gggcuuugccgucaacuuu

SEQ ID NO: 312901 - RNA, 19 nt, Homo sapiens
  misc_RNA (1)...(19): siRNA sense strand
gcuaugagaagccugauga

SEQ ID NO: 312902 - RNA, 19 nt, Homo sapiens
  misc_RNA (1)...(19): siRNA sense strand
gcacugacgaggacagcua

SEQ ID NO: 312903 - RNA, 19 nt, Homo sapiens
  misc_RNA (1)...(19): siRNA sense strand
gcuauauuguguucaccua

SEQ ID NO: 312904 - RNA, 19 nt, Homo sapiens
  misc_RNA (1)...(19): siRNA sense strand
ugugggagauggagaggua

SEQ ID NO: 312905 - RNA, 19 nt, Homo sapiens
  misc_RNA (1)...(19): siRNA sense strand
ggacauugcccuggacgaa

SEQ ID NO: 312906 - RNA, 19 nt, Homo sapiens
  misc_RNA (1)...(19): siRNA sense strand
ggcaagaacugugacaagu

SEQ ID NO: 312907 - RNA, 19 nt, Homo sapiens
  misc_RNA (1)...(19): siRNA sense strand
gcauuacgcucggaacaca

SEQ ID NO: 312908 - RNA, 19 nt, Homo sapiens
  misc_RNA (1)...(19): siRNA sense strand
gacgaggacagcuauauug

SEQ ID NO: 312909 - RNA, 19 nt, Homo sapiens
  misc_RNA (1)...(19): siRNA sense strand
gagaagaucauccugaacu

SEQ ID NO: 312910 - RNA, 19 nt, Homo sapiens
  misc_RNA (1)...(19): siRNA sense strand
caguuugacuucuuugaga

SEQ ID NO: 312911 - RNA, 19 nt, Homo sapiens
  misc_RNA (1)...(19): siRNA sense strand
caagcugcauggcaaguuc

SEQ ID NO: 312912 - RNA, 19 nt, Homo sapiens
  misc_RNA (1)...(19): siRNA sense strand
ggacuauggccacauucaa

SEQ ID NO: 312913 - RNA, 19 nt, Homo sapiens
  misc_RNA (1)...(19): siRNA sense strand
ugacggguccauuaacaaa

SEQ ID NO: 312914 - RNA, 19 nt, Homo sapiens
  misc_RNA (1)...(19): siRNA sense strand
agacagagggcaaugaugu

SEQ ID NO: 312915 - RNA, 19 nt, Homo sapiens
  misc_RNA (1)...(19): siRNA sense strand
uggcuacucugcucacaug

SEQ ID NO: 312916 - RNA, 19 nt, Homo sapiens
  misc_RNA (1)...(19): siRNA sense strand
ucacauuccaguccuuuga

SEQ ID NO: 312917 - RNA, 19 nt, Homo sapiens
  misc_RNA (1)...(19): siRNA sense strand
cauggcaaguucugugguu

SEQ ID NO: 312918 - RNA, 19 nt, Homo sapiens
  misc_RNA (1)...(19): siRNA sense strand
ugacgaggacagcuauauu

SEQ ID NO: 312919 - RNA, 19 nt, Homo sapiens
  misc_RNA (1)...(19): siRNA sense strand
ggucaucaccucccaguac

SEQ ID NO: 312920 - RNA, 19 nt, Homo sapiens
  misc_RNA (1)...(19): siRNA sense strand
ccacgugggccucacauuc

SEQ ID NO: 312921 - RNA, 19 nt, Homo sapiens
  misc_RNA (1)...(19): siRNA sense strand
guggagagacccugcaaga

SEQ ID NO: 312922 - RNA, 19 nt, Homo sapiens
  misc_RNA (1)...(19): siRNA sense strand
cccgcaagcuuuacaagug

SEQ ID NO: 312923 - RNA, 19 nt, Homo sapiens
  misc_RNA (1)...(19): siRNA sense strand
agaagaucauccugaacuu

SEQ ID NO: 312924 - RNA, 19 nt, Homo sapiens
  misc_RNA (1)...(19): siRNA sense strand
caacuacccagacgauuac

SEQ ID NO: 312925 - RNA, 19 nt, Homo sapiens
  misc_RNA (1)...(19): siRNA sense strand
gagauggcuucuggaggaa

SEQ ID NO: 312926 - RNA, 19 nt, Homo sapiens
  misc_RNA (1)...(19): siRNA sense strand
cguaaguccuccaucaaag

SEQ ID NO: 312927 - RNA, 19 nt, Homo sapiens
  misc_RNA (1)...(19): siRNA sense strand
cagcugugccuacgacuau

SEQ ID NO: 312928 - RNA, 19 nt, Homo sapiens
  misc_RNA (1)...(19): siRNA sense strand
uauauuguguucaccuauc

SEQ ID NO: 312929 - RNA, 19 nt, Homo sapiens
  misc_RNA (1)...(19): siRNA sense strand
acauugcccuggacgaaga

SEQ ID NO: 312930 - RNA, 19 nt, Homo sapiens
  misc_RNA (1)...(19): siRNA sense strand
ucaacacccugggcagcua

SEQ ID NO: 312931 - RNA, 19 nt, Homo sapiens
  misc_RNA (1)...(19): siRNA sense strand
caaacucccugagccuauc

SEQ ID NO: 312932 - RNA, 19 nt, Homo sapiens
  misc_RNA (1)...(19): siRNA sense strand
caacaugcgcguggaguuc

SEQ ID NO: 312933 - RNA, 19 nt, Homo sapiens
  misc_RNA (1)...(19): siRNA sense strand
cuucaaggcccacuucuuc

SEQ ID NO: 312934 - RNA, 19 nt, Homo sapiens
  misc_RNA (1)...(19): siRNA sense strand
agacagcacaggcaacuuc

SEQ ID NO: 312935 - RNA, 19 nt, Homo sapiens
  misc_RNA (1)...(19): siRNA sense strand
ccgcaucucccugcaguuu

SEQ ID NO: 312936 - RNA, 19 nt, Homo sapiens
  misc_RNA (1)...(19): siRNA sense strand
gacuauggccacauucaau

SEQ ID NO: 312937 - RNA, 19 nt, Homo sapiens
  misc_RNA (1)...(19): siRNA sense strand
gggcuucuuugcagucuac

SEQ ID NO: 312938 - RNA, 19 nt, Homo sapiens
  misc_RNA (1)...(19): siRNA sense strand
cagcagcaauuggguugga

SEQ ID NO: 312939 - RNA, 19 nt, Homo sapiens
  misc_RNA (1)...(19): siRNA sense strand
gcgcuacuguggcuaugag

SEQ ID NO: 312940 - RNA, 19 nt, Homo sapiens
  misc_RNA (1)...(19): siRNA sense strand
ggcucaaguucgucucuga

SEQ ID NO: 312941 - RNA, 19 nt, Homo sapiens
  misc_RNA (1)...(19): siRNA sense strand
ggucauccccuuugucauu

SEQ ID NO: 312942 - RNA, 19 nt, Homo sapiens
  misc_RNA (1)...(19): siRNA sense strand
ugacuucgacagcaucaug

SEQ ID NO: 312943 - RNA, 19 nt, Homo sapiens
  misc_RNA (1)...(19): siRNA sense strand
ccaaacucccugagccuau

SEQ ID NO: 312944 - RNA, 19 nt, Homo sapiens
  misc_RNA (1)...(19): siRNA sense strand
ucugacggguccauuaaca

SEQ ID NO: 312945 - RNA, 19 nt, Homo sapiens
  misc_RNA (1)...(19): siRNA sense strand
gcagcaauuggguuggaaa

SEQ ID NO: 312946 - RNA, 19 nt, Homo sapiens
  misc_RNA (1)...(19): siRNA sense strand
ccuaucgucuccacugaca

SEQ ID NO: 312947 - RNA, 19 nt, Homo sapiens
  misc_RNA (1)...(19): siRNA sense strand
ucucugacggguccauuaa

SEQ ID NO: 312948 - RNA, 19 nt, Homo sapiens
  misc_RNA (1)...(19): siRNA sense strand
gcaguuugacuucuuugag

SEQ ID NO: 312949 - RNA, 19 nt, Homo sapiens
  misc_RNA (1)...(19): siRNA sense strand
ccugcaguuugacuucuuu

SEQ ID NO: 312950 - RNA, 19 nt, Homo sapiens
  misc_RNA (1)...(19): siRNA sense strand
gcggauuccucaccaagcu

SEQ ID NO: 312951 - RNA, 19 nt, Homo sapiens
  misc_RNA (1)...(19): siRNA sense strand
gcaucuuccuggauaccau

SEQ ID NO: 312952 - RNA, 19 nt, Homo sapiens
  misc_RNA (1)...(19): siRNA sense strand
gucaucaccucccaguaca

SEQ ID NO: 312953 - RNA, 19 nt, Homo sapiens
  misc_RNA (1)...(19): siRNA sense strand
ugugacaaguucggcauug

SEQ ID NO: 312954 - RNA, 19 nt, Homo sapiens
  misc_RNA (1)...(19): siRNA sense strand
ucguaaguccuccaucaaa

SEQ ID NO: 312955 - RNA, 19 nt, Homo sapiens
  misc_RNA (1)...(19): siRNA sense strand
caaggcccacuucuucuca

SEQ ID NO: 312956 - RNA, 19 nt, Homo sapiens
  misc_RNA (1)...(19): siRNA sense strand
cgaggacagcuauauugug

SEQ ID NO: 312957 - RNA, 19 nt, Homo sapiens
  misc_RNA (1)...(19): siRNA sense strand
ucaccucccaguacaacaa

SEQ ID NO: 312958 - RNA, 19 nt, Homo sapiens
  misc_RNA (1)...(19): siRNA sense strand
gagaagcccgaggucauca

SEQ ID NO: 312959 - RNA, 19 nt, Homo sapiens
  misc_RNA (1)...(19): siRNA sense strand
uccaguccuuugagauuga

SEQ ID NO: 312960 - RNA, 19 nt, Homo sapiens
  misc_RNA (1)...(19): siRNA sense strand
ccuaugacuucgacagcau

SEQ ID NO: 312961 - RNA, 19 nt, Homo sapiens
  misc_RNA (1)...(19): siRNA sense strand
ccgccacguuuccaucguu

SEQ ID NO: 312962 - RNA, 19 nt, Homo sapiens
  misc_RNA (1)...(19): siRNA sense strand
gggugaaaccucccauugg

SEQ ID NO: 312963 - RNA, 19 nt, Homo sapiens
  misc_RNA (1)...(19): siRNA sense strand
gaguucaaguccgacaaca

SEQ ID NO: 312964 - RNA, 19 nt, Homo sapiens
  misc_RNA (1)...(19): siRNA sense strand
gaggugcgcaguggacuca

SEQ ID NO: 312965 - RNA, 19 nt, Homo sapiens
  misc_RNA (1)...(19): siRNA sense strand
gacagagggcaaugaugug

SEQ ID NO: 312966 - RNA, 19 nt, Homo sapiens
  misc_RNA (1)...(19): siRNA sense strand
gagacagagggcaaugaug

SEQ ID NO: 312967 - RNA, 19 nt, Homo sapiens
  misc_RNA (1)...(19): siRNA sense strand
caagacagcacaggcaacu

SEQ ID NO: 312968 - RNA, 19 nt, Homo sapiens
  misc_RNA (1)...(19): siRNA sense strand
ugagacagagggcaaugau

SEQ ID NO: 312969 - RNA, 19 nt, Homo sapiens
  misc_RNA (1)...(19): siRNA sense strand
gcaaugaugugugcaagua

SEQ ID NO: 312970 - RNA, 19 nt, Homo sapiens
  misc_RNA (1)...(19): siRNA sense strand
ggacagcuauauuguguuc

SEQ ID NO: 312971 - RNA, 19 nt, Homo sapiens
  misc_RNA (1)...(19): siRNA sense strand
gaggacagcuauauugugu

SEQ ID NO: 312972 - RNA, 19 nt, Homo sapiens
  misc_RNA (1)...(19): siRNA sense strand
gggagaagaucauccugaa

SEQ ID NO: 312973 - RNA, 19 nt, Homo sapiens
  misc_RNA (1)...(19): siRNA sense strand
caucaaagcugcaguucca

SEQ ID NO: 312974 - RNA, 19 nt, Homo sapiens
  misc_RNA (1)...(19): siRNA sense strand
ccaacuacccagacgauua

SEQ ID NO: 312975 - RNA, 19 nt, Homo sapiens
  misc_RNA (1)...(19): siRNA sense strand
gagcagcggugccucaaca

SEQ ID NO: 312976 - RNA, 19 nt, Homo sapiens
  misc_RNA (1)...(19): siRNA sense strand
gcucguaaguccuccauca

SEQ ID NO: 312977 - RNA, 19 nt, Homo sapiens
  misc_RNA (1)...(19): siRNA sense strand
ggagagacccugcaagaca

SEQ ID NO: 312978 - RNA, 19 nt, Homo sapiens
  misc_RNA (1)...(19): siRNA sense strand
gcaucucccugcaguuuga

SEQ ID NO: 312979 - RNA, 19 nt, Homo sapiens
  misc_RNA (1)...(19): siRNA sense strand
aaaggacuauggccacauu

SEQ ID NO: 312980 - RNA, 19 nt, Homo sapiens
  misc_RNA (1)...(19): siRNA sense strand
gggcuuugccgucaacuuu

SEQ ID NO: 312981 - RNA, 19 nt, Homo sapiens
  misc_RNA (1)...(19): siRNA sense strand
gcuaugagaagccugauga

SEQ ID NO: 312982 - RNA, 19 nt, Homo sapiens
  misc_RNA (1)...(19): siRNA sense strand
gcacugacgaggacagcua

SEQ ID NO: 312983 - RNA, 19 nt, Homo sapiens
  misc_RNA (1)...(19): siRNA sense strand
gcuauauuguguucaccua

SEQ ID NO: 312984 - RNA, 19 nt, Homo sapiens
  misc_RNA (1)...(19): siRNA sense strand
ugugggagauggagaggua

SEQ ID NO: 312985 - RNA, 19 nt, Homo sapiens
  misc_RNA (1)...(19): siRNA sense strand
ggacauugcccuggacgaa

SEQ ID NO: 312986 - RNA, 19 nt, Homo sapiens
  misc_RNA (1)...(19): siRNA sense strand
ggcaagaacugugacaagu

SEQ ID NO: 312987 - RNA, 19 nt, Homo sapiens
  misc_RNA (1)...(19): siRNA sense strand
gcauuacgcucggaacaca

SEQ ID NO: 312988 - RNA, 19 nt, Homo sapiens
  misc_RNA (1)...(19): siRNA sense strand
gacgaggacagcuauauug

SEQ ID NO: 312989 - RNA, 19 nt, Homo sapiens
  misc_RNA (1)...(19): siRNA sense strand
gagaagaucauccugaacu

SEQ ID NO: 312990 - RNA, 19 nt, Homo sapiens
  misc_RNA (1)...(19): siRNA sense strand
caguuugacuucuuugaga

SEQ ID NO: 312991 - RNA, 19 nt, Homo sapiens
  misc_RNA (1)...(19): siRNA sense strand
caagcugcauggcaaguuc

SEQ ID NO: 312992 - RNA, 19 nt, Homo sapiens
  misc_RNA (1)...(19): siRNA sense strand
ggacuauggccacauucaa

SEQ ID NO: 312993 - RNA, 19 nt, Homo sapiens
  misc_RNA (1)...(19): siRNA sense strand
ugacggguccauuaacaaa

SEQ ID NO: 312994 - RNA, 19 nt, Homo sapiens
  misc_RNA (1)...(19): siRNA sense strand
agacagagggcaaugaugu

SEQ ID NO: 312995 - RNA, 19 nt, Homo sapiens
  misc_RNA (1)...(19): siRNA sense strand
uggcuacucugcucacaug

SEQ ID NO: 312996 - RNA, 19 nt, Homo sapiens
  misc_RNA (1)...(19): siRNA sense strand
ucacauuccaguccuuuga

SEQ ID NO: 312997 - RNA, 19 nt, Homo sapiens
  misc_RNA (1)...(19): siRNA sense strand
cauggcaaguucugugguu

SEQ ID NO: 312998 - RNA, 19 nt, Homo sapiens
  misc_RNA (1)...(19): siRNA sense strand
ugacgaggacagcuauauu

SEQ ID NO: 312999 - RNA, 19 nt, Homo sapiens
  misc_RNA (1)...(19): siRNA sense strand
ggucaucaccucccaguac

SEQ ID NO: 313000 - RNA, 19 nt, Homo sapiens
  misc_RNA (1)...(19): siRNA sense strand
ccacgugggccucacauuc

SEQ ID NO: 313001 - RNA, 19 nt, Homo sapiens
  misc_RNA (1)...(19): siRNA sense strand
guggagagacccugcaaga

SEQ ID NO: 313002 - RNA, 19 nt, Homo sapiens
  misc_RNA (1)...(19): siRNA sense strand
cccgcaagcuuuacaagug

SEQ ID NO: 313003 - RNA, 19 nt, Homo sapiens
  misc_RNA (1)...(19): siRNA sense strand
agaagaucauccugaacuu

SEQ ID NO: 313004 - RNA, 19 nt, Homo sapiens
  misc_RNA (1)...(19): siRNA sense strand
caacuacccagacgauuac

SEQ ID NO: 313005 - RNA, 19 nt, Homo sapiens
  misc_RNA (1)...(19): siRNA sense strand
gagauggcuucuggaggaa

SEQ ID NO: 313006 - RNA, 19 nt, Homo sapiens
  misc_RNA (1)...(19): siRNA sense strand
cguaaguccuccaucaaag

SEQ ID NO: 313007 - RNA, 19 nt, Homo sapiens
  misc_RNA (1)...(19): siRNA sense strand
cagcugugccuacgacuau

SEQ ID NO: 313008 - RNA, 19 nt, Homo sapiens
  misc_RNA (1)...(19): siRNA sense strand
uauauuguguucaccuauc

SEQ ID NO: 313009 - RNA, 19 nt, Homo sapiens
  misc_RNA (1)...(19): siRNA sense strand
acauugcccuggacgaaga

SEQ ID NO: 313010 - RNA, 19 nt, Homo sapiens
  misc_RNA (1)...(19): siRNA sense strand
ucaacacccugggcagcua

SEQ ID NO: 313011 - RNA, 19 nt, Homo sapiens
  misc_RNA (1)...(19): siRNA sense strand
caaacucccugagccuauc

SEQ ID NO: 313012 - RNA, 19 nt, Homo sapiens
  misc_RNA (1)...(19): siRNA sense strand
caacaugcgcguggaguuc

SEQ ID NO: 313013 - RNA, 19 nt, Homo sapiens
  misc_RNA (1)...(19): siRNA sense strand
cuucaaggcccacuucuuc

SEQ ID NO: 313014 - RNA, 19 nt, Homo sapiens
  misc_RNA (1)...(19): siRNA sense strand
agacagcacaggcaacuuc

SEQ ID NO: 313015 - RNA, 19 nt, Homo sapiens
  misc_RNA (1)...(19): siRNA sense strand
ccgcaucucccugcaguuu

SEQ ID NO: 313016 - RNA, 19 nt, Homo sapiens
  misc_RNA (1)...(19): siRNA sense strand
gacuauggccacauucaau

SEQ ID NO: 313017 - RNA, 19 nt, Homo sapiens
  misc_RNA (1)...(19): siRNA sense strand
gggcuucuuugcagucuac

SEQ ID NO: 313018 - RNA, 19 nt, Homo sapiens
  misc_RNA (1)...(19): siRNA sense strand
cagcagcaauuggguugga

SEQ ID NO: 313019 - RNA, 19 nt, Homo sapiens
  misc_RNA (1)...(19): siRNA sense strand
gcgcuacuguggcuaugag

SEQ ID NO: 313020 - RNA, 19 nt, Homo sapiens
  misc_RNA (1)...(19): siRNA sense strand
ggcucaaguucgucucuga

SEQ ID NO: 313021 - RNA, 19 nt, Homo sapiens
  misc_RNA (1)...(19): siRNA sense strand
ggucauccccuuugucauu

SEQ ID NO: 313022 - RNA, 19 nt, Homo sapiens
  misc_RNA (1)...(19): siRNA sense strand
ugacuucgacagcaucaug

SEQ ID NO: 313023 - RNA, 19 nt, Homo sapiens
  misc_RNA (1)...(19): siRNA sense strand
ccaaacucccugagccuau

SEQ ID NO: 313024 - RNA, 19 nt, Homo sapiens
  misc_RNA (1)...(19): siRNA sense strand
ucugacggguccauuaaca

SEQ ID NO: 313025 - RNA, 19 nt, Homo sapiens
  misc_RNA (1)...(19): siRNA sense strand
gcagcaauuggguuggaaa

SEQ ID NO: 313026 - RNA, 19 nt, Homo sapiens
  misc_RNA (1)...(19): siRNA sense strand
ccuaucgucuccacugaca

SEQ ID NO: 313027 - RNA, 19 nt, Homo sapiens
  misc_RNA (1)...(19): siRNA sense strand
ucucugacggguccauuaa

SEQ ID NO: 313028 - RNA, 19 nt, Homo sapiens
  misc_RNA (1)...(19): siRNA sense strand
gcaguuugacuucuuugag

SEQ ID NO: 313029 - RNA, 19 nt, Homo sapiens
  misc_RNA (1)...(19): siRNA sense strand
ccugcaguuugacuucuuu

SEQ ID NO: 313030 - RNA, 19 nt, Homo sapiens
  misc_RNA (1)...(19): siRNA sense strand
gcggauuccucaccaagcu

SEQ ID NO: 313031 - RNA, 19 nt, Homo sapiens
  misc_RNA (1)...(19): siRNA sense strand
gcaucuuccuggauaccau

SEQ ID NO: 313032 - RNA, 19 nt, Homo sapiens
  misc_RNA (1)...(19): siRNA sense strand
gucaucaccucccaguaca

SEQ ID NO: 313033 - RNA, 19 nt, Homo sapiens
  misc_RNA (1)...(19): siRNA sense strand
ugugacaaguucggcauug

SEQ ID NO: 313034 - RNA, 19 nt, Homo sapiens
  misc_RNA (1)...(19): siRNA sense strand
ucguaaguccuccaucaaa

SEQ ID NO: 313035 - RNA, 19 nt, Homo sapiens
  misc_RNA (1)...(19): siRNA sense strand
caaggcccacuucuucuca

SEQ ID NO: 313036 - RNA, 19 nt, Homo sapiens
  misc_RNA (1)...(19): siRNA sense strand
cgaggacagcuauauugug

SEQ ID NO: 313037 - RNA, 19 nt, Homo sapiens
  misc_RNA (1)...(19): siRNA sense strand
ucaccucccaguacaacaa

SEQ ID NO: 313038 - RNA, 19 nt, Homo sapiens
  misc_RNA (1)...(19): siRNA sense strand
gagaagcccgaggucauca

SEQ ID NO: 313039 - RNA, 19 nt, Homo sapiens
  misc_RNA (1)...(19): siRNA sense strand
uccaguccuuugagauuga

SEQ ID NO: 313040 - RNA, 19 nt, Homo sapiens
  misc_RNA (1)...(19): siRNA sense strand
ccuaugacuucgacagcau

SEQ ID NO: 313041 - RNA, 19 nt, Homo sapiens
  misc_RNA (1)...(19): siRNA sense strand
ccgccacguuuccaucguu

SEQ ID NO: 313042 - RNA, 19 nt, Homo sapiens
  misc_RNA (1)...(19): siRNA sense strand
gggugaaaccucccauugg

SEQ ID NO: 313043 - RNA, 19 nt, Homo sapiens
  misc_RNA (1)...(19): siRNA sense strand
gaguucaaguccgacaaca

SEQ ID NO: 313044 - RNA, 19 nt, Homo sapiens
  misc_RNA (1)...(19): siRNA sense strand
gaggugcgcaguggacuca

SEQ ID NO: 313045 - RNA, 19 nt, Homo sapiens
  misc_RNA (1)...(19): siRNA sense strand
gacagagggcaaugaugug

SEQ ID NO: 313046 - RNA, 19 nt, Homo sapiens
  misc_RNA (1)...(19): siRNA sense strand
gagacagagggcaaugaug

SEQ ID NO: 313047 - RNA, 19 nt, Homo sapiens
  misc_RNA (1)...(19): siRNA sense strand
caagacagcacaggcaacu

SEQ ID NO: 313048 - RNA, 19 nt, Homo sapiens
  misc_RNA (1)...(19): siRNA sense strand
ugagacagagggcaaugau

SEQ ID NO: 313049 - RNA, 19 nt, Homo sapiens
  misc_RNA (1)...(19): siRNA sense strand
gcaaugaugugugcaagua

SEQ ID NO: 313050 - RNA, 19 nt, Homo sapiens
  misc_RNA (1)...(19): siRNA sense strand
ggacagcuauauuguguuc

SEQ ID NO: 313051 - RNA, 19 nt, Homo sapiens
  misc_RNA (1)...(19): siRNA sense strand
gaggacagcuauauugugu

SEQ ID NO: 313052 - RNA, 19 nt, Homo sapiens
  misc_RNA (1)...(19): siRNA sense strand
gggagaagaucauccugaa

SEQ ID NO: 313053 - RNA, 19 nt, Homo sapiens
  misc_RNA (1)...(19): siRNA sense strand
caucaaagcugcaguucca

SEQ ID NO: 313054 - RNA, 19 nt, Homo sapiens
  misc_RNA (1)...(19): siRNA sense strand
ccaacuacccagacgauua

SEQ ID NO: 313055 - RNA, 19 nt, Homo sapiens
  misc_RNA (1)...(19): siRNA sense strand
gagcagcggugccucaaca

SEQ ID NO: 313056 - RNA, 19 nt, Homo sapiens
  misc_RNA (1)...(19): siRNA sense strand
gcucguaaguccuccauca

SEQ ID NO: 313057 - RNA, 19 nt, Homo sapiens
  misc_RNA (1)...(19): siRNA sense strand
ggagagacccugcaagaca

SEQ ID NO: 313058 - RNA, 19 nt, Homo sapiens
  misc_RNA (1)...(19): siRNA sense strand
gcaucucccugcaguuuga

SEQ ID NO: 313059 - RNA, 19 nt, Homo sapiens
  misc_RNA (1)...(19): siRNA sense strand
aaaggacuauggccacauu

SEQ ID NO: 313060 - RNA, 19 nt, Homo sapiens
  misc_RNA (1)...(19): siRNA sense strand
gggcuuugccgucaacuuu

SEQ ID NO: 313061 - RNA, 19 nt, Homo sapiens
  misc_RNA (1)...(19): siRNA sense strand
gcuaugagaagccugauga

SEQ ID NO: 313062 - RNA, 19 nt, Homo sapiens
  misc_RNA (1)...(19): siRNA sense strand
gcacugacgaggacagcua

SEQ ID NO: 313063 - RNA, 19 nt, Homo sapiens
  misc_RNA (1)...(19): siRNA sense strand
gcuauauuguguucaccua

SEQ ID NO: 313064 - RNA, 19 nt, Homo sapiens
  misc_RNA (1)...(19): siRNA sense strand
ugugggagauggagaggua

SEQ ID NO: 313065 - RNA, 19 nt, Homo sapiens
  misc_RNA (1)...(19): siRNA sense strand
ggacauugcccuggacgaa

SEQ ID NO: 313066 - RNA, 19 nt, Homo sapiens
  misc_RNA (1)...(19): siRNA sense strand
ggcaagaacugugacaagu

SEQ ID NO: 313067 - RNA, 19 nt, Homo sapiens
  misc_RNA (1)...(19): siRNA sense strand
gcauuacgcucggaacaca

SEQ ID NO: 313068 - RNA, 19 nt, Homo sapiens
  misc_RNA (1)...(19): siRNA sense strand
gacgaggacagcuauauug

SEQ ID NO: 313069 - RNA, 19 nt, Homo sapiens
  misc_RNA (1)...(19): siRNA sense strand
gagaagaucauccugaacu

SEQ ID NO: 313070 - RNA, 19 nt, Homo sapiens
  misc_RNA (1)...(19): siRNA sense strand
caguuugacuucuuugaga

SEQ ID NO: 313071 - RNA, 19 nt, Homo sapiens
  misc_RNA (1)...(19): siRNA sense strand
caagcugcauggcaaguuc

SEQ ID NO: 313072 - RNA, 19 nt, Homo sapiens
  misc_RNA (1)...(19): siRNA sense strand
ggacuauggccacauucaa

SEQ ID NO: 313073 - RNA, 19 nt, Homo sapiens
  misc_RNA (1)...(19): siRNA sense strand
ugacggguccauuaacaaa

SEQ ID NO: 313074 - RNA, 19 nt, Homo sapiens
  misc_RNA (1)...(19): siRNA sense strand
agacagagggcaaugaugu

SEQ ID NO: 313075 - RNA, 19 nt, Homo sapiens
  misc_RNA (1)...(19): siRNA sense strand
uggcuacucugcucacaug

SEQ ID NO: 313076 - RNA, 19 nt, Homo sapiens
  misc_RNA (1)...(19): siRNA sense strand
ucacauuccaguccuuuga

SEQ ID NO: 313077 - RNA, 19 nt, Homo sapiens
  misc_RNA (1)...(19): siRNA sense strand
cauggcaaguucugugguu

SEQ ID NO: 313078 - RNA, 19 nt, Homo sapiens
  misc_RNA (1)...(19): siRNA sense strand
ugacgaggacagcuauauu

SEQ ID NO: 313079 - RNA, 19 nt, Homo sapiens
  misc_RNA (1)...(19): siRNA sense strand
ggucaucaccucccaguac

SEQ ID NO: 313080 - RNA, 19 nt, Homo sapiens
  misc_RNA (1)...(19): siRNA sense strand
ccacgugggccucacauuc

SEQ ID NO: 313081 - RNA, 19 nt, Homo sapiens
  misc_RNA (1)...(19): siRNA sense strand
guggagagacccugcaaga

SEQ ID NO: 313082 - RNA, 19 nt, Homo sapiens
  misc_RNA (1)...(19): siRNA sense strand
cccgcaagcuuuacaagug

SEQ ID NO: 313083 - RNA, 19 nt, Homo sapiens
  misc_RNA (1)...(19): siRNA sense strand
agaagaucauccugaacuu

SEQ ID NO: 313084 - RNA, 19 nt, Homo sapiens
  misc_RNA (1)...(19): siRNA sense strand
caacuacccagacgauuac

SEQ ID NO: 313085 - RNA, 19 nt, Homo sapiens
  misc_RNA (1)...(19): siRNA sense strand
gagauggcuucuggaggaa

SEQ ID NO: 313086 - RNA, 19 nt, Homo sapiens
  misc_RNA (1)...(19): siRNA sense strand
cguaaguccuccaucaaag

SEQ ID NO: 313087 - RNA, 19 nt, Homo sapiens
  misc_RNA (1)...(19): siRNA sense strand
cagcugugccuacgacuau

SEQ ID NO: 313088 - RNA, 19 nt, Homo sapiens
  misc_RNA (1)...(19): siRNA sense strand
uauauuguguucaccuauc

SEQ ID NO: 313089 - RNA, 19 nt, Homo sapiens
  misc_RNA (1)...(19): siRNA sense strand
acauugcccuggacgaaga

SEQ ID NO: 313090 - RNA, 19 nt, Homo sapiens
  misc_RNA (1)...(19): siRNA sense strand
ucaacacccugggcagcua

SEQ ID NO: 313091 - RNA, 19 nt, Homo sapiens
  misc_RNA (1)...(19): siRNA sense strand
caaacucccugagccuauc

SEQ ID NO: 313092 - RNA, 19 nt, Homo sapiens
  misc_RNA (1)...(19): siRNA sense strand
caacaugcgcguggaguuc

SEQ ID NO: 313093 - RNA, 19 nt, Homo sapiens
  misc_RNA (1)...(19): siRNA sense strand
cuucaaggcccacuucuuc

SEQ ID NO: 313094 - RNA, 19 nt, Homo sapiens
  misc_RNA (1)...(19): siRNA sense strand
agacagcacaggcaacuuc

SEQ ID NO: 313095 - RNA, 19 nt, Homo sapiens
  misc_RNA (1)...(19): siRNA sense strand
ccgcaucucccugcaguuu

SEQ ID NO: 313096 - RNA, 19 nt, Homo sapiens
  misc_RNA (1)...(19): siRNA sense strand
gacuauggccacauucaau

SEQ ID NO: 313097 - RNA, 19 nt, Homo sapiens
  misc_RNA (1)...(19): siRNA sense strand
gggcuucuuugcagucuac

SEQ ID NO: 313098 - RNA, 19 nt, Homo sapiens
  misc_RNA (1)...(19): siRNA sense strand
cagcagcaauuggguugga

SEQ ID NO: 313099 - RNA, 19 nt, Homo sapiens
  misc_RNA (1)...(19): siRNA sense strand
gcgcuacuguggcuaugag

SEQ ID NO: 313100 - RNA, 19 nt, Homo sapiens
  misc_RNA (1)...(19): siRNA sense strand
ggcucaaguucgucucuga

SEQ ID NO: 313101 - RNA, 19 nt, Homo sapiens
  misc_RNA (1)...(19): siRNA sense strand
ggucauccccuuugucauu

SEQ ID NO: 313102 - RNA, 19 nt, Homo sapiens
  misc_RNA (1)...(19): siRNA sense strand
ugacuucgacagcaucaug

SEQ ID NO: 313103 - RNA, 19 nt, Homo sapiens
  misc_RNA (1)...(19): siRNA sense strand
ccaaacucccugagccuau

SEQ ID NO: 313104 - RNA, 19 nt, Homo sapiens
  misc_RNA (1)...(19): siRNA sense strand
ucugacggguccauuaaca

SEQ ID NO: 313105 - RNA, 19 nt, Homo sapiens
  misc_RNA (1)...(19): siRNA sense strand
gcagcaauuggguuggaaa

SEQ ID NO: 313106 - RNA, 19 nt, Homo sapiens
  misc_RNA (1)...(19): siRNA sense strand
ccuaucgucuccacugaca

SEQ ID NO: 313107 - RNA, 19 nt, Homo sapiens
  misc_RNA (1)...(19): siRNA sense strand
ucucugacggguccauuaa

SEQ ID NO: 313108 - RNA, 19 nt, Homo sapiens
  misc_RNA (1)...(19): siRNA sense strand
gcaguuugacuucuuugag

SEQ ID NO: 313109 - RNA, 19 nt, Homo sapiens
  misc_RNA (1)...(19): siRNA sense strand
ccugcaguuugacuucuuu

SEQ ID NO: 313110 - RNA, 19 nt, Homo sapiens
  misc_RNA (1)...(19): siRNA sense strand
gcggauuccucaccaagcu

SEQ ID NO: 313111 - RNA, 19 nt, Homo sapiens
  misc_RNA (1)...(19): siRNA sense strand
gcaucuuccuggauaccau

SEQ ID NO: 313112 - RNA, 19 nt, Homo sapiens
  misc_RNA (1)...(19): siRNA sense strand
gucaucaccucccaguaca

SEQ ID NO: 313113 - RNA, 19 nt, Homo sapiens
  misc_RNA (1)...(19): siRNA sense strand
ugugacaaguucggcauug

SEQ ID NO: 313114 - RNA, 19 nt, Homo sapiens
  misc_RNA (1)...(19): siRNA sense strand
ucguaaguccuccaucaaa

SEQ ID NO: 313115 - RNA, 19 nt, Homo sapiens
  misc_RNA (1)...(19): siRNA sense strand
caaggcccacuucuucuca

SEQ ID NO: 313116 - RNA, 19 nt, Homo sapiens
  misc_RNA (1)...(19): siRNA sense strand
cgaggacagcuauauugug

SEQ ID NO: 313117 - RNA, 19 nt, Homo sapiens
  misc_RNA (1)...(19): siRNA sense strand
ucaccucccaguacaacaa

SEQ ID NO: 313118 - RNA, 19 nt, Homo sapiens
  misc_RNA (1)...(19): siRNA sense strand
gagaagcccgaggucauca

SEQ ID NO: 313119 - RNA, 19 nt, Homo sapiens
  misc_RNA (1)...(19): siRNA sense strand
uccaguccuuugagauuga

SEQ ID NO: 313120 - RNA, 19 nt, Homo sapiens
  misc_RNA (1)...(19): siRNA sense strand
ccuaugacuucgacagcau

SEQ ID NO: 313121 - RNA, 19 nt, Homo sapiens
  misc_RNA (1)...(19): siRNA sense strand
ccgccacguuuccaucguu

SEQ ID NO: 313122 - RNA, 19 nt, Homo sapiens
  misc_RNA (1)...(19): siRNA sense strand
gggugaaaccucccauugg

SEQ ID NO: 313123 - RNA, 19 nt, Homo sapiens
  misc_RNA (1)...(19): siRNA sense strand
gaguucaaguccgacaaca

SEQ ID NO: 313124 - RNA, 19 nt, Homo sapiens
  misc_RNA (1)...(19): siRNA sense strand
gaggugcgcaguggacuca

SEQ ID NO: 313125 - RNA, 19 nt, Homo sapiens
  misc_RNA (1)...(19): siRNA sense strand
gacagagggcaaugaugug

SEQ ID NO: 313126 - RNA, 19 nt, Homo sapiens
  misc_RNA (1)...(19): siRNA sense strand
gagacagagggcaaugaug

SEQ ID NO: 313127 - RNA, 19 nt, Homo sapiens
  misc_RNA (1)...(19): siRNA sense strand
caagacagcacaggcaacu

SEQ ID NO: 313128 - RNA, 19 nt, Homo sapiens
  misc_RNA (1)...(19): siRNA sense strand
ugagacagagggcaaugau

SEQ ID NO: 313129 - RNA, 19 nt, Homo sapiens
  misc_RNA (1)...(19): siRNA sense strand
gcaaugaugugugcaagua

SEQ ID NO: 313130 - RNA, 19 nt, Homo sapiens
  misc_RNA (1)...(19): siRNA sense strand
ggacagcuauauuguguuc

SEQ ID NO: 313131 - RNA, 19 nt, Homo sapiens
  misc_RNA (1)...(19): siRNA sense strand
gaggacagcuauauugugu

SEQ ID NO: 313132 - RNA, 19 nt, Homo sapiens
  misc_RNA (1)...(19): siRNA sense strand
gggagaagaucauccugaa

SEQ ID NO: 313133 - RNA, 19 nt, Homo sapiens
  misc_RNA (1)...(19): siRNA sense strand
caucaaagcugcaguucca

SEQ ID NO: 313134 - RNA, 19 nt, Homo sapiens
  misc_RNA (1)...(19): siRNA sense strand
ccaacuacccagacgauua

SEQ ID NO: 313135 - RNA, 19 nt, Homo sapiens
  misc_RNA (1)...(19): siRNA sense strand
gagcagcggugccucaaca

SEQ ID NO: 313136 - RNA, 19 nt, Homo sapiens
  misc_RNA (1)...(19): siRNA sense strand
gcucguaaguccuccauca

SEQ ID NO: 313137 - RNA, 19 nt, Homo sapiens
  misc_RNA (1)...(19): siRNA sense strand
ggagagacccugcaagaca

SEQ ID NO: 313138 - RNA, 19 nt, Homo sapiens
  misc_RNA (1)...(19): siRNA sense strand
gcaucucccugcaguuuga

SEQ ID NO: 313139 - RNA, 19 nt, Homo sapiens
  misc_RNA (1)...(19): siRNA sense strand
aaaggacuauggccacauu

SEQ ID NO: 313140 - RNA, 19 nt, Homo sapiens
  misc_RNA (1)...(19): siRNA sense strand
gggcuuugccgucaacuuu

SEQ ID NO: 313141 - RNA, 19 nt, Homo sapiens
  misc_RNA (1)...(19): siRNA sense strand
gcuaugagaagccugauga

SEQ ID NO: 313142 - RNA, 19 nt, Homo sapiens
  misc_RNA (1)...(19): siRNA sense strand
gcacugacgaggacagcua

SEQ ID NO: 313143 - RNA, 19 nt, Homo sapiens
  misc_RNA (1)...(19): siRNA sense strand
gcuauauuguguucaccua

SEQ ID NO: 313144 - RNA, 19 nt, Homo sapiens
  misc_RNA (1)...(19): siRNA sense strand
ugugggagauggagaggua

SEQ ID NO: 313145 - RNA, 19 nt, Homo sapiens
  misc_RNA (1)...(19): siRNA sense strand
ggacauugcccuggacgaa

SEQ ID NO: 313146 - RNA, 19 nt, Homo sapiens
  misc_RNA (1)...(19): siRNA sense strand
ggcaagaacugugacaagu

SEQ ID NO: 313147 - RNA, 19 nt, Homo sapiens
  misc_RNA (1)...(19): siRNA sense strand
gcauuacgcucggaacaca

SEQ ID NO: 313148 - RNA, 19 nt, Homo sapiens
  misc_RNA (1)...(19): siRNA sense strand
gacgaggacagcuauauug

SEQ ID NO: 313149 - RNA, 19 nt, Homo sapiens
  misc_RNA (1)...(19): siRNA sense strand
gagaagaucauccugaacu

SEQ ID NO: 313150 - RNA, 19 nt, Homo sapiens
  misc_RNA (1)...(19): siRNA sense strand
caguuugacuucuuugaga

SEQ ID NO: 313151 - RNA, 19 nt, Homo sapiens
  misc_RNA (1)...(19): siRNA sense strand
caagcugcauggcaaguuc

SEQ ID NO: 313152 - RNA, 19 nt, Homo sapiens
  misc_RNA (1)...(19): siRNA sense strand
ggacuauggccacauucaa

SEQ ID NO: 313153 - RNA, 19 nt, Homo sapiens
  misc_RNA (1)...(19): siRNA sense strand
ugacggguccauuaacaaa

SEQ ID NO: 313154 - RNA, 19 nt, Homo sapiens
  misc_RNA (1)...(19): siRNA sense strand
agacagagggcaaugaugu

SEQ ID NO: 313155 - RNA, 19 nt, Homo sapiens
  misc_RNA (1)...(19): siRNA sense strand
uggcuacucugcucacaug

SEQ ID NO: 313156 - RNA, 19 nt, Homo sapiens
  misc_RNA (1)...(19): siRNA sense strand
ucacauuccaguccuuuga

SEQ ID NO: 313157 - RNA, 19 nt, Homo sapiens
  misc_RNA (1)...(19): siRNA sense strand
cauggcaaguucugugguu

SEQ ID NO: 313158 - RNA, 19 nt, Homo sapiens
  misc_RNA (1)...(19): siRNA sense strand
ugacgaggacagcuauauu

SEQ ID NO: 313159 - RNA, 19 nt, Homo sapiens
  misc_RNA (1)...(19): siRNA sense strand
ggucaucaccucccaguac

SEQ ID NO: 313160 - RNA, 19 nt, Homo sapiens
  misc_RNA (1)...(19): siRNA sense strand
ccacgugggccucacauuc

SEQ ID NO: 313161 - RNA, 19 nt, Homo sapiens
  misc_RNA (1)...(19): siRNA sense strand
guggagagacccugcaaga

SEQ ID NO: 313162 - RNA, 19 nt, Homo sapiens
  misc_RNA (1)...(19): siRNA sense strand
cccgcaagcuuuacaagug

SEQ ID NO: 313163 - RNA, 19 nt, Homo sapiens
  misc_RNA (1)...(19): siRNA sense strand
agaagaucauccugaacuu

SEQ ID NO: 313164 - RNA, 19 nt, Homo sapiens
  misc_RNA (1)...(19): siRNA sense strand
caacuacccagacgauuac

SEQ ID NO: 313165 - RNA, 19 nt, Homo sapiens
  misc_RNA (1)...(19): siRNA sense strand
gagauggcuucuggaggaa

SEQ ID NO: 313166 - RNA, 19 nt, Homo sapiens
  misc_RNA (1)...(19): siRNA sense strand
cguaaguccuccaucaaag

SEQ ID NO: 313167 - RNA, 19 nt, Homo sapiens
  misc_RNA (1)...(19): siRNA sense strand
cagcugugccuacgacuau

SEQ ID NO: 313168 - RNA, 19 nt, Homo sapiens
  misc_RNA (1)...(19): siRNA sense strand
uauauuguguucaccuauc

SEQ ID NO: 313169 - RNA, 19 nt, Homo sapiens
  misc_RNA (1)...(19): siRNA sense strand
acauugcccuggacgaaga

SEQ ID NO: 313170 - RNA, 19 nt, Homo sapiens
  misc_RNA (1)...(19): siRNA sense strand
ucaacacccugggcagcua

SEQ ID NO: 313171 - RNA, 19 nt, Homo sapiens
  misc_RNA (1)...(19): siRNA sense strand
caaacucccugagccuauc

SEQ ID NO: 313172 - RNA, 19 nt, Homo sapiens
  misc_RNA (1)...(19): siRNA sense strand
caacaugcgcguggaguuc

SEQ ID NO: 313173 - RNA, 19 nt, Homo sapiens
  misc_RNA (1)...(19): siRNA sense strand
cuucaaggcccacuucuuc

SEQ ID NO: 313174 - RNA, 19 nt, Homo sapiens
  misc_RNA (1)...(19): siRNA sense strand
agacagcacaggcaacuuc

SEQ ID NO: 313175 - RNA, 19 nt, Homo sapiens
  misc_RNA (1)...(19): siRNA sense strand
ccgcaucucccugcaguuu

SEQ ID NO: 313176 - RNA, 19 nt, Homo sapiens
  misc_RNA (1)...(19): siRNA sense strand
gacuauggccacauucaau

SEQ ID NO: 313177 - RNA, 19 nt, Homo sapiens
  misc_RNA (1)...(19): siRNA sense strand
gggcuucuuugcagucuac

SEQ ID NO: 313178 - RNA, 19 nt, Homo sapiens
  misc_RNA (1)...(19): siRNA sense strand
cagcagcaauuggguugga

SEQ ID NO: 313179 - RNA, 19 nt, Homo sapiens
  misc_RNA (1)...(19): siRNA sense strand
gcgcuacuguggcuaugag

SEQ ID NO: 313180 - RNA, 19 nt, Homo sapiens
  misc_RNA (1)...(19): siRNA sense strand
ggcucaaguucgucucuga

SEQ ID NO: 313181 - RNA, 19 nt, Homo sapiens
  misc_RNA (1)...(19): siRNA sense strand
ggucauccccuuugucauu

SEQ ID NO: 313182 - RNA, 19 nt, Homo sapiens
  misc_RNA (1)...(19): siRNA sense strand
ugacuucgacagcaucaug

SEQ ID NO: 313183 - RNA, 19 nt, Homo sapiens
  misc_RNA (1)...(19): siRNA sense strand
ccaaacucccugagccuau

SEQ ID NO: 313184 - RNA, 19 nt, Homo sapiens
  misc_RNA (1)...(19): siRNA sense strand
ucugacggguccauuaaca

SEQ ID NO: 313185 - RNA, 19 nt, Homo sapiens
  misc_RNA (1)...(19): siRNA sense strand
gcagcaauuggguuggaaa

SEQ ID NO: 313186 - RNA, 19 nt, Homo sapiens
  misc_RNA (1)...(19): siRNA sense strand
ccuaucgucuccacugaca

SEQ ID NO: 313187 - RNA, 19 nt, Homo sapiens
  misc_RNA (1)...(19): siRNA sense strand
ucucugacggguccauuaa

SEQ ID NO: 313188 - RNA, 19 nt, Homo sapiens
  misc_RNA (1)...(19): siRNA sense strand
gcaguuugacuucuuugag

SEQ ID NO: 313189 - RNA, 19 nt, Homo sapiens
  misc_RNA (1)...(19): siRNA sense strand
ccugcaguuugacuucuuu

SEQ ID NO: 313190 - RNA, 19 nt, Homo sapiens
  misc_RNA (1)...(19): siRNA sense strand
gcggauuccucaccaagcu

SEQ ID NO: 313191 - RNA, 19 nt, Homo sapiens
  misc_RNA (1)...(19): siRNA sense strand
gcaucuuccuggauaccau

SEQ ID NO: 313192 - RNA, 19 nt, Homo sapiens
  misc_RNA (1)...(19): siRNA sense strand
gucaucaccucccaguaca

SEQ ID NO: 313193 - RNA, 19 nt, Homo sapiens
  misc_RNA (1)...(19): siRNA sense strand
ugugacaaguucggcauug

SEQ ID NO: 313194 - RNA, 19 nt, Homo sapiens
  misc_RNA (1)...(19): siRNA sense strand
ucguaaguccuccaucaaa

SEQ ID NO: 313195 - RNA, 19 nt, Homo sapiens
  misc_RNA (1)...(19): siRNA sense strand
caaggcccacuucuucuca

SEQ ID NO: 313196 - RNA, 19 nt, Homo sapiens
  misc_RNA (1)...(19): siRNA sense strand
cgaggacagcuauauugug

SEQ ID NO: 313197 - RNA, 19 nt, Homo sapiens
  misc_RNA (1)...(19): siRNA sense strand
ucaccucccaguacaacaa

SEQ ID NO: 313198 - RNA, 19 nt, Homo sapiens
  misc_RNA (1)...(19): siRNA sense strand
gagaagcccgaggucauca

SEQ ID NO: 313199 - RNA, 19 nt, Homo sapiens
  misc_RNA (1)...(19): siRNA sense strand
uccaguccuuugagauuga

SEQ ID NO: 313200 - RNA, 19 nt, Homo sapiens
  misc_RNA (1)...(19): siRNA sense strand
ccuaugacuucgacagcau

SEQ ID NO: 313201 - RNA, 19 nt, Homo sapiens
  misc_RNA (1)...(19): siRNA sense strand
ccgccacguuuccaucguu

SEQ ID NO: 313202 - RNA, 19 nt, Homo sapiens
  misc_RNA (1)...(19): siRNA sense strand
gggugaaaccucccauugg

SEQ ID NO: 313203 - RNA, 19 nt, Homo sapiens
  misc_RNA (1)...(19): siRNA sense strand
gaguucaaguccgacaaca

SEQ ID NO: 313204 - RNA, 19 nt, Homo sapiens
  misc_RNA (1)...(19): siRNA sense strand
gaggugcgcaguggacuca

SEQ ID NO: 313205 - RNA, 19 nt, Homo sapiens
  misc_RNA (1)...(19): siRNA sense strand
gacagagggcaaugaugug

SEQ ID NO: 313206 - RNA, 19 nt, Homo sapiens
  misc_RNA (1)...(19): siRNA sense strand
gagacagagggcaaugaug

SEQ ID NO: 313207 - RNA, 19 nt, Homo sapiens
  misc_RNA (1)...(19): siRNA sense strand
caagacagcacaggcaacu

SEQ ID NO: 313208 - RNA, 19 nt, Homo sapiens
  misc_RNA (1)...(19): siRNA sense strand
ugagacagagggcaaugau

SEQ ID NO: 313209 - RNA, 19 nt, Homo sapiens
  misc_RNA (1)...(19): siRNA sense strand
ggacagcuauauuguguuc

SEQ ID NO: 313210 - RNA, 19 nt, Homo sapiens
  misc_RNA (1)...(19): siRNA sense strand
gaggacagcuauauugugu

SEQ ID NO: 313211 - RNA, 19 nt, Homo sapiens
  misc_RNA (1)...(19): siRNA sense strand
gggagaagaucauccugaa

SEQ ID NO: 313212 - RNA, 19 nt, Homo sapiens
  misc_RNA (1)...(19): siRNA sense strand
caucaaagcugcaguucca

SEQ ID NO: 313213 - RNA, 19 nt, Homo sapiens
  misc_RNA (1)...(19): siRNA sense strand
ccaacuacccagacgauua

SEQ ID NO: 313214 - RNA, 19 nt, Homo sapiens
  misc_RNA (1)...(19): siRNA sense strand
gagcagcggugccucaaca

SEQ ID NO: 313215 - RNA, 19 nt, Homo sapiens
  misc_RNA (1)...(19): siRNA sense strand
gcucguaaguccuccauca

SEQ ID NO: 313216 - RNA, 19 nt, Homo sapiens
  misc_RNA (1)...(19): siRNA sense strand
ggagagacccugcaagaca

SEQ ID NO: 313217 - RNA, 19 nt, Homo sapiens
  misc_RNA (1)...(19): siRNA sense strand
aaaggacuauggccacauu

SEQ ID NO: 313218 - RNA, 19 nt, Homo sapiens
  misc_RNA (1)...(19): siRNA sense strand
gggcuuugccgucaacuuu

SEQ ID NO: 313219 - RNA, 19 nt, Homo sapiens
  misc_RNA (1)...(19): siRNA sense strand
gcuaugagaagccugauga

SEQ ID NO: 313220 - RNA, 19 nt, Homo sapiens
  misc_RNA (1)...(19): siRNA sense strand
gcacugacgaggacagcua

SEQ ID NO: 313221 - RNA, 19 nt, Homo sapiens
  misc_RNA (1)...(19): siRNA sense strand
gcuauauuguguucaccua

SEQ ID NO: 313222 - RNA, 19 nt, Homo sapiens
  misc_RNA (1)...(19): siRNA sense strand
ugugggagauggagaggua

SEQ ID NO: 313223 - RNA, 19 nt, Homo sapiens
  misc_RNA (1)...(19): siRNA sense strand
ggacauugcccuggacgaa

SEQ ID NO: 313224 - RNA, 19 nt, Homo sapiens
  misc_RNA (1)...(19): siRNA sense strand
ggcaagaacugugacaagu

SEQ ID NO: 313225 - RNA, 19 nt, Homo sapiens
  misc_RNA (1)...(19): siRNA sense strand
gcauuacgcucggaacaca

SEQ ID NO: 313226 - RNA, 19 nt, Homo sapiens
  misc_RNA (1)...(19): siRNA sense strand
gacgaggacagcuauauug

SEQ ID NO: 313227 - RNA, 19 nt, Homo sapiens
  misc_RNA (1)...(19): siRNA sense strand
gagaagaucauccugaacu

SEQ ID NO: 313228 - RNA, 19 nt, Homo sapiens
  misc_RNA (1)...(19): siRNA sense strand
ggacuauggccacauucaa

SEQ ID NO: 313229 - RNA, 19 nt, Homo sapiens
  misc_RNA (1)...(19): siRNA sense strand
ugacggguccauuaacaaa

SEQ ID NO: 313230 - RNA, 19 nt, Homo sapiens
  misc_RNA (1)...(19): siRNA sense strand
uggcuacucugcucacaug

SEQ ID NO: 313231 - RNA, 19 nt, Homo sapiens
  misc_RNA (1)...(19): siRNA sense strand
ucacauuccaguccuuuga

SEQ ID NO: 313232 - RNA, 19 nt, Homo sapiens
  misc_RNA (1)...(19): siRNA sense strand
ugacgaggacagcuauauu

SEQ ID NO: 313233 - RNA, 19 nt, Homo sapiens
  misc_RNA (1)...(19): siRNA sense strand
ccacgugggccucacauuc

SEQ ID NO: 313234 - RNA, 19 nt, Homo sapiens
  misc_RNA (1)...(19): siRNA sense strand
guggagagacccugcaaga

SEQ ID NO: 313235 - RNA, 19 nt, Homo sapiens
  misc_RNA (1)...(19): siRNA sense strand
cccgcaagcuuuacaagug

SEQ ID NO: 313236 - RNA, 19 nt, Homo sapiens
  misc_RNA (1)...(19): siRNA sense strand
agaagaucauccugaacuu

SEQ ID NO: 313237 - RNA, 19 nt, Homo sapiens
  misc_RNA (1)...(19): siRNA sense strand
caacuacccagacgauuac

SEQ ID NO: 313238 - RNA, 19 nt, Homo sapiens
  misc_RNA (1)...(19): siRNA sense strand
gagauggcuucuggaggaa

SEQ ID NO: 313239 - RNA, 19 nt, Homo sapiens
  misc_RNA (1)...(19): siRNA sense strand
cguaaguccuccaucaaag

SEQ ID NO: 313240 - RNA, 19 nt, Homo sapiens
  misc_RNA (1)...(19): siRNA sense strand
cagcugugccuacgacuau

SEQ ID NO: 313241 - RNA, 19 nt, Homo sapiens
  misc_RNA (1)...(19): siRNA sense strand
uauauuguguucaccuauc

SEQ ID NO: 313242 - RNA, 19 nt, Homo sapiens
  misc_RNA (1)...(19): siRNA sense strand
ucaacacccugggcagcua

SEQ ID NO: 313243 - RNA, 19 nt, Homo sapiens
  misc_RNA (1)...(19): siRNA sense strand
caaacucccugagccuauc

SEQ ID NO: 313244 - RNA, 19 nt, Homo sapiens
  misc_RNA (1)...(19): siRNA sense strand
acauugcccuggacgaaga

SEQ ID NO: 313245 - RNA, 19 nt, Homo sapiens
  misc_RNA (1)...(19): siRNA sense strand
agacagcacaggcaacuuc

SEQ ID NO: 313246 - RNA, 19 nt, Homo sapiens
  misc_RNA (1)...(19): siRNA sense strand
gacuauggccacauucaau

SEQ ID NO: 313247 - RNA, 19 nt, Homo sapiens
  misc_RNA (1)...(19): siRNA sense strand
gggcuucuuugcagucuac

SEQ ID NO: 313248 - RNA, 19 nt, Homo sapiens
  misc_RNA (1)...(19): siRNA sense strand
cagcagcaauuggguugga

SEQ ID NO: 313249 - RNA, 19 nt, Homo sapiens
  misc_RNA (1)...(19): siRNA sense strand
gcgcuacuguggcuaugag

SEQ ID NO: 313250 - RNA, 19 nt, Homo sapiens
  misc_RNA (1)...(19): siRNA sense strand
ggcucaaguucgucucuga

SEQ ID NO: 313251 - RNA, 19 nt, Homo sapiens
  misc_RNA (1)...(19): siRNA sense strand
ggucauccccuuugucauu

SEQ ID NO: 313252 - RNA, 19 nt, Homo sapiens
  misc_RNA (1)...(19): siRNA sense strand
ugacuucgacagcaucaug

SEQ ID NO: 313253 - RNA, 19 nt, Homo sapiens
  misc_RNA (1)...(19): siRNA sense strand
ccaaacucccugagccuau

SEQ ID NO: 313254 - RNA, 19 nt, Homo sapiens
  misc_RNA (1)...(19): siRNA sense strand
ucugacggguccauuaaca

SEQ ID NO: 313255 - RNA, 19 nt, Homo sapiens
  misc_RNA (1)...(19): siRNA sense strand
gcagcaauuggguuggaaa

SEQ ID NO: 313256 - RNA, 19 nt, Homo sapiens
  misc_RNA (1)...(19): siRNA sense strand
ccuaucgucuccacugaca

SEQ ID NO: 313257 - RNA, 19 nt, Homo sapiens
  misc_RNA (1)...(19): siRNA sense strand
ucucugacggguccauuaa

SEQ ID NO: 313258 - RNA, 19 nt, Homo sapiens
  misc_RNA (1)...(19): siRNA sense strand
gcaucuuccuggauaccau

SEQ ID NO: 313259 - RNA, 19 nt, Homo sapiens
  misc_RNA (1)...(19): siRNA sense strand
ugugacaaguucggcauug

SEQ ID NO: 313260 - RNA, 19 nt, Homo sapiens
  misc_RNA (1)...(19): siRNA sense strand
ucguaaguccuccaucaaa

SEQ ID NO: 313261 - RNA, 19 nt, Homo sapiens
  misc_RNA (1)...(19): siRNA sense strand
cgaggacagcuauauugug

SEQ ID NO: 313262 - RNA, 19 nt, Homo sapiens
  misc_RNA (1)...(19): siRNA sense strand
uccaguccuuugagauuga

SEQ ID NO: 313263 - RNA, 19 nt, Homo sapiens
  misc_RNA (1)...(19): siRNA sense strand
ccuaugacuucgacagcau

SEQ ID NO: 313264 - RNA, 19 nt, Homo sapiens
  misc_RNA (1)...(19): siRNA sense strand
ccgccacguuuccaucguu

SEQ ID NO: 313265 - RNA, 19 nt, Homo sapiens
  misc_RNA (1)...(19): siRNA sense strand
gggugaaaccucccauugg

SEQ ID NO: 313266 - RNA, 19 nt, Homo sapiens
  misc_RNA (1)...(19): siRNA sense strand
caagacagcacaggcaacu

SEQ ID NO: 313267 - RNA, 19 nt, Homo sapiens
  misc_RNA (1)...(19): siRNA sense strand
ggacagcuauauuguguuc

SEQ ID NO: 313268 - RNA, 19 nt, Homo sapiens
  misc_RNA (1)...(19): siRNA sense strand
gaggacagcuauauugugu

SEQ ID NO: 313269 - RNA, 19 nt, Homo sapiens
  misc_RNA (1)...(19): siRNA sense strand
caucaaagcugcaguucca

SEQ ID NO: 313270 - RNA, 19 nt, Homo sapiens
  misc_RNA (1)...(19): siRNA sense strand
gcucguaaguccuccauca

SEQ ID NO: 313271 - RNA, 19 nt, Homo sapiens
  misc_RNA (1)...(19): siRNA sense strand
gcacugacgaggacagcua

SEQ ID NO: 313272 - RNA, 19 nt, Homo sapiens
  misc_RNA (1)...(19): siRNA sense strand
gcuauauuguguucaccua

SEQ ID NO: 313273 - RNA, 19 nt, Homo sapiens
  misc_RNA (1)...(19): siRNA sense strand
ugugggagauggagaggua

SEQ ID NO: 313274 - RNA, 19 nt, Homo sapiens
  misc_RNA (1)...(19): siRNA sense strand
ggacauugcccuggacgaa

SEQ ID NO: 313275 - RNA, 19 nt, Homo sapiens
  misc_RNA (1)...(19): siRNA sense strand
ggcaagaacugugacaagu

SEQ ID NO: 313276 - RNA, 19 nt, Homo sapiens
  misc_RNA (1)...(19): siRNA sense strand
gacgaggacagcuauauug

SEQ ID NO: 313277 - RNA, 19 nt, Homo sapiens
  misc_RNA (1)...(19): siRNA sense strand
ugacgaggacagcuauauu

SEQ ID NO: 313278 - RNA, 19 nt, Homo sapiens
  misc_RNA (1)...(19): siRNA sense strand
cguaaguccuccaucaaag

SEQ ID NO: 313279 - RNA, 19 nt, Homo sapiens
  misc_RNA (1)...(19): siRNA sense strand
acauugcccuggacgaaga

SEQ ID NO: 313280 - RNA, 19 nt, Homo sapiens
  misc_RNA (1)...(19): siRNA sense strand
uauauuguguucaccuauc

SEQ ID NO: 313281 - RNA, 19 nt, Homo sapiens
  misc_RNA (1)...(19): siRNA sense strand
ggucauccccuuugucauu

SEQ ID NO: 313282 - RNA, 19 nt, Homo sapiens
  misc_RNA (1)...(19): siRNA sense strand
ugugacaaguucggcauug

SEQ ID NO: 313283 - RNA, 19 nt, Homo sapiens
  misc_RNA (1)...(19): siRNA sense strand
ucguaaguccuccaucaaa

SEQ ID NO: 313284 - RNA, 19 nt, Homo sapiens
  misc_RNA (1)...(19): siRNA sense strand
cgaggacagcuauauugug

SEQ ID NO: 313285 - RNA, 19 nt, Homo sapiens
  misc_RNA (1)...(19): siRNA sense strand
ccgccacguuuccaucguu

SEQ ID NO: 313286 - RNA, 19 nt, Homo sapiens
  misc_RNA (1)...(19): siRNA sense strand
gcaaugaugugugcaagua

SEQ ID NO: 313287 - RNA, 19 nt, Homo sapiens
  misc_RNA (1)...(19): siRNA sense strand
ggacagcuauauuguguuc

SEQ ID NO: 313288 - RNA, 19 nt, Homo sapiens
  misc_RNA (1)...(19): siRNA sense strand
gaggacagcuauauugugu

SEQ ID NO: 313289 - RNA, 19 nt, Homo sapiens
  misc_RNA (1)...(19): siRNA sense strand
gggagaagaucauccugaa

SEQ ID NO: 313290 - RNA, 19 nt, Homo sapiens
  misc_RNA (1)...(19): siRNA sense strand
caucaaagcugcaguucca

SEQ ID NO: 313291 - RNA, 19 nt, Homo sapiens
  misc_RNA (1)...(19): siRNA sense strand
ccaacuacccagacgauua

SEQ ID NO: 313292 - RNA, 19 nt, Homo sapiens
  misc_RNA (1)...(19): siRNA sense strand
gagcagcggugccucaaca

SEQ ID NO: 313293 - RNA, 19 nt, Homo sapiens
  misc_RNA (1)...(19): siRNA sense strand
gcucguaaguccuccauca

SEQ ID NO: 313294 - RNA, 19 nt, Homo sapiens
  misc_RNA (1)...(19): siRNA sense strand
ggagagacccugcaagaca

SEQ ID NO: 313295 - RNA, 19 nt, Homo sapiens
  misc_RNA (1)...(19): siRNA sense strand
gcaucucccugcaguuuga

SEQ ID NO: 313296 - RNA, 19 nt, Homo sapiens
  misc_RNA (1)...(19): siRNA sense strand
aaaggacuauggccacauu

SEQ ID NO: 313297 - RNA, 19 nt, Homo sapiens
  misc_RNA (1)...(19): siRNA sense strand
gggcuuugccgucaacuuu

SEQ ID NO: 313298 - RNA, 19 nt, Homo sapiens
  misc_RNA (1)...(19): siRNA sense strand
gcuaugagaagccugauga

SEQ ID NO: 313299 - RNA, 19 nt, Homo sapiens
  misc_RNA (1)...(19): siRNA sense strand
gcacugacgaggacagcua

SEQ ID NO: 313300 - RNA, 19 nt, Homo sapiens
  misc_RNA (1)...(19): siRNA sense strand
gcuauauuguguucaccua

SEQ ID NO: 313301 - RNA, 19 nt, Homo sapiens
  misc_RNA (1)...(19): siRNA sense strand
ugugggagauggagaggua

SEQ ID NO: 313302 - RNA, 19 nt, Homo sapiens
  misc_RNA (1)...(19): siRNA sense strand
ggacauugcccuggacgaa

SEQ ID NO: 313303 - RNA, 19 nt, Homo sapiens
  misc_RNA (1)...(19): siRNA sense strand
ggcaagaacugugacaagu

SEQ ID NO: 313304 - RNA, 19 nt, Homo sapiens
  misc_RNA (1)...(19): siRNA sense strand
gcauuacgcucggaacaca

SEQ ID NO: 313305 - RNA, 19 nt, Homo sapiens
  misc_RNA (1)...(19): siRNA sense strand
gacgaggacagcuauauug

SEQ ID NO: 313306 - RNA, 19 nt, Homo sapiens
  misc_RNA (1)...(19): siRNA sense strand
gagaagaucauccugaacu

SEQ ID NO: 313307 - RNA, 19 nt, Homo sapiens
  misc_RNA (1)...(19): siRNA sense strand
caguuugacuucuuugaga

SEQ ID NO: 313308 - RNA, 19 nt, Homo sapiens
  misc_RNA (1)...(19): siRNA sense strand
caagcugcauggcaaguuc

SEQ ID NO: 313309 - RNA, 19 nt, Homo sapiens
  misc_RNA (1)...(19): siRNA sense strand
ggacuauggccacauucaa

SEQ ID NO: 313310 - RNA, 19 nt, Homo sapiens
  misc_RNA (1)...(19): siRNA sense strand
ugacggguccauuaacaaa

SEQ ID NO: 313311 - RNA, 19 nt, Homo sapiens
  misc_RNA (1)...(19): siRNA sense strand
agacagagggcaaugaugu

SEQ ID NO: 313312 - RNA, 19 nt, Homo sapiens
  misc_RNA (1)...(19): siRNA sense strand
uggcuacucugcucacaug

SEQ ID NO: 313313 - RNA, 19 nt, Homo sapiens
  misc_RNA (1)...(19): siRNA sense strand
ucacauuccaguccuuuga

SEQ ID NO: 313314 - RNA, 19 nt, Homo sapiens
  misc_RNA (1)...(19): siRNA sense strand
cauggcaaguucugugguu

SEQ ID NO: 313315 - RNA, 19 nt, Homo sapiens
  misc_RNA (1)...(19): siRNA sense strand
ugacgaggacagcuauauu

SEQ ID NO: 313316 - RNA, 19 nt, Homo sapiens
  misc_RNA (1)...(19): siRNA sense strand
ggucaucaccucccaguac

SEQ ID NO: 313317 - RNA, 19 nt, Homo sapiens
  misc_RNA (1)...(19): siRNA sense strand
ccacgugggccucacauuc

SEQ ID NO: 313318 - RNA, 19 nt, Homo sapiens
  misc_RNA (1)...(19): siRNA sense strand
guggagagacccugcaaga

SEQ ID NO: 313319 - RNA, 19 nt, Homo sapiens
  misc_RNA (1)...(19): siRNA sense strand
cccgcaagcuuuacaagug

SEQ ID NO: 313320 - RNA, 19 nt, Homo sapiens
  misc_RNA (1)...(19): siRNA sense strand
agaagaucauccugaacuu

SEQ ID NO: 313321 - RNA, 19 nt, Homo sapiens
  misc_RNA (1)...(19): siRNA sense strand
caacuacccagacgauuac

SEQ ID NO: 313322 - RNA, 19 nt, Homo sapiens
  misc_RNA (1)...(19): siRNA sense strand
gagauggcuucuggaggaa

SEQ ID NO: 313323 - RNA, 19 nt, Homo sapiens
  misc_RNA (1)...(19): siRNA sense strand
cguaaguccuccaucaaag

SEQ ID NO: 313324 - RNA, 19 nt, Homo sapiens
  misc_RNA (1)...(19): siRNA sense strand
cagcugugccuacgacuau

SEQ ID NO: 313325 - RNA, 19 nt, Homo sapiens
  misc_RNA (1)...(19): siRNA sense strand
uauauuguguucaccuauc

SEQ ID NO: 313326 - RNA, 19 nt, Homo sapiens
  misc_RNA (1)...(19): siRNA sense strand
acauugcccuggacgaaga

SEQ ID NO: 313327 - RNA, 19 nt, Homo sapiens
  misc_RNA (1)...(19): siRNA sense strand
ucaacacccugggcagcua

SEQ ID NO: 313328 - RNA, 19 nt, Homo sapiens
  misc_RNA (1)...(19): siRNA sense strand
caaacucccugagccuauc

SEQ ID NO: 313329 - RNA, 19 nt, Homo sapiens
  misc_RNA (1)...(19): siRNA sense strand
caacaugcgcguggaguuc

SEQ ID NO: 313330 - RNA, 19 nt, Homo sapiens
  misc_RNA (1)...(19): siRNA sense strand
cuucaaggcccacuucuuc

SEQ ID NO: 313331 - RNA, 19 nt, Homo sapiens
  misc_RNA (1)...(19): siRNA sense strand
agacagcacaggcaacuuc

SEQ ID NO: 313332 - RNA, 19 nt, Homo sapiens
  misc_RNA (1)...(19): siRNA sense strand
ccgcaucucccugcaguuu

SEQ ID NO: 313333 - RNA, 19 nt, Homo sapiens
  misc_RNA (1)...(19): siRNA sense strand
gacuauggccacauucaau

SEQ ID NO: 313334 - RNA, 19 nt, Homo sapiens
  misc_RNA (1)...(19): siRNA sense strand
gggcuucuuugcagucuac

SEQ ID NO: 313335 - RNA, 19 nt, Homo sapiens
  misc_RNA (1)...(19): siRNA sense strand
cagcagcaauuggguugga

SEQ ID NO: 313336 - RNA, 19 nt, Homo sapiens
  misc_RNA (1)...(19): siRNA sense strand
gcgcuacuguggcuaugag

SEQ ID NO: 313337 - RNA, 19 nt, Homo sapiens
  misc_RNA (1)...(19): siRNA sense strand
ggcucaaguucgucucuga

SEQ ID NO: 313338 - RNA, 19 nt, Homo sapiens
  misc_RNA (1)...(19): siRNA sense strand
ggucauccccuuugucauu

SEQ ID NO: 313339 - RNA, 19 nt, Homo sapiens
  misc_RNA (1)...(19): siRNA sense strand
ugacuucgacagcaucaug

SEQ ID NO: 313340 - RNA, 19 nt, Homo sapiens
  misc_RNA (1)...(19): siRNA sense strand
ccaaacucccugagccuau

SEQ ID NO: 313341 - RNA, 19 nt, Homo sapiens
  misc_RNA (1)...(19): siRNA sense strand
ucugacggguccauuaaca

SEQ ID NO: 313342 - RNA, 19 nt, Homo sapiens
  misc_RNA (1)...(19): siRNA sense strand
gcagcaauuggguuggaaa

SEQ ID NO: 313343 - RNA, 19 nt, Homo sapiens
  misc_RNA (1)...(19): siRNA sense strand
ccuaucgucuccacugaca

SEQ ID NO: 313344 - RNA, 19 nt, Homo sapiens
  misc_RNA (1)...(19): siRNA sense strand
ucucugacggguccauuaa

SEQ ID NO: 313345 - RNA, 19 nt, Homo sapiens
  misc_RNA (1)...(19): siRNA sense strand
gcaguuugacuucuuugag

SEQ ID NO: 313346 - RNA, 19 nt, Homo sapiens
  misc_RNA (1)...(19): siRNA sense strand
ccugcaguuugacuucuuu

SEQ ID NO: 313347 - RNA, 19 nt, Homo sapiens
  misc_RNA (1)...(19): siRNA sense strand
gcggauuccucaccaagcu

SEQ ID NO: 313348 - RNA, 19 nt, Homo sapiens
  misc_RNA (1)...(19): siRNA sense strand
gcaucuuccuggauaccau

SEQ ID NO: 313349 - RNA, 19 nt, Homo sapiens
  misc_RNA (1)...(19): siRNA sense strand
gucaucaccucccaguaca

SEQ ID NO: 313350 - RNA, 19 nt, Homo sapiens
  misc_RNA (1)...(19): siRNA sense strand
ugugacaaguucggcauug

SEQ ID NO: 313351 - RNA, 19 nt, Homo sapiens
  misc_RNA (1)...(19): siRNA sense strand
ucguaaguccuccaucaaa

SEQ ID NO: 313352 - RNA, 19 nt, Homo sapiens
  misc_RNA (1)...(19): siRNA sense strand
caaggcccacuucuucuca

SEQ ID NO: 313353 - RNA, 19 nt, Homo sapiens
  misc_RNA (1)...(19): siRNA sense strand
cgaggacagcuauauugug

SEQ ID NO: 313354 - RNA, 19 nt, Homo sapiens
  misc_RNA (1)...(19): siRNA sense strand
ucaccucccaguacaacaa

SEQ ID NO: 313355 - RNA, 19 nt, Homo sapiens
  misc_RNA (1)...(19): siRNA sense strand
gagaagcccgaggucauca

SEQ ID NO: 313356 - RNA, 19 nt, Homo sapiens
  misc_RNA (1)...(19): siRNA sense strand
uccaguccuuugagauuga

SEQ ID NO: 313357 - RNA, 19 nt, Homo sapiens
  misc_RNA (1)...(19): siRNA sense strand
ccuaugacuucgacagcau

SEQ ID NO: 313358 - RNA, 19 nt, Homo sapiens
  misc_RNA (1)...(19): siRNA sense strand
ccgccacguuuccaucguu

SEQ ID NO: 313359 - RNA, 19 nt, Homo sapiens
  misc_RNA (1)...(19): siRNA sense strand
gggugaaaccucccauugg

SEQ ID NO: 313360 - RNA, 19 nt, Homo sapiens
  misc_RNA (1)...(19): siRNA sense strand
gaguucaaguccgacaaca

SEQ ID NO: 313361 - RNA, 19 nt, Homo sapiens
  misc_RNA (1)...(19): siRNA sense strand
gaggugcgcaguggacuca

SEQ ID NO: 313362 - RNA, 19 nt, Homo sapiens
  misc_RNA (1)...(19): siRNA sense strand
gacagagggcaaugaugug

SEQ ID NO: 313363 - RNA, 19 nt, Homo sapiens
  misc_RNA (1)...(19): siRNA sense strand
gagacagagggcaaugaug

SEQ ID NO: 313364 - RNA, 19 nt, Homo sapiens
  misc_RNA (1)...(19): siRNA sense strand
caagacagcacaggcaacu

SEQ ID NO: 313365 - RNA, 19 nt, Homo sapiens
  misc_RNA (1)...(19): siRNA sense strand
ugagacagagggcaaugau

SEQ ID NO: 313366 - RNA, 19 nt, Homo sapiens
  misc_RNA (1)...(19): siRNA sense strand
gcaaugaugugugcaagua

SEQ ID NO: 313367 - RNA, 19 nt, Homo sapiens
  misc_RNA (1)...(19): siRNA sense strand
ggacagcuauauuguguuc

SEQ ID NO: 313368 - RNA, 19 nt, Homo sapiens
  misc_RNA (1)...(19): siRNA sense strand
gaggacagcuauauugugu

SEQ ID NO: 313369 - RNA, 19 nt, Homo sapiens
  misc_RNA (1)...(19): siRNA sense strand
gggagaagaucauccugaa

SEQ ID NO: 313370 - RNA, 19 nt, Homo sapiens
  misc_RNA (1)...(19): siRNA sense strand
caucaaagcugcaguucca

SEQ ID NO: 313371 - RNA, 19 nt, Homo sapiens
  misc_RNA (1)...(19): siRNA sense strand
ccaacuacccagacgauua

SEQ ID NO: 313372 - RNA, 19 nt, Homo sapiens
  misc_RNA (1)...(19): siRNA sense strand
gagcagcggugccucaaca

SEQ ID NO: 313373 - RNA, 19 nt, Homo sapiens
  misc_RNA (1)...(19): siRNA sense strand
gcucguaaguccuccauca

SEQ ID NO: 313374 - RNA, 19 nt, Homo sapiens
  misc_RNA (1)...(19): siRNA sense strand
ggagagacccugcaagaca

SEQ ID NO: 313375 - RNA, 19 nt, Homo sapiens
  misc_RNA (1)...(19): siRNA sense strand
gcaucucccugcaguuuga

SEQ ID NO: 313376 - RNA, 19 nt, Homo sapiens
  misc_RNA (1)...(19): siRNA sense strand
aaaggacuauggccacauu

SEQ ID NO: 313377 - RNA, 19 nt, Homo sapiens
  misc_RNA (1)...(19): siRNA sense strand
gggcuuugccgucaacuuu

SEQ ID NO: 313378 - RNA, 19 nt, Homo sapiens
  misc_RNA (1)...(19): siRNA sense strand
gcuaugagaagccugauga

SEQ ID NO: 313379 - RNA, 19 nt, Homo sapiens
  misc_RNA (1)...(19): siRNA sense strand
gcacugacgaggacagcua

SEQ ID NO: 313380 - RNA, 19 nt, Homo sapiens
  misc_RNA (1)...(19): siRNA sense strand
gcuauauuguguucaccua

SEQ ID NO: 313381 - RNA, 19 nt, Homo sapiens
  misc_RNA (1)...(19): siRNA sense strand
ugugggagauggagaggua

SEQ ID NO: 313382 - RNA, 19 nt, Homo sapiens
  misc_RNA (1)...(19): siRNA sense strand
ggacauugcccuggacgaa

SEQ ID NO: 313383 - RNA, 19 nt, Homo sapiens
  misc_RNA (1)...(19): siRNA sense strand
ggcaagaacugugacaagu

SEQ ID NO: 313384 - RNA, 19 nt, Homo sapiens
  misc_RNA (1)...(19): siRNA sense strand
gcauuacgcucggaacaca

SEQ ID NO: 313385 - RNA, 19 nt, Homo sapiens
  misc_RNA (1)...(19): siRNA sense strand
gacgaggacagcuauauug

SEQ ID NO: 313386 - RNA, 19 nt, Homo sapiens
  misc_RNA (1)...(19): siRNA sense strand
gagaagaucauccugaacu

SEQ ID NO: 313387 - RNA, 19 nt, Homo sapiens
  misc_RNA (1)...(19): siRNA sense strand
caguuugacuucuuugaga

SEQ ID NO: 313388 - RNA, 19 nt, Homo sapiens
  misc_RNA (1)...(19): siRNA sense strand
caagcugcauggcaaguuc

SEQ ID NO: 313389 - RNA, 19 nt, Homo sapiens
  misc_RNA (1)...(19): siRNA sense strand
ggacuauggccacauucaa

SEQ ID NO: 313390 - RNA, 19 nt, Homo sapiens
  misc_RNA (1)...(19): siRNA sense strand
ugacggguccauuaacaaa

SEQ ID NO: 313391 - RNA, 19 nt, Homo sapiens
  misc_RNA (1)...(19): siRNA sense strand
agacagagggcaaugaugu

SEQ ID NO: 313392 - RNA, 19 nt, Homo sapiens
  misc_RNA (1)...(19): siRNA sense strand
uggcuacucugcucacaug

SEQ ID NO: 313393 - RNA, 19 nt, Homo sapiens
  misc_RNA (1)...(19): siRNA sense strand
ucacauuccaguccuuuga

SEQ ID NO: 313394 - RNA, 19 nt, Homo sapiens
  misc_RNA (1)...(19): siRNA sense strand
cauggcaaguucugugguu

SEQ ID NO: 313395 - RNA, 19 nt, Homo sapiens
  misc_RNA (1)...(19): siRNA sense strand
ugacgaggacagcuauauu

SEQ ID NO: 313396 - RNA, 19 nt, Homo sapiens
  misc_RNA (1)...(19): siRNA sense strand
ggucaucaccucccaguac

SEQ ID NO: 313397 - RNA, 19 nt, Homo sapiens
  misc_RNA (1)...(19): siRNA sense strand
ccacgugggccucacauuc

SEQ ID NO: 313398 - RNA, 19 nt, Homo sapiens
  misc_RNA (1)...(19): siRNA sense strand
guggagagacccugcaaga

SEQ ID NO: 313399 - RNA, 19 nt, Homo sapiens
  misc_RNA (1)...(19): siRNA sense strand
cccgcaagcuuuacaagug

SEQ ID NO: 313400 - RNA, 19 nt, Homo sapiens
  misc_RNA (1)...(19): siRNA sense strand
agaagaucauccugaacuu

SEQ ID NO: 313401 - RNA, 19 nt, Homo sapiens
  misc_RNA (1)...(19): siRNA sense strand
caacuacccagacgauuac

SEQ ID NO: 313402 - RNA, 19 nt, Homo sapiens
  misc_RNA (1)...(19): siRNA sense strand
gagauggcuucuggaggaa

SEQ ID NO: 313403 - RNA, 19 nt, Homo sapiens
  misc_RNA (1)...(19): siRNA sense strand
cguaaguccuccaucaaag

SEQ ID NO: 313404 - RNA, 19 nt, Homo sapiens
  misc_RNA (1)...(19): siRNA sense strand
cagcugugccuacgacuau

SEQ ID NO: 313405 - RNA, 19 nt, Homo sapiens
  misc_RNA (1)...(19): siRNA sense strand
uauauuguguucaccuauc

SEQ ID NO: 313406 - RNA, 19 nt, Homo sapiens
  misc_RNA (1)...(19): siRNA sense strand
acauugcccuggacgaaga

SEQ ID NO: 313407 - RNA, 19 nt, Homo sapiens
  misc_RNA (1)...(19): siRNA sense strand
ucaacacccugggcagcua

SEQ ID NO: 313408 - RNA, 19 nt, Homo sapiens
  misc_RNA (1)...(19): siRNA sense strand
caaacucccugagccuauc

SEQ ID NO: 313409 - RNA, 19 nt, Homo sapiens
  misc_RNA (1)...(19): siRNA sense strand
caacaugcgcguggaguuc

SEQ ID NO: 313410 - RNA, 19 nt, Homo sapiens
  misc_RNA (1)...(19): siRNA sense strand
cuucaaggcccacuucuuc

SEQ ID NO: 313411 - RNA, 19 nt, Homo sapiens
  misc_RNA (1)...(19): siRNA sense strand
agacagcacaggcaacuuc

SEQ ID NO: 313412 - RNA, 19 nt, Homo sapiens
  misc_RNA (1)...(19): siRNA sense strand
ccgcaucucccugcaguuu

SEQ ID NO: 313413 - RNA, 19 nt, Homo sapiens
  misc_RNA (1)...(19): siRNA sense strand
gacuauggccacauucaau

SEQ ID NO: 313414 - RNA, 19 nt, Homo sapiens
  misc_RNA (1)...(19): siRNA sense strand
gggcuucuuugcagucuac

SEQ ID NO: 313415 - RNA, 19 nt, Homo sapiens
  misc_RNA (1)...(19): siRNA sense strand
cagcagcaauuggguugga

SEQ ID NO: 313416 - RNA, 19 nt, Homo sapiens
  misc_RNA (1)...(19): siRNA sense strand
gcgcuacuguggcuaugag

SEQ ID NO: 313417 - RNA, 19 nt, Homo sapiens
  misc_RNA (1)...(19): siRNA sense strand
ggcucaaguucgucucuga

SEQ ID NO: 313418 - RNA, 19 nt, Homo sapiens
  misc_RNA (1)...(19): siRNA sense strand
ggucauccccuuugucauu

SEQ ID NO: 313419 - RNA, 19 nt, Homo sapiens
  misc_RNA (1)...(19): siRNA sense strand
ugacuucgacagcaucaug

SEQ ID NO: 313420 - RNA, 19 nt, Homo sapiens
  misc_RNA (1)...(19): siRNA sense strand
ccaaacucccugagccuau

SEQ ID NO: 313421 - RNA, 19 nt, Homo sapiens
  misc_RNA (1)...(19): siRNA sense strand
ucugacggguccauuaaca

SEQ ID NO: 313422 - RNA, 19 nt, Homo sapiens
  misc_RNA (1)...(19): siRNA sense strand
gcagcaauuggguuggaaa

SEQ ID NO: 313423 - RNA, 19 nt, Homo sapiens
  misc_RNA (1)...(19): siRNA sense strand
ccuaucgucuccacugaca

SEQ ID NO: 313424 - RNA, 19 nt, Homo sapiens
  misc_RNA (1)...(19): siRNA sense strand
ucucugacggguccauuaa

SEQ ID NO: 313425 - RNA, 19 nt, Homo sapiens
  misc_RNA (1)...(19): siRNA sense strand
gcaguuugacuucuuugag

SEQ ID NO: 313426 - RNA, 19 nt, Homo sapiens
  misc_RNA (1)...(19): siRNA sense strand
ccugcaguuugacuucuuu

SEQ ID NO: 313427 - RNA, 19 nt, Homo sapiens
  misc_RNA (1)...(19): siRNA sense strand
gcggauuccucaccaagcu

SEQ ID NO: 313428 - RNA, 19 nt, Homo sapiens
  misc_RNA (1)...(19): siRNA sense strand
gcaucuuccuggauaccau

SEQ ID NO: 313429 - RNA, 19 nt, Homo sapiens
  misc_RNA (1)...(19): siRNA sense strand
gucaucaccucccaguaca

SEQ ID NO: 313430 - RNA, 19 nt, Homo sapiens
  misc_RNA (1)...(19): siRNA sense strand
ugugacaaguucggcauug

SEQ ID NO: 313431 - RNA, 19 nt, Homo sapiens
  misc_RNA (1)...(19): siRNA sense strand
ucguaaguccuccaucaaa

SEQ ID NO: 313432 - RNA, 19 nt, Homo sapiens
  misc_RNA (1)...(19): siRNA sense strand
caaggcccacuucuucuca

SEQ ID NO: 313433 - RNA, 19 nt, Homo sapiens
  misc_RNA (1)...(19): siRNA sense strand
cgaggacagcuauauugug

SEQ ID NO: 313434 - RNA, 19 nt, Homo sapiens
  misc_RNA (1)...(19): siRNA sense strand
ucaccucccaguacaacaa

SEQ ID NO: 313435 - RNA, 19 nt, Homo sapiens
  misc_RNA (1)...(19): siRNA sense strand
gagaagcccgaggucauca

SEQ ID NO: 313436 - RNA, 19 nt, Homo sapiens
  misc_RNA (1)...(19): siRNA sense strand
uccaguccuuugagauuga

SEQ ID NO: 313437 - RNA, 19 nt, Homo sapiens
  misc_RNA (1)...(19): siRNA sense strand
ccuaugacuucgacagcau

SEQ ID NO: 313438 - RNA, 19 nt, Homo sapiens
  misc_RNA (1)...(19): siRNA sense strand
ccgccacguuuccaucguu

SEQ ID NO: 313439 - RNA, 19 nt, Homo sapiens
  misc_RNA (1)...(19): siRNA sense strand
gggugaaaccucccauugg

SEQ ID NO: 313440 - RNA, 19 nt, Homo sapiens
  misc_RNA (1)...(19): siRNA sense strand
gaguucaaguccgacaaca

SEQ ID NO: 313441 - RNA, 19 nt, Homo sapiens
  misc_RNA (1)...(19): siRNA sense strand
gaggugcgcaguggacuca

SEQ ID NO: 313442 - RNA, 19 nt, Homo sapiens
  misc_RNA (1)...(19): siRNA sense strand
gacagagggcaaugaugug

SEQ ID NO: 313443 - RNA, 19 nt, Homo sapiens
  misc_RNA (1)...(19): siRNA sense strand
gagacagagggcaaugaug

SEQ ID NO: 313444 - RNA, 19 nt, Homo sapiens
  misc_RNA (1)...(19): siRNA sense strand
caagacagcacaggcaacu

SEQ ID NO: 313445 - RNA, 19 nt, Homo sapiens
  misc_RNA (1)...(19): siRNA sense strand
ugagacagagggcaaugau

SEQ ID NO: 313446 - RNA, 19 nt, Homo sapiens
  misc_RNA (1)...(19): siRNA sense strand
gcaaugaugugugcaagua

SEQ ID NO: 313447 - RNA, 19 nt, Homo sapiens
  misc_RNA (1)...(19): siRNA sense strand
ggacagcuauauuguguuc

SEQ ID NO: 313448 - RNA, 19 nt, Homo sapiens
  misc_RNA (1)...(19): siRNA sense strand
gaggacagcuauauugugu

SEQ ID NO: 313449 - RNA, 19 nt, Homo sapiens
  misc_RNA (1)...(19): siRNA sense strand
gggagaagaucauccugaa

SEQ ID NO: 313450 - RNA, 19 nt, Homo sapiens
  misc_RNA (1)...(19): siRNA sense strand
caucaaagcugcaguucca

SEQ ID NO: 313451 - RNA, 19 nt, Homo sapiens
  misc_RNA (1)...(19): siRNA sense strand
ccaacuacccagacgauua

SEQ ID NO: 313452 - RNA, 19 nt, Homo sapiens
  misc_RNA (1)...(19): siRNA sense strand
gagcagcggugccucaaca

SEQ ID NO: 313453 - RNA, 19 nt, Homo sapiens
  misc_RNA (1)...(19): siRNA sense strand
gcucguaaguccuccauca

SEQ ID NO: 313454 - RNA, 19 nt, Homo sapiens
  misc_RNA (1)...(19): siRNA sense strand
ggagagacccugcaagaca

SEQ ID NO: 313455 - RNA, 19 nt, Homo sapiens
  misc_RNA (1)...(19): siRNA sense strand
gcaucucccugcaguuuga

SEQ ID NO: 313456 - RNA, 19 nt, Homo sapiens
  misc_RNA (1)...(19): siRNA sense strand
aaaggacuauggccacauu

SEQ ID NO: 313457 - RNA, 19 nt, Homo sapiens
  misc_RNA (1)...(19): siRNA sense strand
gggcuuugccgucaacuuu

SEQ ID NO: 313458 - RNA, 19 nt, Homo sapiens
  misc_RNA (1)...(19): siRNA sense strand
gcuaugagaagccugauga

SEQ ID NO: 313459 - RNA, 19 nt, Homo sapiens
  misc_RNA (1)...(19): siRNA sense strand
gcacugacgaggacagcua

SEQ ID NO: 313460 - RNA, 19 nt, Homo sapiens
  misc_RNA (1)...(19): siRNA sense strand
gcuauauuguguucaccua

SEQ ID NO: 313461 - RNA, 19 nt, Homo sapiens
  misc_RNA (1)...(19): siRNA sense strand
ugugggagauggagaggua

SEQ ID NO: 313462 - RNA, 19 nt, Homo sapiens
  misc_RNA (1)...(19): siRNA sense strand
ggacauugcccuggacgaa

SEQ ID NO: 313463 - RNA, 19 nt, Homo sapiens
  misc_RNA (1)...(19): siRNA sense strand
ggcaagaacugugacaagu

SEQ ID NO: 313464 - RNA, 19 nt, Homo sapiens
  misc_RNA (1)...(19): siRNA sense strand
gcauuacgcucggaacaca

SEQ ID NO: 313465 - RNA, 19 nt, Homo sapiens
  misc_RNA (1)...(19): siRNA sense strand
gacgaggacagcuauauug

SEQ ID NO: 313466 - RNA, 19 nt, Homo sapiens
  misc_RNA (1)...(19): siRNA sense strand
gagaagaucauccugaacu

SEQ ID NO: 313467 - RNA, 19 nt, Homo sapiens
  misc_RNA (1)...(19): siRNA sense strand
caguuugacuucuuugaga

SEQ ID NO: 313468 - RNA, 19 nt, Homo sapiens
  misc_RNA (1)...(19): siRNA sense strand
caagcugcauggcaaguuc

SEQ ID NO: 313469 - RNA, 19 nt, Homo sapiens
  misc_RNA (1)...(19): siRNA sense strand
ggacuauggccacauucaa

SEQ ID NO: 313470 - RNA, 19 nt, Homo sapiens
  misc_RNA (1)...(19): siRNA sense strand
ugacggguccauuaacaaa

SEQ ID NO: 313471 - RNA, 19 nt, Homo sapiens
  misc_RNA (1)...(19): siRNA sense strand
agacagagggcaaugaugu

SEQ ID NO: 313472 - RNA, 19 nt, Homo sapiens
  misc_RNA (1)...(19): siRNA sense strand
uggcuacucugcucacaug

SEQ ID NO: 313473 - RNA, 19 nt, Homo sapiens
  misc_RNA (1)...(19): siRNA sense strand
ucacauuccaguccuuuga

SEQ ID NO: 313474 - RNA, 19 nt, Homo sapiens
  misc_RNA (1)...(19): siRNA sense strand
cauggcaaguucugugguu

SEQ ID NO: 313475 - RNA, 19 nt, Homo sapiens
  misc_RNA (1)...(19): siRNA sense strand
ugacgaggacagcuauauu

SEQ ID NO: 313476 - RNA, 19 nt, Homo sapiens
  misc_RNA (1)...(19): siRNA sense strand
ggucaucaccucccaguac

SEQ ID NO: 313477 - RNA, 19 nt, Homo sapiens
  misc_RNA (1)...(19): siRNA sense strand
ccacgugggccucacauuc

SEQ ID NO: 313478 - RNA, 19 nt, Homo sapiens
  misc_RNA (1)...(19): siRNA sense strand
guggagagacccugcaaga

SEQ ID NO: 313479 - RNA, 19 nt, Homo sapiens
  misc_RNA (1)...(19): siRNA sense strand
cccgcaagcuuuacaagug

SEQ ID NO: 313480 - RNA, 19 nt, Homo sapiens
  misc_RNA (1)...(19): siRNA sense strand
agaagaucauccugaacuu

SEQ ID NO: 313481 - RNA, 19 nt, Homo sapiens
  misc_RNA (1)...(19): siRNA sense strand
caacuacccagacgauuac

SEQ ID NO: 313482 - RNA, 19 nt, Homo sapiens
  misc_RNA (1)...(19): siRNA sense strand
gagauggcuucuggaggaa

SEQ ID NO: 313483 - RNA, 19 nt, Homo sapiens
  misc_RNA (1)...(19): siRNA sense strand
cguaaguccuccaucaaag

SEQ ID NO: 313484 - RNA, 19 nt, Homo sapiens
  misc_RNA (1)...(19): siRNA sense strand
cagcugugccuacgacuau

SEQ ID NO: 313485 - RNA, 19 nt, Homo sapiens
  misc_RNA (1)...(19): siRNA sense strand
uauauuguguucaccuauc

SEQ ID NO: 313486 - RNA, 19 nt, Homo sapiens
  misc_RNA (1)...(19): siRNA sense strand
acauugcccuggacgaaga

SEQ ID NO: 313487 - RNA, 19 nt, Homo sapiens
  misc_RNA (1)...(19): siRNA sense strand
ucaacacccugggcagcua

SEQ ID NO: 313488 - RNA, 19 nt, Homo sapiens
  misc_RNA (1)...(19): siRNA sense strand
caaacucccugagccuauc

SEQ ID NO: 313489 - RNA, 19 nt, Homo sapiens
  misc_RNA (1)...(19): siRNA sense strand
caacaugcgcguggaguuc

SEQ ID NO: 313490 - RNA, 19 nt, Homo sapiens
  misc_RNA (1)...(19): siRNA sense strand
cuucaaggcccacuucuuc

SEQ ID NO: 313491 - RNA, 19 nt, Homo sapiens
  misc_RNA (1)...(19): siRNA sense strand
agacagcacaggcaacuuc

SEQ ID NO: 313492 - RNA, 19 nt, Homo sapiens
  misc_RNA (1)...(19): siRNA sense strand
ccgcaucucccugcaguuu

SEQ ID NO: 313493 - RNA, 19 nt, Homo sapiens
  misc_RNA (1)...(19): siRNA sense strand
gacuauggccacauucaau

SEQ ID NO: 313494 - RNA, 19 nt, Homo sapiens
  misc_RNA (1)...(19): siRNA sense strand
gggcuucuuugcagucuac

SEQ ID NO: 313495 - RNA, 19 nt, Homo sapiens
  misc_RNA (1)...(19): siRNA sense strand
cagcagcaauuggguugga

SEQ ID NO: 313496 - RNA, 19 nt, Homo sapiens
  misc_RNA (1)...(19): siRNA sense strand
gcgcuacuguggcuaugag

SEQ ID NO: 313497 - RNA, 19 nt, Homo sapiens
  misc_RNA (1)...(19): siRNA sense strand
ggcucaaguucgucucuga

SEQ ID NO: 313498 - RNA, 19 nt, Homo sapiens
  misc_RNA (1)...(19): siRNA sense strand
ggucauccccuuugucauu

SEQ ID NO: 313499 - RNA, 19 nt, Homo sapiens
  misc_RNA (1)...(19): siRNA sense strand
ugacuucgacagcaucaug

SEQ ID NO: 313500 - RNA, 19 nt, Homo sapiens
  misc_RNA (1)...(19): siRNA sense strand
ccaaacucccugagccuau

SEQ ID NO: 313501 - RNA, 19 nt, Homo sapiens
  misc_RNA (1)...(19): siRNA sense strand
ucugacggguccauuaaca

SEQ ID NO: 313502 - RNA, 19 nt, Homo sapiens
  misc_RNA (1)...(19): siRNA sense strand
gcagcaauuggguuggaaa

SEQ ID NO: 313503 - RNA, 19 nt, Homo sapiens
  misc_RNA (1)...(19): siRNA sense strand
ccuaucgucuccacugaca

SEQ ID NO: 313504 - RNA, 19 nt, Homo sapiens
  misc_RNA (1)...(19): siRNA sense strand
ucucugacggguccauuaa

SEQ ID NO: 313505 - RNA, 19 nt, Homo sapiens
  misc_RNA (1)...(19): siRNA sense strand
gcaguuugacuucuuugag

SEQ ID NO: 313506 - RNA, 19 nt, Homo sapiens
  misc_RNA (1)...(19): siRNA sense strand
ccugcaguuugacuucuuu

SEQ ID NO: 313507 - RNA, 19 nt, Homo sapiens
  misc_RNA (1)...(19): siRNA sense strand
gcggauuccucaccaagcu

SEQ ID NO: 313508 - RNA, 19 nt, Homo sapiens
  misc_RNA (1)...(19): siRNA sense strand
gcaucuuccuggauaccau

SEQ ID NO: 313509 - RNA, 19 nt, Homo sapiens
  misc_RNA (1)...(19): siRNA sense strand
gucaucaccucccaguaca

SEQ ID NO: 313510 - RNA, 19 nt, Homo sapiens
  misc_RNA (1)...(19): siRNA sense strand
ugugacaaguucggcauug

SEQ ID NO: 313511 - RNA, 19 nt, Homo sapiens
  misc_RNA (1)...(19): siRNA sense strand
ucguaaguccuccaucaaa

SEQ ID NO: 313512 - RNA, 19 nt, Homo sapiens
  misc_RNA (1)...(19): siRNA sense strand
caaggcccacuucuucuca

SEQ ID NO: 313513 - RNA, 19 nt, Homo sapiens
  misc_RNA (1)...(19): siRNA sense strand
cgaggacagcuauauugug

SEQ ID NO: 313514 - RNA, 19 nt, Homo sapiens
  misc_RNA (1)...(19): siRNA sense strand
ucaccucccaguacaacaa

SEQ ID NO: 313515 - RNA, 19 nt, Homo sapiens
  misc_RNA (1)...(19): siRNA sense strand
gagaagcccgaggucauca

SEQ ID NO: 313516 - RNA, 19 nt, Homo sapiens
  misc_RNA (1)...(19): siRNA sense strand
uccaguccuuugagauuga

SEQ ID NO: 313517 - RNA, 19 nt, Homo sapiens
  misc_RNA (1)...(19): siRNA sense strand
ccuaugacuucgacagcau

SEQ ID NO: 313518 - RNA, 19 nt, Homo sapiens
  misc_RNA (1)...(19): siRNA sense strand
ccgccacguuuccaucguu

SEQ ID NO: 313519 - RNA, 19 nt, Homo sapiens
  misc_RNA (1)...(19): siRNA sense strand
gggugaaaccucccauugg

SEQ ID NO: 313520 - RNA, 19 nt, Homo sapiens
  misc_RNA (1)...(19): siRNA sense strand
gaguucaaguccgacaaca

SEQ ID NO: 313521 - RNA, 19 nt, Homo sapiens
  misc_RNA (1)...(19): siRNA sense strand
gaggugcgcaguggacuca

SEQ ID NO: 313522 - RNA, 19 nt, Homo sapiens
  misc_RNA (1)...(19): siRNA sense strand
gacagagggcaaugaugug

SEQ ID NO: 313523 - RNA, 19 nt, Homo sapiens
  misc_RNA (1)...(19): siRNA sense strand
gagacagagggcaaugaug

SEQ ID NO: 313524 - RNA, 19 nt, Homo sapiens
  misc_RNA (1)...(19): siRNA sense strand
caagacagcacaggcaacu

SEQ ID NO: 313525 - RNA, 19 nt, Homo sapiens
  misc_RNA (1)...(19): siRNA sense strand
ugagacagagggcaaugau

SEQ ID NO: 313526 - RNA, 19 nt, Homo sapiens
  misc_RNA (1)...(19): siRNA sense strand
gcaaugaugugugcaagua

SEQ ID NO: 313527 - RNA, 19 nt, Homo sapiens
  misc_RNA (1)...(19): siRNA sense strand
ggacagcuauauuguguuc

SEQ ID NO: 313528 - RNA, 19 nt, Homo sapiens
  misc_RNA (1)...(19): siRNA sense strand
gaggacagcuauauugugu

SEQ ID NO: 313529 - RNA, 19 nt, Homo sapiens
  misc_RNA (1)...(19): siRNA sense strand
gggagaagaucauccugaa

SEQ ID NO: 313530 - RNA, 19 nt, Homo sapiens
  misc_RNA (1)...(19): siRNA sense strand
caucaaagcugcaguucca

SEQ ID NO: 313531 - RNA, 19 nt, Homo sapiens
  misc_RNA (1)...(19): siRNA sense strand
ccaacuacccagacgauua

SEQ ID NO: 313532 - RNA, 19 nt, Homo sapiens
  misc_RNA (1)...(19): siRNA sense strand
gagcagcggugccucaaca

SEQ ID NO: 313533 - RNA, 19 nt, Homo sapiens
  misc_RNA (1)...(19): siRNA sense strand
gcucguaaguccuccauca

SEQ ID NO: 313534 - RNA, 19 nt, Homo sapiens
  misc_RNA (1)...(19): siRNA sense strand
ggagagacccugcaagaca

SEQ ID NO: 313535 - RNA, 19 nt, Homo sapiens
  misc_RNA (1)...(19): siRNA sense strand
gcaucucccugcaguuuga

SEQ ID NO: 313536 - RNA, 19 nt, Homo sapiens
  misc_RNA (1)...(19): siRNA sense strand
aaaggacuauggccacauu

SEQ ID NO: 313537 - RNA, 19 nt, Homo sapiens
  misc_RNA (1)...(19): siRNA sense strand
gggcuuugccgucaacuuu

SEQ ID NO: 313538 - RNA, 19 nt, Homo sapiens
  misc_RNA (1)...(19): siRNA sense strand
gcuaugagaagccugauga

SEQ ID NO: 313539 - RNA, 19 nt, Homo sapiens
  misc_RNA (1)...(19): siRNA sense strand
gcacugacgaggacagcua

SEQ ID NO: 313540 - RNA, 19 nt, Homo sapiens
  misc_RNA (1)...(19): siRNA sense strand
gcuauauuguguucaccua

SEQ ID NO: 313541 - RNA, 19 nt, Homo sapiens
  misc_RNA (1)...(19): siRNA sense strand
ugugggagauggagaggua

SEQ ID NO: 313542 - RNA, 19 nt, Homo sapiens
  misc_RNA (1)...(19): siRNA sense strand
ggacauugcccuggacgaa

SEQ ID NO: 313543 - RNA, 19 nt, Homo sapiens
  misc_RNA (1)...(19): siRNA sense strand
ggcaagaacugugacaagu

SEQ ID NO: 313544 - RNA, 19 nt, Homo sapiens
  misc_RNA (1)...(19): siRNA sense strand
gcauuacgcucggaacaca

SEQ ID NO: 313545 - RNA, 19 nt, Homo sapiens
  misc_RNA (1)...(19): siRNA sense strand
gacgaggacagcuauauug

SEQ ID NO: 313546 - RNA, 19 nt, Homo sapiens
  misc_RNA (1)...(19): siRNA sense strand
gagaagaucauccugaacu

SEQ ID NO: 313547 - RNA, 19 nt, Homo sapiens
  misc_RNA (1)...(19): siRNA sense strand
caguuugacuucuuugaga

SEQ ID NO: 313548 - RNA, 19 nt, Homo sapiens
  misc_RNA (1)...(19): siRNA sense strand
caagcugcauggcaaguuc

SEQ ID NO: 313549 - RNA, 19 nt, Homo sapiens
  misc_RNA (1)...(19): siRNA sense strand
ggacuauggccacauucaa

SEQ ID NO: 313550 - RNA, 19 nt, Homo sapiens
  misc_RNA (1)...(19): siRNA sense strand
ugacggguccauuaacaaa

SEQ ID NO: 313551 - RNA, 19 nt, Homo sapiens
  misc_RNA (1)...(19): siRNA sense strand
agacagagggcaaugaugu

SEQ ID NO: 313552 - RNA, 19 nt, Homo sapiens
  misc_RNA (1)...(19): siRNA sense strand
uggcuacucugcucacaug

SEQ ID NO: 313553 - RNA, 19 nt, Homo sapiens
  misc_RNA (1)...(19): siRNA sense strand
ucacauuccaguccuuuga

SEQ ID NO: 313554 - RNA, 19 nt, Homo sapiens
  misc_RNA (1)...(19): siRNA sense strand
cauggcaaguucugugguu

SEQ ID NO: 313555 - RNA, 19 nt, Homo sapiens
  misc_RNA (1)...(19): siRNA sense strand
ugacgaggacagcuauauu

SEQ ID NO: 313556 - RNA, 19 nt, Homo sapiens
  misc_RNA (1)...(19): siRNA sense strand
ggucaucaccucccaguac

SEQ ID NO: 313557 - RNA, 19 nt, Homo sapiens
  misc_RNA (1)...(19): siRNA sense strand
ccacgugggccucacauuc

SEQ ID NO: 313558 - RNA, 19 nt, Homo sapiens
  misc_RNA (1)...(19): siRNA sense strand
guggagagacccugcaaga

SEQ ID NO: 313559 - RNA, 19 nt, Homo sapiens
  misc_RNA (1)...(19): siRNA sense strand
cccgcaagcuuuacaagug

SEQ ID NO: 313560 - RNA, 19 nt, Homo sapiens
  misc_RNA (1)...(19): siRNA sense strand
agaagaucauccugaacuu

SEQ ID NO: 313561 - RNA, 19 nt, Homo sapiens
  misc_RNA (1)...(19): siRNA sense strand
caacuacccagacgauuac

SEQ ID NO: 313562 - RNA, 19 nt, Homo sapiens
  misc_RNA (1)...(19): siRNA sense strand
gagauggcuucuggaggaa

SEQ ID NO: 313563 - RNA, 19 nt, Homo sapiens
  misc_RNA (1)...(19): siRNA sense strand
cguaaguccuccaucaaag

SEQ ID NO: 313564 - RNA, 19 nt, Homo sapiens
  misc_RNA (1)...(19): siRNA sense strand
cagcugugccuacgacuau

SEQ ID NO: 313565 - RNA, 19 nt, Homo sapiens
  misc_RNA (1)...(19): siRNA sense strand
uauauuguguucaccuauc

SEQ ID NO: 313566 - RNA, 19 nt, Homo sapiens
  misc_RNA (1)...(19): siRNA sense strand
acauugcccuggacgaaga

SEQ ID NO: 313567 - RNA, 19 nt, Homo sapiens
  misc_RNA (1)...(19): siRNA sense strand
ucaacacccugggcagcua

SEQ ID NO: 313568 - RNA, 19 nt, Homo sapiens
  misc_RNA (1)...(19): siRNA sense strand
caaacucccugagccuauc

SEQ ID NO: 313569 - RNA, 19 nt, Homo sapiens
  misc_RNA (1)...(19): siRNA sense strand
caacaugcgcguggaguuc

SEQ ID NO: 313570 - RNA, 19 nt, Homo sapiens
  misc_RNA (1)...(19): siRNA sense strand
cuucaaggcccacuucuuc

SEQ ID NO: 313571 - RNA, 19 nt, Homo sapiens
  misc_RNA (1)...(19): siRNA sense strand
agacagcacaggcaacuuc

SEQ ID NO: 313572 - RNA, 19 nt, Homo sapiens
  misc_RNA (1)...(19): siRNA sense strand
ccgcaucucccugcaguuu

SEQ ID NO: 313573 - RNA, 19 nt, Homo sapiens
  misc_RNA (1)...(19): siRNA sense strand
gacuauggccacauucaau

SEQ ID NO: 313574 - RNA, 19 nt, Homo sapiens
  misc_RNA (1)...(19): siRNA sense strand
gggcuucuuugcagucuac

SEQ ID NO: 313575 - RNA, 19 nt, Homo sapiens
  misc_RNA (1)...(19): siRNA sense strand
cagcagcaauuggguugga

SEQ ID NO: 313576 - RNA, 19 nt, Homo sapiens
  misc_RNA (1)...(19): siRNA sense strand
gcgcuacuguggcuaugag

SEQ ID NO: 313577 - RNA, 19 nt, Homo sapiens
  misc_RNA (1)...(19): siRNA sense strand
ggcucaaguucgucucuga

SEQ ID NO: 313578 - RNA, 19 nt, Homo sapiens
  misc_RNA (1)...(19): siRNA sense strand
ggucauccccuuugucauu

SEQ ID NO: 313579 - RNA, 19 nt, Homo sapiens
  misc_RNA (1)...(19): siRNA sense strand
ugacuucgacagcaucaug

SEQ ID NO: 313580 - RNA, 19 nt, Homo sapiens
  misc_RNA (1)...(19): siRNA sense strand
ccaaacucccugagccuau

SEQ ID NO: 313581 - RNA, 19 nt, Homo sapiens
  misc_RNA (1)...(19): siRNA sense strand
ucugacggguccauuaaca

SEQ ID NO: 313582 - RNA, 19 nt, Homo sapiens
  misc_RNA (1)...(19): siRNA sense strand
gcagcaauuggguuggaaa

SEQ ID NO: 313583 - RNA, 19 nt, Homo sapiens
  misc_RNA (1)...(19): siRNA sense strand
ccuaucgucuccacugaca

SEQ ID NO: 313584 - RNA, 19 nt, Homo sapiens
  misc_RNA (1)...(19): siRNA sense strand
ucucugacggguccauuaa

SEQ ID NO: 313585 - RNA, 19 nt, Homo sapiens
  misc_RNA (1)...(19): siRNA sense strand
gcaguuugacuucuuugag

SEQ ID NO: 313586 - RNA, 19 nt, Homo sapiens
  misc_RNA (1)...(19): siRNA sense strand
ccugcaguuugacuucuuu

SEQ ID NO: 313587 - RNA, 19 nt, Homo sapiens
  misc_RNA (1)...(19): siRNA sense strand
gcggauuccucaccaagcu

SEQ ID NO: 313588 - RNA, 19 nt, Homo sapiens
  misc_RNA (1)...(19): siRNA sense strand
gcaucuuccuggauaccau

SEQ ID NO: 313589 - RNA, 19 nt, Homo sapiens
  misc_RNA (1)...(19): siRNA sense strand
gucaucaccucccaguaca

SEQ ID NO: 313590 - RNA, 19 nt, Homo sapiens
  misc_RNA (1)...(19): siRNA sense strand
ugugacaaguucggcauug

SEQ ID NO: 313591 - RNA, 19 nt, Homo sapiens
  misc_RNA (1)...(19): siRNA sense strand
ucguaaguccuccaucaaa

SEQ ID NO: 313592 - RNA, 19 nt, Homo sapiens
  misc_RNA (1)...(19): siRNA sense strand
caaggcccacuucuucuca

SEQ ID NO: 313593 - RNA, 19 nt, Homo sapiens
  misc_RNA (1)...(19): siRNA sense strand
cgaggacagcuauauugug

SEQ ID NO: 313594 - RNA, 19 nt, Homo sapiens
  misc_RNA (1)...(19): siRNA sense strand
ucaccucccaguacaacaa

SEQ ID NO: 313595 - RNA, 19 nt, Homo sapiens
  misc_RNA (1)...(19): siRNA sense strand
gagaagcccgaggucauca

SEQ ID NO: 313596 - RNA, 19 nt, Homo sapiens
  misc_RNA (1)...(19): siRNA sense strand
uccaguccuuugagauuga

SEQ ID NO: 313597 - RNA, 19 nt, Homo sapiens
  misc_RNA (1)...(19): siRNA sense strand
ccuaugacuucgacagcau

SEQ ID NO: 313598 - RNA, 19 nt, Homo sapiens
  misc_RNA (1)...(19): siRNA sense strand
ccgccacguuuccaucguu

SEQ ID NO: 313599 - RNA, 19 nt, Homo sapiens
  misc_RNA (1)...(19): siRNA sense strand
gggugaaaccucccauugg

SEQ ID NO: 313600 - RNA, 19 nt, Homo sapiens
  misc_RNA (1)...(19): siRNA sense strand
gaguucaaguccgacaaca

SEQ ID NO: 313601 - RNA, 19 nt, Homo sapiens
  misc_RNA (1)...(19): siRNA sense strand
gaggugcgcaguggacuca

SEQ ID NO: 313602 - RNA, 19 nt, Homo sapiens
  misc_RNA (1)...(19): siRNA sense strand
gacagagggcaaugaugug

SEQ ID NO: 313603 - RNA, 19 nt, Homo sapiens
  misc_RNA (1)...(19): siRNA sense strand
gagacagagggcaaugaug

SEQ ID NO: 313604 - RNA, 19 nt, Homo sapiens
  misc_RNA (1)...(19): siRNA sense strand
caagacagcacaggcaacu

SEQ ID NO: 313605 - RNA, 19 nt, Homo sapiens
  misc_RNA (1)...(19): siRNA sense strand
ugagacagagggcaaugau

SEQ ID NO: 313606 - RNA, 19 nt, Homo sapiens
  misc_RNA (1)...(19): siRNA sense strand
ggacagcuauauuguguuc

SEQ ID NO: 313607 - RNA, 19 nt, Homo sapiens
  misc_RNA (1)...(19): siRNA sense strand
gaggacagcuauauugugu

SEQ ID NO: 313608 - RNA, 19 nt, Homo sapiens
  misc_RNA (1)...(19): siRNA sense strand
gggagaagaucauccugaa

SEQ ID NO: 313609 - RNA, 19 nt, Homo sapiens
  misc_RNA (1)...(19): siRNA sense strand
caucaaagcugcaguucca

SEQ ID NO: 313610 - RNA, 19 nt, Homo sapiens
  misc_RNA (1)...(19): siRNA sense strand
ccaacuacccagacgauua

SEQ ID NO: 313611 - RNA, 19 nt, Homo sapiens
  misc_RNA (1)...(19): siRNA sense strand
gagcagcggugccucaaca

SEQ ID NO: 313612 - RNA, 19 nt, Homo sapiens
  misc_RNA (1)...(19): siRNA sense strand
gcucguaaguccuccauca

SEQ ID NO: 313613 - RNA, 19 nt, Homo sapiens
  misc_RNA (1)...(19): siRNA sense strand
ggagagacccugcaagaca

SEQ ID NO: 313614 - RNA, 19 nt, Homo sapiens
  misc_RNA (1)...(19): siRNA sense strand
aaaggacuauggccacauu

SEQ ID NO: 313615 - RNA, 19 nt, Homo sapiens
  misc_RNA (1)...(19): siRNA sense strand
gggcuuugccgucaacuuu

SEQ ID NO: 313616 - RNA, 19 nt, Homo sapiens
  misc_RNA (1)...(19): siRNA sense strand
gcuaugagaagccugauga

SEQ ID NO: 313617 - RNA, 19 nt, Homo sapiens
  misc_RNA (1)...(19): siRNA sense strand
gcacugacgaggacagcua

SEQ ID NO: 313618 - RNA, 19 nt, Homo sapiens
  misc_RNA (1)...(19): siRNA sense strand
gcuauauuguguucaccua

SEQ ID NO: 313619 - RNA, 19 nt, Homo sapiens
  misc_RNA (1)...(19): siRNA sense strand
ugugggagauggagaggua

SEQ ID NO: 313620 - RNA, 19 nt, Homo sapiens
  misc_RNA (1)...(19): siRNA sense strand
ggacauugcccuggacgaa

SEQ ID NO: 313621 - RNA, 19 nt, Homo sapiens
  misc_RNA (1)...(19): siRNA sense strand
ggcaagaacugugacaagu

SEQ ID NO: 313622 - RNA, 19 nt, Homo sapiens
  misc_RNA (1)...(19): siRNA sense strand
gcauuacgcucggaacaca

SEQ ID NO: 313623 - RNA, 19 nt, Homo sapiens
  misc_RNA (1)...(19): siRNA sense strand
gacgaggacagcuauauug

SEQ ID NO: 313624 - RNA, 19 nt, Homo sapiens
  misc_RNA (1)...(19): siRNA sense strand
gagaagaucauccugaacu

SEQ ID NO: 313625 - RNA, 19 nt, Homo sapiens
  misc_RNA (1)...(19): siRNA sense strand
ggacuauggccacauucaa

SEQ ID NO: 313626 - RNA, 19 nt, Homo sapiens
  misc_RNA (1)...(19): siRNA sense strand
ugacggguccauuaacaaa

SEQ ID NO: 313627 - RNA, 19 nt, Homo sapiens
  misc_RNA (1)...(19): siRNA sense strand
uggcuacucugcucacaug

SEQ ID NO: 313628 - RNA, 19 nt, Homo sapiens
  misc_RNA (1)...(19): siRNA sense strand
ucacauuccaguccuuuga

SEQ ID NO: 313629 - RNA, 19 nt, Homo sapiens
  misc_RNA (1)...(19): siRNA sense strand
ugacgaggacagcuauauu

SEQ ID NO: 313630 - RNA, 19 nt, Homo sapiens
  misc_RNA (1)...(19): siRNA sense strand
ccacgugggccucacauuc

SEQ ID NO: 313631 - RNA, 19 nt, Homo sapiens
  misc_RNA (1)...(19): siRNA sense strand
guggagagacccugcaaga

SEQ ID NO: 313632 - RNA, 19 nt, Homo sapiens
  misc_RNA (1)...(19): siRNA sense strand
cccgcaagcuuuacaagug

SEQ ID NO: 313633 - RNA, 19 nt, Homo sapiens
  misc_RNA (1)...(19): siRNA sense strand
agaagaucauccugaacuu

SEQ ID NO: 313634 - RNA, 19 nt, Homo sapiens
  misc_RNA (1)...(19): siRNA sense strand
caacuacccagacgauuac

SEQ ID NO: 313635 - RNA, 19 nt, Homo sapiens
  misc_RNA (1)...(19): siRNA sense strand
gagauggcuucuggaggaa

SEQ ID NO: 313636 - RNA, 19 nt, Homo sapiens
  misc_RNA (1)...(19): siRNA sense strand
cguaaguccuccaucaaag

SEQ ID NO: 313637 - RNA, 19 nt, Homo sapiens
  misc_RNA (1)...(19): siRNA sense strand
cagcugugccuacgacuau

SEQ ID NO: 313638 - RNA, 19 nt, Homo sapiens
  misc_RNA (1)...(19): siRNA sense strand
uauauuguguucaccuauc

SEQ ID NO: 313639 - RNA, 19 nt, Homo sapiens
  misc_RNA (1)...(19): siRNA sense strand
ucaacacccugggcagcua

SEQ ID NO: 313640 - RNA, 19 nt, Homo sapiens
  misc_RNA (1)...(19): siRNA sense strand
caaacucccugagccuauc

SEQ ID NO: 313641 - RNA, 19 nt, Homo sapiens
  misc_RNA (1)...(19): siRNA sense strand
acauugcccuggacgaaga

SEQ ID NO: 313642 - RNA, 19 nt, Homo sapiens
  misc_RNA (1)...(19): siRNA sense strand
agacagcacaggcaacuuc

SEQ ID NO: 313643 - RNA, 19 nt, Homo sapiens
  misc_RNA (1)...(19): siRNA sense strand
gacuauggccacauucaau

SEQ ID NO: 313644 - RNA, 19 nt, Homo sapiens
  misc_RNA (1)...(19): siRNA sense strand
gggcuucuuugcagucuac

SEQ ID NO: 313645 - RNA, 19 nt, Homo sapiens
  misc_RNA (1)...(19): siRNA sense strand
cagcagcaauuggguugga

SEQ ID NO: 313646 - RNA, 19 nt, Homo sapiens
  misc_RNA (1)...(19): siRNA sense strand
gcgcuacuguggcuaugag

SEQ ID NO: 313647 - RNA, 19 nt, Homo sapiens
  misc_RNA (1)...(19): siRNA sense strand
ggcucaaguucgucucuga

SEQ ID NO: 313648 - RNA, 19 nt, Homo sapiens
  misc_RNA (1)...(19): siRNA sense strand
ggucauccccuuugucauu

SEQ ID NO: 313649 - RNA, 19 nt, Homo sapiens
  misc_RNA (1)...(19): siRNA sense strand
ugacuucgacagcaucaug

SEQ ID NO: 313650 - RNA, 19 nt, Homo sapiens
  misc_RNA (1)...(19): siRNA sense strand
ccaaacucccugagccuau

SEQ ID NO: 313651 - RNA, 19 nt, Homo sapiens
  misc_RNA (1)...(19): siRNA sense strand
ucugacggguccauuaaca

SEQ ID NO: 313652 - RNA, 19 nt, Homo sapiens
  misc_RNA (1)...(19): siRNA sense strand
gcagcaauuggguuggaaa

SEQ ID NO: 313653 - RNA, 19 nt, Homo sapiens
  misc_RNA (1)...(19): siRNA sense strand
ccuaucgucuccacugaca

SEQ ID NO: 313654 - RNA, 19 nt, Homo sapiens
  misc_RNA (1)...(19): siRNA sense strand
ucucugacggguccauuaa

SEQ ID NO: 313655 - RNA, 19 nt, Homo sapiens
  misc_RNA (1)...(19): siRNA sense strand
gcaucuuccuggauaccau

SEQ ID NO: 313656 - RNA, 19 nt, Homo sapiens
  misc_RNA (1)...(19): siRNA sense strand
ugugacaaguucggcauug

SEQ ID NO: 313657 - RNA, 19 nt, Homo sapiens
  misc_RNA (1)...(19): siRNA sense strand
ucguaaguccuccaucaaa

SEQ ID NO: 313658 - RNA, 19 nt, Homo sapiens
  misc_RNA (1)...(19): siRNA sense strand
cgaggacagcuauauugug

SEQ ID NO: 313659 - RNA, 19 nt, Homo sapiens
  misc_RNA (1)...(19): siRNA sense strand
uccaguccuuugagauuga

SEQ ID NO: 313660 - RNA, 19 nt, Homo sapiens
  misc_RNA (1)...(19): siRNA sense strand
ccuaugacuucgacagcau

SEQ ID NO: 313661 - RNA, 19 nt, Homo sapiens
  misc_RNA (1)...(19): siRNA sense strand
ccgccacguuuccaucguu

SEQ ID NO: 313662 - RNA, 19 nt, Homo sapiens
  misc_RNA (1)...(19): siRNA sense strand
gggugaaaccucccauugg

SEQ ID NO: 313663 - RNA, 19 nt, Homo sapiens
  misc_RNA (1)...(19): siRNA sense strand
caagacagcacaggcaacu

SEQ ID NO: 313664 - RNA, 19 nt, Homo sapiens
  misc_RNA (1)...(19): siRNA sense strand
ggacagcuauauuguguuc

SEQ ID NO: 313665 - RNA, 19 nt, Homo sapiens
  misc_RNA (1)...(19): siRNA sense strand
gaggacagcuauauugugu

SEQ ID NO: 313666 - RNA, 19 nt, Homo sapiens
  misc_RNA (1)...(19): siRNA sense strand
caucaaagcugcaguucca

SEQ ID NO: 313667 - RNA, 19 nt, Homo sapiens
  misc_RNA (1)...(19): siRNA sense strand
gcucguaaguccuccauca

SEQ ID NO: 313668 - RNA, 19 nt, Homo sapiens
  misc_RNA (1)...(19): siRNA sense strand
gcacugacgaggacagcua

SEQ ID NO: 313669 - RNA, 19 nt, Homo sapiens
  misc_RNA (1)...(19): siRNA sense strand
gcuauauuguguucaccua

SEQ ID NO: 313670 - RNA, 19 nt, Homo sapiens
  misc_RNA (1)...(19): siRNA sense strand
ugugggagauggagaggua

SEQ ID NO: 313671 - RNA, 19 nt, Homo sapiens
  misc_RNA (1)...(19): siRNA sense strand
ggacauugcccuggacgaa

SEQ ID NO: 313672 - RNA, 19 nt, Homo sapiens
  misc_RNA (1)...(19): siRNA sense strand
ggcaagaacugugacaagu

SEQ ID NO: 313673 - RNA, 19 nt, Homo sapiens
  misc_RNA (1)...(19): siRNA sense strand
gacgaggacagcuauauug

SEQ ID NO: 313674 - RNA, 19 nt, Homo sapiens
  misc_RNA (1)...(19): siRNA sense strand
ugacgaggacagcuauauu

SEQ ID NO: 313675 - RNA, 19 nt, Homo sapiens
  misc_RNA (1)...(19): siRNA sense strand
cguaaguccuccaucaaag

SEQ ID NO: 313676 - RNA, 19 nt, Homo sapiens
  misc_RNA (1)...(19): siRNA sense strand
acauugcccuggacgaaga

SEQ ID NO: 313677 - RNA, 19 nt, Homo sapiens
  misc_RNA (1)...(19): siRNA sense strand
uauauuguguucaccuauc

SEQ ID NO: 313678 - RNA, 19 nt, Homo sapiens
  misc_RNA (1)...(19): siRNA sense strand
ggucauccccuuugucauu

SEQ ID NO: 313679 - RNA, 19 nt, Homo sapiens
  misc_RNA (1)...(19): siRNA sense strand
ugugacaaguucggcauug

SEQ ID NO: 313680 - RNA, 19 nt, Homo sapiens
  misc_RNA (1)...(19): siRNA sense strand
ucguaaguccuccaucaaa

SEQ ID NO: 313681 - RNA, 19 nt, Homo sapiens
  misc_RNA (1)...(19): siRNA sense strand
cgaggacagcuauauugug

SEQ ID NO: 313682 - RNA, 19 nt, Homo sapiens
  misc_RNA (1)...(19): siRNA sense strand
ccgccacguuuccaucguu

SEQ ID NO: 313683 - RNA, 19 nt, Homo sapiens
  misc_RNA (1)...(19): siRNA sense strand
ucacgucgcuccagcaaga

SEQ ID NO: 313684 - RNA, 19 nt, Homo sapiens
  misc_RNA (1)...(19): siRNA sense strand
ccaaggaggugcugguuca

SEQ ID NO: 313685 - RNA, 19 nt, Homo sapiens
  misc_RNA (1)...(19): siRNA sense strand
gaggaggcauuccggcaaa

SEQ ID NO: 313686 - RNA, 19 nt, Homo sapiens
  misc_RNA (1)...(19): siRNA sense strand
gagagauccuccgacaauu

SEQ ID NO: 313687 - RNA, 19 nt, Homo sapiens
  misc_RNA (1)...(19): siRNA sense strand
ucacugagguccgugucua

SEQ ID NO: 313688 - RNA, 19 nt, Homo sapiens
  misc_RNA (1)...(19): siRNA sense strand
gcaggaaggaggaggcauu

SEQ ID NO: 313689 - RNA, 19 nt, Homo sapiens
  misc_RNA (1)...(19): siRNA sense strand
cuaaaaugaucaaggguua

SEQ ID NO: 313690 - RNA, 19 nt, Homo sapiens
  misc_RNA (1)...(19): siRNA sense strand
agagggagguggucgaugu

SEQ ID NO: 313691 - RNA, 19 nt, Homo sapiens
  misc_RNA (1)...(19): siRNA sense strand
ggaagagagagaggccuua

SEQ ID NO: 313692 - RNA, 19 nt, Homo sapiens
  misc_RNA (1)...(19): siRNA sense strand
gagauccuccgacaauuca

SEQ ID NO: 313693 - RNA, 19 nt, Homo sapiens
  misc_RNA (1)...(19): siRNA sense strand
ccaagccggucuuccauac

SEQ ID NO: 313694 - RNA, 19 nt, Homo sapiens
  misc_RNA (1)...(19): siRNA sense strand
ggcaaaagcuggccaugga

SEQ ID NO: 313695 - RNA, 19 nt, Homo sapiens
  misc_RNA (1)...(19): siRNA sense strand
cuggaaauaugacagacaa

SEQ ID NO: 313696 - RNA, 19 nt, Homo sapiens
  misc_RNA (1)...(19): siRNA sense strand
gaagagagagaggccuuag

SEQ ID NO: 313697 - RNA, 19 nt, Homo sapiens
  misc_RNA (1)...(19): siRNA sense strand
ggaaauaugacagacaaaa

SEQ ID NO: 313698 - RNA, 19 nt, Homo sapiens
  misc_RNA (1)...(19): siRNA sense strand
cgaggacggcgacgacuau

SEQ ID NO: 313699 - RNA, 19 nt, Homo sapiens
  misc_RNA (1)...(19): siRNA sense strand
gcuccucuccuccaaacaa

SEQ ID NO: 313700 - RNA, 19 nt, Homo sapiens
  misc_RNA (1)...(19): siRNA sense strand
agagagagaggccuuagug

SEQ ID NO: 313701 - RNA, 19 nt, Homo sapiens
  misc_RNA (1)...(19): siRNA sense strand
gucuacaacugguuugcaa

SEQ ID NO: 313702 - RNA, 19 nt, Homo sapiens
  misc_RNA (1)...(19): siRNA sense strand
ggacggcgacgacuaugac

SEQ ID NO: 313703 - RNA, 19 nt, Homo sapiens
  misc_RNA (1)...(19): siRNA sense strand
ccagaguucagucaacaga

SEQ ID NO: 313704 - RNA, 19 nt, Homo sapiens
  misc_RNA (1)...(19): siRNA sense strand
ggaaugcaacagggcagaa

SEQ ID NO: 313705 - RNA, 19 nt, Homo sapiens
  misc_RNA (1)...(19): siRNA sense strand
gaaugcaacagggcagaau

SEQ ID NO: 313706 - RNA, 19 nt, Homo sapiens
  misc_RNA (1)...(19): siRNA sense strand
caaccagacaguccagagu

SEQ ID NO: 313707 - RNA, 19 nt, Homo sapiens
  misc_RNA (1)...(19): siRNA sense strand
cagcuccucuccuccaaac

SEQ ID NO: 313708 - RNA, 19 nt, Homo sapiens
  misc_RNA (1)...(19): siRNA sense strand
uggaccggaugcucaguga

SEQ ID NO: 313709 - RNA, 19 nt, Homo sapiens
  misc_RNA (1)...(19): siRNA sense strand
gagcccaccaacaagaaga

SEQ ID NO: 313710 - RNA, 19 nt, Homo sapiens
  misc_RNA (1)...(19): siRNA sense strand
gaaauaugacagacaaaag

SEQ ID NO: 313711 - RNA, 19 nt, Homo sapiens
  misc_RNA (1)...(19): siRNA sense strand
agagauccuccgacaauuc

SEQ ID NO: 313712 - RNA, 19 nt, Homo sapiens
  misc_RNA (1)...(19): siRNA sense strand
ugagguccgugucuacaac

SEQ ID NO: 313713 - RNA, 19 nt, Homo sapiens
  misc_RNA (1)...(19): siRNA sense strand
gcucacgucgcuccagcaa

SEQ ID NO: 313714 - RNA, 19 nt, Homo sapiens
  misc_RNA (1)...(19): siRNA sense strand
cgucccagcaaaucuugua

SEQ ID NO: 313715 - RNA, 19 nt, Homo sapiens
  misc_RNA (1)...(19): siRNA sense strand
ucacgucgcuccagcaaga

SEQ ID NO: 313716 - RNA, 19 nt, Homo sapiens
  misc_RNA (1)...(19): siRNA sense strand
ccaaggaggugcugguuca

SEQ ID NO: 313717 - RNA, 19 nt, Homo sapiens
  misc_RNA (1)...(19): siRNA sense strand
gaggaggcauuccggcaaa

SEQ ID NO: 313718 - RNA, 19 nt, Homo sapiens
  misc_RNA (1)...(19): siRNA sense strand
gagagauccuccgacaauu

SEQ ID NO: 313719 - RNA, 19 nt, Homo sapiens
  misc_RNA (1)...(19): siRNA sense strand
ucacugagguccgugucua

SEQ ID NO: 313720 - RNA, 19 nt, Homo sapiens
  misc_RNA (1)...(19): siRNA sense strand
gcaggaaggaggaggcauu

SEQ ID NO: 313721 - RNA, 19 nt, Homo sapiens
  misc_RNA (1)...(19): siRNA sense strand
cuaaaaugaucaaggguua

SEQ ID NO: 313722 - RNA, 19 nt, Homo sapiens
  misc_RNA (1)...(19): siRNA sense strand
agagggagguggucgaugu

SEQ ID NO: 313723 - RNA, 19 nt, Homo sapiens
  misc_RNA (1)...(19): siRNA sense strand
ggaagagagagaggccuua

SEQ ID NO: 313724 - RNA, 19 nt, Homo sapiens
  misc_RNA (1)...(19): siRNA sense strand
gagauccuccgacaauuca

SEQ ID NO: 313725 - RNA, 19 nt, Homo sapiens
  misc_RNA (1)...(19): siRNA sense strand
ccaagccggucuuccauac

SEQ ID NO: 313726 - RNA, 19 nt, Homo sapiens
  misc_RNA (1)...(19): siRNA sense strand
ggcaaaagcuggccaugga

SEQ ID NO: 313727 - RNA, 19 nt, Homo sapiens
  misc_RNA (1)...(19): siRNA sense strand
cuggaaauaugacagacaa

SEQ ID NO: 313728 - RNA, 19 nt, Homo sapiens
  misc_RNA (1)...(19): siRNA sense strand
gaagagagagaggccuuag

SEQ ID NO: 313729 - RNA, 19 nt, Homo sapiens
  misc_RNA (1)...(19): siRNA sense strand
ggaaauaugacagacaaaa

SEQ ID NO: 313730 - RNA, 19 nt, Homo sapiens
  misc_RNA (1)...(19): siRNA sense strand
cgaggacggcgacgacuau

SEQ ID NO: 313731 - RNA, 19 nt, Homo sapiens
  misc_RNA (1)...(19): siRNA sense strand
gcuccucuccuccaaacaa

SEQ ID NO: 313732 - RNA, 19 nt, Homo sapiens
  misc_RNA (1)...(19): siRNA sense strand
agagagagaggccuuagug

SEQ ID NO: 313733 - RNA, 19 nt, Homo sapiens
  misc_RNA (1)...(19): siRNA sense strand
gucuacaacugguuugcaa

SEQ ID NO: 313734 - RNA, 19 nt, Homo sapiens
  misc_RNA (1)...(19): siRNA sense strand
ggacggcgacgacuaugac

SEQ ID NO: 313735 - RNA, 19 nt, Homo sapiens
  misc_RNA (1)...(19): siRNA sense strand
ccagaguucagucaacaga

SEQ ID NO: 313736 - RNA, 19 nt, Homo sapiens
  misc_RNA (1)...(19): siRNA sense strand
ggaaugcaacagggcagaa

SEQ ID NO: 313737 - RNA, 19 nt, Homo sapiens
  misc_RNA (1)...(19): siRNA sense strand
gaaugcaacagggcagaau

SEQ ID NO: 313738 - RNA, 19 nt, Homo sapiens
  misc_RNA (1)...(19): siRNA sense strand
caaccagacaguccagagu

SEQ ID NO: 313739 - RNA, 19 nt, Homo sapiens
  misc_RNA (1)...(19): siRNA sense strand
cagcuccucuccuccaaac

SEQ ID NO: 313740 - RNA, 19 nt, Homo sapiens
  misc_RNA (1)...(19): siRNA sense strand
uggaccggaugcucaguga

SEQ ID NO: 313741 - RNA, 19 nt, Homo sapiens
  misc_RNA (1)...(19): siRNA sense strand
gagcccaccaacaagaaga

SEQ ID NO: 313742 - RNA, 19 nt, Homo sapiens
  misc_RNA (1)...(19): siRNA sense strand
gaaauaugacagacaaaag

SEQ ID NO: 313743 - RNA, 19 nt, Homo sapiens
  misc_RNA (1)...(19): siRNA sense strand
agagauccuccgacaauuc

SEQ ID NO: 313744 - RNA, 19 nt, Homo sapiens
  misc_RNA (1)...(19): siRNA sense strand
ugagguccgugucuacaac

SEQ ID NO: 313745 - RNA, 19 nt, Homo sapiens
  misc_RNA (1)...(19): siRNA sense strand
gcucacgucgcuccagcaa

SEQ ID NO: 313746 - RNA, 19 nt, Homo sapiens
  misc_RNA (1)...(19): siRNA sense strand
cgucccagcaaaucuugua

SEQ ID NO: 313747 - RNA, 19 nt, Homo sapiens
  misc_RNA (1)...(19): siRNA sense strand
ggacaaggauaacacaaug

SEQ ID NO: 313748 - RNA, 19 nt, Homo sapiens
  misc_RNA (1)...(19): siRNA sense strand
caaaugggcuuacaacagu

SEQ ID NO: 313749 - RNA, 19 nt, Homo sapiens
  misc_RNA (1)...(19): siRNA sense strand
ggacagugcucacgacaca

SEQ ID NO: 313750 - RNA, 19 nt, Homo sapiens
  misc_RNA (1)...(19): siRNA sense strand
cagcuacccugaaauauau

SEQ ID NO: 313751 - RNA, 19 nt, Homo sapiens
  misc_RNA (1)...(19): siRNA sense strand
uagaagcgguauuaaagua

SEQ ID NO: 313752 - RNA, 19 nt, Homo sapiens
  misc_RNA (1)...(19): siRNA sense strand
ucacguggcuuacagguau

SEQ ID NO: 313753 - RNA, 19 nt, Homo sapiens
  misc_RNA (1)...(19): siRNA sense strand
ggaagcaggacaaggauaa

SEQ ID NO: 313754 - RNA, 19 nt, Homo sapiens
  misc_RNA (1)...(19): siRNA sense strand
gcacguggcccuaaagaug

SEQ ID NO: 313755 - RNA, 19 nt, Homo sapiens
  misc_RNA (1)...(19): siRNA sense strand
ucacaucuauauccaaguu

SEQ ID NO: 313756 - RNA, 19 nt, Homo sapiens
  misc_RNA (1)...(19): siRNA sense strand
ggacuaauuuggcgcagau

SEQ ID NO: 313757 - RNA, 19 nt, Homo sapiens
  misc_RNA (1)...(19): siRNA sense strand
caacaaugguggcuaugau

SEQ ID NO: 313758 - RNA, 19 nt, Homo sapiens
  misc_RNA (1)...(19): siRNA sense strand
cagcuggccuguaugauug

SEQ ID NO: 313759 - RNA, 19 nt, Homo sapiens
  misc_RNA (1)...(19): siRNA sense strand
caaguuaccuccaccuucu

SEQ ID NO: 313760 - RNA, 19 nt, Homo sapiens
  misc_RNA (1)...(19): siRNA sense strand
aacaagcaaugaagcaaua

SEQ ID NO: 313761 - RNA, 19 nt, Homo sapiens
  misc_RNA (1)...(19): siRNA sense strand
gggaccagcuggccuguau

SEQ ID NO: 313762 - RNA, 19 nt, Homo sapiens
  misc_RNA (1)...(19): siRNA sense strand
gagcucaucaagaagaaua

SEQ ID NO: 313763 - RNA, 19 nt, Homo sapiens
  misc_RNA (1)...(19): siRNA sense strand
uaaagauggugcggaauga

SEQ ID NO: 313764 - RNA, 19 nt, Homo sapiens
  misc_RNA (1)...(19): siRNA sense strand
gaacaagcaaugaagcaau

SEQ ID NO: 313765 - RNA, 19 nt, Homo sapiens
  misc_RNA (1)...(19): siRNA sense strand
gguagaagcgguauuaaag

SEQ ID NO: 313766 - RNA, 19 nt, Homo sapiens
  misc_RNA (1)...(19): siRNA sense strand
caugacaccugaacaagca

SEQ ID NO: 313767 - RNA, 19 nt, Homo sapiens
  misc_RNA (1)...(19): siRNA sense strand
ccaaacugaggacuaauuu

SEQ ID NO: 313768 - RNA, 19 nt, Homo sapiens
  misc_RNA (1)...(19): siRNA sense strand
gauaacacaaugaauguca

SEQ ID NO: 313769 - RNA, 19 nt, Homo sapiens
  misc_RNA (1)...(19): siRNA sense strand
gagaaaacgucagugaaaa

SEQ ID NO: 313770 - RNA, 19 nt, Homo sapiens
  misc_RNA (1)...(19): siRNA sense strand
cagagcuccugacggguua

SEQ ID NO: 313771 - RNA, 19 nt, Homo sapiens
  misc_RNA (1)...(19): siRNA sense strand
gcccaacaaugguggcuau

SEQ ID NO: 313772 - RNA, 19 nt, Homo sapiens
  misc_RNA (1)...(19): siRNA sense strand
ggagaaaacgucagugaaa

SEQ ID NO: 313773 - RNA, 19 nt, Homo sapiens
  misc_RNA (1)...(19): siRNA sense strand
caggguagaagcgguauua

SEQ ID NO: 313774 - RNA, 19 nt, Homo sapiens
  misc_RNA (1)...(19): siRNA sense strand
caaguuugcccacucgauu

SEQ ID NO: 313775 - RNA, 19 nt, Homo sapiens
  misc_RNA (1)...(19): siRNA sense strand
gcagaugacagaugccaau

SEQ ID NO: 313776 - RNA, 19 nt, Homo sapiens
  misc_RNA (1)...(19): siRNA sense strand
ggguagaagcgguauuaaa

SEQ ID NO: 313777 - RNA, 19 nt, Homo sapiens
  misc_RNA (1)...(19): siRNA sense strand
ggugcuaucacaucuauau

SEQ ID NO: 313778 - RNA, 19 nt, Homo sapiens
  misc_RNA (1)...(19): siRNA sense strand
ggccuacgaucacaaaguc

SEQ ID NO: 313779 - RNA, 19 nt, Homo sapiens
  misc_RNA (1)...(19): siRNA sense strand
ccagcuggccuguaugauu

SEQ ID NO: 313780 - RNA, 19 nt, Homo sapiens
  misc_RNA (1)...(19): siRNA sense strand
uuaccgggcuccagaagug

SEQ ID NO: 313781 - RNA, 19 nt, Homo sapiens
  misc_RNA (1)...(19): siRNA sense strand
cuuccaaacugaggacuaa

SEQ ID NO: 313782 - RNA, 19 nt, Homo sapiens
  misc_RNA (1)...(19): siRNA sense strand
gaccagcuggccuguauga

SEQ ID NO: 313783 - RNA, 19 nt, Homo sapiens
  misc_RNA (1)...(19): siRNA sense strand
gccuuugguucgcaaguuu

SEQ ID NO: 313784 - RNA, 19 nt, Homo sapiens
  misc_RNA (1)...(19): siRNA sense strand
aaacugaggacuaauuugg

SEQ ID NO: 313785 - RNA, 19 nt, Homo sapiens
  misc_RNA (1)...(19): siRNA sense strand
gcuaucacaucuauaucca

SEQ ID NO: 313786 - RNA, 19 nt, Homo sapiens
  misc_RNA (1)...(19): siRNA sense strand
ggacagauccagguucaac

SEQ ID NO: 313787 - RNA, 19 nt, Homo sapiens
  misc_RNA (1)...(19): siRNA sense strand
ccaaaugggcuuacaacag

SEQ ID NO: 313788 - RNA, 19 nt, Homo sapiens
  misc_RNA (1)...(19): siRNA sense strand
gagcuccaccucucuaaag

SEQ ID NO: 313789 - RNA, 19 nt, Homo sapiens
  misc_RNA (1)...(19): siRNA sense strand
agaggacaguguugccaaa

SEQ ID NO: 313790 - RNA, 19 nt, Homo sapiens
  misc_RNA (1)...(19): siRNA sense strand
gcaugcccauugauaugug

SEQ ID NO: 313791 - RNA, 19 nt, Homo sapiens
  misc_RNA (1)...(19): siRNA sense strand
cuaaagauggugcggaaug

SEQ ID NO: 313792 - RNA, 19 nt, Homo sapiens
  misc_RNA (1)...(19): siRNA sense strand
aaggauaacacaaugaaug

SEQ ID NO: 313793 - RNA, 19 nt, Homo sapiens
  misc_RNA (1)...(19): siRNA sense strand
gauuuuggcuccaguuguu

SEQ ID NO: 313794 - RNA, 19 nt, Homo sapiens
  misc_RNA (1)...(19): siRNA sense strand
guagaagcgguauuaaagu

SEQ ID NO: 313795 - RNA, 19 nt, Homo sapiens
  misc_RNA (1)...(19): siRNA sense strand
caaggccuacgaucacaaa

SEQ ID NO: 313796 - RNA, 19 nt, Homo sapiens
  misc_RNA (1)...(19): siRNA sense strand
acaaggauaacacaaugaa

SEQ ID NO: 313797 - RNA, 19 nt, Homo sapiens
  misc_RNA (1)...(19): siRNA sense strand
gcaagcagcggaggagauc

SEQ ID NO: 313798 - RNA, 19 nt, Homo sapiens
  misc_RNA (1)...(19): siRNA sense strand
gagcaugaaccucuaugag

SEQ ID NO: 313799 - RNA, 19 nt, Homo sapiens
  misc_RNA (1)...(19): siRNA sense strand
ccggugcuaucacaucuau

SEQ ID NO: 313800 - RNA, 19 nt, Homo sapiens
  misc_RNA (1)...(19): siRNA sense strand
gggcuucagucugccuuug

SEQ ID NO: 313801 - RNA, 19 nt, Homo sapiens
  misc_RNA (1)...(19): siRNA sense strand
gacaaggauaacacaauga

SEQ ID NO: 313802 - RNA, 19 nt, Homo sapiens
  misc_RNA (1)...(19): siRNA sense strand
ggagauccgaauccuggaa

SEQ ID NO: 313803 - RNA, 19 nt, Homo sapiens
  misc_RNA (1)...(19): siRNA sense strand
ggcaugcccucacagaaac

SEQ ID NO: 313804 - RNA, 19 nt, Homo sapiens
  misc_RNA (1)...(19): siRNA sense strand
caaccaaaugggcuuacaa

SEQ ID NO: 313805 - RNA, 19 nt, Homo sapiens
  misc_RNA (1)...(19): siRNA sense strand
ggagcuccaccucucuaaa

SEQ ID NO: 313806 - RNA, 19 nt, Homo sapiens
  misc_RNA (1)...(19): siRNA sense strand
ccaccucucuaaaguccau

SEQ ID NO: 313807 - RNA, 19 nt, Homo sapiens
  misc_RNA (1)...(19): siRNA sense strand
ugucacgacucucucagau

SEQ ID NO: 313808 - RNA, 19 nt, Homo sapiens
  misc_RNA (1)...(19): siRNA sense strand
gcucacgacacaaccaaau

SEQ ID NO: 313809 - RNA, 19 nt, Homo sapiens
  misc_RNA (1)...(19): siRNA sense strand
caaugaagcaauacaugca

SEQ ID NO: 313810 - RNA, 19 nt, Homo sapiens
  misc_RNA (1)...(19): siRNA sense strand
ugaggaggcgguugccaaa

SEQ ID NO: 313811 - RNA, 19 nt, Homo sapiens
  misc_RNA (1)...(19): siRNA sense strand
ccaacaaugguggcuauga

SEQ ID NO: 313812 - RNA, 19 nt, Homo sapiens
  misc_RNA (1)...(19): siRNA sense strand
ucuugggucuaaaugcuaa

SEQ ID NO: 313813 - RNA, 19 nt, Homo sapiens
  misc_RNA (1)...(19): siRNA sense strand
agaagcgguauuaaaguaa

SEQ ID NO: 313814 - RNA, 19 nt, Homo sapiens
  misc_RNA (1)...(19): siRNA sense strand
ccacaucugcaugacguuu

SEQ ID NO: 313815 - RNA, 19 nt, Homo sapiens
  misc_RNA (1)...(19): siRNA sense strand
gcaggacaaggauaacaca

SEQ ID NO: 313816 - RNA, 19 nt, Homo sapiens
  misc_RNA (1)...(19): siRNA sense strand
gggucuaaaugcuaagaag

SEQ ID NO: 313817 - RNA, 19 nt, Homo sapiens
  misc_RNA (1)...(19): siRNA sense strand
cuucgaacaccaugagauu

SEQ ID NO: 313818 - RNA, 19 nt, Homo sapiens
  misc_RNA (1)...(19): siRNA sense strand
agauccagguucaacaguu

SEQ ID NO: 313819 - RNA, 19 nt, Homo sapiens
  misc_RNA (1)...(19): siRNA sense strand
acaaugguggcuaugauga

SEQ ID NO: 313820 - RNA, 19 nt, Homo sapiens
  misc_RNA (1)...(19): siRNA sense strand
caggugggcccaacaaugg

SEQ ID NO: 313821 - RNA, 19 nt, Homo sapiens
  misc_RNA (1)...(19): siRNA sense strand
ccuguaugauugaacuguu

SEQ ID NO: 313822 - RNA, 19 nt, Homo sapiens
  misc_RNA (1)...(19): siRNA sense strand
gauccugcagugcgcauga

SEQ ID NO: 313823 - RNA, 19 nt, Homo sapiens
  misc_RNA (1)...(19): siRNA sense strand
ggucaaggccuacgaucac

SEQ ID NO: 313824 - RNA, 19 nt, Homo sapiens
  misc_RNA (1)...(19): siRNA sense strand
uaaagcagcaggguagaag

SEQ ID NO: 313825 - RNA, 19 nt, Homo sapiens
  misc_RNA (1)...(19): siRNA sense strand
cuuaagcccgagaacauuu

SEQ ID NO: 313826 - RNA, 19 nt, Homo sapiens
  misc_RNA (1)...(19): siRNA sense strand
gcucaucaagaagaauaaa

SEQ ID NO: 313827 - RNA, 19 nt, Homo sapiens
  misc_RNA (1)...(19): siRNA sense strand
acaucugcaugacguuuga

SEQ ID NO: 313828 - RNA, 19 nt, Homo sapiens
  misc_RNA (1)...(19): siRNA sense strand
ugacaggugggcccaacaa

SEQ ID NO: 313829 - RNA, 19 nt, Homo sapiens
  misc_RNA (1)...(19): siRNA sense strand
ggacaguguugccaaaacu

SEQ ID NO: 313830 - RNA, 19 nt, Homo sapiens
  misc_RNA (1)...(19): siRNA sense strand
gcagugcuuggaugcuuug

SEQ ID NO: 313831 - RNA, 19 nt, Homo sapiens
  misc_RNA (1)...(19): siRNA sense strand
aaugguggcuaugaugaug

SEQ ID NO: 313832 - RNA, 19 nt, Homo sapiens
  misc_RNA (1)...(19): siRNA sense strand
acggacagauccagguuca

SEQ ID NO: 313833 - RNA, 19 nt, Homo sapiens
  misc_RNA (1)...(19): siRNA sense strand
agauggcucugugguccua

SEQ ID NO: 313834 - RNA, 19 nt, Homo sapiens
  misc_RNA (1)...(19): siRNA sense strand
uaaauuccagggcuucagu

SEQ ID NO: 313835 - RNA, 19 nt, Homo sapiens
  misc_RNA (1)...(19): siRNA sense strand
caccugaacaagcaaugaa

SEQ ID NO: 313836 - RNA, 19 nt, Homo sapiens
  misc_RNA (1)...(19): siRNA sense strand
acagaugccaaugggaaua

SEQ ID NO: 313837 - RNA, 19 nt, Homo sapiens
  misc_RNA (1)...(19): siRNA sense strand
augaagcaauacaugcaaa

SEQ ID NO: 313838 - RNA, 19 nt, Homo sapiens
  misc_RNA (1)...(19): siRNA sense strand
uggaacaccugcggaagca

SEQ ID NO: 313839 - RNA, 19 nt, Homo sapiens
  misc_RNA (1)...(19): siRNA sense strand
gggagcuccaccucucuaa

SEQ ID NO: 313840 - RNA, 19 nt, Homo sapiens
  misc_RNA (1)...(19): siRNA sense strand
cuguaugauugaacuguug

SEQ ID NO: 313841 - RNA, 19 nt, Homo sapiens
  misc_RNA (1)...(19): siRNA sense strand
caaggauaacacaaugaau

SEQ ID NO: 313842 - RNA, 19 nt, Homo sapiens
  misc_RNA (1)...(19): siRNA sense strand
gacagaugccaaugggaau

SEQ ID NO: 313843 - RNA, 19 nt, Homo sapiens
  misc_RNA (1)...(19): siRNA sense strand
acacaaccaaaugggcuua

SEQ ID NO: 313844 - RNA, 19 nt, Homo sapiens
  misc_RNA (1)...(19): siRNA sense strand
uggcaugcccauugauaug

SEQ ID NO: 313845 - RNA, 19 nt, Homo sapiens
  misc_RNA (1)...(19): siRNA sense strand
gcuuggaugcuuugcacaa

SEQ ID NO: 313846 - RNA, 19 nt, Homo sapiens
  misc_RNA (1)...(19): siRNA sense strand
gcaaccacaucugcaugac

SEQ ID NO: 313847 - RNA, 19 nt, Homo sapiens
  misc_RNA (1)...(19): siRNA sense strand
ggacaaggauaacacaaug

SEQ ID NO: 313848 - RNA, 19 nt, Homo sapiens
  misc_RNA (1)...(19): siRNA sense strand
caaaugggcuuacaacagu

SEQ ID NO: 313849 - RNA, 19 nt, Homo sapiens
  misc_RNA (1)...(19): siRNA sense strand
ggacagugcucacgacaca

SEQ ID NO: 313850 - RNA, 19 nt, Homo sapiens
  misc_RNA (1)...(19): siRNA sense strand
cagcuacccugaaauauau

SEQ ID NO: 313851 - RNA, 19 nt, Homo sapiens
  misc_RNA (1)...(19): siRNA sense strand
uagaagcgguauuaaagua

SEQ ID NO: 313852 - RNA, 19 nt, Homo sapiens
  misc_RNA (1)...(19): siRNA sense strand
gcaguaagcacacaaugaa

SEQ ID NO: 313853 - RNA, 19 nt, Homo sapiens
  misc_RNA (1)...(19): siRNA sense strand
ucacguggcuuacagguau

SEQ ID NO: 313854 - RNA, 19 nt, Homo sapiens
  misc_RNA (1)...(19): siRNA sense strand
ggaagcaggacaaggauaa

SEQ ID NO: 313855 - RNA, 19 nt, Homo sapiens
  misc_RNA (1)...(19): siRNA sense strand
gcacguggcccuaaagaug

SEQ ID NO: 313856 - RNA, 19 nt, Homo sapiens
  misc_RNA (1)...(19): siRNA sense strand
ucacaucuauauccaaguu

SEQ ID NO: 313857 - RNA, 19 nt, Homo sapiens
  misc_RNA (1)...(19): siRNA sense strand
ggacuaauuuggcgcagau

SEQ ID NO: 313858 - RNA, 19 nt, Homo sapiens
  misc_RNA (1)...(19): siRNA sense strand
caacaaugguggcuaugau

SEQ ID NO: 313859 - RNA, 19 nt, Homo sapiens
  misc_RNA (1)...(19): siRNA sense strand
cagcuggccuguaugauug

SEQ ID NO: 313860 - RNA, 19 nt, Homo sapiens
  misc_RNA (1)...(19): siRNA sense strand
caaguuaccuccaccuucu

SEQ ID NO: 313861 - RNA, 19 nt, Homo sapiens
  misc_RNA (1)...(19): siRNA sense strand
aacaagcaaugaagcaaua

SEQ ID NO: 313862 - RNA, 19 nt, Homo sapiens
  misc_RNA (1)...(19): siRNA sense strand
gggaccagcuggccuguau

SEQ ID NO: 313863 - RNA, 19 nt, Homo sapiens
  misc_RNA (1)...(19): siRNA sense strand
gagcucaucaagaagaaua

SEQ ID NO: 313864 - RNA, 19 nt, Homo sapiens
  misc_RNA (1)...(19): siRNA sense strand
uaaagauggugcggaauga

SEQ ID NO: 313865 - RNA, 19 nt, Homo sapiens
  misc_RNA (1)...(19): siRNA sense strand
gaacaagcaaugaagcaau

SEQ ID NO: 313866 - RNA, 19 nt, Homo sapiens
  misc_RNA (1)...(19): siRNA sense strand
gguagaagcgguauuaaag

SEQ ID NO: 313867 - RNA, 19 nt, Homo sapiens
  misc_RNA (1)...(19): siRNA sense strand
guaagcacacaaugaauga

SEQ ID NO: 313868 - RNA, 19 nt, Homo sapiens
  misc_RNA (1)...(19): siRNA sense strand
caugacaccugaacaagca

SEQ ID NO: 313869 - RNA, 19 nt, Homo sapiens
  misc_RNA (1)...(19): siRNA sense strand
ccaaacugaggacuaauuu

SEQ ID NO: 313870 - RNA, 19 nt, Homo sapiens
  misc_RNA (1)...(19): siRNA sense strand
gauaacacaaugaauguca

SEQ ID NO: 313871 - RNA, 19 nt, Homo sapiens
  misc_RNA (1)...(19): siRNA sense strand
gagaaaacgucagugaaaa

SEQ ID NO: 313872 - RNA, 19 nt, Homo sapiens
  misc_RNA (1)...(19): siRNA sense strand
cagagcuccugacggguua

SEQ ID NO: 313873 - RNA, 19 nt, Homo sapiens
  misc_RNA (1)...(19): siRNA sense strand
gcccaacaaugguggcuau

SEQ ID NO: 313874 - RNA, 19 nt, Homo sapiens
  misc_RNA (1)...(19): siRNA sense strand
ggagaaaacgucagugaaa

SEQ ID NO: 313875 - RNA, 19 nt, Homo sapiens
  misc_RNA (1)...(19): siRNA sense strand
caggguagaagcgguauua

SEQ ID NO: 313876 - RNA, 19 nt, Homo sapiens
  misc_RNA (1)...(19): siRNA sense strand
caaguuugcccacucgauu

SEQ ID NO: 313877 - RNA, 19 nt, Homo sapiens
  misc_RNA (1)...(19): siRNA sense strand
gcagaugacagaugccaau

SEQ ID NO: 313878 - RNA, 19 nt, Homo sapiens
  misc_RNA (1)...(19): siRNA sense strand
ggguagaagcgguauuaaa

SEQ ID NO: 313879 - RNA, 19 nt, Homo sapiens
  misc_RNA (1)...(19): siRNA sense strand
ggugcuaucacaucuauau

SEQ ID NO: 313880 - RNA, 19 nt, Homo sapiens
  misc_RNA (1)...(19): siRNA sense strand
ggccuacgaucacaaaguc

SEQ ID NO: 313881 - RNA, 19 nt, Homo sapiens
  misc_RNA (1)...(19): siRNA sense strand
ccagcuggccuguaugauu

SEQ ID NO: 313882 - RNA, 19 nt, Homo sapiens
  misc_RNA (1)...(19): siRNA sense strand
uuaccgggcuccagaagug

SEQ ID NO: 313883 - RNA, 19 nt, Homo sapiens
  misc_RNA (1)...(19): siRNA sense strand
ugaaugaucaccugcaugu

SEQ ID NO: 313884 - RNA, 19 nt, Homo sapiens
  misc_RNA (1)...(19): siRNA sense strand
cuuccaaacugaggacuaa

SEQ ID NO: 313885 - RNA, 19 nt, Homo sapiens
  misc_RNA (1)...(19): siRNA sense strand
gaccagcuggccuguauga

SEQ ID NO: 313886 - RNA, 19 nt, Homo sapiens
  misc_RNA (1)...(19): siRNA sense strand
ggcaguaagcacacaauga

SEQ ID NO: 313887 - RNA, 19 nt, Homo sapiens
  misc_RNA (1)...(19): siRNA sense strand
aaacugaggacuaauuugg

SEQ ID NO: 313888 - RNA, 19 nt, Homo sapiens
  misc_RNA (1)...(19): siRNA sense strand
gccuuugguucgcaaguuu

SEQ ID NO: 313889 - RNA, 19 nt, Homo sapiens
  misc_RNA (1)...(19): siRNA sense strand
ccaaaugggcuuacaacag

SEQ ID NO: 313890 - RNA, 19 nt, Homo sapiens
  misc_RNA (1)...(19): siRNA sense strand
gcuaucacaucuauaucca

SEQ ID NO: 313891 - RNA, 19 nt, Homo sapiens
  misc_RNA (1)...(19): siRNA sense strand
ggacagauccagguucaac

SEQ ID NO: 313892 - RNA, 19 nt, Homo sapiens
  misc_RNA (1)...(19): siRNA sense strand
gagcuccaccucucuaaag

SEQ ID NO: 313893 - RNA, 19 nt, Homo sapiens
  misc_RNA (1)...(19): siRNA sense strand
agaggacaguguugccaaa

SEQ ID NO: 313894 - RNA, 19 nt, Homo sapiens
  misc_RNA (1)...(19): siRNA sense strand
gcaugcccauugauaugug

SEQ ID NO: 313895 - RNA, 19 nt, Homo sapiens
  misc_RNA (1)...(19): siRNA sense strand
cuaaagauggugcggaaug

SEQ ID NO: 313896 - RNA, 19 nt, Homo sapiens
  misc_RNA (1)...(19): siRNA sense strand
aaggauaacacaaugaaug

SEQ ID NO: 313897 - RNA, 19 nt, Homo sapiens
  misc_RNA (1)...(19): siRNA sense strand
gauuuuggcuccaguuguu

SEQ ID NO: 313898 - RNA, 19 nt, Homo sapiens
  misc_RNA (1)...(19): siRNA sense strand
guagaagcgguauuaaagu

SEQ ID NO: 313899 - RNA, 19 nt, Homo sapiens
  misc_RNA (1)...(19): siRNA sense strand
caaggccuacgaucacaaa

SEQ ID NO: 313900 - RNA, 19 nt, Homo sapiens
  misc_RNA (1)...(19): siRNA sense strand
acaaggauaacacaaugaa

SEQ ID NO: 313901 - RNA, 19 nt, Homo sapiens
  misc_RNA (1)...(19): siRNA sense strand
gcaagcagcggaggagauc

SEQ ID NO: 313902 - RNA, 19 nt, Homo sapiens
  misc_RNA (1)...(19): siRNA sense strand
gagcaugaaccucuaugag

SEQ ID NO: 313903 - RNA, 19 nt, Homo sapiens
  misc_RNA (1)...(19): siRNA sense strand
ccggugcuaucacaucuau

SEQ ID NO: 313904 - RNA, 19 nt, Homo sapiens
  misc_RNA (1)...(19): siRNA sense strand
gggcuucagucugccuuug

SEQ ID NO: 313905 - RNA, 19 nt, Homo sapiens
  misc_RNA (1)...(19): siRNA sense strand
gacaaggauaacacaauga

SEQ ID NO: 313906 - RNA, 19 nt, Homo sapiens
  misc_RNA (1)...(19): siRNA sense strand
caaccaaaugggcuuacaa

SEQ ID NO: 313907 - RNA, 19 nt, Homo sapiens
  misc_RNA (1)...(19): siRNA sense strand
ggcaugcccucacagaaac

SEQ ID NO: 313908 - RNA, 19 nt, Homo sapiens
  misc_RNA (1)...(19): siRNA sense strand
ggagauccgaauccuggaa

SEQ ID NO: 313909 - RNA, 19 nt, Homo sapiens
  misc_RNA (1)...(19): siRNA sense strand
ggagcuccaccucucuaaa

SEQ ID NO: 313910 - RNA, 19 nt, Homo sapiens
  misc_RNA (1)...(19): siRNA sense strand
ccaccucucuaaaguccau

SEQ ID NO: 313911 - RNA, 19 nt, Homo sapiens
  misc_RNA (1)...(19): siRNA sense strand
ugucacgacucucucagau

SEQ ID NO: 313912 - RNA, 19 nt, Homo sapiens
  misc_RNA (1)...(19): siRNA sense strand
gcucacgacacaaccaaau

SEQ ID NO: 313913 - RNA, 19 nt, Homo sapiens
  misc_RNA (1)...(19): siRNA sense strand
caaugaagcaauacaugca

SEQ ID NO: 313914 - RNA, 19 nt, Homo sapiens
  misc_RNA (1)...(19): siRNA sense strand
ugaggaggcgguugccaaa

SEQ ID NO: 313915 - RNA, 19 nt, Homo sapiens
  misc_RNA (1)...(19): siRNA sense strand
ccaacaaugguggcuauga

SEQ ID NO: 313916 - RNA, 19 nt, Homo sapiens
  misc_RNA (1)...(19): siRNA sense strand
ucuugggucuaaaugcuaa

SEQ ID NO: 313917 - RNA, 19 nt, Homo sapiens
  misc_RNA (1)...(19): siRNA sense strand
agaagcgguauuaaaguaa

SEQ ID NO: 313918 - RNA, 19 nt, Homo sapiens
  misc_RNA (1)...(19): siRNA sense strand
ccacaucugcaugacguuu

SEQ ID NO: 313919 - RNA, 19 nt, Homo sapiens
  misc_RNA (1)...(19): siRNA sense strand
gcaggacaaggauaacaca

SEQ ID NO: 313920 - RNA, 19 nt, Homo sapiens
  misc_RNA (1)...(19): siRNA sense strand
gggucuaaaugcuaagaag

SEQ ID NO: 313921 - RNA, 19 nt, Homo sapiens
  misc_RNA (1)...(19): siRNA sense strand
cuucgaacaccaugagauu

SEQ ID NO: 313922 - RNA, 19 nt, Homo sapiens
  misc_RNA (1)...(19): siRNA sense strand
agauccagguucaacaguu

SEQ ID NO: 313923 - RNA, 19 nt, Homo sapiens
  misc_RNA (1)...(19): siRNA sense strand
acaaugguggcuaugauga

SEQ ID NO: 313924 - RNA, 19 nt, Homo sapiens
  misc_RNA (1)...(19): siRNA sense strand
caggugggcccaacaaugg

SEQ ID NO: 313925 - RNA, 19 nt, Homo sapiens
  misc_RNA (1)...(19): siRNA sense strand
ccuguaugauugaacuguu

SEQ ID NO: 313926 - RNA, 19 nt, Homo sapiens
  misc_RNA (1)...(19): siRNA sense strand
gauccugcagugcgcauga

SEQ ID NO: 313927 - RNA, 19 nt, Homo sapiens
  misc_RNA (1)...(19): siRNA sense strand
ggucaaggccuacgaucac

SEQ ID NO: 313928 - RNA, 19 nt, Homo sapiens
  misc_RNA (1)...(19): siRNA sense strand
uaaagcagcaggguagaag

SEQ ID NO: 313929 - RNA, 19 nt, Homo sapiens
  misc_RNA (1)...(19): siRNA sense strand
cuuaagcccgagaacauuu

SEQ ID NO: 313930 - RNA, 19 nt, Homo sapiens
  misc_RNA (1)...(19): siRNA sense strand
gcucaucaagaagaauaaa

SEQ ID NO: 313931 - RNA, 19 nt, Homo sapiens
  misc_RNA (1)...(19): siRNA sense strand
acaucugcaugacguuuga

SEQ ID NO: 313932 - RNA, 19 nt, Homo sapiens
  misc_RNA (1)...(19): siRNA sense strand
ugacaggugggcccaacaa

SEQ ID NO: 313933 - RNA, 19 nt, Homo sapiens
  misc_RNA (1)...(19): siRNA sense strand
ggacaguguugccaaaacu

SEQ ID NO: 313934 - RNA, 19 nt, Homo sapiens
  misc_RNA (1)...(19): siRNA sense strand
gcagugcuuggaugcuuug

SEQ ID NO: 313935 - RNA, 19 nt, Homo sapiens
  misc_RNA (1)...(19): siRNA sense strand
aaugguggcuaugaugaug

SEQ ID NO: 313936 - RNA, 19 nt, Homo sapiens
  misc_RNA (1)...(19): siRNA sense strand
acggacagauccagguuca

SEQ ID NO: 313937 - RNA, 19 nt, Homo sapiens
  misc_RNA (1)...(19): siRNA sense strand
agauggcucugugguccua

SEQ ID NO: 313938 - RNA, 19 nt, Homo sapiens
  misc_RNA (1)...(19): siRNA sense strand
uaaauuccagggcuucagu

SEQ ID NO: 313939 - RNA, 19 nt, Homo sapiens
  misc_RNA (1)...(19): siRNA sense strand
aguaagcacacaaugaaug

SEQ ID NO: 313940 - RNA, 19 nt, Homo sapiens
  misc_RNA (1)...(19): siRNA sense strand
acagaugccaaugggaaua

SEQ ID NO: 313941 - RNA, 19 nt, Homo sapiens
  misc_RNA (1)...(19): siRNA sense strand
gggagcuccaccucucuaa

SEQ ID NO: 313942 - RNA, 19 nt, Homo sapiens
  misc_RNA (1)...(19): siRNA sense strand
caccugaacaagcaaugaa

SEQ ID NO: 313943 - RNA, 19 nt, Homo sapiens
  misc_RNA (1)...(19): siRNA sense strand
augaagcaauacaugcaaa

SEQ ID NO: 313944 - RNA, 19 nt, Homo sapiens
  misc_RNA (1)...(19): siRNA sense strand
uggaacaccugcggaagca

SEQ ID NO: 313945 - RNA, 19 nt, Homo sapiens
  misc_RNA (1)...(19): siRNA sense strand
cuguaugauugaacuguug

SEQ ID NO: 313946 - RNA, 19 nt, Homo sapiens
  misc_RNA (1)...(19): siRNA sense strand
gacagaugccaaugggaau

SEQ ID NO: 313947 - RNA, 19 nt, Homo sapiens
  misc_RNA (1)...(19): siRNA sense strand
gaaauugacucgcucauug

SEQ ID NO: 313948 - RNA, 19 nt, Homo sapiens
  misc_RNA (1)...(19): siRNA sense strand
acacggagaugaaguacua

SEQ ID NO: 313949 - RNA, 19 nt, Homo sapiens
  misc_RNA (1)...(19): siRNA sense strand
gagaugaaguacuauauag

SEQ ID NO: 313950 - RNA, 19 nt, Homo sapiens
  misc_RNA (1)...(19): siRNA sense strand
cgaaagaacucaggaagga

SEQ ID NO: 313951 - RNA, 19 nt, Homo sapiens
  misc_RNA (1)...(19): siRNA sense strand
cagaggaucuaccaguaua

SEQ ID NO: 313952 - RNA, 19 nt, Homo sapiens
  misc_RNA (1)...(19): siRNA sense strand
ggagaugaaguacuauaua

SEQ ID NO: 313953 - RNA, 19 nt, Homo sapiens
  misc_RNA (1)...(19): siRNA sense strand
gcacaucaaugagguauac

SEQ ID NO: 313954 - RNA, 19 nt, Homo sapiens
  misc_RNA (1)...(19): siRNA sense strand
gcacggcacugcucuuucu

SEQ ID NO: 313955 - RNA, 19 nt, Homo sapiens
  misc_RNA (1)...(19): siRNA sense strand
gcaacaagaaggagaagaa

SEQ ID NO: 313956 - RNA, 19 nt, Homo sapiens
  misc_RNA (1)...(19): siRNA sense strand
ccaaugaggucgaccagau

SEQ ID NO: 313957 - RNA, 19 nt, Homo sapiens
  misc_RNA (1)...(19): siRNA sense strand
ccaucaagaucaucaagaa

SEQ ID NO: 313958 - RNA, 19 nt, Homo sapiens
  misc_RNA (1)...(19): siRNA sense strand
gccagaggaucuaccagua

SEQ ID NO: 313959 - RNA, 19 nt, Homo sapiens
  misc_RNA (1)...(19): siRNA sense strand
uauuugagcugcuguccua

SEQ ID NO: 313960 - RNA, 19 nt, Homo sapiens
  misc_RNA (1)...(19): siRNA sense strand
cgacaaccaugacuacauc

SEQ ID NO: 313961 - RNA, 19 nt, Homo sapiens
  misc_RNA (1)...(19): siRNA sense strand
ucaaugagguauacuaugc

SEQ ID NO: 313962 - RNA, 19 nt, Homo sapiens
  misc_RNA (1)...(19): siRNA sense strand
gcccaaggcucgcaaguac

SEQ ID NO: 313963 - RNA, 19 nt, Homo sapiens
  misc_RNA (1)...(19): siRNA sense strand
ccuacgaccuggccauuga

SEQ ID NO: 313964 - RNA, 19 nt, Homo sapiens
  misc_RNA (1)...(19): siRNA sense strand
ggugaaagccuaugaucau

SEQ ID NO: 313965 - RNA, 19 nt, Homo sapiens
  misc_RNA (1)...(19): siRNA sense strand
ccuacaagcacaucaauga

SEQ ID NO: 313966 - RNA, 19 nt, Homo sapiens
  misc_RNA (1)...(19): siRNA sense strand
agaagaagguccugaacca

SEQ ID NO: 313967 - RNA, 19 nt, Homo sapiens
  misc_RNA (1)...(19): siRNA sense strand
ucaagaucaucaagaacaa

SEQ ID NO: 313968 - RNA, 19 nt, Homo sapiens
  misc_RNA (1)...(19): siRNA sense strand
gcagcgccaucaagauugu

SEQ ID NO: 313969 - RNA, 19 nt, Homo sapiens
  misc_RNA (1)...(19): siRNA sense strand
ggacgaaagaacucaggaa

SEQ ID NO: 313970 - RNA, 19 nt, Homo sapiens
  misc_RNA (1)...(19): siRNA sense strand
ccaucaagauuguggacuu

SEQ ID NO: 313971 - RNA, 19 nt, Homo sapiens
  misc_RNA (1)...(19): siRNA sense strand
ggaccuaccgcuacagcaa

SEQ ID NO: 313972 - RNA, 19 nt, Homo sapiens
  misc_RNA (1)...(19): siRNA sense strand
cgaaauugacucgcucauu

SEQ ID NO: 313973 - RNA, 19 nt, Homo sapiens
  misc_RNA (1)...(19): siRNA sense strand
caucaaugagguauacuau

SEQ ID NO: 313974 - RNA, 19 nt, Homo sapiens
  misc_RNA (1)...(19): siRNA sense strand
ccaaggcucgcaaguacuu

SEQ ID NO: 313975 - RNA, 19 nt, Homo sapiens
  misc_RNA (1)...(19): siRNA sense strand
uauacuaugcgaagaagaa

SEQ ID NO: 313976 - RNA, 19 nt, Homo sapiens
  misc_RNA (1)...(19): siRNA sense strand
gcuggagcgcuacgaaauu

SEQ ID NO: 313977 - RNA, 19 nt, Homo sapiens
  misc_RNA (1)...(19): siRNA sense strand
gaccagaugaaccgcauug

SEQ ID NO: 313978 - RNA, 19 nt, Homo sapiens
  misc_RNA (1)...(19): siRNA sense strand
gagcucagcaucauucacu

SEQ ID NO: 313979 - RNA, 19 nt, Homo sapiens
  misc_RNA (1)...(19): siRNA sense strand
caucaagauuguggacuuc

SEQ ID NO: 313980 - RNA, 19 nt, Homo sapiens
  misc_RNA (1)...(19): siRNA sense strand
cuggagcgcuacgaaauug

SEQ ID NO: 313981 - RNA, 19 nt, Homo sapiens
  misc_RNA (1)...(19): siRNA sense strand
cuacagcaaccgauauugu

SEQ ID NO: 313982 - RNA, 19 nt, Homo sapiens
  misc_RNA (1)...(19): siRNA sense strand
gaaccaggcccagauugag

SEQ ID NO: 313983 - RNA, 19 nt, Homo sapiens
  misc_RNA (1)...(19): siRNA sense strand
ugaaccaggcccagauuga

SEQ ID NO: 313984 - RNA, 19 nt, Homo sapiens
  misc_RNA (1)...(19): siRNA sense strand
gugaaagccuaugaucauc

SEQ ID NO: 313985 - RNA, 19 nt, Homo sapiens
  misc_RNA (1)...(19): siRNA sense strand
gagguauacuaugcgaaga

SEQ ID NO: 313986 - RNA, 19 nt, Homo sapiens
  misc_RNA (1)...(19): siRNA sense strand
ccagcuccaucuccaguuc

SEQ ID NO: 313987 - RNA, 19 nt, Homo sapiens
  misc_RNA (1)...(19): siRNA sense strand
gguauacuaugcgaagaag

SEQ ID NO: 313988 - RNA, 19 nt, Homo sapiens
  misc_RNA (1)...(19): siRNA sense strand
ccagaggaucuaccaguau

SEQ ID NO: 313989 - RNA, 19 nt, Homo sapiens
  misc_RNA (1)...(19): siRNA sense strand
cgaccuggccauugacaug

SEQ ID NO: 313990 - RNA, 19 nt, Homo sapiens
  misc_RNA (1)...(19): siRNA sense strand
ggagcacacgcagguauug

SEQ ID NO: 313991 - RNA, 19 nt, Homo sapiens
  misc_RNA (1)...(19): siRNA sense strand
gaagaagguccugaaccau

SEQ ID NO: 313992 - RNA, 19 nt, Homo sapiens
  misc_RNA (1)...(19): siRNA sense strand
ccaccugugccugguauuu

SEQ ID NO: 313993 - RNA, 19 nt, Homo sapiens
  misc_RNA (1)...(19): siRNA sense strand
caagaucaucaagaacaaa

SEQ ID NO: 313994 - RNA, 19 nt, Homo sapiens
  misc_RNA (1)...(19): siRNA sense strand
cagcaugacacggagauga

SEQ ID NO: 313995 - RNA, 19 nt, Homo sapiens
  misc_RNA (1)...(19): siRNA sense strand
acaagaaggagaagaaggu

SEQ ID NO: 313996 - RNA, 19 nt, Homo sapiens
  misc_RNA (1)...(19): siRNA sense strand
ccagaugaaccgcauugug

SEQ ID NO: 313997 - RNA, 19 nt, Homo sapiens
  misc_RNA (1)...(19): siRNA sense strand
gcucgcaaguacuuugaac

SEQ ID NO: 313998 - RNA, 19 nt, Homo sapiens
  misc_RNA (1)...(19): siRNA sense strand
ccucuucaguggcuccaau

SEQ ID NO: 313999 - RNA, 19 nt, Homo sapiens
  misc_RNA (1)...(19): siRNA sense strand
caacaagaaggagaagaag

SEQ ID NO: 314000 - RNA, 19 nt, Homo sapiens
  misc_RNA (1)...(19): siRNA sense strand
caaugaggucgaccagaug

SEQ ID NO: 314001 - RNA, 19 nt, Homo sapiens
  misc_RNA (1)...(19): siRNA sense strand
ggagaagaagguccugaac

SEQ ID NO: 314002 - RNA, 19 nt, Homo sapiens
  misc_RNA (1)...(19): siRNA sense strand
gaggaucuaccaguauauc

SEQ ID NO: 314003 - RNA, 19 nt, Homo sapiens
  misc_RNA (1)...(19): siRNA sense strand
gaccuacaagcacaucaau

SEQ ID NO: 314004 - RNA, 19 nt, Homo sapiens
  misc_RNA (1)...(19): siRNA sense strand
cggagaugaaguacuauau

SEQ ID NO: 314005 - RNA, 19 nt, Homo sapiens
  misc_RNA (1)...(19): siRNA sense strand
ugcgcaugcuggaguauga

SEQ ID NO: 314006 - RNA, 19 nt, Homo sapiens
  misc_RNA (1)...(19): siRNA sense strand
caagcacaucaaugaggua

SEQ ID NO: 314007 - RNA, 19 nt, Homo sapiens
  misc_RNA (1)...(19): siRNA sense strand
gcugcauccuuguggagau

SEQ ID NO: 314008 - RNA, 19 nt, Homo sapiens
  misc_RNA (1)...(19): siRNA sense strand
cgagcaacaagaaggagaa

SEQ ID NO: 314009 - RNA, 19 nt, Homo sapiens
  misc_RNA (1)...(19): siRNA sense strand
ugacgacaaccaugacuac

SEQ ID NO: 314010 - RNA, 19 nt, Homo sapiens
  misc_RNA (1)...(19): siRNA sense strand
caggagcacacgcagguau

SEQ ID NO: 314011 - RNA, 19 nt, Homo sapiens
  misc_RNA (1)...(19): siRNA sense strand
gaaauugacucgcucauug

SEQ ID NO: 314012 - RNA, 19 nt, Homo sapiens
  misc_RNA (1)...(19): siRNA sense strand
acacggagaugaaguacua

SEQ ID NO: 314013 - RNA, 19 nt, Homo sapiens
  misc_RNA (1)...(19): siRNA sense strand
gagaugaaguacuauauag

SEQ ID NO: 314014 - RNA, 19 nt, Homo sapiens
  misc_RNA (1)...(19): siRNA sense strand
cgaaagaacucaggaagga

SEQ ID NO: 314015 - RNA, 19 nt, Homo sapiens
  misc_RNA (1)...(19): siRNA sense strand
cagaggaucuaccaguaua

SEQ ID NO: 314016 - RNA, 19 nt, Homo sapiens
  misc_RNA (1)...(19): siRNA sense strand
ggagaugaaguacuauaua

SEQ ID NO: 314017 - RNA, 19 nt, Homo sapiens
  misc_RNA (1)...(19): siRNA sense strand
gcacaucaaugagguauac

SEQ ID NO: 314018 - RNA, 19 nt, Homo sapiens
  misc_RNA (1)...(19): siRNA sense strand
gcacggcacugcucuuucu

SEQ ID NO: 314019 - RNA, 19 nt, Homo sapiens
  misc_RNA (1)...(19): siRNA sense strand
gcaacaagaaggagaagaa

SEQ ID NO: 314020 - RNA, 19 nt, Homo sapiens
  misc_RNA (1)...(19): siRNA sense strand
ccaaugaggucgaccagau

SEQ ID NO: 314021 - RNA, 19 nt, Homo sapiens
  misc_RNA (1)...(19): siRNA sense strand
ccaucaagaucaucaagaa

SEQ ID NO: 314022 - RNA, 19 nt, Homo sapiens
  misc_RNA (1)...(19): siRNA sense strand
gccagaggaucuaccagua

SEQ ID NO: 314023 - RNA, 19 nt, Homo sapiens
  misc_RNA (1)...(19): siRNA sense strand
uauuugagcugcuguccua

SEQ ID NO: 314024 - RNA, 19 nt, Homo sapiens
  misc_RNA (1)...(19): siRNA sense strand
cgacaaccaugacuacauc

SEQ ID NO: 314025 - RNA, 19 nt, Homo sapiens
  misc_RNA (1)...(19): siRNA sense strand
ucaaugagguauacuaugc

SEQ ID NO: 314026 - RNA, 19 nt, Homo sapiens
  misc_RNA (1)...(19): siRNA sense strand
gcccaaggcucgcaaguac

SEQ ID NO: 314027 - RNA, 19 nt, Homo sapiens
  misc_RNA (1)...(19): siRNA sense strand
ccuacgaccuggccauuga

SEQ ID NO: 314028 - RNA, 19 nt, Homo sapiens
  misc_RNA (1)...(19): siRNA sense strand
ggugaaagccuaugaucau

SEQ ID NO: 314029 - RNA, 19 nt, Homo sapiens
  misc_RNA (1)...(19): siRNA sense strand
ccuacaagcacaucaauga

SEQ ID NO: 314030 - RNA, 19 nt, Homo sapiens
  misc_RNA (1)...(19): siRNA sense strand
agaagaagguccugaacca

SEQ ID NO: 314031 - RNA, 19 nt, Homo sapiens
  misc_RNA (1)...(19): siRNA sense strand
ucaagaucaucaagaacaa

SEQ ID NO: 314032 - RNA, 19 nt, Homo sapiens
  misc_RNA (1)...(19): siRNA sense strand
gcagcgccaucaagauugu

SEQ ID NO: 314033 - RNA, 19 nt, Homo sapiens
  misc_RNA (1)...(19): siRNA sense strand
ggacgaaagaacucaggaa

SEQ ID NO: 314034 - RNA, 19 nt, Homo sapiens
  misc_RNA (1)...(19): siRNA sense strand
ccaucaagauuguggacuu

SEQ ID NO: 314035 - RNA, 19 nt, Homo sapiens
  misc_RNA (1)...(19): siRNA sense strand
ggaccuaccgcuacagcaa

SEQ ID NO: 314036 - RNA, 19 nt, Homo sapiens
  misc_RNA (1)...(19): siRNA sense strand
cgaaauugacucgcucauu

SEQ ID NO: 314037 - RNA, 19 nt, Homo sapiens
  misc_RNA (1)...(19): siRNA sense strand
caucaaugagguauacuau

SEQ ID NO: 314038 - RNA, 19 nt, Homo sapiens
  misc_RNA (1)...(19): siRNA sense strand
ccaaggcucgcaaguacuu

SEQ ID NO: 314039 - RNA, 19 nt, Homo sapiens
  misc_RNA (1)...(19): siRNA sense strand
uauacuaugcgaagaagaa

SEQ ID NO: 314040 - RNA, 19 nt, Homo sapiens
  misc_RNA (1)...(19): siRNA sense strand
gcuggagcgcuacgaaauu

SEQ ID NO: 314041 - RNA, 19 nt, Homo sapiens
  misc_RNA (1)...(19): siRNA sense strand
gaccagaugaaccgcauug

SEQ ID NO: 314042 - RNA, 19 nt, Homo sapiens
  misc_RNA (1)...(19): siRNA sense strand
gagcucagcaucauucacu

SEQ ID NO: 314043 - RNA, 19 nt, Homo sapiens
  misc_RNA (1)...(19): siRNA sense strand
caucaagauuguggacuuc

SEQ ID NO: 314044 - RNA, 19 nt, Homo sapiens
  misc_RNA (1)...(19): siRNA sense strand
cuggagcgcuacgaaauug

SEQ ID NO: 314045 - RNA, 19 nt, Homo sapiens
  misc_RNA (1)...(19): siRNA sense strand
cuacagcaaccgauauugu

SEQ ID NO: 314046 - RNA, 19 nt, Homo sapiens
  misc_RNA (1)...(19): siRNA sense strand
gaaccaggcccagauugag

SEQ ID NO: 314047 - RNA, 19 nt, Homo sapiens
  misc_RNA (1)...(19): siRNA sense strand
ugaaccaggcccagauuga

SEQ ID NO: 314048 - RNA, 19 nt, Homo sapiens
  misc_RNA (1)...(19): siRNA sense strand
gugaaagccuaugaucauc

SEQ ID NO: 314049 - RNA, 19 nt, Homo sapiens
  misc_RNA (1)...(19): siRNA sense strand
gagguauacuaugcgaaga

SEQ ID NO: 314050 - RNA, 19 nt, Homo sapiens
  misc_RNA (1)...(19): siRNA sense strand
ccagcuccaucuccaguuc

SEQ ID NO: 314051 - RNA, 19 nt, Homo sapiens
  misc_RNA (1)...(19): siRNA sense strand
gguauacuaugcgaagaag

SEQ ID NO: 314052 - RNA, 19 nt, Homo sapiens
  misc_RNA (1)...(19): siRNA sense strand
ccagaggaucuaccaguau

SEQ ID NO: 314053 - RNA, 19 nt, Homo sapiens
  misc_RNA (1)...(19): siRNA sense strand
cgaccuggccauugacaug

SEQ ID NO: 314054 - RNA, 19 nt, Homo sapiens
  misc_RNA (1)...(19): siRNA sense strand
ggagcacacgcagguauug

SEQ ID NO: 314055 - RNA, 19 nt, Homo sapiens
  misc_RNA (1)...(19): siRNA sense strand
gaagaagguccugaaccau

SEQ ID NO: 314056 - RNA, 19 nt, Homo sapiens
  misc_RNA (1)...(19): siRNA sense strand
ccaccugugccugguauuu

SEQ ID NO: 314057 - RNA, 19 nt, Homo sapiens
  misc_RNA (1)...(19): siRNA sense strand
caagaucaucaagaacaaa

SEQ ID NO: 314058 - RNA, 19 nt, Homo sapiens
  misc_RNA (1)...(19): siRNA sense strand
cagcaugacacggagauga

SEQ ID NO: 314059 - RNA, 19 nt, Homo sapiens
  misc_RNA (1)...(19): siRNA sense strand
acaagaaggagaagaaggu

SEQ ID NO: 314060 - RNA, 19 nt, Homo sapiens
  misc_RNA (1)...(19): siRNA sense strand
ccagaugaaccgcauugug

SEQ ID NO: 314061 - RNA, 19 nt, Homo sapiens
  misc_RNA (1)...(19): siRNA sense strand
gcucgcaaguacuuugaac

SEQ ID NO: 314062 - RNA, 19 nt, Homo sapiens
  misc_RNA (1)...(19): siRNA sense strand
ccucuucaguggcuccaau

SEQ ID NO: 314063 - RNA, 19 nt, Homo sapiens
  misc_RNA (1)...(19): siRNA sense strand
caacaagaaggagaagaag

SEQ ID NO: 314064 - RNA, 19 nt, Homo sapiens
  misc_RNA (1)...(19): siRNA sense strand
caaugaggucgaccagaug

SEQ ID NO: 314065 - RNA, 19 nt, Homo sapiens
  misc_RNA (1)...(19): siRNA sense strand
ggagaagaagguccugaac

SEQ ID NO: 314066 - RNA, 19 nt, Homo sapiens
  misc_RNA (1)...(19): siRNA sense strand
gaggaucuaccaguauauc

SEQ ID NO: 314067 - RNA, 19 nt, Homo sapiens
  misc_RNA (1)...(19): siRNA sense strand
gaccuacaagcacaucaau

SEQ ID NO: 314068 - RNA, 19 nt, Homo sapiens
  misc_RNA (1)...(19): siRNA sense strand
cggagaugaaguacuauau

SEQ ID NO: 314069 - RNA, 19 nt, Homo sapiens
  misc_RNA (1)...(19): siRNA sense strand
ugcgcaugcuggaguauga

SEQ ID NO: 314070 - RNA, 19 nt, Homo sapiens
  misc_RNA (1)...(19): siRNA sense strand
caagcacaucaaugaggua

SEQ ID NO: 314071 - RNA, 19 nt, Homo sapiens
  misc_RNA (1)...(19): siRNA sense strand
gcugcauccuuguggagau

SEQ ID NO: 314072 - RNA, 19 nt, Homo sapiens
  misc_RNA (1)...(19): siRNA sense strand
cgagcaacaagaaggagaa

SEQ ID NO: 314073 - RNA, 19 nt, Homo sapiens
  misc_RNA (1)...(19): siRNA sense strand
ugacgacaaccaugacuac

SEQ ID NO: 314074 - RNA, 19 nt, Homo sapiens
  misc_RNA (1)...(19): siRNA sense strand
caggagcacacgcagguau

SEQ ID NO: 314075 - RNA, 19 nt, Homo sapiens
  misc_RNA (1)...(19): siRNA sense strand
gaaauugacucgcucauug

SEQ ID NO: 314076 - RNA, 19 nt, Homo sapiens
  misc_RNA (1)...(19): siRNA sense strand
acacggagaugaaguacua

SEQ ID NO: 314077 - RNA, 19 nt, Homo sapiens
  misc_RNA (1)...(19): siRNA sense strand
gagaugaaguacuauauag

SEQ ID NO: 314078 - RNA, 19 nt, Homo sapiens
  misc_RNA (1)...(19): siRNA sense strand
cgaaagaacucaggaagga

SEQ ID NO: 314079 - RNA, 19 nt, Homo sapiens
  misc_RNA (1)...(19): siRNA sense strand
cagaggaucuaccaguaua

SEQ ID NO: 314080 - RNA, 19 nt, Homo sapiens
  misc_RNA (1)...(19): siRNA sense strand
ggagaugaaguacuauaua

SEQ ID NO: 314081 - RNA, 19 nt, Homo sapiens
  misc_RNA (1)...(19): siRNA sense strand
gcacaucaaugagguauac

SEQ ID NO: 314082 - RNA, 19 nt, Homo sapiens
  misc_RNA (1)...(19): siRNA sense strand
gcacggcacugcucuuucu

SEQ ID NO: 314083 - RNA, 19 nt, Homo sapiens
  misc_RNA (1)...(19): siRNA sense strand
gcaacaagaaggagaagaa

SEQ ID NO: 314084 - RNA, 19 nt, Homo sapiens
  misc_RNA (1)...(19): siRNA sense strand
ccaaugaggucgaccagau

SEQ ID NO: 314085 - RNA, 19 nt, Homo sapiens
  misc_RNA (1)...(19): siRNA sense strand
ccaucaagaucaucaagaa

SEQ ID NO: 314086 - RNA, 19 nt, Homo sapiens
  misc_RNA (1)...(19): siRNA sense strand
gccagaggaucuaccagua

SEQ ID NO: 314087 - RNA, 19 nt, Homo sapiens
  misc_RNA (1)...(19): siRNA sense strand
uauuugagcugcuguccua

SEQ ID NO: 314088 - RNA, 19 nt, Homo sapiens
  misc_RNA (1)...(19): siRNA sense strand
cgacaaccaugacuacauc

SEQ ID NO: 314089 - RNA, 19 nt, Homo sapiens
  misc_RNA (1)...(19): siRNA sense strand
ucaaugagguauacuaugc

SEQ ID NO: 314090 - RNA, 19 nt, Homo sapiens
  misc_RNA (1)...(19): siRNA sense strand
gcccaaggcucgcaaguac

SEQ ID NO: 314091 - RNA, 19 nt, Homo sapiens
  misc_RNA (1)...(19): siRNA sense strand
ccuacgaccuggccauuga

SEQ ID NO: 314092 - RNA, 19 nt, Homo sapiens
  misc_RNA (1)...(19): siRNA sense strand
ggugaaagccuaugaucau

SEQ ID NO: 314093 - RNA, 19 nt, Homo sapiens
  misc_RNA (1)...(19): siRNA sense strand
ccuacaagcacaucaauga

SEQ ID NO: 314094 - RNA, 19 nt, Homo sapiens
  misc_RNA (1)...(19): siRNA sense strand
agaagaagguccugaacca

SEQ ID NO: 314095 - RNA, 19 nt, Homo sapiens
  misc_RNA (1)...(19): siRNA sense strand
ucaagaucaucaagaacaa

SEQ ID NO: 314096 - RNA, 19 nt, Homo sapiens
  misc_RNA (1)...(19): siRNA sense strand
gcagcgccaucaagauugu

SEQ ID NO: 314097 - RNA, 19 nt, Homo sapiens
  misc_RNA (1)...(19): siRNA sense strand
ggacgaaagaacucaggaa

SEQ ID NO: 314098 - RNA, 19 nt, Homo sapiens
  misc_RNA (1)...(19): siRNA sense strand
ccaucaagauuguggacuu

SEQ ID NO: 314099 - RNA, 19 nt, Homo sapiens
  misc_RNA (1)...(19): siRNA sense strand
ggaccuaccgcuacagcaa

SEQ ID NO: 314100 - RNA, 19 nt, Homo sapiens
  misc_RNA (1)...(19): siRNA sense strand
cgaaauugacucgcucauu

SEQ ID NO: 314101 - RNA, 19 nt, Homo sapiens
  misc_RNA (1)...(19): siRNA sense strand
caucaaugagguauacuau

SEQ ID NO: 314102 - RNA, 19 nt, Homo sapiens
  misc_RNA (1)...(19): siRNA sense strand
ccaaggcucgcaaguacuu

SEQ ID NO: 314103 - RNA, 19 nt, Homo sapiens
  misc_RNA (1)...(19): siRNA sense strand
uauacuaugcgaagaagaa

SEQ ID NO: 314104 - RNA, 19 nt, Homo sapiens
  misc_RNA (1)...(19): siRNA sense strand
gcuggagcgcuacgaaauu

SEQ ID NO: 314105 - RNA, 19 nt, Homo sapiens
  misc_RNA (1)...(19): siRNA sense strand
gaccagaugaaccgcauug

SEQ ID NO: 314106 - RNA, 19 nt, Homo sapiens
  misc_RNA (1)...(19): siRNA sense strand
gagcucagcaucauucacu

SEQ ID NO: 314107 - RNA, 19 nt, Homo sapiens
  misc_RNA (1)...(19): siRNA sense strand
caucaagauuguggacuuc

SEQ ID NO: 314108 - RNA, 19 nt, Homo sapiens
  misc_RNA (1)...(19): siRNA sense strand
cuggagcgcuacgaaauug

SEQ ID NO: 314109 - RNA, 19 nt, Homo sapiens
  misc_RNA (1)...(19): siRNA sense strand
cuacagcaaccgauauugu

SEQ ID NO: 314110 - RNA, 19 nt, Homo sapiens
  misc_RNA (1)...(19): siRNA sense strand
gaaccaggcccagauugag

SEQ ID NO: 314111 - RNA, 19 nt, Homo sapiens
  misc_RNA (1)...(19): siRNA sense strand
ugaaccaggcccagauuga

SEQ ID NO: 314112 - RNA, 19 nt, Homo sapiens
  misc_RNA (1)...(19): siRNA sense strand
gugaaagccuaugaucauc

SEQ ID NO: 314113 - RNA, 19 nt, Homo sapiens
  misc_RNA (1)...(19): siRNA sense strand
gagguauacuaugcgaaga

SEQ ID NO: 314114 - RNA, 19 nt, Homo sapiens
  misc_RNA (1)...(19): siRNA sense strand
ccagcuccaucuccaguuc

SEQ ID NO: 314115 - RNA, 19 nt, Homo sapiens
  misc_RNA (1)...(19): siRNA sense strand
gguauacuaugcgaagaag

SEQ ID NO: 314116 - RNA, 19 nt, Homo sapiens
  misc_RNA (1)...(19): siRNA sense strand
ccagaggaucuaccaguau

SEQ ID NO: 314117 - RNA, 19 nt, Homo sapiens
  misc_RNA (1)...(19): siRNA sense strand
cgaccuggccauugacaug

SEQ ID NO: 314118 - RNA, 19 nt, Homo sapiens
  misc_RNA (1)...(19): siRNA sense strand
ggagcacacgcagguauug

SEQ ID NO: 314119 - RNA, 19 nt, Homo sapiens
  misc_RNA (1)...(19): siRNA sense strand
gaagaagguccugaaccau

SEQ ID NO: 314120 - RNA, 19 nt, Homo sapiens
  misc_RNA (1)...(19): siRNA sense strand
ccaccugugccugguauuu

SEQ ID NO: 314121 - RNA, 19 nt, Homo sapiens
  misc_RNA (1)...(19): siRNA sense strand
caagaucaucaagaacaaa

SEQ ID NO: 314122 - RNA, 19 nt, Homo sapiens
  misc_RNA (1)...(19): siRNA sense strand
cagcaugacacggagauga

SEQ ID NO: 314123 - RNA, 19 nt, Homo sapiens
  misc_RNA (1)...(19): siRNA sense strand
acaagaaggagaagaaggu

SEQ ID NO: 314124 - RNA, 19 nt, Homo sapiens
  misc_RNA (1)...(19): siRNA sense strand
ccagaugaaccgcauugug

SEQ ID NO: 314125 - RNA, 19 nt, Homo sapiens
  misc_RNA (1)...(19): siRNA sense strand
gcucgcaaguacuuugaac

SEQ ID NO: 314126 - RNA, 19 nt, Homo sapiens
  misc_RNA (1)...(19): siRNA sense strand
ccucuucaguggcuccaau

SEQ ID NO: 314127 - RNA, 19 nt, Homo sapiens
  misc_RNA (1)...(19): siRNA sense strand
caacaagaaggagaagaag

SEQ ID NO: 314128 - RNA, 19 nt, Homo sapiens
  misc_RNA (1)...(19): siRNA sense strand
caaugaggucgaccagaug

SEQ ID NO: 314129 - RNA, 19 nt, Homo sapiens
  misc_RNA (1)...(19): siRNA sense strand
ggagaagaagguccugaac

SEQ ID NO: 314130 - RNA, 19 nt, Homo sapiens
  misc_RNA (1)...(19): siRNA sense strand
gaggaucuaccaguauauc

SEQ ID NO: 314131 - RNA, 19 nt, Homo sapiens
  misc_RNA (1)...(19): siRNA sense strand
gaccuacaagcacaucaau

SEQ ID NO: 314132 - RNA, 19 nt, Homo sapiens
  misc_RNA (1)...(19): siRNA sense strand
cggagaugaaguacuauau

SEQ ID NO: 314133 - RNA, 19 nt, Homo sapiens
  misc_RNA (1)...(19): siRNA sense strand
ugcgcaugcuggaguauga

SEQ ID NO: 314134 - RNA, 19 nt, Homo sapiens
  misc_RNA (1)...(19): siRNA sense strand
caagcacaucaaugaggua

SEQ ID NO: 314135 - RNA, 19 nt, Homo sapiens
  misc_RNA (1)...(19): siRNA sense strand
gcugcauccuuguggagau

SEQ ID NO: 314136 - RNA, 19 nt, Homo sapiens
  misc_RNA (1)...(19): siRNA sense strand
cgagcaacaagaaggagaa

SEQ ID NO: 314137 - RNA, 19 nt, Homo sapiens
  misc_RNA (1)...(19): siRNA sense strand
ugacgacaaccaugacuac

SEQ ID NO: 314138 - RNA, 19 nt, Homo sapiens
  misc_RNA (1)...(19): siRNA sense strand
caggagcacacgcagguau

SEQ ID NO: 314139 - RNA, 19 nt, Homo sapiens
  misc_RNA (1)...(19): siRNA sense strand
gaaauugacucgcucauug

SEQ ID NO: 314140 - RNA, 19 nt, Homo sapiens
  misc_RNA (1)...(19): siRNA sense strand
acacggagaugaaguacua

SEQ ID NO: 314141 - RNA, 19 nt, Homo sapiens
  misc_RNA (1)...(19): siRNA sense strand
gagaugaaguacuauauag

SEQ ID NO: 314142 - RNA, 19 nt, Homo sapiens
  misc_RNA (1)...(19): siRNA sense strand
cgaaagaacucaggaagga

SEQ ID NO: 314143 - RNA, 19 nt, Homo sapiens
  misc_RNA (1)...(19): siRNA sense strand
cagaggaucuaccaguaua

SEQ ID NO: 314144 - RNA, 19 nt, Homo sapiens
  misc_RNA (1)...(19): siRNA sense strand
ggagaugaaguacuauaua

SEQ ID NO: 314145 - RNA, 19 nt, Homo sapiens
  misc_RNA (1)...(19): siRNA sense strand
gcacaucaaugagguauac

SEQ ID NO: 314146 - RNA, 19 nt, Homo sapiens
  misc_RNA (1)...(19): siRNA sense strand
gcacggcacugcucuuucu

SEQ ID NO: 314147 - RNA, 19 nt, Homo sapiens
  misc_RNA (1)...(19): siRNA sense strand
gcaacaagaaggagaagaa

SEQ ID NO: 314148 - RNA, 19 nt, Homo sapiens
  misc_RNA (1)...(19): siRNA sense strand
ccaaugaggucgaccagau

SEQ ID NO: 314149 - RNA, 19 nt, Homo sapiens
  misc_RNA (1)...(19): siRNA sense strand
ccaucaagaucaucaagaa

SEQ ID NO: 314150 - RNA, 19 nt, Homo sapiens
  misc_RNA (1)...(19): siRNA sense strand
gccagaggaucuaccagua

SEQ ID NO: 314151 - RNA, 19 nt, Homo sapiens
  misc_RNA (1)...(19): siRNA sense strand
uauuugagcugcuguccua

SEQ ID NO: 314152 - RNA, 19 nt, Homo sapiens
  misc_RNA (1)...(19): siRNA sense strand
cgacaaccaugacuacauc

SEQ ID NO: 314153 - RNA, 19 nt, Homo sapiens
  misc_RNA (1)...(19): siRNA sense strand
ucaaugagguauacuaugc

SEQ ID NO: 314154 - RNA, 19 nt, Homo sapiens
  misc_RNA (1)...(19): siRNA sense strand
gcccaaggcucgcaaguac

SEQ ID NO: 314155 - RNA, 19 nt, Homo sapiens
  misc_RNA (1)...(19): siRNA sense strand
ccuacgaccuggccauuga

SEQ ID NO: 314156 - RNA, 19 nt, Homo sapiens
  misc_RNA (1)...(19): siRNA sense strand
ggugaaagccuaugaucau

SEQ ID NO: 314157 - RNA, 19 nt, Homo sapiens
  misc_RNA (1)...(19): siRNA sense strand
ccuacaagcacaucaauga

SEQ ID NO: 314158 - RNA, 19 nt, Homo sapiens
  misc_RNA (1)...(19): siRNA sense strand
agaagaagguccugaacca

SEQ ID NO: 314159 - RNA, 19 nt, Homo sapiens
  misc_RNA (1)...(19): siRNA sense strand
ucaagaucaucaagaacaa

SEQ ID NO: 314160 - RNA, 19 nt, Homo sapiens
  misc_RNA (1)...(19): siRNA sense strand
gcagcgccaucaagauugu

SEQ ID NO: 314161 - RNA, 19 nt, Homo sapiens
  misc_RNA (1)...(19): siRNA sense strand
ggacgaaagaacucaggaa

SEQ ID NO: 314162 - RNA, 19 nt, Homo sapiens
  misc_RNA (1)...(19): siRNA sense strand
ccaucaagauuguggacuu

SEQ ID NO: 314163 - RNA, 19 nt, Homo sapiens
  misc_RNA (1)...(19): siRNA sense strand
ggaccuaccgcuacagcaa

SEQ ID NO: 314164 - RNA, 19 nt, Homo sapiens
  misc_RNA (1)...(19): siRNA sense strand
cgaaauugacucgcucauu

SEQ ID NO: 314165 - RNA, 19 nt, Homo sapiens
  misc_RNA (1)...(19): siRNA sense strand
caucaaugagguauacuau

SEQ ID NO: 314166 - RNA, 19 nt, Homo sapiens
  misc_RNA (1)...(19): siRNA sense strand
ccaaggcucgcaaguacuu

SEQ ID NO: 314167 - RNA, 19 nt, Homo sapiens
  misc_RNA (1)...(19): siRNA sense strand
uauacuaugcgaagaagaa

SEQ ID NO: 314168 - RNA, 19 nt, Homo sapiens
  misc_RNA (1)...(19): siRNA sense strand
gcuggagcgcuacgaaauu

SEQ ID NO: 314169 - RNA, 19 nt, Homo sapiens
  misc_RNA (1)...(19): siRNA sense strand
gaccagaugaaccgcauug

SEQ ID NO: 314170 - RNA, 19 nt, Homo sapiens
  misc_RNA (1)...(19): siRNA sense strand
gagcucagcaucauucacu

SEQ ID NO: 314171 - RNA, 19 nt, Homo sapiens
  misc_RNA (1)...(19): siRNA sense strand
caucaagauuguggacuuc

SEQ ID NO: 314172 - RNA, 19 nt, Homo sapiens
  misc_RNA (1)...(19): siRNA sense strand
cuggagcgcuacgaaauug

SEQ ID NO: 314173 - RNA, 19 nt, Homo sapiens
  misc_RNA (1)...(19): siRNA sense strand
cuacagcaaccgauauugu

SEQ ID NO: 314174 - RNA, 19 nt, Homo sapiens
  misc_RNA (1)...(19): siRNA sense strand
gaaccaggcccagauugag

SEQ ID NO: 314175 - RNA, 19 nt, Homo sapiens
  misc_RNA (1)...(19): siRNA sense strand
ugaaccaggcccagauuga

SEQ ID NO: 314176 - RNA, 19 nt, Homo sapiens
  misc_RNA (1)...(19): siRNA sense strand
gugaaagccuaugaucauc

SEQ ID NO: 314177 - RNA, 19 nt, Homo sapiens
  misc_RNA (1)...(19): siRNA sense strand
gagguauacuaugcgaaga

SEQ ID NO: 314178 - RNA, 19 nt, Homo sapiens
  misc_RNA (1)...(19): siRNA sense strand
ccagcuccaucuccaguuc

SEQ ID NO: 314179 - RNA, 19 nt, Homo sapiens
  misc_RNA (1)...(19): siRNA sense strand
gguauacuaugcgaagaag

SEQ ID NO: 314180 - RNA, 19 nt, Homo sapiens
  misc_RNA (1)...(19): siRNA sense strand
ccagaggaucuaccaguau

SEQ ID NO: 314181 - RNA, 19 nt, Homo sapiens
  misc_RNA (1)...(19): siRNA sense strand
cgaccuggccauugacaug

SEQ ID NO: 314182 - RNA, 19 nt, Homo sapiens
  misc_RNA (1)...(19): siRNA sense strand
ggagcacacgcagguauug

SEQ ID NO: 314183 - RNA, 19 nt, Homo sapiens
  misc_RNA (1)...(19): siRNA sense strand
gaagaagguccugaaccau

SEQ ID NO: 314184 - RNA, 19 nt, Homo sapiens
  misc_RNA (1)...(19): siRNA sense strand
ccaccugugccugguauuu

SEQ ID NO: 314185 - RNA, 19 nt, Homo sapiens
  misc_RNA (1)...(19): siRNA sense strand
caagaucaucaagaacaaa

SEQ ID NO: 314186 - RNA, 19 nt, Homo sapiens
  misc_RNA (1)...(19): siRNA sense strand
cagcaugacacggagauga

SEQ ID NO: 314187 - RNA, 19 nt, Homo sapiens
  misc_RNA (1)...(19): siRNA sense strand
acaagaaggagaagaaggu

SEQ ID NO: 314188 - RNA, 19 nt, Homo sapiens
  misc_RNA (1)...(19): siRNA sense strand
ccagaugaaccgcauugug

SEQ ID NO: 314189 - RNA, 19 nt, Homo sapiens
  misc_RNA (1)...(19): siRNA sense strand
gcucgcaaguacuuugaac

SEQ ID NO: 314190 - RNA, 19 nt, Homo sapiens
  misc_RNA (1)...(19): siRNA sense strand
ccucuucaguggcuccaau

SEQ ID NO: 314191 - RNA, 19 nt, Homo sapiens
  misc_RNA (1)...(19): siRNA sense strand
caacaagaaggagaagaag

SEQ ID NO: 314192 - RNA, 19 nt, Homo sapiens
  misc_RNA (1)...(19): siRNA sense strand
caaugaggucgaccagaug

SEQ ID NO: 314193 - RNA, 19 nt, Homo sapiens
  misc_RNA (1)...(19): siRNA sense strand
ggagaagaagguccugaac

SEQ ID NO: 314194 - RNA, 19 nt, Homo sapiens
  misc_RNA (1)...(19): siRNA sense strand
gaggaucuaccaguauauc

SEQ ID NO: 314195 - RNA, 19 nt, Homo sapiens
  misc_RNA (1)...(19): siRNA sense strand
gaccuacaagcacaucaau

SEQ ID NO: 314196 - RNA, 19 nt, Homo sapiens
  misc_RNA (1)...(19): siRNA sense strand
cggagaugaaguacuauau

SEQ ID NO: 314197 - RNA, 19 nt, Homo sapiens
  misc_RNA (1)...(19): siRNA sense strand
ugcgcaugcuggaguauga

SEQ ID NO: 314198 - RNA, 19 nt, Homo sapiens
  misc_RNA (1)...(19): siRNA sense strand
caagcacaucaaugaggua

SEQ ID NO: 314199 - RNA, 19 nt, Homo sapiens
  misc_RNA (1)...(19): siRNA sense strand
gcugcauccuuguggagau

SEQ ID NO: 314200 - RNA, 19 nt, Homo sapiens
  misc_RNA (1)...(19): siRNA sense strand
cgagcaacaagaaggagaa

SEQ ID NO: 314201 - RNA, 19 nt, Homo sapiens
  misc_RNA (1)...(19): siRNA sense strand
ugacgacaaccaugacuac

SEQ ID NO: 314202 - RNA, 19 nt, Homo sapiens
  misc_RNA (1)...(19): siRNA sense strand
caggagcacacgcagguau

SEQ ID NO: 314203 - RNA, 19 nt, Homo sapiens
  misc_RNA (1)...(19): siRNA sense strand
gaaauugacucgcucauug

SEQ ID NO: 314204 - RNA, 19 nt, Homo sapiens
  misc_RNA (1)...(19): siRNA sense strand
acacggagaugaaguacua

SEQ ID NO: 314205 - RNA, 19 nt, Homo sapiens
  misc_RNA (1)...(19): siRNA sense strand
gagaugaaguacuauauag

SEQ ID NO: 314206 - RNA, 19 nt, Homo sapiens
  misc_RNA (1)...(19): siRNA sense strand
cgaaagaacucaggaagga

SEQ ID NO: 314207 - RNA, 19 nt, Homo sapiens
  misc_RNA (1)...(19): siRNA sense strand
cagaggaucuaccaguaua

SEQ ID NO: 314208 - RNA, 19 nt, Homo sapiens
  misc_RNA (1)...(19): siRNA sense strand
ggagaugaaguacuauaua

SEQ ID NO: 314209 - RNA, 19 nt, Homo sapiens
  misc_RNA (1)...(19): siRNA sense strand
gcacaucaaugagguauac

SEQ ID NO: 314210 - RNA, 19 nt, Homo sapiens
  misc_RNA (1)...(19): siRNA sense strand
gcacggcacugcucuuucu

SEQ ID NO: 314211 - RNA, 19 nt, Homo sapiens
  misc_RNA (1)...(19): siRNA sense strand
gcaacaagaaggagaagaa

SEQ ID NO: 314212 - RNA, 19 nt, Homo sapiens
  misc_RNA (1)...(19): siRNA sense strand
ccaaugaggucgaccagau

SEQ ID NO: 314213 - RNA, 19 nt, Homo sapiens
  misc_RNA (1)...(19): siRNA sense strand
ccaucaagaucaucaagaa

SEQ ID NO: 314214 - RNA, 19 nt, Homo sapiens
  misc_RNA (1)...(19): siRNA sense strand
gccagaggaucuaccagua

SEQ ID NO: 314215 - RNA, 19 nt, Homo sapiens
  misc_RNA (1)...(19): siRNA sense strand
uauuugagcugcuguccua

SEQ ID NO: 314216 - RNA, 19 nt, Homo sapiens
  misc_RNA (1)...(19): siRNA sense strand
cgacaaccaugacuacauc

SEQ ID NO: 314217 - RNA, 19 nt, Homo sapiens
  misc_RNA (1)...(19): siRNA sense strand
ucaaugagguauacuaugc

SEQ ID NO: 314218 - RNA, 19 nt, Homo sapiens
  misc_RNA (1)...(19): siRNA sense strand
gcccaaggcucgcaaguac

SEQ ID NO: 314219 - RNA, 19 nt, Homo sapiens
  misc_RNA (1)...(19): siRNA sense strand
ccuacgaccuggccauuga

SEQ ID NO: 314220 - RNA, 19 nt, Homo sapiens
  misc_RNA (1)...(19): siRNA sense strand
ggugaaagccuaugaucau

SEQ ID NO: 314221 - RNA, 19 nt, Homo sapiens
  misc_RNA (1)...(19): siRNA sense strand
ccuacaagcacaucaauga

SEQ ID NO: 314222 - RNA, 19 nt, Homo sapiens
  misc_RNA (1)...(19): siRNA sense strand
agaagaagguccugaacca

SEQ ID NO: 314223 - RNA, 19 nt, Homo sapiens
  misc_RNA (1)...(19): siRNA sense strand
ucaagaucaucaagaacaa

SEQ ID NO: 314224 - RNA, 19 nt, Homo sapiens
  misc_RNA (1)...(19): siRNA sense strand
gcagcgccaucaagauugu

SEQ ID NO: 314225 - RNA, 19 nt, Homo sapiens
  misc_RNA (1)...(19): siRNA sense strand
ggacgaaagaacucaggaa

SEQ ID NO: 314226 - RNA, 19 nt, Homo sapiens
  misc_RNA (1)...(19): siRNA sense strand
ccaucaagauuguggacuu

SEQ ID NO: 314227 - RNA, 19 nt, Homo sapiens
  misc_RNA (1)...(19): siRNA sense strand
ggaccuaccgcuacagcaa

SEQ ID NO: 314228 - RNA, 19 nt, Homo sapiens
  misc_RNA (1)...(19): siRNA sense strand
cgaaauugacucgcucauu

SEQ ID NO: 314229 - RNA, 19 nt, Homo sapiens
  misc_RNA (1)...(19): siRNA sense strand
caucaaugagguauacuau

SEQ ID NO: 314230 - RNA, 19 nt, Homo sapiens
  misc_RNA (1)...(19): siRNA sense strand
ccaaggcucgcaaguacuu

SEQ ID NO: 314231 - RNA, 19 nt, Homo sapiens
  misc_RNA (1)...(19): siRNA sense strand
uauacuaugcgaagaagaa

SEQ ID NO: 314232 - RNA, 19 nt, Homo sapiens
  misc_RNA (1)...(19): siRNA sense strand
gcuggagcgcuacgaaauu

SEQ ID NO: 314233 - RNA, 19 nt, Homo sapiens
  misc_RNA (1)...(19): siRNA sense strand
gaccagaugaaccgcauug

SEQ ID NO: 314234 - RNA, 19 nt, Homo sapiens
  misc_RNA (1)...(19): siRNA sense strand
gagcucagcaucauucacu

SEQ ID NO: 314235 - RNA, 19 nt, Homo sapiens
  misc_RNA (1)...(19): siRNA sense strand
caucaagauuguggacuuc

SEQ ID NO: 314236 - RNA, 19 nt, Homo sapiens
  misc_RNA (1)...(19): siRNA sense strand
cuggagcgcuacgaaauug

SEQ ID NO: 314237 - RNA, 19 nt, Homo sapiens
  misc_RNA (1)...(19): siRNA sense strand
cuacagcaaccgauauugu

SEQ ID NO: 314238 - RNA, 19 nt, Homo sapiens
  misc_RNA (1)...(19): siRNA sense strand
gaaccaggcccagauugag

SEQ ID NO: 314239 - RNA, 19 nt, Homo sapiens
  misc_RNA (1)...(19): siRNA sense strand
ugaaccaggcccagauuga

SEQ ID NO: 314240 - RNA, 19 nt, Homo sapiens
  misc_RNA (1)...(19): siRNA sense strand
gugaaagccuaugaucauc

SEQ ID NO: 314241 - RNA, 19 nt, Homo sapiens
  misc_RNA (1)...(19): siRNA sense strand
gagguauacuaugcgaaga

SEQ ID NO: 314242 - RNA, 19 nt, Homo sapiens
  misc_RNA (1)...(19): siRNA sense strand
ccagcuccaucuccaguuc

SEQ ID NO: 314243 - RNA, 19 nt, Homo sapiens
  misc_RNA (1)...(19): siRNA sense strand
gguauacuaugcgaagaag

SEQ ID NO: 314244 - RNA, 19 nt, Homo sapiens
  misc_RNA (1)...(19): siRNA sense strand
ccagaggaucuaccaguau

SEQ ID NO: 314245 - RNA, 19 nt, Homo sapiens
  misc_RNA (1)...(19): siRNA sense strand
cgaccuggccauugacaug

SEQ ID NO: 314246 - RNA, 19 nt, Homo sapiens
  misc_RNA (1)...(19): siRNA sense strand
ggagcacacgcagguauug

SEQ ID NO: 314247 - RNA, 19 nt, Homo sapiens
  misc_RNA (1)...(19): siRNA sense strand
gaagaagguccugaaccau

SEQ ID NO: 314248 - RNA, 19 nt, Homo sapiens
  misc_RNA (1)...(19): siRNA sense strand
ccaccugugccugguauuu

SEQ ID NO: 314249 - RNA, 19 nt, Homo sapiens
  misc_RNA (1)...(19): siRNA sense strand
caagaucaucaagaacaaa

SEQ ID NO: 314250 - RNA, 19 nt, Homo sapiens
  misc_RNA (1)...(19): siRNA sense strand
cagcaugacacggagauga

SEQ ID NO: 314251 - RNA, 19 nt, Homo sapiens
  misc_RNA (1)...(19): siRNA sense strand
acaagaaggagaagaaggu

SEQ ID NO: 314252 - RNA, 19 nt, Homo sapiens
  misc_RNA (1)...(19): siRNA sense strand
ccagaugaaccgcauugug

SEQ ID NO: 314253 - RNA, 19 nt, Homo sapiens
  misc_RNA (1)...(19): siRNA sense strand
gcucgcaaguacuuugaac

SEQ ID NO: 314254 - RNA, 19 nt, Homo sapiens
  misc_RNA (1)...(19): siRNA sense strand
ccucuucaguggcuccaau

SEQ ID NO: 314255 - RNA, 19 nt, Homo sapiens
  misc_RNA (1)...(19): siRNA sense strand
caacaagaaggagaagaag

SEQ ID NO: 314256 - RNA, 19 nt, Homo sapiens
  misc_RNA (1)...(19): siRNA sense strand
caaugaggucgaccagaug

SEQ ID NO: 314257 - RNA, 19 nt, Homo sapiens
  misc_RNA (1)...(19): siRNA sense strand
ggagaagaagguccugaac

SEQ ID NO: 314258 - RNA, 19 nt, Homo sapiens
  misc_RNA (1)...(19): siRNA sense strand
gaggaucuaccaguauauc

SEQ ID NO: 314259 - RNA, 19 nt, Homo sapiens
  misc_RNA (1)...(19): siRNA sense strand
gaccuacaagcacaucaau

SEQ ID NO: 314260 - RNA, 19 nt, Homo sapiens
  misc_RNA (1)...(19): siRNA sense strand
cggagaugaaguacuauau

SEQ ID NO: 314261 - RNA, 19 nt, Homo sapiens
  misc_RNA (1)...(19): siRNA sense strand
ugcgcaugcuggaguauga

SEQ ID NO: 314262 - RNA, 19 nt, Homo sapiens
  misc_RNA (1)...(19): siRNA sense strand
caagcacaucaaugaggua

SEQ ID NO: 314263 - RNA, 19 nt, Homo sapiens
  misc_RNA (1)...(19): siRNA sense strand
gcugcauccuuguggagau

SEQ ID NO: 314264 - RNA, 19 nt, Homo sapiens
  misc_RNA (1)...(19): siRNA sense strand
cgagcaacaagaaggagaa

SEQ ID NO: 314265 - RNA, 19 nt, Homo sapiens
  misc_RNA (1)...(19): siRNA sense strand
ugacgacaaccaugacuac

SEQ ID NO: 314266 - RNA, 19 nt, Homo sapiens
  misc_RNA (1)...(19): siRNA sense strand
caggagcacacgcagguau

SEQ ID NO: 314267 - RNA, 19 nt, Homo sapiens
  misc_RNA (1)...(19): siRNA sense strand
gaaauugacucgcucauug

SEQ ID NO: 314268 - RNA, 19 nt, Homo sapiens
  misc_RNA (1)...(19): siRNA sense strand
acacggagaugaaguacua

SEQ ID NO: 314269 - RNA, 19 nt, Homo sapiens
  misc_RNA (1)...(19): siRNA sense strand
gagaugaaguacuauauag

SEQ ID NO: 314270 - RNA, 19 nt, Homo sapiens
  misc_RNA (1)...(19): siRNA sense strand
cgaaagaacucaggaagga

SEQ ID NO: 314271 - RNA, 19 nt, Homo sapiens
  misc_RNA (1)...(19): siRNA sense strand
cagaggaucuaccaguaua

SEQ ID NO: 314272 - RNA, 19 nt, Homo sapiens
  misc_RNA (1)...(19): siRNA sense strand
ggagaugaaguacuauaua

SEQ ID NO: 314273 - RNA, 19 nt, Homo sapiens
  misc_RNA (1)...(19): siRNA sense strand
gcacaucaaugagguauac

SEQ ID NO: 314274 - RNA, 19 nt, Homo sapiens
  misc_RNA (1)...(19): siRNA sense strand
gcacggcacugcucuuucu

SEQ ID NO: 314275 - RNA, 19 nt, Homo sapiens
  misc_RNA (1)...(19): siRNA sense strand
gcaacaagaaggagaagaa

SEQ ID NO: 314276 - RNA, 19 nt, Homo sapiens
  misc_RNA (1)...(19): siRNA sense strand
ccaaugaggucgaccagau

SEQ ID NO: 314277 - RNA, 19 nt, Homo sapiens
  misc_RNA (1)...(19): siRNA sense strand
ccaucaagaucaucaagaa

SEQ ID NO: 314278 - RNA, 19 nt, Homo sapiens
  misc_RNA (1)...(19): siRNA sense strand
gccagaggaucuaccagua

SEQ ID NO: 314279 - RNA, 19 nt, Homo sapiens
  misc_RNA (1)...(19): siRNA sense strand
uauuugagcugcuguccua

SEQ ID NO: 314280 - RNA, 19 nt, Homo sapiens
  misc_RNA (1)...(19): siRNA sense strand
cgacaaccaugacuacauc

SEQ ID NO: 314281 - RNA, 19 nt, Homo sapiens
  misc_RNA (1)...(19): siRNA sense strand
ucaaugagguauacuaugc

SEQ ID NO: 314282 - RNA, 19 nt, Homo sapiens
  misc_RNA (1)...(19): siRNA sense strand
gcccaaggcucgcaaguac

SEQ ID NO: 314283 - RNA, 19 nt, Homo sapiens
  misc_RNA (1)...(19): siRNA sense strand
ccuacgaccuggccauuga

SEQ ID NO: 314284 - RNA, 19 nt, Homo sapiens
  misc_RNA (1)...(19): siRNA sense strand
ggugaaagccuaugaucau

SEQ ID NO: 314285 - RNA, 19 nt, Homo sapiens
  misc_RNA (1)...(19): siRNA sense strand
ccuacaagcacaucaauga

SEQ ID NO: 314286 - RNA, 19 nt, Homo sapiens
  misc_RNA (1)...(19): siRNA sense strand
agaagaagguccugaacca

SEQ ID NO: 314287 - RNA, 19 nt, Homo sapiens
  misc_RNA (1)...(19): siRNA sense strand
ucaagaucaucaagaacaa

SEQ ID NO: 314288 - RNA, 19 nt, Homo sapiens
  misc_RNA (1)...(19): siRNA sense strand
gcagcgccaucaagauugu

SEQ ID NO: 314289 - RNA, 19 nt, Homo sapiens
  misc_RNA (1)...(19): siRNA sense strand
ggacgaaagaacucaggaa

SEQ ID NO: 314290 - RNA, 19 nt, Homo sapiens
  misc_RNA (1)...(19): siRNA sense strand
ccaucaagauuguggacuu

SEQ ID NO: 314291 - RNA, 19 nt, Homo sapiens
  misc_RNA (1)...(19): siRNA sense strand
ggaccuaccgcuacagcaa

SEQ ID NO: 314292 - RNA, 19 nt, Homo sapiens
  misc_RNA (1)...(19): siRNA sense strand
cgaaauugacucgcucauu

SEQ ID NO: 314293 - RNA, 19 nt, Homo sapiens
  misc_RNA (1)...(19): siRNA sense strand
caucaaugagguauacuau

SEQ ID NO: 314294 - RNA, 19 nt, Homo sapiens
  misc_RNA (1)...(19): siRNA sense strand
ccaaggcucgcaaguacuu

SEQ ID NO: 314295 - RNA, 19 nt, Homo sapiens
  misc_RNA (1)...(19): siRNA sense strand
uauacuaugcgaagaagaa

SEQ ID NO: 314296 - RNA, 19 nt, Homo sapiens
  misc_RNA (1)...(19): siRNA sense strand
gcuggagcgcuacgaaauu

SEQ ID NO: 314297 - RNA, 19 nt, Homo sapiens
  misc_RNA (1)...(19): siRNA sense strand
gaccagaugaaccgcauug

SEQ ID NO: 314298 - RNA, 19 nt, Homo sapiens
  misc_RNA (1)...(19): siRNA sense strand
gagcucagcaucauucacu

SEQ ID NO: 314299 - RNA, 19 nt, Homo sapiens
  misc_RNA (1)...(19): siRNA sense strand
caucaagauuguggacuuc

SEQ ID NO: 314300 - RNA, 19 nt, Homo sapiens
  misc_RNA (1)...(19): siRNA sense strand
cuggagcgcuacgaaauug

SEQ ID NO: 314301 - RNA, 19 nt, Homo sapiens
  misc_RNA (1)...(19): siRNA sense strand
cuacagcaaccgauauugu

SEQ ID NO: 314302 - RNA, 19 nt, Homo sapiens
  misc_RNA (1)...(19): siRNA sense strand
gaaccaggcccagauugag

SEQ ID NO: 314303 - RNA, 19 nt, Homo sapiens
  misc_RNA (1)...(19): siRNA sense strand
ugaaccaggcccagauuga

SEQ ID NO: 314304 - RNA, 19 nt, Homo sapiens
  misc_RNA (1)...(19): siRNA sense strand
gugaaagccuaugaucauc

SEQ ID NO: 314305 - RNA, 19 nt, Homo sapiens
  misc_RNA (1)...(19): siRNA sense strand
gagguauacuaugcgaaga

SEQ ID NO: 314306 - RNA, 19 nt, Homo sapiens
  misc_RNA (1)...(19): siRNA sense strand
ccagcuccaucuccaguuc

SEQ ID NO: 314307 - RNA, 19 nt, Homo sapiens
  misc_RNA (1)...(19): siRNA sense strand
gguauacuaugcgaagaag

SEQ ID NO: 314308 - RNA, 19 nt, Homo sapiens
  misc_RNA (1)...(19): siRNA sense strand
ccagaggaucuaccaguau

SEQ ID NO: 314309 - RNA, 19 nt, Homo sapiens
  misc_RNA (1)...(19): siRNA sense strand
cgaccuggccauugacaug

SEQ ID NO: 314310 - RNA, 19 nt, Homo sapiens
  misc_RNA (1)...(19): siRNA sense strand
ggagcacacgcagguauug

SEQ ID NO: 314311 - RNA, 19 nt, Homo sapiens
  misc_RNA (1)...(19): siRNA sense strand
gaagaagguccugaaccau

SEQ ID NO: 314312 - RNA, 19 nt, Homo sapiens
  misc_RNA (1)...(19): siRNA sense strand
ccaccugugccugguauuu

SEQ ID NO: 314313 - RNA, 19 nt, Homo sapiens
  misc_RNA (1)...(19): siRNA sense strand
caagaucaucaagaacaaa

SEQ ID NO: 314314 - RNA, 19 nt, Homo sapiens
  misc_RNA (1)...(19): siRNA sense strand
cagcaugacacggagauga

SEQ ID NO: 314315 - RNA, 19 nt, Homo sapiens
  misc_RNA (1)...(19): siRNA sense strand
acaagaaggagaagaaggu

SEQ ID NO: 314316 - RNA, 19 nt, Homo sapiens
  misc_RNA (1)...(19): siRNA sense strand
ccagaugaaccgcauugug

SEQ ID NO: 314317 - RNA, 19 nt, Homo sapiens
  misc_RNA (1)...(19): siRNA sense strand
gcucgcaaguacuuugaac

SEQ ID NO: 314318 - RNA, 19 nt, Homo sapiens
  misc_RNA (1)...(19): siRNA sense strand
ccucuucaguggcuccaau

SEQ ID NO: 314319 - RNA, 19 nt, Homo sapiens
  misc_RNA (1)...(19): siRNA sense strand
caacaagaaggagaagaag

SEQ ID NO: 314320 - RNA, 19 nt, Homo sapiens
  misc_RNA (1)...(19): siRNA sense strand
caaugaggucgaccagaug

SEQ ID NO: 314321 - RNA, 19 nt, Homo sapiens
  misc_RNA (1)...(19): siRNA sense strand
ggagaagaagguccugaac

SEQ ID NO: 314322 - RNA, 19 nt, Homo sapiens
  misc_RNA (1)...(19): siRNA sense strand
gaggaucuaccaguauauc

SEQ ID NO: 314323 - RNA, 19 nt, Homo sapiens
  misc_RNA (1)...(19): siRNA sense strand
gaccuacaagcacaucaau

SEQ ID NO: 314324 - RNA, 19 nt, Homo sapiens
  misc_RNA (1)...(19): siRNA sense strand
cggagaugaaguacuauau

SEQ ID NO: 314325 - RNA, 19 nt, Homo sapiens
  misc_RNA (1)...(19): siRNA sense strand
ugcgcaugcuggaguauga

SEQ ID NO: 314326 - RNA, 19 nt, Homo sapiens
  misc_RNA (1)...(19): siRNA sense strand
caagcacaucaaugaggua

SEQ ID NO: 314327 - RNA, 19 nt, Homo sapiens
  misc_RNA (1)...(19): siRNA sense strand
gcugcauccuuguggagau

SEQ ID NO: 314328 - RNA, 19 nt, Homo sapiens
  misc_RNA (1)...(19): siRNA sense strand
cgagcaacaagaaggagaa

SEQ ID NO: 314329 - RNA, 19 nt, Homo sapiens
  misc_RNA (1)...(19): siRNA sense strand
ugacgacaaccaugacuac

SEQ ID NO: 314330 - RNA, 19 nt, Homo sapiens
  misc_RNA (1)...(19): siRNA sense strand
caggagcacacgcagguau

SEQ ID NO: 314331 - RNA, 19 nt, Homo sapiens
  misc_RNA (1)...(19): siRNA sense strand
gcaaagauguggccaagca

SEQ ID NO: 314332 - RNA, 19 nt, Homo sapiens
  misc_RNA (1)...(19): siRNA sense strand
gcaggaagcacugagauuc

SEQ ID NO: 314333 - RNA, 19 nt, Homo sapiens
  misc_RNA (1)...(19): siRNA sense strand
cuacagacuuugagaaggu

SEQ ID NO: 314334 - RNA, 19 nt, Homo sapiens
  misc_RNA (1)...(19): siRNA sense strand
aaggaggacucggagauaa

SEQ ID NO: 314335 - RNA, 19 nt, Homo sapiens
  misc_RNA (1)...(19): siRNA sense strand
gaucugacccaguucaagu

SEQ ID NO: 314336 - RNA, 19 nt, Homo sapiens
  misc_RNA (1)...(19): siRNA sense strand
uaaggaggacucggagaua

SEQ ID NO: 314337 - RNA, 19 nt, Homo sapiens
  misc_RNA (1)...(19): siRNA sense strand
caucggagcaggugaagau

SEQ ID NO: 314338 - RNA, 19 nt, Homo sapiens
  misc_RNA (1)...(19): siRNA sense strand
cuacggagacgugguguuu

SEQ ID NO: 314339 - RNA, 19 nt, Homo sapiens
  misc_RNA (1)...(19): siRNA sense strand
gaagaugcugcagcggaua

SEQ ID NO: 314340 - RNA, 19 nt, Homo sapiens
  misc_RNA (1)...(19): siRNA sense strand
gggcccugauggcaaauug

SEQ ID NO: 314341 - RNA, 19 nt, Homo sapiens
  misc_RNA (1)...(19): siRNA sense strand
acucggagauaagguguuu

SEQ ID NO: 314342 - RNA, 19 nt, Homo sapiens
  misc_RNA (1)...(19): siRNA sense strand
gaaaggggcugugcuuguc

SEQ ID NO: 314343 - RNA, 19 nt, Homo sapiens
  misc_RNA (1)...(19): siRNA sense strand
ccugggcccugauggcaaa

SEQ ID NO: 314344 - RNA, 19 nt, Homo sapiens
  misc_RNA (1)...(19): siRNA sense strand
ucagccugguggacaagua

SEQ ID NO: 314345 - RNA, 19 nt, Homo sapiens
  misc_RNA (1)...(19): siRNA sense strand
gcggauagacgcacacaac

SEQ ID NO: 314346 - RNA, 19 nt, Homo sapiens
  misc_RNA (1)...(19): siRNA sense strand
ggagacgugguguuuguca

SEQ ID NO: 314347 - RNA, 19 nt, Homo sapiens
  misc_RNA (1)...(19): siRNA sense strand
ugacccaguucaaguggau

SEQ ID NO: 314348 - RNA, 19 nt, Homo sapiens
  misc_RNA (1)...(19): siRNA sense strand
agguugaucugacccaguu

SEQ ID NO: 314349 - RNA, 19 nt, Homo sapiens
  misc_RNA (1)...(19): siRNA sense strand
acggagacgugguguuugu

SEQ ID NO: 314350 - RNA, 19 nt, Homo sapiens
  misc_RNA (1)...(19): siRNA sense strand
gcuggagacaccuucaaug

SEQ ID NO: 314351 - RNA, 19 nt, Homo sapiens
  misc_RNA (1)...(19): siRNA sense strand
caaugccuccgucaucuuc

SEQ ID NO: 314352 - RNA, 19 nt, Homo sapiens
  misc_RNA (1)...(19): siRNA sense strand
ucaucagccugguggacaa

SEQ ID NO: 314353 - RNA, 19 nt, Homo sapiens
  misc_RNA (1)...(19): siRNA sense strand
gagcuggagacaccuucaa

SEQ ID NO: 314354 - RNA, 19 nt, Homo sapiens
  misc_RNA (1)...(19): siRNA sense strand
ggaaaggggcugugcuugu

SEQ ID NO: 314355 - RNA, 19 nt, Homo sapiens
  misc_RNA (1)...(19): siRNA sense strand
cuaaggaggacucggagau

SEQ ID NO: 314356 - RNA, 19 nt, Homo sapiens
  misc_RNA (1)...(19): siRNA sense strand
gcaaagauguggccaagca

SEQ ID NO: 314357 - RNA, 19 nt, Homo sapiens
  misc_RNA (1)...(19): siRNA sense strand
gcaggaagcacugagauuc

SEQ ID NO: 314358 - RNA, 19 nt, Homo sapiens
  misc_RNA (1)...(19): siRNA sense strand
cuacagacuuugagaaggu

SEQ ID NO: 314359 - RNA, 19 nt, Homo sapiens
  misc_RNA (1)...(19): siRNA sense strand
aaggaggacucggagauaa

SEQ ID NO: 314360 - RNA, 19 nt, Homo sapiens
  misc_RNA (1)...(19): siRNA sense strand
gaucugacccaguucaagu

SEQ ID NO: 314361 - RNA, 19 nt, Homo sapiens
  misc_RNA (1)...(19): siRNA sense strand
uaaggaggacucggagaua

SEQ ID NO: 314362 - RNA, 19 nt, Homo sapiens
  misc_RNA (1)...(19): siRNA sense strand
caucggagcaggugaagau

SEQ ID NO: 314363 - RNA, 19 nt, Homo sapiens
  misc_RNA (1)...(19): siRNA sense strand
cuacggagacgugguguuu

SEQ ID NO: 314364 - RNA, 19 nt, Homo sapiens
  misc_RNA (1)...(19): siRNA sense strand
gaagaugcugcagcggaua

SEQ ID NO: 314365 - RNA, 19 nt, Homo sapiens
  misc_RNA (1)...(19): siRNA sense strand
gggcccugauggcaaauug

SEQ ID NO: 314366 - RNA, 19 nt, Homo sapiens
  misc_RNA (1)...(19): siRNA sense strand
acucggagauaagguguuu

SEQ ID NO: 314367 - RNA, 19 nt, Homo sapiens
  misc_RNA (1)...(19): siRNA sense strand
gaaaggggcugugcuuguc

SEQ ID NO: 314368 - RNA, 19 nt, Homo sapiens
  misc_RNA (1)...(19): siRNA sense strand
ccugggcccugauggcaaa

SEQ ID NO: 314369 - RNA, 19 nt, Homo sapiens
  misc_RNA (1)...(19): siRNA sense strand
ucagccugguggacaagua

SEQ ID NO: 314370 - RNA, 19 nt, Homo sapiens
  misc_RNA (1)...(19): siRNA sense strand
gcggauagacgcacacaac

SEQ ID NO: 314371 - RNA, 19 nt, Homo sapiens
  misc_RNA (1)...(19): siRNA sense strand
ggagacgugguguuuguca

SEQ ID NO: 314372 - RNA, 19 nt, Homo sapiens
  misc_RNA (1)...(19): siRNA sense strand
ugacccaguucaaguggau

SEQ ID NO: 314373 - RNA, 19 nt, Homo sapiens
  misc_RNA (1)...(19): siRNA sense strand
agguugaucugacccaguu

SEQ ID NO: 314374 - RNA, 19 nt, Homo sapiens
  misc_RNA (1)...(19): siRNA sense strand
acggagacgugguguuugu

SEQ ID NO: 314375 - RNA, 19 nt, Homo sapiens
  misc_RNA (1)...(19): siRNA sense strand
gcuggagacaccuucaaug

SEQ ID NO: 314376 - RNA, 19 nt, Homo sapiens
  misc_RNA (1)...(19): siRNA sense strand
caaugccuccgucaucuuc

SEQ ID NO: 314377 - RNA, 19 nt, Homo sapiens
  misc_RNA (1)...(19): siRNA sense strand
ucaucagccugguggacaa

SEQ ID NO: 314378 - RNA, 19 nt, Homo sapiens
  misc_RNA (1)...(19): siRNA sense strand
gagcuggagacaccuucaa

SEQ ID NO: 314379 - RNA, 19 nt, Homo sapiens
  misc_RNA (1)...(19): siRNA sense strand
ggaaaggggcugugcuugu

SEQ ID NO: 314380 - RNA, 19 nt, Homo sapiens
  misc_RNA (1)...(19): siRNA sense strand
cuaaggaggacucggagau

SEQ ID NO: 314381 - RNA, 19 nt, Homo sapiens
  misc_RNA (1)...(19): siRNA sense strand
ccaacaacgugguguauaa

SEQ ID NO: 314382 - RNA, 19 nt, Homo sapiens
  misc_RNA (1)...(19): siRNA sense strand
caagaaggaugaacccaaa

SEQ ID NO: 314383 - RNA, 19 nt, Homo sapiens
  misc_RNA (1)...(19): siRNA sense strand
gaauucaucugcacugugu

SEQ ID NO: 314384 - RNA, 19 nt, Homo sapiens
  misc_RNA (1)...(19): siRNA sense strand
ggaaggcacugcaugucaa

SEQ ID NO: 314385 - RNA, 19 nt, Homo sapiens
  misc_RNA (1)...(19): siRNA sense strand
aaacgggaccuguucuuua

SEQ ID NO: 314386 - RNA, 19 nt, Homo sapiens
  misc_RNA (1)...(19): siRNA sense strand
gaaacgggaccuguucuuu

SEQ ID NO: 314387 - RNA, 19 nt, Homo sapiens
  misc_RNA (1)...(19): siRNA sense strand
gaccuguucuuuaaugaga

SEQ ID NO: 314388 - RNA, 19 nt, Homo sapiens
  misc_RNA (1)...(19): siRNA sense strand
ugacacagcccaagaagga

SEQ ID NO: 314389 - RNA, 19 nt, Homo sapiens
  misc_RNA (1)...(19): siRNA sense strand
gauaagaccguguaugagu

SEQ ID NO: 314390 - RNA, 19 nt, Homo sapiens
  misc_RNA (1)...(19): siRNA sense strand
aacgggaccuguucuuuaa

SEQ ID NO: 314391 - RNA, 19 nt, Homo sapiens
  misc_RNA (1)...(19): siRNA sense strand
auaagaccguguaugagua

SEQ ID NO: 314392 - RNA, 19 nt, Homo sapiens
  misc_RNA (1)...(19): siRNA sense strand
ccaaacuccucacuuucuu

SEQ ID NO: 314393 - RNA, 19 nt, Homo sapiens
  misc_RNA (1)...(19): siRNA sense strand
gaagcagagguacguguuu

SEQ ID NO: 314394 - RNA, 19 nt, Homo sapiens
  misc_RNA (1)...(19): siRNA sense strand
guacguguuugacauuagu

SEQ ID NO: 314395 - RNA, 19 nt, Homo sapiens
  misc_RNA (1)...(19): siRNA sense strand
ucacuuucuugcuuuggua

SEQ ID NO: 314396 - RNA, 19 nt, Homo sapiens
  misc_RNA (1)...(19): siRNA sense strand
caagaaacgggaccuguuc

SEQ ID NO: 314397 - RNA, 19 nt, Homo sapiens
  misc_RNA (1)...(19): siRNA sense strand
gcucuggccaggacgauaa

SEQ ID NO: 314398 - RNA, 19 nt, Homo sapiens
  misc_RNA (1)...(19): siRNA sense strand
ggaagcagagguacguguu

SEQ ID NO: 314399 - RNA, 19 nt, Homo sapiens
  misc_RNA (1)...(19): siRNA sense strand
cgacccagcaagaaccuua

SEQ ID NO: 314400 - RNA, 19 nt, Homo sapiens
  misc_RNA (1)...(19): siRNA sense strand
acgauaagaccguguauga

SEQ ID NO: 314401 - RNA, 19 nt, Homo sapiens
  misc_RNA (1)...(19): siRNA sense strand
gcugggagguguucgacau

SEQ ID NO: 314402 - RNA, 19 nt, Homo sapiens
  misc_RNA (1)...(19): siRNA sense strand
ccaagaaacgggaccuguu

SEQ ID NO: 314403 - RNA, 19 nt, Homo sapiens
  misc_RNA (1)...(19): siRNA sense strand
ucagcauccucuucauuga

SEQ ID NO: 314404 - RNA, 19 nt, Homo sapiens
  misc_RNA (1)...(19): siRNA sense strand
gcaagcgacccagcaagaa

SEQ ID NO: 314405 - RNA, 19 nt, Homo sapiens
  misc_RNA (1)...(19): siRNA sense strand
uuagugcccuggagaagga

SEQ ID NO: 314406 - RNA, 19 nt, Homo sapiens
  misc_RNA (1)...(19): siRNA sense strand
caccagcuuuauugacaaa

SEQ ID NO: 314407 - RNA, 19 nt, Homo sapiens
  misc_RNA (1)...(19): siRNA sense strand
gggaccuguucuuuaauga

SEQ ID NO: 314408 - RNA, 19 nt, Homo sapiens
  misc_RNA (1)...(19): siRNA sense strand
gcaacagcagcgugaaguu

SEQ ID NO: 314409 - RNA, 19 nt, Homo sapiens
  misc_RNA (1)...(19): siRNA sense strand
ccaacaccaucaccagcuu

SEQ ID NO: 314410 - RNA, 19 nt, Homo sapiens
  misc_RNA (1)...(19): siRNA sense strand
aagcagagguacguguuug

SEQ ID NO: 314411 - RNA, 19 nt, Homo sapiens
  misc_RNA (1)...(19): siRNA sense strand
gaggucccguggucaggaa

SEQ ID NO: 314412 - RNA, 19 nt, Homo sapiens
  misc_RNA (1)...(19): siRNA sense strand
caucagcauccucuucauu

SEQ ID NO: 314413 - RNA, 19 nt, Homo sapiens
  misc_RNA (1)...(19): siRNA sense strand
gagguacguguuugacauu

SEQ ID NO: 314414 - RNA, 19 nt, Homo sapiens
  misc_RNA (1)...(19): siRNA sense strand
caccaucaccagcuuuauu

SEQ ID NO: 314415 - RNA, 19 nt, Homo sapiens
  misc_RNA (1)...(19): siRNA sense strand
cgggaccuguucuuuaaug

SEQ ID NO: 314416 - RNA, 19 nt, Homo sapiens
  misc_RNA (1)...(19): siRNA sense strand
ggcaagcgacccagcaaga

SEQ ID NO: 314417 - RNA, 19 nt, Homo sapiens
  misc_RNA (1)...(19): siRNA sense strand
caacaccaucaccagcuuu

SEQ ID NO: 314418 - RNA, 19 nt, Homo sapiens
  misc_RNA (1)...(19): siRNA sense strand
gccaacaacgugguguaua

SEQ ID NO: 314419 - RNA, 19 nt, Homo sapiens
  misc_RNA (1)...(19): siRNA sense strand
ccaaagcagaggccaagga

SEQ ID NO: 314420 - RNA, 19 nt, Homo sapiens
  misc_RNA (1)...(19): siRNA sense strand
agagguacguguuugacau

SEQ ID NO: 314421 - RNA, 19 nt, Homo sapiens
  misc_RNA (1)...(19): siRNA sense strand
ucaccagcuuuauugacaa

SEQ ID NO: 314422 - RNA, 19 nt, Homo sapiens
  misc_RNA (1)...(19): siRNA sense strand
ggcacugcaugucaacuuc

SEQ ID NO: 314423 - RNA, 19 nt, Homo sapiens
  misc_RNA (1)...(19): siRNA sense strand
gguacguguuugacauuag

SEQ ID NO: 314424 - RNA, 19 nt, Homo sapiens
  misc_RNA (1)...(19): siRNA sense strand
gcugugcgaguucccauug

SEQ ID NO: 314425 - RNA, 19 nt, Homo sapiens
  misc_RNA (1)...(19): siRNA sense strand
uaagcaguaugaggacaug

SEQ ID NO: 314426 - RNA, 19 nt, Homo sapiens
  misc_RNA (1)...(19): siRNA sense strand
guccgaugcugacagaaag

SEQ ID NO: 314427 - RNA, 19 nt, Homo sapiens
  misc_RNA (1)...(19): siRNA sense strand
gcacugcaugucaacuuca

SEQ ID NO: 314428 - RNA, 19 nt, Homo sapiens
  misc_RNA (1)...(19): siRNA sense strand
aagcucuuccgaaacuuua

SEQ ID NO: 314429 - RNA, 19 nt, Homo sapiens
  misc_RNA (1)...(19): siRNA sense strand
ccuguucuuuaaugagauu

SEQ ID NO: 314430 - RNA, 19 nt, Homo sapiens
  misc_RNA (1)...(19): siRNA sense strand
caaacuccucacuuucuug

SEQ ID NO: 314431 - RNA, 19 nt, Homo sapiens
  misc_RNA (1)...(19): siRNA sense strand
ugacaaagggcaagaugac

SEQ ID NO: 314432 - RNA, 19 nt, Homo sapiens
  misc_RNA (1)...(19): siRNA sense strand
acaacgugguguauaagca

SEQ ID NO: 314433 - RNA, 19 nt, Homo sapiens
  misc_RNA (1)...(19): siRNA sense strand
ccacgaaucaugcagucau

SEQ ID NO: 314434 - RNA, 19 nt, Homo sapiens
  misc_RNA (1)...(19): siRNA sense strand
ggacgauaagaccguguau

SEQ ID NO: 314435 - RNA, 19 nt, Homo sapiens
  misc_RNA (1)...(19): siRNA sense strand
ggcuggaccuggaauucau

SEQ ID NO: 314436 - RNA, 19 nt, Homo sapiens
  misc_RNA (1)...(19): siRNA sense strand
caacaacgugguguauaag

SEQ ID NO: 314437 - RNA, 19 nt, Homo sapiens
  misc_RNA (1)...(19): siRNA sense strand
acuccucacuuucuugcuu

SEQ ID NO: 314438 - RNA, 19 nt, Homo sapiens
  misc_RNA (1)...(19): siRNA sense strand
cauugacucugccaacaac

SEQ ID NO: 314439 - RNA, 19 nt, Homo sapiens
  misc_RNA (1)...(19): siRNA sense strand
agguacguguuugacauua

SEQ ID NO: 314440 - RNA, 19 nt, Homo sapiens
  misc_RNA (1)...(19): siRNA sense strand
uuccgaaacuuuaagaacu

SEQ ID NO: 314441 - RNA, 19 nt, Homo sapiens
  misc_RNA (1)...(19): siRNA sense strand
gggagguguucgacaucug

SEQ ID NO: 314442 - RNA, 19 nt, Homo sapiens
  misc_RNA (1)...(19): siRNA sense strand
ccacgagaaggcccuguuc

SEQ ID NO: 314443 - RNA, 19 nt, Homo sapiens
  misc_RNA (1)...(19): siRNA sense strand
cggaaggcacugcauguca

SEQ ID NO: 314444 - RNA, 19 nt, Homo sapiens
  misc_RNA (1)...(19): siRNA sense strand
gacccagcaagaaccuuaa

SEQ ID NO: 314445 - RNA, 19 nt, Homo sapiens
  misc_RNA (1)...(19): siRNA sense strand
acacagaccugaagaacua

SEQ ID NO: 314446 - RNA, 19 nt, Homo sapiens
  misc_RNA (1)...(19): siRNA sense strand
gcaacgcccucaagugcua

SEQ ID NO: 314447 - RNA, 19 nt, Homo sapiens
  misc_RNA (1)...(19): siRNA sense strand
gagacaucaucuucaaauu

SEQ ID NO: 314448 - RNA, 19 nt, Homo sapiens
  misc_RNA (1)...(19): siRNA sense strand
ggaagaaggcgcugcugaa

SEQ ID NO: 314449 - RNA, 19 nt, Homo sapiens
  misc_RNA (1)...(19): siRNA sense strand
uggagaagcuggacacaga

SEQ ID NO: 314450 - RNA, 19 nt, Homo sapiens
  misc_RNA (1)...(19): siRNA sense strand
gacaucaucuucaaauucu

SEQ ID NO: 314451 - RNA, 19 nt, Homo sapiens
  misc_RNA (1)...(19): siRNA sense strand
gcaaccagauccaugucaa

SEQ ID NO: 314452 - RNA, 19 nt, Homo sapiens
  misc_RNA (1)...(19): siRNA sense strand
ccaaacacgucaucaacau

SEQ ID NO: 314453 - RNA, 19 nt, Homo sapiens
  misc_RNA (1)...(19): siRNA sense strand
gccuggaucuggaacagua

SEQ ID NO: 314454 - RNA, 19 nt, Homo sapiens
  misc_RNA (1)...(19): siRNA sense strand
ggucucaugugcucagcua

SEQ ID NO: 314455 - RNA, 19 nt, Homo sapiens
  misc_RNA (1)...(19): siRNA sense strand
gaaugcaccugacgucaac

SEQ ID NO: 314456 - RNA, 19 nt, Homo sapiens
  misc_RNA (1)...(19): siRNA sense strand
gaugagcaccaacauguga

SEQ ID NO: 314457 - RNA, 19 nt, Homo sapiens
  misc_RNA (1)...(19): siRNA sense strand
ucaacuacgugguggagaa

SEQ ID NO: 314458 - RNA, 19 nt, Homo sapiens
  misc_RNA (1)...(19): siRNA sense strand
cagcagcuccuucaaguug

SEQ ID NO: 314459 - RNA, 19 nt, Homo sapiens
  misc_RNA (1)...(19): siRNA sense strand
ucaagaugcuggacgagau

SEQ ID NO: 314460 - RNA, 19 nt, Homo sapiens
  misc_RNA (1)...(19): siRNA sense strand
ccagcaacguggccaucua

SEQ ID NO: 314461 - RNA, 19 nt, Homo sapiens
  misc_RNA (1)...(19): siRNA sense strand
caagggcaacuccaucaaa

SEQ ID NO: 314462 - RNA, 19 nt, Homo sapiens
  misc_RNA (1)...(19): siRNA sense strand
ccuuuaacguggacaugua

SEQ ID NO: 314463 - RNA, 19 nt, Homo sapiens
  misc_RNA (1)...(19): siRNA sense strand
gcagcuccuucaaguuguu

SEQ ID NO: 314464 - RNA, 19 nt, Homo sapiens
  misc_RNA (1)...(19): siRNA sense strand
gaagaaggcgcugcugaag

SEQ ID NO: 314465 - RNA, 19 nt, Homo sapiens
  misc_RNA (1)...(19): siRNA sense strand
gcaccaccuuugagaaguc

SEQ ID NO: 314466 - RNA, 19 nt, Homo sapiens
  misc_RNA (1)...(19): siRNA sense strand
cgagacaucaucuucaaau

SEQ ID NO: 314467 - RNA, 19 nt, Homo sapiens
  misc_RNA (1)...(19): siRNA sense strand
gcgucuacuugcagaauug

SEQ ID NO: 314468 - RNA, 19 nt, Homo sapiens
  misc_RNA (1)...(19): siRNA sense strand
ucacacagcaagauccuau

SEQ ID NO: 314469 - RNA, 19 nt, Homo sapiens
  misc_RNA (1)...(19): siRNA sense strand
agaaggcgcugcugaagcu

SEQ ID NO: 314470 - RNA, 19 nt, Homo sapiens
  misc_RNA (1)...(19): siRNA sense strand
agacaucaucuucaaauuc

SEQ ID NO: 314471 - RNA, 19 nt, Homo sapiens
  misc_RNA (1)...(19): siRNA sense strand
ggacauguacgaggagauc

SEQ ID NO: 314472 - RNA, 19 nt, Homo sapiens
  misc_RNA (1)...(19): siRNA sense strand
ggacacagaccugaagaac

SEQ ID NO: 314473 - RNA, 19 nt, Homo sapiens
  misc_RNA (1)...(19): siRNA sense strand
ccacagguccgagacauca

SEQ ID NO: 314474 - RNA, 19 nt, Homo sapiens
  misc_RNA (1)...(19): siRNA sense strand
gagcugcagcgcaauguca

SEQ ID NO: 314475 - RNA, 19 nt, Homo sapiens
  misc_RNA (1)...(19): siRNA sense strand
aaacacgucaucaacaugu

SEQ ID NO: 314476 - RNA, 19 nt, Homo sapiens
  misc_RNA (1)...(19): siRNA sense strand
uggacgagaugaaggacaa

SEQ ID NO: 314477 - RNA, 19 nt, Homo sapiens
  misc_RNA (1)...(19): siRNA sense strand
cggaugagcaccaacaugu

SEQ ID NO: 314478 - RNA, 19 nt, Homo sapiens
  misc_RNA (1)...(19): siRNA sense strand
cagccgacaugcauaggau

SEQ ID NO: 314479 - RNA, 19 nt, Homo sapiens
  misc_RNA (1)...(19): siRNA sense strand
uugcagaauuggucucaug

SEQ ID NO: 314480 - RNA, 19 nt, Homo sapiens
  misc_RNA (1)...(19): siRNA sense strand
gcagcaccaccuuugagaa

SEQ ID NO: 314481 - RNA, 19 nt, Homo sapiens
  misc_RNA (1)...(19): siRNA sense strand
ggacucacacagcaagauc

SEQ ID NO: 314482 - RNA, 19 nt, Homo sapiens
  misc_RNA (1)...(19): siRNA sense strand
ccaaguacgccucaugucu

SEQ ID NO: 314483 - RNA, 19 nt, Homo sapiens
  misc_RNA (1)...(19): siRNA sense strand
caggaagacccgcagaaug

SEQ ID NO: 314484 - RNA, 19 nt, Homo sapiens
  misc_RNA (1)...(19): siRNA sense strand
cgguucagguguuuaacuu

SEQ ID NO: 314485 - RNA, 19 nt, Homo sapiens
  misc_RNA (1)...(19): siRNA sense strand
gcaucgaacggcugcaguu

SEQ ID NO: 314486 - RNA, 19 nt, Homo sapiens
  misc_RNA (1)...(19): siRNA sense strand
ccucaugucucaagaugcu

SEQ ID NO: 314487 - RNA, 19 nt, Homo sapiens
  misc_RNA (1)...(19): siRNA sense strand
gggcaacuccaucaaagag

SEQ ID NO: 314488 - RNA, 19 nt, Homo sapiens
  misc_RNA (1)...(19): siRNA sense strand
gguccgagacaucaucuuc

SEQ ID NO: 314489 - RNA, 19 nt, Homo sapiens
  misc_RNA (1)...(19): siRNA sense strand
gugcccucauccaguauuu

SEQ ID NO: 314490 - RNA, 19 nt, Homo sapiens
  misc_RNA (1)...(19): siRNA sense strand
cagcgcagcaccaccuuug

SEQ ID NO: 314491 - RNA, 19 nt, Homo sapiens
  misc_RNA (1)...(19): siRNA sense strand
caaacacgucaucaacaug

SEQ ID NO: 314492 - RNA, 19 nt, Homo sapiens
  misc_RNA (1)...(19): siRNA sense strand
uccagcagcuccuucaagu

SEQ ID NO: 314493 - RNA, 19 nt, Homo sapiens
  misc_RNA (1)...(19): siRNA sense strand
gccaaacacgucaucaaca

SEQ ID NO: 314494 - RNA, 19 nt, Homo sapiens
  misc_RNA (1)...(19): siRNA sense strand
uccgagacaucaucuucaa

SEQ ID NO: 314495 - RNA, 19 nt, Homo sapiens
  misc_RNA (1)...(19): siRNA sense strand
aagggcaacuccaucaaag

SEQ ID NO: 314496 - RNA, 19 nt, Homo sapiens
  misc_RNA (1)...(19): siRNA sense strand
ccugcuggcuuccuuugau

SEQ ID NO: 314497 - RNA, 19 nt, Homo sapiens
  misc_RNA (1)...(19): siRNA sense strand
gcgccaaacacgucaucaa

SEQ ID NO: 314498 - RNA, 19 nt, Homo sapiens
  misc_RNA (1)...(19): siRNA sense strand
gcagaauuggucucaugug

SEQ ID NO: 314499 - RNA, 19 nt, Homo sapiens
  misc_RNA (1)...(19): siRNA sense strand
gcggcagccuucaauacca

SEQ ID NO: 314500 - RNA, 19 nt, Homo sapiens
  misc_RNA (1)...(19): siRNA sense strand
gauggcggcagccuucaau

SEQ ID NO: 314501 - RNA, 19 nt, Homo sapiens
  misc_RNA (1)...(19): siRNA sense strand
caagaugcuggacgagaug

SEQ ID NO: 314502 - RNA, 19 nt, Homo sapiens
  misc_RNA (1)...(19): siRNA sense strand
cgccucaugucucaagaug

SEQ ID NO: 314503 - RNA, 19 nt, Homo sapiens
  misc_RNA (1)...(19): siRNA sense strand
ccaggaagacccgcagaau

SEQ ID NO: 314504 - RNA, 19 nt, Homo sapiens
  misc_RNA (1)...(19): siRNA sense strand
ggaugagcaccaacaugug

SEQ ID NO: 314505 - RNA, 19 nt, Homo sapiens
  misc_RNA (1)...(19): siRNA sense strand
ucaucaaggucagcgucua

SEQ ID NO: 314506 - RNA, 19 nt, Homo sapiens
  misc_RNA (1)...(19): siRNA sense strand
cagcaccaccuuugagaag

SEQ ID NO: 314507 - RNA, 19 nt, Homo sapiens
  misc_RNA (1)...(19): siRNA sense strand
gcccucauccaguauuuca

SEQ ID NO: 314508 - RNA, 19 nt, Homo sapiens
  misc_RNA (1)...(19): siRNA sense strand
accgugcccucauccagua

SEQ ID NO: 314509 - RNA, 19 nt, Homo sapiens
  misc_RNA (1)...(19): siRNA sense strand
ucgcaaccgugcccucauc

SEQ ID NO: 314510 - RNA, 19 nt, Homo sapiens
  misc_RNA (1)...(19): siRNA sense strand
gguggaggcccugaagaug

SEQ ID NO: 314511 - RNA, 19 nt, Homo sapiens
  misc_RNA (1)...(19): siRNA sense strand
aaguacgccucaugucuca

SEQ ID NO: 314512 - RNA, 19 nt, Homo sapiens
  misc_RNA (1)...(19): siRNA sense strand
gcaguucauugcugaucac

SEQ ID NO: 314513 - RNA, 19 nt, Homo sapiens
  misc_RNA (1)...(19): siRNA sense strand
cuacugcaccagcgccaaa

SEQ ID NO: 314514 - RNA, 19 nt, Homo sapiens
  misc_RNA (1)...(19): siRNA sense strand
ggguggaggcccugaagau

SEQ ID NO: 314515 - RNA, 19 nt, Homo sapiens
  misc_RNA (1)...(19): siRNA sense strand
agaaugcaccugacgucaa

SEQ ID NO: 314516 - RNA, 19 nt, Homo sapiens
  misc_RNA (1)...(19): siRNA sense strand
gcgccuuggcuaccuuuga

SEQ ID NO: 314517 - RNA, 19 nt, Homo sapiens
  misc_RNA (1)...(19): siRNA sense strand
gugccucaaugucaucaag

SEQ ID NO: 314518 - RNA, 19 nt, Homo sapiens
  misc_RNA (1)...(19): siRNA sense strand
gugcagagaaccuuuaacg

SEQ ID NO: 314519 - RNA, 19 nt, Homo sapiens
  misc_RNA (1)...(19): siRNA sense strand
ggaagacccgcagaaugca

SEQ ID NO: 314520 - RNA, 19 nt, Homo sapiens
  misc_RNA (1)...(19): siRNA sense strand
guacgccucaugucucaag

SEQ ID NO: 314521 - RNA, 19 nt, Homo sapiens
  misc_RNA (1)...(19): siRNA sense strand
gcgaagacggccaguauuu

SEQ ID NO: 314522 - RNA, 19 nt, Homo sapiens
  misc_RNA (1)...(19): siRNA sense strand
gcugcuggaucuauaauug

SEQ ID NO: 314523 - RNA, 19 nt, Homo sapiens
  misc_RNA (1)...(19): siRNA sense strand
gacagacaauuguucaguu

SEQ ID NO: 314524 - RNA, 19 nt, Homo sapiens
  misc_RNA (1)...(19): siRNA sense strand
gaagggaggacagacaauu

SEQ ID NO: 314525 - RNA, 19 nt, Homo sapiens
  misc_RNA (1)...(19): siRNA sense strand
uaauccagaucgcaucaaa

SEQ ID NO: 314526 - RNA, 19 nt, Homo sapiens
  misc_RNA (1)...(19): siRNA sense strand
gggcgaagacggccaguau

SEQ ID NO: 314527 - RNA, 19 nt, Homo sapiens
  misc_RNA (1)...(19): siRNA sense strand
gaaacuggagccaccauca

SEQ ID NO: 314528 - RNA, 19 nt, Homo sapiens
  misc_RNA (1)...(19): siRNA sense strand
acagacaauuguucaguug

SEQ ID NO: 314529 - RNA, 19 nt, Homo sapiens
  misc_RNA (1)...(19): siRNA sense strand
gcaccaagaggaccaauac

SEQ ID NO: 314530 - RNA, 19 nt, Homo sapiens
  misc_RNA (1)...(19): siRNA sense strand
ugucuaaguccaaagauuu

SEQ ID NO: 314531 - RNA, 19 nt, Homo sapiens
  misc_RNA (1)...(19): siRNA sense strand
gacagaaccagucagcauu

SEQ ID NO: 314532 - RNA, 19 nt, Homo sapiens
  misc_RNA (1)...(19): siRNA sense strand
gaaccagucagcauucuac

SEQ ID NO: 314533 - RNA, 19 nt, Homo sapiens
  misc_RNA (1)...(19): siRNA sense strand
ggacagacaauuguucagu

SEQ ID NO: 314534 - RNA, 19 nt, Homo sapiens
  misc_RNA (1)...(19): siRNA sense strand
gcaguucauggauucauug

SEQ ID NO: 314535 - RNA, 19 nt, Homo sapiens
  misc_RNA (1)...(19): siRNA sense strand
gaggacagacaauuguuca

SEQ ID NO: 314536 - RNA, 19 nt, Homo sapiens
  misc_RNA (1)...(19): siRNA sense strand
ggaggacagacaauuguuc

SEQ ID NO: 314537 - RNA, 19 nt, Homo sapiens
  misc_RNA (1)...(19): siRNA sense strand
gaagccggcagcaccaaga

SEQ ID NO: 314538 - RNA, 19 nt, Homo sapiens
  misc_RNA (1)...(19): siRNA sense strand
uuaugcugcuggaucuaua

SEQ ID NO: 314539 - RNA, 19 nt, Homo sapiens
  misc_RNA (1)...(19): siRNA sense strand
gagaaaugccccaaaaugu

SEQ ID NO: 314540 - RNA, 19 nt, Homo sapiens
  misc_RNA (1)...(19): siRNA sense strand
gacaauuguucaguugcaa

SEQ ID NO: 314541 - RNA, 19 nt, Homo sapiens
  misc_RNA (1)...(19): siRNA sense strand
ggaccaauacgggcgaaga

SEQ ID NO: 314542 - RNA, 19 nt, Homo sapiens
  misc_RNA (1)...(19): siRNA sense strand
cagcucccauccagcagaa

SEQ ID NO: 314543 - RNA, 19 nt, Homo sapiens
  misc_RNA (1)...(19): siRNA sense strand
gggaagggaggacagacaa

SEQ ID NO: 314544 - RNA, 19 nt, Homo sapiens
  misc_RNA (1)...(19): siRNA sense strand
agacaauuguucaguugca

SEQ ID NO: 314545 - RNA, 19 nt, Homo sapiens
  misc_RNA (1)...(19): siRNA sense strand
gaagacggccaguauuuuc

SEQ ID NO: 314546 - RNA, 19 nt, Homo sapiens
  misc_RNA (1)...(19): siRNA sense strand
gaccaccguuaauccagau

SEQ ID NO: 314547 - RNA, 19 nt, Homo sapiens
  misc_RNA (1)...(19): siRNA sense strand
cuacugagcgagugugcuu

SEQ ID NO: 314548 - RNA, 19 nt, Homo sapiens
  misc_RNA (1)...(19): siRNA sense strand
ccagggaacgguugaagca

SEQ ID NO: 314549 - RNA, 19 nt, Homo sapiens
  misc_RNA (1)...(19): siRNA sense strand
ggaagggaggacagacaau

SEQ ID NO: 314550 - RNA, 19 nt, Homo sapiens
  misc_RNA (1)...(19): siRNA sense strand
agacagaaccagucagcau

SEQ ID NO: 314551 - RNA, 19 nt, Homo sapiens
  misc_RNA (1)...(19): siRNA sense strand
gggaggacagacaauuguu

SEQ ID NO: 314552 - RNA, 19 nt, Homo sapiens
  misc_RNA (1)...(19): siRNA sense strand
aaacuggagccaccaucaa

SEQ ID NO: 314553 - RNA, 19 nt, Homo sapiens
  misc_RNA (1)...(19): siRNA sense strand
gaacgguugaagcacugaa

SEQ ID NO: 314554 - RNA, 19 nt, Homo sapiens
  misc_RNA (1)...(19): siRNA sense strand
ccagucagcauucuacaac

SEQ ID NO: 314555 - RNA, 19 nt, Homo sapiens
  misc_RNA (1)...(19): siRNA sense strand
cgagaaaugccccaaaaug

SEQ ID NO: 314556 - RNA, 19 nt, Homo sapiens
  misc_RNA (1)...(19): siRNA sense strand
cugucuaaguccaaagauu

SEQ ID NO: 314557 - RNA, 19 nt, Homo sapiens
  misc_RNA (1)...(19): siRNA sense strand
ugcaguucauggauucauu

SEQ ID NO: 314558 - RNA, 19 nt, Homo sapiens
  misc_RNA (1)...(19): siRNA sense strand
uaguuaugcugcuggaucu

SEQ ID NO: 314559 - RNA, 19 nt, Homo sapiens
  misc_RNA (1)...(19): siRNA sense strand
gccaagacagaaccaguca

SEQ ID NO: 314560 - RNA, 19 nt, Homo sapiens
  misc_RNA (1)...(19): siRNA sense strand
ccaccaucaagcugucuaa

SEQ ID NO: 314561 - RNA, 19 nt, Homo sapiens
  misc_RNA (1)...(19): siRNA sense strand
ggcgaagacggccaguauu

SEQ ID NO: 314562 - RNA, 19 nt, Homo sapiens
  misc_RNA (1)...(19): siRNA sense strand
gcgaagacggccaguauuu

SEQ ID NO: 314563 - RNA, 19 nt, Homo sapiens
  misc_RNA (1)...(19): siRNA sense strand
gcugcuggaucuauaauug

SEQ ID NO: 314564 - RNA, 19 nt, Homo sapiens
  misc_RNA (1)...(19): siRNA sense strand
gacagacaauuguucaguu

SEQ ID NO: 314565 - RNA, 19 nt, Homo sapiens
  misc_RNA (1)...(19): siRNA sense strand
gaagggaggacagacaauu

SEQ ID NO: 314566 - RNA, 19 nt, Homo sapiens
  misc_RNA (1)...(19): siRNA sense strand
uaauccagaucgcaucaaa

SEQ ID NO: 314567 - RNA, 19 nt, Homo sapiens
  misc_RNA (1)...(19): siRNA sense strand
gggcgaagacggccaguau

SEQ ID NO: 314568 - RNA, 19 nt, Homo sapiens
  misc_RNA (1)...(19): siRNA sense strand
gaaacuggagccaccauca

SEQ ID NO: 314569 - RNA, 19 nt, Homo sapiens
  misc_RNA (1)...(19): siRNA sense strand
acagacaauuguucaguug

SEQ ID NO: 314570 - RNA, 19 nt, Homo sapiens
  misc_RNA (1)...(19): siRNA sense strand
gcaccaagaggaccaauac

SEQ ID NO: 314571 - RNA, 19 nt, Homo sapiens
  misc_RNA (1)...(19): siRNA sense strand
ugucuaaguccaaagauuu

SEQ ID NO: 314572 - RNA, 19 nt, Homo sapiens
  misc_RNA (1)...(19): siRNA sense strand
gacagaaccagucagcauu

SEQ ID NO: 314573 - RNA, 19 nt, Homo sapiens
  misc_RNA (1)...(19): siRNA sense strand
gaaccagucagcauucuac

SEQ ID NO: 314574 - RNA, 19 nt, Homo sapiens
  misc_RNA (1)...(19): siRNA sense strand
ggacagacaauuguucagu

SEQ ID NO: 314575 - RNA, 19 nt, Homo sapiens
  misc_RNA (1)...(19): siRNA sense strand
gcaguucauggauucauug

SEQ ID NO: 314576 - RNA, 19 nt, Homo sapiens
  misc_RNA (1)...(19): siRNA sense strand
gaggacagacaauuguuca

SEQ ID NO: 314577 - RNA, 19 nt, Homo sapiens
  misc_RNA (1)...(19): siRNA sense strand
ggaggacagacaauuguuc

SEQ ID NO: 314578 - RNA, 19 nt, Homo sapiens
  misc_RNA (1)...(19): siRNA sense strand
gaagccggcagcaccaaga

SEQ ID NO: 314579 - RNA, 19 nt, Homo sapiens
  misc_RNA (1)...(19): siRNA sense strand
uuaugcugcuggaucuaua

SEQ ID NO: 314580 - RNA, 19 nt, Homo sapiens
  misc_RNA (1)...(19): siRNA sense strand
gagaaaugccccaaaaugu

SEQ ID NO: 314581 - RNA, 19 nt, Homo sapiens
  misc_RNA (1)...(19): siRNA sense strand
gacaauuguucaguugcaa

SEQ ID NO: 314582 - RNA, 19 nt, Homo sapiens
  misc_RNA (1)...(19): siRNA sense strand
ggaccaauacgggcgaaga

SEQ ID NO: 314583 - RNA, 19 nt, Homo sapiens
  misc_RNA (1)...(19): siRNA sense strand
cagcucccauccagcagaa

SEQ ID NO: 314584 - RNA, 19 nt, Homo sapiens
  misc_RNA (1)...(19): siRNA sense strand
gggaagggaggacagacaa

SEQ ID NO: 314585 - RNA, 19 nt, Homo sapiens
  misc_RNA (1)...(19): siRNA sense strand
agacaauuguucaguugca

SEQ ID NO: 314586 - RNA, 19 nt, Homo sapiens
  misc_RNA (1)...(19): siRNA sense strand
gaagacggccaguauuuuc

SEQ ID NO: 314587 - RNA, 19 nt, Homo sapiens
  misc_RNA (1)...(19): siRNA sense strand
gaccaccguuaauccagau

SEQ ID NO: 314588 - RNA, 19 nt, Homo sapiens
  misc_RNA (1)...(19): siRNA sense strand
cuacugagcgagugugcuu

SEQ ID NO: 314589 - RNA, 19 nt, Homo sapiens
  misc_RNA (1)...(19): siRNA sense strand
ccagggaacgguugaagca

SEQ ID NO: 314590 - RNA, 19 nt, Homo sapiens
  misc_RNA (1)...(19): siRNA sense strand
ggaagggaggacagacaau

SEQ ID NO: 314591 - RNA, 19 nt, Homo sapiens
  misc_RNA (1)...(19): siRNA sense strand
agacagaaccagucagcau

SEQ ID NO: 314592 - RNA, 19 nt, Homo sapiens
  misc_RNA (1)...(19): siRNA sense strand
gggaggacagacaauuguu

SEQ ID NO: 314593 - RNA, 19 nt, Homo sapiens
  misc_RNA (1)...(19): siRNA sense strand
aaacuggagccaccaucaa

SEQ ID NO: 314594 - RNA, 19 nt, Homo sapiens
  misc_RNA (1)...(19): siRNA sense strand
gaacgguugaagcacugaa

SEQ ID NO: 314595 - RNA, 19 nt, Homo sapiens
  misc_RNA (1)...(19): siRNA sense strand
ccagucagcauucuacaac

SEQ ID NO: 314596 - RNA, 19 nt, Homo sapiens
  misc_RNA (1)...(19): siRNA sense strand
cgagaaaugccccaaaaug

SEQ ID NO: 314597 - RNA, 19 nt, Homo sapiens
  misc_RNA (1)...(19): siRNA sense strand
cugucuaaguccaaagauu

SEQ ID NO: 314598 - RNA, 19 nt, Homo sapiens
  misc_RNA (1)...(19): siRNA sense strand
ugcaguucauggauucauu

SEQ ID NO: 314599 - RNA, 19 nt, Homo sapiens
  misc_RNA (1)...(19): siRNA sense strand
uaguuaugcugcuggaucu

SEQ ID NO: 314600 - RNA, 19 nt, Homo sapiens
  misc_RNA (1)...(19): siRNA sense strand
gccaagacagaaccaguca

SEQ ID NO: 314601 - RNA, 19 nt, Homo sapiens
  misc_RNA (1)...(19): siRNA sense strand
ccaccaucaagcugucuaa

SEQ ID NO: 314602 - RNA, 19 nt, Homo sapiens
  misc_RNA (1)...(19): siRNA sense strand
ggcgaagacggccaguauu

SEQ ID NO: 314603 - RNA, 19 nt, Homo sapiens
  misc_RNA (1)...(19): siRNA sense strand
gcgaagacggccaguauuu

SEQ ID NO: 314604 - RNA, 19 nt, Homo sapiens
  misc_RNA (1)...(19): siRNA sense strand
gcugcuggaucuauaauug

SEQ ID NO: 314605 - RNA, 19 nt, Homo sapiens
  misc_RNA (1)...(19): siRNA sense strand
gacagacaauuguucaguu

SEQ ID NO: 314606 - RNA, 19 nt, Homo sapiens
  misc_RNA (1)...(19): siRNA sense strand
gaagggaggacagacaauu

SEQ ID NO: 314607 - RNA, 19 nt, Homo sapiens
  misc_RNA (1)...(19): siRNA sense strand
uaauccagaucgcaucaaa

SEQ ID NO: 314608 - RNA, 19 nt, Homo sapiens
  misc_RNA (1)...(19): siRNA sense strand
gggcgaagacggccaguau

SEQ ID NO: 314609 - RNA, 19 nt, Homo sapiens
  misc_RNA (1)...(19): siRNA sense strand
gaaacuggagccaccauca

SEQ ID NO: 314610 - RNA, 19 nt, Homo sapiens
  misc_RNA (1)...(19): siRNA sense strand
acagacaauuguucaguug

SEQ ID NO: 314611 - RNA, 19 nt, Homo sapiens
  misc_RNA (1)...(19): siRNA sense strand
gcaccaagaggaccaauac

SEQ ID NO: 314612 - RNA, 19 nt, Homo sapiens
  misc_RNA (1)...(19): siRNA sense strand
ugucuaaguccaaagauuu

SEQ ID NO: 314613 - RNA, 19 nt, Homo sapiens
  misc_RNA (1)...(19): siRNA sense strand
gacagaaccagucagcauu

SEQ ID NO: 314614 - RNA, 19 nt, Homo sapiens
  misc_RNA (1)...(19): siRNA sense strand
gaaccagucagcauucuac

SEQ ID NO: 314615 - RNA, 19 nt, Homo sapiens
  misc_RNA (1)...(19): siRNA sense strand
ggacagacaauuguucagu

SEQ ID NO: 314616 - RNA, 19 nt, Homo sapiens
  misc_RNA (1)...(19): siRNA sense strand
gcaguucauggauucauug

SEQ ID NO: 314617 - RNA, 19 nt, Homo sapiens
  misc_RNA (1)...(19): siRNA sense strand
gaggacagacaauuguuca

SEQ ID NO: 314618 - RNA, 19 nt, Homo sapiens
  misc_RNA (1)...(19): siRNA sense strand
ggaggacagacaauuguuc

SEQ ID NO: 314619 - RNA, 19 nt, Homo sapiens
  misc_RNA (1)...(19): siRNA sense strand
gaagccggcagcaccaaga

SEQ ID NO: 314620 - RNA, 19 nt, Homo sapiens
  misc_RNA (1)...(19): siRNA sense strand
uuaugcugcuggaucuaua

SEQ ID NO: 314621 - RNA, 19 nt, Homo sapiens
  misc_RNA (1)...(19): siRNA sense strand
gagaaaugccccaaaaugu

SEQ ID NO: 314622 - RNA, 19 nt, Homo sapiens
  misc_RNA (1)...(19): siRNA sense strand
gacaauuguucaguugcaa

SEQ ID NO: 314623 - RNA, 19 nt, Homo sapiens
  misc_RNA (1)...(19): siRNA sense strand
ggaccaauacgggcgaaga

SEQ ID NO: 314624 - RNA, 19 nt, Homo sapiens
  misc_RNA (1)...(19): siRNA sense strand
cagcucccauccagcagaa

SEQ ID NO: 314625 - RNA, 19 nt, Homo sapiens
  misc_RNA (1)...(19): siRNA sense strand
gggaagggaggacagacaa

SEQ ID NO: 314626 - RNA, 19 nt, Homo sapiens
  misc_RNA (1)...(19): siRNA sense strand
agacaauuguucaguugca

SEQ ID NO: 314627 - RNA, 19 nt, Homo sapiens
  misc_RNA (1)...(19): siRNA sense strand
gaagacggccaguauuuuc

SEQ ID NO: 314628 - RNA, 19 nt, Homo sapiens
  misc_RNA (1)...(19): siRNA sense strand
gaccaccguuaauccagau

SEQ ID NO: 314629 - RNA, 19 nt, Homo sapiens
  misc_RNA (1)...(19): siRNA sense strand
cuacugagcgagugugcuu

SEQ ID NO: 314630 - RNA, 19 nt, Homo sapiens
  misc_RNA (1)...(19): siRNA sense strand
ccagggaacgguugaagca

SEQ ID NO: 314631 - RNA, 19 nt, Homo sapiens
  misc_RNA (1)...(19): siRNA sense strand
ggaagggaggacagacaau

SEQ ID NO: 314632 - RNA, 19 nt, Homo sapiens
  misc_RNA (1)...(19): siRNA sense strand
agacagaaccagucagcau

SEQ ID NO: 314633 - RNA, 19 nt, Homo sapiens
  misc_RNA (1)...(19): siRNA sense strand
gggaggacagacaauuguu

SEQ ID NO: 314634 - RNA, 19 nt, Homo sapiens
  misc_RNA (1)...(19): siRNA sense strand
aaacuggagccaccaucaa

SEQ ID NO: 314635 - RNA, 19 nt, Homo sapiens
  misc_RNA (1)...(19): siRNA sense strand
gaacgguugaagcacugaa

SEQ ID NO: 314636 - RNA, 19 nt, Homo sapiens
  misc_RNA (1)...(19): siRNA sense strand
ccagucagcauucuacaac

SEQ ID NO: 314637 - RNA, 19 nt, Homo sapiens
  misc_RNA (1)...(19): siRNA sense strand
cgagaaaugccccaaaaug

SEQ ID NO: 314638 - RNA, 19 nt, Homo sapiens
  misc_RNA (1)...(19): siRNA sense strand
cugucuaaguccaaagauu

SEQ ID NO: 314639 - RNA, 19 nt, Homo sapiens
  misc_RNA (1)...(19): siRNA sense strand
ugcaguucauggauucauu

SEQ ID NO: 314640 - RNA, 19 nt, Homo sapiens
  misc_RNA (1)...(19): siRNA sense strand
uaguuaugcugcuggaucu

SEQ ID NO: 314641 - RNA, 19 nt, Homo sapiens
  misc_RNA (1)...(19): siRNA sense strand
gccaagacagaaccaguca

SEQ ID NO: 314642 - RNA, 19 nt, Homo sapiens
  misc_RNA (1)...(19): siRNA sense strand
ccaccaucaagcugucuaa

SEQ ID NO: 314643 - RNA, 19 nt, Homo sapiens
  misc_RNA (1)...(19): siRNA sense strand
ggcgaagacggccaguauu

SEQ ID NO: 314644 - RNA, 19 nt, Homo sapiens
  misc_RNA (1)...(19): siRNA sense strand
gaauaucucuuccgacaag

SEQ ID NO: 314645 - RNA, 19 nt, Homo sapiens
  misc_RNA (1)...(19): siRNA sense strand
agagaaauaugcugaaaug

SEQ ID NO: 314646 - RNA, 19 nt, Homo sapiens
  misc_RNA (1)...(19): siRNA sense strand
gaagaaaugcugcuuugug

SEQ ID NO: 314647 - RNA, 19 nt, Homo sapiens
  misc_RNA (1)...(19): siRNA sense strand
acaagaaccuacugaauca

SEQ ID NO: 314648 - RNA, 19 nt, Homo sapiens
  misc_RNA (1)...(19): siRNA sense strand
gcucggagauguucuucaa

SEQ ID NO: 314649 - RNA, 19 nt, Homo sapiens
  misc_RNA (1)...(19): siRNA sense strand
gaagaaagucccucucagu

SEQ ID NO: 314650 - RNA, 19 nt, Homo sapiens
  misc_RNA (1)...(19): siRNA sense strand
aagaagaaaugcugcuuug

SEQ ID NO: 314651 - RNA, 19 nt, Homo sapiens
  misc_RNA (1)...(19): siRNA sense strand
gggauacagugcaggauau

SEQ ID NO: 314652 - RNA, 19 nt, Homo sapiens
  misc_RNA (1)...(19): siRNA sense strand
acacaaacguucaucucaa

SEQ ID NO: 314653 - RNA, 19 nt, Homo sapiens
  misc_RNA (1)...(19): siRNA sense strand
cuacgaggguuauccuuug

SEQ ID NO: 314654 - RNA, 19 nt, Homo sapiens
  misc_RNA (1)...(19): siRNA sense strand
ccuccagacugccucuuua

SEQ ID NO: 314655 - RNA, 19 nt, Homo sapiens
  misc_RNA (1)...(19): siRNA sense strand
gggaugggcccaccaagaa

SEQ ID NO: 314656 - RNA, 19 nt, Homo sapiens
  misc_RNA (1)...(19): siRNA sense strand
uggaggacaucaagaagaa

SEQ ID NO: 314657 - RNA, 19 nt, Homo sapiens
  misc_RNA (1)...(19): siRNA sense strand
caagaagaaaugcugcuuu

SEQ ID NO: 314658 - RNA, 19 nt, Homo sapiens
  misc_RNA (1)...(19): siRNA sense strand
ggaggagcaugcggucuug

SEQ ID NO: 314659 - RNA, 19 nt, Homo sapiens
  misc_RNA (1)...(19): siRNA sense strand
caagccaucucucaucaag

SEQ ID NO: 314660 - RNA, 19 nt, Homo sapiens
  misc_RNA (1)...(19): siRNA sense strand
gagcaugcggucuugguuu

SEQ ID NO: 314661 - RNA, 19 nt, Homo sapiens
  misc_RNA (1)...(19): siRNA sense strand
guaaacgugcugccugaaa

SEQ ID NO: 314662 - RNA, 19 nt, Homo sapiens
  misc_RNA (1)...(19): siRNA sense strand
ggcacuggcuacuguaaau

SEQ ID NO: 314663 - RNA, 19 nt, Homo sapiens
  misc_RNA (1)...(19): siRNA sense strand
uaaacgugcugccugaaag

SEQ ID NO: 314664 - RNA, 19 nt, Homo sapiens
  misc_RNA (1)...(19): siRNA sense strand
agagagaaauaugcugaaa

SEQ ID NO: 314665 - RNA, 19 nt, Homo sapiens
  misc_RNA (1)...(19): siRNA sense strand
ccacaagaaccuacugaau

SEQ ID NO: 314666 - RNA, 19 nt, Homo sapiens
  misc_RNA (1)...(19): siRNA sense strand
guucaucucaagcugguua

SEQ ID NO: 314667 - RNA, 19 nt, Homo sapiens
  misc_RNA (1)...(19): siRNA sense strand
cacaagaaccuacugaauc

SEQ ID NO: 314668 - RNA, 19 nt, Homo sapiens
  misc_RNA (1)...(19): siRNA sense strand
ccaagaaggugggcaacca

SEQ ID NO: 314669 - RNA, 19 nt, Homo sapiens
  misc_RNA (1)...(19): siRNA sense strand
gagagaaauaugcugaaau

SEQ ID NO: 314670 - RNA, 19 nt, Homo sapiens
  misc_RNA (1)...(19): siRNA sense strand
agaaagucccucucaguga

SEQ ID NO: 314671 - RNA, 19 nt, Homo sapiens
  misc_RNA (1)...(19): siRNA sense strand
ggcaggaacucaacaacac

SEQ ID NO: 314672 - RNA, 19 nt, Homo sapiens
  misc_RNA (1)...(19): siRNA sense strand
ggaacacgggccuuucuuc

SEQ ID NO: 314673 - RNA, 19 nt, Homo sapiens
  misc_RNA (1)...(19): siRNA sense strand
gcugaaaugcuguuugaag

SEQ ID NO: 314674 - RNA, 19 nt, Homo sapiens
  misc_RNA (1)...(19): siRNA sense strand
augcugaaaugcuguuuga

SEQ ID NO: 314675 - RNA, 19 nt, Homo sapiens
  misc_RNA (1)...(19): siRNA sense strand
ugcaggauaucugggaaua

SEQ ID NO: 314676 - RNA, 19 nt, Homo sapiens
  misc_RNA (1)...(19): siRNA sense strand
cacaaacguucaucucaag

SEQ ID NO: 314677 - RNA, 19 nt, Homo sapiens
  misc_RNA (1)...(19): siRNA sense strand
gaacucaacaacacaaacg

SEQ ID NO: 314678 - RNA, 19 nt, Homo sapiens
  misc_RNA (1)...(19): siRNA sense strand
uggccucacuucaggguuu

SEQ ID NO: 314679 - RNA, 19 nt, Homo sapiens
  misc_RNA (1)...(19): siRNA sense strand
gaggacaucaagaagaaau

SEQ ID NO: 314680 - RNA, 19 nt, Homo sapiens
  misc_RNA (1)...(19): siRNA sense strand
caacacaaacguucaucuc

SEQ ID NO: 314681 - RNA, 19 nt, Homo sapiens
  misc_RNA (1)...(19): siRNA sense strand
acaccaacagagagaaaua

SEQ ID NO: 314682 - RNA, 19 nt, Homo sapiens
  misc_RNA (1)...(19): siRNA sense strand
ccaagacccacccacaaga

SEQ ID NO: 314683 - RNA, 19 nt, Homo sapiens
  misc_RNA (1)...(19): siRNA sense strand
cuaaccgucugcagaagga

SEQ ID NO: 314684 - RNA, 19 nt, Homo sapiens
  misc_RNA (1)...(19): siRNA sense strand
caacagagagaaauaugcu

SEQ ID NO: 314685 - RNA, 19 nt, Homo sapiens
  misc_RNA (1)...(19): siRNA sense strand
caacaacacaaacguucau

SEQ ID NO: 314686 - RNA, 19 nt, Homo sapiens
  misc_RNA (1)...(19): siRNA sense strand
aaucaaaggcagccaagga

SEQ ID NO: 314687 - RNA, 19 nt, Homo sapiens
  misc_RNA (1)...(19): siRNA sense strand
agaaggagcuaagcagcau

SEQ ID NO: 314688 - RNA, 19 nt, Homo sapiens
  misc_RNA (1)...(19): siRNA sense strand
uguccugccuuaacaagug

SEQ ID NO: 314689 - RNA, 19 nt, Homo sapiens
  misc_RNA (1)...(19): siRNA sense strand
gaguucagagccacaagaa

SEQ ID NO: 314690 - RNA, 19 nt, Homo sapiens
  misc_RNA (1)...(19): siRNA sense strand
gggcaggaacucaacaaca

SEQ ID NO: 314691 - RNA, 19 nt, Homo sapiens
  misc_RNA (1)...(19): siRNA sense strand
ccaaggagaggcccaagca

SEQ ID NO: 314692 - RNA, 19 nt, Homo sapiens
  misc_RNA (1)...(19): siRNA sense strand
agucgcgccuguccaugua

SEQ ID NO: 314693 - RNA, 19 nt, Homo sapiens
  misc_RNA (1)...(19): siRNA sense strand
ccugggcacuggcuacugu

SEQ ID NO: 314694 - RNA, 19 nt, Homo sapiens
  misc_RNA (1)...(19): siRNA sense strand
caagacccacccacaagau

SEQ ID NO: 314695 - RNA, 19 nt, Homo sapiens
  misc_RNA (1)...(19): siRNA sense strand
ggagcuaagcagcaugugu

SEQ ID NO: 314696 - RNA, 19 nt, Homo sapiens
  misc_RNA (1)...(19): siRNA sense strand
ccauugaggagaagaaagu

SEQ ID NO: 314697 - RNA, 19 nt, Homo sapiens
  misc_RNA (1)...(19): siRNA sense strand
caaugcacaucgccuacca

SEQ ID NO: 314698 - RNA, 19 nt, Homo sapiens
  misc_RNA (1)...(19): siRNA sense strand
ggagcaugcggucuugguu

SEQ ID NO: 314699 - RNA, 19 nt, Homo sapiens
  misc_RNA (1)...(19): siRNA sense strand
aagaaccuacugaaucaaa

SEQ ID NO: 314700 - RNA, 19 nt, Homo sapiens
  misc_RNA (1)...(19): siRNA sense strand
gcaggaacucaacaacaca

SEQ ID NO: 314701 - RNA, 19 nt, Homo sapiens
  misc_RNA (1)...(19): siRNA sense strand
cagcaugugucccaaugac

SEQ ID NO: 314702 - RNA, 19 nt, Homo sapiens
  misc_RNA (1)...(19): siRNA sense strand
agccaucucucaucaaguc

SEQ ID NO: 314703 - RNA, 19 nt, Homo sapiens
  misc_RNA (1)...(19): siRNA sense strand
gcacuggcuacuguaaaug

SEQ ID NO: 314704 - RNA, 19 nt, Homo sapiens
  misc_RNA (1)...(19): siRNA sense strand
gaggaacacgggccuuucu

SEQ ID NO: 314705 - RNA, 19 nt, Homo sapiens
  misc_RNA (1)...(19): siRNA sense strand
guggaggacaucaagaaga

SEQ ID NO: 314706 - RNA, 19 nt, Homo sapiens
  misc_RNA (1)...(19): siRNA sense strand
gccuguccauguacuccua

SEQ ID NO: 314707 - RNA, 19 nt, Homo sapiens
  misc_RNA (1)...(19): siRNA sense strand
gggcacuggcuacuguaaa

SEQ ID NO: 314708 - RNA, 19 nt, Homo sapiens
  misc_RNA (1)...(19): siRNA sense strand
gaaccuacugaaucaaagg

SEQ ID NO: 314709 - RNA, 19 nt, Homo sapiens
  misc_RNA (1)...(19): siRNA sense strand
uaucugggaauaucucuuc

SEQ ID NO: 314710 - RNA, 19 nt, Homo sapiens
  misc_RNA (1)...(19): siRNA sense strand
ugggauacagugcaggaua

SEQ ID NO: 314711 - RNA, 19 nt, Homo sapiens
  misc_RNA (1)...(19): siRNA sense strand
gcagcaugugucccaauga

SEQ ID NO: 314712 - RNA, 19 nt, Homo sapiens
  misc_RNA (1)...(19): siRNA sense strand
ccaagcaggaggugaccaa

SEQ ID NO: 314713 - RNA, 19 nt, Homo sapiens
  misc_RNA (1)...(19): siRNA sense strand
agaaauaugcugaaaugcu

SEQ ID NO: 314714 - RNA, 19 nt, Homo sapiens
  misc_RNA (1)...(19): siRNA sense strand
gccaagacccacccacaag

SEQ ID NO: 314715 - RNA, 19 nt, Homo sapiens
  misc_RNA (1)...(19): siRNA sense strand
gggccuuucuuccucuaca

SEQ ID NO: 314716 - RNA, 19 nt, Homo sapiens
  misc_RNA (1)...(19): siRNA sense strand
gauaaucgcaaggagacau

SEQ ID NO: 314717 - RNA, 19 nt, Homo sapiens
  misc_RNA (1)...(19): siRNA sense strand
ccucaaacgggaccucaug

SEQ ID NO: 314718 - RNA, 19 nt, Homo sapiens
  misc_RNA (1)...(19): siRNA sense strand
ucuacgaggguuauccuuu

SEQ ID NO: 314719 - RNA, 19 nt, Homo sapiens
  misc_RNA (1)...(19): siRNA sense strand
uggaucccauugaggagaa

SEQ ID NO: 314720 - RNA, 19 nt, Homo sapiens
  misc_RNA (1)...(19): siRNA sense strand
aaacgugcugccugaaaga

SEQ ID NO: 314721 - RNA, 19 nt, Homo sapiens
  misc_RNA (1)...(19): siRNA sense strand
ccagacugccucuuuaagg

SEQ ID NO: 314722 - RNA, 19 nt, Homo sapiens
  misc_RNA (1)...(19): siRNA sense strand
ggaggacaucaagaagaaa

SEQ ID NO: 314723 - RNA, 19 nt, Homo sapiens
  misc_RNA (1)...(19): siRNA sense strand
ggacaucaagaagaaaugc

SEQ ID NO: 314724 - RNA, 19 nt, Homo sapiens
  misc_RNA (1)...(19): siRNA sense strand
gguuaacccucugcgacau

SEQ ID NO: 314725 - RNA, 19 nt, Homo sapiens
  misc_RNA (1)...(19): siRNA sense strand
cccacaagaucucaacaac

SEQ ID NO: 314726 - RNA, 19 nt, Homo sapiens
  misc_RNA (1)...(19): siRNA sense strand
uucaagccaucucucauca

SEQ ID NO: 314727 - RNA, 19 nt, Homo sapiens
  misc_RNA (1)...(19): siRNA sense strand
ccacucagcucaagaugaa

SEQ ID NO: 314728 - RNA, 19 nt, Homo sapiens
  misc_RNA (1)...(19): siRNA sense strand
ugaugcagcugcucaauga

SEQ ID NO: 314729 - RNA, 19 nt, Homo sapiens
  misc_RNA (1)...(19): siRNA sense strand
ccaggaaggugcacaagau

SEQ ID NO: 314730 - RNA, 19 nt, Homo sapiens
  misc_RNA (1)...(19): siRNA sense strand
acgcggagcucauguuuga

SEQ ID NO: 314731 - RNA, 19 nt, Homo sapiens
  misc_RNA (1)...(19): siRNA sense strand
gcagcaaccgggagaagua

SEQ ID NO: 314732 - RNA, 19 nt, Homo sapiens
  misc_RNA (1)...(19): siRNA sense strand
ucauagagcacaucaagaa

SEQ ID NO: 314733 - RNA, 19 nt, Homo sapiens
  misc_RNA (1)...(19): siRNA sense strand
gaucaaggcggucaucauc

SEQ ID NO: 314734 - RNA, 19 nt, Homo sapiens
  misc_RNA (1)...(19): siRNA sense strand
uagagcacaucaagaagaa

SEQ ID NO: 314735 - RNA, 19 nt, Homo sapiens
  misc_RNA (1)...(19): siRNA sense strand
ggacuuuagugggccauga

SEQ ID NO: 314736 - RNA, 19 nt, Homo sapiens
  misc_RNA (1)...(19): siRNA sense strand
gcaaacucaucacuauugg

SEQ ID NO: 314737 - RNA, 19 nt, Homo sapiens
  misc_RNA (1)...(19): siRNA sense strand
ggcaaacucaucacuauug

SEQ ID NO: 314738 - RNA, 19 nt, Homo sapiens
  misc_RNA (1)...(19): siRNA sense strand
aagaagaagugcugcuaug

SEQ ID NO: 314739 - RNA, 19 nt, Homo sapiens
  misc_RNA (1)...(19): siRNA sense strand
ggucagcaaggaagaguuu

SEQ ID NO: 314740 - RNA, 19 nt, Homo sapiens
  misc_RNA (1)...(19): siRNA sense strand
gcucugagaugcucuucca

SEQ ID NO: 314741 - RNA, 19 nt, Homo sapiens
  misc_RNA (1)...(19): siRNA sense strand
ggaaggugcacaagaucaa

SEQ ID NO: 314742 - RNA, 19 nt, Homo sapiens
  misc_RNA (1)...(19): siRNA sense strand
gaaguacgcggagcucaug

SEQ ID NO: 314743 - RNA, 19 nt, Homo sapiens
  misc_RNA (1)...(19): siRNA sense strand
ucaaggcggucaucaucga

SEQ ID NO: 314744 - RNA, 19 nt, Homo sapiens
  misc_RNA (1)...(19): siRNA sense strand
guacgcggagcucauguuu

SEQ ID NO: 314745 - RNA, 19 nt, Homo sapiens
  misc_RNA (1)...(19): siRNA sense strand
caucauagagcacaucaag

SEQ ID NO: 314746 - RNA, 19 nt, Homo sapiens
  misc_RNA (1)...(19): siRNA sense strand
caagaagaagugcugcuau

SEQ ID NO: 314747 - RNA, 19 nt, Homo sapiens
  misc_RNA (1)...(19): siRNA sense strand
agucguugcuguccaucua

SEQ ID NO: 314748 - RNA, 19 nt, Homo sapiens
  misc_RNA (1)...(19): siRNA sense strand
gagcacaucaagaagaagu

SEQ ID NO: 314749 - RNA, 19 nt, Homo sapiens
  misc_RNA (1)...(19): siRNA sense strand
acggcaaacucaucacuau

SEQ ID NO: 314750 - RNA, 19 nt, Homo sapiens
  misc_RNA (1)...(19): siRNA sense strand
ucaagaagaagugcugcua

SEQ ID NO: 314751 - RNA, 19 nt, Homo sapiens
  misc_RNA (1)...(19): siRNA sense strand
caggagcgcuuccguugcu

SEQ ID NO: 314752 - RNA, 19 nt, Homo sapiens
  misc_RNA (1)...(19): siRNA sense strand
ggacaucugggaguacauc

SEQ ID NO: 314753 - RNA, 19 nt, Homo sapiens
  misc_RNA (1)...(19): siRNA sense strand
gacggcaaacucaucacua

SEQ ID NO: 314754 - RNA, 19 nt, Homo sapiens
  misc_RNA (1)...(19): siRNA sense strand
caucugggaguacaucuuc

SEQ ID NO: 314755 - RNA, 19 nt, Homo sapiens
  misc_RNA (1)...(19): siRNA sense strand
gacgaccaccugcacauca

SEQ ID NO: 314756 - RNA, 19 nt, Homo sapiens
  misc_RNA (1)...(19): siRNA sense strand
ugcaggacaucugggagua

SEQ ID NO: 314757 - RNA, 19 nt, Homo sapiens
  misc_RNA (1)...(19): siRNA sense strand
caggacaucugggaguaca

SEQ ID NO: 314758 - RNA, 19 nt, Homo sapiens
  misc_RNA (1)...(19): siRNA sense strand
cgaccaccugcacaucaua

SEQ ID NO: 314759 - RNA, 19 nt, Homo sapiens
  misc_RNA (1)...(19): siRNA sense strand
gcguggccaucuacagcaa

SEQ ID NO: 314760 - RNA, 19 nt, Homo sapiens
  misc_RNA (1)...(19): siRNA sense strand
gcaccgccaugaagauccu

SEQ ID NO: 314761 - RNA, 19 nt, Homo sapiens
  misc_RNA (1)...(19): siRNA sense strand
ucagcaaggaagaguuuga

SEQ ID NO: 314762 - RNA, 19 nt, Homo sapiens
  misc_RNA (1)...(19): siRNA sense strand
acacaggugcggccacuca

SEQ ID NO: 314763 - RNA, 19 nt, Homo sapiens
  misc_RNA (1)...(19): siRNA sense strand
auagagcacaucaagaaga

SEQ ID NO: 314764 - RNA, 19 nt, Homo sapiens
  misc_RNA (1)...(19): siRNA sense strand
ggacgaccaccugcacauc

SEQ ID NO: 314765 - RNA, 19 nt, Homo sapiens
  misc_RNA (1)...(19): siRNA sense strand
gcacaucauagagcacauc

SEQ ID NO: 314766 - RNA, 19 nt, Homo sapiens
  misc_RNA (1)...(19): siRNA sense strand
ggacggcaaacucaucacu

SEQ ID NO: 314767 - RNA, 19 nt, Homo sapiens
  misc_RNA (1)...(19): siRNA sense strand
cggcaaacucaucacuauu

SEQ ID NO: 314768 - RNA, 19 nt, Homo sapiens
  misc_RNA (1)...(19): siRNA sense strand
ggaaacagcuccaaaugaa

SEQ ID NO: 314769 - RNA, 19 nt, Homo sapiens
  misc_RNA (1)...(19): siRNA sense strand
gaaaugagcugggacaguu

SEQ ID NO: 314770 - RNA, 19 nt, Homo sapiens
  misc_RNA (1)...(19): siRNA sense strand
ccacacagcuggacgacua

SEQ ID NO: 314771 - RNA, 19 nt, Homo sapiens
  misc_RNA (1)...(19): siRNA sense strand
ugacaaaucuaacaccaaa

SEQ ID NO: 314772 - RNA, 19 nt, Homo sapiens
  misc_RNA (1)...(19): siRNA sense strand
ggaccaaaguggaaccaaa

SEQ ID NO: 314773 - RNA, 19 nt, Homo sapiens
  misc_RNA (1)...(19): siRNA sense strand
caaccgaggugaugucuuc

SEQ ID NO: 314774 - RNA, 19 nt, Homo sapiens
  misc_RNA (1)...(19): siRNA sense strand
ucaagcagcuguuccagaa

SEQ ID NO: 314775 - RNA, 19 nt, Homo sapiens
  misc_RNA (1)...(19): siRNA sense strand
ggaaagucaucauccaaug

SEQ ID NO: 314776 - RNA, 19 nt, Homo sapiens
  misc_RNA (1)...(19): siRNA sense strand
gcgaaucacugcugacaug

SEQ ID NO: 314777 - RNA, 19 nt, Homo sapiens
  misc_RNA (1)...(19): siRNA sense strand
gcgcugggcuucaucaaga

SEQ ID NO: 314778 - RNA, 19 nt, Homo sapiens
  misc_RNA (1)...(19): siRNA sense strand
gaagccacaucacaucuug

SEQ ID NO: 314779 - RNA, 19 nt, Homo sapiens
  misc_RNA (1)...(19): siRNA sense strand
ucaaugguauggcuucuuu

SEQ ID NO: 314780 - RNA, 19 nt, Homo sapiens
  misc_RNA (1)...(19): siRNA sense strand
guugaggucuggagaauug

SEQ ID NO: 314781 - RNA, 19 nt, Homo sapiens
  misc_RNA (1)...(19): siRNA sense strand
gcccagagcugaugaaggu

SEQ ID NO: 314782 - RNA, 19 nt, Homo sapiens
  misc_RNA (1)...(19): siRNA sense strand
gcaacccucucccugaauu

SEQ ID NO: 314783 - RNA, 19 nt, Homo sapiens
  misc_RNA (1)...(19): siRNA sense strand
acaccaauccugaucauua

SEQ ID NO: 314784 - RNA, 19 nt, Homo sapiens
  misc_RNA (1)...(19): siRNA sense strand
ggagguggaucggcaguuu

SEQ ID NO: 314785 - RNA, 19 nt, Homo sapiens
  misc_RNA (1)...(19): siRNA sense strand
aagcagaaaucaacuauca

SEQ ID NO: 314786 - RNA, 19 nt, Homo sapiens
  misc_RNA (1)...(19): siRNA sense strand
caacgacccugggaucauu

SEQ ID NO: 314787 - RNA, 19 nt, Homo sapiens
  misc_RNA (1)...(19): siRNA sense strand
ucacugagaucacagacuu

SEQ ID NO: 314788 - RNA, 19 nt, Homo sapiens
  misc_RNA (1)...(19): siRNA sense strand
aaacuccaaugaugucuuu

SEQ ID NO: 314789 - RNA, 19 nt, Homo sapiens
  misc_RNA (1)...(19): siRNA sense strand
ggccgacgcuccauuauca

SEQ ID NO: 314790 - RNA, 19 nt, Homo sapiens
  misc_RNA (1)...(19): siRNA sense strand
agaauuaccucucugaaca

SEQ ID NO: 314791 - RNA, 19 nt, Homo sapiens
  misc_RNA (1)...(19): siRNA sense strand
caccaauccugaucauuaa

SEQ ID NO: 314792 - RNA, 19 nt, Homo sapiens
  misc_RNA (1)...(19): siRNA sense strand
ggaagcuaguuaucuuuga

SEQ ID NO: 314793 - RNA, 19 nt, Homo sapiens
  misc_RNA (1)...(19): siRNA sense strand
gcagaaaucaacuaucaug

SEQ ID NO: 314794 - RNA, 19 nt, Homo sapiens
  misc_RNA (1)...(19): siRNA sense strand
gaacucaggcagagcacua

SEQ ID NO: 314795 - RNA, 19 nt, Homo sapiens
  misc_RNA (1)...(19): siRNA sense strand
agagguagcugcccaggaa

SEQ ID NO: 314796 - RNA, 19 nt, Homo sapiens
  misc_RNA (1)...(19): siRNA sense strand
caggauaaauuugauguga

SEQ ID NO: 314797 - RNA, 19 nt, Homo sapiens
  misc_RNA (1)...(19): siRNA sense strand
ggaaaugacaaaucuaaca

SEQ ID NO: 314798 - RNA, 19 nt, Homo sapiens
  misc_RNA (1)...(19): siRNA sense strand
caucacaucuuguacaucu

SEQ ID NO: 314799 - RNA, 19 nt, Homo sapiens
  misc_RNA (1)...(19): siRNA sense strand
ucacagagguagcaacaag

SEQ ID NO: 314800 - RNA, 19 nt, Homo sapiens
  misc_RNA (1)...(19): siRNA sense strand
gaacccuacugacgugaug

SEQ ID NO: 314801 - RNA, 19 nt, Homo sapiens
  misc_RNA (1)...(19): siRNA sense strand
ggagcugccugaggaugua

SEQ ID NO: 314802 - RNA, 19 nt, Homo sapiens
  misc_RNA (1)...(19): siRNA sense strand
ugaagcggcugcuacaugu

SEQ ID NO: 314803 - RNA, 19 nt, Homo sapiens
  misc_RNA (1)...(19): siRNA sense strand
ggauaaauuugaugugacu

SEQ ID NO: 314804 - RNA, 19 nt, Homo sapiens
  misc_RNA (1)...(19): siRNA sense strand
caauaagaccggccaauuc

SEQ ID NO: 314805 - RNA, 19 nt, Homo sapiens
  misc_RNA (1)...(19): siRNA sense strand
gaaagaauggucgaugaug

SEQ ID NO: 314806 - RNA, 19 nt, Homo sapiens
  misc_RNA (1)...(19): siRNA sense strand
gacgugaugcuccuagaua

SEQ ID NO: 314807 - RNA, 19 nt, Homo sapiens
  misc_RNA (1)...(19): siRNA sense strand
gagccugacccuccaguaa

SEQ ID NO: 314808 - RNA, 19 nt, Homo sapiens
  misc_RNA (1)...(19): siRNA sense strand
gaacggagccacgccacuu

SEQ ID NO: 314809 - RNA, 19 nt, Homo sapiens
  misc_RNA (1)...(19): siRNA sense strand
gccaaaauauuacccuaua

SEQ ID NO: 314810 - RNA, 19 nt, Homo sapiens
  misc_RNA (1)...(19): siRNA sense strand
gaagcuaguuaucuuugag

SEQ ID NO: 314811 - RNA, 19 nt, Homo sapiens
  misc_RNA (1)...(19): siRNA sense strand
gaucagaagcagaaaucaa

SEQ ID NO: 314812 - RNA, 19 nt, Homo sapiens
  misc_RNA (1)...(19): siRNA sense strand
gggaaaacguucagcauug

SEQ ID NO: 314813 - RNA, 19 nt, Homo sapiens
  misc_RNA (1)...(19): siRNA sense strand
aaacagcuccaaaugaaga

SEQ ID NO: 314814 - RNA, 19 nt, Homo sapiens
  misc_RNA (1)...(19): siRNA sense strand
ggacuuugugucuguguuu

SEQ ID NO: 314815 - RNA, 19 nt, Homo sapiens
  misc_RNA (1)...(19): siRNA sense strand
ccaauaagaccggccaauu

SEQ ID NO: 314816 - RNA, 19 nt, Homo sapiens
  misc_RNA (1)...(19): siRNA sense strand
gccaauucguugucacuga

SEQ ID NO: 314817 - RNA, 19 nt, Homo sapiens
  misc_RNA (1)...(19): siRNA sense strand
gaucauugucuggagaaua

SEQ ID NO: 314818 - RNA, 19 nt, Homo sapiens
  misc_RNA (1)...(19): siRNA sense strand
gggccgugcugaaauagga

SEQ ID NO: 314819 - RNA, 19 nt, Homo sapiens
  misc_RNA (1)...(19): siRNA sense strand
cauguuguaucauaucuca

SEQ ID NO: 314820 - RNA, 19 nt, Homo sapiens
  misc_RNA (1)...(19): siRNA sense strand
uuccagaaguggucaguaa

SEQ ID NO: 314821 - RNA, 19 nt, Homo sapiens
  misc_RNA (1)...(19): siRNA sense strand
ggauguaaacccugccaaa

SEQ ID NO: 314822 - RNA, 19 nt, Homo sapiens
  misc_RNA (1)...(19): siRNA sense strand
acagugagccaaaauauua

SEQ ID NO: 314823 - RNA, 19 nt, Homo sapiens
  misc_RNA (1)...(19): siRNA sense strand
uguccagucucgucucuuu

SEQ ID NO: 314824 - RNA, 19 nt, Homo sapiens
  misc_RNA (1)...(19): siRNA sense strand
ucccuaaacuccaaugaug

SEQ ID NO: 314825 - RNA, 19 nt, Homo sapiens
  misc_RNA (1)...(19): siRNA sense strand
ggaaagaauggucgaugau

SEQ ID NO: 314826 - RNA, 19 nt, Homo sapiens
  misc_RNA (1)...(19): siRNA sense strand
aggaaagaauggucgauga

SEQ ID NO: 314827 - RNA, 19 nt, Homo sapiens
  misc_RNA (1)...(19): siRNA sense strand
cagguguucuuguggauug

SEQ ID NO: 314828 - RNA, 19 nt, Homo sapiens
  misc_RNA (1)...(19): siRNA sense strand
aagggaagcuaguuaucuu

SEQ ID NO: 314829 - RNA, 19 nt, Homo sapiens
  misc_RNA (1)...(19): siRNA sense strand
gaaagucaucauccaaugg

SEQ ID NO: 314830 - RNA, 19 nt, Homo sapiens
  misc_RNA (1)...(19): siRNA sense strand
uauagcaguucuguugaaa

SEQ ID NO: 314831 - RNA, 19 nt, Homo sapiens
  misc_RNA (1)...(19): siRNA sense strand
cuauagcaguucuguugaa

SEQ ID NO: 314832 - RNA, 19 nt, Homo sapiens
  misc_RNA (1)...(19): siRNA sense strand
gggagaugcugcugcuauc

SEQ ID NO: 314833 - RNA, 19 nt, Homo sapiens
  misc_RNA (1)...(19): siRNA sense strand
ggaauggcccagagagcaa

SEQ ID NO: 314834 - RNA, 19 nt, Homo sapiens
  misc_RNA (1)...(19): siRNA sense strand
ugaagcacguggagaccaa

SEQ ID NO: 314835 - RNA, 19 nt, Homo sapiens
  misc_RNA (1)...(19): siRNA sense strand
ucaaagggaagcuaguuau

SEQ ID NO: 314836 - RNA, 19 nt, Homo sapiens
  misc_RNA (1)...(19): siRNA sense strand
uaaaugggaagccacauca

SEQ ID NO: 314837 - RNA, 19 nt, Homo sapiens
  misc_RNA (1)...(19): siRNA sense strand
ccgaggugaugucuucuug

SEQ ID NO: 314838 - RNA, 19 nt, Homo sapiens
  misc_RNA (1)...(19): siRNA sense strand
gggaccagguguucuugug

SEQ ID NO: 314839 - RNA, 19 nt, Homo sapiens
  misc_RNA (1)...(19): siRNA sense strand
gcuggucccuguggaguau

SEQ ID NO: 314840 - RNA, 19 nt, Homo sapiens
  misc_RNA (1)...(19): siRNA sense strand
gcuaaaguuuuccaggaua

SEQ ID NO: 314841 - RNA, 19 nt, Homo sapiens
  misc_RNA (1)...(19): siRNA sense strand
ucauagaucagaagcagaa

SEQ ID NO: 314842 - RNA, 19 nt, Homo sapiens
  misc_RNA (1)...(19): siRNA sense strand
acuguuaucugguccucua

SEQ ID NO: 314843 - RNA, 19 nt, Homo sapiens
  misc_RNA (1)...(19): siRNA sense strand
ugaauucuaaugacaguga

SEQ ID NO: 314844 - RNA, 19 nt, Homo sapiens
  misc_RNA (1)...(19): siRNA sense strand
gccuuugccuccucccuaa

SEQ ID NO: 314845 - RNA, 19 nt, Homo sapiens
  misc_RNA (1)...(19): siRNA sense strand
caccaaagcaguggaaguu

SEQ ID NO: 314846 - RNA, 19 nt, Homo sapiens
  misc_RNA (1)...(19): siRNA sense strand
gaggugaugucuucuugcu

SEQ ID NO: 314847 - RNA, 19 nt, Homo sapiens
  misc_RNA (1)...(19): siRNA sense strand
gagagguccaguaccauga

SEQ ID NO: 314848 - RNA, 19 nt, Homo sapiens
  misc_RNA (1)...(19): siRNA sense strand
uaagaccggccaauucguu

SEQ ID NO: 314849 - RNA, 19 nt, Homo sapiens
  misc_RNA (1)...(19): siRNA sense strand
gccugacccuccaguaaga

SEQ ID NO: 314850 - RNA, 19 nt, Homo sapiens
  misc_RNA (1)...(19): siRNA sense strand
gggaagcuaguuaucuuug

SEQ ID NO: 314851 - RNA, 19 nt, Homo sapiens
  misc_RNA (1)...(19): siRNA sense strand
gcaaaggauauucgagaca

SEQ ID NO: 314852 - RNA, 19 nt, Homo sapiens
  misc_RNA (1)...(19): siRNA sense strand
gggaaagucaucauccaau

SEQ ID NO: 314853 - RNA, 19 nt, Homo sapiens
  misc_RNA (1)...(19): siRNA sense strand
ggaagccacaucacaucuu

SEQ ID NO: 314854 - RNA, 19 nt, Homo sapiens
  misc_RNA (1)...(19): siRNA sense strand
gaaaugacaaaucuaacac

SEQ ID NO: 314855 - RNA, 19 nt, Homo sapiens
  misc_RNA (1)...(19): siRNA sense strand
cuucauggccaucuucaaa

SEQ ID NO: 314856 - RNA, 19 nt, Homo sapiens
  misc_RNA (1)...(19): siRNA sense strand
ccacaucacaucuuguaca

SEQ ID NO: 314857 - RNA, 19 nt, Homo sapiens
  misc_RNA (1)...(19): siRNA sense strand
gaaucacugcugacaugaa

SEQ ID NO: 314858 - RNA, 19 nt, Homo sapiens
  misc_RNA (1)...(19): siRNA sense strand
ccugggacccuaacauuug

SEQ ID NO: 314859 - RNA, 19 nt, Homo sapiens
  misc_RNA (1)...(19): siRNA sense strand
gguuugagccucccaucuu

SEQ ID NO: 314860 - RNA, 19 nt, Homo sapiens
  misc_RNA (1)...(19): siRNA sense strand
gugaagcggcugcuacaug

SEQ ID NO: 314861 - RNA, 19 nt, Homo sapiens
  misc_RNA (1)...(19): siRNA sense strand
gaaacagcuccaaaugaag

SEQ ID NO: 314862 - RNA, 19 nt, Homo sapiens
  misc_RNA (1)...(19): siRNA sense strand
caucacaagagggcaauuu

SEQ ID NO: 314863 - RNA, 19 nt, Homo sapiens
  misc_RNA (1)...(19): siRNA sense strand
uggccagccuucucuguga

SEQ ID NO: 314864 - RNA, 19 nt, Homo sapiens
  misc_RNA (1)...(19): siRNA sense strand
ucaagcagggcaucaucua

SEQ ID NO: 314865 - RNA, 19 nt, Homo sapiens
  misc_RNA (1)...(19): siRNA sense strand
gcaccgagagguccaguac

SEQ ID NO: 314866 - RNA, 19 nt, Homo sapiens
  misc_RNA (1)...(19): siRNA sense strand
aggcuaugcuucuggcaaa

SEQ ID NO: 314867 - RNA, 19 nt, Homo sapiens
  misc_RNA (1)...(19): siRNA sense strand
cuaccgagguggaaaugag

SEQ ID NO: 314868 - RNA, 19 nt, Homo sapiens
  misc_RNA (1)...(19): siRNA sense strand
gaacggaagccuugcacaa

SEQ ID NO: 314869 - RNA, 19 nt, Homo sapiens
  misc_RNA (1)...(19): siRNA sense strand
cggaagccuugcacaauuu

SEQ ID NO: 314870 - RNA, 19 nt, Homo sapiens
  misc_RNA (1)...(19): siRNA sense strand
uggcagcccuguuccuuau

SEQ ID NO: 314871 - RNA, 19 nt, Homo sapiens
  misc_RNA (1)...(19): siRNA sense strand
acggaagccuugcacaauu

SEQ ID NO: 314872 - RNA, 19 nt, Homo sapiens
  misc_RNA (1)...(19): siRNA sense strand
gcuucuaccugcucagcuu

SEQ ID NO: 314873 - RNA, 19 nt, Homo sapiens
  misc_RNA (1)...(19): siRNA sense strand
gcagcccuguuccuuaucu

SEQ ID NO: 314874 - RNA, 19 nt, Homo sapiens
  misc_RNA (1)...(19): siRNA sense strand
ggaagccuugcacaauuug

SEQ ID NO: 314875 - RNA, 19 nt, Homo sapiens
  misc_RNA (1)...(19): siRNA sense strand
guucagccacuccauguuc

SEQ ID NO: 314876 - RNA, 19 nt, Homo sapiens
  misc_RNA (1)...(19): siRNA sense strand
aaagcaaccuucugaugua

SEQ ID NO: 314877 - RNA, 19 nt, Homo sapiens
  misc_RNA (1)...(19): siRNA sense strand
gcaaagcaaccuucugaug

SEQ ID NO: 314878 - RNA, 19 nt, Homo sapiens
  misc_RNA (1)...(19): siRNA sense strand
ccgagaagguagacaauug

SEQ ID NO: 314879 - RNA, 19 nt, Homo sapiens
  misc_RNA (1)...(19): siRNA sense strand
caaagcaaccuucugaugu

SEQ ID NO: 314880 - RNA, 19 nt, Homo sapiens
  misc_RNA (1)...(19): siRNA sense strand
gaagaccacccacgaaugg

SEQ ID NO: 314881 - RNA, 19 nt, Homo sapiens
  misc_RNA (1)...(19): siRNA sense strand
gcaaccuucugauguaagu

SEQ ID NO: 314882 - RNA, 19 nt, Homo sapiens
  misc_RNA (1)...(19): siRNA sense strand
ucuuacgacuguuacguua

SEQ ID NO: 314883 - RNA, 19 nt, Homo sapiens
  misc_RNA (1)...(19): siRNA sense strand
ugauguaaguucugagugu

SEQ ID NO: 314884 - RNA, 19 nt, Homo sapiens
  misc_RNA (1)...(19): siRNA sense strand
aagcaaccuucugauguaa

SEQ ID NO: 314885 - RNA, 19 nt, Homo sapiens
  misc_RNA (1)...(19): siRNA sense strand
gguuaucuuacgacuguua

SEQ ID NO: 314886 - RNA, 19 nt, Homo sapiens
  misc_RNA (1)...(19): siRNA sense strand
uuacgacuguuacguuaca

SEQ ID NO: 314887 - RNA, 19 nt, Homo sapiens
  misc_RNA (1)...(19): siRNA sense strand
cgacuguuacguuacauug

SEQ ID NO: 314888 - RNA, 19 nt, Homo sapiens
  misc_RNA (1)...(19): siRNA sense strand
cuaccucccuacagacaga

SEQ ID NO: 314889 - RNA, 19 nt, Homo sapiens
  misc_RNA (1)...(19): siRNA sense strand
cgaagaccacccacgaaug

SEQ ID NO: 314890 - RNA, 19 nt, Homo sapiens
  misc_RNA (1)...(19): siRNA sense strand
augguuaucuuacgacugu

SEQ ID NO: 314891 - RNA, 19 nt, Homo sapiens
  misc_RNA (1)...(19): siRNA sense strand
gagugugaccgagaaggua

SEQ ID NO: 314892 - RNA, 19 nt, Homo sapiens
  misc_RNA (1)...(19): siRNA sense strand
cuucugauguaaguucuga

SEQ ID NO: 314893 - RNA, 19 nt, Homo sapiens
  misc_RNA (1)...(19): siRNA sense strand
ccacgaaugguuaucuuac

SEQ ID NO: 314894 - RNA, 19 nt, Homo sapiens
  misc_RNA (1)...(19): siRNA sense strand
ugaccgagaagguagacaa

SEQ ID NO: 314895 - RNA, 19 nt, Homo sapiens
  misc_RNA (1)...(19): siRNA sense strand
ccgaagaccacccacgaau

SEQ ID NO: 314896 - RNA, 19 nt, Homo sapiens
  misc_RNA (1)...(19): siRNA sense strand
acgaaugguuaucuuacga

SEQ ID NO: 314897 - RNA, 19 nt, Homo sapiens
  misc_RNA (1)...(19): siRNA sense strand
gaccgagaagguagacaau

SEQ ID NO: 314898 - RNA, 19 nt, Homo sapiens
  misc_RNA (1)...(19): siRNA sense strand
gagaagguagacaauugca

SEQ ID NO: 314899 - RNA, 19 nt, Homo sapiens
  misc_RNA (1)...(19): siRNA sense strand
aaagcaaccuucugaugua

SEQ ID NO: 314900 - RNA, 19 nt, Homo sapiens
  misc_RNA (1)...(19): siRNA sense strand
gcaaagcaaccuucugaug

SEQ ID NO: 314901 - RNA, 19 nt, Homo sapiens
  misc_RNA (1)...(19): siRNA sense strand
ccgagaagguagacaauug

SEQ ID NO: 314902 - RNA, 19 nt, Homo sapiens
  misc_RNA (1)...(19): siRNA sense strand
caaagcaaccuucugaugu

SEQ ID NO: 314903 - RNA, 19 nt, Homo sapiens
  misc_RNA (1)...(19): siRNA sense strand
gaagaccacccacgaaugg

SEQ ID NO: 314904 - RNA, 19 nt, Homo sapiens
  misc_RNA (1)...(19): siRNA sense strand
gcaaccuucugauguaagu

SEQ ID NO: 314905 - RNA, 19 nt, Homo sapiens
  misc_RNA (1)...(19): siRNA sense strand
ucuuacgacuguuacguua

SEQ ID NO: 314906 - RNA, 19 nt, Homo sapiens
  misc_RNA (1)...(19): siRNA sense strand
ugauguaaguucugagugu

SEQ ID NO: 314907 - RNA, 19 nt, Homo sapiens
  misc_RNA (1)...(19): siRNA sense strand
aagcaaccuucugauguaa

SEQ ID NO: 314908 - RNA, 19 nt, Homo sapiens
  misc_RNA (1)...(19): siRNA sense strand
gguuaucuuacgacuguua

SEQ ID NO: 314909 - RNA, 19 nt, Homo sapiens
  misc_RNA (1)...(19): siRNA sense strand
uuacgacuguuacguuaca

SEQ ID NO: 314910 - RNA, 19 nt, Homo sapiens
  misc_RNA (1)...(19): siRNA sense strand
cgacuguuacguuacauug

SEQ ID NO: 314911 - RNA, 19 nt, Homo sapiens
  misc_RNA (1)...(19): siRNA sense strand
cuaccucccuacagacaga

SEQ ID NO: 314912 - RNA, 19 nt, Homo sapiens
  misc_RNA (1)...(19): siRNA sense strand
cgaagaccacccacgaaug

SEQ ID NO: 314913 - RNA, 19 nt, Homo sapiens
  misc_RNA (1)...(19): siRNA sense strand
augguuaucuuacgacugu

SEQ ID NO: 314914 - RNA, 19 nt, Homo sapiens
  misc_RNA (1)...(19): siRNA sense strand
gagugugaccgagaaggua

SEQ ID NO: 314915 - RNA, 19 nt, Homo sapiens
  misc_RNA (1)...(19): siRNA sense strand
cuucugauguaaguucuga

SEQ ID NO: 314916 - RNA, 19 nt, Homo sapiens
  misc_RNA (1)...(19): siRNA sense strand
ccacgaaugguuaucuuac

SEQ ID NO: 314917 - RNA, 19 nt, Homo sapiens
  misc_RNA (1)...(19): siRNA sense strand
ugaccgagaagguagacaa

SEQ ID NO: 314918 - RNA, 19 nt, Homo sapiens
  misc_RNA (1)...(19): siRNA sense strand
ccgaagaccacccacgaau

SEQ ID NO: 314919 - RNA, 19 nt, Homo sapiens
  misc_RNA (1)...(19): siRNA sense strand
acgaaugguuaucuuacga

SEQ ID NO: 314920 - RNA, 19 nt, Homo sapiens
  misc_RNA (1)...(19): siRNA sense strand
gaccgagaagguagacaau

SEQ ID NO: 314921 - RNA, 19 nt, Homo sapiens
  misc_RNA (1)...(19): siRNA sense strand
gagaagguagacaauugca

SEQ ID NO: 314922 - RNA, 19 nt, Homo sapiens
  misc_RNA (1)...(19): siRNA sense strand
aaagcaaccuucugaugua

SEQ ID NO: 314923 - RNA, 19 nt, Homo sapiens
  misc_RNA (1)...(19): siRNA sense strand
gcaaagcaaccuucugaug

SEQ ID NO: 314924 - RNA, 19 nt, Homo sapiens
  misc_RNA (1)...(19): siRNA sense strand
ccgagaagguagacaauug

SEQ ID NO: 314925 - RNA, 19 nt, Homo sapiens
  misc_RNA (1)...(19): siRNA sense strand
caaagcaaccuucugaugu

SEQ ID NO: 314926 - RNA, 19 nt, Homo sapiens
  misc_RNA (1)...(19): siRNA sense strand
gcaaccuucugauguaagu

SEQ ID NO: 314927 - RNA, 19 nt, Homo sapiens
  misc_RNA (1)...(19): siRNA sense strand
ugauguaaguucugagugu

SEQ ID NO: 314928 - RNA, 19 nt, Homo sapiens
  misc_RNA (1)...(19): siRNA sense strand
aagcaaccuucugauguaa

SEQ ID NO: 314929 - RNA, 19 nt, Homo sapiens
  misc_RNA (1)...(19): siRNA sense strand
cuaccucccuacagacaga

SEQ ID NO: 314930 - RNA, 19 nt, Homo sapiens
  misc_RNA (1)...(19): siRNA sense strand
gagugugaccgagaaggua

SEQ ID NO: 314931 - RNA, 19 nt, Homo sapiens
  misc_RNA (1)...(19): siRNA sense strand
cuucugauguaaguucuga

SEQ ID NO: 314932 - RNA, 19 nt, Homo sapiens
  misc_RNA (1)...(19): siRNA sense strand
ugaccgagaagguagacaa

SEQ ID NO: 314933 - RNA, 19 nt, Homo sapiens
  misc_RNA (1)...(19): siRNA sense strand
gaccgagaagguagacaau

SEQ ID NO: 314934 - RNA, 19 nt, Homo sapiens
  misc_RNA (1)...(19): siRNA sense strand
gagaagguagacaauugca

SEQ ID NO: 314935 - RNA, 19 nt, Homo sapiens
  misc_RNA (1)...(19): siRNA sense strand
aaagcaaccuucugaugua

SEQ ID NO: 314936 - RNA, 19 nt, Homo sapiens
  misc_RNA (1)...(19): siRNA sense strand
gcaaagcaaccuucugaug

SEQ ID NO: 314937 - RNA, 19 nt, Homo sapiens
  misc_RNA (1)...(19): siRNA sense strand
ccgagaagguagacaauug

SEQ ID NO: 314938 - RNA, 19 nt, Homo sapiens
  misc_RNA (1)...(19): siRNA sense strand
caaagcaaccuucugaugu

SEQ ID NO: 314939 - RNA, 19 nt, Homo sapiens
  misc_RNA (1)...(19): siRNA sense strand
gcaaccuucugauguaagu

SEQ ID NO: 314940 - RNA, 19 nt, Homo sapiens
  misc_RNA (1)...(19): siRNA sense strand
ugauguaaguucugagugu

SEQ ID NO: 314941 - RNA, 19 nt, Homo sapiens
  misc_RNA (1)...(19): siRNA sense strand
aagcaaccuucugauguaa

SEQ ID NO: 314942 - RNA, 19 nt, Homo sapiens
  misc_RNA (1)...(19): siRNA sense strand
cuaccucccuacagacaga

SEQ ID NO: 314943 - RNA, 19 nt, Homo sapiens
  misc_RNA (1)...(19): siRNA sense strand
gagugugaccgagaaggua

SEQ ID NO: 314944 - RNA, 19 nt, Homo sapiens
  misc_RNA (1)...(19): siRNA sense strand
cuucugauguaaguucuga

SEQ ID NO: 314945 - RNA, 19 nt, Homo sapiens
  misc_RNA (1)...(19): siRNA sense strand
ugaccgagaagguagacaa

SEQ ID NO: 314946 - RNA, 19 nt, Homo sapiens
  misc_RNA (1)...(19): siRNA sense strand
gaccgagaagguagacaau

SEQ ID NO: 314947 - RNA, 19 nt, Homo sapiens
  misc_RNA (1)...(19): siRNA sense strand
gagaagguagacaauugca

SEQ ID NO: 314948 - RNA, 19 nt, Homo sapiens
  misc_RNA (1)...(19): siRNA sense strand
aaagcaaccuucugaugua

SEQ ID NO: 314949 - RNA, 19 nt, Homo sapiens
  misc_RNA (1)...(19): siRNA sense strand
gcaaagcaaccuucugaug

SEQ ID NO: 314950 - RNA, 19 nt, Homo sapiens
  misc_RNA (1)...(19): siRNA sense strand
ccgagaagguagacaauug

SEQ ID NO: 314951 - RNA, 19 nt, Homo sapiens
  misc_RNA (1)...(19): siRNA sense strand
caaagcaaccuucugaugu

SEQ ID NO: 314952 - RNA, 19 nt, Homo sapiens
  misc_RNA (1)...(19): siRNA sense strand
gcaaccuucugauguaagu

SEQ ID NO: 314953 - RNA, 19 nt, Homo sapiens
  misc_RNA (1)...(19): siRNA sense strand
ugauguaaguucugagugu

SEQ ID NO: 314954 - RNA, 19 nt, Homo sapiens
  misc_RNA (1)...(19): siRNA sense strand
aagcaaccuucugauguaa

SEQ ID NO: 314955 - RNA, 19 nt, Homo sapiens
  misc_RNA (1)...(19): siRNA sense strand
cuaccucccuacagacaga

SEQ ID NO: 314956 - RNA, 19 nt, Homo sapiens
  misc_RNA (1)...(19): siRNA sense strand
gagugugaccgagaaggua

SEQ ID NO: 314957 - RNA, 19 nt, Homo sapiens
  misc_RNA (1)...(19): siRNA sense strand
cuucugauguaaguucuga

SEQ ID NO: 314958 - RNA, 19 nt, Homo sapiens
  misc_RNA (1)...(19): siRNA sense strand
ugaccgagaagguagacaa

SEQ ID NO: 314959 - RNA, 19 nt, Homo sapiens
  misc_RNA (1)...(19): siRNA sense strand
gaccgagaagguagacaau

SEQ ID NO: 314960 - RNA, 19 nt, Homo sapiens
  misc_RNA (1)...(19): siRNA sense strand
gagaagguagacaauugca

SEQ ID NO: 314961 - RNA, 19 nt, Homo sapiens
  misc_RNA (1)...(19): siRNA sense strand
aaagcaaccuucugaugua

SEQ ID NO: 314962 - RNA, 19 nt, Homo sapiens
  misc_RNA (1)...(19): siRNA sense strand
gcaaagcaaccuucugaug

SEQ ID NO: 314963 - RNA, 19 nt, Homo sapiens
  misc_RNA (1)...(19): siRNA sense strand
ccgagaagguagacaauug

SEQ ID NO: 314964 - RNA, 19 nt, Homo sapiens
  misc_RNA (1)...(19): siRNA sense strand
caaagcaaccuucugaugu

SEQ ID NO: 314965 - RNA, 19 nt, Homo sapiens
  misc_RNA (1)...(19): siRNA sense strand
gcaaccuucugauguaagu

SEQ ID NO: 314966 - RNA, 19 nt, Homo sapiens
  misc_RNA (1)...(19): siRNA sense strand
ugauguaaguucugagugu

SEQ ID NO: 314967 - RNA, 19 nt, Homo sapiens
  misc_RNA (1)...(19): siRNA sense strand
aagcaaccuucugauguaa

SEQ ID NO: 314968 - RNA, 19 nt, Homo sapiens
  misc_RNA (1)...(19): siRNA sense strand
cuaccucccuacagacaga

SEQ ID NO: 314969 - RNA, 19 nt, Homo sapiens
  misc_RNA (1)...(19): siRNA sense strand
gagugugaccgagaaggua

SEQ ID NO: 314970 - RNA, 19 nt, Homo sapiens
  misc_RNA (1)...(19): siRNA sense strand
cuucugauguaaguucuga

SEQ ID NO: 314971 - RNA, 19 nt, Homo sapiens
  misc_RNA (1)...(19): siRNA sense strand
ugaccgagaagguagacaa

SEQ ID NO: 314972 - RNA, 19 nt, Homo sapiens
  misc_RNA (1)...(19): siRNA sense strand
gaccgagaagguagacaau

SEQ ID NO: 314973 - RNA, 19 nt, Homo sapiens
  misc_RNA (1)...(19): siRNA sense strand
gagaagguagacaauugca

SEQ ID NO: 314974 - RNA, 19 nt, Homo sapiens
  misc_RNA (1)...(19): siRNA sense strand
aaagcaaccuucugaugua

SEQ ID NO: 314975 - RNA, 19 nt, Homo sapiens
  misc_RNA (1)...(19): siRNA sense strand
gcaaagcaaccuucugaug

SEQ ID NO: 314976 - RNA, 19 nt, Homo sapiens
  misc_RNA (1)...(19): siRNA sense strand
ccgagaagguagacaauug

SEQ ID NO: 314977 - RNA, 19 nt, Homo sapiens
  misc_RNA (1)...(19): siRNA sense strand
caaagcaaccuucugaugu

SEQ ID NO: 314978 - RNA, 19 nt, Homo sapiens
  misc_RNA (1)...(19): siRNA sense strand
gcaaccuucugauguaagu

SEQ ID NO: 314979 - RNA, 19 nt, Homo sapiens
  misc_RNA (1)...(19): siRNA sense strand
ugauguaaguucugagugu

SEQ ID NO: 314980 - RNA, 19 nt, Homo sapiens
  misc_RNA (1)...(19): siRNA sense strand
aagcaaccuucugauguaa

SEQ ID NO: 314981 - RNA, 19 nt, Homo sapiens
  misc_RNA (1)...(19): siRNA sense strand
cuaccucccuacagacaga

SEQ ID NO: 314982 - RNA, 19 nt, Homo sapiens
  misc_RNA (1)...(19): siRNA sense strand
gagugugaccgagaaggua

SEQ ID NO: 314983 - RNA, 19 nt, Homo sapiens
  misc_RNA (1)...(19): siRNA sense strand
cuucugauguaaguucuga

SEQ ID NO: 314984 - RNA, 19 nt, Homo sapiens
  misc_RNA (1)...(19): siRNA sense strand
ugaccgagaagguagacaa

SEQ ID NO: 314985 - RNA, 19 nt, Homo sapiens
  misc_RNA (1)...(19): siRNA sense strand
gaccgagaagguagacaau

SEQ ID NO: 314986 - RNA, 19 nt, Homo sapiens
  misc_RNA (1)...(19): siRNA sense strand
gagaagguagacaauugca

SEQ ID NO: 314987 - RNA, 19 nt, Homo sapiens
  misc_RNA (1)...(19): siRNA sense strand
aaagcaaccuucugaugua

SEQ ID NO: 314988 - RNA, 19 nt, Homo sapiens
  misc_RNA (1)...(19): siRNA sense strand
gcaaagcaaccuucugaug

SEQ ID NO: 314989 - RNA, 19 nt, Homo sapiens
  misc_RNA (1)...(19): siRNA sense strand
ccgagaagguagacaauug

SEQ ID NO: 314990 - RNA, 19 nt, Homo sapiens
  misc_RNA (1)...(19): siRNA sense strand
caaagcaaccuucugaugu

SEQ ID NO: 314991 - RNA, 19 nt, Homo sapiens
  misc_RNA (1)...(19): siRNA sense strand
gcaaccuucugauguaagu

SEQ ID NO: 314992 - RNA, 19 nt, Homo sapiens
  misc_RNA (1)...(19): siRNA sense strand
ugauguaaguucugagugu

SEQ ID NO: 314993 - RNA, 19 nt, Homo sapiens
  misc_RNA (1)...(19): siRNA sense strand
aagcaaccuucugauguaa

SEQ ID NO: 314994 - RNA, 19 nt, Homo sapiens
  misc_RNA (1)...(19): siRNA sense strand
cuaccucccuacagacaga

SEQ ID NO: 314995 - RNA, 19 nt, Homo sapiens
  misc_RNA (1)...(19): siRNA sense strand
gagugugaccgagaaggua

SEQ ID NO: 314996 - RNA, 19 nt, Homo sapiens
  misc_RNA (1)...(19): siRNA sense strand
cuucugauguaaguucuga

SEQ ID NO: 314997 - RNA, 19 nt, Homo sapiens
  misc_RNA (1)...(19): siRNA sense strand
ugaccgagaagguagacaa

SEQ ID NO: 314998 - RNA, 19 nt, Homo sapiens
  misc_RNA (1)...(19): siRNA sense strand
gaccgagaagguagacaau

SEQ ID NO: 314999 - RNA, 19 nt, Homo sapiens
  misc_RNA (1)...(19): siRNA sense strand
gagaagguagacaauugca

SEQ ID NO: 315000 - RNA, 19 nt, Homo sapiens
  misc_RNA (1)...(19): siRNA sense strand
gagacaagcuguaaauaaa

SEQ ID NO: 315001 - RNA, 19 nt, Homo sapiens
  misc_RNA (1)...(19): siRNA sense strand
gaaagugaaugaagggaaa

SEQ ID NO: 315002 - RNA, 19 nt, Homo sapiens
  misc_RNA (1)...(19): siRNA sense strand
gaagggaaauaccgaaguu

SEQ ID NO: 315003 - RNA, 19 nt, Homo sapiens
  misc_RNA (1)...(19): siRNA sense strand
gaucuucaaugacuucaaa

SEQ ID NO: 315004 - RNA, 19 nt, Homo sapiens
  misc_RNA (1)...(19): siRNA sense strand
ggaggaauuuguagaagaa

SEQ ID NO: 315005 - RNA, 19 nt, Homo sapiens
  misc_RNA (1)...(19): siRNA sense strand
gcaggagcauuaagaagaa

SEQ ID NO: 315006 - RNA, 19 nt, Homo sapiens
  misc_RNA (1)...(19): siRNA sense strand
gcaaagaaaggacgacgua

SEQ ID NO: 315007 - RNA, 19 nt, Homo sapiens
  misc_RNA (1)...(19): siRNA sense strand
ggagagggcuauagaucuu

SEQ ID NO: 315008 - RNA, 19 nt, Homo sapiens
  misc_RNA (1)...(19): siRNA sense strand
acaccaagaucuucaauga

SEQ ID NO: 315009 - RNA, 19 nt, Homo sapiens
  misc_RNA (1)...(19): siRNA sense strand
gcacauaccucagauucau

SEQ ID NO: 315010 - RNA, 19 nt, Homo sapiens
  misc_RNA (1)...(19): siRNA sense strand
ucaagaagcuggcaacaca

SEQ ID NO: 315011 - RNA, 19 nt, Homo sapiens
  misc_RNA (1)...(19): siRNA sense strand
gcacucagcuguggacguu

SEQ ID NO: 315012 - RNA, 19 nt, Homo sapiens
  misc_RNA (1)...(19): siRNA sense strand
ggaaauaccgaaguuauga

SEQ ID NO: 315013 - RNA, 19 nt, Homo sapiens
  misc_RNA (1)...(19): siRNA sense strand
gaaagaagacaaucaaguc

SEQ ID NO: 315014 - RNA, 19 nt, Homo sapiens
  misc_RNA (1)...(19): siRNA sense strand
gaagcugcguucugaaaug

SEQ ID NO: 315015 - RNA, 19 nt, Homo sapiens
  misc_RNA (1)...(19): siRNA sense strand
ggagagguguugauaugug

SEQ ID NO: 315016 - RNA, 19 nt, Homo sapiens
  misc_RNA (1)...(19): siRNA sense strand
caaagcugaugcccaauug

SEQ ID NO: 315017 - RNA, 19 nt, Homo sapiens
  misc_RNA (1)...(19): siRNA sense strand
ccaaagucaugcagaaaga

SEQ ID NO: 315018 - RNA, 19 nt, Homo sapiens
  misc_RNA (1)...(19): siRNA sense strand
gcagaaagaagacaaucaa

SEQ ID NO: 315019 - RNA, 19 nt, Homo sapiens
  misc_RNA (1)...(19): siRNA sense strand
aaucaugacugguauuguu

SEQ ID NO: 315020 - RNA, 19 nt, Homo sapiens
  misc_RNA (1)...(19): siRNA sense strand
gagagguguugauauguga

SEQ ID NO: 315021 - RNA, 19 nt, Homo sapiens
  misc_RNA (1)...(19): siRNA sense strand
cgaggaugcuauauaaaga

SEQ ID NO: 315022 - RNA, 19 nt, Homo sapiens
  misc_RNA (1)...(19): siRNA sense strand
acaagcaacugauuucuca

SEQ ID NO: 315023 - RNA, 19 nt, Homo sapiens
  misc_RNA (1)...(19): siRNA sense strand
ccaaguguuugucugauga

SEQ ID NO: 315024 - RNA, 19 nt, Homo sapiens
  misc_RNA (1)...(19): siRNA sense strand
gaaaggacgacguaaucaa

SEQ ID NO: 315025 - RNA, 19 nt, Homo sapiens
  misc_RNA (1)...(19): siRNA sense strand
uugcgaggaugcuauauaa

SEQ ID NO: 315026 - RNA, 19 nt, Homo sapiens
  misc_RNA (1)...(19): siRNA sense strand
guaaugagcagcuaaaggu

SEQ ID NO: 315027 - RNA, 19 nt, Homo sapiens
  misc_RNA (1)...(19): siRNA sense strand
gggccuggauuccuucuga

SEQ ID NO: 315028 - RNA, 19 nt, Homo sapiens
  misc_RNA (1)...(19): siRNA sense strand
gaaccaagagcaaagaaag

SEQ ID NO: 315029 - RNA, 19 nt, Homo sapiens
  misc_RNA (1)...(19): siRNA sense strand
gaagaggcagaauccagua

SEQ ID NO: 315030 - RNA, 19 nt, Homo sapiens
  misc_RNA (1)...(19): siRNA sense strand
agagacaagcuguaaauaa

SEQ ID NO: 315031 - RNA, 19 nt, Homo sapiens
  misc_RNA (1)...(19): siRNA sense strand
gaaaagagacaagcuguaa

SEQ ID NO: 315032 - RNA, 19 nt, Homo sapiens
  misc_RNA (1)...(19): siRNA sense strand
guugauaugugaccugugu

SEQ ID NO: 315033 - RNA, 19 nt, Homo sapiens
  misc_RNA (1)...(19): siRNA sense strand
acagugggcugcaaagguu

SEQ ID NO: 315034 - RNA, 19 nt, Homo sapiens
  misc_RNA (1)...(19): siRNA sense strand
uggaugaacugcagcuuug

SEQ ID NO: 315035 - RNA, 19 nt, Homo sapiens
  misc_RNA (1)...(19): siRNA sense strand
acaauaaacacccgaugua

SEQ ID NO: 315036 - RNA, 19 nt, Homo sapiens
  misc_RNA (1)...(19): siRNA sense strand
ccaguuugcaggagcauua

SEQ ID NO: 315037 - RNA, 19 nt, Homo sapiens
  misc_RNA (1)...(19): siRNA sense strand
gaaauaccgaaguuaugaa

SEQ ID NO: 315038 - RNA, 19 nt, Homo sapiens
  misc_RNA (1)...(19): siRNA sense strand
gaacaagaaggauauuggu

SEQ ID NO: 315039 - RNA, 19 nt, Homo sapiens
  misc_RNA (1)...(19): siRNA sense strand
gaagaaccagagccugaaa

SEQ ID NO: 315040 - RNA, 19 nt, Homo sapiens
  misc_RNA (1)...(19): siRNA sense strand
gcauuaagaagaagaauac

SEQ ID NO: 315041 - RNA, 19 nt, Homo sapiens
  misc_RNA (1)...(19): siRNA sense strand
cagccaaagucaugcagaa

SEQ ID NO: 315042 - RNA, 19 nt, Homo sapiens
  misc_RNA (1)...(19): siRNA sense strand
uagaagaaaucaagaagcu

SEQ ID NO: 315043 - RNA, 19 nt, Homo sapiens
  misc_RNA (1)...(19): siRNA sense strand
ggaccgaggugaggaagag

SEQ ID NO: 315044 - RNA, 19 nt, Homo sapiens
  misc_RNA (1)...(19): siRNA sense strand
gggcuaaaaugaaagguuu

SEQ ID NO: 315045 - RNA, 19 nt, Homo sapiens
  misc_RNA (1)...(19): siRNA sense strand
uaaggaggaauuuguagaa

SEQ ID NO: 315046 - RNA, 19 nt, Homo sapiens
  misc_RNA (1)...(19): siRNA sense strand
gguaugcacccuaaagaga

SEQ ID NO: 315047 - RNA, 19 nt, Homo sapiens
  misc_RNA (1)...(19): siRNA sense strand
uuaagugccucuucaccaa

SEQ ID NO: 315048 - RNA, 19 nt, Homo sapiens
  misc_RNA (1)...(19): siRNA sense strand
aaacagaagcaguaaguuc

SEQ ID NO: 315049 - RNA, 19 nt, Homo sapiens
  misc_RNA (1)...(19): siRNA sense strand
aaaggacgacguaaucaaa

SEQ ID NO: 315050 - RNA, 19 nt, Homo sapiens
  misc_RNA (1)...(19): siRNA sense strand
cuggagagguguugauaug

SEQ ID NO: 315051 - RNA, 19 nt, Homo sapiens
  misc_RNA (1)...(19): siRNA sense strand
caacacagcacaagcaacu

SEQ ID NO: 315052 - RNA, 19 nt, Homo sapiens
  misc_RNA (1)...(19): siRNA sense strand
guauugaacaagaaggaua

SEQ ID NO: 315053 - RNA, 19 nt, Homo sapiens
  misc_RNA (1)...(19): siRNA sense strand
aacaggagaugggcacaua

SEQ ID NO: 315054 - RNA, 19 nt, Homo sapiens
  misc_RNA (1)...(19): siRNA sense strand
gaugcuauauaaagacaca

SEQ ID NO: 315055 - RNA, 19 nt, Homo sapiens
  misc_RNA (1)...(19): siRNA sense strand
aaagagacaagcuguaaau

SEQ ID NO: 315056 - RNA, 19 nt, Homo sapiens
  misc_RNA (1)...(19): siRNA sense strand
ucaaagaccggaugaaguc

SEQ ID NO: 315057 - RNA, 19 nt, Homo sapiens
  misc_RNA (1)...(19): siRNA sense strand
cagagggccuggauuccuu

SEQ ID NO: 315058 - RNA, 19 nt, Homo sapiens
  misc_RNA (1)...(19): siRNA sense strand
caagagaaagugaaugaag

SEQ ID NO: 315059 - RNA, 19 nt, Homo sapiens
  misc_RNA (1)...(19): siRNA sense strand
agggugagauggacagaaa

SEQ ID NO: 315060 - RNA, 19 nt, Homo sapiens
  misc_RNA (1)...(19): siRNA sense strand
acaaauacaccaagaucuu

SEQ ID NO: 315061 - RNA, 19 nt, Homo sapiens
  misc_RNA (1)...(19): siRNA sense strand
caugacaaauacaccaaga

SEQ ID NO: 315062 - RNA, 19 nt, Homo sapiens
  misc_RNA (1)...(19): siRNA sense strand
aaccagagccugaaacaga

SEQ ID NO: 315063 - RNA, 19 nt, Homo sapiens
  misc_RNA (1)...(19): siRNA sense strand
gcgaggaugcuauauaaag

SEQ ID NO: 315064 - RNA, 19 nt, Homo sapiens
  misc_RNA (1)...(19): siRNA sense strand
gggaaauaccgaaguuaug

SEQ ID NO: 315065 - RNA, 19 nt, Homo sapiens
  misc_RNA (1)...(19): siRNA sense strand
gggcuauagaucuuaauaa

SEQ ID NO: 315066 - RNA, 19 nt, Homo sapiens
  misc_RNA (1)...(19): siRNA sense strand
caacaugcagggugagaug

SEQ ID NO: 315067 - RNA, 19 nt, Homo sapiens
  misc_RNA (1)...(19): siRNA sense strand
aaaggucacucaagaacca

SEQ ID NO: 315068 - RNA, 19 nt, Homo sapiens
  misc_RNA (1)...(19): siRNA sense strand
gcuaaaggucacucaagaa

SEQ ID NO: 315069 - RNA, 19 nt, Homo sapiens
  misc_RNA (1)...(19): siRNA sense strand
ccugacaacugguucuguu

SEQ ID NO: 315070 - RNA, 19 nt, Homo sapiens
  misc_RNA (1)...(19): siRNA sense strand
caaaugcucguccugacaa

SEQ ID NO: 315071 - RNA, 19 nt, Homo sapiens
  misc_RNA (1)...(19): siRNA sense strand
ugaaggagagggcuauaga

SEQ ID NO: 315072 - RNA, 19 nt, Homo sapiens
  misc_RNA (1)...(19): siRNA sense strand
cagcacaagcaacugauuu

SEQ ID NO: 315073 - RNA, 19 nt, Homo sapiens
  misc_RNA (1)...(19): siRNA sense strand
guaaggaggaauuuguaga

SEQ ID NO: 315074 - RNA, 19 nt, Homo sapiens
  misc_RNA (1)...(19): siRNA sense strand
ggaagaaccagagccugaa

SEQ ID NO: 315075 - RNA, 19 nt, Homo sapiens
  misc_RNA (1)...(19): siRNA sense strand
gagauugacugggaaacag

SEQ ID NO: 315076 - RNA, 19 nt, Homo sapiens
  misc_RNA (1)...(19): siRNA sense strand
caagauaucacagucaaca

SEQ ID NO: 315077 - RNA, 19 nt, Homo sapiens
  misc_RNA (1)...(19): siRNA sense strand
gacaacugguucuguuauc

SEQ ID NO: 315078 - RNA, 19 nt, Homo sapiens
  misc_RNA (1)...(19): siRNA sense strand
gaaggagagggcuauagau

SEQ ID NO: 315079 - RNA, 19 nt, Homo sapiens
  misc_RNA (1)...(19): siRNA sense strand
gaaacagaagcaguaaguu

SEQ ID NO: 315080 - RNA, 19 nt, Homo sapiens
  misc_RNA (1)...(19): siRNA sense strand
ugaaacagaagcaguaagu

SEQ ID NO: 315081 - RNA, 19 nt, Homo sapiens
  misc_RNA (1)...(19): siRNA sense strand
aagcugguauugaacaaga

SEQ ID NO: 315082 - RNA, 19 nt, Homo sapiens
  misc_RNA (1)...(19): siRNA sense strand
gauaucacagucaacauuc

SEQ ID NO: 315083 - RNA, 19 nt, Homo sapiens
  misc_RNA (1)...(19): siRNA sense strand
gacaauaaacacccgaugu

SEQ ID NO: 315084 - RNA, 19 nt, Homo sapiens
  misc_RNA (1)...(19): siRNA sense strand
gggcacauaccucagauuc

SEQ ID NO: 315085 - RNA, 19 nt, Homo sapiens
  misc_RNA (1)...(19): siRNA sense strand
gcacccagaccacaaacga

SEQ ID NO: 315086 - RNA, 19 nt, Homo sapiens
  misc_RNA (1)...(19): siRNA sense strand
guguuugucugaugaguuc

SEQ ID NO: 315087 - RNA, 19 nt, Homo sapiens
  misc_RNA (1)...(19): siRNA sense strand
gacaagcuguaaauaaagc

SEQ ID NO: 315088 - RNA, 19 nt, Homo sapiens
  misc_RNA (1)...(19): siRNA sense strand
ccgagaagcucuggagaag

SEQ ID NO: 315089 - RNA, 19 nt, Homo sapiens
  misc_RNA (1)...(19): siRNA sense strand
caaauacaccaagaucuuc

SEQ ID NO: 315090 - RNA, 19 nt, Homo sapiens
  misc_RNA (1)...(19): siRNA sense strand
agucgacguucgcuucuuu

SEQ ID NO: 315091 - RNA, 19 nt, Homo sapiens
  misc_RNA (1)...(19): siRNA sense strand
aaugaaagguuuuggguuu

SEQ ID NO: 315092 - RNA, 19 nt, Homo sapiens
  misc_RNA (1)...(19): siRNA sense strand
cccaauugcuucuccacaa

SEQ ID NO: 315093 - RNA, 19 nt, Homo sapiens
  misc_RNA (1)...(19): siRNA sense strand
ucaaagcugaugcccaauu

SEQ ID NO: 315094 - RNA, 19 nt, Homo sapiens
  misc_RNA (1)...(19): siRNA sense strand
agagggcuauagaucuuaa

SEQ ID NO: 315095 - RNA, 19 nt, Homo sapiens
  misc_RNA (1)...(19): siRNA sense strand
gaggcagaauccaguaucu

SEQ ID NO: 315096 - RNA, 19 nt, Homo sapiens
  misc_RNA (1)...(19): siRNA sense strand
gugaggaggaggccaugua

SEQ ID NO: 315097 - RNA, 19 nt, Homo sapiens
  misc_RNA (1)...(19): siRNA sense strand
ugacaaauacaccaagauc

SEQ ID NO: 315098 - RNA, 19 nt, Homo sapiens
  misc_RNA (1)...(19): siRNA sense strand
ggagcacccagaccacaaa

SEQ ID NO: 315099 - RNA, 19 nt, Homo sapiens
  misc_RNA (1)...(19): siRNA sense strand
aaagaaaggacgacguaau

SEQ ID NO: 315100 - RNA, 19 nt, Homo sapiens
  misc_RNA (1)...(19): siRNA sense strand
gaagaaaccugaugauggu

SEQ ID NO: 315101 - RNA, 19 nt, Homo sapiens
  misc_RNA (1)...(19): siRNA sense strand
ugaaaggccuggcauuuau

SEQ ID NO: 315102 - RNA, 19 nt, Homo sapiens
  misc_RNA (1)...(19): siRNA sense strand
gaacugggagucaaauuug

SEQ ID NO: 315103 - RNA, 19 nt, Homo sapiens
  misc_RNA (1)...(19): siRNA sense strand
ggaaugacgcuaauccaaa

SEQ ID NO: 315104 - RNA, 19 nt, Homo sapiens
  misc_RNA (1)...(19): siRNA sense strand
gaaaccugaugaugguaaa

SEQ ID NO: 315105 - RNA, 19 nt, Homo sapiens
  misc_RNA (1)...(19): siRNA sense strand
gaauugcuguuccugaugu

SEQ ID NO: 315106 - RNA, 19 nt, Homo sapiens
  misc_RNA (1)...(19): siRNA sense strand
ccuaagaagucacuggauu

SEQ ID NO: 315107 - RNA, 19 nt, Homo sapiens
  misc_RNA (1)...(19): siRNA sense strand
ggagucaaauuugugaaga

SEQ ID NO: 315108 - RNA, 19 nt, Homo sapiens
  misc_RNA (1)...(19): siRNA sense strand
gaaugacgcuaauccaaaa

SEQ ID NO: 315109 - RNA, 19 nt, Homo sapiens
  misc_RNA (1)...(19): siRNA sense strand
ccugauggcuacuggauug

SEQ ID NO: 315110 - RNA, 19 nt, Homo sapiens
  misc_RNA (1)...(19): siRNA sense strand
gauggcuacuggauugaaa

SEQ ID NO: 315111 - RNA, 19 nt, Homo sapiens
  misc_RNA (1)...(19): siRNA sense strand
gaaaggccuggcauuuauu

SEQ ID NO: 315112 - RNA, 19 nt, Homo sapiens
  misc_RNA (1)...(19): siRNA sense strand
gagucaaauuugugaagaa

SEQ ID NO: 315113 - RNA, 19 nt, Homo sapiens
  misc_RNA (1)...(19): siRNA sense strand
gaaggauccuaagaaguca

SEQ ID NO: 315114 - RNA, 19 nt, Homo sapiens
  misc_RNA (1)...(19): siRNA sense strand
ugaaggauccuaagaaguc

SEQ ID NO: 315115 - RNA, 19 nt, Homo sapiens
  misc_RNA (1)...(19): siRNA sense strand
aaaaugacaucccuaaaga

SEQ ID NO: 315116 - RNA, 19 nt, Homo sapiens
  misc_RNA (1)...(19): siRNA sense strand
cuaagaagucacuggauuu

SEQ ID NO: 315117 - RNA, 19 nt, Homo sapiens
  misc_RNA (1)...(19): siRNA sense strand
gagugaaggauccuaagaa

SEQ ID NO: 315118 - RNA, 19 nt, Homo sapiens
  misc_RNA (1)...(19): siRNA sense strand
gcuacuggauugaaauuuu

SEQ ID NO: 315119 - RNA, 19 nt, Homo sapiens
  misc_RNA (1)...(19): siRNA sense strand
cacuugagcugacacacaa

SEQ ID NO: 315120 - RNA, 19 nt, Homo sapiens
  misc_RNA (1)...(19): siRNA sense strand
aaugacaucccuaaagaaa

SEQ ID NO: 315121 - RNA, 19 nt, Homo sapiens
  misc_RNA (1)...(19): siRNA sense strand
cuucuuggcuuaugaggau

SEQ ID NO: 315122 - RNA, 19 nt, Homo sapiens
  misc_RNA (1)...(19): siRNA sense strand
agaacugggagucaaauuu

SEQ ID NO: 315123 - RNA, 19 nt, Homo sapiens
  misc_RNA (1)...(19): siRNA sense strand
uaccaaggauuuucuauug

SEQ ID NO: 315124 - RNA, 19 nt, Homo sapiens
  misc_RNA (1)...(19): siRNA sense strand
gacccagaguuaccacaau

SEQ ID NO: 315125 - RNA, 19 nt, Homo sapiens
  misc_RNA (1)...(19): siRNA sense strand
gaagaacugggagucaaau

SEQ ID NO: 315126 - RNA, 19 nt, Homo sapiens
  misc_RNA (1)...(19): siRNA sense strand
uaacaaaauggcaaccuua

SEQ ID NO: 315127 - RNA, 19 nt, Homo sapiens
  misc_RNA (1)...(19): siRNA sense strand
caaaauggcaaccuuaaug

SEQ ID NO: 315128 - RNA, 19 nt, Homo sapiens
  misc_RNA (1)...(19): siRNA sense strand
uacuagaguucuuggaaug

SEQ ID NO: 315129 - RNA, 19 nt, Homo sapiens
  misc_RNA (1)...(19): siRNA sense strand
augaaaggccuggcauuua

SEQ ID NO: 315130 - RNA, 19 nt, Homo sapiens
  misc_RNA (1)...(19): siRNA sense strand
guucuuggaaugacgcuaa

SEQ ID NO: 315131 - RNA, 19 nt, Homo sapiens
  misc_RNA (1)...(19): siRNA sense strand
ugaagaacugggagucaaa

SEQ ID NO: 315132 - RNA, 19 nt, Homo sapiens
  misc_RNA (1)...(19): siRNA sense strand
aaauggcaaccuuaaugua

SEQ ID NO: 315133 - RNA, 19 nt, Homo sapiens
  misc_RNA (1)...(19): siRNA sense strand
ggccuggcauuuauucaag

SEQ ID NO: 315134 - RNA, 19 nt, Homo sapiens
  misc_RNA (1)...(19): siRNA sense strand
uuaccacaauggcaauuca

SEQ ID NO: 315135 - RNA, 19 nt, Homo sapiens
  misc_RNA (1)...(19): siRNA sense strand
uauacuagaguucuuggaa

SEQ ID NO: 315136 - RNA, 19 nt, Homo sapiens
  misc_RNA (1)...(19): siRNA sense strand
auacuagaguucuuggaau

SEQ ID NO: 315137 - RNA, 19 nt, Homo sapiens
  misc_RNA (1)...(19): siRNA sense strand
cacucuacuucuuggcuua

SEQ ID NO: 315138 - RNA, 19 nt, Homo sapiens
  misc_RNA (1)...(19): siRNA sense strand
gugaagaaaccugaugaug

SEQ ID NO: 315139 - RNA, 19 nt, Homo sapiens
  misc_RNA (1)...(19): siRNA sense strand
cagaaaagcuacacuugag

SEQ ID NO: 315140 - RNA, 19 nt, Homo sapiens
  misc_RNA (1)...(19): siRNA sense strand
guaaaagguuugaagaacu

SEQ ID NO: 315141 - RNA, 19 nt, Homo sapiens
  misc_RNA (1)...(19): siRNA sense strand
ucaaauuugugaagaaacc

SEQ ID NO: 315142 - RNA, 19 nt, Homo sapiens
  misc_RNA (1)...(19): siRNA sense strand
cgagugaaggauccuaaga

SEQ ID NO: 315143 - RNA, 19 nt, Homo sapiens
  misc_RNA (1)...(19): siRNA sense strand
uaaaagguuugaagaacug

SEQ ID NO: 315144 - RNA, 19 nt, Homo sapiens
  misc_RNA (1)...(19): siRNA sense strand
agaaaccugaugaugguaa

SEQ ID NO: 315145 - RNA, 19 nt, Homo sapiens
  misc_RNA (1)...(19): siRNA sense strand
agugaaggauccuaagaag

SEQ ID NO: 315146 - RNA, 19 nt, Homo sapiens
  misc_RNA (1)...(19): siRNA sense strand
ccugauguauacagugcuu

SEQ ID NO: 315147 - RNA, 19 nt, Homo sapiens
  misc_RNA (1)...(19): siRNA sense strand
acccagaguuaccacaaug

SEQ ID NO: 315148 - RNA, 19 nt, Homo sapiens
  misc_RNA (1)...(19): siRNA sense strand
cagaccaugcuacgaguga

SEQ ID NO: 315149 - RNA, 19 nt, Homo sapiens
  misc_RNA (1)...(19): siRNA sense strand
aaaugacaucccuaaagaa

SEQ ID NO: 315150 - RNA, 19 nt, Homo sapiens
  misc_RNA (1)...(19): siRNA sense strand
cuacuggauugaaauuuug

SEQ ID NO: 315151 - RNA, 19 nt, Homo sapiens
  misc_RNA (1)...(19): siRNA sense strand
ccagaaaagcuacacuuga

SEQ ID NO: 315152 - RNA, 19 nt, Homo sapiens
  misc_RNA (1)...(19): siRNA sense strand
ucuacuucuuggcuuauga

SEQ ID NO: 315153 - RNA, 19 nt, Homo sapiens
  misc_RNA (1)...(19): siRNA sense strand
aauggcaaccuuaauguag

SEQ ID NO: 315154 - RNA, 19 nt, Homo sapiens
  misc_RNA (1)...(19): siRNA sense strand
gccuggcauuuauucaaga

SEQ ID NO: 315155 - RNA, 19 nt, Homo sapiens
  misc_RNA (1)...(19): siRNA sense strand
gaaagaagcugccauggaa

SEQ ID NO: 315156 - RNA, 19 nt, Homo sapiens
  misc_RNA (1)...(19): siRNA sense strand
gaagagagacgauaauaaa

SEQ ID NO: 315157 - RNA, 19 nt, Homo sapiens
  misc_RNA (1)...(19): siRNA sense strand
ggagaugacugaagaagaa

SEQ ID NO: 315158 - RNA, 19 nt, Homo sapiens
  misc_RNA (1)...(19): siRNA sense strand
gaugaaacuucugcaauua

SEQ ID NO: 315159 - RNA, 19 nt, Homo sapiens
  misc_RNA (1)...(19): siRNA sense strand
gaagauccucgauguauua

SEQ ID NO: 315160 - RNA, 19 nt, Homo sapiens
  misc_RNA (1)...(19): siRNA sense strand
ggaugaaacuucugcaauu

SEQ ID NO: 315161 - RNA, 19 nt, Homo sapiens
  misc_RNA (1)...(19): siRNA sense strand
cauggaagcugaaauuaaa

SEQ ID NO: 315162 - RNA, 19 nt, Homo sapiens
  misc_RNA (1)...(19): siRNA sense strand
gagaagccuuguuuaauga

SEQ ID NO: 315163 - RNA, 19 nt, Homo sapiens
  misc_RNA (1)...(19): siRNA sense strand
ucaaagcucuucugucuga

SEQ ID NO: 315164 - RNA, 19 nt, Homo sapiens
  misc_RNA (1)...(19): siRNA sense strand
agaaauagaucgagagaga

SEQ ID NO: 315165 - RNA, 19 nt, Homo sapiens
  misc_RNA (1)...(19): siRNA sense strand
cgagaagccuuguuuaaug

SEQ ID NO: 315166 - RNA, 19 nt, Homo sapiens
  misc_RNA (1)...(19): siRNA sense strand
gcaauuaccuuaacaucca

SEQ ID NO: 315167 - RNA, 19 nt, Homo sapiens
  misc_RNA (1)...(19): siRNA sense strand
caacagcaguuucugaaug

SEQ ID NO: 315168 - RNA, 19 nt, Homo sapiens
  misc_RNA (1)...(19): siRNA sense strand
ggaagauccucgauguauu

SEQ ID NO: 315169 - RNA, 19 nt, Homo sapiens
  misc_RNA (1)...(19): siRNA sense strand
guaaacugauuguggcaua

SEQ ID NO: 315170 - RNA, 19 nt, Homo sapiens
  misc_RNA (1)...(19): siRNA sense strand
gagaaggaguugcacaaga

SEQ ID NO: 315171 - RNA, 19 nt, Homo sapiens
  misc_RNA (1)...(19): siRNA sense strand
gaccagaggugagaagauu

SEQ ID NO: 315172 - RNA, 19 nt, Homo sapiens
  misc_RNA (1)...(19): siRNA sense strand
ggaagagagacgauaauaa

SEQ ID NO: 315173 - RNA, 19 nt, Homo sapiens
  misc_RNA (1)...(19): siRNA sense strand
aagaagcuauccagaauuu

SEQ ID NO: 315174 - RNA, 19 nt, Homo sapiens
  misc_RNA (1)...(19): siRNA sense strand
gaggagauauggguugaaa

SEQ ID NO: 315175 - RNA, 19 nt, Homo sapiens
  misc_RNA (1)...(19): siRNA sense strand
ggagaggcguaaacugauu

SEQ ID NO: 315176 - RNA, 19 nt, Homo sapiens
  misc_RNA (1)...(19): siRNA sense strand
gaagaaagagaaagaagau

SEQ ID NO: 315177 - RNA, 19 nt, Homo sapiens
  misc_RNA (1)...(19): siRNA sense strand
gaggagaggcguaaacuga

SEQ ID NO: 315178 - RNA, 19 nt, Homo sapiens
  misc_RNA (1)...(19): siRNA sense strand
agaagaagcuauccagaau

SEQ ID NO: 315179 - RNA, 19 nt, Homo sapiens
  misc_RNA (1)...(19): siRNA sense strand
gagaagaccuuuucaaaca

SEQ ID NO: 315180 - RNA, 19 nt, Homo sapiens
  misc_RNA (1)...(19): siRNA sense strand
gagaagaagcuauccagaa

SEQ ID NO: 315181 - RNA, 19 nt, Homo sapiens
  misc_RNA (1)...(19): siRNA sense strand
cagaugggaagguuuauua

SEQ ID NO: 315182 - RNA, 19 nt, Homo sapiens
  misc_RNA (1)...(19): siRNA sense strand
ugacaaacgguaucuagua

SEQ ID NO: 315183 - RNA, 19 nt, Homo sapiens
  misc_RNA (1)...(19): siRNA sense strand
cagaugggaagacauauua

SEQ ID NO: 315184 - RNA, 19 nt, Homo sapiens
  misc_RNA (1)...(19): siRNA sense strand
ggaccgaccugaugaucug

SEQ ID NO: 315185 - RNA, 19 nt, Homo sapiens
  misc_RNA (1)...(19): siRNA sense strand
gauccucgauguauuaagu

SEQ ID NO: 315186 - RNA, 19 nt, Homo sapiens
  misc_RNA (1)...(19): siRNA sense strand
ggaacaagaauuaauggaa

SEQ ID NO: 315187 - RNA, 19 nt, Homo sapiens
  misc_RNA (1)...(19): siRNA sense strand
gagcgggucuucuuuuaua

SEQ ID NO: 315188 - RNA, 19 nt, Homo sapiens
  misc_RNA (1)...(19): siRNA sense strand
gaugugucauggucugaua

SEQ ID NO: 315189 - RNA, 19 nt, Homo sapiens
  misc_RNA (1)...(19): siRNA sense strand
auaaagacauugacucaga

SEQ ID NO: 315190 - RNA, 19 nt, Homo sapiens
  misc_RNA (1)...(19): siRNA sense strand
ggaagaaagagaaagaaga

SEQ ID NO: 315191 - RNA, 19 nt, Homo sapiens
  misc_RNA (1)...(19): siRNA sense strand
ccagauggaguuaagguua

SEQ ID NO: 315192 - RNA, 19 nt, Homo sapiens
  misc_RNA (1)...(19): siRNA sense strand
gcuaaagauucaagauuca

SEQ ID NO: 315193 - RNA, 19 nt, Homo sapiens
  misc_RNA (1)...(19): siRNA sense strand
aagaagagccuauaaagga

SEQ ID NO: 315194 - RNA, 19 nt, Homo sapiens
  misc_RNA (1)...(19): siRNA sense strand
cugggaaucuggauccuua

SEQ ID NO: 315195 - RNA, 19 nt, Homo sapiens
  misc_RNA (1)...(19): siRNA sense strand
gcaaugaugcaaauaguca

SEQ ID NO: 315196 - RNA, 19 nt, Homo sapiens
  misc_RNA (1)...(19): siRNA sense strand
gaacacauugaagcacuua

SEQ ID NO: 315197 - RNA, 19 nt, Homo sapiens
  misc_RNA (1)...(19): siRNA sense strand
gaagcuauccagaauuuca

SEQ ID NO: 315198 - RNA, 19 nt, Homo sapiens
  misc_RNA (1)...(19): siRNA sense strand
aauuaaagcugcccgagaa

SEQ ID NO: 315199 - RNA, 19 nt, Homo sapiens
  misc_RNA (1)...(19): siRNA sense strand
aagaggagaugacugaaga

SEQ ID NO: 315200 - RNA, 19 nt, Homo sapiens
  misc_RNA (1)...(19): siRNA sense strand
uuaaagaacccucugaaga

SEQ ID NO: 315201 - RNA, 19 nt, Homo sapiens
  misc_RNA (1)...(19): siRNA sense strand
gauucaagauucaaagcaa

SEQ ID NO: 315202 - RNA, 19 nt, Homo sapiens
  misc_RNA (1)...(19): siRNA sense strand
gaaggaguugcacaagaua

SEQ ID NO: 315203 - RNA, 19 nt, Homo sapiens
  misc_RNA (1)...(19): siRNA sense strand
gaauggaggaauugaagaa

SEQ ID NO: 315204 - RNA, 19 nt, Homo sapiens
  misc_RNA (1)...(19): siRNA sense strand
uaaaggaggagcccaaaga

SEQ ID NO: 315205 - RNA, 19 nt, Homo sapiens
  misc_RNA (1)...(19): siRNA sense strand
gacguuaccuccugcuguu

SEQ ID NO: 315206 - RNA, 19 nt, Homo sapiens
  misc_RNA (1)...(19): siRNA sense strand
gaagaagcuauccagaauu

SEQ ID NO: 315207 - RNA, 19 nt, Homo sapiens
  misc_RNA (1)...(19): siRNA sense strand
ccaagaauuuagacucaga

SEQ ID NO: 315208 - RNA, 19 nt, Homo sapiens
  misc_RNA (1)...(19): siRNA sense strand
cagggcagauguugacaaa

SEQ ID NO: 315209 - RNA, 19 nt, Homo sapiens
  misc_RNA (1)...(19): siRNA sense strand
uaaagaagagccuauaaag

SEQ ID NO: 315210 - RNA, 19 nt, Homo sapiens
  misc_RNA (1)...(19): siRNA sense strand
cagcagaugggaagacaua

SEQ ID NO: 315211 - RNA, 19 nt, Homo sapiens
  misc_RNA (1)...(19): siRNA sense strand
cugaauggacugaauauaa

SEQ ID NO: 315212 - RNA, 19 nt, Homo sapiens
  misc_RNA (1)...(19): siRNA sense strand
ucaaggacaugcugcuaga

SEQ ID NO: 315213 - RNA, 19 nt, Homo sapiens
  misc_RNA (1)...(19): siRNA sense strand
gaaucuggauccuuauugg

SEQ ID NO: 315214 - RNA, 19 nt, Homo sapiens
  misc_RNA (1)...(19): siRNA sense strand
gaaaggcaagcccgcauug

SEQ ID NO: 315215 - RNA, 19 nt, Homo sapiens
  misc_RNA (1)...(19): siRNA sense strand
gcacccaacuccgacaaug

SEQ ID NO: 315216 - RNA, 19 nt, Homo sapiens
  misc_RNA (1)...(19): siRNA sense strand
uuaggcaacuucuggauga

SEQ ID NO: 315217 - RNA, 19 nt, Homo sapiens
  misc_RNA (1)...(19): siRNA sense strand
uuucaaagcucuucugucu

SEQ ID NO: 315218 - RNA, 19 nt, Homo sapiens
  misc_RNA (1)...(19): siRNA sense strand
agaaggaguugcacaagau

SEQ ID NO: 315219 - RNA, 19 nt, Homo sapiens
  misc_RNA (1)...(19): siRNA sense strand
uaccuuagcuggagcaaca

SEQ ID NO: 315220 - RNA, 19 nt, Homo sapiens
  misc_RNA (1)...(19): siRNA sense strand
gacaaacgguaucuaguac

SEQ ID NO: 315221 - RNA, 19 nt, Homo sapiens
  misc_RNA (1)...(19): siRNA sense strand
gaugggaagguuuauuauu

SEQ ID NO: 315222 - RNA, 19 nt, Homo sapiens
  misc_RNA (1)...(19): siRNA sense strand
caaacgguaucuaguacug

SEQ ID NO: 315223 - RNA, 19 nt, Homo sapiens
  misc_RNA (1)...(19): siRNA sense strand
ccacucgucuuucuaugug

SEQ ID NO: 315224 - RNA, 19 nt, Homo sapiens
  misc_RNA (1)...(19): siRNA sense strand
cuaaagaagagccuauaaa

SEQ ID NO: 315225 - RNA, 19 nt, Homo sapiens
  misc_RNA (1)...(19): siRNA sense strand
gcagaugggaagacauauu

SEQ ID NO: 315226 - RNA, 19 nt, Homo sapiens
  misc_RNA (1)...(19): siRNA sense strand
cacaacaacugcuacuuca

SEQ ID NO: 315227 - RNA, 19 nt, Homo sapiens
  misc_RNA (1)...(19): siRNA sense strand
gaugggaagacauauuauu

SEQ ID NO: 315228 - RNA, 19 nt, Homo sapiens
  misc_RNA (1)...(19): siRNA sense strand
aaagagaggagaaagagaa

SEQ ID NO: 315229 - RNA, 19 nt, Homo sapiens
  misc_RNA (1)...(19): siRNA sense strand
gagagacgauaauaaagac

SEQ ID NO: 315230 - RNA, 19 nt, Homo sapiens
  misc_RNA (1)...(19): siRNA sense strand
cagauggaguuaagguuau

SEQ ID NO: 315231 - RNA, 19 nt, Homo sapiens
  misc_RNA (1)...(19): siRNA sense strand
caagcaugcuaaagauuca

SEQ ID NO: 315232 - RNA, 19 nt, Homo sapiens
  misc_RNA (1)...(19): siRNA sense strand
ccauggaagcugaaauuaa

SEQ ID NO: 315233 - RNA, 19 nt, Homo sapiens
  misc_RNA (1)...(19): siRNA sense strand
gaaaauaaaacuccagaug

SEQ ID NO: 315234 - RNA, 19 nt, Homo sapiens
  misc_RNA (1)...(19): siRNA sense strand
gagcaacagcaguuucuga

SEQ ID NO: 315235 - RNA, 19 nt, Homo sapiens
  misc_RNA (1)...(19): siRNA sense strand
guaccuccguuucguguuc

SEQ ID NO: 315236 - RNA, 19 nt, Homo sapiens
  misc_RNA (1)...(19): siRNA sense strand
ggaaagagaggagaaagag

SEQ ID NO: 315237 - RNA, 19 nt, Homo sapiens
  misc_RNA (1)...(19): siRNA sense strand
acaaagcaguagauaguuc

SEQ ID NO: 315238 - RNA, 19 nt, Homo sapiens
  misc_RNA (1)...(19): siRNA sense strand
gggcgagagugaacgauuc

SEQ ID NO: 315239 - RNA, 19 nt, Homo sapiens
  misc_RNA (1)...(19): siRNA sense strand
acaaugcugucgauccaaa

SEQ ID NO: 315240 - RNA, 19 nt, Homo sapiens
  misc_RNA (1)...(19): siRNA sense strand
ccagagaccaccuuucaug

SEQ ID NO: 315241 - RNA, 19 nt, Homo sapiens
  misc_RNA (1)...(19): siRNA sense strand
gaaagagaggagaaagaga

SEQ ID NO: 315242 - RNA, 19 nt, Homo sapiens
  misc_RNA (1)...(19): siRNA sense strand
ggaaucuggauccuuauug

SEQ ID NO: 315243 - RNA, 19 nt, Homo sapiens
  misc_RNA (1)...(19): siRNA sense strand
uuacaaagcaguagauagu

SEQ ID NO: 315244 - RNA, 19 nt, Homo sapiens
  misc_RNA (1)...(19): siRNA sense strand
gggcagauguugacaaaau

SEQ ID NO: 315245 - RNA, 19 nt, Homo sapiens
  misc_RNA (1)...(19): siRNA sense strand
ccacaacaacugcuacuuc

SEQ ID NO: 315246 - RNA, 19 nt, Homo sapiens
  misc_RNA (1)...(19): siRNA sense strand
gaucaccgcugggaaucug

SEQ ID NO: 315247 - RNA, 19 nt, Homo sapiens
  misc_RNA (1)...(19): siRNA sense strand
gaaagugauccacguuaca

SEQ ID NO: 315248 - RNA, 19 nt, Homo sapiens
  misc_RNA (1)...(19): siRNA sense strand
cagccaagcaugcuaaaga

SEQ ID NO: 315249 - RNA, 19 nt, Homo sapiens
  misc_RNA (1)...(19): siRNA sense strand
gaagaugagccuguuaaag

SEQ ID NO: 315250 - RNA, 19 nt, Homo sapiens
  misc_RNA (1)...(19): siRNA sense strand
caagccagauggaguuaag

SEQ ID NO: 315251 - RNA, 19 nt, Homo sapiens
  misc_RNA (1)...(19): siRNA sense strand
gagagaagaccuuuucaaa

SEQ ID NO: 315252 - RNA, 19 nt, Homo sapiens
  misc_RNA (1)...(19): siRNA sense strand
ccagaggugagaagauuaa

SEQ ID NO: 315253 - RNA, 19 nt, Homo sapiens
  misc_RNA (1)...(19): siRNA sense strand
gguguuugaucaguaugua

SEQ ID NO: 315254 - RNA, 19 nt, Homo sapiens
  misc_RNA (1)...(19): siRNA sense strand
gcaccugaaagauguagaa

SEQ ID NO: 315255 - RNA, 19 nt, Homo sapiens
  misc_RNA (1)...(19): siRNA sense strand
gaaggaaacucaagagauu

SEQ ID NO: 315256 - RNA, 19 nt, Homo sapiens
  misc_RNA (1)...(19): siRNA sense strand
gcagagaccuuccaaacua

SEQ ID NO: 315257 - RNA, 19 nt, Homo sapiens
  misc_RNA (1)...(19): siRNA sense strand
gcagaaagauagaaggaaa

SEQ ID NO: 315258 - RNA, 19 nt, Homo sapiens
  misc_RNA (1)...(19): siRNA sense strand
ggauauggauggaaaugua

SEQ ID NO: 315259 - RNA, 19 nt, Homo sapiens
  misc_RNA (1)...(19): siRNA sense strand
gaacuucuaugagauucua

SEQ ID NO: 315260 - RNA, 19 nt, Homo sapiens
  misc_RNA (1)...(19): siRNA sense strand
ccaggaagcugauuucugu

SEQ ID NO: 315261 - RNA, 19 nt, Homo sapiens
  misc_RNA (1)...(19): siRNA sense strand
cagaggaacuugaguaugu

SEQ ID NO: 315262 - RNA, 19 nt, Homo sapiens
  misc_RNA (1)...(19): siRNA sense strand
gaaucgagcucauccgaau

SEQ ID NO: 315263 - RNA, 19 nt, Homo sapiens
  misc_RNA (1)...(19): siRNA sense strand
gcagagaggcacccuguuu

SEQ ID NO: 315264 - RNA, 19 nt, Homo sapiens
  misc_RNA (1)...(19): siRNA sense strand
gauauuccauuuccaguuc

SEQ ID NO: 315265 - RNA, 19 nt, Homo sapiens
  misc_RNA (1)...(19): siRNA sense strand
gcaauuuccuggauaccuu

SEQ ID NO: 315266 - RNA, 19 nt, Homo sapiens
  misc_RNA (1)...(19): siRNA sense strand
ggaccaauccacaaauaaa

SEQ ID NO: 315267 - RNA, 19 nt, Homo sapiens
  misc_RNA (1)...(19): siRNA sense strand
guacaaagaacaaggaguu

SEQ ID NO: 315268 - RNA, 19 nt, Homo sapiens
  misc_RNA (1)...(19): siRNA sense strand
ggaguguaguuuccuugua

SEQ ID NO: 315269 - RNA, 19 nt, Homo sapiens
  misc_RNA (1)...(19): siRNA sense strand
gaagcugauuucugucuga

SEQ ID NO: 315270 - RNA, 19 nt, Homo sapiens
  misc_RNA (1)...(19): siRNA sense strand
ggagacugcuggcuauuag

SEQ ID NO: 315271 - RNA, 19 nt, Homo sapiens
  misc_RNA (1)...(19): siRNA sense strand
ggaagacgcgauccacaaa

SEQ ID NO: 315272 - RNA, 19 nt, Homo sapiens
  misc_RNA (1)...(19): siRNA sense strand
gaagcaagacguucaucaa

SEQ ID NO: 315273 - RNA, 19 nt, Homo sapiens
  misc_RNA (1)...(19): siRNA sense strand
cagaagugcugcagaaucu

SEQ ID NO: 315274 - RNA, 19 nt, Homo sapiens
  misc_RNA (1)...(19): siRNA sense strand
ggaguucauucaucucaau

SEQ ID NO: 315275 - RNA, 19 nt, Homo sapiens
  misc_RNA (1)...(19): siRNA sense strand
cagagaccuuccaaacuaa

SEQ ID NO: 315276 - RNA, 19 nt, Homo sapiens
  misc_RNA (1)...(19): siRNA sense strand
acgaacaccugaacaaaga

SEQ ID NO: 315277 - RNA, 19 nt, Homo sapiens
  misc_RNA (1)...(19): siRNA sense strand
ggacuucaaggcccacuuu

SEQ ID NO: 315278 - RNA, 19 nt, Homo sapiens
  misc_RNA (1)...(19): siRNA sense strand
agagaaggcuuugaagaga

SEQ ID NO: 315279 - RNA, 19 nt, Homo sapiens
  misc_RNA (1)...(19): siRNA sense strand
gaguguaguuuccuuguag

SEQ ID NO: 315280 - RNA, 19 nt, Homo sapiens
  misc_RNA (1)...(19): siRNA sense strand
gaacuacggacugcacuga

SEQ ID NO: 315281 - RNA, 19 nt, Homo sapiens
  misc_RNA (1)...(19): siRNA sense strand
gaauugaccagguaagcuu

SEQ ID NO: 315282 - RNA, 19 nt, Homo sapiens
  misc_RNA (1)...(19): siRNA sense strand
aaagauagaaggaaacuca

SEQ ID NO: 315283 - RNA, 19 nt, Homo sapiens
  misc_RNA (1)...(19): siRNA sense strand
gauagaaggaaacucaaga

SEQ ID NO: 315284 - RNA, 19 nt, Homo sapiens
  misc_RNA (1)...(19): siRNA sense strand
gcaaugggaagcuggaguu

SEQ ID NO: 315285 - RNA, 19 nt, Homo sapiens
  misc_RNA (1)...(19): siRNA sense strand
gacaaucggcuaugccauu

SEQ ID NO: 315286 - RNA, 19 nt, Homo sapiens
  misc_RNA (1)...(19): siRNA sense strand
cugcugggcugcuucauug

SEQ ID NO: 315287 - RNA, 19 nt, Homo sapiens
  misc_RNA (1)...(19): siRNA sense strand
caccaugucuaccuaugaa

SEQ ID NO: 315288 - RNA, 19 nt, Homo sapiens
  misc_RNA (1)...(19): siRNA sense strand
uaccagaagugcugcagaa

SEQ ID NO: 315289 - RNA, 19 nt, Homo sapiens
  misc_RNA (1)...(19): siRNA sense strand
gggagacugcuggcuauua

SEQ ID NO: 315290 - RNA, 19 nt, Homo sapiens
  misc_RNA (1)...(19): siRNA sense strand
acaaggaguucauucaucu

SEQ ID NO: 315291 - RNA, 19 nt, Homo sapiens
  misc_RNA (1)...(19): siRNA sense strand
ggacaucaaauucaagaag

SEQ ID NO: 315292 - RNA, 19 nt, Homo sapiens
  misc_RNA (1)...(19): siRNA sense strand
cagcagaggaacuugagua

SEQ ID NO: 315293 - RNA, 19 nt, Homo sapiens
  misc_RNA (1)...(19): siRNA sense strand
gcaauuccucccuguucua

SEQ ID NO: 315294 - RNA, 19 nt, Homo sapiens
  misc_RNA (1)...(19): siRNA sense strand
gaagcuggaguuugaugaa

SEQ ID NO: 315295 - RNA, 19 nt, Homo sapiens
  misc_RNA (1)...(19): siRNA sense strand
acaaucggcuaugccauuu

SEQ ID NO: 315296 - RNA, 19 nt, Homo sapiens
  misc_RNA (1)...(19): siRNA sense strand
gcuggaguuugaugaauuc

SEQ ID NO: 315297 - RNA, 19 nt, Homo sapiens
  misc_RNA (1)...(19): siRNA sense strand
gcaagacguucaucaaccu

SEQ ID NO: 315298 - RNA, 19 nt, Homo sapiens
  misc_RNA (1)...(19): siRNA sense strand
gcaccaugucuaccuauga

SEQ ID NO: 315299 - RNA, 19 nt, Homo sapiens
  misc_RNA (1)...(19): siRNA sense strand
uaagccugaucuccuguaa

SEQ ID NO: 315300 - RNA, 19 nt, Homo sapiens
  misc_RNA (1)...(19): siRNA sense strand
augggaagcuggaguuuga

SEQ ID NO: 315301 - RNA, 19 nt, Homo sapiens
  misc_RNA (1)...(19): siRNA sense strand
ccgaugcccuggaggaaga

SEQ ID NO: 315302 - RNA, 19 nt, Homo sapiens
  misc_RNA (1)...(19): siRNA sense strand
aagcugaagcaguggauua

SEQ ID NO: 315303 - RNA, 19 nt, Homo sapiens
  misc_RNA (1)...(19): siRNA sense strand
ucaagaagcuaagccugau

SEQ ID NO: 315304 - RNA, 19 nt, Homo sapiens
  misc_RNA (1)...(19): siRNA sense strand
ggaggugacagcagaggaa

SEQ ID NO: 315305 - RNA, 19 nt, Homo sapiens
  misc_RNA (1)...(19): siRNA sense strand
aaucggcuaugccauuuau

SEQ ID NO: 315306 - RNA, 19 nt, Homo sapiens
  misc_RNA (1)...(19): siRNA sense strand
gcccugaugcagaaagaua

SEQ ID NO: 315307 - RNA, 19 nt, Homo sapiens
  misc_RNA (1)...(19): siRNA sense strand
ggacgccguuuggucuuau

SEQ ID NO: 315308 - RNA, 19 nt, Homo sapiens
  misc_RNA (1)...(19): siRNA sense strand
uaaaugcugugcugcaaaa

SEQ ID NO: 315309 - RNA, 19 nt, Homo sapiens
  misc_RNA (1)...(19): siRNA sense strand
ggauggcauuuaaggacuu

SEQ ID NO: 315310 - RNA, 19 nt, Homo sapiens
  misc_RNA (1)...(19): siRNA sense strand
ggaguggcguucuguuggu

SEQ ID NO: 315311 - RNA, 19 nt, Homo sapiens
  misc_RNA (1)...(19): siRNA sense strand
ggauauuccauuuccaguu

SEQ ID NO: 315312 - RNA, 19 nt, Homo sapiens
  misc_RNA (1)...(19): siRNA sense strand
ggaagcuggaguuugauga

SEQ ID NO: 315313 - RNA, 19 nt, Homo sapiens
  misc_RNA (1)...(19): siRNA sense strand
gugccaaugugcugacaau

SEQ ID NO: 315314 - RNA, 19 nt, Homo sapiens
  misc_RNA (1)...(19): siRNA sense strand
aagacgcgauccacaaaug

SEQ ID NO: 315315 - RNA, 19 nt, Homo sapiens
  misc_RNA (1)...(19): siRNA sense strand
gaagacgcgauccacaaau

SEQ ID NO: 315316 - RNA, 19 nt, Homo sapiens
  misc_RNA (1)...(19): siRNA sense strand
ucgccucccuuacgcuuaa

SEQ ID NO: 315317 - RNA, 19 nt, Homo sapiens
  misc_RNA (1)...(19): siRNA sense strand
caaggcccacuuugauaaa

SEQ ID NO: 315318 - RNA, 19 nt, Homo sapiens
  misc_RNA (1)...(19): siRNA sense strand
aauucuggauggcauuuaa

SEQ ID NO: 315319 - RNA, 19 nt, Homo sapiens
  misc_RNA (1)...(19): siRNA sense strand
ggaauucuggauggcauuu

SEQ ID NO: 315320 - RNA, 19 nt, Homo sapiens
  misc_RNA (1)...(19): siRNA sense strand
gaauucuggauggcauuua

SEQ ID NO: 315321 - RNA, 19 nt, Homo sapiens
  misc_RNA (1)...(19): siRNA sense strand
gcaggaggaguguaguuuc

SEQ ID NO: 315322 - RNA, 19 nt, Homo sapiens
  misc_RNA (1)...(19): siRNA sense strand
cugggcugcuucauugaua

SEQ ID NO: 315323 - RNA, 19 nt, Homo sapiens
  misc_RNA (1)...(19): siRNA sense strand
guuccaggcucucaguaca

SEQ ID NO: 315324 - RNA, 19 nt, Homo sapiens
  misc_RNA (1)...(19): siRNA sense strand
gaggaacuugaguauguuu

SEQ ID NO: 315325 - RNA, 19 nt, Homo sapiens
  misc_RNA (1)...(19): siRNA sense strand
gggaguacauccugauucc

SEQ ID NO: 315326 - RNA, 19 nt, Homo sapiens
  misc_RNA (1)...(19): siRNA sense strand
guuugaggaugcagacuuc

SEQ ID NO: 315327 - RNA, 19 nt, Homo sapiens
  misc_RNA (1)...(19): siRNA sense strand
acuacggacugcacugaaa

SEQ ID NO: 315328 - RNA, 19 nt, Homo sapiens
  misc_RNA (1)...(19): siRNA sense strand
ggaacuugaguauguuuua

SEQ ID NO: 315329 - RNA, 19 nt, Homo sapiens
  misc_RNA (1)...(19): siRNA sense strand
gacgaacaccugaacaaag

SEQ ID NO: 315330 - RNA, 19 nt, Homo sapiens
  misc_RNA (1)...(19): siRNA sense strand
cuagagaaggcuuugaaga

SEQ ID NO: 315331 - RNA, 19 nt, Homo sapiens
  misc_RNA (1)...(19): siRNA sense strand
ugagugcccugacaaagac

SEQ ID NO: 315332 - RNA, 19 nt, Homo sapiens
  misc_RNA (1)...(19): siRNA sense strand
cagagaggcacccuguuug

SEQ ID NO: 315333 - RNA, 19 nt, Homo sapiens
  misc_RNA (1)...(19): siRNA sense strand
cggacgccguuuggucuua

SEQ ID NO: 315334 - RNA, 19 nt, Homo sapiens
  misc_RNA (1)...(19): siRNA sense strand
uagagaaggcuuugaagag

SEQ ID NO: 315335 - RNA, 19 nt, Homo sapiens
  misc_RNA (1)...(19): siRNA sense strand
cagcaauuccucccuguuc

SEQ ID NO: 315336 - RNA, 19 nt, Homo sapiens
  misc_RNA (1)...(19): siRNA sense strand
gaguucauucaucucaaua

SEQ ID NO: 315337 - RNA, 19 nt, Homo sapiens
  misc_RNA (1)...(19): siRNA sense strand
gcagaggaacuugaguaug

SEQ ID NO: 315338 - RNA, 19 nt, Homo sapiens
  misc_RNA (1)...(19): siRNA sense strand
ucacacugcucuggaugau

SEQ ID NO: 315339 - RNA, 19 nt, Homo sapiens
  misc_RNA (1)...(19): siRNA sense strand
aacaaggaguucauucauc

SEQ ID NO: 315340 - RNA, 19 nt, Homo sapiens
  misc_RNA (1)...(19): siRNA sense strand
ugacagcagaggaacuuga

SEQ ID NO: 315341 - RNA, 19 nt, Homo sapiens
  misc_RNA (1)...(19): siRNA sense strand
agacgaacaccugaacaaa

SEQ ID NO: 315342 - RNA, 19 nt, Homo sapiens
  misc_RNA (1)...(19): siRNA sense strand
agaaggaaacucaagagau

SEQ ID NO: 315343 - RNA, 19 nt, Homo sapiens
  misc_RNA (1)...(19): siRNA sense strand
ggcaggaggaguguaguuu

SEQ ID NO: 315344 - RNA, 19 nt, Homo sapiens
  misc_RNA (1)...(19): siRNA sense strand
agagaggcacccuguuuga

SEQ ID NO: 315345 - RNA, 19 nt, Homo sapiens
  misc_RNA (1)...(19): siRNA sense strand
ucaaaguguucugggacaa

SEQ ID NO: 315346 - RNA, 19 nt, Homo sapiens
  misc_RNA (1)...(19): siRNA sense strand
gauauggauggaaauguag

SEQ ID NO: 315347 - RNA, 19 nt, Homo sapiens
  misc_RNA (1)...(19): siRNA sense strand
cccgggauauggauggaaa

SEQ ID NO: 315348 - RNA, 19 nt, Homo sapiens
  misc_RNA (1)...(19): siRNA sense strand
caaagacgaacaccugaac

SEQ ID NO: 315349 - RNA, 19 nt, Homo sapiens
  misc_RNA (1)...(19): siRNA sense strand
cuaaaugggagcuaugaag

SEQ ID NO: 315350 - RNA, 19 nt, Homo sapiens
  misc_RNA (1)...(19): siRNA sense strand
agaggaacuugaguauguu

SEQ ID NO: 315351 - RNA, 19 nt, Homo sapiens
  misc_RNA (1)...(19): siRNA sense strand
ggugacagcagaggaacuu

SEQ ID NO: 315352 - RNA, 19 nt, Homo sapiens
  misc_RNA (1)...(19): siRNA sense strand
aacgggaauugaccaggua

SEQ ID NO: 315353 - RNA, 19 nt, Homo sapiens
  misc_RNA (1)...(19): siRNA sense strand
uaagggucaugccuacagu

SEQ ID NO: 315354 - RNA, 19 nt, Homo sapiens
  misc_RNA (1)...(19): siRNA sense strand
ccagaagugcugcagaauc

SEQ ID NO: 315355 - RNA, 19 nt, Homo sapiens
  misc_RNA (1)...(19): siRNA sense strand
gaagauggaucauuuauug

SEQ ID NO: 315356 - RNA, 19 nt, Homo sapiens
  misc_RNA (1)...(19): siRNA sense strand
gaagauggcaggauaauua

SEQ ID NO: 315357 - RNA, 19 nt, Homo sapiens
  misc_RNA (1)...(19): siRNA sense strand
ggagaagccuuugaaauua

SEQ ID NO: 315358 - RNA, 19 nt, Homo sapiens
  misc_RNA (1)...(19): siRNA sense strand
gcacauaucucacuuucaa

SEQ ID NO: 315359 - RNA, 19 nt, Homo sapiens
  misc_RNA (1)...(19): siRNA sense strand
gaagaggacuaaucguaua

SEQ ID NO: 315360 - RNA, 19 nt, Homo sapiens
  misc_RNA (1)...(19): siRNA sense strand
gagagaauaugcugguuua

SEQ ID NO: 315361 - RNA, 19 nt, Homo sapiens
  misc_RNA (1)...(19): siRNA sense strand
ggacuaaucguauaucuaa

SEQ ID NO: 315362 - RNA, 19 nt, Homo sapiens
  misc_RNA (1)...(19): siRNA sense strand
gaaauaccaucuucaguuc

SEQ ID NO: 315363 - RNA, 19 nt, Homo sapiens
  misc_RNA (1)...(19): siRNA sense strand
gaagauaucaggaguaaau

SEQ ID NO: 315364 - RNA, 19 nt, Homo sapiens
  misc_RNA (1)...(19): siRNA sense strand
cgaacaagaugaaagagua

SEQ ID NO: 315365 - RNA, 19 nt, Homo sapiens
  misc_RNA (1)...(19): siRNA sense strand
gagaagccuuugaaauuaa

SEQ ID NO: 315366 - RNA, 19 nt, Homo sapiens
  misc_RNA (1)...(19): siRNA sense strand
gaacagccacucacgauuu

SEQ ID NO: 315367 - RNA, 19 nt, Homo sapiens
  misc_RNA (1)...(19): siRNA sense strand
gaauagagguggaaaguac

SEQ ID NO: 315368 - RNA, 19 nt, Homo sapiens
  misc_RNA (1)...(19): siRNA sense strand
gaccacaacagcaauauua

SEQ ID NO: 315369 - RNA, 19 nt, Homo sapiens
  misc_RNA (1)...(19): siRNA sense strand
gccgggagcugaacauaua

SEQ ID NO: 315370 - RNA, 19 nt, Homo sapiens
  misc_RNA (1)...(19): siRNA sense strand
gaggaaagcuccaccuuag

SEQ ID NO: 315371 - RNA, 19 nt, Homo sapiens
  misc_RNA (1)...(19): siRNA sense strand
gaaagugagccuuauauau

SEQ ID NO: 315372 - RNA, 19 nt, Homo sapiens
  misc_RNA (1)...(19): siRNA sense strand
gcgaguauauuguugaauu

SEQ ID NO: 315373 - RNA, 19 nt, Homo sapiens
  misc_RNA (1)...(19): siRNA sense strand
ggcagugagucuucaauua

SEQ ID NO: 315374 - RNA, 19 nt, Homo sapiens
  misc_RNA (1)...(19): siRNA sense strand
gggacuaccuaagaaauua

SEQ ID NO: 315375 - RNA, 19 nt, Homo sapiens
  misc_RNA (1)...(19): siRNA sense strand
agacagugcugccgauaua

SEQ ID NO: 315376 - RNA, 19 nt, Homo sapiens
  misc_RNA (1)...(19): siRNA sense strand
gaagggaucuguugaaagc

SEQ ID NO: 315377 - RNA, 19 nt, Homo sapiens
  misc_RNA (1)...(19): siRNA sense strand
gggaagauaucaggaguaa

SEQ ID NO: 315378 - RNA, 19 nt, Homo sapiens
  misc_RNA (1)...(19): siRNA sense strand
gagaagggaucuguugaaa

SEQ ID NO: 315379 - RNA, 19 nt, Homo sapiens
  misc_RNA (1)...(19): siRNA sense strand
gcaauggcaucuuguuaug

SEQ ID NO: 315380 - RNA, 19 nt, Homo sapiens
  misc_RNA (1)...(19): siRNA sense strand
aaacuuaacuggcuaucuu

SEQ ID NO: 315381 - RNA, 19 nt, Homo sapiens
  misc_RNA (1)...(19): siRNA sense strand
gaagaacacaucccaaaga

SEQ ID NO: 315382 - RNA, 19 nt, Homo sapiens
  misc_RNA (1)...(19): siRNA sense strand
gguggaaaguacucaguua

SEQ ID NO: 315383 - RNA, 19 nt, Homo sapiens
  misc_RNA (1)...(19): siRNA sense strand
cuacgagauuggagaauua

SEQ ID NO: 315384 - RNA, 19 nt, Homo sapiens
  misc_RNA (1)...(19): siRNA sense strand
gaacacaucccaaagaagu

SEQ ID NO: 315385 - RNA, 19 nt, Homo sapiens
  misc_RNA (1)...(19): siRNA sense strand
guacagugcuuucuuacau

SEQ ID NO: 315386 - RNA, 19 nt, Homo sapiens
  misc_RNA (1)...(19): siRNA sense strand
ggacugaugugugcgauug

SEQ ID NO: 315387 - RNA, 19 nt, Homo sapiens
  misc_RNA (1)...(19): siRNA sense strand
gagaauaugcugguuuaua

SEQ ID NO: 315388 - RNA, 19 nt, Homo sapiens
  misc_RNA (1)...(19): siRNA sense strand
caaagaaacucuggaaugg

SEQ ID NO: 315389 - RNA, 19 nt, Homo sapiens
  misc_RNA (1)...(19): siRNA sense strand
caacagaaccaccgaagaa

SEQ ID NO: 315390 - RNA, 19 nt, Homo sapiens
  misc_RNA (1)...(19): siRNA sense strand
gaugaaagaguauacauga

SEQ ID NO: 315391 - RNA, 19 nt, Homo sapiens
  misc_RNA (1)...(19): siRNA sense strand
gaugaaaccuuuggugaau

SEQ ID NO: 315392 - RNA, 19 nt, Homo sapiens
  misc_RNA (1)...(19): siRNA sense strand
ggauguccguccauugaua

SEQ ID NO: 315393 - RNA, 19 nt, Homo sapiens
  misc_RNA (1)...(19): siRNA sense strand
caaaauugguggugacuua

SEQ ID NO: 315394 - RNA, 19 nt, Homo sapiens
  misc_RNA (1)...(19): siRNA sense strand
acucaaggcugguuuauug

SEQ ID NO: 315395 - RNA, 19 nt, Homo sapiens
  misc_RNA (1)...(19): siRNA sense strand
gaagugaacauucuaagau

SEQ ID NO: 315396 - RNA, 19 nt, Homo sapiens
  misc_RNA (1)...(19): siRNA sense strand
aaagggagaucuauacuuc

SEQ ID NO: 315397 - RNA, 19 nt, Homo sapiens
  misc_RNA (1)...(19): siRNA sense strand
gaacuauccuugccaaugc

SEQ ID NO: 315398 - RNA, 19 nt, Homo sapiens
  misc_RNA (1)...(19): siRNA sense strand
gcaagacuuugaagauaga

SEQ ID NO: 315399 - RNA, 19 nt, Homo sapiens
  misc_RNA (1)...(19): siRNA sense strand
gaaaguacucaguuaaaga

SEQ ID NO: 315400 - RNA, 19 nt, Homo sapiens
  misc_RNA (1)...(19): siRNA sense strand
cacagaagauggcaggaua

SEQ ID NO: 315401 - RNA, 19 nt, Homo sapiens
  misc_RNA (1)...(19): siRNA sense strand
cagugaagauggaucauuu

SEQ ID NO: 315402 - RNA, 19 nt, Homo sapiens
  misc_RNA (1)...(19): siRNA sense strand
ggaaaguacucaguuaaag

SEQ ID NO: 315403 - RNA, 19 nt, Homo sapiens
  misc_RNA (1)...(19): siRNA sense strand
gaccauaucuaauguaacu

SEQ ID NO: 315404 - RNA, 19 nt, Homo sapiens
  misc_RNA (1)...(19): siRNA sense strand
ggagggagauccaauuguc

SEQ ID NO: 315405 - RNA, 19 nt, Homo sapiens
  misc_RNA (1)...(19): siRNA sense strand
ccacaguuaucuuaccuuu

SEQ ID NO: 315406 - RNA, 19 nt, Homo sapiens
  misc_RNA (1)...(19): siRNA sense strand
gaacaauucaggaacauuc

SEQ ID NO: 315407 - RNA, 19 nt, Homo sapiens
  misc_RNA (1)...(19): siRNA sense strand
ggacaaagaaacucuggaa

SEQ ID NO: 315408 - RNA, 19 nt, Homo sapiens
  misc_RNA (1)...(19): siRNA sense strand
caaauugaaugugaagcua

SEQ ID NO: 315409 - RNA, 19 nt, Homo sapiens
  misc_RNA (1)...(19): siRNA sense strand
ggagaagggaguaaaggua

SEQ ID NO: 315410 - RNA, 19 nt, Homo sapiens
  misc_RNA (1)...(19): siRNA sense strand
uaacagucuuagccuauaa

SEQ ID NO: 315411 - RNA, 19 nt, Homo sapiens
  misc_RNA (1)...(19): siRNA sense strand
gaaaaccacaguuaucuua

SEQ ID NO: 315412 - RNA, 19 nt, Homo sapiens
  misc_RNA (1)...(19): siRNA sense strand
cgauauaacucaaguaacu

SEQ ID NO: 315413 - RNA, 19 nt, Homo sapiens
  misc_RNA (1)...(19): siRNA sense strand
ggagcuaauuugaccauau

SEQ ID NO: 315414 - RNA, 19 nt, Homo sapiens
  misc_RNA (1)...(19): siRNA sense strand
gaagguggaagaagugaaa

SEQ ID NO: 315415 - RNA, 19 nt, Homo sapiens
  misc_RNA (1)...(19): siRNA sense strand
ggucaacaguuccaaagga

SEQ ID NO: 315416 - RNA, 19 nt, Homo sapiens
  misc_RNA (1)...(19): siRNA sense strand
gaugacgccugcugucuau

SEQ ID NO: 315417 - RNA, 19 nt, Homo sapiens
  misc_RNA (1)...(19): siRNA sense strand
ggaaagaaaaccacaguua

SEQ ID NO: 315418 - RNA, 19 nt, Homo sapiens
  misc_RNA (1)...(19): siRNA sense strand
ggaagaggacuaaucguau

SEQ ID NO: 315419 - RNA, 19 nt, Homo sapiens
  misc_RNA (1)...(19): siRNA sense strand
ucaaaagacucacccaaua

SEQ ID NO: 315420 - RNA, 19 nt, Homo sapiens
  misc_RNA (1)...(19): siRNA sense strand
ugaaauccauggagcagaa

SEQ ID NO: 315421 - RNA, 19 nt, Homo sapiens
  misc_RNA (1)...(19): siRNA sense strand
caaauuccaucaagcaaag

SEQ ID NO: 315422 - RNA, 19 nt, Homo sapiens
  misc_RNA (1)...(19): siRNA sense strand
gagcuaauuugaccauauc

SEQ ID NO: 315423 - RNA, 19 nt, Homo sapiens
  misc_RNA (1)...(19): siRNA sense strand
uggagaagccuuugaaauu

SEQ ID NO: 315424 - RNA, 19 nt, Homo sapiens
  misc_RNA (1)...(19): siRNA sense strand
uaaggacuauuguacagaa

SEQ ID NO: 315425 - RNA, 19 nt, Homo sapiens
  misc_RNA (1)...(19): siRNA sense strand
ggaaagcuccaccuuagga

SEQ ID NO: 315426 - RNA, 19 nt, Homo sapiens
  misc_RNA (1)...(19): siRNA sense strand
uggcaagacuuugaagaua

SEQ ID NO: 315427 - RNA, 19 nt, Homo sapiens
  misc_RNA (1)...(19): siRNA sense strand
uaaaggaaauccagaacca

SEQ ID NO: 315428 - RNA, 19 nt, Homo sapiens
  misc_RNA (1)...(19): siRNA sense strand
gagcugguccugaaaguga

SEQ ID NO: 315429 - RNA, 19 nt, Homo sapiens
  misc_RNA (1)...(19): siRNA sense strand
aagaaacucuggaaugguu

SEQ ID NO: 315430 - RNA, 19 nt, Homo sapiens
  misc_RNA (1)...(19): siRNA sense strand
gggaggaacugaccagagu

SEQ ID NO: 315431 - RNA, 19 nt, Homo sapiens
  misc_RNA (1)...(19): siRNA sense strand
gggaaucgcuaugucagaa

SEQ ID NO: 315432 - RNA, 19 nt, Homo sapiens
  misc_RNA (1)...(19): siRNA sense strand
guuuaaagcaugcuaauga

SEQ ID NO: 315433 - RNA, 19 nt, Homo sapiens
  misc_RNA (1)...(19): siRNA sense strand
caacuaccaaguacaaauu

SEQ ID NO: 315434 - RNA, 19 nt, Homo sapiens
  misc_RNA (1)...(19): siRNA sense strand
gcaaauuccaucaagcaaa

SEQ ID NO: 315435 - RNA, 19 nt, Homo sapiens
  misc_RNA (1)...(19): siRNA sense strand
uuaccaaccuucaaccaaa

SEQ ID NO: 315436 - RNA, 19 nt, Homo sapiens
  misc_RNA (1)...(19): siRNA sense strand
ggucauagccgugaacgaa

SEQ ID NO: 315437 - RNA, 19 nt, Homo sapiens
  misc_RNA (1)...(19): siRNA sense strand
gaaucgcuaugucagaaga

SEQ ID NO: 315438 - RNA, 19 nt, Homo sapiens
  misc_RNA (1)...(19): siRNA sense strand
acauauaguucgccuaaug

SEQ ID NO: 315439 - RNA, 19 nt, Homo sapiens
  misc_RNA (1)...(19): siRNA sense strand
gaaugcaacuaccaaguac

SEQ ID NO: 315440 - RNA, 19 nt, Homo sapiens
  misc_RNA (1)...(19): siRNA sense strand
ucagauaaauugguggaaa

SEQ ID NO: 315441 - RNA, 19 nt, Homo sapiens
  misc_RNA (1)...(19): siRNA sense strand
caauugaaauaccaucuuc

SEQ ID NO: 315442 - RNA, 19 nt, Homo sapiens
  misc_RNA (1)...(19): siRNA sense strand
ugaaauuaauggcacagaa

SEQ ID NO: 315443 - RNA, 19 nt, Homo sapiens
  misc_RNA (1)...(19): siRNA sense strand
caaaucauacugcugugua

SEQ ID NO: 315444 - RNA, 19 nt, Homo sapiens
  misc_RNA (1)...(19): siRNA sense strand
gaaccucaacccacaauca

SEQ ID NO: 315445 - RNA, 19 nt, Homo sapiens
  misc_RNA (1)...(19): siRNA sense strand
gggcacauaucucacuuuc

SEQ ID NO: 315446 - RNA, 19 nt, Homo sapiens
  misc_RNA (1)...(19): siRNA sense strand
ggagagaauaugcugguuu

SEQ ID NO: 315447 - RNA, 19 nt, Homo sapiens
  misc_RNA (1)...(19): siRNA sense strand
ucaaacaccagaaggagua

SEQ ID NO: 315448 - RNA, 19 nt, Homo sapiens
  misc_RNA (1)...(19): siRNA sense strand
uuagaugccuuuagugaau

SEQ ID NO: 315449 - RNA, 19 nt, Homo sapiens
  misc_RNA (1)...(19): siRNA sense strand
aagaacacaucccaaagaa

SEQ ID NO: 315450 - RNA, 19 nt, Homo sapiens
  misc_RNA (1)...(19): siRNA sense strand
gagggcaggcgguaucaua

SEQ ID NO: 315451 - RNA, 19 nt, Homo sapiens
  misc_RNA (1)...(19): siRNA sense strand
uagaacacaucgaacaaga

SEQ ID NO: 315452 - RNA, 19 nt, Homo sapiens
  misc_RNA (1)...(19): siRNA sense strand
ugaaugcaacuaccaagua

SEQ ID NO: 315453 - RNA, 19 nt, Homo sapiens
  misc_RNA (1)...(19): siRNA sense strand
gacaagagggagagaauau

SEQ ID NO: 315454 - RNA, 19 nt, Homo sapiens
  misc_RNA (1)...(19): siRNA sense strand
guaaagguaucgggaagau

SEQ ID NO: 315455 - RNA, 19 nt, Homo sapiens
  misc_RNA (1)...(19): siRNA sense strand
ugacaaaccuuucuacaua

SEQ ID NO: 315456 - RNA, 19 nt, Homo sapiens
  misc_RNA (1)...(19): siRNA sense strand
ggaaucauuugccuuauua

SEQ ID NO: 315457 - RNA, 19 nt, Homo sapiens
  misc_RNA (1)...(19): siRNA sense strand
caagaugacuuuaacaaug

SEQ ID NO: 315458 - RNA, 19 nt, Homo sapiens
  misc_RNA (1)...(19): siRNA sense strand
gaucgaaaguugcugguuu

SEQ ID NO: 315459 - RNA, 19 nt, Homo sapiens
  misc_RNA (1)...(19): siRNA sense strand
gaggaauuaucacgucuua

SEQ ID NO: 315460 - RNA, 19 nt, Homo sapiens
  misc_RNA (1)...(19): siRNA sense strand
gaagaggaauugacccuau

SEQ ID NO: 315461 - RNA, 19 nt, Homo sapiens
  misc_RNA (1)...(19): siRNA sense strand
gcuacaagcuaugaaauaa

SEQ ID NO: 315462 - RNA, 19 nt, Homo sapiens
  misc_RNA (1)...(19): siRNA sense strand
ggaauuuacucgagguauu

SEQ ID NO: 315463 - RNA, 19 nt, Homo sapiens
  misc_RNA (1)...(19): siRNA sense strand
gcaauggguuugauaggaa

SEQ ID NO: 315464 - RNA, 19 nt, Homo sapiens
  misc_RNA (1)...(19): siRNA sense strand
gacaaaccuuucuacauaa

SEQ ID NO: 315465 - RNA, 19 nt, Homo sapiens
  misc_RNA (1)...(19): siRNA sense strand
gaugaaugcuccaaggaaa

SEQ ID NO: 315466 - RNA, 19 nt, Homo sapiens
  misc_RNA (1)...(19): siRNA sense strand
caugaaagccacagaauuu

SEQ ID NO: 315467 - RNA, 19 nt, Homo sapiens
  misc_RNA (1)...(19): siRNA sense strand
gaaaugaggaggagcgaaa

SEQ ID NO: 315468 - RNA, 19 nt, Homo sapiens
  misc_RNA (1)...(19): siRNA sense strand
gcaacugcaucaauaaugu

SEQ ID NO: 315469 - RNA, 19 nt, Homo sapiens
  misc_RNA (1)...(19): siRNA sense strand
caccacagcuuucccauga

SEQ ID NO: 315470 - RNA, 19 nt, Homo sapiens
  misc_RNA (1)...(19): siRNA sense strand
gaaaggauuugaggugguu

SEQ ID NO: 315471 - RNA, 19 nt, Homo sapiens
  misc_RNA (1)...(19): siRNA sense strand
gaguacagcuucaagacaa

SEQ ID NO: 315472 - RNA, 19 nt, Homo sapiens
  misc_RNA (1)...(19): siRNA sense strand
aaccucaucucaaacauua

SEQ ID NO: 315473 - RNA, 19 nt, Homo sapiens
  misc_RNA (1)...(19): siRNA sense strand
gcaauacgagcaauggaua

SEQ ID NO: 315474 - RNA, 19 nt, Homo sapiens
  misc_RNA (1)...(19): siRNA sense strand
aaacagacaucagcauuug

SEQ ID NO: 315475 - RNA, 19 nt, Homo sapiens
  misc_RNA (1)...(19): siRNA sense strand
acaacaagccgcagaauuu

SEQ ID NO: 315476 - RNA, 19 nt, Homo sapiens
  misc_RNA (1)...(19): siRNA sense strand
aaagagagcagacaagaaa

SEQ ID NO: 315477 - RNA, 19 nt, Homo sapiens
  misc_RNA (1)...(19): siRNA sense strand
caaauuaacagcaaugaug

SEQ ID NO: 315478 - RNA, 19 nt, Homo sapiens
  misc_RNA (1)...(19): siRNA sense strand
ggaaaucaguaggcagaaa

SEQ ID NO: 315479 - RNA, 19 nt, Homo sapiens
  misc_RNA (1)...(19): siRNA sense strand
gaaagagaauggaacaaaa

SEQ ID NO: 315480 - RNA, 19 nt, Homo sapiens
  misc_RNA (1)...(19): siRNA sense strand
ugacaaaguggucuguuua

SEQ ID NO: 315481 - RNA, 19 nt, Homo sapiens
  misc_RNA (1)...(19): siRNA sense strand
gaauauccaagaugacuuu

SEQ ID NO: 315482 - RNA, 19 nt, Homo sapiens
  misc_RNA (1)...(19): siRNA sense strand
ccaagaagcaccaaaccua

SEQ ID NO: 315483 - RNA, 19 nt, Homo sapiens
  misc_RNA (1)...(19): siRNA sense strand
gaaagagacagccuccauu

SEQ ID NO: 315484 - RNA, 19 nt, Homo sapiens
  misc_RNA (1)...(19): siRNA sense strand
ggacuuacacccugaacaa

SEQ ID NO: 315485 - RNA, 19 nt, Homo sapiens
  misc_RNA (1)...(19): siRNA sense strand
ccacauggaaagcuaauaa

SEQ ID NO: 315486 - RNA, 19 nt, Homo sapiens
  misc_RNA (1)...(19): siRNA sense strand
ggaauuaucacgucuuaca

SEQ ID NO: 315487 - RNA, 19 nt, Homo sapiens
  misc_RNA (1)...(19): siRNA sense strand
ccuacugaaugauaacuua

SEQ ID NO: 315488 - RNA, 19 nt, Homo sapiens
  misc_RNA (1)...(19): siRNA sense strand
guucagggcuuaagaaagg

SEQ ID NO: 315489 - RNA, 19 nt, Homo sapiens
  misc_RNA (1)...(19): siRNA sense strand
gaauugacccuaucuugga

SEQ ID NO: 315490 - RNA, 19 nt, Homo sapiens
  misc_RNA (1)...(19): siRNA sense strand
gaacaauacccaucauucu

SEQ ID NO: 315491 - RNA, 19 nt, Homo sapiens
  misc_RNA (1)...(19): siRNA sense strand
caacgacacuauguuucua

SEQ ID NO: 315492 - RNA, 19 nt, Homo sapiens
  misc_RNA (1)...(19): siRNA sense strand
cagcagugguucaacaauu

SEQ ID NO: 315493 - RNA, 19 nt, Homo sapiens
  misc_RNA (1)...(19): siRNA sense strand
gcaccuuuaucuacaauag

SEQ ID NO: 315494 - RNA, 19 nt, Homo sapiens
  misc_RNA (1)...(19): siRNA sense strand
caaucacucucccagcaua

SEQ ID NO: 315495 - RNA, 19 nt, Homo sapiens
  misc_RNA (1)...(19): siRNA sense strand
cagcggagaugauaagcuu

SEQ ID NO: 315496 - RNA, 19 nt, Homo sapiens
  misc_RNA (1)...(19): siRNA sense strand
uaacagcaaugaugaucga

SEQ ID NO: 315497 - RNA, 19 nt, Homo sapiens
  misc_RNA (1)...(19): siRNA sense strand
gugacaaaguggucuguuu

SEQ ID NO: 315498 - RNA, 19 nt, Homo sapiens
  misc_RNA (1)...(19): siRNA sense strand
cauagugacugacugguau

SEQ ID NO: 315499 - RNA, 19 nt, Homo sapiens
  misc_RNA (1)...(19): siRNA sense strand
gaaagccacagaauuuaug

SEQ ID NO: 315500 - RNA, 19 nt, Homo sapiens
  misc_RNA (1)...(19): siRNA sense strand
gaauuuacucgagguauuu

SEQ ID NO: 315501 - RNA, 19 nt, Homo sapiens
  misc_RNA (1)...(19): siRNA sense strand
gcuuauggcucugugauga

SEQ ID NO: 315502 - RNA, 19 nt, Homo sapiens
  misc_RNA (1)...(19): siRNA sense strand
cuaauuuccuacugaauga

SEQ ID NO: 315503 - RNA, 19 nt, Homo sapiens
  misc_RNA (1)...(19): siRNA sense strand
caaugaugaucgaaaguug

SEQ ID NO: 315504 - RNA, 19 nt, Homo sapiens
  misc_RNA (1)...(19): siRNA sense strand
ccacagaauuuauguugca

SEQ ID NO: 315505 - RNA, 19 nt, Homo sapiens
  misc_RNA (1)...(19): siRNA sense strand
ucagggagauauuuacguu

SEQ ID NO: 315506 - RNA, 19 nt, Homo sapiens
  misc_RNA (1)...(19): siRNA sense strand
uacagaauauccaagauga

SEQ ID NO: 315507 - RNA, 19 nt, Homo sapiens
  misc_RNA (1)...(19): siRNA sense strand
ugucaaaccucaccaucaa

SEQ ID NO: 315508 - RNA, 19 nt, Homo sapiens
  misc_RNA (1)...(19): siRNA sense strand
gaugcagauuguugaaauu

SEQ ID NO: 315509 - RNA, 19 nt, Homo sapiens
  misc_RNA (1)...(19): siRNA sense strand
gagcagacaagaaagagaa

SEQ ID NO: 315510 - RNA, 19 nt, Homo sapiens
  misc_RNA (1)...(19): siRNA sense strand
guucuuuguuccagauaua

SEQ ID NO: 315511 - RNA, 19 nt, Homo sapiens
  misc_RNA (1)...(19): siRNA sense strand
gacaauggguauaauggau

SEQ ID NO: 315512 - RNA, 19 nt, Homo sapiens
  misc_RNA (1)...(19): siRNA sense strand
gaauuuauguugcaauacg

SEQ ID NO: 315513 - RNA, 19 nt, Homo sapiens
  misc_RNA (1)...(19): siRNA sense strand
gggcaacgacacuauguuu

SEQ ID NO: 315514 - RNA, 19 nt, Homo sapiens
  misc_RNA (1)...(19): siRNA sense strand
uacaggagguuuaaaguuc

SEQ ID NO: 315515 - RNA, 19 nt, Homo sapiens
  misc_RNA (1)...(19): siRNA sense strand
gagcccagcuacaccaaau

SEQ ID NO: 315516 - RNA, 19 nt, Homo sapiens
  misc_RNA (1)...(19): siRNA sense strand
uaucuucugugguugaauu

SEQ ID NO: 315517 - RNA, 19 nt, Homo sapiens
  misc_RNA (1)...(19): siRNA sense strand
gaaccucaucucaaacauu

SEQ ID NO: 315518 - RNA, 19 nt, Homo sapiens
  misc_RNA (1)...(19): siRNA sense strand
gaaaucaguaggcagaaau

SEQ ID NO: 315519 - RNA, 19 nt, Homo sapiens
  misc_RNA (1)...(19): siRNA sense strand
ggaugcaccuuuaucuaca

SEQ ID NO: 315520 - RNA, 19 nt, Homo sapiens
  misc_RNA (1)...(19): siRNA sense strand
ggacagcaccuggagaaga

SEQ ID NO: 315521 - RNA, 19 nt, Homo sapiens
  misc_RNA (1)...(19): siRNA sense strand
gcccagcuacaccaaauua

SEQ ID NO: 315522 - RNA, 19 nt, Homo sapiens
  misc_RNA (1)...(19): siRNA sense strand
ugacagacuccuucaacua

SEQ ID NO: 315523 - RNA, 19 nt, Homo sapiens
  misc_RNA (1)...(19): siRNA sense strand
ccacagcuuucccaugaau

SEQ ID NO: 315524 - RNA, 19 nt, Homo sapiens
  misc_RNA (1)...(19): siRNA sense strand
cuauguauguaccagguua

SEQ ID NO: 315525 - RNA, 19 nt, Homo sapiens
  misc_RNA (1)...(19): siRNA sense strand
gaaagugcaugucaaucac

SEQ ID NO: 315526 - RNA, 19 nt, Homo sapiens
  misc_RNA (1)...(19): siRNA sense strand
gauugaugcuuucaguaga

SEQ ID NO: 315527 - RNA, 19 nt, Homo sapiens
  misc_RNA (1)...(19): siRNA sense strand
gcaaugaugaucgaaaguu

SEQ ID NO: 315528 - RNA, 19 nt, Homo sapiens
  misc_RNA (1)...(19): siRNA sense strand
gcucagcagugguucaaca

SEQ ID NO: 315529 - RNA, 19 nt, Homo sapiens
  misc_RNA (1)...(19): siRNA sense strand
ccuggaagcuguaaaagua

SEQ ID NO: 315530 - RNA, 19 nt, Homo sapiens
  misc_RNA (1)...(19): siRNA sense strand
ggagucaugcuauguaugu

SEQ ID NO: 315531 - RNA, 19 nt, Homo sapiens
  misc_RNA (1)...(19): siRNA sense strand
aaagagacagccuccauuu

SEQ ID NO: 315532 - RNA, 19 nt, Homo sapiens
  misc_RNA (1)...(19): siRNA sense strand
aaaggcaaaugucauagug

SEQ ID NO: 315533 - RNA, 19 nt, Homo sapiens
  misc_RNA (1)...(19): siRNA sense strand
ggaaagagacagccuccau

SEQ ID NO: 315534 - RNA, 19 nt, Homo sapiens
  misc_RNA (1)...(19): siRNA sense strand
gcaauugcuuacccacugu

SEQ ID NO: 315535 - RNA, 19 nt, Homo sapiens
  misc_RNA (1)...(19): siRNA sense strand
gaaaugauaacugaagcuu

SEQ ID NO: 315536 - RNA, 19 nt, Homo sapiens
  misc_RNA (1)...(19): siRNA sense strand
acaccuaauuuccuacuga

SEQ ID NO: 315537 - RNA, 19 nt, Homo sapiens
  misc_RNA (1)...(19): siRNA sense strand
gagcauugcagguccuauu

SEQ ID NO: 315538 - RNA, 19 nt, Homo sapiens
  misc_RNA (1)...(19): siRNA sense strand
ugaaagugcaugucaauca

SEQ ID NO: 315539 - RNA, 19 nt, Homo sapiens
  misc_RNA (1)...(19): siRNA sense strand
guagauauagcuugaaagu

SEQ ID NO: 315540 - RNA, 19 nt, Homo sapiens
  misc_RNA (1)...(19): siRNA sense strand
gaugauuuaugccaaugug

SEQ ID NO: 315541 - RNA, 19 nt, Homo sapiens
  misc_RNA (1)...(19): siRNA sense strand
caaaguggucuguuuagug

SEQ ID NO: 315542 - RNA, 19 nt, Homo sapiens
  misc_RNA (1)...(19): siRNA sense strand
uguacaggcuggugacaaa

SEQ ID NO: 315543 - RNA, 19 nt, Homo sapiens
  misc_RNA (1)...(19): siRNA sense strand
gagacuggagauccuguua

SEQ ID NO: 315544 - RNA, 19 nt, Homo sapiens
  misc_RNA (1)...(19): siRNA sense strand
cgaauggaccugaacauca

SEQ ID NO: 315545 - RNA, 19 nt, Homo sapiens
  misc_RNA (1)...(19): siRNA sense strand
caaauuaaagugacaaggu

SEQ ID NO: 315546 - RNA, 19 nt, Homo sapiens
  misc_RNA (1)...(19): siRNA sense strand
uaacagcaauggguuugau

SEQ ID NO: 315547 - RNA, 19 nt, Homo sapiens
  misc_RNA (1)...(19): siRNA sense strand
aaacuccaauagcaugauu

SEQ ID NO: 315548 - RNA, 19 nt, Homo sapiens
  misc_RNA (1)...(19): siRNA sense strand
agaagugcaugggauguaa

SEQ ID NO: 315549 - RNA, 19 nt, Homo sapiens
  misc_RNA (1)...(19): siRNA sense strand
aaguuuaucuucugugguu

SEQ ID NO: 315550 - RNA, 19 nt, Homo sapiens
  misc_RNA (1)...(19): siRNA sense strand
gcucugugaugauauuagu

SEQ ID NO: 315551 - RNA, 19 nt, Homo sapiens
  misc_RNA (1)...(19): siRNA sense strand
gauuugaggugguugaaaa

SEQ ID NO: 315552 - RNA, 19 nt, Homo sapiens
  misc_RNA (1)...(19): siRNA sense strand
ugaugcagauuguugaaau

SEQ ID NO: 315553 - RNA, 19 nt, Homo sapiens
  misc_RNA (1)...(19): siRNA sense strand
caagaaagagaauggaaca

SEQ ID NO: 315554 - RNA, 19 nt, Homo sapiens
  misc_RNA (1)...(19): siRNA sense strand
agaaagagaauggaacaaa

SEQ ID NO: 315555 - RNA, 19 nt, Homo sapiens
  misc_RNA (1)...(19): siRNA sense strand
gaaggaagcagaggagaaa

SEQ ID NO: 315556 - RNA, 19 nt, Homo sapiens
  misc_RNA (1)...(19): siRNA sense strand
aguaugggcugaagaagaa

SEQ ID NO: 315557 - RNA, 19 nt, Homo sapiens
  misc_RNA (1)...(19): siRNA sense strand
uggacacggugcucaaaua

SEQ ID NO: 315558 - RNA, 19 nt, Homo sapiens
  misc_RNA (1)...(19): siRNA sense strand
ggcagcagauccgagauaa

SEQ ID NO: 315559 - RNA, 19 nt, Homo sapiens
  misc_RNA (1)...(19): siRNA sense strand
gcagauccgagauaaguau

SEQ ID NO: 315560 - RNA, 19 nt, Homo sapiens
  misc_RNA (1)...(19): siRNA sense strand
gaagaaggaggagaaggaa

SEQ ID NO: 315561 - RNA, 19 nt, Homo sapiens
  misc_RNA (1)...(19): siRNA sense strand
ggacauguucaagaaguaa

SEQ ID NO: 315562 - RNA, 19 nt, Homo sapiens
  misc_RNA (1)...(19): siRNA sense strand
ugaagaagaaggaggagaa

SEQ ID NO: 315563 - RNA, 19 nt, Homo sapiens
  misc_RNA (1)...(19): siRNA sense strand
ugcaggacauguucaagaa

SEQ ID NO: 315564 - RNA, 19 nt, Homo sapiens
  misc_RNA (1)...(19): siRNA sense strand
caggacauguucaagaagu

SEQ ID NO: 315565 - RNA, 19 nt, Homo sapiens
  misc_RNA (1)...(19): siRNA sense strand
cagcagauccgagauaagu

SEQ ID NO: 315566 - RNA, 19 nt, Homo sapiens
  misc_RNA (1)...(19): siRNA sense strand
agaagaaggaggagaagga

SEQ ID NO: 315567 - RNA, 19 nt, Homo sapiens
  misc_RNA (1)...(19): siRNA sense strand
ggacacggugcucaaauac

SEQ ID NO: 315568 - RNA, 19 nt, Homo sapiens
  misc_RNA (1)...(19): siRNA sense strand
ggacgaggaggaggaggaa

SEQ ID NO: 315569 - RNA, 19 nt, Homo sapiens
  misc_RNA (1)...(19): siRNA sense strand
cggcagcagauccgagaua

SEQ ID NO: 315570 - RNA, 19 nt, Homo sapiens
  misc_RNA (1)...(19): siRNA sense strand
auaaguaugggcugaagaa

SEQ ID NO: 315571 - RNA, 19 nt, Homo sapiens
  misc_RNA (1)...(19): siRNA sense strand
ggaagcagaggagaaagca

SEQ ID NO: 315572 - RNA, 19 nt, Homo sapiens
  misc_RNA (1)...(19): siRNA sense strand
gaagaagaaggaggagaag

SEQ ID NO: 315573 - RNA, 19 nt, Homo sapiens
  misc_RNA (1)...(19): siRNA sense strand
gagauaaguaugggcugaa

SEQ ID NO: 315574 - RNA, 19 nt, Homo sapiens
  misc_RNA (1)...(19): siRNA sense strand
aggacauguucaagaagua

SEQ ID NO: 315575 - RNA, 19 nt, Homo sapiens
  misc_RNA (1)...(19): siRNA sense strand
caaaggacauggggaagau

SEQ ID NO: 315576 - RNA, 19 nt, Homo sapiens
  misc_RNA (1)...(19): siRNA sense strand
gauaaguaugggcugaaga

SEQ ID NO: 315577 - RNA, 19 nt, Homo sapiens
  misc_RNA (1)...(19): siRNA sense strand
acacggugcucaaauaccu

SEQ ID NO: 315578 - RNA, 19 nt, Homo sapiens
  misc_RNA (1)...(19): siRNA sense strand
agaaggaagcagaggagaa

SEQ ID NO: 315579 - RNA, 19 nt, Homo sapiens
  misc_RNA (1)...(19): siRNA sense strand
gaggagaccuugauugaug

SEQ ID NO: 315580 - RNA, 19 nt, Homo sapiens
  misc_RNA (1)...(19): siRNA sense strand
gcaacacucuggcaaaguu

SEQ ID NO: 315581 - RNA, 19 nt, Homo sapiens
  misc_RNA (1)...(19): siRNA sense strand
guuaagaaguuccugaugu

SEQ ID NO: 315582 - RNA, 19 nt, Homo sapiens
  misc_RNA (1)...(19): siRNA sense strand
caacaaggacuccaagaug

SEQ ID NO: 315583 - RNA, 19 nt, Homo sapiens
  misc_RNA (1)...(19): siRNA sense strand
gaagaggagaccuugauug

SEQ ID NO: 315584 - RNA, 19 nt, Homo sapiens
  misc_RNA (1)...(19): siRNA sense strand
agccggagcuccuugguua

SEQ ID NO: 315585 - RNA, 19 nt, Homo sapiens
  misc_RNA (1)...(19): siRNA sense strand
uaagaaguauggaccuguu

SEQ ID NO: 315586 - RNA, 19 nt, Homo sapiens
  misc_RNA (1)...(19): siRNA sense strand
ggauugggcuaagaaguau

SEQ ID NO: 315587 - RNA, 19 nt, Homo sapiens
  misc_RNA (1)...(19): siRNA sense strand
uugguuagcuuaauggaaa

SEQ ID NO: 315588 - RNA, 19 nt, Homo sapiens
  misc_RNA (1)...(19): siRNA sense strand
ucuaagagguaccuggauu

SEQ ID NO: 315589 - RNA, 19 nt, Homo sapiens
  misc_RNA (1)...(19): siRNA sense strand
ggucaacgucuuccacaaa

SEQ ID NO: 315590 - RNA, 19 nt, Homo sapiens
  misc_RNA (1)...(19): siRNA sense strand
ggaagaggagaccuugauu

SEQ ID NO: 315591 - RNA, 19 nt, Homo sapiens
  misc_RNA (1)...(19): siRNA sense strand
cagugaaacuuauguugga

SEQ ID NO: 315592 - RNA, 19 nt, Homo sapiens
  misc_RNA (1)...(19): siRNA sense strand
ugaagguggucauggcaaa

SEQ ID NO: 315593 - RNA, 19 nt, Homo sapiens
  misc_RNA (1)...(19): siRNA sense strand
ggagguuccugccgacauc

SEQ ID NO: 315594 - RNA, 19 nt, Homo sapiens
  misc_RNA (1)...(19): siRNA sense strand
gcggauggacacauacuuu

SEQ ID NO: 315595 - RNA, 19 nt, Homo sapiens
  misc_RNA (1)...(19): siRNA sense strand
cugagucgguuaagaaguu

SEQ ID NO: 315596 - RNA, 19 nt, Homo sapiens
  misc_RNA (1)...(19): siRNA sense strand
ggauggacacauacuuuga

SEQ ID NO: 315597 - RNA, 19 nt, Homo sapiens
  misc_RNA (1)...(19): siRNA sense strand
agagguaccuggauuucga

SEQ ID NO: 315598 - RNA, 19 nt, Homo sapiens
  misc_RNA (1)...(19): siRNA sense strand
aagaggagaccuugauuga

SEQ ID NO: 315599 - RNA, 19 nt, Homo sapiens
  misc_RNA (1)...(19): siRNA sense strand
aacaaggacuccaagaugu

SEQ ID NO: 315600 - RNA, 19 nt, Homo sapiens
  misc_RNA (1)...(19): siRNA sense strand
guucagcaccuaugucaug

SEQ ID NO: 315601 - RNA, 19 nt, Homo sapiens
  misc_RNA (1)...(19): siRNA sense strand
uggauugggcuaagaagua

SEQ ID NO: 315602 - RNA, 19 nt, Homo sapiens
  misc_RNA (1)...(19): siRNA sense strand
uuaagaaguuccugauguc

SEQ ID NO: 315603 - RNA, 19 nt, Homo sapiens
  misc_RNA (1)...(19): siRNA sense strand
aagagucgcugaggcugua

SEQ ID NO: 315604 - RNA, 19 nt, Homo sapiens
  misc_RNA (1)...(19): siRNA sense strand
caaccaaguacaacaagga

SEQ ID NO: 315605 - RNA, 19 nt, Homo sapiens
  misc_RNA (1)...(19): siRNA sense strand
acaaggacuccaagaugua

SEQ ID NO: 315606 - RNA, 19 nt, Homo sapiens
  misc_RNA (1)...(19): siRNA sense strand
uggaaacauucaacgagaa

SEQ ID NO: 315607 - RNA, 19 nt, Homo sapiens
  misc_RNA (1)...(19): siRNA sense strand
caacuucgucaccuucuuc

SEQ ID NO: 315608 - RNA, 19 nt, Homo sapiens
  misc_RNA (1)...(19): siRNA sense strand
ggaaacauucaacgagaag

SEQ ID NO: 315609 - RNA, 19 nt, Homo sapiens
  misc_RNA (1)...(19): siRNA sense strand
gccgugugcuccaagaugu

SEQ ID NO: 315610 - RNA, 19 nt, Homo sapiens
  misc_RNA (1)...(19): siRNA sense strand
ugucccagguccucaaaga

SEQ ID NO: 315611 - RNA, 19 nt, Homo sapiens
  misc_RNA (1)...(19): siRNA sense strand
gaaguauggaccuguugug

SEQ ID NO: 315612 - RNA, 19 nt, Homo sapiens
  misc_RNA (1)...(19): siRNA sense strand
cuaagagguaccuggauuu

SEQ ID NO: 315613 - RNA, 19 nt, Homo sapiens
  misc_RNA (1)...(19): siRNA sense strand
ucauagaccuggccuucag

SEQ ID NO: 315614 - RNA, 19 nt, Homo sapiens
  misc_RNA (1)...(19): siRNA sense strand
ugcaggacaugcugaccua

SEQ ID NO: 315615 - RNA, 19 nt, Homo sapiens
  misc_RNA (1)...(19): siRNA sense strand
uugaggacccgcugacuuu

SEQ ID NO: 315616 - RNA, 19 nt, Homo sapiens
  misc_RNA (1)...(19): siRNA sense strand
cgacauccucacacagauu

SEQ ID NO: 315617 - RNA, 19 nt, Homo sapiens
  misc_RNA (1)...(19): siRNA sense strand
ggacaccuccccugcuuuu

SEQ ID NO: 315618 - RNA, 19 nt, Homo sapiens
  misc_RNA (1)...(19): siRNA sense strand
cugagcagcugguggagau

SEQ ID NO: 315619 - RNA, 19 nt, Homo sapiens
  misc_RNA (1)...(19): siRNA sense strand
guccugagucgguuaagaa

SEQ ID NO: 315620 - RNA, 19 nt, Homo sapiens
  misc_RNA (1)...(19): siRNA sense strand
gccgacauccucacacaga

SEQ ID NO: 315621 - RNA, 19 nt, Homo sapiens
  misc_RNA (1)...(19): siRNA sense strand
ccacaaaaccucagucauc

SEQ ID NO: 315622 - RNA, 19 nt, Homo sapiens
  misc_RNA (1)...(19): siRNA sense strand
agaaguuccugaugucaac

SEQ ID NO: 315623 - RNA, 19 nt, Homo sapiens
  misc_RNA (1)...(19): siRNA sense strand
ccaagccacgguucaccua

SEQ ID NO: 315624 - RNA, 19 nt, Homo sapiens
  misc_RNA (1)...(19): siRNA sense strand
cuucgucaccuucuucauu

SEQ ID NO: 315625 - RNA, 19 nt, Homo sapiens
  misc_RNA (1)...(19): siRNA sense strand
ccgcaacacucuggcaaag

SEQ ID NO: 315626 - RNA, 19 nt, Homo sapiens
  misc_RNA (1)...(19): siRNA sense strand
gaggucauugguucuaaga

SEQ ID NO: 315627 - RNA, 19 nt, Homo sapiens
  misc_RNA (1)...(19): siRNA sense strand
gggucaacgucuuccacaa

SEQ ID NO: 315628 - RNA, 19 nt, Homo sapiens
  misc_RNA (1)...(19): siRNA sense strand
uaagagguaccuggauuuc

SEQ ID NO: 315629 - RNA, 19 nt, Homo sapiens
  misc_RNA (1)...(19): siRNA sense strand
ucccaggcagugaaacuua

SEQ ID NO: 315630 - RNA, 19 nt, Homo sapiens
  misc_RNA (1)...(19): siRNA sense strand
gacuguguuuggugagaga

SEQ ID NO: 315631 - RNA, 19 nt, Homo sapiens
  misc_RNA (1)...(19): siRNA sense strand
ggagcaggccacacucaag

SEQ ID NO: 315632 - RNA, 19 nt, Homo sapiens
  misc_RNA (1)...(19): siRNA sense strand
gcacccaagccacgguuca

SEQ ID NO: 315633 - RNA, 19 nt, Homo sapiens
  misc_RNA (1)...(19): siRNA sense strand
ggcagugaaacuuauguug

SEQ ID NO: 315634 - RNA, 19 nt, Homo sapiens
  misc_RNA (1)...(19): siRNA sense strand
gcuccuugguuagcuuaau

SEQ ID NO: 315635 - RNA, 19 nt, Homo sapiens
  misc_RNA (1)...(19): siRNA sense strand
gaggacccgcugacuuuca

SEQ ID NO: 315636 - RNA, 19 nt, Homo sapiens
  misc_RNA (1)...(19): siRNA sense strand
acgagggucugcuggacaa

SEQ ID NO: 315637 - RNA, 19 nt, Homo sapiens
  misc_RNA (1)...(19): siRNA sense strand
gacauccucacacagauuc

SEQ ID NO: 315638 - RNA, 19 nt, Homo sapiens
  misc_RNA (1)...(19): siRNA sense strand
cccaggcagugaaacuuau

SEQ ID NO: 315639 - RNA, 19 nt, Homo sapiens
  misc_RNA (1)...(19): siRNA sense strand
gcugguggagauucuagaa

SEQ ID NO: 315640 - RNA, 19 nt, Homo sapiens
  misc_RNA (1)...(19): siRNA sense strand
acaacaaggacuccaagau

SEQ ID NO: 315641 - RNA, 19 nt, Homo sapiens
  misc_RNA (1)...(19): siRNA sense strand
uugcucagauggaggugaa

SEQ ID NO: 315642 - RNA, 19 nt, Homo sapiens
  misc_RNA (1)...(19): siRNA sense strand
uucgucaccuucuucauug

SEQ ID NO: 315643 - RNA, 19 nt, Homo sapiens
  misc_RNA (1)...(19): siRNA sense strand
caagcagcggagagucaua

SEQ ID NO: 315644 - RNA, 19 nt, Homo sapiens
  misc_RNA (1)...(19): siRNA sense strand
cagacuguguuuggugaga

SEQ ID NO: 315645 - RNA, 19 nt, Homo sapiens
  misc_RNA (1)...(19): siRNA sense strand
gagcagcugguggagauuc

SEQ ID NO: 315646 - RNA, 19 nt, Homo sapiens
  misc_RNA (1)...(19): siRNA sense strand
gauggacacauacuuugag

SEQ ID NO: 315647 - RNA, 19 nt, Homo sapiens
  misc_RNA (1)...(19): siRNA sense strand
gucaacgucuuccacaaaa

SEQ ID NO: 315648 - RNA, 19 nt, Homo sapiens
  misc_RNA (1)...(19): siRNA sense strand
cggauggacacauacuuug

SEQ ID NO: 315649 - RNA, 19 nt, Homo sapiens
  misc_RNA (1)...(19): siRNA sense strand
gaccucugccaaccacuug

SEQ ID NO: 315650 - RNA, 19 nt, Homo sapiens
  misc_RNA (1)...(19): siRNA sense strand
gcuccagacuguguuuggu

SEQ ID NO: 315651 - RNA, 19 nt, Homo sapiens
  misc_RNA (1)...(19): siRNA sense strand
ucauugguucuaagaggua

SEQ ID NO: 315652 - RNA, 19 nt, Homo sapiens
  misc_RNA (1)...(19): siRNA sense strand
uaagaaguuccugauguca

SEQ ID NO: 315653 - RNA, 19 nt, Homo sapiens
  misc_RNA (1)...(19): siRNA sense strand
ggugaaagcuucucaauau

SEQ ID NO: 315654 - RNA, 19 nt, Homo sapiens
  misc_RNA (1)...(19): siRNA sense strand
gcacagaucuuggauuaaa

SEQ ID NO: 315655 - RNA, 19 nt, Homo sapiens
  misc_RNA (1)...(19): siRNA sense strand
ccaaugaucuggaaauaaa

SEQ ID NO: 315656 - RNA, 19 nt, Homo sapiens
  misc_RNA (1)...(19): siRNA sense strand
cagcagcucuuacuaauaa

SEQ ID NO: 315657 - RNA, 19 nt, Homo sapiens
  misc_RNA (1)...(19): siRNA sense strand
gaaagcuucucaauaugua

SEQ ID NO: 315658 - RNA, 19 nt, Homo sapiens
  misc_RNA (1)...(19): siRNA sense strand
ggaaguaaaugaguuggua

SEQ ID NO: 315659 - RNA, 19 nt, Homo sapiens
  misc_RNA (1)...(19): siRNA sense strand
gaaggccgcugaauucuau

SEQ ID NO: 315660 - RNA, 19 nt, Homo sapiens
  misc_RNA (1)...(19): siRNA sense strand
ccgaagcacuuaacacuua

SEQ ID NO: 315661 - RNA, 19 nt, Homo sapiens
  misc_RNA (1)...(19): siRNA sense strand
uaaaugaguugguagaaga

SEQ ID NO: 315662 - RNA, 19 nt, Homo sapiens
  misc_RNA (1)...(19): siRNA sense strand
gaaaguagcaguaacaaag

SEQ ID NO: 315663 - RNA, 19 nt, Homo sapiens
  misc_RNA (1)...(19): siRNA sense strand
ccaaagccauuaaauucua

SEQ ID NO: 315664 - RNA, 19 nt, Homo sapiens
  misc_RNA (1)...(19): siRNA sense strand
uaaccaagcuguagagauc

SEQ ID NO: 315665 - RNA, 19 nt, Homo sapiens
  misc_RNA (1)...(19): siRNA sense strand
cagcagcuaugcagauaua

SEQ ID NO: 315666 - RNA, 19 nt, Homo sapiens
  misc_RNA (1)...(19): siRNA sense strand
caauaguuguggagacuua

SEQ ID NO: 315667 - RNA, 19 nt, Homo sapiens
  misc_RNA (1)...(19): siRNA sense strand
cugcacagaucuuggauua

SEQ ID NO: 315668 - RNA, 19 nt, Homo sapiens
  misc_RNA (1)...(19): siRNA sense strand
ggacaaaugaaccuuauga

SEQ ID NO: 315669 - RNA, 19 nt, Homo sapiens
  misc_RNA (1)...(19): siRNA sense strand
guacugaagcacuuuauaa

SEQ ID NO: 315670 - RNA, 19 nt, Homo sapiens
  misc_RNA (1)...(19): siRNA sense strand
ggaaauaaacaaagcaguu

SEQ ID NO: 315671 - RNA, 19 nt, Homo sapiens
  misc_RNA (1)...(19): siRNA sense strand
gaugguagcuaguuguuuc

SEQ ID NO: 315672 - RNA, 19 nt, Homo sapiens
  misc_RNA (1)...(19): siRNA sense strand
cuuaguaacugaagcuaua

SEQ ID NO: 315673 - RNA, 19 nt, Homo sapiens
  misc_RNA (1)...(19): siRNA sense strand
gaaacuaaaucggcuagau

SEQ ID NO: 315674 - RNA, 19 nt, Homo sapiens
  misc_RNA (1)...(19): siRNA sense strand
caaagcaguuacauacuug

SEQ ID NO: 315675 - RNA, 19 nt, Homo sapiens
  misc_RNA (1)...(19): siRNA sense strand
gcaggaauauugaaaauga

SEQ ID NO: 315676 - RNA, 19 nt, Homo sapiens
  misc_RNA (1)...(19): siRNA sense strand
cagaagaccuccaauaacu

SEQ ID NO: 315677 - RNA, 19 nt, Homo sapiens
  misc_RNA (1)...(19): siRNA sense strand
caaaugaaccuuaugaaag

SEQ ID NO: 315678 - RNA, 19 nt, Homo sapiens
  misc_RNA (1)...(19): siRNA sense strand
uuacaaagauacucacaga

SEQ ID NO: 315679 - RNA, 19 nt, Homo sapiens
  misc_RNA (1)...(19): siRNA sense strand
ucucagcccuguauuauau

SEQ ID NO: 315680 - RNA, 19 nt, Homo sapiens
  misc_RNA (1)...(19): siRNA sense strand
ggcagaagaccuccaauaa

SEQ ID NO: 315681 - RNA, 19 nt, Homo sapiens
  misc_RNA (1)...(19): siRNA sense strand
gcaauuagagaaggaagua

SEQ ID NO: 315682 - RNA, 19 nt, Homo sapiens
  misc_RNA (1)...(19): siRNA sense strand
gaaggcaggcuacaaccua

SEQ ID NO: 315683 - RNA, 19 nt, Homo sapiens
  misc_RNA (1)...(19): siRNA sense strand
ugacuacaauccaaucuau

SEQ ID NO: 315684 - RNA, 19 nt, Homo sapiens
  misc_RNA (1)...(19): siRNA sense strand
caagacaucucuggcauca

SEQ ID NO: 315685 - RNA, 19 nt, Homo sapiens
  misc_RNA (1)...(19): siRNA sense strand
uaucuaagcuaggagaauu

SEQ ID NO: 315686 - RNA, 19 nt, Homo sapiens
  misc_RNA (1)...(19): siRNA sense strand
gaaaugauucuucuuguac

SEQ ID NO: 315687 - RNA, 19 nt, Homo sapiens
  misc_RNA (1)...(19): siRNA sense strand
aaacaaagcaguuacauac

SEQ ID NO: 315688 - RNA, 19 nt, Homo sapiens
  misc_RNA (1)...(19): siRNA sense strand
gcacuuaacacuuaucaag

SEQ ID NO: 315689 - RNA, 19 nt, Homo sapiens
  misc_RNA (1)...(19): siRNA sense strand
gccagucaguauucaguua

SEQ ID NO: 315690 - RNA, 19 nt, Homo sapiens
  misc_RNA (1)...(19): siRNA sense strand
acucauugcuccuguaauu

SEQ ID NO: 315691 - RNA, 19 nt, Homo sapiens
  misc_RNA (1)...(19): siRNA sense strand
guagcuaguuguuucagaa

SEQ ID NO: 315692 - RNA, 19 nt, Homo sapiens
  misc_RNA (1)...(19): siRNA sense strand
acaaagcaguuacauacuu

SEQ ID NO: 315693 - RNA, 19 nt, Homo sapiens
  misc_RNA (1)...(19): siRNA sense strand
cgaaguucuuuaccagaua

SEQ ID NO: 315694 - RNA, 19 nt, Homo sapiens
  misc_RNA (1)...(19): siRNA sense strand
acaaagauacucacagaaa

SEQ ID NO: 315695 - RNA, 19 nt, Homo sapiens
  misc_RNA (1)...(19): siRNA sense strand
guagagaucuuaaaagugu

SEQ ID NO: 315696 - RNA, 19 nt, Homo sapiens
  misc_RNA (1)...(19): siRNA sense strand
ccacuuggcccucaaauag

SEQ ID NO: 315697 - RNA, 19 nt, Homo sapiens
  misc_RNA (1)...(19): siRNA sense strand
cagaagaagugguaacuac

SEQ ID NO: 315698 - RNA, 19 nt, Homo sapiens
  misc_RNA (1)...(19): siRNA sense strand
gaaggaaguaaaugaguug

SEQ ID NO: 315699 - RNA, 19 nt, Homo sapiens
  misc_RNA (1)...(19): siRNA sense strand
ucuaugauaucgaggaauu

SEQ ID NO: 315700 - RNA, 19 nt, Homo sapiens
  misc_RNA (1)...(19): siRNA sense strand
ggaaagccauggcagaaaa

SEQ ID NO: 315701 - RNA, 19 nt, Homo sapiens
  misc_RNA (1)...(19): siRNA sense strand
agacaucucuggcaucauc

SEQ ID NO: 315702 - RNA, 19 nt, Homo sapiens
  misc_RNA (1)...(19): siRNA sense strand
gcuuggagccuauuacauu

SEQ ID NO: 315703 - RNA, 19 nt, Homo sapiens
  misc_RNA (1)...(19): siRNA sense strand
gaaguucuuuaccagauag

SEQ ID NO: 315704 - RNA, 19 nt, Homo sapiens
  misc_RNA (1)...(19): siRNA sense strand
guuuagcaaugcaggaaua

SEQ ID NO: 315705 - RNA, 19 nt, Homo sapiens
  misc_RNA (1)...(19): siRNA sense strand
ugugaacucugauagauau

SEQ ID NO: 315706 - RNA, 19 nt, Homo sapiens
  misc_RNA (1)...(19): siRNA sense strand
gcuaguuguuucagaagaa

SEQ ID NO: 315707 - RNA, 19 nt, Homo sapiens
  misc_RNA (1)...(19): siRNA sense strand
ggauauggguccaagacau

SEQ ID NO: 315708 - RNA, 19 nt, Homo sapiens
  misc_RNA (1)...(19): siRNA sense strand
gaugaagaauuaggagaug

SEQ ID NO: 315709 - RNA, 19 nt, Homo sapiens
  misc_RNA (1)...(19): siRNA sense strand
ugagaaggccgcugaauuc

SEQ ID NO: 315710 - RNA, 19 nt, Homo sapiens
  misc_RNA (1)...(19): siRNA sense strand
gccagcagcuaugcagaua

SEQ ID NO: 315711 - RNA, 19 nt, Homo sapiens
  misc_RNA (1)...(19): siRNA sense strand
aaagauagcccagaggaaa

SEQ ID NO: 315712 - RNA, 19 nt, Homo sapiens
  misc_RNA (1)...(19): siRNA sense strand
ccgcugaauucuauaaaga

SEQ ID NO: 315713 - RNA, 19 nt, Homo sapiens
  misc_RNA (1)...(19): siRNA sense strand
ugaaauguaugccgaagca

SEQ ID NO: 315714 - RNA, 19 nt, Homo sapiens
  misc_RNA (1)...(19): siRNA sense strand
agaaggaaguaaaugaguu

SEQ ID NO: 315715 - RNA, 19 nt, Homo sapiens
  misc_RNA (1)...(19): siRNA sense strand
guagaagaaagcuguauug

SEQ ID NO: 315716 - RNA, 19 nt, Homo sapiens
  misc_RNA (1)...(19): siRNA sense strand
ugauuugcuuccagaauaa

SEQ ID NO: 315717 - RNA, 19 nt, Homo sapiens
  misc_RNA (1)...(19): siRNA sense strand
gcugugaacucugauagau

SEQ ID NO: 315718 - RNA, 19 nt, Homo sapiens
  misc_RNA (1)...(19): siRNA sense strand
ucaauaggaagaccaauga

SEQ ID NO: 315719 - RNA, 19 nt, Homo sapiens
  misc_RNA (1)...(19): siRNA sense strand
ccagaaaacugaagagguu

SEQ ID NO: 315720 - RNA, 19 nt, Homo sapiens
  misc_RNA (1)...(19): siRNA sense strand
gcaaauggaacgugaaagg

SEQ ID NO: 315721 - RNA, 19 nt, Homo sapiens
  misc_RNA (1)...(19): siRNA sense strand
agacagcgagaacaaguua

SEQ ID NO: 315722 - RNA, 19 nt, Homo sapiens
  misc_RNA (1)...(19): siRNA sense strand
guaaaugaguugguagaag

SEQ ID NO: 315723 - RNA, 19 nt, Homo sapiens
  misc_RNA (1)...(19): siRNA sense strand
ucgaggaauuggagaauga

SEQ ID NO: 315724 - RNA, 19 nt, Homo sapiens
  misc_RNA (1)...(19): siRNA sense strand
agaauuaggagaugauuug

SEQ ID NO: 315725 - RNA, 19 nt, Homo sapiens
  misc_RNA (1)...(19): siRNA sense strand
caaagauacucacagaaaa

SEQ ID NO: 315726 - RNA, 19 nt, Homo sapiens
  misc_RNA (1)...(19): siRNA sense strand
gaaauggcagcugauggua

SEQ ID NO: 315727 - RNA, 19 nt, Homo sapiens
  misc_RNA (1)...(19): siRNA sense strand
gcaaauggugauuaugaga

SEQ ID NO: 315728 - RNA, 19 nt, Homo sapiens
  misc_RNA (1)...(19): siRNA sense strand
gcacaagccagcagcuaug

SEQ ID NO: 315729 - RNA, 19 nt, Homo sapiens
  misc_RNA (1)...(19): siRNA sense strand
uaaagcaauuagagaagga

SEQ ID NO: 315730 - RNA, 19 nt, Homo sapiens
  misc_RNA (1)...(19): siRNA sense strand
augauuugcuuccagaaua

SEQ ID NO: 315731 - RNA, 19 nt, Homo sapiens
  misc_RNA (1)...(19): siRNA sense strand
agagacagaugaagaugau

SEQ ID NO: 315732 - RNA, 19 nt, Homo sapiens
  misc_RNA (1)...(19): siRNA sense strand
gaaaaucccagucaagcua

SEQ ID NO: 315733 - RNA, 19 nt, Homo sapiens
  misc_RNA (1)...(19): siRNA sense strand
ggagaaugaugcagcuuuu

SEQ ID NO: 315734 - RNA, 19 nt, Homo sapiens
  misc_RNA (1)...(19): siRNA sense strand
guuacauacuugagacaaa

SEQ ID NO: 315735 - RNA, 19 nt, Homo sapiens
  misc_RNA (1)...(19): siRNA sense strand
gcagaauauuggaguuaca

SEQ ID NO: 315736 - RNA, 19 nt, Homo sapiens
  misc_RNA (1)...(19): siRNA sense strand
gugaaagcuucucaauaug

SEQ ID NO: 315737 - RNA, 19 nt, Homo sapiens
  misc_RNA (1)...(19): siRNA sense strand
gcuauugaauggcuaaugc

SEQ ID NO: 315738 - RNA, 19 nt, Homo sapiens
  misc_RNA (1)...(19): siRNA sense strand
caaauggugauuaugagaa

SEQ ID NO: 315739 - RNA, 19 nt, Homo sapiens
  misc_RNA (1)...(19): siRNA sense strand
aaaggacaguagagugaaa

SEQ ID NO: 315740 - RNA, 19 nt, Homo sapiens
  misc_RNA (1)...(19): siRNA sense strand
ggcaguuacuagaccuaua

SEQ ID NO: 315741 - RNA, 19 nt, Homo sapiens
  misc_RNA (1)...(19): siRNA sense strand
ucaagaauaugccagaaaa

SEQ ID NO: 315742 - RNA, 19 nt, Homo sapiens
  misc_RNA (1)...(19): siRNA sense strand
uaaugcagguggucagugu

SEQ ID NO: 315743 - RNA, 19 nt, Homo sapiens
  misc_RNA (1)...(19): siRNA sense strand
gaaacuucacgcaauccua

SEQ ID NO: 315744 - RNA, 19 nt, Homo sapiens
  misc_RNA (1)...(19): siRNA sense strand
auauuggccuuaccuauga

SEQ ID NO: 315745 - RNA, 19 nt, Homo sapiens
  misc_RNA (1)...(19): siRNA sense strand
gauuacuguuccauuagaa

SEQ ID NO: 315746 - RNA, 19 nt, Homo sapiens
  misc_RNA (1)...(19): siRNA sense strand
gcagaagaccuccaauaac

SEQ ID NO: 315747 - RNA, 19 nt, Homo sapiens
  misc_RNA (1)...(19): siRNA sense strand
ggaguuacuagacccauga

SEQ ID NO: 315748 - RNA, 19 nt, Homo sapiens
  misc_RNA (1)...(19): siRNA sense strand
gcaguaacaaagaaauaga

SEQ ID NO: 315749 - RNA, 19 nt, Homo sapiens
  misc_RNA (1)...(19): siRNA sense strand
gggaacagcgcauaaaguc

SEQ ID NO: 315750 - RNA, 19 nt, Homo sapiens
  misc_RNA (1)...(19): siRNA sense strand
ugaaagaaauaagggaaca

SEQ ID NO: 315751 - RNA, 19 nt, Homo sapiens
  misc_RNA (1)...(19): siRNA sense strand
gcuagccaaugaucuggaa

SEQ ID NO: 315752 - RNA, 19 nt, Homo sapiens
  misc_RNA (1)...(19): siRNA sense strand
gagcauggcaccaaaucug

SEQ ID NO: 315753 - RNA, 19 nt, Homo sapiens
  misc_RNA (1)...(19): siRNA sense strand
ggugaaagcuucucaauau

SEQ ID NO: 315754 - RNA, 19 nt, Homo sapiens
  misc_RNA (1)...(19): siRNA sense strand
gcacagaucuuggauuaaa

SEQ ID NO: 315755 - RNA, 19 nt, Homo sapiens
  misc_RNA (1)...(19): siRNA sense strand
ccaaugaucuggaaauaaa

SEQ ID NO: 315756 - RNA, 19 nt, Homo sapiens
  misc_RNA (1)...(19): siRNA sense strand
cagcagcucuuacuaauaa

SEQ ID NO: 315757 - RNA, 19 nt, Homo sapiens
  misc_RNA (1)...(19): siRNA sense strand
gaaagcuucucaauaugua

SEQ ID NO: 315758 - RNA, 19 nt, Homo sapiens
  misc_RNA (1)...(19): siRNA sense strand
ggaaguaaaugaguuggua

SEQ ID NO: 315759 - RNA, 19 nt, Homo sapiens
  misc_RNA (1)...(19): siRNA sense strand
gaaggccgcugaauucuau

SEQ ID NO: 315760 - RNA, 19 nt, Homo sapiens
  misc_RNA (1)...(19): siRNA sense strand
ccgaagcacuuaacacuua

SEQ ID NO: 315761 - RNA, 19 nt, Homo sapiens
  misc_RNA (1)...(19): siRNA sense strand
uaaaugaguugguagaaga

SEQ ID NO: 315762 - RNA, 19 nt, Homo sapiens
  misc_RNA (1)...(19): siRNA sense strand
gaaaguagcaguaacaaag

SEQ ID NO: 315763 - RNA, 19 nt, Homo sapiens
  misc_RNA (1)...(19): siRNA sense strand
ccaaagccauuaaauucua

SEQ ID NO: 315764 - RNA, 19 nt, Homo sapiens
  misc_RNA (1)...(19): siRNA sense strand
uaaccaagcuguagagauc

SEQ ID NO: 315765 - RNA, 19 nt, Homo sapiens
  misc_RNA (1)...(19): siRNA sense strand
cagcagcuaugcagauaua

SEQ ID NO: 315766 - RNA, 19 nt, Homo sapiens
  misc_RNA (1)...(19): siRNA sense strand
caauaguuguggagacuua

SEQ ID NO: 315767 - RNA, 19 nt, Homo sapiens
  misc_RNA (1)...(19): siRNA sense strand
cugcacagaucuuggauua

SEQ ID NO: 315768 - RNA, 19 nt, Homo sapiens
  misc_RNA (1)...(19): siRNA sense strand
ggacaaaugaaccuuauga

SEQ ID NO: 315769 - RNA, 19 nt, Homo sapiens
  misc_RNA (1)...(19): siRNA sense strand
guacugaagcacuuuauaa

SEQ ID NO: 315770 - RNA, 19 nt, Homo sapiens
  misc_RNA (1)...(19): siRNA sense strand
ggaaauaaacaaagcaguu

SEQ ID NO: 315771 - RNA, 19 nt, Homo sapiens
  misc_RNA (1)...(19): siRNA sense strand
gaugguagcuaguuguuuc

SEQ ID NO: 315772 - RNA, 19 nt, Homo sapiens
  misc_RNA (1)...(19): siRNA sense strand
cuuaguaacugaagcuaua

SEQ ID NO: 315773 - RNA, 19 nt, Homo sapiens
  misc_RNA (1)...(19): siRNA sense strand
gaaacuaaaucggcuagau

SEQ ID NO: 315774 - RNA, 19 nt, Homo sapiens
  misc_RNA (1)...(19): siRNA sense strand
caaagcaguuacauacuug

SEQ ID NO: 315775 - RNA, 19 nt, Homo sapiens
  misc_RNA (1)...(19): siRNA sense strand
gcaggaauauugaaaauga

SEQ ID NO: 315776 - RNA, 19 nt, Homo sapiens
  misc_RNA (1)...(19): siRNA sense strand
cagaagaccuccaauaacu

SEQ ID NO: 315777 - RNA, 19 nt, Homo sapiens
  misc_RNA (1)...(19): siRNA sense strand
caaaugaaccuuaugaaag

SEQ ID NO: 315778 - RNA, 19 nt, Homo sapiens
  misc_RNA (1)...(19): siRNA sense strand
uuacaaagauacucacaga

SEQ ID NO: 315779 - RNA, 19 nt, Homo sapiens
  misc_RNA (1)...(19): siRNA sense strand
ucucagcccuguauuauau

SEQ ID NO: 315780 - RNA, 19 nt, Homo sapiens
  misc_RNA (1)...(19): siRNA sense strand
ggcagaagaccuccaauaa

SEQ ID NO: 315781 - RNA, 19 nt, Homo sapiens
  misc_RNA (1)...(19): siRNA sense strand
gcaauuagagaaggaagua

SEQ ID NO: 315782 - RNA, 19 nt, Homo sapiens
  misc_RNA (1)...(19): siRNA sense strand
gaaggcaggcuacaaccua

SEQ ID NO: 315783 - RNA, 19 nt, Homo sapiens
  misc_RNA (1)...(19): siRNA sense strand
ugacuacaauccaaucuau

SEQ ID NO: 315784 - RNA, 19 nt, Homo sapiens
  misc_RNA (1)...(19): siRNA sense strand
caagacaucucuggcauca

SEQ ID NO: 315785 - RNA, 19 nt, Homo sapiens
  misc_RNA (1)...(19): siRNA sense strand
uaucuaagcuaggagaauu

SEQ ID NO: 315786 - RNA, 19 nt, Homo sapiens
  misc_RNA (1)...(19): siRNA sense strand
gaaaugauucuucuuguac

SEQ ID NO: 315787 - RNA, 19 nt, Homo sapiens
  misc_RNA (1)...(19): siRNA sense strand
aaacaaagcaguuacauac

SEQ ID NO: 315788 - RNA, 19 nt, Homo sapiens
  misc_RNA (1)...(19): siRNA sense strand
gcacuuaacacuuaucaag

SEQ ID NO: 315789 - RNA, 19 nt, Homo sapiens
  misc_RNA (1)...(19): siRNA sense strand
gccagucaguauucaguua

SEQ ID NO: 315790 - RNA, 19 nt, Homo sapiens
  misc_RNA (1)...(19): siRNA sense strand
acucauugcuccuguaauu

SEQ ID NO: 315791 - RNA, 19 nt, Homo sapiens
  misc_RNA (1)...(19): siRNA sense strand
guagcuaguuguuucagaa

SEQ ID NO: 315792 - RNA, 19 nt, Homo sapiens
  misc_RNA (1)...(19): siRNA sense strand
acaaagcaguuacauacuu

SEQ ID NO: 315793 - RNA, 19 nt, Homo sapiens
  misc_RNA (1)...(19): siRNA sense strand
cgaaguucuuuaccagaua

SEQ ID NO: 315794 - RNA, 19 nt, Homo sapiens
  misc_RNA (1)...(19): siRNA sense strand
acaaagauacucacagaaa

SEQ ID NO: 315795 - RNA, 19 nt, Homo sapiens
  misc_RNA (1)...(19): siRNA sense strand
guagagaucuuaaaagugu

SEQ ID NO: 315796 - RNA, 19 nt, Homo sapiens
  misc_RNA (1)...(19): siRNA sense strand
ccacuuggcccucaaauag

SEQ ID NO: 315797 - RNA, 19 nt, Homo sapiens
  misc_RNA (1)...(19): siRNA sense strand
cagaagaagugguaacuac

SEQ ID NO: 315798 - RNA, 19 nt, Homo sapiens
  misc_RNA (1)...(19): siRNA sense strand
ucuaugauaucgaggaauu

SEQ ID NO: 315799 - RNA, 19 nt, Homo sapiens
  misc_RNA (1)...(19): siRNA sense strand
ggaaagccauggcagaaaa

SEQ ID NO: 315800 - RNA, 19 nt, Homo sapiens
  misc_RNA (1)...(19): siRNA sense strand
gaaggaaguaaaugaguug

SEQ ID NO: 315801 - RNA, 19 nt, Homo sapiens
  misc_RNA (1)...(19): siRNA sense strand
agacaucucuggcaucauc

SEQ ID NO: 315802 - RNA, 19 nt, Homo sapiens
  misc_RNA (1)...(19): siRNA sense strand
gcuuggagccuauuacauu

SEQ ID NO: 315803 - RNA, 19 nt, Homo sapiens
  misc_RNA (1)...(19): siRNA sense strand
gaaguucuuuaccagauag

SEQ ID NO: 315804 - RNA, 19 nt, Homo sapiens
  misc_RNA (1)...(19): siRNA sense strand
guuuagcaaugcaggaaua

SEQ ID NO: 315805 - RNA, 19 nt, Homo sapiens
  misc_RNA (1)...(19): siRNA sense strand
ugugaacucugauagauau

SEQ ID NO: 315806 - RNA, 19 nt, Homo sapiens
  misc_RNA (1)...(19): siRNA sense strand
gcuaguuguuucagaagaa

SEQ ID NO: 315807 - RNA, 19 nt, Homo sapiens
  misc_RNA (1)...(19): siRNA sense strand
ggauauggguccaagacau

SEQ ID NO: 315808 - RNA, 19 nt, Homo sapiens
  misc_RNA (1)...(19): siRNA sense strand
gaugaagaauuaggagaug

SEQ ID NO: 315809 - RNA, 19 nt, Homo sapiens
  misc_RNA (1)...(19): siRNA sense strand
ugagaaggccgcugaauuc

SEQ ID NO: 315810 - RNA, 19 nt, Homo sapiens
  misc_RNA (1)...(19): siRNA sense strand
gccagcagcuaugcagaua

SEQ ID NO: 315811 - RNA, 19 nt, Homo sapiens
  misc_RNA (1)...(19): siRNA sense strand
aaagauagcccagaggaaa

SEQ ID NO: 315812 - RNA, 19 nt, Homo sapiens
  misc_RNA (1)...(19): siRNA sense strand
ccgcugaauucuauaaaga

SEQ ID NO: 315813 - RNA, 19 nt, Homo sapiens
  misc_RNA (1)...(19): siRNA sense strand
ugaaauguaugccgaagca

SEQ ID NO: 315814 - RNA, 19 nt, Homo sapiens
  misc_RNA (1)...(19): siRNA sense strand
agaaggaaguaaaugaguu

SEQ ID NO: 315815 - RNA, 19 nt, Homo sapiens
  misc_RNA (1)...(19): siRNA sense strand
guagaagaaagcuguauug

SEQ ID NO: 315816 - RNA, 19 nt, Homo sapiens
  misc_RNA (1)...(19): siRNA sense strand
ugauuugcuuccagaauaa

SEQ ID NO: 315817 - RNA, 19 nt, Homo sapiens
  misc_RNA (1)...(19): siRNA sense strand
gcugugaacucugauagau

SEQ ID NO: 315818 - RNA, 19 nt, Homo sapiens
  misc_RNA (1)...(19): siRNA sense strand
ucaauaggaagaccaauga

SEQ ID NO: 315819 - RNA, 19 nt, Homo sapiens
  misc_RNA (1)...(19): siRNA sense strand
ccagaaaacugaagagguu

SEQ ID NO: 315820 - RNA, 19 nt, Homo sapiens
  misc_RNA (1)...(19): siRNA sense strand
gcaaauggaacgugaaagg

SEQ ID NO: 315821 - RNA, 19 nt, Homo sapiens
  misc_RNA (1)...(19): siRNA sense strand
agacagcgagaacaaguua

SEQ ID NO: 315822 - RNA, 19 nt, Homo sapiens
  misc_RNA (1)...(19): siRNA sense strand
guaaaugaguugguagaag

SEQ ID NO: 315823 - RNA, 19 nt, Homo sapiens
  misc_RNA (1)...(19): siRNA sense strand
gcacaagccagcagcuaug

SEQ ID NO: 315824 - RNA, 19 nt, Homo sapiens
  misc_RNA (1)...(19): siRNA sense strand
agaauuaggagaugauuug

SEQ ID NO: 315825 - RNA, 19 nt, Homo sapiens
  misc_RNA (1)...(19): siRNA sense strand
caaagauacucacagaaaa

SEQ ID NO: 315826 - RNA, 19 nt, Homo sapiens
  misc_RNA (1)...(19): siRNA sense strand
ucgaggaauuggagaauga

SEQ ID NO: 315827 - RNA, 19 nt, Homo sapiens
  misc_RNA (1)...(19): siRNA sense strand
gaaauggcagcugauggua

SEQ ID NO: 315828 - RNA, 19 nt, Homo sapiens
  misc_RNA (1)...(19): siRNA sense strand
gcaaauggugauuaugaga

SEQ ID NO: 315829 - RNA, 19 nt, Homo sapiens
  misc_RNA (1)...(19): siRNA sense strand
uaaagcaauuagagaagga

SEQ ID NO: 315830 - RNA, 19 nt, Homo sapiens
  misc_RNA (1)...(19): siRNA sense strand
augauuugcuuccagaaua

SEQ ID NO: 315831 - RNA, 19 nt, Homo sapiens
  misc_RNA (1)...(19): siRNA sense strand
gcagaauauuggaguuaca

SEQ ID NO: 315832 - RNA, 19 nt, Homo sapiens
  misc_RNA (1)...(19): siRNA sense strand
gaaaaucccagucaagcua

SEQ ID NO: 315833 - RNA, 19 nt, Homo sapiens
  misc_RNA (1)...(19): siRNA sense strand
ggagaaugaugcagcuuuu

SEQ ID NO: 315834 - RNA, 19 nt, Homo sapiens
  misc_RNA (1)...(19): siRNA sense strand
agagacagaugaagaugau

SEQ ID NO: 315835 - RNA, 19 nt, Homo sapiens
  misc_RNA (1)...(19): siRNA sense strand
guuacauacuugagacaaa

SEQ ID NO: 315836 - RNA, 19 nt, Homo sapiens
  misc_RNA (1)...(19): siRNA sense strand
gugaaagcuucucaauaug

SEQ ID NO: 315837 - RNA, 19 nt, Homo sapiens
  misc_RNA (1)...(19): siRNA sense strand
gcuauugaauggcuaaugc

SEQ ID NO: 315838 - RNA, 19 nt, Homo sapiens
  misc_RNA (1)...(19): siRNA sense strand
caaauggugauuaugagaa

SEQ ID NO: 315839 - RNA, 19 nt, Homo sapiens
  misc_RNA (1)...(19): siRNA sense strand
aaaggacaguagagugaaa

SEQ ID NO: 315840 - RNA, 19 nt, Homo sapiens
  misc_RNA (1)...(19): siRNA sense strand
gcagaagaccuccaauaac

SEQ ID NO: 315841 - RNA, 19 nt, Homo sapiens
  misc_RNA (1)...(19): siRNA sense strand
ucaagaauaugccagaaaa

SEQ ID NO: 315842 - RNA, 19 nt, Homo sapiens
  misc_RNA (1)...(19): siRNA sense strand
uaaugcagguggucagugu

SEQ ID NO: 315843 - RNA, 19 nt, Homo sapiens
  misc_RNA (1)...(19): siRNA sense strand
gaaacuucacgcaauccua

SEQ ID NO: 315844 - RNA, 19 nt, Homo sapiens
  misc_RNA (1)...(19): siRNA sense strand
auauuggccuuaccuauga

SEQ ID NO: 315845 - RNA, 19 nt, Homo sapiens
  misc_RNA (1)...(19): siRNA sense strand
ggcaguuacuagaccuaua

SEQ ID NO: 315846 - RNA, 19 nt, Homo sapiens
  misc_RNA (1)...(19): siRNA sense strand
gauuacuguuccauuagaa

SEQ ID NO: 315847 - RNA, 19 nt, Homo sapiens
  misc_RNA (1)...(19): siRNA sense strand
ggaguuacuagacccauga

SEQ ID NO: 315848 - RNA, 19 nt, Homo sapiens
  misc_RNA (1)...(19): siRNA sense strand
gcaguaacaaagaaauaga

SEQ ID NO: 315849 - RNA, 19 nt, Homo sapiens
  misc_RNA (1)...(19): siRNA sense strand
gggaacagcgcauaaaguc

SEQ ID NO: 315850 - RNA, 19 nt, Homo sapiens
  misc_RNA (1)...(19): siRNA sense strand
ugaaagaaauaagggaaca

SEQ ID NO: 315851 - RNA, 19 nt, Homo sapiens
  misc_RNA (1)...(19): siRNA sense strand
gcuagccaaugaucuggaa

SEQ ID NO: 315852 - RNA, 19 nt, Homo sapiens
  misc_RNA (1)...(19): siRNA sense strand
gagcauggcaccaaaucug

SEQ ID NO: 315853 - RNA, 19 nt, Homo sapiens
  misc_RNA (1)...(19): siRNA sense strand
gaccaagccuucuuaucuc

SEQ ID NO: 315854 - RNA, 19 nt, Homo sapiens
  misc_RNA (1)...(19): siRNA sense strand
uaucucaacucuggaaaga

SEQ ID NO: 315855 - RNA, 19 nt, Homo sapiens
  misc_RNA (1)...(19): siRNA sense strand
uauacuggcuggccucuuc

SEQ ID NO: 315856 - RNA, 19 nt, Homo sapiens
  misc_RNA (1)...(19): siRNA sense strand
gugcugcgguugucccauu

SEQ ID NO: 315857 - RNA, 19 nt, Homo sapiens
  misc_RNA (1)...(19): siRNA sense strand
gggccacccucucuacuuc

SEQ ID NO: 315858 - RNA, 19 nt, Homo sapiens
  misc_RNA (1)...(19): siRNA sense strand
gcugguucguucucuacua

SEQ ID NO: 315859 - RNA, 19 nt, Homo sapiens
  misc_RNA (1)...(19): siRNA sense strand
cauccugggugacaacuuc

SEQ ID NO: 315860 - RNA, 19 nt, Homo sapiens
  misc_RNA (1)...(19): siRNA sense strand
agaccaagccuucuuaucu

SEQ ID NO: 315861 - RNA, 19 nt, Homo sapiens
  misc_RNA (1)...(19): siRNA sense strand
gcuggccucuucucuguca

SEQ ID NO: 315862 - RNA, 19 nt, Homo sapiens
  misc_RNA (1)...(19): siRNA sense strand
ccuaagacuggacaacuuu

SEQ ID NO: 315863 - RNA, 19 nt, Homo sapiens
  misc_RNA (1)...(19): siRNA sense strand
uggcuggccucuucucugu

SEQ ID NO: 315864 - RNA, 19 nt, Homo sapiens
  misc_RNA (1)...(19): siRNA sense strand
gaucgagggcugguucguu

SEQ ID NO: 315865 - RNA, 19 nt, Homo sapiens
  misc_RNA (1)...(19): siRNA sense strand
uacuuugucuucaugaaug

SEQ ID NO: 315866 - RNA, 19 nt, Homo sapiens
  misc_RNA (1)...(19): siRNA sense strand
auacuggccucagcaccua

SEQ ID NO: 315867 - RNA, 19 nt, Homo sapiens
  misc_RNA (1)...(19): siRNA sense strand
ggugcugccuggaguccuu

SEQ ID NO: 315868 - RNA, 19 nt, Homo sapiens
  misc_RNA (1)...(19): siRNA sense strand
gauacauccugggugacaa

SEQ ID NO: 315869 - RNA, 19 nt, Homo sapiens
  misc_RNA (1)...(19): siRNA sense strand
caagggagacagccgauac

SEQ ID NO: 315870 - RNA, 19 nt, Homo sapiens
  misc_RNA (1)...(19): siRNA sense strand
ggagaccaagccuucuuau

SEQ ID NO: 315871 - RNA, 19 nt, Homo sapiens
  misc_RNA (1)...(19): siRNA sense strand
gugcugguuugcagugugu

SEQ ID NO: 315872 - RNA, 19 nt, Homo sapiens
  misc_RNA (1)...(19): siRNA sense strand
uggagaccaagccuucuua

SEQ ID NO: 315873 - RNA, 19 nt, Homo sapiens
  misc_RNA (1)...(19): siRNA sense strand
gggaugugcucuacuuccu

SEQ ID NO: 315874 - RNA, 19 nt, Homo sapiens
  misc_RNA (1)...(19): siRNA sense strand
aagccaagagcaagaagaa

SEQ ID NO: 315875 - RNA, 19 nt, Homo sapiens
  misc_RNA (1)...(19): siRNA sense strand
gacugucccugugcugguu

SEQ ID NO: 315876 - RNA, 19 nt, Homo sapiens
  misc_RNA (1)...(19): siRNA sense strand
caagagcaagaagaacuga

SEQ ID NO: 315877 - RNA, 19 nt, Homo sapiens
  misc_RNA (1)...(19): siRNA sense strand
gccaagagcaagaagaacu

SEQ ID NO: 315878 - RNA, 19 nt, Homo sapiens
  misc_RNA (1)...(19): siRNA sense strand
cuggaguccuugugcuuga

SEQ ID NO: 315879 - RNA, 19 nt, Homo sapiens
  misc_RNA (1)...(19): siRNA sense strand
gagaccaagccuucuuauc

SEQ ID NO: 315880 - RNA, 19 nt, Homo sapiens
  misc_RNA (1)...(19): siRNA sense strand
cuacgaagaccugcuugga

SEQ ID NO: 315881 - RNA, 19 nt, Homo sapiens
  misc_RNA (1)...(19): siRNA sense strand
ccgcuucauucuacagcuu

SEQ ID NO: 315882 - RNA, 19 nt, Homo sapiens
  misc_RNA (1)...(19): siRNA sense strand
gcaguguguggguucauuc

SEQ ID NO: 315883 - RNA, 19 nt, Homo sapiens
  misc_RNA (1)...(19): siRNA sense strand
ccaagagcaagaagaacug

SEQ ID NO: 315884 - RNA, 19 nt, Homo sapiens
  misc_RNA (1)...(19): siRNA sense strand
gggagacagccgauacauc

SEQ ID NO: 315885 - RNA, 19 nt, Homo sapiens
  misc_RNA (1)...(19): siRNA sense strand
caagccuucuuaucucaac

SEQ ID NO: 315886 - RNA, 19 nt, Homo sapiens
  misc_RNA (1)...(19): siRNA sense strand
ggacaacuauuaccugaau

SEQ ID NO: 315887 - RNA, 19 nt, Homo sapiens
  misc_RNA (1)...(19): siRNA sense strand
gagaugagcuggagauaag

SEQ ID NO: 315888 - RNA, 19 nt, Homo sapiens
  misc_RNA (1)...(19): siRNA sense strand
ggaaaagguugaucucaua

SEQ ID NO: 315889 - RNA, 19 nt, Homo sapiens
  misc_RNA (1)...(19): siRNA sense strand
gaucaacuuucauggagaa

SEQ ID NO: 315890 - RNA, 19 nt, Homo sapiens
  misc_RNA (1)...(19): siRNA sense strand
gaacaacaacuggucaauu

SEQ ID NO: 315891 - RNA, 19 nt, Homo sapiens
  misc_RNA (1)...(19): siRNA sense strand
gcaaauauccggcugugau

SEQ ID NO: 315892 - RNA, 19 nt, Homo sapiens
  misc_RNA (1)...(19): siRNA sense strand
gagaaagccugcagcucuu

SEQ ID NO: 315893 - RNA, 19 nt, Homo sapiens
  misc_RNA (1)...(19): siRNA sense strand
uaagauggguagacugcua

SEQ ID NO: 315894 - RNA, 19 nt, Homo sapiens
  misc_RNA (1)...(19): siRNA sense strand
ugaguuauuugcugguaua

SEQ ID NO: 315895 - RNA, 19 nt, Homo sapiens
  misc_RNA (1)...(19): siRNA sense strand
ggagaggugcccaugcaua

SEQ ID NO: 315896 - RNA, 19 nt, Homo sapiens
  misc_RNA (1)...(19): siRNA sense strand
gaggagaccugguggaaaa

SEQ ID NO: 315897 - RNA, 19 nt, Homo sapiens
  misc_RNA (1)...(19): siRNA sense strand
ggaagguccucaccagagu

SEQ ID NO: 315898 - RNA, 19 nt, Homo sapiens
  misc_RNA (1)...(19): siRNA sense strand
aacaacaacuggucaauuc

SEQ ID NO: 315899 - RNA, 19 nt, Homo sapiens
  misc_RNA (1)...(19): siRNA sense strand
caauucagcuggugcucaa

SEQ ID NO: 315900 - RNA, 19 nt, Homo sapiens
  misc_RNA (1)...(19): siRNA sense strand
ggagaugagcuggagauaa

SEQ ID NO: 315901 - RNA, 19 nt, Homo sapiens
  misc_RNA (1)...(19): siRNA sense strand
caacuuucauggagaaugg

SEQ ID NO: 315902 - RNA, 19 nt, Homo sapiens
  misc_RNA (1)...(19): siRNA sense strand
uuacacauccuuccuuuga

SEQ ID NO: 315903 - RNA, 19 nt, Homo sapiens
  misc_RNA (1)...(19): siRNA sense strand
ccgugaagcuuguagaguu

SEQ ID NO: 315904 - RNA, 19 nt, Homo sapiens
  misc_RNA (1)...(19): siRNA sense strand
gagaggugcccaugcauau

SEQ ID NO: 315905 - RNA, 19 nt, Homo sapiens
  misc_RNA (1)...(19): siRNA sense strand
gagauaagauggguagacu

SEQ ID NO: 315906 - RNA, 19 nt, Homo sapiens
  misc_RNA (1)...(19): siRNA sense strand
ucccagcacuacccuauuu

SEQ ID NO: 315907 - RNA, 19 nt, Homo sapiens
  misc_RNA (1)...(19): siRNA sense strand
uagaaaggcuagccaugau

SEQ ID NO: 315908 - RNA, 19 nt, Homo sapiens
  misc_RNA (1)...(19): siRNA sense strand
ggagaucaacuuucaugga

SEQ ID NO: 315909 - RNA, 19 nt, Homo sapiens
  misc_RNA (1)...(19): siRNA sense strand
agauggagaucaacuuuca

SEQ ID NO: 315910 - RNA, 19 nt, Homo sapiens
  misc_RNA (1)...(19): siRNA sense strand
gcucugcgcauaaacaaga

SEQ ID NO: 315911 - RNA, 19 nt, Homo sapiens
  misc_RNA (1)...(19): siRNA sense strand
acacauccuuccuuugaga

SEQ ID NO: 315912 - RNA, 19 nt, Homo sapiens
  misc_RNA (1)...(19): siRNA sense strand
uauaaaggauggagaaagc

SEQ ID NO: 315913 - RNA, 19 nt, Homo sapiens
  misc_RNA (1)...(19): siRNA sense strand
cgugaagcuuguagaguuu

SEQ ID NO: 315914 - RNA, 19 nt, Homo sapiens
  misc_RNA (1)...(19): siRNA sense strand
cgaccuggcagaacuuuga

SEQ ID NO: 315915 - RNA, 19 nt, Homo sapiens
  misc_RNA (1)...(19): siRNA sense strand
caggagaggugcccaugca

SEQ ID NO: 315916 - RNA, 19 nt, Homo sapiens
  misc_RNA (1)...(19): siRNA sense strand
cugaagcaguucuguguau

SEQ ID NO: 315917 - RNA, 19 nt, Homo sapiens
  misc_RNA (1)...(19): siRNA sense strand
cuacaggcgugaccagauc

SEQ ID NO: 315918 - RNA, 19 nt, Homo sapiens
  misc_RNA (1)...(19): siRNA sense strand
ugagauggagaucaacuuu

SEQ ID NO: 315919 - RNA, 19 nt, Homo sapiens
  misc_RNA (1)...(19): siRNA sense strand
ucaaggagagggugaagga

SEQ ID NO: 315920 - RNA, 19 nt, Homo sapiens
  misc_RNA (1)...(19): siRNA sense strand
gguggugggugaugucuac

SEQ ID NO: 315921 - RNA, 19 nt, Homo sapiens
  misc_RNA (1)...(19): siRNA sense strand
cuuguagaguuugaucuua

SEQ ID NO: 315922 - RNA, 19 nt, Homo sapiens
  misc_RNA (1)...(19): siRNA sense strand
caugaguuauuugcuggua

SEQ ID NO: 315923 - RNA, 19 nt, Homo sapiens
  misc_RNA (1)...(19): siRNA sense strand
ucuacgacaucccugauau

SEQ ID NO: 315924 - RNA, 19 nt, Homo sapiens
  misc_RNA (1)...(19): siRNA sense strand
cuccaagcaugaguuauuu

SEQ ID NO: 315925 - RNA, 19 nt, Homo sapiens
  misc_RNA (1)...(19): siRNA sense strand
ggaggagaccugguggaaa

SEQ ID NO: 315926 - RNA, 19 nt, Homo sapiens
  misc_RNA (1)...(19): siRNA sense strand
gaggugcccaugcauaugu

SEQ ID NO: 315927 - RNA, 19 nt, Homo sapiens
  misc_RNA (1)...(19): siRNA sense strand
agaguuugaucuuaagcaa

SEQ ID NO: 315928 - RNA, 19 nt, Homo sapiens
  misc_RNA (1)...(19): siRNA sense strand
uuagaaaggcuagccauga

SEQ ID NO: 315929 - RNA, 19 nt, Homo sapiens
  misc_RNA (1)...(19): siRNA sense strand
gcacuucuacaagcaguau

SEQ ID NO: 315930 - RNA, 19 nt, Homo sapiens
  misc_RNA (1)...(19): siRNA sense strand
uuaaucagaaggugaaguu

SEQ ID NO: 315931 - RNA, 19 nt, Homo sapiens
  misc_RNA (1)...(19): siRNA sense strand
gccugcagcucuuugaaca

SEQ ID NO: 315932 - RNA, 19 nt, Homo sapiens
  misc_RNA (1)...(19): siRNA sense strand
ucuccaagcaugaguuauu

SEQ ID NO: 315933 - RNA, 19 nt, Homo sapiens
  misc_RNA (1)...(19): siRNA sense strand
gaguaaggccagucacauc

SEQ ID NO: 315934 - RNA, 19 nt, Homo sapiens
  misc_RNA (1)...(19): siRNA sense strand
ggagaauggcuggaaguuc

SEQ ID NO: 315935 - RNA, 19 nt, Homo sapiens
  misc_RNA (1)...(19): siRNA sense strand
ucacguaccgccacaugga

SEQ ID NO: 315936 - RNA, 19 nt, Homo sapiens
  misc_RNA (1)...(19): siRNA sense strand
gaagguccucaccagaguu

SEQ ID NO: 315937 - RNA, 19 nt, Homo sapiens
  misc_RNA (1)...(19): siRNA sense strand
gaucucauagacaaguuug

SEQ ID NO: 315938 - RNA, 19 nt, Homo sapiens
  misc_RNA (1)...(19): siRNA sense strand
ugaagcuuguagaguuuga

SEQ ID NO: 315939 - RNA, 19 nt, Homo sapiens
  misc_RNA (1)...(19): siRNA sense strand
gagauggagaucaacuuuc

SEQ ID NO: 315940 - RNA, 19 nt, Homo sapiens
  misc_RNA (1)...(19): siRNA sense strand
aaagguugaucucauagac

SEQ ID NO: 315941 - RNA, 19 nt, Homo sapiens
  misc_RNA (1)...(19): siRNA sense strand
caaauauccggcugugauc

SEQ ID NO: 315942 - RNA, 19 nt, Homo sapiens
  misc_RNA (1)...(19): siRNA sense strand
guuucagccucuuagcaaa

SEQ ID NO: 315943 - RNA, 19 nt, Homo sapiens
  misc_RNA (1)...(19): siRNA sense strand
ggaacaacaacuggucaau

SEQ ID NO: 315944 - RNA, 19 nt, Homo sapiens
  misc_RNA (1)...(19): siRNA sense strand
agagagaggucaggcacau

SEQ ID NO: 315945 - RNA, 19 nt, Homo sapiens
  misc_RNA (1)...(19): siRNA sense strand
agguugaucucauagacaa

SEQ ID NO: 315946 - RNA, 19 nt, Homo sapiens
  misc_RNA (1)...(19): siRNA sense strand
gcagagugugccacccaaa

SEQ ID NO: 315947 - RNA, 19 nt, Homo sapiens
  misc_RNA (1)...(19): siRNA sense strand
gguugcccucugagaauua

SEQ ID NO: 315948 - RNA, 19 nt, Homo sapiens
  misc_RNA (1)...(19): siRNA sense strand
ggcuagccaugauccucua

SEQ ID NO: 315949 - RNA, 19 nt, Homo sapiens
  misc_RNA (1)...(19): siRNA sense strand
ggugauggaacaacaacug

SEQ ID NO: 315950 - RNA, 19 nt, Homo sapiens
  misc_RNA (1)...(19): siRNA sense strand
uucagccucuuagcaaaua

SEQ ID NO: 315951 - RNA, 19 nt, Homo sapiens
  misc_RNA (1)...(19): siRNA sense strand
gguauaaaggauggagaaa

SEQ ID NO: 315952 - RNA, 19 nt, Homo sapiens
  misc_RNA (1)...(19): siRNA sense strand
guauccaacauuaaucaga

SEQ ID NO: 315953 - RNA, 19 nt, Homo sapiens
  misc_RNA (1)...(19): siRNA sense strand
uucuguguauccaacauua

SEQ ID NO: 315954 - RNA, 19 nt, Homo sapiens
  misc_RNA (1)...(19): siRNA sense strand
gcuuguagaguuugaucuu

SEQ ID NO: 315955 - RNA, 19 nt, Homo sapiens
  misc_RNA (1)...(19): siRNA sense strand
caacaacuggucaauucag

SEQ ID NO: 315956 - RNA, 19 nt, Homo sapiens
  misc_RNA (1)...(19): siRNA sense strand
ugaagcaguucuguguauc

SEQ ID NO: 315957 - RNA, 19 nt, Homo sapiens
  misc_RNA (1)...(19): siRNA sense strand
augucuaccuggugaguaa

SEQ ID NO: 315958 - RNA, 19 nt, Homo sapiens
  misc_RNA (1)...(19): siRNA sense strand
gaucgacucccagcacuac

SEQ ID NO: 315959 - RNA, 19 nt, Homo sapiens
  misc_RNA (1)...(19): siRNA sense strand
cauucugguugcccucuga

SEQ ID NO: 315960 - RNA, 19 nt, Homo sapiens
  misc_RNA (1)...(19): siRNA sense strand
ucaccagaguuggcaggaa

SEQ ID NO: 315961 - RNA, 19 nt, Homo sapiens
  misc_RNA (1)...(19): siRNA sense strand
aaucagaaggugaaguuuc

SEQ ID NO: 315962 - RNA, 19 nt, Homo sapiens
  misc_RNA (1)...(19): siRNA sense strand
gaugagcuggagauaagau

SEQ ID NO: 315963 - RNA, 19 nt, Homo sapiens
  misc_RNA (1)...(19): siRNA sense strand
guauaaaggauggagaaag

SEQ ID NO: 315964 - RNA, 19 nt, Homo sapiens
  misc_RNA (1)...(19): siRNA sense strand
ggagauaagauggguagac

SEQ ID NO: 315965 - RNA, 19 nt, Homo sapiens
  misc_RNA (1)...(19): siRNA sense strand
cgaaucggcugggcuuuug

SEQ ID NO: 315966 - RNA, 19 nt, Homo sapiens
  misc_RNA (1)...(19): siRNA sense strand
ccugauauccgucucuucu

SEQ ID NO: 315967 - RNA, 19 nt, Homo sapiens
  misc_RNA (1)...(19): siRNA sense strand
gaauuacgcagaaaaugau

SEQ ID NO: 315968 - RNA, 19 nt, Homo sapiens
  misc_RNA (1)...(19): siRNA sense strand
acauuaaucagaaggugaa

SEQ ID NO: 315969 - RNA, 19 nt, Homo sapiens
  misc_RNA (1)...(19): siRNA sense strand
uguagaguuugaucuuaag

SEQ ID NO: 315970 - RNA, 19 nt, Homo sapiens
  misc_RNA (1)...(19): siRNA sense strand
ggucuacgacaaccuuucu

SEQ ID NO: 315971 - RNA, 19 nt, Homo sapiens
  misc_RNA (1)...(19): siRNA sense strand
ccaugauccucuacgacau

SEQ ID NO: 315972 - RNA, 19 nt, Homo sapiens
  misc_RNA (1)...(19): siRNA sense strand
uagccaugauccucuacga

SEQ ID NO: 315973 - RNA, 19 nt, Homo sapiens
  misc_RNA (1)...(19): siRNA sense strand
gcagcaaggugguacagaa

SEQ ID NO: 315974 - RNA, 19 nt, Homo sapiens
  misc_RNA (1)...(19): siRNA sense strand
gcaaggugguacagaaguu

SEQ ID NO: 315975 - RNA, 19 nt, Homo sapiens
  misc_RNA (1)...(19): siRNA sense strand
gcaaguacagucacaagga

SEQ ID NO: 315976 - RNA, 19 nt, Homo sapiens
  misc_RNA (1)...(19): siRNA sense strand
ucagagcccugcacuuugu

SEQ ID NO: 315977 - RNA, 19 nt, Homo sapiens
  misc_RNA (1)...(19): siRNA sense strand
gcagcaagugcccaucuuu

SEQ ID NO: 315978 - RNA, 19 nt, Homo sapiens
  misc_RNA (1)...(19): siRNA sense strand
guuggaagcugcucuaagc

SEQ ID NO: 315979 - RNA, 19 nt, Homo sapiens
  misc_RNA (1)...(19): siRNA sense strand
aaacgcaacucagcagcaa

SEQ ID NO: 315980 - RNA, 19 nt, Homo sapiens
  misc_RNA (1)...(19): siRNA sense strand
cuucagagcccugcacuuu

SEQ ID NO: 315981 - RNA, 19 nt, Homo sapiens
  misc_RNA (1)...(19): siRNA sense strand
gaaguugguccugcccuuu

SEQ ID NO: 315982 - RNA, 19 nt, Homo sapiens
  misc_RNA (1)...(19): siRNA sense strand
gauccuggcucgggaagca

SEQ ID NO: 315983 - RNA, 19 nt, Homo sapiens
  misc_RNA (1)...(19): siRNA sense strand
cgggaacgcuggcauuucu

SEQ ID NO: 315984 - RNA, 19 nt, Homo sapiens
  misc_RNA (1)...(19): siRNA sense strand
guacagucacaaggacaua

SEQ ID NO: 315985 - RNA, 19 nt, Homo sapiens
  misc_RNA (1)...(19): siRNA sense strand
uuuaugcccugccuugaga

SEQ ID NO: 315986 - RNA, 19 nt, Homo sapiens
  misc_RNA (1)...(19): siRNA sense strand
agagcuaccugaggcagaa

SEQ ID NO: 315987 - RNA, 19 nt, Homo sapiens
  misc_RNA (1)...(19): siRNA sense strand
uggaagccauugcccacuu

SEQ ID NO: 315988 - RNA, 19 nt, Homo sapiens
  misc_RNA (1)...(19): siRNA sense strand
uggcuacagucaacaucuu

SEQ ID NO: 315989 - RNA, 19 nt, Homo sapiens
  misc_RNA (1)...(19): siRNA sense strand
cagcaagugcccaucuuuc

SEQ ID NO: 315990 - RNA, 19 nt, Homo sapiens
  misc_RNA (1)...(19): siRNA sense strand
gcaaggccagaggaacuga

SEQ ID NO: 315991 - RNA, 19 nt, Homo sapiens
  misc_RNA (1)...(19): siRNA sense strand
ccuggugugugcccuggaa

SEQ ID NO: 315992 - RNA, 19 nt, Homo sapiens
  misc_RNA (1)...(19): siRNA sense strand
guucaggaaacgcaacuca

SEQ ID NO: 315993 - RNA, 19 nt, Homo sapiens
  misc_RNA (1)...(19): siRNA sense strand
ucacaaggacauaguagcu

SEQ ID NO: 315994 - RNA, 19 nt, Homo sapiens
  misc_RNA (1)...(19): siRNA sense strand
caaggugguacagaaguug

SEQ ID NO: 315995 - RNA, 19 nt, Homo sapiens
  misc_RNA (1)...(19): siRNA sense strand
ccacggcagcaucugauca

SEQ ID NO: 315996 - RNA, 19 nt, Homo sapiens
  misc_RNA (1)...(19): siRNA sense strand
gcagcaaggugguacagaa

SEQ ID NO: 315997 - RNA, 19 nt, Homo sapiens
  misc_RNA (1)...(19): siRNA sense strand
gcaaggugguacagaaguu

SEQ ID NO: 315998 - RNA, 19 nt, Homo sapiens
  misc_RNA (1)...(19): siRNA sense strand
gcaaguacagucacaagga

SEQ ID NO: 315999 - RNA, 19 nt, Homo sapiens
  misc_RNA (1)...(19): siRNA sense strand
ucagagcccugcacuuugu

SEQ ID NO: 316000 - RNA, 19 nt, Homo sapiens
  misc_RNA (1)...(19): siRNA sense strand
gcagcaagugcccaucuuu

SEQ ID NO: 316001 - RNA, 19 nt, Homo sapiens
  misc_RNA (1)...(19): siRNA sense strand
guuggaagcugcucuaagc

SEQ ID NO: 316002 - RNA, 19 nt, Homo sapiens
  misc_RNA (1)...(19): siRNA sense strand
aaacgcaacucagcagcaa

SEQ ID NO: 316003 - RNA, 19 nt, Homo sapiens
  misc_RNA (1)...(19): siRNA sense strand
cuucagagcccugcacuuu

SEQ ID NO: 316004 - RNA, 19 nt, Homo sapiens
  misc_RNA (1)...(19): siRNA sense strand
gaaguugguccugcccuuu

SEQ ID NO: 316005 - RNA, 19 nt, Homo sapiens
  misc_RNA (1)...(19): siRNA sense strand
gauccuggcucgggaagca

SEQ ID NO: 316006 - RNA, 19 nt, Homo sapiens
  misc_RNA (1)...(19): siRNA sense strand
cgggaacgcuggcauuucu

SEQ ID NO: 316007 - RNA, 19 nt, Homo sapiens
  misc_RNA (1)...(19): siRNA sense strand
guacagucacaaggacaua

SEQ ID NO: 316008 - RNA, 19 nt, Homo sapiens
  misc_RNA (1)...(19): siRNA sense strand
uuuaugcccugccuugaga

SEQ ID NO: 316009 - RNA, 19 nt, Homo sapiens
  misc_RNA (1)...(19): siRNA sense strand
agagcuaccugaggcagaa

SEQ ID NO: 316010 - RNA, 19 nt, Homo sapiens
  misc_RNA (1)...(19): siRNA sense strand
uggaagccauugcccacuu

SEQ ID NO: 316011 - RNA, 19 nt, Homo sapiens
  misc_RNA (1)...(19): siRNA sense strand
uggcuacagucaacaucuu

SEQ ID NO: 316012 - RNA, 19 nt, Homo sapiens
  misc_RNA (1)...(19): siRNA sense strand
cagcaagugcccaucuuuc

SEQ ID NO: 316013 - RNA, 19 nt, Homo sapiens
  misc_RNA (1)...(19): siRNA sense strand
gcaaggccagaggaacuga

SEQ ID NO: 316014 - RNA, 19 nt, Homo sapiens
  misc_RNA (1)...(19): siRNA sense strand
ccuggugugugcccuggaa

SEQ ID NO: 316015 - RNA, 19 nt, Homo sapiens
  misc_RNA (1)...(19): siRNA sense strand
guucaggaaacgcaacuca

SEQ ID NO: 316016 - RNA, 19 nt, Homo sapiens
  misc_RNA (1)...(19): siRNA sense strand
ucacaaggacauaguagcu

SEQ ID NO: 316017 - RNA, 19 nt, Homo sapiens
  misc_RNA (1)...(19): siRNA sense strand
caaggugguacagaaguug

SEQ ID NO: 316018 - RNA, 19 nt, Homo sapiens
  misc_RNA (1)...(19): siRNA sense strand
ccacggcagcaucugauca

SEQ ID NO: 316019 - RNA, 19 nt, Homo sapiens
  misc_RNA (1)...(19): siRNA sense strand
ggaaagcgcugcaugaguu

SEQ ID NO: 316020 - RNA, 19 nt, Homo sapiens
  misc_RNA (1)...(19): siRNA sense strand
gaggagagccgcagcguua

SEQ ID NO: 316021 - RNA, 19 nt, Homo sapiens
  misc_RNA (1)...(19): siRNA sense strand
cgagaacgacaucgacaua

SEQ ID NO: 316022 - RNA, 19 nt, Homo sapiens
  misc_RNA (1)...(19): siRNA sense strand
gaacgacaucgacauagug

SEQ ID NO: 316023 - RNA, 19 nt, Homo sapiens
  misc_RNA (1)...(19): siRNA sense strand
gaugcagggugccgggaaa

SEQ ID NO: 316024 - RNA, 19 nt, Homo sapiens
  misc_RNA (1)...(19): siRNA sense strand
cgagucagccaaagucuug

SEQ ID NO: 316025 - RNA, 19 nt, Homo sapiens
  misc_RNA (1)...(19): siRNA sense strand
ggagaagcucagccuguuu

SEQ ID NO: 316026 - RNA, 19 nt, Homo sapiens
  misc_RNA (1)...(19): siRNA sense strand
ggacacaguuccggaaagc

SEQ ID NO: 316027 - RNA, 19 nt, Homo sapiens
  misc_RNA (1)...(19): siRNA sense strand
gaaagcgcugcaugaguug

SEQ ID NO: 316028 - RNA, 19 nt, Homo sapiens
  misc_RNA (1)...(19): siRNA sense strand
uggagaagcucagccuguu

SEQ ID NO: 316029 - RNA, 19 nt, Homo sapiens
  misc_RNA (1)...(19): siRNA sense strand
agaacgacaucgacauagu

SEQ ID NO: 316030 - RNA, 19 nt, Homo sapiens
  misc_RNA (1)...(19): siRNA sense strand
uuacgcugauccaggcuuu

SEQ ID NO: 316031 - RNA, 19 nt, Homo sapiens
  misc_RNA (1)...(19): siRNA sense strand
cagccaaagucuugaacgu

SEQ ID NO: 316032 - RNA, 19 nt, Homo sapiens
  misc_RNA (1)...(19): siRNA sense strand
ccaacgaggacgccuggaa

SEQ ID NO: 316033 - RNA, 19 nt, Homo sapiens
  misc_RNA (1)...(19): siRNA sense strand
gaacguggaccccgacaau

SEQ ID NO: 316034 - RNA, 19 nt, Homo sapiens
  misc_RNA (1)...(19): siRNA sense strand
gagaagcucagccuguuuu

SEQ ID NO: 316035 - RNA, 19 nt, Homo sapiens
  misc_RNA (1)...(19): siRNA sense strand
cgacaucgcgcugcagauc

SEQ ID NO: 316036 - RNA, 19 nt, Homo sapiens
  misc_RNA (1)...(19): siRNA sense strand
gggaaagcgcugcaugagu

SEQ ID NO: 316037 - RNA, 19 nt, Homo sapiens
  misc_RNA (1)...(19): siRNA sense strand
gagaacgacaucgacauag

SEQ ID NO: 316038 - RNA, 19 nt, Homo sapiens
  misc_RNA (1)...(19): siRNA sense strand
ccgacaaugugaccuucug

SEQ ID NO: 316039 - RNA, 19 nt, Homo sapiens
  misc_RNA (1)...(19): siRNA sense strand
gcacugcauccucauuucg

SEQ ID NO: 316040 - RNA, 19 nt, Homo sapiens
  misc_RNA (1)...(19): siRNA sense strand
acaaugugaccuucugugu

SEQ ID NO: 316041 - RNA, 19 nt, Homo sapiens
  misc_RNA (1)...(19): siRNA sense strand
ccgggaaagcgcugcauga

SEQ ID NO: 316042 - RNA, 19 nt, Homo sapiens
  misc_RNA (1)...(19): siRNA sense strand
gacaacaucucgucagcua

SEQ ID NO: 316043 - RNA, 19 nt, Homo sapiens
  misc_RNA (1)...(19): siRNA sense strand
caacagcaaugaugcaaca

SEQ ID NO: 316044 - RNA, 19 nt, Homo sapiens
  misc_RNA (1)...(19): siRNA sense strand
uuacuaaaccuccauauga

SEQ ID NO: 316045 - RNA, 19 nt, Homo sapiens
  misc_RNA (1)...(19): siRNA sense strand
ugaagaagaugaccaagca

SEQ ID NO: 316046 - RNA, 19 nt, Homo sapiens
  misc_RNA (1)...(19): siRNA sense strand
gcaaugaugcaacaauuau

SEQ ID NO: 316047 - RNA, 19 nt, Homo sapiens
  misc_RNA (1)...(19): siRNA sense strand
cagcaaugaugcaacaauu

SEQ ID NO: 316048 - RNA, 19 nt, Homo sapiens
  misc_RNA (1)...(19): siRNA sense strand
gcaagucgugaaacuauaa

SEQ ID NO: 316049 - RNA, 19 nt, Homo sapiens
  misc_RNA (1)...(19): siRNA sense strand
caagagaauggccgaauuu

SEQ ID NO: 316050 - RNA, 19 nt, Homo sapiens
  misc_RNA (1)...(19): siRNA sense strand
ucaagagaauggccgaauu

SEQ ID NO: 316051 - RNA, 19 nt, Homo sapiens
  misc_RNA (1)...(19): siRNA sense strand
gugaaaccauauagaaaug

SEQ ID NO: 316052 - RNA, 19 nt, Homo sapiens
  misc_RNA (1)...(19): siRNA sense strand
uuucagaguucuaugauga

SEQ ID NO: 316053 - RNA, 19 nt, Homo sapiens
  misc_RNA (1)...(19): siRNA sense strand
ggcaauccuuuaagaguug

SEQ ID NO: 316054 - RNA, 19 nt, Homo sapiens
  misc_RNA (1)...(19): siRNA sense strand
gaaaccauauagaaaugag

SEQ ID NO: 316055 - RNA, 19 nt, Homo sapiens
  misc_RNA (1)...(19): siRNA sense strand
gacagugguuucagaguuc

SEQ ID NO: 316056 - RNA, 19 nt, Homo sapiens
  misc_RNA (1)...(19): siRNA sense strand
agacagugguuucagaguu

SEQ ID NO: 316057 - RNA, 19 nt, Homo sapiens
  misc_RNA (1)...(19): siRNA sense strand
agaguucuaugaugaaaug

SEQ ID NO: 316058 - RNA, 19 nt, Homo sapiens
  misc_RNA (1)...(19): siRNA sense strand
ucagaaaacuugaagaaga

SEQ ID NO: 316059 - RNA, 19 nt, Homo sapiens
  misc_RNA (1)...(19): siRNA sense strand
uacuaaaccuccauaugaa

SEQ ID NO: 316060 - RNA, 19 nt, Homo sapiens
  misc_RNA (1)...(19): siRNA sense strand
caugaaagcuauggcaauc

SEQ ID NO: 316061 - RNA, 19 nt, Homo sapiens
  misc_RNA (1)...(19): siRNA sense strand
cuguaacccuguaucauuu

SEQ ID NO: 316062 - RNA, 19 nt, Homo sapiens
  misc_RNA (1)...(19): siRNA sense strand
ccuauaagcaugaaacaga

SEQ ID NO: 316063 - RNA, 19 nt, Homo sapiens
  misc_RNA (1)...(19): siRNA sense strand
cagcauaugugaagaaaau

SEQ ID NO: 316064 - RNA, 19 nt, Homo sapiens
  misc_RNA (1)...(19): siRNA sense strand
cuauaagcaugaaacagaa

SEQ ID NO: 316065 - RNA, 19 nt, Homo sapiens
  misc_RNA (1)...(19): siRNA sense strand
uaaagcuguuucaaucaga

SEQ ID NO: 316066 - RNA, 19 nt, Homo sapiens
  misc_RNA (1)...(19): siRNA sense strand
uggcaauccuuuaagaguu

SEQ ID NO: 316067 - RNA, 19 nt, Homo sapiens
  misc_RNA (1)...(19): siRNA sense strand
aaaacaagcuuugagauug

SEQ ID NO: 316068 - RNA, 19 nt, Homo sapiens
  misc_RNA (1)...(19): siRNA sense strand
gaaauuacugaaacaggau

SEQ ID NO: 316069 - RNA, 19 nt, Homo sapiens
  misc_RNA (1)...(19): siRNA sense strand
ccuguaacccuguaucauu

SEQ ID NO: 316070 - RNA, 19 nt, Homo sapiens
  misc_RNA (1)...(19): siRNA sense strand
cuauggcaauccuuuaaga

SEQ ID NO: 316071 - RNA, 19 nt, Homo sapiens
  misc_RNA (1)...(19): siRNA sense strand
guaauguugcucgguauuu

SEQ ID NO: 316072 - RNA, 19 nt, Homo sapiens
  misc_RNA (1)...(19): siRNA sense strand
ucagaguucuaugaugaaa

SEQ ID NO: 316073 - RNA, 19 nt, Homo sapiens
  misc_RNA (1)...(19): siRNA sense strand
ugcuaaagcuguuucaauc

SEQ ID NO: 316074 - RNA, 19 nt, Homo sapiens
  misc_RNA (1)...(19): siRNA sense strand
acucaucaguggacaguau

SEQ ID NO: 316075 - RNA, 19 nt, Homo sapiens
  misc_RNA (1)...(19): siRNA sense strand
aaacaagcuuugagauugc

SEQ ID NO: 316076 - RNA, 19 nt, Homo sapiens
  misc_RNA (1)...(19): siRNA sense strand
uaaaggguguuacuaucgu

SEQ ID NO: 316077 - RNA, 19 nt, Homo sapiens
  misc_RNA (1)...(19): siRNA sense strand
gacaguauaugugaaacca

SEQ ID NO: 316078 - RNA, 19 nt, Homo sapiens
  misc_RNA (1)...(19): siRNA sense strand
aaagaccuguaacccugua

SEQ ID NO: 316079 - RNA, 19 nt, Homo sapiens
  misc_RNA (1)...(19): siRNA sense strand
ccuaaugaaagaccuguaa

SEQ ID NO: 316080 - RNA, 19 nt, Homo sapiens
  misc_RNA (1)...(19): siRNA sense strand
gcaugaaacagaauuugca

SEQ ID NO: 316081 - RNA, 19 nt, Homo sapiens
  misc_RNA (1)...(19): siRNA sense strand
gucgugaaacuauaaauug

SEQ ID NO: 316082 - RNA, 19 nt, Homo sapiens
  misc_RNA (1)...(19): siRNA sense strand
gcuaaagcuguuucaauca

SEQ ID NO: 316083 - RNA, 19 nt, Homo sapiens
  misc_RNA (1)...(19): siRNA sense strand
gaagugaaaaccagagaaa

SEQ ID NO: 316084 - RNA, 19 nt, Homo sapiens
  misc_RNA (1)...(19): siRNA sense strand
ggguguuacuaucguuaaa

SEQ ID NO: 316085 - RNA, 19 nt, Homo sapiens
  misc_RNA (1)...(19): siRNA sense strand
cuaaagcuguuucaaucag

SEQ ID NO: 316086 - RNA, 19 nt, Homo sapiens
  misc_RNA (1)...(19): siRNA sense strand
aagcaagucgugaaacuau

SEQ ID NO: 316087 - RNA, 19 nt, Homo sapiens
  misc_RNA (1)...(19): siRNA sense strand
ccauauagaaaugaggaua

SEQ ID NO: 316088 - RNA, 19 nt, Homo sapiens
  misc_RNA (1)...(19): siRNA sense strand
caacaucucgucagcuaac

SEQ ID NO: 316089 - RNA, 19 nt, Homo sapiens
  misc_RNA (1)...(19): siRNA sense strand
gaaagaaaagagaagaaga

SEQ ID NO: 316090 - RNA, 19 nt, Homo sapiens
  misc_RNA (1)...(19): siRNA sense strand
gucagcauaugugaagaaa

SEQ ID NO: 316091 - RNA, 19 nt, Homo sapiens
  misc_RNA (1)...(19): siRNA sense strand
cuaaaccuccauaugaaau

SEQ ID NO: 316092 - RNA, 19 nt, Homo sapiens
  misc_RNA (1)...(19): siRNA sense strand
aagaagaugaccaagcaaa

SEQ ID NO: 316093 - RNA, 19 nt, Homo sapiens
  misc_RNA (1)...(19): siRNA sense strand
gaagaagaugaccaagcaa

SEQ ID NO: 316094 - RNA, 19 nt, Homo sapiens
  misc_RNA (1)...(19): siRNA sense strand
cagaaaacuugaagaagau

SEQ ID NO: 316095 - RNA, 19 nt, Homo sapiens
  misc_RNA (1)...(19): siRNA sense strand
gaaacaggauggggugaau

SEQ ID NO: 316096 - RNA, 19 nt, Homo sapiens
  misc_RNA (1)...(19): siRNA sense strand
ggugaauucgaaauaauca

SEQ ID NO: 316097 - RNA, 19 nt, Homo sapiens
  misc_RNA (1)...(19): siRNA sense strand
guuacuaucguuaaaccaa

SEQ ID NO: 316098 - RNA, 19 nt, Homo sapiens
  misc_RNA (1)...(19): siRNA sense strand
agaagaagaugggcacacu

SEQ ID NO: 316099 - RNA, 19 nt, Homo sapiens
  misc_RNA (1)...(19): siRNA sense strand
gugaagaaaauccaguuua

SEQ ID NO: 316100 - RNA, 19 nt, Homo sapiens
  misc_RNA (1)...(19): siRNA sense strand
caucucgucagcuaacauu

SEQ ID NO: 316101 - RNA, 19 nt, Homo sapiens
  misc_RNA (1)...(19): siRNA sense strand
aaaagacagugguuucaga

SEQ ID NO: 316102 - RNA, 19 nt, Homo sapiens
  misc_RNA (1)...(19): siRNA sense strand
aaucagacaccaaugcaau

SEQ ID NO: 316103 - RNA, 19 nt, Homo sapiens
  misc_RNA (1)...(19): siRNA sense strand
guuacuaaaccuccauaug

SEQ ID NO: 316104 - RNA, 19 nt, Homo sapiens
  misc_RNA (1)...(19): siRNA sense strand
uaagaguuguuacuaaacc

SEQ ID NO: 316105 - RNA, 19 nt, Homo sapiens
  misc_RNA (1)...(19): siRNA sense strand
gguaauguugcucgguauu

SEQ ID NO: 316106 - RNA, 19 nt, Homo sapiens
  misc_RNA (1)...(19): siRNA sense strand
ccaagcaaaagacauauaa

SEQ ID NO: 316107 - RNA, 19 nt, Homo sapiens
  misc_RNA (1)...(19): siRNA sense strand
agcaagucgugaaacuaua

SEQ ID NO: 316108 - RNA, 19 nt, Homo sapiens
  misc_RNA (1)...(19): siRNA sense strand
guggacaguauaugugaaa

SEQ ID NO: 316109 - RNA, 19 nt, Homo sapiens
  misc_RNA (1)...(19): siRNA sense strand
aaaggguguuacuaucguu

SEQ ID NO: 316110 - RNA, 19 nt, Homo sapiens
  misc_RNA (1)...(19): siRNA sense strand
ugaaagcuauggcaauccu

SEQ ID NO: 316111 - RNA, 19 nt, Homo sapiens
  misc_RNA (1)...(19): siRNA sense strand
caagacccaacagcaauga

SEQ ID NO: 316112 - RNA, 19 nt, Homo sapiens
  misc_RNA (1)...(19): siRNA sense strand
aaagcaagucgugaaacua

SEQ ID NO: 316113 - RNA, 19 nt, Homo sapiens
  misc_RNA (1)...(19): siRNA sense strand
agcaaugaugcaacaauua

SEQ ID NO: 316114 - RNA, 19 nt, Homo sapiens
  misc_RNA (1)...(19): siRNA sense strand
gaccuguaacccuguauca

SEQ ID NO: 316115 - RNA, 19 nt, Homo sapiens
  misc_RNA (1)...(19): siRNA sense strand
gggagaguaaaggguguua

SEQ ID NO: 316116 - RNA, 19 nt, Homo sapiens
  misc_RNA (1)...(19): siRNA sense strand
aaggagagauuaaaagcaa

SEQ ID NO: 316117 - RNA, 19 nt, Homo sapiens
  misc_RNA (1)...(19): siRNA sense strand
uagaaaugaggauauguca

SEQ ID NO: 316118 - RNA, 19 nt, Homo sapiens
  misc_RNA (1)...(19): siRNA sense strand
gcaauccuuuaagaguugu

SEQ ID NO: 316119 - RNA, 19 nt, Homo sapiens
  misc_RNA (1)...(19): siRNA sense strand
ugaccaagcaaaagacaua

SEQ ID NO: 316120 - RNA, 19 nt, Homo sapiens
  misc_RNA (1)...(19): siRNA sense strand
aagcuauggcaauccuuua

SEQ ID NO: 316121 - RNA, 19 nt, Homo sapiens
  misc_RNA (1)...(19): siRNA sense strand
uaauguugcucgguauuuu

SEQ ID NO: 316122 - RNA, 19 nt, Homo sapiens
  misc_RNA (1)...(19): siRNA sense strand
aacccuguaucauuugcua

SEQ ID NO: 316123 - RNA, 19 nt, Homo sapiens
  misc_RNA (1)...(19): siRNA sense strand
aagaagaugggcacacuca

SEQ ID NO: 316124 - RNA, 19 nt, Homo sapiens
  misc_RNA (1)...(19): siRNA sense strand
caagucgugaaacuauaaa

SEQ ID NO: 316125 - RNA, 19 nt, Homo sapiens
  misc_RNA (1)...(19): siRNA sense strand
gggugaauucgaaauaauc

SEQ ID NO: 316126 - RNA, 19 nt, Homo sapiens
  misc_RNA (1)...(19): siRNA sense strand
ucaagacccaacagcaaug

SEQ ID NO: 316127 - RNA, 19 nt, Homo sapiens
  misc_RNA (1)...(19): siRNA sense strand
caguggacaguauauguga

SEQ ID NO: 316128 - RNA, 19 nt, Homo sapiens
  misc_RNA (1)...(19): siRNA sense strand
acuaaaccuccauaugaaa

SEQ ID NO: 316129 - RNA, 19 nt, Homo sapiens
  misc_RNA (1)...(19): siRNA sense strand
guuucagaguucuaugaug

SEQ ID NO: 316130 - RNA, 19 nt, Homo sapiens
  misc_RNA (1)...(19): siRNA sense strand
ucaguggacaguauaugug

SEQ ID NO: 316131 - RNA, 19 nt, Homo sapiens
  misc_RNA (1)...(19): siRNA sense strand
gaauaaacgugaagugugu

SEQ ID NO: 316132 - RNA, 19 nt, Homo sapiens
  misc_RNA (1)...(19): siRNA sense strand
ggaggaggguguaaagaaa

SEQ ID NO: 316133 - RNA, 19 nt, Homo sapiens
  misc_RNA (1)...(19): siRNA sense strand
gcacacacauuuggccuaa

SEQ ID NO: 316134 - RNA, 19 nt, Homo sapiens
  misc_RNA (1)...(19): siRNA sense strand
gcaaagcagucaucuugga

SEQ ID NO: 316135 - RNA, 19 nt, Homo sapiens
  misc_RNA (1)...(19): siRNA sense strand
agacagagcugaggacuga

SEQ ID NO: 316136 - RNA, 19 nt, Homo sapiens
  misc_RNA (1)...(19): siRNA sense strand
ggaaauugcuuaccccaua

SEQ ID NO: 316137 - RNA, 19 nt, Homo sapiens
  misc_RNA (1)...(19): siRNA sense strand
caaguucaaugaucaguug

SEQ ID NO: 316138 - RNA, 19 nt, Homo sapiens
  misc_RNA (1)...(19): siRNA sense strand
ggaaaggaauagcugaugu

SEQ ID NO: 316139 - RNA, 19 nt, Homo sapiens
  misc_RNA (1)...(19): siRNA sense strand
gaaaggaauagcugaugua

SEQ ID NO: 316140 - RNA, 19 nt, Homo sapiens
  misc_RNA (1)...(19): siRNA sense strand
gaauggaacucagcucuca

SEQ ID NO: 316141 - RNA, 19 nt, Homo sapiens
  misc_RNA (1)...(19): siRNA sense strand
gggcaaagcagucaucuug

SEQ ID NO: 316142 - RNA, 19 nt, Homo sapiens
  misc_RNA (1)...(19): siRNA sense strand
gcagggagaagaacaguuu

SEQ ID NO: 316143 - RNA, 19 nt, Homo sapiens
  misc_RNA (1)...(19): siRNA sense strand
gaaagacucagaggaaauu

SEQ ID NO: 316144 - RNA, 19 nt, Homo sapiens
  misc_RNA (1)...(19): siRNA sense strand
caacagaaggaaccaagua

SEQ ID NO: 316145 - RNA, 19 nt, Homo sapiens
  misc_RNA (1)...(19): siRNA sense strand
aguagaaacucacacgaua

SEQ ID NO: 316146 - RNA, 19 nt, Homo sapiens
  misc_RNA (1)...(19): siRNA sense strand
gagguugucugcaauauac

SEQ ID NO: 316147 - RNA, 19 nt, Homo sapiens
  misc_RNA (1)...(19): siRNA sense strand
gaagagguugucugcaaua

SEQ ID NO: 316148 - RNA, 19 nt, Homo sapiens
  misc_RNA (1)...(19): siRNA sense strand
gcagaagcaccaaauuuga

SEQ ID NO: 316149 - RNA, 19 nt, Homo sapiens
  misc_RNA (1)...(19): siRNA sense strand
ggaagagguugucugcaau

SEQ ID NO: 316150 - RNA, 19 nt, Homo sapiens
  misc_RNA (1)...(19): siRNA sense strand
caaaugaggauauggaaau

SEQ ID NO: 316151 - RNA, 19 nt, Homo sapiens
  misc_RNA (1)...(19): siRNA sense strand
aaagaaagacucagaggaa

SEQ ID NO: 316152 - RNA, 19 nt, Homo sapiens
  misc_RNA (1)...(19): siRNA sense strand
guuuguauguccaggaaua

SEQ ID NO: 316153 - RNA, 19 nt, Homo sapiens
  misc_RNA (1)...(19): siRNA sense strand
gcugaggacugaggagaaa

SEQ ID NO: 316154 - RNA, 19 nt, Homo sapiens
  misc_RNA (1)...(19): siRNA sense strand
uuaccaacaugacaaaguu

SEQ ID NO: 316155 - RNA, 19 nt, Homo sapiens
  misc_RNA (1)...(19): siRNA sense strand
uggaagagguugucugcaa

SEQ ID NO: 316156 - RNA, 19 nt, Homo sapiens
  misc_RNA (1)...(19): siRNA sense strand
ggacugaggagaaaguugu

SEQ ID NO: 316157 - RNA, 19 nt, Homo sapiens
  misc_RNA (1)...(19): siRNA sense strand
gggcagaccaucauugaga

SEQ ID NO: 316158 - RNA, 19 nt, Homo sapiens
  misc_RNA (1)...(19): siRNA sense strand
ggagaauccugaagacacu

SEQ ID NO: 316159 - RNA, 19 nt, Homo sapiens
  misc_RNA (1)...(19): siRNA sense strand
gaagaacaccagcaucaag

SEQ ID NO: 316160 - RNA, 19 nt, Homo sapiens
  misc_RNA (1)...(19): siRNA sense strand
gaaauugcuuaccccauaa

SEQ ID NO: 316161 - RNA, 19 nt, Homo sapiens
  misc_RNA (1)...(19): siRNA sense strand
ggccuaaccucggcaauuc

SEQ ID NO: 316162 - RNA, 19 nt, Homo sapiens
  misc_RNA (1)...(19): siRNA sense strand
gguuagcccuguggaauug

SEQ ID NO: 316163 - RNA, 19 nt, Homo sapiens
  misc_RNA (1)...(19): siRNA sense strand
gcaaguccacucugaagga

SEQ ID NO: 316164 - RNA, 19 nt, Homo sapiens
  misc_RNA (1)...(19): siRNA sense strand
gcaaaugaggauauggaaa

SEQ ID NO: 316165 - RNA, 19 nt, Homo sapiens
  misc_RNA (1)...(19): siRNA sense strand
gcaccaaauuugaucuucu

SEQ ID NO: 316166 - RNA, 19 nt, Homo sapiens
  misc_RNA (1)...(19): siRNA sense strand
gauggacuccggacagauu

SEQ ID NO: 316167 - RNA, 19 nt, Homo sapiens
  misc_RNA (1)...(19): siRNA sense strand
aggcagggcuggaauggaa

SEQ ID NO: 316168 - RNA, 19 nt, Homo sapiens
  misc_RNA (1)...(19): siRNA sense strand
gaaacucacacgauacaca

SEQ ID NO: 316169 - RNA, 19 nt, Homo sapiens
  misc_RNA (1)...(19): siRNA sense strand
gcaauauacagaaggaaau

SEQ ID NO: 316170 - RNA, 19 nt, Homo sapiens
  misc_RNA (1)...(19): siRNA sense strand
acacuuugauguucuggaa

SEQ ID NO: 316171 - RNA, 19 nt, Homo sapiens
  misc_RNA (1)...(19): siRNA sense strand
cagaagagagcauggaaga

SEQ ID NO: 316172 - RNA, 19 nt, Homo sapiens
  misc_RNA (1)...(19): siRNA sense strand
gcuggcaaguccacucuga

SEQ ID NO: 316173 - RNA, 19 nt, Homo sapiens
  misc_RNA (1)...(19): siRNA sense strand
ggaguacacugggcaacau

SEQ ID NO: 316174 - RNA, 19 nt, Homo sapiens
  misc_RNA (1)...(19): siRNA sense strand
aagaaagacucagaggaaa

SEQ ID NO: 316175 - RNA, 19 nt, Homo sapiens
  misc_RNA (1)...(19): siRNA sense strand
acagucaucucacccauca

SEQ ID NO: 316176 - RNA, 19 nt, Homo sapiens
  misc_RNA (1)...(19): siRNA sense strand
gaaauagaggagcuacuca

SEQ ID NO: 316177 - RNA, 19 nt, Homo sapiens
  misc_RNA (1)...(19): siRNA sense strand
ccucagcucuuccgcuaug

SEQ ID NO: 316178 - RNA, 19 nt, Homo sapiens
  misc_RNA (1)...(19): siRNA sense strand
cauccaggcucccuuccaa

SEQ ID NO: 316179 - RNA, 19 nt, Homo sapiens
  misc_RNA (1)...(19): siRNA sense strand
ggaaauagaggagcuacuc

SEQ ID NO: 316180 - RNA, 19 nt, Homo sapiens
  misc_RNA (1)...(19): siRNA sense strand
caguuucucuauacucuga

SEQ ID NO: 316181 - RNA, 19 nt, Homo sapiens
  misc_RNA (1)...(19): siRNA sense strand
uccaauaccugcagaagca

SEQ ID NO: 316182 - RNA, 19 nt, Homo sapiens
  misc_RNA (1)...(19): siRNA sense strand
uggcugagauggaagaaca

SEQ ID NO: 316183 - RNA, 19 nt, Homo sapiens
  misc_RNA (1)...(19): siRNA sense strand
gaagcugggucggagaaca

SEQ ID NO: 316184 - RNA, 19 nt, Homo sapiens
  misc_RNA (1)...(19): siRNA sense strand
gcacuauagaagcaaauga

SEQ ID NO: 316185 - RNA, 19 nt, Homo sapiens
  misc_RNA (1)...(19): siRNA sense strand
ggaagaacaccagcaucaa

SEQ ID NO: 316186 - RNA, 19 nt, Homo sapiens
  misc_RNA (1)...(19): siRNA sense strand
ucaagaagguuuuagacaa

SEQ ID NO: 316187 - RNA, 19 nt, Homo sapiens
  misc_RNA (1)...(19): siRNA sense strand
ggaagaggcagggcuggaa

SEQ ID NO: 316188 - RNA, 19 nt, Homo sapiens
  misc_RNA (1)...(19): siRNA sense strand
gguagcaucacgcagauug

SEQ ID NO: 316189 - RNA, 19 nt, Homo sapiens
  misc_RNA (1)...(19): siRNA sense strand
gaaaguuguggcugagaug

SEQ ID NO: 316190 - RNA, 19 nt, Homo sapiens
  misc_RNA (1)...(19): siRNA sense strand
cagaggacacuuugauguu

SEQ ID NO: 316191 - RNA, 19 nt, Homo sapiens
  misc_RNA (1)...(19): siRNA sense strand
gaacaguuucucuauacuc

SEQ ID NO: 316192 - RNA, 19 nt, Homo sapiens
  misc_RNA (1)...(19): siRNA sense strand
gauguucuggaaaggaaua

SEQ ID NO: 316193 - RNA, 19 nt, Homo sapiens
  misc_RNA (1)...(19): siRNA sense strand
cgugaagugugucaaguuc

SEQ ID NO: 316194 - RNA, 19 nt, Homo sapiens
  misc_RNA (1)...(19): siRNA sense strand
ugaagauacugagggcaaa

SEQ ID NO: 316195 - RNA, 19 nt, Homo sapiens
  misc_RNA (1)...(19): siRNA sense strand
cccagaagcugaagauacu

SEQ ID NO: 316196 - RNA, 19 nt, Homo sapiens
  misc_RNA (1)...(19): siRNA sense strand
gaucacaggcugaaaucuc

SEQ ID NO: 316197 - RNA, 19 nt, Homo sapiens
  misc_RNA (1)...(19): siRNA sense strand
gaagaagcaaggccaggau

SEQ ID NO: 316198 - RNA, 19 nt, Homo sapiens
  misc_RNA (1)...(19): siRNA sense strand
cugcagaagcaccaaauuu

SEQ ID NO: 316199 - RNA, 19 nt, Homo sapiens
  misc_RNA (1)...(19): siRNA sense strand
ccaagcacuuuguucaucu

SEQ ID NO: 316200 - RNA, 19 nt, Homo sapiens
  misc_RNA (1)...(19): siRNA sense strand
caccaaauuugaucuucug

SEQ ID NO: 316201 - RNA, 19 nt, Homo sapiens
  misc_RNA (1)...(19): siRNA sense strand
gaaggaaauagaggagcua

SEQ ID NO: 316202 - RNA, 19 nt, Homo sapiens
  misc_RNA (1)...(19): siRNA sense strand
gauacaggcacuauagaag

SEQ ID NO: 316203 - RNA, 19 nt, Homo sapiens
  misc_RNA (1)...(19): siRNA sense strand
cacggcaguuguagcagua

SEQ ID NO: 316204 - RNA, 19 nt, Homo sapiens
  misc_RNA (1)...(19): siRNA sense strand
ggacacagucaagaagguu

SEQ ID NO: 316205 - RNA, 19 nt, Homo sapiens
  misc_RNA (1)...(19): siRNA sense strand
gaggacacuuugauguucu

SEQ ID NO: 316206 - RNA, 19 nt, Homo sapiens
  misc_RNA (1)...(19): siRNA sense strand
gaagaggcagggcuggaau

SEQ ID NO: 316207 - RNA, 19 nt, Homo sapiens
  misc_RNA (1)...(19): siRNA sense strand
agaggacacuuugauguuc

SEQ ID NO: 316208 - RNA, 19 nt, Homo sapiens
  misc_RNA (1)...(19): siRNA sense strand
ugugguaccuacugaagga

SEQ ID NO: 316209 - RNA, 19 nt, Homo sapiens
  misc_RNA (1)...(19): siRNA sense strand
ggacccagaagcugaagau

SEQ ID NO: 316210 - RNA, 19 nt, Homo sapiens
  misc_RNA (1)...(19): siRNA sense strand
agaagcaaaugaggauaug

SEQ ID NO: 316211 - RNA, 19 nt, Homo sapiens
  misc_RNA (1)...(19): siRNA sense strand
agaccaucauugagauuga

SEQ ID NO: 316212 - RNA, 19 nt, Homo sapiens
  misc_RNA (1)...(19): siRNA sense strand
cggaggaggguguaaagaa

SEQ ID NO: 316213 - RNA, 19 nt, Homo sapiens
  misc_RNA (1)...(19): siRNA sense strand
gaggauauggaaauugcuu

SEQ ID NO: 316214 - RNA, 19 nt, Homo sapiens
  misc_RNA (1)...(19): siRNA sense strand
ggcagaccaucauugagau

SEQ ID NO: 316215 - RNA, 19 nt, Homo sapiens
  misc_RNA (1)...(19): siRNA sense strand
uaauggacacagucaagaa

SEQ ID NO: 316216 - RNA, 19 nt, Homo sapiens
  misc_RNA (1)...(19): siRNA sense strand
ccaagugauuuugcaguua

SEQ ID NO: 316217 - RNA, 19 nt, Homo sapiens
  misc_RNA (1)...(19): siRNA sense strand
ggacuggaagagagcuauu

SEQ ID NO: 316218 - RNA, 19 nt, Homo sapiens
  misc_RNA (1)...(19): siRNA sense strand
ugcagaagcaccaaauuug

SEQ ID NO: 316219 - RNA, 19 nt, Homo sapiens
  misc_RNA (1)...(19): siRNA sense strand
agaaaguuguggcugagau

SEQ ID NO: 316220 - RNA, 19 nt, Homo sapiens
  misc_RNA (1)...(19): siRNA sense strand
gcagaccaucauugagauu

SEQ ID NO: 316221 - RNA, 19 nt, Homo sapiens
  misc_RNA (1)...(19): siRNA sense strand
ugauacaggcacuauagaa

SEQ ID NO: 316222 - RNA, 19 nt, Homo sapiens
  misc_RNA (1)...(19): siRNA sense strand
gaagaagggauugauacag

SEQ ID NO: 316223 - RNA, 19 nt, Homo sapiens
  misc_RNA (1)...(19): siRNA sense strand
cagccucaguucacaguca

SEQ ID NO: 316224 - RNA, 19 nt, Homo sapiens
  misc_RNA (1)...(19): siRNA sense strand
aaacucacacgauacacaa

SEQ ID NO: 316225 - RNA, 19 nt, Homo sapiens
  misc_RNA (1)...(19): siRNA sense strand
ccaaguagagcagggagaa

SEQ ID NO: 316226 - RNA, 19 nt, Homo sapiens
  misc_RNA (1)...(19): siRNA sense strand
gcaguuguagcaguagaaa

SEQ ID NO: 316227 - RNA, 19 nt, Homo sapiens
  misc_RNA (1)...(19): siRNA sense strand
caggcucccuuccaaguca

SEQ ID NO: 316228 - RNA, 19 nt, Homo sapiens
  misc_RNA (1)...(19): siRNA sense strand
ucagaggacacuuugaugu

SEQ ID NO: 316229 - RNA, 19 nt, Homo sapiens
  misc_RNA (1)...(19): siRNA sense strand
caggacagcagacaagugu

SEQ ID NO: 316230 - RNA, 19 nt, Homo sapiens
  misc_RNA (1)...(19): siRNA sense strand
uggaagaacaccagcauca

SEQ ID NO: 316231 - RNA, 19 nt, Homo sapiens
  misc_RNA (1)...(19): siRNA sense strand
gaauaaacgugaagugugu

SEQ ID NO: 316232 - RNA, 19 nt, Homo sapiens
  misc_RNA (1)...(19): siRNA sense strand
ggaggaggguguaaagaaa

SEQ ID NO: 316233 - RNA, 19 nt, Homo sapiens
  misc_RNA (1)...(19): siRNA sense strand
gcacacacauuuggccuaa

SEQ ID NO: 316234 - RNA, 19 nt, Homo sapiens
  misc_RNA (1)...(19): siRNA sense strand
gcaaagcagucaucuugga

SEQ ID NO: 316235 - RNA, 19 nt, Homo sapiens
  misc_RNA (1)...(19): siRNA sense strand
agacagagcugaggacuga

SEQ ID NO: 316236 - RNA, 19 nt, Homo sapiens
  misc_RNA (1)...(19): siRNA sense strand
ggaaauugcuuaccccaua

SEQ ID NO: 316237 - RNA, 19 nt, Homo sapiens
  misc_RNA (1)...(19): siRNA sense strand
caaguucaaugaucaguug

SEQ ID NO: 316238 - RNA, 19 nt, Homo sapiens
  misc_RNA (1)...(19): siRNA sense strand
ggaaaggaauagcugaugu

SEQ ID NO: 316239 - RNA, 19 nt, Homo sapiens
  misc_RNA (1)...(19): siRNA sense strand
gaaaggaauagcugaugua

SEQ ID NO: 316240 - RNA, 19 nt, Homo sapiens
  misc_RNA (1)...(19): siRNA sense strand
gaauggaacucagcucuca

SEQ ID NO: 316241 - RNA, 19 nt, Homo sapiens
  misc_RNA (1)...(19): siRNA sense strand
gggcaaagcagucaucuug

SEQ ID NO: 316242 - RNA, 19 nt, Homo sapiens
  misc_RNA (1)...(19): siRNA sense strand
gcagggagaagaacaguuu

SEQ ID NO: 316243 - RNA, 19 nt, Homo sapiens
  misc_RNA (1)...(19): siRNA sense strand
gaaagacucagaggaaauu

SEQ ID NO: 316244 - RNA, 19 nt, Homo sapiens
  misc_RNA (1)...(19): siRNA sense strand
caacagaaggaaccaagua

SEQ ID NO: 316245 - RNA, 19 nt, Homo sapiens
  misc_RNA (1)...(19): siRNA sense strand
aguagaaacucacacgaua

SEQ ID NO: 316246 - RNA, 19 nt, Homo sapiens
  misc_RNA (1)...(19): siRNA sense strand
gagguugucugcaauauac

SEQ ID NO: 316247 - RNA, 19 nt, Homo sapiens
  misc_RNA (1)...(19): siRNA sense strand
gaagagguugucugcaaua

SEQ ID NO: 316248 - RNA, 19 nt, Homo sapiens
  misc_RNA (1)...(19): siRNA sense strand
gcagaagcaccaaauuuga

SEQ ID NO: 316249 - RNA, 19 nt, Homo sapiens
  misc_RNA (1)...(19): siRNA sense strand
ggaagagguugucugcaau

SEQ ID NO: 316250 - RNA, 19 nt, Homo sapiens
  misc_RNA (1)...(19): siRNA sense strand
caaaugaggauauggaaau

SEQ ID NO: 316251 - RNA, 19 nt, Homo sapiens
  misc_RNA (1)...(19): siRNA sense strand
aaagaaagacucagaggaa

SEQ ID NO: 316252 - RNA, 19 nt, Homo sapiens
  misc_RNA (1)...(19): siRNA sense strand
guuuguauguccaggaaua

SEQ ID NO: 316253 - RNA, 19 nt, Homo sapiens
  misc_RNA (1)...(19): siRNA sense strand
gcugaggacugaggagaaa

SEQ ID NO: 316254 - RNA, 19 nt, Homo sapiens
  misc_RNA (1)...(19): siRNA sense strand
uuaccaacaugacaaaguu

SEQ ID NO: 316255 - RNA, 19 nt, Homo sapiens
  misc_RNA (1)...(19): siRNA sense strand
uggaagagguugucugcaa

SEQ ID NO: 316256 - RNA, 19 nt, Homo sapiens
  misc_RNA (1)...(19): siRNA sense strand
ggacugaggagaaaguugu

SEQ ID NO: 316257 - RNA, 19 nt, Homo sapiens
  misc_RNA (1)...(19): siRNA sense strand
gggcagaccaucauugaga

SEQ ID NO: 316258 - RNA, 19 nt, Homo sapiens
  misc_RNA (1)...(19): siRNA sense strand
ggagaauccugaagacacu

SEQ ID NO: 316259 - RNA, 19 nt, Homo sapiens
  misc_RNA (1)...(19): siRNA sense strand
gaagaacaccagcaucaag

SEQ ID NO: 316260 - RNA, 19 nt, Homo sapiens
  misc_RNA (1)...(19): siRNA sense strand
gaaauugcuuaccccauaa

SEQ ID NO: 316261 - RNA, 19 nt, Homo sapiens
  misc_RNA (1)...(19): siRNA sense strand
ggccuaaccucggcaauuc

SEQ ID NO: 316262 - RNA, 19 nt, Homo sapiens
  misc_RNA (1)...(19): siRNA sense strand
gguuagcccuguggaauug

SEQ ID NO: 316263 - RNA, 19 nt, Homo sapiens
  misc_RNA (1)...(19): siRNA sense strand
gcaaguccacucugaagga

SEQ ID NO: 316264 - RNA, 19 nt, Homo sapiens
  misc_RNA (1)...(19): siRNA sense strand
gcaaaugaggauauggaaa

SEQ ID NO: 316265 - RNA, 19 nt, Homo sapiens
  misc_RNA (1)...(19): siRNA sense strand
gcaccaaauuugaucuucu

SEQ ID NO: 316266 - RNA, 19 nt, Homo sapiens
  misc_RNA (1)...(19): siRNA sense strand
gauggacuccggacagauu

SEQ ID NO: 316267 - RNA, 19 nt, Homo sapiens
  misc_RNA (1)...(19): siRNA sense strand
aggcagggcuggaauggaa

SEQ ID NO: 316268 - RNA, 19 nt, Homo sapiens
  misc_RNA (1)...(19): siRNA sense strand
gaaacucacacgauacaca

SEQ ID NO: 316269 - RNA, 19 nt, Homo sapiens
  misc_RNA (1)...(19): siRNA sense strand
gcaauauacagaaggaaau

SEQ ID NO: 316270 - RNA, 19 nt, Homo sapiens
  misc_RNA (1)...(19): siRNA sense strand
acacuuugauguucuggaa

SEQ ID NO: 316271 - RNA, 19 nt, Homo sapiens
  misc_RNA (1)...(19): siRNA sense strand
cagaagagagcauggaaga

SEQ ID NO: 316272 - RNA, 19 nt, Homo sapiens
  misc_RNA (1)...(19): siRNA sense strand
gcuggcaaguccacucuga

SEQ ID NO: 316273 - RNA, 19 nt, Homo sapiens
  misc_RNA (1)...(19): siRNA sense strand
ggaguacacugggcaacau

SEQ ID NO: 316274 - RNA, 19 nt, Homo sapiens
  misc_RNA (1)...(19): siRNA sense strand
aagaaagacucagaggaaa

SEQ ID NO: 316275 - RNA, 19 nt, Homo sapiens
  misc_RNA (1)...(19): siRNA sense strand
acagucaucucacccauca

SEQ ID NO: 316276 - RNA, 19 nt, Homo sapiens
  misc_RNA (1)...(19): siRNA sense strand
gaaauagaggagcuacuca

SEQ ID NO: 316277 - RNA, 19 nt, Homo sapiens
  misc_RNA (1)...(19): siRNA sense strand
ccucagcucuuccgcuaug

SEQ ID NO: 316278 - RNA, 19 nt, Homo sapiens
  misc_RNA (1)...(19): siRNA sense strand
cauccaggcucccuuccaa

SEQ ID NO: 316279 - RNA, 19 nt, Homo sapiens
  misc_RNA (1)...(19): siRNA sense strand
ggaaauagaggagcuacuc

SEQ ID NO: 316280 - RNA, 19 nt, Homo sapiens
  misc_RNA (1)...(19): siRNA sense strand
caguuucucuauacucuga

SEQ ID NO: 316281 - RNA, 19 nt, Homo sapiens
  misc_RNA (1)...(19): siRNA sense strand
uccaauaccugcagaagca

SEQ ID NO: 316282 - RNA, 19 nt, Homo sapiens
  misc_RNA (1)...(19): siRNA sense strand
uggcugagauggaagaaca

SEQ ID NO: 316283 - RNA, 19 nt, Homo sapiens
  misc_RNA (1)...(19): siRNA sense strand
gaagcugggucggagaaca

SEQ ID NO: 316284 - RNA, 19 nt, Homo sapiens
  misc_RNA (1)...(19): siRNA sense strand
gcacuauagaagcaaauga

SEQ ID NO: 316285 - RNA, 19 nt, Homo sapiens
  misc_RNA (1)...(19): siRNA sense strand
ggaagaacaccagcaucaa

SEQ ID NO: 316286 - RNA, 19 nt, Homo sapiens
  misc_RNA (1)...(19): siRNA sense strand
ucaagaagguuuuagacaa

SEQ ID NO: 316287 - RNA, 19 nt, Homo sapiens
  misc_RNA (1)...(19): siRNA sense strand
ggaagaggcagggcuggaa

SEQ ID NO: 316288 - RNA, 19 nt, Homo sapiens
  misc_RNA (1)...(19): siRNA sense strand
gguagcaucacgcagauug

SEQ ID NO: 316289 - RNA, 19 nt, Homo sapiens
  misc_RNA (1)...(19): siRNA sense strand
gaaaguuguggcugagaug

SEQ ID NO: 316290 - RNA, 19 nt, Homo sapiens
  misc_RNA (1)...(19): siRNA sense strand
cagaggacacuuugauguu

SEQ ID NO: 316291 - RNA, 19 nt, Homo sapiens
  misc_RNA (1)...(19): siRNA sense strand
gaacaguuucucuauacuc

SEQ ID NO: 316292 - RNA, 19 nt, Homo sapiens
  misc_RNA (1)...(19): siRNA sense strand
gauguucuggaaaggaaua

SEQ ID NO: 316293 - RNA, 19 nt, Homo sapiens
  misc_RNA (1)...(19): siRNA sense strand
cgugaagugugucaaguuc

SEQ ID NO: 316294 - RNA, 19 nt, Homo sapiens
  misc_RNA (1)...(19): siRNA sense strand
ugaagauacugagggcaaa

SEQ ID NO: 316295 - RNA, 19 nt, Homo sapiens
  misc_RNA (1)...(19): siRNA sense strand
cccagaagcugaagauacu

SEQ ID NO: 316296 - RNA, 19 nt, Homo sapiens
  misc_RNA (1)...(19): siRNA sense strand
gaucacaggcugaaaucuc

SEQ ID NO: 316297 - RNA, 19 nt, Homo sapiens
  misc_RNA (1)...(19): siRNA sense strand
gaagaagcaaggccaggau

SEQ ID NO: 316298 - RNA, 19 nt, Homo sapiens
  misc_RNA (1)...(19): siRNA sense strand
cugcagaagcaccaaauuu

SEQ ID NO: 316299 - RNA, 19 nt, Homo sapiens
  misc_RNA (1)...(19): siRNA sense strand
ccaagcacuuuguucaucu

SEQ ID NO: 316300 - RNA, 19 nt, Homo sapiens
  misc_RNA (1)...(19): siRNA sense strand
caccaaauuugaucuucug

SEQ ID NO: 316301 - RNA, 19 nt, Homo sapiens
  misc_RNA (1)...(19): siRNA sense strand
gaaggaaauagaggagcua

SEQ ID NO: 316302 - RNA, 19 nt, Homo sapiens
  misc_RNA (1)...(19): siRNA sense strand
gauacaggcacuauagaag

SEQ ID NO: 316303 - RNA, 19 nt, Homo sapiens
  misc_RNA (1)...(19): siRNA sense strand
cacggcaguuguagcagua

SEQ ID NO: 316304 - RNA, 19 nt, Homo sapiens
  misc_RNA (1)...(19): siRNA sense strand
ggacacagucaagaagguu

SEQ ID NO: 316305 - RNA, 19 nt, Homo sapiens
  misc_RNA (1)...(19): siRNA sense strand
gaggacacuuugauguucu

SEQ ID NO: 316306 - RNA, 19 nt, Homo sapiens
  misc_RNA (1)...(19): siRNA sense strand
gaagaggcagggcuggaau

SEQ ID NO: 316307 - RNA, 19 nt, Homo sapiens
  misc_RNA (1)...(19): siRNA sense strand
agaggacacuuugauguuc

SEQ ID NO: 316308 - RNA, 19 nt, Homo sapiens
  misc_RNA (1)...(19): siRNA sense strand
ugugguaccuacugaagga

SEQ ID NO: 316309 - RNA, 19 nt, Homo sapiens
  misc_RNA (1)...(19): siRNA sense strand
ggacccagaagcugaagau

SEQ ID NO: 316310 - RNA, 19 nt, Homo sapiens
  misc_RNA (1)...(19): siRNA sense strand
agaagcaaaugaggauaug

SEQ ID NO: 316311 - RNA, 19 nt, Homo sapiens
  misc_RNA (1)...(19): siRNA sense strand
agaccaucauugagauuga

SEQ ID NO: 316312 - RNA, 19 nt, Homo sapiens
  misc_RNA (1)...(19): siRNA sense strand
cggaggaggguguaaagaa

SEQ ID NO: 316313 - RNA, 19 nt, Homo sapiens
  misc_RNA (1)...(19): siRNA sense strand
gaggauauggaaauugcuu

SEQ ID NO: 316314 - RNA, 19 nt, Homo sapiens
  misc_RNA (1)...(19): siRNA sense strand
ggcagaccaucauugagau

SEQ ID NO: 316315 - RNA, 19 nt, Homo sapiens
  misc_RNA (1)...(19): siRNA sense strand
uaauggacacagucaagaa

SEQ ID NO: 316316 - RNA, 19 nt, Homo sapiens
  misc_RNA (1)...(19): siRNA sense strand
ccaagugauuuugcaguua

SEQ ID NO: 316317 - RNA, 19 nt, Homo sapiens
  misc_RNA (1)...(19): siRNA sense strand
ggacuggaagagagcuauu

SEQ ID NO: 316318 - RNA, 19 nt, Homo sapiens
  misc_RNA (1)...(19): siRNA sense strand
ugcagaagcaccaaauuug

SEQ ID NO: 316319 - RNA, 19 nt, Homo sapiens
  misc_RNA (1)...(19): siRNA sense strand
agaaaguuguggcugagau

SEQ ID NO: 316320 - RNA, 19 nt, Homo sapiens
  misc_RNA (1)...(19): siRNA sense strand
gcagaccaucauugagauu

SEQ ID NO: 316321 - RNA, 19 nt, Homo sapiens
  misc_RNA (1)...(19): siRNA sense strand
ugauacaggcacuauagaa

SEQ ID NO: 316322 - RNA, 19 nt, Homo sapiens
  misc_RNA (1)...(19): siRNA sense strand
gaagaagggauugauacag

SEQ ID NO: 316323 - RNA, 19 nt, Homo sapiens
  misc_RNA (1)...(19): siRNA sense strand
cagccucaguucacaguca

SEQ ID NO: 316324 - RNA, 19 nt, Homo sapiens
  misc_RNA (1)...(19): siRNA sense strand
aaacucacacgauacacaa

SEQ ID NO: 316325 - RNA, 19 nt, Homo sapiens
  misc_RNA (1)...(19): siRNA sense strand
ccaaguagagcagggagaa

SEQ ID NO: 316326 - RNA, 19 nt, Homo sapiens
  misc_RNA (1)...(19): siRNA sense strand
gcaguuguagcaguagaaa

SEQ ID NO: 316327 - RNA, 19 nt, Homo sapiens
  misc_RNA (1)...(19): siRNA sense strand
caggcucccuuccaaguca

SEQ ID NO: 316328 - RNA, 19 nt, Homo sapiens
  misc_RNA (1)...(19): siRNA sense strand
ucagaggacacuuugaugu

SEQ ID NO: 316329 - RNA, 19 nt, Homo sapiens
  misc_RNA (1)...(19): siRNA sense strand
caggacagcagacaagugu

SEQ ID NO: 316330 - RNA, 19 nt, Homo sapiens
  misc_RNA (1)...(19): siRNA sense strand
uggaagaacaccagcauca

SEQ ID NO: 316331 - RNA, 19 nt, Homo sapiens
  misc_RNA (1)...(19): siRNA sense strand
ccgaagagauucugaugaa

SEQ ID NO: 316332 - RNA, 19 nt, Homo sapiens
  misc_RNA (1)...(19): siRNA sense strand
ucaacgagcuggucgacuu

SEQ ID NO: 316333 - RNA, 19 nt, Homo sapiens
  misc_RNA (1)...(19): siRNA sense strand
gcgacgagcuggccuucaa

SEQ ID NO: 316334 - RNA, 19 nt, Homo sapiens
  misc_RNA (1)...(19): siRNA sense strand
gcagcuggccgaagagauu

SEQ ID NO: 316335 - RNA, 19 nt, Homo sapiens
  misc_RNA (1)...(19): siRNA sense strand
ccaccaccaucgccaagaa

SEQ ID NO: 316336 - RNA, 19 nt, Homo sapiens
  misc_RNA (1)...(19): siRNA sense strand
ucaagauccugaacaugga

SEQ ID NO: 316337 - RNA, 19 nt, Homo sapiens
  misc_RNA (1)...(19): siRNA sense strand
gauuuauucccaagaacua

SEQ ID NO: 316338 - RNA, 19 nt, Homo sapiens
  misc_RNA (1)...(19): siRNA sense strand
gaacuacauccgcgucaag

SEQ ID NO: 316339 - RNA, 19 nt, Homo sapiens
  misc_RNA (1)...(19): siRNA sense strand
caagggagacacacucaag

SEQ ID NO: 316340 - RNA, 19 nt, Homo sapiens
  misc_RNA (1)...(19): siRNA sense strand
guacagcuuucaggcuaca

SEQ ID NO: 316341 - RNA, 19 nt, Homo sapiens
  misc_RNA (1)...(19): siRNA sense strand
gagacacacucaagauccu

SEQ ID NO: 316342 - RNA, 19 nt, Homo sapiens
  misc_RNA (1)...(19): siRNA sense strand
cauggaggaugaccagaac

SEQ ID NO: 316343 - RNA, 19 nt, Homo sapiens
  misc_RNA (1)...(19): siRNA sense strand
gggagacacacucaagauc

SEQ ID NO: 316344 - RNA, 19 nt, Homo sapiens
  misc_RNA (1)...(19): siRNA sense strand
cgaagagauucugaugaag

SEQ ID NO: 316345 - RNA, 19 nt, Homo sapiens
  misc_RNA (1)...(19): siRNA sense strand
gccaagaagcggcagaucu

SEQ ID NO: 316346 - RNA, 19 nt, Homo sapiens
  misc_RNA (1)...(19): siRNA sense strand
cgagcuggccuucaacaag

SEQ ID NO: 316347 - RNA, 19 nt, Homo sapiens
  misc_RNA (1)...(19): siRNA sense strand
gccgaagagauucugauga

SEQ ID NO: 316348 - RNA, 19 nt, Homo sapiens
  misc_RNA (1)...(19): siRNA sense strand
gggugucgagggauuuauu

SEQ ID NO: 316349 - RNA, 19 nt, Homo sapiens
  misc_RNA (1)...(19): siRNA sense strand
caacgagcuggucgacuuc

SEQ ID NO: 316350 - RNA, 19 nt, Homo sapiens
  misc_RNA (1)...(19): siRNA sense strand
ggccgaagagauucugaug

SEQ ID NO: 316351 - RNA, 19 nt, Homo sapiens
  misc_RNA (1)...(19): siRNA sense strand
ggauuuauucccaagaacu

SEQ ID NO: 316352 - RNA, 19 nt, Homo sapiens
  misc_RNA (1)...(19): siRNA sense strand
ucugggagccuuccugauc

SEQ ID NO: 316353 - RNA, 19 nt, Homo sapiens
  misc_RNA (1)...(19): siRNA sense strand
ggcccaguuugacuucuca

SEQ ID NO: 316354 - RNA, 19 nt, Homo sapiens
  misc_RNA (1)...(19): siRNA sense strand
gaaaugaggaccagaguua

SEQ ID NO: 316355 - RNA, 19 nt, Homo sapiens
  misc_RNA (1)...(19): siRNA sense strand
acaaagaaauggcaagaua

SEQ ID NO: 316356 - RNA, 19 nt, Homo sapiens
  misc_RNA (1)...(19): siRNA sense strand
gaccagaguuaacaaagaa

SEQ ID NO: 316357 - RNA, 19 nt, Homo sapiens
  misc_RNA (1)...(19): siRNA sense strand
ggaccagaguuaacaaaga

SEQ ID NO: 316358 - RNA, 19 nt, Homo sapiens
  misc_RNA (1)...(19): siRNA sense strand
ggaagaaggaugugauuug

SEQ ID NO: 316359 - RNA, 19 nt, Homo sapiens
  misc_RNA (1)...(19): siRNA sense strand
gaacacaauugccuacgau

SEQ ID NO: 316360 - RNA, 19 nt, Homo sapiens
  misc_RNA (1)...(19): siRNA sense strand
gacagaagcagaucaacua

SEQ ID NO: 316361 - RNA, 19 nt, Homo sapiens
  misc_RNA (1)...(19): siRNA sense strand
gaugaaaguguccuaauga

SEQ ID NO: 316362 - RNA, 19 nt, Homo sapiens
  misc_RNA (1)...(19): siRNA sense strand
uaacugaacccuugagaga

SEQ ID NO: 316363 - RNA, 19 nt, Homo sapiens
  misc_RNA (1)...(19): siRNA sense strand
caagugcaguugaagaaga

SEQ ID NO: 316364 - RNA, 19 nt, Homo sapiens
  misc_RNA (1)...(19): siRNA sense strand
gaagaaggaugugauuugc

SEQ ID NO: 316365 - RNA, 19 nt, Homo sapiens
  misc_RNA (1)...(19): siRNA sense strand
ucaaaggagucuaugucua

SEQ ID NO: 316366 - RNA, 19 nt, Homo sapiens
  misc_RNA (1)...(19): siRNA sense strand
ggaagguggcucugcauuu

SEQ ID NO: 316367 - RNA, 19 nt, Homo sapiens
  misc_RNA (1)...(19): siRNA sense strand
gaagguggcucugcauuuu

SEQ ID NO: 316368 - RNA, 19 nt, Homo sapiens
  misc_RNA (1)...(19): siRNA sense strand
ggaugugauuugcaagaaa

SEQ ID NO: 316369 - RNA, 19 nt, Homo sapiens
  misc_RNA (1)...(19): siRNA sense strand
uuaaagaagucccaagaca

SEQ ID NO: 316370 - RNA, 19 nt, Homo sapiens
  misc_RNA (1)...(19): siRNA sense strand
gaaguauagucgacguuca

SEQ ID NO: 316371 - RNA, 19 nt, Homo sapiens
  misc_RNA (1)...(19): siRNA sense strand
caagaccccuaauaaauuu

SEQ ID NO: 316372 - RNA, 19 nt, Homo sapiens
  misc_RNA (1)...(19): siRNA sense strand
agaaggaugugauuugcaa

SEQ ID NO: 316373 - RNA, 19 nt, Homo sapiens
  misc_RNA (1)...(19): siRNA sense strand
agaagcagaucaacuaugg

SEQ ID NO: 316374 - RNA, 19 nt, Homo sapiens
  misc_RNA (1)...(19): siRNA sense strand
ggaugaguuugauuuggaa

SEQ ID NO: 316375 - RNA, 19 nt, Homo sapiens
  misc_RNA (1)...(19): siRNA sense strand
caaagaaauggcaagauau

SEQ ID NO: 316376 - RNA, 19 nt, Homo sapiens
  misc_RNA (1)...(19): siRNA sense strand
gaaguucugauucaaagga

SEQ ID NO: 316377 - RNA, 19 nt, Homo sapiens
  misc_RNA (1)...(19): siRNA sense strand
ggaagcuuguuuaacugaa

SEQ ID NO: 316378 - RNA, 19 nt, Homo sapiens
  misc_RNA (1)...(19): siRNA sense strand
caaaggagucuaugucuac

SEQ ID NO: 316379 - RNA, 19 nt, Homo sapiens
  misc_RNA (1)...(19): siRNA sense strand
ugagacacauggacaguca

SEQ ID NO: 316380 - RNA, 19 nt, Homo sapiens
  misc_RNA (1)...(19): siRNA sense strand
gcgcagacccgagagcuuu

SEQ ID NO: 316381 - RNA, 19 nt, Homo sapiens
  misc_RNA (1)...(19): siRNA sense strand
ucaaguggaggaugaguuu

SEQ ID NO: 316382 - RNA, 19 nt, Homo sapiens
  misc_RNA (1)...(19): siRNA sense strand
gaccuugaaucugcagaaa

SEQ ID NO: 316383 - RNA, 19 nt, Homo sapiens
  misc_RNA (1)...(19): siRNA sense strand
agaugaaaguguccuaaug

SEQ ID NO: 316384 - RNA, 19 nt, Homo sapiens
  misc_RNA (1)...(19): siRNA sense strand
ggagacagaagcagaucaa

SEQ ID NO: 316385 - RNA, 19 nt, Homo sapiens
  misc_RNA (1)...(19): siRNA sense strand
ccuacgaucguuauauuaa

SEQ ID NO: 316386 - RNA, 19 nt, Homo sapiens
  misc_RNA (1)...(19): siRNA sense strand
ucaaugacuuuggaagaga

SEQ ID NO: 316387 - RNA, 19 nt, Homo sapiens
  misc_RNA (1)...(19): siRNA sense strand
acagucaaguggaggauga

SEQ ID NO: 316388 - RNA, 19 nt, Homo sapiens
  misc_RNA (1)...(19): siRNA sense strand
caggaugacuuugaugugu

SEQ ID NO: 316389 - RNA, 19 nt, Homo sapiens
  misc_RNA (1)...(19): siRNA sense strand
uaacaaagaaauggcaaga

SEQ ID NO: 316390 - RNA, 19 nt, Homo sapiens
  misc_RNA (1)...(19): siRNA sense strand
ggaggaugaguuugauuug

SEQ ID NO: 316391 - RNA, 19 nt, Homo sapiens
  misc_RNA (1)...(19): siRNA sense strand
gaucaacuaugggaagaac

SEQ ID NO: 316392 - RNA, 19 nt, Homo sapiens
  misc_RNA (1)...(19): siRNA sense strand
gcucucaggaugacuuuga

SEQ ID NO: 316393 - RNA, 19 nt, Homo sapiens
  misc_RNA (1)...(19): siRNA sense strand
ugccuacgaucguuauauu

SEQ ID NO: 316394 - RNA, 19 nt, Homo sapiens
  misc_RNA (1)...(19): siRNA sense strand
gaggaugaguuugauuugg

SEQ ID NO: 316395 - RNA, 19 nt, Homo sapiens
  misc_RNA (1)...(19): siRNA sense strand
caucaaugacuuuggaaga

SEQ ID NO: 316396 - RNA, 19 nt, Homo sapiens
  misc_RNA (1)...(19): siRNA sense strand
ggcaagugcaguugaagaa

SEQ ID NO: 316397 - RNA, 19 nt, Homo sapiens
  misc_RNA (1)...(19): siRNA sense strand
gaagcuuguuuaacugaac

SEQ ID NO: 316398 - RNA, 19 nt, Homo sapiens
  misc_RNA (1)...(19): siRNA sense strand
uuuggaagcuuguuuaacu

SEQ ID NO: 316399 - RNA, 19 nt, Homo sapiens
  misc_RNA (1)...(19): siRNA sense strand
gauuuggaagcuuguuuaa

SEQ ID NO: 316400 - RNA, 19 nt, Homo sapiens
  misc_RNA (1)...(19): siRNA sense strand
ugauuuggaagcuuguuua

SEQ ID NO: 316401 - RNA, 19 nt, Homo sapiens
  misc_RNA (1)...(19): siRNA sense strand
cggcugacuuugagacaga

SEQ ID NO: 316402 - RNA, 19 nt, Homo sapiens
  misc_RNA (1)...(19): siRNA sense strand
ggaugacuuugauguguac

SEQ ID NO: 316403 - RNA, 19 nt, Homo sapiens
  misc_RNA (1)...(19): siRNA sense strand
cagaucaacuaugggaaga

SEQ ID NO: 316404 - RNA, 19 nt, Homo sapiens
  misc_RNA (1)...(19): siRNA sense strand
ccaagaccccuaauaaauu

SEQ ID NO: 316405 - RNA, 19 nt, Homo sapiens
  misc_RNA (1)...(19): siRNA sense strand
aggaugacuuugaugugua

SEQ ID NO: 316406 - RNA, 19 nt, Homo sapiens
  misc_RNA (1)...(19): siRNA sense strand
aggaugaguuugauuugga

SEQ ID NO: 316407 - RNA, 19 nt, Homo sapiens
  misc_RNA (1)...(19): siRNA sense strand
acaauugccuacgaucguu

SEQ ID NO: 316408 - RNA, 19 nt, Homo sapiens
  misc_RNA (1)...(19): siRNA sense strand
gaggaccagaguuaacaaa

SEQ ID NO: 316409 - RNA, 19 nt, Homo sapiens
  misc_RNA (1)...(19): siRNA sense strand
gcggaagaaggaugugauu

SEQ ID NO: 316410 - RNA, 19 nt, Homo sapiens
  misc_RNA (1)...(19): siRNA sense strand
uggaggaugaguuugauuu

SEQ ID NO: 316411 - RNA, 19 nt, Homo sapiens
  misc_RNA (1)...(19): siRNA sense strand
caggaaguucugauucaaa

SEQ ID NO: 316412 - RNA, 19 nt, Homo sapiens
  misc_RNA (1)...(19): siRNA sense strand
ggcaagauauaaaaggaaa

SEQ ID NO: 316413 - RNA, 19 nt, Homo sapiens
  misc_RNA (1)...(19): siRNA sense strand
acacauggacagucaagug

SEQ ID NO: 316414 - RNA, 19 nt, Homo sapiens
  misc_RNA (1)...(19): siRNA sense strand
gccuacgaucguuauauua

SEQ ID NO: 316415 - RNA, 19 nt, Homo sapiens
  misc_RNA (1)...(19): siRNA sense strand
gaagagagagaaaaucauc

SEQ ID NO: 316416 - RNA, 19 nt, Homo sapiens
  misc_RNA (1)...(19): siRNA sense strand
gggcaagugcaguugaaga

SEQ ID NO: 316417 - RNA, 19 nt, Homo sapiens
  misc_RNA (1)...(19): siRNA sense strand
uauuaaagaagucccaaga

SEQ ID NO: 316418 - RNA, 19 nt, Homo sapiens
  misc_RNA (1)...(19): siRNA sense strand
caauugccuacgaucguua

SEQ ID NO: 316419 - RNA, 19 nt, Homo sapiens
  misc_RNA (1)...(19): siRNA sense strand
agaacacaauugccuacga

SEQ ID NO: 316420 - RNA, 19 nt, Homo sapiens
  misc_RNA (1)...(19): siRNA sense strand
aggaaguucugauucaaag

SEQ ID NO: 316421 - RNA, 19 nt, Homo sapiens
  misc_RNA (1)...(19): siRNA sense strand
ccaagacaccuucgacaac

SEQ ID NO: 316422 - RNA, 19 nt, Homo sapiens
  misc_RNA (1)...(19): siRNA sense strand
guucaugggaccagcaaau

SEQ ID NO: 316423 - RNA, 19 nt, Homo sapiens
  misc_RNA (1)...(19): siRNA sense strand
aaaucaaacucuggaaggu

SEQ ID NO: 316424 - RNA, 19 nt, Homo sapiens
  misc_RNA (1)...(19): siRNA sense strand
ugacuuugauguguacucu

SEQ ID NO: 316425 - RNA, 19 nt, Homo sapiens
  misc_RNA (1)...(19): siRNA sense strand
gaccagcucucaggaugac

SEQ ID NO: 316426 - RNA, 19 nt, Homo sapiens
  misc_RNA (1)...(19): siRNA sense strand
aggagucuaugucuacugu

SEQ ID NO: 316427 - RNA, 19 nt, Homo sapiens
  misc_RNA (1)...(19): siRNA sense strand
gagcuuuaccacuccugaa

SEQ ID NO: 316428 - RNA, 19 nt, Homo sapiens
  misc_RNA (1)...(19): siRNA sense strand
gcaguugaagaagaugaaa

SEQ ID NO: 316429 - RNA, 19 nt, Homo sapiens
  misc_RNA (1)...(19): siRNA sense strand
cagaugaaaguguccuaau

SEQ ID NO: 316430 - RNA, 19 nt, Homo sapiens
  misc_RNA (1)...(19): siRNA sense strand
ccuugaaucugcagaaagc

SEQ ID NO: 316431 - RNA, 19 nt, Homo sapiens
  misc_RNA (1)...(19): siRNA sense strand
caugggaccagcaaaucaa

SEQ ID NO: 316432 - RNA, 19 nt, Homo sapiens
  misc_RNA (1)...(19): siRNA sense strand
ucgacaaccuggcauucau

SEQ ID NO: 316433 - RNA, 19 nt, Homo sapiens
  misc_RNA (1)...(19): siRNA sense strand
gagagaaaaucaucaucag

SEQ ID NO: 316434 - RNA, 19 nt, Homo sapiens
  misc_RNA (1)...(19): siRNA sense strand
ugaaaugaggaccagaguu

SEQ ID NO: 316435 - RNA, 19 nt, Homo sapiens
  misc_RNA (1)...(19): siRNA sense strand
cagaagcagaucaacuaug

SEQ ID NO: 316436 - RNA, 19 nt, Homo sapiens
  misc_RNA (1)...(19): siRNA sense strand
gaccagcaaaucaaacucu

SEQ ID NO: 316437 - RNA, 19 nt, Homo sapiens
  misc_RNA (1)...(19): siRNA sense strand
uaugggaagaacacaauug

SEQ ID NO: 316438 - RNA, 19 nt, Homo sapiens
  misc_RNA (1)...(19): siRNA sense strand
aaaugaggaccagaguuaa

SEQ ID NO: 316439 - RNA, 19 nt, Homo sapiens
  misc_RNA (1)...(19): siRNA sense strand
cuacugugccggcugacuu

SEQ ID NO: 316440 - RNA, 19 nt, Homo sapiens
  misc_RNA (1)...(19): siRNA sense strand
ccagaguuaacaaagaaau

SEQ ID NO: 316441 - RNA, 19 nt, Homo sapiens
  misc_RNA (1)...(19): siRNA sense strand
aggaugugauuugcaagaa

SEQ ID NO: 316442 - RNA, 19 nt, Homo sapiens
  misc_RNA (1)...(19): siRNA sense strand
cggaagaaggaugugauuu

SEQ ID NO: 316443 - RNA, 19 nt, Homo sapiens
  misc_RNA (1)...(19): siRNA sense strand
cagaguuaacaaagaaaug

SEQ ID NO: 316444 - RNA, 19 nt, Homo sapiens
  misc_RNA (1)...(19): siRNA sense strand
gcaagugcaguugaagaag

SEQ ID NO: 316445 - RNA, 19 nt, Homo sapiens
  misc_RNA (1)...(19): siRNA sense strand
guagauggauauguugaua

SEQ ID NO: 316446 - RNA, 19 nt, Homo sapiens
  misc_RNA (1)...(19): siRNA sense strand
caaaugugauguccucaug

SEQ ID NO: 316447 - RNA, 19 nt, Homo sapiens
  misc_RNA (1)...(19): siRNA sense strand
gacauccucucuaaagauu

SEQ ID NO: 316448 - RNA, 19 nt, Homo sapiens
  misc_RNA (1)...(19): siRNA sense strand
uagaagaccugaggauuau

SEQ ID NO: 316449 - RNA, 19 nt, Homo sapiens
  misc_RNA (1)...(19): siRNA sense strand
ucaaagaguacaaauguga

SEQ ID NO: 316450 - RNA, 19 nt, Homo sapiens
  misc_RNA (1)...(19): siRNA sense strand
gugcaugcaucaaugagaa

SEQ ID NO: 316451 - RNA, 19 nt, Homo sapiens
  misc_RNA (1)...(19): siRNA sense strand
auagaagaccugaggauua

SEQ ID NO: 316452 - RNA, 19 nt, Homo sapiens
  misc_RNA (1)...(19): siRNA sense strand
ugggagaaguacaacaaua

SEQ ID NO: 316453 - RNA, 19 nt, Homo sapiens
  misc_RNA (1)...(19): siRNA sense strand
uggcguagauggauauguu

SEQ ID NO: 316454 - RNA, 19 nt, Homo sapiens
  misc_RNA (1)...(19): siRNA sense strand
gucgagaauucaaagagua

SEQ ID NO: 316455 - RNA, 19 nt, Homo sapiens
  misc_RNA (1)...(19): siRNA sense strand
cauccucucuaaagauuug

SEQ ID NO: 316456 - RNA, 19 nt, Homo sapiens
  misc_RNA (1)...(19): siRNA sense strand
aacaauagguacacagaga

SEQ ID NO: 316457 - RNA, 19 nt, Homo sapiens
  misc_RNA (1)...(19): siRNA sense strand
gaagaccugaggauuauag

SEQ ID NO: 316458 - RNA, 19 nt, Homo sapiens
  misc_RNA (1)...(19): siRNA sense strand
agaaguacaacaauaggua

SEQ ID NO: 316459 - RNA, 19 nt, Homo sapiens
  misc_RNA (1)...(19): siRNA sense strand
ggagcgaccgauauagaaa

SEQ ID NO: 316460 - RNA, 19 nt, Homo sapiens
  misc_RNA (1)...(19): siRNA sense strand
guucaucuauagcuuaugg

SEQ ID NO: 316461 - RNA, 19 nt, Homo sapiens
  misc_RNA (1)...(19): siRNA sense strand
cagcgugcaugcaucaaug

SEQ ID NO: 316462 - RNA, 19 nt, Homo sapiens
  misc_RNA (1)...(19): siRNA sense strand
gugauguccucaugagaga

SEQ ID NO: 316463 - RNA, 19 nt, Homo sapiens
  misc_RNA (1)...(19): siRNA sense strand
gggagaaguacaacaauag

SEQ ID NO: 316464 - RNA, 19 nt, Homo sapiens
  misc_RNA (1)...(19): siRNA sense strand
gggagcgaccgauauagaa

SEQ ID NO: 316465 - RNA, 19 nt, Homo sapiens
  misc_RNA (1)...(19): siRNA sense strand
uagaaccuaucagcaacua

SEQ ID NO: 316466 - RNA, 19 nt, Homo sapiens
  misc_RNA (1)...(19): siRNA sense strand
ggagagaauucauaaaacu

SEQ ID NO: 316467 - RNA, 19 nt, Homo sapiens
  misc_RNA (1)...(19): siRNA sense strand
gcccugcuuugcauccuuu

SEQ ID NO: 316468 - RNA, 19 nt, Homo sapiens
  misc_RNA (1)...(19): siRNA sense strand
cuucauuacuuaaguccaa

SEQ ID NO: 316469 - RNA, 19 nt, Homo sapiens
  misc_RNA (1)...(19): siRNA sense strand
acagagagcagaagcuuca

SEQ ID NO: 316470 - RNA, 19 nt, Homo sapiens
  misc_RNA (1)...(19): siRNA sense strand
uuacuggagagaauucaua

SEQ ID NO: 316471 - RNA, 19 nt, Homo sapiens
  misc_RNA (1)...(19): siRNA sense strand
gauguccucaugagagaaa

SEQ ID NO: 316472 - RNA, 19 nt, Homo sapiens
  misc_RNA (1)...(19): siRNA sense strand
cauagaagaccugaggauu

SEQ ID NO: 316473 - RNA, 19 nt, Homo sapiens
  misc_RNA (1)...(19): siRNA sense strand
caacauuuacuggagagaa

SEQ ID NO: 316474 - RNA, 19 nt, Homo sapiens
  misc_RNA (1)...(19): siRNA sense strand
cgaccgauauagaaaugca

SEQ ID NO: 316475 - RNA, 19 nt, Homo sapiens
  misc_RNA (1)...(19): siRNA sense strand
gagcgaccgauauagaaau

SEQ ID NO: 316476 - RNA, 19 nt, Homo sapiens
  misc_RNA (1)...(19): siRNA sense strand
uacauugaauuccauugug

SEQ ID NO: 316477 - RNA, 19 nt, Homo sapiens
  misc_RNA (1)...(19): siRNA sense strand
gagaauucaaagaguacaa

SEQ ID NO: 316478 - RNA, 19 nt, Homo sapiens
  misc_RNA (1)...(19): siRNA sense strand
gaccugaggauuauagaac

SEQ ID NO: 316479 - RNA, 19 nt, Homo sapiens
  misc_RNA (1)...(19): siRNA sense strand
ggagaaguacaacaauagg

SEQ ID NO: 316480 - RNA, 19 nt, Homo sapiens
  misc_RNA (1)...(19): siRNA sense strand
caaagaguacaaaugugau

SEQ ID NO: 316481 - RNA, 19 nt, Homo sapiens
  misc_RNA (1)...(19): siRNA sense strand
cuacauugaauuccauugu

SEQ ID NO: 316482 - RNA, 19 nt, Homo sapiens
  misc_RNA (1)...(19): siRNA sense strand
aacauuuacuggagagaau

SEQ ID NO: 316483 - RNA, 19 nt, Homo sapiens
  misc_RNA (1)...(19): siRNA sense strand
gagaaguacaacaauaggu

SEQ ID NO: 316484 - RNA, 19 nt, Homo sapiens
  misc_RNA (1)...(19): siRNA sense strand
agauggauauguugauaac

SEQ ID NO: 316485 - RNA, 19 nt, Homo sapiens
  misc_RNA (1)...(19): siRNA sense strand
cagcuacauugaauuccau

SEQ ID NO: 316486 - RNA, 19 nt, Homo sapiens
  misc_RNA (1)...(19): siRNA sense strand
aucuauagcuuaugguuca

SEQ ID NO: 316487 - RNA, 19 nt, Homo sapiens
  misc_RNA (1)...(19): siRNA sense strand
ucagcuacauugaauucca

SEQ ID NO: 316488 - RNA, 19 nt, Homo sapiens
  misc_RNA (1)...(19): siRNA sense strand
acaacaauagguacacaga

SEQ ID NO: 316489 - RNA, 19 nt, Homo sapiens
  misc_RNA (1)...(19): siRNA sense strand
acacagagagcagaagcuu

SEQ ID NO: 316490 - RNA, 19 nt, Homo sapiens
  misc_RNA (1)...(19): siRNA sense strand
ccaagucgagaauucaaag

SEQ ID NO: 316491 - RNA, 19 nt, Homo sapiens
  misc_RNA (1)...(19): siRNA sense strand
uuugcaggcuguguguaua

SEQ ID NO: 316492 - RNA, 19 nt, Homo sapiens
  misc_RNA (1)...(19): siRNA sense strand
aaugugauguccucaugag

SEQ ID NO: 316493 - RNA, 19 nt, Homo sapiens
  misc_RNA (1)...(19): siRNA sense strand
aaagaguacaaaugugaug

SEQ ID NO: 316494 - RNA, 19 nt, Homo sapiens
  misc_RNA (1)...(19): siRNA sense strand
agucgagaauucaaagagu

SEQ ID NO: 316495 - RNA, 19 nt, Homo sapiens
  misc_RNA (1)...(19): siRNA sense strand
caagucgagaauucaaaga

SEQ ID NO: 316496 - RNA, 19 nt, Homo sapiens
  misc_RNA (1)...(19): siRNA sense strand
gcuuaugguucaaaauuca

SEQ ID NO: 316497 - RNA, 19 nt, Homo sapiens
  misc_RNA (1)...(19): siRNA sense strand
gcguagauggauauguuga

SEQ ID NO: 316498 - RNA, 19 nt, Homo sapiens
  misc_RNA (1)...(19): siRNA sense strand
gaccaaaggccgcaaauuc

SEQ ID NO: 316499 - RNA, 19 nt, Homo sapiens
  misc_RNA (1)...(19): siRNA sense strand
gggaggagcccacugugua

SEQ ID NO: 316500 - RNA, 19 nt, Homo sapiens
  misc_RNA (1)...(19): siRNA sense strand
aggaagcacugaaggauga

SEQ ID NO: 316501 - RNA, 19 nt, Homo sapiens
  misc_RNA (1)...(19): siRNA sense strand
ccaaaggccgcaaauucua

SEQ ID NO: 316502 - RNA, 19 nt, Homo sapiens
  misc_RNA (1)...(19): siRNA sense strand
gggagucucaguucacuuu

SEQ ID NO: 316503 - RNA, 19 nt, Homo sapiens
  misc_RNA (1)...(19): siRNA sense strand
gcaucuuccugcucuacaa

SEQ ID NO: 316504 - RNA, 19 nt, Homo sapiens
  misc_RNA (1)...(19): siRNA sense strand
ugaaggaugaguacgauga

SEQ ID NO: 316505 - RNA, 19 nt, Homo sapiens
  misc_RNA (1)...(19): siRNA sense strand
ggcaagguguucgauguga

SEQ ID NO: 316506 - RNA, 19 nt, Homo sapiens
  misc_RNA (1)...(19): siRNA sense strand
gguguucgaugugaccaaa

SEQ ID NO: 316507 - RNA, 19 nt, Homo sapiens
  misc_RNA (1)...(19): siRNA sense strand
ugaguacgaugaccuuucu

SEQ ID NO: 316508 - RNA, 19 nt, Homo sapiens
  misc_RNA (1)...(19): siRNA sense strand
gagucucaguucacuuuca

SEQ ID NO: 316509 - RNA, 19 nt, Homo sapiens
  misc_RNA (1)...(19): siRNA sense strand
ggagcccacuguguacuca

SEQ ID NO: 316510 - RNA, 19 nt, Homo sapiens
  misc_RNA (1)...(19): siRNA sense strand
gcauacucauggccaucaa

SEQ ID NO: 316511 - RNA, 19 nt, Homo sapiens
  misc_RNA (1)...(19): siRNA sense strand
ugggcaaacugcugaagga

SEQ ID NO: 316512 - RNA, 19 nt, Homo sapiens
  misc_RNA (1)...(19): siRNA sense strand
ggauaaggaagcacugaag

SEQ ID NO: 316513 - RNA, 19 nt, Homo sapiens
  misc_RNA (1)...(19): siRNA sense strand
cagaugaggaagaaccaaa

SEQ ID NO: 316514 - RNA, 19 nt, Homo sapiens
  misc_RNA (1)...(19): siRNA sense strand
uaaggaagcacugaaggau

SEQ ID NO: 316515 - RNA, 19 nt, Homo sapiens
  misc_RNA (1)...(19): siRNA sense strand
ggaugaguacgaugaccuu

SEQ ID NO: 316516 - RNA, 19 nt, Homo sapiens
  misc_RNA (1)...(19): siRNA sense strand
ccaggggccuugccacauu

SEQ ID NO: 316517 - RNA, 19 nt, Homo sapiens
  misc_RNA (1)...(19): siRNA sense strand
ggaggagcccacuguguac

SEQ ID NO: 316518 - RNA, 19 nt, Homo sapiens
  misc_RNA (1)...(19): siRNA sense strand
caaaggccgcaaauucuac

SEQ ID NO: 316519 - RNA, 19 nt, Homo sapiens
  misc_RNA (1)...(19): siRNA sense strand
gcgggcugcugcaugagau

SEQ ID NO: 316520 - RNA, 19 nt, Homo sapiens
  misc_RNA (1)...(19): siRNA sense strand
ccacuguguacucagauga

SEQ ID NO: 316521 - RNA, 19 nt, Homo sapiens
  misc_RNA (1)...(19): siRNA sense strand
agucucaguucacuuucaa

SEQ ID NO: 316522 - RNA, 19 nt, Homo sapiens
  misc_RNA (1)...(19): siRNA sense strand
agaugagagugcccggaaa

SEQ ID NO: 316523 - RNA, 19 nt, Homo sapiens
  misc_RNA (1)...(19): siRNA sense strand
acggcaagguguucgaugu

SEQ ID NO: 316524 - RNA, 19 nt, Homo sapiens
  misc_RNA (1)...(19): siRNA sense strand
gggcugcugcaugagauuu

SEQ ID NO: 316525 - RNA, 19 nt, Homo sapiens
  misc_RNA (1)...(19): siRNA sense strand
ugaccaaaggccgcaaauu

SEQ ID NO: 316526 - RNA, 19 nt, Homo sapiens
  misc_RNA (1)...(19): siRNA sense strand
guaagaaacuggccucuga

SEQ ID NO: 316527 - RNA, 19 nt, Homo sapiens
  misc_RNA (1)...(19): siRNA sense strand
gaaaguaggccaacagaaa

SEQ ID NO: 316528 - RNA, 19 nt, Homo sapiens
  misc_RNA (1)...(19): siRNA sense strand
gcagagacuucuucuauug

SEQ ID NO: 316529 - RNA, 19 nt, Homo sapiens
  misc_RNA (1)...(19): siRNA sense strand
caacaaagauuccugauac

SEQ ID NO: 316530 - RNA, 19 nt, Homo sapiens
  misc_RNA (1)...(19): siRNA sense strand
uaacaucguugccuacuuu

SEQ ID NO: 316531 - RNA, 19 nt, Homo sapiens
  misc_RNA (1)...(19): siRNA sense strand
guacuuggcuguauguuau

SEQ ID NO: 316532 - RNA, 19 nt, Homo sapiens
  misc_RNA (1)...(19): siRNA sense strand
aaugagggcucucuucuua

SEQ ID NO: 316533 - RNA, 19 nt, Homo sapiens
  misc_RNA (1)...(19): siRNA sense strand
gaacugaagaugguauuua

SEQ ID NO: 316534 - RNA, 19 nt, Homo sapiens
  misc_RNA (1)...(19): siRNA sense strand
ggagagagauaccguuuua

SEQ ID NO: 316535 - RNA, 19 nt, Homo sapiens
  misc_RNA (1)...(19): siRNA sense strand
gaacaggaauacccuaugg

SEQ ID NO: 316536 - RNA, 19 nt, Homo sapiens
  misc_RNA (1)...(19): siRNA sense strand
acggacagcuucagaaaua

SEQ ID NO: 316537 - RNA, 19 nt, Homo sapiens
  misc_RNA (1)...(19): siRNA sense strand
gcggaucacuucaagauau

SEQ ID NO: 316538 - RNA, 19 nt, Homo sapiens
  misc_RNA (1)...(19): siRNA sense strand
gcaguuagauuccauucau

SEQ ID NO: 316539 - RNA, 19 nt, Homo sapiens
  misc_RNA (1)...(19): siRNA sense strand
ccacaaauguugcauaguc

SEQ ID NO: 316540 - RNA, 19 nt, Homo sapiens
  misc_RNA (1)...(19): siRNA sense strand
gaacggacagcuucagaaa

SEQ ID NO: 316541 - RNA, 19 nt, Homo sapiens
  misc_RNA (1)...(19): siRNA sense strand
uaacacaguuggagagaga

SEQ ID NO: 316542 - RNA, 19 nt, Homo sapiens
  misc_RNA (1)...(19): siRNA sense strand
ggucuugccuauuugcaua

SEQ ID NO: 316543 - RNA, 19 nt, Homo sapiens
  misc_RNA (1)...(19): siRNA sense strand
caaaggcacugaaucgaau

SEQ ID NO: 316544 - RNA, 19 nt, Homo sapiens
  misc_RNA (1)...(19): siRNA sense strand
gaaaugggauugucaucag

SEQ ID NO: 316545 - RNA, 19 nt, Homo sapiens
  misc_RNA (1)...(19): siRNA sense strand
gcauagagauaucaaaggu

SEQ ID NO: 316546 - RNA, 19 nt, Homo sapiens
  misc_RNA (1)...(19): siRNA sense strand
caucuuggcuggacaugaa

SEQ ID NO: 316547 - RNA, 19 nt, Homo sapiens
  misc_RNA (1)...(19): siRNA sense strand
ccaaguccuuugaauguuu

SEQ ID NO: 316548 - RNA, 19 nt, Homo sapiens
  misc_RNA (1)...(19): siRNA sense strand
gauaagcaguuacccugaa

SEQ ID NO: 316549 - RNA, 19 nt, Homo sapiens
  misc_RNA (1)...(19): siRNA sense strand
agacccaaauuucauguua

SEQ ID NO: 316550 - RNA, 19 nt, Homo sapiens
  misc_RNA (1)...(19): siRNA sense strand
cagauaaccacgcacauua

SEQ ID NO: 316551 - RNA, 19 nt, Homo sapiens
  misc_RNA (1)...(19): siRNA sense strand
ccauguuacuggaccauua

SEQ ID NO: 316552 - RNA, 19 nt, Homo sapiens
  misc_RNA (1)...(19): siRNA sense strand
gaacuucagccaccuaugu

SEQ ID NO: 316553 - RNA, 19 nt, Homo sapiens
  misc_RNA (1)...(19): siRNA sense strand
aggauuagcugcccauauu

SEQ ID NO: 316554 - RNA, 19 nt, Homo sapiens
  misc_RNA (1)...(19): siRNA sense strand
uacagggucuugccuauuu

SEQ ID NO: 316555 - RNA, 19 nt, Homo sapiens
  misc_RNA (1)...(19): siRNA sense strand
gcaaaggcacugaaucgaa

SEQ ID NO: 316556 - RNA, 19 nt, Homo sapiens
  misc_RNA (1)...(19): siRNA sense strand
caaagauuccugauacaaa

SEQ ID NO: 316557 - RNA, 19 nt, Homo sapiens
  misc_RNA (1)...(19): siRNA sense strand
gaagaaugguggcuacaac

SEQ ID NO: 316558 - RNA, 19 nt, Homo sapiens
  misc_RNA (1)...(19): siRNA sense strand
gcucuacucucacaaucuu

SEQ ID NO: 316559 - RNA, 19 nt, Homo sapiens
  misc_RNA (1)...(19): siRNA sense strand
gcaccacaguuaccacgaa

SEQ ID NO: 316560 - RNA, 19 nt, Homo sapiens
  misc_RNA (1)...(19): siRNA sense strand
gcaguuacccugaagacaa

SEQ ID NO: 316561 - RNA, 19 nt, Homo sapiens
  misc_RNA (1)...(19): siRNA sense strand
gacagaccauggcgaugua

SEQ ID NO: 316562 - RNA, 19 nt, Homo sapiens
  misc_RNA (1)...(19): siRNA sense strand
cgaaucagguaguucaguu

SEQ ID NO: 316563 - RNA, 19 nt, Homo sapiens
  misc_RNA (1)...(19): siRNA sense strand
gaugguauuuacacacuga

SEQ ID NO: 316564 - RNA, 19 nt, Homo sapiens
  misc_RNA (1)...(19): siRNA sense strand
caaacgagacuucccuaaa

SEQ ID NO: 316565 - RNA, 19 nt, Homo sapiens
  misc_RNA (1)...(19): siRNA sense strand
ggcagagacuucuucuauu

SEQ ID NO: 316566 - RNA, 19 nt, Homo sapiens
  misc_RNA (1)...(19): siRNA sense strand
gguaugagccaaugcagaa

SEQ ID NO: 316567 - RNA, 19 nt, Homo sapiens
  misc_RNA (1)...(19): siRNA sense strand
cccaggagauuucagauga

SEQ ID NO: 316568 - RNA, 19 nt, Homo sapiens
  misc_RNA (1)...(19): siRNA sense strand
ggaauacccuauggucugu

SEQ ID NO: 316569 - RNA, 19 nt, Homo sapiens
  misc_RNA (1)...(19): siRNA sense strand
gcagaaauucauguugaua

SEQ ID NO: 316570 - RNA, 19 nt, Homo sapiens
  misc_RNA (1)...(19): siRNA sense strand
caaaauagcacuaaccaaa

SEQ ID NO: 316571 - RNA, 19 nt, Homo sapiens
  misc_RNA (1)...(19): siRNA sense strand
aaacgagacuucccuaaac

SEQ ID NO: 316572 - RNA, 19 nt, Homo sapiens
  misc_RNA (1)...(19): siRNA sense strand
ccauggcgauguaaaauua

SEQ ID NO: 316573 - RNA, 19 nt, Homo sapiens
  misc_RNA (1)...(19): siRNA sense strand
aagcagagcuccccaaauu

SEQ ID NO: 316574 - RNA, 19 nt, Homo sapiens
  misc_RNA (1)...(19): siRNA sense strand
ggccagaaauguacacaca

SEQ ID NO: 316575 - RNA, 19 nt, Homo sapiens
  misc_RNA (1)...(19): siRNA sense strand
ggacagcuucagaaauaaa

SEQ ID NO: 316576 - RNA, 19 nt, Homo sapiens
  misc_RNA (1)...(19): siRNA sense strand
uaacagcuaccauugcaaa

SEQ ID NO: 316577 - RNA, 19 nt, Homo sapiens
  misc_RNA (1)...(19): siRNA sense strand
gauaucaaaggugcuaaua

SEQ ID NO: 316578 - RNA, 19 nt, Homo sapiens
  misc_RNA (1)...(19): siRNA sense strand
gaccgaauacuaccaagaa

SEQ ID NO: 316579 - RNA, 19 nt, Homo sapiens
  misc_RNA (1)...(19): siRNA sense strand
gcaaauacuggcaaaucaa

SEQ ID NO: 316580 - RNA, 19 nt, Homo sapiens
  misc_RNA (1)...(19): siRNA sense strand
aaagugaacaauccagaua

SEQ ID NO: 316581 - RNA, 19 nt, Homo sapiens
  misc_RNA (1)...(19): siRNA sense strand
ggucaucaacauuccauaa

SEQ ID NO: 316582 - RNA, 19 nt, Homo sapiens
  misc_RNA (1)...(19): siRNA sense strand
uaucugggcaguaggaaua

SEQ ID NO: 316583 - RNA, 19 nt, Homo sapiens
  misc_RNA (1)...(19): siRNA sense strand
ugagggcucucuucuuaau

SEQ ID NO: 316584 - RNA, 19 nt, Homo sapiens
  misc_RNA (1)...(19): siRNA sense strand
uuugauggcuguccuuuga

SEQ ID NO: 316585 - RNA, 19 nt, Homo sapiens
  misc_RNA (1)...(19): siRNA sense strand
ccacgcacauuacacugaa

SEQ ID NO: 316586 - RNA, 19 nt, Homo sapiens
  misc_RNA (1)...(19): siRNA sense strand
cugaaagacuucugacuca

SEQ ID NO: 316587 - RNA, 19 nt, Homo sapiens
  misc_RNA (1)...(19): siRNA sense strand
cgucauaccauuagaucua

SEQ ID NO: 316588 - RNA, 19 nt, Homo sapiens
  misc_RNA (1)...(19): siRNA sense strand
cagaguagcccaaguugug

SEQ ID NO: 316589 - RNA, 19 nt, Homo sapiens
  misc_RNA (1)...(19): siRNA sense strand
acacagcaaucucuacauc

SEQ ID NO: 316590 - RNA, 19 nt, Homo sapiens
  misc_RNA (1)...(19): siRNA sense strand
cccagaaguugcagcagua

SEQ ID NO: 316591 - RNA, 19 nt, Homo sapiens
  misc_RNA (1)...(19): siRNA sense strand
gcacacagcaaucucuaca

SEQ ID NO: 316592 - RNA, 19 nt, Homo sapiens
  misc_RNA (1)...(19): siRNA sense strand
caacuuuccggaugaagaa

SEQ ID NO: 316593 - RNA, 19 nt, Homo sapiens
  misc_RNA (1)...(19): siRNA sense strand
gagaugaaaugggauuguc

SEQ ID NO: 316594 - RNA, 19 nt, Homo sapiens
  misc_RNA (1)...(19): siRNA sense strand
gaaagacuucugacucaca

SEQ ID NO: 316595 - RNA, 19 nt, Homo sapiens
  misc_RNA (1)...(19): siRNA sense strand
uggcagagacuucuucuau

SEQ ID NO: 316596 - RNA, 19 nt, Homo sapiens
  misc_RNA (1)...(19): siRNA sense strand
cauugaaucuguaguaugc

SEQ ID NO: 316597 - RNA, 19 nt, Homo sapiens
  misc_RNA (1)...(19): siRNA sense strand
aagaccaacugcugaaaga

SEQ ID NO: 316598 - RNA, 19 nt, Homo sapiens
  misc_RNA (1)...(19): siRNA sense strand
acagcaaucucuacaucuu

SEQ ID NO: 316599 - RNA, 19 nt, Homo sapiens
  misc_RNA (1)...(19): siRNA sense strand
gagguuacccaggagauuu

SEQ ID NO: 316600 - RNA, 19 nt, Homo sapiens
  misc_RNA (1)...(19): siRNA sense strand
gcacuuugauuuuccuuug

SEQ ID NO: 316601 - RNA, 19 nt, Homo sapiens
  misc_RNA (1)...(19): siRNA sense strand
ccaagaaaauucgcuuuaa

SEQ ID NO: 316602 - RNA, 19 nt, Homo sapiens
  misc_RNA (1)...(19): siRNA sense strand
cucacaaucuuauagcuuu

SEQ ID NO: 316603 - RNA, 19 nt, Homo sapiens
  misc_RNA (1)...(19): siRNA sense strand
caugcaaucauucgucaua

SEQ ID NO: 316604 - RNA, 19 nt, Homo sapiens
  misc_RNA (1)...(19): siRNA sense strand
gaacuguuagacaaaguga

SEQ ID NO: 316605 - RNA, 19 nt, Homo sapiens
  misc_RNA (1)...(19): siRNA sense strand
gccuauguaugcagagaaa

SEQ ID NO: 316606 - RNA, 19 nt, Homo sapiens
  misc_RNA (1)...(19): siRNA sense strand
gcacagccaggucucucua

SEQ ID NO: 316607 - RNA, 19 nt, Homo sapiens
  misc_RNA (1)...(19): siRNA sense strand
ggaauaacagcaauugaac

SEQ ID NO: 316608 - RNA, 19 nt, Homo sapiens
  misc_RNA (1)...(19): siRNA sense strand
aaaauuagcugacuuuggu

SEQ ID NO: 316609 - RNA, 19 nt, Homo sapiens
  misc_RNA (1)...(19): siRNA sense strand
cuauaaggccagaaaugua

SEQ ID NO: 316610 - RNA, 19 nt, Homo sapiens
  misc_RNA (1)...(19): siRNA sense strand
gcagccagcaguuagauuc

SEQ ID NO: 316611 - RNA, 19 nt, Homo sapiens
  misc_RNA (1)...(19): siRNA sense strand
gaaucagguaguucaguuu

SEQ ID NO: 316612 - RNA, 19 nt, Homo sapiens
  misc_RNA (1)...(19): siRNA sense strand
augcagaaauucauguuga

SEQ ID NO: 316613 - RNA, 19 nt, Homo sapiens
  misc_RNA (1)...(19): siRNA sense strand
auaccucuguggagcuuua

SEQ ID NO: 316614 - RNA, 19 nt, Homo sapiens
  misc_RNA (1)...(19): siRNA sense strand
aggcaacgauggaacaguu

SEQ ID NO: 316615 - RNA, 19 nt, Homo sapiens
  misc_RNA (1)...(19): siRNA sense strand
gaaacagaagcacgagaug

SEQ ID NO: 316616 - RNA, 19 nt, Homo sapiens
  misc_RNA (1)...(19): siRNA sense strand
aauaacagcuaccauugca

SEQ ID NO: 316617 - RNA, 19 nt, Homo sapiens
  misc_RNA (1)...(19): siRNA sense strand
gcaguaggaauaacagcaa

SEQ ID NO: 316618 - RNA, 19 nt, Homo sapiens
  misc_RNA (1)...(19): siRNA sense strand
ggaaaguaggccaacagaa

SEQ ID NO: 316619 - RNA, 19 nt, Homo sapiens
  misc_RNA (1)...(19): siRNA sense strand
acaacaaagauuccugaua

SEQ ID NO: 316620 - RNA, 19 nt, Homo sapiens
  misc_RNA (1)...(19): siRNA sense strand
ugauggcuguccuuugaaa

SEQ ID NO: 316621 - RNA, 19 nt, Homo sapiens
  misc_RNA (1)...(19): siRNA sense strand
gaugguauuucaaaacuga

SEQ ID NO: 316622 - RNA, 19 nt, Homo sapiens
  misc_RNA (1)...(19): siRNA sense strand
uggaaauggugaugguauu

SEQ ID NO: 316623 - RNA, 19 nt, Homo sapiens
  misc_RNA (1)...(19): siRNA sense strand
accauuagaucuacaaaca

SEQ ID NO: 316624 - RNA, 19 nt, Homo sapiens
  misc_RNA (1)...(19): siRNA sense strand
cuucaugguuuacagaaau

SEQ ID NO: 316625 - RNA, 19 nt, Homo sapiens
  misc_RNA (1)...(19): siRNA sense strand
aacaugggaugcaggguaa

SEQ ID NO: 316626 - RNA, 19 nt, Homo sapiens
  misc_RNA (1)...(19): siRNA sense strand
guaagaaacuggccucuga

SEQ ID NO: 316627 - RNA, 19 nt, Homo sapiens
  misc_RNA (1)...(19): siRNA sense strand
gaaaguaggccaacagaaa

SEQ ID NO: 316628 - RNA, 19 nt, Homo sapiens
  misc_RNA (1)...(19): siRNA sense strand
gcagagacuucuucuauug

SEQ ID NO: 316629 - RNA, 19 nt, Homo sapiens
  misc_RNA (1)...(19): siRNA sense strand
caacaaagauuccugauac

SEQ ID NO: 316630 - RNA, 19 nt, Homo sapiens
  misc_RNA (1)...(19): siRNA sense strand
uaacaucguugccuacuuu

SEQ ID NO: 316631 - RNA, 19 nt, Homo sapiens
  misc_RNA (1)...(19): siRNA sense strand
guacuuggcuguauguuau

SEQ ID NO: 316632 - RNA, 19 nt, Homo sapiens
  misc_RNA (1)...(19): siRNA sense strand
aaugagggcucucuucuua

SEQ ID NO: 316633 - RNA, 19 nt, Homo sapiens
  misc_RNA (1)...(19): siRNA sense strand
gaacugaagaugguauuua

SEQ ID NO: 316634 - RNA, 19 nt, Homo sapiens
  misc_RNA (1)...(19): siRNA sense strand
ggagagagauaccguuuua

SEQ ID NO: 316635 - RNA, 19 nt, Homo sapiens
  misc_RNA (1)...(19): siRNA sense strand
gaacaggaauacccuaugg

SEQ ID NO: 316636 - RNA, 19 nt, Homo sapiens
  misc_RNA (1)...(19): siRNA sense strand
acggacagcuucagaaaua

SEQ ID NO: 316637 - RNA, 19 nt, Homo sapiens
  misc_RNA (1)...(19): siRNA sense strand
gcggaucacuucaagauau

SEQ ID NO: 316638 - RNA, 19 nt, Homo sapiens
  misc_RNA (1)...(19): siRNA sense strand
gcaguuagauuccauucau

SEQ ID NO: 316639 - RNA, 19 nt, Homo sapiens
  misc_RNA (1)...(19): siRNA sense strand
ccacaaauguugcauaguc

SEQ ID NO: 316640 - RNA, 19 nt, Homo sapiens
  misc_RNA (1)...(19): siRNA sense strand
gaacggacagcuucagaaa

SEQ ID NO: 316641 - RNA, 19 nt, Homo sapiens
  misc_RNA (1)...(19): siRNA sense strand
uaacacaguuggagagaga

SEQ ID NO: 316642 - RNA, 19 nt, Homo sapiens
  misc_RNA (1)...(19): siRNA sense strand
ggucuugccuauuugcaua

SEQ ID NO: 316643 - RNA, 19 nt, Homo sapiens
  misc_RNA (1)...(19): siRNA sense strand
caaaggcacugaaucgaau

SEQ ID NO: 316644 - RNA, 19 nt, Homo sapiens
  misc_RNA (1)...(19): siRNA sense strand
gaaaugggauugucaucag

SEQ ID NO: 316645 - RNA, 19 nt, Homo sapiens
  misc_RNA (1)...(19): siRNA sense strand
gcauagagauaucaaaggu

SEQ ID NO: 316646 - RNA, 19 nt, Homo sapiens
  misc_RNA (1)...(19): siRNA sense strand
caucuuggcuggacaugaa

SEQ ID NO: 316647 - RNA, 19 nt, Homo sapiens
  misc_RNA (1)...(19): siRNA sense strand
ccaaguccuuugaauguuu

SEQ ID NO: 316648 - RNA, 19 nt, Homo sapiens
  misc_RNA (1)...(19): siRNA sense strand
gauaagcaguuacccugaa

SEQ ID NO: 316649 - RNA, 19 nt, Homo sapiens
  misc_RNA (1)...(19): siRNA sense strand
agacccaaauuucauguua

SEQ ID NO: 316650 - RNA, 19 nt, Homo sapiens
  misc_RNA (1)...(19): siRNA sense strand
cagauaaccacgcacauua

SEQ ID NO: 316651 - RNA, 19 nt, Homo sapiens
  misc_RNA (1)...(19): siRNA sense strand
ccauguuacuggaccauua

SEQ ID NO: 316652 - RNA, 19 nt, Homo sapiens
  misc_RNA (1)...(19): siRNA sense strand
gaacuucagccaccuaugu

SEQ ID NO: 316653 - RNA, 19 nt, Homo sapiens
  misc_RNA (1)...(19): siRNA sense strand
aggauuagcugcccauauu

SEQ ID NO: 316654 - RNA, 19 nt, Homo sapiens
  misc_RNA (1)...(19): siRNA sense strand
uacagggucuugccuauuu

SEQ ID NO: 316655 - RNA, 19 nt, Homo sapiens
  misc_RNA (1)...(19): siRNA sense strand
gcaaaggcacugaaucgaa

SEQ ID NO: 316656 - RNA, 19 nt, Homo sapiens
  misc_RNA (1)...(19): siRNA sense strand
caaagauuccugauacaaa

SEQ ID NO: 316657 - RNA, 19 nt, Homo sapiens
  misc_RNA (1)...(19): siRNA sense strand
gaagaaugguggcuacaac

SEQ ID NO: 316658 - RNA, 19 nt, Homo sapiens
  misc_RNA (1)...(19): siRNA sense strand
gcucuacucucacaaucuu

SEQ ID NO: 316659 - RNA, 19 nt, Homo sapiens
  misc_RNA (1)...(19): siRNA sense strand
gcaccacaguuaccacgaa

SEQ ID NO: 316660 - RNA, 19 nt, Homo sapiens
  misc_RNA (1)...(19): siRNA sense strand
gcaguuacccugaagacaa

SEQ ID NO: 316661 - RNA, 19 nt, Homo sapiens
  misc_RNA (1)...(19): siRNA sense strand
gacagaccauggcgaugua

SEQ ID NO: 316662 - RNA, 19 nt, Homo sapiens
  misc_RNA (1)...(19): siRNA sense strand
cgaaucagguaguucaguu

SEQ ID NO: 316663 - RNA, 19 nt, Homo sapiens
  misc_RNA (1)...(19): siRNA sense strand
gaugguauuuacacacuga

SEQ ID NO: 316664 - RNA, 19 nt, Homo sapiens
  misc_RNA (1)...(19): siRNA sense strand
caaacgagacuucccuaaa

SEQ ID NO: 316665 - RNA, 19 nt, Homo sapiens
  misc_RNA (1)...(19): siRNA sense strand
ggcagagacuucuucuauu

SEQ ID NO: 316666 - RNA, 19 nt, Homo sapiens
  misc_RNA (1)...(19): siRNA sense strand
gguaugagccaaugcagaa

SEQ ID NO: 316667 - RNA, 19 nt, Homo sapiens
  misc_RNA (1)...(19): siRNA sense strand
cccaggagauuucagauga

SEQ ID NO: 316668 - RNA, 19 nt, Homo sapiens
  misc_RNA (1)...(19): siRNA sense strand
ggaauacccuauggucugu

SEQ ID NO: 316669 - RNA, 19 nt, Homo sapiens
  misc_RNA (1)...(19): siRNA sense strand
gcagaaauucauguugaua

SEQ ID NO: 316670 - RNA, 19 nt, Homo sapiens
  misc_RNA (1)...(19): siRNA sense strand
caaaauagcacuaaccaaa

SEQ ID NO: 316671 - RNA, 19 nt, Homo sapiens
  misc_RNA (1)...(19): siRNA sense strand
aaacgagacuucccuaaac

SEQ ID NO: 316672 - RNA, 19 nt, Homo sapiens
  misc_RNA (1)...(19): siRNA sense strand
ccauggcgauguaaaauua

SEQ ID NO: 316673 - RNA, 19 nt, Homo sapiens
  misc_RNA (1)...(19): siRNA sense strand
aagcagagcuccccaaauu

SEQ ID NO: 316674 - RNA, 19 nt, Homo sapiens
  misc_RNA (1)...(19): siRNA sense strand
ggccagaaauguacacaca

SEQ ID NO: 316675 - RNA, 19 nt, Homo sapiens
  misc_RNA (1)...(19): siRNA sense strand
ggacagcuucagaaauaaa

SEQ ID NO: 316676 - RNA, 19 nt, Homo sapiens
  misc_RNA (1)...(19): siRNA sense strand
uaacagcuaccauugcaaa

SEQ ID NO: 316677 - RNA, 19 nt, Homo sapiens
  misc_RNA (1)...(19): siRNA sense strand
gauaucaaaggugcuaaua

SEQ ID NO: 316678 - RNA, 19 nt, Homo sapiens
  misc_RNA (1)...(19): siRNA sense strand
gaccgaauacuaccaagaa

SEQ ID NO: 316679 - RNA, 19 nt, Homo sapiens
  misc_RNA (1)...(19): siRNA sense strand
gcaaauacuggcaaaucaa

SEQ ID NO: 316680 - RNA, 19 nt, Homo sapiens
  misc_RNA (1)...(19): siRNA sense strand
aaagugaacaauccagaua

SEQ ID NO: 316681 - RNA, 19 nt, Homo sapiens
  misc_RNA (1)...(19): siRNA sense strand
ggucaucaacauuccauaa

SEQ ID NO: 316682 - RNA, 19 nt, Homo sapiens
  misc_RNA (1)...(19): siRNA sense strand
uaucugggcaguaggaaua

SEQ ID NO: 316683 - RNA, 19 nt, Homo sapiens
  misc_RNA (1)...(19): siRNA sense strand
ugagggcucucuucuuaau

SEQ ID NO: 316684 - RNA, 19 nt, Homo sapiens
  misc_RNA (1)...(19): siRNA sense strand
uuugauggcuguccuuuga

SEQ ID NO: 316685 - RNA, 19 nt, Homo sapiens
  misc_RNA (1)...(19): siRNA sense strand
ccacgcacauuacacugaa

SEQ ID NO: 316686 - RNA, 19 nt, Homo sapiens
  misc_RNA (1)...(19): siRNA sense strand
cugaaagacuucugacuca

SEQ ID NO: 316687 - RNA, 19 nt, Homo sapiens
  misc_RNA (1)...(19): siRNA sense strand
cgucauaccauuagaucua

SEQ ID NO: 316688 - RNA, 19 nt, Homo sapiens
  misc_RNA (1)...(19): siRNA sense strand
cagaguagcccaaguugug

SEQ ID NO: 316689 - RNA, 19 nt, Homo sapiens
  misc_RNA (1)...(19): siRNA sense strand
acacagcaaucucuacauc

SEQ ID NO: 316690 - RNA, 19 nt, Homo sapiens
  misc_RNA (1)...(19): siRNA sense strand
cccagaaguugcagcagua

SEQ ID NO: 316691 - RNA, 19 nt, Homo sapiens
  misc_RNA (1)...(19): siRNA sense strand
gcacacagcaaucucuaca

SEQ ID NO: 316692 - RNA, 19 nt, Homo sapiens
  misc_RNA (1)...(19): siRNA sense strand
caacuuuccggaugaagaa

SEQ ID NO: 316693 - RNA, 19 nt, Homo sapiens
  misc_RNA (1)...(19): siRNA sense strand
gagaugaaaugggauuguc

SEQ ID NO: 316694 - RNA, 19 nt, Homo sapiens
  misc_RNA (1)...(19): siRNA sense strand
gaaagacuucugacucaca

SEQ ID NO: 316695 - RNA, 19 nt, Homo sapiens
  misc_RNA (1)...(19): siRNA sense strand
uggcagagacuucuucuau

SEQ ID NO: 316696 - RNA, 19 nt, Homo sapiens
  misc_RNA (1)...(19): siRNA sense strand
cauugaaucuguaguaugc

SEQ ID NO: 316697 - RNA, 19 nt, Homo sapiens
  misc_RNA (1)...(19): siRNA sense strand
aagaccaacugcugaaaga

SEQ ID NO: 316698 - RNA, 19 nt, Homo sapiens
  misc_RNA (1)...(19): siRNA sense strand
acagcaaucucuacaucuu

SEQ ID NO: 316699 - RNA, 19 nt, Homo sapiens
  misc_RNA (1)...(19): siRNA sense strand
gagguuacccaggagauuu

SEQ ID NO: 316700 - RNA, 19 nt, Homo sapiens
  misc_RNA (1)...(19): siRNA sense strand
gcacuuugauuuuccuuug

SEQ ID NO: 316701 - RNA, 19 nt, Homo sapiens
  misc_RNA (1)...(19): siRNA sense strand
ccaagaaaauucgcuuuaa

SEQ ID NO: 316702 - RNA, 19 nt, Homo sapiens
  misc_RNA (1)...(19): siRNA sense strand
cucacaaucuuauagcuuu

SEQ ID NO: 316703 - RNA, 19 nt, Homo sapiens
  misc_RNA (1)...(19): siRNA sense strand
caugcaaucauucgucaua

SEQ ID NO: 316704 - RNA, 19 nt, Homo sapiens
  misc_RNA (1)...(19): siRNA sense strand
gaacuguuagacaaaguga

SEQ ID NO: 316705 - RNA, 19 nt, Homo sapiens
  misc_RNA (1)...(19): siRNA sense strand
gccuauguaugcagagaaa

SEQ ID NO: 316706 - RNA, 19 nt, Homo sapiens
  misc_RNA (1)...(19): siRNA sense strand
gcacagccaggucucucua

SEQ ID NO: 316707 - RNA, 19 nt, Homo sapiens
  misc_RNA (1)...(19): siRNA sense strand
ggaauaacagcaauugaac

SEQ ID NO: 316708 - RNA, 19 nt, Homo sapiens
  misc_RNA (1)...(19): siRNA sense strand
aaaauuagcugacuuuggu

SEQ ID NO: 316709 - RNA, 19 nt, Homo sapiens
  misc_RNA (1)...(19): siRNA sense strand
cuauaaggccagaaaugua

SEQ ID NO: 316710 - RNA, 19 nt, Homo sapiens
  misc_RNA (1)...(19): siRNA sense strand
gcagccagcaguuagauuc

SEQ ID NO: 316711 - RNA, 19 nt, Homo sapiens
  misc_RNA (1)...(19): siRNA sense strand
gaaucagguaguucaguuu

SEQ ID NO: 316712 - RNA, 19 nt, Homo sapiens
  misc_RNA (1)...(19): siRNA sense strand
augcagaaauucauguuga

SEQ ID NO: 316713 - RNA, 19 nt, Homo sapiens
  misc_RNA (1)...(19): siRNA sense strand
auaccucuguggagcuuua

SEQ ID NO: 316714 - RNA, 19 nt, Homo sapiens
  misc_RNA (1)...(19): siRNA sense strand
aggcaacgauggaacaguu

SEQ ID NO: 316715 - RNA, 19 nt, Homo sapiens
  misc_RNA (1)...(19): siRNA sense strand
gaaacagaagcacgagaug

SEQ ID NO: 316716 - RNA, 19 nt, Homo sapiens
  misc_RNA (1)...(19): siRNA sense strand
aauaacagcuaccauugca

SEQ ID NO: 316717 - RNA, 19 nt, Homo sapiens
  misc_RNA (1)...(19): siRNA sense strand
gcaguaggaauaacagcaa

SEQ ID NO: 316718 - RNA, 19 nt, Homo sapiens
  misc_RNA (1)...(19): siRNA sense strand
ggaaaguaggccaacagaa

SEQ ID NO: 316719 - RNA, 19 nt, Homo sapiens
  misc_RNA (1)...(19): siRNA sense strand
acaacaaagauuccugaua

SEQ ID NO: 316720 - RNA, 19 nt, Homo sapiens
  misc_RNA (1)...(19): siRNA sense strand
ugauggcuguccuuugaaa

SEQ ID NO: 316721 - RNA, 19 nt, Homo sapiens
  misc_RNA (1)...(19): siRNA sense strand
gaugguauuucaaaacuga

SEQ ID NO: 316722 - RNA, 19 nt, Homo sapiens
  misc_RNA (1)...(19): siRNA sense strand
uggaaauggugaugguauu

SEQ ID NO: 316723 - RNA, 19 nt, Homo sapiens
  misc_RNA (1)...(19): siRNA sense strand
accauuagaucuacaaaca

SEQ ID NO: 316724 - RNA, 19 nt, Homo sapiens
  misc_RNA (1)...(19): siRNA sense strand
cuucaugguuuacagaaau

SEQ ID NO: 316725 - RNA, 19 nt, Homo sapiens
  misc_RNA (1)...(19): siRNA sense strand
aacaugggaugcaggguaa

SEQ ID NO: 316726 - RNA, 19 nt, Homo sapiens
  misc_RNA (1)...(19): siRNA sense strand
ccagaucuaugaauuggaa

SEQ ID NO: 316727 - RNA, 19 nt, Homo sapiens
  misc_RNA (1)...(19): siRNA sense strand
uggaggagcucgccagcaa

SEQ ID NO: 316728 - RNA, 19 nt, Homo sapiens
  misc_RNA (1)...(19): siRNA sense strand
ccaaccaccagaucuauga

SEQ ID NO: 316729 - RNA, 19 nt, Homo sapiens
  misc_RNA (1)...(19): siRNA sense strand
ggaggacgaggaagacgaa

SEQ ID NO: 316730 - RNA, 19 nt, Homo sapiens
  misc_RNA (1)...(19): siRNA sense strand
gcacggccuucaccaacca

SEQ ID NO: 316731 - RNA, 19 nt, Homo sapiens
  misc_RNA (1)...(19): siRNA sense strand
cgaggaagacgaagagauc

SEQ ID NO: 316732 - RNA, 19 nt, Homo sapiens
  misc_RNA (1)...(19): siRNA sense strand
gaggagcucgccagcaaga

SEQ ID NO: 316733 - RNA, 19 nt, Homo sapiens
  misc_RNA (1)...(19): siRNA sense strand
uggccgaacucgagcagaa

SEQ ID NO: 316734 - RNA, 19 nt, Homo sapiens
  misc_RNA (1)...(19): siRNA sense strand
ggacgaggaagacgaagag

SEQ ID NO: 316735 - RNA, 19 nt, Homo sapiens
  misc_RNA (1)...(19): siRNA sense strand
ucaccaaccaccagaucua

SEQ ID NO: 316736 - RNA, 19 nt, Homo sapiens
  misc_RNA (1)...(19): siRNA sense strand
ccaccagaucuaugaauug

SEQ ID NO: 316737 - RNA, 19 nt, Homo sapiens
  misc_RNA (1)...(19): siRNA sense strand
caccagaucuaugaauugg

SEQ ID NO: 316738 - RNA, 19 nt, Homo sapiens
  misc_RNA (1)...(19): siRNA sense strand
gcgacgguaugaccaucuu

SEQ ID NO: 316739 - RNA, 19 nt, Homo sapiens
  misc_RNA (1)...(19): siRNA sense strand
ccuaagaagcggcgaaagu

SEQ ID NO: 316740 - RNA, 19 nt, Homo sapiens
  misc_RNA (1)...(19): siRNA sense strand
cgucugugcggagaaguua

SEQ ID NO: 316741 - RNA, 19 nt, Homo sapiens
  misc_RNA (1)...(19): siRNA sense strand
accaccagaucuaugaauu

SEQ ID NO: 316742 - RNA, 19 nt, Homo sapiens
  misc_RNA (1)...(19): siRNA sense strand
gacgguaugaccaucuuug

SEQ ID NO: 316743 - RNA, 19 nt, Homo sapiens
  misc_RNA (1)...(19): siRNA sense strand
cuaagaagcggcgaaaguc

SEQ ID NO: 316744 - RNA, 19 nt, Homo sapiens
  misc_RNA (1)...(19): siRNA sense strand
caccaacgcgcaagucauc

SEQ ID NO: 316745 - RNA, 19 nt, Homo sapiens
  misc_RNA (1)...(19): siRNA sense strand
cgcaagucaucaccugguu

SEQ ID NO: 316746 - RNA, 19 nt, Homo sapiens
  misc_RNA (1)...(19): siRNA sense strand
caaccaccagaucuaugaa

SEQ ID NO: 316747 - RNA, 19 nt, Homo sapiens
  misc_RNA (1)...(19): siRNA sense strand
ugaaaucacaggcuucuua

SEQ ID NO: 316748 - RNA, 19 nt, Homo sapiens
  misc_RNA (1)...(19): siRNA sense strand
gagaaaagagugcuaauua

SEQ ID NO: 316749 - RNA, 19 nt, Homo sapiens
  misc_RNA (1)...(19): siRNA sense strand
aaucacaggcuucuuauua

SEQ ID NO: 316750 - RNA, 19 nt, Homo sapiens
  misc_RNA (1)...(19): siRNA sense strand
gugaagaaaugcguggaua

SEQ ID NO: 316751 - RNA, 19 nt, Homo sapiens
  misc_RNA (1)...(19): siRNA sense strand
gaaaaccuguguucaaguu

SEQ ID NO: 316752 - RNA, 19 nt, Homo sapiens
  misc_RNA (1)...(19): siRNA sense strand
guuccaacuugccaaauuu

SEQ ID NO: 316753 - RNA, 19 nt, Homo sapiens
  misc_RNA (1)...(19): siRNA sense strand
gaaaucacaggcuucuuau

SEQ ID NO: 316754 - RNA, 19 nt, Homo sapiens
  misc_RNA (1)...(19): siRNA sense strand
uggauacgauggccuauga

SEQ ID NO: 316755 - RNA, 19 nt, Homo sapiens
  misc_RNA (1)...(19): siRNA sense strand
cagccaagauggaagugaa

SEQ ID NO: 316756 - RNA, 19 nt, Homo sapiens
  misc_RNA (1)...(19): siRNA sense strand
gcucuugguucugaaauca

SEQ ID NO: 316757 - RNA, 19 nt, Homo sapiens
  misc_RNA (1)...(19): siRNA sense strand
agauggaagugaagaaaug

SEQ ID NO: 316758 - RNA, 19 nt, Homo sapiens
  misc_RNA (1)...(19): siRNA sense strand
caagauggaagugaagaaa

SEQ ID NO: 316759 - RNA, 19 nt, Homo sapiens
  misc_RNA (1)...(19): siRNA sense strand
agaaaugcguggauacgau

SEQ ID NO: 316760 - RNA, 19 nt, Homo sapiens
  misc_RNA (1)...(19): siRNA sense strand
uacgauggccuaugagaaa

SEQ ID NO: 316761 - RNA, 19 nt, Homo sapiens
  misc_RNA (1)...(19): siRNA sense strand
gaaaagagugcuaauuaca

SEQ ID NO: 316762 - RNA, 19 nt, Homo sapiens
  misc_RNA (1)...(19): siRNA sense strand
gauacgauggccuaugaga

SEQ ID NO: 316763 - RNA, 19 nt, Homo sapiens
  misc_RNA (1)...(19): siRNA sense strand
caacuugccaaauuuaagg

SEQ ID NO: 316764 - RNA, 19 nt, Homo sapiens
  misc_RNA (1)...(19): siRNA sense strand
gaagaaaugcguggauacg

SEQ ID NO: 316765 - RNA, 19 nt, Homo sapiens
  misc_RNA (1)...(19): siRNA sense strand
aaauagcagagaaauguga

SEQ ID NO: 316766 - RNA, 19 nt, Homo sapiens
  misc_RNA (1)...(19): siRNA sense strand
ucacaggcuucuuauuagc

SEQ ID NO: 316767 - RNA, 19 nt, Homo sapiens
  misc_RNA (1)...(19): siRNA sense strand
ccaagauggaagugaagaa

SEQ ID NO: 316768 - RNA, 19 nt, Homo sapiens
  misc_RNA (1)...(19): siRNA sense strand
uaaggcaccucuggaagcu

SEQ ID NO: 316769 - RNA, 19 nt, Homo sapiens
  misc_RNA (1)...(19): siRNA sense strand
ccaacuugccaaauuuaag

SEQ ID NO: 316770 - RNA, 19 nt, Homo sapiens
  misc_RNA (1)...(19): siRNA sense strand
gaagaaauguaguguguga

SEQ ID NO: 316771 - RNA, 19 nt, Homo sapiens
  misc_RNA (1)...(19): siRNA sense strand
gaucagaugucccuucaga

SEQ ID NO: 316772 - RNA, 19 nt, Homo sapiens
  misc_RNA (1)...(19): siRNA sense strand
gcccagcucuuguuucuga

SEQ ID NO: 316773 - RNA, 19 nt, Homo sapiens
  misc_RNA (1)...(19): siRNA sense strand
guuaagucuugccaaauuu

SEQ ID NO: 316774 - RNA, 19 nt, Homo sapiens
  misc_RNA (1)...(19): siRNA sense strand
ucagaugucccuucagaaa

SEQ ID NO: 316775 - RNA, 19 nt, Homo sapiens
  misc_RNA (1)...(19): siRNA sense strand
uuucugagcuguuagacuu

SEQ ID NO: 316776 - RNA, 19 nt, Homo sapiens
  misc_RNA (1)...(19): siRNA sense strand
gcuguuagacuucuucuuc

SEQ ID NO: 316777 - RNA, 19 nt, Homo sapiens
  misc_RNA (1)...(19): siRNA sense strand
aguuaagucuugccaaauu

SEQ ID NO: 316778 - RNA, 19 nt, Homo sapiens
  misc_RNA (1)...(19): siRNA sense strand
gcagccaaguuaggaguga

SEQ ID NO: 316779 - RNA, 19 nt, Homo sapiens
  misc_RNA (1)...(19): siRNA sense strand
uugaagaaauguagugugu

SEQ ID NO: 316780 - RNA, 19 nt, Homo sapiens
  misc_RNA (1)...(19): siRNA sense strand
gagaugcacggaucagaug

SEQ ID NO: 316781 - RNA, 19 nt, Homo sapiens
  misc_RNA (1)...(19): siRNA sense strand
cagaaacgaagccucauug

SEQ ID NO: 316782 - RNA, 19 nt, Homo sapiens
  misc_RNA (1)...(19): siRNA sense strand
caaguuaggagugaagaga

SEQ ID NO: 316783 - RNA, 19 nt, Homo sapiens
  misc_RNA (1)...(19): siRNA sense strand
cggaucagaugucccuuca

SEQ ID NO: 316784 - RNA, 19 nt, Homo sapiens
  misc_RNA (1)...(19): siRNA sense strand
ucagaaacgaagccucauu

SEQ ID NO: 316785 - RNA, 19 nt, Homo sapiens
  misc_RNA (1)...(19): siRNA sense strand
ccaggccaaugccgaguuc

SEQ ID NO: 316786 - RNA, 19 nt, Homo sapiens
  misc_RNA (1)...(19): siRNA sense strand
guuagacuucuucuucauu

SEQ ID NO: 316787 - RNA, 19 nt, Homo sapiens
  misc_RNA (1)...(19): siRNA sense strand
ucuuguuucugagcuguua

SEQ ID NO: 316788 - RNA, 19 nt, Homo sapiens
  misc_RNA (1)...(19): siRNA sense strand
gacuucuucuucauuagug

SEQ ID NO: 316789 - RNA, 19 nt, Homo sapiens
  misc_RNA (1)...(19): siRNA sense strand
gaagccucauugcggaagu

SEQ ID NO: 316790 - RNA, 19 nt, Homo sapiens
  misc_RNA (1)...(19): siRNA sense strand
uaagucuugccaaauuuga

SEQ ID NO: 316791 - RNA, 19 nt, Homo sapiens
  misc_RNA (1)...(19): siRNA sense strand
guucugcccagcucuuguu

SEQ ID NO: 316792 - RNA, 19 nt, Homo sapiens
  misc_RNA (1)...(19): siRNA sense strand
uugcggaaguccuggugaa

SEQ ID NO: 316793 - RNA, 19 nt, Homo sapiens
  misc_RNA (1)...(19): siRNA sense strand
cugcccagcucuuguuucu

SEQ ID NO: 316794 - RNA, 19 nt, Homo sapiens
  misc_RNA (1)...(19): siRNA sense strand
gcaaggacacuuucuacuc

SEQ ID NO: 316795 - RNA, 19 nt, Homo sapiens
  misc_RNA (1)...(19): siRNA sense strand
cgacuacuccaacgagaag

SEQ ID NO: 316796 - RNA, 19 nt, Homo sapiens
  misc_RNA (1)...(19): siRNA sense strand
guucgaggccuucuaugca

SEQ ID NO: 316797 - RNA, 19 nt, Homo sapiens
  misc_RNA (1)...(19): siRNA sense strand
ucucccaccucugcgagua

SEQ ID NO: 316798 - RNA, 19 nt, Homo sapiens
  misc_RNA (1)...(19): siRNA sense strand
gcaaggacacuuucuacuc

SEQ ID NO: 316799 - RNA, 19 nt, Homo sapiens
  misc_RNA (1)...(19): siRNA sense strand
cgacuacuccaacgagaag

SEQ ID NO: 316800 - RNA, 19 nt, Homo sapiens
  misc_RNA (1)...(19): siRNA sense strand
guucgaggccuucuaugca

SEQ ID NO: 316801 - RNA, 19 nt, Homo sapiens
  misc_RNA (1)...(19): siRNA sense strand
ucucccaccucugcgagua

SEQ ID NO: 316802 - RNA, 19 nt, Homo sapiens
  misc_RNA (1)...(19): siRNA sense strand
caacaaugcugaauucuug

SEQ ID NO: 316803 - RNA, 19 nt, Homo sapiens
  misc_RNA (1)...(19): siRNA sense strand
agagugaccuggacaagua

SEQ ID NO: 316804 - RNA, 19 nt, Homo sapiens
  misc_RNA (1)...(19): siRNA sense strand
acaaauaccguaacaagua

SEQ ID NO: 316805 - RNA, 19 nt, Homo sapiens
  misc_RNA (1)...(19): siRNA sense strand
ggagccaccugaaccauga

SEQ ID NO: 316806 - RNA, 19 nt, Homo sapiens
  misc_RNA (1)...(19): siRNA sense strand
cuaaagggcucauugucaa

SEQ ID NO: 316807 - RNA, 19 nt, Homo sapiens
  misc_RNA (1)...(19): siRNA sense strand
gauacgaugucaccaggaa

SEQ ID NO: 316808 - RNA, 19 nt, Homo sapiens
  misc_RNA (1)...(19): siRNA sense strand
caaccuggcuuccuacuac

SEQ ID NO: 316809 - RNA, 19 nt, Homo sapiens
  misc_RNA (1)...(19): siRNA sense strand
gagaauugccaucaaaguu

SEQ ID NO: 316810 - RNA, 19 nt, Homo sapiens
  misc_RNA (1)...(19): siRNA sense strand
gaaggcauacgaugacuug

SEQ ID NO: 316811 - RNA, 19 nt, Homo sapiens
  misc_RNA (1)...(19): siRNA sense strand
caacaaauaccguaacaag

SEQ ID NO: 316812 - RNA, 19 nt, Homo sapiens
  misc_RNA (1)...(19): siRNA sense strand
acagacaaguuuggaauaa

SEQ ID NO: 316813 - RNA, 19 nt, Homo sapiens
  misc_RNA (1)...(19): siRNA sense strand
gcagaggccacaagaaaga

SEQ ID NO: 316814 - RNA, 19 nt, Homo sapiens
  misc_RNA (1)...(19): siRNA sense strand
caucaaaguucucgacuac

SEQ ID NO: 316815 - RNA, 19 nt, Homo sapiens
  misc_RNA (1)...(19): siRNA sense strand
caaggaggcuuuuguaaga

SEQ ID NO: 316816 - RNA, 19 nt, Homo sapiens
  misc_RNA (1)...(19): siRNA sense strand
caagaaagaucuggauggu

SEQ ID NO: 316817 - RNA, 19 nt, Homo sapiens
  misc_RNA (1)...(19): siRNA sense strand
ggccagaagacaauauuaa

SEQ ID NO: 316818 - RNA, 19 nt, Homo sapiens
  misc_RNA (1)...(19): siRNA sense strand
gcaacaaugcugaauucuu

SEQ ID NO: 316819 - RNA, 19 nt, Homo sapiens
  misc_RNA (1)...(19): siRNA sense strand
ccaaggaagccaugaaugu

SEQ ID NO: 316820 - RNA, 19 nt, Homo sapiens
  misc_RNA (1)...(19): siRNA sense strand
caaauaccguaacaaguac

SEQ ID NO: 316821 - RNA, 19 nt, Homo sapiens
  misc_RNA (1)...(19): siRNA sense strand
gaaaggcugcagcuuggaa

SEQ ID NO: 316822 - RNA, 19 nt, Homo sapiens
  misc_RNA (1)...(19): siRNA sense strand
gaauugccaucaaaguucu

SEQ ID NO: 316823 - RNA, 19 nt, Homo sapiens
  misc_RNA (1)...(19): siRNA sense strand
ggaagucucugagcagcau

SEQ ID NO: 316824 - RNA, 19 nt, Homo sapiens
  misc_RNA (1)...(19): siRNA sense strand
gaagcccacagccaucaua

SEQ ID NO: 316825 - RNA, 19 nt, Homo sapiens
  misc_RNA (1)...(19): siRNA sense strand
gaaggcagaggccacaaga

SEQ ID NO: 316826 - RNA, 19 nt, Homo sapiens
  misc_RNA (1)...(19): siRNA sense strand
uggaauaaauugccucauc

SEQ ID NO: 316827 - RNA, 19 nt, Homo sapiens
  misc_RNA (1)...(19): siRNA sense strand
caucaccauucaugacaaa

SEQ ID NO: 316828 - RNA, 19 nt, Homo sapiens
  misc_RNA (1)...(19): siRNA sense strand
caaaggucaucuugcaaca

SEQ ID NO: 316829 - RNA, 19 nt, Homo sapiens
  misc_RNA (1)...(19): siRNA sense strand
gaagaagcgcggauacgau

SEQ ID NO: 316830 - RNA, 19 nt, Homo sapiens
  misc_RNA (1)...(19): siRNA sense strand
ugucauggcccuagagaaa

SEQ ID NO: 316831 - RNA, 19 nt, Homo sapiens
  misc_RNA (1)...(19): siRNA sense strand
cagacaaguuuggaauaaa

SEQ ID NO: 316832 - RNA, 19 nt, Homo sapiens
  misc_RNA (1)...(19): siRNA sense strand
gacagacaaguuuggaaua

SEQ ID NO: 316833 - RNA, 19 nt, Homo sapiens
  misc_RNA (1)...(19): siRNA sense strand
ccaagaccauccugaaguc

SEQ ID NO: 316834 - RNA, 19 nt, Homo sapiens
  misc_RNA (1)...(19): siRNA sense strand
ccaucaaaguucucgacua

SEQ ID NO: 316835 - RNA, 19 nt, Homo sapiens
  misc_RNA (1)...(19): siRNA sense strand
caaggaagccaugaauguu

SEQ ID NO: 316836 - RNA, 19 nt, Homo sapiens
  misc_RNA (1)...(19): siRNA sense strand
uaagaucccuggucuacac

SEQ ID NO: 316837 - RNA, 19 nt, Homo sapiens
  misc_RNA (1)...(19): siRNA sense strand
ggacuguucaucaccauuc

SEQ ID NO: 316838 - RNA, 19 nt, Homo sapiens
  misc_RNA (1)...(19): siRNA sense strand
ggagauguuugcccaagac

SEQ ID NO: 316839 - RNA, 19 nt, Homo sapiens
  misc_RNA (1)...(19): siRNA sense strand
ggauggccuuuacccuuga

SEQ ID NO: 316840 - RNA, 19 nt, Homo sapiens
  misc_RNA (1)...(19): siRNA sense strand
ggacgucggcaccaacaau

SEQ ID NO: 316841 - RNA, 19 nt, Homo sapiens
  misc_RNA (1)...(19): siRNA sense strand
gcuuuccaaucacguguuu

SEQ ID NO: 316842 - RNA, 19 nt, Homo sapiens
  misc_RNA (1)...(19): siRNA sense strand
uugcaacaaugcugaauuc

SEQ ID NO: 316843 - RNA, 19 nt, Homo sapiens
  misc_RNA (1)...(19): siRNA sense strand
ucauggcccuagagaaaga

SEQ ID NO: 316844 - RNA, 19 nt, Homo sapiens
  misc_RNA (1)...(19): siRNA sense strand
acaaguacaucauucucau

SEQ ID NO: 316845 - RNA, 19 nt, Homo sapiens
  misc_RNA (1)...(19): siRNA sense strand
aacacaaccuggcuuccua

SEQ ID NO: 316846 - RNA, 19 nt, Homo sapiens
  misc_RNA (1)...(19): siRNA sense strand
gacgugucuuugagaauug

SEQ ID NO: 316847 - RNA, 19 nt, Homo sapiens
  misc_RNA (1)...(19): siRNA sense strand
cgaggcagcuaugggcauu

SEQ ID NO: 316848 - RNA, 19 nt, Homo sapiens
  misc_RNA (1)...(19): siRNA sense strand
ccaaucacguguuuguuuu

SEQ ID NO: 316849 - RNA, 19 nt, Homo sapiens
  misc_RNA (1)...(19): siRNA sense strand
aaggucaucuugcaacaau

SEQ ID NO: 316850 - RNA, 19 nt, Homo sapiens
  misc_RNA (1)...(19): siRNA sense strand
caggaacccucaucucaac

SEQ ID NO: 316851 - RNA, 19 nt, Homo sapiens
  misc_RNA (1)...(19): siRNA sense strand
gaacccucaucucaacaag

SEQ ID NO: 316852 - RNA, 19 nt, Homo sapiens
  misc_RNA (1)...(19): siRNA sense strand
aggcagaggccacaagaaa

SEQ ID NO: 316853 - RNA, 19 nt, Homo sapiens
  misc_RNA (1)...(19): siRNA sense strand
cguaacaaguacugcaugu

SEQ ID NO: 316854 - RNA, 19 nt, Homo sapiens
  misc_RNA (1)...(19): siRNA sense strand
gacaaguacaucauucuca

SEQ ID NO: 316855 - RNA, 19 nt, Homo sapiens
  misc_RNA (1)...(19): siRNA sense strand
ccuuuacacuggacagcua

SEQ ID NO: 316856 - RNA, 19 nt, Homo sapiens
  misc_RNA (1)...(19): siRNA sense strand
aguacugcauguucaauga

SEQ ID NO: 316857 - RNA, 19 nt, Homo sapiens
  misc_RNA (1)...(19): siRNA sense strand
ugacagacaaguuuggaau

SEQ ID NO: 316858 - RNA, 19 nt, Homo sapiens
  misc_RNA (1)...(19): siRNA sense strand
uccgaaucaugagauauua

SEQ ID NO: 316859 - RNA, 19 nt, Homo sapiens
  misc_RNA (1)...(19): siRNA sense strand
cuaaggacaaggaggcuuu

SEQ ID NO: 316860 - RNA, 19 nt, Homo sapiens
  misc_RNA (1)...(19): siRNA sense strand
ggaacccucaucucaacaa

SEQ ID NO: 316861 - RNA, 19 nt, Homo sapiens
  misc_RNA (1)...(19): siRNA sense strand
ucuggaugguggacucuaa

SEQ ID NO: 316862 - RNA, 19 nt, Homo sapiens
  misc_RNA (1)...(19): siRNA sense strand
ccaggaacccucaucucaa

SEQ ID NO: 316863 - RNA, 19 nt, Homo sapiens
  misc_RNA (1)...(19): siRNA sense strand
acgaugacuugcuggauga

SEQ ID NO: 316864 - RNA, 19 nt, Homo sapiens
  misc_RNA (1)...(19): siRNA sense strand
uggagaaguucaugccaau

SEQ ID NO: 316865 - RNA, 19 nt, Homo sapiens
  misc_RNA (1)...(19): siRNA sense strand
cagcuccuccgaaucauga

SEQ ID NO: 316866 - RNA, 19 nt, Homo sapiens
  misc_RNA (1)...(19): siRNA sense strand
ggcagggaaacaaugcuua

SEQ ID NO: 316867 - RNA, 19 nt, Homo sapiens
  misc_RNA (1)...(19): siRNA sense strand
ugggagaccugggcugcua

SEQ ID NO: 316868 - RNA, 19 nt, Homo sapiens
  misc_RNA (1)...(19): siRNA sense strand
uccaaucacguguuuguuu

SEQ ID NO: 316869 - RNA, 19 nt, Homo sapiens
  misc_RNA (1)...(19): siRNA sense strand
agaauugccaucaaaguuc

SEQ ID NO: 316870 - RNA, 19 nt, Homo sapiens
  misc_RNA (1)...(19): siRNA sense strand
ggacaaguacaucauucuc

SEQ ID NO: 316871 - RNA, 19 nt, Homo sapiens
  misc_RNA (1)...(19): siRNA sense strand
ugacuucggauguggagaa

SEQ ID NO: 316872 - RNA, 19 nt, Homo sapiens
  misc_RNA (1)...(19): siRNA sense strand
gacuaugacuccuuuacac

SEQ ID NO: 316873 - RNA, 19 nt, Homo sapiens
  misc_RNA (1)...(19): siRNA sense strand
uccagacuaugacuccuuu

SEQ ID NO: 316874 - RNA, 19 nt, Homo sapiens
  misc_RNA (1)...(19): siRNA sense strand
ucuaaagggcucauuguca

SEQ ID NO: 316875 - RNA, 19 nt, Homo sapiens
  misc_RNA (1)...(19): siRNA sense strand
guccagcuccuccgaauca

SEQ ID NO: 316876 - RNA, 19 nt, Homo sapiens
  misc_RNA (1)...(19): siRNA sense strand
ggccuuuacccuugaagaa

SEQ ID NO: 316877 - RNA, 19 nt, Homo sapiens
  misc_RNA (1)...(19): siRNA sense strand
ccacaagaaagaucuggau

SEQ ID NO: 316878 - RNA, 19 nt, Homo sapiens
  misc_RNA (1)...(19): siRNA sense strand
ugaagaagcgcggauacga

SEQ ID NO: 316879 - RNA, 19 nt, Homo sapiens
  misc_RNA (1)...(19): siRNA sense strand
gagaaguucaugccaaucg

SEQ ID NO: 316880 - RNA, 19 nt, Homo sapiens
  misc_RNA (1)...(19): siRNA sense strand
ccugacagcagagcaaauu

SEQ ID NO: 316881 - RNA, 19 nt, Homo sapiens
  misc_RNA (1)...(19): siRNA sense strand
gcacgggaaggcauacgau

SEQ ID NO: 316882 - RNA, 19 nt, Homo sapiens
  misc_RNA (1)...(19): siRNA sense strand
gccagaagacaauauuaag

SEQ ID NO: 316883 - RNA, 19 nt, Homo sapiens
  misc_RNA (1)...(19): siRNA sense strand
gacaaaggucaucuugcaa

SEQ ID NO: 316884 - RNA, 19 nt, Homo sapiens
  misc_RNA (1)...(19): siRNA sense strand
gcagggaaacaaugcuuac

SEQ ID NO: 316885 - RNA, 19 nt, Homo sapiens
  misc_RNA (1)...(19): siRNA sense strand
gaauaaauugccucaucca

SEQ ID NO: 316886 - RNA, 19 nt, Homo sapiens
  misc_RNA (1)...(19): siRNA sense strand
ggaaggcauacgaugacuu

SEQ ID NO: 316887 - RNA, 19 nt, Homo sapiens
  misc_RNA (1)...(19): siRNA sense strand
gcccacagccaucauaggu

SEQ ID NO: 316888 - RNA, 19 nt, Homo sapiens
  misc_RNA (1)...(19): siRNA sense strand
gcacuauggccugacuuuc

SEQ ID NO: 316889 - RNA, 19 nt, Homo sapiens
  misc_RNA (1)...(19): siRNA sense strand
gcccaaggaagccaugaau

SEQ ID NO: 316890 - RNA, 19 nt, Homo sapiens
  misc_RNA (1)...(19): siRNA sense strand
acccagagccuaaggacaa

SEQ ID NO: 316891 - RNA, 19 nt, Homo sapiens
  misc_RNA (1)...(19): siRNA sense strand
ccuacuacccagagccuaa

SEQ ID NO: 316892 - RNA, 19 nt, Homo sapiens
  misc_RNA (1)...(19): siRNA sense strand
gauggcaagaccuucauuc

SEQ ID NO: 316893 - RNA, 19 nt, Homo sapiens
  misc_RNA (1)...(19): siRNA sense strand
gaaguccuuuuaagagugu

SEQ ID NO: 316894 - RNA, 19 nt, Homo sapiens
  misc_RNA (1)...(19): siRNA sense strand
gauguuugcccaagaccau

SEQ ID NO: 316895 - RNA, 19 nt, Homo sapiens
  misc_RNA (1)...(19): siRNA sense strand
ccagaagacaauauuaagg

SEQ ID NO: 316896 - RNA, 19 nt, Homo sapiens
  misc_RNA (1)...(19): siRNA sense strand
caccauucaugacaaaggu

SEQ ID NO: 316897 - RNA, 19 nt, Homo sapiens
  misc_RNA (1)...(19): siRNA sense strand
gauggccuuuacccuugaa

SEQ ID NO: 316898 - RNA, 19 nt, Homo sapiens
  misc_RNA (1)...(19): siRNA sense strand
caaguacaucauucucaug

SEQ ID NO: 316899 - RNA, 19 nt, Homo sapiens
  misc_RNA (1)...(19): siRNA sense strand
uccgccugcucaacaaaua

SEQ ID NO: 316900 - RNA, 19 nt, Homo sapiens
  misc_RNA (1)...(19): siRNA sense strand
agacuucgccaaugccaau

SEQ ID NO: 316901 - RNA, 19 nt, Homo sapiens
  misc_RNA (1)...(19): siRNA sense strand
gaccuggacaaguacauca

SEQ ID NO: 316902 - RNA, 19 nt, Homo sapiens
  misc_RNA (1)...(19): siRNA sense strand
gaagagaauuggcuguuaa

SEQ ID NO: 316903 - RNA, 19 nt, Homo sapiens
  misc_RNA (1)...(19): siRNA sense strand
gaagguaucauguuucaua

SEQ ID NO: 316904 - RNA, 19 nt, Homo sapiens
  misc_RNA (1)...(19): siRNA sense strand
gcaaauauccugcgagauu

SEQ ID NO: 316905 - RNA, 19 nt, Homo sapiens
  misc_RNA (1)...(19): siRNA sense strand
ggacaaagcucuggaacug

SEQ ID NO: 316906 - RNA, 19 nt, Homo sapiens
  misc_RNA (1)...(19): siRNA sense strand
ccaagaagguaucauguuu

SEQ ID NO: 316907 - RNA, 19 nt, Homo sapiens
  misc_RNA (1)...(19): siRNA sense strand
ggaagagaauuggcuguua

SEQ ID NO: 316908 - RNA, 19 nt, Homo sapiens
  misc_RNA (1)...(19): siRNA sense strand
guacacaggcuacuaauuu

SEQ ID NO: 316909 - RNA, 19 nt, Homo sapiens
  misc_RNA (1)...(19): siRNA sense strand
gaacauauccaagaaggua

SEQ ID NO: 316910 - RNA, 19 nt, Homo sapiens
  misc_RNA (1)...(19): siRNA sense strand
gaaauacacccgucagauu

SEQ ID NO: 316911 - RNA, 19 nt, Homo sapiens
  misc_RNA (1)...(19): siRNA sense strand
gaucauuccuuaagcacua

SEQ ID NO: 316912 - RNA, 19 nt, Homo sapiens
  misc_RNA (1)...(19): siRNA sense strand
ggagaaggcuauggaagaa

SEQ ID NO: 316913 - RNA, 19 nt, Homo sapiens
  misc_RNA (1)...(19): siRNA sense strand
ggaggaacauauccaagaa

SEQ ID NO: 316914 - RNA, 19 nt, Homo sapiens
  misc_RNA (1)...(19): siRNA sense strand
ugaagagccucaagauauu

SEQ ID NO: 316915 - RNA, 19 nt, Homo sapiens
  misc_RNA (1)...(19): siRNA sense strand
gcaaacggcuucagaccau

SEQ ID NO: 316916 - RNA, 19 nt, Homo sapiens
  misc_RNA (1)...(19): siRNA sense strand
gaugauagucgaauaagaa

SEQ ID NO: 316917 - RNA, 19 nt, Homo sapiens
  misc_RNA (1)...(19): siRNA sense strand
gguaucauguuucauauca

SEQ ID NO: 316918 - RNA, 19 nt, Homo sapiens
  misc_RNA (1)...(19): siRNA sense strand
guagaaaugcuaacugaaa

SEQ ID NO: 316919 - RNA, 19 nt, Homo sapiens
  misc_RNA (1)...(19): siRNA sense strand
gaucguaguauucauauga

SEQ ID NO: 316920 - RNA, 19 nt, Homo sapiens
  misc_RNA (1)...(19): siRNA sense strand
ggagagagcuauccaaaau

SEQ ID NO: 316921 - RNA, 19 nt, Homo sapiens
  misc_RNA (1)...(19): siRNA sense strand
gaagagccucaagauauua

SEQ ID NO: 316922 - RNA, 19 nt, Homo sapiens
  misc_RNA (1)...(19): siRNA sense strand
agaauuggcuguuaagcaa

SEQ ID NO: 316923 - RNA, 19 nt, Homo sapiens
  misc_RNA (1)...(19): siRNA sense strand
ggaagggucuaccucuguu

SEQ ID NO: 316924 - RNA, 19 nt, Homo sapiens
  misc_RNA (1)...(19): siRNA sense strand
uacacaggcuacuaauuua

SEQ ID NO: 316925 - RNA, 19 nt, Homo sapiens
  misc_RNA (1)...(19): siRNA sense strand
gaacugcuggaucguagua

SEQ ID NO: 316926 - RNA, 19 nt, Homo sapiens
  misc_RNA (1)...(19): siRNA sense strand
gauagucgaauaagaagaa

SEQ ID NO: 316927 - RNA, 19 nt, Homo sapiens
  misc_RNA (1)...(19): siRNA sense strand
guaugaugauagucgaaua

SEQ ID NO: 316928 - RNA, 19 nt, Homo sapiens
  misc_RNA (1)...(19): siRNA sense strand
gaagugacauagacaaucc

SEQ ID NO: 316929 - RNA, 19 nt, Homo sapiens
  misc_RNA (1)...(19): siRNA sense strand
cagauaaucaucaggaauu

SEQ ID NO: 316930 - RNA, 19 nt, Homo sapiens
  misc_RNA (1)...(19): siRNA sense strand
ggaucuacauuauaccaau

SEQ ID NO: 316931 - RNA, 19 nt, Homo sapiens
  misc_RNA (1)...(19): siRNA sense strand
caaauauccugcgagauuc

SEQ ID NO: 316932 - RNA, 19 nt, Homo sapiens
  misc_RNA (1)...(19): siRNA sense strand
cauagacaauccuacuuug

SEQ ID NO: 316933 - RNA, 19 nt, Homo sapiens
  misc_RNA (1)...(19): siRNA sense strand
ucugagaucuaaagcuaaa

SEQ ID NO: 316934 - RNA, 19 nt, Homo sapiens
  misc_RNA (1)...(19): siRNA sense strand
ccagagagcauggaacaaa

SEQ ID NO: 316935 - RNA, 19 nt, Homo sapiens
  misc_RNA (1)...(19): siRNA sense strand
gaacaaaugcuggauccau

SEQ ID NO: 316936 - RNA, 19 nt, Homo sapiens
  misc_RNA (1)...(19): siRNA sense strand
gaaugugacuaggaaauac

SEQ ID NO: 316937 - RNA, 19 nt, Homo sapiens
  misc_RNA (1)...(19): siRNA sense strand
caucaagagguaauaauga

SEQ ID NO: 316938 - RNA, 19 nt, Homo sapiens
  misc_RNA (1)...(19): siRNA sense strand
ucagcaagcuuugaacuca

SEQ ID NO: 316939 - RNA, 19 nt, Homo sapiens
  misc_RNA (1)...(19): siRNA sense strand
gauaucaaaggcgcaaaua

SEQ ID NO: 316940 - RNA, 19 nt, Homo sapiens
  misc_RNA (1)...(19): siRNA sense strand
cuggauccauuaucuuuaa

SEQ ID NO: 316941 - RNA, 19 nt, Homo sapiens
  misc_RNA (1)...(19): siRNA sense strand
ugccaucacuagaagauuu

SEQ ID NO: 316942 - RNA, 19 nt, Homo sapiens
  misc_RNA (1)...(19): siRNA sense strand
cggguuacauuccagauga

SEQ ID NO: 316943 - RNA, 19 nt, Homo sapiens
  misc_RNA (1)...(19): siRNA sense strand
aagaagguaucauguuuca

SEQ ID NO: 316944 - RNA, 19 nt, Homo sapiens
  misc_RNA (1)...(19): siRNA sense strand
gggcugaauuugaagcaau

SEQ ID NO: 316945 - RNA, 19 nt, Homo sapiens
  misc_RNA (1)...(19): siRNA sense strand
agacuauacucgagauuuc

SEQ ID NO: 316946 - RNA, 19 nt, Homo sapiens
  misc_RNA (1)...(19): siRNA sense strand
ugaacucaaucaugcaaga

SEQ ID NO: 316947 - RNA, 19 nt, Homo sapiens
  misc_RNA (1)...(19): siRNA sense strand
ggaaauacacccgucagau

SEQ ID NO: 316948 - RNA, 19 nt, Homo sapiens
  misc_RNA (1)...(19): siRNA sense strand
gcgaauuguucaguauuau

SEQ ID NO: 316949 - RNA, 19 nt, Homo sapiens
  misc_RNA (1)...(19): siRNA sense strand
gggucuaccucuguuauga

SEQ ID NO: 316950 - RNA, 19 nt, Homo sapiens
  misc_RNA (1)...(19): siRNA sense strand
gaagggucuaccucuguua

SEQ ID NO: 316951 - RNA, 19 nt, Homo sapiens
  misc_RNA (1)...(19): siRNA sense strand
cagagagcauggaacaaau

SEQ ID NO: 316952 - RNA, 19 nt, Homo sapiens
  misc_RNA (1)...(19): siRNA sense strand
gccuugggcugaauuugaa

SEQ ID NO: 316953 - RNA, 19 nt, Homo sapiens
  misc_RNA (1)...(19): siRNA sense strand
ugguagaaaugcuaacuga

SEQ ID NO: 316954 - RNA, 19 nt, Homo sapiens
  misc_RNA (1)...(19): siRNA sense strand
uaucaaaggcgcaaauauc

SEQ ID NO: 316955 - RNA, 19 nt, Homo sapiens
  misc_RNA (1)...(19): siRNA sense strand
uccauuauuugcacaguaa

SEQ ID NO: 316956 - RNA, 19 nt, Homo sapiens
  misc_RNA (1)...(19): siRNA sense strand
guaauaaugauggucguaa

SEQ ID NO: 316957 - RNA, 19 nt, Homo sapiens
  misc_RNA (1)...(19): siRNA sense strand
ccugugaguuucaguccua

SEQ ID NO: 316958 - RNA, 19 nt, Homo sapiens
  misc_RNA (1)...(19): siRNA sense strand
gcauauggcgcucuuacug

SEQ ID NO: 316959 - RNA, 19 nt, Homo sapiens
  misc_RNA (1)...(19): siRNA sense strand
cuauggaucuacauuauac

SEQ ID NO: 316960 - RNA, 19 nt, Homo sapiens
  misc_RNA (1)...(19): siRNA sense strand
caucuggaguguugcaugu

SEQ ID NO: 316961 - RNA, 19 nt, Homo sapiens
  misc_RNA (1)...(19): siRNA sense strand
gagaaugugacuaggaaau

SEQ ID NO: 316962 - RNA, 19 nt, Homo sapiens
  misc_RNA (1)...(19): siRNA sense strand
ggagaguucauuccagaga

SEQ ID NO: 316963 - RNA, 19 nt, Homo sapiens
  misc_RNA (1)...(19): siRNA sense strand
uaugaagagccucaagaua

SEQ ID NO: 316964 - RNA, 19 nt, Homo sapiens
  misc_RNA (1)...(19): siRNA sense strand
caauaacgaguugguaauu

SEQ ID NO: 316965 - RNA, 19 nt, Homo sapiens
  misc_RNA (1)...(19): siRNA sense strand
gucuauggaucuacauuau

SEQ ID NO: 316966 - RNA, 19 nt, Homo sapiens
  misc_RNA (1)...(19): siRNA sense strand
agcgaauuguucaguauua

SEQ ID NO: 316967 - RNA, 19 nt, Homo sapiens
  misc_RNA (1)...(19): siRNA sense strand
gagaauuggcuguuaagca

SEQ ID NO: 316968 - RNA, 19 nt, Homo sapiens
  misc_RNA (1)...(19): siRNA sense strand
aguggaagcaguaucuuua

SEQ ID NO: 316969 - RNA, 19 nt, Homo sapiens
  misc_RNA (1)...(19): siRNA sense strand
augaagagccucaagauau

SEQ ID NO: 316970 - RNA, 19 nt, Homo sapiens
  misc_RNA (1)...(19): siRNA sense strand
caacagugaaggagaguuc

SEQ ID NO: 316971 - RNA, 19 nt, Homo sapiens
  misc_RNA (1)...(19): siRNA sense strand
uaauaugauuguccuacga

SEQ ID NO: 316972 - RNA, 19 nt, Homo sapiens
  misc_RNA (1)...(19): siRNA sense strand
cugagaaugugacuaggaa

SEQ ID NO: 316973 - RNA, 19 nt, Homo sapiens
  misc_RNA (1)...(19): siRNA sense strand
ugagcgaauuguucaguau

SEQ ID NO: 316974 - RNA, 19 nt, Homo sapiens
  misc_RNA (1)...(19): siRNA sense strand
gauccauuaucuuuaagca

SEQ ID NO: 316975 - RNA, 19 nt, Homo sapiens
  misc_RNA (1)...(19): siRNA sense strand
cauguacugugguagaaau

SEQ ID NO: 316976 - RNA, 19 nt, Homo sapiens
  misc_RNA (1)...(19): siRNA sense strand
gaaugauguccgagucaaa

SEQ ID NO: 316977 - RNA, 19 nt, Homo sapiens
  misc_RNA (1)...(19): siRNA sense strand
gagcgaauuguucaguauu

SEQ ID NO: 316978 - RNA, 19 nt, Homo sapiens
  misc_RNA (1)...(19): siRNA sense strand
cuaccucuguuaugauguu

SEQ ID NO: 316979 - RNA, 19 nt, Homo sapiens
  misc_RNA (1)...(19): siRNA sense strand
gcuggauccauuaucuuua

SEQ ID NO: 316980 - RNA, 19 nt, Homo sapiens
  misc_RNA (1)...(19): siRNA sense strand
gcugccaccucaugucuca

SEQ ID NO: 316981 - RNA, 19 nt, Homo sapiens
  misc_RNA (1)...(19): siRNA sense strand
ccaaagcugccaccucaug

SEQ ID NO: 316982 - RNA, 19 nt, Homo sapiens
  misc_RNA (1)...(19): siRNA sense strand
agaaugugacuaggaaaua

SEQ ID NO: 316983 - RNA, 19 nt, Homo sapiens
  misc_RNA (1)...(19): siRNA sense strand
gacagucuauggaucuaca

SEQ ID NO: 316984 - RNA, 19 nt, Homo sapiens
  misc_RNA (1)...(19): siRNA sense strand
agacaauccuacuuugaca

SEQ ID NO: 316985 - RNA, 19 nt, Homo sapiens
  misc_RNA (1)...(19): siRNA sense strand
ggaggguguccauuauuug

SEQ ID NO: 316986 - RNA, 19 nt, Homo sapiens
  misc_RNA (1)...(19): siRNA sense strand
gaauuguucaguauuaugg

SEQ ID NO: 316987 - RNA, 19 nt, Homo sapiens
  misc_RNA (1)...(19): siRNA sense strand
guuaagcaaguucaauuug

SEQ ID NO: 316988 - RNA, 19 nt, Homo sapiens
  misc_RNA (1)...(19): siRNA sense strand
uccauuaacuacucaagau

SEQ ID NO: 316989 - RNA, 19 nt, Homo sapiens
  misc_RNA (1)...(19): siRNA sense strand
cuacaugagcgaauuguuc

SEQ ID NO: 316990 - RNA, 19 nt, Homo sapiens
  misc_RNA (1)...(19): siRNA sense strand
gaccagcaaggaaguaaau

SEQ ID NO: 316991 - RNA, 19 nt, Homo sapiens
  misc_RNA (1)...(19): siRNA sense strand
acauagacaauccuacuuu

SEQ ID NO: 316992 - RNA, 19 nt, Homo sapiens
  misc_RNA (1)...(19): siRNA sense strand
ggaagugacauagacaauc

SEQ ID NO: 316993 - RNA, 19 nt, Homo sapiens
  misc_RNA (1)...(19): siRNA sense strand
guccauuauuugcacagua

SEQ ID NO: 316994 - RNA, 19 nt, Homo sapiens
  misc_RNA (1)...(19): siRNA sense strand
aaauacacccgucagauuc

SEQ ID NO: 316995 - RNA, 19 nt, Homo sapiens
  misc_RNA (1)...(19): siRNA sense strand
gaaccauugccaucacuag

SEQ ID NO: 316996 - RNA, 19 nt, Homo sapiens
  misc_RNA (1)...(19): siRNA sense strand
gcacaguaauaugauuguc

SEQ ID NO: 316997 - RNA, 19 nt, Homo sapiens
  misc_RNA (1)...(19): siRNA sense strand
uaaacuggaagaucugaga

SEQ ID NO: 316998 - RNA, 19 nt, Homo sapiens
  misc_RNA (1)...(19): siRNA sense strand
cauauggcgcucuuacuga

SEQ ID NO: 316999 - RNA, 19 nt, Homo sapiens
  misc_RNA (1)...(19): siRNA sense strand
ucaguauuauggcuguuug

SEQ ID NO: 317000 - RNA, 19 nt, Homo sapiens
  misc_RNA (1)...(19): siRNA sense strand
ugaugauagucgaauaaga

SEQ ID NO: 317001 - RNA, 19 nt, Homo sapiens
  misc_RNA (1)...(19): siRNA sense strand
caagaagguaucauguuuc

SEQ ID NO: 317002 - RNA, 19 nt, Homo sapiens
  misc_RNA (1)...(19): siRNA sense strand
gagaagugcugaagucuaa

SEQ ID NO: 317003 - RNA, 19 nt, Homo sapiens
  misc_RNA (1)...(19): siRNA sense strand
guugauggcuuucauguaa

SEQ ID NO: 317004 - RNA, 19 nt, Homo sapiens
  misc_RNA (1)...(19): siRNA sense strand
ccaaagagcaguugaagaa

SEQ ID NO: 317005 - RNA, 19 nt, Homo sapiens
  misc_RNA (1)...(19): siRNA sense strand
ggaaggagcagcagucauu

SEQ ID NO: 317006 - RNA, 19 nt, Homo sapiens
  misc_RNA (1)...(19): siRNA sense strand
ggaucaguauuccauguua

SEQ ID NO: 317007 - RNA, 19 nt, Homo sapiens
  misc_RNA (1)...(19): siRNA sense strand
gaauguguuuggaucagua

SEQ ID NO: 317008 - RNA, 19 nt, Homo sapiens
  misc_RNA (1)...(19): siRNA sense strand
gcaaugcuaaugaagaaua

SEQ ID NO: 317009 - RNA, 19 nt, Homo sapiens
  misc_RNA (1)...(19): siRNA sense strand
cagcagauaugaucaagga

SEQ ID NO: 317010 - RNA, 19 nt, Homo sapiens
  misc_RNA (1)...(19): siRNA sense strand
gagcagcagucauugaugu

SEQ ID NO: 317011 - RNA, 19 nt, Homo sapiens
  misc_RNA (1)...(19): siRNA sense strand
gaaauaaucaagcgaacug

SEQ ID NO: 317012 - RNA, 19 nt, Homo sapiens
  misc_RNA (1)...(19): siRNA sense strand
guagauggccuccuuguuc

SEQ ID NO: 317013 - RNA, 19 nt, Homo sapiens
  misc_RNA (1)...(19): siRNA sense strand
gcagguauuccaaaucuga

SEQ ID NO: 317014 - RNA, 19 nt, Homo sapiens
  misc_RNA (1)...(19): siRNA sense strand
ugaugccacuguuacaaua

SEQ ID NO: 317015 - RNA, 19 nt, Homo sapiens
  misc_RNA (1)...(19): siRNA sense strand
uaauguagauggccuccuu

SEQ ID NO: 317016 - RNA, 19 nt, Homo sapiens
  misc_RNA (1)...(19): siRNA sense strand
caaggauguugauggcuuu

SEQ ID NO: 317017 - RNA, 19 nt, Homo sapiens
  misc_RNA (1)...(19): siRNA sense strand
gagagaaggaucugcaaug

SEQ ID NO: 317018 - RNA, 19 nt, Homo sapiens
  misc_RNA (1)...(19): siRNA sense strand
gcgagaauccugcaaguca

SEQ ID NO: 317019 - RNA, 19 nt, Homo sapiens
  misc_RNA (1)...(19): siRNA sense strand
gaucugcaaugcuguuucu

SEQ ID NO: 317020 - RNA, 19 nt, Homo sapiens
  misc_RNA (1)...(19): siRNA sense strand
uggcaaugcuaaugaagaa

SEQ ID NO: 317021 - RNA, 19 nt, Homo sapiens
  misc_RNA (1)...(19): siRNA sense strand
gcugaagucuaaagagcuu

SEQ ID NO: 317022 - RNA, 19 nt, Homo sapiens
  misc_RNA (1)...(19): siRNA sense strand
caauguuacugcacacaga

SEQ ID NO: 317023 - RNA, 19 nt, Homo sapiens
  misc_RNA (1)...(19): siRNA sense strand
caaguugguuggagaugug

SEQ ID NO: 317024 - RNA, 19 nt, Homo sapiens
  misc_RNA (1)...(19): siRNA sense strand
ggaggugaugccacuguua

SEQ ID NO: 317025 - RNA, 19 nt, Homo sapiens
  misc_RNA (1)...(19): siRNA sense strand
gauccugguuggcgagaau

SEQ ID NO: 317026 - RNA, 19 nt, Homo sapiens
  misc_RNA (1)...(19): siRNA sense strand
ugauggcuuucauguaauu

SEQ ID NO: 317027 - RNA, 19 nt, Homo sapiens
  misc_RNA (1)...(19): siRNA sense strand
cagggcagcugcaguugug

SEQ ID NO: 317028 - RNA, 19 nt, Homo sapiens
  misc_RNA (1)...(19): siRNA sense strand
ucauugaugugggaauaaa

SEQ ID NO: 317029 - RNA, 19 nt, Homo sapiens
  misc_RNA (1)...(19): siRNA sense strand
gagcaguugaagaaacaua

SEQ ID NO: 317030 - RNA, 19 nt, Homo sapiens
  misc_RNA (1)...(19): siRNA sense strand
caagcgaacuggcauucca

SEQ ID NO: 317031 - RNA, 19 nt, Homo sapiens
  misc_RNA (1)...(19): siRNA sense strand
uagauggccuccuuguuca

SEQ ID NO: 317032 - RNA, 19 nt, Homo sapiens
  misc_RNA (1)...(19): siRNA sense strand
aaucaacagugagacaauu

SEQ ID NO: 317033 - RNA, 19 nt, Homo sapiens
  misc_RNA (1)...(19): siRNA sense strand
guuacaauaucucaucgau

SEQ ID NO: 317034 - RNA, 19 nt, Homo sapiens
  misc_RNA (1)...(19): siRNA sense strand
gaacgucccggaggugaug

SEQ ID NO: 317035 - RNA, 19 nt, Homo sapiens
  misc_RNA (1)...(19): siRNA sense strand
aaagagcaguugaagaaac

SEQ ID NO: 317036 - RNA, 19 nt, Homo sapiens
  misc_RNA (1)...(19): siRNA sense strand
agucauugaugugggaaua

SEQ ID NO: 317037 - RNA, 19 nt, Homo sapiens
  misc_RNA (1)...(19): siRNA sense strand
ggaaucaacagugagacaa

SEQ ID NO: 317038 - RNA, 19 nt, Homo sapiens
  misc_RNA (1)...(19): siRNA sense strand
aagagcaguugaagaaaca

SEQ ID NO: 317039 - RNA, 19 nt, Homo sapiens
  misc_RNA (1)...(19): siRNA sense strand
gaucaguauuccauguuac

SEQ ID NO: 317040 - RNA, 19 nt, Homo sapiens
  misc_RNA (1)...(19): siRNA sense strand
caacagugagacaauuaug

SEQ ID NO: 317041 - RNA, 19 nt, Homo sapiens
  misc_RNA (1)...(19): siRNA sense strand
gaaucaacagugagacaau

SEQ ID NO: 317042 - RNA, 19 nt, Homo sapiens
  misc_RNA (1)...(19): siRNA sense strand
ggguauaucacuccaguuc

SEQ ID NO: 317043 - RNA, 19 nt, Homo sapiens
  misc_RNA (1)...(19): siRNA sense strand
gggaauaaauagaguucac

SEQ ID NO: 317044 - RNA, 19 nt, Homo sapiens
  misc_RNA (1)...(19): siRNA sense strand
caaagagcaguugaagaaa

SEQ ID NO: 317045 - RNA, 19 nt, Homo sapiens
  misc_RNA (1)...(19): siRNA sense strand
ggauguugauggcuuucau

SEQ ID NO: 317046 - RNA, 19 nt, Homo sapiens
  misc_RNA (1)...(19): siRNA sense strand
acagugagacaauuaugaa

SEQ ID NO: 317047 - RNA, 19 nt, Homo sapiens
  misc_RNA (1)...(19): siRNA sense strand
cgagaagugcugaagucua

SEQ ID NO: 317048 - RNA, 19 nt, Homo sapiens
  misc_RNA (1)...(19): siRNA sense strand
gaaggagcagcagucauug

SEQ ID NO: 317049 - RNA, 19 nt, Homo sapiens
  misc_RNA (1)...(19): siRNA sense strand
uuccagagcauauugauga

SEQ ID NO: 317050 - RNA, 19 nt, Homo sapiens
  misc_RNA (1)...(19): siRNA sense strand
cagcugcaguugugggaau

SEQ ID NO: 317051 - RNA, 19 nt, Homo sapiens
  misc_RNA (1)...(19): siRNA sense strand
uaauguaggacgaaugugu

SEQ ID NO: 317052 - RNA, 19 nt, Homo sapiens
  misc_RNA (1)...(19): siRNA sense strand
ggaagugcggcaggaggua

SEQ ID NO: 317053 - RNA, 19 nt, Homo sapiens
  misc_RNA (1)...(19): siRNA sense strand
gaagugcugaagucuaaag

SEQ ID NO: 317054 - RNA, 19 nt, Homo sapiens
  misc_RNA (1)...(19): siRNA sense strand
cugcagguauuccaaaucu

SEQ ID NO: 317055 - RNA, 19 nt, Homo sapiens
  misc_RNA (1)...(19): siRNA sense strand
gcuguugucauuucuggaa

SEQ ID NO: 317056 - RNA, 19 nt, Homo sapiens
  misc_RNA (1)...(19): siRNA sense strand
guauaucacuccaguuccu

SEQ ID NO: 317057 - RNA, 19 nt, Homo sapiens
  misc_RNA (1)...(19): siRNA sense strand
caguggcaaugcuaaugaa

SEQ ID NO: 317058 - RNA, 19 nt, Homo sapiens
  misc_RNA (1)...(19): siRNA sense strand
guaauuaauguaggacgaa

SEQ ID NO: 317059 - RNA, 19 nt, Homo sapiens
  misc_RNA (1)...(19): siRNA sense strand
gaugugggaauaaauagag

SEQ ID NO: 317060 - RNA, 19 nt, Homo sapiens
  misc_RNA (1)...(19): siRNA sense strand
cauacaauucuugcagaua

SEQ ID NO: 317061 - RNA, 19 nt, Homo sapiens
  misc_RNA (1)...(19): siRNA sense strand
caaugcuaaugaagaauac

SEQ ID NO: 317062 - RNA, 19 nt, Homo sapiens
  misc_RNA (1)...(19): siRNA sense strand
ucgcggcaguucgaaauga

SEQ ID NO: 317063 - RNA, 19 nt, Homo sapiens
  misc_RNA (1)...(19): siRNA sense strand
acuccuauguccucaacaa

SEQ ID NO: 317064 - RNA, 19 nt, Homo sapiens
  misc_RNA (1)...(19): siRNA sense strand
ucacagcagauaugaucaa

SEQ ID NO: 317065 - RNA, 19 nt, Homo sapiens
  misc_RNA (1)...(19): siRNA sense strand
ucaucgauauacucccaaa

SEQ ID NO: 317066 - RNA, 19 nt, Homo sapiens
  misc_RNA (1)...(19): siRNA sense strand
agagaaggaucugcaaugc

SEQ ID NO: 317067 - RNA, 19 nt, Homo sapiens
  misc_RNA (1)...(19): siRNA sense strand
gcagaucaagcaggaagug

SEQ ID NO: 317068 - RNA, 19 nt, Homo sapiens
  misc_RNA (1)...(19): siRNA sense strand
gagcauauugaugagagaa

SEQ ID NO: 317069 - RNA, 19 nt, Homo sapiens
  misc_RNA (1)...(19): siRNA sense strand
agaguucacgauccuguaa

SEQ ID NO: 317070 - RNA, 19 nt, Homo sapiens
  misc_RNA (1)...(19): siRNA sense strand
gguuggagauguggauuuu

SEQ ID NO: 317071 - RNA, 19 nt, Homo sapiens
  misc_RNA (1)...(19): siRNA sense strand
cgaaaugaagcuguuguca

SEQ ID NO: 317072 - RNA, 19 nt, Homo sapiens
  misc_RNA (1)...(19): siRNA sense strand
gacaguggcaaugcuaaug

SEQ ID NO: 317073 - RNA, 19 nt, Homo sapiens
  misc_RNA (1)...(19): siRNA sense strand
cagaggaagaauuguugaa

SEQ ID NO: 317074 - RNA, 19 nt, Homo sapiens
  misc_RNA (1)...(19): siRNA sense strand
gcuugaagagcgagaagug

SEQ ID NO: 317075 - RNA, 19 nt, Homo sapiens
  misc_RNA (1)...(19): siRNA sense strand
gggaaucaacagugagaca

SEQ ID NO: 317076 - RNA, 19 nt, Homo sapiens
  misc_RNA (1)...(19): siRNA sense strand
acaguggcaaugcuaauga

SEQ ID NO: 317077 - RNA, 19 nt, Homo sapiens
  misc_RNA (1)...(19): siRNA sense strand
aaauagaguucacgauccu

SEQ ID NO: 317078 - RNA, 19 nt, Homo sapiens
  misc_RNA (1)...(19): siRNA sense strand
gaaacauacaauucuugca

SEQ ID NO: 317079 - RNA, 19 nt, Homo sapiens
  misc_RNA (1)...(19): siRNA sense strand
gaggugaugccacuguuac

SEQ ID NO: 317080 - RNA, 19 nt, Homo sapiens
  misc_RNA (1)...(19): siRNA sense strand
ggaaauaaucaagcgaacu

SEQ ID NO: 317081 - RNA, 19 nt, Homo sapiens
  misc_RNA (1)...(19): siRNA sense strand
guaggacgaauguguuugg

SEQ ID NO: 317082 - RNA, 19 nt, Homo sapiens
  misc_RNA (1)...(19): siRNA sense strand
caugacaguggcaaugcua

SEQ ID NO: 317083 - RNA, 19 nt, Homo sapiens
  misc_RNA (1)...(19): siRNA sense strand
ggagcagcagucauugaug

SEQ ID NO: 317084 - RNA, 19 nt, Homo sapiens
  misc_RNA (1)...(19): siRNA sense strand
acauacaauucuugcagau

SEQ ID NO: 317085 - RNA, 19 nt, Homo sapiens
  misc_RNA (1)...(19): siRNA sense strand
gcaguugaagaaacauaca

SEQ ID NO: 317086 - RNA, 19 nt, Homo sapiens
  misc_RNA (1)...(19): siRNA sense strand
ucgauauacucccaaagag

SEQ ID NO: 317087 - RNA, 19 nt, Homo sapiens
  misc_RNA (1)...(19): siRNA sense strand
cgaauguguuuggaucagu

SEQ ID NO: 317088 - RNA, 19 nt, Homo sapiens
  misc_RNA (1)...(19): siRNA sense strand
ucacuccuauguccucaac

SEQ ID NO: 317089 - RNA, 19 nt, Homo sapiens
  misc_RNA (1)...(19): siRNA sense strand
gugagacaauuaugaaacc

SEQ ID NO: 317090 - RNA, 19 nt, Homo sapiens
  misc_RNA (1)...(19): siRNA sense strand
gaugccacuguuacaauau

SEQ ID NO: 317091 - RNA, 19 nt, Homo sapiens
  misc_RNA (1)...(19): siRNA sense strand
gugaugccacuguuacaau

SEQ ID NO: 317092 - RNA, 19 nt, Homo sapiens
  misc_RNA (1)...(19): siRNA sense strand
ggugaugccacuguuacaa

SEQ ID NO: 317093 - RNA, 19 nt, Homo sapiens
  misc_RNA (1)...(19): siRNA sense strand
ucaacagugagacaauuau

SEQ ID NO: 317094 - RNA, 19 nt, Homo sapiens
  misc_RNA (1)...(19): siRNA sense strand
cggaggugaugccacuguu

SEQ ID NO: 317095 - RNA, 19 nt, Homo sapiens
  misc_RNA (1)...(19): siRNA sense strand
caaacggccacaccugagu

SEQ ID NO: 317096 - RNA, 19 nt, Homo sapiens
  misc_RNA (1)...(19): siRNA sense strand
cugcaagucacuccuaugu

SEQ ID NO: 317097 - RNA, 19 nt, Homo sapiens
  misc_RNA (1)...(19): siRNA sense strand
gagcgagaagugcugaagu

SEQ ID NO: 317098 - RNA, 19 nt, Homo sapiens
  misc_RNA (1)...(19): siRNA sense strand
gauguugauggcuuucaug

SEQ ID NO: 317099 - RNA, 19 nt, Homo sapiens
  misc_RNA (1)...(19): siRNA sense strand
ugaagcuguugucauuucu

SEQ ID NO: 317100 - RNA, 19 nt, Homo sapiens
  misc_RNA (1)...(19): siRNA sense strand
gguauuccaaaucugauca

SEQ ID NO: 317101 - RNA, 19 nt, Homo sapiens
  misc_RNA (1)...(19): siRNA sense strand
ccacuguuacaauaucuca

SEQ ID NO: 317102 - RNA, 19 nt, Homo sapiens
  misc_RNA (1)...(19): siRNA sense strand
ugaauuaccucgugggauu

SEQ ID NO: 317103 - RNA, 19 nt, Homo sapiens
  misc_RNA (1)...(19): siRNA sense strand
gaagacaguugugugcaaa

SEQ ID NO: 317104 - RNA, 19 nt, Homo sapiens
  misc_RNA (1)...(19): siRNA sense strand
gcacuuggccuuucucagu

SEQ ID NO: 317105 - RNA, 19 nt, Homo sapiens
  misc_RNA (1)...(19): siRNA sense strand
uuacaaguguggcgagaaa

SEQ ID NO: 317106 - RNA, 19 nt, Homo sapiens
  misc_RNA (1)...(19): siRNA sense strand
gugaguuccugcaugagua

SEQ ID NO: 317107 - RNA, 19 nt, Homo sapiens
  misc_RNA (1)...(19): siRNA sense strand
agacacagccuccagcaaa

SEQ ID NO: 317108 - RNA, 19 nt, Homo sapiens
  misc_RNA (1)...(19): siRNA sense strand
gcaaagcaaaguaacaauc

SEQ ID NO: 317109 - RNA, 19 nt, Homo sapiens
  misc_RNA (1)...(19): siRNA sense strand
ggucaccuguuacaagugu

SEQ ID NO: 317110 - RNA, 19 nt, Homo sapiens
  misc_RNA (1)...(19): siRNA sense strand
gccaacagaugcaccaaag

SEQ ID NO: 317111 - RNA, 19 nt, Homo sapiens
  misc_RNA (1)...(19): siRNA sense strand
agagucaucugugugaauu

SEQ ID NO: 317112 - RNA, 19 nt, Homo sapiens
  misc_RNA (1)...(19): siRNA sense strand
gaacucuucucccaaucag

SEQ ID NO: 317113 - RNA, 19 nt, Homo sapiens
  misc_RNA (1)...(19): siRNA sense strand
ccaagaugcccgagugcua

SEQ ID NO: 317114 - RNA, 19 nt, Homo sapiens
  misc_RNA (1)...(19): siRNA sense strand
uaacaauccgccauuacaa

SEQ ID NO: 317115 - RNA, 19 nt, Homo sapiens
  misc_RNA (1)...(19): siRNA sense strand
gcgcugcugucugugaauu

SEQ ID NO: 317116 - RNA, 19 nt, Homo sapiens
  misc_RNA (1)...(19): siRNA sense strand
agaagacaguugugugcaa

SEQ ID NO: 317117 - RNA, 19 nt, Homo sapiens
  misc_RNA (1)...(19): siRNA sense strand
ggagagucaucugugugaa

SEQ ID NO: 317118 - RNA, 19 nt, Homo sapiens
  misc_RNA (1)...(19): siRNA sense strand
aaguaacaauccgccauua

SEQ ID NO: 317119 - RNA, 19 nt, Homo sapiens
  misc_RNA (1)...(19): siRNA sense strand
caugcacccucgauuugaa

SEQ ID NO: 317120 - RNA, 19 nt, Homo sapiens
  misc_RNA (1)...(19): siRNA sense strand
gaguaugacaugaccaaga

SEQ ID NO: 317121 - RNA, 19 nt, Homo sapiens
  misc_RNA (1)...(19): siRNA sense strand
cagcaaagcaaaguaacaa

SEQ ID NO: 317122 - RNA, 19 nt, Homo sapiens
  misc_RNA (1)...(19): siRNA sense strand
aguaugacaugaccaagau

SEQ ID NO: 317123 - RNA, 19 nt, Homo sapiens
  misc_RNA (1)...(19): siRNA sense strand
gggcgcugcugucugugaa

SEQ ID NO: 317124 - RNA, 19 nt, Homo sapiens
  misc_RNA (1)...(19): siRNA sense strand
gacacagccuccagcaaag

SEQ ID NO: 317125 - RNA, 19 nt, Homo sapiens
  misc_RNA (1)...(19): siRNA sense strand
agugugaguuccugcauga

SEQ ID NO: 317126 - RNA, 19 nt, Homo sapiens
  misc_RNA (1)...(19): siRNA sense strand
ggagugcagcaacaaggaa

SEQ ID NO: 317127 - RNA, 19 nt, Homo sapiens
  misc_RNA (1)...(19): siRNA sense strand
gagagucaucugugugaau

SEQ ID NO: 317128 - RNA, 19 nt, Homo sapiens
  misc_RNA (1)...(19): siRNA sense strand
aaaguaacaauccgccauu

SEQ ID NO: 317129 - RNA, 19 nt, Homo sapiens
  misc_RNA (1)...(19): siRNA sense strand
gcacacacggagagucauc

SEQ ID NO: 317130 - RNA, 19 nt, Homo sapiens
  misc_RNA (1)...(19): siRNA sense strand
gacacuacgccaacagaug

SEQ ID NO: 317131 - RNA, 19 nt, Homo sapiens
  misc_RNA (1)...(19): siRNA sense strand
caucaguggugagaagaca

SEQ ID NO: 317132 - RNA, 19 nt, Homo sapiens
  misc_RNA (1)...(19): siRNA sense strand
ggacacuacgccaacagau

SEQ ID NO: 317133 - RNA, 19 nt, Homo sapiens
  misc_RNA (1)...(19): siRNA sense strand
gaacugcccaugggaacca

SEQ ID NO: 317134 - RNA, 19 nt, Homo sapiens
  misc_RNA (1)...(19): siRNA sense strand
agacaguugugugcaaaca

SEQ ID NO: 317135 - RNA, 19 nt, Homo sapiens
  misc_RNA (1)...(19): siRNA sense strand
cggagagucaucuguguga

SEQ ID NO: 317136 - RNA, 19 nt, Homo sapiens
  misc_RNA (1)...(19): siRNA sense strand
aacaauccgccauuacaaa

SEQ ID NO: 317137 - RNA, 19 nt, Homo sapiens
  misc_RNA (1)...(19): siRNA sense strand
caaagcaaaguaacaaucc

SEQ ID NO: 317138 - RNA, 19 nt, Homo sapiens
  misc_RNA (1)...(19): siRNA sense strand
gcccucguguaaauucaug

SEQ ID NO: 317139 - RNA, 19 nt, Homo sapiens
  misc_RNA (1)...(19): siRNA sense strand
cugcguggccuaugcaaga

SEQ ID NO: 317140 - RNA, 19 nt, Homo sapiens
  misc_RNA (1)...(19): siRNA sense strand
cacggagagucaucugugu

SEQ ID NO: 317141 - RNA, 19 nt, Homo sapiens
  misc_RNA (1)...(19): siRNA sense strand
aaaggacacuacgccaaca

SEQ ID NO: 317142 - RNA, 19 nt, Homo sapiens
  misc_RNA (1)...(19): siRNA sense strand
ugcugucugugaauucuuu

SEQ ID NO: 317143 - RNA, 19 nt, Homo sapiens
  misc_RNA (1)...(19): siRNA sense strand
gggagugcagcaacaagga

SEQ ID NO: 317144 - RNA, 19 nt, Homo sapiens
  misc_RNA (1)...(19): siRNA sense strand
gagucaucugugugaauua

SEQ ID NO: 317145 - RNA, 19 nt, Homo sapiens
  misc_RNA (1)...(19): siRNA sense strand
ccagcaaagcaaaguaaca

SEQ ID NO: 317146 - RNA, 19 nt, Homo sapiens
  misc_RNA (1)...(19): siRNA sense strand
caagaaaggggaccagugu

SEQ ID NO: 317147 - RNA, 19 nt, Homo sapiens
  misc_RNA (1)...(19): siRNA sense strand
uagcagagcugaucuuacu

SEQ ID NO: 317148 - RNA, 19 nt, Homo sapiens
  misc_RNA (1)...(19): siRNA sense strand
agaacgggcugcuaugaaa

SEQ ID NO: 317149 - RNA, 19 nt, Homo sapiens
  misc_RNA (1)...(19): siRNA sense strand
ugauguuccucuucaauuu

SEQ ID NO: 317150 - RNA, 19 nt, Homo sapiens
  misc_RNA (1)...(19): siRNA sense strand
gaagaacgccuggaacauc

SEQ ID NO: 317151 - RNA, 19 nt, Homo sapiens
  misc_RNA (1)...(19): siRNA sense strand
uaagaaguacgacgcauga

SEQ ID NO: 317152 - RNA, 19 nt, Homo sapiens
  misc_RNA (1)...(19): siRNA sense strand
gaacgagaacgccaagaag

SEQ ID NO: 317153 - RNA, 19 nt, Homo sapiens
  misc_RNA (1)...(19): siRNA sense strand
ggagaacgggcugcuauga

SEQ ID NO: 317154 - RNA, 19 nt, Homo sapiens
  misc_RNA (1)...(19): siRNA sense strand
gagaacgggcugcuaugaa

SEQ ID NO: 317155 - RNA, 19 nt, Homo sapiens
  misc_RNA (1)...(19): siRNA sense strand
ccaagaaggaccugaagga

SEQ ID NO: 317156 - RNA, 19 nt, Homo sapiens
  misc_RNA (1)...(19): siRNA sense strand
gcagagcugaucuuacuca

SEQ ID NO: 317157 - RNA, 19 nt, Homo sapiens
  misc_RNA (1)...(19): siRNA sense strand
aggaaggccugcugcugua

SEQ ID NO: 317158 - RNA, 19 nt, Homo sapiens
  misc_RNA (1)...(19): siRNA sense strand
uggacaaggugaacgagaa

SEQ ID NO: 317159 - RNA, 19 nt, Homo sapiens
  misc_RNA (1)...(19): siRNA sense strand
ccaccggacugguaagaag

SEQ ID NO: 317160 - RNA, 19 nt, Homo sapiens
  misc_RNA (1)...(19): siRNA sense strand
aagaacgccuggaacauca

SEQ ID NO: 317161 - RNA, 19 nt, Homo sapiens
  misc_RNA (1)...(19): siRNA sense strand
caagaaggaccugaaggaa

SEQ ID NO: 317162 - RNA, 19 nt, Homo sapiens
  misc_RNA (1)...(19): siRNA sense strand
gcaacgccaccacgccuuu

SEQ ID NO: 317163 - RNA, 19 nt, Homo sapiens
  misc_RNA (1)...(19): siRNA sense strand
ugaacgagaacgccaagaa

SEQ ID NO: 317164 - RNA, 19 nt, Homo sapiens
  misc_RNA (1)...(19): siRNA sense strand
ggacugguaagaaguacga

SEQ ID NO: 317165 - RNA, 19 nt, Homo sapiens
  misc_RNA (1)...(19): siRNA sense strand
gauguuccucuucaauuug

SEQ ID NO: 317166 - RNA, 19 nt, Homo sapiens
  misc_RNA (1)...(19): siRNA sense strand
caaccuggucauugccaua

SEQ ID NO: 317167 - RNA, 19 nt, Homo sapiens
  misc_RNA (1)...(19): siRNA sense strand
uuacucauccucuucuuug

SEQ ID NO: 317168 - RNA, 19 nt, Homo sapiens
  misc_RNA (1)...(19): siRNA sense strand
gaucuuacucauccucuuc

SEQ ID NO: 317169 - RNA, 19 nt, Homo sapiens
  misc_RNA (1)...(19): siRNA sense strand
gugguucgaugacaauaag

SEQ ID NO: 317170 - RNA, 19 nt, Homo sapiens
  misc_RNA (1)...(19): siRNA sense strand
cagccaaccuggucauugc

SEQ ID NO: 317171 - RNA, 19 nt, Homo sapiens
  misc_RNA (1)...(19): siRNA sense strand
gcagccaaccuggucauug

SEQ ID NO: 317172 - RNA, 19 nt, Homo sapiens
  misc_RNA (1)...(19): siRNA sense strand
ccucuucuuugucuacaug

SEQ ID NO: 317173 - RNA, 19 nt, Homo sapiens
  misc_RNA (1)...(19): siRNA sense strand
gccauaggcaccauuguca

SEQ ID NO: 317174 - RNA, 19 nt, Homo sapiens
  misc_RNA (1)...(19): siRNA sense strand
ccuagcagagcugaucuua

SEQ ID NO: 317175 - RNA, 19 nt, Homo sapiens
  misc_RNA (1)...(19): siRNA sense strand
cauaggcaccauugucaug

SEQ ID NO: 317176 - RNA, 19 nt, Homo sapiens
  misc_RNA (1)...(19): siRNA sense strand
gaagaugugguucgaugac

SEQ ID NO: 317177 - RNA, 19 nt, Homo sapiens
  misc_RNA (1)...(19): siRNA sense strand
cagcuucccuucguugucu

SEQ ID NO: 317178 - RNA, 19 nt, Homo sapiens
  misc_RNA (1)...(19): siRNA sense strand
gcgaugcuguggugucacu

SEQ ID NO: 317179 - RNA, 19 nt, Homo sapiens
  misc_RNA (1)...(19): siRNA sense strand
guggagaacgggcugcuau

SEQ ID NO: 317180 - RNA, 19 nt, Homo sapiens
  misc_RNA (1)...(19): siRNA sense strand
gaugugguucgaugacaau

SEQ ID NO: 317181 - RNA, 19 nt, Homo sapiens
  misc_RNA (1)...(19): siRNA sense strand
cacauccaccggacuggua

SEQ ID NO: 317182 - RNA, 19 nt, Homo sapiens
  misc_RNA (1)...(19): siRNA sense strand
ggacaaggugaacgagaac

SEQ ID NO: 317183 - RNA, 19 nt, Homo sapiens
  misc_RNA (1)...(19): siRNA sense strand
agaugugguucgaugacaa

SEQ ID NO: 317184 - RNA, 19 nt, Homo sapiens
  misc_RNA (1)...(19): siRNA sense strand
gaacgccuggaacaucauc

SEQ ID NO: 317185 - RNA, 19 nt, Homo sapiens
  misc_RNA (1)...(19): siRNA sense strand
gaugcuguggugucacuga

SEQ ID NO: 317186 - RNA, 19 nt, Homo sapiens
  misc_RNA (1)...(19): siRNA sense strand
ugaagaugugguucgauga

SEQ ID NO: 317187 - RNA, 19 nt, Homo sapiens
  misc_RNA (1)...(19): siRNA sense strand
caugauguuccucuucaau

SEQ ID NO: 317188 - RNA, 19 nt, Homo sapiens
  misc_RNA (1)...(19): siRNA sense strand
gaacgggcugcuaugaaaa

SEQ ID NO: 317189 - RNA, 19 nt, Homo sapiens
  misc_RNA (1)...(19): siRNA sense strand
gcaaguaacucucuucuua

SEQ ID NO: 317190 - RNA, 19 nt, Homo sapiens
  misc_RNA (1)...(19): siRNA sense strand
gaaaggagcugaagauagu

SEQ ID NO: 317191 - RNA, 19 nt, Homo sapiens
  misc_RNA (1)...(19): siRNA sense strand
gcaaagaaguggacauuga

SEQ ID NO: 317192 - RNA, 19 nt, Homo sapiens
  misc_RNA (1)...(19): siRNA sense strand
caacagcgaugcacuauug

SEQ ID NO: 317193 - RNA, 19 nt, Homo sapiens
  misc_RNA (1)...(19): siRNA sense strand
caacagaaccagucaauuu

SEQ ID NO: 317194 - RNA, 19 nt, Homo sapiens
  misc_RNA (1)...(19): siRNA sense strand
gcaguuaucuucaguuuua

SEQ ID NO: 317195 - RNA, 19 nt, Homo sapiens
  misc_RNA (1)...(19): siRNA sense strand
guacaagggucaccuaguu

SEQ ID NO: 317196 - RNA, 19 nt, Homo sapiens
  misc_RNA (1)...(19): siRNA sense strand
caacuugacuggcuccuuu

SEQ ID NO: 317197 - RNA, 19 nt, Homo sapiens
  misc_RNA (1)...(19): siRNA sense strand
caacaugccuggaauucaa

SEQ ID NO: 317198 - RNA, 19 nt, Homo sapiens
  misc_RNA (1)...(19): siRNA sense strand
guagggauauugaaauuga

SEQ ID NO: 317199 - RNA, 19 nt, Homo sapiens
  misc_RNA (1)...(19): siRNA sense strand
ucacagcacucaauaguug

SEQ ID NO: 317200 - RNA, 19 nt, Homo sapiens
  misc_RNA (1)...(19): siRNA sense strand
gcaacagucuccucuuuau

SEQ ID NO: 317201 - RNA, 19 nt, Homo sapiens
  misc_RNA (1)...(19): siRNA sense strand
ccacuggcauccucuauaa

SEQ ID NO: 317202 - RNA, 19 nt, Homo sapiens
  misc_RNA (1)...(19): siRNA sense strand
gaaaagcaguuaaccagua

SEQ ID NO: 317203 - RNA, 19 nt, Homo sapiens
  misc_RNA (1)...(19): siRNA sense strand
ggaaugagaugaugucacu

SEQ ID NO: 317204 - RNA, 19 nt, Homo sapiens
  misc_RNA (1)...(19): siRNA sense strand
gaaaacaucucaaacauag

SEQ ID NO: 317205 - RNA, 19 nt, Homo sapiens
  misc_RNA (1)...(19): siRNA sense strand
gcaguaugauuaagaguga

SEQ ID NO: 317206 - RNA, 19 nt, Homo sapiens
  misc_RNA (1)...(19): siRNA sense strand
gcaaggcuuuccuacagua

SEQ ID NO: 317207 - RNA, 19 nt, Homo sapiens
  misc_RNA (1)...(19): siRNA sense strand
ugacaacacuucuuucuca

SEQ ID NO: 317208 - RNA, 19 nt, Homo sapiens
  misc_RNA (1)...(19): siRNA sense strand
gagaugaugucacuucaau

SEQ ID NO: 317209 - RNA, 19 nt, Homo sapiens
  misc_RNA (1)...(19): siRNA sense strand
gaaacucagucuagagaga

SEQ ID NO: 317210 - RNA, 19 nt, Homo sapiens
  misc_RNA (1)...(19): siRNA sense strand
gcagcaggcuacacaguuu

SEQ ID NO: 317211 - RNA, 19 nt, Homo sapiens
  misc_RNA (1)...(19): siRNA sense strand
gaaaggagaagaagaagug

SEQ ID NO: 317212 - RNA, 19 nt, Homo sapiens
  misc_RNA (1)...(19): siRNA sense strand
uaaugaaccuguaguguug

SEQ ID NO: 317213 - RNA, 19 nt, Homo sapiens
  misc_RNA (1)...(19): siRNA sense strand
uaucaggccugcagaguaa

SEQ ID NO: 317214 - RNA, 19 nt, Homo sapiens
  misc_RNA (1)...(19): siRNA sense strand
ugaaggcacuacuguuaua

SEQ ID NO: 317215 - RNA, 19 nt, Homo sapiens
  misc_RNA (1)...(19): siRNA sense strand
gaggaaugcugaugucgaa

SEQ ID NO: 317216 - RNA, 19 nt, Homo sapiens
  misc_RNA (1)...(19): siRNA sense strand
gcagucaaccaacauauuu

SEQ ID NO: 317217 - RNA, 19 nt, Homo sapiens
  misc_RNA (1)...(19): siRNA sense strand
gacaaucaaccucaaguua

SEQ ID NO: 317218 - RNA, 19 nt, Homo sapiens
  misc_RNA (1)...(19): siRNA sense strand
uugcauagcuguucaguga

SEQ ID NO: 317219 - RNA, 19 nt, Homo sapiens
  misc_RNA (1)...(19): siRNA sense strand
gaacucaauuucuccacuu

SEQ ID NO: 317220 - RNA, 19 nt, Homo sapiens
  misc_RNA (1)...(19): siRNA sense strand
gggaauauauguagugaca

SEQ ID NO: 317221 - RNA, 19 nt, Homo sapiens
  misc_RNA (1)...(19): siRNA sense strand
caaagcaccucacuaugug

SEQ ID NO: 317222 - RNA, 19 nt, Homo sapiens
  misc_RNA (1)...(19): siRNA sense strand
caucaggaauguucuuauu

SEQ ID NO: 317223 - RNA, 19 nt, Homo sapiens
  misc_RNA (1)...(19): siRNA sense strand
acaacaagguaaugguuua

SEQ ID NO: 317224 - RNA, 19 nt, Homo sapiens
  misc_RNA (1)...(19): siRNA sense strand
gcaaaugcagugugaauug

SEQ ID NO: 317225 - RNA, 19 nt, Homo sapiens
  misc_RNA (1)...(19): siRNA sense strand
agaaacaucuguagcauca

SEQ ID NO: 317226 - RNA, 19 nt, Homo sapiens
  misc_RNA (1)...(19): siRNA sense strand
caacaagucagucaaauuc

SEQ ID NO: 317227 - RNA, 19 nt, Homo sapiens
  misc_RNA (1)...(19): siRNA sense strand
ggaacuauuucaucagaau

SEQ ID NO: 317228 - RNA, 19 nt, Homo sapiens
  misc_RNA (1)...(19): siRNA sense strand
gcacuacuguuauagaagu

SEQ ID NO: 317229 - RNA, 19 nt, Homo sapiens
  misc_RNA (1)...(19): siRNA sense strand
cagaguaacuggacgaaau

SEQ ID NO: 317230 - RNA, 19 nt, Homo sapiens
  misc_RNA (1)...(19): siRNA sense strand
ucaggaauguucuuauuug

SEQ ID NO: 317231 - RNA, 19 nt, Homo sapiens
  misc_RNA (1)...(19): siRNA sense strand
uuacagggcucuucaguuc

SEQ ID NO: 317232 - RNA, 19 nt, Homo sapiens
  misc_RNA (1)...(19): siRNA sense strand
uguaagcccuggaauguuu

SEQ ID NO: 317233 - RNA, 19 nt, Homo sapiens
  misc_RNA (1)...(19): siRNA sense strand
uggaagaucucaugauguu

SEQ ID NO: 317234 - RNA, 19 nt, Homo sapiens
  misc_RNA (1)...(19): siRNA sense strand
gaaaacacguuaucuaauc

SEQ ID NO: 317235 - RNA, 19 nt, Homo sapiens
  misc_RNA (1)...(19): siRNA sense strand
uggaagagcugaaaguguu

SEQ ID NO: 317236 - RNA, 19 nt, Homo sapiens
  misc_RNA (1)...(19): siRNA sense strand
ccagagacccugacaacua

SEQ ID NO: 317237 - RNA, 19 nt, Homo sapiens
  misc_RNA (1)...(19): siRNA sense strand
gcuggaagaucucaugaug

SEQ ID NO: 317238 - RNA, 19 nt, Homo sapiens
  misc_RNA (1)...(19): siRNA sense strand
agaagaaacuggaacacaa

SEQ ID NO: 317239 - RNA, 19 nt, Homo sapiens
  misc_RNA (1)...(19): siRNA sense strand
gaucaacucagcaaacauu

SEQ ID NO: 317240 - RNA, 19 nt, Homo sapiens
  misc_RNA (1)...(19): siRNA sense strand
gaagagcccuauguugugu

SEQ ID NO: 317241 - RNA, 19 nt, Homo sapiens
  misc_RNA (1)...(19): siRNA sense strand
ccauagcucuccucagauu

SEQ ID NO: 317242 - RNA, 19 nt, Homo sapiens
  misc_RNA (1)...(19): siRNA sense strand
acagcaagcuccaauauca

SEQ ID NO: 317243 - RNA, 19 nt, Homo sapiens
  misc_RNA (1)...(19): siRNA sense strand
cagcagacuucucacauga

SEQ ID NO: 317244 - RNA, 19 nt, Homo sapiens
  misc_RNA (1)...(19): siRNA sense strand
gaguuaauaucaugaggaa

SEQ ID NO: 317245 - RNA, 19 nt, Homo sapiens
  misc_RNA (1)...(19): siRNA sense strand
gaacuggaguaaagaagag

SEQ ID NO: 317246 - RNA, 19 nt, Homo sapiens
  misc_RNA (1)...(19): siRNA sense strand
caacaacaacagagcauuu

SEQ ID NO: 317247 - RNA, 19 nt, Homo sapiens
  misc_RNA (1)...(19): siRNA sense strand
gaacaaaugcagccuccaa

SEQ ID NO: 317248 - RNA, 19 nt, Homo sapiens
  misc_RNA (1)...(19): siRNA sense strand
gcagcagucuucucauuca

SEQ ID NO: 317249 - RNA, 19 nt, Homo sapiens
  misc_RNA (1)...(19): siRNA sense strand
gaaaugaaacuucuacaac

SEQ ID NO: 317250 - RNA, 19 nt, Homo sapiens
  misc_RNA (1)...(19): siRNA sense strand
uaccagaccagauaauuua

SEQ ID NO: 317251 - RNA, 19 nt, Homo sapiens
  misc_RNA (1)...(19): siRNA sense strand
aaauacaacuccuugcaaa

SEQ ID NO: 317252 - RNA, 19 nt, Homo sapiens
  misc_RNA (1)...(19): siRNA sense strand
cagcaguuaucuucaguuu

SEQ ID NO: 317253 - RNA, 19 nt, Homo sapiens
  misc_RNA (1)...(19): siRNA sense strand
gcaccgaacucaauuucuc

SEQ ID NO: 317254 - RNA, 19 nt, Homo sapiens
  misc_RNA (1)...(19): siRNA sense strand
guaaugagaauguucaaga

SEQ ID NO: 317255 - RNA, 19 nt, Homo sapiens
  misc_RNA (1)...(19): siRNA sense strand
gaaauacaacuccuugcaa

SEQ ID NO: 317256 - RNA, 19 nt, Homo sapiens
  misc_RNA (1)...(19): siRNA sense strand
gaacaacaugccuggaauu

SEQ ID NO: 317257 - RNA, 19 nt, Homo sapiens
  misc_RNA (1)...(19): siRNA sense strand
ggaaaugaaacuucuacaa

SEQ ID NO: 317258 - RNA, 19 nt, Homo sapiens
  misc_RNA (1)...(19): siRNA sense strand
gcagacuucucacaugaug

SEQ ID NO: 317259 - RNA, 19 nt, Homo sapiens
  misc_RNA (1)...(19): siRNA sense strand
ugagucagcuucagaauac

SEQ ID NO: 317260 - RNA, 19 nt, Homo sapiens
  misc_RNA (1)...(19): siRNA sense strand
cagagacccugacaacuau

SEQ ID NO: 317261 - RNA, 19 nt, Homo sapiens
  misc_RNA (1)...(19): siRNA sense strand
gaagaucucaugauguuca

SEQ ID NO: 317262 - RNA, 19 nt, Homo sapiens
  misc_RNA (1)...(19): siRNA sense strand
gcguagggauauugaaauu

SEQ ID NO: 317263 - RNA, 19 nt, Homo sapiens
  misc_RNA (1)...(19): siRNA sense strand
ccaaagcaccucacuaugu

SEQ ID NO: 317264 - RNA, 19 nt, Homo sapiens
  misc_RNA (1)...(19): siRNA sense strand
ugaaccaacugcagaauuc

SEQ ID NO: 317265 - RNA, 19 nt, Homo sapiens
  misc_RNA (1)...(19): siRNA sense strand
cagagucaguccacaguuu

SEQ ID NO: 317266 - RNA, 19 nt, Homo sapiens
  misc_RNA (1)...(19): siRNA sense strand
gaauagugguacccaacaa

SEQ ID NO: 317267 - RNA, 19 nt, Homo sapiens
  misc_RNA (1)...(19): siRNA sense strand
gauuaagagugaagauguu

SEQ ID NO: 317268 - RNA, 19 nt, Homo sapiens
  misc_RNA (1)...(19): siRNA sense strand
caaacacccucuucuccaa

SEQ ID NO: 317269 - RNA, 19 nt, Homo sapiens
  misc_RNA (1)...(19): siRNA sense strand
ucuaugaucuucucccaaa

SEQ ID NO: 317270 - RNA, 19 nt, Homo sapiens
  misc_RNA (1)...(19): siRNA sense strand
gacaaaugcuggaagaucu

SEQ ID NO: 317271 - RNA, 19 nt, Homo sapiens
  misc_RNA (1)...(19): siRNA sense strand
ccugaggacuugcuggaua

SEQ ID NO: 317272 - RNA, 19 nt, Homo sapiens
  misc_RNA (1)...(19): siRNA sense strand
caacagcaagcuccaauau

SEQ ID NO: 317273 - RNA, 19 nt, Homo sapiens
  misc_RNA (1)...(19): siRNA sense strand
gcaagggaaugagaugaug

SEQ ID NO: 317274 - RNA, 19 nt, Homo sapiens
  misc_RNA (1)...(19): siRNA sense strand
guacagugguuaauuuguc

SEQ ID NO: 317275 - RNA, 19 nt, Homo sapiens
  misc_RNA (1)...(19): siRNA sense strand
ggaaaggagcugaagauag

SEQ ID NO: 317276 - RNA, 19 nt, Homo sapiens
  misc_RNA (1)...(19): siRNA sense strand
guaaagaagagcccuaugu

SEQ ID NO: 317277 - RNA, 19 nt, Homo sapiens
  misc_RNA (1)...(19): siRNA sense strand
caccaaacaugauauucaa

SEQ ID NO: 317278 - RNA, 19 nt, Homo sapiens
  misc_RNA (1)...(19): siRNA sense strand
caaccaacauauuucuuuc

SEQ ID NO: 317279 - RNA, 19 nt, Homo sapiens
  misc_RNA (1)...(19): siRNA sense strand
ucacuucaaucuggaaauu

SEQ ID NO: 317280 - RNA, 19 nt, Homo sapiens
  misc_RNA (1)...(19): siRNA sense strand
gagaaacucagucuagaga

SEQ ID NO: 317281 - RNA, 19 nt, Homo sapiens
  misc_RNA (1)...(19): siRNA sense strand
gugaagauguuacuccaau

SEQ ID NO: 317282 - RNA, 19 nt, Homo sapiens
  misc_RNA (1)...(19): siRNA sense strand
gaagaggccaugaaagcaa

SEQ ID NO: 317283 - RNA, 19 nt, Homo sapiens
  misc_RNA (1)...(19): siRNA sense strand
gaauguaaaugugaagaag

SEQ ID NO: 317284 - RNA, 19 nt, Homo sapiens
  misc_RNA (1)...(19): siRNA sense strand
gagcaccaguuccuacaau

SEQ ID NO: 317285 - RNA, 19 nt, Homo sapiens
  misc_RNA (1)...(19): siRNA sense strand
caagagaaacucagucuag

SEQ ID NO: 317286 - RNA, 19 nt, Homo sapiens
  misc_RNA (1)...(19): siRNA sense strand
gauccuagcaacaacauga

SEQ ID NO: 317287 - RNA, 19 nt, Homo sapiens
  misc_RNA (1)...(19): siRNA sense strand
caacagcccaugcaauuuc

SEQ ID NO: 317288 - RNA, 19 nt, Homo sapiens
  misc_RNA (1)...(19): siRNA sense strand
aaacaucuguagcaucaau

SEQ ID NO: 317289 - RNA, 19 nt, Homo sapiens
  misc_RNA (1)...(19): siRNA sense strand
gcaaguaacucucuucuua

SEQ ID NO: 317290 - RNA, 19 nt, Homo sapiens
  misc_RNA (1)...(19): siRNA sense strand
gaaaggagcugaagauagu

SEQ ID NO: 317291 - RNA, 19 nt, Homo sapiens
  misc_RNA (1)...(19): siRNA sense strand
gcaaagaaguggacauuga

SEQ ID NO: 317292 - RNA, 19 nt, Homo sapiens
  misc_RNA (1)...(19): siRNA sense strand
caacagcgaugcacuauug

SEQ ID NO: 317293 - RNA, 19 nt, Homo sapiens
  misc_RNA (1)...(19): siRNA sense strand
caacagaaccagucaauuu

SEQ ID NO: 317294 - RNA, 19 nt, Homo sapiens
  misc_RNA (1)...(19): siRNA sense strand
gcaguuaucuucaguuuua

SEQ ID NO: 317295 - RNA, 19 nt, Homo sapiens
  misc_RNA (1)...(19): siRNA sense strand
guacaagggucaccuaguu

SEQ ID NO: 317296 - RNA, 19 nt, Homo sapiens
  misc_RNA (1)...(19): siRNA sense strand
caacuugacuggcuccuuu

SEQ ID NO: 317297 - RNA, 19 nt, Homo sapiens
  misc_RNA (1)...(19): siRNA sense strand
caacaugccuggaauucaa

SEQ ID NO: 317298 - RNA, 19 nt, Homo sapiens
  misc_RNA (1)...(19): siRNA sense strand
guagggauauugaaauuga

SEQ ID NO: 317299 - RNA, 19 nt, Homo sapiens
  misc_RNA (1)...(19): siRNA sense strand
ucacagcacucaauaguug

SEQ ID NO: 317300 - RNA, 19 nt, Homo sapiens
  misc_RNA (1)...(19): siRNA sense strand
gcaacagucuccucuuuau

SEQ ID NO: 317301 - RNA, 19 nt, Homo sapiens
  misc_RNA (1)...(19): siRNA sense strand
ccacuggcauccucuauaa

SEQ ID NO: 317302 - RNA, 19 nt, Homo sapiens
  misc_RNA (1)...(19): siRNA sense strand
gaaaagcaguuaaccagua

SEQ ID NO: 317303 - RNA, 19 nt, Homo sapiens
  misc_RNA (1)...(19): siRNA sense strand
ggaaugagaugaugucacu

SEQ ID NO: 317304 - RNA, 19 nt, Homo sapiens
  misc_RNA (1)...(19): siRNA sense strand
gaaaacaucucaaacauag

SEQ ID NO: 317305 - RNA, 19 nt, Homo sapiens
  misc_RNA (1)...(19): siRNA sense strand
gcaguaugauuaagaguga

SEQ ID NO: 317306 - RNA, 19 nt, Homo sapiens
  misc_RNA (1)...(19): siRNA sense strand
gcaaggcuuuccuacagua

SEQ ID NO: 317307 - RNA, 19 nt, Homo sapiens
  misc_RNA (1)...(19): siRNA sense strand
ugacaacacuucuuucuca

SEQ ID NO: 317308 - RNA, 19 nt, Homo sapiens
  misc_RNA (1)...(19): siRNA sense strand
gagaugaugucacuucaau

SEQ ID NO: 317309 - RNA, 19 nt, Homo sapiens
  misc_RNA (1)...(19): siRNA sense strand
gaaacucagucuagagaga

SEQ ID NO: 317310 - RNA, 19 nt, Homo sapiens
  misc_RNA (1)...(19): siRNA sense strand
gcagcaggcuacacaguuu

SEQ ID NO: 317311 - RNA, 19 nt, Homo sapiens
  misc_RNA (1)...(19): siRNA sense strand
gaaaggagaagaagaagug

SEQ ID NO: 317312 - RNA, 19 nt, Homo sapiens
  misc_RNA (1)...(19): siRNA sense strand
uaaugaaccuguaguguug

SEQ ID NO: 317313 - RNA, 19 nt, Homo sapiens
  misc_RNA (1)...(19): siRNA sense strand
uaucaggccugcagaguaa

SEQ ID NO: 317314 - RNA, 19 nt, Homo sapiens
  misc_RNA (1)...(19): siRNA sense strand
ugaaggcacuacuguuaua

SEQ ID NO: 317315 - RNA, 19 nt, Homo sapiens
  misc_RNA (1)...(19): siRNA sense strand
gaggaaugcugaugucgaa

SEQ ID NO: 317316 - RNA, 19 nt, Homo sapiens
  misc_RNA (1)...(19): siRNA sense strand
gcagucaaccaacauauuu

SEQ ID NO: 317317 - RNA, 19 nt, Homo sapiens
  misc_RNA (1)...(19): siRNA sense strand
gacaaucaaccucaaguua

SEQ ID NO: 317318 - RNA, 19 nt, Homo sapiens
  misc_RNA (1)...(19): siRNA sense strand
uugcauagcuguucaguga

SEQ ID NO: 317319 - RNA, 19 nt, Homo sapiens
  misc_RNA (1)...(19): siRNA sense strand
gaacucaauuucuccacuu

SEQ ID NO: 317320 - RNA, 19 nt, Homo sapiens
  misc_RNA (1)...(19): siRNA sense strand
gggaauauauguagugaca

SEQ ID NO: 317321 - RNA, 19 nt, Homo sapiens
  misc_RNA (1)...(19): siRNA sense strand
caaagcaccucacuaugug

SEQ ID NO: 317322 - RNA, 19 nt, Homo sapiens
  misc_RNA (1)...(19): siRNA sense strand
caucaggaauguucuuauu

SEQ ID NO: 317323 - RNA, 19 nt, Homo sapiens
  misc_RNA (1)...(19): siRNA sense strand
acaacaagguaaugguuua

SEQ ID NO: 317324 - RNA, 19 nt, Homo sapiens
  misc_RNA (1)...(19): siRNA sense strand
gcaaaugcagugugaauug

SEQ ID NO: 317325 - RNA, 19 nt, Homo sapiens
  misc_RNA (1)...(19): siRNA sense strand
gcacuacuguuauagaagu

SEQ ID NO: 317326 - RNA, 19 nt, Homo sapiens
  misc_RNA (1)...(19): siRNA sense strand
caacaagucagucaaauuc

SEQ ID NO: 317327 - RNA, 19 nt, Homo sapiens
  misc_RNA (1)...(19): siRNA sense strand
ggaacuauuucaucagaau

SEQ ID NO: 317328 - RNA, 19 nt, Homo sapiens
  misc_RNA (1)...(19): siRNA sense strand
cagaguaacuggacgaaau

SEQ ID NO: 317329 - RNA, 19 nt, Homo sapiens
  misc_RNA (1)...(19): siRNA sense strand
ucaggaauguucuuauuug

SEQ ID NO: 317330 - RNA, 19 nt, Homo sapiens
  misc_RNA (1)...(19): siRNA sense strand
uuacagggcucuucaguuc

SEQ ID NO: 317331 - RNA, 19 nt, Homo sapiens
  misc_RNA (1)...(19): siRNA sense strand
uguaagcccuggaauguuu

SEQ ID NO: 317332 - RNA, 19 nt, Homo sapiens
  misc_RNA (1)...(19): siRNA sense strand
uggaagaucucaugauguu

SEQ ID NO: 317333 - RNA, 19 nt, Homo sapiens
  misc_RNA (1)...(19): siRNA sense strand
gaaaacacguuaucuaauc

SEQ ID NO: 317334 - RNA, 19 nt, Homo sapiens
  misc_RNA (1)...(19): siRNA sense strand
uggaagagcugaaaguguu

SEQ ID NO: 317335 - RNA, 19 nt, Homo sapiens
  misc_RNA (1)...(19): siRNA sense strand
ccagagacccugacaacua

SEQ ID NO: 317336 - RNA, 19 nt, Homo sapiens
  misc_RNA (1)...(19): siRNA sense strand
gcuggaagaucucaugaug

SEQ ID NO: 317337 - RNA, 19 nt, Homo sapiens
  misc_RNA (1)...(19): siRNA sense strand
agaagaaacuggaacacaa

SEQ ID NO: 317338 - RNA, 19 nt, Homo sapiens
  misc_RNA (1)...(19): siRNA sense strand
gaucaacucagcaaacauu

SEQ ID NO: 317339 - RNA, 19 nt, Homo sapiens
  misc_RNA (1)...(19): siRNA sense strand
gaagagcccuauguugugu

SEQ ID NO: 317340 - RNA, 19 nt, Homo sapiens
  misc_RNA (1)...(19): siRNA sense strand
ccauagcucuccucagauu

SEQ ID NO: 317341 - RNA, 19 nt, Homo sapiens
  misc_RNA (1)...(19): siRNA sense strand
acagcaagcuccaauauca

SEQ ID NO: 317342 - RNA, 19 nt, Homo sapiens
  misc_RNA (1)...(19): siRNA sense strand
cagcagacuucucacauga

SEQ ID NO: 317343 - RNA, 19 nt, Homo sapiens
  misc_RNA (1)...(19): siRNA sense strand
gaguuaauaucaugaggaa

SEQ ID NO: 317344 - RNA, 19 nt, Homo sapiens
  misc_RNA (1)...(19): siRNA sense strand
gaacuggaguaaagaagag

SEQ ID NO: 317345 - RNA, 19 nt, Homo sapiens
  misc_RNA (1)...(19): siRNA sense strand
caacaacaacagagcauuu

SEQ ID NO: 317346 - RNA, 19 nt, Homo sapiens
  misc_RNA (1)...(19): siRNA sense strand
gaacaaaugcagccuccaa

SEQ ID NO: 317347 - RNA, 19 nt, Homo sapiens
  misc_RNA (1)...(19): siRNA sense strand
gcagcagucuucucauuca

SEQ ID NO: 317348 - RNA, 19 nt, Homo sapiens
  misc_RNA (1)...(19): siRNA sense strand
gaaaugaaacuucuacaac

SEQ ID NO: 317349 - RNA, 19 nt, Homo sapiens
  misc_RNA (1)...(19): siRNA sense strand
uaccagaccagauaauuua

SEQ ID NO: 317350 - RNA, 19 nt, Homo sapiens
  misc_RNA (1)...(19): siRNA sense strand
aaauacaacuccuugcaaa

SEQ ID NO: 317351 - RNA, 19 nt, Homo sapiens
  misc_RNA (1)...(19): siRNA sense strand
cagcaguuaucuucaguuu

SEQ ID NO: 317352 - RNA, 19 nt, Homo sapiens
  misc_RNA (1)...(19): siRNA sense strand
gcaccgaacucaauuucuc

SEQ ID NO: 317353 - RNA, 19 nt, Homo sapiens
  misc_RNA (1)...(19): siRNA sense strand
guaaugagaauguucaaga

SEQ ID NO: 317354 - RNA, 19 nt, Homo sapiens
  misc_RNA (1)...(19): siRNA sense strand
gaaauacaacuccuugcaa

SEQ ID NO: 317355 - RNA, 19 nt, Homo sapiens
  misc_RNA (1)...(19): siRNA sense strand
gaacaacaugccuggaauu

SEQ ID NO: 317356 - RNA, 19 nt, Homo sapiens
  misc_RNA (1)...(19): siRNA sense strand
ggaaaugaaacuucuacaa

SEQ ID NO: 317357 - RNA, 19 nt, Homo sapiens
  misc_RNA (1)...(19): siRNA sense strand
gcagacuucucacaugaug

SEQ ID NO: 317358 - RNA, 19 nt, Homo sapiens
  misc_RNA (1)...(19): siRNA sense strand
ugagucagcuucagaauac

SEQ ID NO: 317359 - RNA, 19 nt, Homo sapiens
  misc_RNA (1)...(19): siRNA sense strand
cagagacccugacaacuau

SEQ ID NO: 317360 - RNA, 19 nt, Homo sapiens
  misc_RNA (1)...(19): siRNA sense strand
gaagaucucaugauguuca

SEQ ID NO: 317361 - RNA, 19 nt, Homo sapiens
  misc_RNA (1)...(19): siRNA sense strand
gcguagggauauugaaauu

SEQ ID NO: 317362 - RNA, 19 nt, Homo sapiens
  misc_RNA (1)...(19): siRNA sense strand
ccaaagcaccucacuaugu

SEQ ID NO: 317363 - RNA, 19 nt, Homo sapiens
  misc_RNA (1)...(19): siRNA sense strand
ugaaccaacugcagaauuc

SEQ ID NO: 317364 - RNA, 19 nt, Homo sapiens
  misc_RNA (1)...(19): siRNA sense strand
cagagucaguccacaguuu

SEQ ID NO: 317365 - RNA, 19 nt, Homo sapiens
  misc_RNA (1)...(19): siRNA sense strand
gaauagugguacccaacaa

SEQ ID NO: 317366 - RNA, 19 nt, Homo sapiens
  misc_RNA (1)...(19): siRNA sense strand
gauuaagagugaagauguu

SEQ ID NO: 317367 - RNA, 19 nt, Homo sapiens
  misc_RNA (1)...(19): siRNA sense strand
caaacacccucuucuccaa

SEQ ID NO: 317368 - RNA, 19 nt, Homo sapiens
  misc_RNA (1)...(19): siRNA sense strand
gacaaaugcuggaagaucu

SEQ ID NO: 317369 - RNA, 19 nt, Homo sapiens
  misc_RNA (1)...(19): siRNA sense strand
ccugaggacuugcuggaua

SEQ ID NO: 317370 - RNA, 19 nt, Homo sapiens
  misc_RNA (1)...(19): siRNA sense strand
caacagcaagcuccaauau

SEQ ID NO: 317371 - RNA, 19 nt, Homo sapiens
  misc_RNA (1)...(19): siRNA sense strand
gcaagggaaugagaugaug

SEQ ID NO: 317372 - RNA, 19 nt, Homo sapiens
  misc_RNA (1)...(19): siRNA sense strand
guacagugguuaauuuguc

SEQ ID NO: 317373 - RNA, 19 nt, Homo sapiens
  misc_RNA (1)...(19): siRNA sense strand
ggaaaggagcugaagauag

SEQ ID NO: 317374 - RNA, 19 nt, Homo sapiens
  misc_RNA (1)...(19): siRNA sense strand
guaaagaagagcccuaugu

SEQ ID NO: 317375 - RNA, 19 nt, Homo sapiens
  misc_RNA (1)...(19): siRNA sense strand
caccaaacaugauauucaa

SEQ ID NO: 317376 - RNA, 19 nt, Homo sapiens
  misc_RNA (1)...(19): siRNA sense strand
caaccaacauauuucuuuc

SEQ ID NO: 317377 - RNA, 19 nt, Homo sapiens
  misc_RNA (1)...(19): siRNA sense strand
ucacuucaaucuggaaauu

SEQ ID NO: 317378 - RNA, 19 nt, Homo sapiens
  misc_RNA (1)...(19): siRNA sense strand
gagaaacucagucuagaga

SEQ ID NO: 317379 - RNA, 19 nt, Homo sapiens
  misc_RNA (1)...(19): siRNA sense strand
gugaagauguuacuccaau

SEQ ID NO: 317380 - RNA, 19 nt, Homo sapiens
  misc_RNA (1)...(19): siRNA sense strand
gaagaggccaugaaagcaa

SEQ ID NO: 317381 - RNA, 19 nt, Homo sapiens
  misc_RNA (1)...(19): siRNA sense strand
gaauguaaaugugaagaag

SEQ ID NO: 317382 - RNA, 19 nt, Homo sapiens
  misc_RNA (1)...(19): siRNA sense strand
gagcaccaguuccuacaau

SEQ ID NO: 317383 - RNA, 19 nt, Homo sapiens
  misc_RNA (1)...(19): siRNA sense strand
caagagaaacucagucuag

SEQ ID NO: 317384 - RNA, 19 nt, Homo sapiens
  misc_RNA (1)...(19): siRNA sense strand
uaaagaagagcccuauguu

SEQ ID NO: 317385 - RNA, 19 nt, Homo sapiens
  misc_RNA (1)...(19): siRNA sense strand
caacagcccaugcaauuuc

SEQ ID NO: 317386 - RNA, 19 nt, Homo sapiens
  misc_RNA (1)...(19): siRNA sense strand
gauccuagcaacaacauga

SEQ ID NO: 317387 - RNA, 19 nt, Homo sapiens
  misc_RNA (1)...(19): siRNA sense strand
cagcaaggcuuuccuacag

SEQ ID NO: 317388 - RNA, 19 nt, Homo sapiens
  misc_RNA (1)...(19): siRNA sense strand
gcagucaccacuacaagaa

SEQ ID NO: 317389 - RNA, 19 nt, Homo sapiens
  misc_RNA (1)...(19): siRNA sense strand
gcaaguaacucucuucuua

SEQ ID NO: 317390 - RNA, 19 nt, Homo sapiens
  misc_RNA (1)...(19): siRNA sense strand
gaaaggagcugaagauagu

SEQ ID NO: 317391 - RNA, 19 nt, Homo sapiens
  misc_RNA (1)...(19): siRNA sense strand
gcaaagaaguggacauuga

SEQ ID NO: 317392 - RNA, 19 nt, Homo sapiens
  misc_RNA (1)...(19): siRNA sense strand
caacagcgaugcacuauug

SEQ ID NO: 317393 - RNA, 19 nt, Homo sapiens
  misc_RNA (1)...(19): siRNA sense strand
caacagaaccagucaauuu

SEQ ID NO: 317394 - RNA, 19 nt, Homo sapiens
  misc_RNA (1)...(19): siRNA sense strand
gcaguuaucuucaguuuua

SEQ ID NO: 317395 - RNA, 19 nt, Homo sapiens
  misc_RNA (1)...(19): siRNA sense strand
guacaagggucaccuaguu

SEQ ID NO: 317396 - RNA, 19 nt, Homo sapiens
  misc_RNA (1)...(19): siRNA sense strand
caacuugacuggcuccuuu

SEQ ID NO: 317397 - RNA, 19 nt, Homo sapiens
  misc_RNA (1)...(19): siRNA sense strand
caacaugccuggaauucaa

SEQ ID NO: 317398 - RNA, 19 nt, Homo sapiens
  misc_RNA (1)...(19): siRNA sense strand
guagggauauugaaauuga

SEQ ID NO: 317399 - RNA, 19 nt, Homo sapiens
  misc_RNA (1)...(19): siRNA sense strand
ucacagcacucaauaguug

SEQ ID NO: 317400 - RNA, 19 nt, Homo sapiens
  misc_RNA (1)...(19): siRNA sense strand
gcaacagucuccucuuuau

SEQ ID NO: 317401 - RNA, 19 nt, Homo sapiens
  misc_RNA (1)...(19): siRNA sense strand
ccacuggcauccucuauaa

SEQ ID NO: 317402 - RNA, 19 nt, Homo sapiens
  misc_RNA (1)...(19): siRNA sense strand
gaaaagcaguuaaccagua

SEQ ID NO: 317403 - RNA, 19 nt, Homo sapiens
  misc_RNA (1)...(19): siRNA sense strand
ggaaugagaugaugucacu

SEQ ID NO: 317404 - RNA, 19 nt, Homo sapiens
  misc_RNA (1)...(19): siRNA sense strand
gaaaacaucucaaacauag

SEQ ID NO: 317405 - RNA, 19 nt, Homo sapiens
  misc_RNA (1)...(19): siRNA sense strand
gcaguaugauuaagaguga

SEQ ID NO: 317406 - RNA, 19 nt, Homo sapiens
  misc_RNA (1)...(19): siRNA sense strand
gcaaggcuuuccuacagua

SEQ ID NO: 317407 - RNA, 19 nt, Homo sapiens
  misc_RNA (1)...(19): siRNA sense strand
ugacaacacuucuuucuca

SEQ ID NO: 317408 - RNA, 19 nt, Homo sapiens
  misc_RNA (1)...(19): siRNA sense strand
gagaugaugucacuucaau

SEQ ID NO: 317409 - RNA, 19 nt, Homo sapiens
  misc_RNA (1)...(19): siRNA sense strand
gaaacucagucuagagaga

SEQ ID NO: 317410 - RNA, 19 nt, Homo sapiens
  misc_RNA (1)...(19): siRNA sense strand
gcagcaggcuacacaguuu

SEQ ID NO: 317411 - RNA, 19 nt, Homo sapiens
  misc_RNA (1)...(19): siRNA sense strand
gaaaggagaagaagaagug

SEQ ID NO: 317412 - RNA, 19 nt, Homo sapiens
  misc_RNA (1)...(19): siRNA sense strand
uaaugaaccuguaguguug

SEQ ID NO: 317413 - RNA, 19 nt, Homo sapiens
  misc_RNA (1)...(19): siRNA sense strand
uaucaggccugcagaguaa

SEQ ID NO: 317414 - RNA, 19 nt, Homo sapiens
  misc_RNA (1)...(19): siRNA sense strand
ugaaggcacuacuguuaua

SEQ ID NO: 317415 - RNA, 19 nt, Homo sapiens
  misc_RNA (1)...(19): siRNA sense strand
gaggaaugcugaugucgaa

SEQ ID NO: 317416 - RNA, 19 nt, Homo sapiens
  misc_RNA (1)...(19): siRNA sense strand
gcagucaaccaacauauuu

SEQ ID NO: 317417 - RNA, 19 nt, Homo sapiens
  misc_RNA (1)...(19): siRNA sense strand
gacaaucaaccucaaguua

SEQ ID NO: 317418 - RNA, 19 nt, Homo sapiens
  misc_RNA (1)...(19): siRNA sense strand
uugcauagcuguucaguga

SEQ ID NO: 317419 - RNA, 19 nt, Homo sapiens
  misc_RNA (1)...(19): siRNA sense strand
gaacucaauuucuccacuu

SEQ ID NO: 317420 - RNA, 19 nt, Homo sapiens
  misc_RNA (1)...(19): siRNA sense strand
gggaauauauguagugaca

SEQ ID NO: 317421 - RNA, 19 nt, Homo sapiens
  misc_RNA (1)...(19): siRNA sense strand
caaagcaccucacuaugug

SEQ ID NO: 317422 - RNA, 19 nt, Homo sapiens
  misc_RNA (1)...(19): siRNA sense strand
caucaggaauguucuuauu

SEQ ID NO: 317423 - RNA, 19 nt, Homo sapiens
  misc_RNA (1)...(19): siRNA sense strand
acaacaagguaaugguuua

SEQ ID NO: 317424 - RNA, 19 nt, Homo sapiens
  misc_RNA (1)...(19): siRNA sense strand
gcaaaugcagugugaauug

SEQ ID NO: 317425 - RNA, 19 nt, Homo sapiens
  misc_RNA (1)...(19): siRNA sense strand
gcacuacuguuauagaagu

SEQ ID NO: 317426 - RNA, 19 nt, Homo sapiens
  misc_RNA (1)...(19): siRNA sense strand
caacaagucagucaaauuc

SEQ ID NO: 317427 - RNA, 19 nt, Homo sapiens
  misc_RNA (1)...(19): siRNA sense strand
ggaacuauuucaucagaau

SEQ ID NO: 317428 - RNA, 19 nt, Homo sapiens
  misc_RNA (1)...(19): siRNA sense strand
cagaguaacuggacgaaau

SEQ ID NO: 317429 - RNA, 19 nt, Homo sapiens
  misc_RNA (1)...(19): siRNA sense strand
ucaggaauguucuuauuug

SEQ ID NO: 317430 - RNA, 19 nt, Homo sapiens
  misc_RNA (1)...(19): siRNA sense strand
uuacagggcucuucaguuc

SEQ ID NO: 317431 - RNA, 19 nt, Homo sapiens
  misc_RNA (1)...(19): siRNA sense strand
uguaagcccuggaauguuu

SEQ ID NO: 317432 - RNA, 19 nt, Homo sapiens
  misc_RNA (1)...(19): siRNA sense strand
uggaagaucucaugauguu

SEQ ID NO: 317433 - RNA, 19 nt, Homo sapiens
  misc_RNA (1)...(19): siRNA sense strand
gaaaacacguuaucuaauc

SEQ ID NO: 317434 - RNA, 19 nt, Homo sapiens
  misc_RNA (1)...(19): siRNA sense strand
uggaagagcugaaaguguu

SEQ ID NO: 317435 - RNA, 19 nt, Homo sapiens
  misc_RNA (1)...(19): siRNA sense strand
ccagagacccugacaacua

SEQ ID NO: 317436 - RNA, 19 nt, Homo sapiens
  misc_RNA (1)...(19): siRNA sense strand
gcuggaagaucucaugaug

SEQ ID NO: 317437 - RNA, 19 nt, Homo sapiens
  misc_RNA (1)...(19): siRNA sense strand
agaagaaacuggaacacaa

SEQ ID NO: 317438 - RNA, 19 nt, Homo sapiens
  misc_RNA (1)...(19): siRNA sense strand
gaucaacucagcaaacauu

SEQ ID NO: 317439 - RNA, 19 nt, Homo sapiens
  misc_RNA (1)...(19): siRNA sense strand
gaagagcccuauguugugu

SEQ ID NO: 317440 - RNA, 19 nt, Homo sapiens
  misc_RNA (1)...(19): siRNA sense strand
ccauagcucuccucagauu

SEQ ID NO: 317441 - RNA, 19 nt, Homo sapiens
  misc_RNA (1)...(19): siRNA sense strand
acagcaagcuccaauauca

SEQ ID NO: 317442 - RNA, 19 nt, Homo sapiens
  misc_RNA (1)...(19): siRNA sense strand
cagcagacuucucacauga

SEQ ID NO: 317443 - RNA, 19 nt, Homo sapiens
  misc_RNA (1)...(19): siRNA sense strand
gaguuaauaucaugaggaa

SEQ ID NO: 317444 - RNA, 19 nt, Homo sapiens
  misc_RNA (1)...(19): siRNA sense strand
gaacuggaguaaagaagag

SEQ ID NO: 317445 - RNA, 19 nt, Homo sapiens
  misc_RNA (1)...(19): siRNA sense strand
caacaacaacagagcauuu

SEQ ID NO: 317446 - RNA, 19 nt, Homo sapiens
  misc_RNA (1)...(19): siRNA sense strand
gaacaaaugcagccuccaa

SEQ ID NO: 317447 - RNA, 19 nt, Homo sapiens
  misc_RNA (1)...(19): siRNA sense strand
gcagcagucuucucauuca

SEQ ID NO: 317448 - RNA, 19 nt, Homo sapiens
  misc_RNA (1)...(19): siRNA sense strand
gaaaugaaacuucuacaac

SEQ ID NO: 317449 - RNA, 19 nt, Homo sapiens
  misc_RNA (1)...(19): siRNA sense strand
uaccagaccagauaauuua

SEQ ID NO: 317450 - RNA, 19 nt, Homo sapiens
  misc_RNA (1)...(19): siRNA sense strand
aaauacaacuccuugcaaa

SEQ ID NO: 317451 - RNA, 19 nt, Homo sapiens
  misc_RNA (1)...(19): siRNA sense strand
cagcaguuaucuucaguuu

SEQ ID NO: 317452 - RNA, 19 nt, Homo sapiens
  misc_RNA (1)...(19): siRNA sense strand
gcaccgaacucaauuucuc

SEQ ID NO: 317453 - RNA, 19 nt, Homo sapiens
  misc_RNA (1)...(19): siRNA sense strand
guaaugagaauguucaaga

SEQ ID NO: 317454 - RNA, 19 nt, Homo sapiens
  misc_RNA (1)...(19): siRNA sense strand
gaaauacaacuccuugcaa

SEQ ID NO: 317455 - RNA, 19 nt, Homo sapiens
  misc_RNA (1)...(19): siRNA sense strand
gaacaacaugccuggaauu

SEQ ID NO: 317456 - RNA, 19 nt, Homo sapiens
  misc_RNA (1)...(19): siRNA sense strand
ggaaaugaaacuucuacaa

SEQ ID NO: 317457 - RNA, 19 nt, Homo sapiens
  misc_RNA (1)...(19): siRNA sense strand
gcagacuucucacaugaug

SEQ ID NO: 317458 - RNA, 19 nt, Homo sapiens
  misc_RNA (1)...(19): siRNA sense strand
ugagucagcuucagaauac

SEQ ID NO: 317459 - RNA, 19 nt, Homo sapiens
  misc_RNA (1)...(19): siRNA sense strand
cagagacccugacaacuau

SEQ ID NO: 317460 - RNA, 19 nt, Homo sapiens
  misc_RNA (1)...(19): siRNA sense strand
gaagaucucaugauguuca

SEQ ID NO: 317461 - RNA, 19 nt, Homo sapiens
  misc_RNA (1)...(19): siRNA sense strand
gcguagggauauugaaauu

SEQ ID NO: 317462 - RNA, 19 nt, Homo sapiens
  misc_RNA (1)...(19): siRNA sense strand
ccaaagcaccucacuaugu

SEQ ID NO: 317463 - RNA, 19 nt, Homo sapiens
  misc_RNA (1)...(19): siRNA sense strand
ugaaccaacugcagaauuc

SEQ ID NO: 317464 - RNA, 19 nt, Homo sapiens
  misc_RNA (1)...(19): siRNA sense strand
cagagucaguccacaguuu

SEQ ID NO: 317465 - RNA, 19 nt, Homo sapiens
  misc_RNA (1)...(19): siRNA sense strand
gaauagugguacccaacaa

SEQ ID NO: 317466 - RNA, 19 nt, Homo sapiens
  misc_RNA (1)...(19): siRNA sense strand
gauuaagagugaagauguu

SEQ ID NO: 317467 - RNA, 19 nt, Homo sapiens
  misc_RNA (1)...(19): siRNA sense strand
caaacacccucuucuccaa

SEQ ID NO: 317468 - RNA, 19 nt, Homo sapiens
  misc_RNA (1)...(19): siRNA sense strand
gacaaaugcuggaagaucu

SEQ ID NO: 317469 - RNA, 19 nt, Homo sapiens
  misc_RNA (1)...(19): siRNA sense strand
ccugaggacuugcuggaua

SEQ ID NO: 317470 - RNA, 19 nt, Homo sapiens
  misc_RNA (1)...(19): siRNA sense strand
caacagcaagcuccaauau

SEQ ID NO: 317471 - RNA, 19 nt, Homo sapiens
  misc_RNA (1)...(19): siRNA sense strand
gcaagggaaugagaugaug

SEQ ID NO: 317472 - RNA, 19 nt, Homo sapiens
  misc_RNA (1)...(19): siRNA sense strand
guacagugguuaauuuguc

SEQ ID NO: 317473 - RNA, 19 nt, Homo sapiens
  misc_RNA (1)...(19): siRNA sense strand
ggaaaggagcugaagauag

SEQ ID NO: 317474 - RNA, 19 nt, Homo sapiens
  misc_RNA (1)...(19): siRNA sense strand
guaaagaagagcccuaugu

SEQ ID NO: 317475 - RNA, 19 nt, Homo sapiens
  misc_RNA (1)...(19): siRNA sense strand
caccaaacaugauauucaa

SEQ ID NO: 317476 - RNA, 19 nt, Homo sapiens
  misc_RNA (1)...(19): siRNA sense strand
caaccaacauauuucuuuc

SEQ ID NO: 317477 - RNA, 19 nt, Homo sapiens
  misc_RNA (1)...(19): siRNA sense strand
ucacuucaaucuggaaauu

SEQ ID NO: 317478 - RNA, 19 nt, Homo sapiens
  misc_RNA (1)...(19): siRNA sense strand
gagaaacucagucuagaga

SEQ ID NO: 317479 - RNA, 19 nt, Homo sapiens
  misc_RNA (1)...(19): siRNA sense strand
gugaagauguuacuccaau

SEQ ID NO: 317480 - RNA, 19 nt, Homo sapiens
  misc_RNA (1)...(19): siRNA sense strand
gaagaggccaugaaagcaa

SEQ ID NO: 317481 - RNA, 19 nt, Homo sapiens
  misc_RNA (1)...(19): siRNA sense strand
gaauguaaaugugaagaag

SEQ ID NO: 317482 - RNA, 19 nt, Homo sapiens
  misc_RNA (1)...(19): siRNA sense strand
gagcaccaguuccuacaau

SEQ ID NO: 317483 - RNA, 19 nt, Homo sapiens
  misc_RNA (1)...(19): siRNA sense strand
caagagaaacucagucuag

SEQ ID NO: 317484 - RNA, 19 nt, Homo sapiens
  misc_RNA (1)...(19): siRNA sense strand
uaaagaagagcccuauguu

SEQ ID NO: 317485 - RNA, 19 nt, Homo sapiens
  misc_RNA (1)...(19): siRNA sense strand
caacagcccaugcaauuuc

SEQ ID NO: 317486 - RNA, 19 nt, Homo sapiens
  misc_RNA (1)...(19): siRNA sense strand
gauccuagcaacaacauga

SEQ ID NO: 317487 - RNA, 19 nt, Homo sapiens
  misc_RNA (1)...(19): siRNA sense strand
cagcaaggcuuuccuacag

SEQ ID NO: 317488 - RNA, 19 nt, Homo sapiens
  misc_RNA (1)...(19): siRNA sense strand
gcagucaccacuacaagaa

SEQ ID NO: 317489 - RNA, 19 nt, Homo sapiens
  misc_RNA (1)...(19): siRNA sense strand
gcaaguaacucucuucuua

SEQ ID NO: 317490 - RNA, 19 nt, Homo sapiens
  misc_RNA (1)...(19): siRNA sense strand
gaaaggagcugaagauagu

SEQ ID NO: 317491 - RNA, 19 nt, Homo sapiens
  misc_RNA (1)...(19): siRNA sense strand
gcaaagaaguggacauuga

SEQ ID NO: 317492 - RNA, 19 nt, Homo sapiens
  misc_RNA (1)...(19): siRNA sense strand
caacagcgaugcacuauug

SEQ ID NO: 317493 - RNA, 19 nt, Homo sapiens
  misc_RNA (1)...(19): siRNA sense strand
caacagaaccagucaauuu

SEQ ID NO: 317494 - RNA, 19 nt, Homo sapiens
  misc_RNA (1)...(19): siRNA sense strand
gcaguuaucuucaguuuua

SEQ ID NO: 317495 - RNA, 19 nt, Homo sapiens
  misc_RNA (1)...(19): siRNA sense strand
guacaagggucaccuaguu

SEQ ID NO: 317496 - RNA, 19 nt, Homo sapiens
  misc_RNA (1)...(19): siRNA sense strand
caacuugacuggcuccuuu

SEQ ID NO: 317497 - RNA, 19 nt, Homo sapiens
  misc_RNA (1)...(19): siRNA sense strand
caacaugccuggaauucaa

SEQ ID NO: 317498 - RNA, 19 nt, Homo sapiens
  misc_RNA (1)...(19): siRNA sense strand
guagggauauugaaauuga

SEQ ID NO: 317499 - RNA, 19 nt, Homo sapiens
  misc_RNA (1)...(19): siRNA sense strand
ucacagcacucaauaguug

SEQ ID NO: 317500 - RNA, 19 nt, Homo sapiens
  misc_RNA (1)...(19): siRNA sense strand
gcaacagucuccucuuuau

SEQ ID NO: 317501 - RNA, 19 nt, Homo sapiens
  misc_RNA (1)...(19): siRNA sense strand
ccacuggcauccucuauaa

SEQ ID NO: 317502 - RNA, 19 nt, Homo sapiens
  misc_RNA (1)...(19): siRNA sense strand
gaaaagcaguuaaccagua

SEQ ID NO: 317503 - RNA, 19 nt, Homo sapiens
  misc_RNA (1)...(19): siRNA sense strand
ggaaugagaugaugucacu

SEQ ID NO: 317504 - RNA, 19 nt, Homo sapiens
  misc_RNA (1)...(19): siRNA sense strand
gaaaacaucucaaacauag

SEQ ID NO: 317505 - RNA, 19 nt, Homo sapiens
  misc_RNA (1)...(19): siRNA sense strand
gcaguaugauuaagaguga

SEQ ID NO: 317506 - RNA, 19 nt, Homo sapiens
  misc_RNA (1)...(19): siRNA sense strand
gcaaggcuuuccuacagua

SEQ ID NO: 317507 - RNA, 19 nt, Homo sapiens
  misc_RNA (1)...(19): siRNA sense strand
ugacaacacuucuuucuca

SEQ ID NO: 317508 - RNA, 19 nt, Homo sapiens
  misc_RNA (1)...(19): siRNA sense strand
gagaugaugucacuucaau

SEQ ID NO: 317509 - RNA, 19 nt, Homo sapiens
  misc_RNA (1)...(19): siRNA sense strand
gaaacucagucuagagaga

SEQ ID NO: 317510 - RNA, 19 nt, Homo sapiens
  misc_RNA (1)...(19): siRNA sense strand
gcagcaggcuacacaguuu

SEQ ID NO: 317511 - RNA, 19 nt, Homo sapiens
  misc_RNA (1)...(19): siRNA sense strand
gaaaggagaagaagaagug

SEQ ID NO: 317512 - RNA, 19 nt, Homo sapiens
  misc_RNA (1)...(19): siRNA sense strand
uaaugaaccuguaguguug

SEQ ID NO: 317513 - RNA, 19 nt, Homo sapiens
  misc_RNA (1)...(19): siRNA sense strand
uaucaggccugcagaguaa

SEQ ID NO: 317514 - RNA, 19 nt, Homo sapiens
  misc_RNA (1)...(19): siRNA sense strand
ugaaggcacuacuguuaua

SEQ ID NO: 317515 - RNA, 19 nt, Homo sapiens
  misc_RNA (1)...(19): siRNA sense strand
gaggaaugcugaugucgaa

SEQ ID NO: 317516 - RNA, 19 nt, Homo sapiens
  misc_RNA (1)...(19): siRNA sense strand
gcagucaaccaacauauuu

SEQ ID NO: 317517 - RNA, 19 nt, Homo sapiens
  misc_RNA (1)...(19): siRNA sense strand
gacaaucaaccucaaguua

SEQ ID NO: 317518 - RNA, 19 nt, Homo sapiens
  misc_RNA (1)...(19): siRNA sense strand
uugcauagcuguucaguga

SEQ ID NO: 317519 - RNA, 19 nt, Homo sapiens
  misc_RNA (1)...(19): siRNA sense strand
gaacucaauuucuccacuu

SEQ ID NO: 317520 - RNA, 19 nt, Homo sapiens
  misc_RNA (1)...(19): siRNA sense strand
gggaauauauguagugaca

SEQ ID NO: 317521 - RNA, 19 nt, Homo sapiens
  misc_RNA (1)...(19): siRNA sense strand
caaagcaccucacuaugug

SEQ ID NO: 317522 - RNA, 19 nt, Homo sapiens
  misc_RNA (1)...(19): siRNA sense strand
caucaggaauguucuuauu

SEQ ID NO: 317523 - RNA, 19 nt, Homo sapiens
  misc_RNA (1)...(19): siRNA sense strand
acaacaagguaaugguuua

SEQ ID NO: 317524 - RNA, 19 nt, Homo sapiens
  misc_RNA (1)...(19): siRNA sense strand
gcaaaugcagugugaauug

SEQ ID NO: 317525 - RNA, 19 nt, Homo sapiens
  misc_RNA (1)...(19): siRNA sense strand
gcacuacuguuauagaagu

SEQ ID NO: 317526 - RNA, 19 nt, Homo sapiens
  misc_RNA (1)...(19): siRNA sense strand
caacaagucagucaaauuc

SEQ ID NO: 317527 - RNA, 19 nt, Homo sapiens
  misc_RNA (1)...(19): siRNA sense strand
ggaacuauuucaucagaau

SEQ ID NO: 317528 - RNA, 19 nt, Homo sapiens
  misc_RNA (1)...(19): siRNA sense strand
cagaguaacuggacgaaau

SEQ ID NO: 317529 - RNA, 19 nt, Homo sapiens
  misc_RNA (1)...(19): siRNA sense strand
ucaggaauguucuuauuug

SEQ ID NO: 317530 - RNA, 19 nt, Homo sapiens
  misc_RNA (1)...(19): siRNA sense strand
uuacagggcucuucaguuc

SEQ ID NO: 317531 - RNA, 19 nt, Homo sapiens
  misc_RNA (1)...(19): siRNA sense strand
uguaagcccuggaauguuu

SEQ ID NO: 317532 - RNA, 19 nt, Homo sapiens
  misc_RNA (1)...(19): siRNA sense strand
uggaagaucucaugauguu

SEQ ID NO: 317533 - RNA, 19 nt, Homo sapiens
  misc_RNA (1)...(19): siRNA sense strand
gaaaacacguuaucuaauc

SEQ ID NO: 317534 - RNA, 19 nt, Homo sapiens
  misc_RNA (1)...(19): siRNA sense strand
uggaagagcugaaaguguu

SEQ ID NO: 317535 - RNA, 19 nt, Homo sapiens
  misc_RNA (1)...(19): siRNA sense strand
ccagagacccugacaacua

SEQ ID NO: 317536 - RNA, 19 nt, Homo sapiens
  misc_RNA (1)...(19): siRNA sense strand
gcuggaagaucucaugaug

SEQ ID NO: 317537 - RNA, 19 nt, Homo sapiens
  misc_RNA (1)...(19): siRNA sense strand
agaagaaacuggaacacaa

SEQ ID NO: 317538 - RNA, 19 nt, Homo sapiens
  misc_RNA (1)...(19): siRNA sense strand
gaucaacucagcaaacauu

SEQ ID NO: 317539 - RNA, 19 nt, Homo sapiens
  misc_RNA (1)...(19): siRNA sense strand
gaagagcccuauguugugu

SEQ ID NO: 317540 - RNA, 19 nt, Homo sapiens
  misc_RNA (1)...(19): siRNA sense strand
ccauagcucuccucagauu

SEQ ID NO: 317541 - RNA, 19 nt, Homo sapiens
  misc_RNA (1)...(19): siRNA sense strand
acagcaagcuccaauauca

SEQ ID NO: 317542 - RNA, 19 nt, Homo sapiens
  misc_RNA (1)...(19): siRNA sense strand
cagcagacuucucacauga

SEQ ID NO: 317543 - RNA, 19 nt, Homo sapiens
  misc_RNA (1)...(19): siRNA sense strand
gaguuaauaucaugaggaa

SEQ ID NO: 317544 - RNA, 19 nt, Homo sapiens
  misc_RNA (1)...(19): siRNA sense strand
gaacuggaguaaagaagag

SEQ ID NO: 317545 - RNA, 19 nt, Homo sapiens
  misc_RNA (1)...(19): siRNA sense strand
caacaacaacagagcauuu

SEQ ID NO: 317546 - RNA, 19 nt, Homo sapiens
  misc_RNA (1)...(19): siRNA sense strand
gaacaaaugcagccuccaa

SEQ ID NO: 317547 - RNA, 19 nt, Homo sapiens
  misc_RNA (1)...(19): siRNA sense strand
gcagcagucuucucauuca

SEQ ID NO: 317548 - RNA, 19 nt, Homo sapiens
  misc_RNA (1)...(19): siRNA sense strand
gaaaugaaacuucuacaac

SEQ ID NO: 317549 - RNA, 19 nt, Homo sapiens
  misc_RNA (1)...(19): siRNA sense strand
uaccagaccagauaauuua

SEQ ID NO: 317550 - RNA, 19 nt, Homo sapiens
  misc_RNA (1)...(19): siRNA sense strand
aaauacaacuccuugcaaa

SEQ ID NO: 317551 - RNA, 19 nt, Homo sapiens
  misc_RNA (1)...(19): siRNA sense strand
cagcaguuaucuucaguuu

SEQ ID NO: 317552 - RNA, 19 nt, Homo sapiens
  misc_RNA (1)...(19): siRNA sense strand
gcaccgaacucaauuucuc

SEQ ID NO: 317553 - RNA, 19 nt, Homo sapiens
  misc_RNA (1)...(19): siRNA sense strand
guaaugagaauguucaaga

SEQ ID NO: 317554 - RNA, 19 nt, Homo sapiens
  misc_RNA (1)...(19): siRNA sense strand
gaaauacaacuccuugcaa

SEQ ID NO: 317555 - RNA, 19 nt, Homo sapiens
  misc_RNA (1)...(19): siRNA sense strand
gaacaacaugccuggaauu

SEQ ID NO: 317556 - RNA, 19 nt, Homo sapiens
  misc_RNA (1)...(19): siRNA sense strand
ggaaaugaaacuucuacaa

SEQ ID NO: 317557 - RNA, 19 nt, Homo sapiens
  misc_RNA (1)...(19): siRNA sense strand
gcagacuucucacaugaug

SEQ ID NO: 317558 - RNA, 19 nt, Homo sapiens
  misc_RNA (1)...(19): siRNA sense strand
ugagucagcuucagaauac

SEQ ID NO: 317559 - RNA, 19 nt, Homo sapiens
  misc_RNA (1)...(19): siRNA sense strand
cagagacccugacaacuau

SEQ ID NO: 317560 - RNA, 19 nt, Homo sapiens
  misc_RNA (1)...(19): siRNA sense strand
gaagaucucaugauguuca

SEQ ID NO: 317561 - RNA, 19 nt, Homo sapiens
  misc_RNA (1)...(19): siRNA sense strand
gcguagggauauugaaauu

SEQ ID NO: 317562 - RNA, 19 nt, Homo sapiens
  misc_RNA (1)...(19): siRNA sense strand
ccaaagcaccucacuaugu

SEQ ID NO: 317563 - RNA, 19 nt, Homo sapiens
  misc_RNA (1)...(19): siRNA sense strand
ugaaccaacugcagaauuc

SEQ ID NO: 317564 - RNA, 19 nt, Homo sapiens
  misc_RNA (1)...(19): siRNA sense strand
cagagucaguccacaguuu

SEQ ID NO: 317565 - RNA, 19 nt, Homo sapiens
  misc_RNA (1)...(19): siRNA sense strand
gaauagugguacccaacaa

SEQ ID NO: 317566 - RNA, 19 nt, Homo sapiens
  misc_RNA (1)...(19): siRNA sense strand
gauuaagagugaagauguu

SEQ ID NO: 317567 - RNA, 19 nt, Homo sapiens
  misc_RNA (1)...(19): siRNA sense strand
caaacacccucuucuccaa

SEQ ID NO: 317568 - RNA, 19 nt, Homo sapiens
  misc_RNA (1)...(19): siRNA sense strand
gacaaaugcuggaagaucu

SEQ ID NO: 317569 - RNA, 19 nt, Homo sapiens
  misc_RNA (1)...(19): siRNA sense strand
ccugaggacuugcuggaua

SEQ ID NO: 317570 - RNA, 19 nt, Homo sapiens
  misc_RNA (1)...(19): siRNA sense strand
caacagcaagcuccaauau

SEQ ID NO: 317571 - RNA, 19 nt, Homo sapiens
  misc_RNA (1)...(19): siRNA sense strand
gcaagggaaugagaugaug

SEQ ID NO: 317572 - RNA, 19 nt, Homo sapiens
  misc_RNA (1)...(19): siRNA sense strand
guacagugguuaauuuguc

SEQ ID NO: 317573 - RNA, 19 nt, Homo sapiens
  misc_RNA (1)...(19): siRNA sense strand
ggaaaggagcugaagauag

SEQ ID NO: 317574 - RNA, 19 nt, Homo sapiens
  misc_RNA (1)...(19): siRNA sense strand
guaaagaagagcccuaugu

SEQ ID NO: 317575 - RNA, 19 nt, Homo sapiens
  misc_RNA (1)...(19): siRNA sense strand
caccaaacaugauauucaa

SEQ ID NO: 317576 - RNA, 19 nt, Homo sapiens
  misc_RNA (1)...(19): siRNA sense strand
caaccaacauauuucuuuc

SEQ ID NO: 317577 - RNA, 19 nt, Homo sapiens
  misc_RNA (1)...(19): siRNA sense strand
ucacuucaaucuggaaauu

SEQ ID NO: 317578 - RNA, 19 nt, Homo sapiens
  misc_RNA (1)...(19): siRNA sense strand
gagaaacucagucuagaga

SEQ ID NO: 317579 - RNA, 19 nt, Homo sapiens
  misc_RNA (1)...(19): siRNA sense strand
gugaagauguuacuccaau

SEQ ID NO: 317580 - RNA, 19 nt, Homo sapiens
  misc_RNA (1)...(19): siRNA sense strand
gaagaggccaugaaagcaa

SEQ ID NO: 317581 - RNA, 19 nt, Homo sapiens
  misc_RNA (1)...(19): siRNA sense strand
gaauguaaaugugaagaag

SEQ ID NO: 317582 - RNA, 19 nt, Homo sapiens
  misc_RNA (1)...(19): siRNA sense strand
gagcaccaguuccuacaau

SEQ ID NO: 317583 - RNA, 19 nt, Homo sapiens
  misc_RNA (1)...(19): siRNA sense strand
caagagaaacucagucuag

SEQ ID NO: 317584 - RNA, 19 nt, Homo sapiens
  misc_RNA (1)...(19): siRNA sense strand
uaaagaagagcccuauguu

SEQ ID NO: 317585 - RNA, 19 nt, Homo sapiens
  misc_RNA (1)...(19): siRNA sense strand
caacagcccaugcaauuuc

SEQ ID NO: 317586 - RNA, 19 nt, Homo sapiens
  misc_RNA (1)...(19): siRNA sense strand
gauccuagcaacaacauga

SEQ ID NO: 317587 - RNA, 19 nt, Homo sapiens
  misc_RNA (1)...(19): siRNA sense strand
cagcaaggcuuuccuacag

SEQ ID NO: 317588 - RNA, 19 nt, Homo sapiens
  misc_RNA (1)...(19): siRNA sense strand
gcagucaccacuacaagaa

SEQ ID NO: 317589 - RNA, 19 nt, Homo sapiens
  misc_RNA (1)...(19): siRNA sense strand
gcaaguaacucucuucuua

SEQ ID NO: 317590 - RNA, 19 nt, Homo sapiens
  misc_RNA (1)...(19): siRNA sense strand
gaaaggagcugaagauagu

SEQ ID NO: 317591 - RNA, 19 nt, Homo sapiens
  misc_RNA (1)...(19): siRNA sense strand
gcaaagaaguggacauuga

SEQ ID NO: 317592 - RNA, 19 nt, Homo sapiens
  misc_RNA (1)...(19): siRNA sense strand
caacagcgaugcacuauug

SEQ ID NO: 317593 - RNA, 19 nt, Homo sapiens
  misc_RNA (1)...(19): siRNA sense strand
caacagaaccagucaauuu

SEQ ID NO: 317594 - RNA, 19 nt, Homo sapiens
  misc_RNA (1)...(19): siRNA sense strand
gcaguuaucuucaguuuua

SEQ ID NO: 317595 - RNA, 19 nt, Homo sapiens
  misc_RNA (1)...(19): siRNA sense strand
guacaagggucaccuaguu

SEQ ID NO: 317596 - RNA, 19 nt, Homo sapiens
  misc_RNA (1)...(19): siRNA sense strand
caacuugacuggcuccuuu

SEQ ID NO: 317597 - RNA, 19 nt, Homo sapiens
  misc_RNA (1)...(19): siRNA sense strand
caacaugccuggaauucaa

SEQ ID NO: 317598 - RNA, 19 nt, Homo sapiens
  misc_RNA (1)...(19): siRNA sense strand
guagggauauugaaauuga

SEQ ID NO: 317599 - RNA, 19 nt, Homo sapiens
  misc_RNA (1)...(19): siRNA sense strand
ucacagcacucaauaguug

SEQ ID NO: 317600 - RNA, 19 nt, Homo sapiens
  misc_RNA (1)...(19): siRNA sense strand
gcaacagucuccucuuuau

SEQ ID NO: 317601 - RNA, 19 nt, Homo sapiens
  misc_RNA (1)...(19): siRNA sense strand
ccacuggcauccucuauaa

SEQ ID NO: 317602 - RNA, 19 nt, Homo sapiens
  misc_RNA (1)...(19): siRNA sense strand
gaaaagcaguuaaccagua

SEQ ID NO: 317603 - RNA, 19 nt, Homo sapiens
  misc_RNA (1)...(19): siRNA sense strand
ggaaugagaugaugucacu

SEQ ID NO: 317604 - RNA, 19 nt, Homo sapiens
  misc_RNA (1)...(19): siRNA sense strand
gaaaacaucucaaacauag

SEQ ID NO: 317605 - RNA, 19 nt, Homo sapiens
  misc_RNA (1)...(19): siRNA sense strand
gcaguaugauuaagaguga

SEQ ID NO: 317606 - RNA, 19 nt, Homo sapiens
  misc_RNA (1)...(19): siRNA sense strand
gcaaggcuuuccuacagua

SEQ ID NO: 317607 - RNA, 19 nt, Homo sapiens
  misc_RNA (1)...(19): siRNA sense strand
ugacaacacuucuuucuca

SEQ ID NO: 317608 - RNA, 19 nt, Homo sapiens
  misc_RNA (1)...(19): siRNA sense strand
gagaugaugucacuucaau

SEQ ID NO: 317609 - RNA, 19 nt, Homo sapiens
  misc_RNA (1)...(19): siRNA sense strand
gaaacucagucuagagaga

SEQ ID NO: 317610 - RNA, 19 nt, Homo sapiens
  misc_RNA (1)...(19): siRNA sense strand
gcagcaggcuacacaguuu

SEQ ID NO: 317611 - RNA, 19 nt, Homo sapiens
  misc_RNA (1)...(19): siRNA sense strand
gaaaggagaagaagaagug

SEQ ID NO: 317612 - RNA, 19 nt, Homo sapiens
  misc_RNA (1)...(19): siRNA sense strand
uaaugaaccuguaguguug

SEQ ID NO: 317613 - RNA, 19 nt, Homo sapiens
  misc_RNA (1)...(19): siRNA sense strand
uaucaggccugcagaguaa

SEQ ID NO: 317614 - RNA, 19 nt, Homo sapiens
  misc_RNA (1)...(19): siRNA sense strand
ugaaggcacuacuguuaua

SEQ ID NO: 317615 - RNA, 19 nt, Homo sapiens
  misc_RNA (1)...(19): siRNA sense strand
gaggaaugcugaugucgaa

SEQ ID NO: 317616 - RNA, 19 nt, Homo sapiens
  misc_RNA (1)...(19): siRNA sense strand
gcagucaaccaacauauuu

SEQ ID NO: 317617 - RNA, 19 nt, Homo sapiens
  misc_RNA (1)...(19): siRNA sense strand
gacaaucaaccucaaguua

SEQ ID NO: 317618 - RNA, 19 nt, Homo sapiens
  misc_RNA (1)...(19): siRNA sense strand
uugcauagcuguucaguga

SEQ ID NO: 317619 - RNA, 19 nt, Homo sapiens
  misc_RNA (1)...(19): siRNA sense strand
gaacucaauuucuccacuu

SEQ ID NO: 317620 - RNA, 19 nt, Homo sapiens
  misc_RNA (1)...(19): siRNA sense strand
gggaauauauguagugaca

SEQ ID NO: 317621 - RNA, 19 nt, Homo sapiens
  misc_RNA (1)...(19): siRNA sense strand
caaagcaccucacuaugug

SEQ ID NO: 317622 - RNA, 19 nt, Homo sapiens
  misc_RNA (1)...(19): siRNA sense strand
caucaggaauguucuuauu

SEQ ID NO: 317623 - RNA, 19 nt, Homo sapiens
  misc_RNA (1)...(19): siRNA sense strand
acaacaagguaaugguuua

SEQ ID NO: 317624 - RNA, 19 nt, Homo sapiens
  misc_RNA (1)...(19): siRNA sense strand
gcaaaugcagugugaauug

SEQ ID NO: 317625 - RNA, 19 nt, Homo sapiens
  misc_RNA (1)...(19): siRNA sense strand
gcacuacuguuauagaagu

SEQ ID NO: 317626 - RNA, 19 nt, Homo sapiens
  misc_RNA (1)...(19): siRNA sense strand
caacaagucagucaaauuc

SEQ ID NO: 317627 - RNA, 19 nt, Homo sapiens
  misc_RNA (1)...(19): siRNA sense strand
ggaacuauuucaucagaau

SEQ ID NO: 317628 - RNA, 19 nt, Homo sapiens
  misc_RNA (1)...(19): siRNA sense strand
cagaguaacuggacgaaau

SEQ ID NO: 317629 - RNA, 19 nt, Homo sapiens
  misc_RNA (1)...(19): siRNA sense strand
ucaggaauguucuuauuug

SEQ ID NO: 317630 - RNA, 19 nt, Homo sapiens
  misc_RNA (1)...(19): siRNA sense strand
uuacagggcucuucaguuc

SEQ ID NO: 317631 - RNA, 19 nt, Homo sapiens
  misc_RNA (1)...(19): siRNA sense strand
uguaagcccuggaauguuu

SEQ ID NO: 317632 - RNA, 19 nt, Homo sapiens
  misc_RNA (1)...(19): siRNA sense strand
uggaagaucucaugauguu

SEQ ID NO: 317633 - RNA, 19 nt, Homo sapiens
  misc_RNA (1)...(19): siRNA sense strand
gaaaacacguuaucuaauc

SEQ ID NO: 317634 - RNA, 19 nt, Homo sapiens
  misc_RNA (1)...(19): siRNA sense strand
uggaagagcugaaaguguu

SEQ ID NO: 317635 - RNA, 19 nt, Homo sapiens
  misc_RNA (1)...(19): siRNA sense strand
ccagagacccugacaacua

SEQ ID NO: 317636 - RNA, 19 nt, Homo sapiens
  misc_RNA (1)...(19): siRNA sense strand
gcuggaagaucucaugaug

SEQ ID NO: 317637 - RNA, 19 nt, Homo sapiens
  misc_RNA (1)...(19): siRNA sense strand
agaagaaacuggaacacaa

SEQ ID NO: 317638 - RNA, 19 nt, Homo sapiens
  misc_RNA (1)...(19): siRNA sense strand
gaucaacucagcaaacauu

SEQ ID NO: 317639 - RNA, 19 nt, Homo sapiens
  misc_RNA (1)...(19): siRNA sense strand
gaagagcccuauguugugu

SEQ ID NO: 317640 - RNA, 19 nt, Homo sapiens
  misc_RNA (1)...(19): siRNA sense strand
ccauagcucuccucagauu

SEQ ID NO: 317641 - RNA, 19 nt, Homo sapiens
  misc_RNA (1)...(19): siRNA sense strand
acagcaagcuccaauauca

SEQ ID NO: 317642 - RNA, 19 nt, Homo sapiens
  misc_RNA (1)...(19): siRNA sense strand
cagcagacuucucacauga

SEQ ID NO: 317643 - RNA, 19 nt, Homo sapiens
  misc_RNA (1)...(19): siRNA sense strand
gaguuaauaucaugaggaa

SEQ ID NO: 317644 - RNA, 19 nt, Homo sapiens
  misc_RNA (1)...(19): siRNA sense strand
gaacuggaguaaagaagag

SEQ ID NO: 317645 - RNA, 19 nt, Homo sapiens
  misc_RNA (1)...(19): siRNA sense strand
caacaacaacagagcauuu

SEQ ID NO: 317646 - RNA, 19 nt, Homo sapiens
  misc_RNA (1)...(19): siRNA sense strand
gaacaaaugcagccuccaa

SEQ ID NO: 317647 - RNA, 19 nt, Homo sapiens
  misc_RNA (1)...(19): siRNA sense strand
gcagcagucuucucauuca

SEQ ID NO: 317648 - RNA, 19 nt, Homo sapiens
  misc_RNA (1)...(19): siRNA sense strand
gaaaugaaacuucuacaac

SEQ ID NO: 317649 - RNA, 19 nt, Homo sapiens
  misc_RNA (1)...(19): siRNA sense strand
uaccagaccagauaauuua

SEQ ID NO: 317650 - RNA, 19 nt, Homo sapiens
  misc_RNA (1)...(19): siRNA sense strand
aaauacaacuccuugcaaa

SEQ ID NO: 317651 - RNA, 19 nt, Homo sapiens
  misc_RNA (1)...(19): siRNA sense strand
cagcaguuaucuucaguuu

SEQ ID NO: 317652 - RNA, 19 nt, Homo sapiens
  misc_RNA (1)...(19): siRNA sense strand
gcaccgaacucaauuucuc

SEQ ID NO: 317653 - RNA, 19 nt, Homo sapiens
  misc_RNA (1)...(19): siRNA sense strand
guaaugagaauguucaaga

SEQ ID NO: 317654 - RNA, 19 nt, Homo sapiens
  misc_RNA (1)...(19): siRNA sense strand
gaaauacaacuccuugcaa

SEQ ID NO: 317655 - RNA, 19 nt, Homo sapiens
  misc_RNA (1)...(19): siRNA sense strand
gaacaacaugccuggaauu

SEQ ID NO: 317656 - RNA, 19 nt, Homo sapiens
  misc_RNA (1)...(19): siRNA sense strand
ggaaaugaaacuucuacaa

SEQ ID NO: 317657 - RNA, 19 nt, Homo sapiens
  misc_RNA (1)...(19): siRNA sense strand
gcagacuucucacaugaug

SEQ ID NO: 317658 - RNA, 19 nt, Homo sapiens
  misc_RNA (1)...(19): siRNA sense strand
ugagucagcuucagaauac

SEQ ID NO: 317659 - RNA, 19 nt, Homo sapiens
  misc_RNA (1)...(19): siRNA sense strand
cagagacccugacaacuau

SEQ ID NO: 317660 - RNA, 19 nt, Homo sapiens
  misc_RNA (1)...(19): siRNA sense strand
gaagaucucaugauguuca

SEQ ID NO: 317661 - RNA, 19 nt, Homo sapiens
  misc_RNA (1)...(19): siRNA sense strand
gcguagggauauugaaauu

SEQ ID NO: 317662 - RNA, 19 nt, Homo sapiens
  misc_RNA (1)...(19): siRNA sense strand
ccaaagcaccucacuaugu

SEQ ID NO: 317663 - RNA, 19 nt, Homo sapiens
  misc_RNA (1)...(19): siRNA sense strand
ugaaccaacugcagaauuc

SEQ ID NO: 317664 - RNA, 19 nt, Homo sapiens
  misc_RNA (1)...(19): siRNA sense strand
cagagucaguccacaguuu

SEQ ID NO: 317665 - RNA, 19 nt, Homo sapiens
  misc_RNA (1)...(19): siRNA sense strand
gaauagugguacccaacaa

SEQ ID NO: 317666 - RNA, 19 nt, Homo sapiens
  misc_RNA (1)...(19): siRNA sense strand
gauuaagagugaagauguu

SEQ ID NO: 317667 - RNA, 19 nt, Homo sapiens
  misc_RNA (1)...(19): siRNA sense strand
caaacacccucuucuccaa

SEQ ID NO: 317668 - RNA, 19 nt, Homo sapiens
  misc_RNA (1)...(19): siRNA sense strand
gacaaaugcuggaagaucu

SEQ ID NO: 317669 - RNA, 19 nt, Homo sapiens
  misc_RNA (1)...(19): siRNA sense strand
ccugaggacuugcuggaua

SEQ ID NO: 317670 - RNA, 19 nt, Homo sapiens
  misc_RNA (1)...(19): siRNA sense strand
caacagcaagcuccaauau

SEQ ID NO: 317671 - RNA, 19 nt, Homo sapiens
  misc_RNA (1)...(19): siRNA sense strand
gcaagggaaugagaugaug

SEQ ID NO: 317672 - RNA, 19 nt, Homo sapiens
  misc_RNA (1)...(19): siRNA sense strand
guacagugguuaauuuguc

SEQ ID NO: 317673 - RNA, 19 nt, Homo sapiens
  misc_RNA (1)...(19): siRNA sense strand
ggaaaggagcugaagauag

SEQ ID NO: 317674 - RNA, 19 nt, Homo sapiens
  misc_RNA (1)...(19): siRNA sense strand
guaaagaagagcccuaugu

SEQ ID NO: 317675 - RNA, 19 nt, Homo sapiens
  misc_RNA (1)...(19): siRNA sense strand
caccaaacaugauauucaa

SEQ ID NO: 317676 - RNA, 19 nt, Homo sapiens
  misc_RNA (1)...(19): siRNA sense strand
caaccaacauauuucuuuc

SEQ ID NO: 317677 - RNA, 19 nt, Homo sapiens
  misc_RNA (1)...(19): siRNA sense strand
ucacuucaaucuggaaauu

SEQ ID NO: 317678 - RNA, 19 nt, Homo sapiens
  misc_RNA (1)...(19): siRNA sense strand
gagaaacucagucuagaga

SEQ ID NO: 317679 - RNA, 19 nt, Homo sapiens
  misc_RNA (1)...(19): siRNA sense strand
gugaagauguuacuccaau

SEQ ID NO: 317680 - RNA, 19 nt, Homo sapiens
  misc_RNA (1)...(19): siRNA sense strand
gaagaggccaugaaagcaa

SEQ ID NO: 317681 - RNA, 19 nt, Homo sapiens
  misc_RNA (1)...(19): siRNA sense strand
gaauguaaaugugaagaag

SEQ ID NO: 317682 - RNA, 19 nt, Homo sapiens
  misc_RNA (1)...(19): siRNA sense strand
gagcaccaguuccuacaau

SEQ ID NO: 317683 - RNA, 19 nt, Homo sapiens
  misc_RNA (1)...(19): siRNA sense strand
caagagaaacucagucuag

SEQ ID NO: 317684 - RNA, 19 nt, Homo sapiens
  misc_RNA (1)...(19): siRNA sense strand
uaaagaagagcccuauguu

SEQ ID NO: 317685 - RNA, 19 nt, Homo sapiens
  misc_RNA (1)...(19): siRNA sense strand
caacagcccaugcaauuuc

SEQ ID NO: 317686 - RNA, 19 nt, Homo sapiens
  misc_RNA (1)...(19): siRNA sense strand
gauccuagcaacaacauga

SEQ ID NO: 317687 - RNA, 19 nt, Homo sapiens
  misc_RNA (1)...(19): siRNA sense strand
cagcaaggcuuuccuacag

SEQ ID NO: 317688 - RNA, 19 nt, Homo sapiens
  misc_RNA (1)...(19): siRNA sense strand
gcagucaccacuacaagaa

SEQ ID NO: 317689 - RNA, 19 nt, Homo sapiens
  misc_RNA (1)...(19): siRNA sense strand
gagagaaacuauccuuauu

SEQ ID NO: 317690 - RNA, 19 nt, Homo sapiens
  misc_RNA (1)...(19): siRNA sense strand
ugagggaucuucuucaaua

SEQ ID NO: 317691 - RNA, 19 nt, Homo sapiens
  misc_RNA (1)...(19): siRNA sense strand
auacaucgcuugcuucuuu

SEQ ID NO: 317692 - RNA, 19 nt, Homo sapiens
  misc_RNA (1)...(19): siRNA sense strand
gaugauuacugcagauauu

SEQ ID NO: 317693 - RNA, 19 nt, Homo sapiens
  misc_RNA (1)...(19): siRNA sense strand
gaaacuauccuuauuccuu

SEQ ID NO: 317694 - RNA, 19 nt, Homo sapiens
  misc_RNA (1)...(19): siRNA sense strand
ugaaauuccucccugauga

SEQ ID NO: 317695 - RNA, 19 nt, Homo sapiens
  misc_RNA (1)...(19): siRNA sense strand
gguaugcuguugaugugua

SEQ ID NO: 317696 - RNA, 19 nt, Homo sapiens
  misc_RNA (1)...(19): siRNA sense strand
ggagccacguuacuaauag

SEQ ID NO: 317697 - RNA, 19 nt, Homo sapiens
  misc_RNA (1)...(19): siRNA sense strand
cugaugagccguacauuaa

SEQ ID NO: 317698 - RNA, 19 nt, Homo sapiens
  misc_RNA (1)...(19): siRNA sense strand
ggaacguucuacuuugguu

SEQ ID NO: 317699 - RNA, 19 nt, Homo sapiens
  misc_RNA (1)...(19): siRNA sense strand
acucgagcguugaugauua

SEQ ID NO: 317700 - RNA, 19 nt, Homo sapiens
  misc_RNA (1)...(19): siRNA sense strand
gaugagccguacauuaaag

SEQ ID NO: 317701 - RNA, 19 nt, Homo sapiens
  misc_RNA (1)...(19): siRNA sense strand
ggugaaugcugaugacucu

SEQ ID NO: 317702 - RNA, 19 nt, Homo sapiens
  misc_RNA (1)...(19): siRNA sense strand
gagaaacuauccuuauucc

SEQ ID NO: 317703 - RNA, 19 nt, Homo sapiens
  misc_RNA (1)...(19): siRNA sense strand
guucucaccugcugcuuau

SEQ ID NO: 317704 - RNA, 19 nt, Homo sapiens
  misc_RNA (1)...(19): siRNA sense strand
cagaaacacagaagacuga

SEQ ID NO: 317705 - RNA, 19 nt, Homo sapiens
  misc_RNA (1)...(19): siRNA sense strand
gcacagagacggccaaaau

SEQ ID NO: 317706 - RNA, 19 nt, Homo sapiens
  misc_RNA (1)...(19): siRNA sense strand
gggaaugcgucacaaaugc

SEQ ID NO: 317707 - RNA, 19 nt, Homo sapiens
  misc_RNA (1)...(19): siRNA sense strand
guccgcaucugcuuuguug

SEQ ID NO: 317708 - RNA, 19 nt, Homo sapiens
  misc_RNA (1)...(19): siRNA sense strand
ggucuugacugcgugaaau

SEQ ID NO: 317709 - RNA, 19 nt, Homo sapiens
  misc_RNA (1)...(19): siRNA sense strand
ugagagaaacuauccuuau

SEQ ID NO: 317710 - RNA, 19 nt, Homo sapiens
  misc_RNA (1)...(19): siRNA sense strand
gacugacacccgccacuua

SEQ ID NO: 317711 - RNA, 19 nt, Homo sapiens
  misc_RNA (1)...(19): siRNA sense strand
gaacguucuacuuugguuu

SEQ ID NO: 317712 - RNA, 19 nt, Homo sapiens
  misc_RNA (1)...(19): siRNA sense strand
ccugaugagccguacauua

SEQ ID NO: 317713 - RNA, 19 nt, Homo sapiens
  misc_RNA (1)...(19): siRNA sense strand
aaugagggaucuucuucaa

SEQ ID NO: 317714 - RNA, 19 nt, Homo sapiens
  misc_RNA (1)...(19): siRNA sense strand
guaacucgagcguugauga

SEQ ID NO: 317715 - RNA, 19 nt, Homo sapiens
  misc_RNA (1)...(19): siRNA sense strand
gggauucgcaccugugaug

SEQ ID NO: 317716 - RNA, 19 nt, Homo sapiens
  misc_RNA (1)...(19): siRNA sense strand
gcuggagccacguuacuaa

SEQ ID NO: 317717 - RNA, 19 nt, Homo sapiens
  misc_RNA (1)...(19): siRNA sense strand
cagccuguuuguauuauuc

SEQ ID NO: 317718 - RNA, 19 nt, Homo sapiens
  misc_RNA (1)...(19): siRNA sense strand
gggaucuucuucaauacau

SEQ ID NO: 317719 - RNA, 19 nt, Homo sapiens
  misc_RNA (1)...(19): siRNA sense strand
ccaccuggacugacuguug

SEQ ID NO: 317720 - RNA, 19 nt, Homo sapiens
  misc_RNA (1)...(19): siRNA sense strand
uguggaacguucuacuuug

SEQ ID NO: 317721 - RNA, 19 nt, Homo sapiens
  misc_RNA (1)...(19): siRNA sense strand
gugguaugcuguugaugug

SEQ ID NO: 317722 - RNA, 19 nt, Homo sapiens
  misc_RNA (1)...(19): siRNA sense strand
gaaauuccucccugaugag

SEQ ID NO: 317723 - RNA, 19 nt, Homo sapiens
  misc_RNA (1)...(19): siRNA sense strand
gauuacugcagauauucua

SEQ ID NO: 317724 - RNA, 19 nt, Homo sapiens
  misc_RNA (1)...(19): siRNA sense strand
ggaaucauuggcucugugu

SEQ ID NO: 317725 - RNA, 19 nt, Homo sapiens
  misc_RNA (1)...(19): siRNA sense strand
aaauuugguugguccuguu

SEQ ID NO: 317726 - RNA, 19 nt, Homo sapiens
  misc_RNA (1)...(19): siRNA sense strand
guggaacguucuacuuugg

SEQ ID NO: 317727 - RNA, 19 nt, Homo sapiens
  misc_RNA (1)...(19): siRNA sense strand
gagggaucuucuucaauac

SEQ ID NO: 317728 - RNA, 19 nt, Homo sapiens
  misc_RNA (1)...(19): siRNA sense strand
aauguaugcuguagacaca

SEQ ID NO: 317729 - RNA, 19 nt, Homo sapiens
  misc_RNA (1)...(19): siRNA sense strand
caaaauguaugcuguagac

SEQ ID NO: 317730 - RNA, 19 nt, Homo sapiens
  misc_RNA (1)...(19): siRNA sense strand
agagaaacuauccuuauuc

SEQ ID NO: 317731 - RNA, 19 nt, Homo sapiens
  misc_RNA (1)...(19): siRNA sense strand
uggagccacguuacuaaua

SEQ ID NO: 317732 - RNA, 19 nt, Homo sapiens
  misc_RNA (1)...(19): siRNA sense strand
ggauggugaaugcugauga

SEQ ID NO: 317733 - RNA, 19 nt, Homo sapiens
  misc_RNA (1)...(19): siRNA sense strand
gauguuggaccugagagaa

SEQ ID NO: 317734 - RNA, 19 nt, Homo sapiens
  misc_RNA (1)...(19): siRNA sense strand
gugaaauuccucccugaug

SEQ ID NO: 317735 - RNA, 19 nt, Homo sapiens
  misc_RNA (1)...(19): siRNA sense strand
gaaugcgucacaaaugcuu

SEQ ID NO: 317736 - RNA, 19 nt, Homo sapiens
  misc_RNA (1)...(19): siRNA sense strand
cgaggccucuggugggaau

SEQ ID NO: 317737 - RNA, 19 nt, Homo sapiens
  misc_RNA (1)...(19): siRNA sense strand
gauggugaaugcugaugac

SEQ ID NO: 317738 - RNA, 19 nt, Homo sapiens
  misc_RNA (1)...(19): siRNA sense strand
guaugcuguugauguguau

SEQ ID NO: 317739 - RNA, 19 nt, Homo sapiens
  misc_RNA (1)...(19): siRNA sense strand
ugaugaguacgauuccaua

SEQ ID NO: 317740 - RNA, 19 nt, Homo sapiens
  misc_RNA (1)...(19): siRNA sense strand
acaaugagggaucuucuuc

SEQ ID NO: 317741 - RNA, 19 nt, Homo sapiens
  misc_RNA (1)...(19): siRNA sense strand
uucaauacaucgcuugcuu

SEQ ID NO: 317742 - RNA, 19 nt, Homo sapiens
  misc_RNA (1)...(19): siRNA sense strand
ugaugagccguacauuaaa

SEQ ID NO: 317743 - RNA, 19 nt, Homo sapiens
  misc_RNA (1)...(19): siRNA sense strand
guaccagaaacacagaaga

SEQ ID NO: 317744 - RNA, 19 nt, Homo sapiens
  misc_RNA (1)...(19): siRNA sense strand
gaaacacagaagacugaca

SEQ ID NO: 317745 - RNA, 19 nt, Homo sapiens
  misc_RNA (1)...(19): siRNA sense strand
gggcugcuugccacaauga

SEQ ID NO: 317746 - RNA, 19 nt, Homo sapiens
  misc_RNA (1)...(19): siRNA sense strand
gcaccugugaugaguacga

SEQ ID NO: 317747 - RNA, 19 nt, Homo sapiens
  misc_RNA (1)...(19): siRNA sense strand
uauucuagcuggguuugga

SEQ ID NO: 317748 - RNA, 19 nt, Homo sapiens
  misc_RNA (1)...(19): siRNA sense strand
ggugggaaugcgucacaaa

SEQ ID NO: 317749 - RNA, 19 nt, Homo sapiens
  misc_RNA (1)...(19): siRNA sense strand
cugagagaaacuauccuua

SEQ ID NO: 317750 - RNA, 19 nt, Homo sapiens
  misc_RNA (1)...(19): siRNA sense strand
gauauucuagcuggguuug

SEQ ID NO: 317751 - RNA, 19 nt, Homo sapiens
  misc_RNA (1)...(19): siRNA sense strand
ccuugaagcuggugguaac

SEQ ID NO: 317752 - RNA, 19 nt, Homo sapiens
  misc_RNA (1)...(19): siRNA sense strand
caauacaucgcuugcuucu

SEQ ID NO: 317753 - RNA, 19 nt, Homo sapiens
  misc_RNA (1)...(19): siRNA sense strand
ucucaccugcugcuuauau

SEQ ID NO: 317754 - RNA, 19 nt, Homo sapiens
  misc_RNA (1)...(19): siRNA sense strand
gcacaauauauuucuuggu

SEQ ID NO: 317755 - RNA, 19 nt, Homo sapiens
  misc_RNA (1)...(19): siRNA sense strand
cauuggcucugugugguau

SEQ ID NO: 317756 - RNA, 19 nt, Homo sapiens
  misc_RNA (1)...(19): siRNA sense strand
caaugagggaucuucuuca

SEQ ID NO: 317757 - RNA, 19 nt, Homo sapiens
  misc_RNA (1)...(19): siRNA sense strand
gugggaaugcgucacaaau

SEQ ID NO: 317758 - RNA, 19 nt, Homo sapiens
  misc_RNA (1)...(19): siRNA sense strand
ugacacccgccacuuaagu

SEQ ID NO: 317759 - RNA, 19 nt, Homo sapiens
  misc_RNA (1)...(19): siRNA sense strand
gaccaguauuuucacauug

SEQ ID NO: 317760 - RNA, 19 nt, Homo sapiens
  misc_RNA (1)...(19): siRNA sense strand
ggaucuucuucaauacauc

SEQ ID NO: 317761 - RNA, 19 nt, Homo sapiens
  misc_RNA (1)...(19): siRNA sense strand
acugacacccgccacuuaa

SEQ ID NO: 317762 - RNA, 19 nt, Homo sapiens
  misc_RNA (1)...(19): siRNA sense strand
cuagcuggguuuggauuuc

SEQ ID NO: 317763 - RNA, 19 nt, Homo sapiens
  misc_RNA (1)...(19): siRNA sense strand
uaacucgagcguugaugau

SEQ ID NO: 317764 - RNA, 19 nt, Homo sapiens
  misc_RNA (1)...(19): siRNA sense strand
gcagguaccccaggaauca

SEQ ID NO: 317765 - RNA, 19 nt, Homo sapiens
  misc_RNA (1)...(19): siRNA sense strand
ucacagagcugccacagaa

SEQ ID NO: 317766 - RNA, 19 nt, Homo sapiens
  misc_RNA (1)...(19): siRNA sense strand
ggagagguccgcauuauuu

SEQ ID NO: 317767 - RNA, 19 nt, Homo sapiens
  misc_RNA (1)...(19): siRNA sense strand
gcagauggguuuaggagaa

SEQ ID NO: 317768 - RNA, 19 nt, Homo sapiens
  misc_RNA (1)...(19): siRNA sense strand
gaagaaugcucaccuaguc

SEQ ID NO: 317769 - RNA, 19 nt, Homo sapiens
  misc_RNA (1)...(19): siRNA sense strand
gagcagugguggacuauga

SEQ ID NO: 317770 - RNA, 19 nt, Homo sapiens
  misc_RNA (1)...(19): siRNA sense strand
gaauaacuguagucaaugu

SEQ ID NO: 317771 - RNA, 19 nt, Homo sapiens
  misc_RNA (1)...(19): siRNA sense strand
ggaggacgguggacauuau

SEQ ID NO: 317772 - RNA, 19 nt, Homo sapiens
  misc_RNA (1)...(19): siRNA sense strand
gaugauaugugcuggcuau

SEQ ID NO: 317773 - RNA, 19 nt, Homo sapiens
  misc_RNA (1)...(19): siRNA sense strand
gcaagugccuuaauuacag

SEQ ID NO: 317774 - RNA, 19 nt, Homo sapiens
  misc_RNA (1)...(19): siRNA sense strand
ggcaauggcugcucucaga

SEQ ID NO: 317775 - RNA, 19 nt, Homo sapiens
  misc_RNA (1)...(19): siRNA sense strand
gaacuccucuuccuuucug

SEQ ID NO: 317776 - RNA, 19 nt, Homo sapiens
  misc_RNA (1)...(19): siRNA sense strand
gggaauguccauccaauaa

SEQ ID NO: 317777 - RNA, 19 nt, Homo sapiens
  misc_RNA (1)...(19): siRNA sense strand
ccgggaaacugcaauguaa

SEQ ID NO: 317778 - RNA, 19 nt, Homo sapiens
  misc_RNA (1)...(19): siRNA sense strand
gaccaaagaugccucuaca

SEQ ID NO: 317779 - RNA, 19 nt, Homo sapiens
  misc_RNA (1)...(19): siRNA sense strand
ggaccaaagucacaggaau

SEQ ID NO: 317780 - RNA, 19 nt, Homo sapiens
  misc_RNA (1)...(19): siRNA sense strand
gagagagaaugcugcaguu

SEQ ID NO: 317781 - RNA, 19 nt, Homo sapiens
  misc_RNA (1)...(19): siRNA sense strand
ccugaugccugaugaauau

SEQ ID NO: 317782 - RNA, 19 nt, Homo sapiens
  misc_RNA (1)...(19): siRNA sense strand
cugaauaacuguagucaau

SEQ ID NO: 317783 - RNA, 19 nt, Homo sapiens
  misc_RNA (1)...(19): siRNA sense strand
gaacaacagucugaauaac

SEQ ID NO: 317784 - RNA, 19 nt, Homo sapiens
  misc_RNA (1)...(19): siRNA sense strand
gaccaaagucacaggaaua

SEQ ID NO: 317785 - RNA, 19 nt, Homo sapiens
  misc_RNA (1)...(19): siRNA sense strand
uaaaugggcagucuuguga

SEQ ID NO: 317786 - RNA, 19 nt, Homo sapiens
  misc_RNA (1)...(19): siRNA sense strand
ucagaaacauggaaaugga

SEQ ID NO: 317787 - RNA, 19 nt, Homo sapiens
  misc_RNA (1)...(19): siRNA sense strand
guucaaaccaacuguuaua

SEQ ID NO: 317788 - RNA, 19 nt, Homo sapiens
  misc_RNA (1)...(19): siRNA sense strand
gcugacaccucuccucuca

SEQ ID NO: 317789 - RNA, 19 nt, Homo sapiens
  misc_RNA (1)...(19): siRNA sense strand
ggccuggcguuuauaguaa

SEQ ID NO: 317790 - RNA, 19 nt, Homo sapiens
  misc_RNA (1)...(19): siRNA sense strand
gaaguggguucugacaguu

SEQ ID NO: 317791 - RNA, 19 nt, Homo sapiens
  misc_RNA (1)...(19): siRNA sense strand
gcaugaauuugcccuacaa

SEQ ID NO: 317792 - RNA, 19 nt, Homo sapiens
  misc_RNA (1)...(19): siRNA sense strand
caaaugggagugaaccuuu

SEQ ID NO: 317793 - RNA, 19 nt, Homo sapiens
  misc_RNA (1)...(19): siRNA sense strand
gaauguccauccaauaaac

SEQ ID NO: 317794 - RNA, 19 nt, Homo sapiens
  misc_RNA (1)...(19): siRNA sense strand
cuugagagcugaugacaau

SEQ ID NO: 317795 - RNA, 19 nt, Homo sapiens
  misc_RNA (1)...(19): siRNA sense strand
cgaacaacagucugaauaa

SEQ ID NO: 317796 - RNA, 19 nt, Homo sapiens
  misc_RNA (1)...(19): siRNA sense strand
ggaaaacugugguuguaaa

SEQ ID NO: 317797 - RNA, 19 nt, Homo sapiens
  misc_RNA (1)...(19): siRNA sense strand
ccaaagaugccucuacaau

SEQ ID NO: 317798 - RNA, 19 nt, Homo sapiens
  misc_RNA (1)...(19): siRNA sense strand
agacugcccugauuacaug

SEQ ID NO: 317799 - RNA, 19 nt, Homo sapiens
  misc_RNA (1)...(19): siRNA sense strand
ggaauguccauccaauaaa

SEQ ID NO: 317800 - RNA, 19 nt, Homo sapiens
  misc_RNA (1)...(19): siRNA sense strand
ccaaggguccgauguuauu

SEQ ID NO: 317801 - RNA, 19 nt, Homo sapiens
  misc_RNA (1)...(19): siRNA sense strand
agagagaucuuugggaaug

SEQ ID NO: 317802 - RNA, 19 nt, Homo sapiens
  misc_RNA (1)...(19): siRNA sense strand
gagcauaucccuccuugca

SEQ ID NO: 317803 - RNA, 19 nt, Homo sapiens
  misc_RNA (1)...(19): siRNA sense strand
gcagaaauggacaauguau

SEQ ID NO: 317804 - RNA, 19 nt, Homo sapiens
  misc_RNA (1)...(19): siRNA sense strand
caaagucacaggaauacaa

SEQ ID NO: 317805 - RNA, 19 nt, Homo sapiens
  misc_RNA (1)...(19): siRNA sense strand
gcucagacaguucagauga

SEQ ID NO: 317806 - RNA, 19 nt, Homo sapiens
  misc_RNA (1)...(19): siRNA sense strand
gauaugugcuggcuaugag

SEQ ID NO: 317807 - RNA, 19 nt, Homo sapiens
  misc_RNA (1)...(19): siRNA sense strand
gagagaaugcugcaguuug

SEQ ID NO: 317808 - RNA, 19 nt, Homo sapiens
  misc_RNA (1)...(19): siRNA sense strand
gaggaaaacugugguugua

SEQ ID NO: 317809 - RNA, 19 nt, Homo sapiens
  misc_RNA (1)...(19): siRNA sense strand
ggcaggagauauugaguca

SEQ ID NO: 317810 - RNA, 19 nt, Homo sapiens
  misc_RNA (1)...(19): siRNA sense strand
ggauuugagugaugagcaa

SEQ ID NO: 317811 - RNA, 19 nt, Homo sapiens
  misc_RNA (1)...(19): siRNA sense strand
gggccuggcguuuauagua

SEQ ID NO: 317812 - RNA, 19 nt, Homo sapiens
  misc_RNA (1)...(19): siRNA sense strand
agacacagauugcagucaa

SEQ ID NO: 317813 - RNA, 19 nt, Homo sapiens
  misc_RNA (1)...(19): siRNA sense strand
ucaagaaggagaccaaaga

SEQ ID NO: 317814 - RNA, 19 nt, Homo sapiens
  misc_RNA (1)...(19): siRNA sense strand
acaagugccuguaugaaca

SEQ ID NO: 317815 - RNA, 19 nt, Homo sapiens
  misc_RNA (1)...(19): siRNA sense strand
ccaaauugauacaggaaca

SEQ ID NO: 317816 - RNA, 19 nt, Homo sapiens
  misc_RNA (1)...(19): siRNA sense strand
aaccaucugugaccaaauu

SEQ ID NO: 317817 - RNA, 19 nt, Homo sapiens
  misc_RNA (1)...(19): siRNA sense strand
ugagucagcuggccugcaa

SEQ ID NO: 317818 - RNA, 19 nt, Homo sapiens
  misc_RNA (1)...(19): siRNA sense strand
ccgaacaacagucugaaua

SEQ ID NO: 317819 - RNA, 19 nt, Homo sapiens
  misc_RNA (1)...(19): siRNA sense strand
caaagaugccucuacaauc

SEQ ID NO: 317820 - RNA, 19 nt, Homo sapiens
  misc_RNA (1)...(19): siRNA sense strand
uaacuguagucaaugugaa

SEQ ID NO: 317821 - RNA, 19 nt, Homo sapiens
  misc_RNA (1)...(19): siRNA sense strand
agaccuuucuccuaaacua

SEQ ID NO: 317822 - RNA, 19 nt, Homo sapiens
  misc_RNA (1)...(19): siRNA sense strand
gacacguacugcuauauca

SEQ ID NO: 317823 - RNA, 19 nt, Homo sapiens
  misc_RNA (1)...(19): siRNA sense strand
ugugugacccucucuauaa

SEQ ID NO: 317824 - RNA, 19 nt, Homo sapiens
  misc_RNA (1)...(19): siRNA sense strand
gaagccgacugcucagaca

SEQ ID NO: 317825 - RNA, 19 nt, Homo sapiens
  misc_RNA (1)...(19): siRNA sense strand
cuacaacaguacaaguuau

SEQ ID NO: 317826 - RNA, 19 nt, Homo sapiens
  misc_RNA (1)...(19): siRNA sense strand
ccucagaugcucccaguuu

SEQ ID NO: 317827 - RNA, 19 nt, Homo sapiens
  misc_RNA (1)...(19): siRNA sense strand
aaagacagauuuacaucca

SEQ ID NO: 317828 - RNA, 19 nt, Homo sapiens
  misc_RNA (1)...(19): siRNA sense strand
uuauuucucuggaacauug

SEQ ID NO: 317829 - RNA, 19 nt, Homo sapiens
  misc_RNA (1)...(19): siRNA sense strand
ugagagcugaugacaauaa

SEQ ID NO: 317830 - RNA, 19 nt, Homo sapiens
  misc_RNA (1)...(19): siRNA sense strand
uaaaucaaaugggagugaa

SEQ ID NO: 317831 - RNA, 19 nt, Homo sapiens
  misc_RNA (1)...(19): siRNA sense strand
ggacgguggacauuauuug

SEQ ID NO: 317832 - RNA, 19 nt, Homo sapiens
  misc_RNA (1)...(19): siRNA sense strand
gcaagcagauggguuuagg

SEQ ID NO: 317833 - RNA, 19 nt, Homo sapiens
  misc_RNA (1)...(19): siRNA sense strand
guggaagaaugcucaccua

SEQ ID NO: 317834 - RNA, 19 nt, Homo sapiens
  misc_RNA (1)...(19): siRNA sense strand
ccacaggacucaaaaggaa

SEQ ID NO: 317835 - RNA, 19 nt, Homo sapiens
  misc_RNA (1)...(19): siRNA sense strand
gaauuugcccuacaacagu

SEQ ID NO: 317836 - RNA, 19 nt, Homo sapiens
  misc_RNA (1)...(19): siRNA sense strand
aaagaugccucuacaaucc

SEQ ID NO: 317837 - RNA, 19 nt, Homo sapiens
  misc_RNA (1)...(19): siRNA sense strand
ccagcacguuucaauguga

SEQ ID NO: 317838 - RNA, 19 nt, Homo sapiens
  misc_RNA (1)...(19): siRNA sense strand
ggagugacgaggcucauug

SEQ ID NO: 317839 - RNA, 19 nt, Homo sapiens
  misc_RNA (1)...(19): siRNA sense strand
ugacaccucuccucucagu

SEQ ID NO: 317840 - RNA, 19 nt, Homo sapiens
  misc_RNA (1)...(19): siRNA sense strand
ggaagaaugcucaccuagu

SEQ ID NO: 317841 - RNA, 19 nt, Homo sapiens
  misc_RNA (1)...(19): siRNA sense strand
ggagaacugcagcgucauu

SEQ ID NO: 317842 - RNA, 19 nt, Homo sapiens
  misc_RNA (1)...(19): siRNA sense strand
gcaaggaugggagugauga

SEQ ID NO: 317843 - RNA, 19 nt, Homo sapiens
  misc_RNA (1)...(19): siRNA sense strand
gcagcaaugucagcagaau

SEQ ID NO: 317844 - RNA, 19 nt, Homo sapiens
  misc_RNA (1)...(19): siRNA sense strand
ugauggauaugaugacugu

SEQ ID NO: 317845 - RNA, 19 nt, Homo sapiens
  misc_RNA (1)...(19): siRNA sense strand
auccagaccuuucuccuaa

SEQ ID NO: 317846 - RNA, 19 nt, Homo sapiens
  misc_RNA (1)...(19): siRNA sense strand
gagggagagguccgcauua

SEQ ID NO: 317847 - RNA, 19 nt, Homo sapiens
  misc_RNA (1)...(19): siRNA sense strand
gugugacccucucuauaaa

SEQ ID NO: 317848 - RNA, 19 nt, Homo sapiens
  misc_RNA (1)...(19): siRNA sense strand
aaacugugguuguaaagag

SEQ ID NO: 317849 - RNA, 19 nt, Homo sapiens
  misc_RNA (1)...(19): siRNA sense strand
gauccugcuuuccuauguu

SEQ ID NO: 317850 - RNA, 19 nt, Homo sapiens
  misc_RNA (1)...(19): siRNA sense strand
uuggaacucugcaugaauu

SEQ ID NO: 317851 - RNA, 19 nt, Homo sapiens
  misc_RNA (1)...(19): siRNA sense strand
cagacacgcuuugugaaga

SEQ ID NO: 317852 - RNA, 19 nt, Homo sapiens
  misc_RNA (1)...(19): siRNA sense strand
caucaacaaucuagaccau

SEQ ID NO: 317853 - RNA, 19 nt, Homo sapiens
  misc_RNA (1)...(19): siRNA sense strand
aaauuucucuucuguguac

SEQ ID NO: 317854 - RNA, 19 nt, Homo sapiens
  misc_RNA (1)...(19): siRNA sense strand
ugaugaauauguggaagaa

SEQ ID NO: 317855 - RNA, 19 nt, Homo sapiens
  misc_RNA (1)...(19): siRNA sense strand
ccgauguuauucuuacaaa

SEQ ID NO: 317856 - RNA, 19 nt, Homo sapiens
  misc_RNA (1)...(19): siRNA sense strand
gugacccucucuauaaaug

SEQ ID NO: 317857 - RNA, 19 nt, Homo sapiens
  misc_RNA (1)...(19): siRNA sense strand
gcagcgagaaucuguuuca

SEQ ID NO: 317858 - RNA, 19 nt, Homo sapiens
  misc_RNA (1)...(19): siRNA sense strand
cucagaugcucccaguuua

SEQ ID NO: 317859 - RNA, 19 nt, Homo sapiens
  misc_RNA (1)...(19): siRNA sense strand
caguacaaguuauccaaau

SEQ ID NO: 317860 - RNA, 19 nt, Homo sapiens
  misc_RNA (1)...(19): siRNA sense strand
agagaaugcugcaguuugg

SEQ ID NO: 317861 - RNA, 19 nt, Homo sapiens
  misc_RNA (1)...(19): siRNA sense strand
gacaauaacaugggcaaug

SEQ ID NO: 317862 - RNA, 19 nt, Homo sapiens
  misc_RNA (1)...(19): siRNA sense strand
guaaaugggcagucuugug

SEQ ID NO: 317863 - RNA, 19 nt, Homo sapiens
  misc_RNA (1)...(19): siRNA sense strand
cugauuacauggacgagaa

SEQ ID NO: 317864 - RNA, 19 nt, Homo sapiens
  misc_RNA (1)...(19): siRNA sense strand
augaauauguggaagaaug

SEQ ID NO: 317865 - RNA, 19 nt, Homo sapiens
  misc_RNA (1)...(19): siRNA sense strand
gaaugucaaugucaaggua

SEQ ID NO: 317866 - RNA, 19 nt, Homo sapiens
  misc_RNA (1)...(19): siRNA sense strand
ggaagaccauguuggcaaa

SEQ ID NO: 317867 - RNA, 19 nt, Homo sapiens
  misc_RNA (1)...(19): siRNA sense strand
ccacaggcuccaacuauua

SEQ ID NO: 317868 - RNA, 19 nt, Homo sapiens
  misc_RNA (1)...(19): siRNA sense strand
caaaggcgguggcacauca

SEQ ID NO: 317869 - RNA, 19 nt, Homo sapiens
  misc_RNA (1)...(19): siRNA sense strand
gcucggaguuuguacagaa

SEQ ID NO: 317870 - RNA, 19 nt, Homo sapiens
  misc_RNA (1)...(19): siRNA sense strand
gaaugcaccugccaucauc

SEQ ID NO: 317871 - RNA, 19 nt, Homo sapiens
  misc_RNA (1)...(19): siRNA sense strand
gagauucgaugcucagaca

SEQ ID NO: 317872 - RNA, 19 nt, Homo sapiens
  misc_RNA (1)...(19): siRNA sense strand
cacaacagcugcauucauc

SEQ ID NO: 317873 - RNA, 19 nt, Homo sapiens
  misc_RNA (1)...(19): siRNA sense strand
ggauggauuugaucagaau

SEQ ID NO: 317874 - RNA, 19 nt, Homo sapiens
  misc_RNA (1)...(19): siRNA sense strand
acaagacugucaucaagaa

SEQ ID NO: 317875 - RNA, 19 nt, Homo sapiens
  misc_RNA (1)...(19): siRNA sense strand
ucagauggauggauuugau

SEQ ID NO: 317876 - RNA, 19 nt, Homo sapiens
  misc_RNA (1)...(19): siRNA sense strand
gaucagaaugucaauguca

SEQ ID NO: 317877 - RNA, 19 nt, Homo sapiens
  misc_RNA (1)...(19): siRNA sense strand
ucaggagaguggaauguug

SEQ ID NO: 317878 - RNA, 19 nt, Homo sapiens
  misc_RNA (1)...(19): siRNA sense strand
gcaagaugaaccucucuga

SEQ ID NO: 317879 - RNA, 19 nt, Homo sapiens
  misc_RNA (1)...(19): siRNA sense strand
auacaagacugucaucaag

SEQ ID NO: 317880 - RNA, 19 nt, Homo sapiens
  misc_RNA (1)...(19): siRNA sense strand
gaagccagaugugauguac

SEQ ID NO: 317881 - RNA, 19 nt, Homo sapiens
  misc_RNA (1)...(19): siRNA sense strand
gaggugaagcgaauccaaa

SEQ ID NO: 317882 - RNA, 19 nt, Homo sapiens
  misc_RNA (1)...(19): siRNA sense strand
ggccaaggacuucgagaaa

SEQ ID NO: 317883 - RNA, 19 nt, Homo sapiens
  misc_RNA (1)...(19): siRNA sense strand
gaugagaucccagcacugu

SEQ ID NO: 317884 - RNA, 19 nt, Homo sapiens
  misc_RNA (1)...(19): siRNA sense strand
ugaggagguugacuuggaa

SEQ ID NO: 317885 - RNA, 19 nt, Homo sapiens
  misc_RNA (1)...(19): siRNA sense strand
cgagaaagcauacaagacu

SEQ ID NO: 317886 - RNA, 19 nt, Homo sapiens
  misc_RNA (1)...(19): siRNA sense strand
gaccagaagccagauguga

SEQ ID NO: 317887 - RNA, 19 nt, Homo sapiens
  misc_RNA (1)...(19): siRNA sense strand
acagggagguucagaggau

SEQ ID NO: 317888 - RNA, 19 nt, Homo sapiens
  misc_RNA (1)...(19): siRNA sense strand
ucaugaugcucaccucaga

SEQ ID NO: 317889 - RNA, 19 nt, Homo sapiens
  misc_RNA (1)...(19): siRNA sense strand
ucacacaacagcugcauuc

SEQ ID NO: 317890 - RNA, 19 nt, Homo sapiens
  misc_RNA (1)...(19): siRNA sense strand
aauguuggcuguccgugaa

SEQ ID NO: 317891 - RNA, 19 nt, Homo sapiens
  misc_RNA (1)...(19): siRNA sense strand
gccgacagcagcaucauga

SEQ ID NO: 317892 - RNA, 19 nt, Homo sapiens
  misc_RNA (1)...(19): siRNA sense strand
ccaaggacuucgagaaagc

SEQ ID NO: 317893 - RNA, 19 nt, Homo sapiens
  misc_RNA (1)...(19): siRNA sense strand
cugaggagguugacuugga

SEQ ID NO: 317894 - RNA, 19 nt, Homo sapiens
  misc_RNA (1)...(19): siRNA sense strand
ucacgcauuucgagcucua

SEQ ID NO: 317895 - RNA, 19 nt, Homo sapiens
  misc_RNA (1)...(19): siRNA sense strand
uggagaaggcucaggauga

SEQ ID NO: 317896 - RNA, 19 nt, Homo sapiens
  misc_RNA (1)...(19): siRNA sense strand
gcuggucaucggacaauuu

SEQ ID NO: 317897 - RNA, 19 nt, Homo sapiens
  misc_RNA (1)...(19): siRNA sense strand
aaucauggccacaaacaga

SEQ ID NO: 317898 - RNA, 19 nt, Homo sapiens
  misc_RNA (1)...(19): siRNA sense strand
cggaguuuguacagaagua

SEQ ID NO: 317899 - RNA, 19 nt, Homo sapiens
  misc_RNA (1)...(19): siRNA sense strand
ccagaagccagaugugaug

SEQ ID NO: 317900 - RNA, 19 nt, Homo sapiens
  misc_RNA (1)...(19): siRNA sense strand
ugcuggagcugcugaauca

SEQ ID NO: 317901 - RNA, 19 nt, Homo sapiens
  misc_RNA (1)...(19): siRNA sense strand
gagcaugaguuuuacaagu

SEQ ID NO: 317902 - RNA, 19 nt, Homo sapiens
  misc_RNA (1)...(19): siRNA sense strand
agacugucaucaagaagga

SEQ ID NO: 317903 - RNA, 19 nt, Homo sapiens
  misc_RNA (1)...(19): siRNA sense strand
cauacaagacugucaucaa

SEQ ID NO: 317904 - RNA, 19 nt, Homo sapiens
  misc_RNA (1)...(19): siRNA sense strand
gccaaggacuucgagaaag

SEQ ID NO: 317905 - RNA, 19 nt, Homo sapiens
  misc_RNA (1)...(19): siRNA sense strand
gguggcacaucacacaaca

SEQ ID NO: 317906 - RNA, 19 nt, Homo sapiens
  misc_RNA (1)...(19): siRNA sense strand
cgccagaagagauugauuu

SEQ ID NO: 317907 - RNA, 19 nt, Homo sapiens
  misc_RNA (1)...(19): siRNA sense strand
guaaucauggccacaaaca

SEQ ID NO: 317908 - RNA, 19 nt, Homo sapiens
  misc_RNA (1)...(19): siRNA sense strand
ggucgugggcucggaguuu

SEQ ID NO: 317909 - RNA, 19 nt, Homo sapiens
  misc_RNA (1)...(19): siRNA sense strand
ggacuucgagaaagcauac

SEQ ID NO: 317910 - RNA, 19 nt, Homo sapiens
  misc_RNA (1)...(19): siRNA sense strand
gcaccugccaucaucuuca

SEQ ID NO: 317911 - RNA, 19 nt, Homo sapiens
  misc_RNA (1)...(19): siRNA sense strand
gagaaugcaccugccauca

SEQ ID NO: 317912 - RNA, 19 nt, Homo sapiens
  misc_RNA (1)...(19): siRNA sense strand
aggaggaggugaagcgaau

SEQ ID NO: 317913 - RNA, 19 nt, Homo sapiens
  misc_RNA (1)...(19): siRNA sense strand
gagguugacuuggaagacu

SEQ ID NO: 317914 - RNA, 19 nt, Homo sapiens
  misc_RNA (1)...(19): siRNA sense strand
cacuaucacuagcaagaug

SEQ ID NO: 317915 - RNA, 19 nt, Homo sapiens
  misc_RNA (1)...(19): siRNA sense strand
cgagcaggagcaugaguuu

SEQ ID NO: 317916 - RNA, 19 nt, Homo sapiens
  misc_RNA (1)...(19): siRNA sense strand
uaccacaggcuccaacuau

SEQ ID NO: 317917 - RNA, 19 nt, Homo sapiens
  misc_RNA (1)...(19): siRNA sense strand
uggaggcuguggaucagaa

SEQ ID NO: 317918 - RNA, 19 nt, Homo sapiens
  misc_RNA (1)...(19): siRNA sense strand
uggauggauuugaucagaa

SEQ ID NO: 317919 - RNA, 19 nt, Homo sapiens
  misc_RNA (1)...(19): siRNA sense strand
ggucaucggacaauuucug

SEQ ID NO: 317920 - RNA, 19 nt, Homo sapiens
  misc_RNA (1)...(19): siRNA sense strand
gcaugaguuuuacaaguga

SEQ ID NO: 317921 - RNA, 19 nt, Homo sapiens
  misc_RNA (1)...(19): siRNA sense strand
gaagccgacagcagcauca

SEQ ID NO: 317922 - RNA, 19 nt, Homo sapiens
  misc_RNA (1)...(19): siRNA sense strand
ggaggugaagcgaauccaa

SEQ ID NO: 317923 - RNA, 19 nt, Homo sapiens
  misc_RNA (1)...(19): siRNA sense strand
ugacuuggaagacuaugug

SEQ ID NO: 317924 - RNA, 19 nt, Homo sapiens
  misc_RNA (1)...(19): siRNA sense strand
gcauuucgagcucuacaag

SEQ ID NO: 317925 - RNA, 19 nt, Homo sapiens
  misc_RNA (1)...(19): siRNA sense strand
ugaagcgaauccaaagcau

SEQ ID NO: 317926 - RNA, 19 nt, Homo sapiens
  misc_RNA (1)...(19): siRNA sense strand
caaugucaagguaaucaug

SEQ ID NO: 317927 - RNA, 19 nt, Homo sapiens
  misc_RNA (1)...(19): siRNA sense strand
ggaccuggaggaccuguac

SEQ ID NO: 317928 - RNA, 19 nt, Homo sapiens
  misc_RNA (1)...(19): siRNA sense strand
accacaggcuccaacuauu

SEQ ID NO: 317929 - RNA, 19 nt, Homo sapiens
  misc_RNA (1)...(19): siRNA sense strand
gugaagcgaauccaaagca

SEQ ID NO: 317930 - RNA, 19 nt, Homo sapiens
  misc_RNA (1)...(19): siRNA sense strand
gaggcuguggaucagaaua

SEQ ID NO: 317931 - RNA, 19 nt, Homo sapiens
  misc_RNA (1)...(19): siRNA sense strand
cacaggcuccaacuauuau

SEQ ID NO: 317932 - RNA, 19 nt, Homo sapiens
  misc_RNA (1)...(19): siRNA sense strand
acaagcagaucggcaucga

SEQ ID NO: 317933 - RNA, 19 nt, Homo sapiens
  misc_RNA (1)...(19): siRNA sense strand
gcaaaggcgguggcacauc

SEQ ID NO: 317934 - RNA, 19 nt, Homo sapiens
  misc_RNA (1)...(19): siRNA sense strand
gcugugggaagaccauguu

SEQ ID NO: 317935 - RNA, 19 nt, Homo sapiens
  misc_RNA (1)...(19): siRNA sense strand
gucgugggcucggaguuug

SEQ ID NO: 317936 - RNA, 19 nt, Homo sapiens
  misc_RNA (1)...(19): siRNA sense strand
gcauacaagacugucauca

SEQ ID NO: 317937 - RNA, 19 nt, Homo sapiens
  misc_RNA (1)...(19): siRNA sense strand
ggauuugaucagaauguca

SEQ ID NO: 317938 - RNA, 19 nt, Homo sapiens
  misc_RNA (1)...(19): siRNA sense strand
gaaugucaaugucaaggua

SEQ ID NO: 317939 - RNA, 19 nt, Homo sapiens
  misc_RNA (1)...(19): siRNA sense strand
ggaagaccauguuggcaaa

SEQ ID NO: 317940 - RNA, 19 nt, Homo sapiens
  misc_RNA (1)...(19): siRNA sense strand
ccacaggcuccaacuauua

SEQ ID NO: 317941 - RNA, 19 nt, Homo sapiens
  misc_RNA (1)...(19): siRNA sense strand
caaaggcgguggcacauca

SEQ ID NO: 317942 - RNA, 19 nt, Homo sapiens
  misc_RNA (1)...(19): siRNA sense strand
gcucggaguuuguacagaa

SEQ ID NO: 317943 - RNA, 19 nt, Homo sapiens
  misc_RNA (1)...(19): siRNA sense strand
gaaugcaccugccaucauc

SEQ ID NO: 317944 - RNA, 19 nt, Homo sapiens
  misc_RNA (1)...(19): siRNA sense strand
gagauucgaugcucagaca

SEQ ID NO: 317945 - RNA, 19 nt, Homo sapiens
  misc_RNA (1)...(19): siRNA sense strand
cacaacagcugcauucauc

SEQ ID NO: 317946 - RNA, 19 nt, Homo sapiens
  misc_RNA (1)...(19): siRNA sense strand
ggauggauuugaucagaau

SEQ ID NO: 317947 - RNA, 19 nt, Homo sapiens
  misc_RNA (1)...(19): siRNA sense strand
acaagacugucaucaagaa

SEQ ID NO: 317948 - RNA, 19 nt, Homo sapiens
  misc_RNA (1)...(19): siRNA sense strand
ucagauggauggauuugau

SEQ ID NO: 317949 - RNA, 19 nt, Homo sapiens
  misc_RNA (1)...(19): siRNA sense strand
gaucagaaugucaauguca

SEQ ID NO: 317950 - RNA, 19 nt, Homo sapiens
  misc_RNA (1)...(19): siRNA sense strand
ucaggagaguggaauguug

SEQ ID NO: 317951 - RNA, 19 nt, Homo sapiens
  misc_RNA (1)...(19): siRNA sense strand
gcaagaugaaccucucuga

SEQ ID NO: 317952 - RNA, 19 nt, Homo sapiens
  misc_RNA (1)...(19): siRNA sense strand
auacaagacugucaucaag

SEQ ID NO: 317953 - RNA, 19 nt, Homo sapiens
  misc_RNA (1)...(19): siRNA sense strand
gaagccagaugugauguac

SEQ ID NO: 317954 - RNA, 19 nt, Homo sapiens
  misc_RNA (1)...(19): siRNA sense strand
gaggugaagcgaauccaaa

SEQ ID NO: 317955 - RNA, 19 nt, Homo sapiens
  misc_RNA (1)...(19): siRNA sense strand
ggccaaggacuucgagaaa

SEQ ID NO: 317956 - RNA, 19 nt, Homo sapiens
  misc_RNA (1)...(19): siRNA sense strand
gaugagaucccagcacugu

SEQ ID NO: 317957 - RNA, 19 nt, Homo sapiens
  misc_RNA (1)...(19): siRNA sense strand
ugaggagguugacuuggaa

SEQ ID NO: 317958 - RNA, 19 nt, Homo sapiens
  misc_RNA (1)...(19): siRNA sense strand
cgagaaagcauacaagacu

SEQ ID NO: 317959 - RNA, 19 nt, Homo sapiens
  misc_RNA (1)...(19): siRNA sense strand
gaccagaagccagauguga

SEQ ID NO: 317960 - RNA, 19 nt, Homo sapiens
  misc_RNA (1)...(19): siRNA sense strand
acagggagguucagaggau

SEQ ID NO: 317961 - RNA, 19 nt, Homo sapiens
  misc_RNA (1)...(19): siRNA sense strand
ucaugaugcucaccucaga

SEQ ID NO: 317962 - RNA, 19 nt, Homo sapiens
  misc_RNA (1)...(19): siRNA sense strand
ucacacaacagcugcauuc

SEQ ID NO: 317963 - RNA, 19 nt, Homo sapiens
  misc_RNA (1)...(19): siRNA sense strand
aauguuggcuguccgugaa

SEQ ID NO: 317964 - RNA, 19 nt, Homo sapiens
  misc_RNA (1)...(19): siRNA sense strand
gccgacagcagcaucauga

SEQ ID NO: 317965 - RNA, 19 nt, Homo sapiens
  misc_RNA (1)...(19): siRNA sense strand
ccaaggacuucgagaaagc

SEQ ID NO: 317966 - RNA, 19 nt, Homo sapiens
  misc_RNA (1)...(19): siRNA sense strand
cugaggagguugacuugga

SEQ ID NO: 317967 - RNA, 19 nt, Homo sapiens
  misc_RNA (1)...(19): siRNA sense strand
ucacgcauuucgagcucua

SEQ ID NO: 317968 - RNA, 19 nt, Homo sapiens
  misc_RNA (1)...(19): siRNA sense strand
uggagaaggcucaggauga

SEQ ID NO: 317969 - RNA, 19 nt, Homo sapiens
  misc_RNA (1)...(19): siRNA sense strand
gcuggucaucggacaauuu

SEQ ID NO: 317970 - RNA, 19 nt, Homo sapiens
  misc_RNA (1)...(19): siRNA sense strand
aaucauggccacaaacaga

SEQ ID NO: 317971 - RNA, 19 nt, Homo sapiens
  misc_RNA (1)...(19): siRNA sense strand
cggaguuuguacagaagua

SEQ ID NO: 317972 - RNA, 19 nt, Homo sapiens
  misc_RNA (1)...(19): siRNA sense strand
ccagaagccagaugugaug

SEQ ID NO: 317973 - RNA, 19 nt, Homo sapiens
  misc_RNA (1)...(19): siRNA sense strand
ugcuggagcugcugaauca

SEQ ID NO: 317974 - RNA, 19 nt, Homo sapiens
  misc_RNA (1)...(19): siRNA sense strand
gagcaugaguuuuacaagu

SEQ ID NO: 317975 - RNA, 19 nt, Homo sapiens
  misc_RNA (1)...(19): siRNA sense strand
agacugucaucaagaagga

SEQ ID NO: 317976 - RNA, 19 nt, Homo sapiens
  misc_RNA (1)...(19): siRNA sense strand
cauacaagacugucaucaa

SEQ ID NO: 317977 - RNA, 19 nt, Homo sapiens
  misc_RNA (1)...(19): siRNA sense strand
gccaaggacuucgagaaag

SEQ ID NO: 317978 - RNA, 19 nt, Homo sapiens
  misc_RNA (1)...(19): siRNA sense strand
gguggcacaucacacaaca

SEQ ID NO: 317979 - RNA, 19 nt, Homo sapiens
  misc_RNA (1)...(19): siRNA sense strand
cgccagaagagauugauuu

SEQ ID NO: 317980 - RNA, 19 nt, Homo sapiens
  misc_RNA (1)...(19): siRNA sense strand
guaaucauggccacaaaca

SEQ ID NO: 317981 - RNA, 19 nt, Homo sapiens
  misc_RNA (1)...(19): siRNA sense strand
ggucgugggcucggaguuu

SEQ ID NO: 317982 - RNA, 19 nt, Homo sapiens
  misc_RNA (1)...(19): siRNA sense strand
ggacuucgagaaagcauac

SEQ ID NO: 317983 - RNA, 19 nt, Homo sapiens
  misc_RNA (1)...(19): siRNA sense strand
gcaccugccaucaucuuca

SEQ ID NO: 317984 - RNA, 19 nt, Homo sapiens
  misc_RNA (1)...(19): siRNA sense strand
gagaaugcaccugccauca

SEQ ID NO: 317985 - RNA, 19 nt, Homo sapiens
  misc_RNA (1)...(19): siRNA sense strand
aggaggaggugaagcgaau

SEQ ID NO: 317986 - RNA, 19 nt, Homo sapiens
  misc_RNA (1)...(19): siRNA sense strand
gagguugacuuggaagacu

SEQ ID NO: 317987 - RNA, 19 nt, Homo sapiens
  misc_RNA (1)...(19): siRNA sense strand
cacuaucacuagcaagaug

SEQ ID NO: 317988 - RNA, 19 nt, Homo sapiens
  misc_RNA (1)...(19): siRNA sense strand
cgagcaggagcaugaguuu

SEQ ID NO: 317989 - RNA, 19 nt, Homo sapiens
  misc_RNA (1)...(19): siRNA sense strand
uaccacaggcuccaacuau

SEQ ID NO: 317990 - RNA, 19 nt, Homo sapiens
  misc_RNA (1)...(19): siRNA sense strand
uggaggcuguggaucagaa

SEQ ID NO: 317991 - RNA, 19 nt, Homo sapiens
  misc_RNA (1)...(19): siRNA sense strand
uggauggauuugaucagaa

SEQ ID NO: 317992 - RNA, 19 nt, Homo sapiens
  misc_RNA (1)...(19): siRNA sense strand
ggucaucggacaauuucug

SEQ ID NO: 317993 - RNA, 19 nt, Homo sapiens
  misc_RNA (1)...(19): siRNA sense strand
gcaugaguuuuacaaguga

SEQ ID NO: 317994 - RNA, 19 nt, Homo sapiens
  misc_RNA (1)...(19): siRNA sense strand
gaagccgacagcagcauca

SEQ ID NO: 317995 - RNA, 19 nt, Homo sapiens
  misc_RNA (1)...(19): siRNA sense strand
ggaggugaagcgaauccaa

SEQ ID NO: 317996 - RNA, 19 nt, Homo sapiens
  misc_RNA (1)...(19): siRNA sense strand
ugacuuggaagacuaugug

SEQ ID NO: 317997 - RNA, 19 nt, Homo sapiens
  misc_RNA (1)...(19): siRNA sense strand
gcauuucgagcucuacaag

SEQ ID NO: 317998 - RNA, 19 nt, Homo sapiens
  misc_RNA (1)...(19): siRNA sense strand
ugaagcgaauccaaagcau

SEQ ID NO: 317999 - RNA, 19 nt, Homo sapiens
  misc_RNA (1)...(19): siRNA sense strand
caaugucaagguaaucaug

SEQ ID NO: 318000 - RNA, 19 nt, Homo sapiens
  misc_RNA (1)...(19): siRNA sense strand
ggaccuggaggaccuguac

SEQ ID NO: 318001 - RNA, 19 nt, Homo sapiens
  misc_RNA (1)...(19): siRNA sense strand
accacaggcuccaacuauu

SEQ ID NO: 318002 - RNA, 19 nt, Homo sapiens
  misc_RNA (1)...(19): siRNA sense strand
gugaagcgaauccaaagca

SEQ ID NO: 318003 - RNA, 19 nt, Homo sapiens
  misc_RNA (1)...(19): siRNA sense strand
gaggcuguggaucagaaua

SEQ ID NO: 318004 - RNA, 19 nt, Homo sapiens
  misc_RNA (1)...(19): siRNA sense strand
cacaggcuccaacuauuau

SEQ ID NO: 318005 - RNA, 19 nt, Homo sapiens
  misc_RNA (1)...(19): siRNA sense strand
acaagcagaucggcaucga

SEQ ID NO: 318006 - RNA, 19 nt, Homo sapiens
  misc_RNA (1)...(19): siRNA sense strand
gcaaaggcgguggcacauc

SEQ ID NO: 318007 - RNA, 19 nt, Homo sapiens
  misc_RNA (1)...(19): siRNA sense strand
gcugugggaagaccauguu

SEQ ID NO: 318008 - RNA, 19 nt, Homo sapiens
  misc_RNA (1)...(19): siRNA sense strand
gucgugggcucggaguuug

SEQ ID NO: 318009 - RNA, 19 nt, Homo sapiens
  misc_RNA (1)...(19): siRNA sense strand
gcauacaagacugucauca

SEQ ID NO: 318010 - RNA, 19 nt, Homo sapiens
  misc_RNA (1)...(19): siRNA sense strand
ggauuugaucagaauguca

SEQ ID NO: 318011 - RNA, 19 nt, Homo sapiens
  misc_RNA (1)...(19): siRNA sense strand
cuacauagaugguuacaaa

SEQ ID NO: 318012 - RNA, 19 nt, Homo sapiens
  misc_RNA (1)...(19): siRNA sense strand
caucaaugcuuccuacaua

SEQ ID NO: 318013 - RNA, 19 nt, Homo sapiens
  misc_RNA (1)...(19): siRNA sense strand
gcgaacagguacauucaua

SEQ ID NO: 318014 - RNA, 19 nt, Homo sapiens
  misc_RNA (1)...(19): siRNA sense strand
gaauggaaaucccacacua

SEQ ID NO: 318015 - RNA, 19 nt, Homo sapiens
  misc_RNA (1)...(19): siRNA sense strand
gauaaaugcuaccaguauu

SEQ ID NO: 318016 - RNA, 19 nt, Homo sapiens
  misc_RNA (1)...(19): siRNA sense strand
cgauugagauaaagaauga

SEQ ID NO: 318017 - RNA, 19 nt, Homo sapiens
  misc_RNA (1)...(19): siRNA sense strand
gaagguggauguguuugaa

SEQ ID NO: 318018 - RNA, 19 nt, Homo sapiens
  misc_RNA (1)...(19): siRNA sense strand
aaacagauaucccaacauc

SEQ ID NO: 318019 - RNA, 19 nt, Homo sapiens
  misc_RNA (1)...(19): siRNA sense strand
caucaacgcauccuucaua

SEQ ID NO: 318020 - RNA, 19 nt, Homo sapiens
  misc_RNA (1)...(19): siRNA sense strand
gaaaaggggucaagaauac

SEQ ID NO: 318021 - RNA, 19 nt, Homo sapiens
  misc_RNA (1)...(19): siRNA sense strand
ggaauucccuguucagacu

SEQ ID NO: 318022 - RNA, 19 nt, Homo sapiens
  misc_RNA (1)...(19): siRNA sense strand
ggauaaaugcuaccaguau

SEQ ID NO: 318023 - RNA, 19 nt, Homo sapiens
  misc_RNA (1)...(19): siRNA sense strand
ggagaaauaacgauugaga

SEQ ID NO: 318024 - RNA, 19 nt, Homo sapiens
  misc_RNA (1)...(19): siRNA sense strand
acaaagugguacaagauuu

SEQ ID NO: 318025 - RNA, 19 nt, Homo sapiens
  misc_RNA (1)...(19): siRNA sense strand
ccaacauccuucccaauga

SEQ ID NO: 318026 - RNA, 19 nt, Homo sapiens
  misc_RNA (1)...(19): siRNA sense strand
gaaagaaaggaaagaggaa

SEQ ID NO: 318027 - RNA, 19 nt, Homo sapiens
  misc_RNA (1)...(19): siRNA sense strand
ggaaacgguuaacgacuuc

SEQ ID NO: 318028 - RNA, 19 nt, Homo sapiens
  misc_RNA (1)...(19): siRNA sense strand
ccucagggcccaagaagua

SEQ ID NO: 318029 - RNA, 19 nt, Homo sapiens
  misc_RNA (1)...(19): siRNA sense strand
cgagugauccuuuccauga

SEQ ID NO: 318030 - RNA, 19 nt, Homo sapiens
  misc_RNA (1)...(19): siRNA sense strand
gcagaagguggauguguuu

SEQ ID NO: 318031 - RNA, 19 nt, Homo sapiens
  misc_RNA (1)...(19): siRNA sense strand
gcuacaaagugguacaaga

SEQ ID NO: 318032 - RNA, 19 nt, Homo sapiens
  misc_RNA (1)...(19): siRNA sense strand
gaggaggaguucaggaaau

SEQ ID NO: 318033 - RNA, 19 nt, Homo sapiens
  misc_RNA (1)...(19): siRNA sense strand
gaggacuucuggaggauga

SEQ ID NO: 318034 - RNA, 19 nt, Homo sapiens
  misc_RNA (1)...(19): siRNA sense strand
ggagagagagcaggauaaa

SEQ ID NO: 318035 - RNA, 19 nt, Homo sapiens
  misc_RNA (1)...(19): siRNA sense strand
ucaggaaauugacaaaugu

SEQ ID NO: 318036 - RNA, 19 nt, Homo sapiens
  misc_RNA (1)...(19): siRNA sense strand
agagagagcaggauaaaug

SEQ ID NO: 318037 - RNA, 19 nt, Homo sapiens
  misc_RNA (1)...(19): siRNA sense strand
acaaauguccggaucauga

SEQ ID NO: 318038 - RNA, 19 nt, Homo sapiens
  misc_RNA (1)...(19): siRNA sense strand
ccauugggaugcugaaguu

SEQ ID NO: 318039 - RNA, 19 nt, Homo sapiens
  misc_RNA (1)...(19): siRNA sense strand
guucaucuaccaagccuua

SEQ ID NO: 318040 - RNA, 19 nt, Homo sapiens
  misc_RNA (1)...(19): siRNA sense strand
gaagaugcccaacggaauc

SEQ ID NO: 318041 - RNA, 19 nt, Homo sapiens
  misc_RNA (1)...(19): siRNA sense strand
ugcaaacccuggaacagua

SEQ ID NO: 318042 - RNA, 19 nt, Homo sapiens
  misc_RNA (1)...(19): siRNA sense strand
ugaaguuccucaagaaagu

SEQ ID NO: 318043 - RNA, 19 nt, Homo sapiens
  misc_RNA (1)...(19): siRNA sense strand
gaaugauacccuuucagaa

SEQ ID NO: 318044 - RNA, 19 nt, Homo sapiens
  misc_RNA (1)...(19): siRNA sense strand
ggauggaauucccuguuca

SEQ ID NO: 318045 - RNA, 19 nt, Homo sapiens
  misc_RNA (1)...(19): siRNA sense strand
gauaugcaguacacguuca

SEQ ID NO: 318046 - RNA, 19 nt, Homo sapiens
  misc_RNA (1)...(19): siRNA sense strand
ccaaacaggaaacgguuaa

SEQ ID NO: 318047 - RNA, 19 nt, Homo sapiens
  misc_RNA (1)...(19): siRNA sense strand
cgacuucagagaccacaua

SEQ ID NO: 318048 - RNA, 19 nt, Homo sapiens
  misc_RNA (1)...(19): siRNA sense strand
ggagcugggcgaacaggua

SEQ ID NO: 318049 - RNA, 19 nt, Homo sapiens
  misc_RNA (1)...(19): siRNA sense strand
gagugauccuuuccaugaa

SEQ ID NO: 318050 - RNA, 19 nt, Homo sapiens
  misc_RNA (1)...(19): siRNA sense strand
gaauuugugucucgaaucc

SEQ ID NO: 318051 - RNA, 19 nt, Homo sapiens
  misc_RNA (1)...(19): siRNA sense strand
ggauguguuugaauuugug

SEQ ID NO: 318052 - RNA, 19 nt, Homo sapiens
  misc_RNA (1)...(19): siRNA sense strand
ggaggaugaucugggaaug

SEQ ID NO: 318053 - RNA, 19 nt, Homo sapiens
  misc_RNA (1)...(19): siRNA sense strand
gaagaaggccagggucauc

SEQ ID NO: 318054 - RNA, 19 nt, Homo sapiens
  misc_RNA (1)...(19): siRNA sense strand
ggaggaggaguucaggaaa

SEQ ID NO: 318055 - RNA, 19 nt, Homo sapiens
  misc_RNA (1)...(19): siRNA sense strand
gaaguuccucaagaaagua

SEQ ID NO: 318056 - RNA, 19 nt, Homo sapiens
  misc_RNA (1)...(19): siRNA sense strand
gaggaguucaggaaauuga

SEQ ID NO: 318057 - RNA, 19 nt, Homo sapiens
  misc_RNA (1)...(19): siRNA sense strand
ggacgggcaccuucauugu

SEQ ID NO: 318058 - RNA, 19 nt, Homo sapiens
  misc_RNA (1)...(19): siRNA sense strand
cuuccuacauagaugguua

SEQ ID NO: 318059 - RNA, 19 nt, Homo sapiens
  misc_RNA (1)...(19): siRNA sense strand
agaaugauacccuuucaga

SEQ ID NO: 318060 - RNA, 19 nt, Homo sapiens
  misc_RNA (1)...(19): siRNA sense strand
caaggcugcuggaccuaug

SEQ ID NO: 318061 - RNA, 19 nt, Homo sapiens
  misc_RNA (1)...(19): siRNA sense strand
agaauggucugggagcaaa

SEQ ID NO: 318062 - RNA, 19 nt, Homo sapiens
  misc_RNA (1)...(19): siRNA sense strand
guggaggacugcgugguuu

SEQ ID NO: 318063 - RNA, 19 nt, Homo sapiens
  misc_RNA (1)...(19): siRNA sense strand
guaugaauucugcuacaaa

SEQ ID NO: 318064 - RNA, 19 nt, Homo sapiens
  misc_RNA (1)...(19): siRNA sense strand
aaacggauaugcaguacac

SEQ ID NO: 318065 - RNA, 19 nt, Homo sapiens
  misc_RNA (1)...(19): siRNA sense strand
guaaucagcgcccucagau

SEQ ID NO: 318066 - RNA, 19 nt, Homo sapiens
  misc_RNA (1)...(19): siRNA sense strand
guggauguguuugaauuug

SEQ ID NO: 318067 - RNA, 19 nt, Homo sapiens
  misc_RNA (1)...(19): siRNA sense strand
ugugaucgaugccaugaug

SEQ ID NO: 318068 - RNA, 19 nt, Homo sapiens
  misc_RNA (1)...(19): siRNA sense strand
caacauccuucccaaugac

SEQ ID NO: 318069 - RNA, 19 nt, Homo sapiens
  misc_RNA (1)...(19): siRNA sense strand
caacgcauccuucauagac

SEQ ID NO: 318070 - RNA, 19 nt, Homo sapiens
  misc_RNA (1)...(19): siRNA sense strand
caaauguccggaucaugaa

SEQ ID NO: 318071 - RNA, 19 nt, Homo sapiens
  misc_RNA (1)...(19): siRNA sense strand
cauagaugguuacaaagag

SEQ ID NO: 318072 - RNA, 19 nt, Homo sapiens
  misc_RNA (1)...(19): siRNA sense strand
aggaaacgguuaacgacuu

SEQ ID NO: 318073 - RNA, 19 nt, Homo sapiens
  misc_RNA (1)...(19): siRNA sense strand
cuacaaagugguacaagau

SEQ ID NO: 318074 - RNA, 19 nt, Homo sapiens
  misc_RNA (1)...(19): siRNA sense strand
ggacacauacaaggaacuu

SEQ ID NO: 318075 - RNA, 19 nt, Homo sapiens
  misc_RNA (1)...(19): siRNA sense strand
ggaggagcagguccgagua

SEQ ID NO: 318076 - RNA, 19 nt, Homo sapiens
  misc_RNA (1)...(19): siRNA sense strand
gagacuuucuggucacucu

SEQ ID NO: 318077 - RNA, 19 nt, Homo sapiens
  misc_RNA (1)...(19): siRNA sense strand
ggaaaucccacacuaucgu

SEQ ID NO: 318078 - RNA, 19 nt, Homo sapiens
  misc_RNA (1)...(19): siRNA sense strand
gaugaucugggaauggaaa

SEQ ID NO: 318079 - RNA, 19 nt, Homo sapiens
  misc_RNA (1)...(19): siRNA sense strand
cgacagaaggacuauuuca

SEQ ID NO: 318080 - RNA, 19 nt, Homo sapiens
  misc_RNA (1)...(19): siRNA sense strand
gcaguacacguucaucuac

SEQ ID NO: 318081 - RNA, 19 nt, Homo sapiens
  misc_RNA (1)...(19): siRNA sense strand
ugaacuggcaaauaaagaa

SEQ ID NO: 318082 - RNA, 19 nt, Homo sapiens
  misc_RNA (1)...(19): siRNA sense strand
uaugaauucugcuacaaag

SEQ ID NO: 318083 - RNA, 19 nt, Homo sapiens
  misc_RNA (1)...(19): siRNA sense strand
gaacuggcaaauaaagaag

SEQ ID NO: 318084 - RNA, 19 nt, Homo sapiens
  misc_RNA (1)...(19): siRNA sense strand
gaacagguacauucauagc

SEQ ID NO: 318085 - RNA, 19 nt, Homo sapiens
  misc_RNA (1)...(19): siRNA sense strand
gagaaauaacgauugagau

SEQ ID NO: 318086 - RNA, 19 nt, Homo sapiens
  misc_RNA (1)...(19): siRNA sense strand
gaauacacagacuacauca

SEQ ID NO: 318087 - RNA, 19 nt, Homo sapiens
  misc_RNA (1)...(19): siRNA sense strand
gcaccuucauugugaucga

SEQ ID NO: 318088 - RNA, 19 nt, Homo sapiens
  misc_RNA (1)...(19): siRNA sense strand
ugaauucugcuacaaagug

SEQ ID NO: 318089 - RNA, 19 nt, Homo sapiens
  misc_RNA (1)...(19): siRNA sense strand
gcaaacccuggaacaguau

SEQ ID NO: 318090 - RNA, 19 nt, Homo sapiens
  misc_RNA (1)...(19): siRNA sense strand
caggagagagagcaggaua

SEQ ID NO: 318091 - RNA, 19 nt, Homo sapiens
  misc_RNA (1)...(19): siRNA sense strand
aggaggaguucaggaaauu

SEQ ID NO: 318092 - RNA, 19 nt, Homo sapiens
  misc_RNA (1)...(19): siRNA sense strand
gcugaaguuccucaagaaa

SEQ ID NO: 318093 - RNA, 19 nt, Homo sapiens
  misc_RNA (1)...(19): siRNA sense strand
ggucaagaauacacagacu

SEQ ID NO: 318094 - RNA, 19 nt, Homo sapiens
  misc_RNA (1)...(19): siRNA sense strand
uucaggaaauugacaaaug

SEQ ID NO: 318095 - RNA, 19 nt, Homo sapiens
  misc_RNA (1)...(19): siRNA sense strand
gcgaccaucgucauguuaa

SEQ ID NO: 318096 - RNA, 19 nt, Homo sapiens
  misc_RNA (1)...(19): siRNA sense strand
gggcucaguuacucaugga

SEQ ID NO: 318097 - RNA, 19 nt, Homo sapiens
  misc_RNA (1)...(19): siRNA sense strand
agaagcaccugcagaccau

SEQ ID NO: 318098 - RNA, 19 nt, Homo sapiens
  misc_RNA (1)...(19): siRNA sense strand
acaaggaacuuuugaacug

SEQ ID NO: 318099 - RNA, 19 nt, Homo sapiens
  misc_RNA (1)...(19): siRNA sense strand
acgggcaccuucauuguga

SEQ ID NO: 318100 - RNA, 19 nt, Homo sapiens
  misc_RNA (1)...(19): siRNA sense strand
acauagaugguuacaaaga

SEQ ID NO: 318101 - RNA, 19 nt, Homo sapiens
  misc_RNA (1)...(19): siRNA sense strand
cuucagagaccacauaugg

SEQ ID NO: 318102 - RNA, 19 nt, Homo sapiens
  misc_RNA (1)...(19): siRNA sense strand
cgagggacuuuuagaugua

SEQ ID NO: 318103 - RNA, 19 nt, Homo sapiens
  misc_RNA (1)...(19): siRNA sense strand
acagaaggacuauuucauc

SEQ ID NO: 318104 - RNA, 19 nt, Homo sapiens
  misc_RNA (1)...(19): siRNA sense strand
ugaaaaggggucaagaaua

SEQ ID NO: 318105 - RNA, 19 nt, Homo sapiens
  misc_RNA (1)...(19): siRNA sense strand
gcccucagaugguucaaac

SEQ ID NO: 318106 - RNA, 19 nt, Homo sapiens
  misc_RNA (1)...(19): siRNA sense strand
gagcagaagguggaugugu

SEQ ID NO: 318107 - RNA, 19 nt, Homo sapiens
  misc_RNA (1)...(19): siRNA sense strand
ugagccaacuggauggaau

SEQ ID NO: 318108 - RNA, 19 nt, Homo sapiens
  misc_RNA (1)...(19): siRNA sense strand
gguuacaaagagaagaaua

SEQ ID NO: 318109 - RNA, 19 nt, Homo sapiens
  misc_RNA (1)...(19): siRNA sense strand
auagaugguuacaaagaga

SEQ ID NO: 318110 - RNA, 19 nt, Homo sapiens
  misc_RNA (1)...(19): siRNA sense strand
gggcgaacagguacauuca

SEQ ID NO: 318111 - RNA, 19 nt, Homo sapiens
  misc_RNA (1)...(19): siRNA sense strand
cuacauagaugguuacaaa

SEQ ID NO: 318112 - RNA, 19 nt, Homo sapiens
  misc_RNA (1)...(19): siRNA sense strand
caucaaugcuuccuacaua

SEQ ID NO: 318113 - RNA, 19 nt, Homo sapiens
  misc_RNA (1)...(19): siRNA sense strand
gcgaacagguacauucaua

SEQ ID NO: 318114 - RNA, 19 nt, Homo sapiens
  misc_RNA (1)...(19): siRNA sense strand
gaauggaaaucccacacua

SEQ ID NO: 318115 - RNA, 19 nt, Homo sapiens
  misc_RNA (1)...(19): siRNA sense strand
gauaaaugcuaccaguauu

SEQ ID NO: 318116 - RNA, 19 nt, Homo sapiens
  misc_RNA (1)...(19): siRNA sense strand
cgauugagauaaagaauga

SEQ ID NO: 318117 - RNA, 19 nt, Homo sapiens
  misc_RNA (1)...(19): siRNA sense strand
gaagguggauguguuugaa

SEQ ID NO: 318118 - RNA, 19 nt, Homo sapiens
  misc_RNA (1)...(19): siRNA sense strand
aaacagauaucccaacauc

SEQ ID NO: 318119 - RNA, 19 nt, Homo sapiens
  misc_RNA (1)...(19): siRNA sense strand
caucaacgcauccuucaua

SEQ ID NO: 318120 - RNA, 19 nt, Homo sapiens
  misc_RNA (1)...(19): siRNA sense strand
gaaaaggggucaagaauac

SEQ ID NO: 318121 - RNA, 19 nt, Homo sapiens
  misc_RNA (1)...(19): siRNA sense strand
ggaauucccuguucagacu

SEQ ID NO: 318122 - RNA, 19 nt, Homo sapiens
  misc_RNA (1)...(19): siRNA sense strand
ggauaaaugcuaccaguau

SEQ ID NO: 318123 - RNA, 19 nt, Homo sapiens
  misc_RNA (1)...(19): siRNA sense strand
ggagaaauaacgauugaga

SEQ ID NO: 318124 - RNA, 19 nt, Homo sapiens
  misc_RNA (1)...(19): siRNA sense strand
acaaagugguacaagauuu

SEQ ID NO: 318125 - RNA, 19 nt, Homo sapiens
  misc_RNA (1)...(19): siRNA sense strand
ccaacauccuucccaauga

SEQ ID NO: 318126 - RNA, 19 nt, Homo sapiens
  misc_RNA (1)...(19): siRNA sense strand
gaaagaaaggaaagaggaa

SEQ ID NO: 318127 - RNA, 19 nt, Homo sapiens
  misc_RNA (1)...(19): siRNA sense strand
ggaaacgguuaacgacuuc

SEQ ID NO: 318128 - RNA, 19 nt, Homo sapiens
  misc_RNA (1)...(19): siRNA sense strand
ccucagggcccaagaagua

SEQ ID NO: 318129 - RNA, 19 nt, Homo sapiens
  misc_RNA (1)...(19): siRNA sense strand
cgagugauccuuuccauga

SEQ ID NO: 318130 - RNA, 19 nt, Homo sapiens
  misc_RNA (1)...(19): siRNA sense strand
gcagaagguggauguguuu

SEQ ID NO: 318131 - RNA, 19 nt, Homo sapiens
  misc_RNA (1)...(19): siRNA sense strand
gcuacaaagugguacaaga

SEQ ID NO: 318132 - RNA, 19 nt, Homo sapiens
  misc_RNA (1)...(19): siRNA sense strand
gaggaggaguucaggaaau

SEQ ID NO: 318133 - RNA, 19 nt, Homo sapiens
  misc_RNA (1)...(19): siRNA sense strand
gaggacuucuggaggauga

SEQ ID NO: 318134 - RNA, 19 nt, Homo sapiens
  misc_RNA (1)...(19): siRNA sense strand
ggagagagagcaggauaaa

SEQ ID NO: 318135 - RNA, 19 nt, Homo sapiens
  misc_RNA (1)...(19): siRNA sense strand
ucaggaaauugacaaaugu

SEQ ID NO: 318136 - RNA, 19 nt, Homo sapiens
  misc_RNA (1)...(19): siRNA sense strand
agagagagcaggauaaaug

SEQ ID NO: 318137 - RNA, 19 nt, Homo sapiens
  misc_RNA (1)...(19): siRNA sense strand
acaaauguccggaucauga

SEQ ID NO: 318138 - RNA, 19 nt, Homo sapiens
  misc_RNA (1)...(19): siRNA sense strand
ccauugggaugcugaaguu

SEQ ID NO: 318139 - RNA, 19 nt, Homo sapiens
  misc_RNA (1)...(19): siRNA sense strand
guucaucuaccaagccuua

SEQ ID NO: 318140 - RNA, 19 nt, Homo sapiens
  misc_RNA (1)...(19): siRNA sense strand
gaagaugcccaacggaauc

SEQ ID NO: 318141 - RNA, 19 nt, Homo sapiens
  misc_RNA (1)...(19): siRNA sense strand
ugcaaacccuggaacagua

SEQ ID NO: 318142 - RNA, 19 nt, Homo sapiens
  misc_RNA (1)...(19): siRNA sense strand
ugaaguuccucaagaaagu

SEQ ID NO: 318143 - RNA, 19 nt, Homo sapiens
  misc_RNA (1)...(19): siRNA sense strand
gaaugauacccuuucagaa

SEQ ID NO: 318144 - RNA, 19 nt, Homo sapiens
  misc_RNA (1)...(19): siRNA sense strand
ggauggaauucccuguuca

SEQ ID NO: 318145 - RNA, 19 nt, Homo sapiens
  misc_RNA (1)...(19): siRNA sense strand
gauaugcaguacacguuca

SEQ ID NO: 318146 - RNA, 19 nt, Homo sapiens
  misc_RNA (1)...(19): siRNA sense strand
ccaaacaggaaacgguuaa

SEQ ID NO: 318147 - RNA, 19 nt, Homo sapiens
  misc_RNA (1)...(19): siRNA sense strand
cgacuucagagaccacaua

SEQ ID NO: 318148 - RNA, 19 nt, Homo sapiens
  misc_RNA (1)...(19): siRNA sense strand
ggagcugggcgaacaggua

SEQ ID NO: 318149 - RNA, 19 nt, Homo sapiens
  misc_RNA (1)...(19): siRNA sense strand
gagugauccuuuccaugaa

SEQ ID NO: 318150 - RNA, 19 nt, Homo sapiens
  misc_RNA (1)...(19): siRNA sense strand
gaauuugugucucgaaucc

SEQ ID NO: 318151 - RNA, 19 nt, Homo sapiens
  misc_RNA (1)...(19): siRNA sense strand
ggauguguuugaauuugug

SEQ ID NO: 318152 - RNA, 19 nt, Homo sapiens
  misc_RNA (1)...(19): siRNA sense strand
ggaggaugaucugggaaug

SEQ ID NO: 318153 - RNA, 19 nt, Homo sapiens
  misc_RNA (1)...(19): siRNA sense strand
gaagaaggccagggucauc

SEQ ID NO: 318154 - RNA, 19 nt, Homo sapiens
  misc_RNA (1)...(19): siRNA sense strand
ggaggaggaguucaggaaa

SEQ ID NO: 318155 - RNA, 19 nt, Homo sapiens
  misc_RNA (1)...(19): siRNA sense strand
gaaguuccucaagaaagua

SEQ ID NO: 318156 - RNA, 19 nt, Homo sapiens
  misc_RNA (1)...(19): siRNA sense strand
gaggaguucaggaaauuga

SEQ ID NO: 318157 - RNA, 19 nt, Homo sapiens
  misc_RNA (1)...(19): siRNA sense strand
ggacgggcaccuucauugu

SEQ ID NO: 318158 - RNA, 19 nt, Homo sapiens
  misc_RNA (1)...(19): siRNA sense strand
cuuccuacauagaugguua

SEQ ID NO: 318159 - RNA, 19 nt, Homo sapiens
  misc_RNA (1)...(19): siRNA sense strand
agaaugauacccuuucaga

SEQ ID NO: 318160 - RNA, 19 nt, Homo sapiens
  misc_RNA (1)...(19): siRNA sense strand
caaggcugcuggaccuaug

SEQ ID NO: 318161 - RNA, 19 nt, Homo sapiens
  misc_RNA (1)...(19): siRNA sense strand
agaauggucugggagcaaa

SEQ ID NO: 318162 - RNA, 19 nt, Homo sapiens
  misc_RNA (1)...(19): siRNA sense strand
guggaggacugcgugguuu

SEQ ID NO: 318163 - RNA, 19 nt, Homo sapiens
  misc_RNA (1)...(19): siRNA sense strand
guaugaauucugcuacaaa

SEQ ID NO: 318164 - RNA, 19 nt, Homo sapiens
  misc_RNA (1)...(19): siRNA sense strand
aaacggauaugcaguacac

SEQ ID NO: 318165 - RNA, 19 nt, Homo sapiens
  misc_RNA (1)...(19): siRNA sense strand
guaaucagcgcccucagau

SEQ ID NO: 318166 - RNA, 19 nt, Homo sapiens
  misc_RNA (1)...(19): siRNA sense strand
guggauguguuugaauuug

SEQ ID NO: 318167 - RNA, 19 nt, Homo sapiens
  misc_RNA (1)...(19): siRNA sense strand
ugugaucgaugccaugaug

SEQ ID NO: 318168 - RNA, 19 nt, Homo sapiens
  misc_RNA (1)...(19): siRNA sense strand
caacauccuucccaaugac

SEQ ID NO: 318169 - RNA, 19 nt, Homo sapiens
  misc_RNA (1)...(19): siRNA sense strand
caacgcauccuucauagac

SEQ ID NO: 318170 - RNA, 19 nt, Homo sapiens
  misc_RNA (1)...(19): siRNA sense strand
caaauguccggaucaugaa

SEQ ID NO: 318171 - RNA, 19 nt, Homo sapiens
  misc_RNA (1)...(19): siRNA sense strand
cauagaugguuacaaagag

SEQ ID NO: 318172 - RNA, 19 nt, Homo sapiens
  misc_RNA (1)...(19): siRNA sense strand
aggaaacgguuaacgacuu

SEQ ID NO: 318173 - RNA, 19 nt, Homo sapiens
  misc_RNA (1)...(19): siRNA sense strand
cuacaaagugguacaagau

SEQ ID NO: 318174 - RNA, 19 nt, Homo sapiens
  misc_RNA (1)...(19): siRNA sense strand
ggacacauacaaggaacuu

SEQ ID NO: 318175 - RNA, 19 nt, Homo sapiens
  misc_RNA (1)...(19): siRNA sense strand
ggaggagcagguccgagua

SEQ ID NO: 318176 - RNA, 19 nt, Homo sapiens
  misc_RNA (1)...(19): siRNA sense strand
gagacuuucuggucacucu

SEQ ID NO: 318177 - RNA, 19 nt, Homo sapiens
  misc_RNA (1)...(19): siRNA sense strand
ggaaaucccacacuaucgu

SEQ ID NO: 318178 - RNA, 19 nt, Homo sapiens
  misc_RNA (1)...(19): siRNA sense strand
gaugaucugggaauggaaa

SEQ ID NO: 318179 - RNA, 19 nt, Homo sapiens
  misc_RNA (1)...(19): siRNA sense strand
cgacagaaggacuauuuca

SEQ ID NO: 318180 - RNA, 19 nt, Homo sapiens
  misc_RNA (1)...(19): siRNA sense strand
gcaguacacguucaucuac

SEQ ID NO: 318181 - RNA, 19 nt, Homo sapiens
  misc_RNA (1)...(19): siRNA sense strand
ugaacuggcaaauaaagaa

SEQ ID NO: 318182 - RNA, 19 nt, Homo sapiens
  misc_RNA (1)...(19): siRNA sense strand
uaugaauucugcuacaaag

SEQ ID NO: 318183 - RNA, 19 nt, Homo sapiens
  misc_RNA (1)...(19): siRNA sense strand
gaacuggcaaauaaagaag

SEQ ID NO: 318184 - RNA, 19 nt, Homo sapiens
  misc_RNA (1)...(19): siRNA sense strand
gaacagguacauucauagc

SEQ ID NO: 318185 - RNA, 19 nt, Homo sapiens
  misc_RNA (1)...(19): siRNA sense strand
gagaaauaacgauugagau

SEQ ID NO: 318186 - RNA, 19 nt, Homo sapiens
  misc_RNA (1)...(19): siRNA sense strand
gaauacacagacuacauca

SEQ ID NO: 318187 - RNA, 19 nt, Homo sapiens
  misc_RNA (1)...(19): siRNA sense strand
gcaccuucauugugaucga

SEQ ID NO: 318188 - RNA, 19 nt, Homo sapiens
  misc_RNA (1)...(19): siRNA sense strand
ugaauucugcuacaaagug

SEQ ID NO: 318189 - RNA, 19 nt, Homo sapiens
  misc_RNA (1)...(19): siRNA sense strand
gcaaacccuggaacaguau

SEQ ID NO: 318190 - RNA, 19 nt, Homo sapiens
  misc_RNA (1)...(19): siRNA sense strand
caggagagagagcaggaua

SEQ ID NO: 318191 - RNA, 19 nt, Homo sapiens
  misc_RNA (1)...(19): siRNA sense strand
aggaggaguucaggaaauu

SEQ ID NO: 318192 - RNA, 19 nt, Homo sapiens
  misc_RNA (1)...(19): siRNA sense strand
gcugaaguuccucaagaaa

SEQ ID NO: 318193 - RNA, 19 nt, Homo sapiens
  misc_RNA (1)...(19): siRNA sense strand
ggucaagaauacacagacu

SEQ ID NO: 318194 - RNA, 19 nt, Homo sapiens
  misc_RNA (1)...(19): siRNA sense strand
uucaggaaauugacaaaug

SEQ ID NO: 318195 - RNA, 19 nt, Homo sapiens
  misc_RNA (1)...(19): siRNA sense strand
gcgaccaucgucauguuaa

SEQ ID NO: 318196 - RNA, 19 nt, Homo sapiens
  misc_RNA (1)...(19): siRNA sense strand
gggcucaguuacucaugga

SEQ ID NO: 318197 - RNA, 19 nt, Homo sapiens
  misc_RNA (1)...(19): siRNA sense strand
agaagcaccugcagaccau

SEQ ID NO: 318198 - RNA, 19 nt, Homo sapiens
  misc_RNA (1)...(19): siRNA sense strand
acaaggaacuuuugaacug

SEQ ID NO: 318199 - RNA, 19 nt, Homo sapiens
  misc_RNA (1)...(19): siRNA sense strand
acgggcaccuucauuguga

SEQ ID NO: 318200 - RNA, 19 nt, Homo sapiens
  misc_RNA (1)...(19): siRNA sense strand
acauagaugguuacaaaga

SEQ ID NO: 318201 - RNA, 19 nt, Homo sapiens
  misc_RNA (1)...(19): siRNA sense strand
cuucagagaccacauaugg

SEQ ID NO: 318202 - RNA, 19 nt, Homo sapiens
  misc_RNA (1)...(19): siRNA sense strand
cgagggacuuuuagaugua

SEQ ID NO: 318203 - RNA, 19 nt, Homo sapiens
  misc_RNA (1)...(19): siRNA sense strand
acagaaggacuauuucauc

SEQ ID NO: 318204 - RNA, 19 nt, Homo sapiens
  misc_RNA (1)...(19): siRNA sense strand
ugaaaaggggucaagaaua

SEQ ID NO: 318205 - RNA, 19 nt, Homo sapiens
  misc_RNA (1)...(19): siRNA sense strand
gcccucagaugguucaaac

SEQ ID NO: 318206 - RNA, 19 nt, Homo sapiens
  misc_RNA (1)...(19): siRNA sense strand
gagcagaagguggaugugu

SEQ ID NO: 318207 - RNA, 19 nt, Homo sapiens
  misc_RNA (1)...(19): siRNA sense strand
ugagccaacuggauggaau

SEQ ID NO: 318208 - RNA, 19 nt, Homo sapiens
  misc_RNA (1)...(19): siRNA sense strand
gguuacaaagagaagaaua

SEQ ID NO: 318209 - RNA, 19 nt, Homo sapiens
  misc_RNA (1)...(19): siRNA sense strand
auagaugguuacaaagaga

SEQ ID NO: 318210 - RNA, 19 nt, Homo sapiens
  misc_RNA (1)...(19): siRNA sense strand
gggcgaacagguacauuca

SEQ ID NO: 318211 - RNA, 19 nt, Homo sapiens
  misc_RNA (1)...(19): siRNA sense strand
gaagaaaggugucaagaac

SEQ ID NO: 318212 - RNA, 19 nt, Homo sapiens
  misc_RNA (1)...(19): siRNA sense strand
caucacgccuagagaauua

SEQ ID NO: 318213 - RNA, 19 nt, Homo sapiens
  misc_RNA (1)...(19): siRNA sense strand
cgacaaagcuugggcugaa

SEQ ID NO: 318214 - RNA, 19 nt, Homo sapiens
  misc_RNA (1)...(19): siRNA sense strand
cagcagaccucgcaggaaa

SEQ ID NO: 318215 - RNA, 19 nt, Homo sapiens
  misc_RNA (1)...(19): siRNA sense strand
gaugagaacuugaugaaaa

SEQ ID NO: 318216 - RNA, 19 nt, Homo sapiens
  misc_RNA (1)...(19): siRNA sense strand
gggagaagguggccucguu

SEQ ID NO: 318217 - RNA, 19 nt, Homo sapiens
  misc_RNA (1)...(19): siRNA sense strand
gguccucucuccuuuggua

SEQ ID NO: 318218 - RNA, 19 nt, Homo sapiens
  misc_RNA (1)...(19): siRNA sense strand
ucacggcgcugaccucaca

SEQ ID NO: 318219 - RNA, 19 nt, Homo sapiens
  misc_RNA (1)...(19): siRNA sense strand
gcaaacaacagaacuacca

SEQ ID NO: 318220 - RNA, 19 nt, Homo sapiens
  misc_RNA (1)...(19): siRNA sense strand
ggaaacaucacgccuagag

SEQ ID NO: 318221 - RNA, 19 nt, Homo sapiens
  misc_RNA (1)...(19): siRNA sense strand
gagcgcagcuuccucuacu

SEQ ID NO: 318222 - RNA, 19 nt, Homo sapiens
  misc_RNA (1)...(19): siRNA sense strand
ugccaaaccuggagaacuu

SEQ ID NO: 318223 - RNA, 19 nt, Homo sapiens
  misc_RNA (1)...(19): siRNA sense strand
aaacaucacgccuagagaa

SEQ ID NO: 318224 - RNA, 19 nt, Homo sapiens
  misc_RNA (1)...(19): siRNA sense strand
gacgacauguccaccaaau

SEQ ID NO: 318225 - RNA, 19 nt, Homo sapiens
  misc_RNA (1)...(19): siRNA sense strand
caacugguccucucuccuu

SEQ ID NO: 318226 - RNA, 19 nt, Homo sapiens
  misc_RNA (1)...(19): siRNA sense strand
gaaacccuccauuaccaaa

SEQ ID NO: 318227 - RNA, 19 nt, Homo sapiens
  misc_RNA (1)...(19): siRNA sense strand
ccucacagguggagaacau

SEQ ID NO: 318228 - RNA, 19 nt, Homo sapiens
  misc_RNA (1)...(19): siRNA sense strand
cccaggaaacccuccauua

SEQ ID NO: 318229 - RNA, 19 nt, Homo sapiens
  misc_RNA (1)...(19): siRNA sense strand
cgacauguccaccaaaucu

SEQ ID NO: 318230 - RNA, 19 nt, Homo sapiens
  misc_RNA (1)...(19): siRNA sense strand
cgucgccgcugaugccaaa

SEQ ID NO: 318231 - RNA, 19 nt, Homo sapiens
  misc_RNA (1)...(19): siRNA sense strand
gaaacaucacgccuagaga

SEQ ID NO: 318232 - RNA, 19 nt, Homo sapiens
  misc_RNA (1)...(19): siRNA sense strand
agaagaaaggugucaagaa

SEQ ID NO: 318233 - RNA, 19 nt, Homo sapiens
  misc_RNA (1)...(19): siRNA sense strand
ucgccaaggacuauuauaa

SEQ ID NO: 318234 - RNA, 19 nt, Homo sapiens
  misc_RNA (1)...(19): siRNA sense strand
ggacagcgccaaccccuuu

SEQ ID NO: 318235 - RNA, 19 nt, Homo sapiens
  misc_RNA (1)...(19): siRNA sense strand
auuauaacccgcagccuua

SEQ ID NO: 318236 - RNA, 19 nt, Homo sapiens
  misc_RNA (1)...(19): siRNA sense strand
ccaggaaacccuccauuac

SEQ ID NO: 318237 - RNA, 19 nt, Homo sapiens
  misc_RNA (1)...(19): siRNA sense strand
ggaaacccuccauuaccaa

SEQ ID NO: 318238 - RNA, 19 nt, Homo sapiens
  misc_RNA (1)...(19): siRNA sense strand
ggccaaguaugaugagaac

SEQ ID NO: 318239 - RNA, 19 nt, Homo sapiens
  misc_RNA (1)...(19): siRNA sense strand
gaccucuccugacgacaug

SEQ ID NO: 318240 - RNA, 19 nt, Homo sapiens
  misc_RNA (1)...(19): siRNA sense strand
ccgcucaccuuccuacagu

SEQ ID NO: 318241 - RNA, 19 nt, Homo sapiens
  misc_RNA (1)...(19): siRNA sense strand
gagaaggccgacaaagcuu

SEQ ID NO: 318242 - RNA, 19 nt, Homo sapiens
  misc_RNA (1)...(19): siRNA sense strand
cgacagcuucuccaaguuc

SEQ ID NO: 318243 - RNA, 19 nt, Homo sapiens
  misc_RNA (1)...(19): siRNA sense strand
gcagaagaaaggugucaag

SEQ ID NO: 318244 - RNA, 19 nt, Homo sapiens
  misc_RNA (1)...(19): siRNA sense strand
cuggagaacuuucccuaca

SEQ ID NO: 318245 - RNA, 19 nt, Homo sapiens
  misc_RNA (1)...(19): siRNA sense strand
gcaaaggggacacccauga

SEQ ID NO: 318246 - RNA, 19 nt, Homo sapiens
  misc_RNA (1)...(19): siRNA sense strand
accaaaaccucgccaagua

SEQ ID NO: 318247 - RNA, 19 nt, Homo sapiens
  misc_RNA (1)...(19): siRNA sense strand
cagcagcuuuugacuguuu

SEQ ID NO: 318248 - RNA, 19 nt, Homo sapiens
  misc_RNA (1)...(19): siRNA sense strand
gaagcugcagaacgacauu

SEQ ID NO: 318249 - RNA, 19 nt, Homo sapiens
  misc_RNA (1)...(19): siRNA sense strand
gaguacuccucccuaugug

SEQ ID NO: 318250 - RNA, 19 nt, Homo sapiens
  misc_RNA (1)...(19): siRNA sense strand
guguccaccuguucuguga

SEQ ID NO: 318251 - RNA, 19 nt, Homo sapiens
  misc_RNA (1)...(19): siRNA sense strand
aggaaacccuccauuacca

SEQ ID NO: 318252 - RNA, 19 nt, Homo sapiens
  misc_RNA (1)...(19): siRNA sense strand
gccaaggacuauuauaacc

SEQ ID NO: 318253 - RNA, 19 nt, Homo sapiens
  misc_RNA (1)...(19): siRNA sense strand
ccaaaucugacgacuccuu

SEQ ID NO: 318254 - RNA, 19 nt, Homo sapiens
  misc_RNA (1)...(19): siRNA sense strand
ugagaaggccgacaaagcu

SEQ ID NO: 318255 - RNA, 19 nt, Homo sapiens
  misc_RNA (1)...(19): siRNA sense strand
ggcagcggguccagaaucu

SEQ ID NO: 318256 - RNA, 19 nt, Homo sapiens
  misc_RNA (1)...(19): siRNA sense strand
cgaagggagcggcuacuca

SEQ ID NO: 318257 - RNA, 19 nt, Homo sapiens
  misc_RNA (1)...(19): siRNA sense strand
cagaagaaaggugucaaga

SEQ ID NO: 318258 - RNA, 19 nt, Homo sapiens
  misc_RNA (1)...(19): siRNA sense strand
cucgacagcuucuccaagu

SEQ ID NO: 318259 - RNA, 19 nt, Homo sapiens
  misc_RNA (1)...(19): siRNA sense strand
gcagcaagccacccuucuc

SEQ ID NO: 318260 - RNA, 19 nt, Homo sapiens
  misc_RNA (1)...(19): siRNA sense strand
gcagaccucgcaggaaaca

SEQ ID NO: 318261 - RNA, 19 nt, Homo sapiens
  misc_RNA (1)...(19): siRNA sense strand
gacaaagcuugggcugaag

SEQ ID NO: 318262 - RNA, 19 nt, Homo sapiens
  misc_RNA (1)...(19): siRNA sense strand
cagcggguccagaaucuuc

SEQ ID NO: 318263 - RNA, 19 nt, Homo sapiens
  misc_RNA (1)...(19): siRNA sense strand
gaaggaggaccuggaagcu

SEQ ID NO: 318264 - RNA, 19 nt, Homo sapiens
  misc_RNA (1)...(19): siRNA sense strand
cugcagggguggccaagua

SEQ ID NO: 318265 - RNA, 19 nt, Homo sapiens
  misc_RNA (1)...(19): siRNA sense strand
cagcagcaagcccuucaga

SEQ ID NO: 318266 - RNA, 19 nt, Homo sapiens
  misc_RNA (1)...(19): siRNA sense strand
gcucaccuuccuacaguuc

SEQ ID NO: 318267 - RNA, 19 nt, Homo sapiens
  misc_RNA (1)...(19): siRNA sense strand
caucacgccuagagaauua

SEQ ID NO: 318268 - RNA, 19 nt, Homo sapiens
  misc_RNA (1)...(19): siRNA sense strand
cagcagaccucgcaggaaa

SEQ ID NO: 318269 - RNA, 19 nt, Homo sapiens
  misc_RNA (1)...(19): siRNA sense strand
gaugagaacuugaugaaaa

SEQ ID NO: 318270 - RNA, 19 nt, Homo sapiens
  misc_RNA (1)...(19): siRNA sense strand
gcaaacaacagaacuacca

SEQ ID NO: 318271 - RNA, 19 nt, Homo sapiens
  misc_RNA (1)...(19): siRNA sense strand
ggaaacaucacgccuagag

SEQ ID NO: 318272 - RNA, 19 nt, Homo sapiens
  misc_RNA (1)...(19): siRNA sense strand
aaacaucacgccuagagaa

SEQ ID NO: 318273 - RNA, 19 nt, Homo sapiens
  misc_RNA (1)...(19): siRNA sense strand
gaaacaucacgccuagaga

SEQ ID NO: 318274 - RNA, 19 nt, Homo sapiens
  misc_RNA (1)...(19): siRNA sense strand
ucgccaaggacuauuauaa

SEQ ID NO: 318275 - RNA, 19 nt, Homo sapiens
  misc_RNA (1)...(19): siRNA sense strand
auuauaacccgcagccuua

SEQ ID NO: 318276 - RNA, 19 nt, Homo sapiens
  misc_RNA (1)...(19): siRNA sense strand
ggccaaguaugaugagaac

SEQ ID NO: 318277 - RNA, 19 nt, Homo sapiens
  misc_RNA (1)...(19): siRNA sense strand
gaagcugcagaacgacauu

SEQ ID NO: 318278 - RNA, 19 nt, Homo sapiens
  misc_RNA (1)...(19): siRNA sense strand
gccaaggacuauuauaacc

SEQ ID NO: 318279 - RNA, 19 nt, Homo sapiens
  misc_RNA (1)...(19): siRNA sense strand
gcagaccucgcaggaaaca

SEQ ID NO: 318280 - RNA, 19 nt, Homo sapiens
  misc_RNA (1)...(19): siRNA sense strand
cugcagggguggccaagua

SEQ ID NO: 318281 - RNA, 19 nt, Homo sapiens
  misc_RNA (1)...(19): siRNA sense strand
gaagaaaggugucaagaac

SEQ ID NO: 318282 - RNA, 19 nt, Homo sapiens
  misc_RNA (1)...(19): siRNA sense strand
caucacgccuagagaauua

SEQ ID NO: 318283 - RNA, 19 nt, Homo sapiens
  misc_RNA (1)...(19): siRNA sense strand
cgacaaagcuugggcugaa

SEQ ID NO: 318284 - RNA, 19 nt, Homo sapiens
  misc_RNA (1)...(19): siRNA sense strand
cagcagaccucgcaggaaa

SEQ ID NO: 318285 - RNA, 19 nt, Homo sapiens
  misc_RNA (1)...(19): siRNA sense strand
gaugagaacuugaugaaaa

SEQ ID NO: 318286 - RNA, 19 nt, Homo sapiens
  misc_RNA (1)...(19): siRNA sense strand
gggagaagguggccucguu

SEQ ID NO: 318287 - RNA, 19 nt, Homo sapiens
  misc_RNA (1)...(19): siRNA sense strand
gguccucucuccuuuggua

SEQ ID NO: 318288 - RNA, 19 nt, Homo sapiens
  misc_RNA (1)...(19): siRNA sense strand
ucacggcgcugaccucaca

SEQ ID NO: 318289 - RNA, 19 nt, Homo sapiens
  misc_RNA (1)...(19): siRNA sense strand
gcaaacaacagaacuacca

SEQ ID NO: 318290 - RNA, 19 nt, Homo sapiens
  misc_RNA (1)...(19): siRNA sense strand
ggaaacaucacgccuagag

SEQ ID NO: 318291 - RNA, 19 nt, Homo sapiens
  misc_RNA (1)...(19): siRNA sense strand
gagcgcagcuuccucuacu

SEQ ID NO: 318292 - RNA, 19 nt, Homo sapiens
  misc_RNA (1)...(19): siRNA sense strand
ugccaaaccuggagaacuu

SEQ ID NO: 318293 - RNA, 19 nt, Homo sapiens
  misc_RNA (1)...(19): siRNA sense strand
aaacaucacgccuagagaa

SEQ ID NO: 318294 - RNA, 19 nt, Homo sapiens
  misc_RNA (1)...(19): siRNA sense strand
gacgacauguccaccaaau

SEQ ID NO: 318295 - RNA, 19 nt, Homo sapiens
  misc_RNA (1)...(19): siRNA sense strand
caacugguccucucuccuu

SEQ ID NO: 318296 - RNA, 19 nt, Homo sapiens
  misc_RNA (1)...(19): siRNA sense strand
gaaacccuccauuaccaaa

SEQ ID NO: 318297 - RNA, 19 nt, Homo sapiens
  misc_RNA (1)...(19): siRNA sense strand
ccucacagguggagaacau

SEQ ID NO: 318298 - RNA, 19 nt, Homo sapiens
  misc_RNA (1)...(19): siRNA sense strand
cccaggaaacccuccauua

SEQ ID NO: 318299 - RNA, 19 nt, Homo sapiens
  misc_RNA (1)...(19): siRNA sense strand
cgacauguccaccaaaucu

SEQ ID NO: 318300 - RNA, 19 nt, Homo sapiens
  misc_RNA (1)...(19): siRNA sense strand
cgucgccgcugaugccaaa

SEQ ID NO: 318301 - RNA, 19 nt, Homo sapiens
  misc_RNA (1)...(19): siRNA sense strand
gaaacaucacgccuagaga

SEQ ID NO: 318302 - RNA, 19 nt, Homo sapiens
  misc_RNA (1)...(19): siRNA sense strand
agaagaaaggugucaagaa

SEQ ID NO: 318303 - RNA, 19 nt, Homo sapiens
  misc_RNA (1)...(19): siRNA sense strand
ucgccaaggacuauuauaa

SEQ ID NO: 318304 - RNA, 19 nt, Homo sapiens
  misc_RNA (1)...(19): siRNA sense strand
ggacagcgccaaccccuuu

SEQ ID NO: 318305 - RNA, 19 nt, Homo sapiens
  misc_RNA (1)...(19): siRNA sense strand
auuauaacccgcagccuua

SEQ ID NO: 318306 - RNA, 19 nt, Homo sapiens
  misc_RNA (1)...(19): siRNA sense strand
ccaggaaacccuccauuac

SEQ ID NO: 318307 - RNA, 19 nt, Homo sapiens
  misc_RNA (1)...(19): siRNA sense strand
ggaaacccuccauuaccaa

SEQ ID NO: 318308 - RNA, 19 nt, Homo sapiens
  misc_RNA (1)...(19): siRNA sense strand
ggccaaguaugaugagaac

SEQ ID NO: 318309 - RNA, 19 nt, Homo sapiens
  misc_RNA (1)...(19): siRNA sense strand
gaccucuccugacgacaug

SEQ ID NO: 318310 - RNA, 19 nt, Homo sapiens
  misc_RNA (1)...(19): siRNA sense strand
ccgcucaccuuccuacagu

SEQ ID NO: 318311 - RNA, 19 nt, Homo sapiens
  misc_RNA (1)...(19): siRNA sense strand
gagaaggccgacaaagcuu

SEQ ID NO: 318312 - RNA, 19 nt, Homo sapiens
  misc_RNA (1)...(19): siRNA sense strand
cgacagcuucuccaaguuc

SEQ ID NO: 318313 - RNA, 19 nt, Homo sapiens
  misc_RNA (1)...(19): siRNA sense strand
gcagaagaaaggugucaag

SEQ ID NO: 318314 - RNA, 19 nt, Homo sapiens
  misc_RNA (1)...(19): siRNA sense strand
cuggagaacuuucccuaca

SEQ ID NO: 318315 - RNA, 19 nt, Homo sapiens
  misc_RNA (1)...(19): siRNA sense strand
gcaaaggggacacccauga

SEQ ID NO: 318316 - RNA, 19 nt, Homo sapiens
  misc_RNA (1)...(19): siRNA sense strand
accaaaaccucgccaagua

SEQ ID NO: 318317 - RNA, 19 nt, Homo sapiens
  misc_RNA (1)...(19): siRNA sense strand
cagcagcuuuugacuguuu

SEQ ID NO: 318318 - RNA, 19 nt, Homo sapiens
  misc_RNA (1)...(19): siRNA sense strand
gaagcugcagaacgacauu

SEQ ID NO: 318319 - RNA, 19 nt, Homo sapiens
  misc_RNA (1)...(19): siRNA sense strand
gaguacuccucccuaugug

SEQ ID NO: 318320 - RNA, 19 nt, Homo sapiens
  misc_RNA (1)...(19): siRNA sense strand
guguccaccuguucuguga

SEQ ID NO: 318321 - RNA, 19 nt, Homo sapiens
  misc_RNA (1)...(19): siRNA sense strand
aggaaacccuccauuacca

SEQ ID NO: 318322 - RNA, 19 nt, Homo sapiens
  misc_RNA (1)...(19): siRNA sense strand
gccaaggacuauuauaacc

SEQ ID NO: 318323 - RNA, 19 nt, Homo sapiens
  misc_RNA (1)...(19): siRNA sense strand
ccaaaucugacgacuccuu

SEQ ID NO: 318324 - RNA, 19 nt, Homo sapiens
  misc_RNA (1)...(19): siRNA sense strand
ugagaaggccgacaaagcu

SEQ ID NO: 318325 - RNA, 19 nt, Homo sapiens
  misc_RNA (1)...(19): siRNA sense strand
ggcagcggguccagaaucu

SEQ ID NO: 318326 - RNA, 19 nt, Homo sapiens
  misc_RNA (1)...(19): siRNA sense strand
cgaagggagcggcuacuca

SEQ ID NO: 318327 - RNA, 19 nt, Homo sapiens
  misc_RNA (1)...(19): siRNA sense strand
cagaagaaaggugucaaga

SEQ ID NO: 318328 - RNA, 19 nt, Homo sapiens
  misc_RNA (1)...(19): siRNA sense strand
cucgacagcuucuccaagu

SEQ ID NO: 318329 - RNA, 19 nt, Homo sapiens
  misc_RNA (1)...(19): siRNA sense strand
gcagcaagccacccuucuc

SEQ ID NO: 318330 - RNA, 19 nt, Homo sapiens
  misc_RNA (1)...(19): siRNA sense strand
gcagaccucgcaggaaaca

SEQ ID NO: 318331 - RNA, 19 nt, Homo sapiens
  misc_RNA (1)...(19): siRNA sense strand
gacaaagcuugggcugaag

SEQ ID NO: 318332 - RNA, 19 nt, Homo sapiens
  misc_RNA (1)...(19): siRNA sense strand
cagcggguccagaaucuuc

SEQ ID NO: 318333 - RNA, 19 nt, Homo sapiens
  misc_RNA (1)...(19): siRNA sense strand
gaaggaggaccuggaagcu

SEQ ID NO: 318334 - RNA, 19 nt, Homo sapiens
  misc_RNA (1)...(19): siRNA sense strand
cugcagggguggccaagua

SEQ ID NO: 318335 - RNA, 19 nt, Homo sapiens
  misc_RNA (1)...(19): siRNA sense strand
cagcagcaagcccuucaga

SEQ ID NO: 318336 - RNA, 19 nt, Homo sapiens
  misc_RNA (1)...(19): siRNA sense strand
gcucaccuuccuacaguuc

SEQ ID NO: 318337 - RNA, 19 nt, Homo sapiens
  misc_RNA (1)...(19): siRNA sense strand
ccacugaccugguaaagaa

SEQ ID NO: 318338 - RNA, 19 nt, Homo sapiens
  misc_RNA (1)...(19): siRNA sense strand
caacuccacugaccuggua

SEQ ID NO: 318339 - RNA, 19 nt, Homo sapiens
  misc_RNA (1)...(19): siRNA sense strand
gcucaaggcuggugaaguc

SEQ ID NO: 318340 - RNA, 19 nt, Homo sapiens
  misc_RNA (1)...(19): siRNA sense strand
aaagugaacucccaggaaa

SEQ ID NO: 318341 - RNA, 19 nt, Homo sapiens
  misc_RNA (1)...(19): siRNA sense strand
aagcugugcuccagaauuu

SEQ ID NO: 318342 - RNA, 19 nt, Homo sapiens
  misc_RNA (1)...(19): siRNA sense strand
gaacugaagcccuuugaca

SEQ ID NO: 318343 - RNA, 19 nt, Homo sapiens
  misc_RNA (1)...(19): siRNA sense strand
gaaagugaacucccaggaa

SEQ ID NO: 318344 - RNA, 19 nt, Homo sapiens
  misc_RNA (1)...(19): siRNA sense strand
ggagcccacuuugccauuu

SEQ ID NO: 318345 - RNA, 19 nt, Homo sapiens
  misc_RNA (1)...(19): siRNA sense strand
gggaagaguccaugggaaa

SEQ ID NO: 318346 - RNA, 19 nt, Homo sapiens
  misc_RNA (1)...(19): siRNA sense strand
ucauuaagaugggaaguga

SEQ ID NO: 318347 - RNA, 19 nt, Homo sapiens
  misc_RNA (1)...(19): siRNA sense strand
ccaguaccauccacaacaa

SEQ ID NO: 318348 - RNA, 19 nt, Homo sapiens
  misc_RNA (1)...(19): siRNA sense strand
ggacagcucaggucacaca

SEQ ID NO: 318349 - RNA, 19 nt, Homo sapiens
  misc_RNA (1)...(19): siRNA sense strand
gaagcugugcuccagaauu

SEQ ID NO: 318350 - RNA, 19 nt, Homo sapiens
  misc_RNA (1)...(19): siRNA sense strand
ccaguggcauggaaauuuc

SEQ ID NO: 318351 - RNA, 19 nt, Homo sapiens
  misc_RNA (1)...(19): siRNA sense strand
gagcccacuuugccauuug

SEQ ID NO: 318352 - RNA, 19 nt, Homo sapiens
  misc_RNA (1)...(19): siRNA sense strand
ccuccugccuuggcuaaua

SEQ ID NO: 318353 - RNA, 19 nt, Homo sapiens
  misc_RNA (1)...(19): siRNA sense strand
cauauucuguggcaagauc

SEQ ID NO: 318354 - RNA, 19 nt, Homo sapiens
  misc_RNA (1)...(19): siRNA sense strand
aaaccggagcauaaaguua

SEQ ID NO: 318355 - RNA, 19 nt, Homo sapiens
  misc_RNA (1)...(19): siRNA sense strand
gaagaguccaugggaaaug

SEQ ID NO: 318356 - RNA, 19 nt, Homo sapiens
  misc_RNA (1)...(19): siRNA sense strand
guaugacaguggugcauca

SEQ ID NO: 318357 - RNA, 19 nt, Homo sapiens
  misc_RNA (1)...(19): siRNA sense strand
ccaaggucauugucucugu

SEQ ID NO: 318358 - RNA, 19 nt, Homo sapiens
  misc_RNA (1)...(19): siRNA sense strand
gccacacggucauuaagau

SEQ ID NO: 318359 - RNA, 19 nt, Homo sapiens
  misc_RNA (1)...(19): siRNA sense strand
aaccggagcauaaaguuaa

SEQ ID NO: 318360 - RNA, 19 nt, Homo sapiens
  misc_RNA (1)...(19): siRNA sense strand
cauugucucugucgaagau

SEQ ID NO: 318361 - RNA, 19 nt, Homo sapiens
  misc_RNA (1)...(19): siRNA sense strand
acacagugauggagaaacu

SEQ ID NO: 318362 - RNA, 19 nt, Homo sapiens
  misc_RNA (1)...(19): siRNA sense strand
cccagaaccucuccaugga

SEQ ID NO: 318363 - RNA, 19 nt, Homo sapiens
  misc_RNA (1)...(19): siRNA sense strand
aaauacacaugcucccaau

SEQ ID NO: 318364 - RNA, 19 nt, Homo sapiens
  misc_RNA (1)...(19): siRNA sense strand
gaacgaggcccuggaucuc

SEQ ID NO: 318365 - RNA, 19 nt, Homo sapiens
  misc_RNA (1)...(19): siRNA sense strand
ugccuuggcuaauaacaga

SEQ ID NO: 318366 - RNA, 19 nt, Homo sapiens
  misc_RNA (1)...(19): siRNA sense strand
ggaagaguccaugggaaau

SEQ ID NO: 318367 - RNA, 19 nt, Homo sapiens
  misc_RNA (1)...(19): siRNA sense strand
caagaucaaaggccucuca

SEQ ID NO: 318368 - RNA, 19 nt, Homo sapiens
  misc_RNA (1)...(19): siRNA sense strand
guggacagcucaggucaca

SEQ ID NO: 318369 - RNA, 19 nt, Homo sapiens
  misc_RNA (1)...(19): siRNA sense strand
auaacagacuggagaaugg

SEQ ID NO: 318370 - RNA, 19 nt, Homo sapiens
  misc_RNA (1)...(19): siRNA sense strand
acacaugcucccaaucaaa

SEQ ID NO: 318371 - RNA, 19 nt, Homo sapiens
  misc_RNA (1)...(19): siRNA sense strand
uggcauggcucagcugauc

SEQ ID NO: 318372 - RNA, 19 nt, Homo sapiens
  misc_RNA (1)...(19): siRNA sense strand
ggagagcccaguggugaug

SEQ ID NO: 318373 - RNA, 19 nt, Homo sapiens
  misc_RNA (1)...(19): siRNA sense strand
ggucauugucucugucgaa

SEQ ID NO: 318374 - RNA, 19 nt, Homo sapiens
  misc_RNA (1)...(19): siRNA sense strand
ccaaguucagcuccaguuu

SEQ ID NO: 318375 - RNA, 19 nt, Homo sapiens
  misc_RNA (1)...(19): siRNA sense strand
cuucagggcuaugacauca

SEQ ID NO: 318376 - RNA, 19 nt, Homo sapiens
  misc_RNA (1)...(19): siRNA sense strand
caaggcuggugaagucagu

SEQ ID NO: 318377 - RNA, 19 nt, Homo sapiens
  misc_RNA (1)...(19): siRNA sense strand
caaguucagcuccaguuuc

SEQ ID NO: 318378 - RNA, 19 nt, Homo sapiens
  misc_RNA (1)...(19): siRNA sense strand
uugaagcugugcuccagaa

SEQ ID NO: 318379 - RNA, 19 nt, Homo sapiens
  misc_RNA (1)...(19): siRNA sense strand
ggaacaucaacuccacuga

SEQ ID NO: 318380 - RNA, 19 nt, Homo sapiens
  misc_RNA (1)...(19): siRNA sense strand
auacacaugcucccaauca

SEQ ID NO: 318381 - RNA, 19 nt, Homo sapiens
  misc_RNA (1)...(19): siRNA sense strand
agugaacucccaggaaaua

SEQ ID NO: 318382 - RNA, 19 nt, Homo sapiens
  misc_RNA (1)...(19): siRNA sense strand
ggagcauaaaguuaaagaa

SEQ ID NO: 318383 - RNA, 19 nt, Homo sapiens
  misc_RNA (1)...(19): siRNA sense strand
aaacuucuccuucaaaaga

SEQ ID NO: 318384 - RNA, 19 nt, Homo sapiens
  misc_RNA (1)...(19): siRNA sense strand
gaagucaaggcugaaaaua

SEQ ID NO: 318385 - RNA, 19 nt, Homo sapiens
  misc_RNA (1)...(19): siRNA sense strand
cuccugccuuggcuaauaa

SEQ ID NO: 318386 - RNA, 19 nt, Homo sapiens
  misc_RNA (1)...(19): siRNA sense strand
aacaacggcuggccaccuu

SEQ ID NO: 318387 - RNA, 19 nt, Homo sapiens
  misc_RNA (1)...(19): siRNA sense strand
ggaagaugcagcccuagac

SEQ ID NO: 318388 - RNA, 19 nt, Homo sapiens
  misc_RNA (1)...(19): siRNA sense strand
gaugcugugccuaccauau

SEQ ID NO: 318389 - RNA, 19 nt, Homo sapiens
  misc_RNA (1)...(19): siRNA sense strand
ggaaaugcagagccccuua

SEQ ID NO: 318390 - RNA, 19 nt, Homo sapiens
  misc_RNA (1)...(19): siRNA sense strand
ccagagcucaauccgaaug

SEQ ID NO: 318391 - RNA, 19 nt, Homo sapiens
  misc_RNA (1)...(19): siRNA sense strand
aagagaagacuccgugcuu

SEQ ID NO: 318392 - RNA, 19 nt, Homo sapiens
  misc_RNA (1)...(19): siRNA sense strand
gcaaugccaccuacgucau

SEQ ID NO: 318393 - RNA, 19 nt, Homo sapiens
  misc_RNA (1)...(19): siRNA sense strand
gaagaugcugugccuacca

SEQ ID NO: 318394 - RNA, 19 nt, Homo sapiens
  misc_RNA (1)...(19): siRNA sense strand
cccaguggcauggaaauuu

SEQ ID NO: 318395 - RNA, 19 nt, Homo sapiens
  misc_RNA (1)...(19): siRNA sense strand
ccacacggucauuaagaug

SEQ ID NO: 318396 - RNA, 19 nt, Homo sapiens
  misc_RNA (1)...(19): siRNA sense strand
cuaauaacagacuggagaa

SEQ ID NO: 318397 - RNA, 19 nt, Homo sapiens
  misc_RNA (1)...(19): siRNA sense strand
caaugccaccuacgucaug

SEQ ID NO: 318398 - RNA, 19 nt, Homo sapiens
  misc_RNA (1)...(19): siRNA sense strand
ucagggcuaugacaucaac

SEQ ID NO: 318399 - RNA, 19 nt, Homo sapiens
  misc_RNA (1)...(19): siRNA sense strand
gcugugcuccagaauuugu

SEQ ID NO: 318400 - RNA, 19 nt, Homo sapiens
  misc_RNA (1)...(19): siRNA sense strand
uacacaugcucccaaucaa

SEQ ID NO: 318401 - RNA, 19 nt, Homo sapiens
  misc_RNA (1)...(19): siRNA sense strand
aauaacagacuggagaaug

SEQ ID NO: 318402 - RNA, 19 nt, Homo sapiens
  misc_RNA (1)...(19): siRNA sense strand
gaugaacugaagcccuuug

SEQ ID NO: 318403 - RNA, 19 nt, Homo sapiens
  misc_RNA (1)...(19): siRNA sense strand
gcauggaaauuucuuuugc

SEQ ID NO: 318404 - RNA, 19 nt, Homo sapiens
  misc_RNA (1)...(19): siRNA sense strand
ggugccguauccuguaauc

SEQ ID NO: 318405 - RNA, 19 nt, Homo sapiens
  misc_RNA (1)...(19): siRNA sense strand
ccugagacacuguaugaca

SEQ ID NO: 318406 - RNA, 19 nt, Homo sapiens
  misc_RNA (1)...(19): siRNA sense strand
caguggugaugcccauuca

SEQ ID NO: 318407 - RNA, 19 nt, Homo sapiens
  misc_RNA (1)...(19): siRNA sense strand
ggaugaaucuugugagaag

SEQ ID NO: 318408 - RNA, 19 nt, Homo sapiens
  misc_RNA (1)...(19): siRNA sense strand
gcucaggauucaagaaaug

SEQ ID NO: 318409 - RNA, 19 nt, Homo sapiens
  misc_RNA (1)...(19): siRNA sense strand
cgaaucagcugcccagaag

SEQ ID NO: 318410 - RNA, 19 nt, Homo sapiens
  misc_RNA (1)...(19): siRNA sense strand
agacagagcugccuaaucc

SEQ ID NO: 318411 - RNA, 19 nt, Homo sapiens
  misc_RNA (1)...(19): siRNA sense strand
gugcaagccugacuucaug

SEQ ID NO: 318412 - RNA, 19 nt, Homo sapiens
  misc_RNA (1)...(19): siRNA sense strand
gcuacuacuuuaaugaaga

SEQ ID NO: 318413 - RNA, 19 nt, Homo sapiens
  misc_RNA (1)...(19): siRNA sense strand
ggaaggaugaaucuuguga

SEQ ID NO: 318414 - RNA, 19 nt, Homo sapiens
  misc_RNA (1)...(19): siRNA sense strand
gaaauggaaggaugaaucu

SEQ ID NO: 318415 - RNA, 19 nt, Homo sapiens
  misc_RNA (1)...(19): siRNA sense strand
gaaguucuccuuuguuugc

SEQ ID NO: 318416 - RNA, 19 nt, Homo sapiens
  misc_RNA (1)...(19): siRNA sense strand
gaccaacucguucuucaug

SEQ ID NO: 318417 - RNA, 19 nt, Homo sapiens
  misc_RNA (1)...(19): siRNA sense strand
gcacugaugacagcaaugu

SEQ ID NO: 318418 - RNA, 19 nt, Homo sapiens
  misc_RNA (1)...(19): siRNA sense strand
gagaguagcacugaugaca

SEQ ID NO: 318419 - RNA, 19 nt, Homo sapiens
  misc_RNA (1)...(19): siRNA sense strand
gugggucccuggucuccua

SEQ ID NO: 318420 - RNA, 19 nt, Homo sapiens
  misc_RNA (1)...(19): siRNA sense strand
aaggaugaaucuugugaga

SEQ ID NO: 318421 - RNA, 19 nt, Homo sapiens
  misc_RNA (1)...(19): siRNA sense strand
cagaccaacucguucuuca

SEQ ID NO: 318422 - RNA, 19 nt, Homo sapiens
  misc_RNA (1)...(19): siRNA sense strand
gcugaucuccucccugaug

SEQ ID NO: 318423 - RNA, 19 nt, Homo sapiens
  misc_RNA (1)...(19): siRNA sense strand
ccugagaccuggguugaug

SEQ ID NO: 318424 - RNA, 19 nt, Homo sapiens
  misc_RNA (1)...(19): siRNA sense strand
gaccuggguugaugcagau

SEQ ID NO: 318425 - RNA, 19 nt, Homo sapiens
  misc_RNA (1)...(19): siRNA sense strand
uucguggccucacugauua

SEQ ID NO: 318426 - RNA, 19 nt, Homo sapiens
  misc_RNA (1)...(19): siRNA sense strand
ucaagaaauggaaggauga

SEQ ID NO: 318427 - RNA, 19 nt, Homo sapiens
  misc_RNA (1)...(19): siRNA sense strand
uggccucacugauuaagga

SEQ ID NO: 318428 - RNA, 19 nt, Homo sapiens
  misc_RNA (1)...(19): siRNA sense strand
cuucguggccucacugauu

SEQ ID NO: 318429 - RNA, 19 nt, Homo sapiens
  misc_RNA (1)...(19): siRNA sense strand
agaaauggaaggaugaauc

SEQ ID NO: 318430 - RNA, 19 nt, Homo sapiens
  misc_RNA (1)...(19): siRNA sense strand
cuacugcuacuacuuuaau

SEQ ID NO: 318431 - RNA, 19 nt, Homo sapiens
  misc_RNA (1)...(19): siRNA sense strand
caagaaauggaaggaugaa

SEQ ID NO: 318432 - RNA, 19 nt, Homo sapiens
  misc_RNA (1)...(19): siRNA sense strand
aauggaaggaugaaucuug

SEQ ID NO: 318433 - RNA, 19 nt, Homo sapiens
  misc_RNA (1)...(19): siRNA sense strand
uuaaggagaguagcacuga

SEQ ID NO: 318434 - RNA, 19 nt, Homo sapiens
  misc_RNA (1)...(19): siRNA sense strand
uagcacugaugacagcaau

SEQ ID NO: 318435 - RNA, 19 nt, Homo sapiens
  misc_RNA (1)...(19): siRNA sense strand
gaucuccucccugauguuc

SEQ ID NO: 318436 - RNA, 19 nt, Homo sapiens
  misc_RNA (1)...(19): siRNA sense strand
gccaggagucccagacaga

SEQ ID NO: 318437 - RNA, 19 nt, Homo sapiens
  misc_RNA (1)...(19): siRNA sense strand
ugaugcagaucucuauugc

SEQ ID NO: 318438 - RNA, 19 nt, Homo sapiens
  misc_RNA (1)...(19): siRNA sense strand
gaucucuauugccagaaca

SEQ ID NO: 318439 - RNA, 19 nt, Homo sapiens
  misc_RNA (1)...(19): siRNA sense strand
uaaggagaguagcacugau

SEQ ID NO: 318440 - RNA, 19 nt, Homo sapiens
  misc_RNA (1)...(19): siRNA sense strand
ggucccuggucuccuacaa

SEQ ID NO: 318441 - RNA, 19 nt, Homo sapiens
  misc_RNA (1)...(19): siRNA sense strand
uccuacugcuacuacuuua

SEQ ID NO: 318442 - RNA, 19 nt, Homo sapiens
  misc_RNA (1)...(19): siRNA sense strand
gcucagaccaacucguucu

SEQ ID NO: 318443 - RNA, 19 nt, Homo sapiens
  misc_RNA (1)...(19): siRNA sense strand
ccgaaucagcugcccagaa

SEQ ID NO: 318444 - RNA, 19 nt, Homo sapiens
  misc_RNA (1)...(19): siRNA sense strand
gguugaugcagaucucuau

SEQ ID NO: 318445 - RNA, 19 nt, Homo sapiens
  misc_RNA (1)...(19): siRNA sense strand
ccaacucguucuucaugcu

SEQ ID NO: 318446 - RNA, 19 nt, Homo sapiens
  misc_RNA (1)...(19): siRNA sense strand
ucuauugccagaacaugaa

SEQ ID NO: 318447 - RNA, 19 nt, Homo sapiens
  misc_RNA (1)...(19): siRNA sense strand
gaucacaccuccagauuug

SEQ ID NO: 318448 - RNA, 19 nt, Homo sapiens
  misc_RNA (1)...(19): siRNA sense strand
gagcagggcugaaagaauc

SEQ ID NO: 318449 - RNA, 19 nt, Homo sapiens
  misc_RNA (1)...(19): siRNA sense strand
uaagagaggcucaguuaua

SEQ ID NO: 318450 - RNA, 19 nt, Homo sapiens
  misc_RNA (1)...(19): siRNA sense strand
gcugaacucuugagccuaa

SEQ ID NO: 318451 - RNA, 19 nt, Homo sapiens
  misc_RNA (1)...(19): siRNA sense strand
gaagauuguuugggaguuu

SEQ ID NO: 318452 - RNA, 19 nt, Homo sapiens
  misc_RNA (1)...(19): siRNA sense strand
gcagcuguaucacuccuua

SEQ ID NO: 318453 - RNA, 19 nt, Homo sapiens
  misc_RNA (1)...(19): siRNA sense strand
agaaccagcucgaccauuu

SEQ ID NO: 318454 - RNA, 19 nt, Homo sapiens
  misc_RNA (1)...(19): siRNA sense strand
cuaaagcaguucacagaaa

SEQ ID NO: 318455 - RNA, 19 nt, Homo sapiens
  misc_RNA (1)...(19): siRNA sense strand
gaaccagcucgaccauuua

SEQ ID NO: 318456 - RNA, 19 nt, Homo sapiens
  misc_RNA (1)...(19): siRNA sense strand
ggcacgagcugaacucuug

SEQ ID NO: 318457 - RNA, 19 nt, Homo sapiens
  misc_RNA (1)...(19): siRNA sense strand
ggagaaaauccaagaauua

SEQ ID NO: 318458 - RNA, 19 nt, Homo sapiens
  misc_RNA (1)...(19): siRNA sense strand
gcagucagauauggagaaa

SEQ ID NO: 318459 - RNA, 19 nt, Homo sapiens
  misc_RNA (1)...(19): siRNA sense strand
ggcaagugcgguacaguua

SEQ ID NO: 318460 - RNA, 19 nt, Homo sapiens
  misc_RNA (1)...(19): siRNA sense strand
ccaguucucuugcaacauc

SEQ ID NO: 318461 - RNA, 19 nt, Homo sapiens
  misc_RNA (1)...(19): siRNA sense strand
gauccucucugauaaucug

SEQ ID NO: 318462 - RNA, 19 nt, Homo sapiens
  misc_RNA (1)...(19): siRNA sense strand
uaaaggagcaugaguaucg

SEQ ID NO: 318463 - RNA, 19 nt, Homo sapiens
  misc_RNA (1)...(19): siRNA sense strand
ggaucacaccuccagauuu

SEQ ID NO: 318464 - RNA, 19 nt, Homo sapiens
  misc_RNA (1)...(19): siRNA sense strand
ucaaggagcaaauccagaa

SEQ ID NO: 318465 - RNA, 19 nt, Homo sapiens
  misc_RNA (1)...(19): siRNA sense strand
auuaagagaggcucaguua

SEQ ID NO: 318466 - RNA, 19 nt, Homo sapiens
  misc_RNA (1)...(19): siRNA sense strand
gagcuagacuuggccaucu

SEQ ID NO: 318467 - RNA, 19 nt, Homo sapiens
  misc_RNA (1)...(19): siRNA sense strand
uaaagcaguucacagaaaa

SEQ ID NO: 318468 - RNA, 19 nt, Homo sapiens
  misc_RNA (1)...(19): siRNA sense strand
ucgcucagcuagaagagaa

SEQ ID NO: 318469 - RNA, 19 nt, Homo sapiens
  misc_RNA (1)...(19): siRNA sense strand
ggaacaggcacgagcugaa

SEQ ID NO: 318470 - RNA, 19 nt, Homo sapiens
  misc_RNA (1)...(19): siRNA sense strand
caucuacaauagcaucaau

SEQ ID NO: 318471 - RNA, 19 nt, Homo sapiens
  misc_RNA (1)...(19): siRNA sense strand
ugucacaccuucacuuucu

SEQ ID NO: 318472 - RNA, 19 nt, Homo sapiens
  misc_RNA (1)...(19): siRNA sense strand
gagagggagaagauuguuu

SEQ ID NO: 318473 - RNA, 19 nt, Homo sapiens
  misc_RNA (1)...(19): siRNA sense strand
cggagagucuaaagcaguu

SEQ ID NO: 318474 - RNA, 19 nt, Homo sapiens
  misc_RNA (1)...(19): siRNA sense strand
aagagaggcucaguuauac

SEQ ID NO: 318475 - RNA, 19 nt, Homo sapiens
  misc_RNA (1)...(19): siRNA sense strand
gccugauccucucugauaa

SEQ ID NO: 318476 - RNA, 19 nt, Homo sapiens
  misc_RNA (1)...(19): siRNA sense strand
gacuuggccaucuacaaua

SEQ ID NO: 318477 - RNA, 19 nt, Homo sapiens
  misc_RNA (1)...(19): siRNA sense strand
agccugauccucucugaua

SEQ ID NO: 318478 - RNA, 19 nt, Homo sapiens
  misc_RNA (1)...(19): siRNA sense strand
agacuuggccaucuacaau

SEQ ID NO: 318479 - RNA, 19 nt, Homo sapiens
  misc_RNA (1)...(19): siRNA sense strand
cgacugcggccauaacauc

SEQ ID NO: 318480 - RNA, 19 nt, Homo sapiens
  misc_RNA (1)...(19): siRNA sense strand
ugacggagagucuaaagca

SEQ ID NO: 318481 - RNA, 19 nt, Homo sapiens
  misc_RNA (1)...(19): siRNA sense strand
ucacccaguucucuugcaa

SEQ ID NO: 318482 - RNA, 19 nt, Homo sapiens
  misc_RNA (1)...(19): siRNA sense strand
gaacaggcacgagcugaac

SEQ ID NO: 318483 - RNA, 19 nt, Homo sapiens
  misc_RNA (1)...(19): siRNA sense strand
cuccagauuugcaagagaa

SEQ ID NO: 318484 - RNA, 19 nt, Homo sapiens
  misc_RNA (1)...(19): siRNA sense strand
cagcuccucugaucaucug

SEQ ID NO: 318485 - RNA, 19 nt, Homo sapiens
  misc_RNA (1)...(19): siRNA sense strand
gagaggcucaguuauacuc

SEQ ID NO: 318486 - RNA, 19 nt, Homo sapiens
  misc_RNA (1)...(19): siRNA sense strand
agagggagaagauuguuug

SEQ ID NO: 318487 - RNA, 19 nt, Homo sapiens
  misc_RNA (1)...(19): siRNA sense strand
ggagagggagaagauuguu

SEQ ID NO: 318488 - RNA, 19 nt, Homo sapiens
  misc_RNA (1)...(19): siRNA sense strand
gucuaaagcaguucacaga

SEQ ID NO: 318489 - RNA, 19 nt, Homo sapiens
  misc_RNA (1)...(19): siRNA sense strand
ccagccugauccucucuga

SEQ ID NO: 318490 - RNA, 19 nt, Homo sapiens
  misc_RNA (1)...(19): siRNA sense strand
cuuaaaggagcaugaguau

SEQ ID NO: 318491 - RNA, 19 nt, Homo sapiens
  misc_RNA (1)...(19): siRNA sense strand
caccuucacuuucucucau

SEQ ID NO: 318492 - RNA, 19 nt, Homo sapiens
  misc_RNA (1)...(19): siRNA sense strand
aagugcagcuccucugauc

SEQ ID NO: 318493 - RNA, 19 nt, Homo sapiens
  misc_RNA (1)...(19): siRNA sense strand
agucagauauggagaaaau

SEQ ID NO: 318494 - RNA, 19 nt, Homo sapiens
  misc_RNA (1)...(19): siRNA sense strand
gcaagugcgguacaguuac

SEQ ID NO: 318495 - RNA, 19 nt, Homo sapiens
  misc_RNA (1)...(19): siRNA sense strand
cugauaaucugcggcaagu

SEQ ID NO: 318496 - RNA, 19 nt, Homo sapiens
  misc_RNA (1)...(19): siRNA sense strand
ccgugugccugcaguacuu

SEQ ID NO: 318497 - RNA, 19 nt, Homo sapiens
  misc_RNA (1)...(19): siRNA sense strand
gcacgagcugaacucuuga

SEQ ID NO: 318498 - RNA, 19 nt, Homo sapiens
  misc_RNA (1)...(19): siRNA sense strand
ggacauuggggacacauug

SEQ ID NO: 318499 - RNA, 19 nt, Homo sapiens
  misc_RNA (1)...(19): siRNA sense strand
agaagauuguuugggaguu

SEQ ID NO: 318500 - RNA, 19 nt, Homo sapiens
  misc_RNA (1)...(19): siRNA sense strand
ggaguuugagcagcuguau

SEQ ID NO: 318501 - RNA, 19 nt, Homo sapiens
  misc_RNA (1)...(19): siRNA sense strand
gaauuaagagaggcucagu

SEQ ID NO: 318502 - RNA, 19 nt, Homo sapiens
  misc_RNA (1)...(19): siRNA sense strand
aaccagcucgaccauuuaa

SEQ ID NO: 318503 - RNA, 19 nt, Homo sapiens
  misc_RNA (1)...(19): siRNA sense strand
gugcagcuccucugaucau

SEQ ID NO: 318504 - RNA, 19 nt, Homo sapiens
  misc_RNA (1)...(19): siRNA sense strand
cggcaagugcgguacaguu

SEQ ID NO: 318505 - RNA, 19 nt, Homo sapiens
  misc_RNA (1)...(19): siRNA sense strand
gcacggcagagacuaacgu

SEQ ID NO: 318506 - RNA, 19 nt, Homo sapiens
  misc_RNA (1)...(19): siRNA sense strand
guacaguuaccuccaacag

SEQ ID NO: 318507 - RNA, 19 nt, Homo sapiens
  misc_RNA (1)...(19): siRNA sense strand
ccuccagauuugcaagaga

SEQ ID NO: 318508 - RNA, 19 nt, Homo sapiens
  misc_RNA (1)...(19): siRNA sense strand
acauugagcagggcugaaa

SEQ ID NO: 318509 - RNA, 19 nt, Homo sapiens
  misc_RNA (1)...(19): siRNA sense strand
gaucacaccuccagauuug

SEQ ID NO: 318510 - RNA, 19 nt, Homo sapiens
  misc_RNA (1)...(19): siRNA sense strand
gagcagggcugaaagaauc

SEQ ID NO: 318511 - RNA, 19 nt, Homo sapiens
  misc_RNA (1)...(19): siRNA sense strand
uaagagaggcucaguuaua

SEQ ID NO: 318512 - RNA, 19 nt, Homo sapiens
  misc_RNA (1)...(19): siRNA sense strand
gcugaacucuugagccuaa

SEQ ID NO: 318513 - RNA, 19 nt, Homo sapiens
  misc_RNA (1)...(19): siRNA sense strand
gaagauuguuugggaguuu

SEQ ID NO: 318514 - RNA, 19 nt, Homo sapiens
  misc_RNA (1)...(19): siRNA sense strand
gcagcuguaucacuccuua

SEQ ID NO: 318515 - RNA, 19 nt, Homo sapiens
  misc_RNA (1)...(19): siRNA sense strand
agaaccagcucgaccauuu

SEQ ID NO: 318516 - RNA, 19 nt, Homo sapiens
  misc_RNA (1)...(19): siRNA sense strand
cuaaagcaguucacagaaa

SEQ ID NO: 318517 - RNA, 19 nt, Homo sapiens
  misc_RNA (1)...(19): siRNA sense strand
gaaccagcucgaccauuua

SEQ ID NO: 318518 - RNA, 19 nt, Homo sapiens
  misc_RNA (1)...(19): siRNA sense strand
ggcacgagcugaacucuug

SEQ ID NO: 318519 - RNA, 19 nt, Homo sapiens
  misc_RNA (1)...(19): siRNA sense strand
ggagaaaauccaagaauua

SEQ ID NO: 318520 - RNA, 19 nt, Homo sapiens
  misc_RNA (1)...(19): siRNA sense strand
gcagucagauauggagaaa

SEQ ID NO: 318521 - RNA, 19 nt, Homo sapiens
  misc_RNA (1)...(19): siRNA sense strand
ggcaagugcgguacaguua

SEQ ID NO: 318522 - RNA, 19 nt, Homo sapiens
  misc_RNA (1)...(19): siRNA sense strand
ccaguucucuugcaacauc

SEQ ID NO: 318523 - RNA, 19 nt, Homo sapiens
  misc_RNA (1)...(19): siRNA sense strand
gauccucucugauaaucug

SEQ ID NO: 318524 - RNA, 19 nt, Homo sapiens
  misc_RNA (1)...(19): siRNA sense strand
uaaaggagcaugaguaucg

SEQ ID NO: 318525 - RNA, 19 nt, Homo sapiens
  misc_RNA (1)...(19): siRNA sense strand
ggaucacaccuccagauuu

SEQ ID NO: 318526 - RNA, 19 nt, Homo sapiens
  misc_RNA (1)...(19): siRNA sense strand
ucaaggagcaaauccagaa

SEQ ID NO: 318527 - RNA, 19 nt, Homo sapiens
  misc_RNA (1)...(19): siRNA sense strand
auuaagagaggcucaguua

SEQ ID NO: 318528 - RNA, 19 nt, Homo sapiens
  misc_RNA (1)...(19): siRNA sense strand
gagcuagacuuggccaucu

SEQ ID NO: 318529 - RNA, 19 nt, Homo sapiens
  misc_RNA (1)...(19): siRNA sense strand
uaaagcaguucacagaaaa

SEQ ID NO: 318530 - RNA, 19 nt, Homo sapiens
  misc_RNA (1)...(19): siRNA sense strand
ucgcucagcuagaagagaa

SEQ ID NO: 318531 - RNA, 19 nt, Homo sapiens
  misc_RNA (1)...(19): siRNA sense strand
ggaacaggcacgagcugaa

SEQ ID NO: 318532 - RNA, 19 nt, Homo sapiens
  misc_RNA (1)...(19): siRNA sense strand
caucuacaauagcaucaau

SEQ ID NO: 318533 - RNA, 19 nt, Homo sapiens
  misc_RNA (1)...(19): siRNA sense strand
gagagggagaagauuguuu

SEQ ID NO: 318534 - RNA, 19 nt, Homo sapiens
  misc_RNA (1)...(19): siRNA sense strand
cggagagucuaaagcaguu

SEQ ID NO: 318535 - RNA, 19 nt, Homo sapiens
  misc_RNA (1)...(19): siRNA sense strand
aagagaggcucaguuauac

SEQ ID NO: 318536 - RNA, 19 nt, Homo sapiens
  misc_RNA (1)...(19): siRNA sense strand
gccugauccucucugauaa

SEQ ID NO: 318537 - RNA, 19 nt, Homo sapiens
  misc_RNA (1)...(19): siRNA sense strand
gacuuggccaucuacaaua

SEQ ID NO: 318538 - RNA, 19 nt, Homo sapiens
  misc_RNA (1)...(19): siRNA sense strand
agccugauccucucugaua

SEQ ID NO: 318539 - RNA, 19 nt, Homo sapiens
  misc_RNA (1)...(19): siRNA sense strand
agacuuggccaucuacaau

SEQ ID NO: 318540 - RNA, 19 nt, Homo sapiens
  misc_RNA (1)...(19): siRNA sense strand
cgacugcggccauaacauc

SEQ ID NO: 318541 - RNA, 19 nt, Homo sapiens
  misc_RNA (1)...(19): siRNA sense strand
ugacggagagucuaaagca

SEQ ID NO: 318542 - RNA, 19 nt, Homo sapiens
  misc_RNA (1)...(19): siRNA sense strand
ucacccaguucucuugcaa

SEQ ID NO: 318543 - RNA, 19 nt, Homo sapiens
  misc_RNA (1)...(19): siRNA sense strand
gaacaggcacgagcugaac

SEQ ID NO: 318544 - RNA, 19 nt, Homo sapiens
  misc_RNA (1)...(19): siRNA sense strand
cuccagauuugcaagagaa

SEQ ID NO: 318545 - RNA, 19 nt, Homo sapiens
  misc_RNA (1)...(19): siRNA sense strand
gagaggcucaguuauacuc

SEQ ID NO: 318546 - RNA, 19 nt, Homo sapiens
  misc_RNA (1)...(19): siRNA sense strand
agagggagaagauuguuug

SEQ ID NO: 318547 - RNA, 19 nt, Homo sapiens
  misc_RNA (1)...(19): siRNA sense strand
ggagagggagaagauuguu

SEQ ID NO: 318548 - RNA, 19 nt, Homo sapiens
  misc_RNA (1)...(19): siRNA sense strand
gucuaaagcaguucacaga

SEQ ID NO: 318549 - RNA, 19 nt, Homo sapiens
  misc_RNA (1)...(19): siRNA sense strand
ccagccugauccucucuga

SEQ ID NO: 318550 - RNA, 19 nt, Homo sapiens
  misc_RNA (1)...(19): siRNA sense strand
cuuaaaggagcaugaguau

SEQ ID NO: 318551 - RNA, 19 nt, Homo sapiens
  misc_RNA (1)...(19): siRNA sense strand
agucagauauggagaaaau

SEQ ID NO: 318552 - RNA, 19 nt, Homo sapiens
  misc_RNA (1)...(19): siRNA sense strand
gcaagugcgguacaguuac

SEQ ID NO: 318553 - RNA, 19 nt, Homo sapiens
  misc_RNA (1)...(19): siRNA sense strand
cugauaaucugcggcaagu

SEQ ID NO: 318554 - RNA, 19 nt, Homo sapiens
  misc_RNA (1)...(19): siRNA sense strand
ccgugugccugcaguacuu

SEQ ID NO: 318555 - RNA, 19 nt, Homo sapiens
  misc_RNA (1)...(19): siRNA sense strand
gcacgagcugaacucuuga

SEQ ID NO: 318556 - RNA, 19 nt, Homo sapiens
  misc_RNA (1)...(19): siRNA sense strand
ggacauuggggacacauug

SEQ ID NO: 318557 - RNA, 19 nt, Homo sapiens
  misc_RNA (1)...(19): siRNA sense strand
agaagauuguuugggaguu

SEQ ID NO: 318558 - RNA, 19 nt, Homo sapiens
  misc_RNA (1)...(19): siRNA sense strand
ggaguuugagcagcuguau

SEQ ID NO: 318559 - RNA, 19 nt, Homo sapiens
  misc_RNA (1)...(19): siRNA sense strand
gaauuaagagaggcucagu

SEQ ID NO: 318560 - RNA, 19 nt, Homo sapiens
  misc_RNA (1)...(19): siRNA sense strand
aaccagcucgaccauuuaa

SEQ ID NO: 318561 - RNA, 19 nt, Homo sapiens
  misc_RNA (1)...(19): siRNA sense strand
cggcaagugcgguacaguu

SEQ ID NO: 318562 - RNA, 19 nt, Homo sapiens
  misc_RNA (1)...(19): siRNA sense strand
gcacggcagagacuaacgu

SEQ ID NO: 318563 - RNA, 19 nt, Homo sapiens
  misc_RNA (1)...(19): siRNA sense strand
guacaguuaccuccaacag

SEQ ID NO: 318564 - RNA, 19 nt, Homo sapiens
  misc_RNA (1)...(19): siRNA sense strand
ccuccagauuugcaagaga

SEQ ID NO: 318565 - RNA, 19 nt, Homo sapiens
  misc_RNA (1)...(19): siRNA sense strand
acauugagcagggcugaaa

SEQ ID NO: 318566 - RNA, 19 nt, Homo sapiens
  misc_RNA (1)...(19): siRNA sense strand
gcacauggauggaggacaa

SEQ ID NO: 318567 - RNA, 19 nt, Homo sapiens
  misc_RNA (1)...(19): siRNA sense strand
gcaaagaccgcucagauga

SEQ ID NO: 318568 - RNA, 19 nt, Homo sapiens
  misc_RNA (1)...(19): siRNA sense strand
gacaaaggaucacaucaug

SEQ ID NO: 318569 - RNA, 19 nt, Homo sapiens
  misc_RNA (1)...(19): siRNA sense strand
caaaggcuaugcguacgua

SEQ ID NO: 318570 - RNA, 19 nt, Homo sapiens
  misc_RNA (1)...(19): siRNA sense strand
ggauuuaucaggagugaaa

SEQ ID NO: 318571 - RNA, 19 nt, Homo sapiens
  misc_RNA (1)...(19): siRNA sense strand
caaaggaucacaucaugga

SEQ ID NO: 318572 - RNA, 19 nt, Homo sapiens
  misc_RNA (1)...(19): siRNA sense strand
guacguagaguuugagaau

SEQ ID NO: 318573 - RNA, 19 nt, Homo sapiens
  misc_RNA (1)...(19): siRNA sense strand
gaucacaucauggagauau

SEQ ID NO: 318574 - RNA, 19 nt, Homo sapiens
  misc_RNA (1)...(19): siRNA sense strand
aaggaucgcucaaaagaua

SEQ ID NO: 318575 - RNA, 19 nt, Homo sapiens
  misc_RNA (1)...(19): siRNA sense strand
ggagauauuuuccaccuau

SEQ ID NO: 318576 - RNA, 19 nt, Homo sapiens
  misc_RNA (1)...(19): siRNA sense strand
agaaggcgcugaagcacau

SEQ ID NO: 318577 - RNA, 19 nt, Homo sapiens
  misc_RNA (1)...(19): siRNA sense strand
ggaaugugacaaaggauca

SEQ ID NO: 318578 - RNA, 19 nt, Homo sapiens
  misc_RNA (1)...(19): siRNA sense strand
ccaccaaggagucgaguga

SEQ ID NO: 318579 - RNA, 19 nt, Homo sapiens
  misc_RNA (1)...(19): siRNA sense strand
cagaugagaaguccaagga

SEQ ID NO: 318580 - RNA, 19 nt, Homo sapiens
  misc_RNA (1)...(19): siRNA sense strand
ccaaauccaaaccaccuaa

SEQ ID NO: 318581 - RNA, 19 nt, Homo sapiens
  misc_RNA (1)...(19): siRNA sense strand
gcauccagccgcucaggaa

SEQ ID NO: 318582 - RNA, 19 nt, Homo sapiens
  misc_RNA (1)...(19): siRNA sense strand
gauggaggacaaauugaug

SEQ ID NO: 318583 - RNA, 19 nt, Homo sapiens
  misc_RNA (1)...(19): siRNA sense strand
ggauggaggacaaauugau

SEQ ID NO: 318584 - RNA, 19 nt, Homo sapiens
  misc_RNA (1)...(19): siRNA sense strand
ugacaaaggaucacaucau

SEQ ID NO: 318585 - RNA, 19 nt, Homo sapiens
  misc_RNA (1)...(19): siRNA sense strand
ucacaucauggagauauuu

SEQ ID NO: 318586 - RNA, 19 nt, Homo sapiens
  misc_RNA (1)...(19): siRNA sense strand
caaauccaaaccaccuaaa

SEQ ID NO: 318587 - RNA, 19 nt, Homo sapiens
  misc_RNA (1)...(19): siRNA sense strand
ccaaggagucgagugagaa

SEQ ID NO: 318588 - RNA, 19 nt, Homo sapiens
  misc_RNA (1)...(19): siRNA sense strand
guuugagaauccagaugaa

SEQ ID NO: 318589 - RNA, 19 nt, Homo sapiens
  misc_RNA (1)...(19): siRNA sense strand
gcuccaacuccucccgaua

SEQ ID NO: 318590 - RNA, 19 nt, Homo sapiens
  misc_RNA (1)...(19): siRNA sense strand
cccggaaugugacaaagga

SEQ ID NO: 318591 - RNA, 19 nt, Homo sapiens
  misc_RNA (1)...(19): siRNA sense strand
cuccaacuccucccgauaa

SEQ ID NO: 318592 - RNA, 19 nt, Homo sapiens
  misc_RNA (1)...(19): siRNA sense strand
gggagacucacccggaaug

SEQ ID NO: 318593 - RNA, 19 nt, Homo sapiens
  misc_RNA (1)...(19): siRNA sense strand
ccaaggaucgcucaaaaga

SEQ ID NO: 318594 - RNA, 19 nt, Homo sapiens
  misc_RNA (1)...(19): siRNA sense strand
ggagucgagugagaaggau

SEQ ID NO: 318595 - RNA, 19 nt, Homo sapiens
  misc_RNA (1)...(19): siRNA sense strand
guccaaggaucgcucaaaa

SEQ ID NO: 318596 - RNA, 19 nt, Homo sapiens
  misc_RNA (1)...(19): siRNA sense strand
gcuaugcguacguagaguu

SEQ ID NO: 318597 - RNA, 19 nt, Homo sapiens
  misc_RNA (1)...(19): siRNA sense strand
augcguacguagaguuuga

SEQ ID NO: 318598 - RNA, 19 nt, Homo sapiens
  misc_RNA (1)...(19): siRNA sense strand
cauggauggaggacaaauu

SEQ ID NO: 318599 - RNA, 19 nt, Homo sapiens
  misc_RNA (1)...(19): siRNA sense strand
ccacggaugaggagaaggu

SEQ ID NO: 318600 - RNA, 19 nt, Homo sapiens
  misc_RNA (1)...(19): siRNA sense strand
cgcaaagaccgcucagaug

SEQ ID NO: 318601 - RNA, 19 nt, Homo sapiens
  misc_RNA (1)...(19): siRNA sense strand
caaaccaccuaaaagagau

SEQ ID NO: 318602 - RNA, 19 nt, Homo sapiens
  misc_RNA (1)...(19): siRNA sense strand
accaaggagucgagugaga

SEQ ID NO: 318603 - RNA, 19 nt, Homo sapiens
  misc_RNA (1)...(19): siRNA sense strand
ccgagaaggcgcugaagca

SEQ ID NO: 318604 - RNA, 19 nt, Homo sapiens
  misc_RNA (1)...(19): siRNA sense strand
cuccuaagcccaccaaagu

SEQ ID NO: 318605 - RNA, 19 nt, Homo sapiens
  misc_RNA (1)...(19): siRNA sense strand
ccaaaccaccuaaaagaga

SEQ ID NO: 318606 - RNA, 19 nt, Homo sapiens
  misc_RNA (1)...(19): siRNA sense strand
acgcaaagaccgcucagau

SEQ ID NO: 318607 - RNA, 19 nt, Homo sapiens
  misc_RNA (1)...(19): siRNA sense strand
gcacauggauggaggacaa

SEQ ID NO: 318608 - RNA, 19 nt, Homo sapiens
  misc_RNA (1)...(19): siRNA sense strand
gcaaagaccgcucagauga

SEQ ID NO: 318609 - RNA, 19 nt, Homo sapiens
  misc_RNA (1)...(19): siRNA sense strand
gacaaaggaucacaucaug

SEQ ID NO: 318610 - RNA, 19 nt, Homo sapiens
  misc_RNA (1)...(19): siRNA sense strand
caaaggcuaugcguacgua

SEQ ID NO: 318611 - RNA, 19 nt, Homo sapiens
  misc_RNA (1)...(19): siRNA sense strand
ggauuuaucaggagugaaa

SEQ ID NO: 318612 - RNA, 19 nt, Homo sapiens
  misc_RNA (1)...(19): siRNA sense strand
caaaggaucacaucaugga

SEQ ID NO: 318613 - RNA, 19 nt, Homo sapiens
  misc_RNA (1)...(19): siRNA sense strand
guacguagaguuugagaau

SEQ ID NO: 318614 - RNA, 19 nt, Homo sapiens
  misc_RNA (1)...(19): siRNA sense strand
gaucacaucauggagauau

SEQ ID NO: 318615 - RNA, 19 nt, Homo sapiens
  misc_RNA (1)...(19): siRNA sense strand
aaggaucgcucaaaagaua

SEQ ID NO: 318616 - RNA, 19 nt, Homo sapiens
  misc_RNA (1)...(19): siRNA sense strand
ggagauauuuuccaccuau

SEQ ID NO: 318617 - RNA, 19 nt, Homo sapiens
  misc_RNA (1)...(19): siRNA sense strand
agaaggcgcugaagcacau

SEQ ID NO: 318618 - RNA, 19 nt, Homo sapiens
  misc_RNA (1)...(19): siRNA sense strand
ggaaugugacaaaggauca

SEQ ID NO: 318619 - RNA, 19 nt, Homo sapiens
  misc_RNA (1)...(19): siRNA sense strand
ccaccaaggagucgaguga

SEQ ID NO: 318620 - RNA, 19 nt, Homo sapiens
  misc_RNA (1)...(19): siRNA sense strand
cagaugagaaguccaagga

SEQ ID NO: 318621 - RNA, 19 nt, Homo sapiens
  misc_RNA (1)...(19): siRNA sense strand
ccaaauccaaaccaccuaa

SEQ ID NO: 318622 - RNA, 19 nt, Homo sapiens
  misc_RNA (1)...(19): siRNA sense strand
gcauccagccgcucaggaa

SEQ ID NO: 318623 - RNA, 19 nt, Homo sapiens
  misc_RNA (1)...(19): siRNA sense strand
gauggaggacaaauugaug

SEQ ID NO: 318624 - RNA, 19 nt, Homo sapiens
  misc_RNA (1)...(19): siRNA sense strand
ggauggaggacaaauugau

SEQ ID NO: 318625 - RNA, 19 nt, Homo sapiens
  misc_RNA (1)...(19): siRNA sense strand
ugacaaaggaucacaucau

SEQ ID NO: 318626 - RNA, 19 nt, Homo sapiens
  misc_RNA (1)...(19): siRNA sense strand
ucacaucauggagauauuu

SEQ ID NO: 318627 - RNA, 19 nt, Homo sapiens
  misc_RNA (1)...(19): siRNA sense strand
caaauccaaaccaccuaaa

SEQ ID NO: 318628 - RNA, 19 nt, Homo sapiens
  misc_RNA (1)...(19): siRNA sense strand
ccaaggagucgagugagaa

SEQ ID NO: 318629 - RNA, 19 nt, Homo sapiens
  misc_RNA (1)...(19): siRNA sense strand
guuugagaauccagaugaa

SEQ ID NO: 318630 - RNA, 19 nt, Homo sapiens
  misc_RNA (1)...(19): siRNA sense strand
gcuccaacuccucccgaua

SEQ ID NO: 318631 - RNA, 19 nt, Homo sapiens
  misc_RNA (1)...(19): siRNA sense strand
cccggaaugugacaaagga

SEQ ID NO: 318632 - RNA, 19 nt, Homo sapiens
  misc_RNA (1)...(19): siRNA sense strand
cuccaacuccucccgauaa

SEQ ID NO: 318633 - RNA, 19 nt, Homo sapiens
  misc_RNA (1)...(19): siRNA sense strand
gggagacucacccggaaug

SEQ ID NO: 318634 - RNA, 19 nt, Homo sapiens
  misc_RNA (1)...(19): siRNA sense strand
ccaaggaucgcucaaaaga

SEQ ID NO: 318635 - RNA, 19 nt, Homo sapiens
  misc_RNA (1)...(19): siRNA sense strand
ggagucgagugagaaggau

SEQ ID NO: 318636 - RNA, 19 nt, Homo sapiens
  misc_RNA (1)...(19): siRNA sense strand
guccaaggaucgcucaaaa

SEQ ID NO: 318637 - RNA, 19 nt, Homo sapiens
  misc_RNA (1)...(19): siRNA sense strand
gcuaugcguacguagaguu

SEQ ID NO: 318638 - RNA, 19 nt, Homo sapiens
  misc_RNA (1)...(19): siRNA sense strand
augcguacguagaguuuga

SEQ ID NO: 318639 - RNA, 19 nt, Homo sapiens
  misc_RNA (1)...(19): siRNA sense strand
cauggauggaggacaaauu

SEQ ID NO: 318640 - RNA, 19 nt, Homo sapiens
  misc_RNA (1)...(19): siRNA sense strand
ccacggaugaggagaaggu

SEQ ID NO: 318641 - RNA, 19 nt, Homo sapiens
  misc_RNA (1)...(19): siRNA sense strand
cgcaaagaccgcucagaug

SEQ ID NO: 318642 - RNA, 19 nt, Homo sapiens
  misc_RNA (1)...(19): siRNA sense strand
caaaccaccuaaaagagau

SEQ ID NO: 318643 - RNA, 19 nt, Homo sapiens
  misc_RNA (1)...(19): siRNA sense strand
accaaggagucgagugaga

SEQ ID NO: 318644 - RNA, 19 nt, Homo sapiens
  misc_RNA (1)...(19): siRNA sense strand
ccgagaaggcgcugaagca

SEQ ID NO: 318645 - RNA, 19 nt, Homo sapiens
  misc_RNA (1)...(19): siRNA sense strand
cuccuaagcccaccaaagu

SEQ ID NO: 318646 - RNA, 19 nt, Homo sapiens
  misc_RNA (1)...(19): siRNA sense strand
ccaaaccaccuaaaagaga

SEQ ID NO: 318647 - RNA, 19 nt, Homo sapiens
  misc_RNA (1)...(19): siRNA sense strand
acgcaaagaccgcucagau

SEQ ID NO: 318648 - RNA, 19 nt, Homo sapiens
  misc_RNA (1)...(19): siRNA sense strand
ggaagaagauguggagaug

SEQ ID NO: 318649 - RNA, 19 nt, Homo sapiens
  misc_RNA (1)...(19): siRNA sense strand
uaacaaggauugagcgaau

SEQ ID NO: 318650 - RNA, 19 nt, Homo sapiens
  misc_RNA (1)...(19): siRNA sense strand
ggagauccgugauguaaca

SEQ ID NO: 318651 - RNA, 19 nt, Homo sapiens
  misc_RNA (1)...(19): siRNA sense strand
caaccaaagucccggagau

SEQ ID NO: 318652 - RNA, 19 nt, Homo sapiens
  misc_RNA (1)...(19): siRNA sense strand
cgcaguacaugaaggagua

SEQ ID NO: 318653 - RNA, 19 nt, Homo sapiens
  misc_RNA (1)...(19): siRNA sense strand
gaccugggcaccaagauga

SEQ ID NO: 318654 - RNA, 19 nt, Homo sapiens
  misc_RNA (1)...(19): siRNA sense strand
gaaacgcaaggguacagaa

SEQ ID NO: 318655 - RNA, 19 nt, Homo sapiens
  misc_RNA (1)...(19): siRNA sense strand
gaagaagauguggagauga

SEQ ID NO: 318656 - RNA, 19 nt, Homo sapiens
  misc_RNA (1)...(19): siRNA sense strand
cagaagugcagguggauga

SEQ ID NO: 318657 - RNA, 19 nt, Homo sapiens
  misc_RNA (1)...(19): siRNA sense strand
ggagaucaagucagaaguc

SEQ ID NO: 318658 - RNA, 19 nt, Homo sapiens
  misc_RNA (1)...(19): siRNA sense strand
aagaagauguggagaugag

SEQ ID NO: 318659 - RNA, 19 nt, Homo sapiens
  misc_RNA (1)...(19): siRNA sense strand
agaaagacacgaagcagau

SEQ ID NO: 318660 - RNA, 19 nt, Homo sapiens
  misc_RNA (1)...(19): siRNA sense strand
ggucgggcaguccuuauug

SEQ ID NO: 318661 - RNA, 19 nt, Homo sapiens
  misc_RNA (1)...(19): siRNA sense strand
gagcuucuccuuccucaac

SEQ ID NO: 318662 - RNA, 19 nt, Homo sapiens
  misc_RNA (1)...(19): siRNA sense strand
caacagggacgggcuccaa

SEQ ID NO: 318663 - RNA, 19 nt, Homo sapiens
  misc_RNA (1)...(19): siRNA sense strand
gaaagacacgaagcagauc

SEQ ID NO: 318664 - RNA, 19 nt, Homo sapiens
  misc_RNA (1)...(19): siRNA sense strand
gcuccacgcaguacaugaa

SEQ ID NO: 318665 - RNA, 19 nt, Homo sapiens
  misc_RNA (1)...(19): siRNA sense strand
ggagacggagaucaucgaa

SEQ ID NO: 318666 - RNA, 19 nt, Homo sapiens
  misc_RNA (1)...(19): siRNA sense strand
caucggcguucgcaucaag

SEQ ID NO: 318667 - RNA, 19 nt, Homo sapiens
  misc_RNA (1)...(19): siRNA sense strand
gcacgagaucgacgucauc

SEQ ID NO: 318668 - RNA, 19 nt, Homo sapiens
  misc_RNA (1)...(19): siRNA sense strand
gcuccaaggugggcaaacu

SEQ ID NO: 318669 - RNA, 19 nt, Homo sapiens
  misc_RNA (1)...(19): siRNA sense strand
ccucuucaacgaacucaaa

SEQ ID NO: 318670 - RNA, 19 nt, Homo sapiens
  misc_RNA (1)...(19): siRNA sense strand
acgcaaggguacagaagug

SEQ ID NO: 318671 - RNA, 19 nt, Homo sapiens
  misc_RNA (1)...(19): siRNA sense strand
uugagucccugaccaagga

SEQ ID NO: 318672 - RNA, 19 nt, Homo sapiens
  misc_RNA (1)...(19): siRNA sense strand
cugcuggaccggcugcuua

SEQ ID NO: 318673 - RNA, 19 nt, Homo sapiens
  misc_RNA (1)...(19): siRNA sense strand
ucaaggaggagacggagau

SEQ ID NO: 318674 - RNA, 19 nt, Homo sapiens
  misc_RNA (1)...(19): siRNA sense strand
gcaaacugacccucaagac

SEQ ID NO: 318675 - RNA, 19 nt, Homo sapiens
  misc_RNA (1)...(19): siRNA sense strand
gcguggugcuggagaugau

SEQ ID NO: 318676 - RNA, 19 nt, Homo sapiens
  misc_RNA (1)...(19): siRNA sense strand
ccacgcaguacaugaagga

SEQ ID NO: 318677 - RNA, 19 nt, Homo sapiens
  misc_RNA (1)...(19): siRNA sense strand
ucaagcgggucuacucacu

SEQ ID NO: 318678 - RNA, 19 nt, Homo sapiens
  misc_RNA (1)...(19): siRNA sense strand
cgagaucgacgucaucaac

SEQ ID NO: 318679 - RNA, 19 nt, Homo sapiens
  misc_RNA (1)...(19): siRNA sense strand
ccucaagaccacagagaug

SEQ ID NO: 318680 - RNA, 19 nt, Homo sapiens
  misc_RNA (1)...(19): siRNA sense strand
ggaaacgcaaggguacaga

SEQ ID NO: 318681 - RNA, 19 nt, Homo sapiens
  misc_RNA (1)...(19): siRNA sense strand
caggggagaucaagucaga

SEQ ID NO: 318682 - RNA, 19 nt, Homo sapiens
  misc_RNA (1)...(19): siRNA sense strand
gcucuucucaggugacaca

SEQ ID NO: 318683 - RNA, 19 nt, Homo sapiens
  misc_RNA (1)...(19): siRNA sense strand
gggcaaggcggagaucauc

SEQ ID NO: 318684 - RNA, 19 nt, Homo sapiens
  misc_RNA (1)...(19): siRNA sense strand
gcgagaaagacacgaagca

SEQ ID NO: 318685 - RNA, 19 nt, Homo sapiens
  misc_RNA (1)...(19): siRNA sense strand
cauggcgccuguccugauc

SEQ ID NO: 318686 - RNA, 19 nt, Homo sapiens
  misc_RNA (1)...(19): siRNA sense strand
caucaagcgggucuacuca

SEQ ID NO: 318687 - RNA, 19 nt, Homo sapiens
  misc_RNA (1)...(19): siRNA sense strand
caucgacgagguccacaug

SEQ ID NO: 318688 - RNA, 19 nt, Homo sapiens
  misc_RNA (1)...(19): siRNA sense strand
gauccgggaagggaagauu

SEQ ID NO: 318689 - RNA, 19 nt, Homo sapiens
  misc_RNA (1)...(19): siRNA sense strand
gggacgugaucaccaucga

SEQ ID NO: 318690 - RNA, 19 nt, Homo sapiens
  misc_RNA (1)...(19): siRNA sense strand
ggcaaacugacccucaaga

SEQ ID NO: 318691 - RNA, 19 nt, Homo sapiens
  misc_RNA (1)...(19): siRNA sense strand
ggaggagacggagaucauc

SEQ ID NO: 318692 - RNA, 19 nt, Homo sapiens
  misc_RNA (1)...(19): siRNA sense strand
ucaaaggcgagaccaugga

SEQ ID NO: 318693 - RNA, 19 nt, Homo sapiens
  misc_RNA (1)...(19): siRNA sense strand
cguuacagccacaaccaaa

SEQ ID NO: 318694 - RNA, 19 nt, Homo sapiens
  misc_RNA (1)...(19): siRNA sense strand
gcgggucuacucacucuuc

SEQ ID NO: 318695 - RNA, 19 nt, Homo sapiens
  misc_RNA (1)...(19): siRNA sense strand
cgugauguaacaaggauug

SEQ ID NO: 318696 - RNA, 19 nt, Homo sapiens
  misc_RNA (1)...(19): siRNA sense strand
gaaguccgugagcagauca

SEQ ID NO: 318697 - RNA, 19 nt, Homo sapiens
  misc_RNA (1)...(19): siRNA sense strand
gaucgacgucaucaacucu

SEQ ID NO: 318698 - RNA, 19 nt, Homo sapiens
  misc_RNA (1)...(19): siRNA sense strand
cagaggaaauuaaagauga

SEQ ID NO: 318699 - RNA, 19 nt, Homo sapiens
  misc_RNA (1)...(19): siRNA sense strand
gaagcugaaucuuguaaau

SEQ ID NO: 318700 - RNA, 19 nt, Homo sapiens
  misc_RNA (1)...(19): siRNA sense strand
ggagaugcauuacguuuca

SEQ ID NO: 318701 - RNA, 19 nt, Homo sapiens
  misc_RNA (1)...(19): siRNA sense strand
gaacauggcaagacuacaa

SEQ ID NO: 318702 - RNA, 19 nt, Homo sapiens
  misc_RNA (1)...(19): siRNA sense strand
ucaaggaaaucguaaauag

SEQ ID NO: 318703 - RNA, 19 nt, Homo sapiens
  misc_RNA (1)...(19): siRNA sense strand
uuaacaagcuguccucuga

SEQ ID NO: 318704 - RNA, 19 nt, Homo sapiens
  misc_RNA (1)...(19): siRNA sense strand
cagcuguucuugccacuua

SEQ ID NO: 318705 - RNA, 19 nt, Homo sapiens
  misc_RNA (1)...(19): siRNA sense strand
caaccacgaucugaaguuu

SEQ ID NO: 318706 - RNA, 19 nt, Homo sapiens
  misc_RNA (1)...(19): siRNA sense strand
agugagaccuacagaguua

SEQ ID NO: 318707 - RNA, 19 nt, Homo sapiens
  misc_RNA (1)...(19): siRNA sense strand
caaagaggcuaagaugaug

SEQ ID NO: 318708 - RNA, 19 nt, Homo sapiens
  misc_RNA (1)...(19): siRNA sense strand
ccaaagaggagaucaaugu

SEQ ID NO: 318709 - RNA, 19 nt, Homo sapiens
  misc_RNA (1)...(19): siRNA sense strand
ccaagcacuuuaagccaua

SEQ ID NO: 318710 - RNA, 19 nt, Homo sapiens
  misc_RNA (1)...(19): siRNA sense strand
caaauaucguuuacacguu

SEQ ID NO: 318711 - RNA, 19 nt, Homo sapiens
  misc_RNA (1)...(19): siRNA sense strand
gaucagacccaagcacuuu

SEQ ID NO: 318712 - RNA, 19 nt, Homo sapiens
  misc_RNA (1)...(19): siRNA sense strand
ggagaucaauguacuucau

SEQ ID NO: 318713 - RNA, 19 nt, Homo sapiens
  misc_RNA (1)...(19): siRNA sense strand
gcuuugaaguuuacuguga

SEQ ID NO: 318714 - RNA, 19 nt, Homo sapiens
  misc_RNA (1)...(19): siRNA sense strand
ucgaggagguguucaaaga

SEQ ID NO: 318715 - RNA, 19 nt, Homo sapiens
  misc_RNA (1)...(19): siRNA sense strand
gauggcaaauguucaaagu

SEQ ID NO: 318716 - RNA, 19 nt, Homo sapiens
  misc_RNA (1)...(19): siRNA sense strand
cuacaaguccuccuucaaa

SEQ ID NO: 318717 - RNA, 19 nt, Homo sapiens
  misc_RNA (1)...(19): siRNA sense strand
cgggagagguuggugauaa

SEQ ID NO: 318718 - RNA, 19 nt, Homo sapiens
  misc_RNA (1)...(19): siRNA sense strand
uggagaagcugaaucuugu

SEQ ID NO: 318719 - RNA, 19 nt, Homo sapiens
  misc_RNA (1)...(19): siRNA sense strand
gcuaaagaaugccaaagag

SEQ ID NO: 318720 - RNA, 19 nt, Homo sapiens
  misc_RNA (1)...(19): siRNA sense strand
caaagaggagaucaaugua

SEQ ID NO: 318721 - RNA, 19 nt, Homo sapiens
  misc_RNA (1)...(19): siRNA sense strand
ucaaagaggcuaagaugau

SEQ ID NO: 318722 - RNA, 19 nt, Homo sapiens
  misc_RNA (1)...(19): siRNA sense strand
uggcaaauauuaucaccaa

SEQ ID NO: 318723 - RNA, 19 nt, Homo sapiens
  misc_RNA (1)...(19): siRNA sense strand
uuauguggcuaaugaguuu

SEQ ID NO: 318724 - RNA, 19 nt, Homo sapiens
  misc_RNA (1)...(19): siRNA sense strand
uggcaaauguucaaagugu

SEQ ID NO: 318725 - RNA, 19 nt, Homo sapiens
  misc_RNA (1)...(19): siRNA sense strand
gaggagguguucaaagaag

SEQ ID NO: 318726 - RNA, 19 nt, Homo sapiens
  misc_RNA (1)...(19): siRNA sense strand
auacagagguguccguaau

SEQ ID NO: 318727 - RNA, 19 nt, Homo sapiens
  misc_RNA (1)...(19): siRNA sense strand
gagaagcugaaucuuguaa

SEQ ID NO: 318728 - RNA, 19 nt, Homo sapiens
  misc_RNA (1)...(19): siRNA sense strand
caaaguggcaaaucuaaca

SEQ ID NO: 318729 - RNA, 19 nt, Homo sapiens
  misc_RNA (1)...(19): siRNA sense strand
gcagugagaccuacagagu

SEQ ID NO: 318730 - RNA, 19 nt, Homo sapiens
  misc_RNA (1)...(19): siRNA sense strand
cagaaacggacuguuguua

SEQ ID NO: 318731 - RNA, 19 nt, Homo sapiens
  misc_RNA (1)...(19): siRNA sense strand
ccucugagcuaaagaaugc

SEQ ID NO: 318732 - RNA, 19 nt, Homo sapiens
  misc_RNA (1)...(19): siRNA sense strand
ggaaaucguaaauagucua

SEQ ID NO: 318733 - RNA, 19 nt, Homo sapiens
  misc_RNA (1)...(19): siRNA sense strand
ugcauuacguuucaacaaa

SEQ ID NO: 318734 - RNA, 19 nt, Homo sapiens
  misc_RNA (1)...(19): siRNA sense strand
aaauucaucuucugaccaa

SEQ ID NO: 318735 - RNA, 19 nt, Homo sapiens
  misc_RNA (1)...(19): siRNA sense strand
gaaacggacuguuguuacc

SEQ ID NO: 318736 - RNA, 19 nt, Homo sapiens
  misc_RNA (1)...(19): siRNA sense strand
uuagagaauuagagaguga

SEQ ID NO: 318737 - RNA, 19 nt, Homo sapiens
  misc_RNA (1)...(19): siRNA sense strand
caaugaaacagaggaaauu

SEQ ID NO: 318738 - RNA, 19 nt, Homo sapiens
  misc_RNA (1)...(19): siRNA sense strand
cuauaugccuuguaugauc

SEQ ID NO: 318739 - RNA, 19 nt, Homo sapiens
  misc_RNA (1)...(19): siRNA sense strand
gaugggagcaccaacuuca

SEQ ID NO: 318740 - RNA, 19 nt, Homo sapiens
  misc_RNA (1)...(19): siRNA sense strand
gaccaagaguaaggaaaug

SEQ ID NO: 318741 - RNA, 19 nt, Homo sapiens
  misc_RNA (1)...(19): siRNA sense strand
gcaagcugcaggcugauga

SEQ ID NO: 318742 - RNA, 19 nt, Homo sapiens
  misc_RNA (1)...(19): siRNA sense strand
cagcaaaguggcaaaucua

SEQ ID NO: 318743 - RNA, 19 nt, Homo sapiens
  misc_RNA (1)...(19): siRNA sense strand
gaauuagagagugagguua

SEQ ID NO: 318744 - RNA, 19 nt, Homo sapiens
  misc_RNA (1)...(19): siRNA sense strand
gcagaaacggacuguuguu

SEQ ID NO: 318745 - RNA, 19 nt, Homo sapiens
  misc_RNA (1)...(19): siRNA sense strand
gcaccaacuucaccagaac

SEQ ID NO: 318746 - RNA, 19 nt, Homo sapiens
  misc_RNA (1)...(19): siRNA sense strand
ggaaaccucagaagggaau

SEQ ID NO: 318747 - RNA, 19 nt, Homo sapiens
  misc_RNA (1)...(19): siRNA sense strand
uuucaccacuccagauaaa

SEQ ID NO: 318748 - RNA, 19 nt, Homo sapiens
  misc_RNA (1)...(19): siRNA sense strand
ggaacugugggcuguacua

SEQ ID NO: 318749 - RNA, 19 nt, Homo sapiens
  misc_RNA (1)...(19): siRNA sense strand
gcugaaucuuguaaauaug

SEQ ID NO: 318750 - RNA, 19 nt, Homo sapiens
  misc_RNA (1)...(19): siRNA sense strand
ugccuuguaugaucaguuu

SEQ ID NO: 318751 - RNA, 19 nt, Homo sapiens
  misc_RNA (1)...(19): siRNA sense strand
caagaguaaggaaaugauu

SEQ ID NO: 318752 - RNA, 19 nt, Homo sapiens
  misc_RNA (1)...(19): siRNA sense strand
caaagugucccagccaaga

SEQ ID NO: 318753 - RNA, 19 nt, Homo sapiens
  misc_RNA (1)...(19): siRNA sense strand
cuacagaguuacaccugau

SEQ ID NO: 318754 - RNA, 19 nt, Homo sapiens
  misc_RNA (1)...(19): siRNA sense strand
gcacagcuggagaugcauu

SEQ ID NO: 318755 - RNA, 19 nt, Homo sapiens
  misc_RNA (1)...(19): siRNA sense strand
agagugagguuaacaagcu

SEQ ID NO: 318756 - RNA, 19 nt, Homo sapiens
  misc_RNA (1)...(19): siRNA sense strand
uggcacagcuggagaugca

SEQ ID NO: 318757 - RNA, 19 nt, Homo sapiens
  misc_RNA (1)...(19): siRNA sense strand
uauaugccuuguaugauca

SEQ ID NO: 318758 - RNA, 19 nt, Homo sapiens
  misc_RNA (1)...(19): siRNA sense strand
ggagaagcugaaucuugua

SEQ ID NO: 318759 - RNA, 19 nt, Homo sapiens
  misc_RNA (1)...(19): siRNA sense strand
gaaacagaggaaauuaaag

SEQ ID NO: 318760 - RNA, 19 nt, Homo sapiens
  misc_RNA (1)...(19): siRNA sense strand
ccaguucaacaucuaauau

SEQ ID NO: 318761 - RNA, 19 nt, Homo sapiens
  misc_RNA (1)...(19): siRNA sense strand
caaggaaaucguaaauagu

SEQ ID NO: 318762 - RNA, 19 nt, Homo sapiens
  misc_RNA (1)...(19): siRNA sense strand
agagguuggugauaacaga

SEQ ID NO: 318763 - RNA, 19 nt, Homo sapiens
  misc_RNA (1)...(19): siRNA sense strand
cuauucagcucccgaagca

SEQ ID NO: 318764 - RNA, 19 nt, Homo sapiens
  misc_RNA (1)...(19): siRNA sense strand
gaucgaggagguguucaaa

SEQ ID NO: 318765 - RNA, 19 nt, Homo sapiens
  misc_RNA (1)...(19): siRNA sense strand
ucucaaauaucguuuacac

SEQ ID NO: 318766 - RNA, 19 nt, Homo sapiens
  misc_RNA (1)...(19): siRNA sense strand
acacguugguaacuauaau

SEQ ID NO: 318767 - RNA, 19 nt, Homo sapiens
  misc_RNA (1)...(19): siRNA sense strand
gaggagaucaauguacuuc

SEQ ID NO: 318768 - RNA, 19 nt, Homo sapiens
  misc_RNA (1)...(19): siRNA sense strand
caagcacuuuaagccauaa

SEQ ID NO: 318769 - RNA, 19 nt, Homo sapiens
  misc_RNA (1)...(19): siRNA sense strand
uaccuggccugguguaagu

SEQ ID NO: 318770 - RNA, 19 nt, Homo sapiens
  misc_RNA (1)...(19): siRNA sense strand
ugaccaagaguaaggaaau

SEQ ID NO: 318771 - RNA, 19 nt, Homo sapiens
  misc_RNA (1)...(19): siRNA sense strand
ccaagaacaaauacaguca

SEQ ID NO: 318772 - RNA, 19 nt, Homo sapiens
  misc_RNA (1)...(19): siRNA sense strand
gcugcaggcugaugacaac

SEQ ID NO: 318773 - RNA, 19 nt, Homo sapiens
  misc_RNA (1)...(19): siRNA sense strand
acagcaaaguggcaaaucu

SEQ ID NO: 318774 - RNA, 19 nt, Homo sapiens
  misc_RNA (1)...(19): siRNA sense strand
cuagaaagcagagggaaau

SEQ ID NO: 318775 - RNA, 19 nt, Homo sapiens
  misc_RNA (1)...(19): siRNA sense strand
aagaggagaucaauguacu

SEQ ID NO: 318776 - RNA, 19 nt, Homo sapiens
  misc_RNA (1)...(19): siRNA sense strand
gggagagguuggugauaac

SEQ ID NO: 318777 - RNA, 19 nt, Homo sapiens
  misc_RNA (1)...(19): siRNA sense strand
agaauuagagagugagguu

SEQ ID NO: 318778 - RNA, 19 nt, Homo sapiens
  misc_RNA (1)...(19): siRNA sense strand
ucaccacuccagauaaaga

SEQ ID NO: 318779 - RNA, 19 nt, Homo sapiens
  misc_RNA (1)...(19): siRNA sense strand
aaaccucaaggaaaucgua

SEQ ID NO: 318780 - RNA, 19 nt, Homo sapiens
  misc_RNA (1)...(19): siRNA sense strand
aaagaagcagugagaccua

SEQ ID NO: 318781 - RNA, 19 nt, Homo sapiens
  misc_RNA (1)...(19): siRNA sense strand
cuacuacgcaauaggcaaa

SEQ ID NO: 318782 - RNA, 19 nt, Homo sapiens
  misc_RNA (1)...(19): siRNA sense strand
gagaucaauguacuucaug

SEQ ID NO: 318783 - RNA, 19 nt, Homo sapiens
  misc_RNA (1)...(19): siRNA sense strand
aauuagagagugagguuaa

SEQ ID NO: 318784 - RNA, 19 nt, Homo sapiens
  misc_RNA (1)...(19): siRNA sense strand
aguuacaccugaucccaaa

SEQ ID NO: 318785 - RNA, 19 nt, Homo sapiens
  misc_RNA (1)...(19): siRNA sense strand
cuucaaagaggcuaagaug

SEQ ID NO: 318786 - RNA, 19 nt, Homo sapiens
  misc_RNA (1)...(19): siRNA sense strand
ggcaaauauuaucaccaaa

SEQ ID NO: 318787 - RNA, 19 nt, Homo sapiens
  misc_RNA (1)...(19): siRNA sense strand
gacaaugaucgauauccuu

SEQ ID NO: 318788 - RNA, 19 nt, Homo sapiens
  misc_RNA (1)...(19): siRNA sense strand
gaacuauaugccuuguaug

SEQ ID NO: 318789 - RNA, 19 nt, Homo sapiens
  misc_RNA (1)...(19): siRNA sense strand
aaggaaaucguaaauaguc

SEQ ID NO: 318790 - RNA, 19 nt, Homo sapiens
  misc_RNA (1)...(19): siRNA sense strand
acaaugaaacagaggaaau

SEQ ID NO: 318791 - RNA, 19 nt, Homo sapiens
  misc_RNA (1)...(19): siRNA sense strand
uacaaguccuccuucaaag

SEQ ID NO: 318792 - RNA, 19 nt, Homo sapiens
  misc_RNA (1)...(19): siRNA sense strand
agauugcucugacuacuac

SEQ ID NO: 318793 - RNA, 19 nt, Homo sapiens
  misc_RNA (1)...(19): siRNA sense strand
aaacaaugaaacagaggaa

SEQ ID NO: 318794 - RNA, 19 nt, Homo sapiens
  misc_RNA (1)...(19): siRNA sense strand
uggcaaacaaugaaacaga

SEQ ID NO: 318795 - RNA, 19 nt, Homo sapiens
  misc_RNA (1)...(19): siRNA sense strand
caaguccuccuucaaagag

SEQ ID NO: 318796 - RNA, 19 nt, Homo sapiens
  misc_RNA (1)...(19): siRNA sense strand
cgaggagguguucaaagaa

SEQ ID NO: 318797 - RNA, 19 nt, Homo sapiens
  misc_RNA (1)...(19): siRNA sense strand
ccagauaaagacaaugauc

SEQ ID NO: 318798 - RNA, 19 nt, Homo sapiens
  misc_RNA (1)...(19): siRNA sense strand
caaaggagcuucaaauaac

SEQ ID NO: 318799 - RNA, 19 nt, Homo sapiens
  misc_RNA (1)...(19): siRNA sense strand
ggagagaaguucaccuuug

SEQ ID NO: 318800 - RNA, 19 nt, Homo sapiens
  misc_RNA (1)...(19): siRNA sense strand
gagagaaguucaccuuuga

SEQ ID NO: 318801 - RNA, 19 nt, Homo sapiens
  misc_RNA (1)...(19): siRNA sense strand
gaacacggauauuacacaa

SEQ ID NO: 318802 - RNA, 19 nt, Homo sapiens
  misc_RNA (1)...(19): siRNA sense strand
gcaaaaggauuucgggaua

SEQ ID NO: 318803 - RNA, 19 nt, Homo sapiens
  misc_RNA (1)...(19): siRNA sense strand
gcaaggaaaucgggucuau

SEQ ID NO: 318804 - RNA, 19 nt, Homo sapiens
  misc_RNA (1)...(19): siRNA sense strand
uaaacucucuccugucuug

SEQ ID NO: 318805 - RNA, 19 nt, Homo sapiens
  misc_RNA (1)...(19): siRNA sense strand
ccgcaacgcugguuuguga

SEQ ID NO: 318806 - RNA, 19 nt, Homo sapiens
  misc_RNA (1)...(19): siRNA sense strand
gaaaucgggucuauaugca

SEQ ID NO: 318807 - RNA, 19 nt, Homo sapiens
  misc_RNA (1)...(19): siRNA sense strand
caacaaaggagcuucaaau

SEQ ID NO: 318808 - RNA, 19 nt, Homo sapiens
  misc_RNA (1)...(19): siRNA sense strand
gauccgagcuugucuugca

SEQ ID NO: 318809 - RNA, 19 nt, Homo sapiens
  misc_RNA (1)...(19): siRNA sense strand
cggccacgcugcucucuua

SEQ ID NO: 318810 - RNA, 19 nt, Homo sapiens
  misc_RNA (1)...(19): siRNA sense strand
acaaaggagcuucaaauaa

SEQ ID NO: 318811 - RNA, 19 nt, Homo sapiens
  misc_RNA (1)...(19): siRNA sense strand
uaacauuucuggucucgau

SEQ ID NO: 318812 - RNA, 19 nt, Homo sapiens
  misc_RNA (1)...(19): siRNA sense strand
gcaaagcggacaccaaugu

SEQ ID NO: 318813 - RNA, 19 nt, Homo sapiens
  misc_RNA (1)...(19): siRNA sense strand
gaacugcgccaaggacauu

SEQ ID NO: 318814 - RNA, 19 nt, Homo sapiens
  misc_RNA (1)...(19): siRNA sense strand
ccaaggagcuccguucuac

SEQ ID NO: 318815 - RNA, 19 nt, Homo sapiens
  misc_RNA (1)...(19): siRNA sense strand
gaacaacaaaggagcuuca

SEQ ID NO: 318816 - RNA, 19 nt, Homo sapiens
  misc_RNA (1)...(19): siRNA sense strand
ggacaccaaugugcaagga

SEQ ID NO: 318817 - RNA, 19 nt, Homo sapiens
  misc_RNA (1)...(19): siRNA sense strand
uaccagaacacggauauua

SEQ ID NO: 318818 - RNA, 19 nt, Homo sapiens
  misc_RNA (1)...(19): siRNA sense strand
gagacgcccuccucgauca

SEQ ID NO: 318819 - RNA, 19 nt, Homo sapiens
  misc_RNA (1)...(19): siRNA sense strand
gcacgaucaucccauuauc

SEQ ID NO: 318820 - RNA, 19 nt, Homo sapiens
  misc_RNA (1)...(19): siRNA sense strand
ggaaaucgggucuauaugc

SEQ ID NO: 318821 - RNA, 19 nt, Homo sapiens
  misc_RNA (1)...(19): siRNA sense strand
ccacggcucauuacaauau

SEQ ID NO: 318822 - RNA, 19 nt, Homo sapiens
  misc_RNA (1)...(19): siRNA sense strand
aaauagaucacaacccuuu

SEQ ID NO: 318823 - RNA, 19 nt, Homo sapiens
  misc_RNA (1)...(19): siRNA sense strand
gagcuccguucuaccaguu

SEQ ID NO: 318824 - RNA, 19 nt, Homo sapiens
  misc_RNA (1)...(19): siRNA sense strand
ggauauuacacaacugaaa

SEQ ID NO: 318825 - RNA, 19 nt, Homo sapiens
  misc_RNA (1)...(19): siRNA sense strand
acaccaaugugcaaggaaa

SEQ ID NO: 318826 - RNA, 19 nt, Homo sapiens
  misc_RNA (1)...(19): siRNA sense strand
aacaaaggagcuucaaaua

SEQ ID NO: 318827 - RNA, 19 nt, Homo sapiens
  misc_RNA (1)...(19): siRNA sense strand
aaggauuucgggauaauua

SEQ ID NO: 318828 - RNA, 19 nt, Homo sapiens
  misc_RNA (1)...(19): siRNA sense strand
ucagucagauacagacaau

SEQ ID NO: 318829 - RNA, 19 nt, Homo sapiens
  misc_RNA (1)...(19): siRNA sense strand
aaggaaaucgggucuauau

SEQ ID NO: 318830 - RNA, 19 nt, Homo sapiens
  misc_RNA (1)...(19): siRNA sense strand
agucagauacagacaauuu

SEQ ID NO: 318831 - RNA, 19 nt, Homo sapiens
  misc_RNA (1)...(19): siRNA sense strand
aaaggagcuucaaauaaca

SEQ ID NO: 318832 - RNA, 19 nt, Homo sapiens
  misc_RNA (1)...(19): siRNA sense strand
gcacugccuuucuccuucu

SEQ ID NO: 318833 - RNA, 19 nt, Homo sapiens
  misc_RNA (1)...(19): siRNA sense strand
acacggauauuacacaacu

SEQ ID NO: 318834 - RNA, 19 nt, Homo sapiens
  misc_RNA (1)...(19): siRNA sense strand
ggaggcaaauggguuccuu

SEQ ID NO: 318835 - RNA, 19 nt, Homo sapiens
  misc_RNA (1)...(19): siRNA sense strand
caaaaggauuucgggauaa

SEQ ID NO: 318836 - RNA, 19 nt, Homo sapiens
  misc_RNA (1)...(19): siRNA sense strand
gagcacugccuuucuccuu

SEQ ID NO: 318837 - RNA, 19 nt, Homo sapiens
  misc_RNA (1)...(19): siRNA sense strand
cccaaucacuggagguuuc

SEQ ID NO: 318838 - RNA, 19 nt, Homo sapiens
  misc_RNA (1)...(19): siRNA sense strand
gauuucgggauaauuauga

SEQ ID NO: 318839 - RNA, 19 nt, Homo sapiens
  misc_RNA (1)...(19): siRNA sense strand
caaggaaaucgggucuaua

SEQ ID NO: 318840 - RNA, 19 nt, Homo sapiens
  misc_RNA (1)...(19): siRNA sense strand
gagcuucaaauaacaaugg

SEQ ID NO: 318841 - RNA, 19 nt, Homo sapiens
  misc_RNA (1)...(19): siRNA sense strand
aguaaacucucuccugucu

SEQ ID NO: 318842 - RNA, 19 nt, Homo sapiens
  misc_RNA (1)...(19): siRNA sense strand
cuaucaugcucuccaagaa

SEQ ID NO: 318843 - RNA, 19 nt, Homo sapiens
  misc_RNA (1)...(19): siRNA sense strand
cagcgggacugcgagaaga

SEQ ID NO: 318844 - RNA, 19 nt, Homo sapiens
  misc_RNA (1)...(19): siRNA sense strand
gcgugcagacguucacuuu

SEQ ID NO: 318845 - RNA, 19 nt, Homo sapiens
  misc_RNA (1)...(19): siRNA sense strand
ucccacggcucauuacaau

SEQ ID NO: 318846 - RNA, 19 nt, Homo sapiens
  misc_RNA (1)...(19): siRNA sense strand
ggacguccagagaaguaaa

SEQ ID NO: 318847 - RNA, 19 nt, Homo sapiens
  misc_RNA (1)...(19): siRNA sense strand
ccagaacacggauauuaca

SEQ ID NO: 318848 - RNA, 19 nt, Homo sapiens
  misc_RNA (1)...(19): siRNA sense strand
aaacagggaaggcgcaugu

SEQ ID NO: 318849 - RNA, 19 nt, Homo sapiens
  misc_RNA (1)...(19): siRNA sense strand
cggcaaagcggacaccaau

SEQ ID NO: 318850 - RNA, 19 nt, Homo sapiens
  misc_RNA (1)...(19): siRNA sense strand
aaauaacaaugggcagaug

SEQ ID NO: 318851 - RNA, 19 nt, Homo sapiens
  misc_RNA (1)...(19): siRNA sense strand
uaucaugcucuccaagaaa

SEQ ID NO: 318852 - RNA, 19 nt, Homo sapiens
  misc_RNA (1)...(19): siRNA sense strand
cgaaucagucagauacaga

SEQ ID NO: 318853 - RNA, 19 nt, Homo sapiens
  misc_RNA (1)...(19): siRNA sense strand
gugcagacguucacuuucc

SEQ ID NO: 318854 - RNA, 19 nt, Homo sapiens
  misc_RNA (1)...(19): siRNA sense strand
gcaccaaacggagaugauc

SEQ ID NO: 318855 - RNA, 19 nt, Homo sapiens
  misc_RNA (1)...(19): siRNA sense strand
cagcagcuacccacauuca

SEQ ID NO: 318856 - RNA, 19 nt, Homo sapiens
  misc_RNA (1)...(19): siRNA sense strand
ggauuucgggauaauuaug

SEQ ID NO: 318857 - RNA, 19 nt, Homo sapiens
  misc_RNA (1)...(19): siRNA sense strand
guacggccacuccuaccaa

SEQ ID NO: 318858 - RNA, 19 nt, Homo sapiens
  misc_RNA (1)...(19): siRNA sense strand
aaauuucaccggcaccaaa

SEQ ID NO: 318859 - RNA, 19 nt, Homo sapiens
  misc_RNA (1)...(19): siRNA sense strand
gaaauuucaccggcaccaa

SEQ ID NO: 318860 - RNA, 19 nt, Homo sapiens
  misc_RNA (1)...(19): siRNA sense strand
gaucacaacccuuuugcaa

SEQ ID NO: 318861 - RNA, 19 nt, Homo sapiens
  misc_RNA (1)...(19): siRNA sense strand
caaauaacaaugggcagau

SEQ ID NO: 318862 - RNA, 19 nt, Homo sapiens
  misc_RNA (1)...(19): siRNA sense strand
agcagcagcuacccacauu

SEQ ID NO: 318863 - RNA, 19 nt, Homo sapiens
  misc_RNA (1)...(19): siRNA sense strand
acagggaaggcgcauguuu

SEQ ID NO: 318864 - RNA, 19 nt, Homo sapiens
  misc_RNA (1)...(19): siRNA sense strand
gagcagcagcuacccacau

SEQ ID NO: 318865 - RNA, 19 nt, Homo sapiens
  misc_RNA (1)...(19): siRNA sense strand
ccaacaaccggcuggacuu

SEQ ID NO: 318866 - RNA, 19 nt, Homo sapiens
  misc_RNA (1)...(19): siRNA sense strand
cuacaccggcugugacaug

SEQ ID NO: 318867 - RNA, 19 nt, Homo sapiens
  misc_RNA (1)...(19): siRNA sense strand
cagggaaggcgcauguuuc

SEQ ID NO: 318868 - RNA, 19 nt, Homo sapiens
  misc_RNA (1)...(19): siRNA sense strand
cggcuacuauggcuucuac

SEQ ID NO: 318869 - RNA, 19 nt, Homo sapiens
  misc_RNA (1)...(19): siRNA sense strand
caacaaccggcuggacuuc

SEQ ID NO: 318870 - RNA, 19 nt, Homo sapiens
  misc_RNA (1)...(19): siRNA sense strand
cugacaaccuggagagaag

SEQ ID NO: 318871 - RNA, 19 nt, Homo sapiens
  misc_RNA (1)...(19): siRNA sense strand
caaagcggacaccaaugug

SEQ ID NO: 318872 - RNA, 19 nt, Homo sapiens
  misc_RNA (1)...(19): siRNA sense strand
ucgaucccacggcucauua

SEQ ID NO: 318873 - RNA, 19 nt, Homo sapiens
  misc_RNA (1)...(19): siRNA sense strand
ucacuggagguuucaagga

SEQ ID NO: 318874 - RNA, 19 nt, Homo sapiens
  misc_RNA (1)...(19): siRNA sense strand
aaacuuacgaacaacaaag

SEQ ID NO: 318875 - RNA, 19 nt, Homo sapiens
  misc_RNA (1)...(19): siRNA sense strand
gggauaauuaugacacgau

SEQ ID NO: 318876 - RNA, 19 nt, Homo sapiens
  misc_RNA (1)...(19): siRNA sense strand
caugcucuccaagaaauuu

SEQ ID NO: 318877 - RNA, 19 nt, Homo sapiens
  misc_RNA (1)...(19): siRNA sense strand
gcacaagguuucaacaaga

SEQ ID NO: 318878 - RNA, 19 nt, Homo sapiens
  misc_RNA (1)...(19): siRNA sense strand
ggacaugacugcuguucuu

SEQ ID NO: 318879 - RNA, 19 nt, Homo sapiens
  misc_RNA (1)...(19): siRNA sense strand
gccaggaggugaagaaauu

SEQ ID NO: 318880 - RNA, 19 nt, Homo sapiens
  misc_RNA (1)...(19): siRNA sense strand
ggaugaauaugacucugua

SEQ ID NO: 318881 - RNA, 19 nt, Homo sapiens
  misc_RNA (1)...(19): siRNA sense strand
gaacacacacaauuaaguu

SEQ ID NO: 318882 - RNA, 19 nt, Homo sapiens
  misc_RNA (1)...(19): siRNA sense strand
caauuaaguuggauccuuu

SEQ ID NO: 318883 - RNA, 19 nt, Homo sapiens
  misc_RNA (1)...(19): siRNA sense strand
gaacacugcucgcuacaag

SEQ ID NO: 318884 - RNA, 19 nt, Homo sapiens
  misc_RNA (1)...(19): siRNA sense strand
ugaagaaauugguggguuu

SEQ ID NO: 318885 - RNA, 19 nt, Homo sapiens
  misc_RNA (1)...(19): siRNA sense strand
cagacuaccucgauuacaa

SEQ ID NO: 318886 - RNA, 19 nt, Homo sapiens
  misc_RNA (1)...(19): siRNA sense strand
ggacaaggaccauuuagag

SEQ ID NO: 318887 - RNA, 19 nt, Homo sapiens
  misc_RNA (1)...(19): siRNA sense strand
ggucagacuaccucgauua

SEQ ID NO: 318888 - RNA, 19 nt, Homo sapiens
  misc_RNA (1)...(19): siRNA sense strand
cuaccucgauuacaacauu

SEQ ID NO: 318889 - RNA, 19 nt, Homo sapiens
  misc_RNA (1)...(19): siRNA sense strand
cagaggagauagugcagaa

SEQ ID NO: 318890 - RNA, 19 nt, Homo sapiens
  misc_RNA (1)...(19): siRNA sense strand
cagccgacauucuguugua

SEQ ID NO: 318891 - RNA, 19 nt, Homo sapiens
  misc_RNA (1)...(19): siRNA sense strand
gagaagguuuuacaaauug

SEQ ID NO: 318892 - RNA, 19 nt, Homo sapiens
  misc_RNA (1)...(19): siRNA sense strand
gagguuacaggaugaauau

SEQ ID NO: 318893 - RNA, 19 nt, Homo sapiens
  misc_RNA (1)...(19): siRNA sense strand
guacaaguccacacacguu

SEQ ID NO: 318894 - RNA, 19 nt, Homo sapiens
  misc_RNA (1)...(19): siRNA sense strand
cagaugcugugauugagaa

SEQ ID NO: 318895 - RNA, 19 nt, Homo sapiens
  misc_RNA (1)...(19): siRNA sense strand
ucacauccaugaagaaggu

SEQ ID NO: 318896 - RNA, 19 nt, Homo sapiens
  misc_RNA (1)...(19): siRNA sense strand
cagcaagaagcgaguauuu

SEQ ID NO: 318897 - RNA, 19 nt, Homo sapiens
  misc_RNA (1)...(19): siRNA sense strand
caaggaccauuuagagaag

SEQ ID NO: 318898 - RNA, 19 nt, Homo sapiens
  misc_RNA (1)...(19): siRNA sense strand
ggagauagugcagaaauuc

SEQ ID NO: 318899 - RNA, 19 nt, Homo sapiens
  misc_RNA (1)...(19): siRNA sense strand
caaagacuaccaagcagaa

SEQ ID NO: 318900 - RNA, 19 nt, Homo sapiens
  misc_RNA (1)...(19): siRNA sense strand
cacaagguuucaacaagaa

SEQ ID NO: 318901 - RNA, 19 nt, Homo sapiens
  misc_RNA (1)...(19): siRNA sense strand
gacauucuguuguacaagu

SEQ ID NO: 318902 - RNA, 19 nt, Homo sapiens
  misc_RNA (1)...(19): siRNA sense strand
gacaaggaccauuuagaga

SEQ ID NO: 318903 - RNA, 19 nt, Homo sapiens
  misc_RNA (1)...(19): siRNA sense strand
gguuacaggaugaauauga

SEQ ID NO: 318904 - RNA, 19 nt, Homo sapiens
  misc_RNA (1)...(19): siRNA sense strand
gaggagauagugcagaaau

SEQ ID NO: 318905 - RNA, 19 nt, Homo sapiens
  misc_RNA (1)...(19): siRNA sense strand
acaaggaccauuuagagaa

SEQ ID NO: 318906 - RNA, 19 nt, Homo sapiens
  misc_RNA (1)...(19): siRNA sense strand
gaccuccacuccauuacug

SEQ ID NO: 318907 - RNA, 19 nt, Homo sapiens
  misc_RNA (1)...(19): siRNA sense strand
cguggcagaugcugugauu

SEQ ID NO: 318908 - RNA, 19 nt, Homo sapiens
  misc_RNA (1)...(19): siRNA sense strand
ccaacaaucucaggugucu

SEQ ID NO: 318909 - RNA, 19 nt, Homo sapiens
  misc_RNA (1)...(19): siRNA sense strand
gcuggacaaggaccauuua

SEQ ID NO: 318910 - RNA, 19 nt, Homo sapiens
  misc_RNA (1)...(19): siRNA sense strand
acaauuaaguuggauccuu

SEQ ID NO: 318911 - RNA, 19 nt, Homo sapiens
  misc_RNA (1)...(19): siRNA sense strand
cgugagcgcuggagcuuca

SEQ ID NO: 318912 - RNA, 19 nt, Homo sapiens
  misc_RNA (1)...(19): siRNA sense strand
caugacugcuguucuucuu

SEQ ID NO: 318913 - RNA, 19 nt, Homo sapiens
  misc_RNA (1)...(19): siRNA sense strand
cggugggccugcucacaua

SEQ ID NO: 318914 - RNA, 19 nt, Homo sapiens
  misc_RNA (1)...(19): siRNA sense strand
guugaccuccacuccauua

SEQ ID NO: 318915 - RNA, 19 nt, Homo sapiens
  misc_RNA (1)...(19): siRNA sense strand
ggaucuagcacaagguuuc

SEQ ID NO: 318916 - RNA, 19 nt, Homo sapiens
  misc_RNA (1)...(19): siRNA sense strand
ggaaggcaaagacuaccaa

SEQ ID NO: 318917 - RNA, 19 nt, Homo sapiens
  misc_RNA (1)...(19): siRNA sense strand
ccaaagaauuagcauacac

SEQ ID NO: 318918 - RNA, 19 nt, Homo sapiens
  misc_RNA (1)...(19): siRNA sense strand
uggcagaugcugugauuga

SEQ ID NO: 318919 - RNA, 19 nt, Homo sapiens
  misc_RNA (1)...(19): siRNA sense strand
ugucugaacacacacaauu

SEQ ID NO: 318920 - RNA, 19 nt, Homo sapiens
  misc_RNA (1)...(19): siRNA sense strand
aacugaagcuggacaagga

SEQ ID NO: 318921 - RNA, 19 nt, Homo sapiens
  misc_RNA (1)...(19): siRNA sense strand
gcagaugcugugauugaga

SEQ ID NO: 318922 - RNA, 19 nt, Homo sapiens
  misc_RNA (1)...(19): siRNA sense strand
gcaagaagcgaguauuuuc

SEQ ID NO: 318923 - RNA, 19 nt, Homo sapiens
  misc_RNA (1)...(19): siRNA sense strand
ccagaaagacagcaagaag

SEQ ID NO: 318924 - RNA, 19 nt, Homo sapiens
  misc_RNA (1)...(19): siRNA sense strand
ucugaacacacacaauuaa

SEQ ID NO: 318925 - RNA, 19 nt, Homo sapiens
  misc_RNA (1)...(19): siRNA sense strand
ugagguuacaggaugaaua

SEQ ID NO: 318926 - RNA, 19 nt, Homo sapiens
  misc_RNA (1)...(19): siRNA sense strand
agacagcccagaggagaua

SEQ ID NO: 318927 - RNA, 19 nt, Homo sapiens
  misc_RNA (1)...(19): siRNA sense strand
gccaaagaauuagcauaca

SEQ ID NO: 318928 - RNA, 19 nt, Homo sapiens
  misc_RNA (1)...(19): siRNA sense strand
gcgcuggcguguccaacau

SEQ ID NO: 318929 - RNA, 19 nt, Homo sapiens
  misc_RNA (1)...(19): siRNA sense strand
agcaaaagccaaagaauua

SEQ ID NO: 318930 - RNA, 19 nt, Homo sapiens
  misc_RNA (1)...(19): siRNA sense strand
gucugaacacacacaauua

SEQ ID NO: 318931 - RNA, 19 nt, Homo sapiens
  misc_RNA (1)...(19): siRNA sense strand
caaauuggaucagcaaaag

SEQ ID NO: 318932 - RNA, 19 nt, Homo sapiens
  misc_RNA (1)...(19): siRNA sense strand
aggagauagugcagaaauu

SEQ ID NO: 318933 - RNA, 19 nt, Homo sapiens
  misc_RNA (1)...(19): siRNA sense strand
gggugagguuacaggauga

SEQ ID NO: 318934 - RNA, 19 nt, Homo sapiens
  misc_RNA (1)...(19): siRNA sense strand
ccgacauucuguuguacaa

SEQ ID NO: 318935 - RNA, 19 nt, Homo sapiens
  misc_RNA (1)...(19): siRNA sense strand
cagagcauccuggacauga

SEQ ID NO: 318936 - RNA, 19 nt, Homo sapiens
  misc_RNA (1)...(19): siRNA sense strand
ccgaguccauucucacauc

SEQ ID NO: 318937 - RNA, 19 nt, Homo sapiens
  misc_RNA (1)...(19): siRNA sense strand
ugaacacacacaauuaagu

SEQ ID NO: 318938 - RNA, 19 nt, Homo sapiens
  misc_RNA (1)...(19): siRNA sense strand
caaagaauuagcauacacu

SEQ ID NO: 318939 - RNA, 19 nt, Homo sapiens
  misc_RNA (1)...(19): siRNA sense strand
cagcaaaagccaaagaauu

SEQ ID NO: 318940 - RNA, 19 nt, Homo sapiens
  misc_RNA (1)...(19): siRNA sense strand
ccaagacccagcuguccuu

SEQ ID NO: 318941 - RNA, 19 nt, Homo sapiens
  misc_RNA (1)...(19): siRNA sense strand
gcuggcguguccaacauag

SEQ ID NO: 318942 - RNA, 19 nt, Homo sapiens
  misc_RNA (1)...(19): siRNA sense strand
uagcacaagguuucaacaa

SEQ ID NO: 318943 - RNA, 19 nt, Homo sapiens
  misc_RNA (1)...(19): siRNA sense strand
ccaggcagccgacauucug

SEQ ID NO: 318944 - RNA, 19 nt, Homo sapiens
  misc_RNA (1)...(19): siRNA sense strand
cacacacaauuaaguugga

SEQ ID NO: 318945 - RNA, 19 nt, Homo sapiens
  misc_RNA (1)...(19): siRNA sense strand
aggcaaagacuaccaagca

SEQ ID NO: 318946 - RNA, 19 nt, Homo sapiens
  misc_RNA (1)...(19): siRNA sense strand
ggcauucaaccuacaggaa

SEQ ID NO: 318947 - RNA, 19 nt, Homo sapiens
  misc_RNA (1)...(19): siRNA sense strand
gcucacauacccaguacuc

SEQ ID NO: 318948 - RNA, 19 nt, Homo sapiens
  misc_RNA (1)...(19): siRNA sense strand
gagaaguuugccccaauua

SEQ ID NO: 318949 - RNA, 19 nt, Homo sapiens
  misc_RNA (1)...(19): siRNA sense strand
gcgaguauuuuccggcauu

SEQ ID NO: 318950 - RNA, 19 nt, Homo sapiens
  misc_RNA (1)...(19): siRNA sense strand
gcagagcauccuggacaug

SEQ ID NO: 318951 - RNA, 19 nt, Homo sapiens
  misc_RNA (1)...(19): siRNA sense strand
ugagagcugggugagguua

SEQ ID NO: 318952 - RNA, 19 nt, Homo sapiens
  misc_RNA (1)...(19): siRNA sense strand
uuacaaauuggaucagcaa

SEQ ID NO: 318953 - RNA, 19 nt, Homo sapiens
  misc_RNA (1)...(19): siRNA sense strand
gaccauuuagagaagguuu

SEQ ID NO: 318954 - RNA, 19 nt, Homo sapiens
  misc_RNA (1)...(19): siRNA sense strand
augcugugauugagaaguu

SEQ ID NO: 318955 - RNA, 19 nt, Homo sapiens
  misc_RNA (1)...(19): siRNA sense strand
guuacaggaugaauaugac

SEQ ID NO: 318956 - RNA, 19 nt, Homo sapiens
  misc_RNA (1)...(19): siRNA sense strand
uaccucgauuacaacauuu

SEQ ID NO: 318957 - RNA, 19 nt, Homo sapiens
  misc_RNA (1)...(19): siRNA sense strand
gaaguuugccccaauuaag

SEQ ID NO: 318958 - RNA, 19 nt, Homo sapiens
  misc_RNA (1)...(19): siRNA sense strand
auucucacauccaugaaga

SEQ ID NO: 318959 - RNA, 19 nt, Homo sapiens
  misc_RNA (1)...(19): siRNA sense strand
gaagaaauugguggguuuu

SEQ ID NO: 318960 - RNA, 19 nt, Homo sapiens
  misc_RNA (1)...(19): siRNA sense strand
caacauaguggcggugcau

SEQ ID NO: 318961 - RNA, 19 nt, Homo sapiens
  misc_RNA (1)...(19): siRNA sense strand
caagaaguauggggaguuc

SEQ ID NO: 318962 - RNA, 19 nt, Homo sapiens
  misc_RNA (1)...(19): siRNA sense strand
ggcagagcauccuggacau

SEQ ID NO: 318963 - RNA, 19 nt, Homo sapiens
  misc_RNA (1)...(19): siRNA sense strand
caaacaugcugaagacaua

SEQ ID NO: 318964 - RNA, 19 nt, Homo sapiens
  misc_RNA (1)...(19): siRNA sense strand
caucggacguuacggauua

SEQ ID NO: 318965 - RNA, 19 nt, Homo sapiens
  misc_RNA (1)...(19): siRNA sense strand
gcuaacaacuucuacauca

SEQ ID NO: 318966 - RNA, 19 nt, Homo sapiens
  misc_RNA (1)...(19): siRNA sense strand
gcacauggcccucaacaga

SEQ ID NO: 318967 - RNA, 19 nt, Homo sapiens
  misc_RNA (1)...(19): siRNA sense strand
agacauauuuggugaguug

SEQ ID NO: 318968 - RNA, 19 nt, Homo sapiens
  misc_RNA (1)...(19): siRNA sense strand
auacugauccuuccuauuu

SEQ ID NO: 318969 - RNA, 19 nt, Homo sapiens
  misc_RNA (1)...(19): siRNA sense strand
gaagacauauuuggugagu

SEQ ID NO: 318970 - RNA, 19 nt, Homo sapiens
  misc_RNA (1)...(19): siRNA sense strand
ucacaugcaucggacguua

SEQ ID NO: 318971 - RNA, 19 nt, Homo sapiens
  misc_RNA (1)...(19): siRNA sense strand
caaagaacagcauuccuaa

SEQ ID NO: 318972 - RNA, 19 nt, Homo sapiens
  misc_RNA (1)...(19): siRNA sense strand
ucaaagaacagcauuccua

SEQ ID NO: 318973 - RNA, 19 nt, Homo sapiens
  misc_RNA (1)...(19): siRNA sense strand
gaauguguaaccaauagua

SEQ ID NO: 318974 - RNA, 19 nt, Homo sapiens
  misc_RNA (1)...(19): siRNA sense strand
cagcgcagauaauugagua

SEQ ID NO: 318975 - RNA, 19 nt, Homo sapiens
  misc_RNA (1)...(19): siRNA sense strand
gcaagugguuucaaagaac

SEQ ID NO: 318976 - RNA, 19 nt, Homo sapiens
  misc_RNA (1)...(19): siRNA sense strand
ccagcgaacuugaaugugu

SEQ ID NO: 318977 - RNA, 19 nt, Homo sapiens
  misc_RNA (1)...(19): siRNA sense strand
gauacuaggucacaugcau

SEQ ID NO: 318978 - RNA, 19 nt, Homo sapiens
  misc_RNA (1)...(19): siRNA sense strand
gggcugaaguucuauacug

SEQ ID NO: 318979 - RNA, 19 nt, Homo sapiens
  misc_RNA (1)...(19): siRNA sense strand
gaacuugaauguguaacca

SEQ ID NO: 318980 - RNA, 19 nt, Homo sapiens
  misc_RNA (1)...(19): siRNA sense strand
uaaugaggcuaacaacuuc

SEQ ID NO: 318981 - RNA, 19 nt, Homo sapiens
  misc_RNA (1)...(19): siRNA sense strand
auacagagaugacaagaag

SEQ ID NO: 318982 - RNA, 19 nt, Homo sapiens
  misc_RNA (1)...(19): siRNA sense strand
cagcgaacuugaaugugua

SEQ ID NO: 318983 - RNA, 19 nt, Homo sapiens
  misc_RNA (1)...(19): siRNA sense strand
gaacgacugguccgacuga

SEQ ID NO: 318984 - RNA, 19 nt, Homo sapiens
  misc_RNA (1)...(19): siRNA sense strand
gauaagccaccgccucuga

SEQ ID NO: 318985 - RNA, 19 nt, Homo sapiens
  misc_RNA (1)...(19): siRNA sense strand
ugaacauccugacaccaua

SEQ ID NO: 318986 - RNA, 19 nt, Homo sapiens
  misc_RNA (1)...(19): siRNA sense strand
cauauuuggugaguuguuu

SEQ ID NO: 318987 - RNA, 19 nt, Homo sapiens
  misc_RNA (1)...(19): siRNA sense strand
ggucccgggucuucucuuu

SEQ ID NO: 318988 - RNA, 19 nt, Homo sapiens
  misc_RNA (1)...(19): siRNA sense strand
uacaggauaucaacaugaa

SEQ ID NO: 318989 - RNA, 19 nt, Homo sapiens
  misc_RNA (1)...(19): siRNA sense strand
cgucagcccucuccagaug

SEQ ID NO: 318990 - RNA, 19 nt, Homo sapiens
  misc_RNA (1)...(19): siRNA sense strand
aggaugggcugaaguucua

SEQ ID NO: 318991 - RNA, 19 nt, Homo sapiens
  misc_RNA (1)...(19): siRNA sense strand
gaacagcauuccuaauccu

SEQ ID NO: 318992 - RNA, 19 nt, Homo sapiens
  misc_RNA (1)...(19): siRNA sense strand
uaacaacuucuacaucaga

SEQ ID NO: 318993 - RNA, 19 nt, Homo sapiens
  misc_RNA (1)...(19): siRNA sense strand
cgccaggaguggaauauga

SEQ ID NO: 318994 - RNA, 19 nt, Homo sapiens
  misc_RNA (1)...(19): siRNA sense strand
gcaaacaugcugaagacau

SEQ ID NO: 318995 - RNA, 19 nt, Homo sapiens
  misc_RNA (1)...(19): siRNA sense strand
gugauucccucagcacaaa

SEQ ID NO: 318996 - RNA, 19 nt, Homo sapiens
  misc_RNA (1)...(19): siRNA sense strand
gauggcauaugacaaagag

SEQ ID NO: 318997 - RNA, 19 nt, Homo sapiens
  misc_RNA (1)...(19): siRNA sense strand
gauccuuccuauuucuuug

SEQ ID NO: 318998 - RNA, 19 nt, Homo sapiens
  misc_RNA (1)...(19): siRNA sense strand
ggcugaaguucuauacuga

SEQ ID NO: 318999 - RNA, 19 nt, Homo sapiens
  misc_RNA (1)...(19): siRNA sense strand
caagaaggaugggcugaag

SEQ ID NO: 319000 - RNA, 19 nt, Homo sapiens
  misc_RNA (1)...(19): siRNA sense strand
uuaaugaggcuaacaacuu

SEQ ID NO: 319001 - RNA, 19 nt, Homo sapiens
  misc_RNA (1)...(19): siRNA sense strand
uuggugaguuguuuaauga

SEQ ID NO: 319002 - RNA, 19 nt, Homo sapiens
  misc_RNA (1)...(19): siRNA sense strand
caagugguuucaaagaaca

SEQ ID NO: 319003 - RNA, 19 nt, Homo sapiens
  misc_RNA (1)...(19): siRNA sense strand
cuaauccuguugcugauau

SEQ ID NO: 319004 - RNA, 19 nt, Homo sapiens
  misc_RNA (1)...(19): siRNA sense strand
gcauaugacaaagagcuua

SEQ ID NO: 319005 - RNA, 19 nt, Homo sapiens
  misc_RNA (1)...(19): siRNA sense strand
uggaagaggucucacuaca

SEQ ID NO: 319006 - RNA, 19 nt, Homo sapiens
  misc_RNA (1)...(19): siRNA sense strand
ucacccagcuggauucaac

SEQ ID NO: 319007 - RNA, 19 nt, Homo sapiens
  misc_RNA (1)...(19): siRNA sense strand
cagcauuccuaauccuguu

SEQ ID NO: 319008 - RNA, 19 nt, Homo sapiens
  misc_RNA (1)...(19): siRNA sense strand
aagaacagcauuccuaauc

SEQ ID NO: 319009 - RNA, 19 nt, Homo sapiens
  misc_RNA (1)...(19): siRNA sense strand
gcugagcagucugagcaaa

SEQ ID NO: 319010 - RNA, 19 nt, Homo sapiens
  misc_RNA (1)...(19): siRNA sense strand
cagcaagugguuucaaaga

SEQ ID NO: 319011 - RNA, 19 nt, Homo sapiens
  misc_RNA (1)...(19): siRNA sense strand
gagcuuagacccgacaaca

SEQ ID NO: 319012 - RNA, 19 nt, Homo sapiens
  misc_RNA (1)...(19): siRNA sense strand
gggauuaccagcgaacuug

SEQ ID NO: 319013 - RNA, 19 nt, Homo sapiens
  misc_RNA (1)...(19): siRNA sense strand
gaaguucuauacugauccu

SEQ ID NO: 319014 - RNA, 19 nt, Homo sapiens
  misc_RNA (1)...(19): siRNA sense strand
gcgcagauaauugaguauu

SEQ ID NO: 319015 - RNA, 19 nt, Homo sapiens
  misc_RNA (1)...(19): siRNA sense strand
uuugaccucuggaaagaaa

SEQ ID NO: 319016 - RNA, 19 nt, Homo sapiens
  misc_RNA (1)...(19): siRNA sense strand
agcaagugguuucaaagaa

SEQ ID NO: 319017 - RNA, 19 nt, Homo sapiens
  misc_RNA (1)...(19): siRNA sense strand
gagcaaaagcguauagaug

SEQ ID NO: 319018 - RNA, 19 nt, Homo sapiens
  misc_RNA (1)...(19): siRNA sense strand
ggaagaggucucacuacag

SEQ ID NO: 319019 - RNA, 19 nt, Homo sapiens
  misc_RNA (1)...(19): siRNA sense strand
agaaggaugggcugaaguu

SEQ ID NO: 319020 - RNA, 19 nt, Homo sapiens
  misc_RNA (1)...(19): siRNA sense strand
gaacauccugacaccauac

SEQ ID NO: 319021 - RNA, 19 nt, Homo sapiens
  misc_RNA (1)...(19): siRNA sense strand
gcucccagcgcagauaauu

SEQ ID NO: 319022 - RNA, 19 nt, Homo sapiens
  misc_RNA (1)...(19): siRNA sense strand
ggacguuacggauuacucu

SEQ ID NO: 319023 - RNA, 19 nt, Homo sapiens
  misc_RNA (1)...(19): siRNA sense strand
cuacaggauaucaacauga

SEQ ID NO: 319024 - RNA, 19 nt, Homo sapiens
  misc_RNA (1)...(19): siRNA sense strand
gcauugccguggaguacag

SEQ ID NO: 319025 - RNA, 19 nt, Homo sapiens
  misc_RNA (1)...(19): siRNA sense strand
uugaauguguaaccaauag

SEQ ID NO: 319026 - RNA, 19 nt, Homo sapiens
  misc_RNA (1)...(19): siRNA sense strand
caaagucacccagcuggau

SEQ ID NO: 319027 - RNA, 19 nt, Homo sapiens
  misc_RNA (1)...(19): siRNA sense strand
ccuccucgcugcuauucga

SEQ ID NO: 319028 - RNA, 19 nt, Homo sapiens
  misc_RNA (1)...(19): siRNA sense strand
ccagauacuaggucacaug

SEQ ID NO: 319029 - RNA, 19 nt, Homo sapiens
  misc_RNA (1)...(19): siRNA sense strand
gagaaaaggcgucaaaagg

SEQ ID NO: 319030 - RNA, 19 nt, Homo sapiens
  misc_RNA (1)...(19): siRNA sense strand
acagagaugacaagaagga

SEQ ID NO: 319031 - RNA, 19 nt, Homo sapiens
  misc_RNA (1)...(19): siRNA sense strand
gaugggcugaaguucuaua

SEQ ID NO: 319032 - RNA, 19 nt, Homo sapiens
  misc_RNA (1)...(19): siRNA sense strand
ucccagcgcagauaauuga

SEQ ID NO: 319033 - RNA, 19 nt, Homo sapiens
  misc_RNA (1)...(19): siRNA sense strand
gaagacaaaaggaaagaga

SEQ ID NO: 319034 - RNA, 19 nt, Homo sapiens
  misc_RNA (1)...(19): siRNA sense strand
acaggacacagaagacaaa

SEQ ID NO: 319035 - RNA, 19 nt, Homo sapiens
  misc_RNA (1)...(19): siRNA sense strand
uuuggugaguuguuuaaug

SEQ ID NO: 319036 - RNA, 19 nt, Homo sapiens
  misc_RNA (1)...(19): siRNA sense strand
ggauuaccagcgaacuuga

SEQ ID NO: 319037 - RNA, 19 nt, Homo sapiens
  misc_RNA (1)...(19): siRNA sense strand
uagugaagaggaacauuga

SEQ ID NO: 319038 - RNA, 19 nt, Homo sapiens
  misc_RNA (1)...(19): siRNA sense strand
ugagcagucugagcaaaca

SEQ ID NO: 319039 - RNA, 19 nt, Homo sapiens
  misc_RNA (1)...(19): siRNA sense strand
guaaccaauaguacucuug

SEQ ID NO: 319040 - RNA, 19 nt, Homo sapiens
  misc_RNA (1)...(19): siRNA sense strand
cagaauugaucgccuugcu

SEQ ID NO: 319041 - RNA, 19 nt, Homo sapiens
  misc_RNA (1)...(19): siRNA sense strand
gauuaccagcgaacuugaa

SEQ ID NO: 319042 - RNA, 19 nt, Homo sapiens
  misc_RNA (1)...(19): siRNA sense strand
uuagugaagaggaacauug

SEQ ID NO: 319043 - RNA, 19 nt, Homo sapiens
  misc_RNA (1)...(19): siRNA sense strand
cuauacugauccuuccuau

SEQ ID NO: 319044 - RNA, 19 nt, Homo sapiens
  misc_RNA (1)...(19): siRNA sense strand
aaagucacccagcuggauu

SEQ ID NO: 319045 - RNA, 19 nt, Homo sapiens
  misc_RNA (1)...(19): siRNA sense strand
uugcugauauuuacaacca

SEQ ID NO: 319046 - RNA, 19 nt, Homo sapiens
  misc_RNA (1)...(19): siRNA sense strand
cggcuacucccaaccauuc

SEQ ID NO: 319047 - RNA, 19 nt, Homo sapiens
  misc_RNA (1)...(19): siRNA sense strand
gcaucggacguuacggauu

SEQ ID NO: 319048 - RNA, 19 nt, Homo sapiens
  misc_RNA (1)...(19): siRNA sense strand
uaccagcgaacuugaaugu

SEQ ID NO: 319049 - RNA, 19 nt, Homo sapiens
  misc_RNA (1)...(19): siRNA sense strand
gaaggaugggcugaaguuc

SEQ ID NO: 319050 - RNA, 19 nt, Homo sapiens
  misc_RNA (1)...(19): siRNA sense strand
gaggucucacuacaggaua

SEQ ID NO: 319051 - RNA, 19 nt, Homo sapiens
  misc_RNA (1)...(19): siRNA sense strand
ccucgcugcuauucgaaug

SEQ ID NO: 319052 - RNA, 19 nt, Homo sapiens
  misc_RNA (1)...(19): siRNA sense strand
gaugcucccagcgcagaua

SEQ ID NO: 319053 - RNA, 19 nt, Homo sapiens
  misc_RNA (1)...(19): siRNA sense strand
cugaaguucuauacugauc

SEQ ID NO: 319054 - RNA, 19 nt, Homo sapiens
  misc_RNA (1)...(19): siRNA sense strand
gccaccuccuccugugauu

SEQ ID NO: 319055 - RNA, 19 nt, Homo sapiens
  misc_RNA (1)...(19): siRNA sense strand
uaauccuguugcugauauu

SEQ ID NO: 319056 - RNA, 19 nt, Homo sapiens
  misc_RNA (1)...(19): siRNA sense strand
cauacagagaugacaagaa

SEQ ID NO: 319057 - RNA, 19 nt, Homo sapiens
  misc_RNA (1)...(19): siRNA sense strand
acuacaggauaucaacaug

SEQ ID NO: 319058 - RNA, 19 nt, Homo sapiens
  misc_RNA (1)...(19): siRNA sense strand
ggacacagaagacaaaagg

SEQ ID NO: 319059 - RNA, 19 nt, Homo sapiens
  misc_RNA (1)...(19): siRNA sense strand
cauccugacaccauacaga

SEQ ID NO: 319060 - RNA, 19 nt, Homo sapiens
  misc_RNA (1)...(19): siRNA sense strand
aaagaacagcauuccuaau

SEQ ID NO: 319061 - RNA, 19 nt, Homo sapiens
  misc_RNA (1)...(19): siRNA sense strand
ggacagugauccacccuaa

SEQ ID NO: 319062 - RNA, 19 nt, Homo sapiens
  misc_RNA (1)...(19): siRNA sense strand
acaaguggcugcaucauug

SEQ ID NO: 319063 - RNA, 19 nt, Homo sapiens
  misc_RNA (1)...(19): siRNA sense strand
gaagucaucccugagaaua

SEQ ID NO: 319064 - RNA, 19 nt, Homo sapiens
  misc_RNA (1)...(19): siRNA sense strand
gaaaucagaggagauguaa

SEQ ID NO: 319065 - RNA, 19 nt, Homo sapiens
  misc_RNA (1)...(19): siRNA sense strand
gaagggaaccuaauagaag

SEQ ID NO: 319066 - RNA, 19 nt, Homo sapiens
  misc_RNA (1)...(19): siRNA sense strand
ccaauaauguguuugaagu

SEQ ID NO: 319067 - RNA, 19 nt, Homo sapiens
  misc_RNA (1)...(19): siRNA sense strand
aggcagaaauguaauauug

SEQ ID NO: 319068 - RNA, 19 nt, Homo sapiens
  misc_RNA (1)...(19): siRNA sense strand
gaagaugggagauaauaau

SEQ ID NO: 319069 - RNA, 19 nt, Homo sapiens
  misc_RNA (1)...(19): siRNA sense strand
caaauuaccaccaccuaaa

SEQ ID NO: 319070 - RNA, 19 nt, Homo sapiens
  misc_RNA (1)...(19): siRNA sense strand
gcaguuguauguguagaaa

SEQ ID NO: 319071 - RNA, 19 nt, Homo sapiens
  misc_RNA (1)...(19): siRNA sense strand
caacuccaguaaagaacua

SEQ ID NO: 319072 - RNA, 19 nt, Homo sapiens
  misc_RNA (1)...(19): siRNA sense strand
cauaaaugcuuacccagau

SEQ ID NO: 319073 - RNA, 19 nt, Homo sapiens
  misc_RNA (1)...(19): siRNA sense strand
gaagaacaggcccuuauca

SEQ ID NO: 319074 - RNA, 19 nt, Homo sapiens
  misc_RNA (1)...(19): siRNA sense strand
gcaccaauaauguguuuga

SEQ ID NO: 319075 - RNA, 19 nt, Homo sapiens
  misc_RNA (1)...(19): siRNA sense strand
uaaagaagacuaugaaagg

SEQ ID NO: 319076 - RNA, 19 nt, Homo sapiens
  misc_RNA (1)...(19): siRNA sense strand
gcagaaauguaauauugac

SEQ ID NO: 319077 - RNA, 19 nt, Homo sapiens
  misc_RNA (1)...(19): siRNA sense strand
cagaggagauguaacuauc

SEQ ID NO: 319078 - RNA, 19 nt, Homo sapiens
  misc_RNA (1)...(19): siRNA sense strand
gaugggagauaauaauguc

SEQ ID NO: 319079 - RNA, 19 nt, Homo sapiens
  misc_RNA (1)...(19): siRNA sense strand
agaacaggcccuuaucaua

SEQ ID NO: 319080 - RNA, 19 nt, Homo sapiens
  misc_RNA (1)...(19): siRNA sense strand
gauccacccuaaagcaaga

SEQ ID NO: 319081 - RNA, 19 nt, Homo sapiens
  misc_RNA (1)...(19): siRNA sense strand
gcucaacuccaguaaagaa

SEQ ID NO: 319082 - RNA, 19 nt, Homo sapiens
  misc_RNA (1)...(19): siRNA sense strand
agaauacggugaucuaugg

SEQ ID NO: 319083 - RNA, 19 nt, Homo sapiens
  misc_RNA (1)...(19): siRNA sense strand
uguagaaagugaaaucaga

SEQ ID NO: 319084 - RNA, 19 nt, Homo sapiens
  misc_RNA (1)...(19): siRNA sense strand
guugcaaccuaaauacauu

SEQ ID NO: 319085 - RNA, 19 nt, Homo sapiens
  misc_RNA (1)...(19): siRNA sense strand
gagaauacggugaucuaug

SEQ ID NO: 319086 - RNA, 19 nt, Homo sapiens
  misc_RNA (1)...(19): siRNA sense strand
aaagaagacuaugaaagga

SEQ ID NO: 319087 - RNA, 19 nt, Homo sapiens
  misc_RNA (1)...(19): siRNA sense strand
cagcuggauuucuugauga

SEQ ID NO: 319088 - RNA, 19 nt, Homo sapiens
  misc_RNA (1)...(19): siRNA sense strand
cgaagggaaccuaauagaa

SEQ ID NO: 319089 - RNA, 19 nt, Homo sapiens
  misc_RNA (1)...(19): siRNA sense strand
auaaaugcuuacccagaua

SEQ ID NO: 319090 - RNA, 19 nt, Homo sapiens
  misc_RNA (1)...(19): siRNA sense strand
uauguaggcagaaauguaa

SEQ ID NO: 319091 - RNA, 19 nt, Homo sapiens
  misc_RNA (1)...(19): siRNA sense strand
cacccuaaagcaagaauua

SEQ ID NO: 319092 - RNA, 19 nt, Homo sapiens
  misc_RNA (1)...(19): siRNA sense strand
gaagcucaacuccaguaaa

SEQ ID NO: 319093 - RNA, 19 nt, Homo sapiens
  misc_RNA (1)...(19): siRNA sense strand
ccaaauuaccaccaccuaa

SEQ ID NO: 319094 - RNA, 19 nt, Homo sapiens
  misc_RNA (1)...(19): siRNA sense strand
ugaaaucagaggagaugua

SEQ ID NO: 319095 - RNA, 19 nt, Homo sapiens
  misc_RNA (1)...(19): siRNA sense strand
uaauaucacuccugacacu

SEQ ID NO: 319096 - RNA, 19 nt, Homo sapiens
  misc_RNA (1)...(19): siRNA sense strand
aagggaaccuaauagaaga

SEQ ID NO: 319097 - RNA, 19 nt, Homo sapiens
  misc_RNA (1)...(19): siRNA sense strand
aagcucaacuccaguaaag

SEQ ID NO: 319098 - RNA, 19 nt, Homo sapiens
  misc_RNA (1)...(19): siRNA sense strand
gacaaguggcugcaucauu

SEQ ID NO: 319099 - RNA, 19 nt, Homo sapiens
  misc_RNA (1)...(19): siRNA sense strand
gcauauguaggcagaaaug

SEQ ID NO: 319100 - RNA, 19 nt, Homo sapiens
  misc_RNA (1)...(19): siRNA sense strand
uaaaugcuuacccagauaa

SEQ ID NO: 319101 - RNA, 19 nt, Homo sapiens
  misc_RNA (1)...(19): siRNA sense strand
gcgaagggaaccuaauaga

SEQ ID NO: 319102 - RNA, 19 nt, Homo sapiens
  misc_RNA (1)...(19): siRNA sense strand
cacuacagcuggauuucuu

SEQ ID NO: 319103 - RNA, 19 nt, Homo sapiens
  misc_RNA (1)...(19): siRNA sense strand
ccuaaagcaagaauuauug

SEQ ID NO: 319104 - RNA, 19 nt, Homo sapiens
  misc_RNA (1)...(19): siRNA sense strand
aagcauauguaggcagaaa

SEQ ID NO: 319105 - RNA, 19 nt, Homo sapiens
  misc_RNA (1)...(19): siRNA sense strand
uagaagaacaggcccuuau

SEQ ID NO: 319106 - RNA, 19 nt, Homo sapiens
  misc_RNA (1)...(19): siRNA sense strand
uguuugaaguuggcuguua

SEQ ID NO: 319107 - RNA, 19 nt, Homo sapiens
  misc_RNA (1)...(19): siRNA sense strand
uggagcaguuguaugugua

SEQ ID NO: 319108 - RNA, 19 nt, Homo sapiens
  misc_RNA (1)...(19): siRNA sense strand
caaaagagugugaagauug

SEQ ID NO: 319109 - RNA, 19 nt, Homo sapiens
  misc_RNA (1)...(19): siRNA sense strand
ugaagaugggagauaauaa

SEQ ID NO: 319110 - RNA, 19 nt, Homo sapiens
  misc_RNA (1)...(19): siRNA sense strand
uggcaccaauaauguguuu

SEQ ID NO: 319111 - RNA, 19 nt, Homo sapiens
  misc_RNA (1)...(19): siRNA sense strand
acagcuggauuucuugaug

SEQ ID NO: 319112 - RNA, 19 nt, Homo sapiens
  misc_RNA (1)...(19): siRNA sense strand
uggcgaagggaaccuaaua

SEQ ID NO: 319113 - RNA, 19 nt, Homo sapiens
  misc_RNA (1)...(19): siRNA sense strand
guuugaaguuggcuguuau

SEQ ID NO: 319114 - RNA, 19 nt, Homo sapiens
  misc_RNA (1)...(19): siRNA sense strand
gaaccaaaaccuaugauca

SEQ ID NO: 319115 - RNA, 19 nt, Homo sapiens
  misc_RNA (1)...(19): siRNA sense strand
ggaagcucaacuccaguaa

SEQ ID NO: 319116 - RNA, 19 nt, Homo sapiens
  misc_RNA (1)...(19): siRNA sense strand
gcuuguugcaaccuaaaua

SEQ ID NO: 319117 - RNA, 19 nt, Homo sapiens
  misc_RNA (1)...(19): siRNA sense strand
cuaaagaagacuaugaaag

SEQ ID NO: 319118 - RNA, 19 nt, Homo sapiens
  misc_RNA (1)...(19): siRNA sense strand
uaucacuccugacacugaa

SEQ ID NO: 319119 - RNA, 19 nt, Homo sapiens
  misc_RNA (1)...(19): siRNA sense strand
ggcagaaauguaauauuga

SEQ ID NO: 319120 - RNA, 19 nt, Homo sapiens
  misc_RNA (1)...(19): siRNA sense strand
gaaccuaauagaagaacag

SEQ ID NO: 319121 - RNA, 19 nt, Homo sapiens
  misc_RNA (1)...(19): siRNA sense strand
cugaagauccagaaccaaa

SEQ ID NO: 319122 - RNA, 19 nt, Homo sapiens
  misc_RNA (1)...(19): siRNA sense strand
ucagaggagauguaacuau

SEQ ID NO: 319123 - RNA, 19 nt, Homo sapiens
  misc_RNA (1)...(19): siRNA sense strand
gagcaguuguauguguaga

SEQ ID NO: 319124 - RNA, 19 nt, Homo sapiens
  misc_RNA (1)...(19): siRNA sense strand
caaaaccuaugaucauugg

SEQ ID NO: 319125 - RNA, 19 nt, Homo sapiens
  misc_RNA (1)...(19): siRNA sense strand
caccuaaagaagacuauga

SEQ ID NO: 319126 - RNA, 19 nt, Homo sapiens
  misc_RNA (1)...(19): siRNA sense strand
agacacuacagcuggauuu

SEQ ID NO: 319127 - RNA, 19 nt, Homo sapiens
  misc_RNA (1)...(19): siRNA sense strand
ucaaaagagugugaagauu

SEQ ID NO: 319128 - RNA, 19 nt, Homo sapiens
  misc_RNA (1)...(19): siRNA sense strand
ggaaccuaauagaagaaca

SEQ ID NO: 319129 - RNA, 19 nt, Homo sapiens
  misc_RNA (1)...(19): siRNA sense strand
guaggcagaaauguaauau

SEQ ID NO: 319130 - RNA, 19 nt, Homo sapiens
  misc_RNA (1)...(19): siRNA sense strand
caccaauaauguguuugaa

SEQ ID NO: 319131 - RNA, 19 nt, Homo sapiens
  misc_RNA (1)...(19): siRNA sense strand
aaucagaggagauguaacu

SEQ ID NO: 319132 - RNA, 19 nt, Homo sapiens
  misc_RNA (1)...(19): siRNA sense strand
ccuaaagaagacuaugaaa

SEQ ID NO: 319133 - RNA, 19 nt, Homo sapiens
  misc_RNA (1)...(19): siRNA sense strand
uguaggcagaaauguaaua

SEQ ID NO: 319134 - RNA, 19 nt, Homo sapiens
  misc_RNA (1)...(19): siRNA sense strand
augcuuacccagauaauau

SEQ ID NO: 319135 - RNA, 19 nt, Homo sapiens
  misc_RNA (1)...(19): siRNA sense strand
cuggagcaguuguaugugu

SEQ ID NO: 319136 - RNA, 19 nt, Homo sapiens
  misc_RNA (1)...(19): siRNA sense strand
aagaagacuaugaaaggaa

SEQ ID NO: 319137 - RNA, 19 nt, Homo sapiens
  misc_RNA (1)...(19): siRNA sense strand
gccaaauuaccaccaccua

SEQ ID NO: 319138 - RNA, 19 nt, Homo sapiens
  misc_RNA (1)...(19): siRNA sense strand
cugagaauacggugaucua

SEQ ID NO: 319139 - RNA, 19 nt, Homo sapiens
  misc_RNA (1)...(19): siRNA sense strand
cccuaaagcaagaauuauu

SEQ ID NO: 319140 - RNA, 19 nt, Homo sapiens
  misc_RNA (1)...(19): siRNA sense strand
acagugauccacccuaaag

SEQ ID NO: 319141 - RNA, 19 nt, Homo sapiens
  misc_RNA (1)...(19): siRNA sense strand
gacagugauccacccuaaa

SEQ ID NO: 319142 - RNA, 19 nt, Homo sapiens
  misc_RNA (1)...(19): siRNA sense strand
uaccaccaccuaaagaaga

SEQ ID NO: 319143 - RNA, 19 nt, Homo sapiens
  misc_RNA (1)...(19): siRNA sense strand
auauguaggcagaaaugua

SEQ ID NO: 319144 - RNA, 19 nt, Homo sapiens
  misc_RNA (1)...(19): siRNA sense strand
augaagaugggagauaaua

SEQ ID NO: 319145 - RNA, 19 nt, Homo sapiens
  misc_RNA (1)...(19): siRNA sense strand
cacugaagauccagaacca

SEQ ID NO: 319146 - RNA, 19 nt, Homo sapiens
  misc_RNA (1)...(19): siRNA sense strand
aguuguauguguagaaagu

SEQ ID NO: 319147 - RNA, 19 nt, Homo sapiens
  misc_RNA (1)...(19): siRNA sense strand
guauguguagaaagugaaa

SEQ ID NO: 319148 - RNA, 19 nt, Homo sapiens
  misc_RNA (1)...(19): siRNA sense strand
ugaugaaaaucuugccaaa

SEQ ID NO: 319149 - RNA, 19 nt, Homo sapiens
  misc_RNA (1)...(19): siRNA sense strand
aagaugggagauaauaaug

SEQ ID NO: 319150 - RNA, 19 nt, Homo sapiens
  misc_RNA (1)...(19): siRNA sense strand
cuacagcuggauuucuuga

SEQ ID NO: 319151 - RNA, 19 nt, Homo sapiens
  misc_RNA (1)...(19): siRNA sense strand
ugaagucaucccugagaau

SEQ ID NO: 319152 - RNA, 19 nt, Homo sapiens
  misc_RNA (1)...(19): siRNA sense strand
uugaagucaucccugagaa

SEQ ID NO: 319153 - RNA, 19 nt, Homo sapiens
  misc_RNA (1)...(19): siRNA sense strand
ugacacugaagauccagaa

SEQ ID NO: 319154 - RNA, 19 nt, Homo sapiens
  misc_RNA (1)...(19): siRNA sense strand
ggaaauggauggacugugu

SEQ ID NO: 319155 - RNA, 19 nt, Homo sapiens
  misc_RNA (1)...(19): siRNA sense strand
gauagacgcugcuacuuug

SEQ ID NO: 319156 - RNA, 19 nt, Homo sapiens
  misc_RNA (1)...(19): siRNA sense strand
gaugaaagauucgguaguu

SEQ ID NO: 319157 - RNA, 19 nt, Homo sapiens
  misc_RNA (1)...(19): siRNA sense strand
caauccaacucacuuauaa

SEQ ID NO: 319158 - RNA, 19 nt, Homo sapiens
  misc_RNA (1)...(19): siRNA sense strand
cagauuuccugucuacuua

SEQ ID NO: 319159 - RNA, 19 nt, Homo sapiens
  misc_RNA (1)...(19): siRNA sense strand
acacaugacucaaguauuc

SEQ ID NO: 319160 - RNA, 19 nt, Homo sapiens
  misc_RNA (1)...(19): siRNA sense strand
acaaggaucuacagucuuu

SEQ ID NO: 319161 - RNA, 19 nt, Homo sapiens
  misc_RNA (1)...(19): siRNA sense strand
gcaaagacacggugcaaau

SEQ ID NO: 319162 - RNA, 19 nt, Homo sapiens
  misc_RNA (1)...(19): siRNA sense strand
gcaaauccaugauaucacu

SEQ ID NO: 319163 - RNA, 19 nt, Homo sapiens
  misc_RNA (1)...(19): siRNA sense strand
gaaagauucgguaguuauu

SEQ ID NO: 319164 - RNA, 19 nt, Homo sapiens
  misc_RNA (1)...(19): siRNA sense strand
gaagguagcccagcuugaa

SEQ ID NO: 319165 - RNA, 19 nt, Homo sapiens
  misc_RNA (1)...(19): siRNA sense strand
gcaauccaacucacuuaua

SEQ ID NO: 319166 - RNA, 19 nt, Homo sapiens
  misc_RNA (1)...(19): siRNA sense strand
uuaaaccucugaaagcuaa

SEQ ID NO: 319167 - RNA, 19 nt, Homo sapiens
  misc_RNA (1)...(19): siRNA sense strand
gaagucaaacagcugauaa

SEQ ID NO: 319168 - RNA, 19 nt, Homo sapiens
  misc_RNA (1)...(19): siRNA sense strand
caucuacuccuaaugguua

SEQ ID NO: 319169 - RNA, 19 nt, Homo sapiens
  misc_RNA (1)...(19): siRNA sense strand
agacaacugcugcaucuua

SEQ ID NO: 319170 - RNA, 19 nt, Homo sapiens
  misc_RNA (1)...(19): siRNA sense strand
gauaaucccauucaacaga

SEQ ID NO: 319171 - RNA, 19 nt, Homo sapiens
  misc_RNA (1)...(19): siRNA sense strand
caauggaguuuauuaccaa

SEQ ID NO: 319172 - RNA, 19 nt, Homo sapiens
  misc_RNA (1)...(19): siRNA sense strand
gaccugaagcugacaagua

SEQ ID NO: 319173 - RNA, 19 nt, Homo sapiens
  misc_RNA (1)...(19): siRNA sense strand
ccaacuaccuguggcauug

SEQ ID NO: 319174 - RNA, 19 nt, Homo sapiens
  misc_RNA (1)...(19): siRNA sense strand
acaaguaccgccuaacaua

SEQ ID NO: 319175 - RNA, 19 nt, Homo sapiens
  misc_RNA (1)...(19): siRNA sense strand
gauggacuguguuucagaa

SEQ ID NO: 319176 - RNA, 19 nt, Homo sapiens
  misc_RNA (1)...(19): siRNA sense strand
gaaauaugaagcaucgauu

SEQ ID NO: 319177 - RNA, 19 nt, Homo sapiens
  misc_RNA (1)...(19): siRNA sense strand
gaaccaguacugcagacua

SEQ ID NO: 319178 - RNA, 19 nt, Homo sapiens
  misc_RNA (1)...(19): siRNA sense strand
gcagauuuccugucuacuu

SEQ ID NO: 319179 - RNA, 19 nt, Homo sapiens
  misc_RNA (1)...(19): siRNA sense strand
gagacuugauggcagugua

SEQ ID NO: 319180 - RNA, 19 nt, Homo sapiens
  misc_RNA (1)...(19): siRNA sense strand
ugacucaaguauucgauau

SEQ ID NO: 319181 - RNA, 19 nt, Homo sapiens
  misc_RNA (1)...(19): siRNA sense strand
gaacaggauggaucugguu

SEQ ID NO: 319182 - RNA, 19 nt, Homo sapiens
  misc_RNA (1)...(19): siRNA sense strand
gcugggaaaugagaagauu

SEQ ID NO: 319183 - RNA, 19 nt, Homo sapiens
  misc_RNA (1)...(19): siRNA sense strand
gaagauaaucccauucaac

SEQ ID NO: 319184 - RNA, 19 nt, Homo sapiens
  misc_RNA (1)...(19): siRNA sense strand
uaacacaugacucaaguau

SEQ ID NO: 319185 - RNA, 19 nt, Homo sapiens
  misc_RNA (1)...(19): siRNA sense strand
ccuaacauaugccuacuuc

SEQ ID NO: 319186 - RNA, 19 nt, Homo sapiens
  misc_RNA (1)...(19): siRNA sense strand
caucccauaugcauuaaga

SEQ ID NO: 319187 - RNA, 19 nt, Homo sapiens
  misc_RNA (1)...(19): siRNA sense strand
ggacuguguuucagaagag

SEQ ID NO: 319188 - RNA, 19 nt, Homo sapiens
  misc_RNA (1)...(19): siRNA sense strand
ccaggaaccuugcaaagac

SEQ ID NO: 319189 - RNA, 19 nt, Homo sapiens
  misc_RNA (1)...(19): siRNA sense strand
aaaccaaaguagacaagga

SEQ ID NO: 319190 - RNA, 19 nt, Homo sapiens
  misc_RNA (1)...(19): siRNA sense strand
ggaucugguugguggauga

SEQ ID NO: 319191 - RNA, 19 nt, Homo sapiens
  misc_RNA (1)...(19): siRNA sense strand
gaaggcaacugugcugaac

SEQ ID NO: 319192 - RNA, 19 nt, Homo sapiens
  misc_RNA (1)...(19): siRNA sense strand
gcugacaaguaccgccuaa

SEQ ID NO: 319193 - RNA, 19 nt, Homo sapiens
  misc_RNA (1)...(19): siRNA sense strand
ucugaaagcuaaccagcaa

SEQ ID NO: 319194 - RNA, 19 nt, Homo sapiens
  misc_RNA (1)...(19): siRNA sense strand
ucacuuauaauccugauga

SEQ ID NO: 319195 - RNA, 19 nt, Homo sapiens
  misc_RNA (1)...(19): siRNA sense strand
cuacuucuaugcucuuuua

SEQ ID NO: 319196 - RNA, 19 nt, Homo sapiens
  misc_RNA (1)...(19): siRNA sense strand
gacaacugcugcaucuuag

SEQ ID NO: 319197 - RNA, 19 nt, Homo sapiens
  misc_RNA (1)...(19): siRNA sense strand
ugauagacgcugcuacuuu

SEQ ID NO: 319198 - RNA, 19 nt, Homo sapiens
  misc_RNA (1)...(19): siRNA sense strand
aaagaaggauuuggacauc

SEQ ID NO: 319199 - RNA, 19 nt, Homo sapiens
  misc_RNA (1)...(19): siRNA sense strand
gggacaaugacaaugauaa

SEQ ID NO: 319200 - RNA, 19 nt, Homo sapiens
  misc_RNA (1)...(19): siRNA sense strand
gaagauucauuugauaagc

SEQ ID NO: 319201 - RNA, 19 nt, Homo sapiens
  misc_RNA (1)...(19): siRNA sense strand
ugaaagauucgguaguuau

SEQ ID NO: 319202 - RNA, 19 nt, Homo sapiens
  misc_RNA (1)...(19): siRNA sense strand
ccuguggcauugcagauuu

SEQ ID NO: 319203 - RNA, 19 nt, Homo sapiens
  misc_RNA (1)...(19): siRNA sense strand
ucaacagacucacaauugg

SEQ ID NO: 319204 - RNA, 19 nt, Homo sapiens
  misc_RNA (1)...(19): siRNA sense strand
ucaauggaguuuauuacca

SEQ ID NO: 319205 - RNA, 19 nt, Homo sapiens
  misc_RNA (1)...(19): siRNA sense strand
guugguggaugaacaagug

SEQ ID NO: 319206 - RNA, 19 nt, Homo sapiens
  misc_RNA (1)...(19): siRNA sense strand
caaguaccgccuaacauau

SEQ ID NO: 319207 - RNA, 19 nt, Homo sapiens
  misc_RNA (1)...(19): siRNA sense strand
gaacuggaagacuggaaug

SEQ ID NO: 319208 - RNA, 19 nt, Homo sapiens
  misc_RNA (1)...(19): siRNA sense strand
agagacaacugcugcaucu

SEQ ID NO: 319209 - RNA, 19 nt, Homo sapiens
  misc_RNA (1)...(19): siRNA sense strand
ggacaaugacaaugauaag

SEQ ID NO: 319210 - RNA, 19 nt, Homo sapiens
  misc_RNA (1)...(19): siRNA sense strand
uggaauggcagaaccagua

SEQ ID NO: 319211 - RNA, 19 nt, Homo sapiens
  misc_RNA (1)...(19): siRNA sense strand
caaaacaucagaagucaaa

SEQ ID NO: 319212 - RNA, 19 nt, Homo sapiens
  misc_RNA (1)...(19): siRNA sense strand
caacagacucacaauugga

SEQ ID NO: 319213 - RNA, 19 nt, Homo sapiens
  misc_RNA (1)...(19): siRNA sense strand
cauaauggcaugcaguuca

SEQ ID NO: 319214 - RNA, 19 nt, Homo sapiens
  misc_RNA (1)...(19): siRNA sense strand
ugaaagcuaaccagcaauu

SEQ ID NO: 319215 - RNA, 19 nt, Homo sapiens
  misc_RNA (1)...(19): siRNA sense strand
cgaugggucuggaaaugga

SEQ ID NO: 319216 - RNA, 19 nt, Homo sapiens
  misc_RNA (1)...(19): siRNA sense strand
uaaagaaggauuuggacau

SEQ ID NO: 319217 - RNA, 19 nt, Homo sapiens
  misc_RNA (1)...(19): siRNA sense strand
gugcaaauccaugauauca

SEQ ID NO: 319218 - RNA, 19 nt, Homo sapiens
  misc_RNA (1)...(19): siRNA sense strand
ugccaucccauaugcauua

SEQ ID NO: 319219 - RNA, 19 nt, Homo sapiens
  misc_RNA (1)...(19): siRNA sense strand
gaaauggauggacuguguu

SEQ ID NO: 319220 - RNA, 19 nt, Homo sapiens
  misc_RNA (1)...(19): siRNA sense strand
ccaauaagggagcuaaaca

SEQ ID NO: 319221 - RNA, 19 nt, Homo sapiens
  misc_RNA (1)...(19): siRNA sense strand
ugauaucacugggaaagau

SEQ ID NO: 319222 - RNA, 19 nt, Homo sapiens
  misc_RNA (1)...(19): siRNA sense strand
gauaucacugggaaagauu

SEQ ID NO: 319223 - RNA, 19 nt, Homo sapiens
  misc_RNA (1)...(19): siRNA sense strand
ggugguauuccaugaagaa

SEQ ID NO: 319224 - RNA, 19 nt, Homo sapiens
  misc_RNA (1)...(19): siRNA sense strand
ucaaaagcaucuacuccua

SEQ ID NO: 319225 - RNA, 19 nt, Homo sapiens
  misc_RNA (1)...(19): siRNA sense strand
aagauucgguaguuauugu

SEQ ID NO: 319226 - RNA, 19 nt, Homo sapiens
  misc_RNA (1)...(19): siRNA sense strand
gcaauucuuagucuacugu

SEQ ID NO: 319227 - RNA, 19 nt, Homo sapiens
  misc_RNA (1)...(19): siRNA sense strand
ucaaacagcugauaaaagc

SEQ ID NO: 319228 - RNA, 19 nt, Homo sapiens
  misc_RNA (1)...(19): siRNA sense strand
aagauaaucccauucaaca

SEQ ID NO: 319229 - RNA, 19 nt, Homo sapiens
  misc_RNA (1)...(19): siRNA sense strand
ugacaaguaccgccuaaca

SEQ ID NO: 319230 - RNA, 19 nt, Homo sapiens
  misc_RNA (1)...(19): siRNA sense strand
aaccaguacugcagacuau

SEQ ID NO: 319231 - RNA, 19 nt, Homo sapiens
  misc_RNA (1)...(19): siRNA sense strand
gcaguguagauuucaagaa

SEQ ID NO: 319232 - RNA, 19 nt, Homo sapiens
  misc_RNA (1)...(19): siRNA sense strand
ugggaaagauugucaagac

SEQ ID NO: 319233 - RNA, 19 nt, Homo sapiens
  misc_RNA (1)...(19): siRNA sense strand
gccaggaaccuugcaaaga

SEQ ID NO: 319234 - RNA, 19 nt, Homo sapiens
  misc_RNA (1)...(19): siRNA sense strand
caagguggcacuuacucaa

SEQ ID NO: 319235 - RNA, 19 nt, Homo sapiens
  misc_RNA (1)...(19): siRNA sense strand
gcgaugauccuagugacaa

SEQ ID NO: 319236 - RNA, 19 nt, Homo sapiens
  misc_RNA (1)...(19): siRNA sense strand
gaaaucgaugggucuggaa

SEQ ID NO: 319237 - RNA, 19 nt, Homo sapiens
  misc_RNA (1)...(19): siRNA sense strand
uuguuaaccugaaagagaa

SEQ ID NO: 319238 - RNA, 19 nt, Homo sapiens
  misc_RNA (1)...(19): siRNA sense strand
agaaggauuuggacaucug

SEQ ID NO: 319239 - RNA, 19 nt, Homo sapiens
  misc_RNA (1)...(19): siRNA sense strand
ugauggcaguguagauuuc

SEQ ID NO: 319240 - RNA, 19 nt, Homo sapiens
  misc_RNA (1)...(19): siRNA sense strand
gaaagcuaaccagcaauuc

SEQ ID NO: 319241 - RNA, 19 nt, Homo sapiens
  misc_RNA (1)...(19): siRNA sense strand
caaagacacggugcaaauc

SEQ ID NO: 319242 - RNA, 19 nt, Homo sapiens
  misc_RNA (1)...(19): siRNA sense strand
aagcaauccaacucacuua

SEQ ID NO: 319243 - RNA, 19 nt, Homo sapiens
  misc_RNA (1)...(19): siRNA sense strand
ggaacuggaagacuggaau

SEQ ID NO: 319244 - RNA, 19 nt, Homo sapiens
  misc_RNA (1)...(19): siRNA sense strand
augaaagauucgguaguua

SEQ ID NO: 319245 - RNA, 19 nt, Homo sapiens
  misc_RNA (1)...(19): siRNA sense strand
cuuauaauccugaugaauc

SEQ ID NO: 319246 - RNA, 19 nt, Homo sapiens
  misc_RNA (1)...(19): siRNA sense strand
gauuuccugucuacuuauc

SEQ ID NO: 319247 - RNA, 19 nt, Homo sapiens
  misc_RNA (1)...(19): siRNA sense strand
ccaacucacuuauaauccu

SEQ ID NO: 319248 - RNA, 19 nt, Homo sapiens
  misc_RNA (1)...(19): siRNA sense strand
uuaccaagguggcacuuac

SEQ ID NO: 319249 - RNA, 19 nt, Homo sapiens
  misc_RNA (1)...(19): siRNA sense strand
ggaucuacagucuuuggaa

SEQ ID NO: 319250 - RNA, 19 nt, Homo sapiens
  misc_RNA (1)...(19): siRNA sense strand
uucaacauguguagcauau

SEQ ID NO: 319251 - RNA, 19 nt, Homo sapiens
  misc_RNA (1)...(19): siRNA sense strand
aauaagggagcuaaacaga

SEQ ID NO: 319252 - RNA, 19 nt, Homo sapiens
  misc_RNA (1)...(19): siRNA sense strand
agacaucuuacaucaaguu

SEQ ID NO: 319253 - RNA, 19 nt, Homo sapiens
  misc_RNA (1)...(19): siRNA sense strand
caggaaccuugcaaagaca

SEQ ID NO: 319254 - RNA, 19 nt, Homo sapiens
  misc_RNA (1)...(19): siRNA sense strand
ggaaauggauggacugugu

SEQ ID NO: 319255 - RNA, 19 nt, Homo sapiens
  misc_RNA (1)...(19): siRNA sense strand
gauagacgcugcuacuuug

SEQ ID NO: 319256 - RNA, 19 nt, Homo sapiens
  misc_RNA (1)...(19): siRNA sense strand
gaugaaagauucgguaguu

SEQ ID NO: 319257 - RNA, 19 nt, Homo sapiens
  misc_RNA (1)...(19): siRNA sense strand
caauccaacucacuuauaa

SEQ ID NO: 319258 - RNA, 19 nt, Homo sapiens
  misc_RNA (1)...(19): siRNA sense strand
cagauuuccugucuacuua

SEQ ID NO: 319259 - RNA, 19 nt, Homo sapiens
  misc_RNA (1)...(19): siRNA sense strand
acacaugacucaaguauuc

SEQ ID NO: 319260 - RNA, 19 nt, Homo sapiens
  misc_RNA (1)...(19): siRNA sense strand
acaaggaucuacagucuuu

SEQ ID NO: 319261 - RNA, 19 nt, Homo sapiens
  misc_RNA (1)...(19): siRNA sense strand
gcaaagacacggugcaaau

SEQ ID NO: 319262 - RNA, 19 nt, Homo sapiens
  misc_RNA (1)...(19): siRNA sense strand
gcaaauccaugauaucacu

SEQ ID NO: 319263 - RNA, 19 nt, Homo sapiens
  misc_RNA (1)...(19): siRNA sense strand
gaaagauucgguaguuauu

SEQ ID NO: 319264 - RNA, 19 nt, Homo sapiens
  misc_RNA (1)...(19): siRNA sense strand
gaagguagcccagcuugaa

SEQ ID NO: 319265 - RNA, 19 nt, Homo sapiens
  misc_RNA (1)...(19): siRNA sense strand
gcaauccaacucacuuaua

SEQ ID NO: 319266 - RNA, 19 nt, Homo sapiens
  misc_RNA (1)...(19): siRNA sense strand
uuaaaccucugaaagcuaa

SEQ ID NO: 319267 - RNA, 19 nt, Homo sapiens
  misc_RNA (1)...(19): siRNA sense strand
gaagucaaacagcugauaa

SEQ ID NO: 319268 - RNA, 19 nt, Homo sapiens
  misc_RNA (1)...(19): siRNA sense strand
caucuacuccuaaugguua

SEQ ID NO: 319269 - RNA, 19 nt, Homo sapiens
  misc_RNA (1)...(19): siRNA sense strand
agacaacugcugcaucuua

SEQ ID NO: 319270 - RNA, 19 nt, Homo sapiens
  misc_RNA (1)...(19): siRNA sense strand
gauaaucccauucaacaga

SEQ ID NO: 319271 - RNA, 19 nt, Homo sapiens
  misc_RNA (1)...(19): siRNA sense strand
caauggaguuuauuaccaa

SEQ ID NO: 319272 - RNA, 19 nt, Homo sapiens
  misc_RNA (1)...(19): siRNA sense strand
gaccugaagcugacaagua

SEQ ID NO: 319273 - RNA, 19 nt, Homo sapiens
  misc_RNA (1)...(19): siRNA sense strand
ccaacuaccuguggcauug

SEQ ID NO: 319274 - RNA, 19 nt, Homo sapiens
  misc_RNA (1)...(19): siRNA sense strand
acaaguaccgccuaacaua

SEQ ID NO: 319275 - RNA, 19 nt, Homo sapiens
  misc_RNA (1)...(19): siRNA sense strand
gauggacuguguuucagaa

SEQ ID NO: 319276 - RNA, 19 nt, Homo sapiens
  misc_RNA (1)...(19): siRNA sense strand
gaaauaugaagcaucgauu

SEQ ID NO: 319277 - RNA, 19 nt, Homo sapiens
  misc_RNA (1)...(19): siRNA sense strand
gaaccaguacugcagacua

SEQ ID NO: 319278 - RNA, 19 nt, Homo sapiens
  misc_RNA (1)...(19): siRNA sense strand
gcagauuuccugucuacuu

SEQ ID NO: 319279 - RNA, 19 nt, Homo sapiens
  misc_RNA (1)...(19): siRNA sense strand
gagacuugauggcagugua

SEQ ID NO: 319280 - RNA, 19 nt, Homo sapiens
  misc_RNA (1)...(19): siRNA sense strand
ugacucaaguauucgauau

SEQ ID NO: 319281 - RNA, 19 nt, Homo sapiens
  misc_RNA (1)...(19): siRNA sense strand
gaacaggauggaucugguu

SEQ ID NO: 319282 - RNA, 19 nt, Homo sapiens
  misc_RNA (1)...(19): siRNA sense strand
gcugggaaaugagaagauu

SEQ ID NO: 319283 - RNA, 19 nt, Homo sapiens
  misc_RNA (1)...(19): siRNA sense strand
gaagauaaucccauucaac

SEQ ID NO: 319284 - RNA, 19 nt, Homo sapiens
  misc_RNA (1)...(19): siRNA sense strand
uaacacaugacucaaguau

SEQ ID NO: 319285 - RNA, 19 nt, Homo sapiens
  misc_RNA (1)...(19): siRNA sense strand
ccuaacauaugccuacuuc

SEQ ID NO: 319286 - RNA, 19 nt, Homo sapiens
  misc_RNA (1)...(19): siRNA sense strand
caucccauaugcauuaaga

SEQ ID NO: 319287 - RNA, 19 nt, Homo sapiens
  misc_RNA (1)...(19): siRNA sense strand
ggacuguguuucagaagag

SEQ ID NO: 319288 - RNA, 19 nt, Homo sapiens
  misc_RNA (1)...(19): siRNA sense strand
ccaggaaccuugcaaagac

SEQ ID NO: 319289 - RNA, 19 nt, Homo sapiens
  misc_RNA (1)...(19): siRNA sense strand
aaaccaaaguagacaagga

SEQ ID NO: 319290 - RNA, 19 nt, Homo sapiens
  misc_RNA (1)...(19): siRNA sense strand
ggaucugguugguggauga

SEQ ID NO: 319291 - RNA, 19 nt, Homo sapiens
  misc_RNA (1)...(19): siRNA sense strand
gaaggcaacugugcugaac

SEQ ID NO: 319292 - RNA, 19 nt, Homo sapiens
  misc_RNA (1)...(19): siRNA sense strand
gcugacaaguaccgccuaa

SEQ ID NO: 319293 - RNA, 19 nt, Homo sapiens
  misc_RNA (1)...(19): siRNA sense strand
ucugaaagcuaaccagcaa

SEQ ID NO: 319294 - RNA, 19 nt, Homo sapiens
  misc_RNA (1)...(19): siRNA sense strand
ucacuuauaauccugauga

SEQ ID NO: 319295 - RNA, 19 nt, Homo sapiens
  misc_RNA (1)...(19): siRNA sense strand
cuacuucuaugcucuuuua

SEQ ID NO: 319296 - RNA, 19 nt, Homo sapiens
  misc_RNA (1)...(19): siRNA sense strand
gacaacugcugcaucuuag

SEQ ID NO: 319297 - RNA, 19 nt, Homo sapiens
  misc_RNA (1)...(19): siRNA sense strand
ugauagacgcugcuacuuu

SEQ ID NO: 319298 - RNA, 19 nt, Homo sapiens
  misc_RNA (1)...(19): siRNA sense strand
aaagaaggauuuggacauc

SEQ ID NO: 319299 - RNA, 19 nt, Homo sapiens
  misc_RNA (1)...(19): siRNA sense strand
gggacaaugacaaugauaa

SEQ ID NO: 319300 - RNA, 19 nt, Homo sapiens
  misc_RNA (1)...(19): siRNA sense strand
gaagauucauuugauaagc

SEQ ID NO: 319301 - RNA, 19 nt, Homo sapiens
  misc_RNA (1)...(19): siRNA sense strand
ugaaagauucgguaguuau

SEQ ID NO: 319302 - RNA, 19 nt, Homo sapiens
  misc_RNA (1)...(19): siRNA sense strand
ccuguggcauugcagauuu

SEQ ID NO: 319303 - RNA, 19 nt, Homo sapiens
  misc_RNA (1)...(19): siRNA sense strand
ucaacagacucacaauugg

SEQ ID NO: 319304 - RNA, 19 nt, Homo sapiens
  misc_RNA (1)...(19): siRNA sense strand
ucaauggaguuuauuacca

SEQ ID NO: 319305 - RNA, 19 nt, Homo sapiens
  misc_RNA (1)...(19): siRNA sense strand
guugguggaugaacaagug

SEQ ID NO: 319306 - RNA, 19 nt, Homo sapiens
  misc_RNA (1)...(19): siRNA sense strand
caaguaccgccuaacauau

SEQ ID NO: 319307 - RNA, 19 nt, Homo sapiens
  misc_RNA (1)...(19): siRNA sense strand
gaacuggaagacuggaaug

SEQ ID NO: 319308 - RNA, 19 nt, Homo sapiens
  misc_RNA (1)...(19): siRNA sense strand
agagacaacugcugcaucu

SEQ ID NO: 319309 - RNA, 19 nt, Homo sapiens
  misc_RNA (1)...(19): siRNA sense strand
ggacaaugacaaugauaag

SEQ ID NO: 319310 - RNA, 19 nt, Homo sapiens
  misc_RNA (1)...(19): siRNA sense strand
uggaauggcagaaccagua

SEQ ID NO: 319311 - RNA, 19 nt, Homo sapiens
  misc_RNA (1)...(19): siRNA sense strand
caaaacaucagaagucaaa

SEQ ID NO: 319312 - RNA, 19 nt, Homo sapiens
  misc_RNA (1)...(19): siRNA sense strand
caacagacucacaauugga

SEQ ID NO: 319313 - RNA, 19 nt, Homo sapiens
  misc_RNA (1)...(19): siRNA sense strand
cauaauggcaugcaguuca

SEQ ID NO: 319314 - RNA, 19 nt, Homo sapiens
  misc_RNA (1)...(19): siRNA sense strand
ugaaagcuaaccagcaauu

SEQ ID NO: 319315 - RNA, 19 nt, Homo sapiens
  misc_RNA (1)...(19): siRNA sense strand
cgaugggucuggaaaugga

SEQ ID NO: 319316 - RNA, 19 nt, Homo sapiens
  misc_RNA (1)...(19): siRNA sense strand
uaaagaaggauuuggacau

SEQ ID NO: 319317 - RNA, 19 nt, Homo sapiens
  misc_RNA (1)...(19): siRNA sense strand
gugcaaauccaugauauca

SEQ ID NO: 319318 - RNA, 19 nt, Homo sapiens
  misc_RNA (1)...(19): siRNA sense strand
ugccaucccauaugcauua

SEQ ID NO: 319319 - RNA, 19 nt, Homo sapiens
  misc_RNA (1)...(19): siRNA sense strand
gaaauggauggacuguguu

SEQ ID NO: 319320 - RNA, 19 nt, Homo sapiens
  misc_RNA (1)...(19): siRNA sense strand
ccaauaagggagcuaaaca

SEQ ID NO: 319321 - RNA, 19 nt, Homo sapiens
  misc_RNA (1)...(19): siRNA sense strand
ugauaucacugggaaagau

SEQ ID NO: 319322 - RNA, 19 nt, Homo sapiens
  misc_RNA (1)...(19): siRNA sense strand
gauaucacugggaaagauu

SEQ ID NO: 319323 - RNA, 19 nt, Homo sapiens
  misc_RNA (1)...(19): siRNA sense strand
ggugguauuccaugaagaa

SEQ ID NO: 319324 - RNA, 19 nt, Homo sapiens
  misc_RNA (1)...(19): siRNA sense strand
ucaaaagcaucuacuccua

SEQ ID NO: 319325 - RNA, 19 nt, Homo sapiens
  misc_RNA (1)...(19): siRNA sense strand
aagauucgguaguuauugu

SEQ ID NO: 319326 - RNA, 19 nt, Homo sapiens
  misc_RNA (1)...(19): siRNA sense strand
gcaauucuuagucuacugu

SEQ ID NO: 319327 - RNA, 19 nt, Homo sapiens
  misc_RNA (1)...(19): siRNA sense strand
ucaaacagcugauaaaagc

SEQ ID NO: 319328 - RNA, 19 nt, Homo sapiens
  misc_RNA (1)...(19): siRNA sense strand
aagauaaucccauucaaca

SEQ ID NO: 319329 - RNA, 19 nt, Homo sapiens
  misc_RNA (1)...(19): siRNA sense strand
ugacaaguaccgccuaaca

SEQ ID NO: 319330 - RNA, 19 nt, Homo sapiens
  misc_RNA (1)...(19): siRNA sense strand
aaccaguacugcagacuau

SEQ ID NO: 319331 - RNA, 19 nt, Homo sapiens
  misc_RNA (1)...(19): siRNA sense strand
gcaguguagauuucaagaa

SEQ ID NO: 319332 - RNA, 19 nt, Homo sapiens
  misc_RNA (1)...(19): siRNA sense strand
ugggaaagauugucaagac

SEQ ID NO: 319333 - RNA, 19 nt, Homo sapiens
  misc_RNA (1)...(19): siRNA sense strand
gccaggaaccuugcaaaga

SEQ ID NO: 319334 - RNA, 19 nt, Homo sapiens
  misc_RNA (1)...(19): siRNA sense strand
caagguggcacuuacucaa

SEQ ID NO: 319335 - RNA, 19 nt, Homo sapiens
  misc_RNA (1)...(19): siRNA sense strand
gcgaugauccuagugacaa

SEQ ID NO: 319336 - RNA, 19 nt, Homo sapiens
  misc_RNA (1)...(19): siRNA sense strand
gaaaucgaugggucuggaa

SEQ ID NO: 319337 - RNA, 19 nt, Homo sapiens
  misc_RNA (1)...(19): siRNA sense strand
uuguuaaccugaaagagaa

SEQ ID NO: 319338 - RNA, 19 nt, Homo sapiens
  misc_RNA (1)...(19): siRNA sense strand
agaaggauuuggacaucug

SEQ ID NO: 319339 - RNA, 19 nt, Homo sapiens
  misc_RNA (1)...(19): siRNA sense strand
ugauggcaguguagauuuc

SEQ ID NO: 319340 - RNA, 19 nt, Homo sapiens
  misc_RNA (1)...(19): siRNA sense strand
gaaagcuaaccagcaauuc

SEQ ID NO: 319341 - RNA, 19 nt, Homo sapiens
  misc_RNA (1)...(19): siRNA sense strand
caaagacacggugcaaauc

SEQ ID NO: 319342 - RNA, 19 nt, Homo sapiens
  misc_RNA (1)...(19): siRNA sense strand
aagcaauccaacucacuua

SEQ ID NO: 319343 - RNA, 19 nt, Homo sapiens
  misc_RNA (1)...(19): siRNA sense strand
ggaacuggaagacuggaau

SEQ ID NO: 319344 - RNA, 19 nt, Homo sapiens
  misc_RNA (1)...(19): siRNA sense strand
augaaagauucgguaguua

SEQ ID NO: 319345 - RNA, 19 nt, Homo sapiens
  misc_RNA (1)...(19): siRNA sense strand
cuuauaauccugaugaauc

SEQ ID NO: 319346 - RNA, 19 nt, Homo sapiens
  misc_RNA (1)...(19): siRNA sense strand
gauuuccugucuacuuauc

SEQ ID NO: 319347 - RNA, 19 nt, Homo sapiens
  misc_RNA (1)...(19): siRNA sense strand
ccaacucacuuauaauccu

SEQ ID NO: 319348 - RNA, 19 nt, Homo sapiens
  misc_RNA (1)...(19): siRNA sense strand
uuaccaagguggcacuuac

SEQ ID NO: 319349 - RNA, 19 nt, Homo sapiens
  misc_RNA (1)...(19): siRNA sense strand
ggaucuacagucuuuggaa

SEQ ID NO: 319350 - RNA, 19 nt, Homo sapiens
  misc_RNA (1)...(19): siRNA sense strand
uucaacauguguagcauau

SEQ ID NO: 319351 - RNA, 19 nt, Homo sapiens
  misc_RNA (1)...(19): siRNA sense strand
aauaagggagcuaaacaga

SEQ ID NO: 319352 - RNA, 19 nt, Homo sapiens
  misc_RNA (1)...(19): siRNA sense strand
agacaucuuacaucaaguu

SEQ ID NO: 319353 - RNA, 19 nt, Homo sapiens
  misc_RNA (1)...(19): siRNA sense strand
caggaaccuugcaaagaca

SEQ ID NO: 319354 - RNA, 19 nt, Homo sapiens
  misc_RNA (1)...(19): siRNA sense strand
gcgaagacggccaguauuu

SEQ ID NO: 319355 - RNA, 19 nt, Homo sapiens
  misc_RNA (1)...(19): siRNA sense strand
gcugcuggaucuauaauug

SEQ ID NO: 319356 - RNA, 19 nt, Homo sapiens
  misc_RNA (1)...(19): siRNA sense strand
gacagacaauuguucaguu

SEQ ID NO: 319357 - RNA, 19 nt, Homo sapiens
  misc_RNA (1)...(19): siRNA sense strand
gaagggaggacagacaauu

SEQ ID NO: 319358 - RNA, 19 nt, Homo sapiens
  misc_RNA (1)...(19): siRNA sense strand
uaauccagaucgcaucaaa

SEQ ID NO: 319359 - RNA, 19 nt, Homo sapiens
  misc_RNA (1)...(19): siRNA sense strand
gggcgaagacggccaguau

SEQ ID NO: 319360 - RNA, 19 nt, Homo sapiens
  misc_RNA (1)...(19): siRNA sense strand
gaaacuggagccaccauca

SEQ ID NO: 319361 - RNA, 19 nt, Homo sapiens
  misc_RNA (1)...(19): siRNA sense strand
acagacaauuguucaguug

SEQ ID NO: 319362 - RNA, 19 nt, Homo sapiens
  misc_RNA (1)...(19): siRNA sense strand
gcaccaagaggaccaauac

SEQ ID NO: 319363 - RNA, 19 nt, Homo sapiens
  misc_RNA (1)...(19): siRNA sense strand
ugucuaaguccaaagauuu

SEQ ID NO: 319364 - RNA, 19 nt, Homo sapiens
  misc_RNA (1)...(19): siRNA sense strand
gacagaaccagucagcauu

SEQ ID NO: 319365 - RNA, 19 nt, Homo sapiens
  misc_RNA (1)...(19): siRNA sense strand
gaaccagucagcauucuac

SEQ ID NO: 319366 - RNA, 19 nt, Homo sapiens
  misc_RNA (1)...(19): siRNA sense strand
ggacagacaauuguucagu

SEQ ID NO: 319367 - RNA, 19 nt, Homo sapiens
  misc_RNA (1)...(19): siRNA sense strand
gcaguucauggauucauug

SEQ ID NO: 319368 - RNA, 19 nt, Homo sapiens
  misc_RNA (1)...(19): siRNA sense strand
gaggacagacaauuguuca

SEQ ID NO: 319369 - RNA, 19 nt, Homo sapiens
  misc_RNA (1)...(19): siRNA sense strand
ggaggacagacaauuguuc

SEQ ID NO: 319370 - RNA, 19 nt, Homo sapiens
  misc_RNA (1)...(19): siRNA sense strand
gaagccggcagcaccaaga

SEQ ID NO: 319371 - RNA, 19 nt, Homo sapiens
  misc_RNA (1)...(19): siRNA sense strand
uuaugcugcuggaucuaua

SEQ ID NO: 319372 - RNA, 19 nt, Homo sapiens
  misc_RNA (1)...(19): siRNA sense strand
gagaaaugccccaaaaugu

SEQ ID NO: 319373 - RNA, 19 nt, Homo sapiens
  misc_RNA (1)...(19): siRNA sense strand
gacaauuguucaguugcaa

SEQ ID NO: 319374 - RNA, 19 nt, Homo sapiens
  misc_RNA (1)...(19): siRNA sense strand
ggaccaauacgggcgaaga

SEQ ID NO: 319375 - RNA, 19 nt, Homo sapiens
  misc_RNA (1)...(19): siRNA sense strand
cagcucccauccagcagaa

SEQ ID NO: 319376 - RNA, 19 nt, Homo sapiens
  misc_RNA (1)...(19): siRNA sense strand
gggaagggaggacagacaa

SEQ ID NO: 319377 - RNA, 19 nt, Homo sapiens
  misc_RNA (1)...(19): siRNA sense strand
agacaauuguucaguugca

SEQ ID NO: 319378 - RNA, 19 nt, Homo sapiens
  misc_RNA (1)...(19): siRNA sense strand
gaagacggccaguauuuuc

SEQ ID NO: 319379 - RNA, 19 nt, Homo sapiens
  misc_RNA (1)...(19): siRNA sense strand
gaccaccguuaauccagau

SEQ ID NO: 319380 - RNA, 19 nt, Homo sapiens
  misc_RNA (1)...(19): siRNA sense strand
cuacugagcgagugugcuu

SEQ ID NO: 319381 - RNA, 19 nt, Homo sapiens
  misc_RNA (1)...(19): siRNA sense strand
ccagggaacgguugaagca

SEQ ID NO: 319382 - RNA, 19 nt, Homo sapiens
  misc_RNA (1)...(19): siRNA sense strand
ggaagggaggacagacaau

SEQ ID NO: 319383 - RNA, 19 nt, Homo sapiens
  misc_RNA (1)...(19): siRNA sense strand
agacagaaccagucagcau

SEQ ID NO: 319384 - RNA, 19 nt, Homo sapiens
  misc_RNA (1)...(19): siRNA sense strand
gggaggacagacaauuguu

SEQ ID NO: 319385 - RNA, 19 nt, Homo sapiens
  misc_RNA (1)...(19): siRNA sense strand
aaacuggagccaccaucaa

SEQ ID NO: 319386 - RNA, 19 nt, Homo sapiens
  misc_RNA (1)...(19): siRNA sense strand
gaacgguugaagcacugaa

SEQ ID NO: 319387 - RNA, 19 nt, Homo sapiens
  misc_RNA (1)...(19): siRNA sense strand
ccagucagcauucuacaac

SEQ ID NO: 319388 - RNA, 19 nt, Homo sapiens
  misc_RNA (1)...(19): siRNA sense strand
cgagaaaugccccaaaaug

SEQ ID NO: 319389 - RNA, 19 nt, Homo sapiens
  misc_RNA (1)...(19): siRNA sense strand
cugucuaaguccaaagauu

SEQ ID NO: 319390 - RNA, 19 nt, Homo sapiens
  misc_RNA (1)...(19): siRNA sense strand
ugcaguucauggauucauu

SEQ ID NO: 319391 - RNA, 19 nt, Homo sapiens
  misc_RNA (1)...(19): siRNA sense strand
uaguuaugcugcuggaucu

SEQ ID NO: 319392 - RNA, 19 nt, Homo sapiens
  misc_RNA (1)...(19): siRNA sense strand
gccaagacagaaccaguca

SEQ ID NO: 319393 - RNA, 19 nt, Homo sapiens
  misc_RNA (1)...(19): siRNA sense strand
ccaccaucaagcugucuaa

SEQ ID NO: 319394 - RNA, 19 nt, Homo sapiens
  misc_RNA (1)...(19): siRNA sense strand
ggcgaagacggccaguauu

SEQ ID NO: 319395 - RNA, 19 nt, Homo sapiens
  misc_RNA (1)...(19): siRNA sense strand
gcgaagacggccaguauuu

SEQ ID NO: 319396 - RNA, 19 nt, Homo sapiens
  misc_RNA (1)...(19): siRNA sense strand
gcugcuggaucuauaauug

SEQ ID NO: 319397 - RNA, 19 nt, Homo sapiens
  misc_RNA (1)...(19): siRNA sense strand
gacagacaauuguucaguu

SEQ ID NO: 319398 - RNA, 19 nt, Homo sapiens
  misc_RNA (1)...(19): siRNA sense strand
gaagggaggacagacaauu

SEQ ID NO: 319399 - RNA, 19 nt, Homo sapiens
  misc_RNA (1)...(19): siRNA sense strand
uaauccagaucgcaucaaa

SEQ ID NO: 319400 - RNA, 19 nt, Homo sapiens
  misc_RNA (1)...(19): siRNA sense strand
gggcgaagacggccaguau

SEQ ID NO: 319401 - RNA, 19 nt, Homo sapiens
  misc_RNA (1)...(19): siRNA sense strand
gaaacuggagccaccauca

SEQ ID NO: 319402 - RNA, 19 nt, Homo sapiens
  misc_RNA (1)...(19): siRNA sense strand
acagacaauuguucaguug

SEQ ID NO: 319403 - RNA, 19 nt, Homo sapiens
  misc_RNA (1)...(19): siRNA sense strand
gcaccaagaggaccaauac

SEQ ID NO: 319404 - RNA, 19 nt, Homo sapiens
  misc_RNA (1)...(19): siRNA sense strand
ugucuaaguccaaagauuu

SEQ ID NO: 319405 - RNA, 19 nt, Homo sapiens
  misc_RNA (1)...(19): siRNA sense strand
gacagaaccagucagcauu

SEQ ID NO: 319406 - RNA, 19 nt, Homo sapiens
  misc_RNA (1)...(19): siRNA sense strand
gaaccagucagcauucuac

SEQ ID NO: 319407 - RNA, 19 nt, Homo sapiens
  misc_RNA (1)...(19): siRNA sense strand
ggacagacaauuguucagu

SEQ ID NO: 319408 - RNA, 19 nt, Homo sapiens
  misc_RNA (1)...(19): siRNA sense strand
gcaguucauggauucauug

SEQ ID NO: 319409 - RNA, 19 nt, Homo sapiens
  misc_RNA (1)...(19): siRNA sense strand
gaggacagacaauuguuca

SEQ ID NO: 319410 - RNA, 19 nt, Homo sapiens
  misc_RNA (1)...(19): siRNA sense strand
ggaggacagacaauuguuc

SEQ ID NO: 319411 - RNA, 19 nt, Homo sapiens
  misc_RNA (1)...(19): siRNA sense strand
gaagccggcagcaccaaga

SEQ ID NO: 319412 - RNA, 19 nt, Homo sapiens
  misc_RNA (1)...(19): siRNA sense strand
uuaugcugcuggaucuaua

SEQ ID NO: 319413 - RNA, 19 nt, Homo sapiens
  misc_RNA (1)...(19): siRNA sense strand
gagaaaugccccaaaaugu

SEQ ID NO: 319414 - RNA, 19 nt, Homo sapiens
  misc_RNA (1)...(19): siRNA sense strand
gacaauuguucaguugcaa

SEQ ID NO: 319415 - RNA, 19 nt, Homo sapiens
  misc_RNA (1)...(19): siRNA sense strand
ggaccaauacgggcgaaga

SEQ ID NO: 319416 - RNA, 19 nt, Homo sapiens
  misc_RNA (1)...(19): siRNA sense strand
cagcucccauccagcagaa

SEQ ID NO: 319417 - RNA, 19 nt, Homo sapiens
  misc_RNA (1)...(19): siRNA sense strand
gggaagggaggacagacaa

SEQ ID NO: 319418 - RNA, 19 nt, Homo sapiens
  misc_RNA (1)...(19): siRNA sense strand
agacaauuguucaguugca

SEQ ID NO: 319419 - RNA, 19 nt, Homo sapiens
  misc_RNA (1)...(19): siRNA sense strand
gaagacggccaguauuuuc

SEQ ID NO: 319420 - RNA, 19 nt, Homo sapiens
  misc_RNA (1)...(19): siRNA sense strand
gaccaccguuaauccagau

SEQ ID NO: 319421 - RNA, 19 nt, Homo sapiens
  misc_RNA (1)...(19): siRNA sense strand
cuacugagcgagugugcuu

SEQ ID NO: 319422 - RNA, 19 nt, Homo sapiens
  misc_RNA (1)...(19): siRNA sense strand
ccagggaacgguugaagca

SEQ ID NO: 319423 - RNA, 19 nt, Homo sapiens
  misc_RNA (1)...(19): siRNA sense strand
ggaagggaggacagacaau

SEQ ID NO: 319424 - RNA, 19 nt, Homo sapiens
  misc_RNA (1)...(19): siRNA sense strand
agacagaaccagucagcau

SEQ ID NO: 319425 - RNA, 19 nt, Homo sapiens
  misc_RNA (1)...(19): siRNA sense strand
gggaggacagacaauuguu

SEQ ID NO: 319426 - RNA, 19 nt, Homo sapiens
  misc_RNA (1)...(19): siRNA sense strand
aaacuggagccaccaucaa

SEQ ID NO: 319427 - RNA, 19 nt, Homo sapiens
  misc_RNA (1)...(19): siRNA sense strand
gaacgguugaagcacugaa

SEQ ID NO: 319428 - RNA, 19 nt, Homo sapiens
  misc_RNA (1)...(19): siRNA sense strand
ccagucagcauucuacaac

SEQ ID NO: 319429 - RNA, 19 nt, Homo sapiens
  misc_RNA (1)...(19): siRNA sense strand
cgagaaaugccccaaaaug

SEQ ID NO: 319430 - RNA, 19 nt, Homo sapiens
  misc_RNA (1)...(19): siRNA sense strand
cugucuaaguccaaagauu

SEQ ID NO: 319431 - RNA, 19 nt, Homo sapiens
  misc_RNA (1)...(19): siRNA sense strand
ugcaguucauggauucauu

SEQ ID NO: 319432 - RNA, 19 nt, Homo sapiens
  misc_RNA (1)...(19): siRNA sense strand
uaguuaugcugcuggaucu

SEQ ID NO: 319433 - RNA, 19 nt, Homo sapiens
  misc_RNA (1)...(19): siRNA sense strand
gccaagacagaaccaguca

SEQ ID NO: 319434 - RNA, 19 nt, Homo sapiens
  misc_RNA (1)...(19): siRNA sense strand
ccaccaucaagcugucuaa

SEQ ID NO: 319435 - RNA, 19 nt, Homo sapiens
  misc_RNA (1)...(19): siRNA sense strand
ggcgaagacggccaguauu

SEQ ID NO: 319436 - RNA, 19 nt, Homo sapiens
  misc_RNA (1)...(19): siRNA sense strand
gcgaagacggccaguauuu

SEQ ID NO: 319437 - RNA, 19 nt, Homo sapiens
  misc_RNA (1)...(19): siRNA sense strand
gcugcuggaucuauaauug

SEQ ID NO: 319438 - RNA, 19 nt, Homo sapiens
  misc_RNA (1)...(19): siRNA sense strand
gacagacaauuguucaguu

SEQ ID NO: 319439 - RNA, 19 nt, Homo sapiens
  misc_RNA (1)...(19): siRNA sense strand
gaagggaggacagacaauu

SEQ ID NO: 319440 - RNA, 19 nt, Homo sapiens
  misc_RNA (1)...(19): siRNA sense strand
uaauccagaucgcaucaaa

SEQ ID NO: 319441 - RNA, 19 nt, Homo sapiens
  misc_RNA (1)...(19): siRNA sense strand
gggcgaagacggccaguau

SEQ ID NO: 319442 - RNA, 19 nt, Homo sapiens
  misc_RNA (1)...(19): siRNA sense strand
gaaacuggagccaccauca

SEQ ID NO: 319443 - RNA, 19 nt, Homo sapiens
  misc_RNA (1)...(19): siRNA sense strand
acagacaauuguucaguug

SEQ ID NO: 319444 - RNA, 19 nt, Homo sapiens
  misc_RNA (1)...(19): siRNA sense strand
gcaccaagaggaccaauac

SEQ ID NO: 319445 - RNA, 19 nt, Homo sapiens
  misc_RNA (1)...(19): siRNA sense strand
ugucuaaguccaaagauuu

SEQ ID NO: 319446 - RNA, 19 nt, Homo sapiens
  misc_RNA (1)...(19): siRNA sense strand
gacagaaccagucagcauu

SEQ ID NO: 319447 - RNA, 19 nt, Homo sapiens
  misc_RNA (1)...(19): siRNA sense strand
gaaccagucagcauucuac

SEQ ID NO: 319448 - RNA, 19 nt, Homo sapiens
  misc_RNA (1)...(19): siRNA sense strand
ggacagacaauuguucagu

SEQ ID NO: 319449 - RNA, 19 nt, Homo sapiens
  misc_RNA (1)...(19): siRNA sense strand
gcaguucauggauucauug

SEQ ID NO: 319450 - RNA, 19 nt, Homo sapiens
  misc_RNA (1)...(19): siRNA sense strand
gaggacagacaauuguuca

SEQ ID NO: 319451 - RNA, 19 nt, Homo sapiens
  misc_RNA (1)...(19): siRNA sense strand
ggaggacagacaauuguuc

SEQ ID NO: 319452 - RNA, 19 nt, Homo sapiens
  misc_RNA (1)...(19): siRNA sense strand
gaagccggcagcaccaaga

SEQ ID NO: 319453 - RNA, 19 nt, Homo sapiens
  misc_RNA (1)...(19): siRNA sense strand
uuaugcugcuggaucuaua

SEQ ID NO: 319454 - RNA, 19 nt, Homo sapiens
  misc_RNA (1)...(19): siRNA sense strand
gagaaaugccccaaaaugu

SEQ ID NO: 319455 - RNA, 19 nt, Homo sapiens
  misc_RNA (1)...(19): siRNA sense strand
gacaauuguucaguugcaa

SEQ ID NO: 319456 - RNA, 19 nt, Homo sapiens
  misc_RNA (1)...(19): siRNA sense strand
ggaccaauacgggcgaaga

SEQ ID NO: 319457 - RNA, 19 nt, Homo sapiens
  misc_RNA (1)...(19): siRNA sense strand
cagcucccauccagcagaa

SEQ ID NO: 319458 - RNA, 19 nt, Homo sapiens
  misc_RNA (1)...(19): siRNA sense strand
gggaagggaggacagacaa

SEQ ID NO: 319459 - RNA, 19 nt, Homo sapiens
  misc_RNA (1)...(19): siRNA sense strand
agacaauuguucaguugca

SEQ ID NO: 319460 - RNA, 19 nt, Homo sapiens
  misc_RNA (1)...(19): siRNA sense strand
gaagacggccaguauuuuc

SEQ ID NO: 319461 - RNA, 19 nt, Homo sapiens
  misc_RNA (1)...(19): siRNA sense strand
gaccaccguuaauccagau

SEQ ID NO: 319462 - RNA, 19 nt, Homo sapiens
  misc_RNA (1)...(19): siRNA sense strand
cuacugagcgagugugcuu

SEQ ID NO: 319463 - RNA, 19 nt, Homo sapiens
  misc_RNA (1)...(19): siRNA sense strand
ccagggaacgguugaagca

SEQ ID NO: 319464 - RNA, 19 nt, Homo sapiens
  misc_RNA (1)...(19): siRNA sense strand
ggaagggaggacagacaau

SEQ ID NO: 319465 - RNA, 19 nt, Homo sapiens
  misc_RNA (1)...(19): siRNA sense strand
agacagaaccagucagcau

SEQ ID NO: 319466 - RNA, 19 nt, Homo sapiens
  misc_RNA (1)...(19): siRNA sense strand
gggaggacagacaauuguu

SEQ ID NO: 319467 - RNA, 19 nt, Homo sapiens
  misc_RNA (1)...(19): siRNA sense strand
aaacuggagccaccaucaa

SEQ ID NO: 319468 - RNA, 19 nt, Homo sapiens
  misc_RNA (1)...(19): siRNA sense strand
gaacgguugaagcacugaa

SEQ ID NO: 319469 - RNA, 19 nt, Homo sapiens
  misc_RNA (1)...(19): siRNA sense strand
ccagucagcauucuacaac

SEQ ID NO: 319470 - RNA, 19 nt, Homo sapiens
  misc_RNA (1)...(19): siRNA sense strand
cgagaaaugccccaaaaug

SEQ ID NO: 319471 - RNA, 19 nt, Homo sapiens
  misc_RNA (1)...(19): siRNA sense strand
cugucuaaguccaaagauu

SEQ ID NO: 319472 - RNA, 19 nt, Homo sapiens
  misc_RNA (1)...(19): siRNA sense strand
ugcaguucauggauucauu

SEQ ID NO: 319473 - RNA, 19 nt, Homo sapiens
  misc_RNA (1)...(19): siRNA sense strand
uaguuaugcugcuggaucu

SEQ ID NO: 319474 - RNA, 19 nt, Homo sapiens
  misc_RNA (1)...(19): siRNA sense strand
gccaagacagaaccaguca

SEQ ID NO: 319475 - RNA, 19 nt, Homo sapiens
  misc_RNA (1)...(19): siRNA sense strand
ccaccaucaagcugucuaa

SEQ ID NO: 319476 - RNA, 19 nt, Homo sapiens
  misc_RNA (1)...(19): siRNA sense strand
ggcgaagacggccaguauu

SEQ ID NO: 319477 - RNA, 19 nt, Homo sapiens
  misc_RNA (1)...(19): siRNA sense strand
caacucagcuucacauauu

SEQ ID NO: 319478 - RNA, 19 nt, Homo sapiens
  misc_RNA (1)...(19): siRNA sense strand
ggaaaggucaucucuguua

SEQ ID NO: 319479 - RNA, 19 nt, Homo sapiens
  misc_RNA (1)...(19): siRNA sense strand
cagaagauaucaucaaguu

SEQ ID NO: 319480 - RNA, 19 nt, Homo sapiens
  misc_RNA (1)...(19): siRNA sense strand
gaacguccagaucuuauua

SEQ ID NO: 319481 - RNA, 19 nt, Homo sapiens
  misc_RNA (1)...(19): siRNA sense strand
cauaggaccugacaugaaa

SEQ ID NO: 319482 - RNA, 19 nt, Homo sapiens
  misc_RNA (1)...(19): siRNA sense strand
aagaagagauggagaaaga

SEQ ID NO: 319483 - RNA, 19 nt, Homo sapiens
  misc_RNA (1)...(19): siRNA sense strand
ccacaugccugcaaugaga

SEQ ID NO: 319484 - RNA, 19 nt, Homo sapiens
  misc_RNA (1)...(19): siRNA sense strand
gaucaaggaaucaacauuu

SEQ ID NO: 319485 - RNA, 19 nt, Homo sapiens
  misc_RNA (1)...(19): siRNA sense strand
gcaaccagauguucacaga

SEQ ID NO: 319486 - RNA, 19 nt, Homo sapiens
  misc_RNA (1)...(19): siRNA sense strand
caacagagggcgaaacaaa

SEQ ID NO: 319487 - RNA, 19 nt, Homo sapiens
  misc_RNA (1)...(19): siRNA sense strand
gaaucaacauuuaccgaaa

SEQ ID NO: 319488 - RNA, 19 nt, Homo sapiens
  misc_RNA (1)...(19): siRNA sense strand
guccagaucuuauuaccua

SEQ ID NO: 319489 - RNA, 19 nt, Homo sapiens
  misc_RNA (1)...(19): siRNA sense strand
gagaggaaauguaucuuca

SEQ ID NO: 319490 - RNA, 19 nt, Homo sapiens
  misc_RNA (1)...(19): siRNA sense strand
caaggcaauuuaugacauu

SEQ ID NO: 319491 - RNA, 19 nt, Homo sapiens
  misc_RNA (1)...(19): siRNA sense strand
ccacagaccuggcaaugag

SEQ ID NO: 319492 - RNA, 19 nt, Homo sapiens
  misc_RNA (1)...(19): siRNA sense strand
gaaagccacccaucuacaa

SEQ ID NO: 319493 - RNA, 19 nt, Homo sapiens
  misc_RNA (1)...(19): siRNA sense strand
gcagagaggaagaugauga

SEQ ID NO: 319494 - RNA, 19 nt, Homo sapiens
  misc_RNA (1)...(19): siRNA sense strand
gaaaggucaucucuguuag

SEQ ID NO: 319495 - RNA, 19 nt, Homo sapiens
  misc_RNA (1)...(19): siRNA sense strand
gaaagaagagauggagaaa

SEQ ID NO: 319496 - RNA, 19 nt, Homo sapiens
  misc_RNA (1)...(19): siRNA sense strand
cuucaaggcuccaccguuu

SEQ ID NO: 319497 - RNA, 19 nt, Homo sapiens
  misc_RNA (1)...(19): siRNA sense strand
agaggaagaugaugaggaa

SEQ ID NO: 319498 - RNA, 19 nt, Homo sapiens
  misc_RNA (1)...(19): siRNA sense strand
caagaagagcaauuaauga

SEQ ID NO: 319499 - RNA, 19 nt, Homo sapiens
  misc_RNA (1)...(19): siRNA sense strand
gaggaaauguaucuucaag

SEQ ID NO: 319500 - RNA, 19 nt, Homo sapiens
  misc_RNA (1)...(19): siRNA sense strand
gagcaaguccucagaagau

SEQ ID NO: 319501 - RNA, 19 nt, Homo sapiens
  misc_RNA (1)...(19): siRNA sense strand
ggaagaugaugaggaacuu

SEQ ID NO: 319502 - RNA, 19 nt, Homo sapiens
  misc_RNA (1)...(19): siRNA sense strand
gaaacaaaauccucagaga

SEQ ID NO: 319503 - RNA, 19 nt, Homo sapiens
  misc_RNA (1)...(19): siRNA sense strand
gaagagauggagaaagaga

SEQ ID NO: 319504 - RNA, 19 nt, Homo sapiens
  misc_RNA (1)...(19): siRNA sense strand
gagcaauuaaugaagcuua

SEQ ID NO: 319505 - RNA, 19 nt, Homo sapiens
  misc_RNA (1)...(19): siRNA sense strand
ucaagaagagcaauuaaug

SEQ ID NO: 319506 - RNA, 19 nt, Homo sapiens
  misc_RNA (1)...(19): siRNA sense strand
ggacauccucggaaaguau

SEQ ID NO: 319507 - RNA, 19 nt, Homo sapiens
  misc_RNA (1)...(19): siRNA sense strand
gaauguccauacaggaguu

SEQ ID NO: 319508 - RNA, 19 nt, Homo sapiens
  misc_RNA (1)...(19): siRNA sense strand
cggaaaguauuuauucuag

SEQ ID NO: 319509 - RNA, 19 nt, Homo sapiens
  misc_RNA (1)...(19): siRNA sense strand
gaaggucaaggcaauuuau

SEQ ID NO: 319510 - RNA, 19 nt, Homo sapiens
  misc_RNA (1)...(19): siRNA sense strand
cgggaaaggucaucucugu

SEQ ID NO: 319511 - RNA, 19 nt, Homo sapiens
  misc_RNA (1)...(19): siRNA sense strand
cgggaaaucuuuggaaugu

SEQ ID NO: 319512 - RNA, 19 nt, Homo sapiens
  misc_RNA (1)...(19): siRNA sense strand
ucacauauuccaucaucua

SEQ ID NO: 319513 - RNA, 19 nt, Homo sapiens
  misc_RNA (1)...(19): siRNA sense strand
gggcuucaccggccuguuu

SEQ ID NO: 319514 - RNA, 19 nt, Homo sapiens
  misc_RNA (1)...(19): siRNA sense strand
gacaugaaacgcagaucua

SEQ ID NO: 319515 - RNA, 19 nt, Homo sapiens
  misc_RNA (1)...(19): siRNA sense strand
ucagagagguggacagaac

SEQ ID NO: 319516 - RNA, 19 nt, Homo sapiens
  misc_RNA (1)...(19): siRNA sense strand
cagaucuuauuaccuauga

SEQ ID NO: 319517 - RNA, 19 nt, Homo sapiens
  misc_RNA (1)...(19): siRNA sense strand
acaggaguuugacagguua

SEQ ID NO: 319518 - RNA, 19 nt, Homo sapiens
  misc_RNA (1)...(19): siRNA sense strand
uguaagcaaucuacgaaga

SEQ ID NO: 319519 - RNA, 19 nt, Homo sapiens
  misc_RNA (1)...(19): siRNA sense strand
ugaaagaagagauggagaa

SEQ ID NO: 319520 - RNA, 19 nt, Homo sapiens
  misc_RNA (1)...(19): siRNA sense strand
ggagaggaaauguaucuuc

SEQ ID NO: 319521 - RNA, 19 nt, Homo sapiens
  misc_RNA (1)...(19): siRNA sense strand
cuaccgacuucgcucagua

SEQ ID NO: 319522 - RNA, 19 nt, Homo sapiens
  misc_RNA (1)...(19): siRNA sense strand
agaaggagaggaaauguau

SEQ ID NO: 319523 - RNA, 19 nt, Homo sapiens
  misc_RNA (1)...(19): siRNA sense strand
cgacuucgcucaguauaac

SEQ ID NO: 319524 - RNA, 19 nt, Homo sapiens
  misc_RNA (1)...(19): siRNA sense strand
gaaccaaagauauuuccau

SEQ ID NO: 319525 - RNA, 19 nt, Homo sapiens
  misc_RNA (1)...(19): siRNA sense strand
cgaaggucaaggcaauuua

SEQ ID NO: 319526 - RNA, 19 nt, Homo sapiens
  misc_RNA (1)...(19): siRNA sense strand
uacaggaguuugacagguu

SEQ ID NO: 319527 - RNA, 19 nt, Homo sapiens
  misc_RNA (1)...(19): siRNA sense strand
gcagaugcaaccagauguu

SEQ ID NO: 319528 - RNA, 19 nt, Homo sapiens
  misc_RNA (1)...(19): siRNA sense strand
ucaaggcaauuuaugacau

SEQ ID NO: 319529 - RNA, 19 nt, Homo sapiens
  misc_RNA (1)...(19): siRNA sense strand
cagaaggagaggaaaugua

SEQ ID NO: 319530 - RNA, 19 nt, Homo sapiens
  misc_RNA (1)...(19): siRNA sense strand
gagaaagagagccgggaaa

SEQ ID NO: 319531 - RNA, 19 nt, Homo sapiens
  misc_RNA (1)...(19): siRNA sense strand
gcgagacaccagagauuga

SEQ ID NO: 319532 - RNA, 19 nt, Homo sapiens
  misc_RNA (1)...(19): siRNA sense strand
gcaaguccucagaagauau

SEQ ID NO: 319533 - RNA, 19 nt, Homo sapiens
  misc_RNA (1)...(19): siRNA sense strand
aggccaggcuccaguauuc

SEQ ID NO: 319534 - RNA, 19 nt, Homo sapiens
  misc_RNA (1)...(19): siRNA sense strand
aaagagagccgggaaaggu

SEQ ID NO: 319535 - RNA, 19 nt, Homo sapiens
  misc_RNA (1)...(19): siRNA sense strand
gaugaugaggaacuucuga

SEQ ID NO: 319536 - RNA, 19 nt, Homo sapiens
  misc_RNA (1)...(19): siRNA sense strand
ggaacuccccucucccuua

SEQ ID NO: 319537 - RNA, 19 nt, Homo sapiens
  misc_RNA (1)...(19): siRNA sense strand
agacagagccuuggagagu

SEQ ID NO: 319538 - RNA, 19 nt, Homo sapiens
  misc_RNA (1)...(19): siRNA sense strand
uagcagccauuccgaaggu

SEQ ID NO: 319539 - RNA, 19 nt, Homo sapiens
  misc_RNA (1)...(19): siRNA sense strand
cuucacauauuccaucauc

SEQ ID NO: 319540 - RNA, 19 nt, Homo sapiens
  misc_RNA (1)...(19): siRNA sense strand
aaccagauguucacagaag

SEQ ID NO: 319541 - RNA, 19 nt, Homo sapiens
  misc_RNA (1)...(19): siRNA sense strand
ugggacaguugaucuugaa

SEQ ID NO: 319542 - RNA, 19 nt, Homo sapiens
  misc_RNA (1)...(19): siRNA sense strand
cgccacagcuacacuccaa

SEQ ID NO: 319543 - RNA, 19 nt, Homo sapiens
  misc_RNA (1)...(19): siRNA sense strand
caccaggucauacuaucua

SEQ ID NO: 319544 - RNA, 19 nt, Homo sapiens
  misc_RNA (1)...(19): siRNA sense strand
cagagcaaguccucagaag

SEQ ID NO: 319545 - RNA, 19 nt, Homo sapiens
  misc_RNA (1)...(19): siRNA sense strand
ccucggaaaguauuuauuc

SEQ ID NO: 319546 - RNA, 19 nt, Homo sapiens
  misc_RNA (1)...(19): siRNA sense strand
gggcuaugaugacaaacag

SEQ ID NO: 319547 - RNA, 19 nt, Homo sapiens
  misc_RNA (1)...(19): siRNA sense strand
acacuucgggcuaugauga

SEQ ID NO: 319548 - RNA, 19 nt, Homo sapiens
  misc_RNA (1)...(19): siRNA sense strand
cauugaacguccagaucuu

SEQ ID NO: 319549 - RNA, 19 nt, Homo sapiens
  misc_RNA (1)...(19): siRNA sense strand
ggagagacagagccuugga

SEQ ID NO: 319550 - RNA, 19 nt, Homo sapiens
  misc_RNA (1)...(19): siRNA sense strand
gagugucuaugcccaacau

SEQ ID NO: 319551 - RNA, 19 nt, Homo sapiens
  misc_RNA (1)...(19): siRNA sense strand
aggcaggugacaaacauua

SEQ ID NO: 319552 - RNA, 19 nt, Homo sapiens
  misc_RNA (1)...(19): siRNA sense strand
ggacaguugaucuugaaag

SEQ ID NO: 319553 - RNA, 19 nt, Homo sapiens
  misc_RNA (1)...(19): siRNA sense strand
guucacagaaggagaggaa

SEQ ID NO: 319554 - RNA, 19 nt, Homo sapiens
  misc_RNA (1)...(19): siRNA sense strand
cagcgagacaccagagauu

SEQ ID NO: 319555 - RNA, 19 nt, Homo sapiens
  misc_RNA (1)...(19): siRNA sense strand
cagcagaugcaaccagaug

SEQ ID NO: 319556 - RNA, 19 nt, Homo sapiens
  misc_RNA (1)...(19): siRNA sense strand
aaucaacauuuaccgaaag

SEQ ID NO: 319557 - RNA, 19 nt, Homo sapiens
  misc_RNA (1)...(19): siRNA sense strand
gauguucgggaucggauga

SEQ ID NO: 319558 - RNA, 19 nt, Homo sapiens
  misc_RNA (1)...(19): siRNA sense strand
ggagacgcaacgacaugaa

SEQ ID NO: 319559 - RNA, 19 nt, Homo sapiens
  misc_RNA (1)...(19): siRNA sense strand
gaaagagagccgggaaagg

SEQ ID NO: 319560 - RNA, 19 nt, Homo sapiens
  misc_RNA (1)...(19): siRNA sense strand
uaugagccuuucuacacuu

SEQ ID NO: 319561 - RNA, 19 nt, Homo sapiens
  misc_RNA (1)...(19): siRNA sense strand
cacauauuccaucaucuaa

SEQ ID NO: 319562 - RNA, 19 nt, Homo sapiens
  misc_RNA (1)...(19): siRNA sense strand
ucaacucagcuucacauau

SEQ ID NO: 319563 - RNA, 19 nt, Homo sapiens
  misc_RNA (1)...(19): siRNA sense strand
ucacagaaggagaggaaau

SEQ ID NO: 319564 - RNA, 19 nt, Homo sapiens
  misc_RNA (1)...(19): siRNA sense strand
cucauuugcugucauagga

SEQ ID NO: 319565 - RNA, 19 nt, Homo sapiens
  misc_RNA (1)...(19): siRNA sense strand
agcaaguccucagaagaua

SEQ ID NO: 319566 - RNA, 19 nt, Homo sapiens
  misc_RNA (1)...(19): siRNA sense strand
gcagaucuaguggcagaga

SEQ ID NO: 319567 - RNA, 19 nt, Homo sapiens
  misc_RNA (1)...(19): siRNA sense strand
gaacuccccucucccuuac

SEQ ID NO: 319568 - RNA, 19 nt, Homo sapiens
  misc_RNA (1)...(19): siRNA sense strand
gacauccucggaaaguauu

SEQ ID NO: 319569 - RNA, 19 nt, Homo sapiens
  misc_RNA (1)...(19): siRNA sense strand
cuacgauucucccaucaac

SEQ ID NO: 319570 - RNA, 19 nt, Homo sapiens
  misc_RNA (1)...(19): siRNA sense strand
caucccgacuguaagcaau

SEQ ID NO: 319571 - RNA, 19 nt, Homo sapiens
  misc_RNA (1)...(19): siRNA sense strand
ccucagaagauaucaucaa

SEQ ID NO: 319572 - RNA, 19 nt, Homo sapiens
  misc_RNA (1)...(19): siRNA sense strand
ccagagcaaguccucagaa

SEQ ID NO: 319573 - RNA, 19 nt, Homo sapiens
  misc_RNA (1)...(19): siRNA sense strand
cgaaagccacccaucuaca

SEQ ID NO: 319574 - RNA, 19 nt, Homo sapiens
  misc_RNA (1)...(19): siRNA sense strand
gcucaccaggucauacuau

SEQ ID NO: 319575 - RNA, 19 nt, Homo sapiens
  misc_RNA (1)...(19): siRNA sense strand
gcucaggccccuaaacauu

SEQ ID NO: 319576 - RNA, 19 nt, Homo sapiens
  misc_RNA (1)...(19): siRNA sense strand
ggccacaugccugcaauga

SEQ ID NO: 319577 - RNA, 19 nt, Homo sapiens
  misc_RNA (1)...(19): siRNA sense strand
caacucagcuucacauauu

SEQ ID NO: 319578 - RNA, 19 nt, Homo sapiens
  misc_RNA (1)...(19): siRNA sense strand
ggaaaggucaucucuguua

SEQ ID NO: 319579 - RNA, 19 nt, Homo sapiens
  misc_RNA (1)...(19): siRNA sense strand
cagaagauaucaucaaguu

SEQ ID NO: 319580 - RNA, 19 nt, Homo sapiens
  misc_RNA (1)...(19): siRNA sense strand
gaacguccagaucuuauua

SEQ ID NO: 319581 - RNA, 19 nt, Homo sapiens
  misc_RNA (1)...(19): siRNA sense strand
cauaggaccugacaugaaa

SEQ ID NO: 319582 - RNA, 19 nt, Homo sapiens
  misc_RNA (1)...(19): siRNA sense strand
aagaagagauggagaaaga

SEQ ID NO: 319583 - RNA, 19 nt, Homo sapiens
  misc_RNA (1)...(19): siRNA sense strand
ccacaugccugcaaugaga

SEQ ID NO: 319584 - RNA, 19 nt, Homo sapiens
  misc_RNA (1)...(19): siRNA sense strand
gaucaaggaaucaacauuu

SEQ ID NO: 319585 - RNA, 19 nt, Homo sapiens
  misc_RNA (1)...(19): siRNA sense strand
gcaaccagauguucacaga

SEQ ID NO: 319586 - RNA, 19 nt, Homo sapiens
  misc_RNA (1)...(19): siRNA sense strand
caacagagggcgaaacaaa

SEQ ID NO: 319587 - RNA, 19 nt, Homo sapiens
  misc_RNA (1)...(19): siRNA sense strand
gaaucaacauuuaccgaaa

SEQ ID NO: 319588 - RNA, 19 nt, Homo sapiens
  misc_RNA (1)...(19): siRNA sense strand
guccagaucuuauuaccua

SEQ ID NO: 319589 - RNA, 19 nt, Homo sapiens
  misc_RNA (1)...(19): siRNA sense strand
gagaggaaauguaucuuca

SEQ ID NO: 319590 - RNA, 19 nt, Homo sapiens
  misc_RNA (1)...(19): siRNA sense strand
caaggcaauuuaugacauu

SEQ ID NO: 319591 - RNA, 19 nt, Homo sapiens
  misc_RNA (1)...(19): siRNA sense strand
ccacagaccuggcaaugag

SEQ ID NO: 319592 - RNA, 19 nt, Homo sapiens
  misc_RNA (1)...(19): siRNA sense strand
gaaagccacccaucuacaa

SEQ ID NO: 319593 - RNA, 19 nt, Homo sapiens
  misc_RNA (1)...(19): siRNA sense strand
gcagagaggaagaugauga

SEQ ID NO: 319594 - RNA, 19 nt, Homo sapiens
  misc_RNA (1)...(19): siRNA sense strand
gaaaggucaucucuguuag

SEQ ID NO: 319595 - RNA, 19 nt, Homo sapiens
  misc_RNA (1)...(19): siRNA sense strand
gaaagaagagauggagaaa

SEQ ID NO: 319596 - RNA, 19 nt, Homo sapiens
  misc_RNA (1)...(19): siRNA sense strand
cuucaaggcuccaccguuu

SEQ ID NO: 319597 - RNA, 19 nt, Homo sapiens
  misc_RNA (1)...(19): siRNA sense strand
agaggaagaugaugaggaa

SEQ ID NO: 319598 - RNA, 19 nt, Homo sapiens
  misc_RNA (1)...(19): siRNA sense strand
caagaagagcaauuaauga

SEQ ID NO: 319599 - RNA, 19 nt, Homo sapiens
  misc_RNA (1)...(19): siRNA sense strand
gaggaaauguaucuucaag

SEQ ID NO: 319600 - RNA, 19 nt, Homo sapiens
  misc_RNA (1)...(19): siRNA sense strand
gagcaaguccucagaagau

SEQ ID NO: 319601 - RNA, 19 nt, Homo sapiens
  misc_RNA (1)...(19): siRNA sense strand
ggaagaugaugaggaacuu

SEQ ID NO: 319602 - RNA, 19 nt, Homo sapiens
  misc_RNA (1)...(19): siRNA sense strand
gaaacaaaauccucagaga

SEQ ID NO: 319603 - RNA, 19 nt, Homo sapiens
  misc_RNA (1)...(19): siRNA sense strand
gaagagauggagaaagaga

SEQ ID NO: 319604 - RNA, 19 nt, Homo sapiens
  misc_RNA (1)...(19): siRNA sense strand
gagcaauuaaugaagcuua

SEQ ID NO: 319605 - RNA, 19 nt, Homo sapiens
  misc_RNA (1)...(19): siRNA sense strand
ucaagaagagcaauuaaug

SEQ ID NO: 319606 - RNA, 19 nt, Homo sapiens
  misc_RNA (1)...(19): siRNA sense strand
ggacauccucggaaaguau

SEQ ID NO: 319607 - RNA, 19 nt, Homo sapiens
  misc_RNA (1)...(19): siRNA sense strand
gaauguccauacaggaguu

SEQ ID NO: 319608 - RNA, 19 nt, Homo sapiens
  misc_RNA (1)...(19): siRNA sense strand
cggaaaguauuuauucuag

SEQ ID NO: 319609 - RNA, 19 nt, Homo sapiens
  misc_RNA (1)...(19): siRNA sense strand
gaaggucaaggcaauuuau

SEQ ID NO: 319610 - RNA, 19 nt, Homo sapiens
  misc_RNA (1)...(19): siRNA sense strand
cgggaaaggucaucucugu

SEQ ID NO: 319611 - RNA, 19 nt, Homo sapiens
  misc_RNA (1)...(19): siRNA sense strand
cgggaaaucuuuggaaugu

SEQ ID NO: 319612 - RNA, 19 nt, Homo sapiens
  misc_RNA (1)...(19): siRNA sense strand
ucacauauuccaucaucua

SEQ ID NO: 319613 - RNA, 19 nt, Homo sapiens
  misc_RNA (1)...(19): siRNA sense strand
gggcuucaccggccuguuu

SEQ ID NO: 319614 - RNA, 19 nt, Homo sapiens
  misc_RNA (1)...(19): siRNA sense strand
gacaugaaacgcagaucua

SEQ ID NO: 319615 - RNA, 19 nt, Homo sapiens
  misc_RNA (1)...(19): siRNA sense strand
ucagagagguggacagaac

SEQ ID NO: 319616 - RNA, 19 nt, Homo sapiens
  misc_RNA (1)...(19): siRNA sense strand
cagaucuuauuaccuauga

SEQ ID NO: 319617 - RNA, 19 nt, Homo sapiens
  misc_RNA (1)...(19): siRNA sense strand
acaggaguuugacagguua

SEQ ID NO: 319618 - RNA, 19 nt, Homo sapiens
  misc_RNA (1)...(19): siRNA sense strand
uguaagcaaucuacgaaga

SEQ ID NO: 319619 - RNA, 19 nt, Homo sapiens
  misc_RNA (1)...(19): siRNA sense strand
ugaaagaagagauggagaa

SEQ ID NO: 319620 - RNA, 19 nt, Homo sapiens
  misc_RNA (1)...(19): siRNA sense strand
ggagaggaaauguaucuuc

SEQ ID NO: 319621 - RNA, 19 nt, Homo sapiens
  misc_RNA (1)...(19): siRNA sense strand
cuaccgacuucgcucagua

SEQ ID NO: 319622 - RNA, 19 nt, Homo sapiens
  misc_RNA (1)...(19): siRNA sense strand
agaaggagaggaaauguau

SEQ ID NO: 319623 - RNA, 19 nt, Homo sapiens
  misc_RNA (1)...(19): siRNA sense strand
cgacuucgcucaguauaac

SEQ ID NO: 319624 - RNA, 19 nt, Homo sapiens
  misc_RNA (1)...(19): siRNA sense strand
gaaccaaagauauuuccau

SEQ ID NO: 319625 - RNA, 19 nt, Homo sapiens
  misc_RNA (1)...(19): siRNA sense strand
cgaaggucaaggcaauuua

SEQ ID NO: 319626 - RNA, 19 nt, Homo sapiens
  misc_RNA (1)...(19): siRNA sense strand
uacaggaguuugacagguu

SEQ ID NO: 319627 - RNA, 19 nt, Homo sapiens
  misc_RNA (1)...(19): siRNA sense strand
gcagaugcaaccagauguu

SEQ ID NO: 319628 - RNA, 19 nt, Homo sapiens
  misc_RNA (1)...(19): siRNA sense strand
ucaaggcaauuuaugacau

SEQ ID NO: 319629 - RNA, 19 nt, Homo sapiens
  misc_RNA (1)...(19): siRNA sense strand
cagaaggagaggaaaugua

SEQ ID NO: 319630 - RNA, 19 nt, Homo sapiens
  misc_RNA (1)...(19): siRNA sense strand
gagaaagagagccgggaaa

SEQ ID NO: 319631 - RNA, 19 nt, Homo sapiens
  misc_RNA (1)...(19): siRNA sense strand
gcgagacaccagagauuga

SEQ ID NO: 319632 - RNA, 19 nt, Homo sapiens
  misc_RNA (1)...(19): siRNA sense strand
gcaaguccucagaagauau

SEQ ID NO: 319633 - RNA, 19 nt, Homo sapiens
  misc_RNA (1)...(19): siRNA sense strand
aggccaggcuccaguauuc

SEQ ID NO: 319634 - RNA, 19 nt, Homo sapiens
  misc_RNA (1)...(19): siRNA sense strand
aaagagagccgggaaaggu

SEQ ID NO: 319635 - RNA, 19 nt, Homo sapiens
  misc_RNA (1)...(19): siRNA sense strand
gaugaugaggaacuucuga

SEQ ID NO: 319636 - RNA, 19 nt, Homo sapiens
  misc_RNA (1)...(19): siRNA sense strand
ggaacuccccucucccuua

SEQ ID NO: 319637 - RNA, 19 nt, Homo sapiens
  misc_RNA (1)...(19): siRNA sense strand
agacagagccuuggagagu

SEQ ID NO: 319638 - RNA, 19 nt, Homo sapiens
  misc_RNA (1)...(19): siRNA sense strand
uagcagccauuccgaaggu

SEQ ID NO: 319639 - RNA, 19 nt, Homo sapiens
  misc_RNA (1)...(19): siRNA sense strand
cuucacauauuccaucauc

SEQ ID NO: 319640 - RNA, 19 nt, Homo sapiens
  misc_RNA (1)...(19): siRNA sense strand
aaccagauguucacagaag

SEQ ID NO: 319641 - RNA, 19 nt, Homo sapiens
  misc_RNA (1)...(19): siRNA sense strand
ugggacaguugaucuugaa

SEQ ID NO: 319642 - RNA, 19 nt, Homo sapiens
  misc_RNA (1)...(19): siRNA sense strand
cgccacagcuacacuccaa

SEQ ID NO: 319643 - RNA, 19 nt, Homo sapiens
  misc_RNA (1)...(19): siRNA sense strand
caccaggucauacuaucua

SEQ ID NO: 319644 - RNA, 19 nt, Homo sapiens
  misc_RNA (1)...(19): siRNA sense strand
cagagcaaguccucagaag

SEQ ID NO: 319645 - RNA, 19 nt, Homo sapiens
  misc_RNA (1)...(19): siRNA sense strand
ccucggaaaguauuuauuc

SEQ ID NO: 319646 - RNA, 19 nt, Homo sapiens
  misc_RNA (1)...(19): siRNA sense strand
gggcuaugaugacaaacag

SEQ ID NO: 319647 - RNA, 19 nt, Homo sapiens
  misc_RNA (1)...(19): siRNA sense strand
acacuucgggcuaugauga

SEQ ID NO: 319648 - RNA, 19 nt, Homo sapiens
  misc_RNA (1)...(19): siRNA sense strand
cauugaacguccagaucuu

SEQ ID NO: 319649 - RNA, 19 nt, Homo sapiens
  misc_RNA (1)...(19): siRNA sense strand
ggagagacagagccuugga

SEQ ID NO: 319650 - RNA, 19 nt, Homo sapiens
  misc_RNA (1)...(19): siRNA sense strand
gagugucuaugcccaacau

SEQ ID NO: 319651 - RNA, 19 nt, Homo sapiens
  misc_RNA (1)...(19): siRNA sense strand
aggcaggugacaaacauua

SEQ ID NO: 319652 - RNA, 19 nt, Homo sapiens
  misc_RNA (1)...(19): siRNA sense strand
ggacaguugaucuugaaag

SEQ ID NO: 319653 - RNA, 19 nt, Homo sapiens
  misc_RNA (1)...(19): siRNA sense strand
guucacagaaggagaggaa

SEQ ID NO: 319654 - RNA, 19 nt, Homo sapiens
  misc_RNA (1)...(19): siRNA sense strand
cagcgagacaccagagauu

SEQ ID NO: 319655 - RNA, 19 nt, Homo sapiens
  misc_RNA (1)...(19): siRNA sense strand
cagcagaugcaaccagaug

SEQ ID NO: 319656 - RNA, 19 nt, Homo sapiens
  misc_RNA (1)...(19): siRNA sense strand
aaucaacauuuaccgaaag

SEQ ID NO: 319657 - RNA, 19 nt, Homo sapiens
  misc_RNA (1)...(19): siRNA sense strand
gauguucgggaucggauga

SEQ ID NO: 319658 - RNA, 19 nt, Homo sapiens
  misc_RNA (1)...(19): siRNA sense strand
ggagacgcaacgacaugaa

SEQ ID NO: 319659 - RNA, 19 nt, Homo sapiens
  misc_RNA (1)...(19): siRNA sense strand
gaaagagagccgggaaagg

SEQ ID NO: 319660 - RNA, 19 nt, Homo sapiens
  misc_RNA (1)...(19): siRNA sense strand
uaugagccuuucuacacuu

SEQ ID NO: 319661 - RNA, 19 nt, Homo sapiens
  misc_RNA (1)...(19): siRNA sense strand
cacauauuccaucaucuaa

SEQ ID NO: 319662 - RNA, 19 nt, Homo sapiens
  misc_RNA (1)...(19): siRNA sense strand
ucaacucagcuucacauau

SEQ ID NO: 319663 - RNA, 19 nt, Homo sapiens
  misc_RNA (1)...(19): siRNA sense strand
ucacagaaggagaggaaau

SEQ ID NO: 319664 - RNA, 19 nt, Homo sapiens
  misc_RNA (1)...(19): siRNA sense strand
cucauuugcugucauagga

SEQ ID NO: 319665 - RNA, 19 nt, Homo sapiens
  misc_RNA (1)...(19): siRNA sense strand
agcaaguccucagaagaua

SEQ ID NO: 319666 - RNA, 19 nt, Homo sapiens
  misc_RNA (1)...(19): siRNA sense strand
gcagaucuaguggcagaga

SEQ ID NO: 319667 - RNA, 19 nt, Homo sapiens
  misc_RNA (1)...(19): siRNA sense strand
gaacuccccucucccuuac

SEQ ID NO: 319668 - RNA, 19 nt, Homo sapiens
  misc_RNA (1)...(19): siRNA sense strand
gacauccucggaaaguauu

SEQ ID NO: 319669 - RNA, 19 nt, Homo sapiens
  misc_RNA (1)...(19): siRNA sense strand
cuacgauucucccaucaac

SEQ ID NO: 319670 - RNA, 19 nt, Homo sapiens
  misc_RNA (1)...(19): siRNA sense strand
caucccgacuguaagcaau

SEQ ID NO: 319671 - RNA, 19 nt, Homo sapiens
  misc_RNA (1)...(19): siRNA sense strand
ccucagaagauaucaucaa

SEQ ID NO: 319672 - RNA, 19 nt, Homo sapiens
  misc_RNA (1)...(19): siRNA sense strand
ccagagcaaguccucagaa

SEQ ID NO: 319673 - RNA, 19 nt, Homo sapiens
  misc_RNA (1)...(19): siRNA sense strand
cgaaagccacccaucuaca

SEQ ID NO: 319674 - RNA, 19 nt, Homo sapiens
  misc_RNA (1)...(19): siRNA sense strand
gcucaccaggucauacuau

SEQ ID NO: 319675 - RNA, 19 nt, Homo sapiens
  misc_RNA (1)...(19): siRNA sense strand
gcucaggccccuaaacauu

SEQ ID NO: 319676 - RNA, 19 nt, Homo sapiens
  misc_RNA (1)...(19): siRNA sense strand
ggccacaugccugcaauga

SEQ ID NO: 319677 - RNA, 19 nt, Homo sapiens
  misc_RNA (1)...(19): siRNA sense strand
caacucagcuucacauauu

SEQ ID NO: 319678 - RNA, 19 nt, Homo sapiens
  misc_RNA (1)...(19): siRNA sense strand
ggaaaggucaucucuguua

SEQ ID NO: 319679 - RNA, 19 nt, Homo sapiens
  misc_RNA (1)...(19): siRNA sense strand
cagaagauaucaucaaguu

SEQ ID NO: 319680 - RNA, 19 nt, Homo sapiens
  misc_RNA (1)...(19): siRNA sense strand
gaacguccagaucuuauua

SEQ ID NO: 319681 - RNA, 19 nt, Homo sapiens
  misc_RNA (1)...(19): siRNA sense strand
cauaggaccugacaugaaa

SEQ ID NO: 319682 - RNA, 19 nt, Homo sapiens
  misc_RNA (1)...(19): siRNA sense strand
aagaagagauggagaaaga

SEQ ID NO: 319683 - RNA, 19 nt, Homo sapiens
  misc_RNA (1)...(19): siRNA sense strand
ccacaugccugcaaugaga

SEQ ID NO: 319684 - RNA, 19 nt, Homo sapiens
  misc_RNA (1)...(19): siRNA sense strand
gaucaaggaaucaacauuu

SEQ ID NO: 319685 - RNA, 19 nt, Homo sapiens
  misc_RNA (1)...(19): siRNA sense strand
guccagaucuuauuaccua

SEQ ID NO: 319686 - RNA, 19 nt, Homo sapiens
  misc_RNA (1)...(19): siRNA sense strand
caacagagggcgaaacaaa

SEQ ID NO: 319687 - RNA, 19 nt, Homo sapiens
  misc_RNA (1)...(19): siRNA sense strand
gaaucaacauuuaccgaaa

SEQ ID NO: 319688 - RNA, 19 nt, Homo sapiens
  misc_RNA (1)...(19): siRNA sense strand
gagaggaaauguaucuuca

SEQ ID NO: 319689 - RNA, 19 nt, Homo sapiens
  misc_RNA (1)...(19): siRNA sense strand
caaggcaauuuaugacauu

SEQ ID NO: 319690 - RNA, 19 nt, Homo sapiens
  misc_RNA (1)...(19): siRNA sense strand
ccacagaccuggcaaugag

SEQ ID NO: 319691 - RNA, 19 nt, Homo sapiens
  misc_RNA (1)...(19): siRNA sense strand
gaaagccacccaucuacaa

SEQ ID NO: 319692 - RNA, 19 nt, Homo sapiens
  misc_RNA (1)...(19): siRNA sense strand
gcagagaggaagaugauga

SEQ ID NO: 319693 - RNA, 19 nt, Homo sapiens
  misc_RNA (1)...(19): siRNA sense strand
gaaaggucaucucuguuag

SEQ ID NO: 319694 - RNA, 19 nt, Homo sapiens
  misc_RNA (1)...(19): siRNA sense strand
gaaagaagagauggagaaa

SEQ ID NO: 319695 - RNA, 19 nt, Homo sapiens
  misc_RNA (1)...(19): siRNA sense strand
cuucaaggcuccaccguuu

SEQ ID NO: 319696 - RNA, 19 nt, Homo sapiens
  misc_RNA (1)...(19): siRNA sense strand
agaggaagaugaugaggaa

SEQ ID NO: 319697 - RNA, 19 nt, Homo sapiens
  misc_RNA (1)...(19): siRNA sense strand
caagaagagcaauuaauga

SEQ ID NO: 319698 - RNA, 19 nt, Homo sapiens
  misc_RNA (1)...(19): siRNA sense strand
gaggaaauguaucuucaag

SEQ ID NO: 319699 - RNA, 19 nt, Homo sapiens
  misc_RNA (1)...(19): siRNA sense strand
gagcaaguccucagaagau

SEQ ID NO: 319700 - RNA, 19 nt, Homo sapiens
  misc_RNA (1)...(19): siRNA sense strand
ggaagaugaugaggaacuu

SEQ ID NO: 319701 - RNA, 19 nt, Homo sapiens
  misc_RNA (1)...(19): siRNA sense strand
gaaacaaaauccucagaga

SEQ ID NO: 319702 - RNA, 19 nt, Homo sapiens
  misc_RNA (1)...(19): siRNA sense strand
gaagagauggagaaagaga

SEQ ID NO: 319703 - RNA, 19 nt, Homo sapiens
  misc_RNA (1)...(19): siRNA sense strand
gagcaauuaaugaagcuua

SEQ ID NO: 319704 - RNA, 19 nt, Homo sapiens
  misc_RNA (1)...(19): siRNA sense strand
ucaagaagagcaauuaaug

SEQ ID NO: 319705 - RNA, 19 nt, Homo sapiens
  misc_RNA (1)...(19): siRNA sense strand
ggacauccucggaaaguau

SEQ ID NO: 319706 - RNA, 19 nt, Homo sapiens
  misc_RNA (1)...(19): siRNA sense strand
gaauguccauacaggaguu

SEQ ID NO: 319707 - RNA, 19 nt, Homo sapiens
  misc_RNA (1)...(19): siRNA sense strand
cggaaaguauuuauucuag

SEQ ID NO: 319708 - RNA, 19 nt, Homo sapiens
  misc_RNA (1)...(19): siRNA sense strand
gaaggucaaggcaauuuau

SEQ ID NO: 319709 - RNA, 19 nt, Homo sapiens
  misc_RNA (1)...(19): siRNA sense strand
cgggaaaggucaucucugu

SEQ ID NO: 319710 - RNA, 19 nt, Homo sapiens
  misc_RNA (1)...(19): siRNA sense strand
cgggaaaucuuuggaaugu

SEQ ID NO: 319711 - RNA, 19 nt, Homo sapiens
  misc_RNA (1)...(19): siRNA sense strand
ucacauauuccaucaucua

SEQ ID NO: 319712 - RNA, 19 nt, Homo sapiens
  misc_RNA (1)...(19): siRNA sense strand
gggcuucaccggccuguuu

SEQ ID NO: 319713 - RNA, 19 nt, Homo sapiens
  misc_RNA (1)...(19): siRNA sense strand
gacaugaaacgcagaucua

SEQ ID NO: 319714 - RNA, 19 nt, Homo sapiens
  misc_RNA (1)...(19): siRNA sense strand
ucagagagguggacagaac

SEQ ID NO: 319715 - RNA, 19 nt, Homo sapiens
  misc_RNA (1)...(19): siRNA sense strand
cagaucuuauuaccuauga

SEQ ID NO: 319716 - RNA, 19 nt, Homo sapiens
  misc_RNA (1)...(19): siRNA sense strand
acaggaguuugacagguua

SEQ ID NO: 319717 - RNA, 19 nt, Homo sapiens
  misc_RNA (1)...(19): siRNA sense strand
uguaagcaaucuacgaaga

SEQ ID NO: 319718 - RNA, 19 nt, Homo sapiens
  misc_RNA (1)...(19): siRNA sense strand
ugaaagaagagauggagaa

SEQ ID NO: 319719 - RNA, 19 nt, Homo sapiens
  misc_RNA (1)...(19): siRNA sense strand
ggagaggaaauguaucuuc

SEQ ID NO: 319720 - RNA, 19 nt, Homo sapiens
  misc_RNA (1)...(19): siRNA sense strand
agaaggagaggaaauguau

SEQ ID NO: 319721 - RNA, 19 nt, Homo sapiens
  misc_RNA (1)...(19): siRNA sense strand
cgacuucgcucaguauaac

SEQ ID NO: 319722 - RNA, 19 nt, Homo sapiens
  misc_RNA (1)...(19): siRNA sense strand
cuaccgacuucgcucagua

SEQ ID NO: 319723 - RNA, 19 nt, Homo sapiens
  misc_RNA (1)...(19): siRNA sense strand
gaaccaaagauauuuccau

SEQ ID NO: 319724 - RNA, 19 nt, Homo sapiens
  misc_RNA (1)...(19): siRNA sense strand
cgaaggucaaggcaauuua

SEQ ID NO: 319725 - RNA, 19 nt, Homo sapiens
  misc_RNA (1)...(19): siRNA sense strand
uacaggaguuugacagguu

SEQ ID NO: 319726 - RNA, 19 nt, Homo sapiens
  misc_RNA (1)...(19): siRNA sense strand
ucaaggcaauuuaugacau

SEQ ID NO: 319727 - RNA, 19 nt, Homo sapiens
  misc_RNA (1)...(19): siRNA sense strand
gcaaguccucagaagauau

SEQ ID NO: 319728 - RNA, 19 nt, Homo sapiens
  misc_RNA (1)...(19): siRNA sense strand
cagaaggagaggaaaugua

SEQ ID NO: 319729 - RNA, 19 nt, Homo sapiens
  misc_RNA (1)...(19): siRNA sense strand
gagaaagagagccgggaaa

SEQ ID NO: 319730 - RNA, 19 nt, Homo sapiens
  misc_RNA (1)...(19): siRNA sense strand
gcgagacaccagagauuga

SEQ ID NO: 319731 - RNA, 19 nt, Homo sapiens
  misc_RNA (1)...(19): siRNA sense strand
agacagagccuuggagagu

SEQ ID NO: 319732 - RNA, 19 nt, Homo sapiens
  misc_RNA (1)...(19): siRNA sense strand
aaagagagccgggaaaggu

SEQ ID NO: 319733 - RNA, 19 nt, Homo sapiens
  misc_RNA (1)...(19): siRNA sense strand
aggccaggcuccaguauuc

SEQ ID NO: 319734 - RNA, 19 nt, Homo sapiens
  misc_RNA (1)...(19): siRNA sense strand
gaugaugaggaacuucuga

SEQ ID NO: 319735 - RNA, 19 nt, Homo sapiens
  misc_RNA (1)...(19): siRNA sense strand
ggaacuccccucucccuua

SEQ ID NO: 319736 - RNA, 19 nt, Homo sapiens
  misc_RNA (1)...(19): siRNA sense strand
uagcagccauuccgaaggu

SEQ ID NO: 319737 - RNA, 19 nt, Homo sapiens
  misc_RNA (1)...(19): siRNA sense strand
cuucacauauuccaucauc

SEQ ID NO: 319738 - RNA, 19 nt, Homo sapiens
  misc_RNA (1)...(19): siRNA sense strand
ugggacaguugaucuugaa

SEQ ID NO: 319739 - RNA, 19 nt, Homo sapiens
  misc_RNA (1)...(19): siRNA sense strand
cgccacagcuacacuccaa

SEQ ID NO: 319740 - RNA, 19 nt, Homo sapiens
  misc_RNA (1)...(19): siRNA sense strand
caccaggucauacuaucua

SEQ ID NO: 319741 - RNA, 19 nt, Homo sapiens
  misc_RNA (1)...(19): siRNA sense strand
cagagcaaguccucagaag

SEQ ID NO: 319742 - RNA, 19 nt, Homo sapiens
  misc_RNA (1)...(19): siRNA sense strand
gggcuaugaugacaaacag

SEQ ID NO: 319743 - RNA, 19 nt, Homo sapiens
  misc_RNA (1)...(19): siRNA sense strand
acacuucgggcuaugauga

SEQ ID NO: 319744 - RNA, 19 nt, Homo sapiens
  misc_RNA (1)...(19): siRNA sense strand
cauugaacguccagaucuu

SEQ ID NO: 319745 - RNA, 19 nt, Homo sapiens
  misc_RNA (1)...(19): siRNA sense strand
ccucggaaaguauuuauuc

SEQ ID NO: 319746 - RNA, 19 nt, Homo sapiens
  misc_RNA (1)...(19): siRNA sense strand
ggagagacagagccuugga

SEQ ID NO: 319747 - RNA, 19 nt, Homo sapiens
  misc_RNA (1)...(19): siRNA sense strand
gagugucuaugcccaacau

SEQ ID NO: 319748 - RNA, 19 nt, Homo sapiens
  misc_RNA (1)...(19): siRNA sense strand
guucacagaaggagaggaa

SEQ ID NO: 319749 - RNA, 19 nt, Homo sapiens
  misc_RNA (1)...(19): siRNA sense strand
ggacaguugaucuugaaag

SEQ ID NO: 319750 - RNA, 19 nt, Homo sapiens
  misc_RNA (1)...(19): siRNA sense strand
cagcgagacaccagagauu

SEQ ID NO: 319751 - RNA, 19 nt, Homo sapiens
  misc_RNA (1)...(19): siRNA sense strand
aaucaacauuuaccgaaag

SEQ ID NO: 319752 - RNA, 19 nt, Homo sapiens
  misc_RNA (1)...(19): siRNA sense strand
gauguucgggaucggauga

SEQ ID NO: 319753 - RNA, 19 nt, Homo sapiens
  misc_RNA (1)...(19): siRNA sense strand
ggagacgcaacgacaugaa

SEQ ID NO: 319754 - RNA, 19 nt, Homo sapiens
  misc_RNA (1)...(19): siRNA sense strand
gaaagagagccgggaaagg

SEQ ID NO: 319755 - RNA, 19 nt, Homo sapiens
  misc_RNA (1)...(19): siRNA sense strand
uaugagccuuucuacacuu

SEQ ID NO: 319756 - RNA, 19 nt, Homo sapiens
  misc_RNA (1)...(19): siRNA sense strand
cacauauuccaucaucuaa

SEQ ID NO: 319757 - RNA, 19 nt, Homo sapiens
  misc_RNA (1)...(19): siRNA sense strand
ucaacucagcuucacauau

SEQ ID NO: 319758 - RNA, 19 nt, Homo sapiens
  misc_RNA (1)...(19): siRNA sense strand
cucauuugcugucauagga

SEQ ID NO: 319759 - RNA, 19 nt, Homo sapiens
  misc_RNA (1)...(19): siRNA sense strand
ucacagaaggagaggaaau

SEQ ID NO: 319760 - RNA, 19 nt, Homo sapiens
  misc_RNA (1)...(19): siRNA sense strand
agcaaguccucagaagaua

SEQ ID NO: 319761 - RNA, 19 nt, Homo sapiens
  misc_RNA (1)...(19): siRNA sense strand
gcagaucuaguggcagaga

SEQ ID NO: 319762 - RNA, 19 nt, Homo sapiens
  misc_RNA (1)...(19): siRNA sense strand
gaacuccccucucccuuac

SEQ ID NO: 319763 - RNA, 19 nt, Homo sapiens
  misc_RNA (1)...(19): siRNA sense strand
gacauccucggaaaguauu

SEQ ID NO: 319764 - RNA, 19 nt, Homo sapiens
  misc_RNA (1)...(19): siRNA sense strand
gcucaccaggucauacuau

SEQ ID NO: 319765 - RNA, 19 nt, Homo sapiens
  misc_RNA (1)...(19): siRNA sense strand
cuacgauucucccaucaac

SEQ ID NO: 319766 - RNA, 19 nt, Homo sapiens
  misc_RNA (1)...(19): siRNA sense strand
caucccgacuguaagcaau

SEQ ID NO: 319767 - RNA, 19 nt, Homo sapiens
  misc_RNA (1)...(19): siRNA sense strand
ccucagaagauaucaucaa

SEQ ID NO: 319768 - RNA, 19 nt, Homo sapiens
  misc_RNA (1)...(19): siRNA sense strand
ccagagcaaguccucagaa

SEQ ID NO: 319769 - RNA, 19 nt, Homo sapiens
  misc_RNA (1)...(19): siRNA sense strand
cgaaagccacccaucuaca

SEQ ID NO: 319770 - RNA, 19 nt, Homo sapiens
  misc_RNA (1)...(19): siRNA sense strand
gcccucuaacuccaacuua

SEQ ID NO: 319771 - RNA, 19 nt, Homo sapiens
  misc_RNA (1)...(19): siRNA sense strand
ggccacaugccugcaauga

SEQ ID NO: 319772 - RNA, 19 nt, Homo sapiens
  misc_RNA (1)...(19): siRNA sense strand
gcucaggccccuaaacauu

SEQ ID NO: 319773 - RNA, 19 nt, Homo sapiens
  misc_RNA (1)...(19): siRNA sense strand
uaccagacacucccagaug

SEQ ID NO: 319774 - RNA, 19 nt, Homo sapiens
  misc_RNA (1)...(19): siRNA sense strand
caggcuggagcgccacuua

SEQ ID NO: 319775 - RNA, 19 nt, Homo sapiens
  misc_RNA (1)...(19): siRNA sense strand
ggaccgaggagugucuaug

SEQ ID NO: 319776 - RNA, 19 nt, Homo sapiens
  misc_RNA (1)...(19): siRNA sense strand
gacauugaacguccagauc

SEQ ID NO: 319777 - RNA, 19 nt, Homo sapiens
  misc_RNA (1)...(19): siRNA sense strand
caacucagcuucacauauu

SEQ ID NO: 319778 - RNA, 19 nt, Homo sapiens
  misc_RNA (1)...(19): siRNA sense strand
ggaaaggucaucucuguua

SEQ ID NO: 319779 - RNA, 19 nt, Homo sapiens
  misc_RNA (1)...(19): siRNA sense strand
cagaagauaucaucaaguu

SEQ ID NO: 319780 - RNA, 19 nt, Homo sapiens
  misc_RNA (1)...(19): siRNA sense strand
gaacguccagaucuuauua

SEQ ID NO: 319781 - RNA, 19 nt, Homo sapiens
  misc_RNA (1)...(19): siRNA sense strand
cauaggaccugacaugaaa

SEQ ID NO: 319782 - RNA, 19 nt, Homo sapiens
  misc_RNA (1)...(19): siRNA sense strand
aagaagagauggagaaaga

SEQ ID NO: 319783 - RNA, 19 nt, Homo sapiens
  misc_RNA (1)...(19): siRNA sense strand
ccacaugccugcaaugaga

SEQ ID NO: 319784 - RNA, 19 nt, Homo sapiens
  misc_RNA (1)...(19): siRNA sense strand
gaucaaggaaucaacauuu

SEQ ID NO: 319785 - RNA, 19 nt, Homo sapiens
  misc_RNA (1)...(19): siRNA sense strand
gcaaccagauguucacaga

SEQ ID NO: 319786 - RNA, 19 nt, Homo sapiens
  misc_RNA (1)...(19): siRNA sense strand
caacagagggcgaaacaaa

SEQ ID NO: 319787 - RNA, 19 nt, Homo sapiens
  misc_RNA (1)...(19): siRNA sense strand
gaaucaacauuuaccgaaa

SEQ ID NO: 319788 - RNA, 19 nt, Homo sapiens
  misc_RNA (1)...(19): siRNA sense strand
guccagaucuuauuaccua

SEQ ID NO: 319789 - RNA, 19 nt, Homo sapiens
  misc_RNA (1)...(19): siRNA sense strand
gagaggaaauguaucuuca

SEQ ID NO: 319790 - RNA, 19 nt, Homo sapiens
  misc_RNA (1)...(19): siRNA sense strand
caaggcaauuuaugacauu

SEQ ID NO: 319791 - RNA, 19 nt, Homo sapiens
  misc_RNA (1)...(19): siRNA sense strand
ccacagaccuggcaaugag

SEQ ID NO: 319792 - RNA, 19 nt, Homo sapiens
  misc_RNA (1)...(19): siRNA sense strand
gaaagccacccaucuacaa

SEQ ID NO: 319793 - RNA, 19 nt, Homo sapiens
  misc_RNA (1)...(19): siRNA sense strand
gcagagaggaagaugauga

SEQ ID NO: 319794 - RNA, 19 nt, Homo sapiens
  misc_RNA (1)...(19): siRNA sense strand
gaaaggucaucucuguuag

SEQ ID NO: 319795 - RNA, 19 nt, Homo sapiens
  misc_RNA (1)...(19): siRNA sense strand
gaaagaagagauggagaaa

SEQ ID NO: 319796 - RNA, 19 nt, Homo sapiens
  misc_RNA (1)...(19): siRNA sense strand
cuucaaggcuccaccguuu

SEQ ID NO: 319797 - RNA, 19 nt, Homo sapiens
  misc_RNA (1)...(19): siRNA sense strand
agaggaagaugaugaggaa

SEQ ID NO: 319798 - RNA, 19 nt, Homo sapiens
  misc_RNA (1)...(19): siRNA sense strand
caagaagagcaauuaauga

SEQ ID NO: 319799 - RNA, 19 nt, Homo sapiens
  misc_RNA (1)...(19): siRNA sense strand
gaggaaauguaucuucaag

SEQ ID NO: 319800 - RNA, 19 nt, Homo sapiens
  misc_RNA (1)...(19): siRNA sense strand
gagcaaguccucagaagau

SEQ ID NO: 319801 - RNA, 19 nt, Homo sapiens
  misc_RNA (1)...(19): siRNA sense strand
ggaagaugaugaggaacuu

SEQ ID NO: 319802 - RNA, 19 nt, Homo sapiens
  misc_RNA (1)...(19): siRNA sense strand
gaaacaaaauccucagaga

SEQ ID NO: 319803 - RNA, 19 nt, Homo sapiens
  misc_RNA (1)...(19): siRNA sense strand
gaagagauggagaaagaga

SEQ ID NO: 319804 - RNA, 19 nt, Homo sapiens
  misc_RNA (1)...(19): siRNA sense strand
gagcaauuaaugaagcuua

SEQ ID NO: 319805 - RNA, 19 nt, Homo sapiens
  misc_RNA (1)...(19): siRNA sense strand
ucaagaagagcaauuaaug

SEQ ID NO: 319806 - RNA, 19 nt, Homo sapiens
  misc_RNA (1)...(19): siRNA sense strand
ggacauccucggaaaguau

SEQ ID NO: 319807 - RNA, 19 nt, Homo sapiens
  misc_RNA (1)...(19): siRNA sense strand
gaauguccauacaggaguu

SEQ ID NO: 319808 - RNA, 19 nt, Homo sapiens
  misc_RNA (1)...(19): siRNA sense strand
cggaaaguauuuauucuag

SEQ ID NO: 319809 - RNA, 19 nt, Homo sapiens
  misc_RNA (1)...(19): siRNA sense strand
gaaggucaaggcaauuuau

SEQ ID NO: 319810 - RNA, 19 nt, Homo sapiens
  misc_RNA (1)...(19): siRNA sense strand
cgggaaaggucaucucugu

SEQ ID NO: 319811 - RNA, 19 nt, Homo sapiens
  misc_RNA (1)...(19): siRNA sense strand
cgggaaaucuuuggaaugu

SEQ ID NO: 319812 - RNA, 19 nt, Homo sapiens
  misc_RNA (1)...(19): siRNA sense strand
ucacauauuccaucaucua

SEQ ID NO: 319813 - RNA, 19 nt, Homo sapiens
  misc_RNA (1)...(19): siRNA sense strand
gggcuucaccggccuguuu

SEQ ID NO: 319814 - RNA, 19 nt, Homo sapiens
  misc_RNA (1)...(19): siRNA sense strand
gacaugaaacgcagaucua

SEQ ID NO: 319815 - RNA, 19 nt, Homo sapiens
  misc_RNA (1)...(19): siRNA sense strand
ucagagagguggacagaac

SEQ ID NO: 319816 - RNA, 19 nt, Homo sapiens
  misc_RNA (1)...(19): siRNA sense strand
cagaucuuauuaccuauga

SEQ ID NO: 319817 - RNA, 19 nt, Homo sapiens
  misc_RNA (1)...(19): siRNA sense strand
acaggaguuugacagguua

SEQ ID NO: 319818 - RNA, 19 nt, Homo sapiens
  misc_RNA (1)...(19): siRNA sense strand
uguaagcaaucuacgaaga

SEQ ID NO: 319819 - RNA, 19 nt, Homo sapiens
  misc_RNA (1)...(19): siRNA sense strand
ugaaagaagagauggagaa

SEQ ID NO: 319820 - RNA, 19 nt, Homo sapiens
  misc_RNA (1)...(19): siRNA sense strand
ggagaggaaauguaucuuc

SEQ ID NO: 319821 - RNA, 19 nt, Homo sapiens
  misc_RNA (1)...(19): siRNA sense strand
cuaccgacuucgcucagua

SEQ ID NO: 319822 - RNA, 19 nt, Homo sapiens
  misc_RNA (1)...(19): siRNA sense strand
agaaggagaggaaauguau

SEQ ID NO: 319823 - RNA, 19 nt, Homo sapiens
  misc_RNA (1)...(19): siRNA sense strand
cgacuucgcucaguauaac

SEQ ID NO: 319824 - RNA, 19 nt, Homo sapiens
  misc_RNA (1)...(19): siRNA sense strand
gaaccaaagauauuuccau

SEQ ID NO: 319825 - RNA, 19 nt, Homo sapiens
  misc_RNA (1)...(19): siRNA sense strand
cgaaggucaaggcaauuua

SEQ ID NO: 319826 - RNA, 19 nt, Homo sapiens
  misc_RNA (1)...(19): siRNA sense strand
uacaggaguuugacagguu

SEQ ID NO: 319827 - RNA, 19 nt, Homo sapiens
  misc_RNA (1)...(19): siRNA sense strand
gcagaugcaaccagauguu

SEQ ID NO: 319828 - RNA, 19 nt, Homo sapiens
  misc_RNA (1)...(19): siRNA sense strand
ucaaggcaauuuaugacau

SEQ ID NO: 319829 - RNA, 19 nt, Homo sapiens
  misc_RNA (1)...(19): siRNA sense strand
cagaaggagaggaaaugua

SEQ ID NO: 319830 - RNA, 19 nt, Homo sapiens
  misc_RNA (1)...(19): siRNA sense strand
gagaaagagagccgggaaa

SEQ ID NO: 319831 - RNA, 19 nt, Homo sapiens
  misc_RNA (1)...(19): siRNA sense strand
gcgagacaccagagauuga

SEQ ID NO: 319832 - RNA, 19 nt, Homo sapiens
  misc_RNA (1)...(19): siRNA sense strand
gcaaguccucagaagauau

SEQ ID NO: 319833 - RNA, 19 nt, Homo sapiens
  misc_RNA (1)...(19): siRNA sense strand
aggccaggcuccaguauuc

SEQ ID NO: 319834 - RNA, 19 nt, Homo sapiens
  misc_RNA (1)...(19): siRNA sense strand
aaagagagccgggaaaggu

SEQ ID NO: 319835 - RNA, 19 nt, Homo sapiens
  misc_RNA (1)...(19): siRNA sense strand
gaugaugaggaacuucuga

SEQ ID NO: 319836 - RNA, 19 nt, Homo sapiens
  misc_RNA (1)...(19): siRNA sense strand
ggaacuccccucucccuua

SEQ ID NO: 319837 - RNA, 19 nt, Homo sapiens
  misc_RNA (1)...(19): siRNA sense strand
agacagagccuuggagagu

SEQ ID NO: 319838 - RNA, 19 nt, Homo sapiens
  misc_RNA (1)...(19): siRNA sense strand
uagcagccauuccgaaggu

SEQ ID NO: 319839 - RNA, 19 nt, Homo sapiens
  misc_RNA (1)...(19): siRNA sense strand
cuucacauauuccaucauc

SEQ ID NO: 319840 - RNA, 19 nt, Homo sapiens
  misc_RNA (1)...(19): siRNA sense strand
aaccagauguucacagaag

SEQ ID NO: 319841 - RNA, 19 nt, Homo sapiens
  misc_RNA (1)...(19): siRNA sense strand
ugggacaguugaucuugaa

SEQ ID NO: 319842 - RNA, 19 nt, Homo sapiens
  misc_RNA (1)...(19): siRNA sense strand
cgccacagcuacacuccaa

SEQ ID NO: 319843 - RNA, 19 nt, Homo sapiens
  misc_RNA (1)...(19): siRNA sense strand
caccaggucauacuaucua

SEQ ID NO: 319844 - RNA, 19 nt, Homo sapiens
  misc_RNA (1)...(19): siRNA sense strand
cagagcaaguccucagaag

SEQ ID NO: 319845 - RNA, 19 nt, Homo sapiens
  misc_RNA (1)...(19): siRNA sense strand
ccucggaaaguauuuauuc

SEQ ID NO: 319846 - RNA, 19 nt, Homo sapiens
  misc_RNA (1)...(19): siRNA sense strand
gggcuaugaugacaaacag

SEQ ID NO: 319847 - RNA, 19 nt, Homo sapiens
  misc_RNA (1)...(19): siRNA sense strand
acacuucgggcuaugauga

SEQ ID NO: 319848 - RNA, 19 nt, Homo sapiens
  misc_RNA (1)...(19): siRNA sense strand
cauugaacguccagaucuu

SEQ ID NO: 319849 - RNA, 19 nt, Homo sapiens
  misc_RNA (1)...(19): siRNA sense strand
ggagagacagagccuugga

SEQ ID NO: 319850 - RNA, 19 nt, Homo sapiens
  misc_RNA (1)...(19): siRNA sense strand
gagugucuaugcccaacau

SEQ ID NO: 319851 - RNA, 19 nt, Homo sapiens
  misc_RNA (1)...(19): siRNA sense strand
aggcaggugacaaacauua

SEQ ID NO: 319852 - RNA, 19 nt, Homo sapiens
  misc_RNA (1)...(19): siRNA sense strand
ggacaguugaucuugaaag

SEQ ID NO: 319853 - RNA, 19 nt, Homo sapiens
  misc_RNA (1)...(19): siRNA sense strand
guucacagaaggagaggaa

SEQ ID NO: 319854 - RNA, 19 nt, Homo sapiens
  misc_RNA (1)...(19): siRNA sense strand
cagcgagacaccagagauu

SEQ ID NO: 319855 - RNA, 19 nt, Homo sapiens
  misc_RNA (1)...(19): siRNA sense strand
cagcagaugcaaccagaug

SEQ ID NO: 319856 - RNA, 19 nt, Homo sapiens
  misc_RNA (1)...(19): siRNA sense strand
aaucaacauuuaccgaaag

SEQ ID NO: 319857 - RNA, 19 nt, Homo sapiens
  misc_RNA (1)...(19): siRNA sense strand
gauguucgggaucggauga

SEQ ID NO: 319858 - RNA, 19 nt, Homo sapiens
  misc_RNA (1)...(19): siRNA sense strand
ggagacgcaacgacaugaa

SEQ ID NO: 319859 - RNA, 19 nt, Homo sapiens
  misc_RNA (1)...(19): siRNA sense strand
gaaagagagccgggaaagg

SEQ ID NO: 319860 - RNA, 19 nt, Homo sapiens
  misc_RNA (1)...(19): siRNA sense strand
uaugagccuuucuacacuu

SEQ ID NO: 319861 - RNA, 19 nt, Homo sapiens
  misc_RNA (1)...(19): siRNA sense strand
cacauauuccaucaucuaa

SEQ ID NO: 319862 - RNA, 19 nt, Homo sapiens
  misc_RNA (1)...(19): siRNA sense strand
ucaacucagcuucacauau

SEQ ID NO: 319863 - RNA, 19 nt, Homo sapiens
  misc_RNA (1)...(19): siRNA sense strand
ucacagaaggagaggaaau

SEQ ID NO: 319864 - RNA, 19 nt, Homo sapiens
  misc_RNA (1)...(19): siRNA sense strand
cucauuugcugucauagga

SEQ ID NO: 319865 - RNA, 19 nt, Homo sapiens
  misc_RNA (1)...(19): siRNA sense strand
agcaaguccucagaagaua

SEQ ID NO: 319866 - RNA, 19 nt, Homo sapiens
  misc_RNA (1)...(19): siRNA sense strand
gcagaucuaguggcagaga

SEQ ID NO: 319867 - RNA, 19 nt, Homo sapiens
  misc_RNA (1)...(19): siRNA sense strand
gaacuccccucucccuuac

SEQ ID NO: 319868 - RNA, 19 nt, Homo sapiens
  misc_RNA (1)...(19): siRNA sense strand
gacauccucggaaaguauu

SEQ ID NO: 319869 - RNA, 19 nt, Homo sapiens
  misc_RNA (1)...(19): siRNA sense strand
cuacgauucucccaucaac

SEQ ID NO: 319870 - RNA, 19 nt, Homo sapiens
  misc_RNA (1)...(19): siRNA sense strand
caucccgacuguaagcaau

SEQ ID NO: 319871 - RNA, 19 nt, Homo sapiens
  misc_RNA (1)...(19): siRNA sense strand
ccucagaagauaucaucaa

SEQ ID NO: 319872 - RNA, 19 nt, Homo sapiens
  misc_RNA (1)...(19): siRNA sense strand
ccagagcaaguccucagaa

SEQ ID NO: 319873 - RNA, 19 nt, Homo sapiens
  misc_RNA (1)...(19): siRNA sense strand
cgaaagccacccaucuaca

SEQ ID NO: 319874 - RNA, 19 nt, Homo sapiens
  misc_RNA (1)...(19): siRNA sense strand
gcucaccaggucauacuau

SEQ ID NO: 319875 - RNA, 19 nt, Homo sapiens
  misc_RNA (1)...(19): siRNA sense strand
gcucaggccccuaaacauu

SEQ ID NO: 319876 - RNA, 19 nt, Homo sapiens
  misc_RNA (1)...(19): siRNA sense strand
ggccacaugccugcaauga

SEQ ID NO: 319877 - RNA, 19 nt, Homo sapiens
  misc_RNA (1)...(19): siRNA sense strand
caacucagcuucacauauu

SEQ ID NO: 319878 - RNA, 19 nt, Homo sapiens
  misc_RNA (1)...(19): siRNA sense strand
ggaaaggucaucucuguua

SEQ ID NO: 319879 - RNA, 19 nt, Homo sapiens
  misc_RNA (1)...(19): siRNA sense strand
cagaagauaucaucaaguu

SEQ ID NO: 319880 - RNA, 19 nt, Homo sapiens
  misc_RNA (1)...(19): siRNA sense strand
gaacguccagaucuuauua

SEQ ID NO: 319881 - RNA, 19 nt, Homo sapiens
  misc_RNA (1)...(19): siRNA sense strand
cauaggaccugacaugaaa

SEQ ID NO: 319882 - RNA, 19 nt, Homo sapiens
  misc_RNA (1)...(19): siRNA sense strand
aagaagagauggagaaaga

SEQ ID NO: 319883 - RNA, 19 nt, Homo sapiens
  misc_RNA (1)...(19): siRNA sense strand
ccacaugccugcaaugaga

SEQ ID NO: 319884 - RNA, 19 nt, Homo sapiens
  misc_RNA (1)...(19): siRNA sense strand
gaucaaggaaucaacauuu

SEQ ID NO: 319885 - RNA, 19 nt, Homo sapiens
  misc_RNA (1)...(19): siRNA sense strand
gcaaccagauguucacaga

SEQ ID NO: 319886 - RNA, 19 nt, Homo sapiens
  misc_RNA (1)...(19): siRNA sense strand
caacagagggcgaaacaaa

SEQ ID NO: 319887 - RNA, 19 nt, Homo sapiens
  misc_RNA (1)...(19): siRNA sense strand
gaaucaacauuuaccgaaa

SEQ ID NO: 319888 - RNA, 19 nt, Homo sapiens
  misc_RNA (1)...(19): siRNA sense strand
guccagaucuuauuaccua

SEQ ID NO: 319889 - RNA, 19 nt, Homo sapiens
  misc_RNA (1)...(19): siRNA sense strand
gagaggaaauguaucuuca

SEQ ID NO: 319890 - RNA, 19 nt, Homo sapiens
  misc_RNA (1)...(19): siRNA sense strand
caaggcaauuuaugacauu

SEQ ID NO: 319891 - RNA, 19 nt, Homo sapiens
  misc_RNA (1)...(19): siRNA sense strand
ccacagaccuggcaaugag

SEQ ID NO: 319892 - RNA, 19 nt, Homo sapiens
  misc_RNA (1)...(19): siRNA sense strand
gaaagccacccaucuacaa

SEQ ID NO: 319893 - RNA, 19 nt, Homo sapiens
  misc_RNA (1)...(19): siRNA sense strand
gcagagaggaagaugauga

SEQ ID NO: 319894 - RNA, 19 nt, Homo sapiens
  misc_RNA (1)...(19): siRNA sense strand
gaaaggucaucucuguuag

SEQ ID NO: 319895 - RNA, 19 nt, Homo sapiens
  misc_RNA (1)...(19): siRNA sense strand
gaaagaagagauggagaaa

SEQ ID NO: 319896 - RNA, 19 nt, Homo sapiens
  misc_RNA (1)...(19): siRNA sense strand
cuucaaggcuccaccguuu

SEQ ID NO: 319897 - RNA, 19 nt, Homo sapiens
  misc_RNA (1)...(19): siRNA sense strand
agaggaagaugaugaggaa

SEQ ID NO: 319898 - RNA, 19 nt, Homo sapiens
  misc_RNA (1)...(19): siRNA sense strand
caagaagagcaauuaauga

SEQ ID NO: 319899 - RNA, 19 nt, Homo sapiens
  misc_RNA (1)...(19): siRNA sense strand
gaggaaauguaucuucaag

SEQ ID NO: 319900 - RNA, 19 nt, Homo sapiens
  misc_RNA (1)...(19): siRNA sense strand
gagcaaguccucagaagau

SEQ ID NO: 319901 - RNA, 19 nt, Homo sapiens
  misc_RNA (1)...(19): siRNA sense strand
ggaagaugaugaggaacuu

SEQ ID NO: 319902 - RNA, 19 nt, Homo sapiens
  misc_RNA (1)...(19): siRNA sense strand
gaaacaaaauccucagaga

SEQ ID NO: 319903 - RNA, 19 nt, Homo sapiens
  misc_RNA (1)...(19): siRNA sense strand
gaagagauggagaaagaga

SEQ ID NO: 319904 - RNA, 19 nt, Homo sapiens
  misc_RNA (1)...(19): siRNA sense strand
gagcaauuaaugaagcuua

SEQ ID NO: 319905 - RNA, 19 nt, Homo sapiens
  misc_RNA (1)...(19): siRNA sense strand
ucaagaagagcaauuaaug

SEQ ID NO: 319906 - RNA, 19 nt, Homo sapiens
  misc_RNA (1)...(19): siRNA sense strand
ggacauccucggaaaguau

SEQ ID NO: 319907 - RNA, 19 nt, Homo sapiens
  misc_RNA (1)...(19): siRNA sense strand
gaauguccauacaggaguu

SEQ ID NO: 319908 - RNA, 19 nt, Homo sapiens
  misc_RNA (1)...(19): siRNA sense strand
cggaaaguauuuauucuag

SEQ ID NO: 319909 - RNA, 19 nt, Homo sapiens
  misc_RNA (1)...(19): siRNA sense strand
gaaggucaaggcaauuuau

SEQ ID NO: 319910 - RNA, 19 nt, Homo sapiens
  misc_RNA (1)...(19): siRNA sense strand
cgggaaaggucaucucugu

SEQ ID NO: 319911 - RNA, 19 nt, Homo sapiens
  misc_RNA (1)...(19): siRNA sense strand
cgggaaaucuuuggaaugu

SEQ ID NO: 319912 - RNA, 19 nt, Homo sapiens
  misc_RNA (1)...(19): siRNA sense strand
ucacauauuccaucaucua

SEQ ID NO: 319913 - RNA, 19 nt, Homo sapiens
  misc_RNA (1)...(19): siRNA sense strand
gggcuucaccggccuguuu

SEQ ID NO: 319914 - RNA, 19 nt, Homo sapiens
  misc_RNA (1)...(19): siRNA sense strand
gacaugaaacgcagaucua

SEQ ID NO: 319915 - RNA, 19 nt, Homo sapiens
  misc_RNA (1)...(19): siRNA sense strand
ucagagagguggacagaac

SEQ ID NO: 319916 - RNA, 19 nt, Homo sapiens
  misc_RNA (1)...(19): siRNA sense strand
cagaucuuauuaccuauga

SEQ ID NO: 319917 - RNA, 19 nt, Homo sapiens
  misc_RNA (1)...(19): siRNA sense strand
acaggaguuugacagguua

SEQ ID NO: 319918 - RNA, 19 nt, Homo sapiens
  misc_RNA (1)...(19): siRNA sense strand
uguaagcaaucuacgaaga

SEQ ID NO: 319919 - RNA, 19 nt, Homo sapiens
  misc_RNA (1)...(19): siRNA sense strand
ugaaagaagagauggagaa

SEQ ID NO: 319920 - RNA, 19 nt, Homo sapiens
  misc_RNA (1)...(19): siRNA sense strand
ggagaggaaauguaucuuc

SEQ ID NO: 319921 - RNA, 19 nt, Homo sapiens
  misc_RNA (1)...(19): siRNA sense strand
cuaccgacuucgcucagua

SEQ ID NO: 319922 - RNA, 19 nt, Homo sapiens
  misc_RNA (1)...(19): siRNA sense strand
agaaggagaggaaauguau

SEQ ID NO: 319923 - RNA, 19 nt, Homo sapiens
  misc_RNA (1)...(19): siRNA sense strand
cgacuucgcucaguauaac

SEQ ID NO: 319924 - RNA, 19 nt, Homo sapiens
  misc_RNA (1)...(19): siRNA sense strand
gaaccaaagauauuuccau

SEQ ID NO: 319925 - RNA, 19 nt, Homo sapiens
  misc_RNA (1)...(19): siRNA sense strand
cgaaggucaaggcaauuua

SEQ ID NO: 319926 - RNA, 19 nt, Homo sapiens
  misc_RNA (1)...(19): siRNA sense strand
uacaggaguuugacagguu

SEQ ID NO: 319927 - RNA, 19 nt, Homo sapiens
  misc_RNA (1)...(19): siRNA sense strand
gcagaugcaaccagauguu

SEQ ID NO: 319928 - RNA, 19 nt, Homo sapiens
  misc_RNA (1)...(19): siRNA sense strand
ucaaggcaauuuaugacau

SEQ ID NO: 319929 - RNA, 19 nt, Homo sapiens
  misc_RNA (1)...(19): siRNA sense strand
cagaaggagaggaaaugua

SEQ ID NO: 319930 - RNA, 19 nt, Homo sapiens
  misc_RNA (1)...(19): siRNA sense strand
gagaaagagagccgggaaa

SEQ ID NO: 319931 - RNA, 19 nt, Homo sapiens
  misc_RNA (1)...(19): siRNA sense strand
gcgagacaccagagauuga

SEQ ID NO: 319932 - RNA, 19 nt, Homo sapiens
  misc_RNA (1)...(19): siRNA sense strand
gcaaguccucagaagauau

SEQ ID NO: 319933 - RNA, 19 nt, Homo sapiens
  misc_RNA (1)...(19): siRNA sense strand
aggccaggcuccaguauuc

SEQ ID NO: 319934 - RNA, 19 nt, Homo sapiens
  misc_RNA (1)...(19): siRNA sense strand
aaagagagccgggaaaggu

SEQ ID NO: 319935 - RNA, 19 nt, Homo sapiens
  misc_RNA (1)...(19): siRNA sense strand
gaugaugaggaacuucuga

SEQ ID NO: 319936 - RNA, 19 nt, Homo sapiens
  misc_RNA (1)...(19): siRNA sense strand
ggaacuccccucucccuua

SEQ ID NO: 319937 - RNA, 19 nt, Homo sapiens
  misc_RNA (1)...(19): siRNA sense strand
agacagagccuuggagagu

SEQ ID NO: 319938 - RNA, 19 nt, Homo sapiens
  misc_RNA (1)...(19): siRNA sense strand
uagcagccauuccgaaggu

SEQ ID NO: 319939 - RNA, 19 nt, Homo sapiens
  misc_RNA (1)...(19): siRNA sense strand
cuucacauauuccaucauc

SEQ ID NO: 319940 - RNA, 19 nt, Homo sapiens
  misc_RNA (1)...(19): siRNA sense strand
aaccagauguucacagaag

SEQ ID NO: 319941 - RNA, 19 nt, Homo sapiens
  misc_RNA (1)...(19): siRNA sense strand
ugggacaguugaucuugaa

SEQ ID NO: 319942 - RNA, 19 nt, Homo sapiens
  misc_RNA (1)...(19): siRNA sense strand
cgccacagcuacacuccaa

SEQ ID NO: 319943 - RNA, 19 nt, Homo sapiens
  misc_RNA (1)...(19): siRNA sense strand
caccaggucauacuaucua

SEQ ID NO: 319944 - RNA, 19 nt, Homo sapiens
  misc_RNA (1)...(19): siRNA sense strand
cagagcaaguccucagaag

SEQ ID NO: 319945 - RNA, 19 nt, Homo sapiens
  misc_RNA (1)...(19): siRNA sense strand
ccucggaaaguauuuauuc

SEQ ID NO: 319946 - RNA, 19 nt, Homo sapiens
  misc_RNA (1)...(19): siRNA sense strand
gggcuaugaugacaaacag

SEQ ID NO: 319947 - RNA, 19 nt, Homo sapiens
  misc_RNA (1)...(19): siRNA sense strand
acacuucgggcuaugauga

SEQ ID NO: 319948 - RNA, 19 nt, Homo sapiens
  misc_RNA (1)...(19): siRNA sense strand
cauugaacguccagaucuu

SEQ ID NO: 319949 - RNA, 19 nt, Homo sapiens
  misc_RNA (1)...(19): siRNA sense strand
ggagagacagagccuugga

SEQ ID NO: 319950 - RNA, 19 nt, Homo sapiens
  misc_RNA (1)...(19): siRNA sense strand
gagugucuaugcccaacau

SEQ ID NO: 319951 - RNA, 19 nt, Homo sapiens
  misc_RNA (1)...(19): siRNA sense strand
aggcaggugacaaacauua

SEQ ID NO: 319952 - RNA, 19 nt, Homo sapiens
  misc_RNA (1)...(19): siRNA sense strand
ggacaguugaucuugaaag

SEQ ID NO: 319953 - RNA, 19 nt, Homo sapiens
  misc_RNA (1)...(19): siRNA sense strand
guucacagaaggagaggaa

SEQ ID NO: 319954 - RNA, 19 nt, Homo sapiens
  misc_RNA (1)...(19): siRNA sense strand
cagcgagacaccagagauu

SEQ ID NO: 319955 - RNA, 19 nt, Homo sapiens
  misc_RNA (1)...(19): siRNA sense strand
cagcagaugcaaccagaug

SEQ ID NO: 319956 - RNA, 19 nt, Homo sapiens
  misc_RNA (1)...(19): siRNA sense strand
aaucaacauuuaccgaaag

SEQ ID NO: 319957 - RNA, 19 nt, Homo sapiens
  misc_RNA (1)...(19): siRNA sense strand
gauguucgggaucggauga

SEQ ID NO: 319958 - RNA, 19 nt, Homo sapiens
  misc_RNA (1)...(19): siRNA sense strand
ggagacgcaacgacaugaa

SEQ ID NO: 319959 - RNA, 19 nt, Homo sapiens
  misc_RNA (1)...(19): siRNA sense strand
gaaagagagccgggaaagg

SEQ ID NO: 319960 - RNA, 19 nt, Homo sapiens
  misc_RNA (1)...(19): siRNA sense strand
uaugagccuuucuacacuu

SEQ ID NO: 319961 - RNA, 19 nt, Homo sapiens
  misc_RNA (1)...(19): siRNA sense strand
cacauauuccaucaucuaa

SEQ ID NO: 319962 - RNA, 19 nt, Homo sapiens
  misc_RNA (1)...(19): siRNA sense strand
ucaacucagcuucacauau

SEQ ID NO: 319963 - RNA, 19 nt, Homo sapiens
  misc_RNA (1)...(19): siRNA sense strand
ucacagaaggagaggaaau

SEQ ID NO: 319964 - RNA, 19 nt, Homo sapiens
  misc_RNA (1)...(19): siRNA sense strand
cucauuugcugucauagga

SEQ ID NO: 319965 - RNA, 19 nt, Homo sapiens
  misc_RNA (1)...(19): siRNA sense strand
agcaaguccucagaagaua

SEQ ID NO: 319966 - RNA, 19 nt, Homo sapiens
  misc_RNA (1)...(19): siRNA sense strand
gcagaucuaguggcagaga

SEQ ID NO: 319967 - RNA, 19 nt, Homo sapiens
  misc_RNA (1)...(19): siRNA sense strand
gaacuccccucucccuuac

SEQ ID NO: 319968 - RNA, 19 nt, Homo sapiens
  misc_RNA (1)...(19): siRNA sense strand
gacauccucggaaaguauu

SEQ ID NO: 319969 - RNA, 19 nt, Homo sapiens
  misc_RNA (1)...(19): siRNA sense strand
cuacgauucucccaucaac

SEQ ID NO: 319970 - RNA, 19 nt, Homo sapiens
  misc_RNA (1)...(19): siRNA sense strand
caucccgacuguaagcaau

SEQ ID NO: 319971 - RNA, 19 nt, Homo sapiens
  misc_RNA (1)...(19): siRNA sense strand
ccucagaagauaucaucaa

SEQ ID NO: 319972 - RNA, 19 nt, Homo sapiens
  misc_RNA (1)...(19): siRNA sense strand
ccagagcaaguccucagaa

SEQ ID NO: 319973 - RNA, 19 nt, Homo sapiens
  misc_RNA (1)...(19): siRNA sense strand
cgaaagccacccaucuaca

SEQ ID NO: 319974 - RNA, 19 nt, Homo sapiens
  misc_RNA (1)...(19): siRNA sense strand
gcucaccaggucauacuau

SEQ ID NO: 319975 - RNA, 19 nt, Homo sapiens
  misc_RNA (1)...(19): siRNA sense strand
gcucaggccccuaaacauu

SEQ ID NO: 319976 - RNA, 19 nt, Homo sapiens
  misc_RNA (1)...(19): siRNA sense strand
ggccacaugccugcaauga

SEQ ID NO: 319977 - RNA, 19 nt, Homo sapiens
  misc_RNA (1)...(19): siRNA sense strand
caacucagcuucacauauu

SEQ ID NO: 319978 - RNA, 19 nt, Homo sapiens
  misc_RNA (1)...(19): siRNA sense strand
ggaaaggucaucucuguua

SEQ ID NO: 319979 - RNA, 19 nt, Homo sapiens
  misc_RNA (1)...(19): siRNA sense strand
cagaagauaucaucaaguu

SEQ ID NO: 319980 - RNA, 19 nt, Homo sapiens
  misc_RNA (1)...(19): siRNA sense strand
gaacguccagaucuuauua

SEQ ID NO: 319981 - RNA, 19 nt, Homo sapiens
  misc_RNA (1)...(19): siRNA sense strand
cauaggaccugacaugaaa

SEQ ID NO: 319982 - RNA, 19 nt, Homo sapiens
  misc_RNA (1)...(19): siRNA sense strand
aagaagagauggagaaaga

SEQ ID NO: 319983 - RNA, 19 nt, Homo sapiens
  misc_RNA (1)...(19): siRNA sense strand
ccacaugccugcaaugaga

SEQ ID NO: 319984 - RNA, 19 nt, Homo sapiens
  misc_RNA (1)...(19): siRNA sense strand
gaucaaggaaucaacauuu

SEQ ID NO: 319985 - RNA, 19 nt, Homo sapiens
  misc_RNA (1)...(19): siRNA sense strand
guccagaucuuauuaccua

SEQ ID NO: 319986 - RNA, 19 nt, Homo sapiens
  misc_RNA (1)...(19): siRNA sense strand
caacagagggcgaaacaaa

SEQ ID NO: 319987 - RNA, 19 nt, Homo sapiens
  misc_RNA (1)...(19): siRNA sense strand
gaaucaacauuuaccgaaa

SEQ ID NO: 319988 - RNA, 19 nt, Homo sapiens
  misc_RNA (1)...(19): siRNA sense strand
gagaggaaauguaucuuca

SEQ ID NO: 319989 - RNA, 19 nt, Homo sapiens
  misc_RNA (1)...(19): siRNA sense strand
caaggcaauuuaugacauu

SEQ ID NO: 319990 - RNA, 19 nt, Homo sapiens
  misc_RNA (1)...(19): siRNA sense strand
ccacagaccuggcaaugag

SEQ ID NO: 319991 - RNA, 19 nt, Homo sapiens
  misc_RNA (1)...(19): siRNA sense strand
gaaagccacccaucuacaa

SEQ ID NO: 319992 - RNA, 19 nt, Homo sapiens
  misc_RNA (1)...(19): siRNA sense strand
gcagagaggaagaugauga

SEQ ID NO: 319993 - RNA, 19 nt, Homo sapiens
  misc_RNA (1)...(19): siRNA sense strand
gaaaggucaucucuguuag

SEQ ID NO: 319994 - RNA, 19 nt, Homo sapiens
  misc_RNA (1)...(19): siRNA sense strand
gaaagaagagauggagaaa

SEQ ID NO: 319995 - RNA, 19 nt, Homo sapiens
  misc_RNA (1)...(19): siRNA sense strand
cuucaaggcuccaccguuu

SEQ ID NO: 319996 - RNA, 19 nt, Homo sapiens
  misc_RNA (1)...(19): siRNA sense strand
agaggaagaugaugaggaa

SEQ ID NO: 319997 - RNA, 19 nt, Homo sapiens
  misc_RNA (1)...(19): siRNA sense strand
caagaagagcaauuaauga

SEQ ID NO: 319998 - RNA, 19 nt, Homo sapiens
  misc_RNA (1)...(19): siRNA sense strand
gaggaaauguaucuucaag

SEQ ID NO: 319999 - RNA, 19 nt, Homo sapiens
  misc_RNA (1)...(19): siRNA sense strand
gagcaaguccucagaagau

SEQ ID NO: 320000 - RNA, 19 nt, Homo sapiens
  misc_RNA (1)...(19): siRNA sense strand
ggaagaugaugaggaacuu

SEQ ID NO: 320001 - RNA, 19 nt, Homo sapiens
  misc_RNA (1)...(19): siRNA sense strand
gaaacaaaauccucagaga

SEQ ID NO: 320002 - RNA, 19 nt, Homo sapiens
  misc_RNA (1)...(19): siRNA sense strand
gaagagauggagaaagaga

SEQ ID NO: 320003 - RNA, 19 nt, Homo sapiens
  misc_RNA (1)...(19): siRNA sense strand
gagcaauuaaugaagcuua

SEQ ID NO: 320004 - RNA, 19 nt, Homo sapiens
  misc_RNA (1)...(19): siRNA sense strand
ucaagaagagcaauuaaug

SEQ ID NO: 320005 - RNA, 19 nt, Homo sapiens
  misc_RNA (1)...(19): siRNA sense strand
ggacauccucggaaaguau

SEQ ID NO: 320006 - RNA, 19 nt, Homo sapiens
  misc_RNA (1)...(19): siRNA sense strand
gaauguccauacaggaguu

SEQ ID NO: 320007 - RNA, 19 nt, Homo sapiens
  misc_RNA (1)...(19): siRNA sense strand
cggaaaguauuuauucuag

SEQ ID NO: 320008 - RNA, 19 nt, Homo sapiens
  misc_RNA (1)...(19): siRNA sense strand
gaaggucaaggcaauuuau

SEQ ID NO: 320009 - RNA, 19 nt, Homo sapiens
  misc_RNA (1)...(19): siRNA sense strand
cgggaaaggucaucucugu

SEQ ID NO: 320010 - RNA, 19 nt, Homo sapiens
  misc_RNA (1)...(19): siRNA sense strand
cgggaaaucuuuggaaugu

SEQ ID NO: 320011 - RNA, 19 nt, Homo sapiens
  misc_RNA (1)...(19): siRNA sense strand
ucacauauuccaucaucua

SEQ ID NO: 320012 - RNA, 19 nt, Homo sapiens
  misc_RNA (1)...(19): siRNA sense strand
gggcuucaccggccuguuu

SEQ ID NO: 320013 - RNA, 19 nt, Homo sapiens
  misc_RNA (1)...(19): siRNA sense strand
gacaugaaacgcagaucua

SEQ ID NO: 320014 - RNA, 19 nt, Homo sapiens
  misc_RNA (1)...(19): siRNA sense strand
ucagagagguggacagaac

SEQ ID NO: 320015 - RNA, 19 nt, Homo sapiens
  misc_RNA (1)...(19): siRNA sense strand
cagaucuuauuaccuauga

SEQ ID NO: 320016 - RNA, 19 nt, Homo sapiens
  misc_RNA (1)...(19): siRNA sense strand
acaggaguuugacagguua

SEQ ID NO: 320017 - RNA, 19 nt, Homo sapiens
  misc_RNA (1)...(19): siRNA sense strand
uguaagcaaucuacgaaga

SEQ ID NO: 320018 - RNA, 19 nt, Homo sapiens
  misc_RNA (1)...(19): siRNA sense strand
ugaaagaagagauggagaa

SEQ ID NO: 320019 - RNA, 19 nt, Homo sapiens
  misc_RNA (1)...(19): siRNA sense strand
ggagaggaaauguaucuuc

SEQ ID NO: 320020 - RNA, 19 nt, Homo sapiens
  misc_RNA (1)...(19): siRNA sense strand
agaaggagaggaaauguau

SEQ ID NO: 320021 - RNA, 19 nt, Homo sapiens
  misc_RNA (1)...(19): siRNA sense strand
cgacuucgcucaguauaac

SEQ ID NO: 320022 - RNA, 19 nt, Homo sapiens
  misc_RNA (1)...(19): siRNA sense strand
cuaccgacuucgcucagua

SEQ ID NO: 320023 - RNA, 19 nt, Homo sapiens
  misc_RNA (1)...(19): siRNA sense strand
gaaccaaagauauuuccau

SEQ ID NO: 320024 - RNA, 19 nt, Homo sapiens
  misc_RNA (1)...(19): siRNA sense strand
cgaaggucaaggcaauuua

SEQ ID NO: 320025 - RNA, 19 nt, Homo sapiens
  misc_RNA (1)...(19): siRNA sense strand
uacaggaguuugacagguu

SEQ ID NO: 320026 - RNA, 19 nt, Homo sapiens
  misc_RNA (1)...(19): siRNA sense strand
ucaaggcaauuuaugacau

SEQ ID NO: 320027 - RNA, 19 nt, Homo sapiens
  misc_RNA (1)...(19): siRNA sense strand
gcaaguccucagaagauau

SEQ ID NO: 320028 - RNA, 19 nt, Homo sapiens
  misc_RNA (1)...(19): siRNA sense strand
cagaaggagaggaaaugua

SEQ ID NO: 320029 - RNA, 19 nt, Homo sapiens
  misc_RNA (1)...(19): siRNA sense strand
gagaaagagagccgggaaa

SEQ ID NO: 320030 - RNA, 19 nt, Homo sapiens
  misc_RNA (1)...(19): siRNA sense strand
gcgagacaccagagauuga

SEQ ID NO: 320031 - RNA, 19 nt, Homo sapiens
  misc_RNA (1)...(19): siRNA sense strand
agacagagccuuggagagu

SEQ ID NO: 320032 - RNA, 19 nt, Homo sapiens
  misc_RNA (1)...(19): siRNA sense strand
aaagagagccgggaaaggu

SEQ ID NO: 320033 - RNA, 19 nt, Homo sapiens
  misc_RNA (1)...(19): siRNA sense strand
aggccaggcuccaguauuc

SEQ ID NO: 320034 - RNA, 19 nt, Homo sapiens
  misc_RNA (1)...(19): siRNA sense strand
gaugaugaggaacuucuga

SEQ ID NO: 320035 - RNA, 19 nt, Homo sapiens
  misc_RNA (1)...(19): siRNA sense strand
ggaacuccccucucccuua

SEQ ID NO: 320036 - RNA, 19 nt, Homo sapiens
  misc_RNA (1)...(19): siRNA sense strand
uagcagccauuccgaaggu

SEQ ID NO: 320037 - RNA, 19 nt, Homo sapiens
  misc_RNA (1)...(19): siRNA sense strand
cuucacauauuccaucauc

SEQ ID NO: 320038 - RNA, 19 nt, Homo sapiens
  misc_RNA (1)...(19): siRNA sense strand
ugggacaguugaucuugaa

SEQ ID NO: 320039 - RNA, 19 nt, Homo sapiens
  misc_RNA (1)...(19): siRNA sense strand
cgccacagcuacacuccaa

SEQ ID NO: 320040 - RNA, 19 nt, Homo sapiens
  misc_RNA (1)...(19): siRNA sense strand
caccaggucauacuaucua

SEQ ID NO: 320041 - RNA, 19 nt, Homo sapiens
  misc_RNA (1)...(19): siRNA sense strand
cagagcaaguccucagaag

SEQ ID NO: 320042 - RNA, 19 nt, Homo sapiens
  misc_RNA (1)...(19): siRNA sense strand
gggcuaugaugacaaacag

SEQ ID NO: 320043 - RNA, 19 nt, Homo sapiens
  misc_RNA (1)...(19): siRNA sense strand
acacuucgggcuaugauga

SEQ ID NO: 320044 - RNA, 19 nt, Homo sapiens
  misc_RNA (1)...(19): siRNA sense strand
cauugaacguccagaucuu

SEQ ID NO: 320045 - RNA, 19 nt, Homo sapiens
  misc_RNA (1)...(19): siRNA sense strand
ccucggaaaguauuuauuc

SEQ ID NO: 320046 - RNA, 19 nt, Homo sapiens
  misc_RNA (1)...(19): siRNA sense strand
ggagagacagagccuugga

SEQ ID NO: 320047 - RNA, 19 nt, Homo sapiens
  misc_RNA (1)...(19): siRNA sense strand
gagugucuaugcccaacau

SEQ ID NO: 320048 - RNA, 19 nt, Homo sapiens
  misc_RNA (1)...(19): siRNA sense strand
guucacagaaggagaggaa

SEQ ID NO: 320049 - RNA, 19 nt, Homo sapiens
  misc_RNA (1)...(19): siRNA sense strand
ggacaguugaucuugaaag

SEQ ID NO: 320050 - RNA, 19 nt, Homo sapiens
  misc_RNA (1)...(19): siRNA sense strand
cagcgagacaccagagauu

SEQ ID NO: 320051 - RNA, 19 nt, Homo sapiens
  misc_RNA (1)...(19): siRNA sense strand
aaucaacauuuaccgaaag

SEQ ID NO: 320052 - RNA, 19 nt, Homo sapiens
  misc_RNA (1)...(19): siRNA sense strand
gauguucgggaucggauga

SEQ ID NO: 320053 - RNA, 19 nt, Homo sapiens
  misc_RNA (1)...(19): siRNA sense strand
ggagacgcaacgacaugaa

SEQ ID NO: 320054 - RNA, 19 nt, Homo sapiens
  misc_RNA (1)...(19): siRNA sense strand
gaaagagagccgggaaagg

SEQ ID NO: 320055 - RNA, 19 nt, Homo sapiens
  misc_RNA (1)...(19): siRNA sense strand
uaugagccuuucuacacuu

SEQ ID NO: 320056 - RNA, 19 nt, Homo sapiens
  misc_RNA (1)...(19): siRNA sense strand
cacauauuccaucaucuaa

SEQ ID NO: 320057 - RNA, 19 nt, Homo sapiens
  misc_RNA (1)...(19): siRNA sense strand
ucaacucagcuucacauau

SEQ ID NO: 320058 - RNA, 19 nt, Homo sapiens
  misc_RNA (1)...(19): siRNA sense strand
cucauuugcugucauagga

SEQ ID NO: 320059 - RNA, 19 nt, Homo sapiens
  misc_RNA (1)...(19): siRNA sense strand
ucacagaaggagaggaaau

SEQ ID NO: 320060 - RNA, 19 nt, Homo sapiens
  misc_RNA (1)...(19): siRNA sense strand
agcaaguccucagaagaua

SEQ ID NO: 320061 - RNA, 19 nt, Homo sapiens
  misc_RNA (1)...(19): siRNA sense strand
gcagaucuaguggcagaga

SEQ ID NO: 320062 - RNA, 19 nt, Homo sapiens
  misc_RNA (1)...(19): siRNA sense strand
gaacuccccucucccuuac

SEQ ID NO: 320063 - RNA, 19 nt, Homo sapiens
  misc_RNA (1)...(19): siRNA sense strand
gacauccucggaaaguauu

SEQ ID NO: 320064 - RNA, 19 nt, Homo sapiens
  misc_RNA (1)...(19): siRNA sense strand
gcucaccaggucauacuau

SEQ ID NO: 320065 - RNA, 19 nt, Homo sapiens
  misc_RNA (1)...(19): siRNA sense strand
cuacgauucucccaucaac

SEQ ID NO: 320066 - RNA, 19 nt, Homo sapiens
  misc_RNA (1)...(19): siRNA sense strand
caucccgacuguaagcaau

SEQ ID NO: 320067 - RNA, 19 nt, Homo sapiens
  misc_RNA (1)...(19): siRNA sense strand
ccucagaagauaucaucaa

SEQ ID NO: 320068 - RNA, 19 nt, Homo sapiens
  misc_RNA (1)...(19): siRNA sense strand
ccagagcaaguccucagaa

SEQ ID NO: 320069 - RNA, 19 nt, Homo sapiens
  misc_RNA (1)...(19): siRNA sense strand
cgaaagccacccaucuaca

SEQ ID NO: 320070 - RNA, 19 nt, Homo sapiens
  misc_RNA (1)...(19): siRNA sense strand
gcccucuaacuccaacuua

SEQ ID NO: 320071 - RNA, 19 nt, Homo sapiens
  misc_RNA (1)...(19): siRNA sense strand
ggccacaugccugcaauga

SEQ ID NO: 320072 - RNA, 19 nt, Homo sapiens
  misc_RNA (1)...(19): siRNA sense strand
gcucaggccccuaaacauu

SEQ ID NO: 320073 - RNA, 19 nt, Homo sapiens
  misc_RNA (1)...(19): siRNA sense strand
uaccagacacucccagaug

SEQ ID NO: 320074 - RNA, 19 nt, Homo sapiens
  misc_RNA (1)...(19): siRNA sense strand
caggcuggagcgccacuua

SEQ ID NO: 320075 - RNA, 19 nt, Homo sapiens
  misc_RNA (1)...(19): siRNA sense strand
ggaccgaggagugucuaug

SEQ ID NO: 320076 - RNA, 19 nt, Homo sapiens
  misc_RNA (1)...(19): siRNA sense strand
gacauugaacguccagauc

SEQ ID NO: 320077 - RNA, 19 nt, Homo sapiens
  misc_RNA (1)...(19): siRNA sense strand
ggacaaagauuuccuugau

SEQ ID NO: 320078 - RNA, 19 nt, Homo sapiens
  misc_RNA (1)...(19): siRNA sense strand
gcagcaagcaucauaauua

SEQ ID NO: 320079 - RNA, 19 nt, Homo sapiens
  misc_RNA (1)...(19): siRNA sense strand
gaaucuaucugcaccguuu

SEQ ID NO: 320080 - RNA, 19 nt, Homo sapiens
  misc_RNA (1)...(19): siRNA sense strand
gagcaaggcuuugagacua

SEQ ID NO: 320081 - RNA, 19 nt, Homo sapiens
  misc_RNA (1)...(19): siRNA sense strand
acaaggaacuguuugauga

SEQ ID NO: 320082 - RNA, 19 nt, Homo sapiens
  misc_RNA (1)...(19): siRNA sense strand
gacaaagauuuccuugaua

SEQ ID NO: 320083 - RNA, 19 nt, Homo sapiens
  misc_RNA (1)...(19): siRNA sense strand
gaaaccaaaugaccaaauc

SEQ ID NO: 320084 - RNA, 19 nt, Homo sapiens
  misc_RNA (1)...(19): siRNA sense strand
gcaagaguuuguuauauag

SEQ ID NO: 320085 - RNA, 19 nt, Homo sapiens
  misc_RNA (1)...(19): siRNA sense strand
gcauugggauagauaaauu

SEQ ID NO: 320086 - RNA, 19 nt, Homo sapiens
  misc_RNA (1)...(19): siRNA sense strand
acacaaagcagcaacauuu

SEQ ID NO: 320087 - RNA, 19 nt, Homo sapiens
  misc_RNA (1)...(19): siRNA sense strand
ugacaucucugcuguagug

SEQ ID NO: 320088 - RNA, 19 nt, Homo sapiens
  misc_RNA (1)...(19): siRNA sense strand
ugaugaaaguuaugccuua

SEQ ID NO: 320089 - RNA, 19 nt, Homo sapiens
  misc_RNA (1)...(19): siRNA sense strand
gaaauccucugcuugacau

SEQ ID NO: 320090 - RNA, 19 nt, Homo sapiens
  misc_RNA (1)...(19): siRNA sense strand
gaucaagaccagaaagaaa

SEQ ID NO: 320091 - RNA, 19 nt, Homo sapiens
  misc_RNA (1)...(19): siRNA sense strand
gacaacaggucccucauag

SEQ ID NO: 320092 - RNA, 19 nt, Homo sapiens
  misc_RNA (1)...(19): siRNA sense strand
uauaauggcuacagaaagu

SEQ ID NO: 320093 - RNA, 19 nt, Homo sapiens
  misc_RNA (1)...(19): siRNA sense strand
ugccaaagaugaacucaaa

SEQ ID NO: 320094 - RNA, 19 nt, Homo sapiens
  misc_RNA (1)...(19): siRNA sense strand
gggagauccugaagagaaa

SEQ ID NO: 320095 - RNA, 19 nt, Homo sapiens
  misc_RNA (1)...(19): siRNA sense strand
caauggagcuggagaugca

SEQ ID NO: 320096 - RNA, 19 nt, Homo sapiens
  misc_RNA (1)...(19): siRNA sense strand
ggaacuguuugaugaacuu

SEQ ID NO: 320097 - RNA, 19 nt, Homo sapiens
  misc_RNA (1)...(19): siRNA sense strand
agggagagaugacacuaua

SEQ ID NO: 320098 - RNA, 19 nt, Homo sapiens
  misc_RNA (1)...(19): siRNA sense strand
gacagaagcugccacuuuu

SEQ ID NO: 320099 - RNA, 19 nt, Homo sapiens
  misc_RNA (1)...(19): siRNA sense strand
ugaaaguuaugccuuaugu

SEQ ID NO: 320100 - RNA, 19 nt, Homo sapiens
  misc_RNA (1)...(19): siRNA sense strand
cagcaagcaucauaauuag

SEQ ID NO: 320101 - RNA, 19 nt, Homo sapiens
  misc_RNA (1)...(19): siRNA sense strand
agacagaagcugccacuuu

SEQ ID NO: 320102 - RNA, 19 nt, Homo sapiens
  misc_RNA (1)...(19): siRNA sense strand
acaggucccucauagcuaa

SEQ ID NO: 320103 - RNA, 19 nt, Homo sapiens
  misc_RNA (1)...(19): siRNA sense strand
gaccagaaagaaauuauug

SEQ ID NO: 320104 - RNA, 19 nt, Homo sapiens
  misc_RNA (1)...(19): siRNA sense strand
ggagagaugacacuauaau

SEQ ID NO: 320105 - RNA, 19 nt, Homo sapiens
  misc_RNA (1)...(19): siRNA sense strand
gaugaaaguuaugccuuau

SEQ ID NO: 320106 - RNA, 19 nt, Homo sapiens
  misc_RNA (1)...(19): siRNA sense strand
gcaaggcuuugagacuaaa

SEQ ID NO: 320107 - RNA, 19 nt, Homo sapiens
  misc_RNA (1)...(19): siRNA sense strand
aaaguuaugccuuauguug

SEQ ID NO: 320108 - RNA, 19 nt, Homo sapiens
  misc_RNA (1)...(19): siRNA sense strand
ugucucaacuggucucuga

SEQ ID NO: 320109 - RNA, 19 nt, Homo sapiens
  misc_RNA (1)...(19): siRNA sense strand
ccaaagaugaacucaaaga

SEQ ID NO: 320110 - RNA, 19 nt, Homo sapiens
  misc_RNA (1)...(19): siRNA sense strand
cacaagcccugccaaagau

SEQ ID NO: 320111 - RNA, 19 nt, Homo sapiens
  misc_RNA (1)...(19): siRNA sense strand
ugacaagccucugacugaa

SEQ ID NO: 320112 - RNA, 19 nt, Homo sapiens
  misc_RNA (1)...(19): siRNA sense strand
ugacaacaggucccucaua

SEQ ID NO: 320113 - RNA, 19 nt, Homo sapiens
  misc_RNA (1)...(19): siRNA sense strand
acacaagcccugccaaaga

SEQ ID NO: 320114 - RNA, 19 nt, Homo sapiens
  misc_RNA (1)...(19): siRNA sense strand
aguauucucugaaaccaaa

SEQ ID NO: 320115 - RNA, 19 nt, Homo sapiens
  misc_RNA (1)...(19): siRNA sense strand
cuugauaaguauucucuga

SEQ ID NO: 320116 - RNA, 19 nt, Homo sapiens
  misc_RNA (1)...(19): siRNA sense strand
acaagccucugacugaaug

SEQ ID NO: 320117 - RNA, 19 nt, Homo sapiens
  misc_RNA (1)...(19): siRNA sense strand
ggaaauccucugcuugaca

SEQ ID NO: 320118 - RNA, 19 nt, Homo sapiens
  misc_RNA (1)...(19): siRNA sense strand
gcaagcaucauaauuagac

SEQ ID NO: 320119 - RNA, 19 nt, Homo sapiens
  misc_RNA (1)...(19): siRNA sense strand
ccucauagcuaaucuugcu

SEQ ID NO: 320120 - RNA, 19 nt, Homo sapiens
  misc_RNA (1)...(19): siRNA sense strand
gaacuugugcugcaugcau

SEQ ID NO: 320121 - RNA, 19 nt, Homo sapiens
  misc_RNA (1)...(19): siRNA sense strand
caacaggucccucauagcu

SEQ ID NO: 320122 - RNA, 19 nt, Homo sapiens
  misc_RNA (1)...(19): siRNA sense strand
gagagaugacacuauaaug

SEQ ID NO: 320123 - RNA, 19 nt, Homo sapiens
  misc_RNA (1)...(19): siRNA sense strand
caagaccagaaagaaauua

SEQ ID NO: 320124 - RNA, 19 nt, Homo sapiens
  misc_RNA (1)...(19): siRNA sense strand
gauaaguauucucugaaac

SEQ ID NO: 320125 - RNA, 19 nt, Homo sapiens
  misc_RNA (1)...(19): siRNA sense strand
caacaggauuuucacuuug

SEQ ID NO: 320126 - RNA, 19 nt, Homo sapiens
  misc_RNA (1)...(19): siRNA sense strand
ggaucaagaccagaaagaa

SEQ ID NO: 320127 - RNA, 19 nt, Homo sapiens
  misc_RNA (1)...(19): siRNA sense strand
gaaaguuaugccuuauguu

SEQ ID NO: 320128 - RNA, 19 nt, Homo sapiens
  misc_RNA (1)...(19): siRNA sense strand
acacuauaauggcuacaga

SEQ ID NO: 320129 - RNA, 19 nt, Homo sapiens
  misc_RNA (1)...(19): siRNA sense strand
ggaugcauugggauagaua

SEQ ID NO: 320130 - RNA, 19 nt, Homo sapiens
  misc_RNA (1)...(19): siRNA sense strand
uauccgugcuggccacuau

SEQ ID NO: 320131 - RNA, 19 nt, Homo sapiens
  misc_RNA (1)...(19): siRNA sense strand
caaggaacuguuugaugaa

SEQ ID NO: 320132 - RNA, 19 nt, Homo sapiens
  misc_RNA (1)...(19): siRNA sense strand
ccauguggaugcucauuac

SEQ ID NO: 320133 - RNA, 19 nt, Homo sapiens
  misc_RNA (1)...(19): siRNA sense strand
gcucuacccagaauucaau

SEQ ID NO: 320134 - RNA, 19 nt, Homo sapiens
  misc_RNA (1)...(19): siRNA sense strand
guuaugccuuauguugaua

SEQ ID NO: 320135 - RNA, 19 nt, Homo sapiens
  misc_RNA (1)...(19): siRNA sense strand
ugggaaauccucugcuuga

SEQ ID NO: 320136 - RNA, 19 nt, Homo sapiens
  misc_RNA (1)...(19): siRNA sense strand
cuaucugcaccguuuauua

SEQ ID NO: 320137 - RNA, 19 nt, Homo sapiens
  misc_RNA (1)...(19): siRNA sense strand
acaacaggauuuucacuuu

SEQ ID NO: 320138 - RNA, 19 nt, Homo sapiens
  misc_RNA (1)...(19): siRNA sense strand
uaucugcaccguuuauuag

SEQ ID NO: 320139 - RNA, 19 nt, Homo sapiens
  misc_RNA (1)...(19): siRNA sense strand
cugacaagccucugacuga

SEQ ID NO: 320140 - RNA, 19 nt, Homo sapiens
  misc_RNA (1)...(19): siRNA sense strand
ucaagaccagaaagaaauu

SEQ ID NO: 320141 - RNA, 19 nt, Homo sapiens
  misc_RNA (1)...(19): siRNA sense strand
cagagucaguauuaaaggu

SEQ ID NO: 320142 - RNA, 19 nt, Homo sapiens
  misc_RNA (1)...(19): siRNA sense strand
cggacuggcugcaccuuuc

SEQ ID NO: 320143 - RNA, 19 nt, Homo sapiens
  misc_RNA (1)...(19): siRNA sense strand
cagcgaaucgugaucuuca

SEQ ID NO: 320144 - RNA, 19 nt, Homo sapiens
  misc_RNA (1)...(19): siRNA sense strand
ucaaagaggcagcgaaucg

SEQ ID NO: 320145 - RNA, 19 nt, Homo sapiens
  misc_RNA (1)...(19): siRNA sense strand
aaugggaaauccucugcuu

SEQ ID NO: 320146 - RNA, 19 nt, Homo sapiens
  misc_RNA (1)...(19): siRNA sense strand
ggcugcaccuuuccugaga

SEQ ID NO: 320147 - RNA, 19 nt, Homo sapiens
  misc_RNA (1)...(19): siRNA sense strand
agcaaggcuuugagacuaa

SEQ ID NO: 320148 - RNA, 19 nt, Homo sapiens
  misc_RNA (1)...(19): siRNA sense strand
uaaucuugcugcugccaau

SEQ ID NO: 320149 - RNA, 19 nt, Homo sapiens
  misc_RNA (1)...(19): siRNA sense strand
gggagagaugacacuauaa

SEQ ID NO: 320150 - RNA, 19 nt, Homo sapiens
  misc_RNA (1)...(19): siRNA sense strand
agacacaagcccugccaaa

SEQ ID NO: 320151 - RNA, 19 nt, Homo sapiens
  misc_RNA (1)...(19): siRNA sense strand
gacuaaagacauuaaagag

SEQ ID NO: 320152 - RNA, 19 nt, Homo sapiens
  misc_RNA (1)...(19): siRNA sense strand
cuagagagcaaggcuuuga

SEQ ID NO: 320153 - RNA, 19 nt, Homo sapiens
  misc_RNA (1)...(19): siRNA sense strand
gagacuaaagacauuaaag

SEQ ID NO: 320154 - RNA, 19 nt, Homo sapiens
  misc_RNA (1)...(19): siRNA sense strand
gagcuggagaugcauuugu

SEQ ID NO: 320155 - RNA, 19 nt, Homo sapiens
  misc_RNA (1)...(19): siRNA sense strand
agagaugacacuauaaugg

SEQ ID NO: 320156 - RNA, 19 nt, Homo sapiens
  misc_RNA (1)...(19): siRNA sense strand
caaagaugaacucaaagag

SEQ ID NO: 320157 - RNA, 19 nt, Homo sapiens
  misc_RNA (1)...(19): siRNA sense strand
gaagagaaaagcugcugaa

SEQ ID NO: 320158 - RNA, 19 nt, Homo sapiens
  misc_RNA (1)...(19): siRNA sense strand
uaaguauucucugaaacca

SEQ ID NO: 320159 - RNA, 19 nt, Homo sapiens
  misc_RNA (1)...(19): siRNA sense strand
cacaaggaacuguuugaug

SEQ ID NO: 320160 - RNA, 19 nt, Homo sapiens
  misc_RNA (1)...(19): siRNA sense strand
caagggagagaugacacua

SEQ ID NO: 320161 - RNA, 19 nt, Homo sapiens
  misc_RNA (1)...(19): siRNA sense strand
cauuaaagagauagccaaa

SEQ ID NO: 320162 - RNA, 19 nt, Homo sapiens
  misc_RNA (1)...(19): siRNA sense strand
ugaagacaaacacaaggaa

SEQ ID NO: 320163 - RNA, 19 nt, Homo sapiens
  misc_RNA (1)...(19): siRNA sense strand
guucuacaaggaaucauug

SEQ ID NO: 320164 - RNA, 19 nt, Homo sapiens
  misc_RNA (1)...(19): siRNA sense strand
uugcugcugccaauuguua

SEQ ID NO: 320165 - RNA, 19 nt, Homo sapiens
  misc_RNA (1)...(19): siRNA sense strand
gcugcugccaauuguuaua

SEQ ID NO: 320166 - RNA, 19 nt, Homo sapiens
  misc_RNA (1)...(19): siRNA sense strand
gacaagccucugacugaau

SEQ ID NO: 320167 - RNA, 19 nt, Homo sapiens
  misc_RNA (1)...(19): siRNA sense strand
gauucaacagccacacaaa

SEQ ID NO: 320168 - RNA, 19 nt, Homo sapiens
  misc_RNA (1)...(19): siRNA sense strand
caaagucgaauaucaugcu

SEQ ID NO: 320169 - RNA, 19 nt, Homo sapiens
  misc_RNA (1)...(19): siRNA sense strand
gaugcauugggauagauaa

SEQ ID NO: 320170 - RNA, 19 nt, Homo sapiens
  misc_RNA (1)...(19): siRNA sense strand
gcugcaccuuuccugagaa

SEQ ID NO: 320171 - RNA, 19 nt, Homo sapiens
  misc_RNA (1)...(19): siRNA sense strand
uaauggcuacagaaaguga

SEQ ID NO: 320172 - RNA, 19 nt, Homo sapiens
  misc_RNA (1)...(19): siRNA sense strand
acuauaauggcuacagaaa

SEQ ID NO: 320173 - RNA, 19 nt, Homo sapiens
  misc_RNA (1)...(19): siRNA sense strand
aguuaugccuuauguugau

SEQ ID NO: 320174 - RNA, 19 nt, Homo sapiens
  misc_RNA (1)...(19): siRNA sense strand
uuagccaguucuacaagga

SEQ ID NO: 320175 - RNA, 19 nt, Homo sapiens
  misc_RNA (1)...(19): siRNA sense strand
ugaaaccaaaugaccaaau

SEQ ID NO: 320176 - RNA, 19 nt, Homo sapiens
  misc_RNA (1)...(19): siRNA sense strand
uguggaugcucauuacuac

SEQ ID NO: 320177 - RNA, 19 nt, Homo sapiens
  misc_RNA (1)...(19): siRNA sense strand
ggacaaagauuuccuugau

SEQ ID NO: 320178 - RNA, 19 nt, Homo sapiens
  misc_RNA (1)...(19): siRNA sense strand
gcagcaagcaucauaauua

SEQ ID NO: 320179 - RNA, 19 nt, Homo sapiens
  misc_RNA (1)...(19): siRNA sense strand
gaaucuaucugcaccguuu

SEQ ID NO: 320180 - RNA, 19 nt, Homo sapiens
  misc_RNA (1)...(19): siRNA sense strand
gagcaaggcuuugagacua

SEQ ID NO: 320181 - RNA, 19 nt, Homo sapiens
  misc_RNA (1)...(19): siRNA sense strand
acaaggaacuguuugauga

SEQ ID NO: 320182 - RNA, 19 nt, Homo sapiens
  misc_RNA (1)...(19): siRNA sense strand
gacaaagauuuccuugaua

SEQ ID NO: 320183 - RNA, 19 nt, Homo sapiens
  misc_RNA (1)...(19): siRNA sense strand
gaaaccaaaugaccaaauc

SEQ ID NO: 320184 - RNA, 19 nt, Homo sapiens
  misc_RNA (1)...(19): siRNA sense strand
gcaagaguuuguuauauag

SEQ ID NO: 320185 - RNA, 19 nt, Homo sapiens
  misc_RNA (1)...(19): siRNA sense strand
gcauugggauagauaaauu

SEQ ID NO: 320186 - RNA, 19 nt, Homo sapiens
  misc_RNA (1)...(19): siRNA sense strand
acacaaagcagcaacauuu

SEQ ID NO: 320187 - RNA, 19 nt, Homo sapiens
  misc_RNA (1)...(19): siRNA sense strand
ugacaucucugcuguagug

SEQ ID NO: 320188 - RNA, 19 nt, Homo sapiens
  misc_RNA (1)...(19): siRNA sense strand
ugaugaaaguuaugccuua

SEQ ID NO: 320189 - RNA, 19 nt, Homo sapiens
  misc_RNA (1)...(19): siRNA sense strand
gaaauccucugcuugacau

SEQ ID NO: 320190 - RNA, 19 nt, Homo sapiens
  misc_RNA (1)...(19): siRNA sense strand
gaucaagaccagaaagaaa

SEQ ID NO: 320191 - RNA, 19 nt, Homo sapiens
  misc_RNA (1)...(19): siRNA sense strand
gacaacaggucccucauag

SEQ ID NO: 320192 - RNA, 19 nt, Homo sapiens
  misc_RNA (1)...(19): siRNA sense strand
uauaauggcuacagaaagu

SEQ ID NO: 320193 - RNA, 19 nt, Homo sapiens
  misc_RNA (1)...(19): siRNA sense strand
ugccaaagaugaacucaaa

SEQ ID NO: 320194 - RNA, 19 nt, Homo sapiens
  misc_RNA (1)...(19): siRNA sense strand
gggagauccugaagagaaa

SEQ ID NO: 320195 - RNA, 19 nt, Homo sapiens
  misc_RNA (1)...(19): siRNA sense strand
caauggagcuggagaugca

SEQ ID NO: 320196 - RNA, 19 nt, Homo sapiens
  misc_RNA (1)...(19): siRNA sense strand
ggaacuguuugaugaacuu

SEQ ID NO: 320197 - RNA, 19 nt, Homo sapiens
  misc_RNA (1)...(19): siRNA sense strand
agggagagaugacacuaua

SEQ ID NO: 320198 - RNA, 19 nt, Homo sapiens
  misc_RNA (1)...(19): siRNA sense strand
gacagaagcugccacuuuu

SEQ ID NO: 320199 - RNA, 19 nt, Homo sapiens
  misc_RNA (1)...(19): siRNA sense strand
ugaaaguuaugccuuaugu

SEQ ID NO: 320200 - RNA, 19 nt, Homo sapiens
  misc_RNA (1)...(19): siRNA sense strand
cagcaagcaucauaauuag

SEQ ID NO: 320201 - RNA, 19 nt, Homo sapiens
  misc_RNA (1)...(19): siRNA sense strand
agacagaagcugccacuuu

SEQ ID NO: 320202 - RNA, 19 nt, Homo sapiens
  misc_RNA (1)...(19): siRNA sense strand
acaggucccucauagcuaa

SEQ ID NO: 320203 - RNA, 19 nt, Homo sapiens
  misc_RNA (1)...(19): siRNA sense strand
gaccagaaagaaauuauug

SEQ ID NO: 320204 - RNA, 19 nt, Homo sapiens
  misc_RNA (1)...(19): siRNA sense strand
ggagagaugacacuauaau

SEQ ID NO: 320205 - RNA, 19 nt, Homo sapiens
  misc_RNA (1)...(19): siRNA sense strand
gaugaaaguuaugccuuau

SEQ ID NO: 320206 - RNA, 19 nt, Homo sapiens
  misc_RNA (1)...(19): siRNA sense strand
gcaaggcuuugagacuaaa

SEQ ID NO: 320207 - RNA, 19 nt, Homo sapiens
  misc_RNA (1)...(19): siRNA sense strand
aaaguuaugccuuauguug

SEQ ID NO: 320208 - RNA, 19 nt, Homo sapiens
  misc_RNA (1)...(19): siRNA sense strand
ugucucaacuggucucuga

SEQ ID NO: 320209 - RNA, 19 nt, Homo sapiens
  misc_RNA (1)...(19): siRNA sense strand
ccaaagaugaacucaaaga

SEQ ID NO: 320210 - RNA, 19 nt, Homo sapiens
  misc_RNA (1)...(19): siRNA sense strand
cacaagcccugccaaagau

SEQ ID NO: 320211 - RNA, 19 nt, Homo sapiens
  misc_RNA (1)...(19): siRNA sense strand
ugacaagccucugacugaa

SEQ ID NO: 320212 - RNA, 19 nt, Homo sapiens
  misc_RNA (1)...(19): siRNA sense strand
ugacaacaggucccucaua

SEQ ID NO: 320213 - RNA, 19 nt, Homo sapiens
  misc_RNA (1)...(19): siRNA sense strand
acacaagcccugccaaaga

SEQ ID NO: 320214 - RNA, 19 nt, Homo sapiens
  misc_RNA (1)...(19): siRNA sense strand
aguauucucugaaaccaaa

SEQ ID NO: 320215 - RNA, 19 nt, Homo sapiens
  misc_RNA (1)...(19): siRNA sense strand
cuugauaaguauucucuga

SEQ ID NO: 320216 - RNA, 19 nt, Homo sapiens
  misc_RNA (1)...(19): siRNA sense strand
acaagccucugacugaaug

SEQ ID NO: 320217 - RNA, 19 nt, Homo sapiens
  misc_RNA (1)...(19): siRNA sense strand
ggaaauccucugcuugaca

SEQ ID NO: 320218 - RNA, 19 nt, Homo sapiens
  misc_RNA (1)...(19): siRNA sense strand
gcaagcaucauaauuagac

SEQ ID NO: 320219 - RNA, 19 nt, Homo sapiens
  misc_RNA (1)...(19): siRNA sense strand
ccucauagcuaaucuugcu

SEQ ID NO: 320220 - RNA, 19 nt, Homo sapiens
  misc_RNA (1)...(19): siRNA sense strand
gaacuugugcugcaugcau

SEQ ID NO: 320221 - RNA, 19 nt, Homo sapiens
  misc_RNA (1)...(19): siRNA sense strand
caacaggucccucauagcu

SEQ ID NO: 320222 - RNA, 19 nt, Homo sapiens
  misc_RNA (1)...(19): siRNA sense strand
gagagaugacacuauaaug

SEQ ID NO: 320223 - RNA, 19 nt, Homo sapiens
  misc_RNA (1)...(19): siRNA sense strand
caagaccagaaagaaauua

SEQ ID NO: 320224 - RNA, 19 nt, Homo sapiens
  misc_RNA (1)...(19): siRNA sense strand
gauaaguauucucugaaac

SEQ ID NO: 320225 - RNA, 19 nt, Homo sapiens
  misc_RNA (1)...(19): siRNA sense strand
caacaggauuuucacuuug

SEQ ID NO: 320226 - RNA, 19 nt, Homo sapiens
  misc_RNA (1)...(19): siRNA sense strand
ggaucaagaccagaaagaa

SEQ ID NO: 320227 - RNA, 19 nt, Homo sapiens
  misc_RNA (1)...(19): siRNA sense strand
gaaaguuaugccuuauguu

SEQ ID NO: 320228 - RNA, 19 nt, Homo sapiens
  misc_RNA (1)...(19): siRNA sense strand
acacuauaauggcuacaga

SEQ ID NO: 320229 - RNA, 19 nt, Homo sapiens
  misc_RNA (1)...(19): siRNA sense strand
ggaugcauugggauagaua

SEQ ID NO: 320230 - RNA, 19 nt, Homo sapiens
  misc_RNA (1)...(19): siRNA sense strand
uauccgugcuggccacuau

SEQ ID NO: 320231 - RNA, 19 nt, Homo sapiens
  misc_RNA (1)...(19): siRNA sense strand
caaggaacuguuugaugaa

SEQ ID NO: 320232 - RNA, 19 nt, Homo sapiens
  misc_RNA (1)...(19): siRNA sense strand
ccauguggaugcucauuac

SEQ ID NO: 320233 - RNA, 19 nt, Homo sapiens
  misc_RNA (1)...(19): siRNA sense strand
gcucuacccagaauucaau

SEQ ID NO: 320234 - RNA, 19 nt, Homo sapiens
  misc_RNA (1)...(19): siRNA sense strand
guuaugccuuauguugaua

SEQ ID NO: 320235 - RNA, 19 nt, Homo sapiens
  misc_RNA (1)...(19): siRNA sense strand
ugggaaauccucugcuuga

SEQ ID NO: 320236 - RNA, 19 nt, Homo sapiens
  misc_RNA (1)...(19): siRNA sense strand
cuaucugcaccguuuauua

SEQ ID NO: 320237 - RNA, 19 nt, Homo sapiens
  misc_RNA (1)...(19): siRNA sense strand
acaacaggauuuucacuuu

SEQ ID NO: 320238 - RNA, 19 nt, Homo sapiens
  misc_RNA (1)...(19): siRNA sense strand
uaucugcaccguuuauuag

SEQ ID NO: 320239 - RNA, 19 nt, Homo sapiens
  misc_RNA (1)...(19): siRNA sense strand
cugacaagccucugacuga

SEQ ID NO: 320240 - RNA, 19 nt, Homo sapiens
  misc_RNA (1)...(19): siRNA sense strand
ucaagaccagaaagaaauu

SEQ ID NO: 320241 - RNA, 19 nt, Homo sapiens
  misc_RNA (1)...(19): siRNA sense strand
cagagucaguauuaaaggu

SEQ ID NO: 320242 - RNA, 19 nt, Homo sapiens
  misc_RNA (1)...(19): siRNA sense strand
cggacuggcugcaccuuuc

SEQ ID NO: 320243 - RNA, 19 nt, Homo sapiens
  misc_RNA (1)...(19): siRNA sense strand
cagcgaaucgugaucuuca

SEQ ID NO: 320244 - RNA, 19 nt, Homo sapiens
  misc_RNA (1)...(19): siRNA sense strand
ucaaagaggcagcgaaucg

SEQ ID NO: 320245 - RNA, 19 nt, Homo sapiens
  misc_RNA (1)...(19): siRNA sense strand
aaugggaaauccucugcuu

SEQ ID NO: 320246 - RNA, 19 nt, Homo sapiens
  misc_RNA (1)...(19): siRNA sense strand
ggcugcaccuuuccugaga

SEQ ID NO: 320247 - RNA, 19 nt, Homo sapiens
  misc_RNA (1)...(19): siRNA sense strand
agcaaggcuuugagacuaa

SEQ ID NO: 320248 - RNA, 19 nt, Homo sapiens
  misc_RNA (1)...(19): siRNA sense strand
uaaucuugcugcugccaau

SEQ ID NO: 320249 - RNA, 19 nt, Homo sapiens
  misc_RNA (1)...(19): siRNA sense strand
gggagagaugacacuauaa

SEQ ID NO: 320250 - RNA, 19 nt, Homo sapiens
  misc_RNA (1)...(19): siRNA sense strand
agacacaagcccugccaaa

SEQ ID NO: 320251 - RNA, 19 nt, Homo sapiens
  misc_RNA (1)...(19): siRNA sense strand
gacuaaagacauuaaagag

SEQ ID NO: 320252 - RNA, 19 nt, Homo sapiens
  misc_RNA (1)...(19): siRNA sense strand
cuagagagcaaggcuuuga

SEQ ID NO: 320253 - RNA, 19 nt, Homo sapiens
  misc_RNA (1)...(19): siRNA sense strand
gagacuaaagacauuaaag

SEQ ID NO: 320254 - RNA, 19 nt, Homo sapiens
  misc_RNA (1)...(19): siRNA sense strand
gagcuggagaugcauuugu

SEQ ID NO: 320255 - RNA, 19 nt, Homo sapiens
  misc_RNA (1)...(19): siRNA sense strand
agagaugacacuauaaugg

SEQ ID NO: 320256 - RNA, 19 nt, Homo sapiens
  misc_RNA (1)...(19): siRNA sense strand
caaagaugaacucaaagag

SEQ ID NO: 320257 - RNA, 19 nt, Homo sapiens
  misc_RNA (1)...(19): siRNA sense strand
gaagagaaaagcugcugaa

SEQ ID NO: 320258 - RNA, 19 nt, Homo sapiens
  misc_RNA (1)...(19): siRNA sense strand
uaaguauucucugaaacca

SEQ ID NO: 320259 - RNA, 19 nt, Homo sapiens
  misc_RNA (1)...(19): siRNA sense strand
cacaaggaacuguuugaug

SEQ ID NO: 320260 - RNA, 19 nt, Homo sapiens
  misc_RNA (1)...(19): siRNA sense strand
caagggagagaugacacua

SEQ ID NO: 320261 - RNA, 19 nt, Homo sapiens
  misc_RNA (1)...(19): siRNA sense strand
cauuaaagagauagccaaa

SEQ ID NO: 320262 - RNA, 19 nt, Homo sapiens
  misc_RNA (1)...(19): siRNA sense strand
ugaagacaaacacaaggaa

SEQ ID NO: 320263 - RNA, 19 nt, Homo sapiens
  misc_RNA (1)...(19): siRNA sense strand
guucuacaaggaaucauug

SEQ ID NO: 320264 - RNA, 19 nt, Homo sapiens
  misc_RNA (1)...(19): siRNA sense strand
uugcugcugccaauuguua

SEQ ID NO: 320265 - RNA, 19 nt, Homo sapiens
  misc_RNA (1)...(19): siRNA sense strand
gcugcugccaauuguuaua

SEQ ID NO: 320266 - RNA, 19 nt, Homo sapiens
  misc_RNA (1)...(19): siRNA sense strand
gacaagccucugacugaau

SEQ ID NO: 320267 - RNA, 19 nt, Homo sapiens
  misc_RNA (1)...(19): siRNA sense strand
gauucaacagccacacaaa

SEQ ID NO: 320268 - RNA, 19 nt, Homo sapiens
  misc_RNA (1)...(19): siRNA sense strand
caaagucgaauaucaugcu

SEQ ID NO: 320269 - RNA, 19 nt, Homo sapiens
  misc_RNA (1)...(19): siRNA sense strand
gaugcauugggauagauaa

SEQ ID NO: 320270 - RNA, 19 nt, Homo sapiens
  misc_RNA (1)...(19): siRNA sense strand
gcugcaccuuuccugagaa

SEQ ID NO: 320271 - RNA, 19 nt, Homo sapiens
  misc_RNA (1)...(19): siRNA sense strand
uaauggcuacagaaaguga

SEQ ID NO: 320272 - RNA, 19 nt, Homo sapiens
  misc_RNA (1)...(19): siRNA sense strand
acuauaauggcuacagaaa

SEQ ID NO: 320273 - RNA, 19 nt, Homo sapiens
  misc_RNA (1)...(19): siRNA sense strand
aguuaugccuuauguugau

SEQ ID NO: 320274 - RNA, 19 nt, Homo sapiens
  misc_RNA (1)...(19): siRNA sense strand
uuagccaguucuacaagga

SEQ ID NO: 320275 - RNA, 19 nt, Homo sapiens
  misc_RNA (1)...(19): siRNA sense strand
ugaaaccaaaugaccaaau

SEQ ID NO: 320276 - RNA, 19 nt, Homo sapiens
  misc_RNA (1)...(19): siRNA sense strand
uguggaugcucauuacuac

SEQ ID NO: 320277 - RNA, 19 nt, Homo sapiens
  misc_RNA (1)...(19): siRNA sense strand
gagcacaacuuucaaauua

SEQ ID NO: 320278 - RNA, 19 nt, Homo sapiens
  misc_RNA (1)...(19): siRNA sense strand
gaacaaaucucugauccua

SEQ ID NO: 320279 - RNA, 19 nt, Homo sapiens
  misc_RNA (1)...(19): siRNA sense strand
gaaaugaggagaaagaaua

SEQ ID NO: 320280 - RNA, 19 nt, Homo sapiens
  misc_RNA (1)...(19): siRNA sense strand
caacagagcgugaucauaa

SEQ ID NO: 320281 - RNA, 19 nt, Homo sapiens
  misc_RNA (1)...(19): siRNA sense strand
gaaaucaucaggucuguua

SEQ ID NO: 320282 - RNA, 19 nt, Homo sapiens
  misc_RNA (1)...(19): siRNA sense strand
ggagagcugugcugaauuu

SEQ ID NO: 320283 - RNA, 19 nt, Homo sapiens
  misc_RNA (1)...(19): siRNA sense strand
ggaaauagcagcagaauuc

SEQ ID NO: 320284 - RNA, 19 nt, Homo sapiens
  misc_RNA (1)...(19): siRNA sense strand
ggaaguggaugaauuaugu

SEQ ID NO: 320285 - RNA, 19 nt, Homo sapiens
  misc_RNA (1)...(19): siRNA sense strand
gaagauaggagacaaauau

SEQ ID NO: 320286 - RNA, 19 nt, Homo sapiens
  misc_RNA (1)...(19): siRNA sense strand
gaagaagaauggaauuuca

SEQ ID NO: 320287 - RNA, 19 nt, Homo sapiens
  misc_RNA (1)...(19): siRNA sense strand
guaaugagccggaguauga

SEQ ID NO: 320288 - RNA, 19 nt, Homo sapiens
  misc_RNA (1)...(19): siRNA sense strand
uaauggagcugcuagagua

SEQ ID NO: 320289 - RNA, 19 nt, Homo sapiens
  misc_RNA (1)...(19): siRNA sense strand
caaaucagccuccacauaa

SEQ ID NO: 320290 - RNA, 19 nt, Homo sapiens
  misc_RNA (1)...(19): siRNA sense strand
guaaagauacugcuucuaa

SEQ ID NO: 320291 - RNA, 19 nt, Homo sapiens
  misc_RNA (1)...(19): siRNA sense strand
ugaauuauguccugacuaa

SEQ ID NO: 320292 - RNA, 19 nt, Homo sapiens
  misc_RNA (1)...(19): siRNA sense strand
ggauuuaccuucauucgaa

SEQ ID NO: 320293 - RNA, 19 nt, Homo sapiens
  misc_RNA (1)...(19): siRNA sense strand
gagauucgauuucaaccua

SEQ ID NO: 320294 - RNA, 19 nt, Homo sapiens
  misc_RNA (1)...(19): siRNA sense strand
caaggaaacugcagacgaa

SEQ ID NO: 320295 - RNA, 19 nt, Homo sapiens
  misc_RNA (1)...(19): siRNA sense strand
gcacaacuuucaaauuaug

SEQ ID NO: 320296 - RNA, 19 nt, Homo sapiens
  misc_RNA (1)...(19): siRNA sense strand
guacagugcucauucaugu

SEQ ID NO: 320297 - RNA, 19 nt, Homo sapiens
  misc_RNA (1)...(19): siRNA sense strand
gaaaagagguaccgagaaa

SEQ ID NO: 320298 - RNA, 19 nt, Homo sapiens
  misc_RNA (1)...(19): siRNA sense strand
uaaagaaguuguucguuug

SEQ ID NO: 320299 - RNA, 19 nt, Homo sapiens
  misc_RNA (1)...(19): siRNA sense strand
gaaaggaccuggaaauagc

SEQ ID NO: 320300 - RNA, 19 nt, Homo sapiens
  misc_RNA (1)...(19): siRNA sense strand
ccaucucucuugaguauua

SEQ ID NO: 320301 - RNA, 19 nt, Homo sapiens
  misc_RNA (1)...(19): siRNA sense strand
gaauaucauuggucaaguu

SEQ ID NO: 320302 - RNA, 19 nt, Homo sapiens
  misc_RNA (1)...(19): siRNA sense strand
ugacacagaaggagaauua

SEQ ID NO: 320303 - RNA, 19 nt, Homo sapiens
  misc_RNA (1)...(19): siRNA sense strand
gcaaauuccuggguuagaa

SEQ ID NO: 320304 - RNA, 19 nt, Homo sapiens
  misc_RNA (1)...(19): siRNA sense strand
ugaagaggaucuacauaaa

SEQ ID NO: 320305 - RNA, 19 nt, Homo sapiens
  misc_RNA (1)...(19): siRNA sense strand
gagcaaagaggacaagaaa

SEQ ID NO: 320306 - RNA, 19 nt, Homo sapiens
  misc_RNA (1)...(19): siRNA sense strand
gaggagaagaguauuauuu

SEQ ID NO: 320307 - RNA, 19 nt, Homo sapiens
  misc_RNA (1)...(19): siRNA sense strand
gcaagaguccugaaucuga

SEQ ID NO: 320308 - RNA, 19 nt, Homo sapiens
  misc_RNA (1)...(19): siRNA sense strand
gagaaaggaccuggaaaua

SEQ ID NO: 320309 - RNA, 19 nt, Homo sapiens
  misc_RNA (1)...(19): siRNA sense strand
guacauagaagcacuuuau

SEQ ID NO: 320310 - RNA, 19 nt, Homo sapiens
  misc_RNA (1)...(19): siRNA sense strand
uaaaggaguuggaaaguag

SEQ ID NO: 320311 - RNA, 19 nt, Homo sapiens
  misc_RNA (1)...(19): siRNA sense strand
gaacuucggacacuaauca

SEQ ID NO: 320312 - RNA, 19 nt, Homo sapiens
  misc_RNA (1)...(19): siRNA sense strand
gaagucaguccgauuguuu

SEQ ID NO: 320313 - RNA, 19 nt, Homo sapiens
  misc_RNA (1)...(19): siRNA sense strand
ucagacagcccauagauaa

SEQ ID NO: 320314 - RNA, 19 nt, Homo sapiens
  misc_RNA (1)...(19): siRNA sense strand
ugauuaggcuguauucaaa

SEQ ID NO: 320315 - RNA, 19 nt, Homo sapiens
  misc_RNA (1)...(19): siRNA sense strand
ggacaccaccuucaucuga

SEQ ID NO: 320316 - RNA, 19 nt, Homo sapiens
  misc_RNA (1)...(19): siRNA sense strand
gcacguauagcauugguaa

SEQ ID NO: 320317 - RNA, 19 nt, Homo sapiens
  misc_RNA (1)...(19): siRNA sense strand
uggagaauguggaagaaua

SEQ ID NO: 320318 - RNA, 19 nt, Homo sapiens
  misc_RNA (1)...(19): siRNA sense strand
uuccauagcugcugaauug

SEQ ID NO: 320319 - RNA, 19 nt, Homo sapiens
  misc_RNA (1)...(19): siRNA sense strand
ggaugagagugaagaagaa

SEQ ID NO: 320320 - RNA, 19 nt, Homo sapiens
  misc_RNA (1)...(19): siRNA sense strand
ccaaaucagccuccacaua

SEQ ID NO: 320321 - RNA, 19 nt, Homo sapiens
  misc_RNA (1)...(19): siRNA sense strand
ggaaacugcagacgaauug

SEQ ID NO: 320322 - RNA, 19 nt, Homo sapiens
  misc_RNA (1)...(19): siRNA sense strand
gagcuucgccuuuguuaga

SEQ ID NO: 320323 - RNA, 19 nt, Homo sapiens
  misc_RNA (1)...(19): siRNA sense strand
gcagguggauaaucuuuua

SEQ ID NO: 320324 - RNA, 19 nt, Homo sapiens
  misc_RNA (1)...(19): siRNA sense strand
gagagugacccaaagauga

SEQ ID NO: 320325 - RNA, 19 nt, Homo sapiens
  misc_RNA (1)...(19): siRNA sense strand
cagcagaucguuuaaaguu

SEQ ID NO: 320326 - RNA, 19 nt, Homo sapiens
  misc_RNA (1)...(19): siRNA sense strand
gcagcagaauucaggcuuu

SEQ ID NO: 320327 - RNA, 19 nt, Homo sapiens
  misc_RNA (1)...(19): siRNA sense strand
gcaaagggcacguauagca

SEQ ID NO: 320328 - RNA, 19 nt, Homo sapiens
  misc_RNA (1)...(19): siRNA sense strand
gauuguagguuacucaaca

SEQ ID NO: 320329 - RNA, 19 nt, Homo sapiens
  misc_RNA (1)...(19): siRNA sense strand
ccaaacaucagaggaauaa

SEQ ID NO: 320330 - RNA, 19 nt, Homo sapiens
  misc_RNA (1)...(19): siRNA sense strand
gaaccugccuuuauuucag

SEQ ID NO: 320331 - RNA, 19 nt, Homo sapiens
  misc_RNA (1)...(19): siRNA sense strand
ggaaaggacuguucaaaag

SEQ ID NO: 320332 - RNA, 19 nt, Homo sapiens
  misc_RNA (1)...(19): siRNA sense strand
uuaagcagcuggugagaga

SEQ ID NO: 320333 - RNA, 19 nt, Homo sapiens
  misc_RNA (1)...(19): siRNA sense strand
gcacucuguuugugguuaa

SEQ ID NO: 320334 - RNA, 19 nt, Homo sapiens
  misc_RNA (1)...(19): siRNA sense strand
cuaacgaacugaucugguu

SEQ ID NO: 320335 - RNA, 19 nt, Homo sapiens
  misc_RNA (1)...(19): siRNA sense strand
cagcacaccucgacagaug

SEQ ID NO: 320336 - RNA, 19 nt, Homo sapiens
  misc_RNA (1)...(19): siRNA sense strand
gccagucggucuaauuuga

SEQ ID NO: 320337 - RNA, 19 nt, Homo sapiens
  misc_RNA (1)...(19): siRNA sense strand
uuaaaggaguuggaaagua

SEQ ID NO: 320338 - RNA, 19 nt, Homo sapiens
  misc_RNA (1)...(19): siRNA sense strand
ggagaaagaauaucauugg

SEQ ID NO: 320339 - RNA, 19 nt, Homo sapiens
  misc_RNA (1)...(19): siRNA sense strand
gcaauugaaccugccuuua

SEQ ID NO: 320340 - RNA, 19 nt, Homo sapiens
  misc_RNA (1)...(19): siRNA sense strand
caucaggucuguuauagag

SEQ ID NO: 320341 - RNA, 19 nt, Homo sapiens
  misc_RNA (1)...(19): siRNA sense strand
ggaaugcugcugaaaucua

SEQ ID NO: 320342 - RNA, 19 nt, Homo sapiens
  misc_RNA (1)...(19): siRNA sense strand
gaauggaauuucaccaaag

SEQ ID NO: 320343 - RNA, 19 nt, Homo sapiens
  misc_RNA (1)...(19): siRNA sense strand
caagccaucccagauauua

SEQ ID NO: 320344 - RNA, 19 nt, Homo sapiens
  misc_RNA (1)...(19): siRNA sense strand
uugcacagaugaagaauga

SEQ ID NO: 320345 - RNA, 19 nt, Homo sapiens
  misc_RNA (1)...(19): siRNA sense strand
gcugaaaucuacaggaagu

SEQ ID NO: 320346 - RNA, 19 nt, Homo sapiens
  misc_RNA (1)...(19): siRNA sense strand
guauagcauugguaaagaa

SEQ ID NO: 320347 - RNA, 19 nt, Homo sapiens
  misc_RNA (1)...(19): siRNA sense strand
gcagaucguuuaaaguuuu

SEQ ID NO: 320348 - RNA, 19 nt, Homo sapiens
  misc_RNA (1)...(19): siRNA sense strand
caaagcagaucaccauugc

SEQ ID NO: 320349 - RNA, 19 nt, Homo sapiens
  misc_RNA (1)...(19): siRNA sense strand
guaccucgaugccauagug

SEQ ID NO: 320350 - RNA, 19 nt, Homo sapiens
  misc_RNA (1)...(19): siRNA sense strand
caauugaaccugccuuuau

SEQ ID NO: 320351 - RNA, 19 nt, Homo sapiens
  misc_RNA (1)...(19): siRNA sense strand
gcccggaaguggaugaauu

SEQ ID NO: 320352 - RNA, 19 nt, Homo sapiens
  misc_RNA (1)...(19): siRNA sense strand
gcaugcagguggauaaucu

SEQ ID NO: 320353 - RNA, 19 nt, Homo sapiens
  misc_RNA (1)...(19): siRNA sense strand
uuagagaccuccuggaugu

SEQ ID NO: 320354 - RNA, 19 nt, Homo sapiens
  misc_RNA (1)...(19): siRNA sense strand
ucaagcaucgcauaguuua

SEQ ID NO: 320355 - RNA, 19 nt, Homo sapiens
  misc_RNA (1)...(19): siRNA sense strand
gaaaucagacagcccauag

SEQ ID NO: 320356 - RNA, 19 nt, Homo sapiens
  misc_RNA (1)...(19): siRNA sense strand
gccagagggucucauuuga

SEQ ID NO: 320357 - RNA, 19 nt, Homo sapiens
  misc_RNA (1)...(19): siRNA sense strand
acaaagcacugaagcagau

SEQ ID NO: 320358 - RNA, 19 nt, Homo sapiens
  misc_RNA (1)...(19): siRNA sense strand
gaagcaugcagguggauaa

SEQ ID NO: 320359 - RNA, 19 nt, Homo sapiens
  misc_RNA (1)...(19): siRNA sense strand
gcacuuggauuugcuaaaa

SEQ ID NO: 320360 - RNA, 19 nt, Homo sapiens
  misc_RNA (1)...(19): siRNA sense strand
caggagagcugugcugaau

SEQ ID NO: 320361 - RNA, 19 nt, Homo sapiens
  misc_RNA (1)...(19): siRNA sense strand
uaaccgaucuaacgaacug

SEQ ID NO: 320362 - RNA, 19 nt, Homo sapiens
  misc_RNA (1)...(19): siRNA sense strand
ccauaagacuaucaaggaa

SEQ ID NO: 320363 - RNA, 19 nt, Homo sapiens
  misc_RNA (1)...(19): siRNA sense strand
ggugcaaauuccuggguua

SEQ ID NO: 320364 - RNA, 19 nt, Homo sapiens
  misc_RNA (1)...(19): siRNA sense strand
caaagccacuccuggaaca

SEQ ID NO: 320365 - RNA, 19 nt, Homo sapiens
  misc_RNA (1)...(19): siRNA sense strand
gcugaaggccauggauuua

SEQ ID NO: 320366 - RNA, 19 nt, Homo sapiens
  misc_RNA (1)...(19): siRNA sense strand
cauuaaaggugccaauauc

SEQ ID NO: 320367 - RNA, 19 nt, Homo sapiens
  misc_RNA (1)...(19): siRNA sense strand
caggaaugcugcugaaauc

SEQ ID NO: 320368 - RNA, 19 nt, Homo sapiens
  misc_RNA (1)...(19): siRNA sense strand
agaauggaauuucaccaaa

SEQ ID NO: 320369 - RNA, 19 nt, Homo sapiens
  misc_RNA (1)...(19): siRNA sense strand
ggccauggauuuaccuuca

SEQ ID NO: 320370 - RNA, 19 nt, Homo sapiens
  misc_RNA (1)...(19): siRNA sense strand
gaaugcugcugaaaucuac

SEQ ID NO: 320371 - RNA, 19 nt, Homo sapiens
  misc_RNA (1)...(19): siRNA sense strand
ccucaagcaucgcauaguu

SEQ ID NO: 320372 - RNA, 19 nt, Homo sapiens
  misc_RNA (1)...(19): siRNA sense strand
caaccaaacaucagaggaa

SEQ ID NO: 320373 - RNA, 19 nt, Homo sapiens
  misc_RNA (1)...(19): siRNA sense strand
ccaaucugguucgguauuu

SEQ ID NO: 320374 - RNA, 19 nt, Homo sapiens
  misc_RNA (1)...(19): siRNA sense strand
gcaaagaggaaacaaaauu

SEQ ID NO: 320375 - RNA, 19 nt, Homo sapiens
  misc_RNA (1)...(19): siRNA sense strand
gagaaagaauaucauuggu

SEQ ID NO: 320376 - RNA, 19 nt, Homo sapiens
  misc_RNA (1)...(19): siRNA sense strand
uaaacuaggacccauagaa

SEQ ID NO: 320377 - RNA, 19 nt, Homo sapiens
  misc_RNA (1)...(19): siRNA sense strand
gagcacaacuuucaaauua

SEQ ID NO: 320378 - RNA, 19 nt, Homo sapiens
  misc_RNA (1)...(19): siRNA sense strand
gaacaaaucucugauccua

SEQ ID NO: 320379 - RNA, 19 nt, Homo sapiens
  misc_RNA (1)...(19): siRNA sense strand
gaaaugaggagaaagaaua

SEQ ID NO: 320380 - RNA, 19 nt, Homo sapiens
  misc_RNA (1)...(19): siRNA sense strand
caacagagcgugaucauaa

SEQ ID NO: 320381 - RNA, 19 nt, Homo sapiens
  misc_RNA (1)...(19): siRNA sense strand
gaaaucaucaggucuguua

SEQ ID NO: 320382 - RNA, 19 nt, Homo sapiens
  misc_RNA (1)...(19): siRNA sense strand
ggagagcugugcugaauuu

SEQ ID NO: 320383 - RNA, 19 nt, Homo sapiens
  misc_RNA (1)...(19): siRNA sense strand
ggaaauagcagcagaauuc

SEQ ID NO: 320384 - RNA, 19 nt, Homo sapiens
  misc_RNA (1)...(19): siRNA sense strand
ggaaguggaugaauuaugu

SEQ ID NO: 320385 - RNA, 19 nt, Homo sapiens
  misc_RNA (1)...(19): siRNA sense strand
gaagauaggagacaaauau

SEQ ID NO: 320386 - RNA, 19 nt, Homo sapiens
  misc_RNA (1)...(19): siRNA sense strand
gaagaagaauggaauuuca

SEQ ID NO: 320387 - RNA, 19 nt, Homo sapiens
  misc_RNA (1)...(19): siRNA sense strand
guaaugagccggaguauga

SEQ ID NO: 320388 - RNA, 19 nt, Homo sapiens
  misc_RNA (1)...(19): siRNA sense strand
uaauggagcugcuagagua

SEQ ID NO: 320389 - RNA, 19 nt, Homo sapiens
  misc_RNA (1)...(19): siRNA sense strand
caaaucagccuccacauaa

SEQ ID NO: 320390 - RNA, 19 nt, Homo sapiens
  misc_RNA (1)...(19): siRNA sense strand
guaaagauacugcuucuaa

SEQ ID NO: 320391 - RNA, 19 nt, Homo sapiens
  misc_RNA (1)...(19): siRNA sense strand
ugaauuauguccugacuaa

SEQ ID NO: 320392 - RNA, 19 nt, Homo sapiens
  misc_RNA (1)...(19): siRNA sense strand
ggauuuaccuucauucgaa

SEQ ID NO: 320393 - RNA, 19 nt, Homo sapiens
  misc_RNA (1)...(19): siRNA sense strand
gagauucgauuucaaccua

SEQ ID NO: 320394 - RNA, 19 nt, Homo sapiens
  misc_RNA (1)...(19): siRNA sense strand
caaggaaacugcagacgaa

SEQ ID NO: 320395 - RNA, 19 nt, Homo sapiens
  misc_RNA (1)...(19): siRNA sense strand
gcacaacuuucaaauuaug

SEQ ID NO: 320396 - RNA, 19 nt, Homo sapiens
  misc_RNA (1)...(19): siRNA sense strand
guacagugcucauucaugu

SEQ ID NO: 320397 - RNA, 19 nt, Homo sapiens
  misc_RNA (1)...(19): siRNA sense strand
gaaaagagguaccgagaaa

SEQ ID NO: 320398 - RNA, 19 nt, Homo sapiens
  misc_RNA (1)...(19): siRNA sense strand
uaaagaaguuguucguuug

SEQ ID NO: 320399 - RNA, 19 nt, Homo sapiens
  misc_RNA (1)...(19): siRNA sense strand
gaaaggaccuggaaauagc

SEQ ID NO: 320400 - RNA, 19 nt, Homo sapiens
  misc_RNA (1)...(19): siRNA sense strand
ccaucucucuugaguauua

SEQ ID NO: 320401 - RNA, 19 nt, Homo sapiens
  misc_RNA (1)...(19): siRNA sense strand
gaauaucauuggucaaguu

SEQ ID NO: 320402 - RNA, 19 nt, Homo sapiens
  misc_RNA (1)...(19): siRNA sense strand
ugacacagaaggagaauua

SEQ ID NO: 320403 - RNA, 19 nt, Homo sapiens
  misc_RNA (1)...(19): siRNA sense strand
gcaaauuccuggguuagaa

SEQ ID NO: 320404 - RNA, 19 nt, Homo sapiens
  misc_RNA (1)...(19): siRNA sense strand
ugaagaggaucuacauaaa

SEQ ID NO: 320405 - RNA, 19 nt, Homo sapiens
  misc_RNA (1)...(19): siRNA sense strand
gagcaaagaggacaagaaa

SEQ ID NO: 320406 - RNA, 19 nt, Homo sapiens
  misc_RNA (1)...(19): siRNA sense strand
gaggagaagaguauuauuu

SEQ ID NO: 320407 - RNA, 19 nt, Homo sapiens
  misc_RNA (1)...(19): siRNA sense strand
gcaagaguccugaaucuga

SEQ ID NO: 320408 - RNA, 19 nt, Homo sapiens
  misc_RNA (1)...(19): siRNA sense strand
gagaaaggaccuggaaaua

SEQ ID NO: 320409 - RNA, 19 nt, Homo sapiens
  misc_RNA (1)...(19): siRNA sense strand
guacauagaagcacuuuau

SEQ ID NO: 320410 - RNA, 19 nt, Homo sapiens
  misc_RNA (1)...(19): siRNA sense strand
uaaaggaguuggaaaguag

SEQ ID NO: 320411 - RNA, 19 nt, Homo sapiens
  misc_RNA (1)...(19): siRNA sense strand
gaacuucggacacuaauca

SEQ ID NO: 320412 - RNA, 19 nt, Homo sapiens
  misc_RNA (1)...(19): siRNA sense strand
gaagucaguccgauuguuu

SEQ ID NO: 320413 - RNA, 19 nt, Homo sapiens
  misc_RNA (1)...(19): siRNA sense strand
ucagacagcccauagauaa

SEQ ID NO: 320414 - RNA, 19 nt, Homo sapiens
  misc_RNA (1)...(19): siRNA sense strand
ugauuaggcuguauucaaa

SEQ ID NO: 320415 - RNA, 19 nt, Homo sapiens
  misc_RNA (1)...(19): siRNA sense strand
ggacaccaccuucaucuga

SEQ ID NO: 320416 - RNA, 19 nt, Homo sapiens
  misc_RNA (1)...(19): siRNA sense strand
gcacguauagcauugguaa

SEQ ID NO: 320417 - RNA, 19 nt, Homo sapiens
  misc_RNA (1)...(19): siRNA sense strand
uggagaauguggaagaaua

SEQ ID NO: 320418 - RNA, 19 nt, Homo sapiens
  misc_RNA (1)...(19): siRNA sense strand
uuccauagcugcugaauug

SEQ ID NO: 320419 - RNA, 19 nt, Homo sapiens
  misc_RNA (1)...(19): siRNA sense strand
ggaugagagugaagaagaa

SEQ ID NO: 320420 - RNA, 19 nt, Homo sapiens
  misc_RNA (1)...(19): siRNA sense strand
ccaaaucagccuccacaua

SEQ ID NO: 320421 - RNA, 19 nt, Homo sapiens
  misc_RNA (1)...(19): siRNA sense strand
ggaaacugcagacgaauug

SEQ ID NO: 320422 - RNA, 19 nt, Homo sapiens
  misc_RNA (1)...(19): siRNA sense strand
gagcuucgccuuuguuaga

SEQ ID NO: 320423 - RNA, 19 nt, Homo sapiens
  misc_RNA (1)...(19): siRNA sense strand
gcagguggauaaucuuuua

SEQ ID NO: 320424 - RNA, 19 nt, Homo sapiens
  misc_RNA (1)...(19): siRNA sense strand
gagagugacccaaagauga

SEQ ID NO: 320425 - RNA, 19 nt, Homo sapiens
  misc_RNA (1)...(19): siRNA sense strand
cagcagaucguuuaaaguu

SEQ ID NO: 320426 - RNA, 19 nt, Homo sapiens
  misc_RNA (1)...(19): siRNA sense strand
gcagcagaauucaggcuuu

SEQ ID NO: 320427 - RNA, 19 nt, Homo sapiens
  misc_RNA (1)...(19): siRNA sense strand
gcaaagggcacguauagca

SEQ ID NO: 320428 - RNA, 19 nt, Homo sapiens
  misc_RNA (1)...(19): siRNA sense strand
gauuguagguuacucaaca

SEQ ID NO: 320429 - RNA, 19 nt, Homo sapiens
  misc_RNA (1)...(19): siRNA sense strand
ccaaacaucagaggaauaa

SEQ ID NO: 320430 - RNA, 19 nt, Homo sapiens
  misc_RNA (1)...(19): siRNA sense strand
gaaccugccuuuauuucag

SEQ ID NO: 320431 - RNA, 19 nt, Homo sapiens
  misc_RNA (1)...(19): siRNA sense strand
ggaaaggacuguucaaaag

SEQ ID NO: 320432 - RNA, 19 nt, Homo sapiens
  misc_RNA (1)...(19): siRNA sense strand
uuaagcagcuggugagaga

SEQ ID NO: 320433 - RNA, 19 nt, Homo sapiens
  misc_RNA (1)...(19): siRNA sense strand
gcacucuguuugugguuaa

SEQ ID NO: 320434 - RNA, 19 nt, Homo sapiens
  misc_RNA (1)...(19): siRNA sense strand
cuaacgaacugaucugguu

SEQ ID NO: 320435 - RNA, 19 nt, Homo sapiens
  misc_RNA (1)...(19): siRNA sense strand
cagcacaccucgacagaug

SEQ ID NO: 320436 - RNA, 19 nt, Homo sapiens
  misc_RNA (1)...(19): siRNA sense strand
gccagucggucuaauuuga

SEQ ID NO: 320437 - RNA, 19 nt, Homo sapiens
  misc_RNA (1)...(19): siRNA sense strand
uuaaaggaguuggaaagua

SEQ ID NO: 320438 - RNA, 19 nt, Homo sapiens
  misc_RNA (1)...(19): siRNA sense strand
ggagaaagaauaucauugg

SEQ ID NO: 320439 - RNA, 19 nt, Homo sapiens
  misc_RNA (1)...(19): siRNA sense strand
gcaauugaaccugccuuua

SEQ ID NO: 320440 - RNA, 19 nt, Homo sapiens
  misc_RNA (1)...(19): siRNA sense strand
caucaggucuguuauagag

SEQ ID NO: 320441 - RNA, 19 nt, Homo sapiens
  misc_RNA (1)...(19): siRNA sense strand
ggaaugcugcugaaaucua

SEQ ID NO: 320442 - RNA, 19 nt, Homo sapiens
  misc_RNA (1)...(19): siRNA sense strand
gaauggaauuucaccaaag

SEQ ID NO: 320443 - RNA, 19 nt, Homo sapiens
  misc_RNA (1)...(19): siRNA sense strand
caagccaucccagauauua

SEQ ID NO: 320444 - RNA, 19 nt, Homo sapiens
  misc_RNA (1)...(19): siRNA sense strand
uugcacagaugaagaauga

SEQ ID NO: 320445 - RNA, 19 nt, Homo sapiens
  misc_RNA (1)...(19): siRNA sense strand
gcugaaaucuacaggaagu

SEQ ID NO: 320446 - RNA, 19 nt, Homo sapiens
  misc_RNA (1)...(19): siRNA sense strand
guauagcauugguaaagaa

SEQ ID NO: 320447 - RNA, 19 nt, Homo sapiens
  misc_RNA (1)...(19): siRNA sense strand
gcagaucguuuaaaguuuu

SEQ ID NO: 320448 - RNA, 19 nt, Homo sapiens
  misc_RNA (1)...(19): siRNA sense strand
caaagcagaucaccauugc

SEQ ID NO: 320449 - RNA, 19 nt, Homo sapiens
  misc_RNA (1)...(19): siRNA sense strand
guaccucgaugccauagug

SEQ ID NO: 320450 - RNA, 19 nt, Homo sapiens
  misc_RNA (1)...(19): siRNA sense strand
caauugaaccugccuuuau

SEQ ID NO: 320451 - RNA, 19 nt, Homo sapiens
  misc_RNA (1)...(19): siRNA sense strand
gcccggaaguggaugaauu

SEQ ID NO: 320452 - RNA, 19 nt, Homo sapiens
  misc_RNA (1)...(19): siRNA sense strand
gcaugcagguggauaaucu

SEQ ID NO: 320453 - RNA, 19 nt, Homo sapiens
  misc_RNA (1)...(19): siRNA sense strand
uuagagaccuccuggaugu

SEQ ID NO: 320454 - RNA, 19 nt, Homo sapiens
  misc_RNA (1)...(19): siRNA sense strand
ucaagcaucgcauaguuua

SEQ ID NO: 320455 - RNA, 19 nt, Homo sapiens
  misc_RNA (1)...(19): siRNA sense strand
gaaaucagacagcccauag

SEQ ID NO: 320456 - RNA, 19 nt, Homo sapiens
  misc_RNA (1)...(19): siRNA sense strand
gccagagggucucauuuga

SEQ ID NO: 320457 - RNA, 19 nt, Homo sapiens
  misc_RNA (1)...(19): siRNA sense strand
acaaagcacugaagcagau

SEQ ID NO: 320458 - RNA, 19 nt, Homo sapiens
  misc_RNA (1)...(19): siRNA sense strand
gaagcaugcagguggauaa

SEQ ID NO: 320459 - RNA, 19 nt, Homo sapiens
  misc_RNA (1)...(19): siRNA sense strand
gcacuuggauuugcuaaaa

SEQ ID NO: 320460 - RNA, 19 nt, Homo sapiens
  misc_RNA (1)...(19): siRNA sense strand
caggagagcugugcugaau

SEQ ID NO: 320461 - RNA, 19 nt, Homo sapiens
  misc_RNA (1)...(19): siRNA sense strand
uaaccgaucuaacgaacug

SEQ ID NO: 320462 - RNA, 19 nt, Homo sapiens
  misc_RNA (1)...(19): siRNA sense strand
ccauaagacuaucaaggaa

SEQ ID NO: 320463 - RNA, 19 nt, Homo sapiens
  misc_RNA (1)...(19): siRNA sense strand
ggugcaaauuccuggguua

SEQ ID NO: 320464 - RNA, 19 nt, Homo sapiens
  misc_RNA (1)...(19): siRNA sense strand
caaagccacuccuggaaca

SEQ ID NO: 320465 - RNA, 19 nt, Homo sapiens
  misc_RNA (1)...(19): siRNA sense strand
gcugaaggccauggauuua

SEQ ID NO: 320466 - RNA, 19 nt, Homo sapiens
  misc_RNA (1)...(19): siRNA sense strand
cauuaaaggugccaauauc

SEQ ID NO: 320467 - RNA, 19 nt, Homo sapiens
  misc_RNA (1)...(19): siRNA sense strand
caggaaugcugcugaaauc

SEQ ID NO: 320468 - RNA, 19 nt, Homo sapiens
  misc_RNA (1)...(19): siRNA sense strand
agaauggaauuucaccaaa

SEQ ID NO: 320469 - RNA, 19 nt, Homo sapiens
  misc_RNA (1)...(19): siRNA sense strand
ggccauggauuuaccuuca

SEQ ID NO: 320470 - RNA, 19 nt, Homo sapiens
  misc_RNA (1)...(19): siRNA sense strand
gaaugcugcugaaaucuac

SEQ ID NO: 320471 - RNA, 19 nt, Homo sapiens
  misc_RNA (1)...(19): siRNA sense strand
ccucaagcaucgcauaguu

SEQ ID NO: 320472 - RNA, 19 nt, Homo sapiens
  misc_RNA (1)...(19): siRNA sense strand
caaccaaacaucagaggaa

SEQ ID NO: 320473 - RNA, 19 nt, Homo sapiens
  misc_RNA (1)...(19): siRNA sense strand
ccaaucugguucgguauuu

SEQ ID NO: 320474 - RNA, 19 nt, Homo sapiens
  misc_RNA (1)...(19): siRNA sense strand
gcaaagaggaaacaaaauu

SEQ ID NO: 320475 - RNA, 19 nt, Homo sapiens
  misc_RNA (1)...(19): siRNA sense strand
gagaaagaauaucauuggu

SEQ ID NO: 320476 - RNA, 19 nt, Homo sapiens
  misc_RNA (1)...(19): siRNA sense strand
uaaacuaggacccauagaa

SEQ ID NO: 320477 - RNA, 19 nt, Homo sapiens
  misc_RNA (1)...(19): siRNA sense strand
gcaaguagcugaugaagua

SEQ ID NO: 320478 - RNA, 19 nt, Homo sapiens
  misc_RNA (1)...(19): siRNA sense strand
aaaguuagguggauccuua

SEQ ID NO: 320479 - RNA, 19 nt, Homo sapiens
  misc_RNA (1)...(19): siRNA sense strand
gaugaaguaugucgcauuu

SEQ ID NO: 320480 - RNA, 19 nt, Homo sapiens
  misc_RNA (1)...(19): siRNA sense strand
gaaagaaggcugucauuuu

SEQ ID NO: 320481 - RNA, 19 nt, Homo sapiens
  misc_RNA (1)...(19): siRNA sense strand
gaugcaagcuuugaaacaa

SEQ ID NO: 320482 - RNA, 19 nt, Homo sapiens
  misc_RNA (1)...(19): siRNA sense strand
gguuggagauguuggugua

SEQ ID NO: 320483 - RNA, 19 nt, Homo sapiens
  misc_RNA (1)...(19): siRNA sense strand
uuagguggauccuuaauug

SEQ ID NO: 320484 - RNA, 19 nt, Homo sapiens
  misc_RNA (1)...(19): siRNA sense strand
uaacugauccuuucaagca

SEQ ID NO: 320485 - RNA, 19 nt, Homo sapiens
  misc_RNA (1)...(19): siRNA sense strand
gugcaucauuguagaagaa

SEQ ID NO: 320486 - RNA, 19 nt, Homo sapiens
  misc_RNA (1)...(19): siRNA sense strand
ucaagcaaauggaccagaa

SEQ ID NO: 320487 - RNA, 19 nt, Homo sapiens
  misc_RNA (1)...(19): siRNA sense strand
caugaaaguucguaaaugc

SEQ ID NO: 320488 - RNA, 19 nt, Homo sapiens
  misc_RNA (1)...(19): siRNA sense strand
aaccauaacugauccuuuc

SEQ ID NO: 320489 - RNA, 19 nt, Homo sapiens
  misc_RNA (1)...(19): siRNA sense strand
gcuccaaggaugcaauuaa

SEQ ID NO: 320490 - RNA, 19 nt, Homo sapiens
  misc_RNA (1)...(19): siRNA sense strand
gcaaauggaccagaagauc

SEQ ID NO: 320491 - RNA, 19 nt, Homo sapiens
  misc_RNA (1)...(19): siRNA sense strand
cuccaaggaugcaauuaaa

SEQ ID NO: 320492 - RNA, 19 nt, Homo sapiens
  misc_RNA (1)...(19): siRNA sense strand
gacaugaaaguucguaaau

SEQ ID NO: 320493 - RNA, 19 nt, Homo sapiens
  misc_RNA (1)...(19): siRNA sense strand
agaacuagcaccucugaaa

SEQ ID NO: 320494 - RNA, 19 nt, Homo sapiens
  misc_RNA (1)...(19): siRNA sense strand
gguggauccuuaauuguag

SEQ ID NO: 320495 - RNA, 19 nt, Homo sapiens
  misc_RNA (1)...(19): siRNA sense strand
uaaaugcuccacaccagaa

SEQ ID NO: 320496 - RNA, 19 nt, Homo sapiens
  misc_RNA (1)...(19): siRNA sense strand
gagugcaaguagcugauga

SEQ ID NO: 320497 - RNA, 19 nt, Homo sapiens
  misc_RNA (1)...(19): siRNA sense strand
gaacuagcaccucugaaaa

SEQ ID NO: 320498 - RNA, 19 nt, Homo sapiens
  misc_RNA (1)...(19): siRNA sense strand
cagaagaaaucaagaaaag

SEQ ID NO: 320499 - RNA, 19 nt, Homo sapiens
  misc_RNA (1)...(19): siRNA sense strand
agaaagaaggcugucauuu

SEQ ID NO: 320500 - RNA, 19 nt, Homo sapiens
  misc_RNA (1)...(19): siRNA sense strand
gaagaaggcaaagagaucu

SEQ ID NO: 320501 - RNA, 19 nt, Homo sapiens
  misc_RNA (1)...(19): siRNA sense strand
uagcaccucugaaaaguaa

SEQ ID NO: 320502 - RNA, 19 nt, Homo sapiens
  misc_RNA (1)...(19): siRNA sense strand
ugacaugaaaguucguaaa

SEQ ID NO: 320503 - RNA, 19 nt, Homo sapiens
  misc_RNA (1)...(19): siRNA sense strand
gauugucgcuaugcuuugu

SEQ ID NO: 320504 - RNA, 19 nt, Homo sapiens
  misc_RNA (1)...(19): siRNA sense strand
guagaagaaggcaaagaga

SEQ ID NO: 320505 - RNA, 19 nt, Homo sapiens
  misc_RNA (1)...(19): siRNA sense strand
caaauggaccagaagaucu

SEQ ID NO: 320506 - RNA, 19 nt, Homo sapiens
  misc_RNA (1)...(19): siRNA sense strand
cauaacugauccuuucaag

SEQ ID NO: 320507 - RNA, 19 nt, Homo sapiens
  misc_RNA (1)...(19): siRNA sense strand
acaugaaaguucguaaaug

SEQ ID NO: 320508 - RNA, 19 nt, Homo sapiens
  misc_RNA (1)...(19): siRNA sense strand
gguguaaccauaacugauc

SEQ ID NO: 320509 - RNA, 19 nt, Homo sapiens
  misc_RNA (1)...(19): siRNA sense strand
ugaaggaugcccuguguag

SEQ ID NO: 320510 - RNA, 19 nt, Homo sapiens
  misc_RNA (1)...(19): siRNA sense strand
gggcuuguauugcugaaaa

SEQ ID NO: 320511 - RNA, 19 nt, Homo sapiens
  misc_RNA (1)...(19): siRNA sense strand
uaaccauaacugauccuuu

SEQ ID NO: 320512 - RNA, 19 nt, Homo sapiens
  misc_RNA (1)...(19): siRNA sense strand
aagauugucgcuaugcuuu

SEQ ID NO: 320513 - RNA, 19 nt, Homo sapiens
  misc_RNA (1)...(19): siRNA sense strand
agaagaaggcaaagagauc

SEQ ID NO: 320514 - RNA, 19 nt, Homo sapiens
  misc_RNA (1)...(19): siRNA sense strand
guuagguggauccuuaauu

SEQ ID NO: 320515 - RNA, 19 nt, Homo sapiens
  misc_RNA (1)...(19): siRNA sense strand
caccagaagaaaucaagaa

SEQ ID NO: 320516 - RNA, 19 nt, Homo sapiens
  misc_RNA (1)...(19): siRNA sense strand
gaucucaaucgggcuugua

SEQ ID NO: 320517 - RNA, 19 nt, Homo sapiens
  misc_RNA (1)...(19): siRNA sense strand
gaccagaagaucucaaucg

SEQ ID NO: 320518 - RNA, 19 nt, Homo sapiens
  misc_RNA (1)...(19): siRNA sense strand
cugauccuuucaagcauuu

SEQ ID NO: 320519 - RNA, 19 nt, Homo sapiens
  misc_RNA (1)...(19): siRNA sense strand
uaugaugcaagcuuugaaa

SEQ ID NO: 320520 - RNA, 19 nt, Homo sapiens
  misc_RNA (1)...(19): siRNA sense strand
cauuguagaagaaggcaaa

SEQ ID NO: 320521 - RNA, 19 nt, Homo sapiens
  misc_RNA (1)...(19): siRNA sense strand
uuugaaggaugcccugugu

SEQ ID NO: 320522 - RNA, 19 nt, Homo sapiens
  misc_RNA (1)...(19): siRNA sense strand
aagaaagaaggcugucauu

SEQ ID NO: 320523 - RNA, 19 nt, Homo sapiens
  misc_RNA (1)...(19): siRNA sense strand
uagaagaaggcaaagagau

SEQ ID NO: 320524 - RNA, 19 nt, Homo sapiens
  misc_RNA (1)...(19): siRNA sense strand
uuuguaugaugcaagcuuu

SEQ ID NO: 320525 - RNA, 19 nt, Homo sapiens
  misc_RNA (1)...(19): siRNA sense strand
agguggauccuuaauugua

SEQ ID NO: 320526 - RNA, 19 nt, Homo sapiens
  misc_RNA (1)...(19): siRNA sense strand
aaaagugcaucauuguaga

SEQ ID NO: 320527 - RNA, 19 nt, Homo sapiens
  misc_RNA (1)...(19): siRNA sense strand
aaagaaagaaggcugucau

SEQ ID NO: 320528 - RNA, 19 nt, Homo sapiens
  misc_RNA (1)...(19): siRNA sense strand
acugauccuuucaagcauu

SEQ ID NO: 320529 - RNA, 19 nt, Homo sapiens
  misc_RNA (1)...(19): siRNA sense strand
gucgcuaugcuuuguauga

SEQ ID NO: 320530 - RNA, 19 nt, Homo sapiens
  misc_RNA (1)...(19): siRNA sense strand
aaagugcaucauuguagaa

SEQ ID NO: 320531 - RNA, 19 nt, Homo sapiens
  misc_RNA (1)...(19): siRNA sense strand
auccuuaauuguagccuuu

SEQ ID NO: 320532 - RNA, 19 nt, Homo sapiens
  misc_RNA (1)...(19): siRNA sense strand
gcuccacaccagaagaaau

SEQ ID NO: 320533 - RNA, 19 nt, Homo sapiens
  misc_RNA (1)...(19): siRNA sense strand
ggccucaggagugcaagua

SEQ ID NO: 320534 - RNA, 19 nt, Homo sapiens
  misc_RNA (1)...(19): siRNA sense strand
aguagcugaugaaguaugu

SEQ ID NO: 320535 - RNA, 19 nt, Homo sapiens
  misc_RNA (1)...(19): siRNA sense strand
ucgcuaugcuuuguaugau

SEQ ID NO: 320536 - RNA, 19 nt, Homo sapiens
  misc_RNA (1)...(19): siRNA sense strand
gugauggccuccuugagua

SEQ ID NO: 320537 - RNA, 19 nt, Homo sapiens
  misc_RNA (1)...(19): siRNA sense strand
guacagcaccuucaacuuc

SEQ ID NO: 320538 - RNA, 19 nt, Homo sapiens
  misc_RNA (1)...(19): siRNA sense strand
caguacaguuccuuucuuu

SEQ ID NO: 320539 - RNA, 19 nt, Homo sapiens
  misc_RNA (1)...(19): siRNA sense strand
gugaguagccaguacaguu

SEQ ID NO: 320540 - RNA, 19 nt, Homo sapiens
  misc_RNA (1)...(19): siRNA sense strand
ccaguacaguuccuuucuu

SEQ ID NO: 320541 - RNA, 19 nt, Homo sapiens
  misc_RNA (1)...(19): siRNA sense strand
ggugauggccuccuugagu

SEQ ID NO: 320542 - RNA, 19 nt, Homo sapiens
  misc_RNA (1)...(19): siRNA sense strand
cgaacuggacuugcucuaa

SEQ ID NO: 320543 - RNA, 19 nt, Homo sapiens
  misc_RNA (1)...(19): siRNA sense strand
cagcauccacuccuucgaa

SEQ ID NO: 320544 - RNA, 19 nt, Homo sapiens
  misc_RNA (1)...(19): siRNA sense strand
agacagcagcguuggcaaa

SEQ ID NO: 320545 - RNA, 19 nt, Homo sapiens
  misc_RNA (1)...(19): siRNA sense strand
gagcucccauugccagcau

SEQ ID NO: 320546 - RNA, 19 nt, Homo sapiens
  misc_RNA (1)...(19): siRNA sense strand
cagauacagccaccuacaa

SEQ ID NO: 320547 - RNA, 19 nt, Homo sapiens
  misc_RNA (1)...(19): siRNA sense strand
cagcagcguuggcaaaaug

SEQ ID NO: 320548 - RNA, 19 nt, Homo sapiens
  misc_RNA (1)...(19): siRNA sense strand
ggaaggccugggucuguca

SEQ ID NO: 320549 - RNA, 19 nt, Homo sapiens
  misc_RNA (1)...(19): siRNA sense strand
ugucagauacagccaccua

SEQ ID NO: 320550 - RNA, 19 nt, Homo sapiens
  misc_RNA (1)...(19): siRNA sense strand
uacagcaccuucaacuucu

SEQ ID NO: 320551 - RNA, 19 nt, Homo sapiens
  misc_RNA (1)...(19): siRNA sense strand
gaguacagcaccuucaacu

SEQ ID NO: 320552 - RNA, 19 nt, Homo sapiens
  misc_RNA (1)...(19): siRNA sense strand
ugaguagccaguacaguuc

SEQ ID NO: 320553 - RNA, 19 nt, Homo sapiens
  misc_RNA (1)...(19): siRNA sense strand
guacaguuccuuucuuuuc

SEQ ID NO: 320554 - RNA, 19 nt, Homo sapiens
  misc_RNA (1)...(19): siRNA sense strand
ggaaggacuuugucaauaa

SEQ ID NO: 320555 - RNA, 19 nt, Homo sapiens
  misc_RNA (1)...(19): siRNA sense strand
ggaagacgcugcuagcuaa

SEQ ID NO: 320556 - RNA, 19 nt, Homo sapiens
  misc_RNA (1)...(19): siRNA sense strand
ggagaaaccuuacagugaa

SEQ ID NO: 320557 - RNA, 19 nt, Homo sapiens
  misc_RNA (1)...(19): siRNA sense strand
ggagagaaaucacuuggaa

SEQ ID NO: 320558 - RNA, 19 nt, Homo sapiens
  misc_RNA (1)...(19): siRNA sense strand
gaaauucucuuuugacaga

SEQ ID NO: 320559 - RNA, 19 nt, Homo sapiens
  misc_RNA (1)...(19): siRNA sense strand
gauaggauguguaugacuu

SEQ ID NO: 320560 - RNA, 19 nt, Homo sapiens
  misc_RNA (1)...(19): siRNA sense strand
gcuaaugucuguaaugaag

SEQ ID NO: 320561 - RNA, 19 nt, Homo sapiens
  misc_RNA (1)...(19): siRNA sense strand
caagauugauagaugauga

SEQ ID NO: 320562 - RNA, 19 nt, Homo sapiens
  misc_RNA (1)...(19): siRNA sense strand
uaaugaagcugcguugauu

SEQ ID NO: 320563 - RNA, 19 nt, Homo sapiens
  misc_RNA (1)...(19): siRNA sense strand
ggcaauacguuugguuuaa

SEQ ID NO: 320564 - RNA, 19 nt, Homo sapiens
  misc_RNA (1)...(19): siRNA sense strand
gaagaagacuguggcauac

SEQ ID NO: 320565 - RNA, 19 nt, Homo sapiens
  misc_RNA (1)...(19): siRNA sense strand
gcaagggccagcagaaauu

SEQ ID NO: 320566 - RNA, 19 nt, Homo sapiens
  misc_RNA (1)...(19): siRNA sense strand
cagauauaauugcugcuua

SEQ ID NO: 320567 - RNA, 19 nt, Homo sapiens
  misc_RNA (1)...(19): siRNA sense strand
gcaauacguuugguuuaau

SEQ ID NO: 320568 - RNA, 19 nt, Homo sapiens
  misc_RNA (1)...(19): siRNA sense strand
uggaaggacuuugucaaua

SEQ ID NO: 320569 - RNA, 19 nt, Homo sapiens
  misc_RNA (1)...(19): siRNA sense strand
gcgagugauugguggcuua

SEQ ID NO: 320570 - RNA, 19 nt, Homo sapiens
  misc_RNA (1)...(19): siRNA sense strand
gugcugauguugcuaaugu

SEQ ID NO: 320571 - RNA, 19 nt, Homo sapiens
  misc_RNA (1)...(19): siRNA sense strand
gauagaugaugaaguacga

SEQ ID NO: 320572 - RNA, 19 nt, Homo sapiens
  misc_RNA (1)...(19): siRNA sense strand
gagugcauaugcccaaauu

SEQ ID NO: 320573 - RNA, 19 nt, Homo sapiens
  misc_RNA (1)...(19): siRNA sense strand
gaacaauaccucuauacca

SEQ ID NO: 320574 - RNA, 19 nt, Homo sapiens
  misc_RNA (1)...(19): siRNA sense strand
ggucuuaaaggaugaaauu

SEQ ID NO: 320575 - RNA, 19 nt, Homo sapiens
  misc_RNA (1)...(19): siRNA sense strand
ugaagccacugcaagauug

SEQ ID NO: 320576 - RNA, 19 nt, Homo sapiens
  misc_RNA (1)...(19): siRNA sense strand
agaagaagacuguggcaua

SEQ ID NO: 320577 - RNA, 19 nt, Homo sapiens
  misc_RNA (1)...(19): siRNA sense strand
gauuggaagucgucaacaa

SEQ ID NO: 320578 - RNA, 19 nt, Homo sapiens
  misc_RNA (1)...(19): siRNA sense strand
gcaaaggacuagguuaugc

SEQ ID NO: 320579 - RNA, 19 nt, Homo sapiens
  misc_RNA (1)...(19): siRNA sense strand
gagaggaagaggcaacuuu

SEQ ID NO: 320580 - RNA, 19 nt, Homo sapiens
  misc_RNA (1)...(19): siRNA sense strand
aacggaaucuggaaacuuu

SEQ ID NO: 320581 - RNA, 19 nt, Homo sapiens
  misc_RNA (1)...(19): siRNA sense strand
aacaauaccucuauaccaa

SEQ ID NO: 320582 - RNA, 19 nt, Homo sapiens
  misc_RNA (1)...(19): siRNA sense strand
gaucauggaauuugugaau

SEQ ID NO: 320583 - RNA, 19 nt, Homo sapiens
  misc_RNA (1)...(19): siRNA sense strand
uaucaaagauucuguucuc

SEQ ID NO: 320584 - RNA, 19 nt, Homo sapiens
  misc_RNA (1)...(19): siRNA sense strand
ggucgagccucugaagaaa

SEQ ID NO: 320585 - RNA, 19 nt, Homo sapiens
  misc_RNA (1)...(19): siRNA sense strand
gggcaauacguuugguuua

SEQ ID NO: 320586 - RNA, 19 nt, Homo sapiens
  misc_RNA (1)...(19): siRNA sense strand
caacuggugcucaagauga

SEQ ID NO: 320587 - RNA, 19 nt, Homo sapiens
  misc_RNA (1)...(19): siRNA sense strand
ggaauugggcauagaagga

SEQ ID NO: 320588 - RNA, 19 nt, Homo sapiens
  misc_RNA (1)...(19): siRNA sense strand
ggagauggaugguuuuaau

SEQ ID NO: 320589 - RNA, 19 nt, Homo sapiens
  misc_RNA (1)...(19): siRNA sense strand
gacaaggauuucaggaugu

SEQ ID NO: 320590 - RNA, 19 nt, Homo sapiens
  misc_RNA (1)...(19): siRNA sense strand
ggacaccucacuuccagaa

SEQ ID NO: 320591 - RNA, 19 nt, Homo sapiens
  misc_RNA (1)...(19): siRNA sense strand
uagguuaugcucaguauuu

SEQ ID NO: 320592 - RNA, 19 nt, Homo sapiens
  misc_RNA (1)...(19): siRNA sense strand
gggaagacgcugcuagcua

SEQ ID NO: 320593 - RNA, 19 nt, Homo sapiens
  misc_RNA (1)...(19): siRNA sense strand
ggaugaaauugaugugaag

SEQ ID NO: 320594 - RNA, 19 nt, Homo sapiens
  misc_RNA (1)...(19): siRNA sense strand
cuacauugcugaaagugau

SEQ ID NO: 320595 - RNA, 19 nt, Homo sapiens
  misc_RNA (1)...(19): siRNA sense strand
ggacaccuuugaacggaau

SEQ ID NO: 320596 - RNA, 19 nt, Homo sapiens
  misc_RNA (1)...(19): siRNA sense strand
gaaggacuuugucaauaac

SEQ ID NO: 320597 - RNA, 19 nt, Homo sapiens
  misc_RNA (1)...(19): siRNA sense strand
caagagauccgggagagaa

SEQ ID NO: 320598 - RNA, 19 nt, Homo sapiens
  misc_RNA (1)...(19): siRNA sense strand
gaacggaaucuggaaacuu

SEQ ID NO: 320599 - RNA, 19 nt, Homo sapiens
  misc_RNA (1)...(19): siRNA sense strand
ugaaauugaugugaaguuc

SEQ ID NO: 320600 - RNA, 19 nt, Homo sapiens
  misc_RNA (1)...(19): siRNA sense strand
gcaccaaucgaccagauau

SEQ ID NO: 320601 - RNA, 19 nt, Homo sapiens
  misc_RNA (1)...(19): siRNA sense strand
caguagcucuucucacaga

SEQ ID NO: 320602 - RNA, 19 nt, Homo sapiens
  misc_RNA (1)...(19): siRNA sense strand
aacaguagcucuucucaca

SEQ ID NO: 320603 - RNA, 19 nt, Homo sapiens
  misc_RNA (1)...(19): siRNA sense strand
guucaucuccgaccgcuaa

SEQ ID NO: 320604 - RNA, 19 nt, Homo sapiens
  misc_RNA (1)...(19): siRNA sense strand
ggacaugguauuggagaaa

SEQ ID NO: 320605 - RNA, 19 nt, Homo sapiens
  misc_RNA (1)...(19): siRNA sense strand
uagugaaccuaaagaaguu

SEQ ID NO: 320606 - RNA, 19 nt, Homo sapiens
  misc_RNA (1)...(19): siRNA sense strand
gcauaugcccaaauuguuc

SEQ ID NO: 320607 - RNA, 19 nt, Homo sapiens
  misc_RNA (1)...(19): siRNA sense strand
gcacuggcagcuuggauga

SEQ ID NO: 320608 - RNA, 19 nt, Homo sapiens
  misc_RNA (1)...(19): siRNA sense strand
aaggauaaauuggcaagaa

SEQ ID NO: 320609 - RNA, 19 nt, Homo sapiens
  misc_RNA (1)...(19): siRNA sense strand
gcaggaauugggcauagaa

SEQ ID NO: 320610 - RNA, 19 nt, Homo sapiens
  misc_RNA (1)...(19): siRNA sense strand
uggagaaaccuuacaguga

SEQ ID NO: 320611 - RNA, 19 nt, Homo sapiens
  misc_RNA (1)...(19): siRNA sense strand
acaguacccuggagaagga

SEQ ID NO: 320612 - RNA, 19 nt, Homo sapiens
  misc_RNA (1)...(19): siRNA sense strand
ccucuggacugcucuguuc

SEQ ID NO: 320613 - RNA, 19 nt, Homo sapiens
  misc_RNA (1)...(19): siRNA sense strand
agaaugauaugguugaacu

SEQ ID NO: 320614 - RNA, 19 nt, Homo sapiens
  misc_RNA (1)...(19): siRNA sense strand
gagaaaccuuacagugaag

SEQ ID NO: 320615 - RNA, 19 nt, Homo sapiens
  misc_RNA (1)...(19): siRNA sense strand
guaaugaagcugcguugau

SEQ ID NO: 320616 - RNA, 19 nt, Homo sapiens
  misc_RNA (1)...(19): siRNA sense strand
aaacuggcaucuuuaacuc

SEQ ID NO: 320617 - RNA, 19 nt, Homo sapiens
  misc_RNA (1)...(19): siRNA sense strand
aaagcaguaucaagaccua

SEQ ID NO: 320618 - RNA, 19 nt, Homo sapiens
  misc_RNA (1)...(19): siRNA sense strand
gaaaaucgggugccuguug

SEQ ID NO: 320619 - RNA, 19 nt, Homo sapiens
  misc_RNA (1)...(19): siRNA sense strand
ggacuuugucaauaacuau

SEQ ID NO: 320620 - RNA, 19 nt, Homo sapiens
  misc_RNA (1)...(19): siRNA sense strand
aggauaaauuggcaagaaa

SEQ ID NO: 320621 - RNA, 19 nt, Homo sapiens
  misc_RNA (1)...(19): siRNA sense strand
ccauaaaucagaaacacuu

SEQ ID NO: 320622 - RNA, 19 nt, Homo sapiens
  misc_RNA (1)...(19): siRNA sense strand
uaggauguguaugacuuua

SEQ ID NO: 320623 - RNA, 19 nt, Homo sapiens
  misc_RNA (1)...(19): siRNA sense strand
caauaccucuauaccaaag

SEQ ID NO: 320624 - RNA, 19 nt, Homo sapiens
  misc_RNA (1)...(19): siRNA sense strand
gugcauaugcccaaauugu

SEQ ID NO: 320625 - RNA, 19 nt, Homo sapiens
  misc_RNA (1)...(19): siRNA sense strand
aaaacgagguggcaagaaa

SEQ ID NO: 320626 - RNA, 19 nt, Homo sapiens
  misc_RNA (1)...(19): siRNA sense strand
cugcaagauugauagauga

SEQ ID NO: 320627 - RNA, 19 nt, Homo sapiens
  misc_RNA (1)...(19): siRNA sense strand
ugguggagauggaugguuu

SEQ ID NO: 320628 - RNA, 19 nt, Homo sapiens
  misc_RNA (1)...(19): siRNA sense strand
ggauguguaugacuuuagg

SEQ ID NO: 320629 - RNA, 19 nt, Homo sapiens
  misc_RNA (1)...(19): siRNA sense strand
uugcuaaugucuguaauga

SEQ ID NO: 320630 - RNA, 19 nt, Homo sapiens
  misc_RNA (1)...(19): siRNA sense strand
gacaggcagaucuuuauug

SEQ ID NO: 320631 - RNA, 19 nt, Homo sapiens
  misc_RNA (1)...(19): siRNA sense strand
gggguggagucauguuuua

SEQ ID NO: 320632 - RNA, 19 nt, Homo sapiens
  misc_RNA (1)...(19): siRNA sense strand
gagaucauggaauuuguga

SEQ ID NO: 320633 - RNA, 19 nt, Homo sapiens
  misc_RNA (1)...(19): siRNA sense strand
aggaugaaauugaugugaa

SEQ ID NO: 320634 - RNA, 19 nt, Homo sapiens
  misc_RNA (1)...(19): siRNA sense strand
aagagggccugcuggcauu

SEQ ID NO: 320635 - RNA, 19 nt, Homo sapiens
  misc_RNA (1)...(19): siRNA sense strand
aaacuuuacagcaggaauu

SEQ ID NO: 320636 - RNA, 19 nt, Homo sapiens
  misc_RNA (1)...(19): siRNA sense strand
gugaagccacugcaagauu

SEQ ID NO: 320637 - RNA, 19 nt, Homo sapiens
  misc_RNA (1)...(19): siRNA sense strand
ggacuagguuaugcucagu

SEQ ID NO: 320638 - RNA, 19 nt, Homo sapiens
  misc_RNA (1)...(19): siRNA sense strand
acaggcagaucuuuauugg

SEQ ID NO: 320639 - RNA, 19 nt, Homo sapiens
  misc_RNA (1)...(19): siRNA sense strand
cugccaaggucuuaaagga

SEQ ID NO: 320640 - RNA, 19 nt, Homo sapiens
  misc_RNA (1)...(19): siRNA sense strand
gagaaaccacugccaaggu

SEQ ID NO: 320641 - RNA, 19 nt, Homo sapiens
  misc_RNA (1)...(19): siRNA sense strand
gcucaucaucgccuucuug

SEQ ID NO: 320642 - RNA, 19 nt, Homo sapiens
  misc_RNA (1)...(19): siRNA sense strand
gcucuacaccaucagaaga

SEQ ID NO: 320643 - RNA, 19 nt, Homo sapiens
  misc_RNA (1)...(19): siRNA sense strand
gaugaugaaguacgaauac

SEQ ID NO: 320644 - RNA, 19 nt, Homo sapiens
  misc_RNA (1)...(19): siRNA sense strand
gagcuucuauuuucaaagu

SEQ ID NO: 320645 - RNA, 19 nt, Homo sapiens
  misc_RNA (1)...(19): siRNA sense strand
ucagaagggugacauucca

SEQ ID NO: 320646 - RNA, 19 nt, Homo sapiens
  misc_RNA (1)...(19): siRNA sense strand
cuagagaucauggaauuug

SEQ ID NO: 320647 - RNA, 19 nt, Homo sapiens
  misc_RNA (1)...(19): siRNA sense strand
agcuagagaucauggaauu

SEQ ID NO: 320648 - RNA, 19 nt, Homo sapiens
  misc_RNA (1)...(19): siRNA sense strand
ccaaggucuuaaaggauga

SEQ ID NO: 320649 - RNA, 19 nt, Homo sapiens
  misc_RNA (1)...(19): siRNA sense strand
acgcuuuaccgauuuguua

SEQ ID NO: 320650 - RNA, 19 nt, Homo sapiens
  misc_RNA (1)...(19): siRNA sense strand
cuagugaaccuaaagaagu

SEQ ID NO: 320651 - RNA, 19 nt, Homo sapiens
  misc_RNA (1)...(19): siRNA sense strand
acaaggauuucaggauguu

SEQ ID NO: 320652 - RNA, 19 nt, Homo sapiens
  misc_RNA (1)...(19): siRNA sense strand
gcucuuggauaggaugugu

SEQ ID NO: 320653 - RNA, 19 nt, Homo sapiens
  misc_RNA (1)...(19): siRNA sense strand
caucaucccacguggcaaa

SEQ ID NO: 320654 - RNA, 19 nt, Homo sapiens
  misc_RNA (1)...(19): siRNA sense strand
gaagguaccugaagaagaa

SEQ ID NO: 320655 - RNA, 19 nt, Homo sapiens
  misc_RNA (1)...(19): siRNA sense strand
gaagaggacccuuuaaauu

SEQ ID NO: 320656 - RNA, 19 nt, Homo sapiens
  misc_RNA (1)...(19): siRNA sense strand
guaaagcaaccaagaaaua

SEQ ID NO: 320657 - RNA, 19 nt, Homo sapiens
  misc_RNA (1)...(19): siRNA sense strand
agaagaagcugacaguauu

SEQ ID NO: 320658 - RNA, 19 nt, Homo sapiens
  misc_RNA (1)...(19): siRNA sense strand
ggaaaguucucacuauauc

SEQ ID NO: 320659 - RNA, 19 nt, Homo sapiens
  misc_RNA (1)...(19): siRNA sense strand
ccacaggucucucaaacaa

SEQ ID NO: 320660 - RNA, 19 nt, Homo sapiens
  misc_RNA (1)...(19): siRNA sense strand
ucaacagcaucauuaguua

SEQ ID NO: 320661 - RNA, 19 nt, Homo sapiens
  misc_RNA (1)...(19): siRNA sense strand
caggaaaguucucacuaua

SEQ ID NO: 320662 - RNA, 19 nt, Homo sapiens
  misc_RNA (1)...(19): siRNA sense strand
gcaaguauuucaacagcuu

SEQ ID NO: 320663 - RNA, 19 nt, Homo sapiens
  misc_RNA (1)...(19): siRNA sense strand
gaagaaauaggaaguacaa

SEQ ID NO: 320664 - RNA, 19 nt, Homo sapiens
  misc_RNA (1)...(19): siRNA sense strand
gauuuaagcauucggguua

SEQ ID NO: 320665 - RNA, 19 nt, Homo sapiens
  misc_RNA (1)...(19): siRNA sense strand
gaaucuauuugcugaagaa

SEQ ID NO: 320666 - RNA, 19 nt, Homo sapiens
  misc_RNA (1)...(19): siRNA sense strand
aaacuaguguuccacaauu

SEQ ID NO: 320667 - RNA, 19 nt, Homo sapiens
  misc_RNA (1)...(19): siRNA sense strand
ggugauacaucuuccaaug

SEQ ID NO: 320668 - RNA, 19 nt, Homo sapiens
  misc_RNA (1)...(19): siRNA sense strand
ugaagaagguauagaggaa

SEQ ID NO: 320669 - RNA, 19 nt, Homo sapiens
  misc_RNA (1)...(19): siRNA sense strand
guauggaugugauucugua

SEQ ID NO: 320670 - RNA, 19 nt, Homo sapiens
  misc_RNA (1)...(19): siRNA sense strand
uaaugaagacccucaagua

SEQ ID NO: 320671 - RNA, 19 nt, Homo sapiens
  misc_RNA (1)...(19): siRNA sense strand
ccgcacagcuugcaccaaa

SEQ ID NO: 320672 - RNA, 19 nt, Homo sapiens
  misc_RNA (1)...(19): siRNA sense strand
gaaugaauuucuagggaau

SEQ ID NO: 320673 - RNA, 19 nt, Homo sapiens
  misc_RNA (1)...(19): siRNA sense strand
aaacuccagugcaaacuuu

SEQ ID NO: 320674 - RNA, 19 nt, Homo sapiens
  misc_RNA (1)...(19): siRNA sense strand
gcauucggguuacugauga

SEQ ID NO: 320675 - RNA, 19 nt, Homo sapiens
  misc_RNA (1)...(19): siRNA sense strand
ucaggaaaguucucacuau

SEQ ID NO: 320676 - RNA, 19 nt, Homo sapiens
  misc_RNA (1)...(19): siRNA sense strand
gaaaaugccaccagugaua

SEQ ID NO: 320677 - RNA, 19 nt, Homo sapiens
  misc_RNA (1)...(19): siRNA sense strand
ugauacaucuuccaaugaa

SEQ ID NO: 320678 - RNA, 19 nt, Homo sapiens
  misc_RNA (1)...(19): siRNA sense strand
gaacugggcacuucaaacu

SEQ ID NO: 320679 - RNA, 19 nt, Homo sapiens
  misc_RNA (1)...(19): siRNA sense strand
gaagaagcugacaguauuu

SEQ ID NO: 320680 - RNA, 19 nt, Homo sapiens
  misc_RNA (1)...(19): siRNA sense strand
gauaggaaacacuuagaaa

SEQ ID NO: 320681 - RNA, 19 nt, Homo sapiens
  misc_RNA (1)...(19): siRNA sense strand
ucagguggauuuaagcauu

SEQ ID NO: 320682 - RNA, 19 nt, Homo sapiens
  misc_RNA (1)...(19): siRNA sense strand
gaauuucuagggaauauug

SEQ ID NO: 320683 - RNA, 19 nt, Homo sapiens
  misc_RNA (1)...(19): siRNA sense strand
gaaauaggaaguacaagag

SEQ ID NO: 320684 - RNA, 19 nt, Homo sapiens
  misc_RNA (1)...(19): siRNA sense strand
cagcagaacugggcacuuc

SEQ ID NO: 320685 - RNA, 19 nt, Homo sapiens
  misc_RNA (1)...(19): siRNA sense strand
uggccagccuucaguaaua

SEQ ID NO: 320686 - RNA, 19 nt, Homo sapiens
  misc_RNA (1)...(19): siRNA sense strand
ccacaaacaguagugauaa

SEQ ID NO: 320687 - RNA, 19 nt, Homo sapiens
  misc_RNA (1)...(19): siRNA sense strand
gaagaagaagcugacagua

SEQ ID NO: 320688 - RNA, 19 nt, Homo sapiens
  misc_RNA (1)...(19): siRNA sense strand
guuauugucugucaguaug

SEQ ID NO: 320689 - RNA, 19 nt, Homo sapiens
  misc_RNA (1)...(19): siRNA sense strand
ugaagacccucaaguaaac

SEQ ID NO: 320690 - RNA, 19 nt, Homo sapiens
  misc_RNA (1)...(19): siRNA sense strand
uaucuggucaccuuuauaa

SEQ ID NO: 320691 - RNA, 19 nt, Homo sapiens
  misc_RNA (1)...(19): siRNA sense strand
guacaagagaugcagauga

SEQ ID NO: 320692 - RNA, 19 nt, Homo sapiens
  misc_RNA (1)...(19): siRNA sense strand
ugaaggaguucggaaucua

SEQ ID NO: 320693 - RNA, 19 nt, Homo sapiens
  misc_RNA (1)...(19): siRNA sense strand
gagaugcagaugagaauga

SEQ ID NO: 320694 - RNA, 19 nt, Homo sapiens
  misc_RNA (1)...(19): siRNA sense strand
uagaagaggacccuuuaaa

SEQ ID NO: 320695 - RNA, 19 nt, Homo sapiens
  misc_RNA (1)...(19): siRNA sense strand
caaacaguagugauaauga

SEQ ID NO: 320696 - RNA, 19 nt, Homo sapiens
  misc_RNA (1)...(19): siRNA sense strand
gaaggaguucggaaucuau

SEQ ID NO: 320697 - RNA, 19 nt, Homo sapiens
  misc_RNA (1)...(19): siRNA sense strand
caagagaugcagaugagaa

SEQ ID NO: 320698 - RNA, 19 nt, Homo sapiens
  misc_RNA (1)...(19): siRNA sense strand
acaggucucucaaacaaau

SEQ ID NO: 320699 - RNA, 19 nt, Homo sapiens
  misc_RNA (1)...(19): siRNA sense strand
gacuguaucuggucaccuu

SEQ ID NO: 320700 - RNA, 19 nt, Homo sapiens
  misc_RNA (1)...(19): siRNA sense strand
aagaggacccuuuaaauuc

SEQ ID NO: 320701 - RNA, 19 nt, Homo sapiens
  misc_RNA (1)...(19): siRNA sense strand
cuaauucucagguggauuu

SEQ ID NO: 320702 - RNA, 19 nt, Homo sapiens
  misc_RNA (1)...(19): siRNA sense strand
caccagugauauacuugua

SEQ ID NO: 320703 - RNA, 19 nt, Homo sapiens
  misc_RNA (1)...(19): siRNA sense strand
ggaaucuauuugcugaaga

SEQ ID NO: 320704 - RNA, 19 nt, Homo sapiens
  misc_RNA (1)...(19): siRNA sense strand
gccacaaacaguagugaua

SEQ ID NO: 320705 - RNA, 19 nt, Homo sapiens
  misc_RNA (1)...(19): siRNA sense strand
ggaugugccagaccuguuu

SEQ ID NO: 320706 - RNA, 19 nt, Homo sapiens
  misc_RNA (1)...(19): siRNA sense strand
cauccaaucaccucuguuu

SEQ ID NO: 320707 - RNA, 19 nt, Homo sapiens
  misc_RNA (1)...(19): siRNA sense strand
aaugaagacccucaaguaa

SEQ ID NO: 320708 - RNA, 19 nt, Homo sapiens
  misc_RNA (1)...(19): siRNA sense strand
gaagcuuuguugugucauc

SEQ ID NO: 320709 - RNA, 19 nt, Homo sapiens
  misc_RNA (1)...(19): siRNA sense strand
gucaacagcaucauuaguu

SEQ ID NO: 320710 - RNA, 19 nt, Homo sapiens
  misc_RNA (1)...(19): siRNA sense strand
guagauggaagcggugaua

SEQ ID NO: 320711 - RNA, 19 nt, Homo sapiens
  misc_RNA (1)...(19): siRNA sense strand
gguuacugaugaugauauu

SEQ ID NO: 320712 - RNA, 19 nt, Homo sapiens
  misc_RNA (1)...(19): siRNA sense strand
agaggaacccagcaacaua

SEQ ID NO: 320713 - RNA, 19 nt, Homo sapiens
  misc_RNA (1)...(19): siRNA sense strand
aaucgugccugaagcuuug

SEQ ID NO: 320714 - RNA, 19 nt, Homo sapiens
  misc_RNA (1)...(19): siRNA sense strand
ccaauuauggugacagaga

SEQ ID NO: 320715 - RNA, 19 nt, Homo sapiens
  misc_RNA (1)...(19): siRNA sense strand
uguagaagaggacccuuua

SEQ ID NO: 320716 - RNA, 19 nt, Homo sapiens
  misc_RNA (1)...(19): siRNA sense strand
gaagcugacaguauuucaa

SEQ ID NO: 320717 - RNA, 19 nt, Homo sapiens
  misc_RNA (1)...(19): siRNA sense strand
gaaaguucucacuauauca

SEQ ID NO: 320718 - RNA, 19 nt, Homo sapiens
  misc_RNA (1)...(19): siRNA sense strand
ggaguucggaaucuauuug

SEQ ID NO: 320719 - RNA, 19 nt, Homo sapiens
  misc_RNA (1)...(19): siRNA sense strand
ucaccucuguuuacucuuc

SEQ ID NO: 320720 - RNA, 19 nt, Homo sapiens
  misc_RNA (1)...(19): siRNA sense strand
uacaagagaugcagaugag

SEQ ID NO: 320721 - RNA, 19 nt, Homo sapiens
  misc_RNA (1)...(19): siRNA sense strand
agaaauaggaaguacaaga

SEQ ID NO: 320722 - RNA, 19 nt, Homo sapiens
  misc_RNA (1)...(19): siRNA sense strand
caccagcacgugacugaua

SEQ ID NO: 320723 - RNA, 19 nt, Homo sapiens
  misc_RNA (1)...(19): siRNA sense strand
guaauacaaacuaguguuc

SEQ ID NO: 320724 - RNA, 19 nt, Homo sapiens
  misc_RNA (1)...(19): siRNA sense strand
agaagaggacccuuuaaau

SEQ ID NO: 320725 - RNA, 19 nt, Homo sapiens
  misc_RNA (1)...(19): siRNA sense strand
aagaagaagcugacaguau

SEQ ID NO: 320726 - RNA, 19 nt, Homo sapiens
  misc_RNA (1)...(19): siRNA sense strand
gcauccaauucagcaagua

SEQ ID NO: 320727 - RNA, 19 nt, Homo sapiens
  misc_RNA (1)...(19): siRNA sense strand
gaauugaaaccgugcuaca

SEQ ID NO: 320728 - RNA, 19 nt, Homo sapiens
  misc_RNA (1)...(19): siRNA sense strand
caacagcaucauuaguuau

SEQ ID NO: 320729 - RNA, 19 nt, Homo sapiens
  misc_RNA (1)...(19): siRNA sense strand
agaggacccuuuaaauucu

SEQ ID NO: 320730 - RNA, 19 nt, Homo sapiens
  misc_RNA (1)...(19): siRNA sense strand
guagaagaggacccuuuaa

SEQ ID NO: 320731 - RNA, 19 nt, Homo sapiens
  misc_RNA (1)...(19): siRNA sense strand
caaacuaguguuccacaau

SEQ ID NO: 320732 - RNA, 19 nt, Homo sapiens
  misc_RNA (1)...(19): siRNA sense strand
ccagugcaaacuuuacuuu

SEQ ID NO: 320733 - RNA, 19 nt, Homo sapiens
  misc_RNA (1)...(19): siRNA sense strand
gcacagcuugcaccaaaca

SEQ ID NO: 320734 - RNA, 19 nt, Homo sapiens
  misc_RNA (1)...(19): siRNA sense strand
cacaaacaguagugauaau

SEQ ID NO: 320735 - RNA, 19 nt, Homo sapiens
  misc_RNA (1)...(19): siRNA sense strand
ugccuaaacucuacagauc

SEQ ID NO: 320736 - RNA, 19 nt, Homo sapiens
  misc_RNA (1)...(19): siRNA sense strand
gccugaagcuuuguugugu

SEQ ID NO: 320737 - RNA, 19 nt, Homo sapiens
  misc_RNA (1)...(19): siRNA sense strand
guagauaggaaacacuuag

SEQ ID NO: 320738 - RNA, 19 nt, Homo sapiens
  misc_RNA (1)...(19): siRNA sense strand
ucuuccagguguuguauuu

SEQ ID NO: 320739 - RNA, 19 nt, Homo sapiens
  misc_RNA (1)...(19): siRNA sense strand
gaaaugagcauaaaaucgu

SEQ ID NO: 320740 - RNA, 19 nt, Homo sapiens
  misc_RNA (1)...(19): siRNA sense strand
ccuaaacucuacagaucug

SEQ ID NO: 320741 - RNA, 19 nt, Homo sapiens
  misc_RNA (1)...(19): siRNA sense strand
ccaaucaccucuguuuacu

SEQ ID NO: 320742 - RNA, 19 nt, Homo sapiens
  misc_RNA (1)...(19): siRNA sense strand
uggaagcggugauacaucu

SEQ ID NO: 320743 - RNA, 19 nt, Homo sapiens
  misc_RNA (1)...(19): siRNA sense strand
aaucaccucuguuuacucu

SEQ ID NO: 320744 - RNA, 19 nt, Homo sapiens
  misc_RNA (1)...(19): siRNA sense strand
ugguagaacucuuccaagu

SEQ ID NO: 320745 - RNA, 19 nt, Homo sapiens
  misc_RNA (1)...(19): siRNA sense strand
ucuauuugcugaagaaggu

SEQ ID NO: 320746 - RNA, 19 nt, Homo sapiens
  misc_RNA (1)...(19): siRNA sense strand
cuucagaaauagcauccaa

SEQ ID NO: 320747 - RNA, 19 nt, Homo sapiens
  misc_RNA (1)...(19): siRNA sense strand
ugaagcagcucugggaaac

SEQ ID NO: 320748 - RNA, 19 nt, Homo sapiens
  misc_RNA (1)...(19): siRNA sense strand
gguauagaggaacaaguuu

SEQ ID NO: 320749 - RNA, 19 nt, Homo sapiens
  misc_RNA (1)...(19): siRNA sense strand
agauguaauugaaggaguu

SEQ ID NO: 320750 - RNA, 19 nt, Homo sapiens
  misc_RNA (1)...(19): siRNA sense strand
ucuguuuacucuucaguug

SEQ ID NO: 320751 - RNA, 19 nt, Homo sapiens
  misc_RNA (1)...(19): siRNA sense strand
gagaauugaaaccgugcua

SEQ ID NO: 320752 - RNA, 19 nt, Homo sapiens
  misc_RNA (1)...(19): siRNA sense strand
caauucagcaaguauuuca

SEQ ID NO: 320753 - RNA, 19 nt, Homo sapiens
  misc_RNA (1)...(19): siRNA sense strand
caaguaaacauuguagaag

SEQ ID NO: 320754 - RNA, 19 nt, Homo sapiens
  misc_RNA (1)...(19): siRNA sense strand
gaagguaccugaagaagaa

SEQ ID NO: 320755 - RNA, 19 nt, Homo sapiens
  misc_RNA (1)...(19): siRNA sense strand
gaagaggacccuuuaaauu

SEQ ID NO: 320756 - RNA, 19 nt, Homo sapiens
  misc_RNA (1)...(19): siRNA sense strand
guaaagcaaccaagaaaua

SEQ ID NO: 320757 - RNA, 19 nt, Homo sapiens
  misc_RNA (1)...(19): siRNA sense strand
agaagaagcugacaguauu

SEQ ID NO: 320758 - RNA, 19 nt, Homo sapiens
  misc_RNA (1)...(19): siRNA sense strand
ggaaaguucucacuauauc

SEQ ID NO: 320759 - RNA, 19 nt, Homo sapiens
  misc_RNA (1)...(19): siRNA sense strand
ccacaggucucucaaacaa

SEQ ID NO: 320760 - RNA, 19 nt, Homo sapiens
  misc_RNA (1)...(19): siRNA sense strand
ucaacagcaucauuaguua

SEQ ID NO: 320761 - RNA, 19 nt, Homo sapiens
  misc_RNA (1)...(19): siRNA sense strand
caggaaaguucucacuaua

SEQ ID NO: 320762 - RNA, 19 nt, Homo sapiens
  misc_RNA (1)...(19): siRNA sense strand
gcaaguauuucaacagcuu

SEQ ID NO: 320763 - RNA, 19 nt, Homo sapiens
  misc_RNA (1)...(19): siRNA sense strand
gaagaaauaggaaguacaa

SEQ ID NO: 320764 - RNA, 19 nt, Homo sapiens
  misc_RNA (1)...(19): siRNA sense strand
gauuuaagcauucggguua

SEQ ID NO: 320765 - RNA, 19 nt, Homo sapiens
  misc_RNA (1)...(19): siRNA sense strand
gaaucuauuugcugaagaa

SEQ ID NO: 320766 - RNA, 19 nt, Homo sapiens
  misc_RNA (1)...(19): siRNA sense strand
aaacuaguguuccacaauu

SEQ ID NO: 320767 - RNA, 19 nt, Homo sapiens
  misc_RNA (1)...(19): siRNA sense strand
ggugauacaucuuccaaug

SEQ ID NO: 320768 - RNA, 19 nt, Homo sapiens
  misc_RNA (1)...(19): siRNA sense strand
ugaagaagguauagaggaa

SEQ ID NO: 320769 - RNA, 19 nt, Homo sapiens
  misc_RNA (1)...(19): siRNA sense strand
guauggaugugauucugua

SEQ ID NO: 320770 - RNA, 19 nt, Homo sapiens
  misc_RNA (1)...(19): siRNA sense strand
uaaugaagacccucaagua

SEQ ID NO: 320771 - RNA, 19 nt, Homo sapiens
  misc_RNA (1)...(19): siRNA sense strand
ccgcacagcuugcaccaaa

SEQ ID NO: 320772 - RNA, 19 nt, Homo sapiens
  misc_RNA (1)...(19): siRNA sense strand
gaaugaauuucuagggaau

SEQ ID NO: 320773 - RNA, 19 nt, Homo sapiens
  misc_RNA (1)...(19): siRNA sense strand
aaacuccagugcaaacuuu

SEQ ID NO: 320774 - RNA, 19 nt, Homo sapiens
  misc_RNA (1)...(19): siRNA sense strand
gcauucggguuacugauga

SEQ ID NO: 320775 - RNA, 19 nt, Homo sapiens
  misc_RNA (1)...(19): siRNA sense strand
ucaggaaaguucucacuau

SEQ ID NO: 320776 - RNA, 19 nt, Homo sapiens
  misc_RNA (1)...(19): siRNA sense strand
gaaaaugccaccagugaua

SEQ ID NO: 320777 - RNA, 19 nt, Homo sapiens
  misc_RNA (1)...(19): siRNA sense strand
ugauacaucuuccaaugaa

SEQ ID NO: 320778 - RNA, 19 nt, Homo sapiens
  misc_RNA (1)...(19): siRNA sense strand
gaacugggcacuucaaacu

SEQ ID NO: 320779 - RNA, 19 nt, Homo sapiens
  misc_RNA (1)...(19): siRNA sense strand
gaagaagcugacaguauuu

SEQ ID NO: 320780 - RNA, 19 nt, Homo sapiens
  misc_RNA (1)...(19): siRNA sense strand
gauaggaaacacuuagaaa

SEQ ID NO: 320781 - RNA, 19 nt, Homo sapiens
  misc_RNA (1)...(19): siRNA sense strand
ucagguggauuuaagcauu

SEQ ID NO: 320782 - RNA, 19 nt, Homo sapiens
  misc_RNA (1)...(19): siRNA sense strand
gaauuucuagggaauauug

SEQ ID NO: 320783 - RNA, 19 nt, Homo sapiens
  misc_RNA (1)...(19): siRNA sense strand
gaaauaggaaguacaagag

SEQ ID NO: 320784 - RNA, 19 nt, Homo sapiens
  misc_RNA (1)...(19): siRNA sense strand
cagcagaacugggcacuuc

SEQ ID NO: 320785 - RNA, 19 nt, Homo sapiens
  misc_RNA (1)...(19): siRNA sense strand
uggccagccuucaguaaua

SEQ ID NO: 320786 - RNA, 19 nt, Homo sapiens
  misc_RNA (1)...(19): siRNA sense strand
ccacaaacaguagugauaa

SEQ ID NO: 320787 - RNA, 19 nt, Homo sapiens
  misc_RNA (1)...(19): siRNA sense strand
gaagaagaagcugacagua

SEQ ID NO: 320788 - RNA, 19 nt, Homo sapiens
  misc_RNA (1)...(19): siRNA sense strand
guuauugucugucaguaug

SEQ ID NO: 320789 - RNA, 19 nt, Homo sapiens
  misc_RNA (1)...(19): siRNA sense strand
ugaagacccucaaguaaac

SEQ ID NO: 320790 - RNA, 19 nt, Homo sapiens
  misc_RNA (1)...(19): siRNA sense strand
uaucuggucaccuuuauaa

SEQ ID NO: 320791 - RNA, 19 nt, Homo sapiens
  misc_RNA (1)...(19): siRNA sense strand
guacaagagaugcagauga

SEQ ID NO: 320792 - RNA, 19 nt, Homo sapiens
  misc_RNA (1)...(19): siRNA sense strand
ugaaggaguucggaaucua

SEQ ID NO: 320793 - RNA, 19 nt, Homo sapiens
  misc_RNA (1)...(19): siRNA sense strand
gagaugcagaugagaauga

SEQ ID NO: 320794 - RNA, 19 nt, Homo sapiens
  misc_RNA (1)...(19): siRNA sense strand
uagaagaggacccuuuaaa

SEQ ID NO: 320795 - RNA, 19 nt, Homo sapiens
  misc_RNA (1)...(19): siRNA sense strand
caaacaguagugauaauga

SEQ ID NO: 320796 - RNA, 19 nt, Homo sapiens
  misc_RNA (1)...(19): siRNA sense strand
gaaggaguucggaaucuau

SEQ ID NO: 320797 - RNA, 19 nt, Homo sapiens
  misc_RNA (1)...(19): siRNA sense strand
caagagaugcagaugagaa

SEQ ID NO: 320798 - RNA, 19 nt, Homo sapiens
  misc_RNA (1)...(19): siRNA sense strand
acaggucucucaaacaaau

SEQ ID NO: 320799 - RNA, 19 nt, Homo sapiens
  misc_RNA (1)...(19): siRNA sense strand
gacuguaucuggucaccuu

SEQ ID NO: 320800 - RNA, 19 nt, Homo sapiens
  misc_RNA (1)...(19): siRNA sense strand
aagaggacccuuuaaauuc

SEQ ID NO: 320801 - RNA, 19 nt, Homo sapiens
  misc_RNA (1)...(19): siRNA sense strand
cuaauucucagguggauuu

SEQ ID NO: 320802 - RNA, 19 nt, Homo sapiens
  misc_RNA (1)...(19): siRNA sense strand
caccagugauauacuugua

SEQ ID NO: 320803 - RNA, 19 nt, Homo sapiens
  misc_RNA (1)...(19): siRNA sense strand
ggaaucuauuugcugaaga

SEQ ID NO: 320804 - RNA, 19 nt, Homo sapiens
  misc_RNA (1)...(19): siRNA sense strand
gccacaaacaguagugaua

SEQ ID NO: 320805 - RNA, 19 nt, Homo sapiens
  misc_RNA (1)...(19): siRNA sense strand
ggaugugccagaccuguuu

SEQ ID NO: 320806 - RNA, 19 nt, Homo sapiens
  misc_RNA (1)...(19): siRNA sense strand
cauccaaucaccucuguuu

SEQ ID NO: 320807 - RNA, 19 nt, Homo sapiens
  misc_RNA (1)...(19): siRNA sense strand
aaugaagacccucaaguaa

SEQ ID NO: 320808 - RNA, 19 nt, Homo sapiens
  misc_RNA (1)...(19): siRNA sense strand
gaagcuuuguugugucauc

SEQ ID NO: 320809 - RNA, 19 nt, Homo sapiens
  misc_RNA (1)...(19): siRNA sense strand
gucaacagcaucauuaguu

SEQ ID NO: 320810 - RNA, 19 nt, Homo sapiens
  misc_RNA (1)...(19): siRNA sense strand
guagauggaagcggugaua

SEQ ID NO: 320811 - RNA, 19 nt, Homo sapiens
  misc_RNA (1)...(19): siRNA sense strand
gguuacugaugaugauauu

SEQ ID NO: 320812 - RNA, 19 nt, Homo sapiens
  misc_RNA (1)...(19): siRNA sense strand
agaggaacccagcaacaua

SEQ ID NO: 320813 - RNA, 19 nt, Homo sapiens
  misc_RNA (1)...(19): siRNA sense strand
aaucgugccugaagcuuug

SEQ ID NO: 320814 - RNA, 19 nt, Homo sapiens
  misc_RNA (1)...(19): siRNA sense strand
ccaauuauggugacagaga

SEQ ID NO: 320815 - RNA, 19 nt, Homo sapiens
  misc_RNA (1)...(19): siRNA sense strand
uguagaagaggacccuuua

SEQ ID NO: 320816 - RNA, 19 nt, Homo sapiens
  misc_RNA (1)...(19): siRNA sense strand
gaagcugacaguauuucaa

SEQ ID NO: 320817 - RNA, 19 nt, Homo sapiens
  misc_RNA (1)...(19): siRNA sense strand
gaaaguucucacuauauca

SEQ ID NO: 320818 - RNA, 19 nt, Homo sapiens
  misc_RNA (1)...(19): siRNA sense strand
ggaguucggaaucuauuug

SEQ ID NO: 320819 - RNA, 19 nt, Homo sapiens
  misc_RNA (1)...(19): siRNA sense strand
ucaccucuguuuacucuuc

SEQ ID NO: 320820 - RNA, 19 nt, Homo sapiens
  misc_RNA (1)...(19): siRNA sense strand
uacaagagaugcagaugag

SEQ ID NO: 320821 - RNA, 19 nt, Homo sapiens
  misc_RNA (1)...(19): siRNA sense strand
agaaauaggaaguacaaga

SEQ ID NO: 320822 - RNA, 19 nt, Homo sapiens
  misc_RNA (1)...(19): siRNA sense strand
caccagcacgugacugaua

SEQ ID NO: 320823 - RNA, 19 nt, Homo sapiens
  misc_RNA (1)...(19): siRNA sense strand
guaauacaaacuaguguuc

SEQ ID NO: 320824 - RNA, 19 nt, Homo sapiens
  misc_RNA (1)...(19): siRNA sense strand
agaagaggacccuuuaaau

SEQ ID NO: 320825 - RNA, 19 nt, Homo sapiens
  misc_RNA (1)...(19): siRNA sense strand
aagaagaagcugacaguau

SEQ ID NO: 320826 - RNA, 19 nt, Homo sapiens
  misc_RNA (1)...(19): siRNA sense strand
gcauccaauucagcaagua

SEQ ID NO: 320827 - RNA, 19 nt, Homo sapiens
  misc_RNA (1)...(19): siRNA sense strand
gaauugaaaccgugcuaca

SEQ ID NO: 320828 - RNA, 19 nt, Homo sapiens
  misc_RNA (1)...(19): siRNA sense strand
caacagcaucauuaguuau

SEQ ID NO: 320829 - RNA, 19 nt, Homo sapiens
  misc_RNA (1)...(19): siRNA sense strand
agaggacccuuuaaauucu

SEQ ID NO: 320830 - RNA, 19 nt, Homo sapiens
  misc_RNA (1)...(19): siRNA sense strand
guagaagaggacccuuuaa

SEQ ID NO: 320831 - RNA, 19 nt, Homo sapiens
  misc_RNA (1)...(19): siRNA sense strand
caaacuaguguuccacaau

SEQ ID NO: 320832 - RNA, 19 nt, Homo sapiens
  misc_RNA (1)...(19): siRNA sense strand
ccagugcaaacuuuacuuu

SEQ ID NO: 320833 - RNA, 19 nt, Homo sapiens
  misc_RNA (1)...(19): siRNA sense strand
gcacagcuugcaccaaaca

SEQ ID NO: 320834 - RNA, 19 nt, Homo sapiens
  misc_RNA (1)...(19): siRNA sense strand
cacaaacaguagugauaau

SEQ ID NO: 320835 - RNA, 19 nt, Homo sapiens
  misc_RNA (1)...(19): siRNA sense strand
ugccuaaacucuacagauc

SEQ ID NO: 320836 - RNA, 19 nt, Homo sapiens
  misc_RNA (1)...(19): siRNA sense strand
gccugaagcuuuguugugu

SEQ ID NO: 320837 - RNA, 19 nt, Homo sapiens
  misc_RNA (1)...(19): siRNA sense strand
guagauaggaaacacuuag

SEQ ID NO: 320838 - RNA, 19 nt, Homo sapiens
  misc_RNA (1)...(19): siRNA sense strand
ucuuccagguguuguauuu

SEQ ID NO: 320839 - RNA, 19 nt, Homo sapiens
  misc_RNA (1)...(19): siRNA sense strand
gaaaugagcauaaaaucgu

SEQ ID NO: 320840 - RNA, 19 nt, Homo sapiens
  misc_RNA (1)...(19): siRNA sense strand
ccuaaacucuacagaucug

SEQ ID NO: 320841 - RNA, 19 nt, Homo sapiens
  misc_RNA (1)...(19): siRNA sense strand
ccaaucaccucuguuuacu

SEQ ID NO: 320842 - RNA, 19 nt, Homo sapiens
  misc_RNA (1)...(19): siRNA sense strand
uggaagcggugauacaucu

SEQ ID NO: 320843 - RNA, 19 nt, Homo sapiens
  misc_RNA (1)...(19): siRNA sense strand
aaucaccucuguuuacucu

SEQ ID NO: 320844 - RNA, 19 nt, Homo sapiens
  misc_RNA (1)...(19): siRNA sense strand
ugguagaacucuuccaagu

SEQ ID NO: 320845 - RNA, 19 nt, Homo sapiens
  misc_RNA (1)...(19): siRNA sense strand
ucuauuugcugaagaaggu

SEQ ID NO: 320846 - RNA, 19 nt, Homo sapiens
  misc_RNA (1)...(19): siRNA sense strand
cuucagaaauagcauccaa

SEQ ID NO: 320847 - RNA, 19 nt, Homo sapiens
  misc_RNA (1)...(19): siRNA sense strand
ugaagcagcucugggaaac

SEQ ID NO: 320848 - RNA, 19 nt, Homo sapiens
  misc_RNA (1)...(19): siRNA sense strand
gguauagaggaacaaguuu

SEQ ID NO: 320849 - RNA, 19 nt, Homo sapiens
  misc_RNA (1)...(19): siRNA sense strand
agauguaauugaaggaguu

SEQ ID NO: 320850 - RNA, 19 nt, Homo sapiens
  misc_RNA (1)...(19): siRNA sense strand
ucuguuuacucuucaguug

SEQ ID NO: 320851 - RNA, 19 nt, Homo sapiens
  misc_RNA (1)...(19): siRNA sense strand
gagaauugaaaccgugcua

SEQ ID NO: 320852 - RNA, 19 nt, Homo sapiens
  misc_RNA (1)...(19): siRNA sense strand
caauucagcaaguauuuca

SEQ ID NO: 320853 - RNA, 19 nt, Homo sapiens
  misc_RNA (1)...(19): siRNA sense strand
caaguaaacauuguagaag

SEQ ID NO: 320854 - RNA, 19 nt, Homo sapiens
  misc_RNA (1)...(19): siRNA sense strand
ugacaaagcuaacgaauuu

SEQ ID NO: 320855 - RNA, 19 nt, Homo sapiens
  misc_RNA (1)...(19): siRNA sense strand
gaacgagcuugacaaauuu

SEQ ID NO: 320856 - RNA, 19 nt, Homo sapiens
  misc_RNA (1)...(19): siRNA sense strand
caucuugccuggauaaaua

SEQ ID NO: 320857 - RNA, 19 nt, Homo sapiens
  misc_RNA (1)...(19): siRNA sense strand
agaacgagcuugacaaauu

SEQ ID NO: 320858 - RNA, 19 nt, Homo sapiens
  misc_RNA (1)...(19): siRNA sense strand
cuacagaaauuguugcuuu

SEQ ID NO: 320859 - RNA, 19 nt, Homo sapiens
  misc_RNA (1)...(19): siRNA sense strand
gaacaucgcacucuuguca

SEQ ID NO: 320860 - RNA, 19 nt, Homo sapiens
  misc_RNA (1)...(19): siRNA sense strand
gaagaacgagcuugacaaa

SEQ ID NO: 320861 - RNA, 19 nt, Homo sapiens
  misc_RNA (1)...(19): siRNA sense strand
ggaaauauuuggugcuuuu

SEQ ID NO: 320862 - RNA, 19 nt, Homo sapiens
  misc_RNA (1)...(19): siRNA sense strand
guacagccguugucaaugg

SEQ ID NO: 320863 - RNA, 19 nt, Homo sapiens
  misc_RNA (1)...(19): siRNA sense strand
agacuacggugugcuguua

SEQ ID NO: 320864 - RNA, 19 nt, Homo sapiens
  misc_RNA (1)...(19): siRNA sense strand
gagcuugacaaauuuauug

SEQ ID NO: 320865 - RNA, 19 nt, Homo sapiens
  misc_RNA (1)...(19): siRNA sense strand
ccuaagccuugaugacuuu

SEQ ID NO: 320866 - RNA, 19 nt, Homo sapiens
  misc_RNA (1)...(19): siRNA sense strand
ugaaggcguuccaguaugu

SEQ ID NO: 320867 - RNA, 19 nt, Homo sapiens
  misc_RNA (1)...(19): siRNA sense strand
ggauaaauacaccaaggaa

SEQ ID NO: 320868 - RNA, 19 nt, Homo sapiens
  misc_RNA (1)...(19): siRNA sense strand
ccaauggagucaucaagca

SEQ ID NO: 320869 - RNA, 19 nt, Homo sapiens
  misc_RNA (1)...(19): siRNA sense strand
ggaagaacgagcuugacaa

SEQ ID NO: 320870 - RNA, 19 nt, Homo sapiens
  misc_RNA (1)...(19): siRNA sense strand
agaaacacauggagaaguc

SEQ ID NO: 320871 - RNA, 19 nt, Homo sapiens
  misc_RNA (1)...(19): siRNA sense strand
ggugaaggcguuccaguau

SEQ ID NO: 320872 - RNA, 19 nt, Homo sapiens
  misc_RNA (1)...(19): siRNA sense strand
ccucaggccugcugcaugu

SEQ ID NO: 320873 - RNA, 19 nt, Homo sapiens
  misc_RNA (1)...(19): siRNA sense strand
gcacucuugucagacuuaa

SEQ ID NO: 320874 - RNA, 19 nt, Homo sapiens
  misc_RNA (1)...(19): siRNA sense strand
ggauuucaccuuugugugu

SEQ ID NO: 320875 - RNA, 19 nt, Homo sapiens
  misc_RNA (1)...(19): siRNA sense strand
caaggaagaauggugguuu

SEQ ID NO: 320876 - RNA, 19 nt, Homo sapiens
  misc_RNA (1)...(19): siRNA sense strand
auaaauacaccaaggaaga

SEQ ID NO: 320877 - RNA, 19 nt, Homo sapiens
  misc_RNA (1)...(19): siRNA sense strand
uaaauacaccaaggaagaa

SEQ ID NO: 320878 - RNA, 19 nt, Homo sapiens
  misc_RNA (1)...(19): siRNA sense strand
gugaaggcguuccaguaug

SEQ ID NO: 320879 - RNA, 19 nt, Homo sapiens
  misc_RNA (1)...(19): siRNA sense strand
gggaaauauuuggugcuuu

SEQ ID NO: 320880 - RNA, 19 nt, Homo sapiens
  misc_RNA (1)...(19): siRNA sense strand
uucagaagguaaaucagua

SEQ ID NO: 320881 - RNA, 19 nt, Homo sapiens
  misc_RNA (1)...(19): siRNA sense strand
gcagauuucccgagacuac

SEQ ID NO: 320882 - RNA, 19 nt, Homo sapiens
  misc_RNA (1)...(19): siRNA sense strand
ggguacagccguugucaau

SEQ ID NO: 320883 - RNA, 19 nt, Homo sapiens
  misc_RNA (1)...(19): siRNA sense strand
aaggaagaauggugguuug

SEQ ID NO: 320884 - RNA, 19 nt, Homo sapiens
  misc_RNA (1)...(19): siRNA sense strand
guuccaguauguagaaaca

SEQ ID NO: 320885 - RNA, 19 nt, Homo sapiens
  misc_RNA (1)...(19): siRNA sense strand
guucuggucuugcacuaag

SEQ ID NO: 320886 - RNA, 19 nt, Homo sapiens
  misc_RNA (1)...(19): siRNA sense strand
gugacaaagcuaacgaauu

SEQ ID NO: 320887 - RNA, 19 nt, Homo sapiens
  misc_RNA (1)...(19): siRNA sense strand
gaggucucuucauaauuga

SEQ ID NO: 320888 - RNA, 19 nt, Homo sapiens
  misc_RNA (1)...(19): siRNA sense strand
ucaauggagaguucaaaga

SEQ ID NO: 320889 - RNA, 19 nt, Homo sapiens
  misc_RNA (1)...(19): siRNA sense strand
ggccgaagcguggaagaaa

SEQ ID NO: 320890 - RNA, 19 nt, Homo sapiens
  misc_RNA (1)...(19): siRNA sense strand
gaacuggacaccggauucu

SEQ ID NO: 320891 - RNA, 19 nt, Homo sapiens
  misc_RNA (1)...(19): siRNA sense strand
ggugugcuguuagaagguu

SEQ ID NO: 320892 - RNA, 19 nt, Homo sapiens
  misc_RNA (1)...(19): siRNA sense strand
uguagaaacacauggagaa

SEQ ID NO: 320893 - RNA, 19 nt, Homo sapiens
  misc_RNA (1)...(19): siRNA sense strand
uguguguccuacagaaauu

SEQ ID NO: 320894 - RNA, 19 nt, Homo sapiens
  misc_RNA (1)...(19): siRNA sense strand
aagaguacuuucagaaggu

SEQ ID NO: 320895 - RNA, 19 nt, Homo sapiens
  misc_RNA (1)...(19): siRNA sense strand
acaaagcuaacgaauuuca

SEQ ID NO: 320896 - RNA, 19 nt, Homo sapiens
  misc_RNA (1)...(19): siRNA sense strand
ggagaguucaaagaccuaa

SEQ ID NO: 320897 - RNA, 19 nt, Homo sapiens
  misc_RNA (1)...(19): siRNA sense strand
agaguacuuucagaaggua

SEQ ID NO: 320898 - RNA, 19 nt, Homo sapiens
  misc_RNA (1)...(19): siRNA sense strand
cagcugcuuccaaagagua

SEQ ID NO: 320899 - RNA, 19 nt, Homo sapiens
  misc_RNA (1)...(19): siRNA sense strand
gaaggcguuccaguaugua

SEQ ID NO: 320900 - RNA, 19 nt, Homo sapiens
  misc_RNA (1)...(19): siRNA sense strand
gaccuaagccuugaugacu

SEQ ID NO: 320901 - RNA, 19 nt, Homo sapiens
  misc_RNA (1)...(19): siRNA sense strand
acaucgcacucuugucaga

SEQ ID NO: 320902 - RNA, 19 nt, Homo sapiens
  misc_RNA (1)...(19): siRNA sense strand
aaguccagcugcuuccaaa

SEQ ID NO: 320903 - RNA, 19 nt, Homo sapiens
  misc_RNA (1)...(19): siRNA sense strand
uccuuuggauuucaccuuu

SEQ ID NO: 320904 - RNA, 19 nt, Homo sapiens
  misc_RNA (1)...(19): siRNA sense strand
guccagcugcuuccaaaga

SEQ ID NO: 320905 - RNA, 19 nt, Homo sapiens
  misc_RNA (1)...(19): siRNA sense strand
caugaacaucgcacucuug

SEQ ID NO: 320906 - RNA, 19 nt, Homo sapiens
  misc_RNA (1)...(19): siRNA sense strand
acaugaacaucgcacucuu

SEQ ID NO: 320907 - RNA, 19 nt, Homo sapiens
  misc_RNA (1)...(19): siRNA sense strand
caauggagaguucaaagac

SEQ ID NO: 320908 - RNA, 19 nt, Homo sapiens
  misc_RNA (1)...(19): siRNA sense strand
gagacuacggugugcuguu

SEQ ID NO: 320909 - RNA, 19 nt, Homo sapiens
  misc_RNA (1)...(19): siRNA sense strand
aagcagauuucccgagacu

SEQ ID NO: 320910 - RNA, 19 nt, Homo sapiens
  misc_RNA (1)...(19): siRNA sense strand
cggauucuccuacgaucaa

SEQ ID NO: 320911 - RNA, 19 nt, Homo sapiens
  misc_RNA (1)...(19): siRNA sense strand
gaaauuguugcuuuuagug

SEQ ID NO: 320912 - RNA, 19 nt, Homo sapiens
  misc_RNA (1)...(19): siRNA sense strand
uuagccaucuugccuggau

SEQ ID NO: 320913 - RNA, 19 nt, Homo sapiens
  misc_RNA (1)...(19): siRNA sense strand
uggugaaggcguuccagua

SEQ ID NO: 320914 - RNA, 19 nt, Homo sapiens
  misc_RNA (1)...(19): siRNA sense strand
auggagucaucaagcauuu

SEQ ID NO: 320915 - RNA, 19 nt, Homo sapiens
  misc_RNA (1)...(19): siRNA sense strand
gccgaagcguggaagaaac

SEQ ID NO: 320916 - RNA, 19 nt, Homo sapiens
  misc_RNA (1)...(19): siRNA sense strand
cguugucaauggagaguuc

SEQ ID NO: 320917 - RNA, 19 nt, Homo sapiens
  misc_RNA (1)...(19): siRNA sense strand
cgaacuggacaccggauuc

SEQ ID NO: 320918 - RNA, 19 nt, Homo sapiens
  misc_RNA (1)...(19): siRNA sense strand
guagaaacacauggagaag

SEQ ID NO: 320919 - RNA, 19 nt, Homo sapiens
  misc_RNA (1)...(19): siRNA sense strand
cgagcuugacaaauuuauu

SEQ ID NO: 320920 - RNA, 19 nt, Homo sapiens
  misc_RNA (1)...(19): siRNA sense strand
ugacaaagcuaacgaauuu

SEQ ID NO: 320921 - RNA, 19 nt, Homo sapiens
  misc_RNA (1)...(19): siRNA sense strand
gaacgagcuugacaaauuu

SEQ ID NO: 320922 - RNA, 19 nt, Homo sapiens
  misc_RNA (1)...(19): siRNA sense strand
caucuugccuggauaaaua

SEQ ID NO: 320923 - RNA, 19 nt, Homo sapiens
  misc_RNA (1)...(19): siRNA sense strand
agaacgagcuugacaaauu

SEQ ID NO: 320924 - RNA, 19 nt, Homo sapiens
  misc_RNA (1)...(19): siRNA sense strand
cuacagaaauuguugcuuu

SEQ ID NO: 320925 - RNA, 19 nt, Homo sapiens
  misc_RNA (1)...(19): siRNA sense strand
gaacaucgcacucuuguca

SEQ ID NO: 320926 - RNA, 19 nt, Homo sapiens
  misc_RNA (1)...(19): siRNA sense strand
gaagaacgagcuugacaaa

SEQ ID NO: 320927 - RNA, 19 nt, Homo sapiens
  misc_RNA (1)...(19): siRNA sense strand
ggaaauauuuggugcuuuu

SEQ ID NO: 320928 - RNA, 19 nt, Homo sapiens
  misc_RNA (1)...(19): siRNA sense strand
guacagccguugucaaugg

SEQ ID NO: 320929 - RNA, 19 nt, Homo sapiens
  misc_RNA (1)...(19): siRNA sense strand
agacuacggugugcuguua

SEQ ID NO: 320930 - RNA, 19 nt, Homo sapiens
  misc_RNA (1)...(19): siRNA sense strand
gagcuugacaaauuuauug

SEQ ID NO: 320931 - RNA, 19 nt, Homo sapiens
  misc_RNA (1)...(19): siRNA sense strand
ccuaagccuugaugacuuu

SEQ ID NO: 320932 - RNA, 19 nt, Homo sapiens
  misc_RNA (1)...(19): siRNA sense strand
ugaaggcguuccaguaugu

SEQ ID NO: 320933 - RNA, 19 nt, Homo sapiens
  misc_RNA (1)...(19): siRNA sense strand
ggauaaauacaccaaggaa

SEQ ID NO: 320934 - RNA, 19 nt, Homo sapiens
  misc_RNA (1)...(19): siRNA sense strand
ccaauggagucaucaagca

SEQ ID NO: 320935 - RNA, 19 nt, Homo sapiens
  misc_RNA (1)...(19): siRNA sense strand
ggaagaacgagcuugacaa

SEQ ID NO: 320936 - RNA, 19 nt, Homo sapiens
  misc_RNA (1)...(19): siRNA sense strand
agaaacacauggagaaguc

SEQ ID NO: 320937 - RNA, 19 nt, Homo sapiens
  misc_RNA (1)...(19): siRNA sense strand
ggugaaggcguuccaguau

SEQ ID NO: 320938 - RNA, 19 nt, Homo sapiens
  misc_RNA (1)...(19): siRNA sense strand
ccucaggccugcugcaugu

SEQ ID NO: 320939 - RNA, 19 nt, Homo sapiens
  misc_RNA (1)...(19): siRNA sense strand
gcacucuugucagacuuaa

SEQ ID NO: 320940 - RNA, 19 nt, Homo sapiens
  misc_RNA (1)...(19): siRNA sense strand
ggauuucaccuuugugugu

SEQ ID NO: 320941 - RNA, 19 nt, Homo sapiens
  misc_RNA (1)...(19): siRNA sense strand
caaggaagaauggugguuu

SEQ ID NO: 320942 - RNA, 19 nt, Homo sapiens
  misc_RNA (1)...(19): siRNA sense strand
auaaauacaccaaggaaga

SEQ ID NO: 320943 - RNA, 19 nt, Homo sapiens
  misc_RNA (1)...(19): siRNA sense strand
uaaauacaccaaggaagaa

SEQ ID NO: 320944 - RNA, 19 nt, Homo sapiens
  misc_RNA (1)...(19): siRNA sense strand
gugaaggcguuccaguaug

SEQ ID NO: 320945 - RNA, 19 nt, Homo sapiens
  misc_RNA (1)...(19): siRNA sense strand
gggaaauauuuggugcuuu

SEQ ID NO: 320946 - RNA, 19 nt, Homo sapiens
  misc_RNA (1)...(19): siRNA sense strand
uucagaagguaaaucagua

SEQ ID NO: 320947 - RNA, 19 nt, Homo sapiens
  misc_RNA (1)...(19): siRNA sense strand
gcagauuucccgagacuac

SEQ ID NO: 320948 - RNA, 19 nt, Homo sapiens
  misc_RNA (1)...(19): siRNA sense strand
ggguacagccguugucaau

SEQ ID NO: 320949 - RNA, 19 nt, Homo sapiens
  misc_RNA (1)...(19): siRNA sense strand
aaggaagaauggugguuug

SEQ ID NO: 320950 - RNA, 19 nt, Homo sapiens
  misc_RNA (1)...(19): siRNA sense strand
guuccaguauguagaaaca

SEQ ID NO: 320951 - RNA, 19 nt, Homo sapiens
  misc_RNA (1)...(19): siRNA sense strand
guucuggucuugcacuaag

SEQ ID NO: 320952 - RNA, 19 nt, Homo sapiens
  misc_RNA (1)...(19): siRNA sense strand
gugacaaagcuaacgaauu

SEQ ID NO: 320953 - RNA, 19 nt, Homo sapiens
  misc_RNA (1)...(19): siRNA sense strand
gaggucucuucauaauuga

SEQ ID NO: 320954 - RNA, 19 nt, Homo sapiens
  misc_RNA (1)...(19): siRNA sense strand
ucaauggagaguucaaaga

SEQ ID NO: 320955 - RNA, 19 nt, Homo sapiens
  misc_RNA (1)...(19): siRNA sense strand
ggccgaagcguggaagaaa

SEQ ID NO: 320956 - RNA, 19 nt, Homo sapiens
  misc_RNA (1)...(19): siRNA sense strand
gaacuggacaccggauucu

SEQ ID NO: 320957 - RNA, 19 nt, Homo sapiens
  misc_RNA (1)...(19): siRNA sense strand
ggugugcuguuagaagguu

SEQ ID NO: 320958 - RNA, 19 nt, Homo sapiens
  misc_RNA (1)...(19): siRNA sense strand
uguagaaacacauggagaa

SEQ ID NO: 320959 - RNA, 19 nt, Homo sapiens
  misc_RNA (1)...(19): siRNA sense strand
uguguguccuacagaaauu

SEQ ID NO: 320960 - RNA, 19 nt, Homo sapiens
  misc_RNA (1)...(19): siRNA sense strand
aagaguacuuucagaaggu

SEQ ID NO: 320961 - RNA, 19 nt, Homo sapiens
  misc_RNA (1)...(19): siRNA sense strand
acaaagcuaacgaauuuca

SEQ ID NO: 320962 - RNA, 19 nt, Homo sapiens
  misc_RNA (1)...(19): siRNA sense strand
ggagaguucaaagaccuaa

SEQ ID NO: 320963 - RNA, 19 nt, Homo sapiens
  misc_RNA (1)...(19): siRNA sense strand
agaguacuuucagaaggua

SEQ ID NO: 320964 - RNA, 19 nt, Homo sapiens
  misc_RNA (1)...(19): siRNA sense strand
cagcugcuuccaaagagua

SEQ ID NO: 320965 - RNA, 19 nt, Homo sapiens
  misc_RNA (1)...(19): siRNA sense strand
gaaggcguuccaguaugua

SEQ ID NO: 320966 - RNA, 19 nt, Homo sapiens
  misc_RNA (1)...(19): siRNA sense strand
gaccuaagccuugaugacu

SEQ ID NO: 320967 - RNA, 19 nt, Homo sapiens
  misc_RNA (1)...(19): siRNA sense strand
acaucgcacucuugucaga

SEQ ID NO: 320968 - RNA, 19 nt, Homo sapiens
  misc_RNA (1)...(19): siRNA sense strand
aaguccagcugcuuccaaa

SEQ ID NO: 320969 - RNA, 19 nt, Homo sapiens
  misc_RNA (1)...(19): siRNA sense strand
uccuuuggauuucaccuuu

SEQ ID NO: 320970 - RNA, 19 nt, Homo sapiens
  misc_RNA (1)...(19): siRNA sense strand
guccagcugcuuccaaaga

SEQ ID NO: 320971 - RNA, 19 nt, Homo sapiens
  misc_RNA (1)...(19): siRNA sense strand
caugaacaucgcacucuug

SEQ ID NO: 320972 - RNA, 19 nt, Homo sapiens
  misc_RNA (1)...(19): siRNA sense strand
acaugaacaucgcacucuu

SEQ ID NO: 320973 - RNA, 19 nt, Homo sapiens
  misc_RNA (1)...(19): siRNA sense strand
caauggagaguucaaagac

SEQ ID NO: 320974 - RNA, 19 nt, Homo sapiens
  misc_RNA (1)...(19): siRNA sense strand
gagacuacggugugcuguu

SEQ ID NO: 320975 - RNA, 19 nt, Homo sapiens
  misc_RNA (1)...(19): siRNA sense strand
aagcagauuucccgagacu

SEQ ID NO: 320976 - RNA, 19 nt, Homo sapiens
  misc_RNA (1)...(19): siRNA sense strand
cggauucuccuacgaucaa

SEQ ID NO: 320977 - RNA, 19 nt, Homo sapiens
  misc_RNA (1)...(19): siRNA sense strand
gaaauuguugcuuuuagug

SEQ ID NO: 320978 - RNA, 19 nt, Homo sapiens
  misc_RNA (1)...(19): siRNA sense strand
uuagccaucuugccuggau

SEQ ID NO: 320979 - RNA, 19 nt, Homo sapiens
  misc_RNA (1)...(19): siRNA sense strand
uggugaaggcguuccagua

SEQ ID NO: 320980 - RNA, 19 nt, Homo sapiens
  misc_RNA (1)...(19): siRNA sense strand
auggagucaucaagcauuu

SEQ ID NO: 320981 - RNA, 19 nt, Homo sapiens
  misc_RNA (1)...(19): siRNA sense strand
gccgaagcguggaagaaac

SEQ ID NO: 320982 - RNA, 19 nt, Homo sapiens
  misc_RNA (1)...(19): siRNA sense strand
cguugucaauggagaguuc

SEQ ID NO: 320983 - RNA, 19 nt, Homo sapiens
  misc_RNA (1)...(19): siRNA sense strand
cgaacuggacaccggauuc

SEQ ID NO: 320984 - RNA, 19 nt, Homo sapiens
  misc_RNA (1)...(19): siRNA sense strand
guagaaacacauggagaag

SEQ ID NO: 320985 - RNA, 19 nt, Homo sapiens
  misc_RNA (1)...(19): siRNA sense strand
cgagcuugacaaauuuauu

SEQ ID NO: 320986 - RNA, 19 nt, Homo sapiens
  misc_RNA (1)...(19): siRNA sense strand
gccaagaccacccaggaaa

SEQ ID NO: 320987 - RNA, 19 nt, Homo sapiens
  misc_RNA (1)...(19): siRNA sense strand
ccaggaaaccaucgacaag

SEQ ID NO: 320988 - RNA, 19 nt, Homo sapiens
  misc_RNA (1)...(19): siRNA sense strand
caggaaaccaucgacaaga

SEQ ID NO: 320989 - RNA, 19 nt, Homo sapiens
  misc_RNA (1)...(19): siRNA sense strand
ggccaagaccacccaggaa

SEQ ID NO: 320990 - RNA, 19 nt, Homo sapiens
  misc_RNA (1)...(19): siRNA sense strand
ggaaaccaucgacaagacu

SEQ ID NO: 320991 - RNA, 19 nt, Homo sapiens
  misc_RNA (1)...(19): siRNA sense strand
cugcuaaccaggccucuga

SEQ ID NO: 320992 - RNA, 19 nt, Homo sapiens
  misc_RNA (1)...(19): siRNA sense strand
gaacgaagguuucuugguu

SEQ ID NO: 320993 - RNA, 19 nt, Homo sapiens
  misc_RNA (1)...(19): siRNA sense strand
gaagguuucuugguucaua

SEQ ID NO: 320994 - RNA, 19 nt, Homo sapiens
  misc_RNA (1)...(19): siRNA sense strand
ccaauaaccugcugaggaa

SEQ ID NO: 320995 - RNA, 19 nt, Homo sapiens
  misc_RNA (1)...(19): siRNA sense strand
gauccuauaucgccaguuc

SEQ ID NO: 320996 - RNA, 19 nt, Homo sapiens
  misc_RNA (1)...(19): siRNA sense strand
acaauaagauccuauaucg

SEQ ID NO: 320997 - RNA, 19 nt, Homo sapiens
  misc_RNA (1)...(19): siRNA sense strand
ggaggucuuugacaagcua

SEQ ID NO: 320998 - RNA, 19 nt, Homo sapiens
  misc_RNA (1)...(19): siRNA sense strand
caaagaagcguugaaguuc

SEQ ID NO: 320999 - RNA, 19 nt, Homo sapiens
  misc_RNA (1)...(19): siRNA sense strand
ggagaggccugcgggaaau

SEQ ID NO: 321000 - RNA, 19 nt, Homo sapiens
  misc_RNA (1)...(19): siRNA sense strand
gccaggaggucuuugacaa

SEQ ID NO: 321001 - RNA, 19 nt, Homo sapiens
  misc_RNA (1)...(19): siRNA sense strand
gguggugccugccuucgaa

SEQ ID NO: 321002 - RNA, 19 nt, Homo sapiens
  misc_RNA (1)...(19): siRNA sense strand
gcacaauaagauccuauau

SEQ ID NO: 321003 - RNA, 19 nt, Homo sapiens
  misc_RNA (1)...(19): siRNA sense strand
ggaggagcaagaccaauau

SEQ ID NO: 321004 - RNA, 19 nt, Homo sapiens
  misc_RNA (1)...(19): siRNA sense strand
gaaaaucagcacaauaaga

SEQ ID NO: 321005 - RNA, 19 nt, Homo sapiens
  misc_RNA (1)...(19): siRNA sense strand
ucauaagggcuucaaagaa

SEQ ID NO: 321006 - RNA, 19 nt, Homo sapiens
  misc_RNA (1)...(19): siRNA sense strand
ggagcaagaccaauauuuu

SEQ ID NO: 321007 - RNA, 19 nt, Homo sapiens
  misc_RNA (1)...(19): siRNA sense strand
gggucaaccugccggaaga

SEQ ID NO: 321008 - RNA, 19 nt, Homo sapiens
  misc_RNA (1)...(19): siRNA sense strand
gaaguuccauccccaaaag

SEQ ID NO: 321009 - RNA, 19 nt, Homo sapiens
  misc_RNA (1)...(19): siRNA sense strand
gccaggcacccaccaacua

SEQ ID NO: 321010 - RNA, 19 nt, Homo sapiens
  misc_RNA (1)...(19): siRNA sense strand
aggaggagcaagaccaaua

SEQ ID NO: 321011 - RNA, 19 nt, Homo sapiens
  misc_RNA (1)...(19): siRNA sense strand
gcaggaggagcaagaccaa

SEQ ID NO: 321012 - RNA, 19 nt, Homo sapiens
  misc_RNA (1)...(19): siRNA sense strand
gagcaagaccaauauuuug

SEQ ID NO: 321013 - RNA, 19 nt, Homo sapiens
  misc_RNA (1)...(19): siRNA sense strand
aaaaggaggcugaaaauca

SEQ ID NO: 321014 - RNA, 19 nt, Homo sapiens
  misc_RNA (1)...(19): siRNA sense strand
gaggagcaagaccaauauu

SEQ ID NO: 321015 - RNA, 19 nt, Homo sapiens
  misc_RNA (1)...(19): siRNA sense strand
caacuaugcccuggugauc

SEQ ID NO: 321016 - RNA, 19 nt, Homo sapiens
  misc_RNA (1)...(19): siRNA sense strand
ccaggcacccaccaacuau

SEQ ID NO: 321017 - RNA, 19 nt, Homo sapiens
  misc_RNA (1)...(19): siRNA sense strand
cacaauaagauccuauauc

SEQ ID NO: 321018 - RNA, 19 nt, Homo sapiens
  misc_RNA (1)...(19): siRNA sense strand
aagguuucuugguucauaa

SEQ ID NO: 321019 - RNA, 19 nt, Homo sapiens
  misc_RNA (1)...(19): siRNA sense strand
ccugaacgaagguuucuug

SEQ ID NO: 321020 - RNA, 19 nt, Homo sapiens
  misc_RNA (1)...(19): siRNA sense strand
guucauaagggcuucaaag

SEQ ID NO: 321021 - RNA, 19 nt, Homo sapiens
  misc_RNA (1)...(19): siRNA sense strand
gcgcugggcaccaaugucu

SEQ ID NO: 321022 - RNA, 19 nt, Homo sapiens
  misc_RNA (1)...(19): siRNA sense strand
gcgauuaccgcgucuacag

SEQ ID NO: 321023 - RNA, 19 nt, Homo sapiens
  misc_RNA (1)...(19): siRNA sense strand
uggagaggccugcgggaaa

SEQ ID NO: 321024 - RNA, 19 nt, Homo sapiens
  misc_RNA (1)...(19): siRNA sense strand
ggaguugaaggccaaguac

SEQ ID NO: 321025 - RNA, 19 nt, Homo sapiens
  misc_RNA (1)...(19): siRNA sense strand
agaccaauauuuugaguuc

SEQ ID NO: 321026 - RNA, 19 nt, Homo sapiens
  misc_RNA (1)...(19): siRNA sense strand
aagaagcguugaaguucca

SEQ ID NO: 321027 - RNA, 19 nt, Homo sapiens
  misc_RNA (1)...(19): siRNA sense strand
aggagcaagaccaauauuu

SEQ ID NO: 321028 - RNA, 19 nt, Homo sapiens
  misc_RNA (1)...(19): siRNA sense strand
ccaaaaggaggcugaaaau

SEQ ID NO: 321029 - RNA, 19 nt, Homo sapiens
  misc_RNA (1)...(19): siRNA sense strand
acuaugcccuggugaucga

SEQ ID NO: 321030 - RNA, 19 nt, Homo sapiens
  misc_RNA (1)...(19): siRNA sense strand
gcacucagcuaaacacaaa

SEQ ID NO: 321031 - RNA, 19 nt, Homo sapiens
  misc_RNA (1)...(19): siRNA sense strand
caaauaagaugaccuccuu

SEQ ID NO: 321032 - RNA, 19 nt, Homo sapiens
  misc_RNA (1)...(19): siRNA sense strand
ugacagaugugaucauuga

SEQ ID NO: 321033 - RNA, 19 nt, Homo sapiens
  misc_RNA (1)...(19): siRNA sense strand
ggaaauccaucaguugaaa

SEQ ID NO: 321034 - RNA, 19 nt, Homo sapiens
  misc_RNA (1)...(19): siRNA sense strand
caaacuaaaugaucuccua

SEQ ID NO: 321035 - RNA, 19 nt, Homo sapiens
  misc_RNA (1)...(19): siRNA sense strand
gaaguaaagaucacaguaa

SEQ ID NO: 321036 - RNA, 19 nt, Homo sapiens
  misc_RNA (1)...(19): siRNA sense strand
gagagaaaguagcgauuau

SEQ ID NO: 321037 - RNA, 19 nt, Homo sapiens
  misc_RNA (1)...(19): siRNA sense strand
ggacacagcagaggaaauu

SEQ ID NO: 321038 - RNA, 19 nt, Homo sapiens
  misc_RNA (1)...(19): siRNA sense strand
cgacguaauugaacaaaug

SEQ ID NO: 321039 - RNA, 19 nt, Homo sapiens
  misc_RNA (1)...(19): siRNA sense strand
ggagagaaaguagcgauua

SEQ ID NO: 321040 - RNA, 19 nt, Homo sapiens
  misc_RNA (1)...(19): siRNA sense strand
ggagauaacuauguucauc

SEQ ID NO: 321041 - RNA, 19 nt, Homo sapiens
  misc_RNA (1)...(19): siRNA sense strand
gaaaauagaugccuuacag

SEQ ID NO: 321042 - RNA, 19 nt, Homo sapiens
  misc_RNA (1)...(19): siRNA sense strand
cuacagcgcugggacgaua

SEQ ID NO: 321043 - RNA, 19 nt, Homo sapiens
  misc_RNA (1)...(19): siRNA sense strand
gauaccacguguccuguuu

SEQ ID NO: 321044 - RNA, 19 nt, Homo sapiens
  misc_RNA (1)...(19): siRNA sense strand
gcagugccaugcuguguau

SEQ ID NO: 321045 - RNA, 19 nt, Homo sapiens
  misc_RNA (1)...(19): siRNA sense strand
gaaagugcacucagcuaaa

SEQ ID NO: 321046 - RNA, 19 nt, Homo sapiens
  misc_RNA (1)...(19): siRNA sense strand
caagccagcuggaaucuca

SEQ ID NO: 321047 - RNA, 19 nt, Homo sapiens
  misc_RNA (1)...(19): siRNA sense strand
gaaaguagcgauuauccau

SEQ ID NO: 321048 - RNA, 19 nt, Homo sapiens
  misc_RNA (1)...(19): siRNA sense strand
ugagaagugugauaaucua

SEQ ID NO: 321049 - RNA, 19 nt, Homo sapiens
  misc_RNA (1)...(19): siRNA sense strand
ggacuaugcuggagauaac

SEQ ID NO: 321050 - RNA, 19 nt, Homo sapiens
  misc_RNA (1)...(19): siRNA sense strand
caauauauggugcugauaa

SEQ ID NO: 321051 - RNA, 19 nt, Homo sapiens
  misc_RNA (1)...(19): siRNA sense strand
gguauuaugcaccuauaua

SEQ ID NO: 321052 - RNA, 19 nt, Homo sapiens
  misc_RNA (1)...(19): siRNA sense strand
gauuggagcucgcggaaca

SEQ ID NO: 321053 - RNA, 19 nt, Homo sapiens
  misc_RNA (1)...(19): siRNA sense strand
gaccagauuucauucuuca

SEQ ID NO: 321054 - RNA, 19 nt, Homo sapiens
  misc_RNA (1)...(19): siRNA sense strand
gaagaccaaguuuaaagaa

SEQ ID NO: 321055 - RNA, 19 nt, Homo sapiens
  misc_RNA (1)...(19): siRNA sense strand
cagcgaaucuacugggaaa

SEQ ID NO: 321056 - RNA, 19 nt, Homo sapiens
  misc_RNA (1)...(19): siRNA sense strand
aauagaugccuuacaguua

SEQ ID NO: 321057 - RNA, 19 nt, Homo sapiens
  misc_RNA (1)...(19): siRNA sense strand
ggaaguugcccuccaggaa

SEQ ID NO: 321058 - RNA, 19 nt, Homo sapiens
  misc_RNA (1)...(19): siRNA sense strand
gcaaagaaguaaagaucac

SEQ ID NO: 321059 - RNA, 19 nt, Homo sapiens
  misc_RNA (1)...(19): siRNA sense strand
gaaggagaccugugaccaa

SEQ ID NO: 321060 - RNA, 19 nt, Homo sapiens
  misc_RNA (1)...(19): siRNA sense strand
gaagugugauaaucuagag

SEQ ID NO: 321061 - RNA, 19 nt, Homo sapiens
  misc_RNA (1)...(19): siRNA sense strand
caacaugaagaccaaguuu

SEQ ID NO: 321062 - RNA, 19 nt, Homo sapiens
  misc_RNA (1)...(19): siRNA sense strand
cagaggaaauuaacaacau

SEQ ID NO: 321063 - RNA, 19 nt, Homo sapiens
  misc_RNA (1)...(19): siRNA sense strand
uauaagcacuuugaggaaa

SEQ ID NO: 321064 - RNA, 19 nt, Homo sapiens
  misc_RNA (1)...(19): siRNA sense strand
cugaagugcucaaaucuga

SEQ ID NO: 321065 - RNA, 19 nt, Homo sapiens
  misc_RNA (1)...(19): siRNA sense strand
guaaagaucacaguaagga

SEQ ID NO: 321066 - RNA, 19 nt, Homo sapiens
  misc_RNA (1)...(19): siRNA sense strand
cauaggauguggacgguau

SEQ ID NO: 321067 - RNA, 19 nt, Homo sapiens
  misc_RNA (1)...(19): siRNA sense strand
gugauaaucuagagcacaa

SEQ ID NO: 321068 - RNA, 19 nt, Homo sapiens
  misc_RNA (1)...(19): siRNA sense strand
gacacuagccucagcugua

SEQ ID NO: 321069 - RNA, 19 nt, Homo sapiens
  misc_RNA (1)...(19): siRNA sense strand
caagauaguucggauagag

SEQ ID NO: 321070 - RNA, 19 nt, Homo sapiens
  misc_RNA (1)...(19): siRNA sense strand
caacccagaugaacuaaaa

SEQ ID NO: 321071 - RNA, 19 nt, Homo sapiens
  misc_RNA (1)...(19): siRNA sense strand
gaaggacacagcagaggaa

SEQ ID NO: 321072 - RNA, 19 nt, Homo sapiens
  misc_RNA (1)...(19): siRNA sense strand
gcaccuauauaagacaaau

SEQ ID NO: 321073 - RNA, 19 nt, Homo sapiens
  misc_RNA (1)...(19): siRNA sense strand
aagaaacaauugagaagug

SEQ ID NO: 321074 - RNA, 19 nt, Homo sapiens
  misc_RNA (1)...(19): siRNA sense strand
gcuaguguauguggaaaga

SEQ ID NO: 321075 - RNA, 19 nt, Homo sapiens
  misc_RNA (1)...(19): siRNA sense strand
gagcacaaacuaaaugauc

SEQ ID NO: 321076 - RNA, 19 nt, Homo sapiens
  misc_RNA (1)...(19): siRNA sense strand
gcgcaaagaaguaaagauc

SEQ ID NO: 321077 - RNA, 19 nt, Homo sapiens
  misc_RNA (1)...(19): siRNA sense strand
aaacuacaguggaagaaag

SEQ ID NO: 321078 - RNA, 19 nt, Homo sapiens
  misc_RNA (1)...(19): siRNA sense strand
ucaaagaggagcaggaaau

SEQ ID NO: 321079 - RNA, 19 nt, Homo sapiens
  misc_RNA (1)...(19): siRNA sense strand
gaaaagcagucuguggaaa

SEQ ID NO: 321080 - RNA, 19 nt, Homo sapiens
  misc_RNA (1)...(19): siRNA sense strand
acaugaagaccaaguuuaa

SEQ ID NO: 321081 - RNA, 19 nt, Homo sapiens
  misc_RNA (1)...(19): siRNA sense strand
gcuguagccuguuuagaag

SEQ ID NO: 321082 - RNA, 19 nt, Homo sapiens
  misc_RNA (1)...(19): siRNA sense strand
caauugagaagugugauaa

SEQ ID NO: 321083 - RNA, 19 nt, Homo sapiens
  misc_RNA (1)...(19): siRNA sense strand
caagucaccaggagagaaa

SEQ ID NO: 321084 - RNA, 19 nt, Homo sapiens
  misc_RNA (1)...(19): siRNA sense strand
ucaacucaauagaagauga

SEQ ID NO: 321085 - RNA, 19 nt, Homo sapiens
  misc_RNA (1)...(19): siRNA sense strand
ccucagcuguagccuguuu

SEQ ID NO: 321086 - RNA, 19 nt, Homo sapiens
  misc_RNA (1)...(19): siRNA sense strand
gaccagucaugaccuuaug

SEQ ID NO: 321087 - RNA, 19 nt, Homo sapiens
  misc_RNA (1)...(19): siRNA sense strand
gaaguuuguugccccauuu

SEQ ID NO: 321088 - RNA, 19 nt, Homo sapiens
  misc_RNA (1)...(19): siRNA sense strand
gcagcugcgugacgucaug

SEQ ID NO: 321089 - RNA, 19 nt, Homo sapiens
  misc_RNA (1)...(19): siRNA sense strand
cagaccagauuucauucuu

SEQ ID NO: 321090 - RNA, 19 nt, Homo sapiens
  misc_RNA (1)...(19): siRNA sense strand
gaaaugacagaugugauca

SEQ ID NO: 321091 - RNA, 19 nt, Homo sapiens
  misc_RNA (1)...(19): siRNA sense strand
gaaguccaacccagaugaa

SEQ ID NO: 321092 - RNA, 19 nt, Homo sapiens
  misc_RNA (1)...(19): siRNA sense strand
agaaagugcacucagcuaa

SEQ ID NO: 321093 - RNA, 19 nt, Homo sapiens
  misc_RNA (1)...(19): siRNA sense strand
gucgagaaaugacagaugu

SEQ ID NO: 321094 - RNA, 19 nt, Homo sapiens
  misc_RNA (1)...(19): siRNA sense strand
acacagcagaggaaauuaa

SEQ ID NO: 321095 - RNA, 19 nt, Homo sapiens
  misc_RNA (1)...(19): siRNA sense strand
aaacaagauaguucggaua

SEQ ID NO: 321096 - RNA, 19 nt, Homo sapiens
  misc_RNA (1)...(19): siRNA sense strand
caauagaagaugacguuug

SEQ ID NO: 321097 - RNA, 19 nt, Homo sapiens
  misc_RNA (1)...(19): siRNA sense strand
gccaugcuguguauucuca

SEQ ID NO: 321098 - RNA, 19 nt, Homo sapiens
  misc_RNA (1)...(19): siRNA sense strand
cacagucccugcugcaaug

SEQ ID NO: 321099 - RNA, 19 nt, Homo sapiens
  misc_RNA (1)...(19): siRNA sense strand
aaggagaccugugaccaaa

SEQ ID NO: 321100 - RNA, 19 nt, Homo sapiens
  misc_RNA (1)...(19): siRNA sense strand
uuaacaacaugaagaccaa

SEQ ID NO: 321101 - RNA, 19 nt, Homo sapiens
  misc_RNA (1)...(19): siRNA sense strand
gaggaaauuaacaacauga

SEQ ID NO: 321102 - RNA, 19 nt, Homo sapiens
  misc_RNA (1)...(19): siRNA sense strand
gcagaggaaauuaacaaca

SEQ ID NO: 321103 - RNA, 19 nt, Homo sapiens
  misc_RNA (1)...(19): siRNA sense strand
cagcagaggaaauuaacaa

SEQ ID NO: 321104 - RNA, 19 nt, Homo sapiens
  misc_RNA (1)...(19): siRNA sense strand
uaacaagccagcuggaauc

SEQ ID NO: 321105 - RNA, 19 nt, Homo sapiens
  misc_RNA (1)...(19): siRNA sense strand
aaauagaugccuuacaguu

SEQ ID NO: 321106 - RNA, 19 nt, Homo sapiens
  misc_RNA (1)...(19): siRNA sense strand
aauagaagaugacguuugc

SEQ ID NO: 321107 - RNA, 19 nt, Homo sapiens
  misc_RNA (1)...(19): siRNA sense strand
ccaugcagcuuaccaacca

SEQ ID NO: 321108 - RNA, 19 nt, Homo sapiens
  misc_RNA (1)...(19): siRNA sense strand
aaagcagucuguggaaaga

SEQ ID NO: 321109 - RNA, 19 nt, Homo sapiens
  misc_RNA (1)...(19): siRNA sense strand
uaaucuagagcacaaacua

SEQ ID NO: 321110 - RNA, 19 nt, Homo sapiens
  misc_RNA (1)...(19): siRNA sense strand
ugagugugguguucaggaa

SEQ ID NO: 321111 - RNA, 19 nt, Homo sapiens
  misc_RNA (1)...(19): siRNA sense strand
agacacagcagaagaucaa

SEQ ID NO: 321112 - RNA, 19 nt, Homo sapiens
  misc_RNA (1)...(19): siRNA sense strand
auagaugccuuacaguuag

SEQ ID NO: 321113 - RNA, 19 nt, Homo sapiens
  misc_RNA (1)...(19): siRNA sense strand
caaagaggagcaggaaaug

SEQ ID NO: 321114 - RNA, 19 nt, Homo sapiens
  misc_RNA (1)...(19): siRNA sense strand
aagaggagcaggaaaugaa

SEQ ID NO: 321115 - RNA, 19 nt, Homo sapiens
  misc_RNA (1)...(19): siRNA sense strand
ccacugcgcaaagaaguaa

SEQ ID NO: 321116 - RNA, 19 nt, Homo sapiens
  misc_RNA (1)...(19): siRNA sense strand
acucuacucccaaccaaua

SEQ ID NO: 321117 - RNA, 19 nt, Homo sapiens
  misc_RNA (1)...(19): siRNA sense strand
gcaagucaccaggagagaa

SEQ ID NO: 321118 - RNA, 19 nt, Homo sapiens
  misc_RNA (1)...(19): siRNA sense strand
ugaagaccaaguuuaaaga

SEQ ID NO: 321119 - RNA, 19 nt, Homo sapiens
  misc_RNA (1)...(19): siRNA sense strand
ggaaauuaacaacaugaag

SEQ ID NO: 321120 - RNA, 19 nt, Homo sapiens
  misc_RNA (1)...(19): siRNA sense strand
aaguagcgauuauccauca

SEQ ID NO: 321121 - RNA, 19 nt, Homo sapiens
  misc_RNA (1)...(19): siRNA sense strand
ugacugaacuccccaagug

SEQ ID NO: 321122 - RNA, 19 nt, Homo sapiens
  misc_RNA (1)...(19): siRNA sense strand
gaagugcucaaaucugaag

SEQ ID NO: 321123 - RNA, 19 nt, Homo sapiens
  misc_RNA (1)...(19): siRNA sense strand
auauggugcugauaaaguu

SEQ ID NO: 321124 - RNA, 19 nt, Homo sapiens
  misc_RNA (1)...(19): siRNA sense strand
gaaauccaucaguugaaau

SEQ ID NO: 321125 - RNA, 19 nt, Homo sapiens
  misc_RNA (1)...(19): siRNA sense strand
aaacaauugagaaguguga

SEQ ID NO: 321126 - RNA, 19 nt, Homo sapiens
  misc_RNA (1)...(19): siRNA sense strand
ggaaacgcagcacacguau

SEQ ID NO: 321127 - RNA, 19 nt, Homo sapiens
  misc_RNA (1)...(19): siRNA sense strand
agaaguaaagaucacagua

SEQ ID NO: 321128 - RNA, 19 nt, Homo sapiens
  misc_RNA (1)...(19): siRNA sense strand
gaccuuaugaaguuuguug

SEQ ID NO: 321129 - RNA, 19 nt, Homo sapiens
  misc_RNA (1)...(19): siRNA sense strand
uccaucaguugaaauaguu

SEQ ID NO: 321130 - RNA, 19 nt, Homo sapiens
  misc_RNA (1)...(19): siRNA sense strand
ucacagagcacuacaaaca

SEQ ID NO: 321131 - RNA, 19 nt, Homo sapiens
  misc_RNA (1)...(19): siRNA sense strand
gagguguccuaccgcauug

SEQ ID NO: 321132 - RNA, 19 nt, Homo sapiens
  misc_RNA (1)...(19): siRNA sense strand
gcauucgcaucaaccacaa

SEQ ID NO: 321133 - RNA, 19 nt, Homo sapiens
  misc_RNA (1)...(19): siRNA sense strand
gcagaggcuuaaggucuuc

SEQ ID NO: 321134 - RNA, 19 nt, Homo sapiens
  misc_RNA (1)...(19): siRNA sense strand
ugauggcagucuccagcua

SEQ ID NO: 321135 - RNA, 19 nt, Homo sapiens
  misc_RNA (1)...(19): siRNA sense strand
ugagguguccuaccgcauu

SEQ ID NO: 321136 - RNA, 19 nt, Homo sapiens
  misc_RNA (1)...(19): siRNA sense strand
acucacagagcacuacaaa

SEQ ID NO: 321137 - RNA, 19 nt, Homo sapiens
  misc_RNA (1)...(19): siRNA sense strand
ugagcgagcagaggcuuaa

SEQ ID NO: 321138 - RNA, 19 nt, Homo sapiens
  misc_RNA (1)...(19): siRNA sense strand
agcagaggcuuaaggucuu

SEQ ID NO: 321139 - RNA, 19 nt, Homo sapiens
  misc_RNA (1)...(19): siRNA sense strand
ggaagggaaccgacaugcu

SEQ ID NO: 321140 - RNA, 19 nt, Homo sapiens
  misc_RNA (1)...(19): siRNA sense strand
aaaucaggcuccacaauua

SEQ ID NO: 321141 - RNA, 19 nt, Homo sapiens
  misc_RNA (1)...(19): siRNA sense strand
gaucaaagacaauguaguu

SEQ ID NO: 321142 - RNA, 19 nt, Homo sapiens
  misc_RNA (1)...(19): siRNA sense strand
gaccaaagcugggaaguuc

SEQ ID NO: 321143 - RNA, 19 nt, Homo sapiens
  misc_RNA (1)...(19): siRNA sense strand
acaauuaaccugcaguuua

SEQ ID NO: 321144 - RNA, 19 nt, Homo sapiens
  misc_RNA (1)...(19): siRNA sense strand
gaugaaaaccccacaauua

SEQ ID NO: 321145 - RNA, 19 nt, Homo sapiens
  misc_RNA (1)...(19): siRNA sense strand
ugaaucgucuggauaugua

SEQ ID NO: 321146 - RNA, 19 nt, Homo sapiens
  misc_RNA (1)...(19): siRNA sense strand
ggacacauuucaggauuau

SEQ ID NO: 321147 - RNA, 19 nt, Homo sapiens
  misc_RNA (1)...(19): siRNA sense strand
gaaugugggugaccagcuu

SEQ ID NO: 321148 - RNA, 19 nt, Homo sapiens
  misc_RNA (1)...(19): siRNA sense strand
gaagagaugcuugacaaug

SEQ ID NO: 321149 - RNA, 19 nt, Homo sapiens
  misc_RNA (1)...(19): siRNA sense strand
uaaaucaggcuccacaauu

SEQ ID NO: 321150 - RNA, 19 nt, Homo sapiens
  misc_RNA (1)...(19): siRNA sense strand
ggugaaauauaccaacaau

SEQ ID NO: 321151 - RNA, 19 nt, Homo sapiens
  misc_RNA (1)...(19): siRNA sense strand
ggacaguaguucccuugga

SEQ ID NO: 321152 - RNA, 19 nt, Homo sapiens
  misc_RNA (1)...(19): siRNA sense strand
gaaaaugugccuccgguua

SEQ ID NO: 321153 - RNA, 19 nt, Homo sapiens
  misc_RNA (1)...(19): siRNA sense strand
uggaagagaugcuugacaa

SEQ ID NO: 321154 - RNA, 19 nt, Homo sapiens
  misc_RNA (1)...(19): siRNA sense strand
ggucagccguucuguuugu

SEQ ID NO: 321155 - RNA, 19 nt, Homo sapiens
  misc_RNA (1)...(19): siRNA sense strand
caauguaguugugguuuau

SEQ ID NO: 321156 - RNA, 19 nt, Homo sapiens
  misc_RNA (1)...(19): siRNA sense strand
cacaaaagcuaccaaguuu

SEQ ID NO: 321157 - RNA, 19 nt, Homo sapiens
  misc_RNA (1)...(19): siRNA sense strand
cuuggacgcuuugaaauaa

SEQ ID NO: 321158 - RNA, 19 nt, Homo sapiens
  misc_RNA (1)...(19): siRNA sense strand
ccaacaaugaggccuauuu

SEQ ID NO: 321159 - RNA, 19 nt, Homo sapiens
  misc_RNA (1)...(19): siRNA sense strand
gaugcugucuugggaugua

SEQ ID NO: 321160 - RNA, 19 nt, Homo sapiens
  misc_RNA (1)...(19): siRNA sense strand
gccguucuguuugugauua

SEQ ID NO: 321161 - RNA, 19 nt, Homo sapiens
  misc_RNA (1)...(19): siRNA sense strand
gaacucauaaagccuccua

SEQ ID NO: 321162 - RNA, 19 nt, Homo sapiens
  misc_RNA (1)...(19): siRNA sense strand
ccucaccacuaucucuuaa

SEQ ID NO: 321163 - RNA, 19 nt, Homo sapiens
  misc_RNA (1)...(19): siRNA sense strand
ggacuggggugaaauauac

SEQ ID NO: 321164 - RNA, 19 nt, Homo sapiens
  misc_RNA (1)...(19): siRNA sense strand
caaggugaaucgucuggau

SEQ ID NO: 321165 - RNA, 19 nt, Homo sapiens
  misc_RNA (1)...(19): siRNA sense strand
guggacacauuucaggauu

SEQ ID NO: 321166 - RNA, 19 nt, Homo sapiens
  misc_RNA (1)...(19): siRNA sense strand
guggucagccguucuguuu

SEQ ID NO: 321167 - RNA, 19 nt, Homo sapiens
  misc_RNA (1)...(19): siRNA sense strand
guucagagccagugaucaa

SEQ ID NO: 321168 - RNA, 19 nt, Homo sapiens
  misc_RNA (1)...(19): siRNA sense strand
cagagccagugaucaaaga

SEQ ID NO: 321169 - RNA, 19 nt, Homo sapiens
  misc_RNA (1)...(19): siRNA sense strand
guccugaacaugagccuua

SEQ ID NO: 321170 - RNA, 19 nt, Homo sapiens
  misc_RNA (1)...(19): siRNA sense strand
ugccagaccuuacacuuuc

SEQ ID NO: 321171 - RNA, 19 nt, Homo sapiens
  misc_RNA (1)...(19): siRNA sense strand
uggacacauuucaggauua

SEQ ID NO: 321172 - RNA, 19 nt, Homo sapiens
  misc_RNA (1)...(19): siRNA sense strand
ucaccacuaucucuuaagu

SEQ ID NO: 321173 - RNA, 19 nt, Homo sapiens
  misc_RNA (1)...(19): siRNA sense strand
gaaauauaccaacaaugag

SEQ ID NO: 321174 - RNA, 19 nt, Homo sapiens
  misc_RNA (1)...(19): siRNA sense strand
aagagaugcuugacaaugg

SEQ ID NO: 321175 - RNA, 19 nt, Homo sapiens
  misc_RNA (1)...(19): siRNA sense strand
ggagaaacauuggaaaagu

SEQ ID NO: 321176 - RNA, 19 nt, Homo sapiens
  misc_RNA (1)...(19): siRNA sense strand
gagcgcauccucuccuuca

SEQ ID NO: 321177 - RNA, 19 nt, Homo sapiens
  misc_RNA (1)...(19): siRNA sense strand
cagcuuccauccuuguguu

SEQ ID NO: 321178 - RNA, 19 nt, Homo sapiens
  misc_RNA (1)...(19): siRNA sense strand
cacaauuacugcugagauc

SEQ ID NO: 321179 - RNA, 19 nt, Homo sapiens
  misc_RNA (1)...(19): siRNA sense strand
uuuaugagguauuggaaga

SEQ ID NO: 321180 - RNA, 19 nt, Homo sapiens
  misc_RNA (1)...(19): siRNA sense strand
ugucaaacauaacaucagu

SEQ ID NO: 321181 - RNA, 19 nt, Homo sapiens
  misc_RNA (1)...(19): siRNA sense strand
ugaugugauugaagagauu

SEQ ID NO: 321182 - RNA, 19 nt, Homo sapiens
  misc_RNA (1)...(19): siRNA sense strand
uaaaauacaugaccaaagc

SEQ ID NO: 321183 - RNA, 19 nt, Homo sapiens
  misc_RNA (1)...(19): siRNA sense strand
ggccauuucuggacucaag

SEQ ID NO: 321184 - RNA, 19 nt, Homo sapiens
  misc_RNA (1)...(19): siRNA sense strand
ccuuggacgcuuugaaaua

SEQ ID NO: 321185 - RNA, 19 nt, Homo sapiens
  misc_RNA (1)...(19): siRNA sense strand
gaccuuacacuuuccuuca

SEQ ID NO: 321186 - RNA, 19 nt, Homo sapiens
  misc_RNA (1)...(19): siRNA sense strand
ucauaaagccuccuaccau

SEQ ID NO: 321187 - RNA, 19 nt, Homo sapiens
  misc_RNA (1)...(19): siRNA sense strand
gagaaacauuggaaaagug

SEQ ID NO: 321188 - RNA, 19 nt, Homo sapiens
  misc_RNA (1)...(19): siRNA sense strand
gagagcuacugaggcagaa

SEQ ID NO: 321189 - RNA, 19 nt, Homo sapiens
  misc_RNA (1)...(19): siRNA sense strand
ccacaaaagcuaccaaguu

SEQ ID NO: 321190 - RNA, 19 nt, Homo sapiens
  misc_RNA (1)...(19): siRNA sense strand
ccaugucagugcacagaau

SEQ ID NO: 321191 - RNA, 19 nt, Homo sapiens
  misc_RNA (1)...(19): siRNA sense strand
ggaagagaugcuugacaau

SEQ ID NO: 321192 - RNA, 19 nt, Homo sapiens
  misc_RNA (1)...(19): siRNA sense strand
ucacaggaagcacgaaugu

SEQ ID NO: 321193 - RNA, 19 nt, Homo sapiens
  misc_RNA (1)...(19): siRNA sense strand
ggauauguauggagaaaag

SEQ ID NO: 321194 - RNA, 19 nt, Homo sapiens
  misc_RNA (1)...(19): siRNA sense strand
gcaaucccaguguauguca

SEQ ID NO: 321195 - RNA, 19 nt, Homo sapiens
  misc_RNA (1)...(19): siRNA sense strand
uaugagguauuggaagaga

SEQ ID NO: 321196 - RNA, 19 nt, Homo sapiens
  misc_RNA (1)...(19): siRNA sense strand
gagcuuccaaaccagauga

SEQ ID NO: 321197 - RNA, 19 nt, Homo sapiens
  misc_RNA (1)...(19): siRNA sense strand
gcuaccgagucgaacauuc

SEQ ID NO: 321198 - RNA, 19 nt, Homo sapiens
  misc_RNA (1)...(19): siRNA sense strand
caacaaugaggccuauuuu

SEQ ID NO: 321199 - RNA, 19 nt, Homo sapiens
  misc_RNA (1)...(19): siRNA sense strand
ccgagucgaacauucuuaa

SEQ ID NO: 321200 - RNA, 19 nt, Homo sapiens
  misc_RNA (1)...(19): siRNA sense strand
gagucgaacauucuuaaag

SEQ ID NO: 321201 - RNA, 19 nt, Homo sapiens
  misc_RNA (1)...(19): siRNA sense strand
uuucuggacucaaggugaa

SEQ ID NO: 321202 - RNA, 19 nt, Homo sapiens
  misc_RNA (1)...(19): siRNA sense strand
gauaaaucaggcuccacaa

SEQ ID NO: 321203 - RNA, 19 nt, Homo sapiens
  misc_RNA (1)...(19): siRNA sense strand
ccacaauuaaccugcaguu

SEQ ID NO: 321204 - RNA, 19 nt, Homo sapiens
  misc_RNA (1)...(19): siRNA sense strand
acaaugaggccuauuuuga

SEQ ID NO: 321205 - RNA, 19 nt, Homo sapiens
  misc_RNA (1)...(19): siRNA sense strand
cuggauauguauggagaaa

SEQ ID NO: 321206 - RNA, 19 nt, Homo sapiens
  misc_RNA (1)...(19): siRNA sense strand
ggugaaucgucuggauaug

SEQ ID NO: 321207 - RNA, 19 nt, Homo sapiens
  misc_RNA (1)...(19): siRNA sense strand
caugagccuuacuccauca

SEQ ID NO: 321208 - RNA, 19 nt, Homo sapiens
  misc_RNA (1)...(19): siRNA sense strand
ccacaauuacugcugagau

SEQ ID NO: 321209 - RNA, 19 nt, Homo sapiens
  misc_RNA (1)...(19): siRNA sense strand
cuagguuguuggaugaugu

SEQ ID NO: 321210 - RNA, 19 nt, Homo sapiens
  misc_RNA (1)...(19): siRNA sense strand
aguugugguuuaugaggua

SEQ ID NO: 321211 - RNA, 19 nt, Homo sapiens
  misc_RNA (1)...(19): siRNA sense strand
gucaacaccaucacaggaa

SEQ ID NO: 321212 - RNA, 19 nt, Homo sapiens
  misc_RNA (1)...(19): siRNA sense strand
cgcaagagagagcuacuga

SEQ ID NO: 321213 - RNA, 19 nt, Homo sapiens
  misc_RNA (1)...(19): siRNA sense strand
gugaaucgucuggauaugu

SEQ ID NO: 321214 - RNA, 19 nt, Homo sapiens
  misc_RNA (1)...(19): siRNA sense strand
acccuagguuguuggauga

SEQ ID NO: 321215 - RNA, 19 nt, Homo sapiens
  misc_RNA (1)...(19): siRNA sense strand
uaccaacaaugaggccuau

SEQ ID NO: 321216 - RNA, 19 nt, Homo sapiens
  misc_RNA (1)...(19): siRNA sense strand
gauccauagucuuuucuug

SEQ ID NO: 321217 - RNA, 19 nt, Homo sapiens
  misc_RNA (1)...(19): siRNA sense strand
ugaccaaagcugggaaguu

SEQ ID NO: 321218 - RNA, 19 nt, Homo sapiens
  misc_RNA (1)...(19): siRNA sense strand
aaaugugccuccgguuauc

SEQ ID NO: 321219 - RNA, 19 nt, Homo sapiens
  misc_RNA (1)...(19): siRNA sense strand
cuuacacuuuccuucauga

SEQ ID NO: 321220 - RNA, 19 nt, Homo sapiens
  misc_RNA (1)...(19): siRNA sense strand
ccuuacacuuuccuucaug

SEQ ID NO: 321221 - RNA, 19 nt, Homo sapiens
  misc_RNA (1)...(19): siRNA sense strand
ccgagugguggacacauuu

SEQ ID NO: 321222 - RNA, 19 nt, Homo sapiens
  misc_RNA (1)...(19): siRNA sense strand
aaggugaaucgucuggaua

SEQ ID NO: 321223 - RNA, 19 nt, Homo sapiens
  misc_RNA (1)...(19): siRNA sense strand
cgagucgaacauucuuaaa

SEQ ID NO: 321224 - RNA, 19 nt, Homo sapiens
  misc_RNA (1)...(19): siRNA sense strand
ccagugaucaaagacaaug

SEQ ID NO: 321225 - RNA, 19 nt, Homo sapiens
  misc_RNA (1)...(19): siRNA sense strand
aacaugagccuuacuccau

SEQ ID NO: 321226 - RNA, 19 nt, Homo sapiens
  misc_RNA (1)...(19): siRNA sense strand
gcgcauccucuccuucauc

SEQ ID NO: 321227 - RNA, 19 nt, Homo sapiens
  misc_RNA (1)...(19): siRNA sense strand
agagaugcuugacaauggu

SEQ ID NO: 321228 - RNA, 19 nt, Homo sapiens
  misc_RNA (1)...(19): siRNA sense strand
gagaagaggcagaaagaua

SEQ ID NO: 321229 - RNA, 19 nt, Homo sapiens
  misc_RNA (1)...(19): siRNA sense strand
gaacggaugcgccagauug

SEQ ID NO: 321230 - RNA, 19 nt, Homo sapiens
  misc_RNA (1)...(19): siRNA sense strand
gcgcaaagcuucggacuuc

SEQ ID NO: 321231 - RNA, 19 nt, Homo sapiens
  misc_RNA (1)...(19): siRNA sense strand
agaauucccucauguacua

SEQ ID NO: 321232 - RNA, 19 nt, Homo sapiens
  misc_RNA (1)...(19): siRNA sense strand
gaacacacccuugagaguu

SEQ ID NO: 321233 - RNA, 19 nt, Homo sapiens
  misc_RNA (1)...(19): siRNA sense strand
ggaaguacaaggccaagaa

SEQ ID NO: 321234 - RNA, 19 nt, Homo sapiens
  misc_RNA (1)...(19): siRNA sense strand
agaagaggcagaaagauaa

SEQ ID NO: 321235 - RNA, 19 nt, Homo sapiens
  misc_RNA (1)...(19): siRNA sense strand
aggagcagcuguuuaagaa

SEQ ID NO: 321236 - RNA, 19 nt, Homo sapiens
  misc_RNA (1)...(19): siRNA sense strand
cgaggagaauggagacuug

SEQ ID NO: 321237 - RNA, 19 nt, Homo sapiens
  misc_RNA (1)...(19): siRNA sense strand
ccagauugccaucaaguuu

SEQ ID NO: 321238 - RNA, 19 nt, Homo sapiens
  misc_RNA (1)...(19): siRNA sense strand
ccaagaauucccucaugua

SEQ ID NO: 321239 - RNA, 19 nt, Homo sapiens
  misc_RNA (1)...(19): siRNA sense strand
gaggaagaguuugagaaga

SEQ ID NO: 321240 - RNA, 19 nt, Homo sapiens
  misc_RNA (1)...(19): siRNA sense strand
gccaagaauucccucaugu

SEQ ID NO: 321241 - RNA, 19 nt, Homo sapiens
  misc_RNA (1)...(19): siRNA sense strand
gaggagcagcuguuuaaga

SEQ ID NO: 321242 - RNA, 19 nt, Homo sapiens
  misc_RNA (1)...(19): siRNA sense strand
ggccaagaauucccucaug

SEQ ID NO: 321243 - RNA, 19 nt, Homo sapiens
  misc_RNA (1)...(19): siRNA sense strand
gagaggaggaggagaagga

SEQ ID NO: 321244 - RNA, 19 nt, Homo sapiens
  misc_RNA (1)...(19): siRNA sense strand
gcaggacggccagcaagua

SEQ ID NO: 321245 - RNA, 19 nt, Homo sapiens
  misc_RNA (1)...(19): siRNA sense strand
ucauggagguggccaagga

SEQ ID NO: 321246 - RNA, 19 nt, Homo sapiens
  misc_RNA (1)...(19): siRNA sense strand
guggagaccuggaaguaca

SEQ ID NO: 321247 - RNA, 19 nt, Homo sapiens
  misc_RNA (1)...(19): siRNA sense strand
gaagaggcagaaagauaau

SEQ ID NO: 321248 - RNA, 19 nt, Homo sapiens
  misc_RNA (1)...(19): siRNA sense strand
gcaaagcuucggacuucuu

SEQ ID NO: 321249 - RNA, 19 nt, Homo sapiens
  misc_RNA (1)...(19): siRNA sense strand
gaaguacaaggccaagaau

SEQ ID NO: 321250 - RNA, 19 nt, Homo sapiens
  misc_RNA (1)...(19): siRNA sense strand
ggagaauggagacuuggaa

SEQ ID NO: 321251 - RNA, 19 nt, Homo sapiens
  misc_RNA (1)...(19): siRNA sense strand
ggauuucuuuccugaugug

SEQ ID NO: 321252 - RNA, 19 nt, Homo sapiens
  misc_RNA (1)...(19): siRNA sense strand
ggagagugacggagaaucu

SEQ ID NO: 321253 - RNA, 19 nt, Homo sapiens
  misc_RNA (1)...(19): siRNA sense strand
aagaacacgcgcuuccuua

SEQ ID NO: 321254 - RNA, 19 nt, Homo sapiens
  misc_RNA (1)...(19): siRNA sense strand
acgaggagcagcuguuuaa

SEQ ID NO: 321255 - RNA, 19 nt, Homo sapiens
  misc_RNA (1)...(19): siRNA sense strand
ggguggauuuggauuuguu

SEQ ID NO: 321256 - RNA, 19 nt, Homo sapiens
  misc_RNA (1)...(19): siRNA sense strand
caagaauucccucauguac

SEQ ID NO: 321257 - RNA, 19 nt, Homo sapiens
  misc_RNA (1)...(19): siRNA sense strand
ggcaggugguacauaagaa

SEQ ID NO: 321258 - RNA, 19 nt, Homo sapiens
  misc_RNA (1)...(19): siRNA sense strand
cccggcaggugguacauaa

SEQ ID NO: 321259 - RNA, 19 nt, Homo sapiens
  misc_RNA (1)...(19): siRNA sense strand
aggaagaguuugagaagag

SEQ ID NO: 321260 - RNA, 19 nt, Homo sapiens
  misc_RNA (1)...(19): siRNA sense strand
guugagaacacacccuuga

SEQ ID NO: 321261 - RNA, 19 nt, Homo sapiens
  misc_RNA (1)...(19): siRNA sense strand
gacgaggagcagcuguuua

SEQ ID NO: 321262 - RNA, 19 nt, Homo sapiens
  misc_RNA (1)...(19): siRNA sense strand
gaacacgcgcuuccuuagg

SEQ ID NO: 321263 - RNA, 19 nt, Homo sapiens
  misc_RNA (1)...(19): siRNA sense strand
guggguggauuuggauuug

SEQ ID NO: 321264 - RNA, 19 nt, Homo sapiens
  misc_RNA (1)...(19): siRNA sense strand
uaagaacacgcgcuuccuu

SEQ ID NO: 321265 - RNA, 19 nt, Homo sapiens
  misc_RNA (1)...(19): siRNA sense strand
ugagaacacacccuugaga

SEQ ID NO: 321266 - RNA, 19 nt, Homo sapiens
  misc_RNA (1)...(19): siRNA sense strand
cagauugccaucaaguuug

SEQ ID NO: 321267 - RNA, 19 nt, Homo sapiens
  misc_RNA (1)...(19): siRNA sense strand
gagaagcuccaggcacaga

SEQ ID NO: 321268 - RNA, 19 nt, Homo sapiens
  misc_RNA (1)...(19): siRNA sense strand
gggauuucuuuccugaugu

SEQ ID NO: 321269 - RNA, 19 nt, Homo sapiens
  misc_RNA (1)...(19): siRNA sense strand
ggagguggccaaggagaga

SEQ ID NO: 321270 - RNA, 19 nt, Homo sapiens
  misc_RNA (1)...(19): siRNA sense strand
caucagcgucguccuuguu

SEQ ID NO: 321271 - RNA, 19 nt, Homo sapiens
  misc_RNA (1)...(19): siRNA sense strand
aacacacccuugagaguug

SEQ ID NO: 321272 - RNA, 19 nt, Homo sapiens
  misc_RNA (1)...(19): siRNA sense strand
ucgaguggguggauuugga

SEQ ID NO: 321273 - RNA, 19 nt, Homo sapiens
  misc_RNA (1)...(19): siRNA sense strand
ggacgaggaagaguauauc

SEQ ID NO: 321274 - RNA, 19 nt, Homo sapiens
  misc_RNA (1)...(19): siRNA sense strand
ucaaugcccagcacaaaca

SEQ ID NO: 321275 - RNA, 19 nt, Homo sapiens
  misc_RNA (1)...(19): siRNA sense strand
ugacuccagccacauuuga

SEQ ID NO: 321276 - RNA, 19 nt, Homo sapiens
  misc_RNA (1)...(19): siRNA sense strand
agggauuucuuuccugaug

SEQ ID NO: 321277 - RNA, 19 nt, Homo sapiens
  misc_RNA (1)...(19): siRNA sense strand
gcaucagcgucguccuugu

SEQ ID NO: 321278 - RNA, 19 nt, Homo sapiens
  misc_RNA (1)...(19): siRNA sense strand
ugacgaggagcagcuguuu

SEQ ID NO: 321279 - RNA, 19 nt, Homo sapiens
  misc_RNA (1)...(19): siRNA sense strand
ugaggaagaguuugagaag

SEQ ID NO: 321280 - RNA, 19 nt, Homo sapiens
  misc_RNA (1)...(19): siRNA sense strand
gagcggcugggucugaaga

SEQ ID NO: 321281 - RNA, 19 nt, Homo sapiens
  misc_RNA (1)...(19): siRNA sense strand
acagaaggaguaccuggaa

SEQ ID NO: 321282 - RNA, 19 nt, Homo sapiens
  misc_RNA (1)...(19): siRNA sense strand
gcgcaucagcgucguccuu

SEQ ID NO: 321283 - RNA, 19 nt, Homo sapiens
  misc_RNA (1)...(19): siRNA sense strand
cuacacgagugaggacaau

SEQ ID NO: 321284 - RNA, 19 nt, Homo sapiens
  misc_RNA (1)...(19): siRNA sense strand
ggaacggaugcgccagauu

SEQ ID NO: 321285 - RNA, 19 nt, Homo sapiens
  misc_RNA (1)...(19): siRNA sense strand
ccucaaugcccagcacaaa

SEQ ID NO: 321286 - RNA, 19 nt, Homo sapiens
  misc_RNA (1)...(19): siRNA sense strand
cuaccaggcugaggaagag

SEQ ID NO: 321287 - RNA, 19 nt, Homo sapiens
  misc_RNA (1)...(19): siRNA sense strand
guguggagaccuggaagua

SEQ ID NO: 321288 - RNA, 19 nt, Homo sapiens
  misc_RNA (1)...(19): siRNA sense strand
gucugaagauggccaacga

SEQ ID NO: 321289 - RNA, 19 nt, Homo sapiens
  misc_RNA (1)...(19): siRNA sense strand
aguacaaggccaagaauuc

SEQ ID NO: 321290 - RNA, 19 nt, Homo sapiens
  misc_RNA (1)...(19): siRNA sense strand
cggcaggugguacauaaga

SEQ ID NO: 321291 - RNA, 19 nt, Homo sapiens
  misc_RNA (1)...(19): siRNA sense strand
gcccuacagcgccuuguga

SEQ ID NO: 321292 - RNA, 19 nt, Homo sapiens
  misc_RNA (1)...(19): siRNA sense strand
uugagaagaggcagaaaga

SEQ ID NO: 321293 - RNA, 19 nt, Homo sapiens
  misc_RNA (1)...(19): siRNA sense strand
gaagccuugcggagaguga

SEQ ID NO: 321294 - RNA, 19 nt, Homo sapiens
  misc_RNA (1)...(19): siRNA sense strand
gcucuaccaggcugaggaa

SEQ ID NO: 321295 - RNA, 19 nt, Homo sapiens
  misc_RNA (1)...(19): siRNA sense strand
gcggcugggucugaagaug

SEQ ID NO: 321296 - RNA, 19 nt, Homo sapiens
  misc_RNA (1)...(19): siRNA sense strand
gaacgaguccccgaugaug

SEQ ID NO: 321297 - RNA, 19 nt, Homo sapiens
  misc_RNA (1)...(19): siRNA sense strand
gggagaaccuagcgcuuaa

SEQ ID NO: 321298 - RNA, 19 nt, Homo sapiens
  misc_RNA (1)...(19): siRNA sense strand
cgggagaaccuagcgcuua

SEQ ID NO: 321299 - RNA, 19 nt, Homo sapiens
  misc_RNA (1)...(19): siRNA sense strand
gggcaguccggaucaguug

SEQ ID NO: 321300 - RNA, 19 nt, Homo sapiens
  misc_RNA (1)...(19): siRNA sense strand
gcuaggcaaggaagagcua

SEQ ID NO: 321301 - RNA, 19 nt, Homo sapiens
  misc_RNA (1)...(19): siRNA sense strand
gauaaccucucaaguguga

SEQ ID NO: 321302 - RNA, 19 nt, Homo sapiens
  misc_RNA (1)...(19): siRNA sense strand
caagauaaccucucaagug

SEQ ID NO: 321303 - RNA, 19 nt, Homo sapiens
  misc_RNA (1)...(19): siRNA sense strand
aauacaagcuggacaaaga

SEQ ID NO: 321304 - RNA, 19 nt, Homo sapiens
  misc_RNA (1)...(19): siRNA sense strand
aaagagagcuacccagucu

SEQ ID NO: 321305 - RNA, 19 nt, Homo sapiens
  misc_RNA (1)...(19): siRNA sense strand
ugaaggagacucagaagaa

SEQ ID NO: 321306 - RNA, 19 nt, Homo sapiens
  misc_RNA (1)...(19): siRNA sense strand
gaaggagacucagaagaag

SEQ ID NO: 321307 - RNA, 19 nt, Homo sapiens
  misc_RNA (1)...(19): siRNA sense strand
aagauaaccucucaagugu

SEQ ID NO: 321308 - RNA, 19 nt, Homo sapiens
  misc_RNA (1)...(19): siRNA sense strand
gugacaagcugaacaugga

SEQ ID NO: 321309 - RNA, 19 nt, Homo sapiens
  misc_RNA (1)...(19): siRNA sense strand
gaaauacaagcuggacaaa

SEQ ID NO: 321310 - RNA, 19 nt, Homo sapiens
  misc_RNA (1)...(19): siRNA sense strand
gagcaauaccugaagauca

SEQ ID NO: 321311 - RNA, 19 nt, Homo sapiens
  misc_RNA (1)...(19): siRNA sense strand
gaagugggccgagcaauac

SEQ ID NO: 321312 - RNA, 19 nt, Homo sapiens
  misc_RNA (1)...(19): siRNA sense strand
cgagaaagaggagcuguaa

SEQ ID NO: 321313 - RNA, 19 nt, Homo sapiens
  misc_RNA (1)...(19): siRNA sense strand
agaagugggccgagcaaua

SEQ ID NO: 321314 - RNA, 19 nt, Homo sapiens
  misc_RNA (1)...(19): siRNA sense strand
gaagcaggaugaguucaag

SEQ ID NO: 321315 - RNA, 19 nt, Homo sapiens
  misc_RNA (1)...(19): siRNA sense strand
uggauacggucacuuucua

SEQ ID NO: 321316 - RNA, 19 nt, Homo sapiens
  misc_RNA (1)...(19): siRNA sense strand
gugagaagcaggaugaguu

SEQ ID NO: 321317 - RNA, 19 nt, Homo sapiens
  misc_RNA (1)...(19): siRNA sense strand
acauggagcugagugagaa

SEQ ID NO: 321318 - RNA, 19 nt, Homo sapiens
  misc_RNA (1)...(19): siRNA sense strand
ccaggcugauugagaagaa

SEQ ID NO: 321319 - RNA, 19 nt, Homo sapiens
  misc_RNA (1)...(19): siRNA sense strand
gaagaagugggccgagcaa

SEQ ID NO: 321320 - RNA, 19 nt, Homo sapiens
  misc_RNA (1)...(19): siRNA sense strand
ucgccaggcugauugagaa

SEQ ID NO: 321321 - RNA, 19 nt, Homo sapiens
  misc_RNA (1)...(19): siRNA sense strand
agaagaacaagaugaguga

SEQ ID NO: 321322 - RNA, 19 nt, Homo sapiens
  misc_RNA (1)...(19): siRNA sense strand
gaaguucgacacccaguac

SEQ ID NO: 321323 - RNA, 19 nt, Homo sapiens
  misc_RNA (1)...(19): siRNA sense strand
cugguugccugccuguaua

SEQ ID NO: 321324 - RNA, 19 nt, Homo sapiens
  misc_RNA (1)...(19): siRNA sense strand
gccaggcccucuugaagca

SEQ ID NO: 321325 - RNA, 19 nt, Homo sapiens
  misc_RNA (1)...(19): siRNA sense strand
ggagcugagugagaaauac

SEQ ID NO: 321326 - RNA, 19 nt, Homo sapiens
  misc_RNA (1)...(19): siRNA sense strand
uuccagcgaugaucucuug

SEQ ID NO: 321327 - RNA, 19 nt, Homo sapiens
  misc_RNA (1)...(19): siRNA sense strand
agaaauacaagcuggacaa

SEQ ID NO: 321328 - RNA, 19 nt, Homo sapiens
  misc_RNA (1)...(19): siRNA sense strand
ccagaagagcuuaaacauc

SEQ ID NO: 321329 - RNA, 19 nt, Homo sapiens
  misc_RNA (1)...(19): siRNA sense strand
gcaagauaaccucucaagu

SEQ ID NO: 321330 - RNA, 19 nt, Homo sapiens
  misc_RNA (1)...(19): siRNA sense strand
agcaauaccugaagaucau

SEQ ID NO: 321331 - RNA, 19 nt, Homo sapiens
  misc_RNA (1)...(19): siRNA sense strand
gagcuacccagucuucuac

SEQ ID NO: 321332 - RNA, 19 nt, Homo sapiens
  misc_RNA (1)...(19): siRNA sense strand
gccgagcaauaccugaaga

SEQ ID NO: 321333 - RNA, 19 nt, Homo sapiens
  misc_RNA (1)...(19): siRNA sense strand
cuacaaggucauucccaaa

SEQ ID NO: 321334 - RNA, 19 nt, Homo sapiens
  misc_RNA (1)...(19): siRNA sense strand
ggaggacuucccagcauca

SEQ ID NO: 321335 - RNA, 19 nt, Homo sapiens
  misc_RNA (1)...(19): siRNA sense strand
gaacccagucccauacacu

SEQ ID NO: 321336 - RNA, 19 nt, Homo sapiens
  misc_RNA (1)...(19): siRNA sense strand
gagcugagugagaaauaca

SEQ ID NO: 321337 - RNA, 19 nt, Homo sapiens
  misc_RNA (1)...(19): siRNA sense strand
ugauugagaagaacaagau

SEQ ID NO: 321338 - RNA, 19 nt, Homo sapiens
  misc_RNA (1)...(19): siRNA sense strand
gaugagugacggcaagaag

SEQ ID NO: 321339 - RNA, 19 nt, Homo sapiens
  misc_RNA (1)...(19): siRNA sense strand
gagcuuaaacauccugacu

SEQ ID NO: 321340 - RNA, 19 nt, Homo sapiens
  misc_RNA (1)...(19): siRNA sense strand
uacggucacuuucuacaag

SEQ ID NO: 321341 - RNA, 19 nt, Homo sapiens
  misc_RNA (1)...(19): siRNA sense strand
caagugugaaggagacuca

SEQ ID NO: 321342 - RNA, 19 nt, Homo sapiens
  misc_RNA (1)...(19): siRNA sense strand
uugagaacccagucccaua

SEQ ID NO: 321343 - RNA, 19 nt, Homo sapiens
  misc_RNA (1)...(19): siRNA sense strand
gggccgagcaauaccugaa

SEQ ID NO: 321344 - RNA, 19 nt, Homo sapiens
  misc_RNA (1)...(19): siRNA sense strand
gugaaggagacucagaaga

SEQ ID NO: 321345 - RNA, 19 nt, Homo sapiens
  misc_RNA (1)...(19): siRNA sense strand
ggcaagauaaccucucaag

SEQ ID NO: 321346 - RNA, 19 nt, Homo sapiens
  misc_RNA (1)...(19): siRNA sense strand
gauacggucacuuucuaca

SEQ ID NO: 321347 - RNA, 19 nt, Homo sapiens
  misc_RNA (1)...(19): siRNA sense strand
ugagugacggcaagaagga

SEQ ID NO: 321348 - RNA, 19 nt, Homo sapiens
  misc_RNA (1)...(19): siRNA sense strand
ugagaagcaggaugaguuc

SEQ ID NO: 321349 - RNA, 19 nt, Homo sapiens
  misc_RNA (1)...(19): siRNA sense strand
agagagcuacccagucuuc

SEQ ID NO: 321350 - RNA, 19 nt, Homo sapiens
  misc_RNA (1)...(19): siRNA sense strand
ccgagaaagaggagcugua

SEQ ID NO: 321351 - RNA, 19 nt, Homo sapiens
  misc_RNA (1)...(19): siRNA sense strand
agagcuacccagucuucua

SEQ ID NO: 321352 - RNA, 19 nt, Homo sapiens
  misc_RNA (1)...(19): siRNA sense strand
agaagcaggaugaguucaa

SEQ ID NO: 321353 - RNA, 19 nt, Homo sapiens
  misc_RNA (1)...(19): siRNA sense strand
ugaaguucgacacccagua

SEQ ID NO: 321354 - RNA, 19 nt, Homo sapiens
  misc_RNA (1)...(19): siRNA sense strand
gagaacccagucccauaca

SEQ ID NO: 321355 - RNA, 19 nt, Homo sapiens
  misc_RNA (1)...(19): siRNA sense strand
gaagacagcuuggaacuau

SEQ ID NO: 321356 - RNA, 19 nt, Homo sapiens
  misc_RNA (1)...(19): siRNA sense strand
gaauggagcugguuuguca

SEQ ID NO: 321357 - RNA, 19 nt, Homo sapiens
  misc_RNA (1)...(19): siRNA sense strand
uaaagaagcucgagcauuc

SEQ ID NO: 321358 - RNA, 19 nt, Homo sapiens
  misc_RNA (1)...(19): siRNA sense strand
gguaagaccuggaagauuc

SEQ ID NO: 321359 - RNA, 19 nt, Homo sapiens
  misc_RNA (1)...(19): siRNA sense strand
guaccacacucuagguuua

SEQ ID NO: 321360 - RNA, 19 nt, Homo sapiens
  misc_RNA (1)...(19): siRNA sense strand
gaacuugucuaggauggua

SEQ ID NO: 321361 - RNA, 19 nt, Homo sapiens
  misc_RNA (1)...(19): siRNA sense strand
uagcaaagauguugaccua

SEQ ID NO: 321362 - RNA, 19 nt, Homo sapiens
  misc_RNA (1)...(19): siRNA sense strand
ugaagaaacugaucacaug

SEQ ID NO: 321363 - RNA, 19 nt, Homo sapiens
  misc_RNA (1)...(19): siRNA sense strand
gccuaaagauugagaguaa

SEQ ID NO: 321364 - RNA, 19 nt, Homo sapiens
  misc_RNA (1)...(19): siRNA sense strand
gggaaaagaugauguaaaa

SEQ ID NO: 321365 - RNA, 19 nt, Homo sapiens
  misc_RNA (1)...(19): siRNA sense strand
caagagacuuuacugcauu

SEQ ID NO: 321366 - RNA, 19 nt, Homo sapiens
  misc_RNA (1)...(19): siRNA sense strand
aauggaaucuggccuauuu

SEQ ID NO: 321367 - RNA, 19 nt, Homo sapiens
  misc_RNA (1)...(19): siRNA sense strand
gaagagugcaaaggaauua

SEQ ID NO: 321368 - RNA, 19 nt, Homo sapiens
  misc_RNA (1)...(19): siRNA sense strand
gcugacaaguucugcauuu

SEQ ID NO: 321369 - RNA, 19 nt, Homo sapiens
  misc_RNA (1)...(19): siRNA sense strand
guaccaguguuucuuauug

SEQ ID NO: 321370 - RNA, 19 nt, Homo sapiens
  misc_RNA (1)...(19): siRNA sense strand
gaaauuuguucccuuccaa

SEQ ID NO: 321371 - RNA, 19 nt, Homo sapiens
  misc_RNA (1)...(19): siRNA sense strand
ggacugaguuuguagacau

SEQ ID NO: 321372 - RNA, 19 nt, Homo sapiens
  misc_RNA (1)...(19): siRNA sense strand
gcaaguuacuguugaugga

SEQ ID NO: 321373 - RNA, 19 nt, Homo sapiens
  misc_RNA (1)...(19): siRNA sense strand
ggauuucagugccuaaaga

SEQ ID NO: 321374 - RNA, 19 nt, Homo sapiens
  misc_RNA (1)...(19): siRNA sense strand
gaaucuggccuauuucuga

SEQ ID NO: 321375 - RNA, 19 nt, Homo sapiens
  misc_RNA (1)...(19): siRNA sense strand
gagcauucuuucagcagua

SEQ ID NO: 321376 - RNA, 19 nt, Homo sapiens
  misc_RNA (1)...(19): siRNA sense strand
gcaacauuauuccuuauag

SEQ ID NO: 321377 - RNA, 19 nt, Homo sapiens
  misc_RNA (1)...(19): siRNA sense strand
gaagaaguaccacacucua

SEQ ID NO: 321378 - RNA, 19 nt, Homo sapiens
  misc_RNA (1)...(19): siRNA sense strand
gagguuauccaguuauauu

SEQ ID NO: 321379 - RNA, 19 nt, Homo sapiens
  misc_RNA (1)...(19): siRNA sense strand
gcacugcaguaucaccuau

SEQ ID NO: 321380 - RNA, 19 nt, Homo sapiens
  misc_RNA (1)...(19): siRNA sense strand
gaagccaacuaugguaaga

SEQ ID NO: 321381 - RNA, 19 nt, Homo sapiens
  misc_RNA (1)...(19): siRNA sense strand
agcaguaccuugaugauaa

SEQ ID NO: 321382 - RNA, 19 nt, Homo sapiens
  misc_RNA (1)...(19): siRNA sense strand
gaagcgcucuccucccaau

SEQ ID NO: 321383 - RNA, 19 nt, Homo sapiens
  misc_RNA (1)...(19): siRNA sense strand
gauguugaccuaggaauuu

SEQ ID NO: 321384 - RNA, 19 nt, Homo sapiens
  misc_RNA (1)...(19): siRNA sense strand
caaagauguugaccuagga

SEQ ID NO: 321385 - RNA, 19 nt, Homo sapiens
  misc_RNA (1)...(19): siRNA sense strand
acacaaauuugggaaggua

SEQ ID NO: 321386 - RNA, 19 nt, Homo sapiens
  misc_RNA (1)...(19): siRNA sense strand
ccaagagacuuuacugcau

SEQ ID NO: 321387 - RNA, 19 nt, Homo sapiens
  misc_RNA (1)...(19): siRNA sense strand
gugaaacccucgaauacau

SEQ ID NO: 321388 - RNA, 19 nt, Homo sapiens
  misc_RNA (1)...(19): siRNA sense strand
ggaaggcugguuucggaua

SEQ ID NO: 321389 - RNA, 19 nt, Homo sapiens
  misc_RNA (1)...(19): siRNA sense strand
caaaggauccaaugcacuu

SEQ ID NO: 321390 - RNA, 19 nt, Homo sapiens
  misc_RNA (1)...(19): siRNA sense strand
gaaggcugguuucggauag

SEQ ID NO: 321391 - RNA, 19 nt, Homo sapiens
  misc_RNA (1)...(19): siRNA sense strand
gcuguggccuuucggaaga

SEQ ID NO: 321392 - RNA, 19 nt, Homo sapiens
  misc_RNA (1)...(19): siRNA sense strand
aaacugaucacauguggaa

SEQ ID NO: 321393 - RNA, 19 nt, Homo sapiens
  misc_RNA (1)...(19): siRNA sense strand
ggaagagugcaaaggaauu

SEQ ID NO: 321394 - RNA, 19 nt, Homo sapiens
  misc_RNA (1)...(19): siRNA sense strand
cuacuacaagcacuauuua

SEQ ID NO: 321395 - RNA, 19 nt, Homo sapiens
  misc_RNA (1)...(19): siRNA sense strand
caguggaacuugucuagga

SEQ ID NO: 321396 - RNA, 19 nt, Homo sapiens
  misc_RNA (1)...(19): siRNA sense strand
cacggccacuugagacuua

SEQ ID NO: 321397 - RNA, 19 nt, Homo sapiens
  misc_RNA (1)...(19): siRNA sense strand
caaaggaagccgaauugga

SEQ ID NO: 321398 - RNA, 19 nt, Homo sapiens
  misc_RNA (1)...(19): siRNA sense strand
gugcuggacugaguuugua

SEQ ID NO: 321399 - RNA, 19 nt, Homo sapiens
  misc_RNA (1)...(19): siRNA sense strand
ucggauagcugagaauaug

SEQ ID NO: 321400 - RNA, 19 nt, Homo sapiens
  misc_RNA (1)...(19): siRNA sense strand
gaaugaggaaggcugguuu

SEQ ID NO: 321401 - RNA, 19 nt, Homo sapiens
  misc_RNA (1)...(19): siRNA sense strand
cgaauuggauuugauagca

SEQ ID NO: 321402 - RNA, 19 nt, Homo sapiens
  misc_RNA (1)...(19): siRNA sense strand
gagaauaugggauuucagu

SEQ ID NO: 321403 - RNA, 19 nt, Homo sapiens
  misc_RNA (1)...(19): siRNA sense strand
caaauugggaguaccauuc

SEQ ID NO: 321404 - RNA, 19 nt, Homo sapiens
  misc_RNA (1)...(19): siRNA sense strand
gaguguagguauaaagaag

SEQ ID NO: 321405 - RNA, 19 nt, Homo sapiens
  misc_RNA (1)...(19): siRNA sense strand
aagaacacauugacaggaa

SEQ ID NO: 321406 - RNA, 19 nt, Homo sapiens
  misc_RNA (1)...(19): siRNA sense strand
cuacaagcacuauuuauca

SEQ ID NO: 321407 - RNA, 19 nt, Homo sapiens
  misc_RNA (1)...(19): siRNA sense strand
aaaggaagccgaauuggau

SEQ ID NO: 321408 - RNA, 19 nt, Homo sapiens
  misc_RNA (1)...(19): siRNA sense strand
gacaaguucugcauuucug

SEQ ID NO: 321409 - RNA, 19 nt, Homo sapiens
  misc_RNA (1)...(19): siRNA sense strand
gaaguucucauuccaaagg

SEQ ID NO: 321410 - RNA, 19 nt, Homo sapiens
  misc_RNA (1)...(19): siRNA sense strand
caagcacuauuuaucaaca

SEQ ID NO: 321411 - RNA, 19 nt, Homo sapiens
  misc_RNA (1)...(19): siRNA sense strand
caaagaauggagcugguuu

SEQ ID NO: 321412 - RNA, 19 nt, Homo sapiens
  misc_RNA (1)...(19): siRNA sense strand
gaagccgaauuggauuuga

SEQ ID NO: 321413 - RNA, 19 nt, Homo sapiens
  misc_RNA (1)...(19): siRNA sense strand
ccaaugcacuuuguagaag

SEQ ID NO: 321414 - RNA, 19 nt, Homo sapiens
  misc_RNA (1)...(19): siRNA sense strand
gaagaaacugaucacaugu

SEQ ID NO: 321415 - RNA, 19 nt, Homo sapiens
  misc_RNA (1)...(19): siRNA sense strand
ggacuggaaguucucauuc

SEQ ID NO: 321416 - RNA, 19 nt, Homo sapiens
  misc_RNA (1)...(19): siRNA sense strand
gguagaagacagcuuggaa

SEQ ID NO: 321417 - RNA, 19 nt, Homo sapiens
  misc_RNA (1)...(19): siRNA sense strand
caaugcacuuuguagaaga

SEQ ID NO: 321418 - RNA, 19 nt, Homo sapiens
  misc_RNA (1)...(19): siRNA sense strand
uaucaccuauggaagaaug

SEQ ID NO: 321419 - RNA, 19 nt, Homo sapiens
  misc_RNA (1)...(19): siRNA sense strand
gaaacccucgaauacauug

SEQ ID NO: 321420 - RNA, 19 nt, Homo sapiens
  misc_RNA (1)...(19): siRNA sense strand
uguggaagcuguggccuuu

SEQ ID NO: 321421 - RNA, 19 nt, Homo sapiens
  misc_RNA (1)...(19): siRNA sense strand
gaacacauugacaggaaau

SEQ ID NO: 321422 - RNA, 19 nt, Homo sapiens
  misc_RNA (1)...(19): siRNA sense strand
ccagaguuacagcaaguua

SEQ ID NO: 321423 - RNA, 19 nt, Homo sapiens
  misc_RNA (1)...(19): siRNA sense strand
caaaggaauuacugcaacu

SEQ ID NO: 321424 - RNA, 19 nt, Homo sapiens
  misc_RNA (1)...(19): siRNA sense strand
acaguggcgugcaguuaaa

SEQ ID NO: 321425 - RNA, 19 nt, Homo sapiens
  misc_RNA (1)...(19): siRNA sense strand
ggacuuccgcucaaacaca

SEQ ID NO: 321426 - RNA, 19 nt, Homo sapiens
  misc_RNA (1)...(19): siRNA sense strand
ccacuugagacuuaaagaa

SEQ ID NO: 321427 - RNA, 19 nt, Homo sapiens
  misc_RNA (1)...(19): siRNA sense strand
uaccaguguuucuuauuga

SEQ ID NO: 321428 - RNA, 19 nt, Homo sapiens
  misc_RNA (1)...(19): siRNA sense strand
cagcaguaccuugaugaua

SEQ ID NO: 321429 - RNA, 19 nt, Homo sapiens
  misc_RNA (1)...(19): siRNA sense strand
gcugagcaguggaacuugu

SEQ ID NO: 321430 - RNA, 19 nt, Homo sapiens
  misc_RNA (1)...(19): siRNA sense strand
ggaauuacugcaacuagca

SEQ ID NO: 321431 - RNA, 19 nt, Homo sapiens
  misc_RNA (1)...(19): siRNA sense strand
gcaguaccuugaugauaac

SEQ ID NO: 321432 - RNA, 19 nt, Homo sapiens
  misc_RNA (1)...(19): siRNA sense strand
ccaauggaaucuggccuau

SEQ ID NO: 321433 - RNA, 19 nt, Homo sapiens
  misc_RNA (1)...(19): siRNA sense strand
ggccagaguuacagcaagu

SEQ ID NO: 321434 - RNA, 19 nt, Homo sapiens
  misc_RNA (1)...(19): siRNA sense strand
ccugugaaacccucgaaua

SEQ ID NO: 321435 - RNA, 19 nt, Homo sapiens
  misc_RNA (1)...(19): siRNA sense strand
acacugugcuggacugagu

SEQ ID NO: 321436 - RNA, 19 nt, Homo sapiens
  misc_RNA (1)...(19): siRNA sense strand
gacuuccgcucaaacacaa

SEQ ID NO: 321437 - RNA, 19 nt, Homo sapiens
  misc_RNA (1)...(19): siRNA sense strand
aagagacuuuacugcauuu

SEQ ID NO: 321438 - RNA, 19 nt, Homo sapiens
  misc_RNA (1)...(19): siRNA sense strand
acacaguggcgugcaguua

SEQ ID NO: 321439 - RNA, 19 nt, Homo sapiens
  misc_RNA (1)...(19): siRNA sense strand
caacauuauuccuuauagc

SEQ ID NO: 321440 - RNA, 19 nt, Homo sapiens
  misc_RNA (1)...(19): siRNA sense strand
gaagcucgagcauucuuuc

SEQ ID NO: 321441 - RNA, 19 nt, Homo sapiens
  misc_RNA (1)...(19): siRNA sense strand
ugagaggaguggcaacuac

SEQ ID NO: 321442 - RNA, 19 nt, Homo sapiens
  misc_RNA (1)...(19): siRNA sense strand
uagcugagaauaugggauu

SEQ ID NO: 321443 - RNA, 19 nt, Homo sapiens
  misc_RNA (1)...(19): siRNA sense strand
cugcauuucugcuguuuca

SEQ ID NO: 321444 - RNA, 19 nt, Homo sapiens
  misc_RNA (1)...(19): siRNA sense strand
ggaagccgaauuggauuug

SEQ ID NO: 321445 - RNA, 19 nt, Homo sapiens
  misc_RNA (1)...(19): siRNA sense strand
gaugguaucgacaaugcaa

SEQ ID NO: 321446 - RNA, 19 nt, Homo sapiens
  misc_RNA (1)...(19): siRNA sense strand
guaccuugaugauaacacu

SEQ ID NO: 321447 - RNA, 19 nt, Homo sapiens
  misc_RNA (1)...(19): siRNA sense strand
acacauugacaggaaauuu

SEQ ID NO: 321448 - RNA, 19 nt, Homo sapiens
  misc_RNA (1)...(19): siRNA sense strand
cacaguggcgugcaguuaa

SEQ ID NO: 321449 - RNA, 19 nt, Homo sapiens
  misc_RNA (1)...(19): siRNA sense strand
cauuucugcuguuucaguu

SEQ ID NO: 321450 - RNA, 19 nt, Homo sapiens
  misc_RNA (1)...(19): siRNA sense strand
gguuauccaguuauauuga

SEQ ID NO: 321451 - RNA, 19 nt, Homo sapiens
  misc_RNA (1)...(19): siRNA sense strand
uguuucaguuguacuacua

SEQ ID NO: 321452 - RNA, 19 nt, Homo sapiens
  misc_RNA (1)...(19): siRNA sense strand
ucggaagagugcaaaggaa

SEQ ID NO: 321453 - RNA, 19 nt, Homo sapiens
  misc_RNA (1)...(19): siRNA sense strand
gaaguaccacacucuaggu

SEQ ID NO: 321454 - RNA, 19 nt, Homo sapiens
  misc_RNA (1)...(19): siRNA sense strand
gauccaaugcacuuuguag

SEQ ID NO: 321455 - RNA, 19 nt, Homo sapiens
  misc_RNA (1)...(19): siRNA sense strand
gaaggaacgucuggaguuu

SEQ ID NO: 321456 - RNA, 19 nt, Homo sapiens
  misc_RNA (1)...(19): siRNA sense strand
ggaacgaaauaaacuagca

SEQ ID NO: 321457 - RNA, 19 nt, Homo sapiens
  misc_RNA (1)...(19): siRNA sense strand
ccugacggcuucucucuuu

SEQ ID NO: 321458 - RNA, 19 nt, Homo sapiens
  misc_RNA (1)...(19): siRNA sense strand
cagaucaguuggaggaaga

SEQ ID NO: 321459 - RNA, 19 nt, Homo sapiens
  misc_RNA (1)...(19): siRNA sense strand
uggcggaggugagagauuu

SEQ ID NO: 321460 - RNA, 19 nt, Homo sapiens
  misc_RNA (1)...(19): siRNA sense strand
gcucagcaccggcuaagga

SEQ ID NO: 321461 - RNA, 19 nt, Homo sapiens
  misc_RNA (1)...(19): siRNA sense strand
cggcuucucucuuuacaca

SEQ ID NO: 321462 - RNA, 19 nt, Homo sapiens
  misc_RNA (1)...(19): siRNA sense strand
agaaggaacgucuggaguu

SEQ ID NO: 321463 - RNA, 19 nt, Homo sapiens
  misc_RNA (1)...(19): siRNA sense strand
guacacuucuucguuuguc

SEQ ID NO: 321464 - RNA, 19 nt, Homo sapiens
  misc_RNA (1)...(19): siRNA sense strand
gcuucucucuuuacacaca

SEQ ID NO: 321465 - RNA, 19 nt, Homo sapiens
  misc_RNA (1)...(19): siRNA sense strand
ugucuucgguggacuccuu

SEQ ID NO: 321466 - RNA, 19 nt, Homo sapiens
  misc_RNA (1)...(19): siRNA sense strand
aggaacgucuggaguuugu

SEQ ID NO: 321467 - RNA, 19 nt, Homo sapiens
  misc_RNA (1)...(19): siRNA sense strand
caacccacccucaucucuu

SEQ ID NO: 321468 - RNA, 19 nt, Homo sapiens
  misc_RNA (1)...(19): siRNA sense strand
cagcaccggcuaaggaaga

SEQ ID NO: 321469 - RNA, 19 nt, Homo sapiens
  misc_RNA (1)...(19): siRNA sense strand
guuaacccuucguacacuu

SEQ ID NO: 321470 - RNA, 19 nt, Homo sapiens
  misc_RNA (1)...(19): siRNA sense strand
uucguacacuucuucguuu

SEQ ID NO: 321471 - RNA, 19 nt, Homo sapiens
  misc_RNA (1)...(19): siRNA sense strand
gcaacccacccucaucucu

SEQ ID NO: 321472 - RNA, 19 nt, Homo sapiens
  misc_RNA (1)...(19): siRNA sense strand
cugacggcuucucucuuua

SEQ ID NO: 321473 - RNA, 19 nt, Homo sapiens
  misc_RNA (1)...(19): siRNA sense strand
guuguuaacccuucguaca

SEQ ID NO: 321474 - RNA, 19 nt, Homo sapiens
  misc_RNA (1)...(19): siRNA sense strand
ccucugccgagucucaaua

SEQ ID NO: 321475 - RNA, 19 nt, Homo sapiens
  misc_RNA (1)...(19): siRNA sense strand
gacggcuucucucuuuaca

SEQ ID NO: 321476 - RNA, 19 nt, Homo sapiens
  misc_RNA (1)...(19): siRNA sense strand
aacccacccucaucucuuc

SEQ ID NO: 321477 - RNA, 19 nt, Homo sapiens
  misc_RNA (1)...(19): siRNA sense strand
cuucguacacuucuucguu

SEQ ID NO: 321478 - RNA, 19 nt, Homo sapiens
  misc_RNA (1)...(19): siRNA sense strand
caaaccgggcugcaagauc

SEQ ID NO: 321479 - RNA, 19 nt, Homo sapiens
  misc_RNA (1)...(19): siRNA sense strand
gagaucgccgagcuccaaa

SEQ ID NO: 321480 - RNA, 19 nt, Homo sapiens
  misc_RNA (1)...(19): siRNA sense strand
gagcacuucucgcaguuug

SEQ ID NO: 321481 - RNA, 19 nt, Homo sapiens
  misc_RNA (1)...(19): siRNA sense strand
gcaguaauaguggaccuua

SEQ ID NO: 321482 - RNA, 19 nt, Homo sapiens
  misc_RNA (1)...(19): siRNA sense strand
gcaacacuguggagcugaa

SEQ ID NO: 321483 - RNA, 19 nt, Homo sapiens
  misc_RNA (1)...(19): siRNA sense strand
agaauucucaguuguguaa

SEQ ID NO: 321484 - RNA, 19 nt, Homo sapiens
  misc_RNA (1)...(19): siRNA sense strand
ggauucggcuucguguauu

SEQ ID NO: 321485 - RNA, 19 nt, Homo sapiens
  misc_RNA (1)...(19): siRNA sense strand
gaaaaggccgagauuauug

SEQ ID NO: 321486 - RNA, 19 nt, Homo sapiens
  misc_RNA (1)...(19): siRNA sense strand
gauucggcuucguguauuu

SEQ ID NO: 321487 - RNA, 19 nt, Homo sapiens
  misc_RNA (1)...(19): siRNA sense strand
ggaaaaggccgagauuauu

SEQ ID NO: 321488 - RNA, 19 nt, Homo sapiens
  misc_RNA (1)...(19): siRNA sense strand
cagcaucaguccuccuaug

SEQ ID NO: 321489 - RNA, 19 nt, Homo sapiens
  misc_RNA (1)...(19): siRNA sense strand
gacaagcaguccggcaaga

SEQ ID NO: 321490 - RNA, 19 nt, Homo sapiens
  misc_RNA (1)...(19): siRNA sense strand
ucaaugugcagacgaguga

SEQ ID NO: 321491 - RNA, 19 nt, Homo sapiens
  misc_RNA (1)...(19): siRNA sense strand
ggucaaguuccauccgauu

SEQ ID NO: 321492 - RNA, 19 nt, Homo sapiens
  misc_RNA (1)...(19): siRNA sense strand
caacagcuacggugguuac

SEQ ID NO: 321493 - RNA, 19 nt, Homo sapiens
  misc_RNA (1)...(19): siRNA sense strand
uacaacagcuacggugguu

SEQ ID NO: 321494 - RNA, 19 nt, Homo sapiens
  misc_RNA (1)...(19): siRNA sense strand
ccaaggaggauaucuacuc

SEQ ID NO: 321495 - RNA, 19 nt, Homo sapiens
  misc_RNA (1)...(19): siRNA sense strand
gcguggaggugaagaaagc

SEQ ID NO: 321496 - RNA, 19 nt, Homo sapiens
  misc_RNA (1)...(19): siRNA sense strand
cuucguguauuuccagaau

SEQ ID NO: 321497 - RNA, 19 nt, Homo sapiens
  misc_RNA (1)...(19): siRNA sense strand
gcagcuacagccagcauca

SEQ ID NO: 321498 - RNA, 19 nt, Homo sapiens
  misc_RNA (1)...(19): siRNA sense strand
gcuuuggcuucgugaccua

SEQ ID NO: 321499 - RNA, 19 nt, Homo sapiens
  misc_RNA (1)...(19): siRNA sense strand
gcaguuuggcaccguggaa

SEQ ID NO: 321500 - RNA, 19 nt, Homo sapiens
  misc_RNA (1)...(19): siRNA sense strand
cgagauuauugccgacaag

SEQ ID NO: 321501 - RNA, 19 nt, Homo sapiens
  misc_RNA (1)...(19): siRNA sense strand
gaccagaacggccuuucca

SEQ ID NO: 321502 - RNA, 19 nt, Homo sapiens
  misc_RNA (1)...(19): siRNA sense strand
ucguguauuuccagaauca

SEQ ID NO: 321503 - RNA, 19 nt, Homo sapiens
  misc_RNA (1)...(19): siRNA sense strand
uggauucggcuucguguau

SEQ ID NO: 321504 - RNA, 19 nt, Homo sapiens
  misc_RNA (1)...(19): siRNA sense strand
gccagcaucaguccuccua

SEQ ID NO: 321505 - RNA, 19 nt, Homo sapiens
  misc_RNA (1)...(19): siRNA sense strand
ucacgacgcggcagacaag

SEQ ID NO: 321506 - RNA, 19 nt, Homo sapiens
  misc_RNA (1)...(19): siRNA sense strand
uaauaguggaccuuacaga

SEQ ID NO: 321507 - RNA, 19 nt, Homo sapiens
  misc_RNA (1)...(19): siRNA sense strand
caagcaguccggcaagaag

SEQ ID NO: 321508 - RNA, 19 nt, Homo sapiens
  misc_RNA (1)...(19): siRNA sense strand
ucaaguuccauccgauuca

SEQ ID NO: 321509 - RNA, 19 nt, Homo sapiens
  misc_RNA (1)...(19): siRNA sense strand
ggcggucgcaguaauagug

SEQ ID NO: 321510 - RNA, 19 nt, Homo sapiens
  misc_RNA (1)...(19): siRNA sense strand
ucaguuguguaagcuguuc

SEQ ID NO: 321511 - RNA, 19 nt, Homo sapiens
  misc_RNA (1)...(19): siRNA sense strand
ccgagauuauugccgacaa

SEQ ID NO: 321512 - RNA, 19 nt, Homo sapiens
  misc_RNA (1)...(19): siRNA sense strand
gaggagaugcuggauguua

SEQ ID NO: 321513 - RNA, 19 nt, Homo sapiens
  misc_RNA (1)...(19): siRNA sense strand
ggaggaagcaguguuucua

SEQ ID NO: 321514 - RNA, 19 nt, Homo sapiens
  misc_RNA (1)...(19): siRNA sense strand
ucuuugaacugaucuuuga

SEQ ID NO: 321515 - RNA, 19 nt, Homo sapiens
  misc_RNA (1)...(19): siRNA sense strand
ccgaggagaugcuggaugu

SEQ ID NO: 321516 - RNA, 19 nt, Homo sapiens
  misc_RNA (1)...(19): siRNA sense strand
ggagaugcuggauguuaaa

SEQ ID NO: 321517 - RNA, 19 nt, Homo sapiens
  misc_RNA (1)...(19): siRNA sense strand
aggagaugcuggauguuaa

SEQ ID NO: 321518 - RNA, 19 nt, Homo sapiens
  misc_RNA (1)...(19): siRNA sense strand
gaagcugguguucuuugaa

SEQ ID NO: 321519 - RNA, 19 nt, Homo sapiens
  misc_RNA (1)...(19): siRNA sense strand
gaugcuggauguuaaaaug

SEQ ID NO: 321520 - RNA, 19 nt, Homo sapiens
  misc_RNA (1)...(19): siRNA sense strand
ugaguucacguuccuguug

SEQ ID NO: 321521 - RNA, 19 nt, Homo sapiens
  misc_RNA (1)...(19): siRNA sense strand
ggaagcaguguuucuacca

SEQ ID NO: 321522 - RNA, 19 nt, Homo sapiens
  misc_RNA (1)...(19): siRNA sense strand
aaauggaggacaucaagga

SEQ ID NO: 321523 - RNA, 19 nt, Homo sapiens
  misc_RNA (1)...(19): siRNA sense strand
ggacuggacguggacuuca

SEQ ID NO: 321524 - RNA, 19 nt, Homo sapiens
  misc_RNA (1)...(19): siRNA sense strand
uugacagccuccaggauga

SEQ ID NO: 321525 - RNA, 19 nt, Homo sapiens
  misc_RNA (1)...(19): siRNA sense strand
ugacgaggaggucgaagga

SEQ ID NO: 321526 - RNA, 19 nt, Homo sapiens
  misc_RNA (1)...(19): siRNA sense strand
gaggaagcaguguuucuac

SEQ ID NO: 321527 - RNA, 19 nt, Homo sapiens
  misc_RNA (1)...(19): siRNA sense strand
gacaucaaggaguccauug

SEQ ID NO: 321528 - RNA, 19 nt, Homo sapiens
  misc_RNA (1)...(19): siRNA sense strand
gcacuggucuucacaacuc

SEQ ID NO: 321529 - RNA, 19 nt, Homo sapiens
  misc_RNA (1)...(19): siRNA sense strand
uaacacaucuaugaagguu

SEQ ID NO: 321530 - RNA, 19 nt, Homo sapiens
  misc_RNA (1)...(19): siRNA sense strand
acacaucuaugaagguuau

SEQ ID NO: 321531 - RNA, 19 nt, Homo sapiens
  misc_RNA (1)...(19): siRNA sense strand
gaucuggcgcuucuacuuu

SEQ ID NO: 321532 - RNA, 19 nt, Homo sapiens
  misc_RNA (1)...(19): siRNA sense strand
ggaaagaagcucaguuugc

SEQ ID NO: 321533 - RNA, 19 nt, Homo sapiens
  misc_RNA (1)...(19): siRNA sense strand
gggcuucuuugaccucauu

SEQ ID NO: 321534 - RNA, 19 nt, Homo sapiens
  misc_RNA (1)...(19): siRNA sense strand
caaaaguacucaagggaaa

SEQ ID NO: 321535 - RNA, 19 nt, Homo sapiens
  misc_RNA (1)...(19): siRNA sense strand
uaucgugcuuuguaucuug

SEQ ID NO: 321536 - RNA, 19 nt, Homo sapiens
  misc_RNA (1)...(19): siRNA sense strand
uaccugaucuaccugaaau

SEQ ID NO: 321537 - RNA, 19 nt, Homo sapiens
  misc_RNA (1)...(19): siRNA sense strand
cacgauuucucuccucuug

SEQ ID NO: 321538 - RNA, 19 nt, Homo sapiens
  misc_RNA (1)...(19): siRNA sense strand
ccuauacugugacuucuuc

SEQ ID NO: 321539 - RNA, 19 nt, Homo sapiens
  misc_RNA (1)...(19): siRNA sense strand
gagauccucuggaccuucu

SEQ ID NO: 321540 - RNA, 19 nt, Homo sapiens
  misc_RNA (1)...(19): siRNA sense strand
gggccucuaucgugcuuug

SEQ ID NO: 321541 - RNA, 19 nt, Homo sapiens
  misc_RNA (1)...(19): siRNA sense strand
gcuccuaugccacagugua

SEQ ID NO: 321542 - RNA, 19 nt, Homo sapiens
  misc_RNA (1)...(19): siRNA sense strand
uaaggcaaccuacgaugga

SEQ ID NO: 321543 - RNA, 19 nt, Homo sapiens
  misc_RNA (1)...(19): siRNA sense strand
gggaaagaagcucaguuug

SEQ ID NO: 321544 - RNA, 19 nt, Homo sapiens
  misc_RNA (1)...(19): siRNA sense strand
ugugggaggccucucauuu

SEQ ID NO: 321545 - RNA, 19 nt, Homo sapiens
  misc_RNA (1)...(19): siRNA sense strand
agaccauccuauacuguga

SEQ ID NO: 321546 - RNA, 19 nt, Homo sapiens
  misc_RNA (1)...(19): siRNA sense strand
guauaacacaucuaugaag

SEQ ID NO: 321547 - RNA, 19 nt, Homo sapiens
  misc_RNA (1)...(19): siRNA sense strand
agggaaagaagcucaguuu

SEQ ID NO: 321548 - RNA, 19 nt, Homo sapiens
  misc_RNA (1)...(19): siRNA sense strand
ggaucuggcgcuucuacuu

SEQ ID NO: 321549 - RNA, 19 nt, Homo sapiens
  misc_RNA (1)...(19): siRNA sense strand
ccucuaucgugcuuuguau

SEQ ID NO: 321550 - RNA, 19 nt, Homo sapiens
  misc_RNA (1)...(19): siRNA sense strand
cgauuucucuccucuugag

SEQ ID NO: 321551 - RNA, 19 nt, Homo sapiens
  misc_RNA (1)...(19): siRNA sense strand
guaccugaucuaccugaaa

SEQ ID NO: 321552 - RNA, 19 nt, Homo sapiens
  misc_RNA (1)...(19): siRNA sense strand
cuacuuugagggcuucuuu

SEQ ID NO: 321553 - RNA, 19 nt, Homo sapiens
  misc_RNA (1)...(19): siRNA sense strand
uaccuugccugcuccuaug

SEQ ID NO: 321554 - RNA, 19 nt, Homo sapiens
  misc_RNA (1)...(19): siRNA sense strand
cauccuauacugugacuuc

SEQ ID NO: 321555 - RNA, 19 nt, Homo sapiens
  misc_RNA (1)...(19): siRNA sense strand
caaccuacgauggaaauca

SEQ ID NO: 321556 - RNA, 19 nt, Homo sapiens
  misc_RNA (1)...(19): siRNA sense strand
ugaaauuuaaggcaaccua

SEQ ID NO: 321557 - RNA, 19 nt, Homo sapiens
  misc_RNA (1)...(19): siRNA sense strand
ccugaucuaccugaaauuu

SEQ ID NO: 321558 - RNA, 19 nt, Homo sapiens
  misc_RNA (1)...(19): siRNA sense strand
cugaucuaccugaaauuua

SEQ ID NO: 321559 - RNA, 19 nt, Homo sapiens
  misc_RNA (1)...(19): siRNA sense strand
cuuuguaucuugucaacug

SEQ ID NO: 321560 - RNA, 19 nt, Homo sapiens
  misc_RNA (1)...(19): siRNA sense strand
caucuaugaagguuaucua

SEQ ID NO: 321561 - RNA, 19 nt, Homo sapiens
  misc_RNA (1)...(19): siRNA sense strand
gcucaguuugccagcauaa

SEQ ID NO: 321562 - RNA, 19 nt, Homo sapiens
  misc_RNA (1)...(19): siRNA sense strand
gugacuucuucuacuugua

SEQ ID NO: 321563 - RNA, 19 nt, Homo sapiens
  misc_RNA (1)...(19): siRNA sense strand
ccacaguguaccugaucua

SEQ ID NO: 321564 - RNA, 19 nt, Homo sapiens
  misc_RNA (1)...(19): siRNA sense strand
uacgauggaaaucaugaua

SEQ ID NO: 321565 - RNA, 19 nt, Homo sapiens
  misc_RNA (1)...(19): siRNA sense strand
gaccaucaccacccacuac

SEQ ID NO: 321566 - RNA, 19 nt, Homo sapiens
  misc_RNA (1)...(19): siRNA sense strand
caguguaccugaucuaccu

SEQ ID NO: 321567 - RNA, 19 nt, Homo sapiens
  misc_RNA (1)...(19): siRNA sense strand
acugugacuucuucuacuu

SEQ ID NO: 321568 - RNA, 19 nt, Homo sapiens
  misc_RNA (1)...(19): siRNA sense strand
aaccuacgauggaaaucau

SEQ ID NO: 321569 - RNA, 19 nt, Homo sapiens
  misc_RNA (1)...(19): siRNA sense strand
gaccauaacuacucacuac

SEQ ID NO: 321570 - RNA, 19 nt, Homo sapiens
  misc_RNA (1)...(19): siRNA sense strand
caugauauaugggaaauuc

SEQ ID NO: 321571 - RNA, 19 nt, Homo sapiens
  misc_RNA (1)...(19): siRNA sense strand
gaagagccagauccuguuu

SEQ ID NO: 321572 - RNA, 19 nt, Homo sapiens
  misc_RNA (1)...(19): siRNA sense strand
gguaccagacugagaauuu

SEQ ID NO: 321573 - RNA, 19 nt, Homo sapiens
  misc_RNA (1)...(19): siRNA sense strand
agucgugucuggaguagua

SEQ ID NO: 321574 - RNA, 19 nt, Homo sapiens
  misc_RNA (1)...(19): siRNA sense strand
gagauccucuggacuuucu

SEQ ID NO: 321575 - RNA, 19 nt, Homo sapiens
  misc_RNA (1)...(19): siRNA sense strand
guaccagacugagaauuuc

SEQ ID NO: 321576 - RNA, 19 nt, Homo sapiens
  misc_RNA (1)...(19): siRNA sense strand
uggagaggcugagaccaua

SEQ ID NO: 321577 - RNA, 19 nt, Homo sapiens
  misc_RNA (1)...(19): siRNA sense strand
ggaagagccagauccuguu

SEQ ID NO: 321578 - RNA, 19 nt, Homo sapiens
  misc_RNA (1)...(19): siRNA sense strand
caguguacaugauauaugg

SEQ ID NO: 321579 - RNA, 19 nt, Homo sapiens
  misc_RNA (1)...(19): siRNA sense strand
guacaaaccaucuucuacu

SEQ ID NO: 321580 - RNA, 19 nt, Homo sapiens
  misc_RNA (1)...(19): siRNA sense strand
guacaugauauaugggaaa

SEQ ID NO: 321581 - RNA, 19 nt, Homo sapiens
  misc_RNA (1)...(19): siRNA sense strand
ccaacuucaucuccaucua

SEQ ID NO: 321582 - RNA, 19 nt, Homo sapiens
  misc_RNA (1)...(19): siRNA sense strand
uaacuacucacuaccuguu

SEQ ID NO: 321583 - RNA, 19 nt, Homo sapiens
  misc_RNA (1)...(19): siRNA sense strand
ggagaggcugagaccauaa

SEQ ID NO: 321584 - RNA, 19 nt, Homo sapiens
  misc_RNA (1)...(19): siRNA sense strand
uacaaaccaucuucuacug

SEQ ID NO: 321585 - RNA, 19 nt, Homo sapiens
  misc_RNA (1)...(19): siRNA sense strand
ccuguuugcucucgucuuc

SEQ ID NO: 321586 - RNA, 19 nt, Homo sapiens
  misc_RNA (1)...(19): siRNA sense strand
ccucuggacuuucucuauc

SEQ ID NO: 321587 - RNA, 19 nt, Homo sapiens
  misc_RNA (1)...(19): siRNA sense strand
cuaucuaucuggaaucagu

SEQ ID NO: 321588 - RNA, 19 nt, Homo sapiens
  misc_RNA (1)...(19): siRNA sense strand
aaaccaucuucuacuguga

SEQ ID NO: 321589 - RNA, 19 nt, Homo sapiens
  misc_RNA (1)...(19): siRNA sense strand
ugacuucuucuacuuguau

SEQ ID NO: 321590 - RNA, 19 nt, Homo sapiens
  misc_RNA (1)...(19): siRNA sense strand
cuacaacacaguaaugaag

SEQ ID NO: 321591 - RNA, 19 nt, Homo sapiens
  misc_RNA (1)...(19): siRNA sense strand
ccaaauugcagucgugucu

SEQ ID NO: 321592 - RNA, 19 nt, Homo sapiens
  misc_RNA (1)...(19): siRNA sense strand
gcugagaccauaacuacuc

SEQ ID NO: 321593 - RNA, 19 nt, Homo sapiens
  misc_RNA (1)...(19): siRNA sense strand
ggacuuucucuaucuaucu

SEQ ID NO: 321594 - RNA, 19 nt, Homo sapiens
  misc_RNA (1)...(19): siRNA sense strand
gcagucgugucuggaguag

SEQ ID NO: 321595 - RNA, 19 nt, Homo sapiens
  misc_RNA (1)...(19): siRNA sense strand
cuucuacugugacuucuuc

SEQ ID NO: 321596 - RNA, 19 nt, Homo sapiens
  misc_RNA (1)...(19): siRNA sense strand
caucuucuacugugacuuc

SEQ ID NO: 321597 - RNA, 19 nt, Homo sapiens
  misc_RNA (1)...(19): siRNA sense strand
caacuucaucuccaucuac

SEQ ID NO: 321598 - RNA, 19 nt, Homo sapiens
  misc_RNA (1)...(19): siRNA sense strand
uggagauccucuggacuuu

SEQ ID NO: 321599 - RNA, 19 nt, Homo sapiens
  misc_RNA (1)...(19): siRNA sense strand
caucuacaacacaguaaug

SEQ ID NO: 321600 - RNA, 19 nt, Homo sapiens
  misc_RNA (1)...(19): siRNA sense strand
gugacuucuucuacuugua

SEQ ID NO: 321601 - RNA, 19 nt, Homo sapiens
  misc_RNA (1)...(19): siRNA sense strand
ucaccaacuucaucuccau

SEQ ID NO: 321602 - RNA, 19 nt, Homo sapiens
  misc_RNA (1)...(19): siRNA sense strand
gacuuucucuaucuaucug

SEQ ID NO: 321603 - RNA, 19 nt, Homo sapiens
  misc_RNA (1)...(19): siRNA sense strand
gaggcugagaccauaacua

SEQ ID NO: 321604 - RNA, 19 nt, Homo sapiens
  misc_RNA (1)...(19): siRNA sense strand
ggaguaguacaaaccaucu

SEQ ID NO: 321605 - RNA, 19 nt, Homo sapiens
  misc_RNA (1)...(19): siRNA sense strand
ucuggacuuucucuaucua

SEQ ID NO: 321606 - RNA, 19 nt, Homo sapiens
  misc_RNA (1)...(19): siRNA sense strand
acugugacuucuucuacuu

SEQ ID NO: 321607 - RNA, 19 nt, Homo sapiens
  misc_RNA (1)...(19): siRNA sense strand
ggcgguaccagacugagaa

SEQ ID NO: 321608 - RNA, 19 nt, Homo sapiens
  misc_RNA (1)...(19): siRNA sense strand
uaguacaaaccaucuucua

SEQ ID NO: 321609 - RNA, 19 nt, Homo sapiens
  misc_RNA (1)...(19): siRNA sense strand
ucuccucugugccuauguu

SEQ ID NO: 321610 - RNA, 19 nt, Homo sapiens
  misc_RNA (1)...(19): siRNA sense strand
aagggcaucucugggaaga

SEQ ID NO: 321611 - RNA, 19 nt, Homo sapiens
  misc_RNA (1)...(19): siRNA sense strand
ggaccuguucaccaacuuc

SEQ ID NO: 321612 - RNA, 19 nt, Homo sapiens
  misc_RNA (1)...(19): siRNA sense strand
acacauuccgccuggaguu

SEQ ID NO: 321613 - RNA, 19 nt, Homo sapiens
  misc_RNA (1)...(19): siRNA sense strand
gaccauaacuacucacuac

SEQ ID NO: 321614 - RNA, 19 nt, Homo sapiens
  misc_RNA (1)...(19): siRNA sense strand
caugauauaugggaaauuc

SEQ ID NO: 321615 - RNA, 19 nt, Homo sapiens
  misc_RNA (1)...(19): siRNA sense strand
gaagagccagauccuguuu

SEQ ID NO: 321616 - RNA, 19 nt, Homo sapiens
  misc_RNA (1)...(19): siRNA sense strand
gguaccagacugagaauuu

SEQ ID NO: 321617 - RNA, 19 nt, Homo sapiens
  misc_RNA (1)...(19): siRNA sense strand
agucgugucuggaguagua

SEQ ID NO: 321618 - RNA, 19 nt, Homo sapiens
  misc_RNA (1)...(19): siRNA sense strand
gagauccucuggacuuucu

SEQ ID NO: 321619 - RNA, 19 nt, Homo sapiens
  misc_RNA (1)...(19): siRNA sense strand
guaccagacugagaauuuc

SEQ ID NO: 321620 - RNA, 19 nt, Homo sapiens
  misc_RNA (1)...(19): siRNA sense strand
uggagaggcugagaccaua

SEQ ID NO: 321621 - RNA, 19 nt, Homo sapiens
  misc_RNA (1)...(19): siRNA sense strand
ggaagagccagauccuguu

SEQ ID NO: 321622 - RNA, 19 nt, Homo sapiens
  misc_RNA (1)...(19): siRNA sense strand
caguguacaugauauaugg

SEQ ID NO: 321623 - RNA, 19 nt, Homo sapiens
  misc_RNA (1)...(19): siRNA sense strand
guacaaaccaucuucuacu

SEQ ID NO: 321624 - RNA, 19 nt, Homo sapiens
  misc_RNA (1)...(19): siRNA sense strand
guacaugauauaugggaaa

SEQ ID NO: 321625 - RNA, 19 nt, Homo sapiens
  misc_RNA (1)...(19): siRNA sense strand
ccaacuucaucuccaucua

SEQ ID NO: 321626 - RNA, 19 nt, Homo sapiens
  misc_RNA (1)...(19): siRNA sense strand
uaacuacucacuaccuguu

SEQ ID NO: 321627 - RNA, 19 nt, Homo sapiens
  misc_RNA (1)...(19): siRNA sense strand
ggagaggcugagaccauaa

SEQ ID NO: 321628 - RNA, 19 nt, Homo sapiens
  misc_RNA (1)...(19): siRNA sense strand
uacaaaccaucuucuacug

SEQ ID NO: 321629 - RNA, 19 nt, Homo sapiens
  misc_RNA (1)...(19): siRNA sense strand
ccuguuugcucucgucuuc

SEQ ID NO: 321630 - RNA, 19 nt, Homo sapiens
  misc_RNA (1)...(19): siRNA sense strand
ccucuggacuuucucuauc

SEQ ID NO: 321631 - RNA, 19 nt, Homo sapiens
  misc_RNA (1)...(19): siRNA sense strand
cuaucuaucuggaaucagu

SEQ ID NO: 321632 - RNA, 19 nt, Homo sapiens
  misc_RNA (1)...(19): siRNA sense strand
aaaccaucuucuacuguga

SEQ ID NO: 321633 - RNA, 19 nt, Homo sapiens
  misc_RNA (1)...(19): siRNA sense strand
ugacuucuucuacuuguau

SEQ ID NO: 321634 - RNA, 19 nt, Homo sapiens
  misc_RNA (1)...(19): siRNA sense strand
cuacaacacaguaaugaag

SEQ ID NO: 321635 - RNA, 19 nt, Homo sapiens
  misc_RNA (1)...(19): siRNA sense strand
ccaaauugcagucgugucu

SEQ ID NO: 321636 - RNA, 19 nt, Homo sapiens
  misc_RNA (1)...(19): siRNA sense strand
gcugagaccauaacuacuc

SEQ ID NO: 321637 - RNA, 19 nt, Homo sapiens
  misc_RNA (1)...(19): siRNA sense strand
ggacuuucucuaucuaucu

SEQ ID NO: 321638 - RNA, 19 nt, Homo sapiens
  misc_RNA (1)...(19): siRNA sense strand
gcagucgugucuggaguag

SEQ ID NO: 321639 - RNA, 19 nt, Homo sapiens
  misc_RNA (1)...(19): siRNA sense strand
cuucuacugugacuucuuc

SEQ ID NO: 321640 - RNA, 19 nt, Homo sapiens
  misc_RNA (1)...(19): siRNA sense strand
caucuucuacugugacuuc

SEQ ID NO: 321641 - RNA, 19 nt, Homo sapiens
  misc_RNA (1)...(19): siRNA sense strand
caacuucaucuccaucuac

SEQ ID NO: 321642 - RNA, 19 nt, Homo sapiens
  misc_RNA (1)...(19): siRNA sense strand
uggagauccucuggacuuu

SEQ ID NO: 321643 - RNA, 19 nt, Homo sapiens
  misc_RNA (1)...(19): siRNA sense strand
caucuacaacacaguaaug

SEQ ID NO: 321644 - RNA, 19 nt, Homo sapiens
  misc_RNA (1)...(19): siRNA sense strand
gugacuucuucuacuugua

SEQ ID NO: 321645 - RNA, 19 nt, Homo sapiens
  misc_RNA (1)...(19): siRNA sense strand
ucaccaacuucaucuccau

SEQ ID NO: 321646 - RNA, 19 nt, Homo sapiens
  misc_RNA (1)...(19): siRNA sense strand
gacuuucucuaucuaucug

SEQ ID NO: 321647 - RNA, 19 nt, Homo sapiens
  misc_RNA (1)...(19): siRNA sense strand
gaggcugagaccauaacua

SEQ ID NO: 321648 - RNA, 19 nt, Homo sapiens
  misc_RNA (1)...(19): siRNA sense strand
ggaguaguacaaaccaucu

SEQ ID NO: 321649 - RNA, 19 nt, Homo sapiens
  misc_RNA (1)...(19): siRNA sense strand
ucuggacuuucucuaucua

SEQ ID NO: 321650 - RNA, 19 nt, Homo sapiens
  misc_RNA (1)...(19): siRNA sense strand
acugugacuucuucuacuu

SEQ ID NO: 321651 - RNA, 19 nt, Homo sapiens
  misc_RNA (1)...(19): siRNA sense strand
ggcgguaccagacugagaa

SEQ ID NO: 321652 - RNA, 19 nt, Homo sapiens
  misc_RNA (1)...(19): siRNA sense strand
uaguacaaaccaucuucua

SEQ ID NO: 321653 - RNA, 19 nt, Homo sapiens
  misc_RNA (1)...(19): siRNA sense strand
ucuccucugugccuauguu

SEQ ID NO: 321654 - RNA, 19 nt, Homo sapiens
  misc_RNA (1)...(19): siRNA sense strand
aagggcaucucugggaaga

SEQ ID NO: 321655 - RNA, 19 nt, Homo sapiens
  misc_RNA (1)...(19): siRNA sense strand
ggaccuguucaccaacuuc

SEQ ID NO: 321656 - RNA, 19 nt, Homo sapiens
  misc_RNA (1)...(19): siRNA sense strand
acacauuccgccuggaguu

SEQ ID NO: 321657 - RNA, 19 nt, Homo sapiens
  misc_RNA (1)...(19): siRNA sense strand
ggauugagcuggacauuga

SEQ ID NO: 321658 - RNA, 19 nt, Homo sapiens
  misc_RNA (1)...(19): siRNA sense strand
ggaucaagcuggagaguga

SEQ ID NO: 321659 - RNA, 19 nt, Homo sapiens
  misc_RNA (1)...(19): siRNA sense strand
agaaugagauugccacgua

SEQ ID NO: 321660 - RNA, 19 nt, Homo sapiens
  misc_RNA (1)...(19): siRNA sense strand
cacagaagcuccuggauga

SEQ ID NO: 321661 - RNA, 19 nt, Homo sapiens
  misc_RNA (1)...(19): siRNA sense strand
ccacauuccuggcaacauu

SEQ ID NO: 321662 - RNA, 19 nt, Homo sapiens
  misc_RNA (1)...(19): siRNA sense strand
ucgaggagcuccaacagaa

SEQ ID NO: 321663 - RNA, 19 nt, Homo sapiens
  misc_RNA (1)...(19): siRNA sense strand
ggaaagcgaggacugcaaa

SEQ ID NO: 321664 - RNA, 19 nt, Homo sapiens
  misc_RNA (1)...(19): siRNA sense strand
gagaaugccaggcugauug

SEQ ID NO: 321665 - RNA, 19 nt, Homo sapiens
  misc_RNA (1)...(19): siRNA sense strand
gccgaugacuuuaggauca

SEQ ID NO: 321666 - RNA, 19 nt, Homo sapiens
  misc_RNA (1)...(19): siRNA sense strand
ccaugcaguuccugaauga

SEQ ID NO: 321667 - RNA, 19 nt, Homo sapiens
  misc_RNA (1)...(19): siRNA sense strand
agacccggcuggagaauga

SEQ ID NO: 321668 - RNA, 19 nt, Homo sapiens
  misc_RNA (1)...(19): siRNA sense strand
uaaagauucugaggaguca

SEQ ID NO: 321669 - RNA, 19 nt, Homo sapiens
  misc_RNA (1)...(19): siRNA sense strand
ggacauugagcccaccauu

SEQ ID NO: 321670 - RNA, 19 nt, Homo sapiens
  misc_RNA (1)...(19): siRNA sense strand
gagcaggaaguaaagauuc

SEQ ID NO: 321671 - RNA, 19 nt, Homo sapiens
  misc_RNA (1)...(19): siRNA sense strand
agaaggagaccaugcaguu

SEQ ID NO: 321672 - RNA, 19 nt, Homo sapiens
  misc_RNA (1)...(19): siRNA sense strand
acauugagcccaccauuga

SEQ ID NO: 321673 - RNA, 19 nt, Homo sapiens
  misc_RNA (1)...(19): siRNA sense strand
gaggagcuccaacagaaga

SEQ ID NO: 321674 - RNA, 19 nt, Homo sapiens
  misc_RNA (1)...(19): siRNA sense strand
ggagaugcgggcucaguau

SEQ ID NO: 321675 - RNA, 19 nt, Homo sapiens
  misc_RNA (1)...(19): siRNA sense strand
gagcaagaaaugucucugu

SEQ ID NO: 321676 - RNA, 19 nt, Homo sapiens
  misc_RNA (1)...(19): siRNA sense strand
gcagaacucccugugugaa

SEQ ID NO: 321677 - RNA, 19 nt, Homo sapiens
  misc_RNA (1)...(19): siRNA sense strand
caggcugauuguacaaauu

SEQ ID NO: 321678 - RNA, 19 nt, Homo sapiens
  misc_RNA (1)...(19): siRNA sense strand
gaggagcagcugucugaga

SEQ ID NO: 321679 - RNA, 19 nt, Homo sapiens
  misc_RNA (1)...(19): siRNA sense strand
gaaggacugucugcagaac

SEQ ID NO: 321680 - RNA, 19 nt, Homo sapiens
  misc_RNA (1)...(19): siRNA sense strand
gaaggagaccaugcaguuc

SEQ ID NO: 321681 - RNA, 19 nt, Homo sapiens
  misc_RNA (1)...(19): siRNA sense strand
gggagaugcgggcucagua

SEQ ID NO: 321682 - RNA, 19 nt, Homo sapiens
  misc_RNA (1)...(19): siRNA sense strand
gacauugagcccaccauug

SEQ ID NO: 321683 - RNA, 19 nt, Homo sapiens
  misc_RNA (1)...(19): siRNA sense strand
caaccacgagcaggaagua

SEQ ID NO: 321684 - RNA, 19 nt, Homo sapiens
  misc_RNA (1)...(19): siRNA sense strand
gcaagaaaugucucugucu

SEQ ID NO: 321685 - RNA, 19 nt, Homo sapiens
  misc_RNA (1)...(19): siRNA sense strand
gggcagaggccaacauugc

SEQ ID NO: 321686 - RNA, 19 nt, Homo sapiens
  misc_RNA (1)...(19): siRNA sense strand
uggaggagcagcugucuga

SEQ ID NO: 321687 - RNA, 19 nt, Homo sapiens
  misc_RNA (1)...(19): siRNA sense strand
gcagcaaggccgagaaugc

SEQ ID NO: 321688 - RNA, 19 nt, Homo sapiens
  misc_RNA (1)...(19): siRNA sense strand
ccaggcugauuguacaaau

SEQ ID NO: 321689 - RNA, 19 nt, Homo sapiens
  misc_RNA (1)...(19): siRNA sense strand
ugaauggccaugagaagga

SEQ ID NO: 321690 - RNA, 19 nt, Homo sapiens
  misc_RNA (1)...(19): siRNA sense strand
caagcuggcugccgaugac

SEQ ID NO: 321691 - RNA, 19 nt, Homo sapiens
  misc_RNA (1)...(19): siRNA sense strand
aggagcagcugucugagau

SEQ ID NO: 321692 - RNA, 19 nt, Homo sapiens
  misc_RNA (1)...(19): siRNA sense strand
uaccggaaccuucuggaaa

SEQ ID NO: 321693 - RNA, 19 nt, Homo sapiens
  misc_RNA (1)...(19): siRNA sense strand
gcuggcugccgaugacuuu

SEQ ID NO: 321694 - RNA, 19 nt, Homo sapiens
  misc_RNA (1)...(19): siRNA sense strand
gcaucagccugcaggacau

SEQ ID NO: 321695 - RNA, 19 nt, Homo sapiens
  misc_RNA (1)...(19): siRNA sense strand
gagcaaccacgagcaggaa

SEQ ID NO: 321696 - RNA, 19 nt, Homo sapiens
  misc_RNA (1)...(19): siRNA sense strand
uggcaacauuggaaucugu

SEQ ID NO: 321697 - RNA, 19 nt, Homo sapiens
  misc_RNA (1)...(19): siRNA sense strand
gagaugcgggcucaguaug

SEQ ID NO: 321698 - RNA, 19 nt, Homo sapiens
  misc_RNA (1)...(19): siRNA sense strand
cagaagcuccuggaugaug

SEQ ID NO: 321699 - RNA, 19 nt, Homo sapiens
  misc_RNA (1)...(19): siRNA sense strand
caccggaagccgauucuga

SEQ ID NO: 321700 - RNA, 19 nt, Homo sapiens
  misc_RNA (1)...(19): siRNA sense strand
guaccggaaccuucuggaa

SEQ ID NO: 321701 - RNA, 19 nt, Homo sapiens
  misc_RNA (1)...(19): siRNA sense strand
gaccaugcaguuccugaau

SEQ ID NO: 321702 - RNA, 19 nt, Homo sapiens
  misc_RNA (1)...(19): siRNA sense strand
ugaagacccggcuggagaa

SEQ ID NO: 321703 - RNA, 19 nt, Homo sapiens
  misc_RNA (1)...(19): siRNA sense strand
cgagcaggaaguaaagauu

SEQ ID NO: 321704 - RNA, 19 nt, Homo sapiens
  misc_RNA (1)...(19): siRNA sense strand
gguggaggcagacaagugu

SEQ ID NO: 321705 - RNA, 19 nt, Homo sapiens
  misc_RNA (1)...(19): siRNA sense strand
ccacguaccggaaccuucu

SEQ ID NO: 321706 - RNA, 19 nt, Homo sapiens
  misc_RNA (1)...(19): siRNA sense strand
cgagaaugccaggcugauu

SEQ ID NO: 321707 - RNA, 19 nt, Homo sapiens
  misc_RNA (1)...(19): siRNA sense strand
ugaaggacugucugcagaa

SEQ ID NO: 321708 - RNA, 19 nt, Homo sapiens
  misc_RNA (1)...(19): siRNA sense strand
ccaagcuggcugccgauga

SEQ ID NO: 321709 - RNA, 19 nt, Homo sapiens
  misc_RNA (1)...(19): siRNA sense strand
ugcagagccucaucagcaa

SEQ ID NO: 321710 - RNA, 19 nt, Homo sapiens
  misc_RNA (1)...(19): siRNA sense strand
ggagaccaaccgccaggau

SEQ ID NO: 321711 - RNA, 19 nt, Homo sapiens
  misc_RNA (1)...(19): siRNA sense strand
agaagauccugugcagcaa

SEQ ID NO: 321712 - RNA, 19 nt, Homo sapiens
  misc_RNA (1)...(19): siRNA sense strand
caaccgccaggauguggaa

SEQ ID NO: 321713 - RNA, 19 nt, Homo sapiens
  misc_RNA (1)...(19): siRNA sense strand
caggaaguaaagauucuga

SEQ ID NO: 321714 - RNA, 19 nt, Homo sapiens
  misc_RNA (1)...(19): siRNA sense strand
ccacgagcaggaaguaaag

SEQ ID NO: 321715 - RNA, 19 nt, Homo sapiens
  misc_RNA (1)...(19): siRNA sense strand
ccgaugacuuuaggaucaa

SEQ ID NO: 321716 - RNA, 19 nt, Homo sapiens
  misc_RNA (1)...(19): siRNA sense strand
gaaugccaggcugauugua

SEQ ID NO: 321717 - RNA, 19 nt, Homo sapiens
  misc_RNA (1)...(19): siRNA sense strand
guuccaagcccagucugaa

SEQ ID NO: 321718 - RNA, 19 nt, Homo sapiens
  misc_RNA (1)...(19): siRNA sense strand
ccaacgagcugcacugcua

SEQ ID NO: 321719 - RNA, 19 nt, Homo sapiens
  misc_RNA (1)...(19): siRNA sense strand
gaucaaauacccacggaaa

SEQ ID NO: 321720 - RNA, 19 nt, Homo sapiens
  misc_RNA (1)...(19): siRNA sense strand
ucaccaaggucuccaaguu

SEQ ID NO: 321721 - RNA, 19 nt, Homo sapiens
  misc_RNA (1)...(19): siRNA sense strand
guaaaggagucccacuuca

SEQ ID NO: 321722 - RNA, 19 nt, Homo sapiens
  misc_RNA (1)...(19): siRNA sense strand
ccucuccucuccacugaua

SEQ ID NO: 321723 - RNA, 19 nt, Homo sapiens
  misc_RNA (1)...(19): siRNA sense strand
gaaaggccauguggaggau

SEQ ID NO: 321724 - RNA, 19 nt, Homo sapiens
  misc_RNA (1)...(19): siRNA sense strand
gacauuggcacaucucuga

SEQ ID NO: 321725 - RNA, 19 nt, Homo sapiens
  misc_RNA (1)...(19): siRNA sense strand
ugacaucacucuguugcuu

SEQ ID NO: 321726 - RNA, 19 nt, Homo sapiens
  misc_RNA (1)...(19): siRNA sense strand
gguuccaguucuccuguua

SEQ ID NO: 321727 - RNA, 19 nt, Homo sapiens
  misc_RNA (1)...(19): siRNA sense strand
caagaagucccgagaugug

SEQ ID NO: 321728 - RNA, 19 nt, Homo sapiens
  misc_RNA (1)...(19): siRNA sense strand
ggacucgcucuacuuguuu

SEQ ID NO: 321729 - RNA, 19 nt, Homo sapiens
  misc_RNA (1)...(19): siRNA sense strand
ccacguagccauugucaca

SEQ ID NO: 321730 - RNA, 19 nt, Homo sapiens
  misc_RNA (1)...(19): siRNA sense strand
gaagucccgagauguguuu

SEQ ID NO: 321731 - RNA, 19 nt, Homo sapiens
  misc_RNA (1)...(19): siRNA sense strand
acaccgacaagaucaaaua

SEQ ID NO: 321732 - RNA, 19 nt, Homo sapiens
  misc_RNA (1)...(19): siRNA sense strand
uaaaggagucccacuucaa

SEQ ID NO: 321733 - RNA, 19 nt, Homo sapiens
  misc_RNA (1)...(19): siRNA sense strand
acaacacgcugcccaacga

SEQ ID NO: 321734 - RNA, 19 nt, Homo sapiens
  misc_RNA (1)...(19): siRNA sense strand
gguaaaggagucccacuuc

SEQ ID NO: 321735 - RNA, 19 nt, Homo sapiens
  misc_RNA (1)...(19): siRNA sense strand
ucaaccaggugaucaugau

SEQ ID NO: 321736 - RNA, 19 nt, Homo sapiens
  misc_RNA (1)...(19): siRNA sense strand
gcaagcagaaccuggagau

SEQ ID NO: 321737 - RNA, 19 nt, Homo sapiens
  misc_RNA (1)...(19): siRNA sense strand
gcacugccugcacaucauu

SEQ ID NO: 321738 - RNA, 19 nt, Homo sapiens
  misc_RNA (1)...(19): siRNA sense strand
gcggaauucugugacauca

SEQ ID NO: 321739 - RNA, 19 nt, Homo sapiens
  misc_RNA (1)...(19): siRNA sense strand
aagcagaaccuggagauga

SEQ ID NO: 321740 - RNA, 19 nt, Homo sapiens
  misc_RNA (1)...(19): siRNA sense strand
gcacgcugcacgaggacua

SEQ ID NO: 321741 - RNA, 19 nt, Homo sapiens
  misc_RNA (1)...(19): siRNA sense strand
agcagaaccuggagaugaa

SEQ ID NO: 321742 - RNA, 19 nt, Homo sapiens
  misc_RNA (1)...(19): siRNA sense strand
ugccugaacuucgugguaa

SEQ ID NO: 321743 - RNA, 19 nt, Homo sapiens
  misc_RNA (1)...(19): siRNA sense strand
ucgaggugcucaugcaguu

SEQ ID NO: 321744 - RNA, 19 nt, Homo sapiens
  misc_RNA (1)...(19): siRNA sense strand
guucuccuguuacccuaaa

SEQ ID NO: 321745 - RNA, 19 nt, Homo sapiens
  misc_RNA (1)...(19): siRNA sense strand
gcagggccacguagccauu

SEQ ID NO: 321746 - RNA, 19 nt, Homo sapiens
  misc_RNA (1)...(19): siRNA sense strand
ucauggauguguacaaacu

SEQ ID NO: 321747 - RNA, 19 nt, Homo sapiens
  misc_RNA (1)...(19): siRNA sense strand
aggacucgcucuacuuguu

SEQ ID NO: 321748 - RNA, 19 nt, Homo sapiens
  misc_RNA (1)...(19): siRNA sense strand
gaagaugggcaggugaaca

SEQ ID NO: 321749 - RNA, 19 nt, Homo sapiens
  misc_RNA (1)...(19): siRNA sense strand
ggagcggguuggcuucaag

SEQ ID NO: 321750 - RNA, 19 nt, Homo sapiens
  misc_RNA (1)...(19): siRNA sense strand
cgcaggcacuggacaugaa

SEQ ID NO: 321751 - RNA, 19 nt, Homo sapiens
  misc_RNA (1)...(19): siRNA sense strand
ugaacuucgugguaaagga

SEQ ID NO: 321752 - RNA, 19 nt, Homo sapiens
  misc_RNA (1)...(19): siRNA sense strand
ugcccacccugaccuauga

SEQ ID NO: 321753 - RNA, 19 nt, Homo sapiens
  misc_RNA (1)...(19): siRNA sense strand
acaucacucuguugcuuga

SEQ ID NO: 321754 - RNA, 19 nt, Homo sapiens
  misc_RNA (1)...(19): siRNA sense strand
ggaccagccaguggacauu

SEQ ID NO: 321755 - RNA, 19 nt, Homo sapiens
  misc_RNA (1)...(19): siRNA sense strand
caccaaggucuccaaguug

SEQ ID NO: 321756 - RNA, 19 nt, Homo sapiens
  misc_RNA (1)...(19): siRNA sense strand
gcggggagauguacagguu

SEQ ID NO: 321757 - RNA, 19 nt, Homo sapiens
  misc_RNA (1)...(19): siRNA sense strand
uucaagaagucccgagaug

SEQ ID NO: 321758 - RNA, 19 nt, Homo sapiens
  misc_RNA (1)...(19): siRNA sense strand
ggaggcagcugacaaaacg

SEQ ID NO: 321759 - RNA, 19 nt, Homo sapiens
  misc_RNA (1)...(19): siRNA sense strand
ucaaggagcacugccugaa

SEQ ID NO: 321760 - RNA, 19 nt, Homo sapiens
  misc_RNA (1)...(19): siRNA sense strand
gcacgguggacaacaacau

SEQ ID NO: 321761 - RNA, 19 nt, Homo sapiens
  misc_RNA (1)...(19): siRNA sense strand
gaacgugacggugcagaac

SEQ ID NO: 321762 - RNA, 19 nt, Homo sapiens
  misc_RNA (1)...(19): siRNA sense strand
gccugaacuucgugguaaa

SEQ ID NO: 321763 - RNA, 19 nt, Homo sapiens
  misc_RNA (1)...(19): siRNA sense strand
gauguacagguuccaguuc

SEQ ID NO: 321764 - RNA, 19 nt, Homo sapiens
  misc_RNA (1)...(19): siRNA sense strand
ucaaauacccacggaaagg

SEQ ID NO: 321765 - RNA, 19 nt, Homo sapiens
  misc_RNA (1)...(19): siRNA sense strand
gaccgccaccucuaugugu

SEQ ID NO: 321766 - RNA, 19 nt, Homo sapiens
  misc_RNA (1)...(19): siRNA sense strand
uacuacggcuucuacaaca

SEQ ID NO: 321767 - RNA, 19 nt, Homo sapiens
  misc_RNA (1)...(19): siRNA sense strand
gacucgcucuacuuguuug

SEQ ID NO: 321768 - RNA, 19 nt, Homo sapiens
  misc_RNA (1)...(19): siRNA sense strand
ucaagaagucccgagaugu

SEQ ID NO: 321769 - RNA, 19 nt, Homo sapiens
  misc_RNA (1)...(19): siRNA sense strand
ccuggaggcagcugacaaa

SEQ ID NO: 321770 - RNA, 19 nt, Homo sapiens
  misc_RNA (1)...(19): siRNA sense strand
ggacgccauguacaucuuc

SEQ ID NO: 321771 - RNA, 19 nt, Homo sapiens
  misc_RNA (1)...(19): siRNA sense strand
caacgagcugcacugcuau

SEQ ID NO: 321772 - RNA, 19 nt, Homo sapiens
  misc_RNA (1)...(19): siRNA sense strand
aaggagcacugccugaacu

SEQ ID NO: 321773 - RNA, 19 nt, Homo sapiens
  misc_RNA (1)...(19): siRNA sense strand
gcucaugcaguuccucuac

SEQ ID NO: 321774 - RNA, 19 nt, Homo sapiens
  misc_RNA (1)...(19): siRNA sense strand
cuacggcgaggucaacaug

SEQ ID NO: 321775 - RNA, 19 nt, Homo sapiens
  misc_RNA (1)...(19): siRNA sense strand
ccucuacaccgacaagauc

SEQ ID NO: 321776 - RNA, 19 nt, Homo sapiens
  misc_RNA (1)...(19): siRNA sense strand
gagcggguuggcuucaaga

SEQ ID NO: 321777 - RNA, 19 nt, Homo sapiens
  misc_RNA (1)...(19): siRNA sense strand
gcgcggaauucugugacau

SEQ ID NO: 321778 - RNA, 19 nt, Homo sapiens
  misc_RNA (1)...(19): siRNA sense strand
gaagagagcucaggaguau

SEQ ID NO: 321779 - RNA, 19 nt, Homo sapiens
  misc_RNA (1)...(19): siRNA sense strand
gaauuugcccgaaugauua

SEQ ID NO: 321780 - RNA, 19 nt, Homo sapiens
  misc_RNA (1)...(19): siRNA sense strand
gaaaucaugucuugugaag

SEQ ID NO: 321781 - RNA, 19 nt, Homo sapiens
  misc_RNA (1)...(19): siRNA sense strand
caaaguaucuggagaacca

SEQ ID NO: 321782 - RNA, 19 nt, Homo sapiens
  misc_RNA (1)...(19): siRNA sense strand
ggaaacgcccacugaauaa

SEQ ID NO: 321783 - RNA, 19 nt, Homo sapiens
  misc_RNA (1)...(19): siRNA sense strand
ggaaguggcaagacacaua

SEQ ID NO: 321784 - RNA, 19 nt, Homo sapiens
  misc_RNA (1)...(19): siRNA sense strand
ggaauuugcccgaaugauu

SEQ ID NO: 321785 - RNA, 19 nt, Homo sapiens
  misc_RNA (1)...(19): siRNA sense strand
ggcauaagcuccugugaau

SEQ ID NO: 321786 - RNA, 19 nt, Homo sapiens
  misc_RNA (1)...(19): siRNA sense strand
gagaaugcauggcaaguuc

SEQ ID NO: 321787 - RNA, 19 nt, Homo sapiens
  misc_RNA (1)...(19): siRNA sense strand
ugaaacagcuucgaaugaa

SEQ ID NO: 321788 - RNA, 19 nt, Homo sapiens
  misc_RNA (1)...(19): siRNA sense strand
gaaguugucuacagguuca

SEQ ID NO: 321789 - RNA, 19 nt, Homo sapiens
  misc_RNA (1)...(19): siRNA sense strand
ucagggagcuggaggagaa

SEQ ID NO: 321790 - RNA, 19 nt, Homo sapiens
  misc_RNA (1)...(19): siRNA sense strand
gaugugauuuccauuccua

SEQ ID NO: 321791 - RNA, 19 nt, Homo sapiens
  misc_RNA (1)...(19): siRNA sense strand
gcgcagaaaucaacaagag

SEQ ID NO: 321792 - RNA, 19 nt, Homo sapiens
  misc_RNA (1)...(19): siRNA sense strand
cauaagcuccugugaauau

SEQ ID NO: 321793 - RNA, 19 nt, Homo sapiens
  misc_RNA (1)...(19): siRNA sense strand
aaucaugucuugugaagga

SEQ ID NO: 321794 - RNA, 19 nt, Homo sapiens
  misc_RNA (1)...(19): siRNA sense strand
uggaagagcucaaggagau

SEQ ID NO: 321795 - RNA, 19 nt, Homo sapiens
  misc_RNA (1)...(19): siRNA sense strand
caaauuauucuucgagcua

SEQ ID NO: 321796 - RNA, 19 nt, Homo sapiens
  misc_RNA (1)...(19): siRNA sense strand
guaacaauccagaaacaaa

SEQ ID NO: 321797 - RNA, 19 nt, Homo sapiens
  misc_RNA (1)...(19): siRNA sense strand
aauaaacccagaacucuua

SEQ ID NO: 321798 - RNA, 19 nt, Homo sapiens
  misc_RNA (1)...(19): siRNA sense strand
uaacaaaguaucuggagaa

SEQ ID NO: 321799 - RNA, 19 nt, Homo sapiens
  misc_RNA (1)...(19): siRNA sense strand
ccaacgcaguaaugguuua

SEQ ID NO: 321800 - RNA, 19 nt, Homo sapiens
  misc_RNA (1)...(19): siRNA sense strand
ucccagauguccagcuuua

SEQ ID NO: 321801 - RNA, 19 nt, Homo sapiens
  misc_RNA (1)...(19): siRNA sense strand
cacgcgugcuuccaaauua

SEQ ID NO: 321802 - RNA, 19 nt, Homo sapiens
  misc_RNA (1)...(19): siRNA sense strand
cggaggaaaucaugucuug

SEQ ID NO: 321803 - RNA, 19 nt, Homo sapiens
  misc_RNA (1)...(19): siRNA sense strand
caaauaagcagcaagaaac

SEQ ID NO: 321804 - RNA, 19 nt, Homo sapiens
  misc_RNA (1)...(19): siRNA sense strand
caaguucucuuugguagau

SEQ ID NO: 321805 - RNA, 19 nt, Homo sapiens
  misc_RNA (1)...(19): siRNA sense strand
gcaagaauuggccaagaaa

SEQ ID NO: 321806 - RNA, 19 nt, Homo sapiens
  misc_RNA (1)...(19): siRNA sense strand
ugacugauccuaucgaaga

SEQ ID NO: 321807 - RNA, 19 nt, Homo sapiens
  misc_RNA (1)...(19): siRNA sense strand
caaaauuccugcuccaaaa

SEQ ID NO: 321808 - RNA, 19 nt, Homo sapiens
  misc_RNA (1)...(19): siRNA sense strand
ggagaaggcuauggaagag

SEQ ID NO: 321809 - RNA, 19 nt, Homo sapiens
  misc_RNA (1)...(19): siRNA sense strand
uaucgaagagcacagaaua

SEQ ID NO: 321810 - RNA, 19 nt, Homo sapiens
  misc_RNA (1)...(19): siRNA sense strand
guacaugaacccaaguuga

SEQ ID NO: 321811 - RNA, 19 nt, Homo sapiens
  misc_RNA (1)...(19): siRNA sense strand
caggcuagcagacaaauaa

SEQ ID NO: 321812 - RNA, 19 nt, Homo sapiens
  misc_RNA (1)...(19): siRNA sense strand
gcaguaaugguuuaauuca

SEQ ID NO: 321813 - RNA, 19 nt, Homo sapiens
  misc_RNA (1)...(19): siRNA sense strand
cgaaugaaguugucuacag

SEQ ID NO: 321814 - RNA, 19 nt, Homo sapiens
  misc_RNA (1)...(19): siRNA sense strand
gaagaaggcccagaacucu

SEQ ID NO: 321815 - RNA, 19 nt, Homo sapiens
  misc_RNA (1)...(19): siRNA sense strand
aggaaacgcccacugaaua

SEQ ID NO: 321816 - RNA, 19 nt, Homo sapiens
  misc_RNA (1)...(19): siRNA sense strand
gaauaugugucuguguuag

SEQ ID NO: 321817 - RNA, 19 nt, Homo sapiens
  misc_RNA (1)...(19): siRNA sense strand
gcaauaaacccagaacucu

SEQ ID NO: 321818 - RNA, 19 nt, Homo sapiens
  misc_RNA (1)...(19): siRNA sense strand
gcugauuccaggcaauuua

SEQ ID NO: 321819 - RNA, 19 nt, Homo sapiens
  misc_RNA (1)...(19): siRNA sense strand
ggaaacagaagagauggaa

SEQ ID NO: 321820 - RNA, 19 nt, Homo sapiens
  misc_RNA (1)...(19): siRNA sense strand
gacaggaaguggcaagaca

SEQ ID NO: 321821 - RNA, 19 nt, Homo sapiens
  misc_RNA (1)...(19): siRNA sense strand
gcauauggccagacaggaa

SEQ ID NO: 321822 - RNA, 19 nt, Homo sapiens
  misc_RNA (1)...(19): siRNA sense strand
gaggaaaucaugucuugug

SEQ ID NO: 321823 - RNA, 19 nt, Homo sapiens
  misc_RNA (1)...(19): siRNA sense strand
uuggagaaauccuguguuu

SEQ ID NO: 321824 - RNA, 19 nt, Homo sapiens
  misc_RNA (1)...(19): siRNA sense strand
gcuuugacuuugcauuuga

SEQ ID NO: 321825 - RNA, 19 nt, Homo sapiens
  misc_RNA (1)...(19): siRNA sense strand
gaaugucauccacuuacua

SEQ ID NO: 321826 - RNA, 19 nt, Homo sapiens
  misc_RNA (1)...(19): siRNA sense strand
gaacaagcgagaagagaag

SEQ ID NO: 321827 - RNA, 19 nt, Homo sapiens
  misc_RNA (1)...(19): siRNA sense strand
agaaggaggugccacaaag

SEQ ID NO: 321828 - RNA, 19 nt, Homo sapiens
  misc_RNA (1)...(19): siRNA sense strand
gcucaggaguaugacagua

SEQ ID NO: 321829 - RNA, 19 nt, Homo sapiens
  misc_RNA (1)...(19): siRNA sense strand
acaaauaagcagcaagaaa

SEQ ID NO: 321830 - RNA, 19 nt, Homo sapiens
  misc_RNA (1)...(19): siRNA sense strand
gaauuggccaagaaagaaa

SEQ ID NO: 321831 - RNA, 19 nt, Homo sapiens
  misc_RNA (1)...(19): siRNA sense strand
gaugaaacagcuucgaaug

SEQ ID NO: 321832 - RNA, 19 nt, Homo sapiens
  misc_RNA (1)...(19): siRNA sense strand
caagaaagaaauugaugug

SEQ ID NO: 321833 - RNA, 19 nt, Homo sapiens
  misc_RNA (1)...(19): siRNA sense strand
ccacaaagggcaaagagau

SEQ ID NO: 321834 - RNA, 19 nt, Homo sapiens
  misc_RNA (1)...(19): siRNA sense strand
gcugagggacuccuucauu

SEQ ID NO: 321835 - RNA, 19 nt, Homo sapiens
  misc_RNA (1)...(19): siRNA sense strand
gguuaacucugcugaugau

SEQ ID NO: 321836 - RNA, 19 nt, Homo sapiens
  misc_RNA (1)...(19): siRNA sense strand
uguaaggacugugaacuug

SEQ ID NO: 321837 - RNA, 19 nt, Homo sapiens
  misc_RNA (1)...(19): siRNA sense strand
uaaggacugugaacuugga

SEQ ID NO: 321838 - RNA, 19 nt, Homo sapiens
  misc_RNA (1)...(19): siRNA sense strand
guacagacaaucuuugaag

SEQ ID NO: 321839 - RNA, 19 nt, Homo sapiens
  misc_RNA (1)...(19): siRNA sense strand
ugacauucuucgagaucua

SEQ ID NO: 321840 - RNA, 19 nt, Homo sapiens
  misc_RNA (1)...(19): siRNA sense strand
uaacucugcugaugauguc

SEQ ID NO: 321841 - RNA, 19 nt, Homo sapiens
  misc_RNA (1)...(19): siRNA sense strand
gcagacaaauaagcagcaa

SEQ ID NO: 321842 - RNA, 19 nt, Homo sapiens
  misc_RNA (1)...(19): siRNA sense strand
gaugauguggcugcaauaa

SEQ ID NO: 321843 - RNA, 19 nt, Homo sapiens
  misc_RNA (1)...(19): siRNA sense strand
uuaaacacccugagauaug

SEQ ID NO: 321844 - RNA, 19 nt, Homo sapiens
  misc_RNA (1)...(19): siRNA sense strand
ggagaaugcauggcaaguu

SEQ ID NO: 321845 - RNA, 19 nt, Homo sapiens
  misc_RNA (1)...(19): siRNA sense strand
gggcuacuuuggaauguca

SEQ ID NO: 321846 - RNA, 19 nt, Homo sapiens
  misc_RNA (1)...(19): siRNA sense strand
ggaaaucaugucuugugaa

SEQ ID NO: 321847 - RNA, 19 nt, Homo sapiens
  misc_RNA (1)...(19): siRNA sense strand
ucacggcucaggagaauga

SEQ ID NO: 321848 - RNA, 19 nt, Homo sapiens
  misc_RNA (1)...(19): siRNA sense strand
caucacggcucaggagaau

SEQ ID NO: 321849 - RNA, 19 nt, Homo sapiens
  misc_RNA (1)...(19): siRNA sense strand
ugauguggcugcaauaaac

SEQ ID NO: 321850 - RNA, 19 nt, Homo sapiens
  misc_RNA (1)...(19): siRNA sense strand
acgcaguaaugguuuaauu

SEQ ID NO: 321851 - RNA, 19 nt, Homo sapiens
  misc_RNA (1)...(19): siRNA sense strand
guggagagcaguugauuca

SEQ ID NO: 321852 - RNA, 19 nt, Homo sapiens
  misc_RNA (1)...(19): siRNA sense strand
ucuaggacuugcaugauug

SEQ ID NO: 321853 - RNA, 19 nt, Homo sapiens
  misc_RNA (1)...(19): siRNA sense strand
cugagggacuccuucauug

SEQ ID NO: 321854 - RNA, 19 nt, Homo sapiens
  misc_RNA (1)...(19): siRNA sense strand
ggaaugucauccacuuacu

SEQ ID NO: 321855 - RNA, 19 nt, Homo sapiens
  misc_RNA (1)...(19): siRNA sense strand
gaagaacaagcgagaagag

SEQ ID NO: 321856 - RNA, 19 nt, Homo sapiens
  misc_RNA (1)...(19): siRNA sense strand
gcaggaaaauguaacaauc

SEQ ID NO: 321857 - RNA, 19 nt, Homo sapiens
  misc_RNA (1)...(19): siRNA sense strand
ggacugugaacuuggagaa

SEQ ID NO: 321858 - RNA, 19 nt, Homo sapiens
  misc_RNA (1)...(19): siRNA sense strand
ugauucaaauggaaacaga

SEQ ID NO: 321859 - RNA, 19 nt, Homo sapiens
  misc_RNA (1)...(19): siRNA sense strand
gcaagcaacaggugcaagu

SEQ ID NO: 321860 - RNA, 19 nt, Homo sapiens
  misc_RNA (1)...(19): siRNA sense strand
ugaagagagcucaggagua

SEQ ID NO: 321861 - RNA, 19 nt, Homo sapiens
  misc_RNA (1)...(19): siRNA sense strand
agagagcucaggaguauga

SEQ ID NO: 321862 - RNA, 19 nt, Homo sapiens
  misc_RNA (1)...(19): siRNA sense strand
agacaaauaagcagcaaga

SEQ ID NO: 321863 - RNA, 19 nt, Homo sapiens
  misc_RNA (1)...(19): siRNA sense strand
gcauucugcuuugacuuug

SEQ ID NO: 321864 - RNA, 19 nt, Homo sapiens
  misc_RNA (1)...(19): siRNA sense strand
cccgaaugauuaaagaauu

SEQ ID NO: 321865 - RNA, 19 nt, Homo sapiens
  misc_RNA (1)...(19): siRNA sense strand
ugaagaaucaacccugcua

SEQ ID NO: 321866 - RNA, 19 nt, Homo sapiens
  misc_RNA (1)...(19): siRNA sense strand
acuaugaccuggagaccuu

SEQ ID NO: 321867 - RNA, 19 nt, Homo sapiens
  misc_RNA (1)...(19): siRNA sense strand
ugaccgagcagccagacua

SEQ ID NO: 321868 - RNA, 19 nt, Homo sapiens
  misc_RNA (1)...(19): siRNA sense strand
gcauaagcuccugugaaua

SEQ ID NO: 321869 - RNA, 19 nt, Homo sapiens
  misc_RNA (1)...(19): siRNA sense strand
caauaaacccagaacucuu

SEQ ID NO: 321870 - RNA, 19 nt, Homo sapiens
  misc_RNA (1)...(19): siRNA sense strand
gcaauuuauccaaggaaga

SEQ ID NO: 321871 - RNA, 19 nt, Homo sapiens
  misc_RNA (1)...(19): siRNA sense strand
ugacuuugcauuugaugaa

SEQ ID NO: 321872 - RNA, 19 nt, Homo sapiens
  misc_RNA (1)...(19): siRNA sense strand
guuaggaaacgcccacuga

SEQ ID NO: 321873 - RNA, 19 nt, Homo sapiens
  misc_RNA (1)...(19): siRNA sense strand
ggacagaacaaggcucaca

SEQ ID NO: 321874 - RNA, 19 nt, Homo sapiens
  misc_RNA (1)...(19): siRNA sense strand
ccgagcagccagacuauga

SEQ ID NO: 321875 - RNA, 19 nt, Homo sapiens
  misc_RNA (1)...(19): siRNA sense strand
gaagagcucaaggagauca

SEQ ID NO: 321876 - RNA, 19 nt, Homo sapiens
  misc_RNA (1)...(19): siRNA sense strand
gauggaagccugcucuaac

SEQ ID NO: 321877 - RNA, 19 nt, Homo sapiens
  misc_RNA (1)...(19): siRNA sense strand
uaaacacccugagauaugc

SEQ ID NO: 321878 - RNA, 19 nt, Homo sapiens
  misc_RNA (1)...(19): siRNA sense strand
ggagagcauucaaacaguu

SEQ ID NO: 321879 - RNA, 19 nt, Homo sapiens
  misc_RNA (1)...(19): siRNA sense strand
ugaccuggaugcagaaauu

SEQ ID NO: 321880 - RNA, 19 nt, Homo sapiens
  misc_RNA (1)...(19): siRNA sense strand
ucaaacaguuggacguaga

SEQ ID NO: 321881 - RNA, 19 nt, Homo sapiens
  misc_RNA (1)...(19): siRNA sense strand
agaagcagcucugaccaaa

SEQ ID NO: 321882 - RNA, 19 nt, Homo sapiens
  misc_RNA (1)...(19): siRNA sense strand
gaaauucuacaagcucuga

SEQ ID NO: 321883 - RNA, 19 nt, Homo sapiens
  misc_RNA (1)...(19): siRNA sense strand
caauagaacaguugaaguc

SEQ ID NO: 321884 - RNA, 19 nt, Homo sapiens
  misc_RNA (1)...(19): siRNA sense strand
ucucuacucuggccaacaa

SEQ ID NO: 321885 - RNA, 19 nt, Homo sapiens
  misc_RNA (1)...(19): siRNA sense strand
cacaggcgguuucugcuau

SEQ ID NO: 321886 - RNA, 19 nt, Homo sapiens
  misc_RNA (1)...(19): siRNA sense strand
acucugaagucauucucua

SEQ ID NO: 321887 - RNA, 19 nt, Homo sapiens
  misc_RNA (1)...(19): siRNA sense strand
ugagagcuguuaccuuguc

SEQ ID NO: 321888 - RNA, 19 nt, Homo sapiens
  misc_RNA (1)...(19): siRNA sense strand
ugaagucauucucuacucu

SEQ ID NO: 321889 - RNA, 19 nt, Homo sapiens
  misc_RNA (1)...(19): siRNA sense strand
gagagcauucaaacaguug

SEQ ID NO: 321890 - RNA, 19 nt, Homo sapiens
  misc_RNA (1)...(19): siRNA sense strand
aagcagcucugaccaaagc

SEQ ID NO: 321891 - RNA, 19 nt, Homo sapiens
  misc_RNA (1)...(19): siRNA sense strand
acacccugcuggaguucua

SEQ ID NO: 321892 - RNA, 19 nt, Homo sapiens
  misc_RNA (1)...(19): siRNA sense strand
cuaccacaauagaacaguu

SEQ ID NO: 321893 - RNA, 19 nt, Homo sapiens
  misc_RNA (1)...(19): siRNA sense strand
cugcuggaguucuacuuga

SEQ ID NO: 321894 - RNA, 19 nt, Homo sapiens
  misc_RNA (1)...(19): siRNA sense strand
caaacaguuggacguagaa

SEQ ID NO: 321895 - RNA, 19 nt, Homo sapiens
  misc_RNA (1)...(19): siRNA sense strand
cggagagcauucaaacagu

SEQ ID NO: 321896 - RNA, 19 nt, Homo sapiens
  misc_RNA (1)...(19): siRNA sense strand
gcuggaguucuacuugaaa

SEQ ID NO: 321897 - RNA, 19 nt, Homo sapiens
  misc_RNA (1)...(19): siRNA sense strand
gcaacccagucaagaaaau

SEQ ID NO: 321898 - RNA, 19 nt, Homo sapiens
  misc_RNA (1)...(19): siRNA sense strand
cugcaacccagucaagaaa

SEQ ID NO: 321899 - RNA, 19 nt, Homo sapiens
  misc_RNA (1)...(19): siRNA sense strand
acacaggcgguuucugcua

SEQ ID NO: 321900 - RNA, 19 nt, Homo sapiens
  misc_RNA (1)...(19): siRNA sense strand
acaggcgguuucugcuauu

SEQ ID NO: 321901 - RNA, 19 nt, Homo sapiens
  misc_RNA (1)...(19): siRNA sense strand
aaacuaccacaauagaaca

SEQ ID NO: 321902 - RNA, 19 nt, Homo sapiens
  misc_RNA (1)...(19): siRNA sense strand
caucgugucacaacugcaa

SEQ ID NO: 321903 - RNA, 19 nt, Homo sapiens
  misc_RNA (1)...(19): siRNA sense strand
uagaagcagcucugaccaa

SEQ ID NO: 321904 - RNA, 19 nt, Homo sapiens
  misc_RNA (1)...(19): siRNA sense strand
ccacaauagaacaguugaa

SEQ ID NO: 321905 - RNA, 19 nt, Homo sapiens
  misc_RNA (1)...(19): siRNA sense strand
gaagcagcucugaccaaag

SEQ ID NO: 321906 - RNA, 19 nt, Homo sapiens
  misc_RNA (1)...(19): siRNA sense strand
ccggagagcauucaaacag

SEQ ID NO: 321907 - RNA, 19 nt, Homo sapiens
  misc_RNA (1)...(19): siRNA sense strand
ggagagcauucaaacaguu

SEQ ID NO: 321908 - RNA, 19 nt, Homo sapiens
  misc_RNA (1)...(19): siRNA sense strand
ugaccuggaugcagaaauu

SEQ ID NO: 321909 - RNA, 19 nt, Homo sapiens
  misc_RNA (1)...(19): siRNA sense strand
ucaaacaguuggacguaga

SEQ ID NO: 321910 - RNA, 19 nt, Homo sapiens
  misc_RNA (1)...(19): siRNA sense strand
agaagcagcucugaccaaa

SEQ ID NO: 321911 - RNA, 19 nt, Homo sapiens
  misc_RNA (1)...(19): siRNA sense strand
gaaauucuacaagcucuga

SEQ ID NO: 321912 - RNA, 19 nt, Homo sapiens
  misc_RNA (1)...(19): siRNA sense strand
cacaggcgguuucugcuau

SEQ ID NO: 321913 - RNA, 19 nt, Homo sapiens
  misc_RNA (1)...(19): siRNA sense strand
gagagcauucaaacaguug

SEQ ID NO: 321914 - RNA, 19 nt, Homo sapiens
  misc_RNA (1)...(19): siRNA sense strand
aagcagcucugaccaaagc

SEQ ID NO: 321915 - RNA, 19 nt, Homo sapiens
  misc_RNA (1)...(19): siRNA sense strand
cggagagcauucaaacagu

SEQ ID NO: 321916 - RNA, 19 nt, Homo sapiens
  misc_RNA (1)...(19): siRNA sense strand
caaacaguuggacguagaa

SEQ ID NO: 321917 - RNA, 19 nt, Homo sapiens
  misc_RNA (1)...(19): siRNA sense strand
acacaggcgguuucugcua

SEQ ID NO: 321918 - RNA, 19 nt, Homo sapiens
  misc_RNA (1)...(19): siRNA sense strand
acaggcgguuucugcuauu

SEQ ID NO: 321919 - RNA, 19 nt, Homo sapiens
  misc_RNA (1)...(19): siRNA sense strand
uagaagcagcucugaccaa

SEQ ID NO: 321920 - RNA, 19 nt, Homo sapiens
  misc_RNA (1)...(19): siRNA sense strand
ccggagagcauucaaacag

SEQ ID NO: 321921 - RNA, 19 nt, Homo sapiens
  misc_RNA (1)...(19): siRNA sense strand
gaagcagcucugaccaaag

SEQ ID NO: 321922 - RNA, 19 nt, Homo sapiens
  misc_RNA (1)...(19): siRNA sense strand
guggauggauuaagaauaa

SEQ ID NO: 321923 - RNA, 19 nt, Homo sapiens
  misc_RNA (1)...(19): siRNA sense strand
gaugguggauggauuaaga

SEQ ID NO: 321924 - RNA, 19 nt, Homo sapiens
  misc_RNA (1)...(19): siRNA sense strand
gcgcaaagcugagccagaa

SEQ ID NO: 321925 - RNA, 19 nt, Homo sapiens
  misc_RNA (1)...(19): siRNA sense strand
ugaacaagcucaguauaaa

SEQ ID NO: 321926 - RNA, 19 nt, Homo sapiens
  misc_RNA (1)...(19): siRNA sense strand
ggagaugguggauggauua

SEQ ID NO: 321927 - RNA, 19 nt, Homo sapiens
  misc_RNA (1)...(19): siRNA sense strand
ggaugauuguuacuacauu

SEQ ID NO: 321928 - RNA, 19 nt, Homo sapiens
  misc_RNA (1)...(19): siRNA sense strand
aauccuaugugaagcauuu

SEQ ID NO: 321929 - RNA, 19 nt, Homo sapiens
  misc_RNA (1)...(19): siRNA sense strand
ggaggaugauuguuacuac

SEQ ID NO: 321930 - RNA, 19 nt, Homo sapiens
  misc_RNA (1)...(19): siRNA sense strand
ggauuaagaauaaccuuug

SEQ ID NO: 321931 - RNA, 19 nt, Homo sapiens
  misc_RNA (1)...(19): siRNA sense strand
cauaugaacaagcucagua

SEQ ID NO: 321932 - RNA, 19 nt, Homo sapiens
  misc_RNA (1)...(19): siRNA sense strand
aaaggugacuucgucuaaa

SEQ ID NO: 321933 - RNA, 19 nt, Homo sapiens
  misc_RNA (1)...(19): siRNA sense strand
gaauaaccuuugauuacac

SEQ ID NO: 321934 - RNA, 19 nt, Homo sapiens
  misc_RNA (1)...(19): siRNA sense strand
gaggaugauuguuacuaca

SEQ ID NO: 321935 - RNA, 19 nt, Homo sapiens
  misc_RNA (1)...(19): siRNA sense strand
gaacaagcucaguauaaaa

SEQ ID NO: 321936 - RNA, 19 nt, Homo sapiens
  misc_RNA (1)...(19): siRNA sense strand
ggugacuucgucuaaauuu

SEQ ID NO: 321937 - RNA, 19 nt, Homo sapiens
  misc_RNA (1)...(19): siRNA sense strand
ugagaggccucgucaccau

SEQ ID NO: 321938 - RNA, 19 nt, Homo sapiens
  misc_RNA (1)...(19): siRNA sense strand
gcuggaggaugauuguuac

SEQ ID NO: 321939 - RNA, 19 nt, Homo sapiens
  misc_RNA (1)...(19): siRNA sense strand
gguggauggauuaagaaua

SEQ ID NO: 321940 - RNA, 19 nt, Homo sapiens
  misc_RNA (1)...(19): siRNA sense strand
cauuauaucccagcagaaa

SEQ ID NO: 321941 - RNA, 19 nt, Homo sapiens
  misc_RNA (1)...(19): siRNA sense strand
ccaguccgccuuuguugaa

SEQ ID NO: 321942 - RNA, 19 nt, Homo sapiens
  misc_RNA (1)...(19): siRNA sense strand
ccucgucaccaucacguua

SEQ ID NO: 321943 - RNA, 19 nt, Homo sapiens
  misc_RNA (1)...(19): siRNA sense strand
aaggugacuucgucuaaau

SEQ ID NO: 321944 - RNA, 19 nt, Homo sapiens
  misc_RNA (1)...(19): siRNA sense strand
aagcugagccagaagcauu

SEQ ID NO: 321945 - RNA, 19 nt, Homo sapiens
  misc_RNA (1)...(19): siRNA sense strand
ggaauccuaugugaagcau

SEQ ID NO: 321946 - RNA, 19 nt, Homo sapiens
  misc_RNA (1)...(19): siRNA sense strand
cagaagcauugcagucucu

SEQ ID NO: 321947 - RNA, 19 nt, Homo sapiens
  misc_RNA (1)...(19): siRNA sense strand
augaacaagcucaguauaa

SEQ ID NO: 321948 - RNA, 19 nt, Homo sapiens
  misc_RNA (1)...(19): siRNA sense strand
uaugaacaagcucaguaua

SEQ ID NO: 321949 - RNA, 19 nt, Homo sapiens
  misc_RNA (1)...(19): siRNA sense strand
uaacaggagccaggaggaa

SEQ ID NO: 321950 - RNA, 19 nt, Homo sapiens
  misc_RNA (1)...(19): siRNA sense strand
gcagcuggaggaugauugu

SEQ ID NO: 321951 - RNA, 19 nt, Homo sapiens
  misc_RNA (1)...(19): siRNA sense strand
gaagcauugcagucucuga

SEQ ID NO: 321952 - RNA, 19 nt, Homo sapiens
  misc_RNA (1)...(19): siRNA sense strand
accaacaucauaacgauuu

SEQ ID NO: 321953 - RNA, 19 nt, Homo sapiens
  misc_RNA (1)...(19): siRNA sense strand
gagaugguggauggauuaa

SEQ ID NO: 321954 - RNA, 19 nt, Homo sapiens
  misc_RNA (1)...(19): siRNA sense strand
aggagaugguggauggauu

SEQ ID NO: 321955 - RNA, 19 nt, Homo sapiens
  misc_RNA (1)...(19): siRNA sense strand
ugugacaggcuuucugaga

SEQ ID NO: 321956 - RNA, 19 nt, Homo sapiens
  misc_RNA (1)...(19): siRNA sense strand
ccacgccacaguccacaga

SEQ ID NO: 321957 - RNA, 19 nt, Homo sapiens
  misc_RNA (1)...(19): siRNA sense strand
gaaaucccugaaguucuga

SEQ ID NO: 321958 - RNA, 19 nt, Homo sapiens
  misc_RNA (1)...(19): siRNA sense strand
guggauggauuaagaauaa

SEQ ID NO: 321959 - RNA, 19 nt, Homo sapiens
  misc_RNA (1)...(19): siRNA sense strand
gaagggaaauggaagaaag

SEQ ID NO: 321960 - RNA, 19 nt, Homo sapiens
  misc_RNA (1)...(19): siRNA sense strand
gaugguggauggauuaaga

SEQ ID NO: 321961 - RNA, 19 nt, Homo sapiens
  misc_RNA (1)...(19): siRNA sense strand
gcgcaaagcugagccagaa

SEQ ID NO: 321962 - RNA, 19 nt, Homo sapiens
  misc_RNA (1)...(19): siRNA sense strand
ugaacaagcucaguauaaa

SEQ ID NO: 321963 - RNA, 19 nt, Homo sapiens
  misc_RNA (1)...(19): siRNA sense strand
ggagaugguggauggauua

SEQ ID NO: 321964 - RNA, 19 nt, Homo sapiens
  misc_RNA (1)...(19): siRNA sense strand
agacugaagugaaagaaga

SEQ ID NO: 321965 - RNA, 19 nt, Homo sapiens
  misc_RNA (1)...(19): siRNA sense strand
ggaaauggaagaaagaaca

SEQ ID NO: 321966 - RNA, 19 nt, Homo sapiens
  misc_RNA (1)...(19): siRNA sense strand
ggaugauuguuacuacauu

SEQ ID NO: 321967 - RNA, 19 nt, Homo sapiens
  misc_RNA (1)...(19): siRNA sense strand
aauccuaugugaagcauuu

SEQ ID NO: 321968 - RNA, 19 nt, Homo sapiens
  misc_RNA (1)...(19): siRNA sense strand
ggaggaugauuguuacuac

SEQ ID NO: 321969 - RNA, 19 nt, Homo sapiens
  misc_RNA (1)...(19): siRNA sense strand
ggauuaagaauaaccuuug

SEQ ID NO: 321970 - RNA, 19 nt, Homo sapiens
  misc_RNA (1)...(19): siRNA sense strand
cagcguaaauuggcaagaa

SEQ ID NO: 321971 - RNA, 19 nt, Homo sapiens
  misc_RNA (1)...(19): siRNA sense strand
gcacaggaagaaagaagaa

SEQ ID NO: 321972 - RNA, 19 nt, Homo sapiens
  misc_RNA (1)...(19): siRNA sense strand
gguguggacucugucuuaa

SEQ ID NO: 321973 - RNA, 19 nt, Homo sapiens
  misc_RNA (1)...(19): siRNA sense strand
agaaaagacugaagugaaa

SEQ ID NO: 321974 - RNA, 19 nt, Homo sapiens
  misc_RNA (1)...(19): siRNA sense strand
cauaugaacaagcucagua

SEQ ID NO: 321975 - RNA, 19 nt, Homo sapiens
  misc_RNA (1)...(19): siRNA sense strand
aaaggugacuucgucuaaa

SEQ ID NO: 321976 - RNA, 19 nt, Homo sapiens
  misc_RNA (1)...(19): siRNA sense strand
gaauaaccuuugauuacac

SEQ ID NO: 321977 - RNA, 19 nt, Homo sapiens
  misc_RNA (1)...(19): siRNA sense strand
gaggaugauuguuacuaca

SEQ ID NO: 321978 - RNA, 19 nt, Homo sapiens
  misc_RNA (1)...(19): siRNA sense strand
ggauagaugggcagcagaa

SEQ ID NO: 321979 - RNA, 19 nt, Homo sapiens
  misc_RNA (1)...(19): siRNA sense strand
gaacaagcucaguauaaaa

SEQ ID NO: 321980 - RNA, 19 nt, Homo sapiens
  misc_RNA (1)...(19): siRNA sense strand
ggugacuucgucuaaauuu

SEQ ID NO: 321981 - RNA, 19 nt, Homo sapiens
  misc_RNA (1)...(19): siRNA sense strand
caagaagggaaauggaaga

SEQ ID NO: 321982 - RNA, 19 nt, Homo sapiens
  misc_RNA (1)...(19): siRNA sense strand
gcuggaggaugauuguuac

SEQ ID NO: 321983 - RNA, 19 nt, Homo sapiens
  misc_RNA (1)...(19): siRNA sense strand
gguggauggauuaagaaua

SEQ ID NO: 321984 - RNA, 19 nt, Homo sapiens
  misc_RNA (1)...(19): siRNA sense strand
cauuauaucccagcagaaa

SEQ ID NO: 321985 - RNA, 19 nt, Homo sapiens
  misc_RNA (1)...(19): siRNA sense strand
ugagaggccucgucaccau

SEQ ID NO: 321986 - RNA, 19 nt, Homo sapiens
  misc_RNA (1)...(19): siRNA sense strand
ccaguccgccuuuguugaa

SEQ ID NO: 321987 - RNA, 19 nt, Homo sapiens
  misc_RNA (1)...(19): siRNA sense strand
ccucgucaccaucacguua

SEQ ID NO: 321988 - RNA, 19 nt, Homo sapiens
  misc_RNA (1)...(19): siRNA sense strand
aaggugacuucgucuaaau

SEQ ID NO: 321989 - RNA, 19 nt, Homo sapiens
  misc_RNA (1)...(19): siRNA sense strand
aagcugagccagaagcauu

SEQ ID NO: 321990 - RNA, 19 nt, Homo sapiens
  misc_RNA (1)...(19): siRNA sense strand
ggaauccuaugugaagcau

SEQ ID NO: 321991 - RNA, 19 nt, Homo sapiens
  misc_RNA (1)...(19): siRNA sense strand
cagaagcauugcagucucu

SEQ ID NO: 321992 - RNA, 19 nt, Homo sapiens
  misc_RNA (1)...(19): siRNA sense strand
aaacaagaagggaaaugga

SEQ ID NO: 321993 - RNA, 19 nt, Homo sapiens
  misc_RNA (1)...(19): siRNA sense strand
augaacaagcucaguauaa

SEQ ID NO: 321994 - RNA, 19 nt, Homo sapiens
  misc_RNA (1)...(19): siRNA sense strand
gaagaaaagacugaaguga

SEQ ID NO: 321995 - RNA, 19 nt, Homo sapiens
  misc_RNA (1)...(19): siRNA sense strand
gaggagcacaggaagaaag

SEQ ID NO: 321996 - RNA, 19 nt, Homo sapiens
  misc_RNA (1)...(19): siRNA sense strand
uaugaacaagcucaguaua

SEQ ID NO: 321997 - RNA, 19 nt, Homo sapiens
  misc_RNA (1)...(19): siRNA sense strand
caaacaagaagggaaaugg

SEQ ID NO: 321998 - RNA, 19 nt, Homo sapiens
  misc_RNA (1)...(19): siRNA sense strand
gagcacaggaagaaagaag

SEQ ID NO: 321999 - RNA, 19 nt, Homo sapiens
  misc_RNA (1)...(19): siRNA sense strand
uaacaggagccaggaggaa

SEQ ID NO: 322000 - RNA, 19 nt, Homo sapiens
  misc_RNA (1)...(19): siRNA sense strand
agaagaagcgcugcagguu

SEQ ID NO: 322001 - RNA, 19 nt, Homo sapiens
  misc_RNA (1)...(19): siRNA sense strand
gcagcuggaggaugauugu

SEQ ID NO: 322002 - RNA, 19 nt, Homo sapiens
  misc_RNA (1)...(19): siRNA sense strand
gaagcauugcagucucuga

SEQ ID NO: 322003 - RNA, 19 nt, Homo sapiens
  misc_RNA (1)...(19): siRNA sense strand
accaacaucauaacgauuu

SEQ ID NO: 322004 - RNA, 19 nt, Homo sapiens
  misc_RNA (1)...(19): siRNA sense strand
uagaugggcagcagaagau

SEQ ID NO: 322005 - RNA, 19 nt, Homo sapiens
  misc_RNA (1)...(19): siRNA sense strand
ugguguggacucugucuua

SEQ ID NO: 322006 - RNA, 19 nt, Homo sapiens
  misc_RNA (1)...(19): siRNA sense strand
gagaugguggauggauuaa

SEQ ID NO: 322007 - RNA, 19 nt, Homo sapiens
  misc_RNA (1)...(19): siRNA sense strand
uguggacucugucuuaaaa

SEQ ID NO: 322008 - RNA, 19 nt, Homo sapiens
  misc_RNA (1)...(19): siRNA sense strand
aggagaugguggauggauu

SEQ ID NO: 322009 - RNA, 19 nt, Homo sapiens
  misc_RNA (1)...(19): siRNA sense strand
ugugacaggcuuucugaga

SEQ ID NO: 322010 - RNA, 19 nt, Homo sapiens
  misc_RNA (1)...(19): siRNA sense strand
aacaagaagggaaauggaa

SEQ ID NO: 322011 - RNA, 19 nt, Homo sapiens
  misc_RNA (1)...(19): siRNA sense strand
ccacgccacaguccacaga

SEQ ID NO: 322012 - RNA, 19 nt, Homo sapiens
  misc_RNA (1)...(19): siRNA sense strand
agcguaaauuggcaagaaa

SEQ ID NO: 322013 - RNA, 19 nt, Homo sapiens
  misc_RNA (1)...(19): siRNA sense strand
gaaaucccugaaguucuga

SEQ ID NO: 322014 - RNA, 19 nt, Homo sapiens
  misc_RNA (1)...(19): siRNA sense strand
cauuaagcaguuccucuga

SEQ ID NO: 322015 - RNA, 19 nt, Homo sapiens
  misc_RNA (1)...(19): siRNA sense strand
gaugggcagcagaagauca

SEQ ID NO: 322016 - RNA, 19 nt, Homo sapiens
  misc_RNA (1)...(19): siRNA sense strand
guggauggauuaagaauaa

SEQ ID NO: 322017 - RNA, 19 nt, Homo sapiens
  misc_RNA (1)...(19): siRNA sense strand
gaagggaaauggaagaaag

SEQ ID NO: 322018 - RNA, 19 nt, Homo sapiens
  misc_RNA (1)...(19): siRNA sense strand
gaugguggauggauuaaga

SEQ ID NO: 322019 - RNA, 19 nt, Homo sapiens
  misc_RNA (1)...(19): siRNA sense strand
gcgcaaagcugagccagaa

SEQ ID NO: 322020 - RNA, 19 nt, Homo sapiens
  misc_RNA (1)...(19): siRNA sense strand
ugaacaagcucaguauaaa

SEQ ID NO: 322021 - RNA, 19 nt, Homo sapiens
  misc_RNA (1)...(19): siRNA sense strand
ggagaugguggauggauua

SEQ ID NO: 322022 - RNA, 19 nt, Homo sapiens
  misc_RNA (1)...(19): siRNA sense strand
agacugaagugaaagaaga

SEQ ID NO: 322023 - RNA, 19 nt, Homo sapiens
  misc_RNA (1)...(19): siRNA sense strand
ggaaauggaagaaagaaca

SEQ ID NO: 322024 - RNA, 19 nt, Homo sapiens
  misc_RNA (1)...(19): siRNA sense strand
ggaugauuguuacuacauu

SEQ ID NO: 322025 - RNA, 19 nt, Homo sapiens
  misc_RNA (1)...(19): siRNA sense strand
aauccuaugugaagcauuu

SEQ ID NO: 322026 - RNA, 19 nt, Homo sapiens
  misc_RNA (1)...(19): siRNA sense strand
ggaggaugauuguuacuac

SEQ ID NO: 322027 - RNA, 19 nt, Homo sapiens
  misc_RNA (1)...(19): siRNA sense strand
ggauuaagaauaaccuuug

SEQ ID NO: 322028 - RNA, 19 nt, Homo sapiens
  misc_RNA (1)...(19): siRNA sense strand
cagcguaaauuggcaagaa

SEQ ID NO: 322029 - RNA, 19 nt, Homo sapiens
  misc_RNA (1)...(19): siRNA sense strand
gcacaggaagaaagaagaa

SEQ ID NO: 322030 - RNA, 19 nt, Homo sapiens
  misc_RNA (1)...(19): siRNA sense strand
gguguggacucugucuuaa

SEQ ID NO: 322031 - RNA, 19 nt, Homo sapiens
  misc_RNA (1)...(19): siRNA sense strand
agaaaagacugaagugaaa

SEQ ID NO: 322032 - RNA, 19 nt, Homo sapiens
  misc_RNA (1)...(19): siRNA sense strand
cauaugaacaagcucagua

SEQ ID NO: 322033 - RNA, 19 nt, Homo sapiens
  misc_RNA (1)...(19): siRNA sense strand
aaaggugacuucgucuaaa

SEQ ID NO: 322034 - RNA, 19 nt, Homo sapiens
  misc_RNA (1)...(19): siRNA sense strand
gaauaaccuuugauuacac

SEQ ID NO: 322035 - RNA, 19 nt, Homo sapiens
  misc_RNA (1)...(19): siRNA sense strand
gaggaugauuguuacuaca

SEQ ID NO: 322036 - RNA, 19 nt, Homo sapiens
  misc_RNA (1)...(19): siRNA sense strand
ggauagaugggcagcagaa

SEQ ID NO: 322037 - RNA, 19 nt, Homo sapiens
  misc_RNA (1)...(19): siRNA sense strand
gaacaagcucaguauaaaa

SEQ ID NO: 322038 - RNA, 19 nt, Homo sapiens
  misc_RNA (1)...(19): siRNA sense strand
ggugacuucgucuaaauuu

SEQ ID NO: 322039 - RNA, 19 nt, Homo sapiens
  misc_RNA (1)...(19): siRNA sense strand
caagaagggaaauggaaga

SEQ ID NO: 322040 - RNA, 19 nt, Homo sapiens
  misc_RNA (1)...(19): siRNA sense strand
gcuggaggaugauuguuac

SEQ ID NO: 322041 - RNA, 19 nt, Homo sapiens
  misc_RNA (1)...(19): siRNA sense strand
gguggauggauuaagaaua

SEQ ID NO: 322042 - RNA, 19 nt, Homo sapiens
  misc_RNA (1)...(19): siRNA sense strand
cauuauaucccagcagaaa

SEQ ID NO: 322043 - RNA, 19 nt, Homo sapiens
  misc_RNA (1)...(19): siRNA sense strand
ugagaggccucgucaccau

SEQ ID NO: 322044 - RNA, 19 nt, Homo sapiens
  misc_RNA (1)...(19): siRNA sense strand
ccaguccgccuuuguugaa

SEQ ID NO: 322045 - RNA, 19 nt, Homo sapiens
  misc_RNA (1)...(19): siRNA sense strand
ccucgucaccaucacguua

SEQ ID NO: 322046 - RNA, 19 nt, Homo sapiens
  misc_RNA (1)...(19): siRNA sense strand
aaggugacuucgucuaaau

SEQ ID NO: 322047 - RNA, 19 nt, Homo sapiens
  misc_RNA (1)...(19): siRNA sense strand
aagcugagccagaagcauu

SEQ ID NO: 322048 - RNA, 19 nt, Homo sapiens
  misc_RNA (1)...(19): siRNA sense strand
ggaauccuaugugaagcau

SEQ ID NO: 322049 - RNA, 19 nt, Homo sapiens
  misc_RNA (1)...(19): siRNA sense strand
cagaagcauugcagucucu

SEQ ID NO: 322050 - RNA, 19 nt, Homo sapiens
  misc_RNA (1)...(19): siRNA sense strand
aaacaagaagggaaaugga

SEQ ID NO: 322051 - RNA, 19 nt, Homo sapiens
  misc_RNA (1)...(19): siRNA sense strand
augaacaagcucaguauaa

SEQ ID NO: 322052 - RNA, 19 nt, Homo sapiens
  misc_RNA (1)...(19): siRNA sense strand
gaagaaaagacugaaguga

SEQ ID NO: 322053 - RNA, 19 nt, Homo sapiens
  misc_RNA (1)...(19): siRNA sense strand
gaggagcacaggaagaaag

SEQ ID NO: 322054 - RNA, 19 nt, Homo sapiens
  misc_RNA (1)...(19): siRNA sense strand
uaugaacaagcucaguaua

SEQ ID NO: 322055 - RNA, 19 nt, Homo sapiens
  misc_RNA (1)...(19): siRNA sense strand
caaacaagaagggaaaugg

SEQ ID NO: 322056 - RNA, 19 nt, Homo sapiens
  misc_RNA (1)...(19): siRNA sense strand
gagcacaggaagaaagaag

SEQ ID NO: 322057 - RNA, 19 nt, Homo sapiens
  misc_RNA (1)...(19): siRNA sense strand
uaacaggagccaggaggaa

SEQ ID NO: 322058 - RNA, 19 nt, Homo sapiens
  misc_RNA (1)...(19): siRNA sense strand
agaagaagcgcugcagguu

SEQ ID NO: 322059 - RNA, 19 nt, Homo sapiens
  misc_RNA (1)...(19): siRNA sense strand
gcagcuggaggaugauugu

SEQ ID NO: 322060 - RNA, 19 nt, Homo sapiens
  misc_RNA (1)...(19): siRNA sense strand
gaagcauugcagucucuga

SEQ ID NO: 322061 - RNA, 19 nt, Homo sapiens
  misc_RNA (1)...(19): siRNA sense strand
accaacaucauaacgauuu

SEQ ID NO: 322062 - RNA, 19 nt, Homo sapiens
  misc_RNA (1)...(19): siRNA sense strand
uagaugggcagcagaagau

SEQ ID NO: 322063 - RNA, 19 nt, Homo sapiens
  misc_RNA (1)...(19): siRNA sense strand
ugguguggacucugucuua

SEQ ID NO: 322064 - RNA, 19 nt, Homo sapiens
  misc_RNA (1)...(19): siRNA sense strand
gagaugguggauggauuaa

SEQ ID NO: 322065 - RNA, 19 nt, Homo sapiens
  misc_RNA (1)...(19): siRNA sense strand
uguggacucugucuuaaaa

SEQ ID NO: 322066 - RNA, 19 nt, Homo sapiens
  misc_RNA (1)...(19): siRNA sense strand
aggagaugguggauggauu

SEQ ID NO: 322067 - RNA, 19 nt, Homo sapiens
  misc_RNA (1)...(19): siRNA sense strand
ugugacaggcuuucugaga

SEQ ID NO: 322068 - RNA, 19 nt, Homo sapiens
  misc_RNA (1)...(19): siRNA sense strand
aacaagaagggaaauggaa

SEQ ID NO: 322069 - RNA, 19 nt, Homo sapiens
  misc_RNA (1)...(19): siRNA sense strand
ccacgccacaguccacaga

SEQ ID NO: 322070 - RNA, 19 nt, Homo sapiens
  misc_RNA (1)...(19): siRNA sense strand
agcguaaauuggcaagaaa

SEQ ID NO: 322071 - RNA, 19 nt, Homo sapiens
  misc_RNA (1)...(19): siRNA sense strand
gaaaucccugaaguucuga

SEQ ID NO: 322072 - RNA, 19 nt, Homo sapiens
  misc_RNA (1)...(19): siRNA sense strand
cauuaagcaguuccucuga

SEQ ID NO: 322073 - RNA, 19 nt, Homo sapiens
  misc_RNA (1)...(19): siRNA sense strand
gaugggcagcagaagauca

SEQ ID NO: 322074 - RNA, 19 nt, Homo sapiens
  misc_RNA (1)...(19): siRNA sense strand
guggauggauuaagaauaa

SEQ ID NO: 322075 - RNA, 19 nt, Homo sapiens
  misc_RNA (1)...(19): siRNA sense strand
gaagggaaauggaagaaag

SEQ ID NO: 322076 - RNA, 19 nt, Homo sapiens
  misc_RNA (1)...(19): siRNA sense strand
gaugguggauggauuaaga

SEQ ID NO: 322077 - RNA, 19 nt, Homo sapiens
  misc_RNA (1)...(19): siRNA sense strand
gcgcaaagcugagccagaa

SEQ ID NO: 322078 - RNA, 19 nt, Homo sapiens
  misc_RNA (1)...(19): siRNA sense strand
ugaacaagcucaguauaaa

SEQ ID NO: 322079 - RNA, 19 nt, Homo sapiens
  misc_RNA (1)...(19): siRNA sense strand
ggagaugguggauggauua

SEQ ID NO: 322080 - RNA, 19 nt, Homo sapiens
  misc_RNA (1)...(19): siRNA sense strand
agacugaagugaaagaaga

SEQ ID NO: 322081 - RNA, 19 nt, Homo sapiens
  misc_RNA (1)...(19): siRNA sense strand
ggaaauggaagaaagaaca

SEQ ID NO: 322082 - RNA, 19 nt, Homo sapiens
  misc_RNA (1)...(19): siRNA sense strand
ggaugauuguuacuacauu

SEQ ID NO: 322083 - RNA, 19 nt, Homo sapiens
  misc_RNA (1)...(19): siRNA sense strand
aauccuaugugaagcauuu

SEQ ID NO: 322084 - RNA, 19 nt, Homo sapiens
  misc_RNA (1)...(19): siRNA sense strand
ggaggaugauuguuacuac

SEQ ID NO: 322085 - RNA, 19 nt, Homo sapiens
  misc_RNA (1)...(19): siRNA sense strand
ggauuaagaauaaccuuug

SEQ ID NO: 322086 - RNA, 19 nt, Homo sapiens
  misc_RNA (1)...(19): siRNA sense strand
cagcguaaauuggcaagaa

SEQ ID NO: 322087 - RNA, 19 nt, Homo sapiens
  misc_RNA (1)...(19): siRNA sense strand
gcacaggaagaaagaagaa

SEQ ID NO: 322088 - RNA, 19 nt, Homo sapiens
  misc_RNA (1)...(19): siRNA sense strand
gguguggacucugucuuaa

SEQ ID NO: 322089 - RNA, 19 nt, Homo sapiens
  misc_RNA (1)...(19): siRNA sense strand
agaaaagacugaagugaaa

SEQ ID NO: 322090 - RNA, 19 nt, Homo sapiens
  misc_RNA (1)...(19): siRNA sense strand
cauaugaacaagcucagua

SEQ ID NO: 322091 - RNA, 19 nt, Homo sapiens
  misc_RNA (1)...(19): siRNA sense strand
aaaggugacuucgucuaaa

SEQ ID NO: 322092 - RNA, 19 nt, Homo sapiens
  misc_RNA (1)...(19): siRNA sense strand
gaauaaccuuugauuacac

SEQ ID NO: 322093 - RNA, 19 nt, Homo sapiens
  misc_RNA (1)...(19): siRNA sense strand
gaggaugauuguuacuaca

SEQ ID NO: 322094 - RNA, 19 nt, Homo sapiens
  misc_RNA (1)...(19): siRNA sense strand
ggauagaugggcagcagaa

SEQ ID NO: 322095 - RNA, 19 nt, Homo sapiens
  misc_RNA (1)...(19): siRNA sense strand
gaacaagcucaguauaaaa

SEQ ID NO: 322096 - RNA, 19 nt, Homo sapiens
  misc_RNA (1)...(19): siRNA sense strand
ggugacuucgucuaaauuu

SEQ ID NO: 322097 - RNA, 19 nt, Homo sapiens
  misc_RNA (1)...(19): siRNA sense strand
caagaagggaaauggaaga

SEQ ID NO: 322098 - RNA, 19 nt, Homo sapiens
  misc_RNA (1)...(19): siRNA sense strand
gcuggaggaugauuguuac

SEQ ID NO: 322099 - RNA, 19 nt, Homo sapiens
  misc_RNA (1)...(19): siRNA sense strand
gguggauggauuaagaaua

SEQ ID NO: 322100 - RNA, 19 nt, Homo sapiens
  misc_RNA (1)...(19): siRNA sense strand
cauuauaucccagcagaaa

SEQ ID NO: 322101 - RNA, 19 nt, Homo sapiens
  misc_RNA (1)...(19): siRNA sense strand
ugagaggccucgucaccau

SEQ ID NO: 322102 - RNA, 19 nt, Homo sapiens
  misc_RNA (1)...(19): siRNA sense strand
ccaguccgccuuuguugaa

SEQ ID NO: 322103 - RNA, 19 nt, Homo sapiens
  misc_RNA (1)...(19): siRNA sense strand
ccucgucaccaucacguua

SEQ ID NO: 322104 - RNA, 19 nt, Homo sapiens
  misc_RNA (1)...(19): siRNA sense strand
aaggugacuucgucuaaau

SEQ ID NO: 322105 - RNA, 19 nt, Homo sapiens
  misc_RNA (1)...(19): siRNA sense strand
aagcugagccagaagcauu

SEQ ID NO: 322106 - RNA, 19 nt, Homo sapiens
  misc_RNA (1)...(19): siRNA sense strand
ggaauccuaugugaagcau

SEQ ID NO: 322107 - RNA, 19 nt, Homo sapiens
  misc_RNA (1)...(19): siRNA sense strand
cagaagcauugcagucucu

SEQ ID NO: 322108 - RNA, 19 nt, Homo sapiens
  misc_RNA (1)...(19): siRNA sense strand
aaacaagaagggaaaugga

SEQ ID NO: 322109 - RNA, 19 nt, Homo sapiens
  misc_RNA (1)...(19): siRNA sense strand
augaacaagcucaguauaa

SEQ ID NO: 322110 - RNA, 19 nt, Homo sapiens
  misc_RNA (1)...(19): siRNA sense strand
gaagaaaagacugaaguga

SEQ ID NO: 322111 - RNA, 19 nt, Homo sapiens
  misc_RNA (1)...(19): siRNA sense strand
gaggagcacaggaagaaag

SEQ ID NO: 322112 - RNA, 19 nt, Homo sapiens
  misc_RNA (1)...(19): siRNA sense strand
uaugaacaagcucaguaua

SEQ ID NO: 322113 - RNA, 19 nt, Homo sapiens
  misc_RNA (1)...(19): siRNA sense strand
caaacaagaagggaaaugg

SEQ ID NO: 322114 - RNA, 19 nt, Homo sapiens
  misc_RNA (1)...(19): siRNA sense strand
gagcacaggaagaaagaag

SEQ ID NO: 322115 - RNA, 19 nt, Homo sapiens
  misc_RNA (1)...(19): siRNA sense strand
uaacaggagccaggaggaa

SEQ ID NO: 322116 - RNA, 19 nt, Homo sapiens
  misc_RNA (1)...(19): siRNA sense strand
agaagaagcgcugcagguu

SEQ ID NO: 322117 - RNA, 19 nt, Homo sapiens
  misc_RNA (1)...(19): siRNA sense strand
gcagcuggaggaugauugu

SEQ ID NO: 322118 - RNA, 19 nt, Homo sapiens
  misc_RNA (1)...(19): siRNA sense strand
gaagcauugcagucucuga

SEQ ID NO: 322119 - RNA, 19 nt, Homo sapiens
  misc_RNA (1)...(19): siRNA sense strand
accaacaucauaacgauuu

SEQ ID NO: 322120 - RNA, 19 nt, Homo sapiens
  misc_RNA (1)...(19): siRNA sense strand
uagaugggcagcagaagau

SEQ ID NO: 322121 - RNA, 19 nt, Homo sapiens
  misc_RNA (1)...(19): siRNA sense strand
ugguguggacucugucuua

SEQ ID NO: 322122 - RNA, 19 nt, Homo sapiens
  misc_RNA (1)...(19): siRNA sense strand
gagaugguggauggauuaa

SEQ ID NO: 322123 - RNA, 19 nt, Homo sapiens
  misc_RNA (1)...(19): siRNA sense strand
uguggacucugucuuaaaa

SEQ ID NO: 322124 - RNA, 19 nt, Homo sapiens
  misc_RNA (1)...(19): siRNA sense strand
aggagaugguggauggauu

SEQ ID NO: 322125 - RNA, 19 nt, Homo sapiens
  misc_RNA (1)...(19): siRNA sense strand
ugugacaggcuuucugaga

SEQ ID NO: 322126 - RNA, 19 nt, Homo sapiens
  misc_RNA (1)...(19): siRNA sense strand
aacaagaagggaaauggaa

SEQ ID NO: 322127 - RNA, 19 nt, Homo sapiens
  misc_RNA (1)...(19): siRNA sense strand
ccacgccacaguccacaga

SEQ ID NO: 322128 - RNA, 19 nt, Homo sapiens
  misc_RNA (1)...(19): siRNA sense strand
agcguaaauuggcaagaaa

SEQ ID NO: 322129 - RNA, 19 nt, Homo sapiens
  misc_RNA (1)...(19): siRNA sense strand
gaaaucccugaaguucuga

SEQ ID NO: 322130 - RNA, 19 nt, Homo sapiens
  misc_RNA (1)...(19): siRNA sense strand
cauuaagcaguuccucuga

SEQ ID NO: 322131 - RNA, 19 nt, Homo sapiens
  misc_RNA (1)...(19): siRNA sense strand
gaugggcagcagaagauca

SEQ ID NO: 322132 - RNA, 19 nt, Homo sapiens
  misc_RNA (1)...(19): siRNA sense strand
ccagaaagcuccuugugaa

SEQ ID NO: 322133 - RNA, 19 nt, Homo sapiens
  misc_RNA (1)...(19): siRNA sense strand
gagcuucggucucguauug

SEQ ID NO: 322134 - RNA, 19 nt, Homo sapiens
  misc_RNA (1)...(19): siRNA sense strand
gagaagacuuagacccuuu

SEQ ID NO: 322135 - RNA, 19 nt, Homo sapiens
  misc_RNA (1)...(19): siRNA sense strand
gcagcaugauccucaaugu

SEQ ID NO: 322136 - RNA, 19 nt, Homo sapiens
  misc_RNA (1)...(19): siRNA sense strand
ucggagagguggcaugauu

SEQ ID NO: 322137 - RNA, 19 nt, Homo sapiens
  misc_RNA (1)...(19): siRNA sense strand
gaaagcuccuugugaaagc

SEQ ID NO: 322138 - RNA, 19 nt, Homo sapiens
  misc_RNA (1)...(19): siRNA sense strand
ggaccuacaagaacaguga

SEQ ID NO: 322139 - RNA, 19 nt, Homo sapiens
  misc_RNA (1)...(19): siRNA sense strand
gggcuacgaugacauguac

SEQ ID NO: 322140 - RNA, 19 nt, Homo sapiens
  misc_RNA (1)...(19): siRNA sense strand
ccaaugauaagaagucaga

SEQ ID NO: 322141 - RNA, 19 nt, Homo sapiens
  misc_RNA (1)...(19): siRNA sense strand
ggaaaaggcuaauguaagc

SEQ ID NO: 322142 - RNA, 19 nt, Homo sapiens
  misc_RNA (1)...(19): siRNA sense strand
caacaauaaagaccuguau

SEQ ID NO: 322143 - RNA, 19 nt, Homo sapiens
  misc_RNA (1)...(19): siRNA sense strand
caagaacagugaggagcuu

SEQ ID NO: 322144 - RNA, 19 nt, Homo sapiens
  misc_RNA (1)...(19): siRNA sense strand
gguggaacaacaauaaaga

SEQ ID NO: 322145 - RNA, 19 nt, Homo sapiens
  misc_RNA (1)...(19): siRNA sense strand
gaggagcuucggucucgua

SEQ ID NO: 322146 - RNA, 19 nt, Homo sapiens
  misc_RNA (1)...(19): siRNA sense strand
caucacaccuauccaugag

SEQ ID NO: 322147 - RNA, 19 nt, Homo sapiens
  misc_RNA (1)...(19): siRNA sense strand
acaauaaagaccuguaugu

SEQ ID NO: 322148 - RNA, 19 nt, Homo sapiens
  misc_RNA (1)...(19): siRNA sense strand
ggagagguggcaugauugu

SEQ ID NO: 322149 - RNA, 19 nt, Homo sapiens
  misc_RNA (1)...(19): siRNA sense strand
cagaaagcuccuugugaaa

SEQ ID NO: 322150 - RNA, 19 nt, Homo sapiens
  misc_RNA (1)...(19): siRNA sense strand
ggaaucaucacaccuaucc

SEQ ID NO: 322151 - RNA, 19 nt, Homo sapiens
  misc_RNA (1)...(19): siRNA sense strand
ccagcuggguggaacaaca

SEQ ID NO: 322152 - RNA, 19 nt, Homo sapiens
  misc_RNA (1)...(19): siRNA sense strand
caauaaagaccuguauguc

SEQ ID NO: 322153 - RNA, 19 nt, Homo sapiens
  misc_RNA (1)...(19): siRNA sense strand
cguauugugucuggaauca

SEQ ID NO: 322154 - RNA, 19 nt, Homo sapiens
  misc_RNA (1)...(19): siRNA sense strand
uauugugucuggaaucauc

SEQ ID NO: 322155 - RNA, 19 nt, Homo sapiens
  misc_RNA (1)...(19): siRNA sense strand
cagccucccuggugugauc

SEQ ID NO: 322156 - RNA, 19 nt, Homo sapiens
  misc_RNA (1)...(19): siRNA sense strand
uguauguccuccgguauga

SEQ ID NO: 322157 - RNA, 19 nt, Homo sapiens
  misc_RNA (1)...(19): siRNA sense strand
cagccgggucccaaugaua

SEQ ID NO: 322158 - RNA, 19 nt, Homo sapiens
  misc_RNA (1)...(19): siRNA sense strand
gaccuaacccagaccaucu

SEQ ID NO: 322159 - RNA, 19 nt, Homo sapiens
  misc_RNA (1)...(19): siRNA sense strand
gagaucuggcuucccaaga

SEQ ID NO: 322160 - RNA, 19 nt, Homo sapiens
  misc_RNA (1)...(19): siRNA sense strand
gcuucggucucguauugug

SEQ ID NO: 322161 - RNA, 19 nt, Homo sapiens
  misc_RNA (1)...(19): siRNA sense strand
auaaggauggguccagaaa

SEQ ID NO: 322162 - RNA, 19 nt, Homo sapiens
  misc_RNA (1)...(19): siRNA sense strand
cccaggagcucgcuuugac

SEQ ID NO: 322163 - RNA, 19 nt, Homo sapiens
  misc_RNA (1)...(19): siRNA sense strand
cuggguggaacaacaauaa

SEQ ID NO: 322164 - RNA, 19 nt, Homo sapiens
  misc_RNA (1)...(19): siRNA sense strand
ucuggaaucaucacaccua

SEQ ID NO: 322165 - RNA, 19 nt, Homo sapiens
  misc_RNA (1)...(19): siRNA sense strand
aaggauggguccagaaagc

SEQ ID NO: 322166 - RNA, 19 nt, Homo sapiens
  misc_RNA (1)...(19): siRNA sense strand
agaucuggcuucccaagag

SEQ ID NO: 322167 - RNA, 19 nt, Homo sapiens
  misc_RNA (1)...(19): siRNA sense strand
agaaagcuccuugugaaag

SEQ ID NO: 322168 - RNA, 19 nt, Homo sapiens
  misc_RNA (1)...(19): siRNA sense strand
gcuggguggaacaacaaua

SEQ ID NO: 322169 - RNA, 19 nt, Homo sapiens
  misc_RNA (1)...(19): siRNA sense strand
uccagaaagcuccuuguga

SEQ ID NO: 322170 - RNA, 19 nt, Homo sapiens
  misc_RNA (1)...(19): siRNA sense strand
gauuguggauccccugaga

SEQ ID NO: 322171 - RNA, 19 nt, Homo sapiens
  misc_RNA (1)...(19): siRNA sense strand
ccagaaagcuccuugugaa

SEQ ID NO: 322172 - RNA, 19 nt, Homo sapiens
  misc_RNA (1)...(19): siRNA sense strand
gagcuucggucucguauug

SEQ ID NO: 322173 - RNA, 19 nt, Homo sapiens
  misc_RNA (1)...(19): siRNA sense strand
gagaagacuuagacccuuu

SEQ ID NO: 322174 - RNA, 19 nt, Homo sapiens
  misc_RNA (1)...(19): siRNA sense strand
gcagcaugauccucaaugu

SEQ ID NO: 322175 - RNA, 19 nt, Homo sapiens
  misc_RNA (1)...(19): siRNA sense strand
ucggagagguggcaugauu

SEQ ID NO: 322176 - RNA, 19 nt, Homo sapiens
  misc_RNA (1)...(19): siRNA sense strand
gaaagcuccuugugaaagc

SEQ ID NO: 322177 - RNA, 19 nt, Homo sapiens
  misc_RNA (1)...(19): siRNA sense strand
ggaccuacaagaacaguga

SEQ ID NO: 322178 - RNA, 19 nt, Homo sapiens
  misc_RNA (1)...(19): siRNA sense strand
gggcuacgaugacauguac

SEQ ID NO: 322179 - RNA, 19 nt, Homo sapiens
  misc_RNA (1)...(19): siRNA sense strand
ccaaugauaagaagucaga

SEQ ID NO: 322180 - RNA, 19 nt, Homo sapiens
  misc_RNA (1)...(19): siRNA sense strand
ggaaaaggcuaauguaagc

SEQ ID NO: 322181 - RNA, 19 nt, Homo sapiens
  misc_RNA (1)...(19): siRNA sense strand
caacaauaaagaccuguau

SEQ ID NO: 322182 - RNA, 19 nt, Homo sapiens
  misc_RNA (1)...(19): siRNA sense strand
caagaacagugaggagcuu

SEQ ID NO: 322183 - RNA, 19 nt, Homo sapiens
  misc_RNA (1)...(19): siRNA sense strand
gguggaacaacaauaaaga

SEQ ID NO: 322184 - RNA, 19 nt, Homo sapiens
  misc_RNA (1)...(19): siRNA sense strand
gaggagcuucggucucgua

SEQ ID NO: 322185 - RNA, 19 nt, Homo sapiens
  misc_RNA (1)...(19): siRNA sense strand
caucacaccuauccaugag

SEQ ID NO: 322186 - RNA, 19 nt, Homo sapiens
  misc_RNA (1)...(19): siRNA sense strand
acaauaaagaccuguaugu

SEQ ID NO: 322187 - RNA, 19 nt, Homo sapiens
  misc_RNA (1)...(19): siRNA sense strand
ggagagguggcaugauugu

SEQ ID NO: 322188 - RNA, 19 nt, Homo sapiens
  misc_RNA (1)...(19): siRNA sense strand
cagaaagcuccuugugaaa

SEQ ID NO: 322189 - RNA, 19 nt, Homo sapiens
  misc_RNA (1)...(19): siRNA sense strand
ggaaucaucacaccuaucc

SEQ ID NO: 322190 - RNA, 19 nt, Homo sapiens
  misc_RNA (1)...(19): siRNA sense strand
ccagcuggguggaacaaca

SEQ ID NO: 322191 - RNA, 19 nt, Homo sapiens
  misc_RNA (1)...(19): siRNA sense strand
caauaaagaccuguauguc

SEQ ID NO: 322192 - RNA, 19 nt, Homo sapiens
  misc_RNA (1)...(19): siRNA sense strand
cguauugugucuggaauca

SEQ ID NO: 322193 - RNA, 19 nt, Homo sapiens
  misc_RNA (1)...(19): siRNA sense strand
uauugugucuggaaucauc

SEQ ID NO: 322194 - RNA, 19 nt, Homo sapiens
  misc_RNA (1)...(19): siRNA sense strand
cagccucccuggugugauc

SEQ ID NO: 322195 - RNA, 19 nt, Homo sapiens
  misc_RNA (1)...(19): siRNA sense strand
uguauguccuccgguauga

SEQ ID NO: 322196 - RNA, 19 nt, Homo sapiens
  misc_RNA (1)...(19): siRNA sense strand
cagccgggucccaaugaua

SEQ ID NO: 322197 - RNA, 19 nt, Homo sapiens
  misc_RNA (1)...(19): siRNA sense strand
gaccuaacccagaccaucu

SEQ ID NO: 322198 - RNA, 19 nt, Homo sapiens
  misc_RNA (1)...(19): siRNA sense strand
gagaucuggcuucccaaga

SEQ ID NO: 322199 - RNA, 19 nt, Homo sapiens
  misc_RNA (1)...(19): siRNA sense strand
gcuucggucucguauugug

SEQ ID NO: 322200 - RNA, 19 nt, Homo sapiens
  misc_RNA (1)...(19): siRNA sense strand
auaaggauggguccagaaa

SEQ ID NO: 322201 - RNA, 19 nt, Homo sapiens
  misc_RNA (1)...(19): siRNA sense strand
cccaggagcucgcuuugac

SEQ ID NO: 322202 - RNA, 19 nt, Homo sapiens
  misc_RNA (1)...(19): siRNA sense strand
cuggguggaacaacaauaa

SEQ ID NO: 322203 - RNA, 19 nt, Homo sapiens
  misc_RNA (1)...(19): siRNA sense strand
ucuggaaucaucacaccua

SEQ ID NO: 322204 - RNA, 19 nt, Homo sapiens
  misc_RNA (1)...(19): siRNA sense strand
aaggauggguccagaaagc

SEQ ID NO: 322205 - RNA, 19 nt, Homo sapiens
  misc_RNA (1)...(19): siRNA sense strand
agaucuggcuucccaagag

SEQ ID NO: 322206 - RNA, 19 nt, Homo sapiens
  misc_RNA (1)...(19): siRNA sense strand
agaaagcuccuugugaaag

SEQ ID NO: 322207 - RNA, 19 nt, Homo sapiens
  misc_RNA (1)...(19): siRNA sense strand
gcuggguggaacaacaaua

SEQ ID NO: 322208 - RNA, 19 nt, Homo sapiens
  misc_RNA (1)...(19): siRNA sense strand
uccagaaagcuccuuguga

SEQ ID NO: 322209 - RNA, 19 nt, Homo sapiens
  misc_RNA (1)...(19): siRNA sense strand
gauuguggauccccugaga

SEQ ID NO: 322210 - RNA, 19 nt, Homo sapiens
  misc_RNA (1)...(19): siRNA sense strand
ccagaaagcuccuugugaa

SEQ ID NO: 322211 - RNA, 19 nt, Homo sapiens
  misc_RNA (1)...(19): siRNA sense strand
gcagcaugauccucaaugu

SEQ ID NO: 322212 - RNA, 19 nt, Homo sapiens
  misc_RNA (1)...(19): siRNA sense strand
gaaagcuccuugugaaagc

SEQ ID NO: 322213 - RNA, 19 nt, Homo sapiens
  misc_RNA (1)...(19): siRNA sense strand
ggaccuacaagaacaguga

SEQ ID NO: 322214 - RNA, 19 nt, Homo sapiens
  misc_RNA (1)...(19): siRNA sense strand
ccaaugauaagaagucaga

SEQ ID NO: 322215 - RNA, 19 nt, Homo sapiens
  misc_RNA (1)...(19): siRNA sense strand
caacaauaaagaccuguau

SEQ ID NO: 322216 - RNA, 19 nt, Homo sapiens
  misc_RNA (1)...(19): siRNA sense strand
gguggaacaacaauaaaga

SEQ ID NO: 322217 - RNA, 19 nt, Homo sapiens
  misc_RNA (1)...(19): siRNA sense strand
acaauaaagaccuguaugu

SEQ ID NO: 322218 - RNA, 19 nt, Homo sapiens
  misc_RNA (1)...(19): siRNA sense strand
cagaaagcuccuugugaaa

SEQ ID NO: 322219 - RNA, 19 nt, Homo sapiens
  misc_RNA (1)...(19): siRNA sense strand
ccagcuggguggaacaaca

SEQ ID NO: 322220 - RNA, 19 nt, Homo sapiens
  misc_RNA (1)...(19): siRNA sense strand
caauaaagaccuguauguc

SEQ ID NO: 322221 - RNA, 19 nt, Homo sapiens
  misc_RNA (1)...(19): siRNA sense strand
uguauguccuccgguauga

SEQ ID NO: 322222 - RNA, 19 nt, Homo sapiens
  misc_RNA (1)...(19): siRNA sense strand
cagccgggucccaaugaua

SEQ ID NO: 322223 - RNA, 19 nt, Homo sapiens
  misc_RNA (1)...(19): siRNA sense strand
auaaggauggguccagaaa

SEQ ID NO: 322224 - RNA, 19 nt, Homo sapiens
  misc_RNA (1)...(19): siRNA sense strand
cuggguggaacaacaauaa

SEQ ID NO: 322225 - RNA, 19 nt, Homo sapiens
  misc_RNA (1)...(19): siRNA sense strand
aaggauggguccagaaagc

SEQ ID NO: 322226 - RNA, 19 nt, Homo sapiens
  misc_RNA (1)...(19): siRNA sense strand
agaaagcuccuugugaaag

SEQ ID NO: 322227 - RNA, 19 nt, Homo sapiens
  misc_RNA (1)...(19): siRNA sense strand
gcuggguggaacaacaaua

SEQ ID NO: 322228 - RNA, 19 nt, Homo sapiens
  misc_RNA (1)...(19): siRNA sense strand
uccagaaagcuccuuguga

SEQ ID NO: 322229 - RNA, 19 nt, Homo sapiens
  misc_RNA (1)...(19): siRNA sense strand
gaagaaaugcaauacauga

SEQ ID NO: 322230 - RNA, 19 nt, Homo sapiens
  misc_RNA (1)...(19): siRNA sense strand
gaaauuagcaggucuugau

SEQ ID NO: 322231 - RNA, 19 nt, Homo sapiens
  misc_RNA (1)...(19): siRNA sense strand
gaaacuacauaugcagauu

SEQ ID NO: 322232 - RNA, 19 nt, Homo sapiens
  misc_RNA (1)...(19): siRNA sense strand
gacagaaggugaagaagau

SEQ ID NO: 322233 - RNA, 19 nt, Homo sapiens
  misc_RNA (1)...(19): siRNA sense strand
gcaaugaauuagccuugaa

SEQ ID NO: 322234 - RNA, 19 nt, Homo sapiens
  misc_RNA (1)...(19): siRNA sense strand
ugaagaagaugcacaacga

SEQ ID NO: 322235 - RNA, 19 nt, Homo sapiens
  misc_RNA (1)...(19): siRNA sense strand
ggaagaacagguagaagaa

SEQ ID NO: 322236 - RNA, 19 nt, Homo sapiens
  misc_RNA (1)...(19): siRNA sense strand
gaagaugcacaacgaaguu

SEQ ID NO: 322237 - RNA, 19 nt, Homo sapiens
  misc_RNA (1)...(19): siRNA sense strand
caagacagaaggugaagaa

SEQ ID NO: 322238 - RNA, 19 nt, Homo sapiens
  misc_RNA (1)...(19): siRNA sense strand
caacaagacagaaggugaa

SEQ ID NO: 322239 - RNA, 19 nt, Homo sapiens
  misc_RNA (1)...(19): siRNA sense strand
gaagaacagguagaagaaa

SEQ ID NO: 322240 - RNA, 19 nt, Homo sapiens
  misc_RNA (1)...(19): siRNA sense strand
gcaaguggcaacagcaaug

SEQ ID NO: 322241 - RNA, 19 nt, Homo sapiens
  misc_RNA (1)...(19): siRNA sense strand
gaagaagaugcacaacgaa

SEQ ID NO: 322242 - RNA, 19 nt, Homo sapiens
  misc_RNA (1)...(19): siRNA sense strand
uggcaacagcaaugaauua

SEQ ID NO: 322243 - RNA, 19 nt, Homo sapiens
  misc_RNA (1)...(19): siRNA sense strand
aagaacagguagaagaaau

SEQ ID NO: 322244 - RNA, 19 nt, Homo sapiens
  misc_RNA (1)...(19): siRNA sense strand
gcacaacgaaguucuacag

SEQ ID NO: 322245 - RNA, 19 nt, Homo sapiens
  misc_RNA (1)...(19): siRNA sense strand
uacaugauauccugguuuc

SEQ ID NO: 322246 - RNA, 19 nt, Homo sapiens
  misc_RNA (1)...(19): siRNA sense strand
agacagaaggugaagaaga

SEQ ID NO: 322247 - RNA, 19 nt, Homo sapiens
  misc_RNA (1)...(19): siRNA sense strand
ggaaacuacauaugcagau

SEQ ID NO: 322248 - RNA, 19 nt, Homo sapiens
  misc_RNA (1)...(19): siRNA sense strand
caaugaauuagccuugaaa

SEQ ID NO: 322249 - RNA, 19 nt, Homo sapiens
  misc_RNA (1)...(19): siRNA sense strand
guagaagaaaugcaauaca

SEQ ID NO: 322250 - RNA, 19 nt, Homo sapiens
  misc_RNA (1)...(19): siRNA sense strand
aaauuagcaggucuugaua

SEQ ID NO: 322251 - RNA, 19 nt, Homo sapiens
  misc_RNA (1)...(19): siRNA sense strand
agcaaaaucugaaagcuaa

SEQ ID NO: 322252 - RNA, 19 nt, Homo sapiens
  misc_RNA (1)...(19): siRNA sense strand
aggaagaacagguagaaga

SEQ ID NO: 322253 - RNA, 19 nt, Homo sapiens
  misc_RNA (1)...(19): siRNA sense strand
gaugcacaacgaaguucua

SEQ ID NO: 322254 - RNA, 19 nt, Homo sapiens
  misc_RNA (1)...(19): siRNA sense strand
gauaucaacaagacagaag

SEQ ID NO: 322255 - RNA, 19 nt, Homo sapiens
  misc_RNA (1)...(19): siRNA sense strand
gaacagguagaagaaaugc

SEQ ID NO: 322256 - RNA, 19 nt, Homo sapiens
  misc_RNA (1)...(19): siRNA sense strand
caaguggcaacagcaauga

SEQ ID NO: 322257 - RNA, 19 nt, Homo sapiens
  misc_RNA (1)...(19): siRNA sense strand
ucaggaagaacagguagaa

SEQ ID NO: 322258 - RNA, 19 nt, Homo sapiens
  misc_RNA (1)...(19): siRNA sense strand
acagguagaagaaaugcaa

SEQ ID NO: 322259 - RNA, 19 nt, Homo sapiens
  misc_RNA (1)...(19): siRNA sense strand
agaagaaaugcaauacaug

SEQ ID NO: 322260 - RNA, 19 nt, Homo sapiens
  misc_RNA (1)...(19): siRNA sense strand
uguggaaacuacauaugca

SEQ ID NO: 322261 - RNA, 19 nt, Homo sapiens
  misc_RNA (1)...(19): siRNA sense strand
gguagaagaaaugcaauac

SEQ ID NO: 322262 - RNA, 19 nt, Homo sapiens
  misc_RNA (1)...(19): siRNA sense strand
auuagcaggucuugauauc

SEQ ID NO: 322263 - RNA, 19 nt, Homo sapiens
  misc_RNA (1)...(19): siRNA sense strand
gagaagcagcaaaaucuga

SEQ ID NO: 322264 - RNA, 19 nt, Homo sapiens
  misc_RNA (1)...(19): siRNA sense strand
gaagaaaugcaauacauga

SEQ ID NO: 322265 - RNA, 19 nt, Homo sapiens
  misc_RNA (1)...(19): siRNA sense strand
gaaauuagcaggucuugau

SEQ ID NO: 322266 - RNA, 19 nt, Homo sapiens
  misc_RNA (1)...(19): siRNA sense strand
gaaacuacauaugcagauu

SEQ ID NO: 322267 - RNA, 19 nt, Homo sapiens
  misc_RNA (1)...(19): siRNA sense strand
gacagaaggugaagaagau

SEQ ID NO: 322268 - RNA, 19 nt, Homo sapiens
  misc_RNA (1)...(19): siRNA sense strand
gcaaugaauuagccuugaa

SEQ ID NO: 322269 - RNA, 19 nt, Homo sapiens
  misc_RNA (1)...(19): siRNA sense strand
ugaagaagaugcacaacga

SEQ ID NO: 322270 - RNA, 19 nt, Homo sapiens
  misc_RNA (1)...(19): siRNA sense strand
ggaagaacagguagaagaa

SEQ ID NO: 322271 - RNA, 19 nt, Homo sapiens
  misc_RNA (1)...(19): siRNA sense strand
gaagaugcacaacgaaguu

SEQ ID NO: 322272 - RNA, 19 nt, Homo sapiens
  misc_RNA (1)...(19): siRNA sense strand
caagacagaaggugaagaa

SEQ ID NO: 322273 - RNA, 19 nt, Homo sapiens
  misc_RNA (1)...(19): siRNA sense strand
caacaagacagaaggugaa

SEQ ID NO: 322274 - RNA, 19 nt, Homo sapiens
  misc_RNA (1)...(19): siRNA sense strand
gaagaacagguagaagaaa

SEQ ID NO: 322275 - RNA, 19 nt, Homo sapiens
  misc_RNA (1)...(19): siRNA sense strand
gcaaguggcaacagcaaug

SEQ ID NO: 322276 - RNA, 19 nt, Homo sapiens
  misc_RNA (1)...(19): siRNA sense strand
gaagaagaugcacaacgaa

SEQ ID NO: 322277 - RNA, 19 nt, Homo sapiens
  misc_RNA (1)...(19): siRNA sense strand
uggcaacagcaaugaauua

SEQ ID NO: 322278 - RNA, 19 nt, Homo sapiens
  misc_RNA (1)...(19): siRNA sense strand
aagaacagguagaagaaau

SEQ ID NO: 322279 - RNA, 19 nt, Homo sapiens
  misc_RNA (1)...(19): siRNA sense strand
gcacaacgaaguucuacag

SEQ ID NO: 322280 - RNA, 19 nt, Homo sapiens
  misc_RNA (1)...(19): siRNA sense strand
uacaugauauccugguuuc

SEQ ID NO: 322281 - RNA, 19 nt, Homo sapiens
  misc_RNA (1)...(19): siRNA sense strand
agacagaaggugaagaaga

SEQ ID NO: 322282 - RNA, 19 nt, Homo sapiens
  misc_RNA (1)...(19): siRNA sense strand
ggaaacuacauaugcagau

SEQ ID NO: 322283 - RNA, 19 nt, Homo sapiens
  misc_RNA (1)...(19): siRNA sense strand
caaugaauuagccuugaaa

SEQ ID NO: 322284 - RNA, 19 nt, Homo sapiens
  misc_RNA (1)...(19): siRNA sense strand
guagaagaaaugcaauaca

SEQ ID NO: 322285 - RNA, 19 nt, Homo sapiens
  misc_RNA (1)...(19): siRNA sense strand
aaauuagcaggucuugaua

SEQ ID NO: 322286 - RNA, 19 nt, Homo sapiens
  misc_RNA (1)...(19): siRNA sense strand
agcaaaaucugaaagcuaa

SEQ ID NO: 322287 - RNA, 19 nt, Homo sapiens
  misc_RNA (1)...(19): siRNA sense strand
aggaagaacagguagaaga

SEQ ID NO: 322288 - RNA, 19 nt, Homo sapiens
  misc_RNA (1)...(19): siRNA sense strand
gaugcacaacgaaguucua

SEQ ID NO: 322289 - RNA, 19 nt, Homo sapiens
  misc_RNA (1)...(19): siRNA sense strand
gauaucaacaagacagaag

SEQ ID NO: 322290 - RNA, 19 nt, Homo sapiens
  misc_RNA (1)...(19): siRNA sense strand
gaacagguagaagaaaugc

SEQ ID NO: 322291 - RNA, 19 nt, Homo sapiens
  misc_RNA (1)...(19): siRNA sense strand
caaguggcaacagcaauga

SEQ ID NO: 322292 - RNA, 19 nt, Homo sapiens
  misc_RNA (1)...(19): siRNA sense strand
ucaggaagaacagguagaa

SEQ ID NO: 322293 - RNA, 19 nt, Homo sapiens
  misc_RNA (1)...(19): siRNA sense strand
acagguagaagaaaugcaa

SEQ ID NO: 322294 - RNA, 19 nt, Homo sapiens
  misc_RNA (1)...(19): siRNA sense strand
agaagaaaugcaauacaug

SEQ ID NO: 322295 - RNA, 19 nt, Homo sapiens
  misc_RNA (1)...(19): siRNA sense strand
uguggaaacuacauaugca

SEQ ID NO: 322296 - RNA, 19 nt, Homo sapiens
  misc_RNA (1)...(19): siRNA sense strand
gguagaagaaaugcaauac

SEQ ID NO: 322297 - RNA, 19 nt, Homo sapiens
  misc_RNA (1)...(19): siRNA sense strand
auuagcaggucuugauauc

SEQ ID NO: 322298 - RNA, 19 nt, Homo sapiens
  misc_RNA (1)...(19): siRNA sense strand
gagaagcagcaaaaucuga

SEQ ID NO: 322299 - RNA, 19 nt, Homo sapiens
  misc_RNA (1)...(19): siRNA sense strand
cggaaaugcuggauaaauu

SEQ ID NO: 322300 - RNA, 19 nt, Homo sapiens
  misc_RNA (1)...(19): siRNA sense strand
ggagagucccaaugucuua

SEQ ID NO: 322301 - RNA, 19 nt, Homo sapiens
  misc_RNA (1)...(19): siRNA sense strand
ggaaaugcuggauaaauug

SEQ ID NO: 322302 - RNA, 19 nt, Homo sapiens
  misc_RNA (1)...(19): siRNA sense strand
ucuaugaugugaccaauga

SEQ ID NO: 322303 - RNA, 19 nt, Homo sapiens
  misc_RNA (1)...(19): siRNA sense strand
gaauggauuugguggugaa

SEQ ID NO: 322304 - RNA, 19 nt, Homo sapiens
  misc_RNA (1)...(19): siRNA sense strand
caacaggaauggauuuggu

SEQ ID NO: 322305 - RNA, 19 nt, Homo sapiens
  misc_RNA (1)...(19): siRNA sense strand
aaacauccgugaaagagau

SEQ ID NO: 322306 - RNA, 19 nt, Homo sapiens
  misc_RNA (1)...(19): siRNA sense strand
ugaaagagauggaaaacuu

SEQ ID NO: 322307 - RNA, 19 nt, Homo sapiens
  misc_RNA (1)...(19): siRNA sense strand
ucuuaugucucgucuauga

SEQ ID NO: 322308 - RNA, 19 nt, Homo sapiens
  misc_RNA (1)...(19): siRNA sense strand
ugucuuaugucucgucuau

SEQ ID NO: 322309 - RNA, 19 nt, Homo sapiens
  misc_RNA (1)...(19): siRNA sense strand
gaaaugcuggauaaauugu

SEQ ID NO: 322310 - RNA, 19 nt, Homo sapiens
  misc_RNA (1)...(19): siRNA sense strand
gaaacauccgugaaagaga

SEQ ID NO: 322311 - RNA, 19 nt, Homo sapiens
  misc_RNA (1)...(19): siRNA sense strand
gggagaagguggagguuuu

SEQ ID NO: 322312 - RNA, 19 nt, Homo sapiens
  misc_RNA (1)...(19): siRNA sense strand
ugacaacaggaauggauuu

SEQ ID NO: 322313 - RNA, 19 nt, Homo sapiens
  misc_RNA (1)...(19): siRNA sense strand
gagacaguguggaacucuu

SEQ ID NO: 322314 - RNA, 19 nt, Homo sapiens
  misc_RNA (1)...(19): siRNA sense strand
guguggaacucuucauuuu

SEQ ID NO: 322315 - RNA, 19 nt, Homo sapiens
  misc_RNA (1)...(19): siRNA sense strand
aagaauccuucaacaacug

SEQ ID NO: 322316 - RNA, 19 nt, Homo sapiens
  misc_RNA (1)...(19): siRNA sense strand
gugaagacagugccaguuc

SEQ ID NO: 322317 - RNA, 19 nt, Homo sapiens
  misc_RNA (1)...(19): siRNA sense strand
gagucccaaugucuuaugu

SEQ ID NO: 322318 - RNA, 19 nt, Homo sapiens
  misc_RNA (1)...(19): siRNA sense strand
ugaaacauccgugaaagag

SEQ ID NO: 322319 - RNA, 19 nt, Homo sapiens
  misc_RNA (1)...(19): siRNA sense strand
ugaugugaccaaugaagaa

SEQ ID NO: 322320 - RNA, 19 nt, Homo sapiens
  misc_RNA (1)...(19): siRNA sense strand
agaccgcccuggcacagau

SEQ ID NO: 322321 - RNA, 19 nt, Homo sapiens
  misc_RNA (1)...(19): siRNA sense strand
gacaacaggaauggauuug

SEQ ID NO: 322322 - RNA, 19 nt, Homo sapiens
  misc_RNA (1)...(19): siRNA sense strand
gaugugaccaaugaagaau

SEQ ID NO: 322323 - RNA, 19 nt, Homo sapiens
  misc_RNA (1)...(19): siRNA sense strand
gucccaaugucuuaugucu

SEQ ID NO: 322324 - RNA, 19 nt, Homo sapiens
  misc_RNA (1)...(19): siRNA sense strand
ggccuggaauguuuugaaa

SEQ ID NO: 322325 - RNA, 19 nt, Homo sapiens
  misc_RNA (1)...(19): siRNA sense strand
gaucuuccgcagugaugga

SEQ ID NO: 322326 - RNA, 19 nt, Homo sapiens
  misc_RNA (1)...(19): siRNA sense strand
uucaacaacugcagcaagu

SEQ ID NO: 322327 - RNA, 19 nt, Homo sapiens
  misc_RNA (1)...(19): siRNA sense strand
gaaaagcuacacccugaca

SEQ ID NO: 322328 - RNA, 19 nt, Homo sapiens
  misc_RNA (1)...(19): siRNA sense strand
cgacaaggcucgcuucucu

SEQ ID NO: 322329 - RNA, 19 nt, Homo sapiens
  misc_RNA (1)...(19): siRNA sense strand
gauggcagaucagaaagaa

SEQ ID NO: 322330 - RNA, 19 nt, Homo sapiens
  misc_RNA (1)...(19): siRNA sense strand
gugagcagcuuccgaguca

SEQ ID NO: 322331 - RNA, 19 nt, Homo sapiens
  misc_RNA (1)...(19): siRNA sense strand
gaaaugaugaccacuggau

SEQ ID NO: 322332 - RNA, 19 nt, Homo sapiens
  misc_RNA (1)...(19): siRNA sense strand
cagcuacuccuucguguuu

SEQ ID NO: 322333 - RNA, 19 nt, Homo sapiens
  misc_RNA (1)...(19): siRNA sense strand
cgaggacccugccaaguuc

SEQ ID NO: 322334 - RNA, 19 nt, Homo sapiens
  misc_RNA (1)...(19): siRNA sense strand
acacguaugccguacagua

SEQ ID NO: 322335 - RNA, 19 nt, Homo sapiens
  misc_RNA (1)...(19): siRNA sense strand
gguacgccauggccaagaa

SEQ ID NO: 322336 - RNA, 19 nt, Homo sapiens
  misc_RNA (1)...(19): siRNA sense strand
gacgagaccggccagauga

SEQ ID NO: 322337 - RNA, 19 nt, Homo sapiens
  misc_RNA (1)...(19): siRNA sense strand
ggacgugugcgcagacaug

SEQ ID NO: 322338 - RNA, 19 nt, Homo sapiens
  misc_RNA (1)...(19): siRNA sense strand
cagaagcgcagaagauugu

SEQ ID NO: 322339 - RNA, 19 nt, Homo sapiens
  misc_RNA (1)...(19): siRNA sense strand
gggcguagccuccuuucug

SEQ ID NO: 322340 - RNA, 19 nt, Homo sapiens
  misc_RNA (1)...(19): siRNA sense strand
gaagcgcagaagauuguaa

SEQ ID NO: 322341 - RNA, 19 nt, Homo sapiens
  misc_RNA (1)...(19): siRNA sense strand
ucaaggagaacuucgacaa

SEQ ID NO: 322342 - RNA, 19 nt, Homo sapiens
  misc_RNA (1)...(19): siRNA sense strand
ccgaggacccugccaaguu

SEQ ID NO: 322343 - RNA, 19 nt, Homo sapiens
  misc_RNA (1)...(19): siRNA sense strand
caacaucgucgcggaguuc

SEQ ID NO: 322344 - RNA, 19 nt, Homo sapiens
  misc_RNA (1)...(19): siRNA sense strand
gugggcaccuucacagaca

SEQ ID NO: 322345 - RNA, 19 nt, Homo sapiens
  misc_RNA (1)...(19): siRNA sense strand
ccagaagcgcagaagauug

SEQ ID NO: 322346 - RNA, 19 nt, Homo sapiens
  misc_RNA (1)...(19): siRNA sense strand
cgacacguaugccguacag

SEQ ID NO: 322347 - RNA, 19 nt, Homo sapiens
  misc_RNA (1)...(19): siRNA sense strand
gcagaaaggaaaugaugac

SEQ ID NO: 322348 - RNA, 19 nt, Homo sapiens
  misc_RNA (1)...(19): siRNA sense strand
gaguccgucuuuugaauaa

SEQ ID NO: 322349 - RNA, 19 nt, Homo sapiens
  misc_RNA (1)...(19): siRNA sense strand
ugugggcgcucuugcuguu

SEQ ID NO: 322350 - RNA, 19 nt, Homo sapiens
  misc_RNA (1)...(19): siRNA sense strand
ccugccaaguucaagauga

SEQ ID NO: 322351 - RNA, 19 nt, Homo sapiens
  misc_RNA (1)...(19): siRNA sense strand
gaucgucgacacagacuac

SEQ ID NO: 322352 - RNA, 19 nt, Homo sapiens
  misc_RNA (1)...(19): siRNA sense strand
caaggagaacuucgacaag

SEQ ID NO: 322353 - RNA, 19 nt, Homo sapiens
  misc_RNA (1)...(19): siRNA sense strand
gagcagcuuccgagucaag

SEQ ID NO: 322354 - RNA, 19 nt, Homo sapiens
  misc_RNA (1)...(19): siRNA sense strand
cugcagaaaggaaaugaug

SEQ ID NO: 322355 - RNA, 19 nt, Homo sapiens
  misc_RNA (1)...(19): siRNA sense strand
cccagaagcgcagaagauu

SEQ ID NO: 322356 - RNA, 19 nt, Homo sapiens
  misc_RNA (1)...(19): siRNA sense strand
ugcgauggcagaucagaaa

SEQ ID NO: 322357 - RNA, 19 nt, Homo sapiens
  misc_RNA (1)...(19): siRNA sense strand
gaacagacucucaguauaa

SEQ ID NO: 322358 - RNA, 19 nt, Homo sapiens
  misc_RNA (1)...(19): siRNA sense strand
gaagauacuuggcacuauu

SEQ ID NO: 322359 - RNA, 19 nt, Homo sapiens
  misc_RNA (1)...(19): siRNA sense strand
ggaacagacucucaguaua

SEQ ID NO: 322360 - RNA, 19 nt, Homo sapiens
  misc_RNA (1)...(19): siRNA sense strand
gaacuucauuggaaacuau

SEQ ID NO: 322361 - RNA, 19 nt, Homo sapiens
  misc_RNA (1)...(19): siRNA sense strand
gaaacuaugcuucaacauu

SEQ ID NO: 322362 - RNA, 19 nt, Homo sapiens
  misc_RNA (1)...(19): siRNA sense strand
ggugaccauucguuuauua

SEQ ID NO: 322363 - RNA, 19 nt, Homo sapiens
  misc_RNA (1)...(19): siRNA sense strand
ugaagcccuuuauuucuua

SEQ ID NO: 322364 - RNA, 19 nt, Homo sapiens
  misc_RNA (1)...(19): siRNA sense strand
gaccauucguuuauuagaa

SEQ ID NO: 322365 - RNA, 19 nt, Homo sapiens
  misc_RNA (1)...(19): siRNA sense strand
gggaaagaaugccaagaug

SEQ ID NO: 322366 - RNA, 19 nt, Homo sapiens
  misc_RNA (1)...(19): siRNA sense strand
gcaagaugcuuugguugug

SEQ ID NO: 322367 - RNA, 19 nt, Homo sapiens
  misc_RNA (1)...(19): siRNA sense strand
gaaagaaugccaagauggu

SEQ ID NO: 322368 - RNA, 19 nt, Homo sapiens
  misc_RNA (1)...(19): siRNA sense strand
uaaaucugaucccuuucua

SEQ ID NO: 322369 - RNA, 19 nt, Homo sapiens
  misc_RNA (1)...(19): siRNA sense strand
uauacaaaguuccagauug

SEQ ID NO: 322370 - RNA, 19 nt, Homo sapiens
  misc_RNA (1)...(19): siRNA sense strand
cuuuaaaucugaucccuuu

SEQ ID NO: 322371 - RNA, 19 nt, Homo sapiens
  misc_RNA (1)...(19): siRNA sense strand
gcuuggaacuauauguuga

SEQ ID NO: 322372 - RNA, 19 nt, Homo sapiens
  misc_RNA (1)...(19): siRNA sense strand
caauggaaguguuucaaag

SEQ ID NO: 322373 - RNA, 19 nt, Homo sapiens
  misc_RNA (1)...(19): siRNA sense strand
ggaaguguuucaaaguucu

SEQ ID NO: 322374 - RNA, 19 nt, Homo sapiens
  misc_RNA (1)...(19): siRNA sense strand
guuaugauauuccucucaa

SEQ ID NO: 322375 - RNA, 19 nt, Homo sapiens
  misc_RNA (1)...(19): siRNA sense strand
ucaugaagcccuuuauuuc

SEQ ID NO: 322376 - RNA, 19 nt, Homo sapiens
  misc_RNA (1)...(19): siRNA sense strand
gaggaagaaguuugagaaa

SEQ ID NO: 322377 - RNA, 19 nt, Homo sapiens
  misc_RNA (1)...(19): siRNA sense strand
gaaaaccaauggaaguguu

SEQ ID NO: 322378 - RNA, 19 nt, Homo sapiens
  misc_RNA (1)...(19): siRNA sense strand
aauggaagcugaauaugca

SEQ ID NO: 322379 - RNA, 19 nt, Homo sapiens
  misc_RNA (1)...(19): siRNA sense strand
gaauggaagcugaauaugc

SEQ ID NO: 322380 - RNA, 19 nt, Homo sapiens
  misc_RNA (1)...(19): siRNA sense strand
ugagaauccucugcaagaa

SEQ ID NO: 322381 - RNA, 19 nt, Homo sapiens
  misc_RNA (1)...(19): siRNA sense strand
gaaaagaggaagaaguuug

SEQ ID NO: 322382 - RNA, 19 nt, Homo sapiens
  misc_RNA (1)...(19): siRNA sense strand
guucuucucuuuaaucacu

SEQ ID NO: 322383 - RNA, 19 nt, Homo sapiens
  misc_RNA (1)...(19): siRNA sense strand
ugaagauacuuggcacuau

SEQ ID NO: 322384 - RNA, 19 nt, Homo sapiens
  misc_RNA (1)...(19): siRNA sense strand
ccaauggaaguguuucaaa

SEQ ID NO: 322385 - RNA, 19 nt, Homo sapiens
  misc_RNA (1)...(19): siRNA sense strand
ucucaacccuuuaaaucug

SEQ ID NO: 322386 - RNA, 19 nt, Homo sapiens
  misc_RNA (1)...(19): siRNA sense strand
guauccagcugccuuugau

SEQ ID NO: 322387 - RNA, 19 nt, Homo sapiens
  misc_RNA (1)...(19): siRNA sense strand
gaaucgugcuuuuguguga

SEQ ID NO: 322388 - RNA, 19 nt, Homo sapiens
  misc_RNA (1)...(19): siRNA sense strand
guucucggcaucaugauuu

SEQ ID NO: 322389 - RNA, 19 nt, Homo sapiens
  misc_RNA (1)...(19): siRNA sense strand
auacaaaguuccagauugc

SEQ ID NO: 322390 - RNA, 19 nt, Homo sapiens
  misc_RNA (1)...(19): siRNA sense strand
gaaacuauugauguccaua

SEQ ID NO: 322391 - RNA, 19 nt, Homo sapiens
  misc_RNA (1)...(19): siRNA sense strand
guugugcagucauugaaga

SEQ ID NO: 322392 - RNA, 19 nt, Homo sapiens
  misc_RNA (1)...(19): siRNA sense strand
gaagcccuuuauuucuuau

SEQ ID NO: 322393 - RNA, 19 nt, Homo sapiens
  misc_RNA (1)...(19): siRNA sense strand
uggaaacuaugcuucaaca

SEQ ID NO: 322394 - RNA, 19 nt, Homo sapiens
  misc_RNA (1)...(19): siRNA sense strand
caaaugaaagugucagcau

SEQ ID NO: 322395 - RNA, 19 nt, Homo sapiens
  misc_RNA (1)...(19): siRNA sense strand
uggaauggaagcugaauau

SEQ ID NO: 322396 - RNA, 19 nt, Homo sapiens
  misc_RNA (1)...(19): siRNA sense strand
uggaacagacucucaguau

SEQ ID NO: 322397 - RNA, 19 nt, Homo sapiens
  misc_RNA (1)...(19): siRNA sense strand
ugaauaugcacauccuuug

SEQ ID NO: 322398 - RNA, 19 nt, Homo sapiens
  misc_RNA (1)...(19): siRNA sense strand
guucaugaagcccuuuauu

SEQ ID NO: 322399 - RNA, 19 nt, Homo sapiens
  misc_RNA (1)...(19): siRNA sense strand
aaucugaucccuuucuaug

SEQ ID NO: 322400 - RNA, 19 nt, Homo sapiens
  misc_RNA (1)...(19): siRNA sense strand
augaagcccuuuauuucuu

SEQ ID NO: 322401 - RNA, 19 nt, Homo sapiens
  misc_RNA (1)...(19): siRNA sense strand
gaucccuuauaguucauga

SEQ ID NO: 322402 - RNA, 19 nt, Homo sapiens
  misc_RNA (1)...(19): siRNA sense strand
agaggaagaaguuugagaa

SEQ ID NO: 322403 - RNA, 19 nt, Homo sapiens
  misc_RNA (1)...(19): siRNA sense strand
gaauaugcacauccuuugg

SEQ ID NO: 322404 - RNA, 19 nt, Homo sapiens
  misc_RNA (1)...(19): siRNA sense strand
gaagcugaauaugcacauc

SEQ ID NO: 322405 - RNA, 19 nt, Homo sapiens
  misc_RNA (1)...(19): siRNA sense strand
gcuguggaauauguagauu

SEQ ID NO: 322406 - RNA, 19 nt, Homo sapiens
  misc_RNA (1)...(19): siRNA sense strand
aaagaaugccaagauggua

SEQ ID NO: 322407 - RNA, 19 nt, Homo sapiens
  misc_RNA (1)...(19): siRNA sense strand
ugauuuguggaaccuauua

SEQ ID NO: 322408 - RNA, 19 nt, Homo sapiens
  misc_RNA (1)...(19): siRNA sense strand
uggaaguguuucaaaguuc

SEQ ID NO: 322409 - RNA, 19 nt, Homo sapiens
  misc_RNA (1)...(19): siRNA sense strand
ggcaagaugcuuugguugu

SEQ ID NO: 322410 - RNA, 19 nt, Homo sapiens
  misc_RNA (1)...(19): siRNA sense strand
ccucucaacccuuuaaauc

SEQ ID NO: 322411 - RNA, 19 nt, Homo sapiens
  misc_RNA (1)...(19): siRNA sense strand
ggaauggaagcugaauaug

SEQ ID NO: 322412 - RNA, 19 nt, Homo sapiens
  misc_RNA (1)...(19): siRNA sense strand
caugaagcccuuuauuucu

SEQ ID NO: 322413 - RNA, 19 nt, Homo sapiens
  misc_RNA (1)...(19): siRNA sense strand
ucauguaauucuucuuugg

SEQ ID NO: 322414 - RNA, 19 nt, Homo sapiens
  misc_RNA (1)...(19): siRNA sense strand
cauccuuggcuguggaaua

SEQ ID NO: 322415 - RNA, 19 nt, Homo sapiens
  misc_RNA (1)...(19): siRNA sense strand
gugcagucauugaagauac

SEQ ID NO: 322416 - RNA, 19 nt, Homo sapiens
  misc_RNA (1)...(19): siRNA sense strand
ccagcugccuuugauuugu

SEQ ID NO: 322417 - RNA, 19 nt, Homo sapiens
  misc_RNA (1)...(19): siRNA sense strand
cagcugccuuugauuugug

SEQ ID NO: 322418 - RNA, 19 nt, Homo sapiens
  misc_RNA (1)...(19): siRNA sense strand
gcaacaaaugaaaguguca

SEQ ID NO: 322419 - RNA, 19 nt, Homo sapiens
  misc_RNA (1)...(19): siRNA sense strand
cugagaauccucugcaaga

SEQ ID NO: 322420 - RNA, 19 nt, Homo sapiens
  misc_RNA (1)...(19): siRNA sense strand
gagacucuaauucuuggaa

SEQ ID NO: 322421 - RNA, 19 nt, Homo sapiens
  misc_RNA (1)...(19): siRNA sense strand
uucaugaagcccuuuauuu

SEQ ID NO: 322422 - RNA, 19 nt, Homo sapiens
  misc_RNA (1)...(19): siRNA sense strand
gggugaccauucguuuauu

SEQ ID NO: 322423 - RNA, 19 nt, Homo sapiens
  misc_RNA (1)...(19): siRNA sense strand
cugaauaugcacauccuuu

SEQ ID NO: 322424 - RNA, 19 nt, Homo sapiens
  misc_RNA (1)...(19): siRNA sense strand
uuuaaucacuucuguaucc

SEQ ID NO: 322425 - RNA, 19 nt, Homo sapiens
  misc_RNA (1)...(19): siRNA sense strand
auggaaguguuucaaaguu

SEQ ID NO: 322426 - RNA, 19 nt, Homo sapiens
  misc_RNA (1)...(19): siRNA sense strand
auauuccucucaacccuuu

SEQ ID NO: 322427 - RNA, 19 nt, Homo sapiens
  misc_RNA (1)...(19): siRNA sense strand
ccucugcaagaaccauuua

SEQ ID NO: 322428 - RNA, 19 nt, Homo sapiens
  misc_RNA (1)...(19): siRNA sense strand
aggauaagccagagacaug

SEQ ID NO: 322429 - RNA, 19 nt, Homo sapiens
  misc_RNA (1)...(19): siRNA sense strand
ggggaucccuuauaguuca

SEQ ID NO: 322430 - RNA, 19 nt, Homo sapiens
  misc_RNA (1)...(19): siRNA sense strand
ucucuuuaaucacuucugu

SEQ ID NO: 322431 - RNA, 19 nt, Homo sapiens
  misc_RNA (1)...(19): siRNA sense strand
aagauacuuggcacuauuu

SEQ ID NO: 322432 - RNA, 19 nt, Homo sapiens
  misc_RNA (1)...(19): siRNA sense strand
gaaugccaagaugguauuu

SEQ ID NO: 322433 - RNA, 19 nt, Homo sapiens
  misc_RNA (1)...(19): siRNA sense strand
uuggcaagaugcuuugguu

SEQ ID NO: 322434 - RNA, 19 nt, Homo sapiens
  misc_RNA (1)...(19): siRNA sense strand
aacagacucucaguauaau

SEQ ID NO: 322435 - RNA, 19 nt, Homo sapiens
  misc_RNA (1)...(19): siRNA sense strand
gcuucaacauuuacauggu

SEQ ID NO: 322436 - RNA, 19 nt, Homo sapiens
  misc_RNA (1)...(19): siRNA sense strand
uuuggagacucuaauucuu

SEQ ID NO: 322437 - RNA, 19 nt, Homo sapiens
  misc_RNA (1)...(19): siRNA sense strand
gagaauccucugcaagaac

SEQ ID NO: 322438 - RNA, 19 nt, Homo sapiens
  misc_RNA (1)...(19): siRNA sense strand
ugauguccauagugguuau

SEQ ID NO: 322439 - RNA, 19 nt, Homo sapiens
  misc_RNA (1)...(19): siRNA sense strand
ccuuggcuguggaauaugu

SEQ ID NO: 322440 - RNA, 19 nt, Homo sapiens
  misc_RNA (1)...(19): siRNA sense strand
auccuuggcuguggaauau

SEQ ID NO: 322441 - RNA, 19 nt, Homo sapiens
  misc_RNA (1)...(19): siRNA sense strand
gugaucauguaauucuucu

SEQ ID NO: 322442 - RNA, 19 nt, Homo sapiens
  misc_RNA (1)...(19): siRNA sense strand
gaguuucaggcuccauuug

SEQ ID NO: 322443 - RNA, 19 nt, Homo sapiens
  misc_RNA (1)...(19): siRNA sense strand
gucagcaucuuuaguucag

SEQ ID NO: 322444 - RNA, 19 nt, Homo sapiens
  misc_RNA (1)...(19): siRNA sense strand
gaaguguuucaaaguucuu

SEQ ID NO: 322445 - RNA, 19 nt, Homo sapiens
  misc_RNA (1)...(19): siRNA sense strand
ugggaaagaaugccaagau

SEQ ID NO: 322446 - RNA, 19 nt, Homo sapiens
  misc_RNA (1)...(19): siRNA sense strand
acaaaguuccagauugcaa

SEQ ID NO: 322447 - RNA, 19 nt, Homo sapiens
  misc_RNA (1)...(19): siRNA sense strand
agugucagcaucuuuaguu

SEQ ID NO: 322448 - RNA, 19 nt, Homo sapiens
  misc_RNA (1)...(19): siRNA sense strand
ugggugaccauucguuuau

SEQ ID NO: 322449 - RNA, 19 nt, Homo sapiens
  misc_RNA (1)...(19): siRNA sense strand
gcuuuugugugaucaugua

SEQ ID NO: 322450 - RNA, 19 nt, Homo sapiens
  misc_RNA (1)...(19): siRNA sense strand
agaaugccaagaugguauu

SEQ ID NO: 322451 - RNA, 19 nt, Homo sapiens
  misc_RNA (1)...(19): siRNA sense strand
cucaacccuuuaaaucuga

SEQ ID NO: 322452 - RNA, 19 nt, Homo sapiens
  misc_RNA (1)...(19): siRNA sense strand
ugaccauucguuuauuaga

SEQ ID NO: 322453 - RNA, 19 nt, Homo sapiens
  misc_RNA (1)...(19): siRNA sense strand
agaaacagcugcaaaauuu

SEQ ID NO: 322454 - RNA, 19 nt, Homo sapiens
  misc_RNA (1)...(19): siRNA sense strand
gaagccaccucaaguccuu

SEQ ID NO: 322455 - RNA, 19 nt, Homo sapiens
  misc_RNA (1)...(19): siRNA sense strand
ucacggagcuggccaggau

SEQ ID NO: 322456 - RNA, 19 nt, Homo sapiens
  misc_RNA (1)...(19): siRNA sense strand
ggauuaaggagaucgauga

SEQ ID NO: 322457 - RNA, 19 nt, Homo sapiens
  misc_RNA (1)...(19): siRNA sense strand
gggaagauuuuguaccaua

SEQ ID NO: 322458 - RNA, 19 nt, Homo sapiens
  misc_RNA (1)...(19): siRNA sense strand
cggcauugaucgauggauu

SEQ ID NO: 322459 - RNA, 19 nt, Homo sapiens
  misc_RNA (1)...(19): siRNA sense strand
ggcauugaucgauggauua

SEQ ID NO: 322460 - RNA, 19 nt, Homo sapiens
  misc_RNA (1)...(19): siRNA sense strand
ggucagcccucugugcaau

SEQ ID NO: 322461 - RNA, 19 nt, Homo sapiens
  misc_RNA (1)...(19): siRNA sense strand
gcauugaucgauggauuaa

SEQ ID NO: 322462 - RNA, 19 nt, Homo sapiens
  misc_RNA (1)...(19): siRNA sense strand
gauccuggucuaugacauu

SEQ ID NO: 322463 - RNA, 19 nt, Homo sapiens
  misc_RNA (1)...(19): siRNA sense strand
gcgaaccgcuggucuuuug

SEQ ID NO: 322464 - RNA, 19 nt, Homo sapiens
  misc_RNA (1)...(19): siRNA sense strand
gcaauuucaacaucacaga

SEQ ID NO: 322465 - RNA, 19 nt, Homo sapiens
  misc_RNA (1)...(19): siRNA sense strand
gugugauccuggucuauga

SEQ ID NO: 322466 - RNA, 19 nt, Homo sapiens
  misc_RNA (1)...(19): siRNA sense strand
ucagcccucugugcaauuu

SEQ ID NO: 322467 - RNA, 19 nt, Homo sapiens
  misc_RNA (1)...(19): siRNA sense strand
uaagaagccaccucaaguc

SEQ ID NO: 322468 - RNA, 19 nt, Homo sapiens
  misc_RNA (1)...(19): siRNA sense strand
ggaagauuuuguaccauau

SEQ ID NO: 322469 - RNA, 19 nt, Homo sapiens
  misc_RNA (1)...(19): siRNA sense strand
gagcagccuccgcaaagug

SEQ ID NO: 322470 - RNA, 19 nt, Homo sapiens
  misc_RNA (1)...(19): siRNA sense strand
uuaagaagccaccucaagu

SEQ ID NO: 322471 - RNA, 19 nt, Homo sapiens
  misc_RNA (1)...(19): siRNA sense strand
cugcagcucugggauacuu

SEQ ID NO: 322472 - RNA, 19 nt, Homo sapiens
  misc_RNA (1)...(19): siRNA sense strand
caccagcuccacccacaaa

SEQ ID NO: 322473 - RNA, 19 nt, Homo sapiens
  misc_RNA (1)...(19): siRNA sense strand
caccagaaacagcugcaaa

SEQ ID NO: 322474 - RNA, 19 nt, Homo sapiens
  misc_RNA (1)...(19): siRNA sense strand
ggugugauccuggucuaug

SEQ ID NO: 322475 - RNA, 19 nt, Homo sapiens
  misc_RNA (1)...(19): siRNA sense strand
cagaaacagcugcaaaauu

SEQ ID NO: 322476 - RNA, 19 nt, Homo sapiens
  misc_RNA (1)...(19): siRNA sense strand
gggcgugaccuucuuugag

SEQ ID NO: 322477 - RNA, 19 nt, Homo sapiens
  misc_RNA (1)...(19): siRNA sense strand
ucugugcaauuucaacauc

SEQ ID NO: 322478 - RNA, 19 nt, Homo sapiens
  misc_RNA (1)...(19): siRNA sense strand
gccugcaccuggcguucaa

SEQ ID NO: 322479 - RNA, 19 nt, Homo sapiens
  misc_RNA (1)...(19): siRNA sense strand
gaagaugucugcugaugau

SEQ ID NO: 322480 - RNA, 19 nt, Homo sapiens
  misc_RNA (1)...(19): siRNA sense strand
gaaguaacaccauauauca

SEQ ID NO: 322481 - RNA, 19 nt, Homo sapiens
  misc_RNA (1)...(19): siRNA sense strand
caagaagccaucauuagua

SEQ ID NO: 322482 - RNA, 19 nt, Homo sapiens
  misc_RNA (1)...(19): siRNA sense strand
gaucugaccuuacauuugc

SEQ ID NO: 322483 - RNA, 19 nt, Homo sapiens
  misc_RNA (1)...(19): siRNA sense strand
gaagaucaucccucucaaa

SEQ ID NO: 322484 - RNA, 19 nt, Homo sapiens
  misc_RNA (1)...(19): siRNA sense strand
ucucuaggcugcauguuaa

SEQ ID NO: 322485 - RNA, 19 nt, Homo sapiens
  misc_RNA (1)...(19): siRNA sense strand
ccauggaccugcacucuug

SEQ ID NO: 322486 - RNA, 19 nt, Homo sapiens
  misc_RNA (1)...(19): siRNA sense strand
gaucaucccucucaaaaug

SEQ ID NO: 322487 - RNA, 19 nt, Homo sapiens
  misc_RNA (1)...(19): siRNA sense strand
cauccgaaaucuauacuug

SEQ ID NO: 322488 - RNA, 19 nt, Homo sapiens
  misc_RNA (1)...(19): siRNA sense strand
gaggugaggcuuacuauuc

SEQ ID NO: 322489 - RNA, 19 nt, Homo sapiens
  misc_RNA (1)...(19): siRNA sense strand
gaagccaucauuaguauca

SEQ ID NO: 322490 - RNA, 19 nt, Homo sapiens
  misc_RNA (1)...(19): siRNA sense strand
cugcugagcugaucaagga

SEQ ID NO: 322491 - RNA, 19 nt, Homo sapiens
  misc_RNA (1)...(19): siRNA sense strand
cgaagccgauuguauuugu

SEQ ID NO: 322492 - RNA, 19 nt, Homo sapiens
  misc_RNA (1)...(19): siRNA sense strand
uaucaagaagccaucauua

SEQ ID NO: 322493 - RNA, 19 nt, Homo sapiens
  misc_RNA (1)...(19): siRNA sense strand
aagaagccaucauuaguau

SEQ ID NO: 322494 - RNA, 19 nt, Homo sapiens
  misc_RNA (1)...(19): siRNA sense strand
ggaccaggauacuuguuca

SEQ ID NO: 322495 - RNA, 19 nt, Homo sapiens
  misc_RNA (1)...(19): siRNA sense strand
cgagaaguaacaccauaua

SEQ ID NO: 322496 - RNA, 19 nt, Homo sapiens
  misc_RNA (1)...(19): siRNA sense strand
gaucaaggaagucucucua

SEQ ID NO: 322497 - RNA, 19 nt, Homo sapiens
  misc_RNA (1)...(19): siRNA sense strand
aggauuugcugcucuauga

SEQ ID NO: 322498 - RNA, 19 nt, Homo sapiens
  misc_RNA (1)...(19): siRNA sense strand
guaacaccauauaucaaga

SEQ ID NO: 322499 - RNA, 19 nt, Homo sapiens
  misc_RNA (1)...(19): siRNA sense strand
caaguucauccgagaagua

SEQ ID NO: 322500 - RNA, 19 nt, Homo sapiens
  misc_RNA (1)...(19): siRNA sense strand
gagaaguaacaccauauau

SEQ ID NO: 322501 - RNA, 19 nt, Homo sapiens
  misc_RNA (1)...(19): siRNA sense strand
guaugggacugcuuguaug

SEQ ID NO: 322502 - RNA, 19 nt, Homo sapiens
  misc_RNA (1)...(19): siRNA sense strand
caagaggugaggcuuacua

SEQ ID NO: 322503 - RNA, 19 nt, Homo sapiens
  misc_RNA (1)...(19): siRNA sense strand
ggaagaucaucccucucaa

SEQ ID NO: 322504 - RNA, 19 nt, Homo sapiens
  misc_RNA (1)...(19): siRNA sense strand
ucaagaagccaucauuagu

SEQ ID NO: 322505 - RNA, 19 nt, Homo sapiens
  misc_RNA (1)...(19): siRNA sense strand
ggcuuacuauucacuauga

SEQ ID NO: 322506 - RNA, 19 nt, Homo sapiens
  misc_RNA (1)...(19): siRNA sense strand
agaaggauuugcugcucua

SEQ ID NO: 322507 - RNA, 19 nt, Homo sapiens
  misc_RNA (1)...(19): siRNA sense strand
ggaucugaccuuacauuug

SEQ ID NO: 322508 - RNA, 19 nt, Homo sapiens
  misc_RNA (1)...(19): siRNA sense strand
guccgaagccgauuguauu

SEQ ID NO: 322509 - RNA, 19 nt, Homo sapiens
  misc_RNA (1)...(19): siRNA sense strand
ccacagcuacccacuuguu

SEQ ID NO: 322510 - RNA, 19 nt, Homo sapiens
  misc_RNA (1)...(19): siRNA sense strand
gaggcuuacuauucacuau

SEQ ID NO: 322511 - RNA, 19 nt, Homo sapiens
  misc_RNA (1)...(19): siRNA sense strand
cauguuaaauggccaagag

SEQ ID NO: 322512 - RNA, 19 nt, Homo sapiens
  misc_RNA (1)...(19): siRNA sense strand
ugccacagcuacccacuug

SEQ ID NO: 322513 - RNA, 19 nt, Homo sapiens
  misc_RNA (1)...(19): siRNA sense strand
gaagccgauuguauuugug

SEQ ID NO: 322514 - RNA, 19 nt, Homo sapiens
  misc_RNA (1)...(19): siRNA sense strand
aaaacuagaugguggaaga

SEQ ID NO: 322515 - RNA, 19 nt, Homo sapiens
  misc_RNA (1)...(19): siRNA sense strand
agaaguaacaccauauauc

SEQ ID NO: 322516 - RNA, 19 nt, Homo sapiens
  misc_RNA (1)...(19): siRNA sense strand
agggagaacugaccaugga

SEQ ID NO: 322517 - RNA, 19 nt, Homo sapiens
  misc_RNA (1)...(19): siRNA sense strand
uugaaaggcugaagauguc

SEQ ID NO: 322518 - RNA, 19 nt, Homo sapiens
  misc_RNA (1)...(19): siRNA sense strand
ggagacacaucgggaucug

SEQ ID NO: 322519 - RNA, 19 nt, Homo sapiens
  misc_RNA (1)...(19): siRNA sense strand
ggccaagaggugaggcuua

SEQ ID NO: 322520 - RNA, 19 nt, Homo sapiens
  misc_RNA (1)...(19): siRNA sense strand
gaccuuacauuugcuacca

SEQ ID NO: 322521 - RNA, 19 nt, Homo sapiens
  misc_RNA (1)...(19): siRNA sense strand
uccgagaaguaacaccaua

SEQ ID NO: 322522 - RNA, 19 nt, Homo sapiens
  misc_RNA (1)...(19): siRNA sense strand
ucccuuggaucugaccuua

SEQ ID NO: 322523 - RNA, 19 nt, Homo sapiens
  misc_RNA (1)...(19): siRNA sense strand
gugcuuugcugcuagaaac

SEQ ID NO: 322524 - RNA, 19 nt, Homo sapiens
  misc_RNA (1)...(19): siRNA sense strand
gccaagaggugaggcuuac

SEQ ID NO: 322525 - RNA, 19 nt, Homo sapiens
  misc_RNA (1)...(19): siRNA sense strand
auggagaccuguccucaug

SEQ ID NO: 322526 - RNA, 19 nt, Homo sapiens
  misc_RNA (1)...(19): siRNA sense strand
cggccaaagucacucguau

SEQ ID NO: 322527 - RNA, 19 nt, Homo sapiens
  misc_RNA (1)...(19): siRNA sense strand
uccgaaaucuauacuugga

SEQ ID NO: 322528 - RNA, 19 nt, Homo sapiens
  misc_RNA (1)...(19): siRNA sense strand
ccuuggaucugaccuuaca

SEQ ID NO: 322529 - RNA, 19 nt, Homo sapiens
  misc_RNA (1)...(19): siRNA sense strand
ucauggcugugacugagaa

SEQ ID NO: 322530 - RNA, 19 nt, Homo sapiens
  misc_RNA (1)...(19): siRNA sense strand
gcaccaaggacaggaagau

SEQ ID NO: 322531 - RNA, 19 nt, Homo sapiens
  misc_RNA (1)...(19): siRNA sense strand
cguaugggacugcuuguau

SEQ ID NO: 322532 - RNA, 19 nt, Homo sapiens
  misc_RNA (1)...(19): siRNA sense strand
cugaagaugucugcugaug

SEQ ID NO: 322533 - RNA, 19 nt, Homo sapiens
  misc_RNA (1)...(19): siRNA sense strand
caucauuaguaucagaucu

SEQ ID NO: 322534 - RNA, 19 nt, Homo sapiens
  misc_RNA (1)...(19): siRNA sense strand
ugaagaugucugcugauga

SEQ ID NO: 322535 - RNA, 19 nt, Homo sapiens
  misc_RNA (1)...(19): siRNA sense strand
gcugcucuaugacuguaug

SEQ ID NO: 322536 - RNA, 19 nt, Homo sapiens
  misc_RNA (1)...(19): siRNA sense strand
gccaaagucacucguaugg

SEQ ID NO: 322537 - RNA, 19 nt, Homo sapiens
  misc_RNA (1)...(19): siRNA sense strand
aggugaggcuuacuauuca

SEQ ID NO: 322538 - RNA, 19 nt, Homo sapiens
  misc_RNA (1)...(19): siRNA sense strand
gguggaagacagcaaugga

SEQ ID NO: 322539 - RNA, 19 nt, Homo sapiens
  misc_RNA (1)...(19): siRNA sense strand
gcuccagcagcauauugua

SEQ ID NO: 322540 - RNA, 19 nt, Homo sapiens
  misc_RNA (1)...(19): siRNA sense strand
aggaagaucaucccucuca

SEQ ID NO: 322541 - RNA, 19 nt, Homo sapiens
  misc_RNA (1)...(19): siRNA sense strand
ggccugggcaucagcauca

SEQ ID NO: 322542 - RNA, 19 nt, Homo sapiens
  misc_RNA (1)...(19): siRNA sense strand
aaaaugugcuuugcugcua

SEQ ID NO: 322543 - RNA, 19 nt, Homo sapiens
  misc_RNA (1)...(19): siRNA sense strand
gaugguggaagacagcaau

SEQ ID NO: 322544 - RNA, 19 nt, Homo sapiens
  misc_RNA (1)...(19): siRNA sense strand
ggucaaguucauccgagaa

SEQ ID NO: 322545 - RNA, 19 nt, Homo sapiens
  misc_RNA (1)...(19): siRNA sense strand
aagcaugccggaucuggaa

SEQ ID NO: 322546 - RNA, 19 nt, Homo sapiens
  misc_RNA (1)...(19): siRNA sense strand
uuugaaaggcugaagaugu

SEQ ID NO: 322547 - RNA, 19 nt, Homo sapiens
  misc_RNA (1)...(19): siRNA sense strand
guucauccgagaaguaaca

SEQ ID NO: 322548 - RNA, 19 nt, Homo sapiens
  misc_RNA (1)...(19): siRNA sense strand
ggccaaagucacucguaug

SEQ ID NO: 322549 - RNA, 19 nt, Homo sapiens
  misc_RNA (1)...(19): siRNA sense strand
uaugggacugcuuguauga

SEQ ID NO: 322550 - RNA, 19 nt, Homo sapiens
  misc_RNA (1)...(19): siRNA sense strand
ccaaggacaggaagaucau

SEQ ID NO: 322551 - RNA, 19 nt, Homo sapiens
  misc_RNA (1)...(19): siRNA sense strand
uaggcugcauguuaaaugg

SEQ ID NO: 322552 - RNA, 19 nt, Homo sapiens
  misc_RNA (1)...(19): siRNA sense strand
gaaguaacaccauauauca

SEQ ID NO: 322553 - RNA, 19 nt, Homo sapiens
  misc_RNA (1)...(19): siRNA sense strand
caagaagccaucauuagua

SEQ ID NO: 322554 - RNA, 19 nt, Homo sapiens
  misc_RNA (1)...(19): siRNA sense strand
gaagaucaucccucucaaa

SEQ ID NO: 322555 - RNA, 19 nt, Homo sapiens
  misc_RNA (1)...(19): siRNA sense strand
gaucaucccucucaaaaug

SEQ ID NO: 322556 - RNA, 19 nt, Homo sapiens
  misc_RNA (1)...(19): siRNA sense strand
gaagccaucauuaguauca

SEQ ID NO: 322557 - RNA, 19 nt, Homo sapiens
  misc_RNA (1)...(19): siRNA sense strand
uaucaagaagccaucauua

SEQ ID NO: 322558 - RNA, 19 nt, Homo sapiens
  misc_RNA (1)...(19): siRNA sense strand
aagaagccaucauuaguau

SEQ ID NO: 322559 - RNA, 19 nt, Homo sapiens
  misc_RNA (1)...(19): siRNA sense strand
cgagaaguaacaccauaua

SEQ ID NO: 322560 - RNA, 19 nt, Homo sapiens
  misc_RNA (1)...(19): siRNA sense strand
guaacaccauauaucaaga

SEQ ID NO: 322561 - RNA, 19 nt, Homo sapiens
  misc_RNA (1)...(19): siRNA sense strand
caaguucauccgagaagua

SEQ ID NO: 322562 - RNA, 19 nt, Homo sapiens
  misc_RNA (1)...(19): siRNA sense strand
gagaaguaacaccauauau

SEQ ID NO: 322563 - RNA, 19 nt, Homo sapiens
  misc_RNA (1)...(19): siRNA sense strand
ggaagaucaucccucucaa

SEQ ID NO: 322564 - RNA, 19 nt, Homo sapiens
  misc_RNA (1)...(19): siRNA sense strand
ucaagaagccaucauuagu

SEQ ID NO: 322565 - RNA, 19 nt, Homo sapiens
  misc_RNA (1)...(19): siRNA sense strand
agaaguaacaccauauauc

SEQ ID NO: 322566 - RNA, 19 nt, Homo sapiens
  misc_RNA (1)...(19): siRNA sense strand
uccgagaaguaacaccaua

SEQ ID NO: 322567 - RNA, 19 nt, Homo sapiens
  misc_RNA (1)...(19): siRNA sense strand
gugcuuugcugcuagaaac

SEQ ID NO: 322568 - RNA, 19 nt, Homo sapiens
  misc_RNA (1)...(19): siRNA sense strand
gcaccaaggacaggaagau

SEQ ID NO: 322569 - RNA, 19 nt, Homo sapiens
  misc_RNA (1)...(19): siRNA sense strand
caucauuaguaucagaucu

SEQ ID NO: 322570 - RNA, 19 nt, Homo sapiens
  misc_RNA (1)...(19): siRNA sense strand
ggccugggcaucagcauca

SEQ ID NO: 322571 - RNA, 19 nt, Homo sapiens
  misc_RNA (1)...(19): siRNA sense strand
aaaaugugcuuugcugcua

SEQ ID NO: 322572 - RNA, 19 nt, Homo sapiens
  misc_RNA (1)...(19): siRNA sense strand
aggaagaucaucccucuca

SEQ ID NO: 322573 - RNA, 19 nt, Homo sapiens
  misc_RNA (1)...(19): siRNA sense strand
ggucaaguucauccgagaa

SEQ ID NO: 322574 - RNA, 19 nt, Homo sapiens
  misc_RNA (1)...(19): siRNA sense strand
guucauccgagaaguaaca

SEQ ID NO: 322575 - RNA, 19 nt, Homo sapiens
  misc_RNA (1)...(19): siRNA sense strand
aagcaugccggaucuggaa

SEQ ID NO: 322576 - RNA, 19 nt, Homo sapiens
  misc_RNA (1)...(19): siRNA sense strand
ccaaggacaggaagaucau

SEQ ID NO: 322577 - RNA, 19 nt, Homo sapiens
  misc_RNA (1)...(19): siRNA sense strand
gcaucaaccuccaaaucga

SEQ ID NO: 322578 - RNA, 19 nt, Homo sapiens
  misc_RNA (1)...(19): siRNA sense strand
gaagaggaaggacagaugu

SEQ ID NO: 322579 - RNA, 19 nt, Homo sapiens
  misc_RNA (1)...(19): siRNA sense strand
cagcucaucugguuacagu

SEQ ID NO: 322580 - RNA, 19 nt, Homo sapiens
  misc_RNA (1)...(19): siRNA sense strand
cacuacagcucaucugguu

SEQ ID NO: 322581 - RNA, 19 nt, Homo sapiens
  misc_RNA (1)...(19): siRNA sense strand
uacaguaacucucgcuaca

SEQ ID NO: 322582 - RNA, 19 nt, Homo sapiens
  misc_RNA (1)...(19): siRNA sense strand
caagaggaaauccaaguca

SEQ ID NO: 322583 - RNA, 19 nt, Homo sapiens
  misc_RNA (1)...(19): siRNA sense strand
gcaccucucccgacagcuu

SEQ ID NO: 322584 - RNA, 19 nt, Homo sapiens
  misc_RNA (1)...(19): siRNA sense strand
aagaggaaauccaagucaa

SEQ ID NO: 322585 - RNA, 19 nt, Homo sapiens
  misc_RNA (1)...(19): siRNA sense strand
cagccgaucucgcuauagg

SEQ ID NO: 322586 - RNA, 19 nt, Homo sapiens
  misc_RNA (1)...(19): siRNA sense strand
cgcagccgaucucgcuaua

SEQ ID NO: 322587 - RNA, 19 nt, Homo sapiens
  misc_RNA (1)...(19): siRNA sense strand
ugaagaggaaggacagaug

SEQ ID NO: 322588 - RNA, 19 nt, Homo sapiens
  misc_RNA (1)...(19): siRNA sense strand
cgacguggacggcaugauc

SEQ ID NO: 322589 - RNA, 19 nt, Homo sapiens
  misc_RNA (1)...(19): siRNA sense strand
ugaggcgcguguucgagaa

SEQ ID NO: 322590 - RNA, 19 nt, Homo sapiens
  misc_RNA (1)...(19): siRNA sense strand
ggcgcguguucgagaagua

SEQ ID NO: 322591 - RNA, 19 nt, Homo sapiens
  misc_RNA (1)...(19): siRNA sense strand
uacagcagaucucgcuaca

SEQ ID NO: 322592 - RNA, 19 nt, Homo sapiens
  misc_RNA (1)...(19): siRNA sense strand
caaggucgcgauccaagag

SEQ ID NO: 322593 - RNA, 19 nt, Homo sapiens
  misc_RNA (1)...(19): siRNA sense strand
uauccaagaggaaauccaa

SEQ ID NO: 322594 - RNA, 19 nt, Homo sapiens
  misc_RNA (1)...(19): siRNA sense strand
uauagccggucucccuaca

SEQ ID NO: 322595 - RNA, 19 nt, Homo sapiens
  misc_RNA (1)...(19): siRNA sense strand
ccaagaggaaauccaaguc

SEQ ID NO: 322596 - RNA, 19 nt, Homo sapiens
  misc_RNA (1)...(19): siRNA sense strand
gacguggacggcaugauca

SEQ ID NO: 322597 - RNA, 19 nt, Homo sapiens
  misc_RNA (1)...(19): siRNA sense strand
ggaucucacuacagcucau

SEQ ID NO: 322598 - RNA, 19 nt, Homo sapiens
  misc_RNA (1)...(19): siRNA sense strand
caucaagaccgccaagauu

SEQ ID NO: 322599 - RNA, 19 nt, Homo sapiens
  misc_RNA (1)...(19): siRNA sense strand
agggugaacaggacaauua

SEQ ID NO: 322600 - RNA, 19 nt, Homo sapiens
  misc_RNA (1)...(19): siRNA sense strand
ucaccgagaucaucaagac

SEQ ID NO: 322601 - RNA, 19 nt, Homo sapiens
  misc_RNA (1)...(19): siRNA sense strand
gcgagucccugaugaagcu

SEQ ID NO: 322602 - RNA, 19 nt, Homo sapiens
  misc_RNA (1)...(19): siRNA sense strand
uguccgaccucaagcaguu

SEQ ID NO: 322603 - RNA, 19 nt, Homo sapiens
  misc_RNA (1)...(19): siRNA sense strand
acaggacaauuacgagaug

SEQ ID NO: 322604 - RNA, 19 nt, Homo sapiens
  misc_RNA (1)...(19): siRNA sense strand
caacuucaccgagaucauc

SEQ ID NO: 322605 - RNA, 19 nt, Homo sapiens
  misc_RNA (1)...(19): siRNA sense strand
acaacaagcggcugaagga

SEQ ID NO: 322606 - RNA, 19 nt, Homo sapiens
  misc_RNA (1)...(19): siRNA sense strand
gcugaaggacgacauuaag

SEQ ID NO: 322607 - RNA, 19 nt, Homo sapiens
  misc_RNA (1)...(19): siRNA sense strand
gaucuccauugaccucuac

SEQ ID NO: 322608 - RNA, 19 nt, Homo sapiens
  misc_RNA (1)...(19): siRNA sense strand
ggacaacuucaccgagauc

SEQ ID NO: 322609 - RNA, 19 nt, Homo sapiens
  misc_RNA (1)...(19): siRNA sense strand
ggacgagacgcagguguca

SEQ ID NO: 322610 - RNA, 19 nt, Homo sapiens
  misc_RNA (1)...(19): siRNA sense strand
ggcugaaggacgacauuaa

SEQ ID NO: 322611 - RNA, 19 nt, Homo sapiens
  misc_RNA (1)...(19): siRNA sense strand
cgacauuaaguccaucaug

SEQ ID NO: 322612 - RNA, 19 nt, Homo sapiens
  misc_RNA (1)...(19): siRNA sense strand
acaauuacgagaugcaugu

SEQ ID NO: 322613 - RNA, 19 nt, Homo sapiens
  misc_RNA (1)...(19): siRNA sense strand
gugaacaggacaauuacga

SEQ ID NO: 322614 - RNA, 19 nt, Homo sapiens
  misc_RNA (1)...(19): siRNA sense strand
ugaaggacgacauuaaguc

SEQ ID NO: 322615 - RNA, 19 nt, Homo sapiens
  misc_RNA (1)...(19): siRNA sense strand
ggacaauuacgagaugcau

SEQ ID NO: 322616 - RNA, 19 nt, Homo sapiens
  misc_RNA (1)...(19): siRNA sense strand
caucaagaccgccaagauu

SEQ ID NO: 322617 - RNA, 19 nt, Homo sapiens
  misc_RNA (1)...(19): siRNA sense strand
agggugaacaggacaauua

SEQ ID NO: 322618 - RNA, 19 nt, Homo sapiens
  misc_RNA (1)...(19): siRNA sense strand
ucaccgagaucaucaagac

SEQ ID NO: 322619 - RNA, 19 nt, Homo sapiens
  misc_RNA (1)...(19): siRNA sense strand
gcgagucccugaugaagcu

SEQ ID NO: 322620 - RNA, 19 nt, Homo sapiens
  misc_RNA (1)...(19): siRNA sense strand
uguccgaccucaagcaguu

SEQ ID NO: 322621 - RNA, 19 nt, Homo sapiens
  misc_RNA (1)...(19): siRNA sense strand
acaggacaauuacgagaug

SEQ ID NO: 322622 - RNA, 19 nt, Homo sapiens
  misc_RNA (1)...(19): siRNA sense strand
caacuucaccgagaucauc

SEQ ID NO: 322623 - RNA, 19 nt, Homo sapiens
  misc_RNA (1)...(19): siRNA sense strand
acaacaagcggcugaagga

SEQ ID NO: 322624 - RNA, 19 nt, Homo sapiens
  misc_RNA (1)...(19): siRNA sense strand
gcugaaggacgacauuaag

SEQ ID NO: 322625 - RNA, 19 nt, Homo sapiens
  misc_RNA (1)...(19): siRNA sense strand
gaucuccauugaccucuac

SEQ ID NO: 322626 - RNA, 19 nt, Homo sapiens
  misc_RNA (1)...(19): siRNA sense strand
ggacaacuucaccgagauc

SEQ ID NO: 322627 - RNA, 19 nt, Homo sapiens
  misc_RNA (1)...(19): siRNA sense strand
ggacgagacgcagguguca

SEQ ID NO: 322628 - RNA, 19 nt, Homo sapiens
  misc_RNA (1)...(19): siRNA sense strand
ggcugaaggacgacauuaa

SEQ ID NO: 322629 - RNA, 19 nt, Homo sapiens
  misc_RNA (1)...(19): siRNA sense strand
cgacauuaaguccaucaug

SEQ ID NO: 322630 - RNA, 19 nt, Homo sapiens
  misc_RNA (1)...(19): siRNA sense strand
acaauuacgagaugcaugu

SEQ ID NO: 322631 - RNA, 19 nt, Homo sapiens
  misc_RNA (1)...(19): siRNA sense strand
gugaacaggacaauuacga

SEQ ID NO: 322632 - RNA, 19 nt, Homo sapiens
  misc_RNA (1)...(19): siRNA sense strand
ugaaggacgacauuaaguc

SEQ ID NO: 322633 - RNA, 19 nt, Homo sapiens
  misc_RNA (1)...(19): siRNA sense strand
ggacaauuacgagaugcau

SEQ ID NO: 322634 - RNA, 19 nt, Homo sapiens
  misc_RNA (1)...(19): siRNA sense strand
caucaagaccgccaagauu

SEQ ID NO: 322635 - RNA, 19 nt, Homo sapiens
  misc_RNA (1)...(19): siRNA sense strand
agggugaacaggacaauua

SEQ ID NO: 322636 - RNA, 19 nt, Homo sapiens
  misc_RNA (1)...(19): siRNA sense strand
ucaccgagaucaucaagac

SEQ ID NO: 322637 - RNA, 19 nt, Homo sapiens
  misc_RNA (1)...(19): siRNA sense strand
gcgagucccugaugaagcu

SEQ ID NO: 322638 - RNA, 19 nt, Homo sapiens
  misc_RNA (1)...(19): siRNA sense strand
uguccgaccucaagcaguu

SEQ ID NO: 322639 - RNA, 19 nt, Homo sapiens
  misc_RNA (1)...(19): siRNA sense strand
acaggacaauuacgagaug

SEQ ID NO: 322640 - RNA, 19 nt, Homo sapiens
  misc_RNA (1)...(19): siRNA sense strand
caacuucaccgagaucauc

SEQ ID NO: 322641 - RNA, 19 nt, Homo sapiens
  misc_RNA (1)...(19): siRNA sense strand
acaacaagcggcugaagga

SEQ ID NO: 322642 - RNA, 19 nt, Homo sapiens
  misc_RNA (1)...(19): siRNA sense strand
gcugaaggacgacauuaag

SEQ ID NO: 322643 - RNA, 19 nt, Homo sapiens
  misc_RNA (1)...(19): siRNA sense strand
gaucuccauugaccucuac

SEQ ID NO: 322644 - RNA, 19 nt, Homo sapiens
  misc_RNA (1)...(19): siRNA sense strand
ggacaacuucaccgagauc

SEQ ID NO: 322645 - RNA, 19 nt, Homo sapiens
  misc_RNA (1)...(19): siRNA sense strand
ggacgagacgcagguguca

SEQ ID NO: 322646 - RNA, 19 nt, Homo sapiens
  misc_RNA (1)...(19): siRNA sense strand
ggcugaaggacgacauuaa

SEQ ID NO: 322647 - RNA, 19 nt, Homo sapiens
  misc_RNA (1)...(19): siRNA sense strand
cgacauuaaguccaucaug

SEQ ID NO: 322648 - RNA, 19 nt, Homo sapiens
  misc_RNA (1)...(19): siRNA sense strand
acaauuacgagaugcaugu

SEQ ID NO: 322649 - RNA, 19 nt, Homo sapiens
  misc_RNA (1)...(19): siRNA sense strand
gugaacaggacaauuacga

SEQ ID NO: 322650 - RNA, 19 nt, Homo sapiens
  misc_RNA (1)...(19): siRNA sense strand
ugaaggacgacauuaaguc

SEQ ID NO: 322651 - RNA, 19 nt, Homo sapiens
  misc_RNA (1)...(19): siRNA sense strand
ggacaauuacgagaugcau

SEQ ID NO: 322652 - RNA, 19 nt, Homo sapiens
  misc_RNA (1)...(19): siRNA sense strand
gagcagaaauacuaaagaa

SEQ ID NO: 322653 - RNA, 19 nt, Homo sapiens
  misc_RNA (1)...(19): siRNA sense strand
cagcacagaugcccgcuua

SEQ ID NO: 322654 - RNA, 19 nt, Homo sapiens
  misc_RNA (1)...(19): siRNA sense strand
gcagaaauacuaaagaaga

SEQ ID NO: 322655 - RNA, 19 nt, Homo sapiens
  misc_RNA (1)...(19): siRNA sense strand
ggaccgaauucuuauaaag

SEQ ID NO: 322656 - RNA, 19 nt, Homo sapiens
  misc_RNA (1)...(19): siRNA sense strand
caagaaguuuagcuacaaa

SEQ ID NO: 322657 - RNA, 19 nt, Homo sapiens
  misc_RNA (1)...(19): siRNA sense strand
caacaugacguuacucuuc

SEQ ID NO: 322658 - RNA, 19 nt, Homo sapiens
  misc_RNA (1)...(19): siRNA sense strand
gcaaggaccgaauucuuau

SEQ ID NO: 322659 - RNA, 19 nt, Homo sapiens
  misc_RNA (1)...(19): siRNA sense strand
ucaucgagcucuacaagga

SEQ ID NO: 322660 - RNA, 19 nt, Homo sapiens
  misc_RNA (1)...(19): siRNA sense strand
gcaaacaccgacaagaaau

SEQ ID NO: 322661 - RNA, 19 nt, Homo sapiens
  misc_RNA (1)...(19): siRNA sense strand
cacaagaggaccagauuaa

SEQ ID NO: 322662 - RNA, 19 nt, Homo sapiens
  misc_RNA (1)...(19): siRNA sense strand
uuauaaagcugucaucaac

SEQ ID NO: 322663 - RNA, 19 nt, Homo sapiens
  misc_RNA (1)...(19): siRNA sense strand
ggcaaacaccgacaagaaa

SEQ ID NO: 322664 - RNA, 19 nt, Homo sapiens
  misc_RNA (1)...(19): siRNA sense strand
ggcauccacugcaacauga

SEQ ID NO: 322665 - RNA, 19 nt, Homo sapiens
  misc_RNA (1)...(19): siRNA sense strand
gaucagcaaggaccgaauu

SEQ ID NO: 322666 - RNA, 19 nt, Homo sapiens
  misc_RNA (1)...(19): siRNA sense strand
acaagaaguuuagcuacaa

SEQ ID NO: 322667 - RNA, 19 nt, Homo sapiens
  misc_RNA (1)...(19): siRNA sense strand
ucacaagaggaccagauua

SEQ ID NO: 322668 - RNA, 19 nt, Homo sapiens
  misc_RNA (1)...(19): siRNA sense strand
ccgaguauccacagaagua

SEQ ID NO: 322669 - RNA, 19 nt, Homo sapiens
  misc_RNA (1)...(19): siRNA sense strand
ccagauggcuguggagaag

SEQ ID NO: 322670 - RNA, 19 nt, Homo sapiens
  misc_RNA (1)...(19): siRNA sense strand
ugacguuacucuucuccuu

SEQ ID NO: 322671 - RNA, 19 nt, Homo sapiens
  misc_RNA (1)...(19): siRNA sense strand
guuuggagcagaaauacua

SEQ ID NO: 322672 - RNA, 19 nt, Homo sapiens
  misc_RNA (1)...(19): siRNA sense strand
caacacgggcgagaucaaa

SEQ ID NO: 322673 - RNA, 19 nt, Homo sapiens
  misc_RNA (1)...(19): siRNA sense strand
agcaaggaccgaauucuua

SEQ ID NO: 322674 - RNA, 19 nt, Homo sapiens
  misc_RNA (1)...(19): siRNA sense strand
uacaagaaguuuagcuaca

SEQ ID NO: 322675 - RNA, 19 nt, Homo sapiens
  misc_RNA (1)...(19): siRNA sense strand
caaggaccgaauucuuaua

SEQ ID NO: 322676 - RNA, 19 nt, Homo sapiens
  misc_RNA (1)...(19): siRNA sense strand
gacgggauccgcaaguuug

SEQ ID NO: 322677 - RNA, 19 nt, Homo sapiens
  misc_RNA (1)...(19): siRNA sense strand
ggagcagaaauacuaaaga

SEQ ID NO: 322678 - RNA, 19 nt, Homo sapiens
  misc_RNA (1)...(19): siRNA sense strand
uggaccagcucaagcaguu

SEQ ID NO: 322679 - RNA, 19 nt, Homo sapiens
  misc_RNA (1)...(19): siRNA sense strand
uggcaaacaccgacaagaa

SEQ ID NO: 322680 - RNA, 19 nt, Homo sapiens
  misc_RNA (1)...(19): siRNA sense strand
cagcaaggaccgaauucuu

SEQ ID NO: 322681 - RNA, 19 nt, Homo sapiens
  misc_RNA (1)...(19): siRNA sense strand
caagaggaccagauuaaaa

SEQ ID NO: 322682 - RNA, 19 nt, Homo sapiens
  misc_RNA (1)...(19): siRNA sense strand
aaggaccgaauucuuauaa

SEQ ID NO: 322683 - RNA, 19 nt, Homo sapiens
  misc_RNA (1)...(19): siRNA sense strand
guuguuuggagcagaaaua

SEQ ID NO: 322684 - RNA, 19 nt, Homo sapiens
  misc_RNA (1)...(19): siRNA sense strand
gcuggugccugugcucuca

SEQ ID NO: 322685 - RNA, 19 nt, Homo sapiens
  misc_RNA (1)...(19): siRNA sense strand
ccacugcaacaugacguua

SEQ ID NO: 322686 - RNA, 19 nt, Homo sapiens
  misc_RNA (1)...(19): siRNA sense strand
ugacgggauccgcaaguuu

SEQ ID NO: 322687 - RNA, 19 nt, Homo sapiens
  misc_RNA (1)...(19): siRNA sense strand
acaagaggaccagauuaaa

SEQ ID NO: 322688 - RNA, 19 nt, Homo sapiens
  misc_RNA (1)...(19): siRNA sense strand
gagaagucuuuccguuggu

SEQ ID NO: 322689 - RNA, 19 nt, Homo sapiens
  misc_RNA (1)...(19): siRNA sense strand
cuacaacuacuacaagaag

SEQ ID NO: 322690 - RNA, 19 nt, Homo sapiens
  misc_RNA (1)...(19): siRNA sense strand
aauguucaaugcagagaau

SEQ ID NO: 322691 - RNA, 19 nt, Homo sapiens
  misc_RNA (1)...(19): siRNA sense strand
gcaacacgggcgagaucaa

SEQ ID NO: 322692 - RNA, 19 nt, Homo sapiens
  misc_RNA (1)...(19): siRNA sense strand
ucaucaaccugggaaggaa

SEQ ID NO: 322693 - RNA, 19 nt, Homo sapiens
  misc_RNA (1)...(19): siRNA sense strand
gagcggaugcugacagaac

SEQ ID NO: 322694 - RNA, 19 nt, Homo sapiens
  misc_RNA (1)...(19): siRNA sense strand
guugggcgcauccuugauu

SEQ ID NO: 322695 - RNA, 19 nt, Homo sapiens
  misc_RNA (1)...(19): siRNA sense strand
gcaacaugacguuacucuu

SEQ ID NO: 322696 - RNA, 19 nt, Homo sapiens
  misc_RNA (1)...(19): siRNA sense strand
ucaaugcagagaauggaaa

SEQ ID NO: 322697 - RNA, 19 nt, Homo sapiens
  misc_RNA (1)...(19): siRNA sense strand
gaauguucaaugcagagaa

SEQ ID NO: 322698 - RNA, 19 nt, Homo sapiens
  misc_RNA (1)...(19): siRNA sense strand
caaacaccgacaagaaauc

SEQ ID NO: 322699 - RNA, 19 nt, Homo sapiens
  misc_RNA (1)...(19): siRNA sense strand
ggccgaguauccacagaag

SEQ ID NO: 322700 - RNA, 19 nt, Homo sapiens
  misc_RNA (1)...(19): siRNA sense strand
caaguuugccgcugaugca

SEQ ID NO: 322701 - RNA, 19 nt, Homo sapiens
  misc_RNA (1)...(19): siRNA sense strand
ccgacaagaaauccuauga

SEQ ID NO: 322702 - RNA, 19 nt, Homo sapiens
  misc_RNA (1)...(19): siRNA sense strand
gaugcugacagaacgaaug

SEQ ID NO: 322703 - RNA, 19 nt, Homo sapiens
  misc_RNA (1)...(19): siRNA sense strand
ccaccuggaugagaagucu

SEQ ID NO: 322704 - RNA, 19 nt, Homo sapiens
  misc_RNA (1)...(19): siRNA sense strand
uggagcggaugcugacaga

SEQ ID NO: 322705 - RNA, 19 nt, Homo sapiens
  misc_RNA (1)...(19): siRNA sense strand
agaagucuuuccguugguu

SEQ ID NO: 322706 - RNA, 19 nt, Homo sapiens
  misc_RNA (1)...(19): siRNA sense strand
gaccgaauucuuauaaagc

SEQ ID NO: 322707 - RNA, 19 nt, Homo sapiens
  misc_RNA (1)...(19): siRNA sense strand
augcagagaauggaaagua

SEQ ID NO: 322708 - RNA, 19 nt, Homo sapiens
  misc_RNA (1)...(19): siRNA sense strand
ccaccaacccgucccugau

SEQ ID NO: 322709 - RNA, 19 nt, Homo sapiens
  misc_RNA (1)...(19): siRNA sense strand
cgacaagaaauccuaugag

SEQ ID NO: 322710 - RNA, 19 nt, Homo sapiens
  misc_RNA (1)...(19): siRNA sense strand
acaccgacaagaaauccua

SEQ ID NO: 322711 - RNA, 19 nt, Homo sapiens
  misc_RNA (1)...(19): siRNA sense strand
cggcauccacugcaacaug

SEQ ID NO: 322712 - RNA, 19 nt, Homo sapiens
  misc_RNA (1)...(19): siRNA sense strand
ugcagagaauggaaaguag

SEQ ID NO: 322713 - RNA, 19 nt, Homo sapiens
  misc_RNA (1)...(19): siRNA sense strand
gaccagcucaagcaguuca

SEQ ID NO: 322714 - RNA, 19 nt, Homo sapiens
  misc_RNA (1)...(19): siRNA sense strand
gucacaagaggaccagauu

SEQ ID NO: 322715 - RNA, 19 nt, Homo sapiens
  misc_RNA (1)...(19): siRNA sense strand
gggccgaguauccacagaa

SEQ ID NO: 322716 - RNA, 19 nt, Homo sapiens
  misc_RNA (1)...(19): siRNA sense strand
aacaugacguuacucuucu

SEQ ID NO: 322717 - RNA, 19 nt, Homo sapiens
  misc_RNA (1)...(19): siRNA sense strand
auaaagcugucaucaaccu

SEQ ID NO: 322718 - RNA, 19 nt, Homo sapiens
  misc_RNA (1)...(19): siRNA sense strand
cuuauaaagcugucaucaa

SEQ ID NO: 322719 - RNA, 19 nt, Homo sapiens
  misc_RNA (1)...(19): siRNA sense strand
aggaccgaauucuuauaaa

SEQ ID NO: 322720 - RNA, 19 nt, Homo sapiens
  misc_RNA (1)...(19): siRNA sense strand
ggaacacuaugaugaguuu

SEQ ID NO: 322721 - RNA, 19 nt, Homo sapiens
  misc_RNA (1)...(19): siRNA sense strand
caaagucaacuguucauuu

SEQ ID NO: 322722 - RNA, 19 nt, Homo sapiens
  misc_RNA (1)...(19): siRNA sense strand
ugaaagaucugggcgauuc

SEQ ID NO: 322723 - RNA, 19 nt, Homo sapiens
  misc_RNA (1)...(19): siRNA sense strand
gcucucgguugcacaauaa

SEQ ID NO: 322724 - RNA, 19 nt, Homo sapiens
  misc_RNA (1)...(19): siRNA sense strand
uuacagaaauggaggagaa

SEQ ID NO: 322725 - RNA, 19 nt, Homo sapiens
  misc_RNA (1)...(19): siRNA sense strand
caagaagcauagaucaaga

SEQ ID NO: 322726 - RNA, 19 nt, Homo sapiens
  misc_RNA (1)...(19): siRNA sense strand
gucgagagaucgugaaaga

SEQ ID NO: 322727 - RNA, 19 nt, Homo sapiens
  misc_RNA (1)...(19): siRNA sense strand
gaaagacaaagucaacugu

SEQ ID NO: 322728 - RNA, 19 nt, Homo sapiens
  misc_RNA (1)...(19): siRNA sense strand
gcaagaagcauagaucaag

SEQ ID NO: 322729 - RNA, 19 nt, Homo sapiens
  misc_RNA (1)...(19): siRNA sense strand
gagcgucguucucggucua

SEQ ID NO: 322730 - RNA, 19 nt, Homo sapiens
  misc_RNA (1)...(19): siRNA sense strand
ggagaugcaggaacacuau

SEQ ID NO: 322731 - RNA, 19 nt, Homo sapiens
  misc_RNA (1)...(19): siRNA sense strand
gagaugaacgucugugaca

SEQ ID NO: 322732 - RNA, 19 nt, Homo sapiens
  misc_RNA (1)...(19): siRNA sense strand
ggagaaguauggggaagua

SEQ ID NO: 322733 - RNA, 19 nt, Homo sapiens
  misc_RNA (1)...(19): siRNA sense strand
cagaaauggaggagaagua

SEQ ID NO: 322734 - RNA, 19 nt, Homo sapiens
  misc_RNA (1)...(19): siRNA sense strand
gaagccugcugccgucagu

SEQ ID NO: 322735 - RNA, 19 nt, Homo sapiens
  misc_RNA (1)...(19): siRNA sense strand
ugaagcccauuuccagaga

SEQ ID NO: 322736 - RNA, 19 nt, Homo sapiens
  misc_RNA (1)...(19): siRNA sense strand
aagacaaagucaacuguuc

SEQ ID NO: 322737 - RNA, 19 nt, Homo sapiens
  misc_RNA (1)...(19): siRNA sense strand
gaaauggaggagaaguaug

SEQ ID NO: 322738 - RNA, 19 nt, Homo sapiens
  misc_RNA (1)...(19): siRNA sense strand
gcaccgagaaagacaaagu

SEQ ID NO: 322739 - RNA, 19 nt, Homo sapiens
  misc_RNA (1)...(19): siRNA sense strand
gcaggaacacuaugaugag

SEQ ID NO: 322740 - RNA, 19 nt, Homo sapiens
  misc_RNA (1)...(19): siRNA sense strand
gugauugacuugaauaacc

SEQ ID NO: 322741 - RNA, 19 nt, Homo sapiens
  misc_RNA (1)...(19): siRNA sense strand
aguaugagaugggagaaug

SEQ ID NO: 322742 - RNA, 19 nt, Homo sapiens
  misc_RNA (1)...(19): siRNA sense strand
ggaaguagaggagaugaac

SEQ ID NO: 322743 - RNA, 19 nt, Homo sapiens
  misc_RNA (1)...(19): siRNA sense strand
cgagaaagacaaagucaac

SEQ ID NO: 322744 - RNA, 19 nt, Homo sapiens
  misc_RNA (1)...(19): siRNA sense strand
gcugugauugacuugaaua

SEQ ID NO: 322745 - RNA, 19 nt, Homo sapiens
  misc_RNA (1)...(19): siRNA sense strand
ggaaaaggcugugauugac

SEQ ID NO: 322746 - RNA, 19 nt, Homo sapiens
  misc_RNA (1)...(19): siRNA sense strand
agacaaagucaacuguuca

SEQ ID NO: 322747 - RNA, 19 nt, Homo sapiens
  misc_RNA (1)...(19): siRNA sense strand
guaucuggccuccaucuuc

SEQ ID NO: 322748 - RNA, 19 nt, Homo sapiens
  misc_RNA (1)...(19): siRNA sense strand
cgaggcggcuucugcaacu

SEQ ID NO: 322749 - RNA, 19 nt, Homo sapiens
  misc_RNA (1)...(19): siRNA sense strand
agaaauggaggagaaguau

SEQ ID NO: 322750 - RNA, 19 nt, Homo sapiens
  misc_RNA (1)...(19): siRNA sense strand
gauccacgccgagcuguca

SEQ ID NO: 322751 - RNA, 19 nt, Homo sapiens
  misc_RNA (1)...(19): siRNA sense strand
cgugagcgauguggagaug

SEQ ID NO: 322752 - RNA, 19 nt, Homo sapiens
  misc_RNA (1)...(19): siRNA sense strand
caggaacacuaugaugagu

SEQ ID NO: 322753 - RNA, 19 nt, Homo sapiens
  misc_RNA (1)...(19): siRNA sense strand
aaagacaaagucaacuguu

SEQ ID NO: 322754 - RNA, 19 nt, Homo sapiens
  misc_RNA (1)...(19): siRNA sense strand
ugcaggaacacuaugauga

SEQ ID NO: 322755 - RNA, 19 nt, Homo sapiens
  misc_RNA (1)...(19): siRNA sense strand
aggcugugauugacuugaa

SEQ ID NO: 322756 - RNA, 19 nt, Homo sapiens
  misc_RNA (1)...(19): siRNA sense strand
gaugaacgucugugacaac

SEQ ID NO: 322757 - RNA, 19 nt, Homo sapiens
  misc_RNA (1)...(19): siRNA sense strand
aaauggaggagaaguaugg

SEQ ID NO: 322758 - RNA, 19 nt, Homo sapiens
  misc_RNA (1)...(19): siRNA sense strand
caaguuucgccgugaggaa

SEQ ID NO: 322759 - RNA, 19 nt, Homo sapiens
  misc_RNA (1)...(19): siRNA sense strand
ugagcgauguggagaugca

SEQ ID NO: 322760 - RNA, 19 nt, Homo sapiens
  misc_RNA (1)...(19): siRNA sense strand
cggaaaaggcugugauuga

SEQ ID NO: 322761 - RNA, 19 nt, Homo sapiens
  misc_RNA (1)...(19): siRNA sense strand
agaaagacaaagucaacug

SEQ ID NO: 322762 - RNA, 19 nt, Homo sapiens
  misc_RNA (1)...(19): siRNA sense strand
gggaaguagaggagaugaa

SEQ ID NO: 322763 - RNA, 19 nt, Homo sapiens
  misc_RNA (1)...(19): siRNA sense strand
aaaaggcugugauugacuu

SEQ ID NO: 322764 - RNA, 19 nt, Homo sapiens
  misc_RNA (1)...(19): siRNA sense strand
acaggaggcggucgagaga

SEQ ID NO: 322765 - RNA, 19 nt, Homo sapiens
  misc_RNA (1)...(19): siRNA sense strand
gacaaagucaacuguucau

SEQ ID NO: 322766 - RNA, 19 nt, Homo sapiens
  misc_RNA (1)...(19): siRNA sense strand
ggacaagauccuaacauuu

SEQ ID NO: 322767 - RNA, 19 nt, Homo sapiens
  misc_RNA (1)...(19): siRNA sense strand
gaggaaauuugagaaaguu

SEQ ID NO: 322768 - RNA, 19 nt, Homo sapiens
  misc_RNA (1)...(19): siRNA sense strand
ggauuucucuggacaagau

SEQ ID NO: 322769 - RNA, 19 nt, Homo sapiens
  misc_RNA (1)...(19): siRNA sense strand
gagcuucccuucuacagau

SEQ ID NO: 322770 - RNA, 19 nt, Homo sapiens
  misc_RNA (1)...(19): siRNA sense strand
gaaagagcuucccuucuac

SEQ ID NO: 322771 - RNA, 19 nt, Homo sapiens
  misc_RNA (1)...(19): siRNA sense strand
gaugcugggugcagaaaga

SEQ ID NO: 322772 - RNA, 19 nt, Homo sapiens
  misc_RNA (1)...(19): siRNA sense strand
caagaggaaauuugagaaa

SEQ ID NO: 322773 - RNA, 19 nt, Homo sapiens
  misc_RNA (1)...(19): siRNA sense strand
gacaagauccuaacauuuu

SEQ ID NO: 322774 - RNA, 19 nt, Homo sapiens
  misc_RNA (1)...(19): siRNA sense strand
uggacaagauccuaacauu

SEQ ID NO: 322775 - RNA, 19 nt, Homo sapiens
  misc_RNA (1)...(19): siRNA sense strand
cuacagauacugccagaga

SEQ ID NO: 322776 - RNA, 19 nt, Homo sapiens
  misc_RNA (1)...(19): siRNA sense strand
ccugauugcuucuggaaau

SEQ ID NO: 322777 - RNA, 19 nt, Homo sapiens
  misc_RNA (1)...(19): siRNA sense strand
agacucaaguaccaacauu

SEQ ID NO: 322778 - RNA, 19 nt, Homo sapiens
  misc_RNA (1)...(19): siRNA sense strand
ggaaagcagacucaaguac

SEQ ID NO: 322779 - RNA, 19 nt, Homo sapiens
  misc_RNA (1)...(19): siRNA sense strand
agaggaaauuugagaaagu

SEQ ID NO: 322780 - RNA, 19 nt, Homo sapiens
  misc_RNA (1)...(19): siRNA sense strand
caggaaagcagacucaagu

SEQ ID NO: 322781 - RNA, 19 nt, Homo sapiens
  misc_RNA (1)...(19): siRNA sense strand
gaggggauauucucaggaa

SEQ ID NO: 322782 - RNA, 19 nt, Homo sapiens
  misc_RNA (1)...(19): siRNA sense strand
ccaagaggaaauuugagaa

SEQ ID NO: 322783 - RNA, 19 nt, Homo sapiens
  misc_RNA (1)...(19): siRNA sense strand
cuggaaaccauacaagaaa

SEQ ID NO: 322784 - RNA, 19 nt, Homo sapiens
  misc_RNA (1)...(19): siRNA sense strand
cugauugcuucuggaaaua

SEQ ID NO: 322785 - RNA, 19 nt, Homo sapiens
  misc_RNA (1)...(19): siRNA sense strand
aaagcagacucaaguacca

SEQ ID NO: 322786 - RNA, 19 nt, Homo sapiens
  misc_RNA (1)...(19): siRNA sense strand
aaacgugagacuccugauu

SEQ ID NO: 322787 - RNA, 19 nt, Homo sapiens
  misc_RNA (1)...(19): siRNA sense strand
ucucagcaccucaugaaga

SEQ ID NO: 322788 - RNA, 19 nt, Homo sapiens
  misc_RNA (1)...(19): siRNA sense strand
uaacccaagaggaaauuug

SEQ ID NO: 322789 - RNA, 19 nt, Homo sapiens
  misc_RNA (1)...(19): siRNA sense strand
gauccuaacauuuuacuga

SEQ ID NO: 322790 - RNA, 19 nt, Homo sapiens
  misc_RNA (1)...(19): siRNA sense strand
cuggaaauacugugucuga

SEQ ID NO: 322791 - RNA, 19 nt, Homo sapiens
  misc_RNA (1)...(19): siRNA sense strand
aagaggaaauuugagaaag

SEQ ID NO: 322792 - RNA, 19 nt, Homo sapiens
  misc_RNA (1)...(19): siRNA sense strand
ucuggaaaccauacaagaa

SEQ ID NO: 322793 - RNA, 19 nt, Homo sapiens
  misc_RNA (1)...(19): siRNA sense strand
gaaucuggaaaccauacaa

SEQ ID NO: 322794 - RNA, 19 nt, Homo sapiens
  misc_RNA (1)...(19): siRNA sense strand
gugagacuccugauugcuu

SEQ ID NO: 322795 - RNA, 19 nt, Homo sapiens
  misc_RNA (1)...(19): siRNA sense strand
gcagaaagaggggauauuc

SEQ ID NO: 322796 - RNA, 19 nt, Homo sapiens
  misc_RNA (1)...(19): siRNA sense strand
gacucaaguaccaacauuu

SEQ ID NO: 322797 - RNA, 19 nt, Homo sapiens
  misc_RNA (1)...(19): siRNA sense strand
gagaugcugggugcagaaa

SEQ ID NO: 322798 - RNA, 19 nt, Homo sapiens
  misc_RNA (1)...(19): siRNA sense strand
gaaagaggggauauucuca

SEQ ID NO: 322799 - RNA, 19 nt, Homo sapiens
  misc_RNA (1)...(19): siRNA sense strand
aauauccuuucaacucuca

SEQ ID NO: 322800 - RNA, 19 nt, Homo sapiens
  misc_RNA (1)...(19): siRNA sense strand
aacgugagacuccugauug

SEQ ID NO: 322801 - RNA, 19 nt, Homo sapiens
  misc_RNA (1)...(19): siRNA sense strand
cccaagaggaaauuugaga

SEQ ID NO: 322802 - RNA, 19 nt, Homo sapiens
  misc_RNA (1)...(19): siRNA sense strand
uacagauacugccagagau

SEQ ID NO: 322803 - RNA, 19 nt, Homo sapiens
  misc_RNA (1)...(19): siRNA sense strand
caggauuucucuggacaag

SEQ ID NO: 322804 - RNA, 19 nt, Homo sapiens
  misc_RNA (1)...(19): siRNA sense strand
gggauauucucaggaaagc

SEQ ID NO: 322805 - RNA, 19 nt, Homo sapiens
  misc_RNA (1)...(19): siRNA sense strand
ggacaagauccuaacauuu

SEQ ID NO: 322806 - RNA, 19 nt, Homo sapiens
  misc_RNA (1)...(19): siRNA sense strand
gaggaaauuugagaaaguu

SEQ ID NO: 322807 - RNA, 19 nt, Homo sapiens
  misc_RNA (1)...(19): siRNA sense strand
ggauuucucuggacaagau

SEQ ID NO: 322808 - RNA, 19 nt, Homo sapiens
  misc_RNA (1)...(19): siRNA sense strand
gagcuucccuucuacagau

SEQ ID NO: 322809 - RNA, 19 nt, Homo sapiens
  misc_RNA (1)...(19): siRNA sense strand
gaaagagcuucccuucuac

SEQ ID NO: 322810 - RNA, 19 nt, Homo sapiens
  misc_RNA (1)...(19): siRNA sense strand
gaugcugggugcagaaaga

SEQ ID NO: 322811 - RNA, 19 nt, Homo sapiens
  misc_RNA (1)...(19): siRNA sense strand
caagaggaaauuugagaaa

SEQ ID NO: 322812 - RNA, 19 nt, Homo sapiens
  misc_RNA (1)...(19): siRNA sense strand
gacaagauccuaacauuuu

SEQ ID NO: 322813 - RNA, 19 nt, Homo sapiens
  misc_RNA (1)...(19): siRNA sense strand
uggacaagauccuaacauu

SEQ ID NO: 322814 - RNA, 19 nt, Homo sapiens
  misc_RNA (1)...(19): siRNA sense strand
cuacagauacugccagaga

SEQ ID NO: 322815 - RNA, 19 nt, Homo sapiens
  misc_RNA (1)...(19): siRNA sense strand
ccugauugcuucuggaaau

SEQ ID NO: 322816 - RNA, 19 nt, Homo sapiens
  misc_RNA (1)...(19): siRNA sense strand
agacucaaguaccaacauu

SEQ ID NO: 322817 - RNA, 19 nt, Homo sapiens
  misc_RNA (1)...(19): siRNA sense strand
ggaaagcagacucaaguac

SEQ ID NO: 322818 - RNA, 19 nt, Homo sapiens
  misc_RNA (1)...(19): siRNA sense strand
agaggaaauuugagaaagu

SEQ ID NO: 322819 - RNA, 19 nt, Homo sapiens
  misc_RNA (1)...(19): siRNA sense strand
caggaaagcagacucaagu

SEQ ID NO: 322820 - RNA, 19 nt, Homo sapiens
  misc_RNA (1)...(19): siRNA sense strand
gaggggauauucucaggaa

SEQ ID NO: 322821 - RNA, 19 nt, Homo sapiens
  misc_RNA (1)...(19): siRNA sense strand
ccaagaggaaauuugagaa

SEQ ID NO: 322822 - RNA, 19 nt, Homo sapiens
  misc_RNA (1)...(19): siRNA sense strand
cuggaaaccauacaagaaa

SEQ ID NO: 322823 - RNA, 19 nt, Homo sapiens
  misc_RNA (1)...(19): siRNA sense strand
cugauugcuucuggaaaua

SEQ ID NO: 322824 - RNA, 19 nt, Homo sapiens
  misc_RNA (1)...(19): siRNA sense strand
aaagcagacucaaguacca

SEQ ID NO: 322825 - RNA, 19 nt, Homo sapiens
  misc_RNA (1)...(19): siRNA sense strand
aaacgugagacuccugauu

SEQ ID NO: 322826 - RNA, 19 nt, Homo sapiens
  misc_RNA (1)...(19): siRNA sense strand
ucucagcaccucaugaaga

SEQ ID NO: 322827 - RNA, 19 nt, Homo sapiens
  misc_RNA (1)...(19): siRNA sense strand
uaacccaagaggaaauuug

SEQ ID NO: 322828 - RNA, 19 nt, Homo sapiens
  misc_RNA (1)...(19): siRNA sense strand
gauccuaacauuuuacuga

SEQ ID NO: 322829 - RNA, 19 nt, Homo sapiens
  misc_RNA (1)...(19): siRNA sense strand
cuggaaauacugugucuga

SEQ ID NO: 322830 - RNA, 19 nt, Homo sapiens
  misc_RNA (1)...(19): siRNA sense strand
aagaggaaauuugagaaag

SEQ ID NO: 322831 - RNA, 19 nt, Homo sapiens
  misc_RNA (1)...(19): siRNA sense strand
ucuggaaaccauacaagaa

SEQ ID NO: 322832 - RNA, 19 nt, Homo sapiens
  misc_RNA (1)...(19): siRNA sense strand
gaaucuggaaaccauacaa

SEQ ID NO: 322833 - RNA, 19 nt, Homo sapiens
  misc_RNA (1)...(19): siRNA sense strand
gugagacuccugauugcuu

SEQ ID NO: 322834 - RNA, 19 nt, Homo sapiens
  misc_RNA (1)...(19): siRNA sense strand
gcagaaagaggggauauuc

SEQ ID NO: 322835 - RNA, 19 nt, Homo sapiens
  misc_RNA (1)...(19): siRNA sense strand
gacucaaguaccaacauuu

SEQ ID NO: 322836 - RNA, 19 nt, Homo sapiens
  misc_RNA (1)...(19): siRNA sense strand
gagaugcugggugcagaaa

SEQ ID NO: 322837 - RNA, 19 nt, Homo sapiens
  misc_RNA (1)...(19): siRNA sense strand
gaaagaggggauauucuca

SEQ ID NO: 322838 - RNA, 19 nt, Homo sapiens
  misc_RNA (1)...(19): siRNA sense strand
aauauccuuucaacucuca

SEQ ID NO: 322839 - RNA, 19 nt, Homo sapiens
  misc_RNA (1)...(19): siRNA sense strand
aacgugagacuccugauug

SEQ ID NO: 322840 - RNA, 19 nt, Homo sapiens
  misc_RNA (1)...(19): siRNA sense strand
cccaagaggaaauuugaga

SEQ ID NO: 322841 - RNA, 19 nt, Homo sapiens
  misc_RNA (1)...(19): siRNA sense strand
uacagauacugccagagau

SEQ ID NO: 322842 - RNA, 19 nt, Homo sapiens
  misc_RNA (1)...(19): siRNA sense strand
caggauuucucuggacaag

SEQ ID NO: 322843 - RNA, 19 nt, Homo sapiens
  misc_RNA (1)...(19): siRNA sense strand
gggauauucucaggaaagc

SEQ ID NO: 322844 - RNA, 19 nt, Homo sapiens
  misc_RNA (1)...(19): siRNA sense strand
uuacgaagguucaagauua

SEQ ID NO: 322845 - RNA, 19 nt, Homo sapiens
  misc_RNA (1)...(19): siRNA sense strand
uaauauaucuuccguguug

SEQ ID NO: 322846 - RNA, 19 nt, Homo sapiens
  misc_RNA (1)...(19): siRNA sense strand
gcaaagcaaugucucaaga

SEQ ID NO: 322847 - RNA, 19 nt, Homo sapiens
  misc_RNA (1)...(19): siRNA sense strand
ucaaaccucuauagucuua

SEQ ID NO: 322848 - RNA, 19 nt, Homo sapiens
  misc_RNA (1)...(19): siRNA sense strand
gagcuagaauuaucuguga

SEQ ID NO: 322849 - RNA, 19 nt, Homo sapiens
  misc_RNA (1)...(19): siRNA sense strand
gggccugccugauaauaua

SEQ ID NO: 322850 - RNA, 19 nt, Homo sapiens
  misc_RNA (1)...(19): siRNA sense strand
gcgggacacucacucaaua

SEQ ID NO: 322851 - RNA, 19 nt, Homo sapiens
  misc_RNA (1)...(19): siRNA sense strand
ucauggaagucacaaauaa

SEQ ID NO: 322852 - RNA, 19 nt, Homo sapiens
  misc_RNA (1)...(19): siRNA sense strand
cuacagaaguacaaucauu

SEQ ID NO: 322853 - RNA, 19 nt, Homo sapiens
  misc_RNA (1)...(19): siRNA sense strand
gauagugucuggaaaccuu

SEQ ID NO: 322854 - RNA, 19 nt, Homo sapiens
  misc_RNA (1)...(19): siRNA sense strand
ggcaagagcuagaauuauc

SEQ ID NO: 322855 - RNA, 19 nt, Homo sapiens
  misc_RNA (1)...(19): siRNA sense strand
uagcaaaggacgugucuua

SEQ ID NO: 322856 - RNA, 19 nt, Homo sapiens
  misc_RNA (1)...(19): siRNA sense strand
acaaacaaccuauggauuu

SEQ ID NO: 322857 - RNA, 19 nt, Homo sapiens
  misc_RNA (1)...(19): siRNA sense strand
guggaucuguauauucuua

SEQ ID NO: 322858 - RNA, 19 nt, Homo sapiens
  misc_RNA (1)...(19): siRNA sense strand
ggaaaacgcugugaauuug

SEQ ID NO: 322859 - RNA, 19 nt, Homo sapiens
  misc_RNA (1)...(19): siRNA sense strand
gaaggcaaagaguauauuu

SEQ ID NO: 322860 - RNA, 19 nt, Homo sapiens
  misc_RNA (1)...(19): siRNA sense strand
uaccagauaugcuugaauu

SEQ ID NO: 322861 - RNA, 19 nt, Homo sapiens
  misc_RNA (1)...(19): siRNA sense strand
gcagguacccgaggauuaa

SEQ ID NO: 322862 - RNA, 19 nt, Homo sapiens
  misc_RNA (1)...(19): siRNA sense strand
caaaggacgugucuuacuc

SEQ ID NO: 322863 - RNA, 19 nt, Homo sapiens
  misc_RNA (1)...(19): siRNA sense strand
cuacaacucuggauugcuu

SEQ ID NO: 322864 - RNA, 19 nt, Homo sapiens
  misc_RNA (1)...(19): siRNA sense strand
gaacaaaaccuacaauaca

SEQ ID NO: 322865 - RNA, 19 nt, Homo sapiens
  misc_RNA (1)...(19): siRNA sense strand
gacacucacucaauaugaa

SEQ ID NO: 322866 - RNA, 19 nt, Homo sapiens
  misc_RNA (1)...(19): siRNA sense strand
guucaagucuguaucaaag

SEQ ID NO: 322867 - RNA, 19 nt, Homo sapiens
  misc_RNA (1)...(19): siRNA sense strand
caaacaaccuauggauuuc

SEQ ID NO: 322868 - RNA, 19 nt, Homo sapiens
  misc_RNA (1)...(19): siRNA sense strand
ggacacucacucaauauga

SEQ ID NO: 322869 - RNA, 19 nt, Homo sapiens
  misc_RNA (1)...(19): siRNA sense strand
ucaagucuguaucaaaguu

SEQ ID NO: 322870 - RNA, 19 nt, Homo sapiens
  misc_RNA (1)...(19): siRNA sense strand
cagauaugcuugaauugga

SEQ ID NO: 322871 - RNA, 19 nt, Homo sapiens
  misc_RNA (1)...(19): siRNA sense strand
ugucaaaccucuauagucu

SEQ ID NO: 322872 - RNA, 19 nt, Homo sapiens
  misc_RNA (1)...(19): siRNA sense strand
ugaauuggaucaccucaca

SEQ ID NO: 322873 - RNA, 19 nt, Homo sapiens
  misc_RNA (1)...(19): siRNA sense strand
gaacgguuaucaucauugc

SEQ ID NO: 322874 - RNA, 19 nt, Homo sapiens
  misc_RNA (1)...(19): siRNA sense strand
caauacagaugucccucuu

SEQ ID NO: 322875 - RNA, 19 nt, Homo sapiens
  misc_RNA (1)...(19): siRNA sense strand
gaaaguauaccagauaugc

SEQ ID NO: 322876 - RNA, 19 nt, Homo sapiens
  misc_RNA (1)...(19): siRNA sense strand
ggagaaggcaaagaguaua

SEQ ID NO: 322877 - RNA, 19 nt, Homo sapiens
  misc_RNA (1)...(19): siRNA sense strand
acagaugucccucuuguuu

SEQ ID NO: 322878 - RNA, 19 nt, Homo sapiens
  misc_RNA (1)...(19): siRNA sense strand
uaaaacacgugcagaugua

SEQ ID NO: 322879 - RNA, 19 nt, Homo sapiens
  misc_RNA (1)...(19): siRNA sense strand
uguacaagaucuuagcaaa

SEQ ID NO: 322880 - RNA, 19 nt, Homo sapiens
  misc_RNA (1)...(19): siRNA sense strand
gggaacgguuaucaucauu

SEQ ID NO: 322881 - RNA, 19 nt, Homo sapiens
  misc_RNA (1)...(19): siRNA sense strand
ucaauuagaaacugcagua

SEQ ID NO: 322882 - RNA, 19 nt, Homo sapiens
  misc_RNA (1)...(19): siRNA sense strand
gauggaggccugaauguca

SEQ ID NO: 322883 - RNA, 19 nt, Homo sapiens
  misc_RNA (1)...(19): siRNA sense strand
agaauuaucugugaagaag

SEQ ID NO: 322884 - RNA, 19 nt, Homo sapiens
  misc_RNA (1)...(19): siRNA sense strand
cuacagugcccuugguuaa

SEQ ID NO: 322885 - RNA, 19 nt, Homo sapiens
  misc_RNA (1)...(19): siRNA sense strand
aaagcaaugucucaagaug

SEQ ID NO: 322886 - RNA, 19 nt, Homo sapiens
  misc_RNA (1)...(19): siRNA sense strand
gaucuuagcaaagcaaugu

SEQ ID NO: 322887 - RNA, 19 nt, Homo sapiens
  misc_RNA (1)...(19): siRNA sense strand
uaucccaccuggagcagua

SEQ ID NO: 322888 - RNA, 19 nt, Homo sapiens
  misc_RNA (1)...(19): siRNA sense strand
gagaaggcaaagaguauau

SEQ ID NO: 322889 - RNA, 19 nt, Homo sapiens
  misc_RNA (1)...(19): siRNA sense strand
gguggaaauugcucaagug

SEQ ID NO: 322890 - RNA, 19 nt, Homo sapiens
  misc_RNA (1)...(19): siRNA sense strand
ggauggauuucggaagcua

SEQ ID NO: 322891 - RNA, 19 nt, Homo sapiens
  misc_RNA (1)...(19): siRNA sense strand
gagcaguauuagagaacaa

SEQ ID NO: 322892 - RNA, 19 nt, Homo sapiens
  misc_RNA (1)...(19): siRNA sense strand
cauggugacagaauugaua

SEQ ID NO: 322893 - RNA, 19 nt, Homo sapiens
  misc_RNA (1)...(19): siRNA sense strand
aagcacauguugacgaguu

SEQ ID NO: 322894 - RNA, 19 nt, Homo sapiens
  misc_RNA (1)...(19): siRNA sense strand
auacagaugucccucuugu

SEQ ID NO: 322895 - RNA, 19 nt, Homo sapiens
  misc_RNA (1)...(19): siRNA sense strand
gcugugaauuugucaugga

SEQ ID NO: 322896 - RNA, 19 nt, Homo sapiens
  misc_RNA (1)...(19): siRNA sense strand
gcaaaggacgugucuuacu

SEQ ID NO: 322897 - RNA, 19 nt, Homo sapiens
  misc_RNA (1)...(19): siRNA sense strand
caguggaucuguauauucu

SEQ ID NO: 322898 - RNA, 19 nt, Homo sapiens
  misc_RNA (1)...(19): siRNA sense strand
caauaugaaggcaaacuga

SEQ ID NO: 322899 - RNA, 19 nt, Homo sapiens
  misc_RNA (1)...(19): siRNA sense strand
aaacugagacugguggaaa

SEQ ID NO: 322900 - RNA, 19 nt, Homo sapiens
  misc_RNA (1)...(19): siRNA sense strand
caggucauggugauauuua

SEQ ID NO: 322901 - RNA, 19 nt, Homo sapiens
  misc_RNA (1)...(19): siRNA sense strand
uacgaagguucaagauuau

SEQ ID NO: 322902 - RNA, 19 nt, Homo sapiens
  misc_RNA (1)...(19): siRNA sense strand
caggaucucugacaaugag

SEQ ID NO: 322903 - RNA, 19 nt, Homo sapiens
  misc_RNA (1)...(19): siRNA sense strand
caaaucauggugacagaau

SEQ ID NO: 322904 - RNA, 19 nt, Homo sapiens
  misc_RNA (1)...(19): siRNA sense strand
gguacccgaggauuaauaa

SEQ ID NO: 322905 - RNA, 19 nt, Homo sapiens
  misc_RNA (1)...(19): siRNA sense strand
acaagauagugucuggaaa

SEQ ID NO: 322906 - RNA, 19 nt, Homo sapiens
  misc_RNA (1)...(19): siRNA sense strand
acauggaaaucauugugaa

SEQ ID NO: 322907 - RNA, 19 nt, Homo sapiens
  misc_RNA (1)...(19): siRNA sense strand
ucggcaagagcuagaauua

SEQ ID NO: 322908 - RNA, 19 nt, Homo sapiens
  misc_RNA (1)...(19): siRNA sense strand
uuucggaagcuauuucaua

SEQ ID NO: 322909 - RNA, 19 nt, Homo sapiens
  misc_RNA (1)...(19): siRNA sense strand
uggaaaccuucgcaucuug

SEQ ID NO: 322910 - RNA, 19 nt, Homo sapiens
  misc_RNA (1)...(19): siRNA sense strand
acagugcccuugguuaaau

SEQ ID NO: 322911 - RNA, 19 nt, Homo sapiens
  misc_RNA (1)...(19): siRNA sense strand
gcaggaucucugacaauga

SEQ ID NO: 322912 - RNA, 19 nt, Homo sapiens
  misc_RNA (1)...(19): siRNA sense strand
gacauggaaaucauuguga

SEQ ID NO: 322913 - RNA, 19 nt, Homo sapiens
  misc_RNA (1)...(19): siRNA sense strand
acccgaggauuaauaaaga

SEQ ID NO: 322914 - RNA, 19 nt, Homo sapiens
  misc_RNA (1)...(19): siRNA sense strand
guacaagaucuuagcaaag

SEQ ID NO: 322915 - RNA, 19 nt, Homo sapiens
  misc_RNA (1)...(19): siRNA sense strand
ccucacaguuucaggagau

SEQ ID NO: 322916 - RNA, 19 nt, Homo sapiens
  misc_RNA (1)...(19): siRNA sense strand
gugaagaaggaacuagaaa

SEQ ID NO: 322917 - RNA, 19 nt, Homo sapiens
  misc_RNA (1)...(19): siRNA sense strand
uaggagaaggcaaagagua

SEQ ID NO: 322918 - RNA, 19 nt, Homo sapiens
  misc_RNA (1)...(19): siRNA sense strand
agaugucccucuuguuuua

SEQ ID NO: 322919 - RNA, 19 nt, Homo sapiens
  misc_RNA (1)...(19): siRNA sense strand
aaaucauggugacagaauu

SEQ ID NO: 322920 - RNA, 19 nt, Homo sapiens
  misc_RNA (1)...(19): siRNA sense strand
uggaucaccucacaguuuc

SEQ ID NO: 322921 - RNA, 19 nt, Homo sapiens
  misc_RNA (1)...(19): siRNA sense strand
gucgagauuuguacaagau

SEQ ID NO: 322922 - RNA, 19 nt, Homo sapiens
  misc_RNA (1)...(19): siRNA sense strand
gaauuugucauggaaguca

SEQ ID NO: 322923 - RNA, 19 nt, Homo sapiens
  misc_RNA (1)...(19): siRNA sense strand
uggauugcuugauaccuuu

SEQ ID NO: 322924 - RNA, 19 nt, Homo sapiens
  misc_RNA (1)...(19): siRNA sense strand
ugauuggugugaggaauga

SEQ ID NO: 322925 - RNA, 19 nt, Homo sapiens
  misc_RNA (1)...(19): siRNA sense strand
ggagcaguauuagagaaca

SEQ ID NO: 322926 - RNA, 19 nt, Homo sapiens
  misc_RNA (1)...(19): siRNA sense strand
gcaagagcuagaauuaucu

SEQ ID NO: 322927 - RNA, 19 nt, Homo sapiens
  misc_RNA (1)...(19): siRNA sense strand
ggaacgguuaucaucauug

SEQ ID NO: 322928 - RNA, 19 nt, Homo sapiens
  misc_RNA (1)...(19): siRNA sense strand
cauggaagucacaaauaaa

SEQ ID NO: 322929 - RNA, 19 nt, Homo sapiens
  misc_RNA (1)...(19): siRNA sense strand
gucauggaagucacaaaua

SEQ ID NO: 322930 - RNA, 19 nt, Homo sapiens
  misc_RNA (1)...(19): siRNA sense strand
gugaauuugucauggaagu

SEQ ID NO: 322931 - RNA, 19 nt, Homo sapiens
  misc_RNA (1)...(19): siRNA sense strand
uaacacggaugaagauacc

SEQ ID NO: 322932 - RNA, 19 nt, Homo sapiens
  misc_RNA (1)...(19): siRNA sense strand
gaggaaugagaauaccuuu

SEQ ID NO: 322933 - RNA, 19 nt, Homo sapiens
  misc_RNA (1)...(19): siRNA sense strand
caaacuagugguggugaaa

SEQ ID NO: 322934 - RNA, 19 nt, Homo sapiens
  misc_RNA (1)...(19): siRNA sense strand
uacaagaucuuagcaaagc

SEQ ID NO: 322935 - RNA, 19 nt, Homo sapiens
  misc_RNA (1)...(19): siRNA sense strand
caagauagugucuggaaac

SEQ ID NO: 322936 - RNA, 19 nt, Homo sapiens
  misc_RNA (1)...(19): siRNA sense strand
gcaaaucauggugacagaa

SEQ ID NO: 322937 - RNA, 19 nt, Homo sapiens
  misc_RNA (1)...(19): siRNA sense strand
aaagggaacgguuaucauc

SEQ ID NO: 322938 - RNA, 19 nt, Homo sapiens
  misc_RNA (1)...(19): siRNA sense strand
agauggugcuucucaguuc

SEQ ID NO: 322939 - RNA, 19 nt, Homo sapiens
  misc_RNA (1)...(19): siRNA sense strand
aauuaucugugaagaagga

SEQ ID NO: 322940 - RNA, 19 nt, Homo sapiens
  misc_RNA (1)...(19): siRNA sense strand
ggugauauuuacgccaguu

SEQ ID NO: 322941 - RNA, 19 nt, Homo sapiens
  misc_RNA (1)...(19): siRNA sense strand
ugacuguucagcaaauuga

SEQ ID NO: 322942 - RNA, 19 nt, Homo sapiens
  misc_RNA (1)...(19): siRNA sense strand
ggugugaggaaugagaaua

SEQ ID NO: 322943 - RNA, 19 nt, Homo sapiens
  misc_RNA (1)...(19): siRNA sense strand
ggugaugucaaaccucuau

SEQ ID NO: 322944 - RNA, 19 nt, Homo sapiens
  misc_RNA (1)...(19): siRNA sense strand
caacagagcugaauuguga

SEQ ID NO: 322945 - RNA, 19 nt, Homo sapiens
  misc_RNA (1)...(19): siRNA sense strand
gaagagaaaucaaguagca

SEQ ID NO: 322946 - RNA, 19 nt, Homo sapiens
  misc_RNA (1)...(19): siRNA sense strand
ggacgaaugugcugaguau

SEQ ID NO: 322947 - RNA, 19 nt, Homo sapiens
  misc_RNA (1)...(19): siRNA sense strand
gguaauaaguguacuaugu

SEQ ID NO: 322948 - RNA, 19 nt, Homo sapiens
  misc_RNA (1)...(19): siRNA sense strand
gugcagagcugucuuucua

SEQ ID NO: 322949 - RNA, 19 nt, Homo sapiens
  misc_RNA (1)...(19): siRNA sense strand
ggauacaugugaugaguuu

SEQ ID NO: 322950 - RNA, 19 nt, Homo sapiens
  misc_RNA (1)...(19): siRNA sense strand
gaagauagccacaguguca

SEQ ID NO: 322951 - RNA, 19 nt, Homo sapiens
  misc_RNA (1)...(19): siRNA sense strand
caacaaaugugcccugugu

SEQ ID NO: 322952 - RNA, 19 nt, Homo sapiens
  misc_RNA (1)...(19): siRNA sense strand
gaaugaagaucaggaaaug

SEQ ID NO: 322953 - RNA, 19 nt, Homo sapiens
  misc_RNA (1)...(19): siRNA sense strand
gcagagaaauggaaagcuu

SEQ ID NO: 322954 - RNA, 19 nt, Homo sapiens
  misc_RNA (1)...(19): siRNA sense strand
gaacucaucugcccuagag

SEQ ID NO: 322955 - RNA, 19 nt, Homo sapiens
  misc_RNA (1)...(19): siRNA sense strand
gaagagggccaggcauuua

SEQ ID NO: 322956 - RNA, 19 nt, Homo sapiens
  misc_RNA (1)...(19): siRNA sense strand
guagcaagcccucaaauaa

SEQ ID NO: 322957 - RNA, 19 nt, Homo sapiens
  misc_RNA (1)...(19): siRNA sense strand
ggaaaguucuauacaaaca

SEQ ID NO: 322958 - RNA, 19 nt, Homo sapiens
  misc_RNA (1)...(19): siRNA sense strand
ggagacaugcgaugaauuu

SEQ ID NO: 322959 - RNA, 19 nt, Homo sapiens
  misc_RNA (1)...(19): siRNA sense strand
gaaggaaggcgaaucaaga

SEQ ID NO: 322960 - RNA, 19 nt, Homo sapiens
  misc_RNA (1)...(19): siRNA sense strand
gauggaaaguucuauacaa

SEQ ID NO: 322961 - RNA, 19 nt, Homo sapiens
  misc_RNA (1)...(19): siRNA sense strand
caaaggaaaucugcaguga

SEQ ID NO: 322962 - RNA, 19 nt, Homo sapiens
  misc_RNA (1)...(19): siRNA sense strand
ggaaagagaagcagagaga

SEQ ID NO: 322963 - RNA, 19 nt, Homo sapiens
  misc_RNA (1)...(19): siRNA sense strand
caauaaaugugcuaugugu

SEQ ID NO: 322964 - RNA, 19 nt, Homo sapiens
  misc_RNA (1)...(19): siRNA sense strand
ggaagacgcauggcaauaa

SEQ ID NO: 322965 - RNA, 19 nt, Homo sapiens
  misc_RNA (1)...(19): siRNA sense strand
caacaagugugccaugugu

SEQ ID NO: 322966 - RNA, 19 nt, Homo sapiens
  misc_RNA (1)...(19): siRNA sense strand
gaagaaagagcaagagcaa

SEQ ID NO: 322967 - RNA, 19 nt, Homo sapiens
  misc_RNA (1)...(19): siRNA sense strand
gaaaacauaugacaacaga

SEQ ID NO: 322968 - RNA, 19 nt, Homo sapiens
  misc_RNA (1)...(19): siRNA sense strand
aagagaagcugcaaaggaa

SEQ ID NO: 322969 - RNA, 19 nt, Homo sapiens
  misc_RNA (1)...(19): siRNA sense strand
gaaaaugcauggcaacuug

SEQ ID NO: 322970 - RNA, 19 nt, Homo sapiens
  misc_RNA (1)...(19): siRNA sense strand
gcaagacacaugguaauaa

SEQ ID NO: 322971 - RNA, 19 nt, Homo sapiens
  misc_RNA (1)...(19): siRNA sense strand
gcagugaauuucgaaacua

SEQ ID NO: 322972 - RNA, 19 nt, Homo sapiens
  misc_RNA (1)...(19): siRNA sense strand
ggaucugugucgugaauuu

SEQ ID NO: 322973 - RNA, 19 nt, Homo sapiens
  misc_RNA (1)...(19): siRNA sense strand
caacuuguguuccaugugu

SEQ ID NO: 322974 - RNA, 19 nt, Homo sapiens
  misc_RNA (1)...(19): siRNA sense strand
ucgagaagcuaaugaaaga

SEQ ID NO: 322975 - RNA, 19 nt, Homo sapiens
  misc_RNA (1)...(19): siRNA sense strand
gagcaucuuugaucgagaa

SEQ ID NO: 322976 - RNA, 19 nt, Homo sapiens
  misc_RNA (1)...(19): siRNA sense strand
gaugaagacaggagcaaua

SEQ ID NO: 322977 - RNA, 19 nt, Homo sapiens
  misc_RNA (1)...(19): siRNA sense strand
ggaaagaagaggaagauca

SEQ ID NO: 322978 - RNA, 19 nt, Homo sapiens
  misc_RNA (1)...(19): siRNA sense strand
gaaggcgaaucaagaaaca

SEQ ID NO: 322979 - RNA, 19 nt, Homo sapiens
  misc_RNA (1)...(19): siRNA sense strand
caaauaaugcaaaggauga

SEQ ID NO: 322980 - RNA, 19 nt, Homo sapiens
  misc_RNA (1)...(19): siRNA sense strand
gcaaaucguacaacaauca

SEQ ID NO: 322981 - RNA, 19 nt, Homo sapiens
  misc_RNA (1)...(19): siRNA sense strand
ggaaacaagugugccaugu

SEQ ID NO: 322982 - RNA, 19 nt, Homo sapiens
  misc_RNA (1)...(19): siRNA sense strand
gcagagcuuugcaaugaau

SEQ ID NO: 322983 - RNA, 19 nt, Homo sapiens
  misc_RNA (1)...(19): siRNA sense strand
caaagacuaccgaguauug

SEQ ID NO: 322984 - RNA, 19 nt, Homo sapiens
  misc_RNA (1)...(19): siRNA sense strand
gugcaaagacuaccgagua

SEQ ID NO: 322985 - RNA, 19 nt, Homo sapiens
  misc_RNA (1)...(19): siRNA sense strand
gaaagaaaaugaggaaaga

SEQ ID NO: 322986 - RNA, 19 nt, Homo sapiens
  misc_RNA (1)...(19): siRNA sense strand
guaaggcagucuuccagaa

SEQ ID NO: 322987 - RNA, 19 nt, Homo sapiens
  misc_RNA (1)...(19): siRNA sense strand
gagcugaauugugaugauu

SEQ ID NO: 322988 - RNA, 19 nt, Homo sapiens
  misc_RNA (1)...(19): siRNA sense strand
gagaaaugcugcaggacau

SEQ ID NO: 322989 - RNA, 19 nt, Homo sapiens
  misc_RNA (1)...(19): siRNA sense strand
gugaaacucugcagucaau

SEQ ID NO: 322990 - RNA, 19 nt, Homo sapiens
  misc_RNA (1)...(19): siRNA sense strand
aaacaagugugccaugugu

SEQ ID NO: 322991 - RNA, 19 nt, Homo sapiens
  misc_RNA (1)...(19): siRNA sense strand
caagacacaugguaauaag

SEQ ID NO: 322992 - RNA, 19 nt, Homo sapiens
  misc_RNA (1)...(19): siRNA sense strand
gaagacgcauggcaauaag

SEQ ID NO: 322993 - RNA, 19 nt, Homo sapiens
  misc_RNA (1)...(19): siRNA sense strand
caaugaauaucgaaagcuu

SEQ ID NO: 322994 - RNA, 19 nt, Homo sapiens
  misc_RNA (1)...(19): siRNA sense strand
caauaagugugcaaugugu

SEQ ID NO: 322995 - RNA, 19 nt, Homo sapiens
  misc_RNA (1)...(19): siRNA sense strand
gagaagcuaaugaaagaaa

SEQ ID NO: 322996 - RNA, 19 nt, Homo sapiens
  misc_RNA (1)...(19): siRNA sense strand
gaggaucugugucgugaau

SEQ ID NO: 322997 - RNA, 19 nt, Homo sapiens
  misc_RNA (1)...(19): siRNA sense strand
gaaagaaagaggaaagaag

SEQ ID NO: 322998 - RNA, 19 nt, Homo sapiens
  misc_RNA (1)...(19): siRNA sense strand
gaauaucgucauuauguga

SEQ ID NO: 322999 - RNA, 19 nt, Homo sapiens
  misc_RNA (1)...(19): siRNA sense strand
gaauuucaggcauuuauga

SEQ ID NO: 323000 - RNA, 19 nt, Homo sapiens
  misc_RNA (1)...(19): siRNA sense strand
ggcaaagaauggaauacuu

SEQ ID NO: 323001 - RNA, 19 nt, Homo sapiens
  misc_RNA (1)...(19): siRNA sense strand
gagcaaaagucaaaagaga

SEQ ID NO: 323002 - RNA, 19 nt, Homo sapiens
  misc_RNA (1)...(19): siRNA sense strand
gagagaaugauccuauuga

SEQ ID NO: 323003 - RNA, 19 nt, Homo sapiens
  misc_RNA (1)...(19): siRNA sense strand
gugaauaucgucauuaugu

SEQ ID NO: 323004 - RNA, 19 nt, Homo sapiens
  misc_RNA (1)...(19): siRNA sense strand
aaggaaaucugcagugaau

SEQ ID NO: 323005 - RNA, 19 nt, Homo sapiens
  misc_RNA (1)...(19): siRNA sense strand
gaaacucugcagucaauau

SEQ ID NO: 323006 - RNA, 19 nt, Homo sapiens
  misc_RNA (1)...(19): siRNA sense strand
ggccaaaccuacaacaauc

SEQ ID NO: 323007 - RNA, 19 nt, Homo sapiens
  misc_RNA (1)...(19): siRNA sense strand
caggaaaugugccaugaau

SEQ ID NO: 323008 - RNA, 19 nt, Homo sapiens
  misc_RNA (1)...(19): siRNA sense strand
gaauaucgaaagcuuguga

SEQ ID NO: 323009 - RNA, 19 nt, Homo sapiens
  misc_RNA (1)...(19): siRNA sense strand
acaaacaagugcuacaugu

SEQ ID NO: 323010 - RNA, 19 nt, Homo sapiens
  misc_RNA (1)...(19): siRNA sense strand
ggagaaaggagcaaugaca

SEQ ID NO: 323011 - RNA, 19 nt, Homo sapiens
  misc_RNA (1)...(19): siRNA sense strand
gaguuuagaagccaaauga

SEQ ID NO: 323012 - RNA, 19 nt, Homo sapiens
  misc_RNA (1)...(19): siRNA sense strand
gaguacagcuuccuuugag

SEQ ID NO: 323013 - RNA, 19 nt, Homo sapiens
  misc_RNA (1)...(19): siRNA sense strand
ggcaauaagugugcaaugu

SEQ ID NO: 323014 - RNA, 19 nt, Homo sapiens
  misc_RNA (1)...(19): siRNA sense strand
ccaaacaaauacacacauc

SEQ ID NO: 323015 - RNA, 19 nt, Homo sapiens
  misc_RNA (1)...(19): siRNA sense strand
aaagaaagaggaaagaaga

SEQ ID NO: 323016 - RNA, 19 nt, Homo sapiens
  misc_RNA (1)...(19): siRNA sense strand
ggcaacaccugcuccaugu

SEQ ID NO: 323017 - RNA, 19 nt, Homo sapiens
  misc_RNA (1)...(19): siRNA sense strand
ggcaacaccugcuccaugu

SEQ ID NO: 323018 - RNA, 19 nt, Homo sapiens
  misc_RNA (1)...(19): siRNA sense strand
ggcaacaccugcuccaugu

SEQ ID NO: 323019 - RNA, 19 nt, Homo sapiens
  misc_RNA (1)...(19): siRNA sense strand
caggaugcauggcaacaaa

SEQ ID NO: 323020 - RNA, 19 nt, Homo sapiens
  misc_RNA (1)...(19): siRNA sense strand
gcgagagggugaaacuaga

SEQ ID NO: 323021 - RNA, 19 nt, Homo sapiens
  misc_RNA (1)...(19): siRNA sense strand
gcacagaugggaaaacaua

SEQ ID NO: 323022 - RNA, 19 nt, Homo sapiens
  misc_RNA (1)...(19): siRNA sense strand
gaaacacucaggacgaaug

SEQ ID NO: 323023 - RNA, 19 nt, Homo sapiens
  misc_RNA (1)...(19): siRNA sense strand
gcagugaauaucgucauua

SEQ ID NO: 323024 - RNA, 19 nt, Homo sapiens
  misc_RNA (1)...(19): siRNA sense strand
ggaguuguguagugaauac

SEQ ID NO: 323025 - RNA, 19 nt, Homo sapiens
  misc_RNA (1)...(19): siRNA sense strand
gcaaaaugauacuggaaaa

SEQ ID NO: 323026 - RNA, 19 nt, Homo sapiens
  misc_RNA (1)...(19): siRNA sense strand
cagagagaaugauccuauu

SEQ ID NO: 323027 - RNA, 19 nt, Homo sapiens
  misc_RNA (1)...(19): siRNA sense strand
ggaaagggaagcagcugaa

SEQ ID NO: 323028 - RNA, 19 nt, Homo sapiens
  misc_RNA (1)...(19): siRNA sense strand
ggaaagaaagaggaaagaa

SEQ ID NO: 323029 - RNA, 19 nt, Homo sapiens
  misc_RNA (1)...(19): siRNA sense strand
aaacauaugacaacagaug

SEQ ID NO: 323030 - RNA, 19 nt, Homo sapiens
  misc_RNA (1)...(19): siRNA sense strand
gaaaggagcaaugacaaag

SEQ ID NO: 323031 - RNA, 19 nt, Homo sapiens
  misc_RNA (1)...(19): siRNA sense strand
gaaagaagaggaagaucag

SEQ ID NO: 323032 - RNA, 19 nt, Homo sapiens
  misc_RNA (1)...(19): siRNA sense strand
gccaguguguucaaacuug

SEQ ID NO: 323033 - RNA, 19 nt, Homo sapiens
  misc_RNA (1)...(19): siRNA sense strand
gaauggaacacuuauaugc

SEQ ID NO: 323034 - RNA, 19 nt, Homo sapiens
  misc_RNA (1)...(19): siRNA sense strand
gcaauaagugugcaaugug

SEQ ID NO: 323035 - RNA, 19 nt, Homo sapiens
  misc_RNA (1)...(19): siRNA sense strand
gauuuuaucuguccugauu

SEQ ID NO: 323036 - RNA, 19 nt, Homo sapiens
  misc_RNA (1)...(19): siRNA sense strand
gaugaagagaaaucaagua

SEQ ID NO: 323037 - RNA, 19 nt, Homo sapiens
  misc_RNA (1)...(19): siRNA sense strand
ugacaaagaggaucugugu

SEQ ID NO: 323038 - RNA, 19 nt, Homo sapiens
  misc_RNA (1)...(19): siRNA sense strand
uaucugcacucgagaaagu

SEQ ID NO: 323039 - RNA, 19 nt, Homo sapiens
  misc_RNA (1)...(19): siRNA sense strand
ggaaggauacaugugauga

SEQ ID NO: 323040 - RNA, 19 nt, Homo sapiens
  misc_RNA (1)...(19): siRNA sense strand
cagugaauaucgucauuau

SEQ ID NO: 323041 - RNA, 19 nt, Homo sapiens
  misc_RNA (1)...(19): siRNA sense strand
ggccaggcauuuagcaaga

SEQ ID NO: 323042 - RNA, 19 nt, Homo sapiens
  misc_RNA (1)...(19): siRNA sense strand
caaaagagaaucuggaaaa

SEQ ID NO: 323043 - RNA, 19 nt, Homo sapiens
  misc_RNA (1)...(19): siRNA sense strand
gaaagaugaagagaaauca

SEQ ID NO: 323044 - RNA, 19 nt, Homo sapiens
  misc_RNA (1)...(19): siRNA sense strand
gaagaaagcuagaaagaaa

SEQ ID NO: 323045 - RNA, 19 nt, Homo sapiens
  misc_RNA (1)...(19): siRNA sense strand
ggacauagcuuaucugcaa

SEQ ID NO: 323046 - RNA, 19 nt, Homo sapiens
  misc_RNA (1)...(19): siRNA sense strand
ggacacagauauuauugua

SEQ ID NO: 323047 - RNA, 19 nt, Homo sapiens
  misc_RNA (1)...(19): siRNA sense strand
gaaaagaaccugcuaguua

SEQ ID NO: 323048 - RNA, 19 nt, Homo sapiens
  misc_RNA (1)...(19): siRNA sense strand
ggaagaaucucuacuugug

SEQ ID NO: 323049 - RNA, 19 nt, Homo sapiens
  misc_RNA (1)...(19): siRNA sense strand
gcaacuagaugaagauguu

SEQ ID NO: 323050 - RNA, 19 nt, Homo sapiens
  misc_RNA (1)...(19): siRNA sense strand
gaaagcagcugagaggauu

SEQ ID NO: 323051 - RNA, 19 nt, Homo sapiens
  misc_RNA (1)...(19): siRNA sense strand
ggaaagagaagcagaauau

SEQ ID NO: 323052 - RNA, 19 nt, Homo sapiens
  misc_RNA (1)...(19): siRNA sense strand
ggacacaaacugccuguua

SEQ ID NO: 323053 - RNA, 19 nt, Homo sapiens
  misc_RNA (1)...(19): siRNA sense strand
gcacuuugcucauucuuug

SEQ ID NO: 323054 - RNA, 19 nt, Homo sapiens
  misc_RNA (1)...(19): siRNA sense strand
gcaacuggcuccgcugaua

SEQ ID NO: 323055 - RNA, 19 nt, Homo sapiens
  misc_RNA (1)...(19): siRNA sense strand
acacuuagcuguuggguau

SEQ ID NO: 323056 - RNA, 19 nt, Homo sapiens
  misc_RNA (1)...(19): siRNA sense strand
gacaauagaugcacaugau

SEQ ID NO: 323057 - RNA, 19 nt, Homo sapiens
  misc_RNA (1)...(19): siRNA sense strand
gaaaugagucugcaagaug

SEQ ID NO: 323058 - RNA, 19 nt, Homo sapiens
  misc_RNA (1)...(19): siRNA sense strand
gauguuaucggcuucaaua

SEQ ID NO: 323059 - RNA, 19 nt, Homo sapiens
  misc_RNA (1)...(19): siRNA sense strand
gcagugaugugcggacuuu

SEQ ID NO: 323060 - RNA, 19 nt, Homo sapiens
  misc_RNA (1)...(19): siRNA sense strand
caauauugcuguucuuuca

SEQ ID NO: 323061 - RNA, 19 nt, Homo sapiens
  misc_RNA (1)...(19): siRNA sense strand
cagaaaagcugguuccaua

SEQ ID NO: 323062 - RNA, 19 nt, Homo sapiens
  misc_RNA (1)...(19): siRNA sense strand
cgagugagcuggaagaauc

SEQ ID NO: 323063 - RNA, 19 nt, Homo sapiens
  misc_RNA (1)...(19): siRNA sense strand
ggaaagauaccauggugaa

SEQ ID NO: 323064 - RNA, 19 nt, Homo sapiens
  misc_RNA (1)...(19): siRNA sense strand
aaagggagauggaaagaga

SEQ ID NO: 323065 - RNA, 19 nt, Homo sapiens
  misc_RNA (1)...(19): siRNA sense strand
caauauggcuggucuugau

SEQ ID NO: 323066 - RNA, 19 nt, Homo sapiens
  misc_RNA (1)...(19): siRNA sense strand
ggaaucugcuggagacaau

SEQ ID NO: 323067 - RNA, 19 nt, Homo sapiens
  misc_RNA (1)...(19): siRNA sense strand
ggacagaucacuagcaauc

SEQ ID NO: 323068 - RNA, 19 nt, Homo sapiens
  misc_RNA (1)...(19): siRNA sense strand
gcucugauguugaacuuau

SEQ ID NO: 323069 - RNA, 19 nt, Homo sapiens
  misc_RNA (1)...(19): siRNA sense strand
gaagaaagggagauggaaa

SEQ ID NO: 323070 - RNA, 19 nt, Homo sapiens
  misc_RNA (1)...(19): siRNA sense strand
gaacaagggagccucuuau

SEQ ID NO: 323071 - RNA, 19 nt, Homo sapiens
  misc_RNA (1)...(19): siRNA sense strand
agaacaaccugguggaauu

SEQ ID NO: 323072 - RNA, 19 nt, Homo sapiens
  misc_RNA (1)...(19): siRNA sense strand
gaacuuugcaacuagauga

SEQ ID NO: 323073 - RNA, 19 nt, Homo sapiens
  misc_RNA (1)...(19): siRNA sense strand
ggugggaccuugauacuca

SEQ ID NO: 323074 - RNA, 19 nt, Homo sapiens
  misc_RNA (1)...(19): siRNA sense strand
caaggugacaguuacuuua

SEQ ID NO: 323075 - RNA, 19 nt, Homo sapiens
  misc_RNA (1)...(19): siRNA sense strand
uaugggaugugaucaauga

SEQ ID NO: 323076 - RNA, 19 nt, Homo sapiens
  misc_RNA (1)...(19): siRNA sense strand
gacacaaacugccuguuau

SEQ ID NO: 323077 - RNA, 19 nt, Homo sapiens
  misc_RNA (1)...(19): siRNA sense strand
ucacuaccuugaaguauga

SEQ ID NO: 323078 - RNA, 19 nt, Homo sapiens
  misc_RNA (1)...(19): siRNA sense strand
gagacuauguuguaucauc

SEQ ID NO: 323079 - RNA, 19 nt, Homo sapiens
  misc_RNA (1)...(19): siRNA sense strand
ccacaagucucucuuugca

SEQ ID NO: 323080 - RNA, 19 nt, Homo sapiens
  misc_RNA (1)...(19): siRNA sense strand
ucauucagcucagacaaua

SEQ ID NO: 323081 - RNA, 19 nt, Homo sapiens
  misc_RNA (1)...(19): siRNA sense strand
agacagaguuguaaaccuu

SEQ ID NO: 323082 - RNA, 19 nt, Homo sapiens
  misc_RNA (1)...(19): siRNA sense strand
gaaggaagagacagaguug

SEQ ID NO: 323083 - RNA, 19 nt, Homo sapiens
  misc_RNA (1)...(19): siRNA sense strand
ugacuuggcuucagggaau

SEQ ID NO: 323084 - RNA, 19 nt, Homo sapiens
  misc_RNA (1)...(19): siRNA sense strand
gcuauuggcugugucuuug

SEQ ID NO: 323085 - RNA, 19 nt, Homo sapiens
  misc_RNA (1)...(19): siRNA sense strand
gaaguaugaucagcuagga

SEQ ID NO: 323086 - RNA, 19 nt, Homo sapiens
  misc_RNA (1)...(19): siRNA sense strand
caaacugccuguuauaugc

SEQ ID NO: 323087 - RNA, 19 nt, Homo sapiens
  misc_RNA (1)...(19): siRNA sense strand
aaaugagucugcaagauga

SEQ ID NO: 323088 - RNA, 19 nt, Homo sapiens
  misc_RNA (1)...(19): siRNA sense strand
gaagagacagaguuguaaa

SEQ ID NO: 323089 - RNA, 19 nt, Homo sapiens
  misc_RNA (1)...(19): siRNA sense strand
gaaaugugaccuucaaugg

SEQ ID NO: 323090 - RNA, 19 nt, Homo sapiens
  misc_RNA (1)...(19): siRNA sense strand
ggaagagacagaguuguaa

SEQ ID NO: 323091 - RNA, 19 nt, Homo sapiens
  misc_RNA (1)...(19): siRNA sense strand
accuucagcuuauguauua

SEQ ID NO: 323092 - RNA, 19 nt, Homo sapiens
  misc_RNA (1)...(19): siRNA sense strand
gaacugacucugugcuaga

SEQ ID NO: 323093 - RNA, 19 nt, Homo sapiens
  misc_RNA (1)...(19): siRNA sense strand
gaagagaagaagaggaaga

SEQ ID NO: 323094 - RNA, 19 nt, Homo sapiens
  misc_RNA (1)...(19): siRNA sense strand
gaaggaacacaaagccauu

SEQ ID NO: 323095 - RNA, 19 nt, Homo sapiens
  misc_RNA (1)...(19): siRNA sense strand
aaagagaagcagaauauga

SEQ ID NO: 323096 - RNA, 19 nt, Homo sapiens
  misc_RNA (1)...(19): siRNA sense strand
gggagccucuuauucuuga

SEQ ID NO: 323097 - RNA, 19 nt, Homo sapiens
  misc_RNA (1)...(19): siRNA sense strand
gcagacaaauuugaacaca

SEQ ID NO: 323098 - RNA, 19 nt, Homo sapiens
  misc_RNA (1)...(19): siRNA sense strand
gaaaauaguacccaaaaga

SEQ ID NO: 323099 - RNA, 19 nt, Homo sapiens
  misc_RNA (1)...(19): siRNA sense strand
acaaugaccugugaauaug

SEQ ID NO: 323100 - RNA, 19 nt, Homo sapiens
  misc_RNA (1)...(19): siRNA sense strand
ggaaaugugaccuucaaug

SEQ ID NO: 323101 - RNA, 19 nt, Homo sapiens
  misc_RNA (1)...(19): siRNA sense strand
caagggagccucuuauucu

SEQ ID NO: 323102 - RNA, 19 nt, Homo sapiens
  misc_RNA (1)...(19): siRNA sense strand
gacagguggugcagauaaa

SEQ ID NO: 323103 - RNA, 19 nt, Homo sapiens
  misc_RNA (1)...(19): siRNA sense strand
ggaagauccugagguuaau

SEQ ID NO: 323104 - RNA, 19 nt, Homo sapiens
  misc_RNA (1)...(19): siRNA sense strand
caaggacacagauauuauu

SEQ ID NO: 323105 - RNA, 19 nt, Homo sapiens
  misc_RNA (1)...(19): siRNA sense strand
gcugggcucugauguugaa

SEQ ID NO: 323106 - RNA, 19 nt, Homo sapiens
  misc_RNA (1)...(19): siRNA sense strand
cagcugggcucugauguug

SEQ ID NO: 323107 - RNA, 19 nt, Homo sapiens
  misc_RNA (1)...(19): siRNA sense strand
gaagauguucuguguguca

SEQ ID NO: 323108 - RNA, 19 nt, Homo sapiens
  misc_RNA (1)...(19): siRNA sense strand
ggaaggaagagacagaguu

SEQ ID NO: 323109 - RNA, 19 nt, Homo sapiens
  misc_RNA (1)...(19): siRNA sense strand
uaucucaccuucagcuuau

SEQ ID NO: 323110 - RNA, 19 nt, Homo sapiens
  misc_RNA (1)...(19): siRNA sense strand
guuaucggcuucaauaugg

SEQ ID NO: 323111 - RNA, 19 nt, Homo sapiens
  misc_RNA (1)...(19): siRNA sense strand
gguaauauugucuuuguga

SEQ ID NO: 323112 - RNA, 19 nt, Homo sapiens
  misc_RNA (1)...(19): siRNA sense strand
gaucgaauccuuucaugca

SEQ ID NO: 323113 - RNA, 19 nt, Homo sapiens
  misc_RNA (1)...(19): siRNA sense strand
uauggaggcuauugaguug

SEQ ID NO: 323114 - RNA, 19 nt, Homo sapiens
  misc_RNA (1)...(19): siRNA sense strand
acagugggaugcagacaaa

SEQ ID NO: 323115 - RNA, 19 nt, Homo sapiens
  misc_RNA (1)...(19): siRNA sense strand
gaaaauggauaagaagaug

SEQ ID NO: 323116 - RNA, 19 nt, Homo sapiens
  misc_RNA (1)...(19): siRNA sense strand
gggcuuaaacaagaaguua

SEQ ID NO: 323117 - RNA, 19 nt, Homo sapiens
  misc_RNA (1)...(19): siRNA sense strand
cggaaaagaucauaagauu

SEQ ID NO: 323118 - RNA, 19 nt, Homo sapiens
  misc_RNA (1)...(19): siRNA sense strand
gaacaaccugguggaauug

SEQ ID NO: 323119 - RNA, 19 nt, Homo sapiens
  misc_RNA (1)...(19): siRNA sense strand
gauaagaagaugaagaaag

SEQ ID NO: 323120 - RNA, 19 nt, Homo sapiens
  misc_RNA (1)...(19): siRNA sense strand
caaugaaaguggucuguac

SEQ ID NO: 323121 - RNA, 19 nt, Homo sapiens
  misc_RNA (1)...(19): siRNA sense strand
caggaaauaugguguuugg

SEQ ID NO: 323122 - RNA, 19 nt, Homo sapiens
  misc_RNA (1)...(19): siRNA sense strand
gcaaaggagaggaggaaga

SEQ ID NO: 323123 - RNA, 19 nt, Homo sapiens
  misc_RNA (1)...(19): siRNA sense strand
gaaagauaccauggugaaa

SEQ ID NO: 323124 - RNA, 19 nt, Homo sapiens
  misc_RNA (1)...(19): siRNA sense strand
ggacaagcagaaucacuau

SEQ ID NO: 323125 - RNA, 19 nt, Homo sapiens
  misc_RNA (1)...(19): siRNA sense strand
gcagcuaucacuaccuuga

SEQ ID NO: 323126 - RNA, 19 nt, Homo sapiens
  misc_RNA (1)...(19): siRNA sense strand
acacaaacugccuguuaua

SEQ ID NO: 323127 - RNA, 19 nt, Homo sapiens
  misc_RNA (1)...(19): siRNA sense strand
agaugaagauguucugugu

SEQ ID NO: 323128 - RNA, 19 nt, Homo sapiens
  misc_RNA (1)...(19): siRNA sense strand
gaucagcguggcuuuguga

SEQ ID NO: 323129 - RNA, 19 nt, Homo sapiens
  misc_RNA (1)...(19): siRNA sense strand
ggagggucaucaccaggaa

SEQ ID NO: 323130 - RNA, 19 nt, Homo sapiens
  misc_RNA (1)...(19): siRNA sense strand
ccaaggacacagauauuau

SEQ ID NO: 323131 - RNA, 19 nt, Homo sapiens
  misc_RNA (1)...(19): siRNA sense strand
cagcuuauguauuagagau

SEQ ID NO: 323132 - RNA, 19 nt, Homo sapiens
  misc_RNA (1)...(19): siRNA sense strand
guaucucaccuucagcuua

SEQ ID NO: 323133 - RNA, 19 nt, Homo sapiens
  misc_RNA (1)...(19): siRNA sense strand
ugauagacagguagucaua

SEQ ID NO: 323134 - RNA, 19 nt, Homo sapiens
  misc_RNA (1)...(19): siRNA sense strand
aauaugcacuuugcucauu

SEQ ID NO: 323135 - RNA, 19 nt, Homo sapiens
  misc_RNA (1)...(19): siRNA sense strand
ugaaaugagucugcaagau

SEQ ID NO: 323136 - RNA, 19 nt, Homo sapiens
  misc_RNA (1)...(19): siRNA sense strand
aagauaccauggugaaaug

SEQ ID NO: 323137 - RNA, 19 nt, Homo sapiens
  misc_RNA (1)...(19): siRNA sense strand
cgacaagacaggcaggauu

SEQ ID NO: 323138 - RNA, 19 nt, Homo sapiens
  misc_RNA (1)...(19): siRNA sense strand
uuguaaagcugcagggaaa

SEQ ID NO: 323139 - RNA, 19 nt, Homo sapiens
  misc_RNA (1)...(19): siRNA sense strand
uggaggcuauugaguugua

SEQ ID NO: 323140 - RNA, 19 nt, Homo sapiens
  misc_RNA (1)...(19): siRNA sense strand
ggacuguacugugaaaauu

SEQ ID NO: 323141 - RNA, 19 nt, Homo sapiens
  misc_RNA (1)...(19): siRNA sense strand
ugacagguggugcagauaa

SEQ ID NO: 323142 - RNA, 19 nt, Homo sapiens
  misc_RNA (1)...(19): siRNA sense strand
gaacaaagacagggaagcu

SEQ ID NO: 323143 - RNA, 19 nt, Homo sapiens
  misc_RNA (1)...(19): siRNA sense strand
ugagguuaauguugaaaug

SEQ ID NO: 323144 - RNA, 19 nt, Homo sapiens
  misc_RNA (1)...(19): siRNA sense strand
caagaggcauuugauauaa

SEQ ID NO: 323145 - RNA, 19 nt, Homo sapiens
  misc_RNA (1)...(19): siRNA sense strand
caacuaauccagagaguaa

SEQ ID NO: 323146 - RNA, 19 nt, Homo sapiens
  misc_RNA (1)...(19): siRNA sense strand
agacugagcugauccagaa

SEQ ID NO: 323147 - RNA, 19 nt, Homo sapiens
  misc_RNA (1)...(19): siRNA sense strand
ccaaggagcuuaccaagag

SEQ ID NO: 323148 - RNA, 19 nt, Homo sapiens
  misc_RNA (1)...(19): siRNA sense strand
ccaagaggcauuugauaua

SEQ ID NO: 323149 - RNA, 19 nt, Homo sapiens
  misc_RNA (1)...(19): siRNA sense strand
gagacaaccuaacacuuug

SEQ ID NO: 323150 - RNA, 19 nt, Homo sapiens
  misc_RNA (1)...(19): siRNA sense strand
gauauaagcaagaaagaga

SEQ ID NO: 323151 - RNA, 19 nt, Homo sapiens
  misc_RNA (1)...(19): siRNA sense strand
ccacggugcuggaauuguu

SEQ ID NO: 323152 - RNA, 19 nt, Homo sapiens
  misc_RNA (1)...(19): siRNA sense strand
aguaaggucuucuaucuga

SEQ ID NO: 323153 - RNA, 19 nt, Homo sapiens
  misc_RNA (1)...(19): siRNA sense strand
ggagaagacugagcugauc

SEQ ID NO: 323154 - RNA, 19 nt, Homo sapiens
  misc_RNA (1)...(19): siRNA sense strand
gugcuggaauuguuggaua

SEQ ID NO: 323155 - RNA, 19 nt, Homo sapiens
  misc_RNA (1)...(19): siRNA sense strand
gcucuuaacuuuucuguau

SEQ ID NO: 323156 - RNA, 19 nt, Homo sapiens
  misc_RNA (1)...(19): siRNA sense strand
gauagauaauucccaagga

SEQ ID NO: 323157 - RNA, 19 nt, Homo sapiens
  misc_RNA (1)...(19): siRNA sense strand
agaguaaggucuucuaucu

SEQ ID NO: 323158 - RNA, 19 nt, Homo sapiens
  misc_RNA (1)...(19): siRNA sense strand
agagacaaccuaacacuuu

SEQ ID NO: 323159 - RNA, 19 nt, Homo sapiens
  misc_RNA (1)...(19): siRNA sense strand
gaaguugcguguggugaug

SEQ ID NO: 323160 - RNA, 19 nt, Homo sapiens
  misc_RNA (1)...(19): siRNA sense strand
agaaggggcugaaaacuaa

SEQ ID NO: 323161 - RNA, 19 nt, Homo sapiens
  misc_RNA (1)...(19): siRNA sense strand
ggccauugcugaacuugau

SEQ ID NO: 323162 - RNA, 19 nt, Homo sapiens
  misc_RNA (1)...(19): siRNA sense strand
gaacuugauacacugaaug

SEQ ID NO: 323163 - RNA, 19 nt, Homo sapiens
  misc_RNA (1)...(19): siRNA sense strand
uaaggacuaucgggagaaa

SEQ ID NO: 323164 - RNA, 19 nt, Homo sapiens
  misc_RNA (1)...(19): siRNA sense strand
gaagacucauacaaagaca

SEQ ID NO: 323165 - RNA, 19 nt, Homo sapiens
  misc_RNA (1)...(19): siRNA sense strand
gagcuuaccaagaggcauu

SEQ ID NO: 323166 - RNA, 19 nt, Homo sapiens
  misc_RNA (1)...(19): siRNA sense strand
gcaacuaauccagagagua

SEQ ID NO: 323167 - RNA, 19 nt, Homo sapiens
  misc_RNA (1)...(19): siRNA sense strand
agaaguugcagcugauuaa

SEQ ID NO: 323168 - RNA, 19 nt, Homo sapiens
  misc_RNA (1)...(19): siRNA sense strand
aaagacagcacccucauca

SEQ ID NO: 323169 - RNA, 19 nt, Homo sapiens
  misc_RNA (1)...(19): siRNA sense strand
uaauagccaaugcaacuaa

SEQ ID NO: 323170 - RNA, 19 nt, Homo sapiens
  misc_RNA (1)...(19): siRNA sense strand
uugauacacugaaugaaga

SEQ ID NO: 323171 - RNA, 19 nt, Homo sapiens
  misc_RNA (1)...(19): siRNA sense strand
agacagcacccucaucaug

SEQ ID NO: 323172 - RNA, 19 nt, Homo sapiens
  misc_RNA (1)...(19): siRNA sense strand
acaagaaguugcagcugau

SEQ ID NO: 323173 - RNA, 19 nt, Homo sapiens
  misc_RNA (1)...(19): siRNA sense strand
guaaggucuucuaucugaa

SEQ ID NO: 323174 - RNA, 19 nt, Homo sapiens
  misc_RNA (1)...(19): siRNA sense strand
agacagugcaggagaagaa

SEQ ID NO: 323175 - RNA, 19 nt, Homo sapiens
  misc_RNA (1)...(19): siRNA sense strand
uaaggucuucuaucugaaa

SEQ ID NO: 323176 - RNA, 19 nt, Homo sapiens
  misc_RNA (1)...(19): siRNA sense strand
gagaguaaggucuucuauc

SEQ ID NO: 323177 - RNA, 19 nt, Homo sapiens
  misc_RNA (1)...(19): siRNA sense strand
uaccaagaggcauuugaua

SEQ ID NO: 323178 - RNA, 19 nt, Homo sapiens
  misc_RNA (1)...(19): siRNA sense strand
aaaugaagggugauuacuu

SEQ ID NO: 323179 - RNA, 19 nt, Homo sapiens
  misc_RNA (1)...(19): siRNA sense strand
cgaaaacaaacgauagaua

SEQ ID NO: 323180 - RNA, 19 nt, Homo sapiens
  misc_RNA (1)...(19): siRNA sense strand
ucucuagcaucgagcagaa

SEQ ID NO: 323181 - RNA, 19 nt, Homo sapiens
  misc_RNA (1)...(19): siRNA sense strand
aguugcagcugauuaagga

SEQ ID NO: 323182 - RNA, 19 nt, Homo sapiens
  misc_RNA (1)...(19): siRNA sense strand
ugaacuugauacacugaau

SEQ ID NO: 323183 - RNA, 19 nt, Homo sapiens
  misc_RNA (1)...(19): siRNA sense strand
ggagggucaucucuagcau

SEQ ID NO: 323184 - RNA, 19 nt, Homo sapiens
  misc_RNA (1)...(19): siRNA sense strand
cgacaccuccgacaagaag

SEQ ID NO: 323185 - RNA, 19 nt, Homo sapiens
  misc_RNA (1)...(19): siRNA sense strand
ccuggagggucaucucuag

SEQ ID NO: 323186 - RNA, 19 nt, Homo sapiens
  misc_RNA (1)...(19): siRNA sense strand
aagaaguugcagcugauua

SEQ ID NO: 323187 - RNA, 19 nt, Homo sapiens
  misc_RNA (1)...(19): siRNA sense strand
uugcugaacuugauacacu

SEQ ID NO: 323188 - RNA, 19 nt, Homo sapiens
  misc_RNA (1)...(19): siRNA sense strand
agaaugugaugcggcagaa

SEQ ID NO: 323189 - RNA, 19 nt, Homo sapiens
  misc_RNA (1)...(19): siRNA sense strand
gcauuugauauaagcaaga

SEQ ID NO: 323190 - RNA, 19 nt, Homo sapiens
  misc_RNA (1)...(19): siRNA sense strand
gcagcugauuaaggacuau

SEQ ID NO: 323191 - RNA, 19 nt, Homo sapiens
  misc_RNA (1)...(19): siRNA sense strand
gcaggagaagaaugugaug

SEQ ID NO: 323192 - RNA, 19 nt, Homo sapiens
  misc_RNA (1)...(19): siRNA sense strand
ggggcuugcucuuaacuuu

SEQ ID NO: 323193 - RNA, 19 nt, Homo sapiens
  misc_RNA (1)...(19): siRNA sense strand
gaaaaugaagggugauuac

SEQ ID NO: 323194 - RNA, 19 nt, Homo sapiens
  misc_RNA (1)...(19): siRNA sense strand
ccuaacacuuuggacauca

SEQ ID NO: 323195 - RNA, 19 nt, Homo sapiens
  misc_RNA (1)...(19): siRNA sense strand
caaagacagcacccucauc

SEQ ID NO: 323196 - RNA, 19 nt, Homo sapiens
  misc_RNA (1)...(19): siRNA sense strand
ugcuggaauuguuggauaa

SEQ ID NO: 323197 - RNA, 19 nt, Homo sapiens
  misc_RNA (1)...(19): siRNA sense strand
cagaaggggcugaaaacua

SEQ ID NO: 323198 - RNA, 19 nt, Homo sapiens
  misc_RNA (1)...(19): siRNA sense strand
uacacugaaugaagacuca

SEQ ID NO: 323199 - RNA, 19 nt, Homo sapiens
  misc_RNA (1)...(19): siRNA sense strand
ccgguaccuugcugaaguu

SEQ ID NO: 323200 - RNA, 19 nt, Homo sapiens
  misc_RNA (1)...(19): siRNA sense strand
gaccgacaccuccgacaag

SEQ ID NO: 323201 - RNA, 19 nt, Homo sapiens
  misc_RNA (1)...(19): siRNA sense strand
cagagaguaaggucuucua

SEQ ID NO: 323202 - RNA, 19 nt, Homo sapiens
  misc_RNA (1)...(19): siRNA sense strand
caagaaguugcagcugauu

SEQ ID NO: 323203 - RNA, 19 nt, Homo sapiens
  misc_RNA (1)...(19): siRNA sense strand
accaagaggcauuugauau

SEQ ID NO: 323204 - RNA, 19 nt, Homo sapiens
  misc_RNA (1)...(19): siRNA sense strand
gaaguugcagcugauuaag

SEQ ID NO: 323205 - RNA, 19 nt, Homo sapiens
  misc_RNA (1)...(19): siRNA sense strand
aagaggcauuugauauaag

SEQ ID NO: 323206 - RNA, 19 nt, Homo sapiens
  misc_RNA (1)...(19): siRNA sense strand
aauagccaaugcaacuaau

SEQ ID NO: 323207 - RNA, 19 nt, Homo sapiens
  misc_RNA (1)...(19): siRNA sense strand
ugaagacucauacaaagac

SEQ ID NO: 323208 - RNA, 19 nt, Homo sapiens
  misc_RNA (1)...(19): siRNA sense strand
ugaggccauugcugaacuu

SEQ ID NO: 323209 - RNA, 19 nt, Homo sapiens
  misc_RNA (1)...(19): siRNA sense strand
gcaacccacacacccaauc

SEQ ID NO: 323210 - RNA, 19 nt, Homo sapiens
  misc_RNA (1)...(19): siRNA sense strand
gauaauucccaaggagcuu

SEQ ID NO: 323211 - RNA, 19 nt, Homo sapiens
  misc_RNA (1)...(19): siRNA sense strand
uccgguaccuugcugaagu

SEQ ID NO: 323212 - RNA, 19 nt, Homo sapiens
  misc_RNA (1)...(19): siRNA sense strand
ggucuucuaucugaaaaug

SEQ ID NO: 323213 - RNA, 19 nt, Homo sapiens
  misc_RNA (1)...(19): siRNA sense strand
gaguaaggucuucuaucug

SEQ ID NO: 323214 - RNA, 19 nt, Homo sapiens
  misc_RNA (1)...(19): siRNA sense strand
gugcaggagaagaauguga

SEQ ID NO: 323215 - RNA, 19 nt, Homo sapiens
  misc_RNA (1)...(19): siRNA sense strand
guaaccaccucacagauuc

SEQ ID NO: 323216 - RNA, 19 nt, Homo sapiens
  misc_RNA (1)...(19): siRNA sense strand
uguaaccaccucacagauu

SEQ ID NO: 323217 - RNA, 19 nt, Homo sapiens
  misc_RNA (1)...(19): siRNA sense strand
guaaccaccucacagauuc

SEQ ID NO: 323218 - RNA, 19 nt, Homo sapiens
  misc_RNA (1)...(19): siRNA sense strand
uguaaccaccucacagauu

SEQ ID NO: 323219 - RNA, 19 nt, Homo sapiens
  misc_RNA (1)...(19): siRNA sense strand
guaaccaccucacagauuc

SEQ ID NO: 323220 - RNA, 19 nt, Homo sapiens
  misc_RNA (1)...(19): siRNA sense strand
uguaaccaccucacagauu

SEQ ID NO: 323221 - RNA, 19 nt, Homo sapiens
  misc_RNA (1)...(19): siRNA sense strand
guaaccaccucacagauuc

SEQ ID NO: 323222 - RNA, 19 nt, Homo sapiens
  misc_RNA (1)...(19): siRNA sense strand
uguaaccaccucacagauu

SEQ ID NO: 323223 - RNA, 19 nt, Homo sapiens
  misc_RNA (1)...(19): siRNA sense strand
guaaccaccucacagauuc

SEQ ID NO: 323224 - RNA, 19 nt, Homo sapiens
  misc_RNA (1)...(19): siRNA sense strand
uguaaccaccucacagauu

SEQ ID NO: 323225 - RNA, 19 nt, Homo sapiens
  misc_RNA (1)...(19): siRNA sense strand
guaaccaccucacagauuc

SEQ ID NO: 323226 - RNA, 19 nt, Homo sapiens
  misc_RNA (1)...(19): siRNA sense strand
cuaguugaccugucuauaa

SEQ ID NO: 323227 - RNA, 19 nt, Homo sapiens
  misc_RNA (1)...(19): siRNA sense strand
cuauauaacccuaggaauu

SEQ ID NO: 323228 - RNA, 19 nt, Homo sapiens
  misc_RNA (1)...(19): siRNA sense strand
ugaccugucuauaagagaa

SEQ ID NO: 323229 - RNA, 19 nt, Homo sapiens
  misc_RNA (1)...(19): siRNA sense strand
uaguugaccugucuauaag

SEQ ID NO: 323230 - RNA, 19 nt, Homo sapiens
  misc_RNA (1)...(19): siRNA sense strand
uguaaccaccucacagauu

SEQ ID NO: 323231 - RNA, 19 nt, Homo sapiens
  misc_RNA (1)...(19): siRNA sense strand
guugaccugucuauaagag

SEQ ID NO: 323232 - RNA, 19 nt, Homo sapiens
  misc_RNA (1)...(19): siRNA sense strand
guaaccaccucacagauuc

SEQ ID NO: 323233 - RNA, 19 nt, Homo sapiens
  misc_RNA (1)...(19): siRNA sense strand
uguaaccaccucacagauu

SEQ ID NO: 323234 - RNA, 19 nt, Homo sapiens
  misc_RNA (1)...(19): siRNA sense strand
guaaccaccucacagauuc

SEQ ID NO: 323235 - RNA, 19 nt, Homo sapiens
  misc_RNA (1)...(19): siRNA sense strand
uguaaccaccucacagauu

SEQ ID NO: 323236 - RNA, 19 nt, Homo sapiens
  misc_RNA (1)...(19): siRNA sense strand
guaaccaccucacagauuc

SEQ ID NO: 323237 - RNA, 19 nt, Homo sapiens
  misc_RNA (1)...(19): siRNA sense strand
uguaaccaccucacagauu

SEQ ID NO: 323238 - RNA, 19 nt, Homo sapiens
  misc_RNA (1)...(19): siRNA sense strand
guaaccaccucacagauuc

SEQ ID NO: 323239 - RNA, 19 nt, Homo sapiens
  misc_RNA (1)...(19): siRNA sense strand
uguaaccaccucacagauu

SEQ ID NO: 323240 - RNA, 19 nt, Homo sapiens
  misc_RNA (1)...(19): siRNA sense strand
guaaccaccucacagauuc

SEQ ID NO: 323241 - RNA, 19 nt, Homo sapiens
  misc_RNA (1)...(19): siRNA sense strand
uguaaccaccucacagauu

SEQ ID NO: 323242 - RNA, 19 nt, Homo sapiens
  misc_RNA (1)...(19): siRNA sense strand
guaaccaccucacagauuc

SEQ ID NO: 323243 - RNA, 19 nt, Homo sapiens
  misc_RNA (1)...(19): siRNA sense strand
cuaguugaccugucuauaa

SEQ ID NO: 323244 - RNA, 19 nt, Homo sapiens
  misc_RNA (1)...(19): siRNA sense strand
cuauauaacccuaggaauu

SEQ ID NO: 323245 - RNA, 19 nt, Homo sapiens
  misc_RNA (1)...(19): siRNA sense strand
ugaccugucuauaagagaa

SEQ ID NO: 323246 - RNA, 19 nt, Homo sapiens
  misc_RNA (1)...(19): siRNA sense strand
uaguugaccugucuauaag

SEQ ID NO: 323247 - RNA, 19 nt, Homo sapiens
  misc_RNA (1)...(19): siRNA sense strand
uguaaccaccucacagauu

SEQ ID NO: 323248 - RNA, 19 nt, Homo sapiens
  misc_RNA (1)...(19): siRNA sense strand
guugaccugucuauaagag

SEQ ID NO: 323249 - RNA, 19 nt, Homo sapiens
  misc_RNA (1)...(19): siRNA sense strand
guaaccaccucacagauuc

SEQ ID NO: 323250 - RNA, 19 nt, Homo sapiens
  misc_RNA (1)...(19): siRNA sense strand
uguaaccaccucacagauu

SEQ ID NO: 323251 - RNA, 19 nt, Homo sapiens
  misc_RNA (1)...(19): siRNA sense strand
guaaccaccucacagauuc

SEQ ID NO: 323252 - RNA, 19 nt, Homo sapiens
  misc_RNA (1)...(19): siRNA sense strand
uguaaccaccucacagauu

SEQ ID NO: 323253 - RNA, 19 nt, Homo sapiens
  misc_RNA (1)...(19): siRNA sense strand
guaaccaccucacagauuc

SEQ ID NO: 323254 - RNA, 19 nt, Homo sapiens
  misc_RNA (1)...(19): siRNA sense strand
uguaaccaccucacagauu

SEQ ID NO: 323255 - RNA, 19 nt, Homo sapiens
  misc_RNA (1)...(19): siRNA sense strand
guaaccaccucacagauuc

SEQ ID NO: 323256 - RNA, 19 nt, Homo sapiens
  misc_RNA (1)...(19): siRNA sense strand
uguaaccaccucacagauu

SEQ ID NO: 323257 - RNA, 19 nt, Homo sapiens
  misc_RNA (1)...(19): siRNA sense strand
guaaccaccucacagauuc

SEQ ID NO: 323258 - RNA, 19 nt, Homo sapiens
  misc_RNA (1)...(19): siRNA sense strand
uguaaccaccucacagauu

SEQ ID NO: 323259 - RNA, 19 nt, Homo sapiens
  misc_RNA (1)...(19): siRNA sense strand
guaaccaccucacagauuc

SEQ ID NO: 323260 - RNA, 19 nt, Homo sapiens
  misc_RNA (1)...(19): siRNA sense strand
cuaguugaccugucuauaa

SEQ ID NO: 323261 - RNA, 19 nt, Homo sapiens
  misc_RNA (1)...(19): siRNA sense strand
cuauauaacccuaggaauu

SEQ ID NO: 323262 - RNA, 19 nt, Homo sapiens
  misc_RNA (1)...(19): siRNA sense strand
ugaccugucuauaagagaa

SEQ ID NO: 323263 - RNA, 19 nt, Homo sapiens
  misc_RNA (1)...(19): siRNA sense strand
uaguugaccugucuauaag

SEQ ID NO: 323264 - RNA, 19 nt, Homo sapiens
  misc_RNA (1)...(19): siRNA sense strand
uguaaccaccucacagauu

SEQ ID NO: 323265 - RNA, 19 nt, Homo sapiens
  misc_RNA (1)...(19): siRNA sense strand
guugaccugucuauaagag

SEQ ID NO: 323266 - RNA, 19 nt, Homo sapiens
  misc_RNA (1)...(19): siRNA sense strand
guaaccaccucacagauuc

SEQ ID NO: 323267 - RNA, 19 nt, Homo sapiens
  misc_RNA (1)...(19): siRNA sense strand
uguaaccaccucacagauu

SEQ ID NO: 323268 - RNA, 19 nt, Homo sapiens
  misc_RNA (1)...(19): siRNA sense strand
guaaccaccucacagauuc

SEQ ID NO: 323269 - RNA, 19 nt, Homo sapiens
  misc_RNA (1)...(19): siRNA sense strand
uguaaccaccucacagauu

SEQ ID NO: 323270 - RNA, 19 nt, Homo sapiens
  misc_RNA (1)...(19): siRNA sense strand
guaaccaccucacagauuc

SEQ ID NO: 323271 - RNA, 19 nt, Homo sapiens
  misc_RNA (1)...(19): siRNA sense strand
uguaaccaccucacagauu

SEQ ID NO: 323272 - RNA, 19 nt, Homo sapiens
  misc_RNA (1)...(19): siRNA sense strand
guaaccaccucacagauuc

SEQ ID NO: 323273 - RNA, 19 nt, Homo sapiens
  misc_RNA (1)...(19): siRNA sense strand
uguaaccaccucacagauu

SEQ ID NO: 323274 - RNA, 19 nt, Homo sapiens
  misc_RNA (1)...(19): siRNA sense strand
guaaccaccucacagauuc

SEQ ID NO: 323275 - RNA, 19 nt, Homo sapiens
  misc_RNA (1)...(19): siRNA sense strand
uguaaccaccucacagauu

SEQ ID NO: 323276 - RNA, 19 nt, Homo sapiens
  misc_RNA (1)...(19): siRNA sense strand
guaaccaccucacagauuc

SEQ ID NO: 323277 - RNA, 19 nt, Homo sapiens
  misc_RNA (1)...(19): siRNA sense strand
cuaguugaccugucuauaa

SEQ ID NO: 323278 - RNA, 19 nt, Homo sapiens
  misc_RNA (1)...(19): siRNA sense strand
cuauauaacccuaggaauu

SEQ ID NO: 323279 - RNA, 19 nt, Homo sapiens
  misc_RNA (1)...(19): siRNA sense strand
ugaccugucuauaagagaa

SEQ ID NO: 323280 - RNA, 19 nt, Homo sapiens
  misc_RNA (1)...(19): siRNA sense strand
uaguugaccugucuauaag

SEQ ID NO: 323281 - RNA, 19 nt, Homo sapiens
  misc_RNA (1)...(19): siRNA sense strand
uguaaccaccucacagauu

SEQ ID NO: 323282 - RNA, 19 nt, Homo sapiens
  misc_RNA (1)...(19): siRNA sense strand
guugaccugucuauaagag

SEQ ID NO: 323283 - RNA, 19 nt, Homo sapiens
  misc_RNA (1)...(19): siRNA sense strand
guaaccaccucacagauuc

SEQ ID NO: 323284 - RNA, 19 nt, Homo sapiens
  misc_RNA (1)...(19): siRNA sense strand
uguaaccaccucacagauu

SEQ ID NO: 323285 - RNA, 19 nt, Homo sapiens
  misc_RNA (1)...(19): siRNA sense strand
guaaccaccucacagauuc

SEQ ID NO: 323286 - RNA, 19 nt, Homo sapiens
  misc_RNA (1)...(19): siRNA sense strand
uguaaccaccucacagauu

SEQ ID NO: 323287 - RNA, 19 nt, Homo sapiens
  misc_RNA (1)...(19): siRNA sense strand
guaaccaccucacagauuc

SEQ ID NO: 323288 - RNA, 19 nt, Homo sapiens
  misc_RNA (1)...(19): siRNA sense strand
uguaaccaccucacagauu

SEQ ID NO: 323289 - RNA, 19 nt, Homo sapiens
  misc_RNA (1)...(19): siRNA sense strand
guaaccaccucacagauuc

SEQ ID NO: 323290 - RNA, 19 nt, Homo sapiens
  misc_RNA (1)...(19): siRNA sense strand
uguaaccaccucacagauu

SEQ ID NO: 323291 - RNA, 19 nt, Homo sapiens
  misc_RNA (1)...(19): siRNA sense strand
guaaccaccucacagauuc

SEQ ID NO: 323292 - RNA, 19 nt, Homo sapiens
  misc_RNA (1)...(19): siRNA sense strand
uguaaccaccucacagauu

SEQ ID NO: 323293 - RNA, 19 nt, Homo sapiens
  misc_RNA (1)...(19): siRNA sense strand
guaaccaccucacagauuc

SEQ ID NO: 323294 - RNA, 19 nt, Homo sapiens
  misc_RNA (1)...(19): siRNA sense strand
cuaguugaccugucuauaa

SEQ ID NO: 323295 - RNA, 19 nt, Homo sapiens
  misc_RNA (1)...(19): siRNA sense strand
cuauauaacccuaggaauu

SEQ ID NO: 323296 - RNA, 19 nt, Homo sapiens
  misc_RNA (1)...(19): siRNA sense strand
ugaccugucuauaagagaa

SEQ ID NO: 323297 - RNA, 19 nt, Homo sapiens
  misc_RNA (1)...(19): siRNA sense strand
uaguugaccugucuauaag

SEQ ID NO: 323298 - RNA, 19 nt, Homo sapiens
  misc_RNA (1)...(19): siRNA sense strand
uguaaccaccucacagauu

SEQ ID NO: 323299 - RNA, 19 nt, Homo sapiens
  misc_RNA (1)...(19): siRNA sense strand
guugaccugucuauaagag

SEQ ID NO: 323300 - RNA, 19 nt, Homo sapiens
  misc_RNA (1)...(19): siRNA sense strand
cagaagggauuuaugaaug

SEQ ID NO: 323301 - RNA, 19 nt, Homo sapiens
  misc_RNA (1)...(19): siRNA sense strand
gcauaaaggcgucaucuug

SEQ ID NO: 323302 - RNA, 19 nt, Homo sapiens
  misc_RNA (1)...(19): siRNA sense strand
gguaagaaggauuccauua

SEQ ID NO: 323303 - RNA, 19 nt, Homo sapiens
  misc_RNA (1)...(19): siRNA sense strand
aggagaaacugaaagaauu

SEQ ID NO: 323304 - RNA, 19 nt, Homo sapiens
  misc_RNA (1)...(19): siRNA sense strand
gcagaagggauuuaugaau

SEQ ID NO: 323305 - RNA, 19 nt, Homo sapiens
  misc_RNA (1)...(19): siRNA sense strand
caagagaaucagaugcaua

SEQ ID NO: 323306 - RNA, 19 nt, Homo sapiens
  misc_RNA (1)...(19): siRNA sense strand
gagaguggcagaagggauu

SEQ ID NO: 323307 - RNA, 19 nt, Homo sapiens
  misc_RNA (1)...(19): siRNA sense strand
aagagaaucagaugcauaa

SEQ ID NO: 323308 - RNA, 19 nt, Homo sapiens
  misc_RNA (1)...(19): siRNA sense strand
agaaucagaugcauaaagg

SEQ ID NO: 323309 - RNA, 19 nt, Homo sapiens
  misc_RNA (1)...(19): siRNA sense strand
ggagaaacugaaagaauuc

SEQ ID NO: 323310 - RNA, 19 nt, Homo sapiens
  misc_RNA (1)...(19): siRNA sense strand
gggcacagccaaccaccua

SEQ ID NO: 323311 - RNA, 19 nt, Homo sapiens
  misc_RNA (1)...(19): siRNA sense strand
gcaaacaagagaaucagau

SEQ ID NO: 323312 - RNA, 19 nt, Homo sapiens
  misc_RNA (1)...(19): siRNA sense strand
uaagaaggauuccauuacg

SEQ ID NO: 323313 - RNA, 19 nt, Homo sapiens
  misc_RNA (1)...(19): siRNA sense strand
gagaaucagaugcauaaag

SEQ ID NO: 323314 - RNA, 19 nt, Homo sapiens
  misc_RNA (1)...(19): siRNA sense strand
agaaggauuccauuacgua

SEQ ID NO: 323315 - RNA, 19 nt, Homo sapiens
  misc_RNA (1)...(19): siRNA sense strand
caaacaagagaaucagaug

SEQ ID NO: 323316 - RNA, 19 nt, Homo sapiens
  misc_RNA (1)...(19): siRNA sense strand
ugacaaggagaaacugaaa

SEQ ID NO: 323317 - RNA, 19 nt, Homo sapiens
  misc_RNA (1)...(19): siRNA sense strand
uggcagaagggauuuauga

SEQ ID NO: 323318 - RNA, 19 nt, Homo sapiens
  misc_RNA (1)...(19): siRNA sense strand
gcacagccaaccaccuaga

SEQ ID NO: 323319 - RNA, 19 nt, Homo sapiens
  misc_RNA (1)...(19): siRNA sense strand
gaagggauuuaugaaugca

SEQ ID NO: 323320 - RNA, 19 nt, Homo sapiens
  misc_RNA (1)...(19): siRNA sense strand
ccaagugccgcaaacaaga

SEQ ID NO: 323321 - RNA, 19 nt, Homo sapiens
  misc_RNA (1)...(19): siRNA sense strand
acaaggagaaacugaaaga

SEQ ID NO: 323322 - RNA, 19 nt, Homo sapiens
  misc_RNA (1)...(19): siRNA sense strand
ucaaggaccacguagacaa

SEQ ID NO: 323323 - RNA, 19 nt, Homo sapiens
  misc_RNA (1)...(19): siRNA sense strand
ccacguagacaaugacaag

SEQ ID NO: 323324 - RNA, 19 nt, Homo sapiens
  misc_RNA (1)...(19): siRNA sense strand
caaggaccacguagacaau

SEQ ID NO: 323325 - RNA, 19 nt, Homo sapiens
  misc_RNA (1)...(19): siRNA sense strand
gagguaagaaggauuccau

SEQ ID NO: 323326 - RNA, 19 nt, Homo sapiens
  misc_RNA (1)...(19): siRNA sense strand
agaagggauuuaugaaugc

SEQ ID NO: 323327 - RNA, 19 nt, Homo sapiens
  misc_RNA (1)...(19): siRNA sense strand
gccacugcccggugcauuu

SEQ ID NO: 323328 - RNA, 19 nt, Homo sapiens
  misc_RNA (1)...(19): siRNA sense strand
aaggagaaacugaaagaau

SEQ ID NO: 323329 - RNA, 19 nt, Homo sapiens
  misc_RNA (1)...(19): siRNA sense strand
ggcagaagggauuuaugaa

SEQ ID NO: 323330 - RNA, 19 nt, Homo sapiens
  misc_RNA (1)...(19): siRNA sense strand
caaggagaaacugaaagaa

SEQ ID NO: 323331 - RNA, 19 nt, Homo sapiens
  misc_RNA (1)...(19): siRNA sense strand
gagccuuacggaugccuuu

SEQ ID NO: 323332 - RNA, 19 nt, Homo sapiens
  misc_RNA (1)...(19): siRNA sense strand
ggauuuaugaaugcaaaga

SEQ ID NO: 323333 - RNA, 19 nt, Homo sapiens
  misc_RNA (1)...(19): siRNA sense strand
cgucaacaugggagccuua

SEQ ID NO: 323334 - RNA, 19 nt, Homo sapiens
  misc_RNA (1)...(19): siRNA sense strand
gaagcgcgaggacgugaag

SEQ ID NO: 323335 - RNA, 19 nt, Homo sapiens
  misc_RNA (1)...(19): siRNA sense strand
gccaagugccgcaaacaag

SEQ ID NO: 323336 - RNA, 19 nt, Homo sapiens
  misc_RNA (1)...(19): siRNA sense strand
ccacugcccggugcauuug

SEQ ID NO: 323337 - RNA, 19 nt, Homo sapiens
  misc_RNA (1)...(19): siRNA sense strand
agggauuuaugaaugcaaa

SEQ ID NO: 323338 - RNA, 19 nt, Homo sapiens
  misc_RNA (1)...(19): siRNA sense strand
gcggagguaagaaggauuc

SEQ ID NO: 323339 - RNA, 19 nt, Homo sapiens
  misc_RNA (1)...(19): siRNA sense strand
aagaaggauuccauuacgu

SEQ ID NO: 323340 - RNA, 19 nt, Homo sapiens
  misc_RNA (1)...(19): siRNA sense strand
ccaagucuuuugaccagaa

SEQ ID NO: 323341 - RNA, 19 nt, Homo sapiens
  misc_RNA (1)...(19): siRNA sense strand
gaagagcucacggcuuuug

SEQ ID NO: 323342 - RNA, 19 nt, Homo sapiens
  misc_RNA (1)...(19): siRNA sense strand
gggcagaccaagcugaaac

SEQ ID NO: 323343 - RNA, 19 nt, Homo sapiens
  misc_RNA (1)...(19): siRNA sense strand
guucaaggaccacguagac

SEQ ID NO: 323344 - RNA, 19 nt, Homo sapiens
  misc_RNA (1)...(19): siRNA sense strand
cagaagggauuuaugaaug

SEQ ID NO: 323345 - RNA, 19 nt, Homo sapiens
  misc_RNA (1)...(19): siRNA sense strand
gcauaaaggcgucaucuug

SEQ ID NO: 323346 - RNA, 19 nt, Homo sapiens
  misc_RNA (1)...(19): siRNA sense strand
gguaagaaggauuccauua

SEQ ID NO: 323347 - RNA, 19 nt, Homo sapiens
  misc_RNA (1)...(19): siRNA sense strand
aggagaaacugaaagaauu

SEQ ID NO: 323348 - RNA, 19 nt, Homo sapiens
  misc_RNA (1)...(19): siRNA sense strand
gcagaagggauuuaugaau

SEQ ID NO: 323349 - RNA, 19 nt, Homo sapiens
  misc_RNA (1)...(19): siRNA sense strand
caagagaaucagaugcaua

SEQ ID NO: 323350 - RNA, 19 nt, Homo sapiens
  misc_RNA (1)...(19): siRNA sense strand
gagaguggcagaagggauu

SEQ ID NO: 323351 - RNA, 19 nt, Homo sapiens
  misc_RNA (1)...(19): siRNA sense strand
aagagaaucagaugcauaa

SEQ ID NO: 323352 - RNA, 19 nt, Homo sapiens
  misc_RNA (1)...(19): siRNA sense strand
agaaucagaugcauaaagg

SEQ ID NO: 323353 - RNA, 19 nt, Homo sapiens
  misc_RNA (1)...(19): siRNA sense strand
ggagaaacugaaagaauuc

SEQ ID NO: 323354 - RNA, 19 nt, Homo sapiens
  misc_RNA (1)...(19): siRNA sense strand
gggcacagccaaccaccua

SEQ ID NO: 323355 - RNA, 19 nt, Homo sapiens
  misc_RNA (1)...(19): siRNA sense strand
gcaaacaagagaaucagau

SEQ ID NO: 323356 - RNA, 19 nt, Homo sapiens
  misc_RNA (1)...(19): siRNA sense strand
uaagaaggauuccauuacg

SEQ ID NO: 323357 - RNA, 19 nt, Homo sapiens
  misc_RNA (1)...(19): siRNA sense strand
gagaaucagaugcauaaag

SEQ ID NO: 323358 - RNA, 19 nt, Homo sapiens
  misc_RNA (1)...(19): siRNA sense strand
agaaggauuccauuacgua

SEQ ID NO: 323359 - RNA, 19 nt, Homo sapiens
  misc_RNA (1)...(19): siRNA sense strand
caaacaagagaaucagaug

SEQ ID NO: 323360 - RNA, 19 nt, Homo sapiens
  misc_RNA (1)...(19): siRNA sense strand
ugacaaggagaaacugaaa

SEQ ID NO: 323361 - RNA, 19 nt, Homo sapiens
  misc_RNA (1)...(19): siRNA sense strand
uggcagaagggauuuauga

SEQ ID NO: 323362 - RNA, 19 nt, Homo sapiens
  misc_RNA (1)...(19): siRNA sense strand
gcacagccaaccaccuaga

SEQ ID NO: 323363 - RNA, 19 nt, Homo sapiens
  misc_RNA (1)...(19): siRNA sense strand
gaagggauuuaugaaugca

SEQ ID NO: 323364 - RNA, 19 nt, Homo sapiens
  misc_RNA (1)...(19): siRNA sense strand
ccaagugccgcaaacaaga

SEQ ID NO: 323365 - RNA, 19 nt, Homo sapiens
  misc_RNA (1)...(19): siRNA sense strand
acaaggagaaacugaaaga

SEQ ID NO: 323366 - RNA, 19 nt, Homo sapiens
  misc_RNA (1)...(19): siRNA sense strand
ucaaggaccacguagacaa

SEQ ID NO: 323367 - RNA, 19 nt, Homo sapiens
  misc_RNA (1)...(19): siRNA sense strand
ccacguagacaaugacaag

SEQ ID NO: 323368 - RNA, 19 nt, Homo sapiens
  misc_RNA (1)...(19): siRNA sense strand
caaggaccacguagacaau

SEQ ID NO: 323369 - RNA, 19 nt, Homo sapiens
  misc_RNA (1)...(19): siRNA sense strand
gagguaagaaggauuccau

SEQ ID NO: 323370 - RNA, 19 nt, Homo sapiens
  misc_RNA (1)...(19): siRNA sense strand
agaagggauuuaugaaugc

SEQ ID NO: 323371 - RNA, 19 nt, Homo sapiens
  misc_RNA (1)...(19): siRNA sense strand
gccacugcccggugcauuu

SEQ ID NO: 323372 - RNA, 19 nt, Homo sapiens
  misc_RNA (1)...(19): siRNA sense strand
aaggagaaacugaaagaau

SEQ ID NO: 323373 - RNA, 19 nt, Homo sapiens
  misc_RNA (1)...(19): siRNA sense strand
ggcagaagggauuuaugaa

SEQ ID NO: 323374 - RNA, 19 nt, Homo sapiens
  misc_RNA (1)...(19): siRNA sense strand
caaggagaaacugaaagaa

SEQ ID NO: 323375 - RNA, 19 nt, Homo sapiens
  misc_RNA (1)...(19): siRNA sense strand
gagccuuacggaugccuuu

SEQ ID NO: 323376 - RNA, 19 nt, Homo sapiens
  misc_RNA (1)...(19): siRNA sense strand
ggauuuaugaaugcaaaga

SEQ ID NO: 323377 - RNA, 19 nt, Homo sapiens
  misc_RNA (1)...(19): siRNA sense strand
cgucaacaugggagccuua

SEQ ID NO: 323378 - RNA, 19 nt, Homo sapiens
  misc_RNA (1)...(19): siRNA sense strand
gaagcgcgaggacgugaag

SEQ ID NO: 323379 - RNA, 19 nt, Homo sapiens
  misc_RNA (1)...(19): siRNA sense strand
gccaagugccgcaaacaag

SEQ ID NO: 323380 - RNA, 19 nt, Homo sapiens
  misc_RNA (1)...(19): siRNA sense strand
ccacugcccggugcauuug

SEQ ID NO: 323381 - RNA, 19 nt, Homo sapiens
  misc_RNA (1)...(19): siRNA sense strand
agggauuuaugaaugcaaa

SEQ ID NO: 323382 - RNA, 19 nt, Homo sapiens
  misc_RNA (1)...(19): siRNA sense strand
gcggagguaagaaggauuc

SEQ ID NO: 323383 - RNA, 19 nt, Homo sapiens
  misc_RNA (1)...(19): siRNA sense strand
aagaaggauuccauuacgu

SEQ ID NO: 323384 - RNA, 19 nt, Homo sapiens
  misc_RNA (1)...(19): siRNA sense strand
ccaagucuuuugaccagaa

SEQ ID NO: 323385 - RNA, 19 nt, Homo sapiens
  misc_RNA (1)...(19): siRNA sense strand
gaagagcucacggcuuuug

SEQ ID NO: 323386 - RNA, 19 nt, Homo sapiens
  misc_RNA (1)...(19): siRNA sense strand
gggcagaccaagcugaaac

SEQ ID NO: 323387 - RNA, 19 nt, Homo sapiens
  misc_RNA (1)...(19): siRNA sense strand
guucaaggaccacguagac

SEQ ID NO: 323388 - RNA, 19 nt, Homo sapiens
  misc_RNA (1)...(19): siRNA sense strand
ccauaaagguguucucaua

SEQ ID NO: 323389 - RNA, 19 nt, Homo sapiens
  misc_RNA (1)...(19): siRNA sense strand
caacguaggugcuuuaagg

SEQ ID NO: 323390 - RNA, 19 nt, Homo sapiens
  misc_RNA (1)...(19): siRNA sense strand
ucgaagagcuaaauguaga

SEQ ID NO: 323391 - RNA, 19 nt, Homo sapiens
  misc_RNA (1)...(19): siRNA sense strand
ggacgaaggccagaccaaa

SEQ ID NO: 323392 - RNA, 19 nt, Homo sapiens
  misc_RNA (1)...(19): siRNA sense strand
aaucgaagagcuaaaugua

SEQ ID NO: 323393 - RNA, 19 nt, Homo sapiens
  misc_RNA (1)...(19): siRNA sense strand
ggcgaagucggaccaauuu

SEQ ID NO: 323394 - RNA, 19 nt, Homo sapiens
  misc_RNA (1)...(19): siRNA sense strand
gaaaaucaacuccauaaag

SEQ ID NO: 323395 - RNA, 19 nt, Homo sapiens
  misc_RNA (1)...(19): siRNA sense strand
gaagagcuaaauguagaaa

SEQ ID NO: 323396 - RNA, 19 nt, Homo sapiens
  misc_RNA (1)...(19): siRNA sense strand
cuuguagagucgcaccuua

SEQ ID NO: 323397 - RNA, 19 nt, Homo sapiens
  misc_RNA (1)...(19): siRNA sense strand
gagugcagguuugguuuca

SEQ ID NO: 323398 - RNA, 19 nt, Homo sapiens
  misc_RNA (1)...(19): siRNA sense strand
cgaagucggaccaauuuca

SEQ ID NO: 323399 - RNA, 19 nt, Homo sapiens
  misc_RNA (1)...(19): siRNA sense strand
aaaaucaacuccauaaagg

SEQ ID NO: 323400 - RNA, 19 nt, Homo sapiens
  misc_RNA (1)...(19): siRNA sense strand
ugucaacguaggugcuuua

SEQ ID NO: 323401 - RNA, 19 nt, Homo sapiens
  misc_RNA (1)...(19): siRNA sense strand
cauaaagguguucucauag

SEQ ID NO: 323402 - RNA, 19 nt, Homo sapiens
  misc_RNA (1)...(19): siRNA sense strand
cuuuaaggaugccauuuca

SEQ ID NO: 323403 - RNA, 19 nt, Homo sapiens
  misc_RNA (1)...(19): siRNA sense strand
auaaagguguucucauagg

SEQ ID NO: 323404 - RNA, 19 nt, Homo sapiens
  misc_RNA (1)...(19): siRNA sense strand
ucaacuccauaaagguguu

SEQ ID NO: 323405 - RNA, 19 nt, Homo sapiens
  misc_RNA (1)...(19): siRNA sense strand
gcuuuaaggaugccauuuc

SEQ ID NO: 323406 - RNA, 19 nt, Homo sapiens
  misc_RNA (1)...(19): siRNA sense strand
caauuucacccuggaacaa

SEQ ID NO: 323407 - RNA, 19 nt, Homo sapiens
  misc_RNA (1)...(19): siRNA sense strand
caagaaaaucaacuccaua

SEQ ID NO: 323408 - RNA, 19 nt, Homo sapiens
  misc_RNA (1)...(19): siRNA sense strand
gaggcgaagucggaccaau

SEQ ID NO: 323409 - RNA, 19 nt, Homo sapiens
  misc_RNA (1)...(19): siRNA sense strand
cgaagagcuaaauguagaa

SEQ ID NO: 323410 - RNA, 19 nt, Homo sapiens
  misc_RNA (1)...(19): siRNA sense strand
guagagucgcaccuuaugu

SEQ ID NO: 323411 - RNA, 19 nt, Homo sapiens
  misc_RNA (1)...(19): siRNA sense strand
caaaaucgaagagcuaaau

SEQ ID NO: 323412 - RNA, 19 nt, Homo sapiens
  misc_RNA (1)...(19): siRNA sense strand
gaagucggaccaauuucac

SEQ ID NO: 323413 - RNA, 19 nt, Homo sapiens
  misc_RNA (1)...(19): siRNA sense strand
ccauaaagguguucucaua

SEQ ID NO: 323414 - RNA, 19 nt, Homo sapiens
  misc_RNA (1)...(19): siRNA sense strand
caacguaggugcuuuaagg

SEQ ID NO: 323415 - RNA, 19 nt, Homo sapiens
  misc_RNA (1)...(19): siRNA sense strand
ucgaagagcuaaauguaga

SEQ ID NO: 323416 - RNA, 19 nt, Homo sapiens
  misc_RNA (1)...(19): siRNA sense strand
ggacgaaggccagaccaaa

SEQ ID NO: 323417 - RNA, 19 nt, Homo sapiens
  misc_RNA (1)...(19): siRNA sense strand
aaucgaagagcuaaaugua

SEQ ID NO: 323418 - RNA, 19 nt, Homo sapiens
  misc_RNA (1)...(19): siRNA sense strand
ggcgaagucggaccaauuu

SEQ ID NO: 323419 - RNA, 19 nt, Homo sapiens
  misc_RNA (1)...(19): siRNA sense strand
gaaaaucaacuccauaaag

SEQ ID NO: 323420 - RNA, 19 nt, Homo sapiens
  misc_RNA (1)...(19): siRNA sense strand
gaagagcuaaauguagaaa

SEQ ID NO: 323421 - RNA, 19 nt, Homo sapiens
  misc_RNA (1)...(19): siRNA sense strand
cuuguagagucgcaccuua

SEQ ID NO: 323422 - RNA, 19 nt, Homo sapiens
  misc_RNA (1)...(19): siRNA sense strand
gagugcagguuugguuuca

SEQ ID NO: 323423 - RNA, 19 nt, Homo sapiens
  misc_RNA (1)...(19): siRNA sense strand
cgaagucggaccaauuuca

SEQ ID NO: 323424 - RNA, 19 nt, Homo sapiens
  misc_RNA (1)...(19): siRNA sense strand
aaaaucaacuccauaaagg

SEQ ID NO: 323425 - RNA, 19 nt, Homo sapiens
  misc_RNA (1)...(19): siRNA sense strand
ugucaacguaggugcuuua

SEQ ID NO: 323426 - RNA, 19 nt, Homo sapiens
  misc_RNA (1)...(19): siRNA sense strand
cauaaagguguucucauag

SEQ ID NO: 323427 - RNA, 19 nt, Homo sapiens
  misc_RNA (1)...(19): siRNA sense strand
cuuuaaggaugccauuuca

SEQ ID NO: 323428 - RNA, 19 nt, Homo sapiens
  misc_RNA (1)...(19): siRNA sense strand
auaaagguguucucauagg

SEQ ID NO: 323429 - RNA, 19 nt, Homo sapiens
  misc_RNA (1)...(19): siRNA sense strand
ucaacuccauaaagguguu

SEQ ID NO: 323430 - RNA, 19 nt, Homo sapiens
  misc_RNA (1)...(19): siRNA sense strand
gcuuuaaggaugccauuuc

SEQ ID NO: 323431 - RNA, 19 nt, Homo sapiens
  misc_RNA (1)...(19): siRNA sense strand
gaaagggauggaggacgaa

SEQ ID NO: 323432 - RNA, 19 nt, Homo sapiens
  misc_RNA (1)...(19): siRNA sense strand
caauuucacccuggaacaa

SEQ ID NO: 323433 - RNA, 19 nt, Homo sapiens
  misc_RNA (1)...(19): siRNA sense strand
ggagcugaaagaucgcaaa

SEQ ID NO: 323434 - RNA, 19 nt, Homo sapiens
  misc_RNA (1)...(19): siRNA sense strand
caagaaaaucaacuccaua

SEQ ID NO: 323435 - RNA, 19 nt, Homo sapiens
  misc_RNA (1)...(19): siRNA sense strand
gagcugaaagaucgcaaag

SEQ ID NO: 323436 - RNA, 19 nt, Homo sapiens
  misc_RNA (1)...(19): siRNA sense strand
gaggcgaagucggaccaau

SEQ ID NO: 323437 - RNA, 19 nt, Homo sapiens
  misc_RNA (1)...(19): siRNA sense strand
cgaagagcuaaauguagaa

SEQ ID NO: 323438 - RNA, 19 nt, Homo sapiens
  misc_RNA (1)...(19): siRNA sense strand
guagagucgcaccuuaugu

SEQ ID NO: 323439 - RNA, 19 nt, Homo sapiens
  misc_RNA (1)...(19): siRNA sense strand
caaaaucgaagagcuaaau

SEQ ID NO: 323440 - RNA, 19 nt, Homo sapiens
  misc_RNA (1)...(19): siRNA sense strand
gaagucggaccaauuucac

SEQ ID NO: 323441 - RNA, 19 nt, Homo sapiens
  misc_RNA (1)...(19): siRNA sense strand
gcucaaagcugcaguauga

SEQ ID NO: 323442 - RNA, 19 nt, Homo sapiens
  misc_RNA (1)...(19): siRNA sense strand
gaacagucaugaacuauag

SEQ ID NO: 323443 - RNA, 19 nt, Homo sapiens
  misc_RNA (1)...(19): siRNA sense strand
uagauucacugccuauuua

SEQ ID NO: 323444 - RNA, 19 nt, Homo sapiens
  misc_RNA (1)...(19): siRNA sense strand
gaaggaaauucuaauagug

SEQ ID NO: 323445 - RNA, 19 nt, Homo sapiens
  misc_RNA (1)...(19): siRNA sense strand
ccaaaggccuucugcguuu

SEQ ID NO: 323446 - RNA, 19 nt, Homo sapiens
  misc_RNA (1)...(19): siRNA sense strand
guuggaaccuuuaauaaga

SEQ ID NO: 323447 - RNA, 19 nt, Homo sapiens
  misc_RNA (1)...(19): siRNA sense strand
ucacagaauuccuggauga

SEQ ID NO: 323448 - RNA, 19 nt, Homo sapiens
  misc_RNA (1)...(19): siRNA sense strand
gaacaucgaccaacucuac

SEQ ID NO: 323449 - RNA, 19 nt, Homo sapiens
  misc_RNA (1)...(19): siRNA sense strand
caagggcacuggcuacuau

SEQ ID NO: 323450 - RNA, 19 nt, Homo sapiens
  misc_RNA (1)...(19): siRNA sense strand
ccaaagaccagacuagauu

SEQ ID NO: 323451 - RNA, 19 nt, Homo sapiens
  misc_RNA (1)...(19): siRNA sense strand
gaagagaccuuugguucca

SEQ ID NO: 323452 - RNA, 19 nt, Homo sapiens
  misc_RNA (1)...(19): siRNA sense strand
cgaaggaaauucuaauagu

SEQ ID NO: 323453 - RNA, 19 nt, Homo sapiens
  misc_RNA (1)...(19): siRNA sense strand
gggcaaauguguggacaaa

SEQ ID NO: 323454 - RNA, 19 nt, Homo sapiens
  misc_RNA (1)...(19): siRNA sense strand
gcacuacgaugcagcuauc

SEQ ID NO: 323455 - RNA, 19 nt, Homo sapiens
  misc_RNA (1)...(19): siRNA sense strand
aaaguaaacucugucacua

SEQ ID NO: 323456 - RNA, 19 nt, Homo sapiens
  misc_RNA (1)...(19): siRNA sense strand
gugaguaccuuaucaaugg

SEQ ID NO: 323457 - RNA, 19 nt, Homo sapiens
  misc_RNA (1)...(19): siRNA sense strand
gaaguccacuccaaaagua

SEQ ID NO: 323458 - RNA, 19 nt, Homo sapiens
  misc_RNA (1)...(19): siRNA sense strand
gcaauaaagugggaucaca

SEQ ID NO: 323459 - RNA, 19 nt, Homo sapiens
  misc_RNA (1)...(19): siRNA sense strand
gacaagagccuggaaguga

SEQ ID NO: 323460 - RNA, 19 nt, Homo sapiens
  misc_RNA (1)...(19): siRNA sense strand
cgaugcagcuauccuguuu

SEQ ID NO: 323461 - RNA, 19 nt, Homo sapiens
  misc_RNA (1)...(19): siRNA sense strand
ggaacagucaugaacuaua

SEQ ID NO: 323462 - RNA, 19 nt, Homo sapiens
  misc_RNA (1)...(19): siRNA sense strand
caaaggccuucugcguuua

SEQ ID NO: 323463 - RNA, 19 nt, Homo sapiens
  misc_RNA (1)...(19): siRNA sense strand
ccaccacacucaagaacuu

SEQ ID NO: 323464 - RNA, 19 nt, Homo sapiens
  misc_RNA (1)...(19): siRNA sense strand
ccaugacgauuccaaauuc

SEQ ID NO: 323465 - RNA, 19 nt, Homo sapiens
  misc_RNA (1)...(19): siRNA sense strand
gaagaacucccaggacaga

SEQ ID NO: 323466 - RNA, 19 nt, Homo sapiens
  misc_RNA (1)...(19): siRNA sense strand
ggauggaaaccggaaguua

SEQ ID NO: 323467 - RNA, 19 nt, Homo sapiens
  misc_RNA (1)...(19): siRNA sense strand
gcaaggggcuggugcagaa

SEQ ID NO: 323468 - RNA, 19 nt, Homo sapiens
  misc_RNA (1)...(19): siRNA sense strand
uaaacucugucacuaguca

SEQ ID NO: 323469 - RNA, 19 nt, Homo sapiens
  misc_RNA (1)...(19): siRNA sense strand
gaagcugccugcgguggaa

SEQ ID NO: 323470 - RNA, 19 nt, Homo sapiens
  misc_RNA (1)...(19): siRNA sense strand
gcaaguggcagcaccaaca

SEQ ID NO: 323471 - RNA, 19 nt, Homo sapiens
  misc_RNA (1)...(19): siRNA sense strand
gaccuuugguuccacagaa

SEQ ID NO: 323472 - RNA, 19 nt, Homo sapiens
  misc_RNA (1)...(19): siRNA sense strand
cuucagagacuaucauuga

SEQ ID NO: 323473 - RNA, 19 nt, Homo sapiens
  misc_RNA (1)...(19): siRNA sense strand
ccaagaaguccacuccaaa

SEQ ID NO: 323474 - RNA, 19 nt, Homo sapiens
  misc_RNA (1)...(19): siRNA sense strand
gcugugcugugauugaaga

SEQ ID NO: 323475 - RNA, 19 nt, Homo sapiens
  misc_RNA (1)...(19): siRNA sense strand
ucuaagcccugguccaaau

SEQ ID NO: 323476 - RNA, 19 nt, Homo sapiens
  misc_RNA (1)...(19): siRNA sense strand
cuuaaugucuuccauccuu

SEQ ID NO: 323477 - RNA, 19 nt, Homo sapiens
  misc_RNA (1)...(19): siRNA sense strand
gauggaaaccggaaguuag

SEQ ID NO: 323478 - RNA, 19 nt, Homo sapiens
  misc_RNA (1)...(19): siRNA sense strand
acaaccagcugggagauga

SEQ ID NO: 323479 - RNA, 19 nt, Homo sapiens
  misc_RNA (1)...(19): siRNA sense strand
gaaaccggaaguuagcaaa

SEQ ID NO: 323480 - RNA, 19 nt, Homo sapiens
  misc_RNA (1)...(19): siRNA sense strand
uuaaugucuuccauccuua

SEQ ID NO: 323481 - RNA, 19 nt, Homo sapiens
  misc_RNA (1)...(19): siRNA sense strand
gggcaucauucaugugaca

SEQ ID NO: 323482 - RNA, 19 nt, Homo sapiens
  misc_RNA (1)...(19): siRNA sense strand
cagccaccaucacagaauu

SEQ ID NO: 323483 - RNA, 19 nt, Homo sapiens
  misc_RNA (1)...(19): siRNA sense strand
uggcuacuaugugguauuu

SEQ ID NO: 323484 - RNA, 19 nt, Homo sapiens
  misc_RNA (1)...(19): siRNA sense strand
gcugggagaugaccaugag

SEQ ID NO: 323485 - RNA, 19 nt, Homo sapiens
  misc_RNA (1)...(19): siRNA sense strand
gauguccucucucccaaag

SEQ ID NO: 323486 - RNA, 19 nt, Homo sapiens
  misc_RNA (1)...(19): siRNA sense strand
cauuagauguccguuauag

SEQ ID NO: 323487 - RNA, 19 nt, Homo sapiens
  misc_RNA (1)...(19): siRNA sense strand
ugacaagugcggaguaugu

SEQ ID NO: 323488 - RNA, 19 nt, Homo sapiens
  misc_RNA (1)...(19): siRNA sense strand
ccaguguucucgcucaugu

SEQ ID NO: 323489 - RNA, 19 nt, Homo sapiens
  misc_RNA (1)...(19): siRNA sense strand
gcaaauguguggacaaaac

SEQ ID NO: 323490 - RNA, 19 nt, Homo sapiens
  misc_RNA (1)...(19): siRNA sense strand
gcagcuauccuguuuacuc

SEQ ID NO: 323491 - RNA, 19 nt, Homo sapiens
  misc_RNA (1)...(19): siRNA sense strand
ggacaagagccuggaagug

SEQ ID NO: 323492 - RNA, 19 nt, Homo sapiens
  misc_RNA (1)...(19): siRNA sense strand
cauaaaaguucgacaguuc

SEQ ID NO: 323493 - RNA, 19 nt, Homo sapiens
  misc_RNA (1)...(19): siRNA sense strand
acacugacguggugaggau

SEQ ID NO: 323494 - RNA, 19 nt, Homo sapiens
  misc_RNA (1)...(19): siRNA sense strand
ggugaccgauggcacugaa

SEQ ID NO: 323495 - RNA, 19 nt, Homo sapiens
  misc_RNA (1)...(19): siRNA sense strand
ggaggaggagugcaguuug

SEQ ID NO: 323496 - RNA, 19 nt, Homo sapiens
  misc_RNA (1)...(19): siRNA sense strand
cacgaaggaaauucuaaua

SEQ ID NO: 323497 - RNA, 19 nt, Homo sapiens
  misc_RNA (1)...(19): siRNA sense strand
cuagauucacugccuauuu

SEQ ID NO: 323498 - RNA, 19 nt, Homo sapiens
  misc_RNA (1)...(19): siRNA sense strand
gaggaggagugcaguuugc

SEQ ID NO: 323499 - RNA, 19 nt, Homo sapiens
  misc_RNA (1)...(19): siRNA sense strand
agauguccguuauagcuuu

SEQ ID NO: 323500 - RNA, 19 nt, Homo sapiens
  misc_RNA (1)...(19): siRNA sense strand
caaagauuguuggaaccuu

SEQ ID NO: 323501 - RNA, 19 nt, Homo sapiens
  misc_RNA (1)...(19): siRNA sense strand
cccaagaaguccacuccaa

SEQ ID NO: 323502 - RNA, 19 nt, Homo sapiens
  misc_RNA (1)...(19): siRNA sense strand
gcaaaaggagucaaaacuu

SEQ ID NO: 323503 - RNA, 19 nt, Homo sapiens
  misc_RNA (1)...(19): siRNA sense strand
gaaguuagcaaaaggaugu

SEQ ID NO: 323504 - RNA, 19 nt, Homo sapiens
  misc_RNA (1)...(19): siRNA sense strand
accauuagauguccguuau

SEQ ID NO: 323505 - RNA, 19 nt, Homo sapiens
  misc_RNA (1)...(19): siRNA sense strand
ggugaguaccuuaucaaug

SEQ ID NO: 323506 - RNA, 19 nt, Homo sapiens
  misc_RNA (1)...(19): siRNA sense strand
ccuguggugugcuguggua

SEQ ID NO: 323507 - RNA, 19 nt, Homo sapiens
  misc_RNA (1)...(19): siRNA sense strand
gagacuaucauugacauca

SEQ ID NO: 323508 - RNA, 19 nt, Homo sapiens
  misc_RNA (1)...(19): siRNA sense strand
cagagacuaucauugacau

SEQ ID NO: 323509 - RNA, 19 nt, Homo sapiens
  misc_RNA (1)...(19): siRNA sense strand
guacaugaucuccacuuca

SEQ ID NO: 323510 - RNA, 19 nt, Homo sapiens
  misc_RNA (1)...(19): siRNA sense strand
ggauuuaugugggcaucau

SEQ ID NO: 323511 - RNA, 19 nt, Homo sapiens
  misc_RNA (1)...(19): siRNA sense strand
ggaaaccggaaguuagcaa

SEQ ID NO: 323512 - RNA, 19 nt, Homo sapiens
  misc_RNA (1)...(19): siRNA sense strand
caucuaagcccugguccaa

SEQ ID NO: 323513 - RNA, 19 nt, Homo sapiens
  misc_RNA (1)...(19): siRNA sense strand
cacuguggcucacgaaauc

SEQ ID NO: 323514 - RNA, 19 nt, Homo sapiens
  misc_RNA (1)...(19): siRNA sense strand
ggcagacguugggaccaua

SEQ ID NO: 323515 - RNA, 19 nt, Homo sapiens
  misc_RNA (1)...(19): siRNA sense strand
aguaaacucugucacuagu

SEQ ID NO: 323516 - RNA, 19 nt, Homo sapiens
  misc_RNA (1)...(19): siRNA sense strand
ggagugcaguuugccuauc

SEQ ID NO: 323517 - RNA, 19 nt, Homo sapiens
  misc_RNA (1)...(19): siRNA sense strand
ccacgaaggaaauucuaau

SEQ ID NO: 323518 - RNA, 19 nt, Homo sapiens
  misc_RNA (1)...(19): siRNA sense strand
caaagcugcaguaugacaa

SEQ ID NO: 323519 - RNA, 19 nt, Homo sapiens
  misc_RNA (1)...(19): siRNA sense strand
uaugacaagugcggaguau

SEQ ID NO: 323520 - RNA, 19 nt, Homo sapiens
  misc_RNA (1)...(19): siRNA sense strand
gccuaucgucacuguaaua

SEQ ID NO: 323521 - RNA, 19 nt, Homo sapiens
  misc_RNA (1)...(19): siRNA sense strand
cuucugcguuuaagcaaug

SEQ ID NO: 323522 - RNA, 19 nt, Homo sapiens
  misc_RNA (1)...(19): siRNA sense strand
auggaacagucaugaacua

SEQ ID NO: 323523 - RNA, 19 nt, Homo sapiens
  misc_RNA (1)...(19): siRNA sense strand
caaagaccagacuagauuc

SEQ ID NO: 323524 - RNA, 19 nt, Homo sapiens
  misc_RNA (1)...(19): siRNA sense strand
uaucgucacuguaauaacc

SEQ ID NO: 323525 - RNA, 19 nt, Homo sapiens
  misc_RNA (1)...(19): siRNA sense strand
gauuccaaauucugugaag

SEQ ID NO: 323526 - RNA, 19 nt, Homo sapiens
  misc_RNA (1)...(19): siRNA sense strand
cuaauagugcagauucuug

SEQ ID NO: 323527 - RNA, 19 nt, Homo sapiens
  misc_RNA (1)...(19): siRNA sense strand
uacaugaucuccacuucag

SEQ ID NO: 323528 - RNA, 19 nt, Homo sapiens
  misc_RNA (1)...(19): siRNA sense strand
gccaaagaccagacuagau

SEQ ID NO: 323529 - RNA, 19 nt, Homo sapiens
  misc_RNA (1)...(19): siRNA sense strand
caucacagaauuccuggau

SEQ ID NO: 323530 - RNA, 19 nt, Homo sapiens
  misc_RNA (1)...(19): siRNA sense strand
caauggaaaguacaugauc

SEQ ID NO: 323531 - RNA, 19 nt, Homo sapiens
  misc_RNA (1)...(19): siRNA sense strand
gcuacuaugugguauuuuc

SEQ ID NO: 323532 - RNA, 19 nt, Homo sapiens
  misc_RNA (1)...(19): siRNA sense strand
gagugcaguuugccuaucg

SEQ ID NO: 323533 - RNA, 19 nt, Homo sapiens
  misc_RNA (1)...(19): siRNA sense strand
ugauggccaugguaacugu

SEQ ID NO: 323534 - RNA, 19 nt, Homo sapiens
  misc_RNA (1)...(19): siRNA sense strand
uacuuggccucucccauga

SEQ ID NO: 323535 - RNA, 19 nt, Homo sapiens
  misc_RNA (1)...(19): siRNA sense strand
ccaagggcacuggcuacua

SEQ ID NO: 323536 - RNA, 19 nt, Homo sapiens
  misc_RNA (1)...(19): siRNA sense strand
cagggaagagggccaucua

SEQ ID NO: 323537 - RNA, 19 nt, Homo sapiens
  misc_RNA (1)...(19): siRNA sense strand
gcagugcaaccugacauuc

SEQ ID NO: 323538 - RNA, 19 nt, Homo sapiens
  misc_RNA (1)...(19): siRNA sense strand
guaugacaagugcggagua

SEQ ID NO: 323539 - RNA, 19 nt, Homo sapiens
  misc_RNA (1)...(19): siRNA sense strand
caagaaguccacuccaaaa

SEQ ID NO: 323540 - RNA, 19 nt, Homo sapiens
  misc_RNA (1)...(19): siRNA sense strand
ucaauggaacagucaugaa

SEQ ID NO: 323541 - RNA, 19 nt, Homo sapiens
  misc_RNA (1)...(19): siRNA sense strand
ggaacuaccuggcgcugaa

SEQ ID NO: 323542 - RNA, 19 nt, Homo sapiens
  misc_RNA (1)...(19): siRNA sense strand
ccacuaauauugacgugaa

SEQ ID NO: 323543 - RNA, 19 nt, Homo sapiens
  misc_RNA (1)...(19): siRNA sense strand
gcagacaucgggaccauuu

SEQ ID NO: 323544 - RNA, 19 nt, Homo sapiens
  misc_RNA (1)...(19): siRNA sense strand
gaaguauaaugccuacaau

SEQ ID NO: 323545 - RNA, 19 nt, Homo sapiens
  misc_RNA (1)...(19): siRNA sense strand
aaauacaccuucuuuguuc

SEQ ID NO: 323546 - RNA, 19 nt, Homo sapiens
  misc_RNA (1)...(19): siRNA sense strand
ccaauuauggcuacaauga

SEQ ID NO: 323547 - RNA, 19 nt, Homo sapiens
  misc_RNA (1)...(19): siRNA sense strand
ggagcgaguucaaaguguu

SEQ ID NO: 323548 - RNA, 19 nt, Homo sapiens
  misc_RNA (1)...(19): siRNA sense strand
gcagaacgaugggaacuac

SEQ ID NO: 323549 - RNA, 19 nt, Homo sapiens
  misc_RNA (1)...(19): siRNA sense strand
ccaagcgguuugugucuga

SEQ ID NO: 323550 - RNA, 19 nt, Homo sapiens
  misc_RNA (1)...(19): siRNA sense strand
gaaccacauccugacguua

SEQ ID NO: 323551 - RNA, 19 nt, Homo sapiens
  misc_RNA (1)...(19): siRNA sense strand
ucagggagcagcaguguga

SEQ ID NO: 323552 - RNA, 19 nt, Homo sapiens
  misc_RNA (1)...(19): siRNA sense strand
guccauggcugccuucuac

SEQ ID NO: 323553 - RNA, 19 nt, Homo sapiens
  misc_RNA (1)...(19): siRNA sense strand
caucaagaauuccaucaac

SEQ ID NO: 323554 - RNA, 19 nt, Homo sapiens
  misc_RNA (1)...(19): siRNA sense strand
uaaaagugcugaucguaga

SEQ ID NO: 323555 - RNA, 19 nt, Homo sapiens
  misc_RNA (1)...(19): siRNA sense strand
gcuccgugaucgaggauga

SEQ ID NO: 323556 - RNA, 19 nt, Homo sapiens
  misc_RNA (1)...(19): siRNA sense strand
cucggaagcuggacaaaug

SEQ ID NO: 323557 - RNA, 19 nt, Homo sapiens
  misc_RNA (1)...(19): siRNA sense strand
gcagcagugugagaaguau

SEQ ID NO: 323558 - RNA, 19 nt, Homo sapiens
  misc_RNA (1)...(19): siRNA sense strand
gagcagcagugugagaagu

SEQ ID NO: 323559 - RNA, 19 nt, Homo sapiens
  misc_RNA (1)...(19): siRNA sense strand
gcuggugccacuaauauug

SEQ ID NO: 323560 - RNA, 19 nt, Homo sapiens
  misc_RNA (1)...(19): siRNA sense strand
gaggagcgaguucaaagug

SEQ ID NO: 323561 - RNA, 19 nt, Homo sapiens
  misc_RNA (1)...(19): siRNA sense strand
gcagagcagcaaagagaga

SEQ ID NO: 323562 - RNA, 19 nt, Homo sapiens
  misc_RNA (1)...(19): siRNA sense strand
ggaccauccugaaguacag

SEQ ID NO: 323563 - RNA, 19 nt, Homo sapiens
  misc_RNA (1)...(19): siRNA sense strand
ccauagagcaggacaucuu

SEQ ID NO: 323564 - RNA, 19 nt, Homo sapiens
  misc_RNA (1)...(19): siRNA sense strand
gcaacuggcagcggcguuu

SEQ ID NO: 323565 - RNA, 19 nt, Homo sapiens
  misc_RNA (1)...(19): siRNA sense strand
cagcuggugccacuaauau

SEQ ID NO: 323566 - RNA, 19 nt, Homo sapiens
  misc_RNA (1)...(19): siRNA sense strand
ccuaaugacguggacuuua

SEQ ID NO: 323567 - RNA, 19 nt, Homo sapiens
  misc_RNA (1)...(19): siRNA sense strand
agucaaauacaccuucuuu

SEQ ID NO: 323568 - RNA, 19 nt, Homo sapiens
  misc_RNA (1)...(19): siRNA sense strand
gcgaggaguucaccaucca

SEQ ID NO: 323569 - RNA, 19 nt, Homo sapiens
  misc_RNA (1)...(19): siRNA sense strand
uggaggaggaguacaguuu

SEQ ID NO: 323570 - RNA, 19 nt, Homo sapiens
  misc_RNA (1)...(19): siRNA sense strand
agaaguauaaugccuacaa

SEQ ID NO: 323571 - RNA, 19 nt, Homo sapiens
  misc_RNA (1)...(19): siRNA sense strand
aauuauggcuacaaugaca

SEQ ID NO: 323572 - RNA, 19 nt, Homo sapiens
  misc_RNA (1)...(19): siRNA sense strand
caccaauuauggcuacaau

SEQ ID NO: 323573 - RNA, 19 nt, Homo sapiens
  misc_RNA (1)...(19): siRNA sense strand
acaauuacacugacaugga

SEQ ID NO: 323574 - RNA, 19 nt, Homo sapiens
  misc_RNA (1)...(19): siRNA sense strand
aaccacauccugacguuaa

SEQ ID NO: 323575 - RNA, 19 nt, Homo sapiens
  misc_RNA (1)...(19): siRNA sense strand
gagagcaaccaccaacauc

SEQ ID NO: 323576 - RNA, 19 nt, Homo sapiens
  misc_RNA (1)...(19): siRNA sense strand
gggcaagcaccacgugaug

SEQ ID NO: 323577 - RNA, 19 nt, Homo sapiens
  misc_RNA (1)...(19): siRNA sense strand
gcaucaagaauuccaucaa

SEQ ID NO: 323578 - RNA, 19 nt, Homo sapiens
  misc_RNA (1)...(19): siRNA sense strand
agaaccacauccugacguu

SEQ ID NO: 323579 - RNA, 19 nt, Homo sapiens
  misc_RNA (1)...(19): siRNA sense strand
gcagugcaggcagaucuuu

SEQ ID NO: 323580 - RNA, 19 nt, Homo sapiens
  misc_RNA (1)...(19): siRNA sense strand
gcaacaaggcucugaaacc

SEQ ID NO: 323581 - RNA, 19 nt, Homo sapiens
  misc_RNA (1)...(19): siRNA sense strand
gagcaaccaccaacaucau

SEQ ID NO: 323582 - RNA, 19 nt, Homo sapiens
  misc_RNA (1)...(19): siRNA sense strand
cagugcagcuccugacagu

SEQ ID NO: 323583 - RNA, 19 nt, Homo sapiens
  misc_RNA (1)...(19): siRNA sense strand
ccaagaagaggaggcagaa

SEQ ID NO: 323584 - RNA, 19 nt, Homo sapiens
  misc_RNA (1)...(19): siRNA sense strand
cacccuggcccaugaacua

SEQ ID NO: 323585 - RNA, 19 nt, Homo sapiens
  misc_RNA (1)...(19): siRNA sense strand
ccagcuggugccacuaaua

SEQ ID NO: 323586 - RNA, 19 nt, Homo sapiens
  misc_RNA (1)...(19): siRNA sense strand
gagccaaguaccagucaug

SEQ ID NO: 323587 - RNA, 19 nt, Homo sapiens
  misc_RNA (1)...(19): siRNA sense strand
uggcagaggcgaacuguag

SEQ ID NO: 323588 - RNA, 19 nt, Homo sapiens
  misc_RNA (1)...(19): siRNA sense strand
gggaggagcgaguucaaag

SEQ ID NO: 323589 - RNA, 19 nt, Homo sapiens
  misc_RNA (1)...(19): siRNA sense strand
ucaaccugauggugguaaa

SEQ ID NO: 323590 - RNA, 19 nt, Homo sapiens
  misc_RNA (1)...(19): siRNA sense strand
cgggaccgcugcaaguugu

SEQ ID NO: 323591 - RNA, 19 nt, Homo sapiens
  misc_RNA (1)...(19): siRNA sense strand
cugcguaacuucugcaacu

SEQ ID NO: 323592 - RNA, 19 nt, Homo sapiens
  misc_RNA (1)...(19): siRNA sense strand
gcugaucguagaagaugaa

SEQ ID NO: 323593 - RNA, 19 nt, Homo sapiens
  misc_RNA (1)...(19): siRNA sense strand
ggaggagcgaguucaaagu

SEQ ID NO: 323594 - RNA, 19 nt, Homo sapiens
  misc_RNA (1)...(19): siRNA sense strand
ucagaaggcagcugucuac

SEQ ID NO: 323595 - RNA, 19 nt, Homo sapiens
  misc_RNA (1)...(19): siRNA sense strand
ggaggagagccaagaagag

SEQ ID NO: 323596 - RNA, 19 nt, Homo sapiens
  misc_RNA (1)...(19): siRNA sense strand
gggagcagcagugugagaa

SEQ ID NO: 323597 - RNA, 19 nt, Homo sapiens
  misc_RNA (1)...(19): siRNA sense strand
acaccuucuuuguuccuaa

SEQ ID NO: 323598 - RNA, 19 nt, Homo sapiens
  misc_RNA (1)...(19): siRNA sense strand
cauagagcaggacaucuug

SEQ ID NO: 323599 - RNA, 19 nt, Homo sapiens
  misc_RNA (1)...(19): siRNA sense strand
gaccuguggaggaggagua

SEQ ID NO: 323600 - RNA, 19 nt, Homo sapiens
  misc_RNA (1)...(19): siRNA sense strand
augcagagcagcaaagaga

SEQ ID NO: 323601 - RNA, 19 nt, Homo sapiens
  misc_RNA (1)...(19): siRNA sense strand
gcaugcagagcagcaaaga

SEQ ID NO: 323602 - RNA, 19 nt, Homo sapiens
  misc_RNA (1)...(19): siRNA sense strand
gagcgaguucaaaguguuc

SEQ ID NO: 323603 - RNA, 19 nt, Homo sapiens
  misc_RNA (1)...(19): siRNA sense strand
aaagucaaauacaccuucu

SEQ ID NO: 323604 - RNA, 19 nt, Homo sapiens
  misc_RNA (1)...(19): siRNA sense strand
gaguaggaccaagcgguuu

SEQ ID NO: 323605 - RNA, 19 nt, Homo sapiens
  misc_RNA (1)...(19): siRNA sense strand
gugcugaucguagaagaug

SEQ ID NO: 323606 - RNA, 19 nt, Homo sapiens
  misc_RNA (1)...(19): siRNA sense strand
gagagagcaaccaccaaca

SEQ ID NO: 323607 - RNA, 19 nt, Homo sapiens
  misc_RNA (1)...(19): siRNA sense strand
caccuucuuuguuccuaau

SEQ ID NO: 323608 - RNA, 19 nt, Homo sapiens
  misc_RNA (1)...(19): siRNA sense strand
gcgaggaggagagccaaga

SEQ ID NO: 323609 - RNA, 19 nt, Homo sapiens
  misc_RNA (1)...(19): siRNA sense strand
guucgaggccaaggugauu

SEQ ID NO: 323610 - RNA, 19 nt, Homo sapiens
  misc_RNA (1)...(19): siRNA sense strand
ggaggaggaguacaguuuu

SEQ ID NO: 323611 - RNA, 19 nt, Homo sapiens
  misc_RNA (1)...(19): siRNA sense strand
cgaggaggagagccaagaa

SEQ ID NO: 323612 - RNA, 19 nt, Homo sapiens
  misc_RNA (1)...(19): siRNA sense strand
gaggaggaguacaguuuuc

SEQ ID NO: 323613 - RNA, 19 nt, Homo sapiens
  misc_RNA (1)...(19): siRNA sense strand
gagagccaaguaccaguca

SEQ ID NO: 323614 - RNA, 19 nt, Homo sapiens
  misc_RNA (1)...(19): siRNA sense strand
agacagaauucaaagcaaa

SEQ ID NO: 323615 - RNA, 19 nt, Homo sapiens
  misc_RNA (1)...(19): siRNA sense strand
gaagacagaauucaaagca

SEQ ID NO: 323616 - RNA, 19 nt, Homo sapiens
  misc_RNA (1)...(19): siRNA sense strand
gcaaaugcugagaagacuu

SEQ ID NO: 323617 - RNA, 19 nt, Homo sapiens
  misc_RNA (1)...(19): siRNA sense strand
gacagaauucaaagcaaau

SEQ ID NO: 323618 - RNA, 19 nt, Homo sapiens
  misc_RNA (1)...(19): siRNA sense strand
aagacagaauucaaagcaa

SEQ ID NO: 323619 - RNA, 19 nt, Homo sapiens
  misc_RNA (1)...(19): siRNA sense strand
gcaaaagcagugagagaug

SEQ ID NO: 323620 - RNA, 19 nt, Homo sapiens
  misc_RNA (1)...(19): siRNA sense strand
uaaaggaacuggagaaaga

SEQ ID NO: 323621 - RNA, 19 nt, Homo sapiens
  misc_RNA (1)...(19): siRNA sense strand
gaauugcgauggagaagaa

SEQ ID NO: 323622 - RNA, 19 nt, Homo sapiens
  misc_RNA (1)...(19): siRNA sense strand
gagcuucgcuucagggaaa

SEQ ID NO: 323623 - RNA, 19 nt, Homo sapiens
  misc_RNA (1)...(19): siRNA sense strand
gaagaaagaaagugucauu

SEQ ID NO: 323624 - RNA, 19 nt, Homo sapiens
  misc_RNA (1)...(19): siRNA sense strand
ggaagaaccaccuuuguga

SEQ ID NO: 323625 - RNA, 19 nt, Homo sapiens
  misc_RNA (1)...(19): siRNA sense strand
gaacagaggagcagaugga

SEQ ID NO: 323626 - RNA, 19 nt, Homo sapiens
  misc_RNA (1)...(19): siRNA sense strand
agaaauugcucuaaaggaa

SEQ ID NO: 323627 - RNA, 19 nt, Homo sapiens
  misc_RNA (1)...(19): siRNA sense strand
gaacauguccugcucuauc

SEQ ID NO: 323628 - RNA, 19 nt, Homo sapiens
  misc_RNA (1)...(19): siRNA sense strand
gaacgggaaacaagagaaa

SEQ ID NO: 323629 - RNA, 19 nt, Homo sapiens
  misc_RNA (1)...(19): siRNA sense strand
gaucgcacaucuacacaug

SEQ ID NO: 323630 - RNA, 19 nt, Homo sapiens
  misc_RNA (1)...(19): siRNA sense strand
caagaagaauugcgaugga

SEQ ID NO: 323631 - RNA, 19 nt, Homo sapiens
  misc_RNA (1)...(19): siRNA sense strand
ccgcaguguuuguguauaa

SEQ ID NO: 323632 - RNA, 19 nt, Homo sapiens
  misc_RNA (1)...(19): siRNA sense strand
ggagaaagaacgugugcaa

SEQ ID NO: 323633 - RNA, 19 nt, Homo sapiens
  misc_RNA (1)...(19): siRNA sense strand
gaaccaccuuugugagcaa

SEQ ID NO: 323634 - RNA, 19 nt, Homo sapiens
  misc_RNA (1)...(19): siRNA sense strand
caacaucacagcccaggaa

SEQ ID NO: 323635 - RNA, 19 nt, Homo sapiens
  misc_RNA (1)...(19): siRNA sense strand
gauaggauucucccuuuga

SEQ ID NO: 323636 - RNA, 19 nt, Homo sapiens
  misc_RNA (1)...(19): siRNA sense strand
gaagaauugcgauggagaa

SEQ ID NO: 323637 - RNA, 19 nt, Homo sapiens
  misc_RNA (1)...(19): siRNA sense strand
gagacaguguugagaggaa

SEQ ID NO: 323638 - RNA, 19 nt, Homo sapiens
  misc_RNA (1)...(19): siRNA sense strand
guaugcaucuauuggauca

SEQ ID NO: 323639 - RNA, 19 nt, Homo sapiens
  misc_RNA (1)...(19): siRNA sense strand
cugauaggauucucccuuu

SEQ ID NO: 323640 - RNA, 19 nt, Homo sapiens
  misc_RNA (1)...(19): siRNA sense strand
ggucucagcccaguuuauu

SEQ ID NO: 323641 - RNA, 19 nt, Homo sapiens
  misc_RNA (1)...(19): siRNA sense strand
gagaaauugcucuaaagga

SEQ ID NO: 323642 - RNA, 19 nt, Homo sapiens
  misc_RNA (1)...(19): siRNA sense strand
ggaccuuggagaugcauaa

SEQ ID NO: 323643 - RNA, 19 nt, Homo sapiens
  misc_RNA (1)...(19): siRNA sense strand
cuaugaagcuggagauguc

SEQ ID NO: 323644 - RNA, 19 nt, Homo sapiens
  misc_RNA (1)...(19): siRNA sense strand
caucugcccugcacucaca

SEQ ID NO: 323645 - RNA, 19 nt, Homo sapiens
  misc_RNA (1)...(19): siRNA sense strand
aggagcagauggaggagua

SEQ ID NO: 323646 - RNA, 19 nt, Homo sapiens
  misc_RNA (1)...(19): siRNA sense strand
cagcguggcccuggucaua

SEQ ID NO: 323647 - RNA, 19 nt, Homo sapiens
  misc_RNA (1)...(19): siRNA sense strand
gagaaagaacgugugcaaa

SEQ ID NO: 323648 - RNA, 19 nt, Homo sapiens
  misc_RNA (1)...(19): siRNA sense strand
ggaggaguaccgaggaaga

SEQ ID NO: 323649 - RNA, 19 nt, Homo sapiens
  misc_RNA (1)...(19): siRNA sense strand
gcccacugaucccaucuug

SEQ ID NO: 323650 - RNA, 19 nt, Homo sapiens
  misc_RNA (1)...(19): siRNA sense strand
gaggaagaaccaccuuugu

SEQ ID NO: 323651 - RNA, 19 nt, Homo sapiens
  misc_RNA (1)...(19): siRNA sense strand
gggagagcgugccugacaa

SEQ ID NO: 323652 - RNA, 19 nt, Homo sapiens
  misc_RNA (1)...(19): siRNA sense strand
cggcuggagugcauaucua

SEQ ID NO: 323653 - RNA, 19 nt, Homo sapiens
  misc_RNA (1)...(19): siRNA sense strand
ggucauacacaacaucaca

SEQ ID NO: 323654 - RNA, 19 nt, Homo sapiens
  misc_RNA (1)...(19): siRNA sense strand
gaugucuccuucuacaaca

SEQ ID NO: 323655 - RNA, 19 nt, Homo sapiens
  misc_RNA (1)...(19): siRNA sense strand
ucaacaaacuccaaaagga

SEQ ID NO: 323656 - RNA, 19 nt, Homo sapiens
  misc_RNA (1)...(19): siRNA sense strand
uggcaggacuaggcucuaa

SEQ ID NO: 323657 - RNA, 19 nt, Homo sapiens
  misc_RNA (1)...(19): siRNA sense strand
cgaggaagaaccaccuuug

SEQ ID NO: 323658 - RNA, 19 nt, Homo sapiens
  misc_RNA (1)...(19): siRNA sense strand
cagagagauucgacaguca

SEQ ID NO: 323659 - RNA, 19 nt, Homo sapiens
  misc_RNA (1)...(19): siRNA sense strand
ucuauuggaucaacaaacu

SEQ ID NO: 323660 - RNA, 19 nt, Homo sapiens
  misc_RNA (1)...(19): siRNA sense strand
ucagaggaccggagaagug

SEQ ID NO: 323661 - RNA, 19 nt, Homo sapiens
  misc_RNA (1)...(19): siRNA sense strand
gagaacagaggagcagaug

SEQ ID NO: 323662 - RNA, 19 nt, Homo sapiens
  misc_RNA (1)...(19): siRNA sense strand
ggacccaccagagccuaua

SEQ ID NO: 323663 - RNA, 19 nt, Homo sapiens
  misc_RNA (1)...(19): siRNA sense strand
gaggaccggagaaguguga

SEQ ID NO: 323664 - RNA, 19 nt, Homo sapiens
  misc_RNA (1)...(19): siRNA sense strand
gguugcgccugcccugaaa

SEQ ID NO: 323665 - RNA, 19 nt, Homo sapiens
  misc_RNA (1)...(19): siRNA sense strand
ugauaggauucucccuuug

SEQ ID NO: 323666 - RNA, 19 nt, Homo sapiens
  misc_RNA (1)...(19): siRNA sense strand
aagagggccugacacuuca

SEQ ID NO: 323667 - RNA, 19 nt, Homo sapiens
  misc_RNA (1)...(19): siRNA sense strand
cagaagaaagaaaguguca

SEQ ID NO: 323668 - RNA, 19 nt, Homo sapiens
  misc_RNA (1)...(19): siRNA sense strand
gaggaguaccgaggaagaa

SEQ ID NO: 323669 - RNA, 19 nt, Homo sapiens
  misc_RNA (1)...(19): siRNA sense strand
ucgcuucagggaaacauua

SEQ ID NO: 323670 - RNA, 19 nt, Homo sapiens
  misc_RNA (1)...(19): siRNA sense strand
ggaaacaagagaaauugcu

SEQ ID NO: 323671 - RNA, 19 nt, Homo sapiens
  misc_RNA (1)...(19): siRNA sense strand
caacaaacuccaaaaggaa

SEQ ID NO: 323672 - RNA, 19 nt, Homo sapiens
  misc_RNA (1)...(19): siRNA sense strand
gcucuaagccccucauuuc

SEQ ID NO: 323673 - RNA, 19 nt, Homo sapiens
  misc_RNA (1)...(19): siRNA sense strand
ggacuaugaagcuggagau

SEQ ID NO: 323674 - RNA, 19 nt, Homo sapiens
  misc_RNA (1)...(19): siRNA sense strand
aacauguccugcucuauca

SEQ ID NO: 323675 - RNA, 19 nt, Homo sapiens
  misc_RNA (1)...(19): siRNA sense strand
agacaguguugagaggaaa

SEQ ID NO: 323676 - RNA, 19 nt, Homo sapiens
  misc_RNA (1)...(19): siRNA sense strand
auaggauucucccuuugaa

SEQ ID NO: 323677 - RNA, 19 nt, Homo sapiens
  misc_RNA (1)...(19): siRNA sense strand
gcguggcccuggucauaca

SEQ ID NO: 323678 - RNA, 19 nt, Homo sapiens
  misc_RNA (1)...(19): siRNA sense strand
agaaagaacgugugcaaaa

SEQ ID NO: 323679 - RNA, 19 nt, Homo sapiens
  misc_RNA (1)...(19): siRNA sense strand
gcauccggcuggagugcau

SEQ ID NO: 323680 - RNA, 19 nt, Homo sapiens
  misc_RNA (1)...(19): siRNA sense strand
caccacggcugugaucauc

SEQ ID NO: 323681 - RNA, 19 nt, Homo sapiens
  misc_RNA (1)...(19): siRNA sense strand
gaccggagaagugugagaa

SEQ ID NO: 323682 - RNA, 19 nt, Homo sapiens
  misc_RNA (1)...(19): siRNA sense strand
gggucacggugccugaaga

SEQ ID NO: 323683 - RNA, 19 nt, Homo sapiens
  misc_RNA (1)...(19): siRNA sense strand
uaaagguggcagagagaga

SEQ ID NO: 323684 - RNA, 19 nt, Homo sapiens
  misc_RNA (1)...(19): siRNA sense strand
ugacaacccagagagauuc

SEQ ID NO: 323685 - RNA, 19 nt, Homo sapiens
  misc_RNA (1)...(19): siRNA sense strand
acauggaggugcggugguu

SEQ ID NO: 323686 - RNA, 19 nt, Homo sapiens
  misc_RNA (1)...(19): siRNA sense strand
gcacucacaggagccaaug

SEQ ID NO: 323687 - RNA, 19 nt, Homo sapiens
  misc_RNA (1)...(19): siRNA sense strand
uauaaagguggcagagaga

SEQ ID NO: 323688 - RNA, 19 nt, Homo sapiens
  misc_RNA (1)...(19): siRNA sense strand
aaauugcucuaaaggaacu

SEQ ID NO: 323689 - RNA, 19 nt, Homo sapiens
  misc_RNA (1)...(19): siRNA sense strand
cauugugguuauucugaug

SEQ ID NO: 323690 - RNA, 19 nt, Homo sapiens
  misc_RNA (1)...(19): siRNA sense strand
gccagaagaaagaaagugu

SEQ ID NO: 323691 - RNA, 19 nt, Homo sapiens
  misc_RNA (1)...(19): siRNA sense strand
cagacggccucuucauggu

SEQ ID NO: 323692 - RNA, 19 nt, Homo sapiens
  misc_RNA (1)...(19): siRNA sense strand
gcaucuauuggaucaacaa

SEQ ID NO: 323693 - RNA, 19 nt, Homo sapiens
  misc_RNA (1)...(19): siRNA sense strand
gccugacacuucacagagu

SEQ ID NO: 323694 - RNA, 19 nt, Homo sapiens
  misc_RNA (1)...(19): siRNA sense strand
aaagguggcagagagagaa

SEQ ID NO: 323695 - RNA, 19 nt, Homo sapiens
  misc_RNA (1)...(19): siRNA sense strand
cgggaaacaagagaaauug

SEQ ID NO: 323696 - RNA, 19 nt, Homo sapiens
  misc_RNA (1)...(19): siRNA sense strand
gcauaucuagaggguggua

SEQ ID NO: 323697 - RNA, 19 nt, Homo sapiens
  misc_RNA (1)...(19): siRNA sense strand
gggccugacacuucacaga

SEQ ID NO: 323698 - RNA, 19 nt, Homo sapiens
  misc_RNA (1)...(19): siRNA sense strand
ucucagcccaguuuauugu

SEQ ID NO: 323699 - RNA, 19 nt, Homo sapiens
  misc_RNA (1)...(19): siRNA sense strand
acguuacgcugccaucugu

SEQ ID NO: 323700 - RNA, 19 nt, Homo sapiens
  misc_RNA (1)...(19): siRNA sense strand
ccguaugcaucuauuggau

SEQ ID NO: 323701 - RNA, 19 nt, Homo sapiens
  misc_RNA (1)...(19): siRNA sense strand
gccuaucauugugguuauu

SEQ ID NO: 323702 - RNA, 19 nt, Homo sapiens
  misc_RNA (1)...(19): siRNA sense strand
ggcccugccuaucauugug

SEQ ID NO: 323703 - RNA, 19 nt, Homo sapiens
  misc_RNA (1)...(19): siRNA sense strand
acaagucugugaggaacau

SEQ ID NO: 323704 - RNA, 19 nt, Homo sapiens
  misc_RNA (1)...(19): siRNA sense strand
ucauugugguuauucugau

SEQ ID NO: 323705 - RNA, 19 nt, Homo sapiens
  misc_RNA (1)...(19): siRNA sense strand
ggagaaaacacuacguuac

SEQ ID NO: 323706 - RNA, 19 nt, Homo sapiens
  misc_RNA (1)...(19): siRNA sense strand
uaaaggaacuggagaaaga

SEQ ID NO: 323707 - RNA, 19 nt, Homo sapiens
  misc_RNA (1)...(19): siRNA sense strand
gaauugcgauggagaagaa

SEQ ID NO: 323708 - RNA, 19 nt, Homo sapiens
  misc_RNA (1)...(19): siRNA sense strand
gaagaaagaaagugucauu

SEQ ID NO: 323709 - RNA, 19 nt, Homo sapiens
  misc_RNA (1)...(19): siRNA sense strand
ggaagaaccaccuuuguga

SEQ ID NO: 323710 - RNA, 19 nt, Homo sapiens
  misc_RNA (1)...(19): siRNA sense strand
gaacagaggagcagaugga

SEQ ID NO: 323711 - RNA, 19 nt, Homo sapiens
  misc_RNA (1)...(19): siRNA sense strand
agaaauugcucuaaaggaa

SEQ ID NO: 323712 - RNA, 19 nt, Homo sapiens
  misc_RNA (1)...(19): siRNA sense strand
gaacauguccugcucuauc

SEQ ID NO: 323713 - RNA, 19 nt, Homo sapiens
  misc_RNA (1)...(19): siRNA sense strand
gaacgggaaacaagagaaa

SEQ ID NO: 323714 - RNA, 19 nt, Homo sapiens
  misc_RNA (1)...(19): siRNA sense strand
caagaagaauugcgaugga

SEQ ID NO: 323715 - RNA, 19 nt, Homo sapiens
  misc_RNA (1)...(19): siRNA sense strand
ccgcaguguuuguguauaa

SEQ ID NO: 323716 - RNA, 19 nt, Homo sapiens
  misc_RNA (1)...(19): siRNA sense strand
ggagaaagaacgugugcaa

SEQ ID NO: 323717 - RNA, 19 nt, Homo sapiens
  misc_RNA (1)...(19): siRNA sense strand
gaaccaccuuugugagcaa

SEQ ID NO: 323718 - RNA, 19 nt, Homo sapiens
  misc_RNA (1)...(19): siRNA sense strand
caacaucacagcccaggaa

SEQ ID NO: 323719 - RNA, 19 nt, Homo sapiens
  misc_RNA (1)...(19): siRNA sense strand
gaagaauugcgauggagaa

SEQ ID NO: 323720 - RNA, 19 nt, Homo sapiens
  misc_RNA (1)...(19): siRNA sense strand
guaugcaucuauuggauca

SEQ ID NO: 323721 - RNA, 19 nt, Homo sapiens
  misc_RNA (1)...(19): siRNA sense strand
ggucucagcccaguuuauu

SEQ ID NO: 323722 - RNA, 19 nt, Homo sapiens
  misc_RNA (1)...(19): siRNA sense strand
gagaaauugcucuaaagga

SEQ ID NO: 323723 - RNA, 19 nt, Homo sapiens
  misc_RNA (1)...(19): siRNA sense strand
aggagcagauggaggagua

SEQ ID NO: 323724 - RNA, 19 nt, Homo sapiens
  misc_RNA (1)...(19): siRNA sense strand
cagcguggcccuggucaua

SEQ ID NO: 323725 - RNA, 19 nt, Homo sapiens
  misc_RNA (1)...(19): siRNA sense strand
gagaaagaacgugugcaaa

SEQ ID NO: 323726 - RNA, 19 nt, Homo sapiens
  misc_RNA (1)...(19): siRNA sense strand
ggaggaguaccgaggaaga

SEQ ID NO: 323727 - RNA, 19 nt, Homo sapiens
  misc_RNA (1)...(19): siRNA sense strand
gcccacugaucccaucuug

SEQ ID NO: 323728 - RNA, 19 nt, Homo sapiens
  misc_RNA (1)...(19): siRNA sense strand
gaggaagaaccaccuuugu

SEQ ID NO: 323729 - RNA, 19 nt, Homo sapiens
  misc_RNA (1)...(19): siRNA sense strand
cggcuggagugcauaucua

SEQ ID NO: 323730 - RNA, 19 nt, Homo sapiens
  misc_RNA (1)...(19): siRNA sense strand
ggucauacacaacaucaca

SEQ ID NO: 323731 - RNA, 19 nt, Homo sapiens
  misc_RNA (1)...(19): siRNA sense strand
ucaacaaacuccaaaagga

SEQ ID NO: 323732 - RNA, 19 nt, Homo sapiens
  misc_RNA (1)...(19): siRNA sense strand
uggcaggacuaggcucuaa

SEQ ID NO: 323733 - RNA, 19 nt, Homo sapiens
  misc_RNA (1)...(19): siRNA sense strand
cgaggaagaaccaccuuug

SEQ ID NO: 323734 - RNA, 19 nt, Homo sapiens
  misc_RNA (1)...(19): siRNA sense strand
ucuauuggaucaacaaacu

SEQ ID NO: 323735 - RNA, 19 nt, Homo sapiens
  misc_RNA (1)...(19): siRNA sense strand
gagaacagaggagcagaug

SEQ ID NO: 323736 - RNA, 19 nt, Homo sapiens
  misc_RNA (1)...(19): siRNA sense strand
gguugcgccugcccugaaa

SEQ ID NO: 323737 - RNA, 19 nt, Homo sapiens
  misc_RNA (1)...(19): siRNA sense strand
cagaagaaagaaaguguca

SEQ ID NO: 323738 - RNA, 19 nt, Homo sapiens
  misc_RNA (1)...(19): siRNA sense strand
gaggaguaccgaggaagaa

SEQ ID NO: 323739 - RNA, 19 nt, Homo sapiens
  misc_RNA (1)...(19): siRNA sense strand
ggaaacaagagaaauugcu

SEQ ID NO: 323740 - RNA, 19 nt, Homo sapiens
  misc_RNA (1)...(19): siRNA sense strand
caacaaacuccaaaaggaa

SEQ ID NO: 323741 - RNA, 19 nt, Homo sapiens
  misc_RNA (1)...(19): siRNA sense strand
gcucuaagccccucauuuc

SEQ ID NO: 323742 - RNA, 19 nt, Homo sapiens
  misc_RNA (1)...(19): siRNA sense strand
aacauguccugcucuauca

SEQ ID NO: 323743 - RNA, 19 nt, Homo sapiens
  misc_RNA (1)...(19): siRNA sense strand
gcguggcccuggucauaca

SEQ ID NO: 323744 - RNA, 19 nt, Homo sapiens
  misc_RNA (1)...(19): siRNA sense strand
agaaagaacgugugcaaaa

SEQ ID NO: 323745 - RNA, 19 nt, Homo sapiens
  misc_RNA (1)...(19): siRNA sense strand
gcauccggcuggagugcau

SEQ ID NO: 323746 - RNA, 19 nt, Homo sapiens
  misc_RNA (1)...(19): siRNA sense strand
caccacggcugugaucauc

SEQ ID NO: 323747 - RNA, 19 nt, Homo sapiens
  misc_RNA (1)...(19): siRNA sense strand
uaaagguggcagagagaga

SEQ ID NO: 323748 - RNA, 19 nt, Homo sapiens
  misc_RNA (1)...(19): siRNA sense strand
uauaaagguggcagagaga

SEQ ID NO: 323749 - RNA, 19 nt, Homo sapiens
  misc_RNA (1)...(19): siRNA sense strand
aaauugcucuaaaggaacu

SEQ ID NO: 323750 - RNA, 19 nt, Homo sapiens
  misc_RNA (1)...(19): siRNA sense strand
cauugugguuauucugaug

SEQ ID NO: 323751 - RNA, 19 nt, Homo sapiens
  misc_RNA (1)...(19): siRNA sense strand
gccagaagaaagaaagugu

SEQ ID NO: 323752 - RNA, 19 nt, Homo sapiens
  misc_RNA (1)...(19): siRNA sense strand
cagacggccucuucauggu

SEQ ID NO: 323753 - RNA, 19 nt, Homo sapiens
  misc_RNA (1)...(19): siRNA sense strand
acauggaggugcggugguu

SEQ ID NO: 323754 - RNA, 19 nt, Homo sapiens
  misc_RNA (1)...(19): siRNA sense strand
gcaucuauuggaucaacaa

SEQ ID NO: 323755 - RNA, 19 nt, Homo sapiens
  misc_RNA (1)...(19): siRNA sense strand
aaagguggcagagagagaa

SEQ ID NO: 323756 - RNA, 19 nt, Homo sapiens
  misc_RNA (1)...(19): siRNA sense strand
cgggaaacaagagaaauug

SEQ ID NO: 323757 - RNA, 19 nt, Homo sapiens
  misc_RNA (1)...(19): siRNA sense strand
acguuacgcugccaucugu

SEQ ID NO: 323758 - RNA, 19 nt, Homo sapiens
  misc_RNA (1)...(19): siRNA sense strand
ucucagcccaguuuauugu

SEQ ID NO: 323759 - RNA, 19 nt, Homo sapiens
  misc_RNA (1)...(19): siRNA sense strand
ccguaugcaucuauuggau

SEQ ID NO: 323760 - RNA, 19 nt, Homo sapiens
  misc_RNA (1)...(19): siRNA sense strand
gccuaucauugugguuauu

SEQ ID NO: 323761 - RNA, 19 nt, Homo sapiens
  misc_RNA (1)...(19): siRNA sense strand
ggcccugccuaucauugug

SEQ ID NO: 323762 - RNA, 19 nt, Homo sapiens
  misc_RNA (1)...(19): siRNA sense strand
acaagucugugaggaacau

SEQ ID NO: 323763 - RNA, 19 nt, Homo sapiens
  misc_RNA (1)...(19): siRNA sense strand
gcauaucuagaggguggua

SEQ ID NO: 323764 - RNA, 19 nt, Homo sapiens
  misc_RNA (1)...(19): siRNA sense strand
ggagaaaacacuacguuac

SEQ ID NO: 323765 - RNA, 19 nt, Homo sapiens
  misc_RNA (1)...(19): siRNA sense strand
ucauugugguuauucugau

SEQ ID NO: 323766 - RNA, 19 nt, Homo sapiens
  misc_RNA (1)...(19): siRNA sense strand
caaauaagcucuacucauu

SEQ ID NO: 323767 - RNA, 19 nt, Homo sapiens
  misc_RNA (1)...(19): siRNA sense strand
gaaccggcaucuccaaaua

SEQ ID NO: 323768 - RNA, 19 nt, Homo sapiens
  misc_RNA (1)...(19): siRNA sense strand
gaauuuagaucaacucaga

SEQ ID NO: 323769 - RNA, 19 nt, Homo sapiens
  misc_RNA (1)...(19): siRNA sense strand
gcacacagaucuccauguu

SEQ ID NO: 323770 - RNA, 19 nt, Homo sapiens
  misc_RNA (1)...(19): siRNA sense strand
gaucccaccuuaaaugaua

SEQ ID NO: 323771 - RNA, 19 nt, Homo sapiens
  misc_RNA (1)...(19): siRNA sense strand
gaagagaccgguaaagauu

SEQ ID NO: 323772 - RNA, 19 nt, Homo sapiens
  misc_RNA (1)...(19): siRNA sense strand
gaugauaacugcagauuuu

SEQ ID NO: 323773 - RNA, 19 nt, Homo sapiens
  misc_RNA (1)...(19): siRNA sense strand
caacuacucuucaccuuca

SEQ ID NO: 323774 - RNA, 19 nt, Homo sapiens
  misc_RNA (1)...(19): siRNA sense strand
gaaaugaggaacaguauag

SEQ ID NO: 323775 - RNA, 19 nt, Homo sapiens
  misc_RNA (1)...(19): siRNA sense strand
uaacauacuuucuggaauc

SEQ ID NO: 323776 - RNA, 19 nt, Homo sapiens
  misc_RNA (1)...(19): siRNA sense strand
ccaauaagaccacuuguga

SEQ ID NO: 323777 - RNA, 19 nt, Homo sapiens
  misc_RNA (1)...(19): siRNA sense strand
gcaguuggguugguuauuc

SEQ ID NO: 323778 - RNA, 19 nt, Homo sapiens
  misc_RNA (1)...(19): siRNA sense strand
ggaaaagacaucacaaaua

SEQ ID NO: 323779 - RNA, 19 nt, Homo sapiens
  misc_RNA (1)...(19): siRNA sense strand
caacucagaugcacaaagg

SEQ ID NO: 323780 - RNA, 19 nt, Homo sapiens
  misc_RNA (1)...(19): siRNA sense strand
ugaaugaucccaccuuaaa

SEQ ID NO: 323781 - RNA, 19 nt, Homo sapiens
  misc_RNA (1)...(19): siRNA sense strand
gagcagaagaugaugauga

SEQ ID NO: 323782 - RNA, 19 nt, Homo sapiens
  misc_RNA (1)...(19): siRNA sense strand
guucuugggugucaacauu

SEQ ID NO: 323783 - RNA, 19 nt, Homo sapiens
  misc_RNA (1)...(19): siRNA sense strand
gagagaaucaacugccaua

SEQ ID NO: 323784 - RNA, 19 nt, Homo sapiens
  misc_RNA (1)...(19): siRNA sense strand
gaugaaaccgauagaagaa

SEQ ID NO: 323785 - RNA, 19 nt, Homo sapiens
  misc_RNA (1)...(19): siRNA sense strand
ggaaaugaggaacaguaua

SEQ ID NO: 323786 - RNA, 19 nt, Homo sapiens
  misc_RNA (1)...(19): siRNA sense strand
aauaagcucuacucauuga

SEQ ID NO: 323787 - RNA, 19 nt, Homo sapiens
  misc_RNA (1)...(19): siRNA sense strand
cgaugugccuuggauauaa

SEQ ID NO: 323788 - RNA, 19 nt, Homo sapiens
  misc_RNA (1)...(19): siRNA sense strand
gauagaagaaggagcagaa

SEQ ID NO: 323789 - RNA, 19 nt, Homo sapiens
  misc_RNA (1)...(19): siRNA sense strand
aauguuaacucuaggaugu

SEQ ID NO: 323790 - RNA, 19 nt, Homo sapiens
  misc_RNA (1)...(19): siRNA sense strand
gauaaaaccucaguugaug

SEQ ID NO: 323791 - RNA, 19 nt, Homo sapiens
  misc_RNA (1)...(19): siRNA sense strand
aauaagaccacuugugaaa

SEQ ID NO: 323792 - RNA, 19 nt, Homo sapiens
  misc_RNA (1)...(19): siRNA sense strand
gaucaacucagaugcacaa

SEQ ID NO: 323793 - RNA, 19 nt, Homo sapiens
  misc_RNA (1)...(19): siRNA sense strand
ggaacucaguggcauguac

SEQ ID NO: 323794 - RNA, 19 nt, Homo sapiens
  misc_RNA (1)...(19): siRNA sense strand
uugcaucugucguaucuuu

SEQ ID NO: 323795 - RNA, 19 nt, Homo sapiens
  misc_RNA (1)...(19): siRNA sense strand
gaagaaggagcagaagaug

SEQ ID NO: 323796 - RNA, 19 nt, Homo sapiens
  misc_RNA (1)...(19): siRNA sense strand
agaaucaacugccauaggu

SEQ ID NO: 323797 - RNA, 19 nt, Homo sapiens
  misc_RNA (1)...(19): siRNA sense strand
ggauguacccuuuauaucg

SEQ ID NO: 323798 - RNA, 19 nt, Homo sapiens
  misc_RNA (1)...(19): siRNA sense strand
agaagaugaugaugacguu

SEQ ID NO: 323799 - RNA, 19 nt, Homo sapiens
  misc_RNA (1)...(19): siRNA sense strand
gauguacccuuuauaucgu

SEQ ID NO: 323800 - RNA, 19 nt, Homo sapiens
  misc_RNA (1)...(19): siRNA sense strand
gaugugccuuggauauaau

SEQ ID NO: 323801 - RNA, 19 nt, Homo sapiens
  misc_RNA (1)...(19): siRNA sense strand
caccugaguuagaaaguau

SEQ ID NO: 323802 - RNA, 19 nt, Homo sapiens
  misc_RNA (1)...(19): siRNA sense strand
gcgagccucugccaagaug

SEQ ID NO: 323803 - RNA, 19 nt, Homo sapiens
  misc_RNA (1)...(19): siRNA sense strand
guugaugaccgucugagua

SEQ ID NO: 323804 - RNA, 19 nt, Homo sapiens
  misc_RNA (1)...(19): siRNA sense strand
acucuaggauguacccuuu

SEQ ID NO: 323805 - RNA, 19 nt, Homo sapiens
  misc_RNA (1)...(19): siRNA sense strand
aaaugaaggucuccuaucg

SEQ ID NO: 323806 - RNA, 19 nt, Homo sapiens
  misc_RNA (1)...(19): siRNA sense strand
agagaccgguaaagauuga

SEQ ID NO: 323807 - RNA, 19 nt, Homo sapiens
  misc_RNA (1)...(19): siRNA sense strand
gaggacauuuucugcauaa

SEQ ID NO: 323808 - RNA, 19 nt, Homo sapiens
  misc_RNA (1)...(19): siRNA sense strand
acaccugaguuagaaagua

SEQ ID NO: 323809 - RNA, 19 nt, Homo sapiens
  misc_RNA (1)...(19): siRNA sense strand
uaccugugccuuccaauaa

SEQ ID NO: 323810 - RNA, 19 nt, Homo sapiens
  misc_RNA (1)...(19): siRNA sense strand
ucaccauuauugcagauga

SEQ ID NO: 323811 - RNA, 19 nt, Homo sapiens
  misc_RNA (1)...(19): siRNA sense strand
ucuaggauguacccuuuau

SEQ ID NO: 323812 - RNA, 19 nt, Homo sapiens
  misc_RNA (1)...(19): siRNA sense strand
gaaugaucccaccuuaaau

SEQ ID NO: 323813 - RNA, 19 nt, Homo sapiens
  misc_RNA (1)...(19): siRNA sense strand
cuuuauagauucuccugaa

SEQ ID NO: 323814 - RNA, 19 nt, Homo sapiens
  misc_RNA (1)...(19): siRNA sense strand
uaggauguacccuuuauau

SEQ ID NO: 323815 - RNA, 19 nt, Homo sapiens
  misc_RNA (1)...(19): siRNA sense strand
gaugaccgucugaguauuc

SEQ ID NO: 323816 - RNA, 19 nt, Homo sapiens
  misc_RNA (1)...(19): siRNA sense strand
acucuucaccuucauauga

SEQ ID NO: 323817 - RNA, 19 nt, Homo sapiens
  misc_RNA (1)...(19): siRNA sense strand
cggcaucuccaaauacauu

SEQ ID NO: 323818 - RNA, 19 nt, Homo sapiens
  misc_RNA (1)...(19): siRNA sense strand
agaaggagcagaagaugau

SEQ ID NO: 323819 - RNA, 19 nt, Homo sapiens
  misc_RNA (1)...(19): siRNA sense strand
gauuuguucagaagacuaa

SEQ ID NO: 323820 - RNA, 19 nt, Homo sapiens
  misc_RNA (1)...(19): siRNA sense strand
aagaagagaccgguaaaga

SEQ ID NO: 323821 - RNA, 19 nt, Homo sapiens
  misc_RNA (1)...(19): siRNA sense strand
caauaagaccacuugugaa

SEQ ID NO: 323822 - RNA, 19 nt, Homo sapiens
  misc_RNA (1)...(19): siRNA sense strand
auugaaugaucccaccuua

SEQ ID NO: 323823 - RNA, 19 nt, Homo sapiens
  misc_RNA (1)...(19): siRNA sense strand
aaucaacugccauagguuu

SEQ ID NO: 323824 - RNA, 19 nt, Homo sapiens
  misc_RNA (1)...(19): siRNA sense strand
caagaugaaaccgauagaa

SEQ ID NO: 323825 - RNA, 19 nt, Homo sapiens
  misc_RNA (1)...(19): siRNA sense strand
cagcgagccucugccaaga

SEQ ID NO: 323826 - RNA, 19 nt, Homo sapiens
  misc_RNA (1)...(19): siRNA sense strand
agaagagaccgguaaagau

SEQ ID NO: 323827 - RNA, 19 nt, Homo sapiens
  misc_RNA (1)...(19): siRNA sense strand
agaugaaaccgauagaaga

SEQ ID NO: 323828 - RNA, 19 nt, Homo sapiens
  misc_RNA (1)...(19): siRNA sense strand
gagaaucaacugccauagg

SEQ ID NO: 323829 - RNA, 19 nt, Homo sapiens
  misc_RNA (1)...(19): siRNA sense strand
agaagaaggagcagaagau

SEQ ID NO: 323830 - RNA, 19 nt, Homo sapiens
  misc_RNA (1)...(19): siRNA sense strand
gauauaaugaucuggaacu

SEQ ID NO: 323831 - RNA, 19 nt, Homo sapiens
  misc_RNA (1)...(19): siRNA sense strand
cuaccgaugugccuuggau

SEQ ID NO: 323832 - RNA, 19 nt, Homo sapiens
  misc_RNA (1)...(19): siRNA sense strand
gaagaugaugaugacguuu

SEQ ID NO: 323833 - RNA, 19 nt, Homo sapiens
  misc_RNA (1)...(19): siRNA sense strand
gguaaagauugaaaaggaa

SEQ ID NO: 323834 - RNA, 19 nt, Homo sapiens
  misc_RNA (1)...(19): siRNA sense strand
ccgugugccuccagauuug

SEQ ID NO: 323835 - RNA, 19 nt, Homo sapiens
  misc_RNA (1)...(19): siRNA sense strand
ucacaaauaagcucuacuc

SEQ ID NO: 323836 - RNA, 19 nt, Homo sapiens
  misc_RNA (1)...(19): siRNA sense strand
uacaagaagagaccgguaa

SEQ ID NO: 323837 - RNA, 19 nt, Homo sapiens
  misc_RNA (1)...(19): siRNA sense strand
cccugugccuuuauagauu

SEQ ID NO: 323838 - RNA, 19 nt, Homo sapiens
  misc_RNA (1)...(19): siRNA sense strand
ccagauuuguucagaagac

SEQ ID NO: 323839 - RNA, 19 nt, Homo sapiens
  misc_RNA (1)...(19): siRNA sense strand
ccgaugugccuuggauaua

SEQ ID NO: 323840 - RNA, 19 nt, Homo sapiens
  misc_RNA (1)...(19): siRNA sense strand
gagccucugccaagaugaa

SEQ ID NO: 323841 - RNA, 19 nt, Homo sapiens
  misc_RNA (1)...(19): siRNA sense strand
aaauaagcucuacucauug

SEQ ID NO: 323842 - RNA, 19 nt, Homo sapiens
  misc_RNA (1)...(19): siRNA sense strand
gcauguaccggcgauuguu

SEQ ID NO: 323843 - RNA, 19 nt, Homo sapiens
  misc_RNA (1)...(19): siRNA sense strand
uggauauaaugaucuggaa

SEQ ID NO: 323844 - RNA, 19 nt, Homo sapiens
  misc_RNA (1)...(19): siRNA sense strand
ccugugccuuccaauaaga

SEQ ID NO: 323845 - RNA, 19 nt, Homo sapiens
  misc_RNA (1)...(19): siRNA sense strand
cagcauguccucucuucau

SEQ ID NO: 323846 - RNA, 19 nt, Homo sapiens
  misc_RNA (1)...(19): siRNA sense strand
guauagccagcuccaguga

SEQ ID NO: 323847 - RNA, 19 nt, Homo sapiens
  misc_RNA (1)...(19): siRNA sense strand
aaugaucccaccuuaaaug

SEQ ID NO: 323848 - RNA, 19 nt, Homo sapiens
  misc_RNA (1)...(19): siRNA sense strand
gucaagagaaagauuaaca

SEQ ID NO: 323849 - RNA, 19 nt, Homo sapiens
  misc_RNA (1)...(19): siRNA sense strand
gaaucaacugccauagguu

SEQ ID NO: 323850 - RNA, 19 nt, Homo sapiens
  misc_RNA (1)...(19): siRNA sense strand
ggauaaaaccucaguugau

SEQ ID NO: 323851 - RNA, 19 nt, Homo sapiens
  misc_RNA (1)...(19): siRNA sense strand
acaagaagagaccgguaaa

SEQ ID NO: 323852 - RNA, 19 nt, Homo sapiens
  misc_RNA (1)...(19): siRNA sense strand
ggaauguuaacucuaggau

SEQ ID NO: 323853 - RNA, 19 nt, Homo sapiens
  misc_RNA (1)...(19): siRNA sense strand
cgacggcuugcaccaguuu

SEQ ID NO: 323854 - RNA, 19 nt, Homo sapiens
  misc_RNA (1)...(19): siRNA sense strand
acaaauaagcucuacucau

SEQ ID NO: 323855 - RNA, 19 nt, Homo sapiens
  misc_RNA (1)...(19): siRNA sense strand
gcaucugucguaucuuuua

SEQ ID NO: 323856 - RNA, 19 nt, Homo sapiens
  misc_RNA (1)...(19): siRNA sense strand
gaaaccgauagaagaagga

SEQ ID NO: 323857 - RNA, 19 nt, Homo sapiens
  misc_RNA (1)...(19): siRNA sense strand
caucacaaauaagcucuac

SEQ ID NO: 323858 - RNA, 19 nt, Homo sapiens
  misc_RNA (1)...(19): siRNA sense strand
aaagacaucacaaauaagc

SEQ ID NO: 323859 - RNA, 19 nt, Homo sapiens
  misc_RNA (1)...(19): siRNA sense strand
cagaugauaacugcagauu

SEQ ID NO: 323860 - RNA, 19 nt, Homo sapiens
  misc_RNA (1)...(19): siRNA sense strand
aaauuccaggucaccauua

SEQ ID NO: 323861 - RNA, 19 nt, Homo sapiens
  misc_RNA (1)...(19): siRNA sense strand
ugugaaaacuggagagaga

SEQ ID NO: 323862 - RNA, 19 nt, Homo sapiens
  misc_RNA (1)...(19): siRNA sense strand
ggucaccauuauugcagau

SEQ ID NO: 323863 - RNA, 19 nt, Homo sapiens
  misc_RNA (1)...(19): siRNA sense strand
uaagcucuacucauugaau

SEQ ID NO: 323864 - RNA, 19 nt, Homo sapiens
  misc_RNA (1)...(19): siRNA sense strand
ccugugccuuuauagauuc

SEQ ID NO: 323865 - RNA, 19 nt, Homo sapiens
  misc_RNA (1)...(19): siRNA sense strand
uagaagaaggagcagaaga

SEQ ID NO: 323866 - RNA, 19 nt, Homo sapiens
  misc_RNA (1)...(19): siRNA sense strand
caaauaagcucuacucauu

SEQ ID NO: 323867 - RNA, 19 nt, Homo sapiens
  misc_RNA (1)...(19): siRNA sense strand
gaaccggcaucuccaaaua

SEQ ID NO: 323868 - RNA, 19 nt, Homo sapiens
  misc_RNA (1)...(19): siRNA sense strand
gaauuuagaucaacucaga

SEQ ID NO: 323869 - RNA, 19 nt, Homo sapiens
  misc_RNA (1)...(19): siRNA sense strand
gcacacagaucuccauguu

SEQ ID NO: 323870 - RNA, 19 nt, Homo sapiens
  misc_RNA (1)...(19): siRNA sense strand
gaucccaccuuaaaugaua

SEQ ID NO: 323871 - RNA, 19 nt, Homo sapiens
  misc_RNA (1)...(19): siRNA sense strand
gaagagaccgguaaagauu

SEQ ID NO: 323872 - RNA, 19 nt, Homo sapiens
  misc_RNA (1)...(19): siRNA sense strand
gaugauaacugcagauuuu

SEQ ID NO: 323873 - RNA, 19 nt, Homo sapiens
  misc_RNA (1)...(19): siRNA sense strand
caacuacucuucaccuuca

SEQ ID NO: 323874 - RNA, 19 nt, Homo sapiens
  misc_RNA (1)...(19): siRNA sense strand
gaaaugaggaacaguauag

SEQ ID NO: 323875 - RNA, 19 nt, Homo sapiens
  misc_RNA (1)...(19): siRNA sense strand
uaacauacuuucuggaauc

SEQ ID NO: 323876 - RNA, 19 nt, Homo sapiens
  misc_RNA (1)...(19): siRNA sense strand
ccaauaagaccacuuguga

SEQ ID NO: 323877 - RNA, 19 nt, Homo sapiens
  misc_RNA (1)...(19): siRNA sense strand
gcaguuggguugguuauuc

SEQ ID NO: 323878 - RNA, 19 nt, Homo sapiens
  misc_RNA (1)...(19): siRNA sense strand
ggaaaagacaucacaaaua

SEQ ID NO: 323879 - RNA, 19 nt, Homo sapiens
  misc_RNA (1)...(19): siRNA sense strand
caacucagaugcacaaagg

SEQ ID NO: 323880 - RNA, 19 nt, Homo sapiens
  misc_RNA (1)...(19): siRNA sense strand
ugaaugaucccaccuuaaa

SEQ ID NO: 323881 - RNA, 19 nt, Homo sapiens
  misc_RNA (1)...(19): siRNA sense strand
gagcagaagaugaugauga

SEQ ID NO: 323882 - RNA, 19 nt, Homo sapiens
  misc_RNA (1)...(19): siRNA sense strand
guucuugggugucaacauu

SEQ ID NO: 323883 - RNA, 19 nt, Homo sapiens
  misc_RNA (1)...(19): siRNA sense strand
gagagaaucaacugccaua

SEQ ID NO: 323884 - RNA, 19 nt, Homo sapiens
  misc_RNA (1)...(19): siRNA sense strand
gaugaaaccgauagaagaa

SEQ ID NO: 323885 - RNA, 19 nt, Homo sapiens
  misc_RNA (1)...(19): siRNA sense strand
ggaaaugaggaacaguaua

SEQ ID NO: 323886 - RNA, 19 nt, Homo sapiens
  misc_RNA (1)...(19): siRNA sense strand
aauaagcucuacucauuga

SEQ ID NO: 323887 - RNA, 19 nt, Homo sapiens
  misc_RNA (1)...(19): siRNA sense strand
cgaugugccuuggauauaa

SEQ ID NO: 323888 - RNA, 19 nt, Homo sapiens
  misc_RNA (1)...(19): siRNA sense strand
gauagaagaaggagcagaa

SEQ ID NO: 323889 - RNA, 19 nt, Homo sapiens
  misc_RNA (1)...(19): siRNA sense strand
aauguuaacucuaggaugu

SEQ ID NO: 323890 - RNA, 19 nt, Homo sapiens
  misc_RNA (1)...(19): siRNA sense strand
gauaaaaccucaguugaug

SEQ ID NO: 323891 - RNA, 19 nt, Homo sapiens
  misc_RNA (1)...(19): siRNA sense strand
aauaagaccacuugugaaa

SEQ ID NO: 323892 - RNA, 19 nt, Homo sapiens
  misc_RNA (1)...(19): siRNA sense strand
gaucaacucagaugcacaa

SEQ ID NO: 323893 - RNA, 19 nt, Homo sapiens
  misc_RNA (1)...(19): siRNA sense strand
ggaacucaguggcauguac

SEQ ID NO: 323894 - RNA, 19 nt, Homo sapiens
  misc_RNA (1)...(19): siRNA sense strand
uugcaucugucguaucuuu

SEQ ID NO: 323895 - RNA, 19 nt, Homo sapiens
  misc_RNA (1)...(19): siRNA sense strand
gaagaaggagcagaagaug

SEQ ID NO: 323896 - RNA, 19 nt, Homo sapiens
  misc_RNA (1)...(19): siRNA sense strand
agaaucaacugccauaggu

SEQ ID NO: 323897 - RNA, 19 nt, Homo sapiens
  misc_RNA (1)...(19): siRNA sense strand
ggauguacccuuuauaucg

SEQ ID NO: 323898 - RNA, 19 nt, Homo sapiens
  misc_RNA (1)...(19): siRNA sense strand
agaagaugaugaugacguu

SEQ ID NO: 323899 - RNA, 19 nt, Homo sapiens
  misc_RNA (1)...(19): siRNA sense strand
gauguacccuuuauaucgu

SEQ ID NO: 323900 - RNA, 19 nt, Homo sapiens
  misc_RNA (1)...(19): siRNA sense strand
gaugugccuuggauauaau

SEQ ID NO: 323901 - RNA, 19 nt, Homo sapiens
  misc_RNA (1)...(19): siRNA sense strand
caccugaguuagaaaguau

SEQ ID NO: 323902 - RNA, 19 nt, Homo sapiens
  misc_RNA (1)...(19): siRNA sense strand
gcgagccucugccaagaug

SEQ ID NO: 323903 - RNA, 19 nt, Homo sapiens
  misc_RNA (1)...(19): siRNA sense strand
guugaugaccgucugagua

SEQ ID NO: 323904 - RNA, 19 nt, Homo sapiens
  misc_RNA (1)...(19): siRNA sense strand
acucuaggauguacccuuu

SEQ ID NO: 323905 - RNA, 19 nt, Homo sapiens
  misc_RNA (1)...(19): siRNA sense strand
aaaugaaggucuccuaucg

SEQ ID NO: 323906 - RNA, 19 nt, Homo sapiens
  misc_RNA (1)...(19): siRNA sense strand
agagaccgguaaagauuga

SEQ ID NO: 323907 - RNA, 19 nt, Homo sapiens
  misc_RNA (1)...(19): siRNA sense strand
gaggacauuuucugcauaa

SEQ ID NO: 323908 - RNA, 19 nt, Homo sapiens
  misc_RNA (1)...(19): siRNA sense strand
acaccugaguuagaaagua

SEQ ID NO: 323909 - RNA, 19 nt, Homo sapiens
  misc_RNA (1)...(19): siRNA sense strand
uaccugugccuuccaauaa

SEQ ID NO: 323910 - RNA, 19 nt, Homo sapiens
  misc_RNA (1)...(19): siRNA sense strand
ucaccauuauugcagauga

SEQ ID NO: 323911 - RNA, 19 nt, Homo sapiens
  misc_RNA (1)...(19): siRNA sense strand
ucuaggauguacccuuuau

SEQ ID NO: 323912 - RNA, 19 nt, Homo sapiens
  misc_RNA (1)...(19): siRNA sense strand
gaaugaucccaccuuaaau

SEQ ID NO: 323913 - RNA, 19 nt, Homo sapiens
  misc_RNA (1)...(19): siRNA sense strand
cuuuauagauucuccugaa

SEQ ID NO: 323914 - RNA, 19 nt, Homo sapiens
  misc_RNA (1)...(19): siRNA sense strand
uaggauguacccuuuauau

SEQ ID NO: 323915 - RNA, 19 nt, Homo sapiens
  misc_RNA (1)...(19): siRNA sense strand
gaugaccgucugaguauuc

SEQ ID NO: 323916 - RNA, 19 nt, Homo sapiens
  misc_RNA (1)...(19): siRNA sense strand
acucuucaccuucauauga

SEQ ID NO: 323917 - RNA, 19 nt, Homo sapiens
  misc_RNA (1)...(19): siRNA sense strand
cggcaucuccaaauacauu

SEQ ID NO: 323918 - RNA, 19 nt, Homo sapiens
  misc_RNA (1)...(19): siRNA sense strand
agaaggagcagaagaugau

SEQ ID NO: 323919 - RNA, 19 nt, Homo sapiens
  misc_RNA (1)...(19): siRNA sense strand
gauuuguucagaagacuaa

SEQ ID NO: 323920 - RNA, 19 nt, Homo sapiens
  misc_RNA (1)...(19): siRNA sense strand
aagaagagaccgguaaaga

SEQ ID NO: 323921 - RNA, 19 nt, Homo sapiens
  misc_RNA (1)...(19): siRNA sense strand
caauaagaccacuugugaa

SEQ ID NO: 323922 - RNA, 19 nt, Homo sapiens
  misc_RNA (1)...(19): siRNA sense strand
auugaaugaucccaccuua

SEQ ID NO: 323923 - RNA, 19 nt, Homo sapiens
  misc_RNA (1)...(19): siRNA sense strand
aaucaacugccauagguuu

SEQ ID NO: 323924 - RNA, 19 nt, Homo sapiens
  misc_RNA (1)...(19): siRNA sense strand
caagaugaaaccgauagaa

SEQ ID NO: 323925 - RNA, 19 nt, Homo sapiens
  misc_RNA (1)...(19): siRNA sense strand
cagcgagccucugccaaga

SEQ ID NO: 323926 - RNA, 19 nt, Homo sapiens
  misc_RNA (1)...(19): siRNA sense strand
agaagagaccgguaaagau

SEQ ID NO: 323927 - RNA, 19 nt, Homo sapiens
  misc_RNA (1)...(19): siRNA sense strand
agaugaaaccgauagaaga

SEQ ID NO: 323928 - RNA, 19 nt, Homo sapiens
  misc_RNA (1)...(19): siRNA sense strand
gagaaucaacugccauagg

SEQ ID NO: 323929 - RNA, 19 nt, Homo sapiens
  misc_RNA (1)...(19): siRNA sense strand
agaagaaggagcagaagau

SEQ ID NO: 323930 - RNA, 19 nt, Homo sapiens
  misc_RNA (1)...(19): siRNA sense strand
gauauaaugaucuggaacu

SEQ ID NO: 323931 - RNA, 19 nt, Homo sapiens
  misc_RNA (1)...(19): siRNA sense strand
cuaccgaugugccuuggau

SEQ ID NO: 323932 - RNA, 19 nt, Homo sapiens
  misc_RNA (1)...(19): siRNA sense strand
gaagaugaugaugacguuu

SEQ ID NO: 323933 - RNA, 19 nt, Homo sapiens
  misc_RNA (1)...(19): siRNA sense strand
gguaaagauugaaaaggaa

SEQ ID NO: 323934 - RNA, 19 nt, Homo sapiens
  misc_RNA (1)...(19): siRNA sense strand
ccgugugccuccagauuug

SEQ ID NO: 323935 - RNA, 19 nt, Homo sapiens
  misc_RNA (1)...(19): siRNA sense strand
ucacaaauaagcucuacuc

SEQ ID NO: 323936 - RNA, 19 nt, Homo sapiens
  misc_RNA (1)...(19): siRNA sense strand
uacaagaagagaccgguaa

SEQ ID NO: 323937 - RNA, 19 nt, Homo sapiens
  misc_RNA (1)...(19): siRNA sense strand
cccugugccuuuauagauu

SEQ ID NO: 323938 - RNA, 19 nt, Homo sapiens
  misc_RNA (1)...(19): siRNA sense strand
ccagauuuguucagaagac

SEQ ID NO: 323939 - RNA, 19 nt, Homo sapiens
  misc_RNA (1)...(19): siRNA sense strand
ccgaugugccuuggauaua

SEQ ID NO: 323940 - RNA, 19 nt, Homo sapiens
  misc_RNA (1)...(19): siRNA sense strand
gagccucugccaagaugaa

SEQ ID NO: 323941 - RNA, 19 nt, Homo sapiens
  misc_RNA (1)...(19): siRNA sense strand
aaauaagcucuacucauug

SEQ ID NO: 323942 - RNA, 19 nt, Homo sapiens
  misc_RNA (1)...(19): siRNA sense strand
gcauguaccggcgauuguu

SEQ ID NO: 323943 - RNA, 19 nt, Homo sapiens
  misc_RNA (1)...(19): siRNA sense strand
uggauauaaugaucuggaa

SEQ ID NO: 323944 - RNA, 19 nt, Homo sapiens
  misc_RNA (1)...(19): siRNA sense strand
ccugugccuuccaauaaga

SEQ ID NO: 323945 - RNA, 19 nt, Homo sapiens
  misc_RNA (1)...(19): siRNA sense strand
cagcauguccucucuucau

SEQ ID NO: 323946 - RNA, 19 nt, Homo sapiens
  misc_RNA (1)...(19): siRNA sense strand
guauagccagcuccaguga

SEQ ID NO: 323947 - RNA, 19 nt, Homo sapiens
  misc_RNA (1)...(19): siRNA sense strand
aaugaucccaccuuaaaug

SEQ ID NO: 323948 - RNA, 19 nt, Homo sapiens
  misc_RNA (1)...(19): siRNA sense strand
gucaagagaaagauuaaca

SEQ ID NO: 323949 - RNA, 19 nt, Homo sapiens
  misc_RNA (1)...(19): siRNA sense strand
gaaucaacugccauagguu

SEQ ID NO: 323950 - RNA, 19 nt, Homo sapiens
  misc_RNA (1)...(19): siRNA sense strand
ggauaaaaccucaguugau

SEQ ID NO: 323951 - RNA, 19 nt, Homo sapiens
  misc_RNA (1)...(19): siRNA sense strand
acaagaagagaccgguaaa

SEQ ID NO: 323952 - RNA, 19 nt, Homo sapiens
  misc_RNA (1)...(19): siRNA sense strand
ggaauguuaacucuaggau

SEQ ID NO: 323953 - RNA, 19 nt, Homo sapiens
  misc_RNA (1)...(19): siRNA sense strand
cgacggcuugcaccaguuu

SEQ ID NO: 323954 - RNA, 19 nt, Homo sapiens
  misc_RNA (1)...(19): siRNA sense strand
acaaauaagcucuacucau

SEQ ID NO: 323955 - RNA, 19 nt, Homo sapiens
  misc_RNA (1)...(19): siRNA sense strand
gcaucugucguaucuuuua

SEQ ID NO: 323956 - RNA, 19 nt, Homo sapiens
  misc_RNA (1)...(19): siRNA sense strand
gaaaccgauagaagaagga

SEQ ID NO: 323957 - RNA, 19 nt, Homo sapiens
  misc_RNA (1)...(19): siRNA sense strand
caucacaaauaagcucuac

SEQ ID NO: 323958 - RNA, 19 nt, Homo sapiens
  misc_RNA (1)...(19): siRNA sense strand
aaagacaucacaaauaagc

SEQ ID NO: 323959 - RNA, 19 nt, Homo sapiens
  misc_RNA (1)...(19): siRNA sense strand
cagaugauaacugcagauu

SEQ ID NO: 323960 - RNA, 19 nt, Homo sapiens
  misc_RNA (1)...(19): siRNA sense strand
aaauuccaggucaccauua

SEQ ID NO: 323961 - RNA, 19 nt, Homo sapiens
  misc_RNA (1)...(19): siRNA sense strand
ugugaaaacuggagagaga

SEQ ID NO: 323962 - RNA, 19 nt, Homo sapiens
  misc_RNA (1)...(19): siRNA sense strand
ggucaccauuauugcagau

SEQ ID NO: 323963 - RNA, 19 nt, Homo sapiens
  misc_RNA (1)...(19): siRNA sense strand
uaagcucuacucauugaau

SEQ ID NO: 323964 - RNA, 19 nt, Homo sapiens
  misc_RNA (1)...(19): siRNA sense strand
ccugugccuuuauagauuc

SEQ ID NO: 323965 - RNA, 19 nt, Homo sapiens
  misc_RNA (1)...(19): siRNA sense strand
uagaagaaggagcagaaga

SEQ ID NO: 323966 - RNA, 19 nt, Homo sapiens
  misc_RNA (1)...(19): siRNA sense strand
ggacagagcuucaagaaaa

SEQ ID NO: 323967 - RNA, 19 nt, Homo sapiens
  misc_RNA (1)...(19): siRNA sense strand
gcaucaagcugaacaacaa

SEQ ID NO: 323968 - RNA, 19 nt, Homo sapiens
  misc_RNA (1)...(19): siRNA sense strand
ccaaggauaucauaaacaa

SEQ ID NO: 323969 - RNA, 19 nt, Homo sapiens
  misc_RNA (1)...(19): siRNA sense strand
acacagagaugcugacuuc

SEQ ID NO: 323970 - RNA, 19 nt, Homo sapiens
  misc_RNA (1)...(19): siRNA sense strand
gaacaguggcugcagauga

SEQ ID NO: 323971 - RNA, 19 nt, Homo sapiens
  misc_RNA (1)...(19): siRNA sense strand
aaacaacccucuauucauc

SEQ ID NO: 323972 - RNA, 19 nt, Homo sapiens
  misc_RNA (1)...(19): siRNA sense strand
ggagugcccugcuggagaa

SEQ ID NO: 323973 - RNA, 19 nt, Homo sapiens
  misc_RNA (1)...(19): siRNA sense strand
ggaauuggaugaagucaac

SEQ ID NO: 323974 - RNA, 19 nt, Homo sapiens
  misc_RNA (1)...(19): siRNA sense strand
ugaucaaccucauggauaa

SEQ ID NO: 323975 - RNA, 19 nt, Homo sapiens
  misc_RNA (1)...(19): siRNA sense strand
cgacaacgcccagaacuuu

SEQ ID NO: 323976 - RNA, 19 nt, Homo sapiens
  misc_RNA (1)...(19): siRNA sense strand
gagaugcgccugguuauug

SEQ ID NO: 323977 - RNA, 19 nt, Homo sapiens
  misc_RNA (1)...(19): siRNA sense strand
gcgagcagccugucuaaga

SEQ ID NO: 323978 - RNA, 19 nt, Homo sapiens
  misc_RNA (1)...(19): siRNA sense strand
ugacuggccuucaggaugu

SEQ ID NO: 323979 - RNA, 19 nt, Homo sapiens
  misc_RNA (1)...(19): siRNA sense strand
ucagagaucuucaccaacu

SEQ ID NO: 323980 - RNA, 19 nt, Homo sapiens
  misc_RNA (1)...(19): siRNA sense strand
cgagcagccugucuaagaa

SEQ ID NO: 323981 - RNA, 19 nt, Homo sapiens
  misc_RNA (1)...(19): siRNA sense strand
ggacuuccuacauuuguuu

SEQ ID NO: 323982 - RNA, 19 nt, Homo sapiens
  misc_RNA (1)...(19): siRNA sense strand
gaggacagagcuucaagaa

SEQ ID NO: 323983 - RNA, 19 nt, Homo sapiens
  misc_RNA (1)...(19): siRNA sense strand
caaaagaguuucagaacau

SEQ ID NO: 323984 - RNA, 19 nt, Homo sapiens
  misc_RNA (1)...(19): siRNA sense strand
uaugagaugcgccugguua

SEQ ID NO: 323985 - RNA, 19 nt, Homo sapiens
  misc_RNA (1)...(19): siRNA sense strand
cauaaacaacccucuauuc

SEQ ID NO: 323986 - RNA, 19 nt, Homo sapiens
  misc_RNA (1)...(19): siRNA sense strand
gggaugacccagaggauga

SEQ ID NO: 323987 - RNA, 19 nt, Homo sapiens
  misc_RNA (1)...(19): siRNA sense strand
gagcccagcugcagaccau

SEQ ID NO: 323988 - RNA, 19 nt, Homo sapiens
  misc_RNA (1)...(19): siRNA sense strand
ugaacguggugguagauga

SEQ ID NO: 323989 - RNA, 19 nt, Homo sapiens
  misc_RNA (1)...(19): siRNA sense strand
gcaccuugaacuccuauga

SEQ ID NO: 323990 - RNA, 19 nt, Homo sapiens
  misc_RNA (1)...(19): siRNA sense strand
ggaauggagcuuggaguga

SEQ ID NO: 323991 - RNA, 19 nt, Homo sapiens
  misc_RNA (1)...(19): siRNA sense strand
gcccaaggauaucauaaac

SEQ ID NO: 323992 - RNA, 19 nt, Homo sapiens
  misc_RNA (1)...(19): siRNA sense strand
ugagaaagcaggcaucaag

SEQ ID NO: 323993 - RNA, 19 nt, Homo sapiens
  misc_RNA (1)...(19): siRNA sense strand
gagcagccugucuaagaaa

SEQ ID NO: 323994 - RNA, 19 nt, Homo sapiens
  misc_RNA (1)...(19): siRNA sense strand
gcgccugguuauugagaaa

SEQ ID NO: 323995 - RNA, 19 nt, Homo sapiens
  misc_RNA (1)...(19): siRNA sense strand
aagauuuccugaacaacuu

SEQ ID NO: 323996 - RNA, 19 nt, Homo sapiens
  misc_RNA (1)...(19): siRNA sense strand
cuaccaagauuuccugaac

SEQ ID NO: 323997 - RNA, 19 nt, Homo sapiens
  misc_RNA (1)...(19): siRNA sense strand
uaaacaacccucuauucau

SEQ ID NO: 323998 - RNA, 19 nt, Homo sapiens
  misc_RNA (1)...(19): siRNA sense strand
auaaacaacccucuauuca

SEQ ID NO: 323999 - RNA, 19 nt, Homo sapiens
  misc_RNA (1)...(19): siRNA sense strand
ccaagaauacuggccauau

SEQ ID NO: 324000 - RNA, 19 nt, Homo sapiens
  misc_RNA (1)...(19): siRNA sense strand
ucauagacuuugacagcuu

SEQ ID NO: 324001 - RNA, 19 nt, Homo sapiens
  misc_RNA (1)...(19): siRNA sense strand
ccacaaagaaugacaagcu

SEQ ID NO: 324002 - RNA, 19 nt, Homo sapiens
  misc_RNA (1)...(19): siRNA sense strand
gagcaacuccaagaggaaa

SEQ ID NO: 324003 - RNA, 19 nt, Homo sapiens
  misc_RNA (1)...(19): siRNA sense strand
ggacaucuucagagagugu

SEQ ID NO: 324004 - RNA, 19 nt, Homo sapiens
  misc_RNA (1)...(19): siRNA sense strand
gcuugccgcugcaugauca

SEQ ID NO: 324005 - RNA, 19 nt, Homo sapiens
  misc_RNA (1)...(19): siRNA sense strand
gaugggauuucuccaacag

SEQ ID NO: 324006 - RNA, 19 nt, Homo sapiens
  misc_RNA (1)...(19): siRNA sense strand
ccagguaugcagaugauga

SEQ ID NO: 324007 - RNA, 19 nt, Homo sapiens
  misc_RNA (1)...(19): siRNA sense strand
ggccagguaugcagaugau

SEQ ID NO: 324008 - RNA, 19 nt, Homo sapiens
  misc_RNA (1)...(19): siRNA sense strand
gcaaggagauaggggugua

SEQ ID NO: 324009 - RNA, 19 nt, Homo sapiens
  misc_RNA (1)...(19): siRNA sense strand
ggaugggauuucuccaaca

SEQ ID NO: 324010 - RNA, 19 nt, Homo sapiens
  misc_RNA (1)...(19): siRNA sense strand
gaaugacaagcugguguuu

SEQ ID NO: 324011 - RNA, 19 nt, Homo sapiens
  misc_RNA (1)...(19): siRNA sense strand
uuucagauuuggcaguuug

SEQ ID NO: 324012 - RNA, 19 nt, Homo sapiens
  misc_RNA (1)...(19): siRNA sense strand
aagcaggcaucaagcugaa

SEQ ID NO: 324013 - RNA, 19 nt, Homo sapiens
  misc_RNA (1)...(19): siRNA sense strand
gcagaccauuggcuuuguc

SEQ ID NO: 324014 - RNA, 19 nt, Homo sapiens
  misc_RNA (1)...(19): siRNA sense strand
gggcacgcuuacucuguga

SEQ ID NO: 324015 - RNA, 19 nt, Homo sapiens
  misc_RNA (1)...(19): siRNA sense strand
uaucauaaacaacccucua

SEQ ID NO: 324016 - RNA, 19 nt, Homo sapiens
  misc_RNA (1)...(19): siRNA sense strand
uggaugaagucaacuaugc

SEQ ID NO: 324017 - RNA, 19 nt, Homo sapiens
  misc_RNA (1)...(19): siRNA sense strand
cauucaggauguccacuug

SEQ ID NO: 324018 - RNA, 19 nt, Homo sapiens
  misc_RNA (1)...(19): siRNA sense strand
gggugaacguggugguaga

SEQ ID NO: 324019 - RNA, 19 nt, Homo sapiens
  misc_RNA (1)...(19): siRNA sense strand
ggcccaaggauaucauaaa

SEQ ID NO: 324020 - RNA, 19 nt, Homo sapiens
  misc_RNA (1)...(19): siRNA sense strand
gaccugaucauagacuuug

SEQ ID NO: 324021 - RNA, 19 nt, Homo sapiens
  misc_RNA (1)...(19): siRNA sense strand
agaugcgccugguuauuga

SEQ ID NO: 324022 - RNA, 19 nt, Homo sapiens
  misc_RNA (1)...(19): siRNA sense strand
ggauguccuaccaagauuu

SEQ ID NO: 324023 - RNA, 19 nt, Homo sapiens
  misc_RNA (1)...(19): siRNA sense strand
caugggaauuggaugaagu

SEQ ID NO: 324024 - RNA, 19 nt, Homo sapiens
  misc_RNA (1)...(19): siRNA sense strand
ccaaaagaguuucagaaca

SEQ ID NO: 324025 - RNA, 19 nt, Homo sapiens
  misc_RNA (1)...(19): siRNA sense strand
caaccgaacgcagugaguu

SEQ ID NO: 324026 - RNA, 19 nt, Homo sapiens
  misc_RNA (1)...(19): siRNA sense strand
caagcugaacaacaaggua

SEQ ID NO: 324027 - RNA, 19 nt, Homo sapiens
  misc_RNA (1)...(19): siRNA sense strand
caagggcuuuggccuggau

SEQ ID NO: 324028 - RNA, 19 nt, Homo sapiens
  misc_RNA (1)...(19): siRNA sense strand
caagauuuccugaacaacu

SEQ ID NO: 324029 - RNA, 19 nt, Homo sapiens
  misc_RNA (1)...(19): siRNA sense strand
ggagggccuugaggacuuc

SEQ ID NO: 324030 - RNA, 19 nt, Homo sapiens
  misc_RNA (1)...(19): siRNA sense strand
gaccggcugcccacaaaga

SEQ ID NO: 324031 - RNA, 19 nt, Homo sapiens
  misc_RNA (1)...(19): siRNA sense strand
gcuguuuccugaggcuaaa

SEQ ID NO: 324032 - RNA, 19 nt, Homo sapiens
  misc_RNA (1)...(19): siRNA sense strand
aagcugaacaacaagguaa

SEQ ID NO: 324033 - RNA, 19 nt, Homo sapiens
  misc_RNA (1)...(19): siRNA sense strand
ucaaccucauggauaaaga

SEQ ID NO: 324034 - RNA, 19 nt, Homo sapiens
  misc_RNA (1)...(19): siRNA sense strand
ggagagggcaaggagauag

SEQ ID NO: 324035 - RNA, 19 nt, Homo sapiens
  misc_RNA (1)...(19): siRNA sense strand
ugacauggaccaggacuuc

SEQ ID NO: 324036 - RNA, 19 nt, Homo sapiens
  misc_RNA (1)...(19): siRNA sense strand
ggaaccacccuggcacguu

SEQ ID NO: 324037 - RNA, 19 nt, Homo sapiens
  misc_RNA (1)...(19): siRNA sense strand
accaagauuuccugaacaa

SEQ ID NO: 324038 - RNA, 19 nt, Homo sapiens
  misc_RNA (1)...(19): siRNA sense strand
uggagggccuugaggacuu

SEQ ID NO: 324039 - RNA, 19 nt, Homo sapiens
  misc_RNA (1)...(19): siRNA sense strand
ucauaaacaacccucuauu

SEQ ID NO: 324040 - RNA, 19 nt, Homo sapiens
  misc_RNA (1)...(19): siRNA sense strand
gaucaaccucauggauaaa

SEQ ID NO: 324041 - RNA, 19 nt, Homo sapiens
  misc_RNA (1)...(19): siRNA sense strand
caggauguccacuugaaga

SEQ ID NO: 324042 - RNA, 19 nt, Homo sapiens
  misc_RNA (1)...(19): siRNA sense strand
gcccagaacuuugguaacc

SEQ ID NO: 324043 - RNA, 19 nt, Homo sapiens
  misc_RNA (1)...(19): siRNA sense strand
uggauguccuaccaagauu

SEQ ID NO: 324044 - RNA, 19 nt, Homo sapiens
  misc_RNA (1)...(19): siRNA sense strand
gccaucggcucccuuacca

SEQ ID NO: 324045 - RNA, 19 nt, Homo sapiens
  misc_RNA (1)...(19): siRNA sense strand
caaaauggaaacacugauu

SEQ ID NO: 324046 - RNA, 19 nt, Homo sapiens
  misc_RNA (1)...(19): siRNA sense strand
ucacauucuuucuaaccau

SEQ ID NO: 324047 - RNA, 19 nt, Homo sapiens
  misc_RNA (1)...(19): siRNA sense strand
gcugccaucggcucccuua

SEQ ID NO: 324048 - RNA, 19 nt, Homo sapiens
  misc_RNA (1)...(19): siRNA sense strand
gacaacgcccagaacuuug

SEQ ID NO: 324049 - RNA, 19 nt, Homo sapiens
  misc_RNA (1)...(19): siRNA sense strand
auuauucccuccaccuuug

SEQ ID NO: 324050 - RNA, 19 nt, Homo sapiens
  misc_RNA (1)...(19): siRNA sense strand
ugacgcagagggcaauguu

SEQ ID NO: 324051 - RNA, 19 nt, Homo sapiens
  misc_RNA (1)...(19): siRNA sense strand
gaugaccggcugcccacaa

SEQ ID NO: 324052 - RNA, 19 nt, Homo sapiens
  misc_RNA (1)...(19): siRNA sense strand
gcacgacaacgcccagaac

SEQ ID NO: 324053 - RNA, 19 nt, Homo sapiens
  misc_RNA (1)...(19): siRNA sense strand
cauuauucccuccaccuuu

SEQ ID NO: 324054 - RNA, 19 nt, Homo sapiens
  misc_RNA (1)...(19): siRNA sense strand
ccauuggcuuuguccucua

SEQ ID NO: 324055 - RNA, 19 nt, Homo sapiens
  misc_RNA (1)...(19): siRNA sense strand
caaccucacgccugauaca

SEQ ID NO: 324056 - RNA, 19 nt, Homo sapiens
  misc_RNA (1)...(19): siRNA sense strand
uaccaagauuuccugaaca

SEQ ID NO: 324057 - RNA, 19 nt, Homo sapiens
  misc_RNA (1)...(19): siRNA sense strand
gauguccuaccaagauuuc

SEQ ID NO: 324058 - RNA, 19 nt, Homo sapiens
  misc_RNA (1)...(19): siRNA sense strand
auccaugacugacaagaug

SEQ ID NO: 324059 - RNA, 19 nt, Homo sapiens
  misc_RNA (1)...(19): siRNA sense strand
caagcugaguggguccuau

SEQ ID NO: 324060 - RNA, 19 nt, Homo sapiens
  misc_RNA (1)...(19): siRNA sense strand
gaacguggugguagaugac

SEQ ID NO: 324061 - RNA, 19 nt, Homo sapiens
  misc_RNA (1)...(19): siRNA sense strand
gcaggcaucaagcugaaca

SEQ ID NO: 324062 - RNA, 19 nt, Homo sapiens
  misc_RNA (1)...(19): siRNA sense strand
cagcgagucaugggaauug

SEQ ID NO: 324063 - RNA, 19 nt, Homo sapiens
  misc_RNA (1)...(19): siRNA sense strand
gcuggcaucuuccauuuuc

SEQ ID NO: 324064 - RNA, 19 nt, Homo sapiens
  misc_RNA (1)...(19): siRNA sense strand
gagggcacgcuuacucugu

SEQ ID NO: 324065 - RNA, 19 nt, Homo sapiens
  misc_RNA (1)...(19): siRNA sense strand
gcuaaagaccauguucaca

SEQ ID NO: 324066 - RNA, 19 nt, Homo sapiens
  misc_RNA (1)...(19): siRNA sense strand
gaaaggaggucuuccagua

SEQ ID NO: 324067 - RNA, 19 nt, Homo sapiens
  misc_RNA (1)...(19): siRNA sense strand
ggaacguuauggccaaaua

SEQ ID NO: 324068 - RNA, 19 nt, Homo sapiens
  misc_RNA (1)...(19): siRNA sense strand
gaaccaccuucaccaguuu

SEQ ID NO: 324069 - RNA, 19 nt, Homo sapiens
  misc_RNA (1)...(19): siRNA sense strand
gagcacaccgccaauauuu

SEQ ID NO: 324070 - RNA, 19 nt, Homo sapiens
  misc_RNA (1)...(19): siRNA sense strand
ggacaugcauuugaaacaa

SEQ ID NO: 324071 - RNA, 19 nt, Homo sapiens
  misc_RNA (1)...(19): siRNA sense strand
ugaaagggaugcaagagaa

SEQ ID NO: 324072 - RNA, 19 nt, Homo sapiens
  misc_RNA (1)...(19): siRNA sense strand
ggauaaaugugauacgaau

SEQ ID NO: 324073 - RNA, 19 nt, Homo sapiens
  misc_RNA (1)...(19): siRNA sense strand
uagaggagcuggagaaagu

SEQ ID NO: 324074 - RNA, 19 nt, Homo sapiens
  misc_RNA (1)...(19): siRNA sense strand
caaagcgucugcaggcaaa

SEQ ID NO: 324075 - RNA, 19 nt, Homo sapiens
  misc_RNA (1)...(19): siRNA sense strand
uggagacgcuggacaauga

SEQ ID NO: 324076 - RNA, 19 nt, Homo sapiens
  misc_RNA (1)...(19): siRNA sense strand
ccgaaugucucccgugaaa

SEQ ID NO: 324077 - RNA, 19 nt, Homo sapiens
  misc_RNA (1)...(19): siRNA sense strand
caagagcccuccgaguaaa

SEQ ID NO: 324078 - RNA, 19 nt, Homo sapiens
  misc_RNA (1)...(19): siRNA sense strand
gcacaccgccaauauuuca

SEQ ID NO: 324079 - RNA, 19 nt, Homo sapiens
  misc_RNA (1)...(19): siRNA sense strand
ggauguguaugucagagaa

SEQ ID NO: 324080 - RNA, 19 nt, Homo sapiens
  misc_RNA (1)...(19): siRNA sense strand
cgaaccaccuucaccaguu

SEQ ID NO: 324081 - RNA, 19 nt, Homo sapiens
  misc_RNA (1)...(19): siRNA sense strand
gacacuuccuccuguauga

SEQ ID NO: 324082 - RNA, 19 nt, Homo sapiens
  misc_RNA (1)...(19): siRNA sense strand
ccaaauacaacaagcgaaa

SEQ ID NO: 324083 - RNA, 19 nt, Homo sapiens
  misc_RNA (1)...(19): siRNA sense strand
ucaagagcccuccgaguaa

SEQ ID NO: 324084 - RNA, 19 nt, Homo sapiens
  misc_RNA (1)...(19): siRNA sense strand
ccacagauucagaacaauu

SEQ ID NO: 324085 - RNA, 19 nt, Homo sapiens
  misc_RNA (1)...(19): siRNA sense strand
gagcuauggacaacuguaa

SEQ ID NO: 324086 - RNA, 19 nt, Homo sapiens
  misc_RNA (1)...(19): siRNA sense strand
ggagcacaccgccaauauu

SEQ ID NO: 324087 - RNA, 19 nt, Homo sapiens
  misc_RNA (1)...(19): siRNA sense strand
gcgagaaguuugcccucaa

SEQ ID NO: 324088 - RNA, 19 nt, Homo sapiens
  misc_RNA (1)...(19): siRNA sense strand
acgaauguauccagcagua

SEQ ID NO: 324089 - RNA, 19 nt, Homo sapiens
  misc_RNA (1)...(19): siRNA sense strand
ggacagcagcgugaacuau

SEQ ID NO: 324090 - RNA, 19 nt, Homo sapiens
  misc_RNA (1)...(19): siRNA sense strand
ccuccuguaugacaccuua

SEQ ID NO: 324091 - RNA, 19 nt, Homo sapiens
  misc_RNA (1)...(19): siRNA sense strand
gaagggagagcuggaugaa

SEQ ID NO: 324092 - RNA, 19 nt, Homo sapiens
  misc_RNA (1)...(19): siRNA sense strand
gaacuaugggaucacuaaa

SEQ ID NO: 324093 - RNA, 19 nt, Homo sapiens
  misc_RNA (1)...(19): siRNA sense strand
ugggaucacuaaaguagaa

SEQ ID NO: 324094 - RNA, 19 nt, Homo sapiens
  misc_RNA (1)...(19): siRNA sense strand
ugacagcuacccacagauu

SEQ ID NO: 324095 - RNA, 19 nt, Homo sapiens
  misc_RNA (1)...(19): siRNA sense strand
ugaacuaugggaucacuaa

SEQ ID NO: 324096 - RNA, 19 nt, Homo sapiens
  misc_RNA (1)...(19): siRNA sense strand
uaucgcaguucuucgaaug

SEQ ID NO: 324097 - RNA, 19 nt, Homo sapiens
  misc_RNA (1)...(19): siRNA sense strand
guucugugguuacuucaug

SEQ ID NO: 324098 - RNA, 19 nt, Homo sapiens
  misc_RNA (1)...(19): siRNA sense strand
uucacugacucucuucuua

SEQ ID NO: 324099 - RNA, 19 nt, Homo sapiens
  misc_RNA (1)...(19): siRNA sense strand
cucaagagcccuccgagua

SEQ ID NO: 324100 - RNA, 19 nt, Homo sapiens
  misc_RNA (1)...(19): siRNA sense strand
gaaugucucccgugaaagg

SEQ ID NO: 324101 - RNA, 19 nt, Homo sapiens
  misc_RNA (1)...(19): siRNA sense strand
gaauguauccagcaguaag

SEQ ID NO: 324102 - RNA, 19 nt, Homo sapiens
  misc_RNA (1)...(19): siRNA sense strand
guaugacaccuuauucuca

SEQ ID NO: 324103 - RNA, 19 nt, Homo sapiens
  misc_RNA (1)...(19): siRNA sense strand
ggaaaugcaaguggugguu

SEQ ID NO: 324104 - RNA, 19 nt, Homo sapiens
  misc_RNA (1)...(19): siRNA sense strand
caaaccaccagaaccaguu

SEQ ID NO: 324105 - RNA, 19 nt, Homo sapiens
  misc_RNA (1)...(19): siRNA sense strand
acuaugggaucacuaaagu

SEQ ID NO: 324106 - RNA, 19 nt, Homo sapiens
  misc_RNA (1)...(19): siRNA sense strand
acccacagauucagaacaa

SEQ ID NO: 324107 - RNA, 19 nt, Homo sapiens
  misc_RNA (1)...(19): siRNA sense strand
gugguuacuucaugcaugu

SEQ ID NO: 324108 - RNA, 19 nt, Homo sapiens
  misc_RNA (1)...(19): siRNA sense strand
cacagauucagaacaauuu

SEQ ID NO: 324109 - RNA, 19 nt, Homo sapiens
  misc_RNA (1)...(19): siRNA sense strand
gggauaaaugugauacgaa

SEQ ID NO: 324110 - RNA, 19 nt, Homo sapiens
  misc_RNA (1)...(19): siRNA sense strand
gacagcagcgugaacuaug

SEQ ID NO: 324111 - RNA, 19 nt, Homo sapiens
  misc_RNA (1)...(19): siRNA sense strand
gguuacuucaugcauguua

SEQ ID NO: 324112 - RNA, 19 nt, Homo sapiens
  misc_RNA (1)...(19): siRNA sense strand
gugguucugugguuacuuc

SEQ ID NO: 324113 - RNA, 19 nt, Homo sapiens
  misc_RNA (1)...(19): siRNA sense strand
gcugccaccuaugauauau

SEQ ID NO: 324114 - RNA, 19 nt, Homo sapiens
  misc_RNA (1)...(19): siRNA sense strand
cgagaaguuugcccucaag

SEQ ID NO: 324115 - RNA, 19 nt, Homo sapiens
  misc_RNA (1)...(19): siRNA sense strand
guaacagucuccgaauguc

SEQ ID NO: 324116 - RNA, 19 nt, Homo sapiens
  misc_RNA (1)...(19): siRNA sense strand
acugacagcuacccacaga

SEQ ID NO: 324117 - RNA, 19 nt, Homo sapiens
  misc_RNA (1)...(19): siRNA sense strand
agggagagcuggaugaacu

SEQ ID NO: 324118 - RNA, 19 nt, Homo sapiens
  misc_RNA (1)...(19): siRNA sense strand
gaaagggaugcaagagaag

SEQ ID NO: 324119 - RNA, 19 nt, Homo sapiens
  misc_RNA (1)...(19): siRNA sense strand
gugaaagggaugcaagaga

SEQ ID NO: 324120 - RNA, 19 nt, Homo sapiens
  misc_RNA (1)...(19): siRNA sense strand
gaacguuauggccaaauac

SEQ ID NO: 324121 - RNA, 19 nt, Homo sapiens
  misc_RNA (1)...(19): siRNA sense strand
aaggaggucuuccaguauc

SEQ ID NO: 324122 - RNA, 19 nt, Homo sapiens
  misc_RNA (1)...(19): siRNA sense strand
aaaggaggucuuccaguau

SEQ ID NO: 324123 - RNA, 19 nt, Homo sapiens
  misc_RNA (1)...(19): siRNA sense strand
cgugacacuuccuccugua

SEQ ID NO: 324124 - RNA, 19 nt, Homo sapiens
  misc_RNA (1)...(19): siRNA sense strand
gauaaaugugauacgaaug

SEQ ID NO: 324125 - RNA, 19 nt, Homo sapiens
  misc_RNA (1)...(19): siRNA sense strand
gcaguucuucgaaugaaag

SEQ ID NO: 324126 - RNA, 19 nt, Homo sapiens
  misc_RNA (1)...(19): siRNA sense strand
gcuauggacaacuguaaca

SEQ ID NO: 324127 - RNA, 19 nt, Homo sapiens
  misc_RNA (1)...(19): siRNA sense strand
ucgcaguucuucgaaugaa

SEQ ID NO: 324128 - RNA, 19 nt, Homo sapiens
  misc_RNA (1)...(19): siRNA sense strand
uaugggaucacuaaaguag

SEQ ID NO: 324129 - RNA, 19 nt, Homo sapiens
  misc_RNA (1)...(19): siRNA sense strand
cgaagggccaaauggagaa

SEQ ID NO: 324130 - RNA, 19 nt, Homo sapiens
  misc_RNA (1)...(19): siRNA sense strand
gacaaugaguccuuuuaca

SEQ ID NO: 324131 - RNA, 19 nt, Homo sapiens
  misc_RNA (1)...(19): siRNA sense strand
uguaacagucuccgaaugu

SEQ ID NO: 324132 - RNA, 19 nt, Homo sapiens
  misc_RNA (1)...(19): siRNA sense strand
gaucacuaaaguagaagga

SEQ ID NO: 324133 - RNA, 19 nt, Homo sapiens
  misc_RNA (1)...(19): siRNA sense strand
gaagggccaaauggagaaa

SEQ ID NO: 324134 - RNA, 19 nt, Homo sapiens
  misc_RNA (1)...(19): siRNA sense strand
uggaugaacuuggggauaa

SEQ ID NO: 324135 - RNA, 19 nt, Homo sapiens
  misc_RNA (1)...(19): siRNA sense strand
guaucgcaguucuucgaau

SEQ ID NO: 324136 - RNA, 19 nt, Homo sapiens
  misc_RNA (1)...(19): siRNA sense strand
gcuagaggagcuggagaaa

SEQ ID NO: 324137 - RNA, 19 nt, Homo sapiens
  misc_RNA (1)...(19): siRNA sense strand
ggagagcuggaugaacuug

SEQ ID NO: 324138 - RNA, 19 nt, Homo sapiens
  misc_RNA (1)...(19): siRNA sense strand
ucaccaguuugcagcuaga

SEQ ID NO: 324139 - RNA, 19 nt, Homo sapiens
  misc_RNA (1)...(19): siRNA sense strand
cucauuacccggaugugua

SEQ ID NO: 324140 - RNA, 19 nt, Homo sapiens
  misc_RNA (1)...(19): siRNA sense strand
ggcaaccaauggacaugca

SEQ ID NO: 324141 - RNA, 19 nt, Homo sapiens
  misc_RNA (1)...(19): siRNA sense strand
ggacagauuccaguuacac

SEQ ID NO: 324142 - RNA, 19 nt, Homo sapiens
  misc_RNA (1)...(19): siRNA sense strand
ucggacagauuccaguuac

SEQ ID NO: 324143 - RNA, 19 nt, Homo sapiens
  misc_RNA (1)...(19): siRNA sense strand
gaggccaggguccagguuu

SEQ ID NO: 324144 - RNA, 19 nt, Homo sapiens
  misc_RNA (1)...(19): siRNA sense strand
gagaaguuugcccucaaga

SEQ ID NO: 324145 - RNA, 19 nt, Homo sapiens
  misc_RNA (1)...(19): siRNA sense strand
gguccagguuugguuucaa

SEQ ID NO: 324146 - RNA, 19 nt, Homo sapiens
  misc_RNA (1)...(19): siRNA sense strand
ggaggcaccgaaccaccuu

SEQ ID NO: 324147 - RNA, 19 nt, Homo sapiens
  misc_RNA (1)...(19): siRNA sense strand
aguggugguucugugguua

SEQ ID NO: 324148 - RNA, 19 nt, Homo sapiens
  misc_RNA (1)...(19): siRNA sense strand
ucauuacccggauguguau

SEQ ID NO: 324149 - RNA, 19 nt, Homo sapiens
  misc_RNA (1)...(19): siRNA sense strand
aaacggaggcaccgaacca

SEQ ID NO: 324150 - RNA, 19 nt, Homo sapiens
  misc_RNA (1)...(19): siRNA sense strand
ucacucgccucggacagau

SEQ ID NO: 324151 - RNA, 19 nt, Homo sapiens
  misc_RNA (1)...(19): siRNA sense strand
ugacacuuccuccuguaug

SEQ ID NO: 324152 - RNA, 19 nt, Homo sapiens
  misc_RNA (1)...(19): siRNA sense strand
ugccaaggacugacagcua

SEQ ID NO: 324153 - RNA, 19 nt, Homo sapiens
  misc_RNA (1)...(19): siRNA sense strand
agaagggagagcuggauga

SEQ ID NO: 324154 - RNA, 19 nt, Homo sapiens
  misc_RNA (1)...(19): siRNA sense strand
gaauucaacuaucgaguau

SEQ ID NO: 324155 - RNA, 19 nt, Homo sapiens
  misc_RNA (1)...(19): siRNA sense strand
ggaaauggaagaagaagaa

SEQ ID NO: 324156 - RNA, 19 nt, Homo sapiens
  misc_RNA (1)...(19): siRNA sense strand
gcucaucuauacacgguua

SEQ ID NO: 324157 - RNA, 19 nt, Homo sapiens
  misc_RNA (1)...(19): siRNA sense strand
gaaccaagaauucaacuau

SEQ ID NO: 324158 - RNA, 19 nt, Homo sapiens
  misc_RNA (1)...(19): siRNA sense strand
ugagugagcuaguaguauu

SEQ ID NO: 324159 - RNA, 19 nt, Homo sapiens
  misc_RNA (1)...(19): siRNA sense strand
gaugaauucugaacuguca

SEQ ID NO: 324160 - RNA, 19 nt, Homo sapiens
  misc_RNA (1)...(19): siRNA sense strand
cagucaaccugaaauagua

SEQ ID NO: 324161 - RNA, 19 nt, Homo sapiens
  misc_RNA (1)...(19): siRNA sense strand
ucgcaacucuuauaaaugu

SEQ ID NO: 324162 - RNA, 19 nt, Homo sapiens
  misc_RNA (1)...(19): siRNA sense strand
ccauauaccugaaagaucu

SEQ ID NO: 324163 - RNA, 19 nt, Homo sapiens
  misc_RNA (1)...(19): siRNA sense strand
cagcuugucuguuucauuc

SEQ ID NO: 324164 - RNA, 19 nt, Homo sapiens
  misc_RNA (1)...(19): siRNA sense strand
gaagaugaguguuuugcua

SEQ ID NO: 324165 - RNA, 19 nt, Homo sapiens
  misc_RNA (1)...(19): siRNA sense strand
gaccacauuccuuggauua

SEQ ID NO: 324166 - RNA, 19 nt, Homo sapiens
  misc_RNA (1)...(19): siRNA sense strand
uccaucagcuugucuguuu

SEQ ID NO: 324167 - RNA, 19 nt, Homo sapiens
  misc_RNA (1)...(19): siRNA sense strand
ccucgcaacucuuauaaau

SEQ ID NO: 324168 - RNA, 19 nt, Homo sapiens
  misc_RNA (1)...(19): siRNA sense strand
guacuuccaacaguuauua

SEQ ID NO: 324169 - RNA, 19 nt, Homo sapiens
  misc_RNA (1)...(19): siRNA sense strand
ugaguaacauucucuuugu

SEQ ID NO: 324170 - RNA, 19 nt, Homo sapiens
  misc_RNA (1)...(19): siRNA sense strand
gauguuacgagcaauauga

SEQ ID NO: 324171 - RNA, 19 nt, Homo sapiens
  misc_RNA (1)...(19): siRNA sense strand
gaccugccaugccaauuug

SEQ ID NO: 324172 - RNA, 19 nt, Homo sapiens
  misc_RNA (1)...(19): siRNA sense strand
gaugaagcccagcguguuu

SEQ ID NO: 324173 - RNA, 19 nt, Homo sapiens
  misc_RNA (1)...(19): siRNA sense strand
gaagcggccucgcaacucu

SEQ ID NO: 324174 - RNA, 19 nt, Homo sapiens
  misc_RNA (1)...(19): siRNA sense strand
cgaguaugaugguauuaug

SEQ ID NO: 324175 - RNA, 19 nt, Homo sapiens
  misc_RNA (1)...(19): siRNA sense strand
ugucagugcuugcuaacuu

SEQ ID NO: 324176 - RNA, 19 nt, Homo sapiens
  misc_RNA (1)...(19): siRNA sense strand
cuaauucuauggaaaugga

SEQ ID NO: 324177 - RNA, 19 nt, Homo sapiens
  misc_RNA (1)...(19): siRNA sense strand
ugaaugagguauacuuagg

SEQ ID NO: 324178 - RNA, 19 nt, Homo sapiens
  misc_RNA (1)...(19): siRNA sense strand
cgacaaaagugauacaugu

SEQ ID NO: 324179 - RNA, 19 nt, Homo sapiens
  misc_RNA (1)...(19): siRNA sense strand
gaagauucaagcuuauuuc

SEQ ID NO: 324180 - RNA, 19 nt, Homo sapiens
  misc_RNA (1)...(19): siRNA sense strand
ucaagauaaugucacagaa

SEQ ID NO: 324181 - RNA, 19 nt, Homo sapiens
  misc_RNA (1)...(19): siRNA sense strand
uaucgaguaugaugguauu

SEQ ID NO: 324182 - RNA, 19 nt, Homo sapiens
  misc_RNA (1)...(19): siRNA sense strand
ccuaagaagaugaguguuu

SEQ ID NO: 324183 - RNA, 19 nt, Homo sapiens
  misc_RNA (1)...(19): siRNA sense strand
agagaaauuugacaguguu

SEQ ID NO: 324184 - RNA, 19 nt, Homo sapiens
  misc_RNA (1)...(19): siRNA sense strand
aauuugaccugcucaucua

SEQ ID NO: 324185 - RNA, 19 nt, Homo sapiens
  misc_RNA (1)...(19): siRNA sense strand
auucaacuaucgaguauga

SEQ ID NO: 324186 - RNA, 19 nt, Homo sapiens
  misc_RNA (1)...(19): siRNA sense strand
agaauucaacuaucgagua

SEQ ID NO: 324187 - RNA, 19 nt, Homo sapiens
  misc_RNA (1)...(19): siRNA sense strand
cuauggaaauggaagaaga

SEQ ID NO: 324188 - RNA, 19 nt, Homo sapiens
  misc_RNA (1)...(19): siRNA sense strand
gcuaagaaccaagaauuca

SEQ ID NO: 324189 - RNA, 19 nt, Homo sapiens
  misc_RNA (1)...(19): siRNA sense strand
ccacauuccuuggauuaca

SEQ ID NO: 324190 - RNA, 19 nt, Homo sapiens
  misc_RNA (1)...(19): siRNA sense strand
uaucuucaccuuucucuau

SEQ ID NO: 324191 - RNA, 19 nt, Homo sapiens
  misc_RNA (1)...(19): siRNA sense strand
caucuucuguauucuggaa

SEQ ID NO: 324192 - RNA, 19 nt, Homo sapiens
  misc_RNA (1)...(19): siRNA sense strand
cgagcaauaugaccaucuu

SEQ ID NO: 324193 - RNA, 19 nt, Homo sapiens
  misc_RNA (1)...(19): siRNA sense strand
gggcuuguaucaauguauc

SEQ ID NO: 324194 - RNA, 19 nt, Homo sapiens
  misc_RNA (1)...(19): siRNA sense strand
uauacacgguuacccagaa

SEQ ID NO: 324195 - RNA, 19 nt, Homo sapiens
  misc_RNA (1)...(19): siRNA sense strand
gaguaacauucucuuugug

SEQ ID NO: 324196 - RNA, 19 nt, Homo sapiens
  misc_RNA (1)...(19): siRNA sense strand
guaacauucucuuugugau

SEQ ID NO: 324197 - RNA, 19 nt, Homo sapiens
  misc_RNA (1)...(19): siRNA sense strand
aagagaaauuugacagugu

SEQ ID NO: 324198 - RNA, 19 nt, Homo sapiens
  misc_RNA (1)...(19): siRNA sense strand
ugagguauacuuaggcaaa

SEQ ID NO: 324199 - RNA, 19 nt, Homo sapiens
  misc_RNA (1)...(19): siRNA sense strand
aauaugaccaucuucugua

SEQ ID NO: 324200 - RNA, 19 nt, Homo sapiens
  misc_RNA (1)...(19): siRNA sense strand
caauaugaccaucuucugu

SEQ ID NO: 324201 - RNA, 19 nt, Homo sapiens
  misc_RNA (1)...(19): siRNA sense strand
auacuuaggcaaagagaaa

SEQ ID NO: 324202 - RNA, 19 nt, Homo sapiens
  misc_RNA (1)...(19): siRNA sense strand
agagugaacagaccaagaa

SEQ ID NO: 324203 - RNA, 19 nt, Homo sapiens
  misc_RNA (1)...(19): siRNA sense strand
gcaauaugaccaucuucug

SEQ ID NO: 324204 - RNA, 19 nt, Homo sapiens
  misc_RNA (1)...(19): siRNA sense strand
gaaauuugacaguguucau

SEQ ID NO: 324205 - RNA, 19 nt, Homo sapiens
  misc_RNA (1)...(19): siRNA sense strand
caauguaucauccaucaca

SEQ ID NO: 324206 - RNA, 19 nt, Homo sapiens
  misc_RNA (1)...(19): siRNA sense strand
ucuguauucuggaaacuga

SEQ ID NO: 324207 - RNA, 19 nt, Homo sapiens
  misc_RNA (1)...(19): siRNA sense strand
ccugaaagaucugaugaag

SEQ ID NO: 324208 - RNA, 19 nt, Homo sapiens
  misc_RNA (1)...(19): siRNA sense strand
caagcuuauuucaaugaga

SEQ ID NO: 324209 - RNA, 19 nt, Homo sapiens
  misc_RNA (1)...(19): siRNA sense strand
agaccugccaugccaauuu

SEQ ID NO: 324210 - RNA, 19 nt, Homo sapiens
  misc_RNA (1)...(19): siRNA sense strand
cuaagaagaugaguguuuu

SEQ ID NO: 324211 - RNA, 19 nt, Homo sapiens
  misc_RNA (1)...(19): siRNA sense strand
caggaaaacuugguucuga

SEQ ID NO: 324212 - RNA, 19 nt, Homo sapiens
  misc_RNA (1)...(19): siRNA sense strand
ggacugaguaacauucucu

SEQ ID NO: 324213 - RNA, 19 nt, Homo sapiens
  misc_RNA (1)...(19): siRNA sense strand
uaacauucucuuugugaug

SEQ ID NO: 324214 - RNA, 19 nt, Homo sapiens
  misc_RNA (1)...(19): siRNA sense strand
ccugagacuucacaaucuu

SEQ ID NO: 324215 - RNA, 19 nt, Homo sapiens
  misc_RNA (1)...(19): siRNA sense strand
ucugaaugagguauacuua

SEQ ID NO: 324216 - RNA, 19 nt, Homo sapiens
  misc_RNA (1)...(19): siRNA sense strand
aagauaaugucacagaacu

SEQ ID NO: 324217 - RNA, 19 nt, Homo sapiens
  misc_RNA (1)...(19): siRNA sense strand
gaacagaccaagaaaagag

SEQ ID NO: 324218 - RNA, 19 nt, Homo sapiens
  misc_RNA (1)...(19): siRNA sense strand
gagagugaacagaccaaga

SEQ ID NO: 324219 - RNA, 19 nt, Homo sapiens
  misc_RNA (1)...(19): siRNA sense strand
aaaacuugguucugaauga

SEQ ID NO: 324220 - RNA, 19 nt, Homo sapiens
  misc_RNA (1)...(19): siRNA sense strand
gaugguauuaugcagaaau

SEQ ID NO: 324221 - RNA, 19 nt, Homo sapiens
  misc_RNA (1)...(19): siRNA sense strand
gagugagcuaguaguauuu

SEQ ID NO: 324222 - RNA, 19 nt, Homo sapiens
  misc_RNA (1)...(19): siRNA sense strand
gagguauacuuaggcaaag

SEQ ID NO: 324223 - RNA, 19 nt, Homo sapiens
  misc_RNA (1)...(19): siRNA sense strand
cuaagaaccaagaauucaa

SEQ ID NO: 324224 - RNA, 19 nt, Homo sapiens
  misc_RNA (1)...(19): siRNA sense strand
guauuaugcagaaaucuca

SEQ ID NO: 324225 - RNA, 19 nt, Homo sapiens
  misc_RNA (1)...(19): siRNA sense strand
acaguguucauuccaagua

SEQ ID NO: 324226 - RNA, 19 nt, Homo sapiens
  misc_RNA (1)...(19): siRNA sense strand
ggagagggaagagagugaa

SEQ ID NO: 324227 - RNA, 19 nt, Homo sapiens
  misc_RNA (1)...(19): siRNA sense strand
ucaacuaucgaguaugaug

SEQ ID NO: 324228 - RNA, 19 nt, Homo sapiens
  misc_RNA (1)...(19): siRNA sense strand
aguguucauuccaaguaua

SEQ ID NO: 324229 - RNA, 19 nt, Homo sapiens
  misc_RNA (1)...(19): siRNA sense strand
agaccacauuccuuggauu

SEQ ID NO: 324230 - RNA, 19 nt, Homo sapiens
  misc_RNA (1)...(19): siRNA sense strand
augaccaucuucuguauuc

SEQ ID NO: 324231 - RNA, 19 nt, Homo sapiens
  misc_RNA (1)...(19): siRNA sense strand
gugcugcuccucugaagau

SEQ ID NO: 324232 - RNA, 19 nt, Homo sapiens
  misc_RNA (1)...(19): siRNA sense strand
caagauaaugucacagaac

SEQ ID NO: 324233 - RNA, 19 nt, Homo sapiens
  misc_RNA (1)...(19): siRNA sense strand
uugcuaagaaccaagaauu

SEQ ID NO: 324234 - RNA, 19 nt, Homo sapiens
  misc_RNA (1)...(19): siRNA sense strand
gagugaacagaccaagaaa

SEQ ID NO: 324235 - RNA, 19 nt, Homo sapiens
  misc_RNA (1)...(19): siRNA sense strand
aaacuugguucugaaugag

SEQ ID NO: 324236 - RNA, 19 nt, Homo sapiens
  misc_RNA (1)...(19): siRNA sense strand
cagaccacauuccuuggau

SEQ ID NO: 324237 - RNA, 19 nt, Homo sapiens
  misc_RNA (1)...(19): siRNA sense strand
auaugaccaucuucuguau

SEQ ID NO: 324238 - RNA, 19 nt, Homo sapiens
  misc_RNA (1)...(19): siRNA sense strand
aagccugagugagcuagua

SEQ ID NO: 324239 - RNA, 19 nt, Homo sapiens
  misc_RNA (1)...(19): siRNA sense strand
aaccaagaauucaacuauc

SEQ ID NO: 324240 - RNA, 19 nt, Homo sapiens
  misc_RNA (1)...(19): siRNA sense strand
cugaguaacauucucuuug

SEQ ID NO: 324241 - RNA, 19 nt, Homo sapiens
  misc_RNA (1)...(19): siRNA sense strand
caguguucauuccaaguau

SEQ ID NO: 324242 - RNA, 19 nt, Homo sapiens
  misc_RNA (1)...(19): siRNA sense strand
ggccucgcaacucuuauaa

SEQ ID NO: 324243 - RNA, 19 nt, Homo sapiens
  misc_RNA (1)...(19): siRNA sense strand
gcuuuuaucuucaccuuuc

SEQ ID NO: 324244 - RNA, 19 nt, Homo sapiens
  misc_RNA (1)...(19): siRNA sense strand
ccugagugagcuaguagua

SEQ ID NO: 324245 - RNA, 19 nt, Homo sapiens
  misc_RNA (1)...(19): siRNA sense strand
ucccugauguuacgagcaa

SEQ ID NO: 324246 - RNA, 19 nt, Homo sapiens
  misc_RNA (1)...(19): siRNA sense strand
cccagaaccuaagaagaug

SEQ ID NO: 324247 - RNA, 19 nt, Homo sapiens
  misc_RNA (1)...(19): siRNA sense strand
ggacaguuggacccugaga

SEQ ID NO: 324248 - RNA, 19 nt, Homo sapiens
  misc_RNA (1)...(19): siRNA sense strand
guaucaauguaucauccau

SEQ ID NO: 324249 - RNA, 19 nt, Homo sapiens
  misc_RNA (1)...(19): siRNA sense strand
gaaauggaagaagaagaag

SEQ ID NO: 324250 - RNA, 19 nt, Homo sapiens
  misc_RNA (1)...(19): siRNA sense strand
augaugguauuaugcagaa

SEQ ID NO: 324251 - RNA, 19 nt, Homo sapiens
  misc_RNA (1)...(19): siRNA sense strand
acccagaaccuaagaagau

SEQ ID NO: 324252 - RNA, 19 nt, Homo sapiens
  misc_RNA (1)...(19): siRNA sense strand
gugaugguuuucugucuaa

SEQ ID NO: 324253 - RNA, 19 nt, Homo sapiens
  misc_RNA (1)...(19): siRNA sense strand
cggccucgcaacucuuaua

SEQ ID NO: 324254 - RNA, 19 nt, Homo sapiens
  misc_RNA (1)...(19): siRNA sense strand
gaauucaacuaucgaguau

SEQ ID NO: 324255 - RNA, 19 nt, Homo sapiens
  misc_RNA (1)...(19): siRNA sense strand
ggaaauggaagaagaagaa

SEQ ID NO: 324256 - RNA, 19 nt, Homo sapiens
  misc_RNA (1)...(19): siRNA sense strand
gcucaucuauacacgguua

SEQ ID NO: 324257 - RNA, 19 nt, Homo sapiens
  misc_RNA (1)...(19): siRNA sense strand
gaaccaagaauucaacuau

SEQ ID NO: 324258 - RNA, 19 nt, Homo sapiens
  misc_RNA (1)...(19): siRNA sense strand
ugagugagcuaguaguauu

SEQ ID NO: 324259 - RNA, 19 nt, Homo sapiens
  misc_RNA (1)...(19): siRNA sense strand
gaugaauucugaacuguca

SEQ ID NO: 324260 - RNA, 19 nt, Homo sapiens
  misc_RNA (1)...(19): siRNA sense strand
cagucaaccugaaauagua

SEQ ID NO: 324261 - RNA, 19 nt, Homo sapiens
  misc_RNA (1)...(19): siRNA sense strand
ucgcaacucuuauaaaugu

SEQ ID NO: 324262 - RNA, 19 nt, Homo sapiens
  misc_RNA (1)...(19): siRNA sense strand
ccauauaccugaaagaucu

SEQ ID NO: 324263 - RNA, 19 nt, Homo sapiens
  misc_RNA (1)...(19): siRNA sense strand
cagcuugucuguuucauuc

SEQ ID NO: 324264 - RNA, 19 nt, Homo sapiens
  misc_RNA (1)...(19): siRNA sense strand
gaagaugaguguuuugcua

SEQ ID NO: 324265 - RNA, 19 nt, Homo sapiens
  misc_RNA (1)...(19): siRNA sense strand
gaccacauuccuuggauua

SEQ ID NO: 324266 - RNA, 19 nt, Homo sapiens
  misc_RNA (1)...(19): siRNA sense strand
uccaucagcuugucuguuu

SEQ ID NO: 324267 - RNA, 19 nt, Homo sapiens
  misc_RNA (1)...(19): siRNA sense strand
ccucgcaacucuuauaaau

SEQ ID NO: 324268 - RNA, 19 nt, Homo sapiens
  misc_RNA (1)...(19): siRNA sense strand
guacuuccaacaguuauua

SEQ ID NO: 324269 - RNA, 19 nt, Homo sapiens
  misc_RNA (1)...(19): siRNA sense strand
ugaguaacauucucuuugu

SEQ ID NO: 324270 - RNA, 19 nt, Homo sapiens
  misc_RNA (1)...(19): siRNA sense strand
gauguuacgagcaauauga

SEQ ID NO: 324271 - RNA, 19 nt, Homo sapiens
  misc_RNA (1)...(19): siRNA sense strand
gaccugccaugccaauuug

SEQ ID NO: 324272 - RNA, 19 nt, Homo sapiens
  misc_RNA (1)...(19): siRNA sense strand
gaugaagcccagcguguuu

SEQ ID NO: 324273 - RNA, 19 nt, Homo sapiens
  misc_RNA (1)...(19): siRNA sense strand
gaagcggccucgcaacucu

SEQ ID NO: 324274 - RNA, 19 nt, Homo sapiens
  misc_RNA (1)...(19): siRNA sense strand
cgaguaugaugguauuaug

SEQ ID NO: 324275 - RNA, 19 nt, Homo sapiens
  misc_RNA (1)...(19): siRNA sense strand
ugucagugcuugcuaacuu

SEQ ID NO: 324276 - RNA, 19 nt, Homo sapiens
  misc_RNA (1)...(19): siRNA sense strand
cuaauucuauggaaaugga

SEQ ID NO: 324277 - RNA, 19 nt, Homo sapiens
  misc_RNA (1)...(19): siRNA sense strand
ugaaugagguauacuuagg

SEQ ID NO: 324278 - RNA, 19 nt, Homo sapiens
  misc_RNA (1)...(19): siRNA sense strand
cgacaaaagugauacaugu

SEQ ID NO: 324279 - RNA, 19 nt, Homo sapiens
  misc_RNA (1)...(19): siRNA sense strand
ucaagauaaugucacagaa

SEQ ID NO: 324280 - RNA, 19 nt, Homo sapiens
  misc_RNA (1)...(19): siRNA sense strand
uaucgaguaugaugguauu

SEQ ID NO: 324281 - RNA, 19 nt, Homo sapiens
  misc_RNA (1)...(19): siRNA sense strand
ccuaagaagaugaguguuu

SEQ ID NO: 324282 - RNA, 19 nt, Homo sapiens
  misc_RNA (1)...(19): siRNA sense strand
gaagauucaagcuuauuuc

SEQ ID NO: 324283 - RNA, 19 nt, Homo sapiens
  misc_RNA (1)...(19): siRNA sense strand
agagaaauuugacaguguu

SEQ ID NO: 324284 - RNA, 19 nt, Homo sapiens
  misc_RNA (1)...(19): siRNA sense strand
aauuugaccugcucaucua

SEQ ID NO: 324285 - RNA, 19 nt, Homo sapiens
  misc_RNA (1)...(19): siRNA sense strand
auucaacuaucgaguauga

SEQ ID NO: 324286 - RNA, 19 nt, Homo sapiens
  misc_RNA (1)...(19): siRNA sense strand
gcacuaugggacugaguaa

SEQ ID NO: 324287 - RNA, 19 nt, Homo sapiens
  misc_RNA (1)...(19): siRNA sense strand
agaauucaacuaucgagua

SEQ ID NO: 324288 - RNA, 19 nt, Homo sapiens
  misc_RNA (1)...(19): siRNA sense strand
cuauggaaauggaagaaga

SEQ ID NO: 324289 - RNA, 19 nt, Homo sapiens
  misc_RNA (1)...(19): siRNA sense strand
gcuaagaaccaagaauuca

SEQ ID NO: 324290 - RNA, 19 nt, Homo sapiens
  misc_RNA (1)...(19): siRNA sense strand
ccacauuccuuggauuaca

SEQ ID NO: 324291 - RNA, 19 nt, Homo sapiens
  misc_RNA (1)...(19): siRNA sense strand
uaucuucaccuuucucuau

SEQ ID NO: 324292 - RNA, 19 nt, Homo sapiens
  misc_RNA (1)...(19): siRNA sense strand
caucuucuguauucuggaa

SEQ ID NO: 324293 - RNA, 19 nt, Homo sapiens
  misc_RNA (1)...(19): siRNA sense strand
cgagcaauaugaccaucuu

SEQ ID NO: 324294 - RNA, 19 nt, Homo sapiens
  misc_RNA (1)...(19): siRNA sense strand
gggcuuguaucaauguauc

SEQ ID NO: 324295 - RNA, 19 nt, Homo sapiens
  misc_RNA (1)...(19): siRNA sense strand
uauacacgguuacccagaa

SEQ ID NO: 324296 - RNA, 19 nt, Homo sapiens
  misc_RNA (1)...(19): siRNA sense strand
gaguaacauucucuuugug

SEQ ID NO: 324297 - RNA, 19 nt, Homo sapiens
  misc_RNA (1)...(19): siRNA sense strand
guaacauucucuuugugau

SEQ ID NO: 324298 - RNA, 19 nt, Homo sapiens
  misc_RNA (1)...(19): siRNA sense strand
aagagaaauuugacagugu

SEQ ID NO: 324299 - RNA, 19 nt, Homo sapiens
  misc_RNA (1)...(19): siRNA sense strand
ugagguauacuuaggcaaa

SEQ ID NO: 324300 - RNA, 19 nt, Homo sapiens
  misc_RNA (1)...(19): siRNA sense strand
aauaugaccaucuucugua

SEQ ID NO: 324301 - RNA, 19 nt, Homo sapiens
  misc_RNA (1)...(19): siRNA sense strand
caauaugaccaucuucugu

SEQ ID NO: 324302 - RNA, 19 nt, Homo sapiens
  misc_RNA (1)...(19): siRNA sense strand
auacuuaggcaaagagaaa

SEQ ID NO: 324303 - RNA, 19 nt, Homo sapiens
  misc_RNA (1)...(19): siRNA sense strand
agagugaacagaccaagaa

SEQ ID NO: 324304 - RNA, 19 nt, Homo sapiens
  misc_RNA (1)...(19): siRNA sense strand
gcaauaugaccaucuucug

SEQ ID NO: 324305 - RNA, 19 nt, Homo sapiens
  misc_RNA (1)...(19): siRNA sense strand
gaaauuugacaguguucau

SEQ ID NO: 324306 - RNA, 19 nt, Homo sapiens
  misc_RNA (1)...(19): siRNA sense strand
caauguaucauccaucaca

SEQ ID NO: 324307 - RNA, 19 nt, Homo sapiens
  misc_RNA (1)...(19): siRNA sense strand
ucuguauucuggaaacuga

SEQ ID NO: 324308 - RNA, 19 nt, Homo sapiens
  misc_RNA (1)...(19): siRNA sense strand
ccugaaagaucugaugaag

SEQ ID NO: 324309 - RNA, 19 nt, Homo sapiens
  misc_RNA (1)...(19): siRNA sense strand
caagcuuauuucaaugaga

SEQ ID NO: 324310 - RNA, 19 nt, Homo sapiens
  misc_RNA (1)...(19): siRNA sense strand
agaccugccaugccaauuu

SEQ ID NO: 324311 - RNA, 19 nt, Homo sapiens
  misc_RNA (1)...(19): siRNA sense strand
cuaagaagaugaguguuuu

SEQ ID NO: 324312 - RNA, 19 nt, Homo sapiens
  misc_RNA (1)...(19): siRNA sense strand
caggaaaacuugguucuga

SEQ ID NO: 324313 - RNA, 19 nt, Homo sapiens
  misc_RNA (1)...(19): siRNA sense strand
ggacugaguaacauucucu

SEQ ID NO: 324314 - RNA, 19 nt, Homo sapiens
  misc_RNA (1)...(19): siRNA sense strand
uaacauucucuuugugaug

SEQ ID NO: 324315 - RNA, 19 nt, Homo sapiens
  misc_RNA (1)...(19): siRNA sense strand
ccugagacuucacaaucuu

SEQ ID NO: 324316 - RNA, 19 nt, Homo sapiens
  misc_RNA (1)...(19): siRNA sense strand
ucugaaugagguauacuua

SEQ ID NO: 324317 - RNA, 19 nt, Homo sapiens
  misc_RNA (1)...(19): siRNA sense strand
aagauaaugucacagaacu

SEQ ID NO: 324318 - RNA, 19 nt, Homo sapiens
  misc_RNA (1)...(19): siRNA sense strand
gaacagaccaagaaaagag

SEQ ID NO: 324319 - RNA, 19 nt, Homo sapiens
  misc_RNA (1)...(19): siRNA sense strand
gagagugaacagaccaaga

SEQ ID NO: 324320 - RNA, 19 nt, Homo sapiens
  misc_RNA (1)...(19): siRNA sense strand
aaaacuugguucugaauga

SEQ ID NO: 324321 - RNA, 19 nt, Homo sapiens
  misc_RNA (1)...(19): siRNA sense strand
gagugagcuaguaguauuu

SEQ ID NO: 324322 - RNA, 19 nt, Homo sapiens
  misc_RNA (1)...(19): siRNA sense strand
gaugguauuaugcagaaau

SEQ ID NO: 324323 - RNA, 19 nt, Homo sapiens
  misc_RNA (1)...(19): siRNA sense strand
gagguauacuuaggcaaag

SEQ ID NO: 324324 - RNA, 19 nt, Homo sapiens
  misc_RNA (1)...(19): siRNA sense strand
cuaagaaccaagaauucaa

SEQ ID NO: 324325 - RNA, 19 nt, Homo sapiens
  misc_RNA (1)...(19): siRNA sense strand
guauuaugcagaaaucuca

SEQ ID NO: 324326 - RNA, 19 nt, Homo sapiens
  misc_RNA (1)...(19): siRNA sense strand
acaguguucauuccaagua

SEQ ID NO: 324327 - RNA, 19 nt, Homo sapiens
  misc_RNA (1)...(19): siRNA sense strand
ggagagggaagagagugaa

SEQ ID NO: 324328 - RNA, 19 nt, Homo sapiens
  misc_RNA (1)...(19): siRNA sense strand
ucaacuaucgaguaugaug

SEQ ID NO: 324329 - RNA, 19 nt, Homo sapiens
  misc_RNA (1)...(19): siRNA sense strand
aguguucauuccaaguaua

SEQ ID NO: 324330 - RNA, 19 nt, Homo sapiens
  misc_RNA (1)...(19): siRNA sense strand
gugcugcuccucugaagau

SEQ ID NO: 324331 - RNA, 19 nt, Homo sapiens
  misc_RNA (1)...(19): siRNA sense strand
agaccacauuccuuggauu

SEQ ID NO: 324332 - RNA, 19 nt, Homo sapiens
  misc_RNA (1)...(19): siRNA sense strand
augaccaucuucuguauuc

SEQ ID NO: 324333 - RNA, 19 nt, Homo sapiens
  misc_RNA (1)...(19): siRNA sense strand
caagauaaugucacagaac

SEQ ID NO: 324334 - RNA, 19 nt, Homo sapiens
  misc_RNA (1)...(19): siRNA sense strand
aagccugagugagcuagua

SEQ ID NO: 324335 - RNA, 19 nt, Homo sapiens
  misc_RNA (1)...(19): siRNA sense strand
aaacuugguucugaaugag

SEQ ID NO: 324336 - RNA, 19 nt, Homo sapiens
  misc_RNA (1)...(19): siRNA sense strand
gagugaacagaccaagaaa

SEQ ID NO: 324337 - RNA, 19 nt, Homo sapiens
  misc_RNA (1)...(19): siRNA sense strand
cugaguaacauucucuuug

SEQ ID NO: 324338 - RNA, 19 nt, Homo sapiens
  misc_RNA (1)...(19): siRNA sense strand
cagaccacauuccuuggau

SEQ ID NO: 324339 - RNA, 19 nt, Homo sapiens
  misc_RNA (1)...(19): siRNA sense strand
auaugaccaucuucuguau

SEQ ID NO: 324340 - RNA, 19 nt, Homo sapiens
  misc_RNA (1)...(19): siRNA sense strand
aaccaagaauucaacuauc

SEQ ID NO: 324341 - RNA, 19 nt, Homo sapiens
  misc_RNA (1)...(19): siRNA sense strand
uugcuaagaaccaagaauu

SEQ ID NO: 324342 - RNA, 19 nt, Homo sapiens
  misc_RNA (1)...(19): siRNA sense strand
caguguucauuccaaguau

SEQ ID NO: 324343 - RNA, 19 nt, Homo sapiens
  misc_RNA (1)...(19): siRNA sense strand
ggccucgcaacucuuauaa

SEQ ID NO: 324344 - RNA, 19 nt, Homo sapiens
  misc_RNA (1)...(19): siRNA sense strand
gcuuuuaucuucaccuuuc

SEQ ID NO: 324345 - RNA, 19 nt, Homo sapiens
  misc_RNA (1)...(19): siRNA sense strand
ucccugauguuacgagcaa

SEQ ID NO: 324346 - RNA, 19 nt, Homo sapiens
  misc_RNA (1)...(19): siRNA sense strand
ccugagugagcuaguagua

SEQ ID NO: 324347 - RNA, 19 nt, Homo sapiens
  misc_RNA (1)...(19): siRNA sense strand
cccagaaccuaagaagaug

SEQ ID NO: 324348 - RNA, 19 nt, Homo sapiens
  misc_RNA (1)...(19): siRNA sense strand
ggacaguuggacccugaga

SEQ ID NO: 324349 - RNA, 19 nt, Homo sapiens
  misc_RNA (1)...(19): siRNA sense strand
guaucaauguaucauccau

SEQ ID NO: 324350 - RNA, 19 nt, Homo sapiens
  misc_RNA (1)...(19): siRNA sense strand
gaaauggaagaagaagaag

SEQ ID NO: 324351 - RNA, 19 nt, Homo sapiens
  misc_RNA (1)...(19): siRNA sense strand
augaugguauuaugcagaa

SEQ ID NO: 324352 - RNA, 19 nt, Homo sapiens
  misc_RNA (1)...(19): siRNA sense strand
acccagaaccuaagaagau

SEQ ID NO: 324353 - RNA, 19 nt, Homo sapiens
  misc_RNA (1)...(19): siRNA sense strand
cggccucgcaacucuuaua

SEQ ID NO: 324354 - RNA, 19 nt, Homo sapiens
  misc_RNA (1)...(19): siRNA sense strand
gacaacagaugaagacuua

SEQ ID NO: 324355 - RNA, 19 nt, Homo sapiens
  misc_RNA (1)...(19): siRNA sense strand
gcaaaguucuuauuaguuc

SEQ ID NO: 324356 - RNA, 19 nt, Homo sapiens
  misc_RNA (1)...(19): siRNA sense strand
ggaaauggauacugcaaga

SEQ ID NO: 324357 - RNA, 19 nt, Homo sapiens
  misc_RNA (1)...(19): siRNA sense strand
gaauugaguccaagucuua

SEQ ID NO: 324358 - RNA, 19 nt, Homo sapiens
  misc_RNA (1)...(19): siRNA sense strand
caaaguaucugcugaugau

SEQ ID NO: 324359 - RNA, 19 nt, Homo sapiens
  misc_RNA (1)...(19): siRNA sense strand
gagugaagcugaauuugaa

SEQ ID NO: 324360 - RNA, 19 nt, Homo sapiens
  misc_RNA (1)...(19): siRNA sense strand
cauaguagaucacgagaaa

SEQ ID NO: 324361 - RNA, 19 nt, Homo sapiens
  misc_RNA (1)...(19): siRNA sense strand
uaauggaucuguuaccuaa

SEQ ID NO: 324362 - RNA, 19 nt, Homo sapiens
  misc_RNA (1)...(19): siRNA sense strand
cgucauaaaucccguagua

SEQ ID NO: 324363 - RNA, 19 nt, Homo sapiens
  misc_RNA (1)...(19): siRNA sense strand
gcgaauaucgucaucguua

SEQ ID NO: 324364 - RNA, 19 nt, Homo sapiens
  misc_RNA (1)...(19): siRNA sense strand
gaugaagacuuaacugaag

SEQ ID NO: 324365 - RNA, 19 nt, Homo sapiens
  misc_RNA (1)...(19): siRNA sense strand
gaaaagagucgacgucaua

SEQ ID NO: 324366 - RNA, 19 nt, Homo sapiens
  misc_RNA (1)...(19): siRNA sense strand
ggaaagagaauugcauuau

SEQ ID NO: 324367 - RNA, 19 nt, Homo sapiens
  misc_RNA (1)...(19): siRNA sense strand
gagauuacauggauacucu

SEQ ID NO: 324368 - RNA, 19 nt, Homo sapiens
  misc_RNA (1)...(19): siRNA sense strand
gaugaucguugcaaaguuc

SEQ ID NO: 324369 - RNA, 19 nt, Homo sapiens
  misc_RNA (1)...(19): siRNA sense strand
caagaacgccauugaguga

SEQ ID NO: 324370 - RNA, 19 nt, Homo sapiens
  misc_RNA (1)...(19): siRNA sense strand
gaagcugaauuugaagaaa

SEQ ID NO: 324371 - RNA, 19 nt, Homo sapiens
  misc_RNA (1)...(19): siRNA sense strand
ccaggaagcugaauauggu

SEQ ID NO: 324372 - RNA, 19 nt, Homo sapiens
  misc_RNA (1)...(19): siRNA sense strand
ggaauugaguccaagucuu

SEQ ID NO: 324373 - RNA, 19 nt, Homo sapiens
  misc_RNA (1)...(19): siRNA sense strand
gagcaaauggccagucaaa

SEQ ID NO: 324374 - RNA, 19 nt, Homo sapiens
  misc_RNA (1)...(19): siRNA sense strand
gaaaugcaguccaggaaaa

SEQ ID NO: 324375 - RNA, 19 nt, Homo sapiens
  misc_RNA (1)...(19): siRNA sense strand
uaaaggagcagcaccaaau

SEQ ID NO: 324376 - RNA, 19 nt, Homo sapiens
  misc_RNA (1)...(19): siRNA sense strand
gcaaauggccagucaaagg

SEQ ID NO: 324377 - RNA, 19 nt, Homo sapiens
  misc_RNA (1)...(19): siRNA sense strand
caagauugccuucauggaa

SEQ ID NO: 324378 - RNA, 19 nt, Homo sapiens
  misc_RNA (1)...(19): siRNA sense strand
caccaaauguugucuauac

SEQ ID NO: 324379 - RNA, 19 nt, Homo sapiens
  misc_RNA (1)...(19): siRNA sense strand
gaacccagcuuucuuuccu

SEQ ID NO: 324380 - RNA, 19 nt, Homo sapiens
  misc_RNA (1)...(19): siRNA sense strand
ggcaugaucagauagauuu

SEQ ID NO: 324381 - RNA, 19 nt, Homo sapiens
  misc_RNA (1)...(19): siRNA sense strand
gaauagaaauagggcaauc

SEQ ID NO: 324382 - RNA, 19 nt, Homo sapiens
  misc_RNA (1)...(19): siRNA sense strand
gaaauagggcaaucucaag

SEQ ID NO: 324383 - RNA, 19 nt, Homo sapiens
  misc_RNA (1)...(19): siRNA sense strand
caagagagagggaccauag

SEQ ID NO: 324384 - RNA, 19 nt, Homo sapiens
  misc_RNA (1)...(19): siRNA sense strand
ucaugacgauuauuacaga

SEQ ID NO: 324385 - RNA, 19 nt, Homo sapiens
  misc_RNA (1)...(19): siRNA sense strand
cgugaacgaucaagagaga

SEQ ID NO: 324386 - RNA, 19 nt, Homo sapiens
  misc_RNA (1)...(19): siRNA sense strand
ggacaacagaugaagacuu

SEQ ID NO: 324387 - RNA, 19 nt, Homo sapiens
  misc_RNA (1)...(19): siRNA sense strand
gaucguugcaaaguucuua

SEQ ID NO: 324388 - RNA, 19 nt, Homo sapiens
  misc_RNA (1)...(19): siRNA sense strand
gguaacugcaauuucuuua

SEQ ID NO: 324389 - RNA, 19 nt, Homo sapiens
  misc_RNA (1)...(19): siRNA sense strand
caaccaggaagcugaauau

SEQ ID NO: 324390 - RNA, 19 nt, Homo sapiens
  misc_RNA (1)...(19): siRNA sense strand
gaccgagauuacauggaua

SEQ ID NO: 324391 - RNA, 19 nt, Homo sapiens
  misc_RNA (1)...(19): siRNA sense strand
ggucagaauccuguuguaa

SEQ ID NO: 324392 - RNA, 19 nt, Homo sapiens
  misc_RNA (1)...(19): siRNA sense strand
agaccgagauuacauggau

SEQ ID NO: 324393 - RNA, 19 nt, Homo sapiens
  misc_RNA (1)...(19): siRNA sense strand
ugagugaagcugaauuuga

SEQ ID NO: 324394 - RNA, 19 nt, Homo sapiens
  misc_RNA (1)...(19): siRNA sense strand
auaaacaguuccugaguca

SEQ ID NO: 324395 - RNA, 19 nt, Homo sapiens
  misc_RNA (1)...(19): siRNA sense strand
guaacuccaugcaauaaac

SEQ ID NO: 324396 - RNA, 19 nt, Homo sapiens
  misc_RNA (1)...(19): siRNA sense strand
cgaccuccaccauaugaua

SEQ ID NO: 324397 - RNA, 19 nt, Homo sapiens
  misc_RNA (1)...(19): siRNA sense strand
gaucagauagauuuguaug

SEQ ID NO: 324398 - RNA, 19 nt, Homo sapiens
  misc_RNA (1)...(19): siRNA sense strand
aaucuaacaugguggacaa

SEQ ID NO: 324399 - RNA, 19 nt, Homo sapiens
  misc_RNA (1)...(19): siRNA sense strand
uaacaugguggacaacaga

SEQ ID NO: 324400 - RNA, 19 nt, Homo sapiens
  misc_RNA (1)...(19): siRNA sense strand
gagggaccauaguagauca

SEQ ID NO: 324401 - RNA, 19 nt, Homo sapiens
  misc_RNA (1)...(19): siRNA sense strand
agagagagggaccauagua

SEQ ID NO: 324402 - RNA, 19 nt, Homo sapiens
  misc_RNA (1)...(19): siRNA sense strand
cagaugaagacuuaacuga

SEQ ID NO: 324403 - RNA, 19 nt, Homo sapiens
  misc_RNA (1)...(19): siRNA sense strand
gagcagcaccaaauguugu

SEQ ID NO: 324404 - RNA, 19 nt, Homo sapiens
  misc_RNA (1)...(19): siRNA sense strand
ucauaaaucccguaguaga

SEQ ID NO: 324405 - RNA, 19 nt, Homo sapiens
  misc_RNA (1)...(19): siRNA sense strand
gaaauggauacugcaagaa

SEQ ID NO: 324406 - RNA, 19 nt, Homo sapiens
  misc_RNA (1)...(19): siRNA sense strand
gcaguucccgugcagcauu

SEQ ID NO: 324407 - RNA, 19 nt, Homo sapiens
  misc_RNA (1)...(19): siRNA sense strand
aaacaguuccugagucaau

SEQ ID NO: 324408 - RNA, 19 nt, Homo sapiens
  misc_RNA (1)...(19): siRNA sense strand
ucagaauccuguuguaacu

SEQ ID NO: 324409 - RNA, 19 nt, Homo sapiens
  misc_RNA (1)...(19): siRNA sense strand
guaaaggagcagcaccaaa

SEQ ID NO: 324410 - RNA, 19 nt, Homo sapiens
  misc_RNA (1)...(19): siRNA sense strand
aagauugccuucauggaau

SEQ ID NO: 324411 - RNA, 19 nt, Homo sapiens
  misc_RNA (1)...(19): siRNA sense strand
gaacuucauggucagaauc

SEQ ID NO: 324412 - RNA, 19 nt, Homo sapiens
  misc_RNA (1)...(19): siRNA sense strand
gagagggaccauaguagau

SEQ ID NO: 324413 - RNA, 19 nt, Homo sapiens
  misc_RNA (1)...(19): siRNA sense strand
ucagauagauuuguaugac

SEQ ID NO: 324414 - RNA, 19 nt, Homo sapiens
  misc_RNA (1)...(19): siRNA sense strand
guugcaaaguucuuauuag

SEQ ID NO: 324415 - RNA, 19 nt, Homo sapiens
  misc_RNA (1)...(19): siRNA sense strand
guuguaacuccaugcaaua

SEQ ID NO: 324416 - RNA, 19 nt, Homo sapiens
  misc_RNA (1)...(19): siRNA sense strand
ggagcagcaccaaauguug

SEQ ID NO: 324417 - RNA, 19 nt, Homo sapiens
  misc_RNA (1)...(19): siRNA sense strand
caggaaaacuacacaauca

SEQ ID NO: 324418 - RNA, 19 nt, Homo sapiens
  misc_RNA (1)...(19): siRNA sense strand
uacauauacuggaaagaga

SEQ ID NO: 324419 - RNA, 19 nt, Homo sapiens
  misc_RNA (1)...(19): siRNA sense strand
gcaccaaauguugucuaua

SEQ ID NO: 324420 - RNA, 19 nt, Homo sapiens
  misc_RNA (1)...(19): siRNA sense strand
cgaauaucgucaucguuag

SEQ ID NO: 324421 - RNA, 19 nt, Homo sapiens
  misc_RNA (1)...(19): siRNA sense strand
ugaccgagagcgcgaauau

SEQ ID NO: 324422 - RNA, 19 nt, Homo sapiens
  misc_RNA (1)...(19): siRNA sense strand
gccauugagugaagcugaa

SEQ ID NO: 324423 - RNA, 19 nt, Homo sapiens
  misc_RNA (1)...(19): siRNA sense strand
ggaugucggcgaagaguuc

SEQ ID NO: 324424 - RNA, 19 nt, Homo sapiens
  misc_RNA (1)...(19): siRNA sense strand
agaaauagggcaaucucaa

SEQ ID NO: 324425 - RNA, 19 nt, Homo sapiens
  misc_RNA (1)...(19): siRNA sense strand
gcgcgaauaucgucaucgu

SEQ ID NO: 324426 - RNA, 19 nt, Homo sapiens
  misc_RNA (1)...(19): siRNA sense strand
gagagagggaccauaguag

SEQ ID NO: 324427 - RNA, 19 nt, Homo sapiens
  misc_RNA (1)...(19): siRNA sense strand
gaguccaagucuuaugguu

SEQ ID NO: 324428 - RNA, 19 nt, Homo sapiens
  misc_RNA (1)...(19): siRNA sense strand
gcuauugagacacugguaa

SEQ ID NO: 324429 - RNA, 19 nt, Homo sapiens
  misc_RNA (1)...(19): siRNA sense strand
guucauucuuugggaguaa

SEQ ID NO: 324430 - RNA, 19 nt, Homo sapiens
  misc_RNA (1)...(19): siRNA sense strand
guccaagucuuaugguucu

SEQ ID NO: 324431 - RNA, 19 nt, Homo sapiens
  misc_RNA (1)...(19): siRNA sense strand
gaauauggugggcaugauc

SEQ ID NO: 324432 - RNA, 19 nt, Homo sapiens
  misc_RNA (1)...(19): siRNA sense strand
ccaaaguaucugcugauga

SEQ ID NO: 324433 - RNA, 19 nt, Homo sapiens
  misc_RNA (1)...(19): siRNA sense strand
uggaaagagaauugcauua

SEQ ID NO: 324434 - RNA, 19 nt, Homo sapiens
  misc_RNA (1)...(19): siRNA sense strand
gauuaugggagugcuauug

SEQ ID NO: 324435 - RNA, 19 nt, Homo sapiens
  misc_RNA (1)...(19): siRNA sense strand
ugaaaugcaguccaggaaa

SEQ ID NO: 324436 - RNA, 19 nt, Homo sapiens
  misc_RNA (1)...(19): siRNA sense strand
caauaaacaguuccugagu

SEQ ID NO: 324437 - RNA, 19 nt, Homo sapiens
  misc_RNA (1)...(19): siRNA sense strand
gauacucucccaccaacug

SEQ ID NO: 324438 - RNA, 19 nt, Homo sapiens
  misc_RNA (1)...(19): siRNA sense strand
caacagaugaagacuuaac

SEQ ID NO: 324439 - RNA, 19 nt, Homo sapiens
  misc_RNA (1)...(19): siRNA sense strand
cguugcaaaguucuuauua

SEQ ID NO: 324440 - RNA, 19 nt, Homo sapiens
  misc_RNA (1)...(19): siRNA sense strand
gggcaugaucagauagauu

SEQ ID NO: 324441 - RNA, 19 nt, Homo sapiens
  misc_RNA (1)...(19): siRNA sense strand
ugggcgaccuccaccauau

SEQ ID NO: 324442 - RNA, 19 nt, Homo sapiens
  misc_RNA (1)...(19): siRNA sense strand
gagcgcgaauaucgucauc

SEQ ID NO: 324443 - RNA, 19 nt, Homo sapiens
  misc_RNA (1)...(19): siRNA sense strand
aagagucgacgucauaaau

SEQ ID NO: 324444 - RNA, 19 nt, Homo sapiens
  misc_RNA (1)...(19): siRNA sense strand
ugaugaucguugcaaaguu

SEQ ID NO: 324445 - RNA, 19 nt, Homo sapiens
  misc_RNA (1)...(19): siRNA sense strand
acugguaacugcaauuucu

SEQ ID NO: 324446 - RNA, 19 nt, Homo sapiens
  misc_RNA (1)...(19): siRNA sense strand
cagaagaccgagauuacau

SEQ ID NO: 324447 - RNA, 19 nt, Homo sapiens
  misc_RNA (1)...(19): siRNA sense strand
ucaaccaggaagcugaaua

SEQ ID NO: 324448 - RNA, 19 nt, Homo sapiens
  misc_RNA (1)...(19): siRNA sense strand
uggugggcaugaucagaua

SEQ ID NO: 324449 - RNA, 19 nt, Homo sapiens
  misc_RNA (1)...(19): siRNA sense strand
uggcaugccuacaucagau

SEQ ID NO: 324450 - RNA, 19 nt, Homo sapiens
  misc_RNA (1)...(19): siRNA sense strand
ugugaacccagcuuucuuu

SEQ ID NO: 324451 - RNA, 19 nt, Homo sapiens
  misc_RNA (1)...(19): siRNA sense strand
uaucuccaucugcaaauaa

SEQ ID NO: 324452 - RNA, 19 nt, Homo sapiens
  misc_RNA (1)...(19): siRNA sense strand
uguuguaacuccaugcaau

SEQ ID NO: 324453 - RNA, 19 nt, Homo sapiens
  misc_RNA (1)...(19): siRNA sense strand
uaauggagaugccccagaa

SEQ ID NO: 324454 - RNA, 19 nt, Homo sapiens
  misc_RNA (1)...(19): siRNA sense strand
gggaacaacuuucuucaaa

SEQ ID NO: 324455 - RNA, 19 nt, Homo sapiens
  misc_RNA (1)...(19): siRNA sense strand
gaacaacuuucuucaaacu

SEQ ID NO: 324456 - RNA, 19 nt, Homo sapiens
  misc_RNA (1)...(19): siRNA sense strand
caaacuaccugguggugaa

SEQ ID NO: 324457 - RNA, 19 nt, Homo sapiens
  misc_RNA (1)...(19): siRNA sense strand
gagggaagaauuugauaaa

SEQ ID NO: 324458 - RNA, 19 nt, Homo sapiens
  misc_RNA (1)...(19): siRNA sense strand
uguacccucuuaccaauua

SEQ ID NO: 324459 - RNA, 19 nt, Homo sapiens
  misc_RNA (1)...(19): siRNA sense strand
gaacuuaacccaggagaag

SEQ ID NO: 324460 - RNA, 19 nt, Homo sapiens
  misc_RNA (1)...(19): siRNA sense strand
ggaaugaggaggacuguag

SEQ ID NO: 324461 - RNA, 19 nt, Homo sapiens
  misc_RNA (1)...(19): siRNA sense strand
uuacaaagccuaaggaaca

SEQ ID NO: 324462 - RNA, 19 nt, Homo sapiens
  misc_RNA (1)...(19): siRNA sense strand
gcgcaugagggaagaauuu

SEQ ID NO: 324463 - RNA, 19 nt, Homo sapiens
  misc_RNA (1)...(19): siRNA sense strand
cuaaggaacauaagaaguu

SEQ ID NO: 324464 - RNA, 19 nt, Homo sapiens
  misc_RNA (1)...(19): siRNA sense strand
ggacuaaaacgcuuaauga

SEQ ID NO: 324465 - RNA, 19 nt, Homo sapiens
  misc_RNA (1)...(19): siRNA sense strand
ggaacaacuuucuucaaac

SEQ ID NO: 324466 - RNA, 19 nt, Homo sapiens
  misc_RNA (1)...(19): siRNA sense strand
caccauuguuugaauugua

SEQ ID NO: 324467 - RNA, 19 nt, Homo sapiens
  misc_RNA (1)...(19): siRNA sense strand
uaaggaacauaagaaguug

SEQ ID NO: 324468 - RNA, 19 nt, Homo sapiens
  misc_RNA (1)...(19): siRNA sense strand
aggagaagaugaaguugaa

SEQ ID NO: 324469 - RNA, 19 nt, Homo sapiens
  misc_RNA (1)...(19): siRNA sense strand
gauacugggucgucaggau

SEQ ID NO: 324470 - RNA, 19 nt, Homo sapiens
  misc_RNA (1)...(19): siRNA sense strand
caaagccuaaggaacauaa

SEQ ID NO: 324471 - RNA, 19 nt, Homo sapiens
  misc_RNA (1)...(19): siRNA sense strand
agaugaaguugaaggacua

SEQ ID NO: 324472 - RNA, 19 nt, Homo sapiens
  misc_RNA (1)...(19): siRNA sense strand
ugacaaugcaccaggauau

SEQ ID NO: 324473 - RNA, 19 nt, Homo sapiens
  misc_RNA (1)...(19): siRNA sense strand
gaaugaggaggacuguaga

SEQ ID NO: 324474 - RNA, 19 nt, Homo sapiens
  misc_RNA (1)...(19): siRNA sense strand
ggacccaucauuucuaguc

SEQ ID NO: 324475 - RNA, 19 nt, Homo sapiens
  misc_RNA (1)...(19): siRNA sense strand
gcaccauuguuugaauugu

SEQ ID NO: 324476 - RNA, 19 nt, Homo sapiens
  misc_RNA (1)...(19): siRNA sense strand
ccauauauuccugcacaua

SEQ ID NO: 324477 - RNA, 19 nt, Homo sapiens
  misc_RNA (1)...(19): siRNA sense strand
ccuccucaguauccauaua

SEQ ID NO: 324478 - RNA, 19 nt, Homo sapiens
  misc_RNA (1)...(19): siRNA sense strand
ugagggaagaauuugauaa

SEQ ID NO: 324479 - RNA, 19 nt, Homo sapiens
  misc_RNA (1)...(19): siRNA sense strand
gguagcugcaccauuguuu

SEQ ID NO: 324480 - RNA, 19 nt, Homo sapiens
  misc_RNA (1)...(19): siRNA sense strand
ucacucaguucggcaacaa

SEQ ID NO: 324481 - RNA, 19 nt, Homo sapiens
  misc_RNA (1)...(19): siRNA sense strand
gcaugagggaagaauuuga

SEQ ID NO: 324482 - RNA, 19 nt, Homo sapiens
  misc_RNA (1)...(19): siRNA sense strand
gcugcaccauuguuugaau

SEQ ID NO: 324483 - RNA, 19 nt, Homo sapiens
  misc_RNA (1)...(19): siRNA sense strand
ggguucugauuguacauga

SEQ ID NO: 324484 - RNA, 19 nt, Homo sapiens
  misc_RNA (1)...(19): siRNA sense strand
caggagaagaugaaguuga

SEQ ID NO: 324485 - RNA, 19 nt, Homo sapiens
  misc_RNA (1)...(19): siRNA sense strand
uugcaagacugggucauug

SEQ ID NO: 324486 - RNA, 19 nt, Homo sapiens
  misc_RNA (1)...(19): siRNA sense strand
acaacuuucuucaaacuac

SEQ ID NO: 324487 - RNA, 19 nt, Homo sapiens
  misc_RNA (1)...(19): siRNA sense strand
ccuguacccucuuaccaau

SEQ ID NO: 324488 - RNA, 19 nt, Homo sapiens
  misc_RNA (1)...(19): siRNA sense strand
uagcugcaccauuguuuga

SEQ ID NO: 324489 - RNA, 19 nt, Homo sapiens
  misc_RNA (1)...(19): siRNA sense strand
uaacccaggagaagaugaa

SEQ ID NO: 324490 - RNA, 19 nt, Homo sapiens
  misc_RNA (1)...(19): siRNA sense strand
ccucuuaccaauuauacuu

SEQ ID NO: 324491 - RNA, 19 nt, Homo sapiens
  misc_RNA (1)...(19): siRNA sense strand
gcugggaacaacuuucuuc

SEQ ID NO: 324492 - RNA, 19 nt, Homo sapiens
  misc_RNA (1)...(19): siRNA sense strand
cugcaccauuguuugaauu

SEQ ID NO: 324493 - RNA, 19 nt, Homo sapiens
  misc_RNA (1)...(19): siRNA sense strand
gaaguuguuucugguucag

SEQ ID NO: 324494 - RNA, 19 nt, Homo sapiens
  misc_RNA (1)...(19): siRNA sense strand
cccaggagaagaugaaguu

SEQ ID NO: 324495 - RNA, 19 nt, Homo sapiens
  misc_RNA (1)...(19): siRNA sense strand
gacaaugcaccaggauaug

SEQ ID NO: 324496 - RNA, 19 nt, Homo sapiens
  misc_RNA (1)...(19): siRNA sense strand
cauugacgauugcauuggu

SEQ ID NO: 324497 - RNA, 19 nt, Homo sapiens
  misc_RNA (1)...(19): siRNA sense strand
caaugcaccaggauaugga

SEQ ID NO: 324498 - RNA, 19 nt, Homo sapiens
  misc_RNA (1)...(19): siRNA sense strand
guagcugcaccauuguuug

SEQ ID NO: 324499 - RNA, 19 nt, Homo sapiens
  misc_RNA (1)...(19): siRNA sense strand
caugagggaagaauuugau

SEQ ID NO: 324500 - RNA, 19 nt, Homo sapiens
  misc_RNA (1)...(19): siRNA sense strand
gaugaaguugaaggacuaa

SEQ ID NO: 324501 - RNA, 19 nt, Homo sapiens
  misc_RNA (1)...(19): siRNA sense strand
gacccaucauuucuagucu

SEQ ID NO: 324502 - RNA, 19 nt, Homo sapiens
  misc_RNA (1)...(19): siRNA sense strand
ucuacgagcuguccaacua

SEQ ID NO: 324503 - RNA, 19 nt, Homo sapiens
  misc_RNA (1)...(19): siRNA sense strand
ugaggagagucauagauuu

SEQ ID NO: 324504 - RNA, 19 nt, Homo sapiens
  misc_RNA (1)...(19): siRNA sense strand
cuacagaggccagaugaua

SEQ ID NO: 324505 - RNA, 19 nt, Homo sapiens
  misc_RNA (1)...(19): siRNA sense strand
gcugcuggaugcucuauga

SEQ ID NO: 324506 - RNA, 19 nt, Homo sapiens
  misc_RNA (1)...(19): siRNA sense strand
gaggccagaugauagaguu

SEQ ID NO: 324507 - RNA, 19 nt, Homo sapiens
  misc_RNA (1)...(19): siRNA sense strand
gaggagagucauagauuuc

SEQ ID NO: 324508 - RNA, 19 nt, Homo sapiens
  misc_RNA (1)...(19): siRNA sense strand
ucuaugagcagcccaacua

SEQ ID NO: 324509 - RNA, 19 nt, Homo sapiens
  misc_RNA (1)...(19): siRNA sense strand
caggaccgcuuccgcuuca

SEQ ID NO: 324510 - RNA, 19 nt, Homo sapiens
  misc_RNA (1)...(19): siRNA sense strand
ggacuacagaggccagaug

SEQ ID NO: 324511 - RNA, 19 nt, Homo sapiens
  misc_RNA (1)...(19): siRNA sense strand
gcuccuggguccucuacga

SEQ ID NO: 324512 - RNA, 19 nt, Homo sapiens
  misc_RNA (1)...(19): siRNA sense strand
ggacugcuccugucuucag

SEQ ID NO: 324513 - RNA, 19 nt, Homo sapiens
  misc_RNA (1)...(19): siRNA sense strand
ggaagaucacccucuacga

SEQ ID NO: 324514 - RNA, 19 nt, Homo sapiens
  misc_RNA (1)...(19): siRNA sense strand
acucgggccuccaguacuu

SEQ ID NO: 324515 - RNA, 19 nt, Homo sapiens
  misc_RNA (1)...(19): siRNA sense strand
ugagagggaggacuacaga

SEQ ID NO: 324516 - RNA, 19 nt, Homo sapiens
  misc_RNA (1)...(19): siRNA sense strand
gacuacagaggccagauga

SEQ ID NO: 324517 - RNA, 19 nt, Homo sapiens
  misc_RNA (1)...(19): siRNA sense strand
cugaggagagucauagauu

SEQ ID NO: 324518 - RNA, 19 nt, Homo sapiens
  misc_RNA (1)...(19): siRNA sense strand
caaccugcagcccuacuug

SEQ ID NO: 324519 - RNA, 19 nt, Homo sapiens
  misc_RNA (1)...(19): siRNA sense strand
ucuaugagagggaggacua

SEQ ID NO: 324520 - RNA, 19 nt, Homo sapiens
  misc_RNA (1)...(19): siRNA sense strand
acagaggccagaugauaga

SEQ ID NO: 324521 - RNA, 19 nt, Homo sapiens
  misc_RNA (1)...(19): siRNA sense strand
ucacaggaucagacucuau

SEQ ID NO: 324522 - RNA, 19 nt, Homo sapiens
  misc_RNA (1)...(19): siRNA sense strand
ggaccgcuuccgcuucaau

SEQ ID NO: 324523 - RNA, 19 nt, Homo sapiens
  misc_RNA (1)...(19): siRNA sense strand
cacaggaucagacucuaug

SEQ ID NO: 324524 - RNA, 19 nt, Homo sapiens
  misc_RNA (1)...(19): siRNA sense strand
ugaaauccacucccucaac

SEQ ID NO: 324525 - RNA, 19 nt, Homo sapiens
  misc_RNA (1)...(19): siRNA sense strand
ccagagaucuugauuauuc

SEQ ID NO: 324526 - RNA, 19 nt, Homo sapiens
  misc_RNA (1)...(19): siRNA sense strand
gaaguuguccguacagaua

SEQ ID NO: 324527 - RNA, 19 nt, Homo sapiens
  misc_RNA (1)...(19): siRNA sense strand
ccaaagagcccauuacaac

SEQ ID NO: 324528 - RNA, 19 nt, Homo sapiens
  misc_RNA (1)...(19): siRNA sense strand
ccuccaaucugcaugauga

SEQ ID NO: 324529 - RNA, 19 nt, Homo sapiens
  misc_RNA (1)...(19): siRNA sense strand
agacauacagcucggaaua

SEQ ID NO: 324530 - RNA, 19 nt, Homo sapiens
  misc_RNA (1)...(19): siRNA sense strand
gcaccuccauguacuucaa

SEQ ID NO: 324531 - RNA, 19 nt, Homo sapiens
  misc_RNA (1)...(19): siRNA sense strand
acaccaagcugaccaugga

SEQ ID NO: 324532 - RNA, 19 nt, Homo sapiens
  misc_RNA (1)...(19): siRNA sense strand
caagagaacagugcagaaa

SEQ ID NO: 324533 - RNA, 19 nt, Homo sapiens
  misc_RNA (1)...(19): siRNA sense strand
acccagagaucuugauuau

SEQ ID NO: 324534 - RNA, 19 nt, Homo sapiens
  misc_RNA (1)...(19): siRNA sense strand
ucagaagugucucaguguu

SEQ ID NO: 324535 - RNA, 19 nt, Homo sapiens
  misc_RNA (1)...(19): siRNA sense strand
caaaccaaagagcccauua

SEQ ID NO: 324536 - RNA, 19 nt, Homo sapiens
  misc_RNA (1)...(19): siRNA sense strand
gaggucgucugccuuccaa

SEQ ID NO: 324537 - RNA, 19 nt, Homo sapiens
  misc_RNA (1)...(19): siRNA sense strand
ucucaguguuggaauggua

SEQ ID NO: 324538 - RNA, 19 nt, Homo sapiens
  misc_RNA (1)...(19): siRNA sense strand
caaagagcccauuacaaca

SEQ ID NO: 324539 - RNA, 19 nt, Homo sapiens
  misc_RNA (1)...(19): siRNA sense strand
gagcaacuacgaacucaag

SEQ ID NO: 324540 - RNA, 19 nt, Homo sapiens
  misc_RNA (1)...(19): siRNA sense strand
ugucaguacugucgauuuc

SEQ ID NO: 324541 - RNA, 19 nt, Homo sapiens
  misc_RNA (1)...(19): siRNA sense strand
gaccuuggcagcacugaga

SEQ ID NO: 324542 - RNA, 19 nt, Homo sapiens
  misc_RNA (1)...(19): siRNA sense strand
gaauacaccacggagauca

SEQ ID NO: 324543 - RNA, 19 nt, Homo sapiens
  misc_RNA (1)...(19): siRNA sense strand
ucucagcccucuccaccuu

SEQ ID NO: 324544 - RNA, 19 nt, Homo sapiens
  misc_RNA (1)...(19): siRNA sense strand
aaaccgaugucaguacugu

SEQ ID NO: 324545 - RNA, 19 nt, Homo sapiens
  misc_RNA (1)...(19): siRNA sense strand
cgaaaccgaugucaguacu

SEQ ID NO: 324546 - RNA, 19 nt, Homo sapiens
  misc_RNA (1)...(19): siRNA sense strand
acauacagcucggaauaca

SEQ ID NO: 324547 - RNA, 19 nt, Homo sapiens
  misc_RNA (1)...(19): siRNA sense strand
guagacaagagacgucgaa

SEQ ID NO: 324548 - RNA, 19 nt, Homo sapiens
  misc_RNA (1)...(19): siRNA sense strand
caucagcagccauccauuc

SEQ ID NO: 324549 - RNA, 19 nt, Homo sapiens
  misc_RNA (1)...(19): siRNA sense strand
gacaagagacgucgaaacc

SEQ ID NO: 324550 - RNA, 19 nt, Homo sapiens
  misc_RNA (1)...(19): siRNA sense strand
cagaagugucucaguguug

SEQ ID NO: 324551 - RNA, 19 nt, Homo sapiens
  misc_RNA (1)...(19): siRNA sense strand
ggaauacaccacggagauc

SEQ ID NO: 324552 - RNA, 19 nt, Homo sapiens
  misc_RNA (1)...(19): siRNA sense strand
ccaaucugcaugaugaaug

SEQ ID NO: 324553 - RNA, 19 nt, Homo sapiens
  misc_RNA (1)...(19): siRNA sense strand
ccagcuaccaucaccauca

SEQ ID NO: 324554 - RNA, 19 nt, Homo sapiens
  misc_RNA (1)...(19): siRNA sense strand
cgucgaaaccgaugucagu

SEQ ID NO: 324555 - RNA, 19 nt, Homo sapiens
  misc_RNA (1)...(19): siRNA sense strand
caacacccagagaucuuga

SEQ ID NO: 324556 - RNA, 19 nt, Homo sapiens
  misc_RNA (1)...(19): siRNA sense strand
cacccagagaucuugauua

SEQ ID NO: 324557 - RNA, 19 nt, Homo sapiens
  misc_RNA (1)...(19): siRNA sense strand
gcccagcaccuccauguac

SEQ ID NO: 324558 - RNA, 19 nt, Homo sapiens
  misc_RNA (1)...(19): siRNA sense strand
ccuccagguuccaguuaug

SEQ ID NO: 324559 - RNA, 19 nt, Homo sapiens
  misc_RNA (1)...(19): siRNA sense strand
cggaauacaccacggagau

SEQ ID NO: 324560 - RNA, 19 nt, Homo sapiens
  misc_RNA (1)...(19): siRNA sense strand
ucaagagaacagugcagaa

SEQ ID NO: 324561 - RNA, 19 nt, Homo sapiens
  misc_RNA (1)...(19): siRNA sense strand
gcuucccgcucuuccacuu

SEQ ID NO: 324562 - RNA, 19 nt, Homo sapiens
  misc_RNA (1)...(19): siRNA sense strand
aaaagaaguuguccguaca

SEQ ID NO: 324563 - RNA, 19 nt, Homo sapiens
  misc_RNA (1)...(19): siRNA sense strand
ucaguacugucgauuucag

SEQ ID NO: 324564 - RNA, 19 nt, Homo sapiens
  misc_RNA (1)...(19): siRNA sense strand
aaagagcccauuacaacag

SEQ ID NO: 324565 - RNA, 19 nt, Homo sapiens
  misc_RNA (1)...(19): siRNA sense strand
cgucugccuuccaaaccaa

SEQ ID NO: 324566 - RNA, 19 nt, Homo sapiens
  misc_RNA (1)...(19): siRNA sense strand
ccagagaucuugauuauuc

SEQ ID NO: 324567 - RNA, 19 nt, Homo sapiens
  misc_RNA (1)...(19): siRNA sense strand
gaaguuguccguacagaua

SEQ ID NO: 324568 - RNA, 19 nt, Homo sapiens
  misc_RNA (1)...(19): siRNA sense strand
ccaaagagcccauuacaac

SEQ ID NO: 324569 - RNA, 19 nt, Homo sapiens
  misc_RNA (1)...(19): siRNA sense strand
ccuccaaucugcaugauga

SEQ ID NO: 324570 - RNA, 19 nt, Homo sapiens
  misc_RNA (1)...(19): siRNA sense strand
agacauacagcucggaaua

SEQ ID NO: 324571 - RNA, 19 nt, Homo sapiens
  misc_RNA (1)...(19): siRNA sense strand
gcaccuccauguacuucaa

SEQ ID NO: 324572 - RNA, 19 nt, Homo sapiens
  misc_RNA (1)...(19): siRNA sense strand
acaccaagcugaccaugga

SEQ ID NO: 324573 - RNA, 19 nt, Homo sapiens
  misc_RNA (1)...(19): siRNA sense strand
caagagaacagugcagaaa

SEQ ID NO: 324574 - RNA, 19 nt, Homo sapiens
  misc_RNA (1)...(19): siRNA sense strand
acccagagaucuugauuau

SEQ ID NO: 324575 - RNA, 19 nt, Homo sapiens
  misc_RNA (1)...(19): siRNA sense strand
ucagaagugucucaguguu

SEQ ID NO: 324576 - RNA, 19 nt, Homo sapiens
  misc_RNA (1)...(19): siRNA sense strand
caaaccaaagagcccauua

SEQ ID NO: 324577 - RNA, 19 nt, Homo sapiens
  misc_RNA (1)...(19): siRNA sense strand
gaggucgucugccuuccaa

SEQ ID NO: 324578 - RNA, 19 nt, Homo sapiens
  misc_RNA (1)...(19): siRNA sense strand
ucucaguguuggaauggua

SEQ ID NO: 324579 - RNA, 19 nt, Homo sapiens
  misc_RNA (1)...(19): siRNA sense strand
caaagagcccauuacaaca

SEQ ID NO: 324580 - RNA, 19 nt, Homo sapiens
  misc_RNA (1)...(19): siRNA sense strand
gagcaacuacgaacucaag

SEQ ID NO: 324581 - RNA, 19 nt, Homo sapiens
  misc_RNA (1)...(19): siRNA sense strand
ugucaguacugucgauuuc

SEQ ID NO: 324582 - RNA, 19 nt, Homo sapiens
  misc_RNA (1)...(19): siRNA sense strand
gaccuuggcagcacugaga

SEQ ID NO: 324583 - RNA, 19 nt, Homo sapiens
  misc_RNA (1)...(19): siRNA sense strand
gaauacaccacggagauca

SEQ ID NO: 324584 - RNA, 19 nt, Homo sapiens
  misc_RNA (1)...(19): siRNA sense strand
ucucagcccucuccaccuu

SEQ ID NO: 324585 - RNA, 19 nt, Homo sapiens
  misc_RNA (1)...(19): siRNA sense strand
aaaccgaugucaguacugu

SEQ ID NO: 324586 - RNA, 19 nt, Homo sapiens
  misc_RNA (1)...(19): siRNA sense strand
cgaaaccgaugucaguacu

SEQ ID NO: 324587 - RNA, 19 nt, Homo sapiens
  misc_RNA (1)...(19): siRNA sense strand
acauacagcucggaauaca

SEQ ID NO: 324588 - RNA, 19 nt, Homo sapiens
  misc_RNA (1)...(19): siRNA sense strand
guagacaagagacgucgaa

SEQ ID NO: 324589 - RNA, 19 nt, Homo sapiens
  misc_RNA (1)...(19): siRNA sense strand
caucagcagccauccauuc

SEQ ID NO: 324590 - RNA, 19 nt, Homo sapiens
  misc_RNA (1)...(19): siRNA sense strand
gacaagagacgucgaaacc

SEQ ID NO: 324591 - RNA, 19 nt, Homo sapiens
  misc_RNA (1)...(19): siRNA sense strand
cagaagugucucaguguug

SEQ ID NO: 324592 - RNA, 19 nt, Homo sapiens
  misc_RNA (1)...(19): siRNA sense strand
ggaauacaccacggagauc

SEQ ID NO: 324593 - RNA, 19 nt, Homo sapiens
  misc_RNA (1)...(19): siRNA sense strand
ccaaucugcaugaugaaug

SEQ ID NO: 324594 - RNA, 19 nt, Homo sapiens
  misc_RNA (1)...(19): siRNA sense strand
ccagcuaccaucaccauca

SEQ ID NO: 324595 - RNA, 19 nt, Homo sapiens
  misc_RNA (1)...(19): siRNA sense strand
cgucgaaaccgaugucagu

SEQ ID NO: 324596 - RNA, 19 nt, Homo sapiens
  misc_RNA (1)...(19): siRNA sense strand
caacacccagagaucuuga

SEQ ID NO: 324597 - RNA, 19 nt, Homo sapiens
  misc_RNA (1)...(19): siRNA sense strand
cacccagagaucuugauua

SEQ ID NO: 324598 - RNA, 19 nt, Homo sapiens
  misc_RNA (1)...(19): siRNA sense strand
gcccagcaccuccauguac

SEQ ID NO: 324599 - RNA, 19 nt, Homo sapiens
  misc_RNA (1)...(19): siRNA sense strand
ccuccagguuccaguuaug

SEQ ID NO: 324600 - RNA, 19 nt, Homo sapiens
  misc_RNA (1)...(19): siRNA sense strand
cggaauacaccacggagau

SEQ ID NO: 324601 - RNA, 19 nt, Homo sapiens
  misc_RNA (1)...(19): siRNA sense strand
ucaagagaacagugcagaa

SEQ ID NO: 324602 - RNA, 19 nt, Homo sapiens
  misc_RNA (1)...(19): siRNA sense strand
gcuucccgcucuuccacuu

SEQ ID NO: 324603 - RNA, 19 nt, Homo sapiens
  misc_RNA (1)...(19): siRNA sense strand
aaaagaaguuguccguaca

SEQ ID NO: 324604 - RNA, 19 nt, Homo sapiens
  misc_RNA (1)...(19): siRNA sense strand
ucaguacugucgauuucag

SEQ ID NO: 324605 - RNA, 19 nt, Homo sapiens
  misc_RNA (1)...(19): siRNA sense strand
aaagagcccauuacaacag

SEQ ID NO: 324606 - RNA, 19 nt, Homo sapiens
  misc_RNA (1)...(19): siRNA sense strand
cgucugccuuccaaaccaa

SEQ ID NO: 324607 - RNA, 19 nt, Homo sapiens
  misc_RNA (1)...(19): siRNA sense strand
ccagagaucuugauuauuc

SEQ ID NO: 324608 - RNA, 19 nt, Homo sapiens
  misc_RNA (1)...(19): siRNA sense strand
gaaguuguccguacagaua

SEQ ID NO: 324609 - RNA, 19 nt, Homo sapiens
  misc_RNA (1)...(19): siRNA sense strand
ccaaagagcccauuacaac

SEQ ID NO: 324610 - RNA, 19 nt, Homo sapiens
  misc_RNA (1)...(19): siRNA sense strand
ccuccaaucugcaugauga

SEQ ID NO: 324611 - RNA, 19 nt, Homo sapiens
  misc_RNA (1)...(19): siRNA sense strand
agacauacagcucggaaua

SEQ ID NO: 324612 - RNA, 19 nt, Homo sapiens
  misc_RNA (1)...(19): siRNA sense strand
gcaccuccauguacuucaa

SEQ ID NO: 324613 - RNA, 19 nt, Homo sapiens
  misc_RNA (1)...(19): siRNA sense strand
acaccaagcugaccaugga

SEQ ID NO: 324614 - RNA, 19 nt, Homo sapiens
  misc_RNA (1)...(19): siRNA sense strand
caagagaacagugcagaaa

SEQ ID NO: 324615 - RNA, 19 nt, Homo sapiens
  misc_RNA (1)...(19): siRNA sense strand
acccagagaucuugauuau

SEQ ID NO: 324616 - RNA, 19 nt, Homo sapiens
  misc_RNA (1)...(19): siRNA sense strand
ucagaagugucucaguguu

SEQ ID NO: 324617 - RNA, 19 nt, Homo sapiens
  misc_RNA (1)...(19): siRNA sense strand
caaaccaaagagcccauua

SEQ ID NO: 324618 - RNA, 19 nt, Homo sapiens
  misc_RNA (1)...(19): siRNA sense strand
gaggucgucugccuuccaa

SEQ ID NO: 324619 - RNA, 19 nt, Homo sapiens
  misc_RNA (1)...(19): siRNA sense strand
ucucaguguuggaauggua

SEQ ID NO: 324620 - RNA, 19 nt, Homo sapiens
  misc_RNA (1)...(19): siRNA sense strand
caaagagcccauuacaaca

SEQ ID NO: 324621 - RNA, 19 nt, Homo sapiens
  misc_RNA (1)...(19): siRNA sense strand
gagcaacuacgaacucaag

SEQ ID NO: 324622 - RNA, 19 nt, Homo sapiens
  misc_RNA (1)...(19): siRNA sense strand
ugucaguacugucgauuuc

SEQ ID NO: 324623 - RNA, 19 nt, Homo sapiens
  misc_RNA (1)...(19): siRNA sense strand
gaccuuggcagcacugaga

SEQ ID NO: 324624 - RNA, 19 nt, Homo sapiens
  misc_RNA (1)...(19): siRNA sense strand
gaauacaccacggagauca

SEQ ID NO: 324625 - RNA, 19 nt, Homo sapiens
  misc_RNA (1)...(19): siRNA sense strand
ucucagcccucuccaccuu

SEQ ID NO: 324626 - RNA, 19 nt, Homo sapiens
  misc_RNA (1)...(19): siRNA sense strand
aaaccgaugucaguacugu

SEQ ID NO: 324627 - RNA, 19 nt, Homo sapiens
  misc_RNA (1)...(19): siRNA sense strand
cgaaaccgaugucaguacu

SEQ ID NO: 324628 - RNA, 19 nt, Homo sapiens
  misc_RNA (1)...(19): siRNA sense strand
acauacagcucggaauaca

SEQ ID NO: 324629 - RNA, 19 nt, Homo sapiens
  misc_RNA (1)...(19): siRNA sense strand
guagacaagagacgucgaa

SEQ ID NO: 324630 - RNA, 19 nt, Homo sapiens
  misc_RNA (1)...(19): siRNA sense strand
caucagcagccauccauuc

SEQ ID NO: 324631 - RNA, 19 nt, Homo sapiens
  misc_RNA (1)...(19): siRNA sense strand
gacaagagacgucgaaacc

SEQ ID NO: 324632 - RNA, 19 nt, Homo sapiens
  misc_RNA (1)...(19): siRNA sense strand
cagaagugucucaguguug

SEQ ID NO: 324633 - RNA, 19 nt, Homo sapiens
  misc_RNA (1)...(19): siRNA sense strand
ggaauacaccacggagauc

SEQ ID NO: 324634 - RNA, 19 nt, Homo sapiens
  misc_RNA (1)...(19): siRNA sense strand
ccaaucugcaugaugaaug

SEQ ID NO: 324635 - RNA, 19 nt, Homo sapiens
  misc_RNA (1)...(19): siRNA sense strand
ccagcuaccaucaccauca

SEQ ID NO: 324636 - RNA, 19 nt, Homo sapiens
  misc_RNA (1)...(19): siRNA sense strand
cgucgaaaccgaugucagu

SEQ ID NO: 324637 - RNA, 19 nt, Homo sapiens
  misc_RNA (1)...(19): siRNA sense strand
caacacccagagaucuuga

SEQ ID NO: 324638 - RNA, 19 nt, Homo sapiens
  misc_RNA (1)...(19): siRNA sense strand
cacccagagaucuugauua

SEQ ID NO: 324639 - RNA, 19 nt, Homo sapiens
  misc_RNA (1)...(19): siRNA sense strand
gcccagcaccuccauguac

SEQ ID NO: 324640 - RNA, 19 nt, Homo sapiens
  misc_RNA (1)...(19): siRNA sense strand
ccuccagguuccaguuaug

SEQ ID NO: 324641 - RNA, 19 nt, Homo sapiens
  misc_RNA (1)...(19): siRNA sense strand
cggaauacaccacggagau

SEQ ID NO: 324642 - RNA, 19 nt, Homo sapiens
  misc_RNA (1)...(19): siRNA sense strand
ucaagagaacagugcagaa

SEQ ID NO: 324643 - RNA, 19 nt, Homo sapiens
  misc_RNA (1)...(19): siRNA sense strand
gcuucccgcucuuccacuu

SEQ ID NO: 324644 - RNA, 19 nt, Homo sapiens
  misc_RNA (1)...(19): siRNA sense strand
aaaagaaguuguccguaca

SEQ ID NO: 324645 - RNA, 19 nt, Homo sapiens
  misc_RNA (1)...(19): siRNA sense strand
ucaguacugucgauuucag

SEQ ID NO: 324646 - RNA, 19 nt, Homo sapiens
  misc_RNA (1)...(19): siRNA sense strand
aaagagcccauuacaacag

SEQ ID NO: 324647 - RNA, 19 nt, Homo sapiens
  misc_RNA (1)...(19): siRNA sense strand
cgucugccuuccaaaccaa

SEQ ID NO: 324648 - RNA, 19 nt, Homo sapiens
  misc_RNA (1)...(19): siRNA sense strand
ccagagaucuugauuauuc

SEQ ID NO: 324649 - RNA, 19 nt, Homo sapiens
  misc_RNA (1)...(19): siRNA sense strand
gaaguuguccguacagaua

SEQ ID NO: 324650 - RNA, 19 nt, Homo sapiens
  misc_RNA (1)...(19): siRNA sense strand
ccaaagagcccauuacaac

SEQ ID NO: 324651 - RNA, 19 nt, Homo sapiens
  misc_RNA (1)...(19): siRNA sense strand
ccuccaaucugcaugauga

SEQ ID NO: 324652 - RNA, 19 nt, Homo sapiens
  misc_RNA (1)...(19): siRNA sense strand
agacauacagcucggaaua

SEQ ID NO: 324653 - RNA, 19 nt, Homo sapiens
  misc_RNA (1)...(19): siRNA sense strand
gcaccuccauguacuucaa

SEQ ID NO: 324654 - RNA, 19 nt, Homo sapiens
  misc_RNA (1)...(19): siRNA sense strand
acaccaagcugaccaugga

SEQ ID NO: 324655 - RNA, 19 nt, Homo sapiens
  misc_RNA (1)...(19): siRNA sense strand
caagagaacagugcagaaa

SEQ ID NO: 324656 - RNA, 19 nt, Homo sapiens
  misc_RNA (1)...(19): siRNA sense strand
acccagagaucuugauuau

SEQ ID NO: 324657 - RNA, 19 nt, Homo sapiens
  misc_RNA (1)...(19): siRNA sense strand
ucagaagugucucaguguu

SEQ ID NO: 324658 - RNA, 19 nt, Homo sapiens
  misc_RNA (1)...(19): siRNA sense strand
caaaccaaagagcccauua

SEQ ID NO: 324659 - RNA, 19 nt, Homo sapiens
  misc_RNA (1)...(19): siRNA sense strand
gaggucgucugccuuccaa

SEQ ID NO: 324660 - RNA, 19 nt, Homo sapiens
  misc_RNA (1)...(19): siRNA sense strand
ucucaguguuggaauggua

SEQ ID NO: 324661 - RNA, 19 nt, Homo sapiens
  misc_RNA (1)...(19): siRNA sense strand
caaagagcccauuacaaca

SEQ ID NO: 324662 - RNA, 19 nt, Homo sapiens
  misc_RNA (1)...(19): siRNA sense strand
gagcaacuacgaacucaag

SEQ ID NO: 324663 - RNA, 19 nt, Homo sapiens
  misc_RNA (1)...(19): siRNA sense strand
ugucaguacugucgauuuc

SEQ ID NO: 324664 - RNA, 19 nt, Homo sapiens
  misc_RNA (1)...(19): siRNA sense strand
gaccuuggcagcacugaga

SEQ ID NO: 324665 - RNA, 19 nt, Homo sapiens
  misc_RNA (1)...(19): siRNA sense strand
gaauacaccacggagauca

SEQ ID NO: 324666 - RNA, 19 nt, Homo sapiens
  misc_RNA (1)...(19): siRNA sense strand
ucucagcccucuccaccuu

SEQ ID NO: 324667 - RNA, 19 nt, Homo sapiens
  misc_RNA (1)...(19): siRNA sense strand
aaaccgaugucaguacugu

SEQ ID NO: 324668 - RNA, 19 nt, Homo sapiens
  misc_RNA (1)...(19): siRNA sense strand
cgaaaccgaugucaguacu

SEQ ID NO: 324669 - RNA, 19 nt, Homo sapiens
  misc_RNA (1)...(19): siRNA sense strand
acauacagcucggaauaca

SEQ ID NO: 324670 - RNA, 19 nt, Homo sapiens
  misc_RNA (1)...(19): siRNA sense strand
guagacaagagacgucgaa

SEQ ID NO: 324671 - RNA, 19 nt, Homo sapiens
  misc_RNA (1)...(19): siRNA sense strand
caucagcagccauccauuc

SEQ ID NO: 324672 - RNA, 19 nt, Homo sapiens
  misc_RNA (1)...(19): siRNA sense strand
gacaagagacgucgaaacc

SEQ ID NO: 324673 - RNA, 19 nt, Homo sapiens
  misc_RNA (1)...(19): siRNA sense strand
cagaagugucucaguguug

SEQ ID NO: 324674 - RNA, 19 nt, Homo sapiens
  misc_RNA (1)...(19): siRNA sense strand
ggaauacaccacggagauc

SEQ ID NO: 324675 - RNA, 19 nt, Homo sapiens
  misc_RNA (1)...(19): siRNA sense strand
ccaaucugcaugaugaaug

SEQ ID NO: 324676 - RNA, 19 nt, Homo sapiens
  misc_RNA (1)...(19): siRNA sense strand
ccagcuaccaucaccauca

SEQ ID NO: 324677 - RNA, 19 nt, Homo sapiens
  misc_RNA (1)...(19): siRNA sense strand
cgucgaaaccgaugucagu

SEQ ID NO: 324678 - RNA, 19 nt, Homo sapiens
  misc_RNA (1)...(19): siRNA sense strand
caacacccagagaucuuga

SEQ ID NO: 324679 - RNA, 19 nt, Homo sapiens
  misc_RNA (1)...(19): siRNA sense strand
cacccagagaucuugauua

SEQ ID NO: 324680 - RNA, 19 nt, Homo sapiens
  misc_RNA (1)...(19): siRNA sense strand
gcccagcaccuccauguac

SEQ ID NO: 324681 - RNA, 19 nt, Homo sapiens
  misc_RNA (1)...(19): siRNA sense strand
ccuccagguuccaguuaug

SEQ ID NO: 324682 - RNA, 19 nt, Homo sapiens
  misc_RNA (1)...(19): siRNA sense strand
cggaauacaccacggagau

SEQ ID NO: 324683 - RNA, 19 nt, Homo sapiens
  misc_RNA (1)...(19): siRNA sense strand
ucaagagaacagugcagaa

SEQ ID NO: 324684 - RNA, 19 nt, Homo sapiens
  misc_RNA (1)...(19): siRNA sense strand
gcuucccgcucuuccacuu

SEQ ID NO: 324685 - RNA, 19 nt, Homo sapiens
  misc_RNA (1)...(19): siRNA sense strand
aaaagaaguuguccguaca

SEQ ID NO: 324686 - RNA, 19 nt, Homo sapiens
  misc_RNA (1)...(19): siRNA sense strand
ucaguacugucgauuucag

SEQ ID NO: 324687 - RNA, 19 nt, Homo sapiens
  misc_RNA (1)...(19): siRNA sense strand
aaagagcccauuacaacag

SEQ ID NO: 324688 - RNA, 19 nt, Homo sapiens
  misc_RNA (1)...(19): siRNA sense strand
cgucugccuuccaaaccaa

SEQ ID NO: 324689 - RNA, 19 nt, Homo sapiens
  misc_RNA (1)...(19): siRNA sense strand
ggugauccaugaacucuga

SEQ ID NO: 324690 - RNA, 19 nt, Homo sapiens
  misc_RNA (1)...(19): siRNA sense strand
cuaagaagcuggacuuuug

SEQ ID NO: 324691 - RNA, 19 nt, Homo sapiens
  misc_RNA (1)...(19): siRNA sense strand
gaccuaagaagcuggacuu

SEQ ID NO: 324692 - RNA, 19 nt, Homo sapiens
  misc_RNA (1)...(19): siRNA sense strand
ccaccucugugcuggacaa

SEQ ID NO: 324693 - RNA, 19 nt, Homo sapiens
  misc_RNA (1)...(19): siRNA sense strand
agacaucaccgcacguuuc

SEQ ID NO: 324694 - RNA, 19 nt, Homo sapiens
  misc_RNA (1)...(19): siRNA sense strand
gcccaucugcccacaauuc

SEQ ID NO: 324695 - RNA, 19 nt, Homo sapiens
  misc_RNA (1)...(19): siRNA sense strand
gacaucaccgcacguuuca

SEQ ID NO: 324696 - RNA, 19 nt, Homo sapiens
  misc_RNA (1)...(19): siRNA sense strand
cagagggaccugccaagga

SEQ ID NO: 324697 - RNA, 19 nt, Homo sapiens
  misc_RNA (1)...(19): siRNA sense strand
cuccuagccuggaugacua

SEQ ID NO: 324698 - RNA, 19 nt, Homo sapiens
  misc_RNA (1)...(19): siRNA sense strand
acacugcccauggcugaua

SEQ ID NO: 324699 - RNA, 19 nt, Homo sapiens
  misc_RNA (1)...(19): siRNA sense strand
gagacaucaccgcacguuu

SEQ ID NO: 324700 - RNA, 19 nt, Homo sapiens
  misc_RNA (1)...(19): siRNA sense strand
caucaccgcacguuucagu

SEQ ID NO: 324701 - RNA, 19 nt, Homo sapiens
  misc_RNA (1)...(19): siRNA sense strand
uacgugaggucuauaucuc

SEQ ID NO: 324702 - RNA, 19 nt, Homo sapiens
  misc_RNA (1)...(19): siRNA sense strand
uggcccaucugcccacaau

SEQ ID NO: 324703 - RNA, 19 nt, Homo sapiens
  misc_RNA (1)...(19): siRNA sense strand
ggagaccacggaggagaug

SEQ ID NO: 324704 - RNA, 19 nt, Homo sapiens
  misc_RNA (1)...(19): siRNA sense strand
gaugacuacgugaggucua

SEQ ID NO: 324705 - RNA, 19 nt, Homo sapiens
  misc_RNA (1)...(19): siRNA sense strand
gcccagcuauaaccaguau

SEQ ID NO: 324706 - RNA, 19 nt, Homo sapiens
  misc_RNA (1)...(19): siRNA sense strand
uaaccaguaucagcaguau

SEQ ID NO: 324707 - RNA, 19 nt, Homo sapiens
  misc_RNA (1)...(19): siRNA sense strand
acacaggguggcacaagua

SEQ ID NO: 324708 - RNA, 19 nt, Homo sapiens
  misc_RNA (1)...(19): siRNA sense strand
ggaaccaguacuaucagaa

SEQ ID NO: 324709 - RNA, 19 nt, Homo sapiens
  misc_RNA (1)...(19): siRNA sense strand
gaaccaguacuaucagaac

SEQ ID NO: 324710 - RNA, 19 nt, Homo sapiens
  misc_RNA (1)...(19): siRNA sense strand
gcaguggaaccaguacuau

SEQ ID NO: 324711 - RNA, 19 nt, Homo sapiens
  misc_RNA (1)...(19): siRNA sense strand
ccagcuauaaccaguauca

SEQ ID NO: 324712 - RNA, 19 nt, Homo sapiens
  misc_RNA (1)...(19): siRNA sense strand
uggcacaaguacacaguag

SEQ ID NO: 324713 - RNA, 19 nt, Homo sapiens
  misc_RNA (1)...(19): siRNA sense strand
gagcuacuccgggaacaca

SEQ ID NO: 324714 - RNA, 19 nt, Homo sapiens
  misc_RNA (1)...(19): siRNA sense strand
uggaaccaguacuaucaga

SEQ ID NO: 324715 - RNA, 19 nt, Homo sapiens
  misc_RNA (1)...(19): siRNA sense strand
gcccagcuauaaccaguau

SEQ ID NO: 324716 - RNA, 19 nt, Homo sapiens
  misc_RNA (1)...(19): siRNA sense strand
uaaccaguaucagcaguau

SEQ ID NO: 324717 - RNA, 19 nt, Homo sapiens
  misc_RNA (1)...(19): siRNA sense strand
acacaggguggcacaagua

SEQ ID NO: 324718 - RNA, 19 nt, Homo sapiens
  misc_RNA (1)...(19): siRNA sense strand
ggaaccaguacuaucagaa

SEQ ID NO: 324719 - RNA, 19 nt, Homo sapiens
  misc_RNA (1)...(19): siRNA sense strand
gaaccaguacuaucagaac

SEQ ID NO: 324720 - RNA, 19 nt, Homo sapiens
  misc_RNA (1)...(19): siRNA sense strand
gcaguggaaccaguacuau

SEQ ID NO: 324721 - RNA, 19 nt, Homo sapiens
  misc_RNA (1)...(19): siRNA sense strand
ccagcuauaaccaguauca

SEQ ID NO: 324722 - RNA, 19 nt, Homo sapiens
  misc_RNA (1)...(19): siRNA sense strand
uggcacaaguacacaguag

SEQ ID NO: 324723 - RNA, 19 nt, Homo sapiens
  misc_RNA (1)...(19): siRNA sense strand
gagcuacuccgggaacaca

SEQ ID NO: 324724 - RNA, 19 nt, Homo sapiens
  misc_RNA (1)...(19): siRNA sense strand
uggaaccaguacuaucaga

SEQ ID NO: 324725 - RNA, 19 nt, Homo sapiens
  misc_RNA (1)...(19): siRNA sense strand
gcccagcuauaaccaguau

SEQ ID NO: 324726 - RNA, 19 nt, Homo sapiens
  misc_RNA (1)...(19): siRNA sense strand
uaaccaguaucagcaguau

SEQ ID NO: 324727 - RNA, 19 nt, Homo sapiens
  misc_RNA (1)...(19): siRNA sense strand
acacaggguggcacaagua

SEQ ID NO: 324728 - RNA, 19 nt, Homo sapiens
  misc_RNA (1)...(19): siRNA sense strand
ggaaccaguacuaucagaa

SEQ ID NO: 324729 - RNA, 19 nt, Homo sapiens
  misc_RNA (1)...(19): siRNA sense strand
gaaccaguacuaucagaac

SEQ ID NO: 324730 - RNA, 19 nt, Homo sapiens
  misc_RNA (1)...(19): siRNA sense strand
gcaguggaaccaguacuau

SEQ ID NO: 324731 - RNA, 19 nt, Homo sapiens
  misc_RNA (1)...(19): siRNA sense strand
ccagcuauaaccaguauca

SEQ ID NO: 324732 - RNA, 19 nt, Homo sapiens
  misc_RNA (1)...(19): siRNA sense strand
uggcacaaguacacaguag

SEQ ID NO: 324733 - RNA, 19 nt, Homo sapiens
  misc_RNA (1)...(19): siRNA sense strand
gagcuacuccgggaacaca

SEQ ID NO: 324734 - RNA, 19 nt, Homo sapiens
  misc_RNA (1)...(19): siRNA sense strand
uggaaccaguacuaucaga

SEQ ID NO: 324735 - RNA, 19 nt, Homo sapiens
  misc_RNA (1)...(19): siRNA sense strand
gagaagaaguugugaaaga

SEQ ID NO: 324736 - RNA, 19 nt, Homo sapiens
  misc_RNA (1)...(19): siRNA sense strand
ggacugcccucaacacugu

SEQ ID NO: 324737 - RNA, 19 nt, Homo sapiens
  misc_RNA (1)...(19): siRNA sense strand
gagagaagaaguugugaaa

SEQ ID NO: 324738 - RNA, 19 nt, Homo sapiens
  misc_RNA (1)...(19): siRNA sense strand
ggagauggcaauauuguga

SEQ ID NO: 324739 - RNA, 19 nt, Homo sapiens
  misc_RNA (1)...(19): siRNA sense strand
guaaugaggaaaugguuaa

SEQ ID NO: 324740 - RNA, 19 nt, Homo sapiens
  misc_RNA (1)...(19): siRNA sense strand
gcaauauugugagagaaga

SEQ ID NO: 324741 - RNA, 19 nt, Homo sapiens
  misc_RNA (1)...(19): siRNA sense strand
gaagaaguugugaaagaga

SEQ ID NO: 324742 - RNA, 19 nt, Homo sapiens
  misc_RNA (1)...(19): siRNA sense strand
aaccaagucuuccaacaga

SEQ ID NO: 324743 - RNA, 19 nt, Homo sapiens
  misc_RNA (1)...(19): siRNA sense strand
guaaccaagucuuccaaca

SEQ ID NO: 324744 - RNA, 19 nt, Homo sapiens
  misc_RNA (1)...(19): siRNA sense strand
ugacagcagugagugcaaa

SEQ ID NO: 324745 - RNA, 19 nt, Homo sapiens
  misc_RNA (1)...(19): siRNA sense strand
gggauggauugcagagaga

SEQ ID NO: 324746 - RNA, 19 nt, Homo sapiens
  misc_RNA (1)...(19): siRNA sense strand
ccgccuggagcaauaauua

SEQ ID NO: 324747 - RNA, 19 nt, Homo sapiens
  misc_RNA (1)...(19): siRNA sense strand
ggugucagccuucuaaugg

SEQ ID NO: 324748 - RNA, 19 nt, Homo sapiens
  misc_RNA (1)...(19): siRNA sense strand
aagaaguugugaaagagaa

SEQ ID NO: 324749 - RNA, 19 nt, Homo sapiens
  misc_RNA (1)...(19): siRNA sense strand
ugaggugucagccuucuaa

SEQ ID NO: 324750 - RNA, 19 nt, Homo sapiens
  misc_RNA (1)...(19): siRNA sense strand
gaaauuccccuucuuccaa

SEQ ID NO: 324751 - RNA, 19 nt, Homo sapiens
  misc_RNA (1)...(19): siRNA sense strand
ccaagucuuccaacagauu

SEQ ID NO: 324752 - RNA, 19 nt, Homo sapiens
  misc_RNA (1)...(19): siRNA sense strand
ggugaagaguuugguaucu

SEQ ID NO: 324753 - RNA, 19 nt, Homo sapiens
  misc_RNA (1)...(19): siRNA sense strand
gugaagaguuugguaucug

SEQ ID NO: 324754 - RNA, 19 nt, Homo sapiens
  misc_RNA (1)...(19): siRNA sense strand
agaagaaguugugaaagag

SEQ ID NO: 324755 - RNA, 19 nt, Homo sapiens
  misc_RNA (1)...(19): siRNA sense strand
caagucuuccaacagauuu

SEQ ID NO: 324756 - RNA, 19 nt, Homo sapiens
  misc_RNA (1)...(19): siRNA sense strand
cguaaugaggaaaugguua

SEQ ID NO: 324757 - RNA, 19 nt, Homo sapiens
  misc_RNA (1)...(19): siRNA sense strand
augaggaaaugguuaaauc

SEQ ID NO: 324758 - RNA, 19 nt, Homo sapiens
  misc_RNA (1)...(19): siRNA sense strand
ggucucccguaaugaggaa

SEQ ID NO: 324759 - RNA, 19 nt, Homo sapiens
  misc_RNA (1)...(19): siRNA sense strand
gaggaaaugguuaaaucca

SEQ ID NO: 324760 - RNA, 19 nt, Homo sapiens
  misc_RNA (1)...(19): siRNA sense strand
ggaggauccuuuuggugaa

SEQ ID NO: 324761 - RNA, 19 nt, Homo sapiens
  misc_RNA (1)...(19): siRNA sense strand
aauauucaguaaccaaguc

SEQ ID NO: 324762 - RNA, 19 nt, Homo sapiens
  misc_RNA (1)...(19): siRNA sense strand
gaaguugugaaagagaaug

SEQ ID NO: 324763 - RNA, 19 nt, Homo sapiens
  misc_RNA (1)...(19): siRNA sense strand
uaaccaagucuuccaacag

SEQ ID NO: 324764 - RNA, 19 nt, Homo sapiens
  misc_RNA (1)...(19): siRNA sense strand
gcaccuucgggauggauug

SEQ ID NO: 324765 - RNA, 19 nt, Homo sapiens
  misc_RNA (1)...(19): siRNA sense strand
agauggcaauauugugaga

SEQ ID NO: 324766 - RNA, 19 nt, Homo sapiens
  misc_RNA (1)...(19): siRNA sense strand
caauauugugagagaagaa

SEQ ID NO: 324767 - RNA, 19 nt, Homo sapiens
  misc_RNA (1)...(19): siRNA sense strand
ugagagaagaaguugugaa

SEQ ID NO: 324768 - RNA, 19 nt, Homo sapiens
  misc_RNA (1)...(19): siRNA sense strand
aaacagauaucccaaagua

SEQ ID NO: 324769 - RNA, 19 nt, Homo sapiens
  misc_RNA (1)...(19): siRNA sense strand
gcacacagaccagcuauua

SEQ ID NO: 324770 - RNA, 19 nt, Homo sapiens
  misc_RNA (1)...(19): siRNA sense strand
gaccagcuauuagaaauua

SEQ ID NO: 324771 - RNA, 19 nt, Homo sapiens
  misc_RNA (1)...(19): siRNA sense strand
gagcaagacuuuaaagaag

SEQ ID NO: 324772 - RNA, 19 nt, Homo sapiens
  misc_RNA (1)...(19): siRNA sense strand
aaagagaugucaaauccua

SEQ ID NO: 324773 - RNA, 19 nt, Homo sapiens
  misc_RNA (1)...(19): siRNA sense strand
gcaaagaugcauagaagaa

SEQ ID NO: 324774 - RNA, 19 nt, Homo sapiens
  misc_RNA (1)...(19): siRNA sense strand
guacagggcauccauauug

SEQ ID NO: 324775 - RNA, 19 nt, Homo sapiens
  misc_RNA (1)...(19): siRNA sense strand
uggaagaagucauugauaa

SEQ ID NO: 324776 - RNA, 19 nt, Homo sapiens
  misc_RNA (1)...(19): siRNA sense strand
gagaacacguaacaacaaa

SEQ ID NO: 324777 - RNA, 19 nt, Homo sapiens
  misc_RNA (1)...(19): siRNA sense strand
gauuggagcugcuggagaa

SEQ ID NO: 324778 - RNA, 19 nt, Homo sapiens
  misc_RNA (1)...(19): siRNA sense strand
gggcaaagaugcauagaag

SEQ ID NO: 324779 - RNA, 19 nt, Homo sapiens
  misc_RNA (1)...(19): siRNA sense strand
gaaaugcccuuugcugaca

SEQ ID NO: 324780 - RNA, 19 nt, Homo sapiens
  misc_RNA (1)...(19): siRNA sense strand
gaacuuggaauuaccuuga

SEQ ID NO: 324781 - RNA, 19 nt, Homo sapiens
  misc_RNA (1)...(19): siRNA sense strand
ggaaucagcuaucucuucu

SEQ ID NO: 324782 - RNA, 19 nt, Homo sapiens
  misc_RNA (1)...(19): siRNA sense strand
ucaguuagcugggcaaaga

SEQ ID NO: 324783 - RNA, 19 nt, Homo sapiens
  misc_RNA (1)...(19): siRNA sense strand
agaauaaggucaucaucaa

SEQ ID NO: 324784 - RNA, 19 nt, Homo sapiens
  misc_RNA (1)...(19): siRNA sense strand
ugaagaagguggaaaugau

SEQ ID NO: 324785 - RNA, 19 nt, Homo sapiens
  misc_RNA (1)...(19): siRNA sense strand
gcaaagaacagaagagucu

SEQ ID NO: 324786 - RNA, 19 nt, Homo sapiens
  misc_RNA (1)...(19): siRNA sense strand
uagaagagcaagacuuuaa

SEQ ID NO: 324787 - RNA, 19 nt, Homo sapiens
  misc_RNA (1)...(19): siRNA sense strand
gaacacguaacaacaaaug

SEQ ID NO: 324788 - RNA, 19 nt, Homo sapiens
  misc_RNA (1)...(19): siRNA sense strand
guuaaaggaugaauuacug

SEQ ID NO: 324789 - RNA, 19 nt, Homo sapiens
  misc_RNA (1)...(19): siRNA sense strand
gaugucaaauccuagaaga

SEQ ID NO: 324790 - RNA, 19 nt, Homo sapiens
  misc_RNA (1)...(19): siRNA sense strand
gcacaauucuuugaacagu

SEQ ID NO: 324791 - RNA, 19 nt, Homo sapiens
  misc_RNA (1)...(19): siRNA sense strand
guaaaguuaugcaauccaa

SEQ ID NO: 324792 - RNA, 19 nt, Homo sapiens
  misc_RNA (1)...(19): siRNA sense strand
gagaauagaagacaauagu

SEQ ID NO: 324793 - RNA, 19 nt, Homo sapiens
  misc_RNA (1)...(19): siRNA sense strand
caaggcauauucaauugga

SEQ ID NO: 324794 - RNA, 19 nt, Homo sapiens
  misc_RNA (1)...(19): siRNA sense strand
aaagagaacuuggaauuac

SEQ ID NO: 324795 - RNA, 19 nt, Homo sapiens
  misc_RNA (1)...(19): siRNA sense strand
gcaaggccuuaauagaguu

SEQ ID NO: 324796 - RNA, 19 nt, Homo sapiens
  misc_RNA (1)...(19): siRNA sense strand
uggcauaucuaguauuugu

SEQ ID NO: 324797 - RNA, 19 nt, Homo sapiens
  misc_RNA (1)...(19): siRNA sense strand
gaagaagucauugauaaca

SEQ ID NO: 324798 - RNA, 19 nt, Homo sapiens
  misc_RNA (1)...(19): siRNA sense strand
ggaacuucagucuauaaua

SEQ ID NO: 324799 - RNA, 19 nt, Homo sapiens
  misc_RNA (1)...(19): siRNA sense strand
acagauaucccaaaguauu

SEQ ID NO: 324800 - RNA, 19 nt, Homo sapiens
  misc_RNA (1)...(19): siRNA sense strand
gaaaacagauaucccaaag

SEQ ID NO: 324801 - RNA, 19 nt, Homo sapiens
  misc_RNA (1)...(19): siRNA sense strand
aaagaaaacucacuggaaa

SEQ ID NO: 324802 - RNA, 19 nt, Homo sapiens
  misc_RNA (1)...(19): siRNA sense strand
aaacagugauucagaaacu

SEQ ID NO: 324803 - RNA, 19 nt, Homo sapiens
  misc_RNA (1)...(19): siRNA sense strand
ucuggcauaucuaguauuu

SEQ ID NO: 324804 - RNA, 19 nt, Homo sapiens
  misc_RNA (1)...(19): siRNA sense strand
ucaagaauaugggcuggaa

SEQ ID NO: 324805 - RNA, 19 nt, Homo sapiens
  misc_RNA (1)...(19): siRNA sense strand
auaaagagaugucaaaucc

SEQ ID NO: 324806 - RNA, 19 nt, Homo sapiens
  misc_RNA (1)...(19): siRNA sense strand
gaggaacuucagucuauaa

SEQ ID NO: 324807 - RNA, 19 nt, Homo sapiens
  misc_RNA (1)...(19): siRNA sense strand
ggaugacuauggccuuugu

SEQ ID NO: 324808 - RNA, 19 nt, Homo sapiens
  misc_RNA (1)...(19): siRNA sense strand
ucagaaacuucauaacaag

SEQ ID NO: 324809 - RNA, 19 nt, Homo sapiens
  misc_RNA (1)...(19): siRNA sense strand
guuaugcaauccaaaggaa

SEQ ID NO: 324810 - RNA, 19 nt, Homo sapiens
  misc_RNA (1)...(19): siRNA sense strand
cagaccagcuauuagaaau

SEQ ID NO: 324811 - RNA, 19 nt, Homo sapiens
  misc_RNA (1)...(19): siRNA sense strand
gaagaagguggaaaugauc

SEQ ID NO: 324812 - RNA, 19 nt, Homo sapiens
  misc_RNA (1)...(19): siRNA sense strand
gcaagacuuuaaagaagag

SEQ ID NO: 324813 - RNA, 19 nt, Homo sapiens
  misc_RNA (1)...(19): siRNA sense strand
acacagaccagcuauuaga

SEQ ID NO: 324814 - RNA, 19 nt, Homo sapiens
  misc_RNA (1)...(19): siRNA sense strand
aaucagcuaucucuucuuc

SEQ ID NO: 324815 - RNA, 19 nt, Homo sapiens
  misc_RNA (1)...(19): siRNA sense strand
uacaaacagugauucagaa

SEQ ID NO: 324816 - RNA, 19 nt, Homo sapiens
  misc_RNA (1)...(19): siRNA sense strand
gcaauccaaaggaauuauu

SEQ ID NO: 324817 - RNA, 19 nt, Homo sapiens
  misc_RNA (1)...(19): siRNA sense strand
guaaagauaaagaggauag

SEQ ID NO: 324818 - RNA, 19 nt, Homo sapiens
  misc_RNA (1)...(19): siRNA sense strand
ccuagaagagcaagacuuu

SEQ ID NO: 324819 - RNA, 19 nt, Homo sapiens
  misc_RNA (1)...(19): siRNA sense strand
aaaacucacuggaaaauga

SEQ ID NO: 324820 - RNA, 19 nt, Homo sapiens
  misc_RNA (1)...(19): siRNA sense strand
cguaacaacaaaugguuua

SEQ ID NO: 324821 - RNA, 19 nt, Homo sapiens
  misc_RNA (1)...(19): siRNA sense strand
ugcuucagcuguauauuaa

SEQ ID NO: 324822 - RNA, 19 nt, Homo sapiens
  misc_RNA (1)...(19): siRNA sense strand
gaaucucguugguccuguu

SEQ ID NO: 324823 - RNA, 19 nt, Homo sapiens
  misc_RNA (1)...(19): siRNA sense strand
gaagagcaagacuuuaaag

SEQ ID NO: 324824 - RNA, 19 nt, Homo sapiens
  misc_RNA (1)...(19): siRNA sense strand
aacaaggcauauucaauug

SEQ ID NO: 324825 - RNA, 19 nt, Homo sapiens
  misc_RNA (1)...(19): siRNA sense strand
ugaacagucugaagaaggu

SEQ ID NO: 324826 - RNA, 19 nt, Homo sapiens
  misc_RNA (1)...(19): siRNA sense strand
cagcacaauucuuugaaca

SEQ ID NO: 324827 - RNA, 19 nt, Homo sapiens
  misc_RNA (1)...(19): siRNA sense strand
ugacagcacaauucuuuga

SEQ ID NO: 324828 - RNA, 19 nt, Homo sapiens
  misc_RNA (1)...(19): siRNA sense strand
agagcaagacuuuaaagaa

SEQ ID NO: 324829 - RNA, 19 nt, Homo sapiens
  misc_RNA (1)...(19): siRNA sense strand
uuaagcccauuguaccuuu

SEQ ID NO: 324830 - RNA, 19 nt, Homo sapiens
  misc_RNA (1)...(19): siRNA sense strand
guguaaagauaaagaggau

SEQ ID NO: 324831 - RNA, 19 nt, Homo sapiens
  misc_RNA (1)...(19): siRNA sense strand
ggauucacaaggcaaauau

SEQ ID NO: 324832 - RNA, 19 nt, Homo sapiens
  misc_RNA (1)...(19): siRNA sense strand
guacuuagaaaucaagagu

SEQ ID NO: 324833 - RNA, 19 nt, Homo sapiens
  misc_RNA (1)...(19): siRNA sense strand
ucuguuaucuccaaaggau

SEQ ID NO: 324834 - RNA, 19 nt, Homo sapiens
  misc_RNA (1)...(19): siRNA sense strand
acaguuagcagacucaaug

SEQ ID NO: 324835 - RNA, 19 nt, Homo sapiens
  misc_RNA (1)...(19): siRNA sense strand
ggaagaagucauugauaac

SEQ ID NO: 324836 - RNA, 19 nt, Homo sapiens
  misc_RNA (1)...(19): siRNA sense strand
uuacaaacagugauucaga

SEQ ID NO: 324837 - RNA, 19 nt, Homo sapiens
  misc_RNA (1)...(19): siRNA sense strand
uuaacaaguuggauucaca

SEQ ID NO: 324838 - RNA, 19 nt, Homo sapiens
  misc_RNA (1)...(19): siRNA sense strand
ccucagggcuuagugaaag

SEQ ID NO: 324839 - RNA, 19 nt, Homo sapiens
  misc_RNA (1)...(19): siRNA sense strand
uacagggcauccauauuga

SEQ ID NO: 324840 - RNA, 19 nt, Homo sapiens
  misc_RNA (1)...(19): siRNA sense strand
guggaagaagucauugaua

SEQ ID NO: 324841 - RNA, 19 nt, Homo sapiens
  misc_RNA (1)...(19): siRNA sense strand
acaauagucuacuuuacca

SEQ ID NO: 324842 - RNA, 19 nt, Homo sapiens
  misc_RNA (1)...(19): siRNA sense strand
agaggaacuucagucuaua

SEQ ID NO: 324843 - RNA, 19 nt, Homo sapiens
  misc_RNA (1)...(19): siRNA sense strand
aaaugauccuuucagguau

SEQ ID NO: 324844 - RNA, 19 nt, Homo sapiens
  misc_RNA (1)...(19): siRNA sense strand
ggaauuauuguuggguuug

SEQ ID NO: 324845 - RNA, 19 nt, Homo sapiens
  misc_RNA (1)...(19): siRNA sense strand
ucacaaggcaaauauacau

SEQ ID NO: 324846 - RNA, 19 nt, Homo sapiens
  misc_RNA (1)...(19): siRNA sense strand
ccuugaauuugaagaagaa

SEQ ID NO: 324847 - RNA, 19 nt, Homo sapiens
  misc_RNA (1)...(19): siRNA sense strand
ggcauauucaauuggauua

SEQ ID NO: 324848 - RNA, 19 nt, Homo sapiens
  misc_RNA (1)...(19): siRNA sense strand
gaauaaggucaucaucaag

SEQ ID NO: 324849 - RNA, 19 nt, Homo sapiens
  misc_RNA (1)...(19): siRNA sense strand
uacuguaccucagggcuua

SEQ ID NO: 324850 - RNA, 19 nt, Homo sapiens
  misc_RNA (1)...(19): siRNA sense strand
auaaggucaucaucaagaa

SEQ ID NO: 324851 - RNA, 19 nt, Homo sapiens
  misc_RNA (1)...(19): siRNA sense strand
uaccaguacuuagaaauca

SEQ ID NO: 324852 - RNA, 19 nt, Homo sapiens
  misc_RNA (1)...(19): siRNA sense strand
uggcuucucuggcauaucu

SEQ ID NO: 324853 - RNA, 19 nt, Homo sapiens
  misc_RNA (1)...(19): siRNA sense strand
ugucuacccuuuggaauca

SEQ ID NO: 324854 - RNA, 19 nt, Homo sapiens
  misc_RNA (1)...(19): siRNA sense strand
ggguuugcuugaacugauu

SEQ ID NO: 324855 - RNA, 19 nt, Homo sapiens
  misc_RNA (1)...(19): siRNA sense strand
gggcuuagugaaaguaaug

SEQ ID NO: 324856 - RNA, 19 nt, Homo sapiens
  misc_RNA (1)...(19): siRNA sense strand
aauaaggucaucaucaaga

SEQ ID NO: 324857 - RNA, 19 nt, Homo sapiens
  misc_RNA (1)...(19): siRNA sense strand
augcuucagcuguauauua

SEQ ID NO: 324858 - RNA, 19 nt, Homo sapiens
  misc_RNA (1)...(19): siRNA sense strand
aaggucaucaucaagaaua

SEQ ID NO: 324859 - RNA, 19 nt, Homo sapiens
  misc_RNA (1)...(19): siRNA sense strand
ggucuuaagcccauuguac

SEQ ID NO: 324860 - RNA, 19 nt, Homo sapiens
  misc_RNA (1)...(19): siRNA sense strand
ggacacccuuuccccaaaa

SEQ ID NO: 324861 - RNA, 19 nt, Homo sapiens
  misc_RNA (1)...(19): siRNA sense strand
agcaagacuuuaaagaaga

SEQ ID NO: 324862 - RNA, 19 nt, Homo sapiens
  misc_RNA (1)...(19): siRNA sense strand
ugcaaggccuuaauagagu

SEQ ID NO: 324863 - RNA, 19 nt, Homo sapiens
  misc_RNA (1)...(19): siRNA sense strand
agagaacacguaacaacaa

SEQ ID NO: 324864 - RNA, 19 nt, Homo sapiens
  misc_RNA (1)...(19): siRNA sense strand
aagagucuguuaucuccaa

SEQ ID NO: 324865 - RNA, 19 nt, Homo sapiens
  misc_RNA (1)...(19): siRNA sense strand
gcauaucuaguauuuguac

SEQ ID NO: 324866 - RNA, 19 nt, Homo sapiens
  misc_RNA (1)...(19): siRNA sense strand
uaacaaguuggauucacaa

SEQ ID NO: 324867 - RNA, 19 nt, Homo sapiens
  misc_RNA (1)...(19): siRNA sense strand
aagaauaaggucaucauca

SEQ ID NO: 324868 - RNA, 19 nt, Homo sapiens
  misc_RNA (1)...(19): siRNA sense strand
gagaagagaucccuaauau

SEQ ID NO: 324869 - RNA, 19 nt, Homo sapiens
  misc_RNA (1)...(19): siRNA sense strand
ggacagaacuuggaaauau

SEQ ID NO: 324870 - RNA, 19 nt, Homo sapiens
  misc_RNA (1)...(19): siRNA sense strand
aaacagauaucccaaagua

SEQ ID NO: 324871 - RNA, 19 nt, Homo sapiens
  misc_RNA (1)...(19): siRNA sense strand
gcacacagaccagcuauua

SEQ ID NO: 324872 - RNA, 19 nt, Homo sapiens
  misc_RNA (1)...(19): siRNA sense strand
gaccagcuauuagaaauua

SEQ ID NO: 324873 - RNA, 19 nt, Homo sapiens
  misc_RNA (1)...(19): siRNA sense strand
gagcaagacuuuaaagaag

SEQ ID NO: 324874 - RNA, 19 nt, Homo sapiens
  misc_RNA (1)...(19): siRNA sense strand
ggaagaacucauugaaaua

SEQ ID NO: 324875 - RNA, 19 nt, Homo sapiens
  misc_RNA (1)...(19): siRNA sense strand
aaagagaugucaaauccua

SEQ ID NO: 324876 - RNA, 19 nt, Homo sapiens
  misc_RNA (1)...(19): siRNA sense strand
gaagagaucccuaauaugc

SEQ ID NO: 324877 - RNA, 19 nt, Homo sapiens
  misc_RNA (1)...(19): siRNA sense strand
gcaaagaugcauagaagaa

SEQ ID NO: 324878 - RNA, 19 nt, Homo sapiens
  misc_RNA (1)...(19): siRNA sense strand
guacagggcauccauauug

SEQ ID NO: 324879 - RNA, 19 nt, Homo sapiens
  misc_RNA (1)...(19): siRNA sense strand
uggaagaagucauugauaa

SEQ ID NO: 324880 - RNA, 19 nt, Homo sapiens
  misc_RNA (1)...(19): siRNA sense strand
gagaacacguaacaacaaa

SEQ ID NO: 324881 - RNA, 19 nt, Homo sapiens
  misc_RNA (1)...(19): siRNA sense strand
gauuggagcugcuggagaa

SEQ ID NO: 324882 - RNA, 19 nt, Homo sapiens
  misc_RNA (1)...(19): siRNA sense strand
gggcaaagaugcauagaag

SEQ ID NO: 324883 - RNA, 19 nt, Homo sapiens
  misc_RNA (1)...(19): siRNA sense strand
uaauaugccuccugaaaug

SEQ ID NO: 324884 - RNA, 19 nt, Homo sapiens
  misc_RNA (1)...(19): siRNA sense strand
gaaacagauuuacugcaaa

SEQ ID NO: 324885 - RNA, 19 nt, Homo sapiens
  misc_RNA (1)...(19): siRNA sense strand
ggagaagagaucccuaaua

SEQ ID NO: 324886 - RNA, 19 nt, Homo sapiens
  misc_RNA (1)...(19): siRNA sense strand
gaaaugcccuuugcugaca

SEQ ID NO: 324887 - RNA, 19 nt, Homo sapiens
  misc_RNA (1)...(19): siRNA sense strand
gaacuuggaauuaccuuga

SEQ ID NO: 324888 - RNA, 19 nt, Homo sapiens
  misc_RNA (1)...(19): siRNA sense strand
gacagaacuuggaaauauu

SEQ ID NO: 324889 - RNA, 19 nt, Homo sapiens
  misc_RNA (1)...(19): siRNA sense strand
ggaaucagcuaucucuucu

SEQ ID NO: 324890 - RNA, 19 nt, Homo sapiens
  misc_RNA (1)...(19): siRNA sense strand
uggaagaacucauugaaau

SEQ ID NO: 324891 - RNA, 19 nt, Homo sapiens
  misc_RNA (1)...(19): siRNA sense strand
ucaguuagcugggcaaaga

SEQ ID NO: 324892 - RNA, 19 nt, Homo sapiens
  misc_RNA (1)...(19): siRNA sense strand
aaacaaagucuaccucuga

SEQ ID NO: 324893 - RNA, 19 nt, Homo sapiens
  misc_RNA (1)...(19): siRNA sense strand
ugauuucccuucuugauuu

SEQ ID NO: 324894 - RNA, 19 nt, Homo sapiens
  misc_RNA (1)...(19): siRNA sense strand
agaauaaggucaucaucaa

SEQ ID NO: 324895 - RNA, 19 nt, Homo sapiens
  misc_RNA (1)...(19): siRNA sense strand
ugaagaagguggaaaugau

SEQ ID NO: 324896 - RNA, 19 nt, Homo sapiens
  misc_RNA (1)...(19): siRNA sense strand
agaaacagauuuacugcaa

SEQ ID NO: 324897 - RNA, 19 nt, Homo sapiens
  misc_RNA (1)...(19): siRNA sense strand
gcaaagaacagaagagucu

SEQ ID NO: 324898 - RNA, 19 nt, Homo sapiens
  misc_RNA (1)...(19): siRNA sense strand
uagaagagcaagacuuuaa

SEQ ID NO: 324899 - RNA, 19 nt, Homo sapiens
  misc_RNA (1)...(19): siRNA sense strand
gaacacguaacaacaaaug

SEQ ID NO: 324900 - RNA, 19 nt, Homo sapiens
  misc_RNA (1)...(19): siRNA sense strand
guuaaaggaugaauuacug

SEQ ID NO: 324901 - RNA, 19 nt, Homo sapiens
  misc_RNA (1)...(19): siRNA sense strand
gcacaauucuuugaacagu

SEQ ID NO: 324902 - RNA, 19 nt, Homo sapiens
  misc_RNA (1)...(19): siRNA sense strand
gaacuuggaaauauugaga

SEQ ID NO: 324903 - RNA, 19 nt, Homo sapiens
  misc_RNA (1)...(19): siRNA sense strand
gaugucaaauccuagaaga

SEQ ID NO: 324904 - RNA, 19 nt, Homo sapiens
  misc_RNA (1)...(19): siRNA sense strand
guaaaguuaugcaauccaa

SEQ ID NO: 324905 - RNA, 19 nt, Homo sapiens
  misc_RNA (1)...(19): siRNA sense strand
gagaauagaagacaauagu

SEQ ID NO: 324906 - RNA, 19 nt, Homo sapiens
  misc_RNA (1)...(19): siRNA sense strand
caaggcauauucaauugga

SEQ ID NO: 324907 - RNA, 19 nt, Homo sapiens
  misc_RNA (1)...(19): siRNA sense strand
aaagagaacuuggaauuac

SEQ ID NO: 324908 - RNA, 19 nt, Homo sapiens
  misc_RNA (1)...(19): siRNA sense strand
gcaaggccuuaauagaguu

SEQ ID NO: 324909 - RNA, 19 nt, Homo sapiens
  misc_RNA (1)...(19): siRNA sense strand
uggcauaucuaguauuugu

SEQ ID NO: 324910 - RNA, 19 nt, Homo sapiens
  misc_RNA (1)...(19): siRNA sense strand
gaagaagucauugauaaca

SEQ ID NO: 324911 - RNA, 19 nt, Homo sapiens
  misc_RNA (1)...(19): siRNA sense strand
ggaacuucagucuauaaua

SEQ ID NO: 324912 - RNA, 19 nt, Homo sapiens
  misc_RNA (1)...(19): siRNA sense strand
acagauaucccaaaguauu

SEQ ID NO: 324913 - RNA, 19 nt, Homo sapiens
  misc_RNA (1)...(19): siRNA sense strand
gaaaacagauaucccaaag

SEQ ID NO: 324914 - RNA, 19 nt, Homo sapiens
  misc_RNA (1)...(19): siRNA sense strand
aaagaaaacucacuggaaa

SEQ ID NO: 324915 - RNA, 19 nt, Homo sapiens
  misc_RNA (1)...(19): siRNA sense strand
aaacagugauucagaaacu

SEQ ID NO: 324916 - RNA, 19 nt, Homo sapiens
  misc_RNA (1)...(19): siRNA sense strand
ucuggcauaucuaguauuu

SEQ ID NO: 324917 - RNA, 19 nt, Homo sapiens
  misc_RNA (1)...(19): siRNA sense strand
gaucuuuguucuauaacug

SEQ ID NO: 324918 - RNA, 19 nt, Homo sapiens
  misc_RNA (1)...(19): siRNA sense strand
gaggaacuucagucuauaa

SEQ ID NO: 324919 - RNA, 19 nt, Homo sapiens
  misc_RNA (1)...(19): siRNA sense strand
caaagucuaccucugaaga

SEQ ID NO: 324920 - RNA, 19 nt, Homo sapiens
  misc_RNA (1)...(19): siRNA sense strand
auaaagagaugucaaaucc

SEQ ID NO: 324921 - RNA, 19 nt, Homo sapiens
  misc_RNA (1)...(19): siRNA sense strand
caagaggcccagaaaucua

SEQ ID NO: 324922 - RNA, 19 nt, Homo sapiens
  misc_RNA (1)...(19): siRNA sense strand
ggaugacuauggccuuugu

SEQ ID NO: 324923 - RNA, 19 nt, Homo sapiens
  misc_RNA (1)...(19): siRNA sense strand
ucagaaacuucauaacaag

SEQ ID NO: 324924 - RNA, 19 nt, Homo sapiens
  misc_RNA (1)...(19): siRNA sense strand
guuaugcaauccaaaggaa

SEQ ID NO: 324925 - RNA, 19 nt, Homo sapiens
  misc_RNA (1)...(19): siRNA sense strand
ucaagaauaugggcuggaa

SEQ ID NO: 324926 - RNA, 19 nt, Homo sapiens
  misc_RNA (1)...(19): siRNA sense strand
cagaccagcuauuagaaau

SEQ ID NO: 324927 - RNA, 19 nt, Homo sapiens
  misc_RNA (1)...(19): siRNA sense strand
gaagaagguggaaaugauc

SEQ ID NO: 324928 - RNA, 19 nt, Homo sapiens
  misc_RNA (1)...(19): siRNA sense strand
gcaagacuuuaaagaagag

SEQ ID NO: 324929 - RNA, 19 nt, Homo sapiens
  misc_RNA (1)...(19): siRNA sense strand
acacagaccagcuauuaga

SEQ ID NO: 324930 - RNA, 19 nt, Homo sapiens
  misc_RNA (1)...(19): siRNA sense strand
ccuaauaugccuccugaaa

SEQ ID NO: 324931 - RNA, 19 nt, Homo sapiens
  misc_RNA (1)...(19): siRNA sense strand
uaaagccacuucauauagg

SEQ ID NO: 324932 - RNA, 19 nt, Homo sapiens
  misc_RNA (1)...(19): siRNA sense strand
aaucagcuaucucuucuuc

SEQ ID NO: 324933 - RNA, 19 nt, Homo sapiens
  misc_RNA (1)...(19): siRNA sense strand
uacaaacagugauucagaa

SEQ ID NO: 324934 - RNA, 19 nt, Homo sapiens
  misc_RNA (1)...(19): siRNA sense strand
gcaauccaaaggaauuauu

SEQ ID NO: 324935 - RNA, 19 nt, Homo sapiens
  misc_RNA (1)...(19): siRNA sense strand
guaaagauaaagaggauag

SEQ ID NO: 324936 - RNA, 19 nt, Homo sapiens
  misc_RNA (1)...(19): siRNA sense strand
ccuagaagagcaagacuuu

SEQ ID NO: 324937 - RNA, 19 nt, Homo sapiens
  misc_RNA (1)...(19): siRNA sense strand
ggauuauggcuucauuaaa

SEQ ID NO: 324938 - RNA, 19 nt, Homo sapiens
  misc_RNA (1)...(19): siRNA sense strand
aaaacucacuggaaaauga

SEQ ID NO: 324939 - RNA, 19 nt, Homo sapiens
  misc_RNA (1)...(19): siRNA sense strand
cguaacaacaaaugguuua

SEQ ID NO: 324940 - RNA, 19 nt, Homo sapiens
  misc_RNA (1)...(19): siRNA sense strand
ugcuucagcuguauauuaa

SEQ ID NO: 324941 - RNA, 19 nt, Homo sapiens
  misc_RNA (1)...(19): siRNA sense strand
gaaucucguugguccuguu

SEQ ID NO: 324942 - RNA, 19 nt, Homo sapiens
  misc_RNA (1)...(19): siRNA sense strand
gccaagaggcccagaaauc

SEQ ID NO: 324943 - RNA, 19 nt, Homo sapiens
  misc_RNA (1)...(19): siRNA sense strand
ugagguauuugguuaucaa

SEQ ID NO: 324944 - RNA, 19 nt, Homo sapiens
  misc_RNA (1)...(19): siRNA sense strand
aaacucagauaggauuaug

SEQ ID NO: 324945 - RNA, 19 nt, Homo sapiens
  misc_RNA (1)...(19): siRNA sense strand
gaagagcaagacuuuaaag

SEQ ID NO: 324946 - RNA, 19 nt, Homo sapiens
  misc_RNA (1)...(19): siRNA sense strand
aacaaggcauauucaauug

SEQ ID NO: 324947 - RNA, 19 nt, Homo sapiens
  misc_RNA (1)...(19): siRNA sense strand
cuuaaagccacuucauaua

SEQ ID NO: 324948 - RNA, 19 nt, Homo sapiens
  misc_RNA (1)...(19): siRNA sense strand
ugaacagucugaagaaggu

SEQ ID NO: 324949 - RNA, 19 nt, Homo sapiens
  misc_RNA (1)...(19): siRNA sense strand
cagcacaauucuuugaaca

SEQ ID NO: 324950 - RNA, 19 nt, Homo sapiens
  misc_RNA (1)...(19): siRNA sense strand
ugacagcacaauucuuuga

SEQ ID NO: 324951 - RNA, 19 nt, Homo sapiens
  misc_RNA (1)...(19): siRNA sense strand
agagcaagacuuuaaagaa

SEQ ID NO: 324952 - RNA, 19 nt, Homo sapiens
  misc_RNA (1)...(19): siRNA sense strand
uuaagcccauuguaccuuu

SEQ ID NO: 324953 - RNA, 19 nt, Homo sapiens
  misc_RNA (1)...(19): siRNA sense strand
guguaaagauaaagaggau

SEQ ID NO: 324954 - RNA, 19 nt, Homo sapiens
  misc_RNA (1)...(19): siRNA sense strand
gauugaaaguguucuagcu

SEQ ID NO: 324955 - RNA, 19 nt, Homo sapiens
  misc_RNA (1)...(19): siRNA sense strand
ggauucacaaggcaaauau

SEQ ID NO: 324956 - RNA, 19 nt, Homo sapiens
  misc_RNA (1)...(19): siRNA sense strand
guacuuagaaaucaagagu

SEQ ID NO: 324957 - RNA, 19 nt, Homo sapiens
  misc_RNA (1)...(19): siRNA sense strand
ucuguuaucuccaaaggau

SEQ ID NO: 324958 - RNA, 19 nt, Homo sapiens
  misc_RNA (1)...(19): siRNA sense strand
acaguuagcagacucaaug

SEQ ID NO: 324959 - RNA, 19 nt, Homo sapiens
  misc_RNA (1)...(19): siRNA sense strand
ggaagaagucauugauaac

SEQ ID NO: 324960 - RNA, 19 nt, Homo sapiens
  misc_RNA (1)...(19): siRNA sense strand
uuacaaacagugauucaga

SEQ ID NO: 324961 - RNA, 19 nt, Homo sapiens
  misc_RNA (1)...(19): siRNA sense strand
uuaaagccacuucauauag

SEQ ID NO: 324962 - RNA, 19 nt, Homo sapiens
  misc_RNA (1)...(19): siRNA sense strand
caguugauuucccuucuug

SEQ ID NO: 324963 - RNA, 19 nt, Homo sapiens
  misc_RNA (1)...(19): siRNA sense strand
uuaacaaguuggauucaca

SEQ ID NO: 324964 - RNA, 19 nt, Homo sapiens
  misc_RNA (1)...(19): siRNA sense strand
ccucagggcuuagugaaag

SEQ ID NO: 324965 - RNA, 19 nt, Homo sapiens
  misc_RNA (1)...(19): siRNA sense strand
uacagggcauccauauuga

SEQ ID NO: 324966 - RNA, 19 nt, Homo sapiens
  misc_RNA (1)...(19): siRNA sense strand
gcaaaacucagauaggauu

SEQ ID NO: 324967 - RNA, 19 nt, Homo sapiens
  misc_RNA (1)...(19): siRNA sense strand
gcauucagcucuuuucaca

SEQ ID NO: 324968 - RNA, 19 nt, Homo sapiens
  misc_RNA (1)...(19): siRNA sense strand
ggaaagggcugguguacau

SEQ ID NO: 324969 - RNA, 19 nt, Homo sapiens
  misc_RNA (1)...(19): siRNA sense strand
gaagacgacuugaucaucu

SEQ ID NO: 324970 - RNA, 19 nt, Homo sapiens
  misc_RNA (1)...(19): siRNA sense strand
gaacguggaagacgacuug

SEQ ID NO: 324971 - RNA, 19 nt, Homo sapiens
  misc_RNA (1)...(19): siRNA sense strand
ccaaagccaugcagaacaa

SEQ ID NO: 324972 - RNA, 19 nt, Homo sapiens
  misc_RNA (1)...(19): siRNA sense strand
gagcauugccggaaaguca

SEQ ID NO: 324973 - RNA, 19 nt, Homo sapiens
  misc_RNA (1)...(19): siRNA sense strand
gccggaaagucaacgagua

SEQ ID NO: 324974 - RNA, 19 nt, Homo sapiens
  misc_RNA (1)...(19): siRNA sense strand
caucuucccugacgacugu

SEQ ID NO: 324975 - RNA, 19 nt, Homo sapiens
  misc_RNA (1)...(19): siRNA sense strand
ggacaugagccuggacuga

SEQ ID NO: 324976 - RNA, 19 nt, Homo sapiens
  misc_RNA (1)...(19): siRNA sense strand
ggacgaagaggaggacaug

SEQ ID NO: 324977 - RNA, 19 nt, Homo sapiens
  misc_RNA (1)...(19): siRNA sense strand
agaaagagggcgacacgaa

SEQ ID NO: 324978 - RNA, 19 nt, Homo sapiens
  misc_RNA (1)...(19): siRNA sense strand
ggaagacgacuugaucauc

SEQ ID NO: 324979 - RNA, 19 nt, Homo sapiens
  misc_RNA (1)...(19): siRNA sense strand
ugaggagcauugccggaaa

SEQ ID NO: 324980 - RNA, 19 nt, Homo sapiens
  misc_RNA (1)...(19): siRNA sense strand
ggacaagaaggacgaagag

SEQ ID NO: 324981 - RNA, 19 nt, Homo sapiens
  misc_RNA (1)...(19): siRNA sense strand
gggucuacgugcugaaguu

SEQ ID NO: 324982 - RNA, 19 nt, Homo sapiens
  misc_RNA (1)...(19): siRNA sense strand
gcagaccgcggaugagauc

SEQ ID NO: 324983 - RNA, 19 nt, Homo sapiens
  misc_RNA (1)...(19): siRNA sense strand
gaggagcauugccggaaag

SEQ ID NO: 324984 - RNA, 19 nt, Homo sapiens
  misc_RNA (1)...(19): siRNA sense strand
caacgaguaucugaacaac

SEQ ID NO: 324985 - RNA, 19 nt, Homo sapiens
  misc_RNA (1)...(19): siRNA sense strand
ggaaagucaacgaguaucu

SEQ ID NO: 324986 - RNA, 19 nt, Homo sapiens
  misc_RNA (1)...(19): siRNA sense strand
gaaagucaacgaguaucug

SEQ ID NO: 324987 - RNA, 19 nt, Homo sapiens
  misc_RNA (1)...(19): siRNA sense strand
acacgaaggacaagaagga

SEQ ID NO: 324988 - RNA, 19 nt, Homo sapiens
  misc_RNA (1)...(19): siRNA sense strand
gaaagggcugguguacauu

SEQ ID NO: 324989 - RNA, 19 nt, Homo sapiens
  misc_RNA (1)...(19): siRNA sense strand
ccaagacagaccaggauga

SEQ ID NO: 324990 - RNA, 19 nt, Homo sapiens
  misc_RNA (1)...(19): siRNA sense strand
ccaccgugacuccggauaa

SEQ ID NO: 324991 - RNA, 19 nt, Homo sapiens
  misc_RNA (1)...(19): siRNA sense strand
gcgccugcuucccuacuug

SEQ ID NO: 324992 - RNA, 19 nt, Homo sapiens
  misc_RNA (1)...(19): siRNA sense strand
acgacucgcuuauucacuu

SEQ ID NO: 324993 - RNA, 19 nt, Homo sapiens
  misc_RNA (1)...(19): siRNA sense strand
aaagucaacgaguaucuga

SEQ ID NO: 324994 - RNA, 19 nt, Homo sapiens
  misc_RNA (1)...(19): siRNA sense strand
acggacgacucgcuuauuc

SEQ ID NO: 324995 - RNA, 19 nt, Homo sapiens
  misc_RNA (1)...(19): siRNA sense strand
ugagcgaccuccagagcau

SEQ ID NO: 324996 - RNA, 19 nt, Homo sapiens
  misc_RNA (1)...(19): siRNA sense strand
gcgacacgaaggacaagaa

SEQ ID NO: 324997 - RNA, 19 nt, Homo sapiens
  misc_RNA (1)...(19): siRNA sense strand
cgacucgcuuauucacuuc

SEQ ID NO: 324998 - RNA, 19 nt, Homo sapiens
  misc_RNA (1)...(19): siRNA sense strand
gugcugacgccggagauaa

SEQ ID NO: 324999 - RNA, 19 nt, Homo sapiens
  misc_RNA (1)...(19): siRNA sense strand
aaguggaccuggccagugu

SEQ ID NO: 325000 - RNA, 19 nt, Homo sapiens
  misc_RNA (1)...(19): siRNA sense strand
ucaacgaguaucugaacaa

SEQ ID NO: 325001 - RNA, 19 nt, Homo sapiens
  misc_RNA (1)...(19): siRNA sense strand
ugacgacugugaguucaag

SEQ ID NO: 325002 - RNA, 19 nt, Homo sapiens
  misc_RNA (1)...(19): siRNA sense strand
gccaaagccaugcagaaca

SEQ ID NO: 325003 - RNA, 19 nt, Homo sapiens
  misc_RNA (1)...(19): siRNA sense strand
cagacggacgacucgcuua

SEQ ID NO: 325004 - RNA, 19 nt, Homo sapiens
  misc_RNA (1)...(19): siRNA sense strand
ccggaaagucaacgaguau

SEQ ID NO: 325005 - RNA, 19 nt, Homo sapiens
  misc_RNA (1)...(19): siRNA sense strand
ugcaggaacccaagacaga

SEQ ID NO: 325006 - RNA, 19 nt, Homo sapiens
  misc_RNA (1)...(19): siRNA sense strand
gaaggacaagaaggacgaa

SEQ ID NO: 325007 - RNA, 19 nt, Homo sapiens
  misc_RNA (1)...(19): siRNA sense strand
gacggacgacucgcuuauu

SEQ ID NO: 325008 - RNA, 19 nt, Homo sapiens
  misc_RNA (1)...(19): siRNA sense strand
ggacgacucgcuuauucac

SEQ ID NO: 325009 - RNA, 19 nt, Homo sapiens
  misc_RNA (1)...(19): siRNA sense strand
cgucauccaccaccucuuc

SEQ ID NO: 325010 - RNA, 19 nt, Homo sapiens
  misc_RNA (1)...(19): siRNA sense strand
caagacagaccaggaugag

SEQ ID NO: 325011 - RNA, 19 nt, Homo sapiens
  misc_RNA (1)...(19): siRNA sense strand
cguggaagacgacuugauc

SEQ ID NO: 325012 - RNA, 19 nt, Homo sapiens
  misc_RNA (1)...(19): siRNA sense strand
ggaaagggcugguguacau

SEQ ID NO: 325013 - RNA, 19 nt, Homo sapiens
  misc_RNA (1)...(19): siRNA sense strand
gaagacgacuugaucaucu

SEQ ID NO: 325014 - RNA, 19 nt, Homo sapiens
  misc_RNA (1)...(19): siRNA sense strand
gaacguggaagacgacuug

SEQ ID NO: 325015 - RNA, 19 nt, Homo sapiens
  misc_RNA (1)...(19): siRNA sense strand
ccaaagccaugcagaacaa

SEQ ID NO: 325016 - RNA, 19 nt, Homo sapiens
  misc_RNA (1)...(19): siRNA sense strand
gagcauugccggaaaguca

SEQ ID NO: 325017 - RNA, 19 nt, Homo sapiens
  misc_RNA (1)...(19): siRNA sense strand
gccggaaagucaacgagua

SEQ ID NO: 325018 - RNA, 19 nt, Homo sapiens
  misc_RNA (1)...(19): siRNA sense strand
caucuucccugacgacugu

SEQ ID NO: 325019 - RNA, 19 nt, Homo sapiens
  misc_RNA (1)...(19): siRNA sense strand
ggacaugagccuggacuga

SEQ ID NO: 325020 - RNA, 19 nt, Homo sapiens
  misc_RNA (1)...(19): siRNA sense strand
ggacgaagaggaggacaug

SEQ ID NO: 325021 - RNA, 19 nt, Homo sapiens
  misc_RNA (1)...(19): siRNA sense strand
agaaagagggcgacacgaa

SEQ ID NO: 325022 - RNA, 19 nt, Homo sapiens
  misc_RNA (1)...(19): siRNA sense strand
ggaagacgacuugaucauc

SEQ ID NO: 325023 - RNA, 19 nt, Homo sapiens
  misc_RNA (1)...(19): siRNA sense strand
ugaggagcauugccggaaa

SEQ ID NO: 325024 - RNA, 19 nt, Homo sapiens
  misc_RNA (1)...(19): siRNA sense strand
ggacaagaaggacgaagag

SEQ ID NO: 325025 - RNA, 19 nt, Homo sapiens
  misc_RNA (1)...(19): siRNA sense strand
gggucuacgugcugaaguu

SEQ ID NO: 325026 - RNA, 19 nt, Homo sapiens
  misc_RNA (1)...(19): siRNA sense strand
gcagaccgcggaugagauc

SEQ ID NO: 325027 - RNA, 19 nt, Homo sapiens
  misc_RNA (1)...(19): siRNA sense strand
gaggagcauugccggaaag

SEQ ID NO: 325028 - RNA, 19 nt, Homo sapiens
  misc_RNA (1)...(19): siRNA sense strand
caacgaguaucugaacaac

SEQ ID NO: 325029 - RNA, 19 nt, Homo sapiens
  misc_RNA (1)...(19): siRNA sense strand
ggaaagucaacgaguaucu

SEQ ID NO: 325030 - RNA, 19 nt, Homo sapiens
  misc_RNA (1)...(19): siRNA sense strand
gaaagucaacgaguaucug

SEQ ID NO: 325031 - RNA, 19 nt, Homo sapiens
  misc_RNA (1)...(19): siRNA sense strand
acacgaaggacaagaagga

SEQ ID NO: 325032 - RNA, 19 nt, Homo sapiens
  misc_RNA (1)...(19): siRNA sense strand
gaaagggcugguguacauu

SEQ ID NO: 325033 - RNA, 19 nt, Homo sapiens
  misc_RNA (1)...(19): siRNA sense strand
ccaagacagaccaggauga

SEQ ID NO: 325034 - RNA, 19 nt, Homo sapiens
  misc_RNA (1)...(19): siRNA sense strand
ccaccgugacuccggauaa

SEQ ID NO: 325035 - RNA, 19 nt, Homo sapiens
  misc_RNA (1)...(19): siRNA sense strand
gcgccugcuucccuacuug

SEQ ID NO: 325036 - RNA, 19 nt, Homo sapiens
  misc_RNA (1)...(19): siRNA sense strand
acgacucgcuuauucacuu

SEQ ID NO: 325037 - RNA, 19 nt, Homo sapiens
  misc_RNA (1)...(19): siRNA sense strand
aaagucaacgaguaucuga

SEQ ID NO: 325038 - RNA, 19 nt, Homo sapiens
  misc_RNA (1)...(19): siRNA sense strand
acggacgacucgcuuauuc

SEQ ID NO: 325039 - RNA, 19 nt, Homo sapiens
  misc_RNA (1)...(19): siRNA sense strand
ugagcgaccuccagagcau

SEQ ID NO: 325040 - RNA, 19 nt, Homo sapiens
  misc_RNA (1)...(19): siRNA sense strand
gcgacacgaaggacaagaa

SEQ ID NO: 325041 - RNA, 19 nt, Homo sapiens
  misc_RNA (1)...(19): siRNA sense strand
cgacucgcuuauucacuuc

SEQ ID NO: 325042 - RNA, 19 nt, Homo sapiens
  misc_RNA (1)...(19): siRNA sense strand
gugcugacgccggagauaa

SEQ ID NO: 325043 - RNA, 19 nt, Homo sapiens
  misc_RNA (1)...(19): siRNA sense strand
aaguggaccuggccagugu

SEQ ID NO: 325044 - RNA, 19 nt, Homo sapiens
  misc_RNA (1)...(19): siRNA sense strand
ucaacgaguaucugaacaa

SEQ ID NO: 325045 - RNA, 19 nt, Homo sapiens
  misc_RNA (1)...(19): siRNA sense strand
ugacgacugugaguucaag

SEQ ID NO: 325046 - RNA, 19 nt, Homo sapiens
  misc_RNA (1)...(19): siRNA sense strand
gccaaagccaugcagaaca

SEQ ID NO: 325047 - RNA, 19 nt, Homo sapiens
  misc_RNA (1)...(19): siRNA sense strand
cagacggacgacucgcuua

SEQ ID NO: 325048 - RNA, 19 nt, Homo sapiens
  misc_RNA (1)...(19): siRNA sense strand
ccggaaagucaacgaguau

SEQ ID NO: 325049 - RNA, 19 nt, Homo sapiens
  misc_RNA (1)...(19): siRNA sense strand
ugcaggaacccaagacaga

SEQ ID NO: 325050 - RNA, 19 nt, Homo sapiens
  misc_RNA (1)...(19): siRNA sense strand
gaaggacaagaaggacgaa

SEQ ID NO: 325051 - RNA, 19 nt, Homo sapiens
  misc_RNA (1)...(19): siRNA sense strand
gacggacgacucgcuuauu

SEQ ID NO: 325052 - RNA, 19 nt, Homo sapiens
  misc_RNA (1)...(19): siRNA sense strand
ggacgacucgcuuauucac

SEQ ID NO: 325053 - RNA, 19 nt, Homo sapiens
  misc_RNA (1)...(19): siRNA sense strand
cgucauccaccaccucuuc

SEQ ID NO: 325054 - RNA, 19 nt, Homo sapiens
  misc_RNA (1)...(19): siRNA sense strand
caagacagaccaggaugag

SEQ ID NO: 325055 - RNA, 19 nt, Homo sapiens
  misc_RNA (1)...(19): siRNA sense strand
cguggaagacgacuugauc

SEQ ID NO: 325056 - RNA, 19 nt, Homo sapiens
  misc_RNA (1)...(19): siRNA sense strand
gcucaucucucacgacaau

SEQ ID NO: 325057 - RNA, 19 nt, Homo sapiens
  misc_RNA (1)...(19): siRNA sense strand
gaguuucucuucaauaugu

SEQ ID NO: 325058 - RNA, 19 nt, Homo sapiens
  misc_RNA (1)...(19): siRNA sense strand
aggaguuucucuucaauau

SEQ ID NO: 325059 - RNA, 19 nt, Homo sapiens
  misc_RNA (1)...(19): siRNA sense strand
cagaaucgaaggaugaaga

SEQ ID NO: 325060 - RNA, 19 nt, Homo sapiens
  misc_RNA (1)...(19): siRNA sense strand
gcagcuacccggacuacau

SEQ ID NO: 325061 - RNA, 19 nt, Homo sapiens
  misc_RNA (1)...(19): siRNA sense strand
aaucgaaggaugaagauga

SEQ ID NO: 325062 - RNA, 19 nt, Homo sapiens
  misc_RNA (1)...(19): siRNA sense strand
uggacucgcucaucucuca

SEQ ID NO: 325063 - RNA, 19 nt, Homo sapiens
  misc_RNA (1)...(19): siRNA sense strand
gugccggacuguagcgauu

SEQ ID NO: 325064 - RNA, 19 nt, Homo sapiens
  misc_RNA (1)...(19): siRNA sense strand
cgacaaugaagaccuccua

SEQ ID NO: 325065 - RNA, 19 nt, Homo sapiens
  misc_RNA (1)...(19): siRNA sense strand
gcaagcacaaagaggagaa

SEQ ID NO: 325066 - RNA, 19 nt, Homo sapiens
  misc_RNA (1)...(19): siRNA sense strand
ccuccuagcguccagguuu

SEQ ID NO: 325067 - RNA, 19 nt, Homo sapiens
  misc_RNA (1)...(19): siRNA sense strand
agucguccgugguauauca

SEQ ID NO: 325068 - RNA, 19 nt, Homo sapiens
  misc_RNA (1)...(19): siRNA sense strand
ggaguuucucuucaauaug

SEQ ID NO: 325069 - RNA, 19 nt, Homo sapiens
  misc_RNA (1)...(19): siRNA sense strand
ggcccaucaguaacuauua

SEQ ID NO: 325070 - RNA, 19 nt, Homo sapiens
  misc_RNA (1)...(19): siRNA sense strand
cgcuggaacuggagaagga

SEQ ID NO: 325071 - RNA, 19 nt, Homo sapiens
  misc_RNA (1)...(19): siRNA sense strand
gggcccaucaguaacuauu

SEQ ID NO: 325072 - RNA, 19 nt, Homo sapiens
  misc_RNA (1)...(19): siRNA sense strand
cagcuacccggacuacaug

SEQ ID NO: 325073 - RNA, 19 nt, Homo sapiens
  misc_RNA (1)...(19): siRNA sense strand
uuucagaaucgaaggauga

SEQ ID NO: 325074 - RNA, 19 nt, Homo sapiens
  misc_RNA (1)...(19): siRNA sense strand
gcuacccggacuacaugua

SEQ ID NO: 325075 - RNA, 19 nt, Homo sapiens
  misc_RNA (1)...(19): siRNA sense strand
ucaccgagcggcaggucaa

SEQ ID NO: 325076 - RNA, 19 nt, Homo sapiens
  misc_RNA (1)...(19): siRNA sense strand
gcacggaugucacugagua

SEQ ID NO: 325077 - RNA, 19 nt, Homo sapiens
  misc_RNA (1)...(19): siRNA sense strand
gugaggagaucgagaagaa

SEQ ID NO: 325078 - RNA, 19 nt, Homo sapiens
  misc_RNA (1)...(19): siRNA sense strand
caccaaggaugcugucuau

SEQ ID NO: 325079 - RNA, 19 nt, Homo sapiens
  misc_RNA (1)...(19): siRNA sense strand
gaucgaggcucugagaaag

SEQ ID NO: 325080 - RNA, 19 nt, Homo sapiens
  misc_RNA (1)...(19): siRNA sense strand
cagauucaagucucaaaua

SEQ ID NO: 325081 - RNA, 19 nt, Homo sapiens
  misc_RNA (1)...(19): siRNA sense strand
gaccguacguccaacuuca

SEQ ID NO: 325082 - RNA, 19 nt, Homo sapiens
  misc_RNA (1)...(19): siRNA sense strand
ggaucgaggcucugagaaa

SEQ ID NO: 325083 - RNA, 19 nt, Homo sapiens
  misc_RNA (1)...(19): siRNA sense strand
gguuugugcugacagauuc

SEQ ID NO: 325084 - RNA, 19 nt, Homo sapiens
  misc_RNA (1)...(19): siRNA sense strand
ccaaggaugcugucuauac

SEQ ID NO: 325085 - RNA, 19 nt, Homo sapiens
  misc_RNA (1)...(19): siRNA sense strand
ggaggcagaugagcuggau

SEQ ID NO: 325086 - RNA, 19 nt, Homo sapiens
  misc_RNA (1)...(19): siRNA sense strand
gaaggagguucaggcucuu

SEQ ID NO: 325087 - RNA, 19 nt, Homo sapiens
  misc_RNA (1)...(19): siRNA sense strand
agaaagaccguacguccaa

SEQ ID NO: 325088 - RNA, 19 nt, Homo sapiens
  misc_RNA (1)...(19): siRNA sense strand
ucacugcccugcucaacca

SEQ ID NO: 325089 - RNA, 19 nt, Homo sapiens
  misc_RNA (1)...(19): siRNA sense strand
gaucugcucaacuucaaga

SEQ ID NO: 325090 - RNA, 19 nt, Homo sapiens
  misc_RNA (1)...(19): siRNA sense strand
gaugcugucuauaccuugu

SEQ ID NO: 325091 - RNA, 19 nt, Homo sapiens
  misc_RNA (1)...(19): siRNA sense strand
caacuauggcuuccagauc

SEQ ID NO: 325092 - RNA, 19 nt, Homo sapiens
  misc_RNA (1)...(19): siRNA sense strand
gaggagaucgagaagaagu

SEQ ID NO: 325093 - RNA, 19 nt, Homo sapiens
  misc_RNA (1)...(19): siRNA sense strand
gcaacuauggcuuccagau

SEQ ID NO: 325094 - RNA, 19 nt, Homo sapiens
  misc_RNA (1)...(19): siRNA sense strand
cgcccgaucugcucaacuu

SEQ ID NO: 325095 - RNA, 19 nt, Homo sapiens
  misc_RNA (1)...(19): siRNA sense strand
caaggaugcugucuauacc

SEQ ID NO: 325096 - RNA, 19 nt, Homo sapiens
  misc_RNA (1)...(19): siRNA sense strand
acgaggcacuggagaagga

SEQ ID NO: 325097 - RNA, 19 nt, Homo sapiens
  misc_RNA (1)...(19): siRNA sense strand
ugagcuggauggugagauc

SEQ ID NO: 325098 - RNA, 19 nt, Homo sapiens
  misc_RNA (1)...(19): siRNA sense strand
ccgaucugcucaacuucaa

SEQ ID NO: 325099 - RNA, 19 nt, Homo sapiens
  misc_RNA (1)...(19): siRNA sense strand
agggauggaugucgaucuu

SEQ ID NO: 325100 - RNA, 19 nt, Homo sapiens
  misc_RNA (1)...(19): siRNA sense strand
gacagauucaagucucaaa

SEQ ID NO: 325101 - RNA, 19 nt, Homo sapiens
  misc_RNA (1)...(19): siRNA sense strand
uuagugaggagaucgagaa

SEQ ID NO: 325102 - RNA, 19 nt, Homo sapiens
  misc_RNA (1)...(19): siRNA sense strand
gcuuccagauccacaccaa

SEQ ID NO: 325103 - RNA, 19 nt, Homo sapiens
  misc_RNA (1)...(19): siRNA sense strand
cagcaaaaccggcuuagug

SEQ ID NO: 325104 - RNA, 19 nt, Homo sapiens
  misc_RNA (1)...(19): siRNA sense strand
acaccaaggaugcugucua

SEQ ID NO: 325105 - RNA, 19 nt, Homo sapiens
  misc_RNA (1)...(19): siRNA sense strand
aggaugcugucuauaccuu

SEQ ID NO: 325106 - RNA, 19 nt, Homo sapiens
  misc_RNA (1)...(19): siRNA sense strand
gcucucggacucuaacaag

SEQ ID NO: 325107 - RNA, 19 nt, Homo sapiens
  misc_RNA (1)...(19): siRNA sense strand
gcacggaugucacugagua

SEQ ID NO: 325108 - RNA, 19 nt, Homo sapiens
  misc_RNA (1)...(19): siRNA sense strand
gugaggagaucgagaagaa

SEQ ID NO: 325109 - RNA, 19 nt, Homo sapiens
  misc_RNA (1)...(19): siRNA sense strand
caccaaggaugcugucuau

SEQ ID NO: 325110 - RNA, 19 nt, Homo sapiens
  misc_RNA (1)...(19): siRNA sense strand
gaucgaggcucugagaaag

SEQ ID NO: 325111 - RNA, 19 nt, Homo sapiens
  misc_RNA (1)...(19): siRNA sense strand
cagauucaagucucaaaua

SEQ ID NO: 325112 - RNA, 19 nt, Homo sapiens
  misc_RNA (1)...(19): siRNA sense strand
gaccguacguccaacuuca

SEQ ID NO: 325113 - RNA, 19 nt, Homo sapiens
  misc_RNA (1)...(19): siRNA sense strand
ggaucgaggcucugagaaa

SEQ ID NO: 325114 - RNA, 19 nt, Homo sapiens
  misc_RNA (1)...(19): siRNA sense strand
gguuugugcugacagauuc

SEQ ID NO: 325115 - RNA, 19 nt, Homo sapiens
  misc_RNA (1)...(19): siRNA sense strand
ccaaggaugcugucuauac

SEQ ID NO: 325116 - RNA, 19 nt, Homo sapiens
  misc_RNA (1)...(19): siRNA sense strand
ggaggcagaugagcuggau

SEQ ID NO: 325117 - RNA, 19 nt, Homo sapiens
  misc_RNA (1)...(19): siRNA sense strand
gaaggagguucaggcucuu

SEQ ID NO: 325118 - RNA, 19 nt, Homo sapiens
  misc_RNA (1)...(19): siRNA sense strand
agaaagaccguacguccaa

SEQ ID NO: 325119 - RNA, 19 nt, Homo sapiens
  misc_RNA (1)...(19): siRNA sense strand
ucacugcccugcucaacca

SEQ ID NO: 325120 - RNA, 19 nt, Homo sapiens
  misc_RNA (1)...(19): siRNA sense strand
gaucugcucaacuucaaga

SEQ ID NO: 325121 - RNA, 19 nt, Homo sapiens
  misc_RNA (1)...(19): siRNA sense strand
gaugcugucuauaccuugu

SEQ ID NO: 325122 - RNA, 19 nt, Homo sapiens
  misc_RNA (1)...(19): siRNA sense strand
caacuauggcuuccagauc

SEQ ID NO: 325123 - RNA, 19 nt, Homo sapiens
  misc_RNA (1)...(19): siRNA sense strand
gaggagaucgagaagaagu

SEQ ID NO: 325124 - RNA, 19 nt, Homo sapiens
  misc_RNA (1)...(19): siRNA sense strand
gcaacuauggcuuccagau

SEQ ID NO: 325125 - RNA, 19 nt, Homo sapiens
  misc_RNA (1)...(19): siRNA sense strand
cgcccgaucugcucaacuu

SEQ ID NO: 325126 - RNA, 19 nt, Homo sapiens
  misc_RNA (1)...(19): siRNA sense strand
caaggaugcugucuauacc

SEQ ID NO: 325127 - RNA, 19 nt, Homo sapiens
  misc_RNA (1)...(19): siRNA sense strand
acgaggcacuggagaagga

SEQ ID NO: 325128 - RNA, 19 nt, Homo sapiens
  misc_RNA (1)...(19): siRNA sense strand
ugagcuggauggugagauc

SEQ ID NO: 325129 - RNA, 19 nt, Homo sapiens
  misc_RNA (1)...(19): siRNA sense strand
ccgaucugcucaacuucaa

SEQ ID NO: 325130 - RNA, 19 nt, Homo sapiens
  misc_RNA (1)...(19): siRNA sense strand
agggauggaugucgaucuu

SEQ ID NO: 325131 - RNA, 19 nt, Homo sapiens
  misc_RNA (1)...(19): siRNA sense strand
gacagauucaagucucaaa

SEQ ID NO: 325132 - RNA, 19 nt, Homo sapiens
  misc_RNA (1)...(19): siRNA sense strand
uuagugaggagaucgagaa

SEQ ID NO: 325133 - RNA, 19 nt, Homo sapiens
  misc_RNA (1)...(19): siRNA sense strand
gcuuccagauccacaccaa

SEQ ID NO: 325134 - RNA, 19 nt, Homo sapiens
  misc_RNA (1)...(19): siRNA sense strand
cagcaaaaccggcuuagug

SEQ ID NO: 325135 - RNA, 19 nt, Homo sapiens
  misc_RNA (1)...(19): siRNA sense strand
acaccaaggaugcugucua

SEQ ID NO: 325136 - RNA, 19 nt, Homo sapiens
  misc_RNA (1)...(19): siRNA sense strand
aggaugcugucuauaccuu

SEQ ID NO: 325137 - RNA, 19 nt, Homo sapiens
  misc_RNA (1)...(19): siRNA sense strand
gcucucggacucuaacaag

SEQ ID NO: 325138 - RNA, 19 nt, Homo sapiens
  misc_RNA (1)...(19): siRNA sense strand
gcaaauacgggacuucuua

SEQ ID NO: 325139 - RNA, 19 nt, Homo sapiens
  misc_RNA (1)...(19): siRNA sense strand
ggaaagagcaagaauuaga

SEQ ID NO: 325140 - RNA, 19 nt, Homo sapiens
  misc_RNA (1)...(19): siRNA sense strand
caacugaagugaugcaaau

SEQ ID NO: 325141 - RNA, 19 nt, Homo sapiens
  misc_RNA (1)...(19): siRNA sense strand
ggucgugaauucuugguua

SEQ ID NO: 325142 - RNA, 19 nt, Homo sapiens
  misc_RNA (1)...(19): siRNA sense strand
gagauaaagcuuugaaguu

SEQ ID NO: 325143 - RNA, 19 nt, Homo sapiens
  misc_RNA (1)...(19): siRNA sense strand
gaacuaaagaggaauuugu

SEQ ID NO: 325144 - RNA, 19 nt, Homo sapiens
  misc_RNA (1)...(19): siRNA sense strand
gcagaggugugccuucaug

SEQ ID NO: 325145 - RNA, 19 nt, Homo sapiens
  misc_RNA (1)...(19): siRNA sense strand
gcugacaacugaagugaug

SEQ ID NO: 325146 - RNA, 19 nt, Homo sapiens
  misc_RNA (1)...(19): siRNA sense strand
ggaauugucacgaauguug

SEQ ID NO: 325147 - RNA, 19 nt, Homo sapiens
  misc_RNA (1)...(19): siRNA sense strand
gaugaaagucaguuuguuu

SEQ ID NO: 325148 - RNA, 19 nt, Homo sapiens
  misc_RNA (1)...(19): siRNA sense strand
aaggaaagagcaagaauua

SEQ ID NO: 325149 - RNA, 19 nt, Homo sapiens
  misc_RNA (1)...(19): siRNA sense strand
gcagaguauuguacagaaa

SEQ ID NO: 325150 - RNA, 19 nt, Homo sapiens
  misc_RNA (1)...(19): siRNA sense strand
cagcaucacuggucaaaca

SEQ ID NO: 325151 - RNA, 19 nt, Homo sapiens
  misc_RNA (1)...(19): siRNA sense strand
ggagagcuuccagaaauua

SEQ ID NO: 325152 - RNA, 19 nt, Homo sapiens
  misc_RNA (1)...(19): siRNA sense strand
gggaggagauaaagcuuug

SEQ ID NO: 325153 - RNA, 19 nt, Homo sapiens
  misc_RNA (1)...(19): siRNA sense strand
ggaauuuguuaaagucaga

SEQ ID NO: 325154 - RNA, 19 nt, Homo sapiens
  misc_RNA (1)...(19): siRNA sense strand
ucacgaauguugcugcuau

SEQ ID NO: 325155 - RNA, 19 nt, Homo sapiens
  misc_RNA (1)...(19): siRNA sense strand
uaagagagaagaaggagaa

SEQ ID NO: 325156 - RNA, 19 nt, Homo sapiens
  misc_RNA (1)...(19): siRNA sense strand
uggaacggcugacaacuga

SEQ ID NO: 325157 - RNA, 19 nt, Homo sapiens
  misc_RNA (1)...(19): siRNA sense strand
ggaugaaagucaguuuguu

SEQ ID NO: 325158 - RNA, 19 nt, Homo sapiens
  misc_RNA (1)...(19): siRNA sense strand
cgacagcaguugaaugaag

SEQ ID NO: 325159 - RNA, 19 nt, Homo sapiens
  misc_RNA (1)...(19): siRNA sense strand
gaaaggaaagagcaagaau

SEQ ID NO: 325160 - RNA, 19 nt, Homo sapiens
  misc_RNA (1)...(19): siRNA sense strand
caugggaacuaaagaggaa

SEQ ID NO: 325161 - RNA, 19 nt, Homo sapiens
  misc_RNA (1)...(19): siRNA sense strand
ggagauaaagcuuugaagu

SEQ ID NO: 325162 - RNA, 19 nt, Homo sapiens
  misc_RNA (1)...(19): siRNA sense strand
uugaaaggcuugaaauaca

SEQ ID NO: 325163 - RNA, 19 nt, Homo sapiens
  misc_RNA (1)...(19): siRNA sense strand
ggaaaggaaagagcaagaa

SEQ ID NO: 325164 - RNA, 19 nt, Homo sapiens
  misc_RNA (1)...(19): siRNA sense strand
ggcagaguauuguacagaa

SEQ ID NO: 325165 - RNA, 19 nt, Homo sapiens
  misc_RNA (1)...(19): siRNA sense strand
gaaagagcaagaauuagag

SEQ ID NO: 325166 - RNA, 19 nt, Homo sapiens
  misc_RNA (1)...(19): siRNA sense strand
gcucuuggacaccauauug

SEQ ID NO: 325167 - RNA, 19 nt, Homo sapiens
  misc_RNA (1)...(19): siRNA sense strand
ugaaaggcuugaaauacau

SEQ ID NO: 325168 - RNA, 19 nt, Homo sapiens
  misc_RNA (1)...(19): siRNA sense strand
gggaggugcuggagagcuu

SEQ ID NO: 325169 - RNA, 19 nt, Homo sapiens
  misc_RNA (1)...(19): siRNA sense strand
gagcuggauucggaugaaa

SEQ ID NO: 325170 - RNA, 19 nt, Homo sapiens
  misc_RNA (1)...(19): siRNA sense strand
ggagcuggauucggaugaa

SEQ ID NO: 325171 - RNA, 19 nt, Homo sapiens
  misc_RNA (1)...(19): siRNA sense strand
caucacuggucaaacaaug

SEQ ID NO: 325172 - RNA, 19 nt, Homo sapiens
  misc_RNA (1)...(19): siRNA sense strand
gcugaugucccuauacaau

SEQ ID NO: 325173 - RNA, 19 nt, Homo sapiens
  misc_RNA (1)...(19): siRNA sense strand
ucaaagugcuaaugcugau

SEQ ID NO: 325174 - RNA, 19 nt, Homo sapiens
  misc_RNA (1)...(19): siRNA sense strand
gagagaagaaggagaaacu

SEQ ID NO: 325175 - RNA, 19 nt, Homo sapiens
  misc_RNA (1)...(19): siRNA sense strand
caacgcauccuggcaaugu

SEQ ID NO: 325176 - RNA, 19 nt, Homo sapiens
  misc_RNA (1)...(19): siRNA sense strand
caauguaagcaucaauuug

SEQ ID NO: 325177 - RNA, 19 nt, Homo sapiens
  misc_RNA (1)...(19): siRNA sense strand
uaaugcugaugucccuaua

SEQ ID NO: 325178 - RNA, 19 nt, Homo sapiens
  misc_RNA (1)...(19): siRNA sense strand
ugaugucccuauacaaugu

SEQ ID NO: 325179 - RNA, 19 nt, Homo sapiens
  misc_RNA (1)...(19): siRNA sense strand
caagucggccucugaguuc

SEQ ID NO: 325180 - RNA, 19 nt, Homo sapiens
  misc_RNA (1)...(19): siRNA sense strand
gagagcuuccagaaauuaa

SEQ ID NO: 325181 - RNA, 19 nt, Homo sapiens
  misc_RNA (1)...(19): siRNA sense strand
ccaagucggccucugaguu

SEQ ID NO: 325182 - RNA, 19 nt, Homo sapiens
  misc_RNA (1)...(19): siRNA sense strand
gcacaugggaacuaaagag

SEQ ID NO: 325183 - RNA, 19 nt, Homo sapiens
  misc_RNA (1)...(19): siRNA sense strand
cagcgagaguccaggauuc

SEQ ID NO: 325184 - RNA, 19 nt, Homo sapiens
  misc_RNA (1)...(19): siRNA sense strand
aaaggaaagagcaagaauu

SEQ ID NO: 325185 - RNA, 19 nt, Homo sapiens
  misc_RNA (1)...(19): siRNA sense strand
gaggagauaaagcuuugaa

SEQ ID NO: 325186 - RNA, 19 nt, Homo sapiens
  misc_RNA (1)...(19): siRNA sense strand
gaacggcugacaacugaag

SEQ ID NO: 325187 - RNA, 19 nt, Homo sapiens
  misc_RNA (1)...(19): siRNA sense strand
ggacaguguaccaaacuca

SEQ ID NO: 325188 - RNA, 19 nt, Homo sapiens
  misc_RNA (1)...(19): siRNA sense strand
gucgugaauucuugguuaa

SEQ ID NO: 325189 - RNA, 19 nt, Homo sapiens
  misc_RNA (1)...(19): siRNA sense strand
agaggaauuuguuaaaguc

SEQ ID NO: 325190 - RNA, 19 nt, Homo sapiens
  misc_RNA (1)...(19): siRNA sense strand
gcaggccgacaacauaaga

SEQ ID NO: 325191 - RNA, 19 nt, Homo sapiens
  misc_RNA (1)...(19): siRNA sense strand
cacgaauguugcugcuaua

SEQ ID NO: 325192 - RNA, 19 nt, Homo sapiens
  misc_RNA (1)...(19): siRNA sense strand
caacauaagagagaagaag

SEQ ID NO: 325193 - RNA, 19 nt, Homo sapiens
  misc_RNA (1)...(19): siRNA sense strand
uauagcauguggucgugaa

SEQ ID NO: 325194 - RNA, 19 nt, Homo sapiens
  misc_RNA (1)...(19): siRNA sense strand
ggauugugagcacuuuaaa

SEQ ID NO: 325195 - RNA, 19 nt, Homo sapiens
  misc_RNA (1)...(19): siRNA sense strand
gugcaggccgacaacauaa

SEQ ID NO: 325196 - RNA, 19 nt, Homo sapiens
  misc_RNA (1)...(19): siRNA sense strand
agaauuagagcagcugaaa

SEQ ID NO: 325197 - RNA, 19 nt, Homo sapiens
  misc_RNA (1)...(19): siRNA sense strand
gaaauacaucagcgagagu

SEQ ID NO: 325198 - RNA, 19 nt, Homo sapiens
  misc_RNA (1)...(19): siRNA sense strand
caauuugaaaggcuugaaa

SEQ ID NO: 325199 - RNA, 19 nt, Homo sapiens
  misc_RNA (1)...(19): siRNA sense strand
gaaugaagcgaagcagcaa

SEQ ID NO: 325200 - RNA, 19 nt, Homo sapiens
  misc_RNA (1)...(19): siRNA sense strand
gaucuggaacggcugacaa

SEQ ID NO: 325201 - RNA, 19 nt, Homo sapiens
  misc_RNA (1)...(19): siRNA sense strand
gcacucuggagcauaaugu

SEQ ID NO: 325202 - RNA, 19 nt, Homo sapiens
  misc_RNA (1)...(19): siRNA sense strand
gaagucgucaaggccauuu

SEQ ID NO: 325203 - RNA, 19 nt, Homo sapiens
  misc_RNA (1)...(19): siRNA sense strand
cgugcaggccgacaacaua

SEQ ID NO: 325204 - RNA, 19 nt, Homo sapiens
  misc_RNA (1)...(19): siRNA sense strand
gaaaggcuugaaauacauc

SEQ ID NO: 325205 - RNA, 19 nt, Homo sapiens
  misc_RNA (1)...(19): siRNA sense strand
uggcuggaauugucacgaa

SEQ ID NO: 325206 - RNA, 19 nt, Homo sapiens
  misc_RNA (1)...(19): siRNA sense strand
ggucaaacaauggagaguu

SEQ ID NO: 325207 - RNA, 19 nt, Homo sapiens
  misc_RNA (1)...(19): siRNA sense strand
ggaacuaaagaggaauuug

SEQ ID NO: 325208 - RNA, 19 nt, Homo sapiens
  misc_RNA (1)...(19): siRNA sense strand
gcucuucgacagcaguuga

SEQ ID NO: 325209 - RNA, 19 nt, Homo sapiens
  misc_RNA (1)...(19): siRNA sense strand
uggaagaucuccgcacucu

SEQ ID NO: 325210 - RNA, 19 nt, Homo sapiens
  misc_RNA (1)...(19): siRNA sense strand
gcaggcagaguauuguaca

SEQ ID NO: 325211 - RNA, 19 nt, Homo sapiens
  misc_RNA (1)...(19): siRNA sense strand
ggagaaacuggcucuucga

SEQ ID NO: 325212 - RNA, 19 nt, Homo sapiens
  misc_RNA (1)...(19): siRNA sense strand
gccggcacaugggaacuaa

SEQ ID NO: 325213 - RNA, 19 nt, Homo sapiens
  misc_RNA (1)...(19): siRNA sense strand
gaggugugccuucauguac

SEQ ID NO: 325214 - RNA, 19 nt, Homo sapiens
  misc_RNA (1)...(19): siRNA sense strand
agaguauuguacagaaaug

SEQ ID NO: 325215 - RNA, 19 nt, Homo sapiens
  misc_RNA (1)...(19): siRNA sense strand
ccaggacaguguaccaaac

SEQ ID NO: 325216 - RNA, 19 nt, Homo sapiens
  misc_RNA (1)...(19): siRNA sense strand
gcagugaggaagucgucaa

SEQ ID NO: 325217 - RNA, 19 nt, Homo sapiens
  misc_RNA (1)...(19): siRNA sense strand
gccgacaacauaagagaga

SEQ ID NO: 325218 - RNA, 19 nt, Homo sapiens
  misc_RNA (1)...(19): siRNA sense strand
cagcaggcagaguauugua

SEQ ID NO: 325219 - RNA, 19 nt, Homo sapiens
  misc_RNA (1)...(19): siRNA sense strand
gagcuuccagaaauuaaag

SEQ ID NO: 325220 - RNA, 19 nt, Homo sapiens
  misc_RNA (1)...(19): siRNA sense strand
ggugugccuucauguacug

SEQ ID NO: 325221 - RNA, 19 nt, Homo sapiens
  misc_RNA (1)...(19): siRNA sense strand
agaggugugccuucaugua

SEQ ID NO: 325222 - RNA, 19 nt, Homo sapiens
  misc_RNA (1)...(19): siRNA sense strand
uagagcagcugaaaaugga

SEQ ID NO: 325223 - RNA, 19 nt, Homo sapiens
  misc_RNA (1)...(19): siRNA sense strand
cagaguauuguacagaaau

SEQ ID NO: 325224 - RNA, 19 nt, Homo sapiens
  misc_RNA (1)...(19): siRNA sense strand
uccgcacucuggagcauaa

SEQ ID NO: 325225 - RNA, 19 nt, Homo sapiens
  misc_RNA (1)...(19): siRNA sense strand
ggaagucgucaaggccauu

SEQ ID NO: 325226 - RNA, 19 nt, Homo sapiens
  misc_RNA (1)...(19): siRNA sense strand
gacaacauaagagagaaga

SEQ ID NO: 325227 - RNA, 19 nt, Homo sapiens
  misc_RNA (1)...(19): siRNA sense strand
ccuuugcugugguggcuuu

SEQ ID NO: 325228 - RNA, 19 nt, Homo sapiens
  misc_RNA (1)...(19): siRNA sense strand
caaacucaaagugcuaaug

SEQ ID NO: 325229 - RNA, 19 nt, Homo sapiens
  misc_RNA (1)...(19): siRNA sense strand
gccaggacaguguaccaaa

SEQ ID NO: 325230 - RNA, 19 nt, Homo sapiens
  misc_RNA (1)...(19): siRNA sense strand
uuacccagaauacuaaaug

SEQ ID NO: 325231 - RNA, 19 nt, Homo sapiens
  misc_RNA (1)...(19): siRNA sense strand
gcagcaggcagaguauugu

SEQ ID NO: 325232 - RNA, 19 nt, Homo sapiens
  misc_RNA (1)...(19): siRNA sense strand
caaauacgggacuucuuac

SEQ ID NO: 325233 - RNA, 19 nt, Homo sapiens
  misc_RNA (1)...(19): siRNA sense strand
gggaacuaaagaggaauuu

SEQ ID NO: 325234 - RNA, 19 nt, Homo sapiens
  misc_RNA (1)...(19): siRNA sense strand
uggauugugagcacuuuaa

SEQ ID NO: 325235 - RNA, 19 nt, Homo sapiens
  misc_RNA (1)...(19): siRNA sense strand
gacaguguaccaaacucaa

SEQ ID NO: 325236 - RNA, 19 nt, Homo sapiens
  misc_RNA (1)...(19): siRNA sense strand
gaggaauuuguuaaaguca

SEQ ID NO: 325237 - RNA, 19 nt, Homo sapiens
  misc_RNA (1)...(19): siRNA sense strand
ugugguggcuuuugaguga

SEQ ID NO: 325238 - RNA, 19 nt, Homo sapiens
  misc_RNA (1)...(19): siRNA sense strand
gaucgaagaacguaaagua

SEQ ID NO: 325239 - RNA, 19 nt, Homo sapiens
  misc_RNA (1)...(19): siRNA sense strand
cgaagaacguaaaguagaa

SEQ ID NO: 325240 - RNA, 19 nt, Homo sapiens
  misc_RNA (1)...(19): siRNA sense strand
gaacaccuccgaucgaaga

SEQ ID NO: 325241 - RNA, 19 nt, Homo sapiens
  misc_RNA (1)...(19): siRNA sense strand
gaaggugauugccaggaaa

SEQ ID NO: 325242 - RNA, 19 nt, Homo sapiens
  misc_RNA (1)...(19): siRNA sense strand
gagaagacuccaccuaauc

SEQ ID NO: 325243 - RNA, 19 nt, Homo sapiens
  misc_RNA (1)...(19): siRNA sense strand
agagaagacuccaccuaau

SEQ ID NO: 325244 - RNA, 19 nt, Homo sapiens
  misc_RNA (1)...(19): siRNA sense strand
cuaagcaugcuaagacuaa

SEQ ID NO: 325245 - RNA, 19 nt, Homo sapiens
  misc_RNA (1)...(19): siRNA sense strand
aagagaagacuccaccuaa

SEQ ID NO: 325246 - RNA, 19 nt, Homo sapiens
  misc_RNA (1)...(19): siRNA sense strand
ggaaauggaucuggaaaag

SEQ ID NO: 325247 - RNA, 19 nt, Homo sapiens
  misc_RNA (1)...(19): siRNA sense strand
agaaggugauugccaggaa

SEQ ID NO: 325248 - RNA, 19 nt, Homo sapiens
  misc_RNA (1)...(19): siRNA sense strand
aaagagaagacuccaccua

SEQ ID NO: 325249 - RNA, 19 nt, Homo sapiens
  misc_RNA (1)...(19): siRNA sense strand
gcacgagugagaucaagau

SEQ ID NO: 325250 - RNA, 19 nt, Homo sapiens
  misc_RNA (1)...(19): siRNA sense strand
ggacaagagagagaaggaa

SEQ ID NO: 325251 - RNA, 19 nt, Homo sapiens
  misc_RNA (1)...(19): siRNA sense strand
uaaaguagaaggugauugc

SEQ ID NO: 325252 - RNA, 19 nt, Homo sapiens
  misc_RNA (1)...(19): siRNA sense strand
agacuccaccuaauccuaa

SEQ ID NO: 325253 - RNA, 19 nt, Homo sapiens
  misc_RNA (1)...(19): siRNA sense strand
caagaggaaccaccaacug

SEQ ID NO: 325254 - RNA, 19 nt, Homo sapiens
  misc_RNA (1)...(19): siRNA sense strand
uauugaaccuggacaagag

SEQ ID NO: 325255 - RNA, 19 nt, Homo sapiens
  misc_RNA (1)...(19): siRNA sense strand
aagaggaaccaccaacuga

SEQ ID NO: 325256 - RNA, 19 nt, Homo sapiens
  misc_RNA (1)...(19): siRNA sense strand
ucgaagaacguaaaguaga

SEQ ID NO: 325257 - RNA, 19 nt, Homo sapiens
  misc_RNA (1)...(19): siRNA sense strand
uaagcaugcuaagacuaaa

SEQ ID NO: 325258 - RNA, 19 nt, Homo sapiens
  misc_RNA (1)...(19): siRNA sense strand
gaggaaccaccaacugaca

SEQ ID NO: 325259 - RNA, 19 nt, Homo sapiens
  misc_RNA (1)...(19): siRNA sense strand
gcaagaggaaccaccaacu

SEQ ID NO: 325260 - RNA, 19 nt, Homo sapiens
  misc_RNA (1)...(19): siRNA sense strand
ggaaccaccaacugacaau

SEQ ID NO: 325261 - RNA, 19 nt, Homo sapiens
  misc_RNA (1)...(19): siRNA sense strand
aggaacaccuccgaucgaa

SEQ ID NO: 325262 - RNA, 19 nt, Homo sapiens
  misc_RNA (1)...(19): siRNA sense strand
ggauauugaaccuggacaa

SEQ ID NO: 325263 - RNA, 19 nt, Homo sapiens
  misc_RNA (1)...(19): siRNA sense strand
gacuaaagaagcaggagau

SEQ ID NO: 325264 - RNA, 19 nt, Homo sapiens
  misc_RNA (1)...(19): siRNA sense strand
gaagaacguaaaguagaag

SEQ ID NO: 325265 - RNA, 19 nt, Homo sapiens
  misc_RNA (1)...(19): siRNA sense strand
caggaaauggaucuggaaa

SEQ ID NO: 325266 - RNA, 19 nt, Homo sapiens
  misc_RNA (1)...(19): siRNA sense strand
auucguggcucccggugaa

SEQ ID NO: 325267 - RNA, 19 nt, Homo sapiens
  misc_RNA (1)...(19): siRNA sense strand
gauauugaaccuggacaag

SEQ ID NO: 325268 - RNA, 19 nt, Homo sapiens
  misc_RNA (1)...(19): siRNA sense strand
cuaauccuaagcaugcuaa

SEQ ID NO: 325269 - RNA, 19 nt, Homo sapiens
  misc_RNA (1)...(19): siRNA sense strand
gaaccaccaacugacaauc

SEQ ID NO: 325270 - RNA, 19 nt, Homo sapiens
  misc_RNA (1)...(19): siRNA sense strand
gaaauggaucuggaaaaga

SEQ ID NO: 325271 - RNA, 19 nt, Homo sapiens
  misc_RNA (1)...(19): siRNA sense strand
ggaagacgcuccuugcuaa

SEQ ID NO: 325272 - RNA, 19 nt, Homo sapiens
  misc_RNA (1)...(19): siRNA sense strand
ggacagcacucccuugaaa

SEQ ID NO: 325273 - RNA, 19 nt, Homo sapiens
  misc_RNA (1)...(19): siRNA sense strand
ggaauuggcugaugauguu

SEQ ID NO: 325274 - RNA, 19 nt, Homo sapiens
  misc_RNA (1)...(19): siRNA sense strand
ggauauagaugaggcuuua

SEQ ID NO: 325275 - RNA, 19 nt, Homo sapiens
  misc_RNA (1)...(19): siRNA sense strand
uaaggaagccguaguguua

SEQ ID NO: 325276 - RNA, 19 nt, Homo sapiens
  misc_RNA (1)...(19): siRNA sense strand
ugauaucgcugauuuagua

SEQ ID NO: 325277 - RNA, 19 nt, Homo sapiens
  misc_RNA (1)...(19): siRNA sense strand
gaggaaauccgaaaucuuu

SEQ ID NO: 325278 - RNA, 19 nt, Homo sapiens
  misc_RNA (1)...(19): siRNA sense strand
gggaugauaucgcugauuu

SEQ ID NO: 325279 - RNA, 19 nt, Homo sapiens
  misc_RNA (1)...(19): siRNA sense strand
gauaguaccggauaugaua

SEQ ID NO: 325280 - RNA, 19 nt, Homo sapiens
  misc_RNA (1)...(19): siRNA sense strand
gcacaugccuacaacuaug

SEQ ID NO: 325281 - RNA, 19 nt, Homo sapiens
  misc_RNA (1)...(19): siRNA sense strand
cuacaacuauggaggauuu

SEQ ID NO: 325282 - RNA, 19 nt, Homo sapiens
  misc_RNA (1)...(19): siRNA sense strand
uaacagaaccagagacaaa

SEQ ID NO: 325283 - RNA, 19 nt, Homo sapiens
  misc_RNA (1)...(19): siRNA sense strand
gaaggcgcauugaagguuu

SEQ ID NO: 325284 - RNA, 19 nt, Homo sapiens
  misc_RNA (1)...(19): siRNA sense strand
cugcagacauugaaagaua

SEQ ID NO: 325285 - RNA, 19 nt, Homo sapiens
  misc_RNA (1)...(19): siRNA sense strand
acucugcgauggucuauua

SEQ ID NO: 325286 - RNA, 19 nt, Homo sapiens
  misc_RNA (1)...(19): siRNA sense strand
cacagaauguucacaauga

SEQ ID NO: 325287 - RNA, 19 nt, Homo sapiens
  misc_RNA (1)...(19): siRNA sense strand
auacauaccuccagcagaa

SEQ ID NO: 325288 - RNA, 19 nt, Homo sapiens
  misc_RNA (1)...(19): siRNA sense strand
gaaaugcacaugccuacaa

SEQ ID NO: 325289 - RNA, 19 nt, Homo sapiens
  misc_RNA (1)...(19): siRNA sense strand
gauaaagacuuaguagaag

SEQ ID NO: 325290 - RNA, 19 nt, Homo sapiens
  misc_RNA (1)...(19): siRNA sense strand
gacccuaaaucacauggua

SEQ ID NO: 325291 - RNA, 19 nt, Homo sapiens
  misc_RNA (1)...(19): siRNA sense strand
caacagguuuggcaggaaa

SEQ ID NO: 325292 - RNA, 19 nt, Homo sapiens
  misc_RNA (1)...(19): siRNA sense strand
gaacaugaagcaagcagaa

SEQ ID NO: 325293 - RNA, 19 nt, Homo sapiens
  misc_RNA (1)...(19): siRNA sense strand
gauauaauuucccagaauc

SEQ ID NO: 325294 - RNA, 19 nt, Homo sapiens
  misc_RNA (1)...(19): siRNA sense strand
gggaggagcuauuacgaau

SEQ ID NO: 325295 - RNA, 19 nt, Homo sapiens
  misc_RNA (1)...(19): siRNA sense strand
ggaaauaaauguggaagcu

SEQ ID NO: 325296 - RNA, 19 nt, Homo sapiens
  misc_RNA (1)...(19): siRNA sense strand
gaauaagucuacgugaguu

SEQ ID NO: 325297 - RNA, 19 nt, Homo sapiens
  misc_RNA (1)...(19): siRNA sense strand
gaaagaacagaauaaagga

SEQ ID NO: 325298 - RNA, 19 nt, Homo sapiens
  misc_RNA (1)...(19): siRNA sense strand
caauguggaugcccgaauu

SEQ ID NO: 325299 - RNA, 19 nt, Homo sapiens
  misc_RNA (1)...(19): siRNA sense strand
gagauauaauuucccagaa

SEQ ID NO: 325300 - RNA, 19 nt, Homo sapiens
  misc_RNA (1)...(19): siRNA sense strand
aaaauuggcucgugaauau

SEQ ID NO: 325301 - RNA, 19 nt, Homo sapiens
  misc_RNA (1)...(19): siRNA sense strand
cggauaugauaaagacuua

SEQ ID NO: 325302 - RNA, 19 nt, Homo sapiens
  misc_RNA (1)...(19): siRNA sense strand
cagaaaacauggaagguua

SEQ ID NO: 325303 - RNA, 19 nt, Homo sapiens
  misc_RNA (1)...(19): siRNA sense strand
gaauaaaggaagagaggaa

SEQ ID NO: 325304 - RNA, 19 nt, Homo sapiens
  misc_RNA (1)...(19): siRNA sense strand
gcacagaauguucacaaug

SEQ ID NO: 325305 - RNA, 19 nt, Homo sapiens
  misc_RNA (1)...(19): siRNA sense strand
gcagaaauggcaacagguu

SEQ ID NO: 325306 - RNA, 19 nt, Homo sapiens
  misc_RNA (1)...(19): siRNA sense strand
guacagugacccuaaauca

SEQ ID NO: 325307 - RNA, 19 nt, Homo sapiens
  misc_RNA (1)...(19): siRNA sense strand
caaaugaacaaguaucugu

SEQ ID NO: 325308 - RNA, 19 nt, Homo sapiens
  misc_RNA (1)...(19): siRNA sense strand
gaaauaaauguggaagcua

SEQ ID NO: 325309 - RNA, 19 nt, Homo sapiens
  misc_RNA (1)...(19): siRNA sense strand
ucagauggaugguguugga

SEQ ID NO: 325310 - RNA, 19 nt, Homo sapiens
  misc_RNA (1)...(19): siRNA sense strand
ggaaaggaguacugauggu

SEQ ID NO: 325311 - RNA, 19 nt, Homo sapiens
  misc_RNA (1)...(19): siRNA sense strand
gaaccagagacaaauaaau

SEQ ID NO: 325312 - RNA, 19 nt, Homo sapiens
  misc_RNA (1)...(19): siRNA sense strand
gcuguucguugucgugaaa

SEQ ID NO: 325313 - RNA, 19 nt, Homo sapiens
  misc_RNA (1)...(19): siRNA sense strand
gauguugaccuugcaagua

SEQ ID NO: 325314 - RNA, 19 nt, Homo sapiens
  misc_RNA (1)...(19): siRNA sense strand
gggaagacgcuccuugcua

SEQ ID NO: 325315 - RNA, 19 nt, Homo sapiens
  misc_RNA (1)...(19): siRNA sense strand
aagcggagcugcugguuca

SEQ ID NO: 325316 - RNA, 19 nt, Homo sapiens
  misc_RNA (1)...(19): siRNA sense strand
uguggaagcuaaacauguu

SEQ ID NO: 325317 - RNA, 19 nt, Homo sapiens
  misc_RNA (1)...(19): siRNA sense strand
guggaugcccgaauucuuu

SEQ ID NO: 325318 - RNA, 19 nt, Homo sapiens
  misc_RNA (1)...(19): siRNA sense strand
aaacauggaagguuauuca

SEQ ID NO: 325319 - RNA, 19 nt, Homo sapiens
  misc_RNA (1)...(19): siRNA sense strand
cuaaagcaguagcuacaga

SEQ ID NO: 325320 - RNA, 19 nt, Homo sapiens
  misc_RNA (1)...(19): siRNA sense strand
gcaacagguuuggcaggaa

SEQ ID NO: 325321 - RNA, 19 nt, Homo sapiens
  misc_RNA (1)...(19): siRNA sense strand
ucagggaguucuugaccaa

SEQ ID NO: 325322 - RNA, 19 nt, Homo sapiens
  misc_RNA (1)...(19): siRNA sense strand
agggaaagcuguucguugu

SEQ ID NO: 325323 - RNA, 19 nt, Homo sapiens
  misc_RNA (1)...(19): siRNA sense strand
gguaaucguccaaguacaa

SEQ ID NO: 325324 - RNA, 19 nt, Homo sapiens
  misc_RNA (1)...(19): siRNA sense strand
ucaguacagugacccuaaa

SEQ ID NO: 325325 - RNA, 19 nt, Homo sapiens
  misc_RNA (1)...(19): siRNA sense strand
caaugucucuucaucaacu

SEQ ID NO: 325326 - RNA, 19 nt, Homo sapiens
  misc_RNA (1)...(19): siRNA sense strand
agaaagaacagaauaaagg

SEQ ID NO: 325327 - RNA, 19 nt, Homo sapiens
  misc_RNA (1)...(19): siRNA sense strand
uauggaggauuucgagaug

SEQ ID NO: 325328 - RNA, 19 nt, Homo sapiens
  misc_RNA (1)...(19): siRNA sense strand
gaugauaucgcugauuuag

SEQ ID NO: 325329 - RNA, 19 nt, Homo sapiens
  misc_RNA (1)...(19): siRNA sense strand
aauguucgaugggaugaua

SEQ ID NO: 325330 - RNA, 19 nt, Homo sapiens
  misc_RNA (1)...(19): siRNA sense strand
ugaaagcggcacagcauga

SEQ ID NO: 325331 - RNA, 19 nt, Homo sapiens
  misc_RNA (1)...(19): siRNA sense strand
ccaccauauuuauugauga

SEQ ID NO: 325332 - RNA, 19 nt, Homo sapiens
  misc_RNA (1)...(19): siRNA sense strand
uaucgcugauuuaguagaa

SEQ ID NO: 325333 - RNA, 19 nt, Homo sapiens
  misc_RNA (1)...(19): siRNA sense strand
ggaugauaucgcugauuua

SEQ ID NO: 325334 - RNA, 19 nt, Homo sapiens
  misc_RNA (1)...(19): siRNA sense strand
cagaaccagagacaaauaa

SEQ ID NO: 325335 - RNA, 19 nt, Homo sapiens
  misc_RNA (1)...(19): siRNA sense strand
uaaaucacaugguaaucgu

SEQ ID NO: 325336 - RNA, 19 nt, Homo sapiens
  misc_RNA (1)...(19): siRNA sense strand
guccaugccuguaccuguu

SEQ ID NO: 325337 - RNA, 19 nt, Homo sapiens
  misc_RNA (1)...(19): siRNA sense strand
gaaagauacgagaaaugga

SEQ ID NO: 325338 - RNA, 19 nt, Homo sapiens
  misc_RNA (1)...(19): siRNA sense strand
gaagacgcuccuugcuaaa

SEQ ID NO: 325339 - RNA, 19 nt, Homo sapiens
  misc_RNA (1)...(19): siRNA sense strand
ugucagaguucaccguuca

SEQ ID NO: 325340 - RNA, 19 nt, Homo sapiens
  misc_RNA (1)...(19): siRNA sense strand
caugguaaucguccaagua

SEQ ID NO: 325341 - RNA, 19 nt, Homo sapiens
  misc_RNA (1)...(19): siRNA sense strand
cgaauaagucuacgugagu

SEQ ID NO: 325342 - RNA, 19 nt, Homo sapiens
  misc_RNA (1)...(19): siRNA sense strand
gcuacagaaugcaagacaa

SEQ ID NO: 325343 - RNA, 19 nt, Homo sapiens
  misc_RNA (1)...(19): siRNA sense strand
gcuuguucgucuucuguuu

SEQ ID NO: 325344 - RNA, 19 nt, Homo sapiens
  misc_RNA (1)...(19): siRNA sense strand
gauauuugaguuuggauca

SEQ ID NO: 325345 - RNA, 19 nt, Homo sapiens
  misc_RNA (1)...(19): siRNA sense strand
cagaggaaauccgaaaucu

SEQ ID NO: 325346 - RNA, 19 nt, Homo sapiens
  misc_RNA (1)...(19): siRNA sense strand
gccaccauauuuauugaug

SEQ ID NO: 325347 - RNA, 19 nt, Homo sapiens
  misc_RNA (1)...(19): siRNA sense strand
cagccaccauauuuauuga

SEQ ID NO: 325348 - RNA, 19 nt, Homo sapiens
  misc_RNA (1)...(19): siRNA sense strand
gccguaguguuaccaaugu

SEQ ID NO: 325349 - RNA, 19 nt, Homo sapiens
  misc_RNA (1)...(19): siRNA sense strand
gggaguucuugaccaaaug

SEQ ID NO: 325350 - RNA, 19 nt, Homo sapiens
  misc_RNA (1)...(19): siRNA sense strand
gccuguaccuguugaacga

SEQ ID NO: 325351 - RNA, 19 nt, Homo sapiens
  misc_RNA (1)...(19): siRNA sense strand
ugaaagauacgagaaaugg

SEQ ID NO: 325352 - RNA, 19 nt, Homo sapiens
  misc_RNA (1)...(19): siRNA sense strand
caaagaagaaaugcacaug

SEQ ID NO: 325353 - RNA, 19 nt, Homo sapiens
  misc_RNA (1)...(19): siRNA sense strand
gcagggaugcguccuugau

SEQ ID NO: 325354 - RNA, 19 nt, Homo sapiens
  misc_RNA (1)...(19): siRNA sense strand
cuugagaaacgaaucuaua

SEQ ID NO: 325355 - RNA, 19 nt, Homo sapiens
  misc_RNA (1)...(19): siRNA sense strand
ccagccaccauauuuauug

SEQ ID NO: 325356 - RNA, 19 nt, Homo sapiens
  misc_RNA (1)...(19): siRNA sense strand
gcaguaacagaaccagaga

SEQ ID NO: 325357 - RNA, 19 nt, Homo sapiens
  misc_RNA (1)...(19): siRNA sense strand
ggaagcuaaacauguuaaa

SEQ ID NO: 325358 - RNA, 19 nt, Homo sapiens
  misc_RNA (1)...(19): siRNA sense strand
agaaauggcaacagguuug

SEQ ID NO: 325359 - RNA, 19 nt, Homo sapiens
  misc_RNA (1)...(19): siRNA sense strand
caaauacagaggagaaucu

SEQ ID NO: 325360 - RNA, 19 nt, Homo sapiens
  misc_RNA (1)...(19): siRNA sense strand
uaaagcaguagcuacagaa

SEQ ID NO: 325361 - RNA, 19 nt, Homo sapiens
  misc_RNA (1)...(19): siRNA sense strand
gaagagaggaaaagaacaa

SEQ ID NO: 325362 - RNA, 19 nt, Homo sapiens
  misc_RNA (1)...(19): siRNA sense strand
uugaccaaaugaacaagua

SEQ ID NO: 325363 - RNA, 19 nt, Homo sapiens
  misc_RNA (1)...(19): siRNA sense strand
cagcaugaccuuccagcuu

SEQ ID NO: 325364 - RNA, 19 nt, Homo sapiens
  misc_RNA (1)...(19): siRNA sense strand
acagaaccagagacaaaua

SEQ ID NO: 325365 - RNA, 19 nt, Homo sapiens
  misc_RNA (1)...(19): siRNA sense strand
aaacgccaaucuucucagu

SEQ ID NO: 325366 - RNA, 19 nt, Homo sapiens
  misc_RNA (1)...(19): siRNA sense strand
gagaaucugagaagcuugu

SEQ ID NO: 325367 - RNA, 19 nt, Homo sapiens
  misc_RNA (1)...(19): siRNA sense strand
ggaguucuugaccaaauga

SEQ ID NO: 325368 - RNA, 19 nt, Homo sapiens
  misc_RNA (1)...(19): siRNA sense strand
gaagcuaaacauguuaaag

SEQ ID NO: 325369 - RNA, 19 nt, Homo sapiens
  misc_RNA (1)...(19): siRNA sense strand
agaacagaauaaaggaaga

SEQ ID NO: 325370 - RNA, 19 nt, Homo sapiens
  misc_RNA (1)...(19): siRNA sense strand
gcaggaaauaaauguggaa

SEQ ID NO: 325371 - RNA, 19 nt, Homo sapiens
  misc_RNA (1)...(19): siRNA sense strand
ggacauugcugaucgcuuu

SEQ ID NO: 325372 - RNA, 19 nt, Homo sapiens
  misc_RNA (1)...(19): siRNA sense strand
ccaggaauuugauaaguua

SEQ ID NO: 325373 - RNA, 19 nt, Homo sapiens
  misc_RNA (1)...(19): siRNA sense strand
gaaccaggauuccaagaug

SEQ ID NO: 325374 - RNA, 19 nt, Homo sapiens
  misc_RNA (1)...(19): siRNA sense strand
guaggaaucuguaccauca

SEQ ID NO: 325375 - RNA, 19 nt, Homo sapiens
  misc_RNA (1)...(19): siRNA sense strand
agauggagcuacuugauua

SEQ ID NO: 325376 - RNA, 19 nt, Homo sapiens
  misc_RNA (1)...(19): siRNA sense strand
gaaggaggaucaaguugug

SEQ ID NO: 325377 - RNA, 19 nt, Homo sapiens
  misc_RNA (1)...(19): siRNA sense strand
gcugaucgcuuuaauguag

SEQ ID NO: 325378 - RNA, 19 nt, Homo sapiens
  misc_RNA (1)...(19): siRNA sense strand
gaagagcucuaugcaaugu

SEQ ID NO: 325379 - RNA, 19 nt, Homo sapiens
  misc_RNA (1)...(19): siRNA sense strand
gcucagaauugccaagauu

SEQ ID NO: 325380 - RNA, 19 nt, Homo sapiens
  misc_RNA (1)...(19): siRNA sense strand
ggagcuacuugauuaugua

SEQ ID NO: 325381 - RNA, 19 nt, Homo sapiens
  misc_RNA (1)...(19): siRNA sense strand
gagcaacuaugaccuuuca

SEQ ID NO: 325382 - RNA, 19 nt, Homo sapiens
  misc_RNA (1)...(19): siRNA sense strand
cagcaaaguuccaugaaga

SEQ ID NO: 325383 - RNA, 19 nt, Homo sapiens
  misc_RNA (1)...(19): siRNA sense strand
gaauauaacguggcuguuu

SEQ ID NO: 325384 - RNA, 19 nt, Homo sapiens
  misc_RNA (1)...(19): siRNA sense strand
aagaagagcucuaugcaau

SEQ ID NO: 325385 - RNA, 19 nt, Homo sapiens
  misc_RNA (1)...(19): siRNA sense strand
agaauaagcuugcgaaagg

SEQ ID NO: 325386 - RNA, 19 nt, Homo sapiens
  misc_RNA (1)...(19): siRNA sense strand
gagguggaauugaaaguau

SEQ ID NO: 325387 - RNA, 19 nt, Homo sapiens
  misc_RNA (1)...(19): siRNA sense strand
gcacgugcauauacuagug

SEQ ID NO: 325388 - RNA, 19 nt, Homo sapiens
  misc_RNA (1)...(19): siRNA sense strand
gcauuugaguauagugaaa

SEQ ID NO: 325389 - RNA, 19 nt, Homo sapiens
  misc_RNA (1)...(19): siRNA sense strand
gaggagagcucagaauugc

SEQ ID NO: 325390 - RNA, 19 nt, Homo sapiens
  misc_RNA (1)...(19): siRNA sense strand
gccaggaauuugauaaguu

SEQ ID NO: 325391 - RNA, 19 nt, Homo sapiens
  misc_RNA (1)...(19): siRNA sense strand
gaauugccaagauuuauga

SEQ ID NO: 325392 - RNA, 19 nt, Homo sapiens
  misc_RNA (1)...(19): siRNA sense strand
guauacagaugacaacaag

SEQ ID NO: 325393 - RNA, 19 nt, Homo sapiens
  misc_RNA (1)...(19): siRNA sense strand
gcucaugcuucaacaacaa

SEQ ID NO: 325394 - RNA, 19 nt, Homo sapiens
  misc_RNA (1)...(19): siRNA sense strand
gaaaucaguaggaaucugu

SEQ ID NO: 325395 - RNA, 19 nt, Homo sapiens
  misc_RNA (1)...(19): siRNA sense strand
aaacccagcuuucucauac

SEQ ID NO: 325396 - RNA, 19 nt, Homo sapiens
  misc_RNA (1)...(19): siRNA sense strand
gaaaagaggaaaaugguuu

SEQ ID NO: 325397 - RNA, 19 nt, Homo sapiens
  misc_RNA (1)...(19): siRNA sense strand
gcagcaaaguuccaugaag

SEQ ID NO: 325398 - RNA, 19 nt, Homo sapiens
  misc_RNA (1)...(19): siRNA sense strand
gcuggcaucuucaagcuau

SEQ ID NO: 325399 - RNA, 19 nt, Homo sapiens
  misc_RNA (1)...(19): siRNA sense strand
gcagcgaacaaacuaauug

SEQ ID NO: 325400 - RNA, 19 nt, Homo sapiens
  misc_RNA (1)...(19): siRNA sense strand
gaaaguauggcaauuacag

SEQ ID NO: 325401 - RNA, 19 nt, Homo sapiens
  misc_RNA (1)...(19): siRNA sense strand
aauaacugcuggaggaauu

SEQ ID NO: 325402 - RNA, 19 nt, Homo sapiens
  misc_RNA (1)...(19): siRNA sense strand
ggagguggaauugaaagua

SEQ ID NO: 325403 - RNA, 19 nt, Homo sapiens
  misc_RNA (1)...(19): siRNA sense strand
ucagaauugccaagauuua

SEQ ID NO: 325404 - RNA, 19 nt, Homo sapiens
  misc_RNA (1)...(19): siRNA sense strand
ugacugcauuugaguauag

SEQ ID NO: 325405 - RNA, 19 nt, Homo sapiens
  misc_RNA (1)...(19): siRNA sense strand
gcuuuaauguagaccauga

SEQ ID NO: 325406 - RNA, 19 nt, Homo sapiens
  misc_RNA (1)...(19): siRNA sense strand
ucucauacccucuguguga

SEQ ID NO: 325407 - RNA, 19 nt, Homo sapiens
  misc_RNA (1)...(19): siRNA sense strand
acuaggagguggaauugaa

SEQ ID NO: 325408 - RNA, 19 nt, Homo sapiens
  misc_RNA (1)...(19): siRNA sense strand
gaagaggagagcucagaau

SEQ ID NO: 325409 - RNA, 19 nt, Homo sapiens
  misc_RNA (1)...(19): siRNA sense strand
gauccaggagcaacuauga

SEQ ID NO: 325410 - RNA, 19 nt, Homo sapiens
  misc_RNA (1)...(19): siRNA sense strand
ccaaaguagacaagauuaa

SEQ ID NO: 325411 - RNA, 19 nt, Homo sapiens
  misc_RNA (1)...(19): siRNA sense strand
ucaaaugacugccgaucca

SEQ ID NO: 325412 - RNA, 19 nt, Homo sapiens
  misc_RNA (1)...(19): siRNA sense strand
uaaagaggcagcgaacaaa

SEQ ID NO: 325413 - RNA, 19 nt, Homo sapiens
  misc_RNA (1)...(19): siRNA sense strand
uguagaccaugaugcagua

SEQ ID NO: 325414 - RNA, 19 nt, Homo sapiens
  misc_RNA (1)...(19): siRNA sense strand
acagaaacauggaauuaac

SEQ ID NO: 325415 - RNA, 19 nt, Homo sapiens
  misc_RNA (1)...(19): siRNA sense strand
agaggaaucuuuguuucaa

SEQ ID NO: 325416 - RNA, 19 nt, Homo sapiens
  misc_RNA (1)...(19): siRNA sense strand
gaacaaacuaauugaacca

SEQ ID NO: 325417 - RNA, 19 nt, Homo sapiens
  misc_RNA (1)...(19): siRNA sense strand
gccaaaguagacaagauua

SEQ ID NO: 325418 - RNA, 19 nt, Homo sapiens
  misc_RNA (1)...(19): siRNA sense strand
ggaauuaacguggcugaca

SEQ ID NO: 325419 - RNA, 19 nt, Homo sapiens
  misc_RNA (1)...(19): siRNA sense strand
caagaagagcucuaugcaa

SEQ ID NO: 325420 - RNA, 19 nt, Homo sapiens
  misc_RNA (1)...(19): siRNA sense strand
ggagccaggaauuugauaa

SEQ ID NO: 325421 - RNA, 19 nt, Homo sapiens
  misc_RNA (1)...(19): siRNA sense strand
ggaagaggagagcucagaa

SEQ ID NO: 325422 - RNA, 19 nt, Homo sapiens
  misc_RNA (1)...(19): siRNA sense strand
gcuauugauuaucgauuca

SEQ ID NO: 325423 - RNA, 19 nt, Homo sapiens
  misc_RNA (1)...(19): siRNA sense strand
uuaaagaggcagcgaacaa

SEQ ID NO: 325424 - RNA, 19 nt, Homo sapiens
  misc_RNA (1)...(19): siRNA sense strand
ggacaacguacuuuaugca

SEQ ID NO: 325425 - RNA, 19 nt, Homo sapiens
  misc_RNA (1)...(19): siRNA sense strand
ucuaugcaaugucaaagga

SEQ ID NO: 325426 - RNA, 19 nt, Homo sapiens
  misc_RNA (1)...(19): siRNA sense strand
auacagaugacaacaagaa

SEQ ID NO: 325427 - RNA, 19 nt, Homo sapiens
  misc_RNA (1)...(19): siRNA sense strand
caacaacaagaauaagcuu

SEQ ID NO: 325428 - RNA, 19 nt, Homo sapiens
  misc_RNA (1)...(19): siRNA sense strand
uacagaagcuuuuggagaa

SEQ ID NO: 325429 - RNA, 19 nt, Homo sapiens
  misc_RNA (1)...(19): siRNA sense strand
ugagaugccugaaaaugaa

SEQ ID NO: 325430 - RNA, 19 nt, Homo sapiens
  misc_RNA (1)...(19): siRNA sense strand
gaggaaucuuuguuucaag

SEQ ID NO: 325431 - RNA, 19 nt, Homo sapiens
  misc_RNA (1)...(19): siRNA sense strand
gcuucaacaacaagaauaa

SEQ ID NO: 325432 - RNA, 19 nt, Homo sapiens
  misc_RNA (1)...(19): siRNA sense strand
cagauggagcuacuugauu

SEQ ID NO: 325433 - RNA, 19 nt, Homo sapiens
  misc_RNA (1)...(19): siRNA sense strand
aggaaucuguaccaucaaa

SEQ ID NO: 325434 - RNA, 19 nt, Homo sapiens
  misc_RNA (1)...(19): siRNA sense strand
ggagaauuucguacuggaa

SEQ ID NO: 325435 - RNA, 19 nt, Homo sapiens
  misc_RNA (1)...(19): siRNA sense strand
ugucaaaggacucucagaa

SEQ ID NO: 325436 - RNA, 19 nt, Homo sapiens
  misc_RNA (1)...(19): siRNA sense strand
aagaggagagcucagaauu

SEQ ID NO: 325437 - RNA, 19 nt, Homo sapiens
  misc_RNA (1)...(19): siRNA sense strand
ggacacauucuggcucaug

SEQ ID NO: 325438 - RNA, 19 nt, Homo sapiens
  misc_RNA (1)...(19): siRNA sense strand
aaccaggauuccaagauga

SEQ ID NO: 325439 - RNA, 19 nt, Homo sapiens
  misc_RNA (1)...(19): siRNA sense strand
gggaagaggagagcucaga

SEQ ID NO: 325440 - RNA, 19 nt, Homo sapiens
  misc_RNA (1)...(19): siRNA sense strand
guuacuaggagguggaauu

SEQ ID NO: 325441 - RNA, 19 nt, Homo sapiens
  misc_RNA (1)...(19): siRNA sense strand
gcaauaacugcuggaggaa

SEQ ID NO: 325442 - RNA, 19 nt, Homo sapiens
  misc_RNA (1)...(19): siRNA sense strand
cagcgaacaaacuaauuga

SEQ ID NO: 325443 - RNA, 19 nt, Homo sapiens
  misc_RNA (1)...(19): siRNA sense strand
caacaagaagagcucuaug

SEQ ID NO: 325444 - RNA, 19 nt, Homo sapiens
  misc_RNA (1)...(19): siRNA sense strand
gguauacagaugacaacaa

SEQ ID NO: 325445 - RNA, 19 nt, Homo sapiens
  misc_RNA (1)...(19): siRNA sense strand
gcgaacaaacuaauugaac

SEQ ID NO: 325446 - RNA, 19 nt, Homo sapiens
  misc_RNA (1)...(19): siRNA sense strand
ccaggauucuugacugcau

SEQ ID NO: 325447 - RNA, 19 nt, Homo sapiens
  misc_RNA (1)...(19): siRNA sense strand
cagaauugccaagauuuau

SEQ ID NO: 325448 - RNA, 19 nt, Homo sapiens
  misc_RNA (1)...(19): siRNA sense strand
cauucuggcucaugcuuca

SEQ ID NO: 325449 - RNA, 19 nt, Homo sapiens
  misc_RNA (1)...(19): siRNA sense strand
gauguugucacgacuccaa

SEQ ID NO: 325450 - RNA, 19 nt, Homo sapiens
  misc_RNA (1)...(19): siRNA sense strand
aaaguuccaugaagaagcu

SEQ ID NO: 325451 - RNA, 19 nt, Homo sapiens
  misc_RNA (1)...(19): siRNA sense strand
uagcagcaaaguuccauga

SEQ ID NO: 325452 - RNA, 19 nt, Homo sapiens
  misc_RNA (1)...(19): siRNA sense strand
uugauuauguagcagcaaa

SEQ ID NO: 325453 - RNA, 19 nt, Homo sapiens
  misc_RNA (1)...(19): siRNA sense strand
uaauguagaccaugaugca

SEQ ID NO: 325454 - RNA, 19 nt, Homo sapiens
  misc_RNA (1)...(19): siRNA sense strand
ugugacagcucaacuucca

SEQ ID NO: 325455 - RNA, 19 nt, Homo sapiens
  misc_RNA (1)...(19): siRNA sense strand
gagcucagaauugccaaga

SEQ ID NO: 325456 - RNA, 19 nt, Homo sapiens
  misc_RNA (1)...(19): siRNA sense strand
agaggagagcucagaauug

SEQ ID NO: 325457 - RNA, 19 nt, Homo sapiens
  misc_RNA (1)...(19): siRNA sense strand
uggagcuacuugauuaugu

SEQ ID NO: 325458 - RNA, 19 nt, Homo sapiens
  misc_RNA (1)...(19): siRNA sense strand
ucaaagguauacagaugac

SEQ ID NO: 325459 - RNA, 19 nt, Homo sapiens
  misc_RNA (1)...(19): siRNA sense strand
agaggcagcgaacaaacua

SEQ ID NO: 325460 - RNA, 19 nt, Homo sapiens
  misc_RNA (1)...(19): siRNA sense strand
guccugagaugccugaaaa

SEQ ID NO: 325461 - RNA, 19 nt, Homo sapiens
  misc_RNA (1)...(19): siRNA sense strand
aauauaacguggcuguuuu

SEQ ID NO: 325462 - RNA, 19 nt, Homo sapiens
  misc_RNA (1)...(19): siRNA sense strand
gcaaaguuccaugaagaag

SEQ ID NO: 325463 - RNA, 19 nt, Homo sapiens
  misc_RNA (1)...(19): siRNA sense strand
uuauguagcagcaaaguuc

SEQ ID NO: 325464 - RNA, 19 nt, Homo sapiens
  misc_RNA (1)...(19): siRNA sense strand
uacccaggaggaaagauua

SEQ ID NO: 325465 - RNA, 19 nt, Homo sapiens
  misc_RNA (1)...(19): siRNA sense strand
caggauucuugacugcauu

SEQ ID NO: 325466 - RNA, 19 nt, Homo sapiens
  misc_RNA (1)...(19): siRNA sense strand
aaagguauacagaugacaa

SEQ ID NO: 325467 - RNA, 19 nt, Homo sapiens
  misc_RNA (1)...(19): siRNA sense strand
ucucagaagccaaaguaga

SEQ ID NO: 325468 - RNA, 19 nt, Homo sapiens
  misc_RNA (1)...(19): siRNA sense strand
cauauacuagugaacauca

SEQ ID NO: 325469 - RNA, 19 nt, Homo sapiens
  misc_RNA (1)...(19): siRNA sense strand
agagcucuaugcaauguca

SEQ ID NO: 325470 - RNA, 19 nt, Homo sapiens
  misc_RNA (1)...(19): siRNA sense strand
acucucagaagccaaagua

SEQ ID NO: 325471 - RNA, 19 nt, Homo sapiens
  misc_RNA (1)...(19): siRNA sense strand
gaagauccuccacaagaaa

SEQ ID NO: 325472 - RNA, 19 nt, Homo sapiens
  misc_RNA (1)...(19): siRNA sense strand
cagaagauccuccacaaga

SEQ ID NO: 325473 - RNA, 19 nt, Homo sapiens
  misc_RNA (1)...(19): siRNA sense strand
gccagaagauccuccacaa

SEQ ID NO: 325474 - RNA, 19 nt, Homo sapiens
  misc_RNA (1)...(19): siRNA sense strand
agaagauccuccacaagaa

SEQ ID NO: 325475 - RNA, 19 nt, Homo sapiens
  misc_RNA (1)...(19): siRNA sense strand
aagggaaaguguacuggua

SEQ ID NO: 325476 - RNA, 19 nt, Homo sapiens
  misc_RNA (1)...(19): siRNA sense strand
cgacuucugcuacgaauuc

SEQ ID NO: 325477 - RNA, 19 nt, Homo sapiens
  misc_RNA (1)...(19): siRNA sense strand
caagaaagggaaaguguac

SEQ ID NO: 325478 - RNA, 19 nt, Homo sapiens
  misc_RNA (1)...(19): siRNA sense strand
acaagaaagggaaagugua

SEQ ID NO: 325479 - RNA, 19 nt, Homo sapiens
  misc_RNA (1)...(19): siRNA sense strand
cacaagaaagggaaagugu

SEQ ID NO: 325480 - RNA, 19 nt, Homo sapiens
  misc_RNA (1)...(19): siRNA sense strand
cgcuacagcuggaagaaag

SEQ ID NO: 325481 - RNA, 19 nt, Homo sapiens
  misc_RNA (1)...(19): siRNA sense strand
gaggcgcaccugagcauca

SEQ ID NO: 325482 - RNA, 19 nt, Homo sapiens
  misc_RNA (1)...(19): siRNA sense strand
gcgcuacagcuggaagaaa

SEQ ID NO: 325483 - RNA, 19 nt, Homo sapiens
  misc_RNA (1)...(19): siRNA sense strand
ccacaagaaagggaaagug

SEQ ID NO: 325484 - RNA, 19 nt, Homo sapiens
  misc_RNA (1)...(19): siRNA sense strand
ucgccaacgccgucaauga

SEQ ID NO: 325485 - RNA, 19 nt, Homo sapiens
  misc_RNA (1)...(19): siRNA sense strand
gcacaccuguuuaacuuug

SEQ ID NO: 325486 - RNA, 19 nt, Homo sapiens
  misc_RNA (1)...(19): siRNA sense strand
gaaagcaauuggaucacaa

SEQ ID NO: 325487 - RNA, 19 nt, Homo sapiens
  misc_RNA (1)...(19): siRNA sense strand
caaauacuacuacacaaga

SEQ ID NO: 325488 - RNA, 19 nt, Homo sapiens
  misc_RNA (1)...(19): siRNA sense strand
cgacaaauacuacuacaca

SEQ ID NO: 325489 - RNA, 19 nt, Homo sapiens
  misc_RNA (1)...(19): siRNA sense strand
gacaaauacuacuacacaa

SEQ ID NO: 325490 - RNA, 19 nt, Homo sapiens
  misc_RNA (1)...(19): siRNA sense strand
gcucucugcuugaauuuua

SEQ ID NO: 325491 - RNA, 19 nt, Homo sapiens
  misc_RNA (1)...(19): siRNA sense strand
caucauugcacaccuguuu

SEQ ID NO: 325492 - RNA, 19 nt, Homo sapiens
  misc_RNA (1)...(19): siRNA sense strand
guggaugccuuccugaaau

SEQ ID NO: 325493 - RNA, 19 nt, Homo sapiens
  misc_RNA (1)...(19): siRNA sense strand
uggaugccuuccugaaaua

SEQ ID NO: 325494 - RNA, 19 nt, Homo sapiens
  misc_RNA (1)...(19): siRNA sense strand
ugagaaggccgacaaauac

SEQ ID NO: 325495 - RNA, 19 nt, Homo sapiens
  misc_RNA (1)...(19): siRNA sense strand
ugagaaagcaauuggauca

SEQ ID NO: 325496 - RNA, 19 nt, Homo sapiens
  misc_RNA (1)...(19): siRNA sense strand
uugcacaccuguuuaacuu

SEQ ID NO: 325497 - RNA, 19 nt, Homo sapiens
  misc_RNA (1)...(19): siRNA sense strand
gguuagggcugaauguuuu

SEQ ID NO: 325498 - RNA, 19 nt, Homo sapiens
  misc_RNA (1)...(19): siRNA sense strand
acauacagcuauucacauc

SEQ ID NO: 325499 - RNA, 19 nt, Homo sapiens
  misc_RNA (1)...(19): siRNA sense strand
augagaaggccgacaaaua

SEQ ID NO: 325500 - RNA, 19 nt, Homo sapiens
  misc_RNA (1)...(19): siRNA sense strand
acaagcugguggccuauau

SEQ ID NO: 325501 - RNA, 19 nt, Homo sapiens
  misc_RNA (1)...(19): siRNA sense strand
guuucugguuguuugguua

SEQ ID NO: 325502 - RNA, 19 nt, Homo sapiens
  misc_RNA (1)...(19): siRNA sense strand
gcacacugagaaagcaauu

SEQ ID NO: 325503 - RNA, 19 nt, Homo sapiens
  misc_RNA (1)...(19): siRNA sense strand
gauccugcuuccugugugu

SEQ ID NO: 325504 - RNA, 19 nt, Homo sapiens
  misc_RNA (1)...(19): siRNA sense strand
gcugguggccuauaugauc

SEQ ID NO: 325505 - RNA, 19 nt, Homo sapiens
  misc_RNA (1)...(19): siRNA sense strand
agaaagcaauuggaucaca

SEQ ID NO: 325506 - RNA, 19 nt, Homo sapiens
  misc_RNA (1)...(19): siRNA sense strand
cuacauacagcuauucaca

SEQ ID NO: 325507 - RNA, 19 nt, Homo sapiens
  misc_RNA (1)...(19): siRNA sense strand
ucugcucucugcuugaauu

SEQ ID NO: 325508 - RNA, 19 nt, Homo sapiens
  misc_RNA (1)...(19): siRNA sense strand
ucauugcacaccuguuuaa

SEQ ID NO: 325509 - RNA, 19 nt, Homo sapiens
  misc_RNA (1)...(19): siRNA sense strand
caaccucaccuuccacaag

SEQ ID NO: 325510 - RNA, 19 nt, Homo sapiens
  misc_RNA (1)...(19): siRNA sense strand
gcaaucugcuguccuuccu

SEQ ID NO: 325511 - RNA, 19 nt, Homo sapiens
  misc_RNA (1)...(19): siRNA sense strand
cgucugcucucugcuugaa

SEQ ID NO: 325512 - RNA, 19 nt, Homo sapiens
  misc_RNA (1)...(19): siRNA sense strand
gaaggccgacaaauacuac

SEQ ID NO: 325513 - RNA, 19 nt, Homo sapiens
  misc_RNA (1)...(19): siRNA sense strand
auacagcuauucacaucau

SEQ ID NO: 325514 - RNA, 19 nt, Homo sapiens
  misc_RNA (1)...(19): siRNA sense strand
gcugaauguuuuccuguuu

SEQ ID NO: 325515 - RNA, 19 nt, Homo sapiens
  misc_RNA (1)...(19): siRNA sense strand
ucuccagccuaucucauga

SEQ ID NO: 325516 - RNA, 19 nt, Homo sapiens
  misc_RNA (1)...(19): siRNA sense strand
guuuaacuuugacugcuau

SEQ ID NO: 325517 - RNA, 19 nt, Homo sapiens
  misc_RNA (1)...(19): siRNA sense strand
uccauucucuccagccuau

SEQ ID NO: 325518 - RNA, 19 nt, Homo sapiens
  misc_RNA (1)...(19): siRNA sense strand
agaaggccgacaaauacua

SEQ ID NO: 325519 - RNA, 19 nt, Homo sapiens
  misc_RNA (1)...(19): siRNA sense strand
uguuuaacuuugacugcua

SEQ ID NO: 325520 - RNA, 19 nt, Homo sapiens
  misc_RNA (1)...(19): siRNA sense strand
gaagccgacaggccacaga

SEQ ID NO: 325521 - RNA, 19 nt, Homo sapiens
  misc_RNA (1)...(19): siRNA sense strand
gucgcaaucugcuguccuu

SEQ ID NO: 325522 - RNA, 19 nt, Homo sapiens
  misc_RNA (1)...(19): siRNA sense strand
augccuuccugaaauauga

SEQ ID NO: 325523 - RNA, 19 nt, Homo sapiens
  misc_RNA (1)...(19): siRNA sense strand
acaaauacuacuacacaag

SEQ ID NO: 325524 - RNA, 19 nt, Homo sapiens
  misc_RNA (1)...(19): siRNA sense strand
gagaaggccgacaaauacu

SEQ ID NO: 325525 - RNA, 19 nt, Homo sapiens
  misc_RNA (1)...(19): siRNA sense strand
gaggggcaccugcucauuu

SEQ ID NO: 325526 - RNA, 19 nt, Homo sapiens
  misc_RNA (1)...(19): siRNA sense strand
aauaugagaaggccgacaa

SEQ ID NO: 325527 - RNA, 19 nt, Homo sapiens
  misc_RNA (1)...(19): siRNA sense strand
gccgacaaauacuacuaca

SEQ ID NO: 325528 - RNA, 19 nt, Homo sapiens
  misc_RNA (1)...(19): siRNA sense strand
aagcugguggccuauauga

SEQ ID NO: 325529 - RNA, 19 nt, Homo sapiens
  misc_RNA (1)...(19): siRNA sense strand
gcacaccuguuuaacuuug

SEQ ID NO: 325530 - RNA, 19 nt, Homo sapiens
  misc_RNA (1)...(19): siRNA sense strand
gaaagcaauuggaucacaa

SEQ ID NO: 325531 - RNA, 19 nt, Homo sapiens
  misc_RNA (1)...(19): siRNA sense strand
caaauacuacuacacaaga

SEQ ID NO: 325532 - RNA, 19 nt, Homo sapiens
  misc_RNA (1)...(19): siRNA sense strand
cgacaaauacuacuacaca

SEQ ID NO: 325533 - RNA, 19 nt, Homo sapiens
  misc_RNA (1)...(19): siRNA sense strand
gacaaauacuacuacacaa

SEQ ID NO: 325534 - RNA, 19 nt, Homo sapiens
  misc_RNA (1)...(19): siRNA sense strand
gcucucugcuugaauuuua

SEQ ID NO: 325535 - RNA, 19 nt, Homo sapiens
  misc_RNA (1)...(19): siRNA sense strand
caucauugcacaccuguuu

SEQ ID NO: 325536 - RNA, 19 nt, Homo sapiens
  misc_RNA (1)...(19): siRNA sense strand
guggaugccuuccugaaau

SEQ ID NO: 325537 - RNA, 19 nt, Homo sapiens
  misc_RNA (1)...(19): siRNA sense strand
uggaugccuuccugaaaua

SEQ ID NO: 325538 - RNA, 19 nt, Homo sapiens
  misc_RNA (1)...(19): siRNA sense strand
ugagaaggccgacaaauac

SEQ ID NO: 325539 - RNA, 19 nt, Homo sapiens
  misc_RNA (1)...(19): siRNA sense strand
ugagaaagcaauuggauca

SEQ ID NO: 325540 - RNA, 19 nt, Homo sapiens
  misc_RNA (1)...(19): siRNA sense strand
uugcacaccuguuuaacuu

SEQ ID NO: 325541 - RNA, 19 nt, Homo sapiens
  misc_RNA (1)...(19): siRNA sense strand
gguuagggcugaauguuuu

SEQ ID NO: 325542 - RNA, 19 nt, Homo sapiens
  misc_RNA (1)...(19): siRNA sense strand
acauacagcuauucacauc

SEQ ID NO: 325543 - RNA, 19 nt, Homo sapiens
  misc_RNA (1)...(19): siRNA sense strand
augagaaggccgacaaaua

SEQ ID NO: 325544 - RNA, 19 nt, Homo sapiens
  misc_RNA (1)...(19): siRNA sense strand
acaagcugguggccuauau

SEQ ID NO: 325545 - RNA, 19 nt, Homo sapiens
  misc_RNA (1)...(19): siRNA sense strand
guuucugguuguuugguua

SEQ ID NO: 325546 - RNA, 19 nt, Homo sapiens
  misc_RNA (1)...(19): siRNA sense strand
gcacacugagaaagcaauu

SEQ ID NO: 325547 - RNA, 19 nt, Homo sapiens
  misc_RNA (1)...(19): siRNA sense strand
gauccugcuuccugugugu

SEQ ID NO: 325548 - RNA, 19 nt, Homo sapiens
  misc_RNA (1)...(19): siRNA sense strand
gcugguggccuauaugauc

SEQ ID NO: 325549 - RNA, 19 nt, Homo sapiens
  misc_RNA (1)...(19): siRNA sense strand
agaaagcaauuggaucaca

SEQ ID NO: 325550 - RNA, 19 nt, Homo sapiens
  misc_RNA (1)...(19): siRNA sense strand
cuacauacagcuauucaca

SEQ ID NO: 325551 - RNA, 19 nt, Homo sapiens
  misc_RNA (1)...(19): siRNA sense strand
ucugcucucugcuugaauu

SEQ ID NO: 325552 - RNA, 19 nt, Homo sapiens
  misc_RNA (1)...(19): siRNA sense strand
ucauugcacaccuguuuaa

SEQ ID NO: 325553 - RNA, 19 nt, Homo sapiens
  misc_RNA (1)...(19): siRNA sense strand
caaccucaccuuccacaag

SEQ ID NO: 325554 - RNA, 19 nt, Homo sapiens
  misc_RNA (1)...(19): siRNA sense strand
gcaaucugcuguccuuccu

SEQ ID NO: 325555 - RNA, 19 nt, Homo sapiens
  misc_RNA (1)...(19): siRNA sense strand
cgucugcucucugcuugaa

SEQ ID NO: 325556 - RNA, 19 nt, Homo sapiens
  misc_RNA (1)...(19): siRNA sense strand
gaaggccgacaaauacuac

SEQ ID NO: 325557 - RNA, 19 nt, Homo sapiens
  misc_RNA (1)...(19): siRNA sense strand
auacagcuauucacaucau

SEQ ID NO: 325558 - RNA, 19 nt, Homo sapiens
  misc_RNA (1)...(19): siRNA sense strand
gcugaauguuuuccuguuu

SEQ ID NO: 325559 - RNA, 19 nt, Homo sapiens
  misc_RNA (1)...(19): siRNA sense strand
ucuccagccuaucucauga

SEQ ID NO: 325560 - RNA, 19 nt, Homo sapiens
  misc_RNA (1)...(19): siRNA sense strand
guuuaacuuugacugcuau

SEQ ID NO: 325561 - RNA, 19 nt, Homo sapiens
  misc_RNA (1)...(19): siRNA sense strand
uccauucucuccagccuau

SEQ ID NO: 325562 - RNA, 19 nt, Homo sapiens
  misc_RNA (1)...(19): siRNA sense strand
agaaggccgacaaauacua

SEQ ID NO: 325563 - RNA, 19 nt, Homo sapiens
  misc_RNA (1)...(19): siRNA sense strand
uguuuaacuuugacugcua

SEQ ID NO: 325564 - RNA, 19 nt, Homo sapiens
  misc_RNA (1)...(19): siRNA sense strand
gaagccgacaggccacaga

SEQ ID NO: 325565 - RNA, 19 nt, Homo sapiens
  misc_RNA (1)...(19): siRNA sense strand
gucgcaaucugcuguccuu

SEQ ID NO: 325566 - RNA, 19 nt, Homo sapiens
  misc_RNA (1)...(19): siRNA sense strand
augccuuccugaaauauga

SEQ ID NO: 325567 - RNA, 19 nt, Homo sapiens
  misc_RNA (1)...(19): siRNA sense strand
acaaauacuacuacacaag

SEQ ID NO: 325568 - RNA, 19 nt, Homo sapiens
  misc_RNA (1)...(19): siRNA sense strand
gagaaggccgacaaauacu

SEQ ID NO: 325569 - RNA, 19 nt, Homo sapiens
  misc_RNA (1)...(19): siRNA sense strand
gaggggcaccugcucauuu

SEQ ID NO: 325570 - RNA, 19 nt, Homo sapiens
  misc_RNA (1)...(19): siRNA sense strand
aauaugagaaggccgacaa

SEQ ID NO: 325571 - RNA, 19 nt, Homo sapiens
  misc_RNA (1)...(19): siRNA sense strand
gccgacaaauacuacuaca

SEQ ID NO: 325572 - RNA, 19 nt, Homo sapiens
  misc_RNA (1)...(19): siRNA sense strand
aagcugguggccuauauga

SEQ ID NO: 325573 - RNA, 19 nt, Homo sapiens
  misc_RNA (1)...(19): siRNA sense strand
gcacaccuguuuaacuuug

SEQ ID NO: 325574 - RNA, 19 nt, Homo sapiens
  misc_RNA (1)...(19): siRNA sense strand
gaaagcaauuggaucacaa

SEQ ID NO: 325575 - RNA, 19 nt, Homo sapiens
  misc_RNA (1)...(19): siRNA sense strand
caaauacuacuacacaaga

SEQ ID NO: 325576 - RNA, 19 nt, Homo sapiens
  misc_RNA (1)...(19): siRNA sense strand
cgacaaauacuacuacaca

SEQ ID NO: 325577 - RNA, 19 nt, Homo sapiens
  misc_RNA (1)...(19): siRNA sense strand
gacaaauacuacuacacaa

SEQ ID NO: 325578 - RNA, 19 nt, Homo sapiens
  misc_RNA (1)...(19): siRNA sense strand
gcucucugcuugaauuuua

SEQ ID NO: 325579 - RNA, 19 nt, Homo sapiens
  misc_RNA (1)...(19): siRNA sense strand
caucauugcacaccuguuu

SEQ ID NO: 325580 - RNA, 19 nt, Homo sapiens
  misc_RNA (1)...(19): siRNA sense strand
guggaugccuuccugaaau

SEQ ID NO: 325581 - RNA, 19 nt, Homo sapiens
  misc_RNA (1)...(19): siRNA sense strand
uggaugccuuccugaaaua

SEQ ID NO: 325582 - RNA, 19 nt, Homo sapiens
  misc_RNA (1)...(19): siRNA sense strand
ugagaaggccgacaaauac

SEQ ID NO: 325583 - RNA, 19 nt, Homo sapiens
  misc_RNA (1)...(19): siRNA sense strand
ugagaaagcaauuggauca

SEQ ID NO: 325584 - RNA, 19 nt, Homo sapiens
  misc_RNA (1)...(19): siRNA sense strand
uugcacaccuguuuaacuu

SEQ ID NO: 325585 - RNA, 19 nt, Homo sapiens
  misc_RNA (1)...(19): siRNA sense strand
gguuagggcugaauguuuu

SEQ ID NO: 325586 - RNA, 19 nt, Homo sapiens
  misc_RNA (1)...(19): siRNA sense strand
acauacagcuauucacauc

SEQ ID NO: 325587 - RNA, 19 nt, Homo sapiens
  misc_RNA (1)...(19): siRNA sense strand
augagaaggccgacaaaua

SEQ ID NO: 325588 - RNA, 19 nt, Homo sapiens
  misc_RNA (1)...(19): siRNA sense strand
acaagcugguggccuauau

SEQ ID NO: 325589 - RNA, 19 nt, Homo sapiens
  misc_RNA (1)...(19): siRNA sense strand
guuucugguuguuugguua

SEQ ID NO: 325590 - RNA, 19 nt, Homo sapiens
  misc_RNA (1)...(19): siRNA sense strand
gcacacugagaaagcaauu

SEQ ID NO: 325591 - RNA, 19 nt, Homo sapiens
  misc_RNA (1)...(19): siRNA sense strand
gauccugcuuccugugugu

SEQ ID NO: 325592 - RNA, 19 nt, Homo sapiens
  misc_RNA (1)...(19): siRNA sense strand
gcugguggccuauaugauc

SEQ ID NO: 325593 - RNA, 19 nt, Homo sapiens
  misc_RNA (1)...(19): siRNA sense strand
agaaagcaauuggaucaca

SEQ ID NO: 325594 - RNA, 19 nt, Homo sapiens
  misc_RNA (1)...(19): siRNA sense strand
cuacauacagcuauucaca

SEQ ID NO: 325595 - RNA, 19 nt, Homo sapiens
  misc_RNA (1)...(19): siRNA sense strand
ucugcucucugcuugaauu

SEQ ID NO: 325596 - RNA, 19 nt, Homo sapiens
  misc_RNA (1)...(19): siRNA sense strand
ucauugcacaccuguuuaa

SEQ ID NO: 325597 - RNA, 19 nt, Homo sapiens
  misc_RNA (1)...(19): siRNA sense strand
caaccucaccuuccacaag

SEQ ID NO: 325598 - RNA, 19 nt, Homo sapiens
  misc_RNA (1)...(19): siRNA sense strand
gcaaucugcuguccuuccu

SEQ ID NO: 325599 - RNA, 19 nt, Homo sapiens
  misc_RNA (1)...(19): siRNA sense strand
cgucugcucucugcuugaa

SEQ ID NO: 325600 - RNA, 19 nt, Homo sapiens
  misc_RNA (1)...(19): siRNA sense strand
gaaggccgacaaauacuac

SEQ ID NO: 325601 - RNA, 19 nt, Homo sapiens
  misc_RNA (1)...(19): siRNA sense strand
auacagcuauucacaucau

SEQ ID NO: 325602 - RNA, 19 nt, Homo sapiens
  misc_RNA (1)...(19): siRNA sense strand
gcugaauguuuuccuguuu

SEQ ID NO: 325603 - RNA, 19 nt, Homo sapiens
  misc_RNA (1)...(19): siRNA sense strand
ucuccagccuaucucauga

SEQ ID NO: 325604 - RNA, 19 nt, Homo sapiens
  misc_RNA (1)...(19): siRNA sense strand
guuuaacuuugacugcuau

SEQ ID NO: 325605 - RNA, 19 nt, Homo sapiens
  misc_RNA (1)...(19): siRNA sense strand
uccauucucuccagccuau

SEQ ID NO: 325606 - RNA, 19 nt, Homo sapiens
  misc_RNA (1)...(19): siRNA sense strand
agaaggccgacaaauacua

SEQ ID NO: 325607 - RNA, 19 nt, Homo sapiens
  misc_RNA (1)...(19): siRNA sense strand
uguuuaacuuugacugcua

SEQ ID NO: 325608 - RNA, 19 nt, Homo sapiens
  misc_RNA (1)...(19): siRNA sense strand
gaagccgacaggccacaga

SEQ ID NO: 325609 - RNA, 19 nt, Homo sapiens
  misc_RNA (1)...(19): siRNA sense strand
gucgcaaucugcuguccuu

SEQ ID NO: 325610 - RNA, 19 nt, Homo sapiens
  misc_RNA (1)...(19): siRNA sense strand
augccuuccugaaauauga

SEQ ID NO: 325611 - RNA, 19 nt, Homo sapiens
  misc_RNA (1)...(19): siRNA sense strand
acaaauacuacuacacaag

SEQ ID NO: 325612 - RNA, 19 nt, Homo sapiens
  misc_RNA (1)...(19): siRNA sense strand
gagaaggccgacaaauacu

SEQ ID NO: 325613 - RNA, 19 nt, Homo sapiens
  misc_RNA (1)...(19): siRNA sense strand
gaggggcaccugcucauuu

SEQ ID NO: 325614 - RNA, 19 nt, Homo sapiens
  misc_RNA (1)...(19): siRNA sense strand
aauaugagaaggccgacaa

SEQ ID NO: 325615 - RNA, 19 nt, Homo sapiens
  misc_RNA (1)...(19): siRNA sense strand
gccgacaaauacuacuaca

SEQ ID NO: 325616 - RNA, 19 nt, Homo sapiens
  misc_RNA (1)...(19): siRNA sense strand
aagcugguggccuauauga

SEQ ID NO: 325617 - RNA, 19 nt, Homo sapiens
  misc_RNA (1)...(19): siRNA sense strand
ggaaaccucuggcauauga

SEQ ID NO: 325618 - RNA, 19 nt, Homo sapiens
  misc_RNA (1)...(19): siRNA sense strand
caaaggagcuagcaaagaa

SEQ ID NO: 325619 - RNA, 19 nt, Homo sapiens
  misc_RNA (1)...(19): siRNA sense strand
ggagaaagauugugacauc

SEQ ID NO: 325620 - RNA, 19 nt, Homo sapiens
  misc_RNA (1)...(19): siRNA sense strand
ggugugaagugucauaaua

SEQ ID NO: 325621 - RNA, 19 nt, Homo sapiens
  misc_RNA (1)...(19): siRNA sense strand
guacagaaguuugucuuaa

SEQ ID NO: 325622 - RNA, 19 nt, Homo sapiens
  misc_RNA (1)...(19): siRNA sense strand
ggugaaagcuaacauugaa

SEQ ID NO: 325623 - RNA, 19 nt, Homo sapiens
  misc_RNA (1)...(19): siRNA sense strand
caucagaccuugaaauugu

SEQ ID NO: 325624 - RNA, 19 nt, Homo sapiens
  misc_RNA (1)...(19): siRNA sense strand
ccucguaccuucuccaaua

SEQ ID NO: 325625 - RNA, 19 nt, Homo sapiens
  misc_RNA (1)...(19): siRNA sense strand
gaaagauugugacaucaga

SEQ ID NO: 325626 - RNA, 19 nt, Homo sapiens
  misc_RNA (1)...(19): siRNA sense strand
aaacaucacucuucuaucu

SEQ ID NO: 325627 - RNA, 19 nt, Homo sapiens
  misc_RNA (1)...(19): siRNA sense strand
guaaaugccuuugucgauu

SEQ ID NO: 325628 - RNA, 19 nt, Homo sapiens
  misc_RNA (1)...(19): siRNA sense strand
ccaauagucuugaucugaa

SEQ ID NO: 325629 - RNA, 19 nt, Homo sapiens
  misc_RNA (1)...(19): siRNA sense strand
gauguuggaugacucgauu

SEQ ID NO: 325630 - RNA, 19 nt, Homo sapiens
  misc_RNA (1)...(19): siRNA sense strand
gggaguagauauugacaug

SEQ ID NO: 325631 - RNA, 19 nt, Homo sapiens
  misc_RNA (1)...(19): siRNA sense strand
aagaagagguacagaaguu

SEQ ID NO: 325632 - RNA, 19 nt, Homo sapiens
  misc_RNA (1)...(19): siRNA sense strand
uaaaugccuuugucgauug

SEQ ID NO: 325633 - RNA, 19 nt, Homo sapiens
  misc_RNA (1)...(19): siRNA sense strand
acaaugaucccgcagauuu

SEQ ID NO: 325634 - RNA, 19 nt, Homo sapiens
  misc_RNA (1)...(19): siRNA sense strand
ugaacuaccuaaccauuau

SEQ ID NO: 325635 - RNA, 19 nt, Homo sapiens
  misc_RNA (1)...(19): siRNA sense strand
ccaagcgggugaaagcuaa

SEQ ID NO: 325636 - RNA, 19 nt, Homo sapiens
  misc_RNA (1)...(19): siRNA sense strand
ggacaaacaagcauuucaa

SEQ ID NO: 325637 - RNA, 19 nt, Homo sapiens
  misc_RNA (1)...(19): siRNA sense strand
gacaucagaccuugaaauu

SEQ ID NO: 325638 - RNA, 19 nt, Homo sapiens
  misc_RNA (1)...(19): siRNA sense strand
ucaaagaauugguaaaugc

SEQ ID NO: 325639 - RNA, 19 nt, Homo sapiens
  misc_RNA (1)...(19): siRNA sense strand
ggugggaucuguggagaaa

SEQ ID NO: 325640 - RNA, 19 nt, Homo sapiens
  misc_RNA (1)...(19): siRNA sense strand
caggaaaccucuggcauau

SEQ ID NO: 325641 - RNA, 19 nt, Homo sapiens
  misc_RNA (1)...(19): siRNA sense strand
gguucaagauguuggauga

SEQ ID NO: 325642 - RNA, 19 nt, Homo sapiens
  misc_RNA (1)...(19): siRNA sense strand
gcaggcagccgguuuguca

SEQ ID NO: 325643 - RNA, 19 nt, Homo sapiens
  misc_RNA (1)...(19): siRNA sense strand
gaaaacaucuucaaaucag

SEQ ID NO: 325644 - RNA, 19 nt, Homo sapiens
  misc_RNA (1)...(19): siRNA sense strand
guucuggauucaagcauaa

SEQ ID NO: 325645 - RNA, 19 nt, Homo sapiens
  misc_RNA (1)...(19): siRNA sense strand
gaagagguacagaaguuug

SEQ ID NO: 325646 - RNA, 19 nt, Homo sapiens
  misc_RNA (1)...(19): siRNA sense strand
uaaaguuccucuacucagu

SEQ ID NO: 325647 - RNA, 19 nt, Homo sapiens
  misc_RNA (1)...(19): siRNA sense strand
ugaauaaacagaugguuga

SEQ ID NO: 325648 - RNA, 19 nt, Homo sapiens
  misc_RNA (1)...(19): siRNA sense strand
gauguuccuucuuuccaaa

SEQ ID NO: 325649 - RNA, 19 nt, Homo sapiens
  misc_RNA (1)...(19): siRNA sense strand
gcuguaacuugaguacuuu

SEQ ID NO: 325650 - RNA, 19 nt, Homo sapiens
  misc_RNA (1)...(19): siRNA sense strand
gcugaaauccuagaccuuu

SEQ ID NO: 325651 - RNA, 19 nt, Homo sapiens
  misc_RNA (1)...(19): siRNA sense strand
gagaaagauugugacauca

SEQ ID NO: 325652 - RNA, 19 nt, Homo sapiens
  misc_RNA (1)...(19): siRNA sense strand
caaugacuaugccagaaga

SEQ ID NO: 325653 - RNA, 19 nt, Homo sapiens
  misc_RNA (1)...(19): siRNA sense strand
acgcaaacaucaaagagaa

SEQ ID NO: 325654 - RNA, 19 nt, Homo sapiens
  misc_RNA (1)...(19): siRNA sense strand
agaagaagcuacgcaaaca

SEQ ID NO: 325655 - RNA, 19 nt, Homo sapiens
  misc_RNA (1)...(19): siRNA sense strand
gaaacgacagccuggaguu

SEQ ID NO: 325656 - RNA, 19 nt, Homo sapiens
  misc_RNA (1)...(19): siRNA sense strand
uccuagaccuuuccaauga

SEQ ID NO: 325657 - RNA, 19 nt, Homo sapiens
  misc_RNA (1)...(19): siRNA sense strand
gacaaacaagcauuucaaa

SEQ ID NO: 325658 - RNA, 19 nt, Homo sapiens
  misc_RNA (1)...(19): siRNA sense strand
ggcuguaacuugaguacuu

SEQ ID NO: 325659 - RNA, 19 nt, Homo sapiens
  misc_RNA (1)...(19): siRNA sense strand
gguucuggauucaagcaua

SEQ ID NO: 325660 - RNA, 19 nt, Homo sapiens
  misc_RNA (1)...(19): siRNA sense strand
ccaauaacaaccuaaacuu

SEQ ID NO: 325661 - RNA, 19 nt, Homo sapiens
  misc_RNA (1)...(19): siRNA sense strand
gaaguuugucuuaagcuau

SEQ ID NO: 325662 - RNA, 19 nt, Homo sapiens
  misc_RNA (1)...(19): siRNA sense strand
gguacagaaguuugucuua

SEQ ID NO: 325663 - RNA, 19 nt, Homo sapiens
  misc_RNA (1)...(19): siRNA sense strand
ucaguuucauuuaggcuuu

SEQ ID NO: 325664 - RNA, 19 nt, Homo sapiens
  misc_RNA (1)...(19): siRNA sense strand
gguaaaugcuggcuguaac

SEQ ID NO: 325665 - RNA, 19 nt, Homo sapiens
  misc_RNA (1)...(19): siRNA sense strand
gaagaagagguacagaagu

SEQ ID NO: 325666 - RNA, 19 nt, Homo sapiens
  misc_RNA (1)...(19): siRNA sense strand
auaggaugauuaccaauga

SEQ ID NO: 325667 - RNA, 19 nt, Homo sapiens
  misc_RNA (1)...(19): siRNA sense strand
agaaguuugucuuaagcua

SEQ ID NO: 325668 - RNA, 19 nt, Homo sapiens
  misc_RNA (1)...(19): siRNA sense strand
ucacaaugaucccgcagau

SEQ ID NO: 325669 - RNA, 19 nt, Homo sapiens
  misc_RNA (1)...(19): siRNA sense strand
gaaagcuaacauugaauuc

SEQ ID NO: 325670 - RNA, 19 nt, Homo sapiens
  misc_RNA (1)...(19): siRNA sense strand
gauucaagcauaaguacuu

SEQ ID NO: 325671 - RNA, 19 nt, Homo sapiens
  misc_RNA (1)...(19): siRNA sense strand
ugaagugucauaauacaga

SEQ ID NO: 325672 - RNA, 19 nt, Homo sapiens
  misc_RNA (1)...(19): siRNA sense strand
gucuugaucugaauaaaca

SEQ ID NO: 325673 - RNA, 19 nt, Homo sapiens
  misc_RNA (1)...(19): siRNA sense strand
cagaaaacaucuucaaauc

SEQ ID NO: 325674 - RNA, 19 nt, Homo sapiens
  misc_RNA (1)...(19): siRNA sense strand
caucaaagagaagcuguuu

SEQ ID NO: 325675 - RNA, 19 nt, Homo sapiens
  misc_RNA (1)...(19): siRNA sense strand
uagacugccucauggaaga

SEQ ID NO: 325676 - RNA, 19 nt, Homo sapiens
  misc_RNA (1)...(19): siRNA sense strand
uaaaauagacugccucaug

SEQ ID NO: 325677 - RNA, 19 nt, Homo sapiens
  misc_RNA (1)...(19): siRNA sense strand
acggucaacuuucaauuug

SEQ ID NO: 325678 - RNA, 19 nt, Homo sapiens
  misc_RNA (1)...(19): siRNA sense strand
ggagcuagcaaagaaguga

SEQ ID NO: 325679 - RNA, 19 nt, Homo sapiens
  misc_RNA (1)...(19): siRNA sense strand
acaucacucuucuaucuug

SEQ ID NO: 325680 - RNA, 19 nt, Homo sapiens
  misc_RNA (1)...(19): siRNA sense strand
aaugcuggcuguaacuuga

SEQ ID NO: 325681 - RNA, 19 nt, Homo sapiens
  misc_RNA (1)...(19): siRNA sense strand
gcagaaaacaucuucaaau

SEQ ID NO: 325682 - RNA, 19 nt, Homo sapiens
  misc_RNA (1)...(19): siRNA sense strand
ccacgagcaauaacacgua

SEQ ID NO: 325683 - RNA, 19 nt, Homo sapiens
  misc_RNA (1)...(19): siRNA sense strand
ccaaaggagcuagcaaaga

SEQ ID NO: 325684 - RNA, 19 nt, Homo sapiens
  misc_RNA (1)...(19): siRNA sense strand
gaagcuacgcaaacaucaa

SEQ ID NO: 325685 - RNA, 19 nt, Homo sapiens
  misc_RNA (1)...(19): siRNA sense strand
ucuggcauaugagaaauaa

SEQ ID NO: 325686 - RNA, 19 nt, Homo sapiens
  misc_RNA (1)...(19): siRNA sense strand
caauagucuugaucugaau

SEQ ID NO: 325687 - RNA, 19 nt, Homo sapiens
  misc_RNA (1)...(19): siRNA sense strand
ggaacguucuccugaaucc

SEQ ID NO: 325688 - RNA, 19 nt, Homo sapiens
  misc_RNA (1)...(19): siRNA sense strand
ugggaucuguggagaaaga

SEQ ID NO: 325689 - RNA, 19 nt, Homo sapiens
  misc_RNA (1)...(19): siRNA sense strand
gcuagcaucauaucaagau

SEQ ID NO: 325690 - RNA, 19 nt, Homo sapiens
  misc_RNA (1)...(19): siRNA sense strand
uaacacguacucccgagaa

SEQ ID NO: 325691 - RNA, 19 nt, Homo sapiens
  misc_RNA (1)...(19): siRNA sense strand
gucuuaagcuauccagaug

SEQ ID NO: 325692 - RNA, 19 nt, Homo sapiens
  misc_RNA (1)...(19): siRNA sense strand
uacagaaguuugucuuaag

SEQ ID NO: 325693 - RNA, 19 nt, Homo sapiens
  misc_RNA (1)...(19): siRNA sense strand
gaacuaccuaaccauuaug

SEQ ID NO: 325694 - RNA, 19 nt, Homo sapiens
  misc_RNA (1)...(19): siRNA sense strand
gaauaaacagaugguugaa

SEQ ID NO: 325695 - RNA, 19 nt, Homo sapiens
  misc_RNA (1)...(19): siRNA sense strand
aaaugaggaccuacugaaa

SEQ ID NO: 325696 - RNA, 19 nt, Homo sapiens
  misc_RNA (1)...(19): siRNA sense strand
guuaagcagauuugccuaa

SEQ ID NO: 325697 - RNA, 19 nt, Homo sapiens
  misc_RNA (1)...(19): siRNA sense strand
cgaaucaaagaauugguaa

SEQ ID NO: 325698 - RNA, 19 nt, Homo sapiens
  misc_RNA (1)...(19): siRNA sense strand
gggugaaagcuaacauuga

SEQ ID NO: 325699 - RNA, 19 nt, Homo sapiens
  misc_RNA (1)...(19): siRNA sense strand
caagauauccacgagcaau

SEQ ID NO: 325700 - RNA, 19 nt, Homo sapiens
  misc_RNA (1)...(19): siRNA sense strand
gauauugacauggcaagga

SEQ ID NO: 325701 - RNA, 19 nt, Homo sapiens
  misc_RNA (1)...(19): siRNA sense strand
ugaagaagagguacagaag

SEQ ID NO: 325702 - RNA, 19 nt, Homo sapiens
  misc_RNA (1)...(19): siRNA sense strand
gaagaagcuacgcaaacau

SEQ ID NO: 325703 - RNA, 19 nt, Homo sapiens
  misc_RNA (1)...(19): siRNA sense strand
cauaggaugauuaccaaug

SEQ ID NO: 325704 - RNA, 19 nt, Homo sapiens
  misc_RNA (1)...(19): siRNA sense strand
auacagacagugagccuuu

SEQ ID NO: 325705 - RNA, 19 nt, Homo sapiens
  misc_RNA (1)...(19): siRNA sense strand
ucucuuggauguacugaag

SEQ ID NO: 325706 - RNA, 19 nt, Homo sapiens
  misc_RNA (1)...(19): siRNA sense strand
ugacaucagaccuugaaau

SEQ ID NO: 325707 - RNA, 19 nt, Homo sapiens
  misc_RNA (1)...(19): siRNA sense strand
ucgaaucaaagaauuggua

SEQ ID NO: 325708 - RNA, 19 nt, Homo sapiens
  misc_RNA (1)...(19): siRNA sense strand
ggaagaaaacauuagcauu

SEQ ID NO: 325709 - RNA, 19 nt, Homo sapiens
  misc_RNA (1)...(19): siRNA sense strand
cuuaagcuauccagaugug

SEQ ID NO: 325710 - RNA, 19 nt, Homo sapiens
  misc_RNA (1)...(19): siRNA sense strand
agacagugagccuuugaaa

SEQ ID NO: 325711 - RNA, 19 nt, Homo sapiens
  misc_RNA (1)...(19): siRNA sense strand
uugaacuaccuaaccauua

SEQ ID NO: 325712 - RNA, 19 nt, Homo sapiens
  misc_RNA (1)...(19): siRNA sense strand
auauugacauggcaaggaa

SEQ ID NO: 325713 - RNA, 19 nt, Homo sapiens
  misc_RNA (1)...(19): siRNA sense strand
ugugaagugucauaauaca

SEQ ID NO: 325714 - RNA, 19 nt, Homo sapiens
  misc_RNA (1)...(19): siRNA sense strand
caaacaagcauuucaaaag

SEQ ID NO: 325715 - RNA, 19 nt, Homo sapiens
  misc_RNA (1)...(19): siRNA sense strand
gguccaauaacaaccuaaa

SEQ ID NO: 325716 - RNA, 19 nt, Homo sapiens
  misc_RNA (1)...(19): siRNA sense strand
ccagaagaagcuacgcaaa

SEQ ID NO: 325717 - RNA, 19 nt, Homo sapiens
  misc_RNA (1)...(19): siRNA sense strand
ggacagugaugaggaagaa

SEQ ID NO: 325718 - RNA, 19 nt, Homo sapiens
  misc_RNA (1)...(19): siRNA sense strand
gaugagcaaugauguuucu

SEQ ID NO: 325719 - RNA, 19 nt, Homo sapiens
  misc_RNA (1)...(19): siRNA sense strand
ggagagcgaggaagaggaa

SEQ ID NO: 325720 - RNA, 19 nt, Homo sapiens
  misc_RNA (1)...(19): siRNA sense strand
gagccaaagacgaguguaa

SEQ ID NO: 325721 - RNA, 19 nt, Homo sapiens
  misc_RNA (1)...(19): siRNA sense strand
agacgaguguaauguggua

SEQ ID NO: 325722 - RNA, 19 nt, Homo sapiens
  misc_RNA (1)...(19): siRNA sense strand
guaaugugguagaaguugu

SEQ ID NO: 325723 - RNA, 19 nt, Homo sapiens
  misc_RNA (1)...(19): siRNA sense strand
caaagacgaguguaaugug

SEQ ID NO: 325724 - RNA, 19 nt, Homo sapiens
  misc_RNA (1)...(19): siRNA sense strand
ccaaagacgaguguaaugu

SEQ ID NO: 325725 - RNA, 19 nt, Homo sapiens
  misc_RNA (1)...(19): siRNA sense strand
agaggacagugaugaggaa

SEQ ID NO: 325726 - RNA, 19 nt, Homo sapiens
  misc_RNA (1)...(19): siRNA sense strand
uaagguagaggaagaggau

SEQ ID NO: 325727 - RNA, 19 nt, Homo sapiens
  misc_RNA (1)...(19): siRNA sense strand
cgaguguaaugugguagaa

SEQ ID NO: 325728 - RNA, 19 nt, Homo sapiens
  misc_RNA (1)...(19): siRNA sense strand
ggcaccagauuguuacgau

SEQ ID NO: 325729 - RNA, 19 nt, Homo sapiens
  misc_RNA (1)...(19): siRNA sense strand
gccaaagacgaguguaaug

SEQ ID NO: 325730 - RNA, 19 nt, Homo sapiens
  misc_RNA (1)...(19): siRNA sense strand
ggaagaggacagugaugag

SEQ ID NO: 325731 - RNA, 19 nt, Homo sapiens
  misc_RNA (1)...(19): siRNA sense strand
caccagauuguuacgauga

SEQ ID NO: 325732 - RNA, 19 nt, Homo sapiens
  misc_RNA (1)...(19): siRNA sense strand
cagcuccaaccaccuguaa

SEQ ID NO: 325733 - RNA, 19 nt, Homo sapiens
  misc_RNA (1)...(19): siRNA sense strand
ugagcaaugauguuucuga

SEQ ID NO: 325734 - RNA, 19 nt, Homo sapiens
  misc_RNA (1)...(19): siRNA sense strand
gugaugaggaagaaguuga

SEQ ID NO: 325735 - RNA, 19 nt, Homo sapiens
  misc_RNA (1)...(19): siRNA sense strand
ggaagaggaagaggacagu

SEQ ID NO: 325736 - RNA, 19 nt, Homo sapiens
  misc_RNA (1)...(19): siRNA sense strand
gcagcugccuuagcguuuu

SEQ ID NO: 325737 - RNA, 19 nt, Homo sapiens
  misc_RNA (1)...(19): siRNA sense strand
aagaggaagaggacaguga

SEQ ID NO: 325738 - RNA, 19 nt, Homo sapiens
  misc_RNA (1)...(19): siRNA sense strand
gccaacccaugcucagucu

SEQ ID NO: 325739 - RNA, 19 nt, Homo sapiens
  misc_RNA (1)...(19): siRNA sense strand
aguguaaugugguagaagu

SEQ ID NO: 325740 - RNA, 19 nt, Homo sapiens
  misc_RNA (1)...(19): siRNA sense strand
cggucacuauggacaguuu

SEQ ID NO: 325741 - RNA, 19 nt, Homo sapiens
  misc_RNA (1)...(19): siRNA sense strand
ucaccgagggagccaaaga

SEQ ID NO: 325742 - RNA, 19 nt, Homo sapiens
  misc_RNA (1)...(19): siRNA sense strand
acgaugagcaaugauguuu

SEQ ID NO: 325743 - RNA, 19 nt, Homo sapiens
  misc_RNA (1)...(19): siRNA sense strand
gaggaagaggacagugaug

SEQ ID NO: 325744 - RNA, 19 nt, Homo sapiens
  misc_RNA (1)...(19): siRNA sense strand
gaagcaagaucauuaguug

SEQ ID NO: 325745 - RNA, 19 nt, Homo sapiens
  misc_RNA (1)...(19): siRNA sense strand
uaaauccacucaucaaugu

SEQ ID NO: 325746 - RNA, 19 nt, Homo sapiens
  misc_RNA (1)...(19): siRNA sense strand
gguaucaucuucaccaaau

SEQ ID NO: 325747 - RNA, 19 nt, Homo sapiens
  misc_RNA (1)...(19): siRNA sense strand
gaauuaccgccucuucuuu

SEQ ID NO: 325748 - RNA, 19 nt, Homo sapiens
  misc_RNA (1)...(19): siRNA sense strand
agaggaagcaagaucauua

SEQ ID NO: 325749 - RNA, 19 nt, Homo sapiens
  misc_RNA (1)...(19): siRNA sense strand
ggaagcaagaucauuaguu

SEQ ID NO: 325750 - RNA, 19 nt, Homo sapiens
  misc_RNA (1)...(19): siRNA sense strand
guuauuaaauccacucauc

SEQ ID NO: 325751 - RNA, 19 nt, Homo sapiens
  misc_RNA (1)...(19): siRNA sense strand
ggaagcuacucuuaauugg

SEQ ID NO: 325752 - RNA, 19 nt, Homo sapiens
  misc_RNA (1)...(19): siRNA sense strand
aagcuacucuuaauugguu

SEQ ID NO: 325753 - RNA, 19 nt, Homo sapiens
  misc_RNA (1)...(19): siRNA sense strand
gcaagaucauuaguugaau

SEQ ID NO: 325754 - RNA, 19 nt, Homo sapiens
  misc_RNA (1)...(19): siRNA sense strand
ccuggaagcuacucuuaau

SEQ ID NO: 325755 - RNA, 19 nt, Homo sapiens
  misc_RNA (1)...(19): siRNA sense strand
caagaucauuaguugaauc

SEQ ID NO: 325756 - RNA, 19 nt, Homo sapiens
  misc_RNA (1)...(19): siRNA sense strand
guaucaucuucaccaaaua

SEQ ID NO: 325757 - RNA, 19 nt, Homo sapiens
  misc_RNA (1)...(19): siRNA sense strand
aaacaaggcuuuugcucuu

SEQ ID NO: 325758 - RNA, 19 nt, Homo sapiens
  misc_RNA (1)...(19): siRNA sense strand
gcuauaaauugcacaaacg

SEQ ID NO: 325759 - RNA, 19 nt, Homo sapiens
  misc_RNA (1)...(19): siRNA sense strand
uaauggaggagcuauaaau

SEQ ID NO: 325760 - RNA, 19 nt, Homo sapiens
  misc_RNA (1)...(19): siRNA sense strand
uggaagcuacucuuaauug

SEQ ID NO: 325761 - RNA, 19 nt, Homo sapiens
  misc_RNA (1)...(19): siRNA sense strand
gcagaauuaccgccucuuc

SEQ ID NO: 325762 - RNA, 19 nt, Homo sapiens
  misc_RNA (1)...(19): siRNA sense strand
aauuaccgccucuucuuua

SEQ ID NO: 325763 - RNA, 19 nt, Homo sapiens
  misc_RNA (1)...(19): siRNA sense strand
uggaggagcuauaaauugc

SEQ ID NO: 325764 - RNA, 19 nt, Homo sapiens
  misc_RNA (1)...(19): siRNA sense strand
uuaaauccacucaucaaug

SEQ ID NO: 325765 - RNA, 19 nt, Homo sapiens
  misc_RNA (1)...(19): siRNA sense strand
guaauggaggagcuauaaa

SEQ ID NO: 325766 - RNA, 19 nt, Homo sapiens
  misc_RNA (1)...(19): siRNA sense strand
uguaauggaggagcuauaa

SEQ ID NO: 325767 - RNA, 19 nt, Homo sapiens
  misc_RNA (1)...(19): siRNA sense strand
uugaaucgguaucaucuuc

SEQ ID NO: 325768 - RNA, 19 nt, Homo sapiens
  misc_RNA (1)...(19): siRNA sense strand
gaagcuacucuuaauuggu

SEQ ID NO: 325769 - RNA, 19 nt, Homo sapiens
  misc_RNA (1)...(19): siRNA sense strand
gaggaagcaagaucauuag

SEQ ID NO: 325770 - RNA, 19 nt, Homo sapiens
  misc_RNA (1)...(19): siRNA sense strand
ucaagaggaagcaagauca

SEQ ID NO: 325771 - RNA, 19 nt, Homo sapiens
  misc_RNA (1)...(19): siRNA sense strand
caucaauguuggaaagcau

SEQ ID NO: 325772 - RNA, 19 nt, Homo sapiens
  misc_RNA (1)...(19): siRNA sense strand
uaccuggaagcuacucuua

SEQ ID NO: 325773 - RNA, 19 nt, Homo sapiens
  misc_RNA (1)...(19): siRNA sense strand
ccguugcacucaagaggaa

SEQ ID NO: 325774 - RNA, 19 nt, Homo sapiens
  misc_RNA (1)...(19): siRNA sense strand
acucaucaauguuggaaag

SEQ ID NO: 325775 - RNA, 19 nt, Homo sapiens
  misc_RNA (1)...(19): siRNA sense strand
aauggaggagcuauaaauu

SEQ ID NO: 325776 - RNA, 19 nt, Homo sapiens
  misc_RNA (1)...(19): siRNA sense strand
ccaguuugcuuuuaaugga

SEQ ID NO: 325777 - RNA, 19 nt, Homo sapiens
  misc_RNA (1)...(19): siRNA sense strand
uaagguaccagauggaaaa

SEQ ID NO: 325778 - RNA, 19 nt, Homo sapiens
  misc_RNA (1)...(19): siRNA sense strand
agcaagaucauuaguugaa

SEQ ID NO: 325779 - RNA, 19 nt, Homo sapiens
  misc_RNA (1)...(19): siRNA sense strand
ggagcuauaaauugcacaa

SEQ ID NO: 325780 - RNA, 19 nt, Homo sapiens
  misc_RNA (1)...(19): siRNA sense strand
gauagcccuuuccguugca

SEQ ID NO: 325781 - RNA, 19 nt, Homo sapiens
  misc_RNA (1)...(19): siRNA sense strand
auuaccgccucuucuuuaa

SEQ ID NO: 325782 - RNA, 19 nt, Homo sapiens
  misc_RNA (1)...(19): siRNA sense strand
gagcuauaaauugcacaaa

SEQ ID NO: 325783 - RNA, 19 nt, Homo sapiens
  misc_RNA (1)...(19): siRNA sense strand
gaaucgguaucaucuucac

SEQ ID NO: 325784 - RNA, 19 nt, Homo sapiens
  misc_RNA (1)...(19): siRNA sense strand
caagaggaagcaagaucau

SEQ ID NO: 325785 - RNA, 19 nt, Homo sapiens
  misc_RNA (1)...(19): siRNA sense strand
gcuacucuuaauugguuua

SEQ ID NO: 325786 - RNA, 19 nt, Homo sapiens
  misc_RNA (1)...(19): siRNA sense strand
uauaagguaccagauggaa

SEQ ID NO: 325787 - RNA, 19 nt, Homo sapiens
  misc_RNA (1)...(19): siRNA sense strand
uuauauaagguaccagaug

SEQ ID NO: 325788 - RNA, 19 nt, Homo sapiens
  misc_RNA (1)...(19): siRNA sense strand
gaagcaagaucauuaguug

SEQ ID NO: 325789 - RNA, 19 nt, Homo sapiens
  misc_RNA (1)...(19): siRNA sense strand
uaaauccacucaucaaugu

SEQ ID NO: 325790 - RNA, 19 nt, Homo sapiens
  misc_RNA (1)...(19): siRNA sense strand
gguaucaucuucaccaaau

SEQ ID NO: 325791 - RNA, 19 nt, Homo sapiens
  misc_RNA (1)...(19): siRNA sense strand
gaauuaccgccucuucuuu

SEQ ID NO: 325792 - RNA, 19 nt, Homo sapiens
  misc_RNA (1)...(19): siRNA sense strand
agaggaagcaagaucauua

SEQ ID NO: 325793 - RNA, 19 nt, Homo sapiens
  misc_RNA (1)...(19): siRNA sense strand
ggaagcaagaucauuaguu

SEQ ID NO: 325794 - RNA, 19 nt, Homo sapiens
  misc_RNA (1)...(19): siRNA sense strand
guuauuaaauccacucauc

SEQ ID NO: 325795 - RNA, 19 nt, Homo sapiens
  misc_RNA (1)...(19): siRNA sense strand
ggaagcuacucuuaauugg

SEQ ID NO: 325796 - RNA, 19 nt, Homo sapiens
  misc_RNA (1)...(19): siRNA sense strand
aagcuacucuuaauugguu

SEQ ID NO: 325797 - RNA, 19 nt, Homo sapiens
  misc_RNA (1)...(19): siRNA sense strand
gcaagaucauuaguugaau

SEQ ID NO: 325798 - RNA, 19 nt, Homo sapiens
  misc_RNA (1)...(19): siRNA sense strand
ccuggaagcuacucuuaau

SEQ ID NO: 325799 - RNA, 19 nt, Homo sapiens
  misc_RNA (1)...(19): siRNA sense strand
caagaucauuaguugaauc

SEQ ID NO: 325800 - RNA, 19 nt, Homo sapiens
  misc_RNA (1)...(19): siRNA sense strand
guaucaucuucaccaaaua

SEQ ID NO: 325801 - RNA, 19 nt, Homo sapiens
  misc_RNA (1)...(19): siRNA sense strand
aaacaaggcuuuugcucuu

SEQ ID NO: 325802 - RNA, 19 nt, Homo sapiens
  misc_RNA (1)...(19): siRNA sense strand
gcuauaaauugcacaaacg

SEQ ID NO: 325803 - RNA, 19 nt, Homo sapiens
  misc_RNA (1)...(19): siRNA sense strand
uaauggaggagcuauaaau

SEQ ID NO: 325804 - RNA, 19 nt, Homo sapiens
  misc_RNA (1)...(19): siRNA sense strand
uggaagcuacucuuaauug

SEQ ID NO: 325805 - RNA, 19 nt, Homo sapiens
  misc_RNA (1)...(19): siRNA sense strand
gcagaauuaccgccucuuc

SEQ ID NO: 325806 - RNA, 19 nt, Homo sapiens
  misc_RNA (1)...(19): siRNA sense strand
aauuaccgccucuucuuua

SEQ ID NO: 325807 - RNA, 19 nt, Homo sapiens
  misc_RNA (1)...(19): siRNA sense strand
uggaggagcuauaaauugc

SEQ ID NO: 325808 - RNA, 19 nt, Homo sapiens
  misc_RNA (1)...(19): siRNA sense strand
uuaaauccacucaucaaug

SEQ ID NO: 325809 - RNA, 19 nt, Homo sapiens
  misc_RNA (1)...(19): siRNA sense strand
guaauggaggagcuauaaa

SEQ ID NO: 325810 - RNA, 19 nt, Homo sapiens
  misc_RNA (1)...(19): siRNA sense strand
uguaauggaggagcuauaa

SEQ ID NO: 325811 - RNA, 19 nt, Homo sapiens
  misc_RNA (1)...(19): siRNA sense strand
uugaaucgguaucaucuuc

SEQ ID NO: 325812 - RNA, 19 nt, Homo sapiens
  misc_RNA (1)...(19): siRNA sense strand
gaagcuacucuuaauuggu

SEQ ID NO: 325813 - RNA, 19 nt, Homo sapiens
  misc_RNA (1)...(19): siRNA sense strand
gaggaagcaagaucauuag

SEQ ID NO: 325814 - RNA, 19 nt, Homo sapiens
  misc_RNA (1)...(19): siRNA sense strand
ucaagaggaagcaagauca

SEQ ID NO: 325815 - RNA, 19 nt, Homo sapiens
  misc_RNA (1)...(19): siRNA sense strand
caucaauguuggaaagcau

SEQ ID NO: 325816 - RNA, 19 nt, Homo sapiens
  misc_RNA (1)...(19): siRNA sense strand
uaccuggaagcuacucuua

SEQ ID NO: 325817 - RNA, 19 nt, Homo sapiens
  misc_RNA (1)...(19): siRNA sense strand
ccguugcacucaagaggaa

SEQ ID NO: 325818 - RNA, 19 nt, Homo sapiens
  misc_RNA (1)...(19): siRNA sense strand
acucaucaauguuggaaag

SEQ ID NO: 325819 - RNA, 19 nt, Homo sapiens
  misc_RNA (1)...(19): siRNA sense strand
aauggaggagcuauaaauu

SEQ ID NO: 325820 - RNA, 19 nt, Homo sapiens
  misc_RNA (1)...(19): siRNA sense strand
ccaguuugcuuuuaaugga

SEQ ID NO: 325821 - RNA, 19 nt, Homo sapiens
  misc_RNA (1)...(19): siRNA sense strand
uaagguaccagauggaaaa

SEQ ID NO: 325822 - RNA, 19 nt, Homo sapiens
  misc_RNA (1)...(19): siRNA sense strand
agcaagaucauuaguugaa

SEQ ID NO: 325823 - RNA, 19 nt, Homo sapiens
  misc_RNA (1)...(19): siRNA sense strand
ggagcuauaaauugcacaa

SEQ ID NO: 325824 - RNA, 19 nt, Homo sapiens
  misc_RNA (1)...(19): siRNA sense strand
gauagcccuuuccguugca

SEQ ID NO: 325825 - RNA, 19 nt, Homo sapiens
  misc_RNA (1)...(19): siRNA sense strand
auuaccgccucuucuuuaa

SEQ ID NO: 325826 - RNA, 19 nt, Homo sapiens
  misc_RNA (1)...(19): siRNA sense strand
gagcuauaaauugcacaaa

SEQ ID NO: 325827 - RNA, 19 nt, Homo sapiens
  misc_RNA (1)...(19): siRNA sense strand
gaaucgguaucaucuucac

SEQ ID NO: 325828 - RNA, 19 nt, Homo sapiens
  misc_RNA (1)...(19): siRNA sense strand
caagaggaagcaagaucau

SEQ ID NO: 325829 - RNA, 19 nt, Homo sapiens
  misc_RNA (1)...(19): siRNA sense strand
gcuacucuuaauugguuua

SEQ ID NO: 325830 - RNA, 19 nt, Homo sapiens
  misc_RNA (1)...(19): siRNA sense strand
uauaagguaccagauggaa

SEQ ID NO: 325831 - RNA, 19 nt, Homo sapiens
  misc_RNA (1)...(19): siRNA sense strand
uuauauaagguaccagaug

SEQ ID NO: 325832 - RNA, 19 nt, Homo sapiens
  misc_RNA (1)...(19): siRNA sense strand
gaagcaagaucauuaguug

SEQ ID NO: 325833 - RNA, 19 nt, Homo sapiens
  misc_RNA (1)...(19): siRNA sense strand
uaaauccacucaucaaugu

SEQ ID NO: 325834 - RNA, 19 nt, Homo sapiens
  misc_RNA (1)...(19): siRNA sense strand
gguaucaucuucaccaaau

SEQ ID NO: 325835 - RNA, 19 nt, Homo sapiens
  misc_RNA (1)...(19): siRNA sense strand
gaauuaccgccucuucuuu

SEQ ID NO: 325836 - RNA, 19 nt, Homo sapiens
  misc_RNA (1)...(19): siRNA sense strand
agaggaagcaagaucauua

SEQ ID NO: 325837 - RNA, 19 nt, Homo sapiens
  misc_RNA (1)...(19): siRNA sense strand
ggaagcaagaucauuaguu

SEQ ID NO: 325838 - RNA, 19 nt, Homo sapiens
  misc_RNA (1)...(19): siRNA sense strand
guuauuaaauccacucauc

SEQ ID NO: 325839 - RNA, 19 nt, Homo sapiens
  misc_RNA (1)...(19): siRNA sense strand
ggaagcuacucuuaauugg

SEQ ID NO: 325840 - RNA, 19 nt, Homo sapiens
  misc_RNA (1)...(19): siRNA sense strand
aagcuacucuuaauugguu

SEQ ID NO: 325841 - RNA, 19 nt, Homo sapiens
  misc_RNA (1)...(19): siRNA sense strand
gcaagaucauuaguugaau

SEQ ID NO: 325842 - RNA, 19 nt, Homo sapiens
  misc_RNA (1)...(19): siRNA sense strand
ccuggaagcuacucuuaau

SEQ ID NO: 325843 - RNA, 19 nt, Homo sapiens
  misc_RNA (1)...(19): siRNA sense strand
caagaucauuaguugaauc

SEQ ID NO: 325844 - RNA, 19 nt, Homo sapiens
  misc_RNA (1)...(19): siRNA sense strand
guaucaucuucaccaaaua

SEQ ID NO: 325845 - RNA, 19 nt, Homo sapiens
  misc_RNA (1)...(19): siRNA sense strand
aaacaaggcuuuugcucuu

SEQ ID NO: 325846 - RNA, 19 nt, Homo sapiens
  misc_RNA (1)...(19): siRNA sense strand
gcuauaaauugcacaaacg

SEQ ID NO: 325847 - RNA, 19 nt, Homo sapiens
  misc_RNA (1)...(19): siRNA sense strand
uaauggaggagcuauaaau

SEQ ID NO: 325848 - RNA, 19 nt, Homo sapiens
  misc_RNA (1)...(19): siRNA sense strand
uggaagcuacucuuaauug

SEQ ID NO: 325849 - RNA, 19 nt, Homo sapiens
  misc_RNA (1)...(19): siRNA sense strand
gcagaauuaccgccucuuc

SEQ ID NO: 325850 - RNA, 19 nt, Homo sapiens
  misc_RNA (1)...(19): siRNA sense strand
aauuaccgccucuucuuua

SEQ ID NO: 325851 - RNA, 19 nt, Homo sapiens
  misc_RNA (1)...(19): siRNA sense strand
uggaggagcuauaaauugc

SEQ ID NO: 325852 - RNA, 19 nt, Homo sapiens
  misc_RNA (1)...(19): siRNA sense strand
uuaaauccacucaucaaug

SEQ ID NO: 325853 - RNA, 19 nt, Homo sapiens
  misc_RNA (1)...(19): siRNA sense strand
guaauggaggagcuauaaa

SEQ ID NO: 325854 - RNA, 19 nt, Homo sapiens
  misc_RNA (1)...(19): siRNA sense strand
uguaauggaggagcuauaa

SEQ ID NO: 325855 - RNA, 19 nt, Homo sapiens
  misc_RNA (1)...(19): siRNA sense strand
uugaaucgguaucaucuuc

SEQ ID NO: 325856 - RNA, 19 nt, Homo sapiens
  misc_RNA (1)...(19): siRNA sense strand
gaagcuacucuuaauuggu

SEQ ID NO: 325857 - RNA, 19 nt, Homo sapiens
  misc_RNA (1)...(19): siRNA sense strand
gaggaagcaagaucauuag

SEQ ID NO: 325858 - RNA, 19 nt, Homo sapiens
  misc_RNA (1)...(19): siRNA sense strand
ucaagaggaagcaagauca

SEQ ID NO: 325859 - RNA, 19 nt, Homo sapiens
  misc_RNA (1)...(19): siRNA sense strand
caucaauguuggaaagcau

SEQ ID NO: 325860 - RNA, 19 nt, Homo sapiens
  misc_RNA (1)...(19): siRNA sense strand
uaccuggaagcuacucuua

SEQ ID NO: 325861 - RNA, 19 nt, Homo sapiens
  misc_RNA (1)...(19): siRNA sense strand
ccguugcacucaagaggaa

SEQ ID NO: 325862 - RNA, 19 nt, Homo sapiens
  misc_RNA (1)...(19): siRNA sense strand
acucaucaauguuggaaag

SEQ ID NO: 325863 - RNA, 19 nt, Homo sapiens
  misc_RNA (1)...(19): siRNA sense strand
aauggaggagcuauaaauu

SEQ ID NO: 325864 - RNA, 19 nt, Homo sapiens
  misc_RNA (1)...(19): siRNA sense strand
ccaguuugcuuuuaaugga

SEQ ID NO: 325865 - RNA, 19 nt, Homo sapiens
  misc_RNA (1)...(19): siRNA sense strand
uaagguaccagauggaaaa

SEQ ID NO: 325866 - RNA, 19 nt, Homo sapiens
  misc_RNA (1)...(19): siRNA sense strand
agcaagaucauuaguugaa

SEQ ID NO: 325867 - RNA, 19 nt, Homo sapiens
  misc_RNA (1)...(19): siRNA sense strand
ggagcuauaaauugcacaa

SEQ ID NO: 325868 - RNA, 19 nt, Homo sapiens
  misc_RNA (1)...(19): siRNA sense strand
gauagcccuuuccguugca

SEQ ID NO: 325869 - RNA, 19 nt, Homo sapiens
  misc_RNA (1)...(19): siRNA sense strand
auuaccgccucuucuuuaa

SEQ ID NO: 325870 - RNA, 19 nt, Homo sapiens
  misc_RNA (1)...(19): siRNA sense strand
gagcuauaaauugcacaaa

SEQ ID NO: 325871 - RNA, 19 nt, Homo sapiens
  misc_RNA (1)...(19): siRNA sense strand
gaaucgguaucaucuucac

SEQ ID NO: 325872 - RNA, 19 nt, Homo sapiens
  misc_RNA (1)...(19): siRNA sense strand
caagaggaagcaagaucau

SEQ ID NO: 325873 - RNA, 19 nt, Homo sapiens
  misc_RNA (1)...(19): siRNA sense strand
gcuacucuuaauugguuua

SEQ ID NO: 325874 - RNA, 19 nt, Homo sapiens
  misc_RNA (1)...(19): siRNA sense strand
uauaagguaccagauggaa

SEQ ID NO: 325875 - RNA, 19 nt, Homo sapiens
  misc_RNA (1)...(19): siRNA sense strand
uuauauaagguaccagaug

SEQ ID NO: 325876 - RNA, 19 nt, Homo sapiens
  misc_RNA (1)...(19): siRNA sense strand
gaagcaagaucauuaguug

SEQ ID NO: 325877 - RNA, 19 nt, Homo sapiens
  misc_RNA (1)...(19): siRNA sense strand
uaaauccacucaucaaugu

SEQ ID NO: 325878 - RNA, 19 nt, Homo sapiens
  misc_RNA (1)...(19): siRNA sense strand
gguaucaucuucaccaaau

SEQ ID NO: 325879 - RNA, 19 nt, Homo sapiens
  misc_RNA (1)...(19): siRNA sense strand
gaauuaccgccucuucuuu

SEQ ID NO: 325880 - RNA, 19 nt, Homo sapiens
  misc_RNA (1)...(19): siRNA sense strand
agaggaagcaagaucauua

SEQ ID NO: 325881 - RNA, 19 nt, Homo sapiens
  misc_RNA (1)...(19): siRNA sense strand
ggaagcaagaucauuaguu

SEQ ID NO: 325882 - RNA, 19 nt, Homo sapiens
  misc_RNA (1)...(19): siRNA sense strand
guuauuaaauccacucauc

SEQ ID NO: 325883 - RNA, 19 nt, Homo sapiens
  misc_RNA (1)...(19): siRNA sense strand
ggaagcuacucuuaauugg

SEQ ID NO: 325884 - RNA, 19 nt, Homo sapiens
  misc_RNA (1)...(19): siRNA sense strand
aagcuacucuuaauugguu

SEQ ID NO: 325885 - RNA, 19 nt, Homo sapiens
  misc_RNA (1)...(19): siRNA sense strand
gcaagaucauuaguugaau

SEQ ID NO: 325886 - RNA, 19 nt, Homo sapiens
  misc_RNA (1)...(19): siRNA sense strand
ccuggaagcuacucuuaau

SEQ ID NO: 325887 - RNA, 19 nt, Homo sapiens
  misc_RNA (1)...(19): siRNA sense strand
caagaucauuaguugaauc

SEQ ID NO: 325888 - RNA, 19 nt, Homo sapiens
  misc_RNA (1)...(19): siRNA sense strand
guaucaucuucaccaaaua

SEQ ID NO: 325889 - RNA, 19 nt, Homo sapiens
  misc_RNA (1)...(19): siRNA sense strand
aaacaaggcuuuugcucuu

SEQ ID NO: 325890 - RNA, 19 nt, Homo sapiens
  misc_RNA (1)...(19): siRNA sense strand
gcuauaaauugcacaaacg

SEQ ID NO: 325891 - RNA, 19 nt, Homo sapiens
  misc_RNA (1)...(19): siRNA sense strand
uaauggaggagcuauaaau

SEQ ID NO: 325892 - RNA, 19 nt, Homo sapiens
  misc_RNA (1)...(19): siRNA sense strand
uggaagcuacucuuaauug

SEQ ID NO: 325893 - RNA, 19 nt, Homo sapiens
  misc_RNA (1)...(19): siRNA sense strand
aauuaccgccucuucuuua

SEQ ID NO: 325894 - RNA, 19 nt, Homo sapiens
  misc_RNA (1)...(19): siRNA sense strand
uggaggagcuauaaauugc

SEQ ID NO: 325895 - RNA, 19 nt, Homo sapiens
  misc_RNA (1)...(19): siRNA sense strand
gcagaauuaccgccucuuc

SEQ ID NO: 325896 - RNA, 19 nt, Homo sapiens
  misc_RNA (1)...(19): siRNA sense strand
uuaaauccacucaucaaug

SEQ ID NO: 325897 - RNA, 19 nt, Homo sapiens
  misc_RNA (1)...(19): siRNA sense strand
guaauggaggagcuauaaa

SEQ ID NO: 325898 - RNA, 19 nt, Homo sapiens
  misc_RNA (1)...(19): siRNA sense strand
uguaauggaggagcuauaa

SEQ ID NO: 325899 - RNA, 19 nt, Homo sapiens
  misc_RNA (1)...(19): siRNA sense strand
uugaaucgguaucaucuuc

SEQ ID NO: 325900 - RNA, 19 nt, Homo sapiens
  misc_RNA (1)...(19): siRNA sense strand
gaagcuacucuuaauuggu

SEQ ID NO: 325901 - RNA, 19 nt, Homo sapiens
  misc_RNA (1)...(19): siRNA sense strand
gaggaagcaagaucauuag

SEQ ID NO: 325902 - RNA, 19 nt, Homo sapiens
  misc_RNA (1)...(19): siRNA sense strand
ucaagaggaagcaagauca

SEQ ID NO: 325903 - RNA, 19 nt, Homo sapiens
  misc_RNA (1)...(19): siRNA sense strand
caucaauguuggaaagcau

SEQ ID NO: 325904 - RNA, 19 nt, Homo sapiens
  misc_RNA (1)...(19): siRNA sense strand
gccgugcuauggcccugua

SEQ ID NO: 325905 - RNA, 19 nt, Homo sapiens
  misc_RNA (1)...(19): siRNA sense strand
uaccuggaagcuacucuua

SEQ ID NO: 325906 - RNA, 19 nt, Homo sapiens
  misc_RNA (1)...(19): siRNA sense strand
ccguugcacucaagaggaa

SEQ ID NO: 325907 - RNA, 19 nt, Homo sapiens
  misc_RNA (1)...(19): siRNA sense strand
acucaucaauguuggaaag

SEQ ID NO: 325908 - RNA, 19 nt, Homo sapiens
  misc_RNA (1)...(19): siRNA sense strand
aauggaggagcuauaaauu

SEQ ID NO: 325909 - RNA, 19 nt, Homo sapiens
  misc_RNA (1)...(19): siRNA sense strand
ccaguuugcuuuuaaugga

SEQ ID NO: 325910 - RNA, 19 nt, Homo sapiens
  misc_RNA (1)...(19): siRNA sense strand
uaagguaccagauggaaaa

SEQ ID NO: 325911 - RNA, 19 nt, Homo sapiens
  misc_RNA (1)...(19): siRNA sense strand
agcaagaucauuaguugaa

SEQ ID NO: 325912 - RNA, 19 nt, Homo sapiens
  misc_RNA (1)...(19): siRNA sense strand
ggagcuauaaauugcacaa

SEQ ID NO: 325913 - RNA, 19 nt, Homo sapiens
  misc_RNA (1)...(19): siRNA sense strand
gauagcccuuuccguugca

SEQ ID NO: 325914 - RNA, 19 nt, Homo sapiens
  misc_RNA (1)...(19): siRNA sense strand
auuaccgccucuucuuuaa

SEQ ID NO: 325915 - RNA, 19 nt, Homo sapiens
  misc_RNA (1)...(19): siRNA sense strand
gagcuauaaauugcacaaa

SEQ ID NO: 325916 - RNA, 19 nt, Homo sapiens
  misc_RNA (1)...(19): siRNA sense strand
gaaucgguaucaucuucac

SEQ ID NO: 325917 - RNA, 19 nt, Homo sapiens
  misc_RNA (1)...(19): siRNA sense strand
gcuacucuuaauugguuua

SEQ ID NO: 325918 - RNA, 19 nt, Homo sapiens
  misc_RNA (1)...(19): siRNA sense strand
caagaggaagcaagaucau

SEQ ID NO: 325919 - RNA, 19 nt, Homo sapiens
  misc_RNA (1)...(19): siRNA sense strand
uauaagguaccagauggaa

SEQ ID NO: 325920 - RNA, 19 nt, Homo sapiens
  misc_RNA (1)...(19): siRNA sense strand
uuauauaagguaccagaug

SEQ ID NO: 325921 - RNA, 19 nt, Homo sapiens
  misc_RNA (1)...(19): siRNA sense strand
gaagagagcuacccugcua

SEQ ID NO: 325922 - RNA, 19 nt, Homo sapiens
  misc_RNA (1)...(19): siRNA sense strand
gaacauggcuguccagaag

SEQ ID NO: 325923 - RNA, 19 nt, Homo sapiens
  misc_RNA (1)...(19): siRNA sense strand
agaagcagcuggauaaaua

SEQ ID NO: 325924 - RNA, 19 nt, Homo sapiens
  misc_RNA (1)...(19): siRNA sense strand
cauuagagcuggcaaauaa

SEQ ID NO: 325925 - RNA, 19 nt, Homo sapiens
  misc_RNA (1)...(19): siRNA sense strand
cagaauaccugucaagauu

SEQ ID NO: 325926 - RNA, 19 nt, Homo sapiens
  misc_RNA (1)...(19): siRNA sense strand
gcacaacacugucaccuau

SEQ ID NO: 325927 - RNA, 19 nt, Homo sapiens
  misc_RNA (1)...(19): siRNA sense strand
ggauaaauaugcauuggaa

SEQ ID NO: 325928 - RNA, 19 nt, Homo sapiens
  misc_RNA (1)...(19): siRNA sense strand
ggauccaacugcuuaauaa

SEQ ID NO: 325929 - RNA, 19 nt, Homo sapiens
  misc_RNA (1)...(19): siRNA sense strand
gaacaacgauuagaacaag

SEQ ID NO: 325930 - RNA, 19 nt, Homo sapiens
  misc_RNA (1)...(19): siRNA sense strand
gagaagagcuuuagguacu

SEQ ID NO: 325931 - RNA, 19 nt, Homo sapiens
  misc_RNA (1)...(19): siRNA sense strand
cagaagaccucaagggauu

SEQ ID NO: 325932 - RNA, 19 nt, Homo sapiens
  misc_RNA (1)...(19): siRNA sense strand
ggagagcacuggccaggaa

SEQ ID NO: 325933 - RNA, 19 nt, Homo sapiens
  misc_RNA (1)...(19): siRNA sense strand
ucagaaauuugccuuguuu

SEQ ID NO: 325934 - RNA, 19 nt, Homo sapiens
  misc_RNA (1)...(19): siRNA sense strand
ccacaggccugaagaugaa

SEQ ID NO: 325935 - RNA, 19 nt, Homo sapiens
  misc_RNA (1)...(19): siRNA sense strand
uaaacuggcugcccuaaau

SEQ ID NO: 325936 - RNA, 19 nt, Homo sapiens
  misc_RNA (1)...(19): siRNA sense strand
gagaauggauggcuaugga

SEQ ID NO: 325937 - RNA, 19 nt, Homo sapiens
  misc_RNA (1)...(19): siRNA sense strand
gaagagauccagucuguuc

SEQ ID NO: 325938 - RNA, 19 nt, Homo sapiens
  misc_RNA (1)...(19): siRNA sense strand
gagcgugucuugaagguau

SEQ ID NO: 325939 - RNA, 19 nt, Homo sapiens
  misc_RNA (1)...(19): siRNA sense strand
aaacaacacugguuacauc

SEQ ID NO: 325940 - RNA, 19 nt, Homo sapiens
  misc_RNA (1)...(19): siRNA sense strand
gcaccaacuccuuaaauaa

SEQ ID NO: 325941 - RNA, 19 nt, Homo sapiens
  misc_RNA (1)...(19): siRNA sense strand
ugaagaagcagcuggauaa

SEQ ID NO: 325942 - RNA, 19 nt, Homo sapiens
  misc_RNA (1)...(19): siRNA sense strand
gaagguaucuuugugaaac

SEQ ID NO: 325943 - RNA, 19 nt, Homo sapiens
  misc_RNA (1)...(19): siRNA sense strand
agaaaucgauuccaagaug

SEQ ID NO: 325944 - RNA, 19 nt, Homo sapiens
  misc_RNA (1)...(19): siRNA sense strand
gaugaaagguguaaaauuc

SEQ ID NO: 325945 - RNA, 19 nt, Homo sapiens
  misc_RNA (1)...(19): siRNA sense strand
ggaagugacauauccauug

SEQ ID NO: 325946 - RNA, 19 nt, Homo sapiens
  misc_RNA (1)...(19): siRNA sense strand
agaaagaaaucgauuccaa

SEQ ID NO: 325947 - RNA, 19 nt, Homo sapiens
  misc_RNA (1)...(19): siRNA sense strand
gaagugacauauccauugg

SEQ ID NO: 325948 - RNA, 19 nt, Homo sapiens
  misc_RNA (1)...(19): siRNA sense strand
gaaaucgauuccaagaugu

SEQ ID NO: 325949 - RNA, 19 nt, Homo sapiens
  misc_RNA (1)...(19): siRNA sense strand
gaaggcauccugugguauu

SEQ ID NO: 325950 - RNA, 19 nt, Homo sapiens
  misc_RNA (1)...(19): siRNA sense strand
gagcuacccugcuaaggau

SEQ ID NO: 325951 - RNA, 19 nt, Homo sapiens
  misc_RNA (1)...(19): siRNA sense strand
guucgacgccauacaaaua

SEQ ID NO: 325952 - RNA, 19 nt, Homo sapiens
  misc_RNA (1)...(19): siRNA sense strand
ccauuuggguugaaacuga

SEQ ID NO: 325953 - RNA, 19 nt, Homo sapiens
  misc_RNA (1)...(19): siRNA sense strand
uauggaagguuuaagauca

SEQ ID NO: 325954 - RNA, 19 nt, Homo sapiens
  misc_RNA (1)...(19): siRNA sense strand
cagggaccauuacagaaua

SEQ ID NO: 325955 - RNA, 19 nt, Homo sapiens
  misc_RNA (1)...(19): siRNA sense strand
gggauuauauugccacaca

SEQ ID NO: 325956 - RNA, 19 nt, Homo sapiens
  misc_RNA (1)...(19): siRNA sense strand
gagggacucucugaagaaa

SEQ ID NO: 325957 - RNA, 19 nt, Homo sapiens
  misc_RNA (1)...(19): siRNA sense strand
caucaacgcaucacauauu

SEQ ID NO: 325958 - RNA, 19 nt, Homo sapiens
  misc_RNA (1)...(19): siRNA sense strand
uaaauggacucucccuauc

SEQ ID NO: 325959 - RNA, 19 nt, Homo sapiens
  misc_RNA (1)...(19): siRNA sense strand
guauuuagguggcaugaca

SEQ ID NO: 325960 - RNA, 19 nt, Homo sapiens
  misc_RNA (1)...(19): siRNA sense strand
gggagaagagcuuuaggua

SEQ ID NO: 325961 - RNA, 19 nt, Homo sapiens
  misc_RNA (1)...(19): siRNA sense strand
caccgcaguugcacuauaa

SEQ ID NO: 325962 - RNA, 19 nt, Homo sapiens
  misc_RNA (1)...(19): siRNA sense strand
gaggagaccauucaauuuc

SEQ ID NO: 325963 - RNA, 19 nt, Homo sapiens
  misc_RNA (1)...(19): siRNA sense strand
caacaugucccacaacaag

SEQ ID NO: 325964 - RNA, 19 nt, Homo sapiens
  misc_RNA (1)...(19): siRNA sense strand
gaagaagaacaucguggaa

SEQ ID NO: 325965 - RNA, 19 nt, Homo sapiens
  misc_RNA (1)...(19): siRNA sense strand
ccaccgcaguugcacuaua

SEQ ID NO: 325966 - RNA, 19 nt, Homo sapiens
  misc_RNA (1)...(19): siRNA sense strand
gacauuauacagaaccaua

SEQ ID NO: 325967 - RNA, 19 nt, Homo sapiens
  misc_RNA (1)...(19): siRNA sense strand
acaaauagcacaagugauc

SEQ ID NO: 325968 - RNA, 19 nt, Homo sapiens
  misc_RNA (1)...(19): siRNA sense strand
ggagaccauucaauuucaa

SEQ ID NO: 325969 - RNA, 19 nt, Homo sapiens
  misc_RNA (1)...(19): siRNA sense strand
acacagcaccaacuccuua

SEQ ID NO: 325970 - RNA, 19 nt, Homo sapiens
  misc_RNA (1)...(19): siRNA sense strand
aaaguggccuuacuacauc

SEQ ID NO: 325971 - RNA, 19 nt, Homo sapiens
  misc_RNA (1)...(19): siRNA sense strand
ggacuggcguggugauuuu

SEQ ID NO: 325972 - RNA, 19 nt, Homo sapiens
  misc_RNA (1)...(19): siRNA sense strand
ggaagggagaagagcuuua

SEQ ID NO: 325973 - RNA, 19 nt, Homo sapiens
  misc_RNA (1)...(19): siRNA sense strand
gaauaccugucaagauuuu

SEQ ID NO: 325974 - RNA, 19 nt, Homo sapiens
  misc_RNA (1)...(19): siRNA sense strand
aguauuaucugcaacugaa

SEQ ID NO: 325975 - RNA, 19 nt, Homo sapiens
  misc_RNA (1)...(19): siRNA sense strand
ggaacaacgauuagaacaa

SEQ ID NO: 325976 - RNA, 19 nt, Homo sapiens
  misc_RNA (1)...(19): siRNA sense strand
ggagggacucucugaagaa

SEQ ID NO: 325977 - RNA, 19 nt, Homo sapiens
  misc_RNA (1)...(19): siRNA sense strand
gcucacagcuccugaugcu

SEQ ID NO: 325978 - RNA, 19 nt, Homo sapiens
  misc_RNA (1)...(19): siRNA sense strand
aaguauuccuuguaccuua

SEQ ID NO: 325979 - RNA, 19 nt, Homo sapiens
  misc_RNA (1)...(19): siRNA sense strand
gaagaagcagcuggauaaa

SEQ ID NO: 325980 - RNA, 19 nt, Homo sapiens
  misc_RNA (1)...(19): siRNA sense strand
gcccggauccaacugcuua

SEQ ID NO: 325981 - RNA, 19 nt, Homo sapiens
  misc_RNA (1)...(19): siRNA sense strand
uugaagagauccagucugu

SEQ ID NO: 325982 - RNA, 19 nt, Homo sapiens
  misc_RNA (1)...(19): siRNA sense strand
uggaaggcauccuguggua

SEQ ID NO: 325983 - RNA, 19 nt, Homo sapiens
  misc_RNA (1)...(19): siRNA sense strand
ccaaggaagugacauaucc

SEQ ID NO: 325984 - RNA, 19 nt, Homo sapiens
  misc_RNA (1)...(19): siRNA sense strand
guaugaaucccaggacuuu

SEQ ID NO: 325985 - RNA, 19 nt, Homo sapiens
  misc_RNA (1)...(19): siRNA sense strand
gagugccucugccugauga

SEQ ID NO: 325986 - RNA, 19 nt, Homo sapiens
  misc_RNA (1)...(19): siRNA sense strand
ggaaacagcaaaauacauu

SEQ ID NO: 325987 - RNA, 19 nt, Homo sapiens
  misc_RNA (1)...(19): siRNA sense strand
ccauucaauuucaaacuga

SEQ ID NO: 325988 - RNA, 19 nt, Homo sapiens
  misc_RNA (1)...(19): siRNA sense strand
gcauuagagcuggcaaaua

SEQ ID NO: 325989 - RNA, 19 nt, Homo sapiens
  misc_RNA (1)...(19): siRNA sense strand
aagaggagaccauucaauu

SEQ ID NO: 325990 - RNA, 19 nt, Homo sapiens
  misc_RNA (1)...(19): siRNA sense strand
acaaugaggugcuggacau

SEQ ID NO: 325991 - RNA, 19 nt, Homo sapiens
  misc_RNA (1)...(19): siRNA sense strand
gaagaugaagcaccuccuu

SEQ ID NO: 325992 - RNA, 19 nt, Homo sapiens
  misc_RNA (1)...(19): siRNA sense strand
caacacugguuacaucaac

SEQ ID NO: 325993 - RNA, 19 nt, Homo sapiens
  misc_RNA (1)...(19): siRNA sense strand
aaagaaaucgauuccaaga

SEQ ID NO: 325994 - RNA, 19 nt, Homo sapiens
  misc_RNA (1)...(19): siRNA sense strand
ccagagcaacgaaugauga

SEQ ID NO: 325995 - RNA, 19 nt, Homo sapiens
  misc_RNA (1)...(19): siRNA sense strand
agcaccaacuccuuaaaua

SEQ ID NO: 325996 - RNA, 19 nt, Homo sapiens
  misc_RNA (1)...(19): siRNA sense strand
cggagggacucucugaaga

SEQ ID NO: 325997 - RNA, 19 nt, Homo sapiens
  misc_RNA (1)...(19): siRNA sense strand
gaagggagaagagcuuuag

SEQ ID NO: 325998 - RNA, 19 nt, Homo sapiens
  misc_RNA (1)...(19): siRNA sense strand
cuaaauggacucucccuau

SEQ ID NO: 325999 - RNA, 19 nt, Homo sapiens
  misc_RNA (1)...(19): siRNA sense strand
gagcaacgaaugaugaaag

SEQ ID NO: 326000 - RNA, 19 nt, Homo sapiens
  misc_RNA (1)...(19): siRNA sense strand
agaggagaccauucaauuu

SEQ ID NO: 326001 - RNA, 19 nt, Homo sapiens
  misc_RNA (1)...(19): siRNA sense strand
acagaguccucauccaguu

SEQ ID NO: 326002 - RNA, 19 nt, Homo sapiens
  misc_RNA (1)...(19): siRNA sense strand
caugaucgccugccuggaa

SEQ ID NO: 326003 - RNA, 19 nt, Homo sapiens
  misc_RNA (1)...(19): siRNA sense strand
acacagggaccauuacaga

SEQ ID NO: 326004 - RNA, 19 nt, Homo sapiens
  misc_RNA (1)...(19): siRNA sense strand
caacgcaucacauauuaag

SEQ ID NO: 326005 - RNA, 19 nt, Homo sapiens
  misc_RNA (1)...(19): siRNA sense strand
gaaccuaccgucuauuuug

SEQ ID NO: 326006 - RNA, 19 nt, Homo sapiens
  misc_RNA (1)...(19): siRNA sense strand
cagacaagcuuggauagag

SEQ ID NO: 326007 - RNA, 19 nt, Homo sapiens
  misc_RNA (1)...(19): siRNA sense strand
ccagguaucaguauuaucu

SEQ ID NO: 326008 - RNA, 19 nt, Homo sapiens
  misc_RNA (1)...(19): siRNA sense strand
aucaacgcaucacauauua

SEQ ID NO: 326009 - RNA, 19 nt, Homo sapiens
  misc_RNA (1)...(19): siRNA sense strand
gcaguugcacuauaaugga

SEQ ID NO: 326010 - RNA, 19 nt, Homo sapiens
  misc_RNA (1)...(19): siRNA sense strand
ucccaggacuuucuucaga

SEQ ID NO: 326011 - RNA, 19 nt, Homo sapiens
  misc_RNA (1)...(19): siRNA sense strand
ugacuuugaucaguaugaa

SEQ ID NO: 326012 - RNA, 19 nt, Homo sapiens
  misc_RNA (1)...(19): siRNA sense strand
ggauggcuauggagaagag

SEQ ID NO: 326013 - RNA, 19 nt, Homo sapiens
  misc_RNA (1)...(19): siRNA sense strand
gcagcuggauaaauaugca

SEQ ID NO: 326014 - RNA, 19 nt, Homo sapiens
  misc_RNA (1)...(19): siRNA sense strand
auacaaauagcacaaguga

SEQ ID NO: 326015 - RNA, 19 nt, Homo sapiens
  misc_RNA (1)...(19): siRNA sense strand
aaauaugcauuggaaccua

SEQ ID NO: 326016 - RNA, 19 nt, Homo sapiens
  misc_RNA (1)...(19): siRNA sense strand
caccaacuccuuaaauaau

SEQ ID NO: 326017 - RNA, 19 nt, Homo sapiens
  misc_RNA (1)...(19): siRNA sense strand
aguguaaccugcaaacuca

SEQ ID NO: 326018 - RNA, 19 nt, Homo sapiens
  misc_RNA (1)...(19): siRNA sense strand
gaagcagcuggauaaauau

SEQ ID NO: 326019 - RNA, 19 nt, Homo sapiens
  misc_RNA (1)...(19): siRNA sense strand
gccaacaugucccacaaca

SEQ ID NO: 326020 - RNA, 19 nt, Homo sapiens
  misc_RNA (1)...(19): siRNA sense strand
ccacugccauuuggguuga

SEQ ID NO: 326021 - RNA, 19 nt, Homo sapiens
  misc_RNA (1)...(19): siRNA sense strand
gaagauggcuggcgugauc

SEQ ID NO: 326022 - RNA, 19 nt, Homo sapiens
  misc_RNA (1)...(19): siRNA sense strand
gaagaaaugcuuauuccua

SEQ ID NO: 326023 - RNA, 19 nt, Homo sapiens
  misc_RNA (1)...(19): siRNA sense strand
aaaggaagcuggccaagaa

SEQ ID NO: 326024 - RNA, 19 nt, Homo sapiens
  misc_RNA (1)...(19): siRNA sense strand
gagggcagcugacauuauu

SEQ ID NO: 326025 - RNA, 19 nt, Homo sapiens
  misc_RNA (1)...(19): siRNA sense strand
ggaggcugguguucgauua

SEQ ID NO: 326026 - RNA, 19 nt, Homo sapiens
  misc_RNA (1)...(19): siRNA sense strand
ggacaucauccacagaaua

SEQ ID NO: 326027 - RNA, 19 nt, Homo sapiens
  misc_RNA (1)...(19): siRNA sense strand
ccaacuacauugacggaua

SEQ ID NO: 326028 - RNA, 19 nt, Homo sapiens
  misc_RNA (1)...(19): siRNA sense strand
ucacaaaccugguggaagu

SEQ ID NO: 326029 - RNA, 19 nt, Homo sapiens
  misc_RNA (1)...(19): siRNA sense strand
ccagguggcuguuccuuug

SEQ ID NO: 326030 - RNA, 19 nt, Homo sapiens
  misc_RNA (1)...(19): siRNA sense strand
gaagaaaggcuaccaugag

SEQ ID NO: 326031 - RNA, 19 nt, Homo sapiens
  misc_RNA (1)...(19): siRNA sense strand
gaauauuccgcaucuguaa

SEQ ID NO: 326032 - RNA, 19 nt, Homo sapiens
  misc_RNA (1)...(19): siRNA sense strand
cacaggaucuuucaugaug

SEQ ID NO: 326033 - RNA, 19 nt, Homo sapiens
  misc_RNA (1)...(19): siRNA sense strand
cuacuuugcugcugaguug

SEQ ID NO: 326034 - RNA, 19 nt, Homo sapiens
  misc_RNA (1)...(19): siRNA sense strand
ggucugguguguccaacua

SEQ ID NO: 326035 - RNA, 19 nt, Homo sapiens
  misc_RNA (1)...(19): siRNA sense strand
cgacuuccauuacuacuuc

SEQ ID NO: 326036 - RNA, 19 nt, Homo sapiens
  misc_RNA (1)...(19): siRNA sense strand
gagaagaaaugcuuauucc

SEQ ID NO: 326037 - RNA, 19 nt, Homo sapiens
  misc_RNA (1)...(19): siRNA sense strand
cagacaaacuccagccaaa

SEQ ID NO: 326038 - RNA, 19 nt, Homo sapiens
  misc_RNA (1)...(19): siRNA sense strand
gcaucgacuuccauuacua

SEQ ID NO: 326039 - RNA, 19 nt, Homo sapiens
  misc_RNA (1)...(19): siRNA sense strand
ggaaguggucucagcauga

SEQ ID NO: 326040 - RNA, 19 nt, Homo sapiens
  misc_RNA (1)...(19): siRNA sense strand
ggaaaucguagacaucaga

SEQ ID NO: 326041 - RNA, 19 nt, Homo sapiens
  misc_RNA (1)...(19): siRNA sense strand
aagaaaggcuaccaugaga

SEQ ID NO: 326042 - RNA, 19 nt, Homo sapiens
  misc_RNA (1)...(19): siRNA sense strand
ggaggaauacgaggccuua

SEQ ID NO: 326043 - RNA, 19 nt, Homo sapiens
  misc_RNA (1)...(19): siRNA sense strand
ggagaagaaaugcuuauuc

SEQ ID NO: 326044 - RNA, 19 nt, Homo sapiens
  misc_RNA (1)...(19): siRNA sense strand
gagcuccugucaguguuua

SEQ ID NO: 326045 - RNA, 19 nt, Homo sapiens
  misc_RNA (1)...(19): siRNA sense strand
gagaugauccagcagcaaa

SEQ ID NO: 326046 - RNA, 19 nt, Homo sapiens
  misc_RNA (1)...(19): siRNA sense strand
gauaagaaucgaaguaugg

SEQ ID NO: 326047 - RNA, 19 nt, Homo sapiens
  misc_RNA (1)...(19): siRNA sense strand
ggacaacaccgugaagaug

SEQ ID NO: 326048 - RNA, 19 nt, Homo sapiens
  misc_RNA (1)...(19): siRNA sense strand
gaaaggcuaccaugagauc

SEQ ID NO: 326049 - RNA, 19 nt, Homo sapiens
  misc_RNA (1)...(19): siRNA sense strand
gcaauaagaaucgauaugg

SEQ ID NO: 326050 - RNA, 19 nt, Homo sapiens
  misc_RNA (1)...(19): siRNA sense strand
ugaaggaaguggaauaucg

SEQ ID NO: 326051 - RNA, 19 nt, Homo sapiens
  misc_RNA (1)...(19): siRNA sense strand
uggagacccuggaacagua

SEQ ID NO: 326052 - RNA, 19 nt, Homo sapiens
  misc_RNA (1)...(19): siRNA sense strand
gacaauaagacauacaaug

SEQ ID NO: 326053 - RNA, 19 nt, Homo sapiens
  misc_RNA (1)...(19): siRNA sense strand
cggacuggcugcuucauug

SEQ ID NO: 326054 - RNA, 19 nt, Homo sapiens
  misc_RNA (1)...(19): siRNA sense strand
gacggagaauccagcaauu

SEQ ID NO: 326055 - RNA, 19 nt, Homo sapiens
  misc_RNA (1)...(19): siRNA sense strand
ggacggagaauccagcaau

SEQ ID NO: 326056 - RNA, 19 nt, Homo sapiens
  misc_RNA (1)...(19): siRNA sense strand
ccagccaaaucaaagauga

SEQ ID NO: 326057 - RNA, 19 nt, Homo sapiens
  misc_RNA (1)...(19): siRNA sense strand
caacuacauugacggauac

SEQ ID NO: 326058 - RNA, 19 nt, Homo sapiens
  misc_RNA (1)...(19): siRNA sense strand
gcacuggaauauuuaagcu

SEQ ID NO: 326059 - RNA, 19 nt, Homo sapiens
  misc_RNA (1)...(19): siRNA sense strand
acaggaugguuaucguaua

SEQ ID NO: 326060 - RNA, 19 nt, Homo sapiens
  misc_RNA (1)...(19): siRNA sense strand
gacaucauccacagaauau

SEQ ID NO: 326061 - RNA, 19 nt, Homo sapiens
  misc_RNA (1)...(19): siRNA sense strand
agacagaggagcaauaugu

SEQ ID NO: 326062 - RNA, 19 nt, Homo sapiens
  misc_RNA (1)...(19): siRNA sense strand
aaagucacccugauugaaa

SEQ ID NO: 326063 - RNA, 19 nt, Homo sapiens
  misc_RNA (1)...(19): siRNA sense strand
caagcgcucucugcucaaa

SEQ ID NO: 326064 - RNA, 19 nt, Homo sapiens
  misc_RNA (1)...(19): siRNA sense strand
cagcaacugugguuauagu

SEQ ID NO: 326065 - RNA, 19 nt, Homo sapiens
  misc_RNA (1)...(19): siRNA sense strand
uaacaacaaauccaacaug

SEQ ID NO: 326066 - RNA, 19 nt, Homo sapiens
  misc_RNA (1)...(19): siRNA sense strand
cuacaucaaugccaacuac

SEQ ID NO: 326067 - RNA, 19 nt, Homo sapiens
  misc_RNA (1)...(19): siRNA sense strand
gaugaaaaccgcaauaaga

SEQ ID NO: 326068 - RNA, 19 nt, Homo sapiens
  misc_RNA (1)...(19): siRNA sense strand
ucuacgagaucaacuacaa

SEQ ID NO: 326069 - RNA, 19 nt, Homo sapiens
  misc_RNA (1)...(19): siRNA sense strand
gggagcagauuaacacaac

SEQ ID NO: 326070 - RNA, 19 nt, Homo sapiens
  misc_RNA (1)...(19): siRNA sense strand
gaggacaucauccacagaa

SEQ ID NO: 326071 - RNA, 19 nt, Homo sapiens
  misc_RNA (1)...(19): siRNA sense strand
ggagcaauauguguuugug

SEQ ID NO: 326072 - RNA, 19 nt, Homo sapiens
  misc_RNA (1)...(19): siRNA sense strand
gggcagagacccacauagu

SEQ ID NO: 326073 - RNA, 19 nt, Homo sapiens
  misc_RNA (1)...(19): siRNA sense strand
caugauaagaaucgaagua

SEQ ID NO: 326074 - RNA, 19 nt, Homo sapiens
  misc_RNA (1)...(19): siRNA sense strand
ugacauggccgagaaugaa

SEQ ID NO: 326075 - RNA, 19 nt, Homo sapiens
  misc_RNA (1)...(19): siRNA sense strand
ccacggcguucccugcuau

SEQ ID NO: 326076 - RNA, 19 nt, Homo sapiens
  misc_RNA (1)...(19): siRNA sense strand
acgcggagcugaucgugaa

SEQ ID NO: 326077 - RNA, 19 nt, Homo sapiens
  misc_RNA (1)...(19): siRNA sense strand
agaaguggcaggagcagua

SEQ ID NO: 326078 - RNA, 19 nt, Homo sapiens
  misc_RNA (1)...(19): siRNA sense strand
ccaaagggucaaccuggua

SEQ ID NO: 326079 - RNA, 19 nt, Homo sapiens
  misc_RNA (1)...(19): siRNA sense strand
gaaucgauaugggaacauc

SEQ ID NO: 326080 - RNA, 19 nt, Homo sapiens
  misc_RNA (1)...(19): siRNA sense strand
ggagggcagcugacauuau

SEQ ID NO: 326081 - RNA, 19 nt, Homo sapiens
  misc_RNA (1)...(19): siRNA sense strand
ccacucggauugccaccaa

SEQ ID NO: 326082 - RNA, 19 nt, Homo sapiens
  misc_RNA (1)...(19): siRNA sense strand
guggaaaccucccaaugag

SEQ ID NO: 326083 - RNA, 19 nt, Homo sapiens
  misc_RNA (1)...(19): siRNA sense strand
gaugagcacuacagcaacu

SEQ ID NO: 326084 - RNA, 19 nt, Homo sapiens
  misc_RNA (1)...(19): siRNA sense strand
uuacagugggugacaauaa

SEQ ID NO: 326085 - RNA, 19 nt, Homo sapiens
  misc_RNA (1)...(19): siRNA sense strand
caggaugguuaucguauag

SEQ ID NO: 326086 - RNA, 19 nt, Homo sapiens
  misc_RNA (1)...(19): siRNA sense strand
gaagugggcagggugaaau

SEQ ID NO: 326087 - RNA, 19 nt, Homo sapiens
  misc_RNA (1)...(19): siRNA sense strand
caucauauccuacgaccau

SEQ ID NO: 326088 - RNA, 19 nt, Homo sapiens
  misc_RNA (1)...(19): siRNA sense strand
gaaguggucucagcaugac

SEQ ID NO: 326089 - RNA, 19 nt, Homo sapiens
  misc_RNA (1)...(19): siRNA sense strand
ccuggaacaguauaaauuu

SEQ ID NO: 326090 - RNA, 19 nt, Homo sapiens
  misc_RNA (1)...(19): siRNA sense strand
ugauaagaaucgaaguaug

SEQ ID NO: 326091 - RNA, 19 nt, Homo sapiens
  misc_RNA (1)...(19): siRNA sense strand
uaaagucacccugauugaa

SEQ ID NO: 326092 - RNA, 19 nt, Homo sapiens
  misc_RNA (1)...(19): siRNA sense strand
ggacgucaacggauucaca

SEQ ID NO: 326093 - RNA, 19 nt, Homo sapiens
  misc_RNA (1)...(19): siRNA sense strand
ugaaacccaccaccucuuu

SEQ ID NO: 326094 - RNA, 19 nt, Homo sapiens
  misc_RNA (1)...(19): siRNA sense strand
gggcagcugacauuauuga

SEQ ID NO: 326095 - RNA, 19 nt, Homo sapiens
  misc_RNA (1)...(19): siRNA sense strand
agguggcacuggaauauuu

SEQ ID NO: 326096 - RNA, 19 nt, Homo sapiens
  misc_RNA (1)...(19): siRNA sense strand
uuucagacccucaacauug

SEQ ID NO: 326097 - RNA, 19 nt, Homo sapiens
  misc_RNA (1)...(19): siRNA sense strand
gacaaacuccagccaaauc

SEQ ID NO: 326098 - RNA, 19 nt, Homo sapiens
  misc_RNA (1)...(19): siRNA sense strand
gaggagcaauauguguuug

SEQ ID NO: 326099 - RNA, 19 nt, Homo sapiens
  misc_RNA (1)...(19): siRNA sense strand
ggacacagccaaggaggau

SEQ ID NO: 326100 - RNA, 19 nt, Homo sapiens
  misc_RNA (1)...(19): siRNA sense strand
gauggugggucuggugugu

SEQ ID NO: 326101 - RNA, 19 nt, Homo sapiens
  misc_RNA (1)...(19): siRNA sense strand
ccacaggaugguuaucgua

SEQ ID NO: 326102 - RNA, 19 nt, Homo sapiens
  misc_RNA (1)...(19): siRNA sense strand
ugaaaugugugcgauacug

SEQ ID NO: 326103 - RNA, 19 nt, Homo sapiens
  misc_RNA (1)...(19): siRNA sense strand
ggugaaaugugugcgauac

SEQ ID NO: 326104 - RNA, 19 nt, Homo sapiens
  misc_RNA (1)...(19): siRNA sense strand
ggcacuacauugcgacuca

SEQ ID NO: 326105 - RNA, 19 nt, Homo sapiens
  misc_RNA (1)...(19): siRNA sense strand
gucaacggauucacagaug

SEQ ID NO: 326106 - RNA, 19 nt, Homo sapiens
  misc_RNA (1)...(19): siRNA sense strand
caaaggaagcuggccaaga

SEQ ID NO: 326107 - RNA, 19 nt, Homo sapiens
  misc_RNA (1)...(19): siRNA sense strand
cagagaagcagguggacaa

SEQ ID NO: 326108 - RNA, 19 nt, Homo sapiens
  misc_RNA (1)...(19): siRNA sense strand
acaauaagacauacaaugg

SEQ ID NO: 326109 - RNA, 19 nt, Homo sapiens
  misc_RNA (1)...(19): siRNA sense strand
agucgacucucccaacuau

SEQ ID NO: 326110 - RNA, 19 nt, Homo sapiens
  misc_RNA (1)...(19): siRNA sense strand
gcagaaaagcaccucauuu

SEQ ID NO: 326111 - RNA, 19 nt, Homo sapiens
  misc_RNA (1)...(19): siRNA sense strand
gaagaccuccgggugcuau

SEQ ID NO: 326112 - RNA, 19 nt, Homo sapiens
  misc_RNA (1)...(19): siRNA sense strand
acgcagcacugauggauag

SEQ ID NO: 326113 - RNA, 19 nt, Homo sapiens
  misc_RNA (1)...(19): siRNA sense strand
gaauccagcaauuacauca

SEQ ID NO: 326114 - RNA, 19 nt, Homo sapiens
  misc_RNA (1)...(19): siRNA sense strand
ggaagugggcagggugaaa

SEQ ID NO: 326115 - RNA, 19 nt, Homo sapiens
  misc_RNA (1)...(19): siRNA sense strand
gcaucgucauggucacaaa

SEQ ID NO: 326116 - RNA, 19 nt, Homo sapiens
  misc_RNA (1)...(19): siRNA sense strand
gcacucugacuacaucaau

SEQ ID NO: 326117 - RNA, 19 nt, Homo sapiens
  misc_RNA (1)...(19): siRNA sense strand
ugacauuauugagugcuuu

SEQ ID NO: 326118 - RNA, 19 nt, Homo sapiens
  misc_RNA (1)...(19): siRNA sense strand
ugccaacccugaaggagaa

SEQ ID NO: 326119 - RNA, 19 nt, Homo sapiens
  misc_RNA (1)...(19): siRNA sense strand
gaaacccaccaccucuuug

SEQ ID NO: 326120 - RNA, 19 nt, Homo sapiens
  misc_RNA (1)...(19): siRNA sense strand
ggaugguuaucguauaguc

SEQ ID NO: 326121 - RNA, 19 nt, Homo sapiens
  misc_RNA (1)...(19): siRNA sense strand
gaagauggcuggcgugauc

SEQ ID NO: 326122 - RNA, 19 nt, Homo sapiens
  misc_RNA (1)...(19): siRNA sense strand
gaagaaaugcuuauuccua

SEQ ID NO: 326123 - RNA, 19 nt, Homo sapiens
  misc_RNA (1)...(19): siRNA sense strand
aaaggaagcuggccaagaa

SEQ ID NO: 326124 - RNA, 19 nt, Homo sapiens
  misc_RNA (1)...(19): siRNA sense strand
gagggcagcugacauuauu

SEQ ID NO: 326125 - RNA, 19 nt, Homo sapiens
  misc_RNA (1)...(19): siRNA sense strand
ggaggcugguguucgauua

SEQ ID NO: 326126 - RNA, 19 nt, Homo sapiens
  misc_RNA (1)...(19): siRNA sense strand
ggacaucauccacagaaua

SEQ ID NO: 326127 - RNA, 19 nt, Homo sapiens
  misc_RNA (1)...(19): siRNA sense strand
ccaacuacauugacggaua

SEQ ID NO: 326128 - RNA, 19 nt, Homo sapiens
  misc_RNA (1)...(19): siRNA sense strand
ucacaaaccugguggaagu

SEQ ID NO: 326129 - RNA, 19 nt, Homo sapiens
  misc_RNA (1)...(19): siRNA sense strand
ccagguggcuguuccuuug

SEQ ID NO: 326130 - RNA, 19 nt, Homo sapiens
  misc_RNA (1)...(19): siRNA sense strand
gaagaaaggcuaccaugag

SEQ ID NO: 326131 - RNA, 19 nt, Homo sapiens
  misc_RNA (1)...(19): siRNA sense strand
gaauauuccgcaucuguaa

SEQ ID NO: 326132 - RNA, 19 nt, Homo sapiens
  misc_RNA (1)...(19): siRNA sense strand
cacaggaucuuucaugaug

SEQ ID NO: 326133 - RNA, 19 nt, Homo sapiens
  misc_RNA (1)...(19): siRNA sense strand
cuacuuugcugcugaguug

SEQ ID NO: 326134 - RNA, 19 nt, Homo sapiens
  misc_RNA (1)...(19): siRNA sense strand
ggucugguguguccaacua

SEQ ID NO: 326135 - RNA, 19 nt, Homo sapiens
  misc_RNA (1)...(19): siRNA sense strand
cgacuuccauuacuacuuc

SEQ ID NO: 326136 - RNA, 19 nt, Homo sapiens
  misc_RNA (1)...(19): siRNA sense strand
gagaagaaaugcuuauucc

SEQ ID NO: 326137 - RNA, 19 nt, Homo sapiens
  misc_RNA (1)...(19): siRNA sense strand
cagacaaacuccagccaaa

SEQ ID NO: 326138 - RNA, 19 nt, Homo sapiens
  misc_RNA (1)...(19): siRNA sense strand
gcaucgacuuccauuacua

SEQ ID NO: 326139 - RNA, 19 nt, Homo sapiens
  misc_RNA (1)...(19): siRNA sense strand
ggaaguggucucagcauga

SEQ ID NO: 326140 - RNA, 19 nt, Homo sapiens
  misc_RNA (1)...(19): siRNA sense strand
ggaaaucguagacaucaga

SEQ ID NO: 326141 - RNA, 19 nt, Homo sapiens
  misc_RNA (1)...(19): siRNA sense strand
aagaaaggcuaccaugaga

SEQ ID NO: 326142 - RNA, 19 nt, Homo sapiens
  misc_RNA (1)...(19): siRNA sense strand
ggaggaauacgaggccuua

SEQ ID NO: 326143 - RNA, 19 nt, Homo sapiens
  misc_RNA (1)...(19): siRNA sense strand
ggagaagaaaugcuuauuc

SEQ ID NO: 326144 - RNA, 19 nt, Homo sapiens
  misc_RNA (1)...(19): siRNA sense strand
gagcuccugucaguguuua

SEQ ID NO: 326145 - RNA, 19 nt, Homo sapiens
  misc_RNA (1)...(19): siRNA sense strand
gagaugauccagcagcaaa

SEQ ID NO: 326146 - RNA, 19 nt, Homo sapiens
  misc_RNA (1)...(19): siRNA sense strand
gauaagaaucgaaguaugg

SEQ ID NO: 326147 - RNA, 19 nt, Homo sapiens
  misc_RNA (1)...(19): siRNA sense strand
ggacaacaccgugaagaug

SEQ ID NO: 326148 - RNA, 19 nt, Homo sapiens
  misc_RNA (1)...(19): siRNA sense strand
gaaaggcuaccaugagauc

SEQ ID NO: 326149 - RNA, 19 nt, Homo sapiens
  misc_RNA (1)...(19): siRNA sense strand
gcaauaagaaucgauaugg

SEQ ID NO: 326150 - RNA, 19 nt, Homo sapiens
  misc_RNA (1)...(19): siRNA sense strand
ugaaggaaguggaauaucg

SEQ ID NO: 326151 - RNA, 19 nt, Homo sapiens
  misc_RNA (1)...(19): siRNA sense strand
uggagacccuggaacagua

SEQ ID NO: 326152 - RNA, 19 nt, Homo sapiens
  misc_RNA (1)...(19): siRNA sense strand
gacaauaagacauacaaug

SEQ ID NO: 326153 - RNA, 19 nt, Homo sapiens
  misc_RNA (1)...(19): siRNA sense strand
cggacuggcugcuucauug

SEQ ID NO: 326154 - RNA, 19 nt, Homo sapiens
  misc_RNA (1)...(19): siRNA sense strand
gacggagaauccagcaauu

SEQ ID NO: 326155 - RNA, 19 nt, Homo sapiens
  misc_RNA (1)...(19): siRNA sense strand
ggacggagaauccagcaau

SEQ ID NO: 326156 - RNA, 19 nt, Homo sapiens
  misc_RNA (1)...(19): siRNA sense strand
ccagccaaaucaaagauga

SEQ ID NO: 326157 - RNA, 19 nt, Homo sapiens
  misc_RNA (1)...(19): siRNA sense strand
caacuacauugacggauac

SEQ ID NO: 326158 - RNA, 19 nt, Homo sapiens
  misc_RNA (1)...(19): siRNA sense strand
gcacuggaauauuuaagcu

SEQ ID NO: 326159 - RNA, 19 nt, Homo sapiens
  misc_RNA (1)...(19): siRNA sense strand
acaggaugguuaucguaua

SEQ ID NO: 326160 - RNA, 19 nt, Homo sapiens
  misc_RNA (1)...(19): siRNA sense strand
gacaucauccacagaauau

SEQ ID NO: 326161 - RNA, 19 nt, Homo sapiens
  misc_RNA (1)...(19): siRNA sense strand
agacagaggagcaauaugu

SEQ ID NO: 326162 - RNA, 19 nt, Homo sapiens
  misc_RNA (1)...(19): siRNA sense strand
aaagucacccugauugaaa

SEQ ID NO: 326163 - RNA, 19 nt, Homo sapiens
  misc_RNA (1)...(19): siRNA sense strand
caagcgcucucugcucaaa

SEQ ID NO: 326164 - RNA, 19 nt, Homo sapiens
  misc_RNA (1)...(19): siRNA sense strand
cagcaacugugguuauagu

SEQ ID NO: 326165 - RNA, 19 nt, Homo sapiens
  misc_RNA (1)...(19): siRNA sense strand
uaacaacaaauccaacaug

SEQ ID NO: 326166 - RNA, 19 nt, Homo sapiens
  misc_RNA (1)...(19): siRNA sense strand
cuacaucaaugccaacuac

SEQ ID NO: 326167 - RNA, 19 nt, Homo sapiens
  misc_RNA (1)...(19): siRNA sense strand
gaugaaaaccgcaauaaga

SEQ ID NO: 326168 - RNA, 19 nt, Homo sapiens
  misc_RNA (1)...(19): siRNA sense strand
ucuacgagaucaacuacaa

SEQ ID NO: 326169 - RNA, 19 nt, Homo sapiens
  misc_RNA (1)...(19): siRNA sense strand
gggagcagauuaacacaac

SEQ ID NO: 326170 - RNA, 19 nt, Homo sapiens
  misc_RNA (1)...(19): siRNA sense strand
gaggacaucauccacagaa

SEQ ID NO: 326171 - RNA, 19 nt, Homo sapiens
  misc_RNA (1)...(19): siRNA sense strand
ggagcaauauguguuugug

SEQ ID NO: 326172 - RNA, 19 nt, Homo sapiens
  misc_RNA (1)...(19): siRNA sense strand
gggcagagacccacauagu

SEQ ID NO: 326173 - RNA, 19 nt, Homo sapiens
  misc_RNA (1)...(19): siRNA sense strand
caugauaagaaucgaagua

SEQ ID NO: 326174 - RNA, 19 nt, Homo sapiens
  misc_RNA (1)...(19): siRNA sense strand
ugacauggccgagaaugaa

SEQ ID NO: 326175 - RNA, 19 nt, Homo sapiens
  misc_RNA (1)...(19): siRNA sense strand
ccacggcguucccugcuau

SEQ ID NO: 326176 - RNA, 19 nt, Homo sapiens
  misc_RNA (1)...(19): siRNA sense strand
acgcggagcugaucgugaa

SEQ ID NO: 326177 - RNA, 19 nt, Homo sapiens
  misc_RNA (1)...(19): siRNA sense strand
agaaguggcaggagcagua

SEQ ID NO: 326178 - RNA, 19 nt, Homo sapiens
  misc_RNA (1)...(19): siRNA sense strand
ccaaagggucaaccuggua

SEQ ID NO: 326179 - RNA, 19 nt, Homo sapiens
  misc_RNA (1)...(19): siRNA sense strand
gaaucgauaugggaacauc

SEQ ID NO: 326180 - RNA, 19 nt, Homo sapiens
  misc_RNA (1)...(19): siRNA sense strand
ggagggcagcugacauuau

SEQ ID NO: 326181 - RNA, 19 nt, Homo sapiens
  misc_RNA (1)...(19): siRNA sense strand
ccacucggauugccaccaa

SEQ ID NO: 326182 - RNA, 19 nt, Homo sapiens
  misc_RNA (1)...(19): siRNA sense strand
guggaaaccucccaaugag

SEQ ID NO: 326183 - RNA, 19 nt, Homo sapiens
  misc_RNA (1)...(19): siRNA sense strand
gaugagcacuacagcaacu

SEQ ID NO: 326184 - RNA, 19 nt, Homo sapiens
  misc_RNA (1)...(19): siRNA sense strand
uuacagugggugacaauaa

SEQ ID NO: 326185 - RNA, 19 nt, Homo sapiens
  misc_RNA (1)...(19): siRNA sense strand
caggaugguuaucguauag

SEQ ID NO: 326186 - RNA, 19 nt, Homo sapiens
  misc_RNA (1)...(19): siRNA sense strand
gaagugggcagggugaaau

SEQ ID NO: 326187 - RNA, 19 nt, Homo sapiens
  misc_RNA (1)...(19): siRNA sense strand
caucauauccuacgaccau

SEQ ID NO: 326188 - RNA, 19 nt, Homo sapiens
  misc_RNA (1)...(19): siRNA sense strand
gaaguggucucagcaugac

SEQ ID NO: 326189 - RNA, 19 nt, Homo sapiens
  misc_RNA (1)...(19): siRNA sense strand
ccuggaacaguauaaauuu

SEQ ID NO: 326190 - RNA, 19 nt, Homo sapiens
  misc_RNA (1)...(19): siRNA sense strand
ugauaagaaucgaaguaug

SEQ ID NO: 326191 - RNA, 19 nt, Homo sapiens
  misc_RNA (1)...(19): siRNA sense strand
uaaagucacccugauugaa

SEQ ID NO: 326192 - RNA, 19 nt, Homo sapiens
  misc_RNA (1)...(19): siRNA sense strand
ggacgucaacggauucaca

SEQ ID NO: 326193 - RNA, 19 nt, Homo sapiens
  misc_RNA (1)...(19): siRNA sense strand
ugaaacccaccaccucuuu

SEQ ID NO: 326194 - RNA, 19 nt, Homo sapiens
  misc_RNA (1)...(19): siRNA sense strand
gggcagcugacauuauuga

SEQ ID NO: 326195 - RNA, 19 nt, Homo sapiens
  misc_RNA (1)...(19): siRNA sense strand
agguggcacuggaauauuu

SEQ ID NO: 326196 - RNA, 19 nt, Homo sapiens
  misc_RNA (1)...(19): siRNA sense strand
uuucagacccucaacauug

SEQ ID NO: 326197 - RNA, 19 nt, Homo sapiens
  misc_RNA (1)...(19): siRNA sense strand
gacaaacuccagccaaauc

SEQ ID NO: 326198 - RNA, 19 nt, Homo sapiens
  misc_RNA (1)...(19): siRNA sense strand
gaggagcaauauguguuug

SEQ ID NO: 326199 - RNA, 19 nt, Homo sapiens
  misc_RNA (1)...(19): siRNA sense strand
ggacacagccaaggaggau

SEQ ID NO: 326200 - RNA, 19 nt, Homo sapiens
  misc_RNA (1)...(19): siRNA sense strand
gauggugggucuggugugu

SEQ ID NO: 326201 - RNA, 19 nt, Homo sapiens
  misc_RNA (1)...(19): siRNA sense strand
ccacaggaugguuaucgua

SEQ ID NO: 326202 - RNA, 19 nt, Homo sapiens
  misc_RNA (1)...(19): siRNA sense strand
ugaaaugugugcgauacug

SEQ ID NO: 326203 - RNA, 19 nt, Homo sapiens
  misc_RNA (1)...(19): siRNA sense strand
ggugaaaugugugcgauac

SEQ ID NO: 326204 - RNA, 19 nt, Homo sapiens
  misc_RNA (1)...(19): siRNA sense strand
ggcacuacauugcgacuca

SEQ ID NO: 326205 - RNA, 19 nt, Homo sapiens
  misc_RNA (1)...(19): siRNA sense strand
gucaacggauucacagaug

SEQ ID NO: 326206 - RNA, 19 nt, Homo sapiens
  misc_RNA (1)...(19): siRNA sense strand
caaaggaagcuggccaaga

SEQ ID NO: 326207 - RNA, 19 nt, Homo sapiens
  misc_RNA (1)...(19): siRNA sense strand
cagagaagcagguggacaa

SEQ ID NO: 326208 - RNA, 19 nt, Homo sapiens
  misc_RNA (1)...(19): siRNA sense strand
acaauaagacauacaaugg

SEQ ID NO: 326209 - RNA, 19 nt, Homo sapiens
  misc_RNA (1)...(19): siRNA sense strand
agucgacucucccaacuau

SEQ ID NO: 326210 - RNA, 19 nt, Homo sapiens
  misc_RNA (1)...(19): siRNA sense strand
gcagaaaagcaccucauuu

SEQ ID NO: 326211 - RNA, 19 nt, Homo sapiens
  misc_RNA (1)...(19): siRNA sense strand
gaagaccuccgggugcuau

SEQ ID NO: 326212 - RNA, 19 nt, Homo sapiens
  misc_RNA (1)...(19): siRNA sense strand
acgcagcacugauggauag

SEQ ID NO: 326213 - RNA, 19 nt, Homo sapiens
  misc_RNA (1)...(19): siRNA sense strand
gaauccagcaauuacauca

SEQ ID NO: 326214 - RNA, 19 nt, Homo sapiens
  misc_RNA (1)...(19): siRNA sense strand
ggaagugggcagggugaaa

SEQ ID NO: 326215 - RNA, 19 nt, Homo sapiens
  misc_RNA (1)...(19): siRNA sense strand
gcaucgucauggucacaaa

SEQ ID NO: 326216 - RNA, 19 nt, Homo sapiens
  misc_RNA (1)...(19): siRNA sense strand
gcacucugacuacaucaau

SEQ ID NO: 326217 - RNA, 19 nt, Homo sapiens
  misc_RNA (1)...(19): siRNA sense strand
ugacauuauugagugcuuu

SEQ ID NO: 326218 - RNA, 19 nt, Homo sapiens
  misc_RNA (1)...(19): siRNA sense strand
ugccaacccugaaggagaa

SEQ ID NO: 326219 - RNA, 19 nt, Homo sapiens
  misc_RNA (1)...(19): siRNA sense strand
gaaacccaccaccucuuug

SEQ ID NO: 326220 - RNA, 19 nt, Homo sapiens
  misc_RNA (1)...(19): siRNA sense strand
ggaugguuaucguauaguc

SEQ ID NO: 326221 - RNA, 19 nt, Homo sapiens
  misc_RNA (1)...(19): siRNA sense strand
gaagaggaccugauugaug

SEQ ID NO: 326222 - RNA, 19 nt, Homo sapiens
  misc_RNA (1)...(19): siRNA sense strand
ucagcuccauugagaagaa

SEQ ID NO: 326223 - RNA, 19 nt, Homo sapiens
  misc_RNA (1)...(19): siRNA sense strand
gguggaagaggaccugauu

SEQ ID NO: 326224 - RNA, 19 nt, Homo sapiens
  misc_RNA (1)...(19): siRNA sense strand
uggaagaggaccugauuga

SEQ ID NO: 326225 - RNA, 19 nt, Homo sapiens
  misc_RNA (1)...(19): siRNA sense strand
agaagaccauccuggacaa

SEQ ID NO: 326226 - RNA, 19 nt, Homo sapiens
  misc_RNA (1)...(19): siRNA sense strand
accaucagcuccauugaga

SEQ ID NO: 326227 - RNA, 19 nt, Homo sapiens
  misc_RNA (1)...(19): siRNA sense strand
caggccagcucaaggacaa

SEQ ID NO: 326228 - RNA, 19 nt, Homo sapiens
  misc_RNA (1)...(19): siRNA sense strand
ggaagaggaccugauugau

SEQ ID NO: 326229 - RNA, 19 nt, Homo sapiens
  misc_RNA (1)...(19): siRNA sense strand
ggaccuggccacaguuucu

SEQ ID NO: 326230 - RNA, 19 nt, Homo sapiens
  misc_RNA (1)...(19): siRNA sense strand
cacgggagcugcaguccau

SEQ ID NO: 326231 - RNA, 19 nt, Homo sapiens
  misc_RNA (1)...(19): siRNA sense strand
acauggaccuggccacagu

SEQ ID NO: 326232 - RNA, 19 nt, Homo sapiens
  misc_RNA (1)...(19): siRNA sense strand
caucagcuccauugagaag

SEQ ID NO: 326233 - RNA, 19 nt, Homo sapiens
  misc_RNA (1)...(19): siRNA sense strand
caccagccgccaucaagaa

SEQ ID NO: 326234 - RNA, 19 nt, Homo sapiens
  misc_RNA (1)...(19): siRNA sense strand
cacagcagcaggcgucuug

SEQ ID NO: 326235 - RNA, 19 nt, Homo sapiens
  misc_RNA (1)...(19): siRNA sense strand
agaugcugcugcacucaga

SEQ ID NO: 326236 - RNA, 19 nt, Homo sapiens
  misc_RNA (1)...(19): siRNA sense strand
gaagaggaccugauugaug

SEQ ID NO: 326237 - RNA, 19 nt, Homo sapiens
  misc_RNA (1)...(19): siRNA sense strand
ucagcuccauugagaagaa

SEQ ID NO: 326238 - RNA, 19 nt, Homo sapiens
  misc_RNA (1)...(19): siRNA sense strand
gguggaagaggaccugauu

SEQ ID NO: 326239 - RNA, 19 nt, Homo sapiens
  misc_RNA (1)...(19): siRNA sense strand
uggaagaggaccugauuga

SEQ ID NO: 326240 - RNA, 19 nt, Homo sapiens
  misc_RNA (1)...(19): siRNA sense strand
agaagaccauccuggacaa

SEQ ID NO: 326241 - RNA, 19 nt, Homo sapiens
  misc_RNA (1)...(19): siRNA sense strand
accaucagcuccauugaga

SEQ ID NO: 326242 - RNA, 19 nt, Homo sapiens
  misc_RNA (1)...(19): siRNA sense strand
ggaccaccuuccucuagag

SEQ ID NO: 326243 - RNA, 19 nt, Homo sapiens
  misc_RNA (1)...(19): siRNA sense strand
caggccagcucaaggacaa

SEQ ID NO: 326244 - RNA, 19 nt, Homo sapiens
  misc_RNA (1)...(19): siRNA sense strand
ggaagaggaccugauugau

SEQ ID NO: 326245 - RNA, 19 nt, Homo sapiens
  misc_RNA (1)...(19): siRNA sense strand
ggaccuggccacaguuucu

SEQ ID NO: 326246 - RNA, 19 nt, Homo sapiens
  misc_RNA (1)...(19): siRNA sense strand
cacgggagcugcaguccau

SEQ ID NO: 326247 - RNA, 19 nt, Homo sapiens
  misc_RNA (1)...(19): siRNA sense strand
acauggaccuggccacagu

SEQ ID NO: 326248 - RNA, 19 nt, Homo sapiens
  misc_RNA (1)...(19): siRNA sense strand
caucagcuccauugagaag

SEQ ID NO: 326249 - RNA, 19 nt, Homo sapiens
  misc_RNA (1)...(19): siRNA sense strand
caccagccgccaucaagaa

SEQ ID NO: 326250 - RNA, 19 nt, Homo sapiens
  misc_RNA (1)...(19): siRNA sense strand
cacagcagcaggcgucuug

SEQ ID NO: 326251 - RNA, 19 nt, Homo sapiens
  misc_RNA (1)...(19): siRNA sense strand
agaugcugcugcacucaga

SEQ ID NO: 326252 - RNA, 19 nt, Homo sapiens
  misc_RNA (1)...(19): siRNA sense strand
gcaauucgauuagcugugu

SEQ ID NO: 326253 - RNA, 19 nt, Homo sapiens
  misc_RNA (1)...(19): siRNA sense strand
gcucuucaaugaugcaauu

SEQ ID NO: 326254 - RNA, 19 nt, Homo sapiens
  misc_RNA (1)...(19): siRNA sense strand
ggaaguaugaugcugauga

SEQ ID NO: 326255 - RNA, 19 nt, Homo sapiens
  misc_RNA (1)...(19): siRNA sense strand
gcaucgugguggccaauaa

SEQ ID NO: 326256 - RNA, 19 nt, Homo sapiens
  misc_RNA (1)...(19): siRNA sense strand
gauuagcugugucuuacaa

SEQ ID NO: 326257 - RNA, 19 nt, Homo sapiens
  misc_RNA (1)...(19): siRNA sense strand
auacagagcuucgggaguu

SEQ ID NO: 326258 - RNA, 19 nt, Homo sapiens
  misc_RNA (1)...(19): siRNA sense strand
gggcaaauccaaacucaug

SEQ ID NO: 326259 - RNA, 19 nt, Homo sapiens
  misc_RNA (1)...(19): siRNA sense strand
ggaaagucaccuauaggaa

SEQ ID NO: 326260 - RNA, 19 nt, Homo sapiens
  misc_RNA (1)...(19): siRNA sense strand
ccaaacucauggagagauu

SEQ ID NO: 326261 - RNA, 19 nt, Homo sapiens
  misc_RNA (1)...(19): siRNA sense strand
agaggaaagucaccuauag

SEQ ID NO: 326262 - RNA, 19 nt, Homo sapiens
  misc_RNA (1)...(19): siRNA sense strand
ggaccauccuuguggacuu

SEQ ID NO: 326263 - RNA, 19 nt, Homo sapiens
  misc_RNA (1)...(19): siRNA sense strand
gaccauccuuguggacuuu

SEQ ID NO: 326264 - RNA, 19 nt, Homo sapiens
  misc_RNA (1)...(19): siRNA sense strand
caaugaugcaauucgauua

SEQ ID NO: 326265 - RNA, 19 nt, Homo sapiens
  misc_RNA (1)...(19): siRNA sense strand
gacauaaacgugacccaaa

SEQ ID NO: 326266 - RNA, 19 nt, Homo sapiens
  misc_RNA (1)...(19): siRNA sense strand
gaugacaacgugaagauca

SEQ ID NO: 326267 - RNA, 19 nt, Homo sapiens
  misc_RNA (1)...(19): siRNA sense strand
ggccagagaucccaugcau

SEQ ID NO: 326268 - RNA, 19 nt, Homo sapiens
  misc_RNA (1)...(19): siRNA sense strand
gaaguaugaugcugaugac

SEQ ID NO: 326269 - RNA, 19 nt, Homo sapiens
  misc_RNA (1)...(19): siRNA sense strand
gcacacagccacgguagau

SEQ ID NO: 326270 - RNA, 19 nt, Homo sapiens
  misc_RNA (1)...(19): siRNA sense strand
ggacgugccagaccaggaa

SEQ ID NO: 326271 - RNA, 19 nt, Homo sapiens
  misc_RNA (1)...(19): siRNA sense strand
guaccaauguugugaagcu

SEQ ID NO: 326272 - RNA, 19 nt, Homo sapiens
  misc_RNA (1)...(19): siRNA sense strand
cagaggaaagucaccuaua

SEQ ID NO: 326273 - RNA, 19 nt, Homo sapiens
  misc_RNA (1)...(19): siRNA sense strand
ucaaugaugcaauucgauu

SEQ ID NO: 326274 - RNA, 19 nt, Homo sapiens
  misc_RNA (1)...(19): siRNA sense strand
uucaggagcucgagaacuu

SEQ ID NO: 326275 - RNA, 19 nt, Homo sapiens
  misc_RNA (1)...(19): siRNA sense strand
gaacucccaggacuucaug

SEQ ID NO: 326276 - RNA, 19 nt, Homo sapiens
  misc_RNA (1)...(19): siRNA sense strand
guaugaugcugaugacaac

SEQ ID NO: 326277 - RNA, 19 nt, Homo sapiens
  misc_RNA (1)...(19): siRNA sense strand
aaccugagcaccugguaua

SEQ ID NO: 326278 - RNA, 19 nt, Homo sapiens
  misc_RNA (1)...(19): siRNA sense strand
cguacgcccugacccugua

SEQ ID NO: 326279 - RNA, 19 nt, Homo sapiens
  misc_RNA (1)...(19): siRNA sense strand
gaaccugagcaccugguau

SEQ ID NO: 326280 - RNA, 19 nt, Homo sapiens
  misc_RNA (1)...(19): siRNA sense strand
gugggcaaauccaaacuca

SEQ ID NO: 326281 - RNA, 19 nt, Homo sapiens
  misc_RNA (1)...(19): siRNA sense strand
ucgauuagcugugucuuac

SEQ ID NO: 326282 - RNA, 19 nt, Homo sapiens
  misc_RNA (1)...(19): siRNA sense strand
ccaauguugugaagcucuu

SEQ ID NO: 326283 - RNA, 19 nt, Homo sapiens
  misc_RNA (1)...(19): siRNA sense strand
gaugguaccaauguuguga

SEQ ID NO: 326284 - RNA, 19 nt, Homo sapiens
  misc_RNA (1)...(19): siRNA sense strand
aaaccaaaccgagugaguu

SEQ ID NO: 326285 - RNA, 19 nt, Homo sapiens
  misc_RNA (1)...(19): siRNA sense strand
gcugaugguaccaauguug

SEQ ID NO: 326286 - RNA, 19 nt, Homo sapiens
  misc_RNA (1)...(19): siRNA sense strand
gaccaagggaaguaugaug

SEQ ID NO: 326287 - RNA, 19 nt, Homo sapiens
  misc_RNA (1)...(19): siRNA sense strand
gauguacagaggaaaguca

SEQ ID NO: 326288 - RNA, 19 nt, Homo sapiens
  misc_RNA (1)...(19): siRNA sense strand
ggaaccugagcaccuggua

SEQ ID NO: 326289 - RNA, 19 nt, Homo sapiens
  misc_RNA (1)...(19): siRNA sense strand
acauaaacgugacccaaaa

SEQ ID NO: 326290 - RNA, 19 nt, Homo sapiens
  misc_RNA (1)...(19): siRNA sense strand
gcagugggcaaauccaaac

SEQ ID NO: 326291 - RNA, 19 nt, Homo sapiens
  misc_RNA (1)...(19): siRNA sense strand
cuucaaugaugcaauucga

SEQ ID NO: 326292 - RNA, 19 nt, Homo sapiens
  misc_RNA (1)...(19): siRNA sense strand
caucgugguggccaauaaa

SEQ ID NO: 326293 - RNA, 19 nt, Homo sapiens
  misc_RNA (1)...(19): siRNA sense strand
gaggaaagucaccuauagg

SEQ ID NO: 326294 - RNA, 19 nt, Homo sapiens
  misc_RNA (1)...(19): siRNA sense strand
ucucauggauggcuuucag

SEQ ID NO: 326295 - RNA, 19 nt, Homo sapiens
  misc_RNA (1)...(19): siRNA sense strand
agacagcgcagugggcaaa

SEQ ID NO: 326296 - RNA, 19 nt, Homo sapiens
  misc_RNA (1)...(19): siRNA sense strand
caaacucauggagagauuu

SEQ ID NO: 326297 - RNA, 19 nt, Homo sapiens
  misc_RNA (1)...(19): siRNA sense strand
ggaguucaggccagagauc

SEQ ID NO: 326298 - RNA, 19 nt, Homo sapiens
  misc_RNA (1)...(19): siRNA sense strand
aaccaaaccgagugaguug

SEQ ID NO: 326299 - RNA, 19 nt, Homo sapiens
  misc_RNA (1)...(19): siRNA sense strand
cgucucggcugcugauggu

SEQ ID NO: 326300 - RNA, 19 nt, Homo sapiens
  misc_RNA (1)...(19): siRNA sense strand
uguuugauguacagaggaa

SEQ ID NO: 326301 - RNA, 19 nt, Homo sapiens
  misc_RNA (1)...(19): siRNA sense strand
aggaaagucaccuauagga

SEQ ID NO: 326302 - RNA, 19 nt, Homo sapiens
  misc_RNA (1)...(19): siRNA sense strand
ugaauuagcuuuccaguuc

SEQ ID NO: 326303 - RNA, 19 nt, Homo sapiens
  misc_RNA (1)...(19): siRNA sense strand
gcucaaagcuguucguguu

SEQ ID NO: 326304 - RNA, 19 nt, Homo sapiens
  misc_RNA (1)...(19): siRNA sense strand
ggacaacaguuucucauuc

SEQ ID NO: 326305 - RNA, 19 nt, Homo sapiens
  misc_RNA (1)...(19): siRNA sense strand
guagaaagcuggaagucuu

SEQ ID NO: 326306 - RNA, 19 nt, Homo sapiens
  misc_RNA (1)...(19): siRNA sense strand
cuaaguaucuucgacaaua

SEQ ID NO: 326307 - RNA, 19 nt, Homo sapiens
  misc_RNA (1)...(19): siRNA sense strand
ggauggugcuguagaagua

SEQ ID NO: 326308 - RNA, 19 nt, Homo sapiens
  misc_RNA (1)...(19): siRNA sense strand
caaaggaaguguccaugaa

SEQ ID NO: 326309 - RNA, 19 nt, Homo sapiens
  misc_RNA (1)...(19): siRNA sense strand
gacaauacauggaguaaca

SEQ ID NO: 326310 - RNA, 19 nt, Homo sapiens
  misc_RNA (1)...(19): siRNA sense strand
ggaguaacauucaugacuu

SEQ ID NO: 326311 - RNA, 19 nt, Homo sapiens
  misc_RNA (1)...(19): siRNA sense strand
ggaccaagauguuuguauc

SEQ ID NO: 326312 - RNA, 19 nt, Homo sapiens
  misc_RNA (1)...(19): siRNA sense strand
cuacaacuuugcugauaua

SEQ ID NO: 326313 - RNA, 19 nt, Homo sapiens
  misc_RNA (1)...(19): siRNA sense strand
gaagagcagcgaugaauca

SEQ ID NO: 326314 - RNA, 19 nt, Homo sapiens
  misc_RNA (1)...(19): siRNA sense strand
gaguaacauucaugacuuu

SEQ ID NO: 326315 - RNA, 19 nt, Homo sapiens
  misc_RNA (1)...(19): siRNA sense strand
gacaacaguuucucauuca

SEQ ID NO: 326316 - RNA, 19 nt, Homo sapiens
  misc_RNA (1)...(19): siRNA sense strand
guuauugccuuggaguuua

SEQ ID NO: 326317 - RNA, 19 nt, Homo sapiens
  misc_RNA (1)...(19): siRNA sense strand
uaaacgagauauucaaugg

SEQ ID NO: 326318 - RNA, 19 nt, Homo sapiens
  misc_RNA (1)...(19): siRNA sense strand
caacuuugcugauauacag

SEQ ID NO: 326319 - RNA, 19 nt, Homo sapiens
  misc_RNA (1)...(19): siRNA sense strand
ugacuguacuaacugcaua

SEQ ID NO: 326320 - RNA, 19 nt, Homo sapiens
  misc_RNA (1)...(19): siRNA sense strand
ccagaaaacuaauugauga

SEQ ID NO: 326321 - RNA, 19 nt, Homo sapiens
  misc_RNA (1)...(19): siRNA sense strand
uugaugagaugguugguaa

SEQ ID NO: 326322 - RNA, 19 nt, Homo sapiens
  misc_RNA (1)...(19): siRNA sense strand
gcaaaugccagaaaacuaa

SEQ ID NO: 326323 - RNA, 19 nt, Homo sapiens
  misc_RNA (1)...(19): siRNA sense strand
ugagaacuguaacaucuau

SEQ ID NO: 326324 - RNA, 19 nt, Homo sapiens
  misc_RNA (1)...(19): siRNA sense strand
ugaaacaguaggucgcuua

SEQ ID NO: 326325 - RNA, 19 nt, Homo sapiens
  misc_RNA (1)...(19): siRNA sense strand
gaauuagcuuuccaguuca

SEQ ID NO: 326326 - RNA, 19 nt, Homo sapiens
  misc_RNA (1)...(19): siRNA sense strand
gaaucaugcuuagugguau

SEQ ID NO: 326327 - RNA, 19 nt, Homo sapiens
  misc_RNA (1)...(19): siRNA sense strand
gguagcaggacaacaguuu

SEQ ID NO: 326328 - RNA, 19 nt, Homo sapiens
  misc_RNA (1)...(19): siRNA sense strand
ugaaucaugcuuaguggua

SEQ ID NO: 326329 - RNA, 19 nt, Homo sapiens
  misc_RNA (1)...(19): siRNA sense strand
cacauuagccugccaacaa

SEQ ID NO: 326330 - RNA, 19 nt, Homo sapiens
  misc_RNA (1)...(19): siRNA sense strand
ugugagaacuguaacaucu

SEQ ID NO: 326331 - RNA, 19 nt, Homo sapiens
  misc_RNA (1)...(19): siRNA sense strand
guacuauccugaauuagcu

SEQ ID NO: 326332 - RNA, 19 nt, Homo sapiens
  misc_RNA (1)...(19): siRNA sense strand
augguacuauccugaauua

SEQ ID NO: 326333 - RNA, 19 nt, Homo sapiens
  misc_RNA (1)...(19): siRNA sense strand
ccacagaagccaauagaag

SEQ ID NO: 326334 - RNA, 19 nt, Homo sapiens
  misc_RNA (1)...(19): siRNA sense strand
aaagaugcagggcuaagua

SEQ ID NO: 326335 - RNA, 19 nt, Homo sapiens
  misc_RNA (1)...(19): siRNA sense strand
gagucuuccucaaauauca

SEQ ID NO: 326336 - RNA, 19 nt, Homo sapiens
  misc_RNA (1)...(19): siRNA sense strand
gugauuacacuauugcaaa

SEQ ID NO: 326337 - RNA, 19 nt, Homo sapiens
  misc_RNA (1)...(19): siRNA sense strand
gguauuauuugcuggugau

SEQ ID NO: 326338 - RNA, 19 nt, Homo sapiens
  misc_RNA (1)...(19): siRNA sense strand
gcuggugauuacacuauug

SEQ ID NO: 326339 - RNA, 19 nt, Homo sapiens
  misc_RNA (1)...(19): siRNA sense strand
ucaaugggaccaagauguu

SEQ ID NO: 326340 - RNA, 19 nt, Homo sapiens
  misc_RNA (1)...(19): siRNA sense strand
uccagaagaugcugugguu

SEQ ID NO: 326341 - RNA, 19 nt, Homo sapiens
  misc_RNA (1)...(19): siRNA sense strand
ucaaagcuguucguguuuc

SEQ ID NO: 326342 - RNA, 19 nt, Homo sapiens
  misc_RNA (1)...(19): siRNA sense strand
guaaacgagauauucaaug

SEQ ID NO: 326343 - RNA, 19 nt, Homo sapiens
  misc_RNA (1)...(19): siRNA sense strand
aaaggaaguguccaugaaa

SEQ ID NO: 326344 - RNA, 19 nt, Homo sapiens
  misc_RNA (1)...(19): siRNA sense strand
gaucacucugcuacaguua

SEQ ID NO: 326345 - RNA, 19 nt, Homo sapiens
  misc_RNA (1)...(19): siRNA sense strand
cagaagagcagcgaugaau

SEQ ID NO: 326346 - RNA, 19 nt, Homo sapiens
  misc_RNA (1)...(19): siRNA sense strand
gacggaaggcugacaagga

SEQ ID NO: 326347 - RNA, 19 nt, Homo sapiens
  misc_RNA (1)...(19): siRNA sense strand
cgugaaaggcagcguguuu

SEQ ID NO: 326348 - RNA, 19 nt, Homo sapiens
  misc_RNA (1)...(19): siRNA sense strand
cugcuacaguuaccauuga

SEQ ID NO: 326349 - RNA, 19 nt, Homo sapiens
  misc_RNA (1)...(19): siRNA sense strand
cagaagaugcugugguuca

SEQ ID NO: 326350 - RNA, 19 nt, Homo sapiens
  misc_RNA (1)...(19): siRNA sense strand
caaugguacuauccugaau

SEQ ID NO: 326351 - RNA, 19 nt, Homo sapiens
  misc_RNA (1)...(19): siRNA sense strand
cuacaguuaccauugauga

SEQ ID NO: 326352 - RNA, 19 nt, Homo sapiens
  misc_RNA (1)...(19): siRNA sense strand
caugaaagcugaggaugcu

SEQ ID NO: 326353 - RNA, 19 nt, Homo sapiens
  misc_RNA (1)...(19): siRNA sense strand
ucaagacugugagaacugu

SEQ ID NO: 326354 - RNA, 19 nt, Homo sapiens
  misc_RNA (1)...(19): siRNA sense strand
acaaaggaaguguccauga

SEQ ID NO: 326355 - RNA, 19 nt, Homo sapiens
  misc_RNA (1)...(19): siRNA sense strand
acauuagccugccaacaau

SEQ ID NO: 326356 - RNA, 19 nt, Homo sapiens
  misc_RNA (1)...(19): siRNA sense strand
ugaucacucugcuacaguu

SEQ ID NO: 326357 - RNA, 19 nt, Homo sapiens
  misc_RNA (1)...(19): siRNA sense strand
gacagaagagcagcgauga

SEQ ID NO: 326358 - RNA, 19 nt, Homo sapiens
  misc_RNA (1)...(19): siRNA sense strand
ucuacaacuuugcugauau

SEQ ID NO: 326359 - RNA, 19 nt, Homo sapiens
  misc_RNA (1)...(19): siRNA sense strand
ccaaaagacuacauguuca

SEQ ID NO: 326360 - RNA, 19 nt, Homo sapiens
  misc_RNA (1)...(19): siRNA sense strand
gcaggacaacaguuucuca

SEQ ID NO: 326361 - RNA, 19 nt, Homo sapiens
  misc_RNA (1)...(19): siRNA sense strand
uuauugccuuggaguuuaa

SEQ ID NO: 326362 - RNA, 19 nt, Homo sapiens
  misc_RNA (1)...(19): siRNA sense strand
caauacauggaguaacauu

SEQ ID NO: 326363 - RNA, 19 nt, Homo sapiens
  misc_RNA (1)...(19): siRNA sense strand
aacaguuucucauucaaga

SEQ ID NO: 326364 - RNA, 19 nt, Homo sapiens
  misc_RNA (1)...(19): siRNA sense strand
ucaaugguacuauccugaa

SEQ ID NO: 326365 - RNA, 19 nt, Homo sapiens
  misc_RNA (1)...(19): siRNA sense strand
caaugggaccaagauguuu

SEQ ID NO: 326366 - RNA, 19 nt, Homo sapiens
  misc_RNA (1)...(19): siRNA sense strand
gaggaugcucaaaggguuu

SEQ ID NO: 326367 - RNA, 19 nt, Homo sapiens
  misc_RNA (1)...(19): siRNA sense strand
caugcuuagugguauuauu

SEQ ID NO: 326368 - RNA, 19 nt, Homo sapiens
  misc_RNA (1)...(19): siRNA sense strand
aaucaugcuuagugguauu

SEQ ID NO: 326369 - RNA, 19 nt, Homo sapiens
  misc_RNA (1)...(19): siRNA sense strand
ggcuaaguaucuucgacaa

SEQ ID NO: 326370 - RNA, 19 nt, Homo sapiens
  misc_RNA (1)...(19): siRNA sense strand
auacauggaguaacauuca

SEQ ID NO: 326371 - RNA, 19 nt, Homo sapiens
  misc_RNA (1)...(19): siRNA sense strand
acaaagguccuguuauugc

SEQ ID NO: 326372 - RNA, 19 nt, Homo sapiens
  misc_RNA (1)...(19): siRNA sense strand
gaugagaugguugguaaag

SEQ ID NO: 326373 - RNA, 19 nt, Homo sapiens
  misc_RNA (1)...(19): siRNA sense strand
agaagccaauagaagcauu

SEQ ID NO: 326374 - RNA, 19 nt, Homo sapiens
  misc_RNA (1)...(19): siRNA sense strand
caauuucgugugcgagauu

SEQ ID NO: 326375 - RNA, 19 nt, Homo sapiens
  misc_RNA (1)...(19): siRNA sense strand
aaaagcaccugacuuccuu

SEQ ID NO: 326376 - RNA, 19 nt, Homo sapiens
  misc_RNA (1)...(19): siRNA sense strand
gagaacuguaacaucuaua

SEQ ID NO: 326377 - RNA, 19 nt, Homo sapiens
  misc_RNA (1)...(19): siRNA sense strand
caacaguuucucauucaag

SEQ ID NO: 326378 - RNA, 19 nt, Homo sapiens
  misc_RNA (1)...(19): siRNA sense strand
gggaucagcgcgagaaggu

SEQ ID NO: 326379 - RNA, 19 nt, Homo sapiens
  misc_RNA (1)...(19): siRNA sense strand
gaugcagggcuaaguaucu

SEQ ID NO: 326380 - RNA, 19 nt, Homo sapiens
  misc_RNA (1)...(19): siRNA sense strand
ccauugaugacuguacuaa

SEQ ID NO: 326381 - RNA, 19 nt, Homo sapiens
  misc_RNA (1)...(19): siRNA sense strand
ugacuuccuuccucuucug

SEQ ID NO: 326382 - RNA, 19 nt, Homo sapiens
  misc_RNA (1)...(19): siRNA sense strand
aaggaaguguccaugaaag

SEQ ID NO: 326383 - RNA, 19 nt, Homo sapiens
  misc_RNA (1)...(19): siRNA sense strand
caaagaugcagggcuaagu

SEQ ID NO: 326384 - RNA, 19 nt, Homo sapiens
  misc_RNA (1)...(19): siRNA sense strand
acaacaguuucucauucaa

SEQ ID NO: 326385 - RNA, 19 nt, Homo sapiens
  misc_RNA (1)...(19): siRNA sense strand
ugugcgagauuguagaaag

SEQ ID NO: 326386 - RNA, 19 nt, Homo sapiens
  misc_RNA (1)...(19): siRNA sense strand
gugagaacuguaacaucua

SEQ ID NO: 326387 - RNA, 19 nt, Homo sapiens
  misc_RNA (1)...(19): siRNA sense strand
acuaauugaugagaugguu

SEQ ID NO: 326388 - RNA, 19 nt, Homo sapiens
  misc_RNA (1)...(19): siRNA sense strand
gaaacaguaggucgcuuac

SEQ ID NO: 326389 - RNA, 19 nt, Homo sapiens
  misc_RNA (1)...(19): siRNA sense strand
gguacuauccugaauuagc

SEQ ID NO: 326390 - RNA, 19 nt, Homo sapiens
  misc_RNA (1)...(19): siRNA sense strand
ugauauacagaugggaaua

SEQ ID NO: 326391 - RNA, 19 nt, Homo sapiens
  misc_RNA (1)...(19): siRNA sense strand
ggugauuacacuauugcaa

SEQ ID NO: 326392 - RNA, 19 nt, Homo sapiens
  misc_RNA (1)...(19): siRNA sense strand
aauagaagcauuguuccaa

SEQ ID NO: 326393 - RNA, 19 nt, Homo sapiens
  misc_RNA (1)...(19): siRNA sense strand
gcacauuagccugccaaca

SEQ ID NO: 326394 - RNA, 19 nt, Homo sapiens
  misc_RNA (1)...(19): siRNA sense strand
uucuacaacuuugcugaua

SEQ ID NO: 326395 - RNA, 19 nt, Homo sapiens
  misc_RNA (1)...(19): siRNA sense strand
gaaggaugaaacaguaggu

SEQ ID NO: 326396 - RNA, 19 nt, Homo sapiens
  misc_RNA (1)...(19): siRNA sense strand
guucguguuuccacagaag

SEQ ID NO: 326397 - RNA, 19 nt, Homo sapiens
  misc_RNA (1)...(19): siRNA sense strand
gcuaaguaucuucgacaau

SEQ ID NO: 326398 - RNA, 19 nt, Homo sapiens
  misc_RNA (1)...(19): siRNA sense strand
gacgguagcaggacaacag

SEQ ID NO: 326399 - RNA, 19 nt, Homo sapiens
  misc_RNA (1)...(19): siRNA sense strand
uaauggggauggugcugua

SEQ ID NO: 326400 - RNA, 19 nt, Homo sapiens
  misc_RNA (1)...(19): siRNA sense strand
gucaacuuauuguaaacga

SEQ ID NO: 326401 - RNA, 19 nt, Homo sapiens
  misc_RNA (1)...(19): siRNA sense strand
gggaccaagauguuuguau

SEQ ID NO: 326402 - RNA, 19 nt, Homo sapiens
  misc_RNA (1)...(19): siRNA sense strand
ggaaauggcuguaagaaug

SEQ ID NO: 326403 - RNA, 19 nt, Homo sapiens
  misc_RNA (1)...(19): siRNA sense strand
gauaagagguuacagcaaa

SEQ ID NO: 326404 - RNA, 19 nt, Homo sapiens
  misc_RNA (1)...(19): siRNA sense strand
gaacuugucguuaguauaa

SEQ ID NO: 326405 - RNA, 19 nt, Homo sapiens
  misc_RNA (1)...(19): siRNA sense strand
caaauuacaugaugaccua

SEQ ID NO: 326406 - RNA, 19 nt, Homo sapiens
  misc_RNA (1)...(19): siRNA sense strand
gaagauuccuacuccauuu

SEQ ID NO: 326407 - RNA, 19 nt, Homo sapiens
  misc_RNA (1)...(19): siRNA sense strand
ggaagggaccgcucaguua

SEQ ID NO: 326408 - RNA, 19 nt, Homo sapiens
  misc_RNA (1)...(19): siRNA sense strand
gugcuuacauccuuuauuu

SEQ ID NO: 326409 - RNA, 19 nt, Homo sapiens
  misc_RNA (1)...(19): siRNA sense strand
gugcaacacugagcuauua

SEQ ID NO: 326410 - RNA, 19 nt, Homo sapiens
  misc_RNA (1)...(19): siRNA sense strand
gagucuaccuuaccauaua

SEQ ID NO: 326411 - RNA, 19 nt, Homo sapiens
  misc_RNA (1)...(19): siRNA sense strand
gcauugccauggauaagua

SEQ ID NO: 326412 - RNA, 19 nt, Homo sapiens
  misc_RNA (1)...(19): siRNA sense strand
ugucuucgaucaugcauua

SEQ ID NO: 326413 - RNA, 19 nt, Homo sapiens
  misc_RNA (1)...(19): siRNA sense strand
ucacugacauguucaucua

SEQ ID NO: 326414 - RNA, 19 nt, Homo sapiens
  misc_RNA (1)...(19): siRNA sense strand
acauaaaccucaccauauu

SEQ ID NO: 326415 - RNA, 19 nt, Homo sapiens
  misc_RNA (1)...(19): siRNA sense strand
uacacaaggugguuuauuu

SEQ ID NO: 326416 - RNA, 19 nt, Homo sapiens
  misc_RNA (1)...(19): siRNA sense strand
caucauagacugguauaua

SEQ ID NO: 326417 - RNA, 19 nt, Homo sapiens
  misc_RNA (1)...(19): siRNA sense strand
uauauaagcgccuacauaa

SEQ ID NO: 326418 - RNA, 19 nt, Homo sapiens
  misc_RNA (1)...(19): siRNA sense strand
guauauaagcgccuacaua

SEQ ID NO: 326419 - RNA, 19 nt, Homo sapiens
  misc_RNA (1)...(19): siRNA sense strand
gaaauggcuguaagaauga

SEQ ID NO: 326420 - RNA, 19 nt, Homo sapiens
  misc_RNA (1)...(19): siRNA sense strand
cuacauaaaccucaccaua

SEQ ID NO: 326421 - RNA, 19 nt, Homo sapiens
  misc_RNA (1)...(19): siRNA sense strand
caaggugguuuauuuaagu

SEQ ID NO: 326422 - RNA, 19 nt, Homo sapiens
  misc_RNA (1)...(19): siRNA sense strand
caacacugagcuauuauuu

SEQ ID NO: 326423 - RNA, 19 nt, Homo sapiens
  misc_RNA (1)...(19): siRNA sense strand
ccacauggccagaagauga

SEQ ID NO: 326424 - RNA, 19 nt, Homo sapiens
  misc_RNA (1)...(19): siRNA sense strand
gaagggaccgcucaguuau

SEQ ID NO: 326425 - RNA, 19 nt, Homo sapiens
  misc_RNA (1)...(19): siRNA sense strand
cagcagcccuucaggaaau

SEQ ID NO: 326426 - RNA, 19 nt, Homo sapiens
  misc_RNA (1)...(19): siRNA sense strand
gcuauuagucuucugauug

SEQ ID NO: 326427 - RNA, 19 nt, Homo sapiens
  misc_RNA (1)...(19): siRNA sense strand
acacaaggugguuuauuua

SEQ ID NO: 326428 - RNA, 19 nt, Homo sapiens
  misc_RNA (1)...(19): siRNA sense strand
ucaaguccgucgagagauu

SEQ ID NO: 326429 - RNA, 19 nt, Homo sapiens
  misc_RNA (1)...(19): siRNA sense strand
cacagaggccuucaucaua

SEQ ID NO: 326430 - RNA, 19 nt, Homo sapiens
  misc_RNA (1)...(19): siRNA sense strand
ggacaauuuccauucauga

SEQ ID NO: 326431 - RNA, 19 nt, Homo sapiens
  misc_RNA (1)...(19): siRNA sense strand
acagaggccuucaucauag

SEQ ID NO: 326432 - RNA, 19 nt, Homo sapiens
  misc_RNA (1)...(19): siRNA sense strand
caccauauuuggaagauuc

SEQ ID NO: 326433 - RNA, 19 nt, Homo sapiens
  misc_RNA (1)...(19): siRNA sense strand
gaucuuguacuccguguug

SEQ ID NO: 326434 - RNA, 19 nt, Homo sapiens
  misc_RNA (1)...(19): siRNA sense strand
ggaccgcucaguuauguga

SEQ ID NO: 326435 - RNA, 19 nt, Homo sapiens
  misc_RNA (1)...(19): siRNA sense strand
uaggagaguuuccauaugg

SEQ ID NO: 326436 - RNA, 19 nt, Homo sapiens
  misc_RNA (1)...(19): siRNA sense strand
acacugagcuauuauuuug

SEQ ID NO: 326437 - RNA, 19 nt, Homo sapiens
  misc_RNA (1)...(19): siRNA sense strand
ucaguuaugugaaggagau

SEQ ID NO: 326438 - RNA, 19 nt, Homo sapiens
  misc_RNA (1)...(19): siRNA sense strand
gucgagagauuaaguuuac

SEQ ID NO: 326439 - RNA, 19 nt, Homo sapiens
  misc_RNA (1)...(19): siRNA sense strand
cuguacaucuugguuaaua

SEQ ID NO: 326440 - RNA, 19 nt, Homo sapiens
  misc_RNA (1)...(19): siRNA sense strand
gcucagcucaucauacaga

SEQ ID NO: 326441 - RNA, 19 nt, Homo sapiens
  misc_RNA (1)...(19): siRNA sense strand
gcaacacugagcuauuauu

SEQ ID NO: 326442 - RNA, 19 nt, Homo sapiens
  misc_RNA (1)...(19): siRNA sense strand
cauaaaccucaccauauuu

SEQ ID NO: 326443 - RNA, 19 nt, Homo sapiens
  misc_RNA (1)...(19): siRNA sense strand
ccauauggauuguuugaac

SEQ ID NO: 326444 - RNA, 19 nt, Homo sapiens
  misc_RNA (1)...(19): siRNA sense strand
uauaagcgccuacauaaac

SEQ ID NO: 326445 - RNA, 19 nt, Homo sapiens
  misc_RNA (1)...(19): siRNA sense strand
cuauuagucuucugauugu

SEQ ID NO: 326446 - RNA, 19 nt, Homo sapiens
  misc_RNA (1)...(19): siRNA sense strand
uacauaaaccucaccauau

SEQ ID NO: 326447 - RNA, 19 nt, Homo sapiens
  misc_RNA (1)...(19): siRNA sense strand
uggcucagcucaucauaca

SEQ ID NO: 326448 - RNA, 19 nt, Homo sapiens
  misc_RNA (1)...(19): siRNA sense strand
gggaagggaccgcucaguu

SEQ ID NO: 326449 - RNA, 19 nt, Homo sapiens
  misc_RNA (1)...(19): siRNA sense strand
auugauggcuuucuucaga

SEQ ID NO: 326450 - RNA, 19 nt, Homo sapiens
  misc_RNA (1)...(19): siRNA sense strand
aauggagaguuuacaaaga

SEQ ID NO: 326451 - RNA, 19 nt, Homo sapiens
  misc_RNA (1)...(19): siRNA sense strand
caccauauguucuuugacu

SEQ ID NO: 326452 - RNA, 19 nt, Homo sapiens
  misc_RNA (1)...(19): siRNA sense strand
caucauacagaccaccaua

SEQ ID NO: 326453 - RNA, 19 nt, Homo sapiens
  misc_RNA (1)...(19): siRNA sense strand
cagagucuaccuuaccaua

SEQ ID NO: 326454 - RNA, 19 nt, Homo sapiens
  misc_RNA (1)...(19): siRNA sense strand
uggacaauauuucacuuug

SEQ ID NO: 326455 - RNA, 19 nt, Homo sapiens
  misc_RNA (1)...(19): siRNA sense strand
gcagcagcccuucaggaaa

SEQ ID NO: 326456 - RNA, 19 nt, Homo sapiens
  misc_RNA (1)...(19): siRNA sense strand
gauuggcggcucauucaaa

SEQ ID NO: 326457 - RNA, 19 nt, Homo sapiens
  misc_RNA (1)...(19): siRNA sense strand
cuaggagaguuuccauaug

SEQ ID NO: 326458 - RNA, 19 nt, Homo sapiens
  misc_RNA (1)...(19): siRNA sense strand
cacaaggugguuuauuuaa

SEQ ID NO: 326459 - RNA, 19 nt, Homo sapiens
  misc_RNA (1)...(19): siRNA sense strand
ucacagaggccuucaucau

SEQ ID NO: 326460 - RNA, 19 nt, Homo sapiens
  misc_RNA (1)...(19): siRNA sense strand
uacagcaaauuacaugaug

SEQ ID NO: 326461 - RNA, 19 nt, Homo sapiens
  misc_RNA (1)...(19): siRNA sense strand
auacagaccaccauauguu

SEQ ID NO: 326462 - RNA, 19 nt, Homo sapiens
  misc_RNA (1)...(19): siRNA sense strand
acaaggugguuuauuuaag

SEQ ID NO: 326463 - RNA, 19 nt, Homo sapiens
  misc_RNA (1)...(19): siRNA sense strand
caaguccgucgagagauua

SEQ ID NO: 326464 - RNA, 19 nt, Homo sapiens
  misc_RNA (1)...(19): siRNA sense strand
ucaauggagaguuuacaaa

SEQ ID NO: 326465 - RNA, 19 nt, Homo sapiens
  misc_RNA (1)...(19): siRNA sense strand
gucuguacaucuugguuaa

SEQ ID NO: 326466 - RNA, 19 nt, Homo sapiens
  misc_RNA (1)...(19): siRNA sense strand
cagaggccuucaucauaga

SEQ ID NO: 326467 - RNA, 19 nt, Homo sapiens
  misc_RNA (1)...(19): siRNA sense strand
ccgacaagcuauuagucuu

SEQ ID NO: 326468 - RNA, 19 nt, Homo sapiens
  misc_RNA (1)...(19): siRNA sense strand
ccuaggagaguuuccauau

SEQ ID NO: 326469 - RNA, 19 nt, Homo sapiens
  misc_RNA (1)...(19): siRNA sense strand
aaucaaguccgucgagaga

SEQ ID NO: 326470 - RNA, 19 nt, Homo sapiens
  misc_RNA (1)...(19): siRNA sense strand
gagaguuuacaaagacuga

SEQ ID NO: 326471 - RNA, 19 nt, Homo sapiens
  misc_RNA (1)...(19): siRNA sense strand
caauggagaguuuacaaag

SEQ ID NO: 326472 - RNA, 19 nt, Homo sapiens
  misc_RNA (1)...(19): siRNA sense strand
cgucgagagauuaaguuua

SEQ ID NO: 326473 - RNA, 19 nt, Homo sapiens
  misc_RNA (1)...(19): siRNA sense strand
caagcuauuagucuucuga

SEQ ID NO: 326474 - RNA, 19 nt, Homo sapiens
  misc_RNA (1)...(19): siRNA sense strand
guacaucuugguuaauauc

SEQ ID NO: 326475 - RNA, 19 nt, Homo sapiens
  misc_RNA (1)...(19): siRNA sense strand
acagcaaauuacaugauga

SEQ ID NO: 326476 - RNA, 19 nt, Homo sapiens
  misc_RNA (1)...(19): siRNA sense strand
gagguuacagcaaauuaca

SEQ ID NO: 326477 - RNA, 19 nt, Homo sapiens
  misc_RNA (1)...(19): siRNA sense strand
gacaagcuauuagucuucu

SEQ ID NO: 326478 - RNA, 19 nt, Homo sapiens
  misc_RNA (1)...(19): siRNA sense strand
uauuucacuuugugggaua

SEQ ID NO: 326479 - RNA, 19 nt, Homo sapiens
  misc_RNA (1)...(19): siRNA sense strand
aagagguuacagcaaauua

SEQ ID NO: 326480 - RNA, 19 nt, Homo sapiens
  misc_RNA (1)...(19): siRNA sense strand
gcuuacauccuuuauuucu

SEQ ID NO: 326481 - RNA, 19 nt, Homo sapiens
  misc_RNA (1)...(19): siRNA sense strand
cauuacacaaggugguuua

SEQ ID NO: 326482 - RNA, 19 nt, Homo sapiens
  misc_RNA (1)...(19): siRNA sense strand
gguuacagcaaauuacaug

SEQ ID NO: 326483 - RNA, 19 nt, Homo sapiens
  misc_RNA (1)...(19): siRNA sense strand
uguuugaacuugucguuag

SEQ ID NO: 326484 - RNA, 19 nt, Homo sapiens
  misc_RNA (1)...(19): siRNA sense strand
ccauauguucuuugacuau

SEQ ID NO: 326485 - RNA, 19 nt, Homo sapiens
  misc_RNA (1)...(19): siRNA sense strand
cauccuuuauuucuucugu

SEQ ID NO: 326486 - RNA, 19 nt, Homo sapiens
  misc_RNA (1)...(19): siRNA sense strand
cgacaagcuauuagucuuc

SEQ ID NO: 326487 - RNA, 19 nt, Homo sapiens
  misc_RNA (1)...(19): siRNA sense strand
gagcuauuauuuugucuuc

SEQ ID NO: 326488 - RNA, 19 nt, Homo sapiens
  misc_RNA (1)...(19): siRNA sense strand
agaccaccauauguucuuu

SEQ ID NO: 326489 - RNA, 19 nt, Homo sapiens
  misc_RNA (1)...(19): siRNA sense strand
cuacuccauuugcaaguca

SEQ ID NO: 326490 - RNA, 19 nt, Homo sapiens
  misc_RNA (1)...(19): siRNA sense strand
auaaaccucaccauauuug

SEQ ID NO: 326491 - RNA, 19 nt, Homo sapiens
  misc_RNA (1)...(19): siRNA sense strand
auaagagguuacagcaaau

SEQ ID NO: 326492 - RNA, 19 nt, Homo sapiens
  misc_RNA (1)...(19): siRNA sense strand
ggagaugacagagggaaag

SEQ ID NO: 326493 - RNA, 19 nt, Homo sapiens
  misc_RNA (1)...(19): siRNA sense strand
cuucgaucaugcauuaaug

SEQ ID NO: 326494 - RNA, 19 nt, Homo sapiens
  misc_RNA (1)...(19): siRNA sense strand
gagagauuaaguuuacugu

SEQ ID NO: 326495 - RNA, 19 nt, Homo sapiens
  misc_RNA (1)...(19): siRNA sense strand
ugaacuugucguuaguaua

SEQ ID NO: 326496 - RNA, 19 nt, Homo sapiens
  misc_RNA (1)...(19): siRNA sense strand
cauauggauuguuugaacu

SEQ ID NO: 326497 - RNA, 19 nt, Homo sapiens
  misc_RNA (1)...(19): siRNA sense strand
uaagagguuacagcaaauu

SEQ ID NO: 326498 - RNA, 19 nt, Homo sapiens
  misc_RNA (1)...(19): siRNA sense strand
guuggugcuuacauccuuu

SEQ ID NO: 326499 - RNA, 19 nt, Homo sapiens
  misc_RNA (1)...(19): siRNA sense strand
caggaaauggcuguaagaa

SEQ ID NO: 326500 - RNA, 19 nt, Homo sapiens
  misc_RNA (1)...(19): siRNA sense strand
ucaggaaauggcuguaaga

SEQ ID NO: 326501 - RNA, 19 nt, Homo sapiens
  misc_RNA (1)...(19): siRNA sense strand
gacaucuuccgacaagcua

SEQ ID NO: 326502 - RNA, 19 nt, Homo sapiens
  misc_RNA (1)...(19): siRNA sense strand
caacaacgcucacaccauu

SEQ ID NO: 326503 - RNA, 19 nt, Homo sapiens
  misc_RNA (1)...(19): siRNA sense strand
gaugaugccucaagcaaua

SEQ ID NO: 326504 - RNA, 19 nt, Homo sapiens
  misc_RNA (1)...(19): siRNA sense strand
ggacacgacuccucaguga

SEQ ID NO: 326505 - RNA, 19 nt, Homo sapiens
  misc_RNA (1)...(19): siRNA sense strand
ccaauuacaucaagagguu

SEQ ID NO: 326506 - RNA, 19 nt, Homo sapiens
  misc_RNA (1)...(19): siRNA sense strand
caugugagcugguccauca

SEQ ID NO: 326507 - RNA, 19 nt, Homo sapiens
  misc_RNA (1)...(19): siRNA sense strand
gaaggccaaugggaaguaa

SEQ ID NO: 326508 - RNA, 19 nt, Homo sapiens
  misc_RNA (1)...(19): siRNA sense strand
ccaucucccugcugacuua

SEQ ID NO: 326509 - RNA, 19 nt, Homo sapiens
  misc_RNA (1)...(19): siRNA sense strand
guaauuaacacuguggaua

SEQ ID NO: 326510 - RNA, 19 nt, Homo sapiens
  misc_RNA (1)...(19): siRNA sense strand
gcagaaacccaauuacauc

SEQ ID NO: 326511 - RNA, 19 nt, Homo sapiens
  misc_RNA (1)...(19): siRNA sense strand
gaugugguguggcauguga

SEQ ID NO: 326512 - RNA, 19 nt, Homo sapiens
  misc_RNA (1)...(19): siRNA sense strand
gaaacccaauuacaucaag

SEQ ID NO: 326513 - RNA, 19 nt, Homo sapiens
  misc_RNA (1)...(19): siRNA sense strand
gcaaccugcucaucagaca

SEQ ID NO: 326514 - RNA, 19 nt, Homo sapiens
  misc_RNA (1)...(19): siRNA sense strand
ggucguguguucauuugga

SEQ ID NO: 326515 - RNA, 19 nt, Homo sapiens
  misc_RNA (1)...(19): siRNA sense strand
gaaguaaagaagaucaaca

SEQ ID NO: 326516 - RNA, 19 nt, Homo sapiens
  misc_RNA (1)...(19): siRNA sense strand
ugacagagggccagcagaa

SEQ ID NO: 326517 - RNA, 19 nt, Homo sapiens
  misc_RNA (1)...(19): siRNA sense strand
ggaaggccaaugggaagua

SEQ ID NO: 326518 - RNA, 19 nt, Homo sapiens
  misc_RNA (1)...(19): siRNA sense strand
gggcagaaacccaauuaca

SEQ ID NO: 326519 - RNA, 19 nt, Homo sapiens
  misc_RNA (1)...(19): siRNA sense strand
gauggucguguguucauuu

SEQ ID NO: 326520 - RNA, 19 nt, Homo sapiens
  misc_RNA (1)...(19): siRNA sense strand
gaaggaggagcagaagcua

SEQ ID NO: 326521 - RNA, 19 nt, Homo sapiens
  misc_RNA (1)...(19): siRNA sense strand
ugacuggguucgagaugug

SEQ ID NO: 326522 - RNA, 19 nt, Homo sapiens
  misc_RNA (1)...(19): siRNA sense strand
ccaggauggucguguguuc

SEQ ID NO: 326523 - RNA, 19 nt, Homo sapiens
  misc_RNA (1)...(19): siRNA sense strand
ucaucaagcuguggaagga

SEQ ID NO: 326524 - RNA, 19 nt, Homo sapiens
  misc_RNA (1)...(19): siRNA sense strand
ggcagaaacccaauuacau

SEQ ID NO: 326525 - RNA, 19 nt, Homo sapiens
  misc_RNA (1)...(19): siRNA sense strand
ggaaggaggagcagaagcu

SEQ ID NO: 326526 - RNA, 19 nt, Homo sapiens
  misc_RNA (1)...(19): siRNA sense strand
gugacaaccucaucaagcu

SEQ ID NO: 326527 - RNA, 19 nt, Homo sapiens
  misc_RNA (1)...(19): siRNA sense strand
ggauggucguguguucauu

SEQ ID NO: 326528 - RNA, 19 nt, Homo sapiens
  misc_RNA (1)...(19): siRNA sense strand
gccaaugggaaguaaagaa

SEQ ID NO: 326529 - RNA, 19 nt, Homo sapiens
  misc_RNA (1)...(19): siRNA sense strand
aaacccaauuacaucaaga

SEQ ID NO: 326530 - RNA, 19 nt, Homo sapiens
  misc_RNA (1)...(19): siRNA sense strand
cagaaacccaauuacauca

SEQ ID NO: 326531 - RNA, 19 nt, Homo sapiens
  misc_RNA (1)...(19): siRNA sense strand
gaccggaaagucauuaucu

SEQ ID NO: 326532 - RNA, 19 nt, Homo sapiens
  misc_RNA (1)...(19): siRNA sense strand
acgcccagauggacuacua

SEQ ID NO: 326533 - RNA, 19 nt, Homo sapiens
  misc_RNA (1)...(19): siRNA sense strand
gugcuccuaugaccggaaa

SEQ ID NO: 326534 - RNA, 19 nt, Homo sapiens
  misc_RNA (1)...(19): siRNA sense strand
aaugggaaguaaagaagau

SEQ ID NO: 326535 - RNA, 19 nt, Homo sapiens
  misc_RNA (1)...(19): siRNA sense strand
ccaaugggaaguaaagaag

SEQ ID NO: 326536 - RNA, 19 nt, Homo sapiens
  misc_RNA (1)...(19): siRNA sense strand
ggagaagagccacgagcau

SEQ ID NO: 326537 - RNA, 19 nt, Homo sapiens
  misc_RNA (1)...(19): siRNA sense strand
caucaagagguuugcauca

SEQ ID NO: 326538 - RNA, 19 nt, Homo sapiens
  misc_RNA (1)...(19): siRNA sense strand
uaauuaacacuguggauac

SEQ ID NO: 326539 - RNA, 19 nt, Homo sapiens
  misc_RNA (1)...(19): siRNA sense strand
gugaugaugccucaagcaa

SEQ ID NO: 326540 - RNA, 19 nt, Homo sapiens
  misc_RNA (1)...(19): siRNA sense strand
caaugggaaguaaagaaga

SEQ ID NO: 326541 - RNA, 19 nt, Homo sapiens
  misc_RNA (1)...(19): siRNA sense strand
ggucaugaggguccugugu

SEQ ID NO: 326542 - RNA, 19 nt, Homo sapiens
  misc_RNA (1)...(19): siRNA sense strand
uggaaggagucaguugaug

SEQ ID NO: 326543 - RNA, 19 nt, Homo sapiens
  misc_RNA (1)...(19): siRNA sense strand
gaagcuagaagcgcacagu

SEQ ID NO: 326544 - RNA, 19 nt, Homo sapiens
  misc_RNA (1)...(19): siRNA sense strand
guaccuggaagccucauag

SEQ ID NO: 326545 - RNA, 19 nt, Homo sapiens
  misc_RNA (1)...(19): siRNA sense strand
uggcaucgugcuccuauga

SEQ ID NO: 326546 - RNA, 19 nt, Homo sapiens
  misc_RNA (1)...(19): siRNA sense strand
aauggagggcagauccuua

SEQ ID NO: 326547 - RNA, 19 nt, Homo sapiens
  misc_RNA (1)...(19): siRNA sense strand
cguaucagcaucagugaca

SEQ ID NO: 326548 - RNA, 19 nt, Homo sapiens
  misc_RNA (1)...(19): siRNA sense strand
ucagacagguccgucaaaa

SEQ ID NO: 326549 - RNA, 19 nt, Homo sapiens
  misc_RNA (1)...(19): siRNA sense strand
gggcagugggugugcauca

SEQ ID NO: 326550 - RNA, 19 nt, Homo sapiens
  misc_RNA (1)...(19): siRNA sense strand
caacauccuggcugucucu

SEQ ID NO: 326551 - RNA, 19 nt, Homo sapiens
  misc_RNA (1)...(19): siRNA sense strand
ugcacaaguucaacgaugu

SEQ ID NO: 326552 - RNA, 19 nt, Homo sapiens
  misc_RNA (1)...(19): siRNA sense strand
gugacuggguucgagaugu

SEQ ID NO: 326553 - RNA, 19 nt, Homo sapiens
  misc_RNA (1)...(19): siRNA sense strand
caucagacagguccgucaa

SEQ ID NO: 326554 - RNA, 19 nt, Homo sapiens
  misc_RNA (1)...(19): siRNA sense strand
gggaaguaaagaagaucaa

SEQ ID NO: 326555 - RNA, 19 nt, Homo sapiens
  misc_RNA (1)...(19): siRNA sense strand
gcagugggugugcaucagu

SEQ ID NO: 326556 - RNA, 19 nt, Homo sapiens
  misc_RNA (1)...(19): siRNA sense strand
gcugugacaaccucaucaa

SEQ ID NO: 326557 - RNA, 19 nt, Homo sapiens
  misc_RNA (1)...(19): siRNA sense strand
caacaacgcucacaccauu

SEQ ID NO: 326558 - RNA, 19 nt, Homo sapiens
  misc_RNA (1)...(19): siRNA sense strand
gaugaugccucaagcaaua

SEQ ID NO: 326559 - RNA, 19 nt, Homo sapiens
  misc_RNA (1)...(19): siRNA sense strand
ggacacgacuccucaguga

SEQ ID NO: 326560 - RNA, 19 nt, Homo sapiens
  misc_RNA (1)...(19): siRNA sense strand
ccaauuacaucaagagguu

SEQ ID NO: 326561 - RNA, 19 nt, Homo sapiens
  misc_RNA (1)...(19): siRNA sense strand
caugugagcugguccauca

SEQ ID NO: 326562 - RNA, 19 nt, Homo sapiens
  misc_RNA (1)...(19): siRNA sense strand
gaaggccaaugggaaguaa

SEQ ID NO: 326563 - RNA, 19 nt, Homo sapiens
  misc_RNA (1)...(19): siRNA sense strand
ccaucucccugcugacuua

SEQ ID NO: 326564 - RNA, 19 nt, Homo sapiens
  misc_RNA (1)...(19): siRNA sense strand
guaauuaacacuguggaua

SEQ ID NO: 326565 - RNA, 19 nt, Homo sapiens
  misc_RNA (1)...(19): siRNA sense strand
gcagaaacccaauuacauc

SEQ ID NO: 326566 - RNA, 19 nt, Homo sapiens
  misc_RNA (1)...(19): siRNA sense strand
gaugugguguggcauguga

SEQ ID NO: 326567 - RNA, 19 nt, Homo sapiens
  misc_RNA (1)...(19): siRNA sense strand
gaaacccaauuacaucaag

SEQ ID NO: 326568 - RNA, 19 nt, Homo sapiens
  misc_RNA (1)...(19): siRNA sense strand
gcaaccugcucaucagaca

SEQ ID NO: 326569 - RNA, 19 nt, Homo sapiens
  misc_RNA (1)...(19): siRNA sense strand
ggucguguguucauuugga

SEQ ID NO: 326570 - RNA, 19 nt, Homo sapiens
  misc_RNA (1)...(19): siRNA sense strand
gaaguaaagaagaucaaca

SEQ ID NO: 326571 - RNA, 19 nt, Homo sapiens
  misc_RNA (1)...(19): siRNA sense strand
ugacagagggccagcagaa

SEQ ID NO: 326572 - RNA, 19 nt, Homo sapiens
  misc_RNA (1)...(19): siRNA sense strand
ggaaggccaaugggaagua

SEQ ID NO: 326573 - RNA, 19 nt, Homo sapiens
  misc_RNA (1)...(19): siRNA sense strand
gggcagaaacccaauuaca

SEQ ID NO: 326574 - RNA, 19 nt, Homo sapiens
  misc_RNA (1)...(19): siRNA sense strand
gauggucguguguucauuu

SEQ ID NO: 326575 - RNA, 19 nt, Homo sapiens
  misc_RNA (1)...(19): siRNA sense strand
gaaggaggagcagaagcua

SEQ ID NO: 326576 - RNA, 19 nt, Homo sapiens
  misc_RNA (1)...(19): siRNA sense strand
ugacuggguucgagaugug

SEQ ID NO: 326577 - RNA, 19 nt, Homo sapiens
  misc_RNA (1)...(19): siRNA sense strand
ccaggauggucguguguuc

SEQ ID NO: 326578 - RNA, 19 nt, Homo sapiens
  misc_RNA (1)...(19): siRNA sense strand
ucaucaagcuguggaagga

SEQ ID NO: 326579 - RNA, 19 nt, Homo sapiens
  misc_RNA (1)...(19): siRNA sense strand
ggcagaaacccaauuacau

SEQ ID NO: 326580 - RNA, 19 nt, Homo sapiens
  misc_RNA (1)...(19): siRNA sense strand
ggaaggaggagcagaagcu

SEQ ID NO: 326581 - RNA, 19 nt, Homo sapiens
  misc_RNA (1)...(19): siRNA sense strand
gugacaaccucaucaagcu

SEQ ID NO: 326582 - RNA, 19 nt, Homo sapiens
  misc_RNA (1)...(19): siRNA sense strand
ggauggucguguguucauu

SEQ ID NO: 326583 - RNA, 19 nt, Homo sapiens
  misc_RNA (1)...(19): siRNA sense strand
gccaaugggaaguaaagaa

SEQ ID NO: 326584 - RNA, 19 nt, Homo sapiens
  misc_RNA (1)...(19): siRNA sense strand
aaacccaauuacaucaaga

SEQ ID NO: 326585 - RNA, 19 nt, Homo sapiens
  misc_RNA (1)...(19): siRNA sense strand
cagaaacccaauuacauca

SEQ ID NO: 326586 - RNA, 19 nt, Homo sapiens
  misc_RNA (1)...(19): siRNA sense strand
gaccggaaagucauuaucu

SEQ ID NO: 326587 - RNA, 19 nt, Homo sapiens
  misc_RNA (1)...(19): siRNA sense strand
acgcccagauggacuacua

SEQ ID NO: 326588 - RNA, 19 nt, Homo sapiens
  misc_RNA (1)...(19): siRNA sense strand
gugcuccuaugaccggaaa

SEQ ID NO: 326589 - RNA, 19 nt, Homo sapiens
  misc_RNA (1)...(19): siRNA sense strand
aaugggaaguaaagaagau

SEQ ID NO: 326590 - RNA, 19 nt, Homo sapiens
  misc_RNA (1)...(19): siRNA sense strand
ccaaugggaaguaaagaag

SEQ ID NO: 326591 - RNA, 19 nt, Homo sapiens
  misc_RNA (1)...(19): siRNA sense strand
ggagaagagccacgagcau

SEQ ID NO: 326592 - RNA, 19 nt, Homo sapiens
  misc_RNA (1)...(19): siRNA sense strand
caucaagagguuugcauca

SEQ ID NO: 326593 - RNA, 19 nt, Homo sapiens
  misc_RNA (1)...(19): siRNA sense strand
uaauuaacacuguggauac

SEQ ID NO: 326594 - RNA, 19 nt, Homo sapiens
  misc_RNA (1)...(19): siRNA sense strand
gugaugaugccucaagcaa

SEQ ID NO: 326595 - RNA, 19 nt, Homo sapiens
  misc_RNA (1)...(19): siRNA sense strand
caaugggaaguaaagaaga

SEQ ID NO: 326596 - RNA, 19 nt, Homo sapiens
  misc_RNA (1)...(19): siRNA sense strand
ggucaugaggguccugugu

SEQ ID NO: 326597 - RNA, 19 nt, Homo sapiens
  misc_RNA (1)...(19): siRNA sense strand
uggaaggagucaguugaug

SEQ ID NO: 326598 - RNA, 19 nt, Homo sapiens
  misc_RNA (1)...(19): siRNA sense strand
gaagcuagaagcgcacagu

SEQ ID NO: 326599 - RNA, 19 nt, Homo sapiens
  misc_RNA (1)...(19): siRNA sense strand
guaccuggaagccucauag

SEQ ID NO: 326600 - RNA, 19 nt, Homo sapiens
  misc_RNA (1)...(19): siRNA sense strand
uggcaucgugcuccuauga

SEQ ID NO: 326601 - RNA, 19 nt, Homo sapiens
  misc_RNA (1)...(19): siRNA sense strand
aauggagggcagauccuua

SEQ ID NO: 326602 - RNA, 19 nt, Homo sapiens
  misc_RNA (1)...(19): siRNA sense strand
cguaucagcaucagugaca

SEQ ID NO: 326603 - RNA, 19 nt, Homo sapiens
  misc_RNA (1)...(19): siRNA sense strand
ucagacagguccgucaaaa

SEQ ID NO: 326604 - RNA, 19 nt, Homo sapiens
  misc_RNA (1)...(19): siRNA sense strand
gggcagugggugugcauca

SEQ ID NO: 326605 - RNA, 19 nt, Homo sapiens
  misc_RNA (1)...(19): siRNA sense strand
caacauccuggcugucucu

SEQ ID NO: 326606 - RNA, 19 nt, Homo sapiens
  misc_RNA (1)...(19): siRNA sense strand
ugcacaaguucaacgaugu

SEQ ID NO: 326607 - RNA, 19 nt, Homo sapiens
  misc_RNA (1)...(19): siRNA sense strand
gugacuggguucgagaugu

SEQ ID NO: 326608 - RNA, 19 nt, Homo sapiens
  misc_RNA (1)...(19): siRNA sense strand
caucagacagguccgucaa

SEQ ID NO: 326609 - RNA, 19 nt, Homo sapiens
  misc_RNA (1)...(19): siRNA sense strand
gggaaguaaagaagaucaa

SEQ ID NO: 326610 - RNA, 19 nt, Homo sapiens
  misc_RNA (1)...(19): siRNA sense strand
gcagugggugugcaucagu

SEQ ID NO: 326611 - RNA, 19 nt, Homo sapiens
  misc_RNA (1)...(19): siRNA sense strand
gcugugacaaccucaucaa

SEQ ID NO: 326612 - RNA, 19 nt, Homo sapiens
  misc_RNA (1)...(19): siRNA sense strand
ccaaugaggugcuggagaa

SEQ ID NO: 326613 - RNA, 19 nt, Homo sapiens
  misc_RNA (1)...(19): siRNA sense strand
gagaagcuguuccagauag

SEQ ID NO: 326614 - RNA, 19 nt, Homo sapiens
  misc_RNA (1)...(19): siRNA sense strand
gugaugaggugaacgugua

SEQ ID NO: 326615 - RNA, 19 nt, Homo sapiens
  misc_RNA (1)...(19): siRNA sense strand
ccagcaagaucgaagucua

SEQ ID NO: 326616 - RNA, 19 nt, Homo sapiens
  misc_RNA (1)...(19): siRNA sense strand
ggagaagcuguuccagaua

SEQ ID NO: 326617 - RNA, 19 nt, Homo sapiens
  misc_RNA (1)...(19): siRNA sense strand
gauagugccuggcgagaac

SEQ ID NO: 326618 - RNA, 19 nt, Homo sapiens
  misc_RNA (1)...(19): siRNA sense strand
ccacuuugacgguaacauu

SEQ ID NO: 326619 - RNA, 19 nt, Homo sapiens
  misc_RNA (1)...(19): siRNA sense strand
caacccagccuucuucaag

SEQ ID NO: 326620 - RNA, 19 nt, Homo sapiens
  misc_RNA (1)...(19): siRNA sense strand
ccagccuucuucaaguaua

SEQ ID NO: 326621 - RNA, 19 nt, Homo sapiens
  misc_RNA (1)...(19): siRNA sense strand
gcaacuggcaccacuacug

SEQ ID NO: 326622 - RNA, 19 nt, Homo sapiens
  misc_RNA (1)...(19): siRNA sense strand
ccacccaccauuucaugua

SEQ ID NO: 326623 - RNA, 19 nt, Homo sapiens
  misc_RNA (1)...(19): siRNA sense strand
aagaaaagguccagaucua

SEQ ID NO: 326624 - RNA, 19 nt, Homo sapiens
  misc_RNA (1)...(19): siRNA sense strand
ggacuucgaggcccacauc

SEQ ID NO: 326625 - RNA, 19 nt, Homo sapiens
  misc_RNA (1)...(19): siRNA sense strand
cgagagaacauggaucuuc

SEQ ID NO: 326626 - RNA, 19 nt, Homo sapiens
  misc_RNA (1)...(19): siRNA sense strand
gaaccacccaccauuucau

SEQ ID NO: 326627 - RNA, 19 nt, Homo sapiens
  misc_RNA (1)...(19): siRNA sense strand
cuacaacccagccuucuuc

SEQ ID NO: 326628 - RNA, 19 nt, Homo sapiens
  misc_RNA (1)...(19): siRNA sense strand
gccgaaccacccaccauuu

SEQ ID NO: 326629 - RNA, 19 nt, Homo sapiens
  misc_RNA (1)...(19): siRNA sense strand
acccagccuucuucaagua

SEQ ID NO: 326630 - RNA, 19 nt, Homo sapiens
  misc_RNA (1)...(19): siRNA sense strand
cagccuucuucaaguauau

SEQ ID NO: 326631 - RNA, 19 nt, Homo sapiens
  misc_RNA (1)...(19): siRNA sense strand
ucaagucacacaacaccaa

SEQ ID NO: 326632 - RNA, 19 nt, Homo sapiens
  misc_RNA (1)...(19): siRNA sense strand
caucaugucccugcucuuc

SEQ ID NO: 326633 - RNA, 19 nt, Homo sapiens
  misc_RNA (1)...(19): siRNA sense strand
ggacgggcacaacuucauc

SEQ ID NO: 326634 - RNA, 19 nt, Homo sapiens
  misc_RNA (1)...(19): siRNA sense strand
gaaaagguccagaucuaca

SEQ ID NO: 326635 - RNA, 19 nt, Homo sapiens
  misc_RNA (1)...(19): siRNA sense strand
gguuugacagccacuuuga

SEQ ID NO: 326636 - RNA, 19 nt, Homo sapiens
  misc_RNA (1)...(19): siRNA sense strand
acagccacuuugacgguaa

SEQ ID NO: 326637 - RNA, 19 nt, Homo sapiens
  misc_RNA (1)...(19): siRNA sense strand
cugcugguguucaucaugu

SEQ ID NO: 326638 - RNA, 19 nt, Homo sapiens
  misc_RNA (1)...(19): siRNA sense strand
gauguuggcagccgaacca

SEQ ID NO: 326639 - RNA, 19 nt, Homo sapiens
  misc_RNA (1)...(19): siRNA sense strand
caguucaagucacacaaca

SEQ ID NO: 326640 - RNA, 19 nt, Homo sapiens
  misc_RNA (1)...(19): siRNA sense strand
cgaaccacccaccauuuca

SEQ ID NO: 326641 - RNA, 19 nt, Homo sapiens
  misc_RNA (1)...(19): siRNA sense strand
agucacacaacaccaauga

SEQ ID NO: 326642 - RNA, 19 nt, Homo sapiens
  misc_RNA (1)...(19): siRNA sense strand
cauuucauguacccugaga

SEQ ID NO: 326643 - RNA, 19 nt, Homo sapiens
  misc_RNA (1)...(19): siRNA sense strand
cacuuugacgguaacauuu

SEQ ID NO: 326644 - RNA, 19 nt, Homo sapiens
  misc_RNA (1)...(19): siRNA sense strand
ccgaaccacccaccauuuc

SEQ ID NO: 326645 - RNA, 19 nt, Homo sapiens
  misc_RNA (1)...(19): siRNA sense strand
caagucacacaacaccaau

SEQ ID NO: 326646 - RNA, 19 nt, Homo sapiens
  misc_RNA (1)...(19): siRNA sense strand
ugucccugcucuucaccua

SEQ ID NO: 326647 - RNA, 19 nt, Homo sapiens
  misc_RNA (1)...(19): siRNA sense strand
cgccaaccgugggcuuuga

SEQ ID NO: 326648 - RNA, 19 nt, Homo sapiens
  misc_RNA (1)...(19): siRNA sense strand
gaaauugagucaugaaacu

SEQ ID NO: 326649 - RNA, 19 nt, Homo sapiens
  misc_RNA (1)...(19): siRNA sense strand
ucaugaaacuguaaccauu

SEQ ID NO: 326650 - RNA, 19 nt, Homo sapiens
  misc_RNA (1)...(19): siRNA sense strand
gaauacacaucuuaaagcu

SEQ ID NO: 326651 - RNA, 19 nt, Homo sapiens
  misc_RNA (1)...(19): siRNA sense strand
gcaugaauacacaucuuaa

SEQ ID NO: 326652 - RNA, 19 nt, Homo sapiens
  misc_RNA (1)...(19): siRNA sense strand
gcaggaagaggcagaggaa

SEQ ID NO: 326653 - RNA, 19 nt, Homo sapiens
  misc_RNA (1)...(19): siRNA sense strand
ggaagcuguugcaggaaga

SEQ ID NO: 326654 - RNA, 19 nt, Homo sapiens
  misc_RNA (1)...(19): siRNA sense strand
gaaacuguaaccauugaau

SEQ ID NO: 326655 - RNA, 19 nt, Homo sapiens
  misc_RNA (1)...(19): siRNA sense strand
guggaugucagcaugaaua

SEQ ID NO: 326656 - RNA, 19 nt, Homo sapiens
  misc_RNA (1)...(19): siRNA sense strand
cagcaugaauacacaucuu

SEQ ID NO: 326657 - RNA, 19 nt, Homo sapiens
  misc_RNA (1)...(19): siRNA sense strand
gaaccuguacagcuggaaa

SEQ ID NO: 326658 - RNA, 19 nt, Homo sapiens
  misc_RNA (1)...(19): siRNA sense strand
gaacggaacacagguccau

SEQ ID NO: 326659 - RNA, 19 nt, Homo sapiens
  misc_RNA (1)...(19): siRNA sense strand
gacaguuuaccucuggaua

SEQ ID NO: 326660 - RNA, 19 nt, Homo sapiens
  misc_RNA (1)...(19): siRNA sense strand
caugaaacuguaaccauug

SEQ ID NO: 326661 - RNA, 19 nt, Homo sapiens
  misc_RNA (1)...(19): siRNA sense strand
ggaagaggcagaggaagag

SEQ ID NO: 326662 - RNA, 19 nt, Homo sapiens
  misc_RNA (1)...(19): siRNA sense strand
ggaacacagguccauggaa

SEQ ID NO: 326663 - RNA, 19 nt, Homo sapiens
  misc_RNA (1)...(19): siRNA sense strand
auacacuacuuguggaugu

SEQ ID NO: 326664 - RNA, 19 nt, Homo sapiens
  misc_RNA (1)...(19): siRNA sense strand
gcugaguauucgaggaaau

SEQ ID NO: 326665 - RNA, 19 nt, Homo sapiens
  misc_RNA (1)...(19): siRNA sense strand
aaaugacccugaagaacag

SEQ ID NO: 326666 - RNA, 19 nt, Homo sapiens
  misc_RNA (1)...(19): siRNA sense strand
uauucuaccagacaguuua

SEQ ID NO: 326667 - RNA, 19 nt, Homo sapiens
  misc_RNA (1)...(19): siRNA sense strand
caguuuaccucuggauaca

SEQ ID NO: 326668 - RNA, 19 nt, Homo sapiens
  misc_RNA (1)...(19): siRNA sense strand
acagguccauggaacaauc

SEQ ID NO: 326669 - RNA, 19 nt, Homo sapiens
  misc_RNA (1)...(19): siRNA sense strand
agaggaagaggaagaggaa

SEQ ID NO: 326670 - RNA, 19 nt, Homo sapiens
  misc_RNA (1)...(19): siRNA sense strand
augaaacuguaaccauuga

SEQ ID NO: 326671 - RNA, 19 nt, Homo sapiens
  misc_RNA (1)...(19): siRNA sense strand
uggaaacgcugaguauucg

SEQ ID NO: 326672 - RNA, 19 nt, Homo sapiens
  misc_RNA (1)...(19): siRNA sense strand
uuguggauguugaaccuaa

SEQ ID NO: 326673 - RNA, 19 nt, Homo sapiens
  misc_RNA (1)...(19): siRNA sense strand
cuguaaccauugaauugaa

SEQ ID NO: 326674 - RNA, 19 nt, Homo sapiens
  misc_RNA (1)...(19): siRNA sense strand
ggaagaggaagaggaagag

SEQ ID NO: 326675 - RNA, 19 nt, Homo sapiens
  misc_RNA (1)...(19): siRNA sense strand
gaugucagcaugaauacac

SEQ ID NO: 326676 - RNA, 19 nt, Homo sapiens
  misc_RNA (1)...(19): siRNA sense strand
cuggaaacgcugaguauuc

SEQ ID NO: 326677 - RNA, 19 nt, Homo sapiens
  misc_RNA (1)...(19): siRNA sense strand
gcuggaaacgcugaguauu

SEQ ID NO: 326678 - RNA, 19 nt, Homo sapiens
  misc_RNA (1)...(19): siRNA sense strand
ugaauacacaucuuaaagc

SEQ ID NO: 326679 - RNA, 19 nt, Homo sapiens
  misc_RNA (1)...(19): siRNA sense strand
gaaaagggaagcuguugca

SEQ ID NO: 326680 - RNA, 19 nt, Homo sapiens
  misc_RNA (1)...(19): siRNA sense strand
ucuuaaagcugugaaaaug

SEQ ID NO: 326681 - RNA, 19 nt, Homo sapiens
  misc_RNA (1)...(19): siRNA sense strand
agcaugaauacacaucuua

SEQ ID NO: 326682 - RNA, 19 nt, Homo sapiens
  misc_RNA (1)...(19): siRNA sense strand
aggaagaggcagaggaaga

SEQ ID NO: 326683 - RNA, 19 nt, Homo sapiens
  misc_RNA (1)...(19): siRNA sense strand
ccuaaggugaaaucuaaga

SEQ ID NO: 326684 - RNA, 19 nt, Homo sapiens
  misc_RNA (1)...(19): siRNA sense strand
aaaaugacccugaagaaca

SEQ ID NO: 326685 - RNA, 19 nt, Homo sapiens
  misc_RNA (1)...(19): siRNA sense strand
gaaaaugacccugaagaac

SEQ ID NO: 326686 - RNA, 19 nt, Homo sapiens
  misc_RNA (1)...(19): siRNA sense strand
guguggaugucagcaugaa

SEQ ID NO: 326687 - RNA, 19 nt, Homo sapiens
  misc_RNA (1)...(19): siRNA sense strand
cuaaggugaaaucuaagaa

SEQ ID NO: 326688 - RNA, 19 nt, Homo sapiens
  misc_RNA (1)...(19): siRNA sense strand
gaacugcugcccaccuaua

SEQ ID NO: 326689 - RNA, 19 nt, Homo sapiens
  misc_RNA (1)...(19): siRNA sense strand
gggaacugcugcccaccua

SEQ ID NO: 326690 - RNA, 19 nt, Homo sapiens
  misc_RNA (1)...(19): siRNA sense strand
caaccgagcagaggcuuug

SEQ ID NO: 326691 - RNA, 19 nt, Homo sapiens
  misc_RNA (1)...(19): siRNA sense strand
gcugcugccuccucaucuu

SEQ ID NO: 326692 - RNA, 19 nt, Homo sapiens
  misc_RNA (1)...(19): siRNA sense strand
gcagaggcuuuggguacag

SEQ ID NO: 326693 - RNA, 19 nt, Homo sapiens
  misc_RNA (1)...(19): siRNA sense strand
cagaggcuuuggguacaga

SEQ ID NO: 326694 - RNA, 19 nt, Homo sapiens
  misc_RNA (1)...(19): siRNA sense strand
gcucucccacuccauacaa

SEQ ID NO: 326695 - RNA, 19 nt, Homo sapiens
  misc_RNA (1)...(19): siRNA sense strand
gaacaaacuuagugaagaa

SEQ ID NO: 326696 - RNA, 19 nt, Homo sapiens
  misc_RNA (1)...(19): siRNA sense strand
cagaaugccuuaguuauua

SEQ ID NO: 326697 - RNA, 19 nt, Homo sapiens
  misc_RNA (1)...(19): siRNA sense strand
ggacagaaauggucaugug

SEQ ID NO: 326698 - RNA, 19 nt, Homo sapiens
  misc_RNA (1)...(19): siRNA sense strand
cuacaacaguuuauccuua

SEQ ID NO: 326699 - RNA, 19 nt, Homo sapiens
  misc_RNA (1)...(19): siRNA sense strand
ggaacaaacuuagugaaga

SEQ ID NO: 326700 - RNA, 19 nt, Homo sapiens
  misc_RNA (1)...(19): siRNA sense strand
gaaacccuauuacgaugaa

SEQ ID NO: 326701 - RNA, 19 nt, Homo sapiens
  misc_RNA (1)...(19): siRNA sense strand
ugacaccagugccuacuaa

SEQ ID NO: 326702 - RNA, 19 nt, Homo sapiens
  misc_RNA (1)...(19): siRNA sense strand
cgaaaacgauucccucuaa

SEQ ID NO: 326703 - RNA, 19 nt, Homo sapiens
  misc_RNA (1)...(19): siRNA sense strand
cagaauaucaucucuacaa

SEQ ID NO: 326704 - RNA, 19 nt, Homo sapiens
  misc_RNA (1)...(19): siRNA sense strand
ccagaaugccuuaguuauu

SEQ ID NO: 326705 - RNA, 19 nt, Homo sapiens
  misc_RNA (1)...(19): siRNA sense strand
cggaggaggucaugagaga

SEQ ID NO: 326706 - RNA, 19 nt, Homo sapiens
  misc_RNA (1)...(19): siRNA sense strand
aaagaaacccuauuacgau

SEQ ID NO: 326707 - RNA, 19 nt, Homo sapiens
  misc_RNA (1)...(19): siRNA sense strand
caaacuuagugaagaacaa

SEQ ID NO: 326708 - RNA, 19 nt, Homo sapiens
  misc_RNA (1)...(19): siRNA sense strand
caaauccuacaacaguuua

SEQ ID NO: 326709 - RNA, 19 nt, Homo sapiens
  misc_RNA (1)...(19): siRNA sense strand
cuacaaauccuacaacagu

SEQ ID NO: 326710 - RNA, 19 nt, Homo sapiens
  misc_RNA (1)...(19): siRNA sense strand
ccgagaaggugugaucaaa

SEQ ID NO: 326711 - RNA, 19 nt, Homo sapiens
  misc_RNA (1)...(19): siRNA sense strand
gaccuuaggaucccuuuga

SEQ ID NO: 326712 - RNA, 19 nt, Homo sapiens
  misc_RNA (1)...(19): siRNA sense strand
gaggguaucuuuucaacuu

SEQ ID NO: 326713 - RNA, 19 nt, Homo sapiens
  misc_RNA (1)...(19): siRNA sense strand
caacaaugcagaaaucagu

SEQ ID NO: 326714 - RNA, 19 nt, Homo sapiens
  misc_RNA (1)...(19): siRNA sense strand
cgaguucaaugccagaaug

SEQ ID NO: 326715 - RNA, 19 nt, Homo sapiens
  misc_RNA (1)...(19): siRNA sense strand
cuaaguguuuccaauguau

SEQ ID NO: 326716 - RNA, 19 nt, Homo sapiens
  misc_RNA (1)...(19): siRNA sense strand
agaaaucaguguccagcuu

SEQ ID NO: 326717 - RNA, 19 nt, Homo sapiens
  misc_RNA (1)...(19): siRNA sense strand
ucuaaguguuuccaaugua

SEQ ID NO: 326718 - RNA, 19 nt, Homo sapiens
  misc_RNA (1)...(19): siRNA sense strand
cagaaauggucaugugaag

SEQ ID NO: 326719 - RNA, 19 nt, Homo sapiens
  misc_RNA (1)...(19): siRNA sense strand
guaauucccagccuacaga

SEQ ID NO: 326720 - RNA, 19 nt, Homo sapiens
  misc_RNA (1)...(19): siRNA sense strand
caugaacgcauuuaugguu

SEQ ID NO: 326721 - RNA, 19 nt, Homo sapiens
  misc_RNA (1)...(19): siRNA sense strand
cacagaauaucaucucuac

SEQ ID NO: 326722 - RNA, 19 nt, Homo sapiens
  misc_RNA (1)...(19): siRNA sense strand
gcacaaaagauuaaggaaa

SEQ ID NO: 326723 - RNA, 19 nt, Homo sapiens
  misc_RNA (1)...(19): siRNA sense strand
ucagggagcuccgccuuca

SEQ ID NO: 326724 - RNA, 19 nt, Homo sapiens
  misc_RNA (1)...(19): siRNA sense strand
ucccaucacucauccaguu

SEQ ID NO: 326725 - RNA, 19 nt, Homo sapiens
  misc_RNA (1)...(19): siRNA sense strand
cuacuggagccuucuguaa

SEQ ID NO: 326726 - RNA, 19 nt, Homo sapiens
  misc_RNA (1)...(19): siRNA sense strand
gaacgcauuuaugguuugg

SEQ ID NO: 326727 - RNA, 19 nt, Homo sapiens
  misc_RNA (1)...(19): siRNA sense strand
ccuccaggguggucaaguu

SEQ ID NO: 326728 - RNA, 19 nt, Homo sapiens
  misc_RNA (1)...(19): siRNA sense strand
gaagacagguacccaaaac

SEQ ID NO: 326729 - RNA, 19 nt, Homo sapiens
  misc_RNA (1)...(19): siRNA sense strand
gaacaaaagaaacccuauu

SEQ ID NO: 326730 - RNA, 19 nt, Homo sapiens
  misc_RNA (1)...(19): siRNA sense strand
gaccagcacuagccaaagc

SEQ ID NO: 326731 - RNA, 19 nt, Homo sapiens
  misc_RNA (1)...(19): siRNA sense strand
gacagaaauggucauguga

SEQ ID NO: 326732 - RNA, 19 nt, Homo sapiens
  misc_RNA (1)...(19): siRNA sense strand
uacguacucugugguaauu

SEQ ID NO: 326733 - RNA, 19 nt, Homo sapiens
  misc_RNA (1)...(19): siRNA sense strand
acaaauccuacaacaguuu

SEQ ID NO: 326734 - RNA, 19 nt, Homo sapiens
  misc_RNA (1)...(19): siRNA sense strand
cuauuacgaugaagcacaa

SEQ ID NO: 326735 - RNA, 19 nt, Homo sapiens
  misc_RNA (1)...(19): siRNA sense strand
ugaacgcauuuaugguuug

SEQ ID NO: 326736 - RNA, 19 nt, Homo sapiens
  misc_RNA (1)...(19): siRNA sense strand
uaacccagcagccaacaau

SEQ ID NO: 326737 - RNA, 19 nt, Homo sapiens
  misc_RNA (1)...(19): siRNA sense strand
uacaaauccuacaacaguu

SEQ ID NO: 326738 - RNA, 19 nt, Homo sapiens
  misc_RNA (1)...(19): siRNA sense strand
gaauuuccugguuggguuu

SEQ ID NO: 326739 - RNA, 19 nt, Homo sapiens
  misc_RNA (1)...(19): siRNA sense strand
gaugaagcacaaaagauua

SEQ ID NO: 326740 - RNA, 19 nt, Homo sapiens
  misc_RNA (1)...(19): siRNA sense strand
aaacgauucccucuaagug

SEQ ID NO: 326741 - RNA, 19 nt, Homo sapiens
  misc_RNA (1)...(19): siRNA sense strand
guuauuaugaagacaggua

SEQ ID NO: 326742 - RNA, 19 nt, Homo sapiens
  misc_RNA (1)...(19): siRNA sense strand
ccaggguggucaaguugga

SEQ ID NO: 326743 - RNA, 19 nt, Homo sapiens
  misc_RNA (1)...(19): siRNA sense strand
gccagaaugccuuaguuau

SEQ ID NO: 326744 - RNA, 19 nt, Homo sapiens
  misc_RNA (1)...(19): siRNA sense strand
ucaaugccagaaugccuua

SEQ ID NO: 326745 - RNA, 19 nt, Homo sapiens
  misc_RNA (1)...(19): siRNA sense strand
uacagaaucccaucacuca

SEQ ID NO: 326746 - RNA, 19 nt, Homo sapiens
  misc_RNA (1)...(19): siRNA sense strand
acgauucccucuaaguguu

SEQ ID NO: 326747 - RNA, 19 nt, Homo sapiens
  misc_RNA (1)...(19): siRNA sense strand
gagaaggugugaucaaaac

SEQ ID NO: 326748 - RNA, 19 nt, Homo sapiens
  misc_RNA (1)...(19): siRNA sense strand
gaagccagagcagguguug

SEQ ID NO: 326749 - RNA, 19 nt, Homo sapiens
  misc_RNA (1)...(19): siRNA sense strand
ggguaucuuuucaacuuua

SEQ ID NO: 326750 - RNA, 19 nt, Homo sapiens
  misc_RNA (1)...(19): siRNA sense strand
ugccagaaugccuuaguua

SEQ ID NO: 326751 - RNA, 19 nt, Homo sapiens
  misc_RNA (1)...(19): siRNA sense strand
cagaaucccaucacucauc

SEQ ID NO: 326752 - RNA, 19 nt, Homo sapiens
  misc_RNA (1)...(19): siRNA sense strand
acacagaauaucaucucua

SEQ ID NO: 326753 - RNA, 19 nt, Homo sapiens
  misc_RNA (1)...(19): siRNA sense strand
uuagaguggaacaaacuua

SEQ ID NO: 326754 - RNA, 19 nt, Homo sapiens
  misc_RNA (1)...(19): siRNA sense strand
gaguggaacaaacuuagug

SEQ ID NO: 326755 - RNA, 19 nt, Homo sapiens
  misc_RNA (1)...(19): siRNA sense strand
uacaacaguuuauccuuac

SEQ ID NO: 326756 - RNA, 19 nt, Homo sapiens
  misc_RNA (1)...(19): siRNA sense strand
augaacgcauuuaugguuu

SEQ ID NO: 326757 - RNA, 19 nt, Homo sapiens
  misc_RNA (1)...(19): siRNA sense strand
cgucgaaaccgguccuaga

SEQ ID NO: 326758 - RNA, 19 nt, Homo sapiens
  misc_RNA (1)...(19): siRNA sense strand
ccacacagaauaucaucuc

SEQ ID NO: 326759 - RNA, 19 nt, Homo sapiens
  misc_RNA (1)...(19): siRNA sense strand
ugauaagauugaccaaggu

SEQ ID NO: 326760 - RNA, 19 nt, Homo sapiens
  misc_RNA (1)...(19): siRNA sense strand
gcucaccuacguacucugu

SEQ ID NO: 326761 - RNA, 19 nt, Homo sapiens
  misc_RNA (1)...(19): siRNA sense strand
caugagagacucgaugcaa

SEQ ID NO: 326762 - RNA, 19 nt, Homo sapiens
  misc_RNA (1)...(19): siRNA sense strand
aaaagaaacccuauuacga

SEQ ID NO: 326763 - RNA, 19 nt, Homo sapiens
  misc_RNA (1)...(19): siRNA sense strand
acagaaauggucaugugaa

SEQ ID NO: 326764 - RNA, 19 nt, Homo sapiens
  misc_RNA (1)...(19): siRNA sense strand
uacuggagccuucuguaaa

SEQ ID NO: 326765 - RNA, 19 nt, Homo sapiens
  misc_RNA (1)...(19): siRNA sense strand
agccaacaaugcagaaauc

SEQ ID NO: 326766 - RNA, 19 nt, Homo sapiens
  misc_RNA (1)...(19): siRNA sense strand
gaaaacgauucccucuaag

SEQ ID NO: 326767 - RNA, 19 nt, Homo sapiens
  misc_RNA (1)...(19): siRNA sense strand
uaucaucucuacaaauccu

SEQ ID NO: 326768 - RNA, 19 nt, Homo sapiens
  misc_RNA (1)...(19): siRNA sense strand
ccucuaaguguuuccaaug

SEQ ID NO: 326769 - RNA, 19 nt, Homo sapiens
  misc_RNA (1)...(19): siRNA sense strand
ucaccguguugcccucaga

SEQ ID NO: 326770 - RNA, 19 nt, Homo sapiens
  misc_RNA (1)...(19): siRNA sense strand
gaaugccuuaguuauuaug

SEQ ID NO: 326771 - RNA, 19 nt, Homo sapiens
  misc_RNA (1)...(19): siRNA sense strand
gguaccacacagaauauca

SEQ ID NO: 326772 - RNA, 19 nt, Homo sapiens
  misc_RNA (1)...(19): siRNA sense strand
cgaugaagcacaaaagauu

SEQ ID NO: 326773 - RNA, 19 nt, Homo sapiens
  misc_RNA (1)...(19): siRNA sense strand
ucaaggccaagaagcagaa

SEQ ID NO: 326774 - RNA, 19 nt, Homo sapiens
  misc_RNA (1)...(19): siRNA sense strand
gaggaggucaugagagacu

SEQ ID NO: 326775 - RNA, 19 nt, Homo sapiens
  misc_RNA (1)...(19): siRNA sense strand
gauccaccgaccagcacua

SEQ ID NO: 326776 - RNA, 19 nt, Homo sapiens
  misc_RNA (1)...(19): siRNA sense strand
cccuuuggcuauggaaauu

SEQ ID NO: 326777 - RNA, 19 nt, Homo sapiens
  misc_RNA (1)...(19): siRNA sense strand
ccuacguacucugugguaa

SEQ ID NO: 326778 - RNA, 19 nt, Homo sapiens
  misc_RNA (1)...(19): siRNA sense strand
guaccacacagaauaucau

SEQ ID NO: 326779 - RNA, 19 nt, Homo sapiens
  misc_RNA (1)...(19): siRNA sense strand
ggaaaagcacagagaggaa

SEQ ID NO: 326780 - RNA, 19 nt, Homo sapiens
  misc_RNA (1)...(19): siRNA sense strand
ugccuuaguuauuaugaag

SEQ ID NO: 326781 - RNA, 19 nt, Homo sapiens
  misc_RNA (1)...(19): siRNA sense strand
gaacaaacuuagugaagaa

SEQ ID NO: 326782 - RNA, 19 nt, Homo sapiens
  misc_RNA (1)...(19): siRNA sense strand
gaauggaacuucuuacuau

SEQ ID NO: 326783 - RNA, 19 nt, Homo sapiens
  misc_RNA (1)...(19): siRNA sense strand
cagaaugccuuaguuauua

SEQ ID NO: 326784 - RNA, 19 nt, Homo sapiens
  misc_RNA (1)...(19): siRNA sense strand
ggacagaaauggucaugug

SEQ ID NO: 326785 - RNA, 19 nt, Homo sapiens
  misc_RNA (1)...(19): siRNA sense strand
cuacaacaguuuauccuua

SEQ ID NO: 326786 - RNA, 19 nt, Homo sapiens
  misc_RNA (1)...(19): siRNA sense strand
ggaacaaacuuagugaaga

SEQ ID NO: 326787 - RNA, 19 nt, Homo sapiens
  misc_RNA (1)...(19): siRNA sense strand
gaacaugaauggaacuucu

SEQ ID NO: 326788 - RNA, 19 nt, Homo sapiens
  misc_RNA (1)...(19): siRNA sense strand
gaaacccuauuacgaugaa

SEQ ID NO: 326789 - RNA, 19 nt, Homo sapiens
  misc_RNA (1)...(19): siRNA sense strand
ugacaccagugccuacuaa

SEQ ID NO: 326790 - RNA, 19 nt, Homo sapiens
  misc_RNA (1)...(19): siRNA sense strand
cgaaaacgauucccucuaa

SEQ ID NO: 326791 - RNA, 19 nt, Homo sapiens
  misc_RNA (1)...(19): siRNA sense strand
cagaauaucaucucuacaa

SEQ ID NO: 326792 - RNA, 19 nt, Homo sapiens
  misc_RNA (1)...(19): siRNA sense strand
ccagaaugccuuaguuauu

SEQ ID NO: 326793 - RNA, 19 nt, Homo sapiens
  misc_RNA (1)...(19): siRNA sense strand
cggaggaggucaugagaga

SEQ ID NO: 326794 - RNA, 19 nt, Homo sapiens
  misc_RNA (1)...(19): siRNA sense strand
aaagaaacccuauuacgau

SEQ ID NO: 326795 - RNA, 19 nt, Homo sapiens
  misc_RNA (1)...(19): siRNA sense strand
caaacuuagugaagaacaa

SEQ ID NO: 326796 - RNA, 19 nt, Homo sapiens
  misc_RNA (1)...(19): siRNA sense strand
caaauccuacaacaguuua

SEQ ID NO: 326797 - RNA, 19 nt, Homo sapiens
  misc_RNA (1)...(19): siRNA sense strand
cuacaaauccuacaacagu

SEQ ID NO: 326798 - RNA, 19 nt, Homo sapiens
  misc_RNA (1)...(19): siRNA sense strand
ccgagaaggugugaucaaa

SEQ ID NO: 326799 - RNA, 19 nt, Homo sapiens
  misc_RNA (1)...(19): siRNA sense strand
gaccuuaggaucccuuuga

SEQ ID NO: 326800 - RNA, 19 nt, Homo sapiens
  misc_RNA (1)...(19): siRNA sense strand
ugaauggaacuucuuacua

SEQ ID NO: 326801 - RNA, 19 nt, Homo sapiens
  misc_RNA (1)...(19): siRNA sense strand
gaggguaucuuuucaacuu

SEQ ID NO: 326802 - RNA, 19 nt, Homo sapiens
  misc_RNA (1)...(19): siRNA sense strand
caacaaugcagaaaucagu

SEQ ID NO: 326803 - RNA, 19 nt, Homo sapiens
  misc_RNA (1)...(19): siRNA sense strand
cgaguucaaugccagaaug

SEQ ID NO: 326804 - RNA, 19 nt, Homo sapiens
  misc_RNA (1)...(19): siRNA sense strand
cuaaguguuuccaauguau

SEQ ID NO: 326805 - RNA, 19 nt, Homo sapiens
  misc_RNA (1)...(19): siRNA sense strand
agaaaucaguguccagcuu

SEQ ID NO: 326806 - RNA, 19 nt, Homo sapiens
  misc_RNA (1)...(19): siRNA sense strand
ucuaaguguuuccaaugua

SEQ ID NO: 326807 - RNA, 19 nt, Homo sapiens
  misc_RNA (1)...(19): siRNA sense strand
cgacagugaugaggaggaa

SEQ ID NO: 326808 - RNA, 19 nt, Homo sapiens
  misc_RNA (1)...(19): siRNA sense strand
cagaaauggucaugugaag

SEQ ID NO: 326809 - RNA, 19 nt, Homo sapiens
  misc_RNA (1)...(19): siRNA sense strand
ucaagugaaugcacacaca

SEQ ID NO: 326810 - RNA, 19 nt, Homo sapiens
  misc_RNA (1)...(19): siRNA sense strand
guaauucccagccuacaga

SEQ ID NO: 326811 - RNA, 19 nt, Homo sapiens
  misc_RNA (1)...(19): siRNA sense strand
caugaacgcauuuaugguu

SEQ ID NO: 326812 - RNA, 19 nt, Homo sapiens
  misc_RNA (1)...(19): siRNA sense strand
cacagaauaucaucucuac

SEQ ID NO: 326813 - RNA, 19 nt, Homo sapiens
  misc_RNA (1)...(19): siRNA sense strand
cgacaucaacuccuucuag

SEQ ID NO: 326814 - RNA, 19 nt, Homo sapiens
  misc_RNA (1)...(19): siRNA sense strand
gaaugcacacacagugaaa

SEQ ID NO: 326815 - RNA, 19 nt, Homo sapiens
  misc_RNA (1)...(19): siRNA sense strand
gcacaaaagauuaaggaaa

SEQ ID NO: 326816 - RNA, 19 nt, Homo sapiens
  misc_RNA (1)...(19): siRNA sense strand
ucagggagcuccgccuuca

SEQ ID NO: 326817 - RNA, 19 nt, Homo sapiens
  misc_RNA (1)...(19): siRNA sense strand
ucccaucacucauccaguu

SEQ ID NO: 326818 - RNA, 19 nt, Homo sapiens
  misc_RNA (1)...(19): siRNA sense strand
cuacuggagccuucuguaa

SEQ ID NO: 326819 - RNA, 19 nt, Homo sapiens
  misc_RNA (1)...(19): siRNA sense strand
gaacgcauuuaugguuugg

SEQ ID NO: 326820 - RNA, 19 nt, Homo sapiens
  misc_RNA (1)...(19): siRNA sense strand
ggaguugugagaacaugaa

SEQ ID NO: 326821 - RNA, 19 nt, Homo sapiens
  misc_RNA (1)...(19): siRNA sense strand
gaccagcacuagccaaagc

SEQ ID NO: 326822 - RNA, 19 nt, Homo sapiens
  misc_RNA (1)...(19): siRNA sense strand
ggaacuucuuacuauaaca

SEQ ID NO: 326823 - RNA, 19 nt, Homo sapiens
  misc_RNA (1)...(19): siRNA sense strand
gaagacagguacccaaaac

SEQ ID NO: 326824 - RNA, 19 nt, Homo sapiens
  misc_RNA (1)...(19): siRNA sense strand
gaacaaaagaaacccuauu

SEQ ID NO: 326825 - RNA, 19 nt, Homo sapiens
  misc_RNA (1)...(19): siRNA sense strand
ccuccaggguggucaaguu

SEQ ID NO: 326826 - RNA, 19 nt, Homo sapiens
  misc_RNA (1)...(19): siRNA sense strand
gacagaaauggucauguga

SEQ ID NO: 326827 - RNA, 19 nt, Homo sapiens
  misc_RNA (1)...(19): siRNA sense strand
uaacagucauagccacagu

SEQ ID NO: 326828 - RNA, 19 nt, Homo sapiens
  misc_RNA (1)...(19): siRNA sense strand
uacguacucugugguaauu

SEQ ID NO: 326829 - RNA, 19 nt, Homo sapiens
  misc_RNA (1)...(19): siRNA sense strand
acaaauccuacaacaguuu

SEQ ID NO: 326830 - RNA, 19 nt, Homo sapiens
  misc_RNA (1)...(19): siRNA sense strand
cuauuacgaugaagcacaa

SEQ ID NO: 326831 - RNA, 19 nt, Homo sapiens
  misc_RNA (1)...(19): siRNA sense strand
ugaacgcauuuaugguuug

SEQ ID NO: 326832 - RNA, 19 nt, Homo sapiens
  misc_RNA (1)...(19): siRNA sense strand
uaacccagcagccaacaau

SEQ ID NO: 326833 - RNA, 19 nt, Homo sapiens
  misc_RNA (1)...(19): siRNA sense strand
uacaaauccuacaacaguu

SEQ ID NO: 326834 - RNA, 19 nt, Homo sapiens
  misc_RNA (1)...(19): siRNA sense strand
gaauuuccugguuggguuu

SEQ ID NO: 326835 - RNA, 19 nt, Homo sapiens
  misc_RNA (1)...(19): siRNA sense strand
gaugaagcacaaaagauua

SEQ ID NO: 326836 - RNA, 19 nt, Homo sapiens
  misc_RNA (1)...(19): siRNA sense strand
aaacgauucccucuaagug

SEQ ID NO: 326837 - RNA, 19 nt, Homo sapiens
  misc_RNA (1)...(19): siRNA sense strand
gugaugaggaggaagaaga

SEQ ID NO: 326838 - RNA, 19 nt, Homo sapiens
  misc_RNA (1)...(19): siRNA sense strand
gaacuucuuacuauaacag

SEQ ID NO: 326839 - RNA, 19 nt, Homo sapiens
  misc_RNA (1)...(19): siRNA sense strand
agagacuacucaagugaau

SEQ ID NO: 326840 - RNA, 19 nt, Homo sapiens
  misc_RNA (1)...(19): siRNA sense strand
guuauuaugaagacaggua

SEQ ID NO: 326841 - RNA, 19 nt, Homo sapiens
  misc_RNA (1)...(19): siRNA sense strand
uacagaaucccaucacuca

SEQ ID NO: 326842 - RNA, 19 nt, Homo sapiens
  misc_RNA (1)...(19): siRNA sense strand
ccaggguggucaaguugga

SEQ ID NO: 326843 - RNA, 19 nt, Homo sapiens
  misc_RNA (1)...(19): siRNA sense strand
gccagaaugccuuaguuau

SEQ ID NO: 326844 - RNA, 19 nt, Homo sapiens
  misc_RNA (1)...(19): siRNA sense strand
ucaaugccagaaugccuua

SEQ ID NO: 326845 - RNA, 19 nt, Homo sapiens
  misc_RNA (1)...(19): siRNA sense strand
acgauucccucuaaguguu

SEQ ID NO: 326846 - RNA, 19 nt, Homo sapiens
  misc_RNA (1)...(19): siRNA sense strand
caucaacuccuucuagcau

SEQ ID NO: 326847 - RNA, 19 nt, Homo sapiens
  misc_RNA (1)...(19): siRNA sense strand
gagaaggugugaucaaaac

SEQ ID NO: 326848 - RNA, 19 nt, Homo sapiens
  misc_RNA (1)...(19): siRNA sense strand
acaugaauggaacuucuua

SEQ ID NO: 326849 - RNA, 19 nt, Homo sapiens
  misc_RNA (1)...(19): siRNA sense strand
ugugagaacaugaauggaa

SEQ ID NO: 326850 - RNA, 19 nt, Homo sapiens
  misc_RNA (1)...(19): siRNA sense strand
gcacacacagugaaaauuc

SEQ ID NO: 326851 - RNA, 19 nt, Homo sapiens
  misc_RNA (1)...(19): siRNA sense strand
uuagaguggaacaaacuua

SEQ ID NO: 326852 - RNA, 19 nt, Homo sapiens
  misc_RNA (1)...(19): siRNA sense strand
gaagccagagcagguguug

SEQ ID NO: 326853 - RNA, 19 nt, Homo sapiens
  misc_RNA (1)...(19): siRNA sense strand
ggguaucuuuucaacuuua

SEQ ID NO: 326854 - RNA, 19 nt, Homo sapiens
  misc_RNA (1)...(19): siRNA sense strand
ugccagaaugccuuaguua

SEQ ID NO: 326855 - RNA, 19 nt, Homo sapiens
  misc_RNA (1)...(19): siRNA sense strand
cagaaucccaucacucauc

SEQ ID NO: 326856 - RNA, 19 nt, Homo sapiens
  misc_RNA (1)...(19): siRNA sense strand
acacagaauaucaucucua

SEQ ID NO: 326857 - RNA, 19 nt, Homo sapiens
  misc_RNA (1)...(19): siRNA sense strand
gaguggaacaaacuuagug

SEQ ID NO: 326858 - RNA, 19 nt, Homo sapiens
  misc_RNA (1)...(19): siRNA sense strand
ugaaugcacacacagugaa

SEQ ID NO: 326859 - RNA, 19 nt, Homo sapiens
  misc_RNA (1)...(19): siRNA sense strand
gugaaugcacacacaguga

SEQ ID NO: 326860 - RNA, 19 nt, Homo sapiens
  misc_RNA (1)...(19): siRNA sense strand
uacaacaguuuauccuuac

SEQ ID NO: 326861 - RNA, 19 nt, Homo sapiens
  misc_RNA (1)...(19): siRNA sense strand
augaacgcauuuaugguuu

SEQ ID NO: 326862 - RNA, 19 nt, Homo sapiens
  misc_RNA (1)...(19): siRNA sense strand
gcauccagcaagucaaugu

SEQ ID NO: 326863 - RNA, 19 nt, Homo sapiens
  misc_RNA (1)...(19): siRNA sense strand
cgucgaaaccgguccuaga

SEQ ID NO: 326864 - RNA, 19 nt, Homo sapiens
  misc_RNA (1)...(19): siRNA sense strand
ccacacagaauaucaucuc

SEQ ID NO: 326865 - RNA, 19 nt, Homo sapiens
  misc_RNA (1)...(19): siRNA sense strand
gaaccuuggagaaugucuu

SEQ ID NO: 326866 - RNA, 19 nt, Homo sapiens
  misc_RNA (1)...(19): siRNA sense strand
uuuagagacuacucaagug

SEQ ID NO: 326867 - RNA, 19 nt, Homo sapiens
  misc_RNA (1)...(19): siRNA sense strand
acagaaauggucaugugaa

SEQ ID NO: 326868 - RNA, 19 nt, Homo sapiens
  misc_RNA (1)...(19): siRNA sense strand
gcucaccuacguacucugu

SEQ ID NO: 326869 - RNA, 19 nt, Homo sapiens
  misc_RNA (1)...(19): siRNA sense strand
aaaagaaacccuauuacga

SEQ ID NO: 326870 - RNA, 19 nt, Homo sapiens
  misc_RNA (1)...(19): siRNA sense strand
ugauaagauugaccaaggu

SEQ ID NO: 326871 - RNA, 19 nt, Homo sapiens
  misc_RNA (1)...(19): siRNA sense strand
caugagagacucgaugcaa

SEQ ID NO: 326872 - RNA, 19 nt, Homo sapiens
  misc_RNA (1)...(19): siRNA sense strand
agccaacaaugcagaaauc

SEQ ID NO: 326873 - RNA, 19 nt, Homo sapiens
  misc_RNA (1)...(19): siRNA sense strand
ugccucagcuggacauugg

SEQ ID NO: 326874 - RNA, 19 nt, Homo sapiens
  misc_RNA (1)...(19): siRNA sense strand
uacuggagccuucuguaaa

SEQ ID NO: 326875 - RNA, 19 nt, Homo sapiens
  misc_RNA (1)...(19): siRNA sense strand
guugugagaacaugaaugg

SEQ ID NO: 326876 - RNA, 19 nt, Homo sapiens
  misc_RNA (1)...(19): siRNA sense strand
uuagagacuacucaaguga

SEQ ID NO: 326877 - RNA, 19 nt, Homo sapiens
  misc_RNA (1)...(19): siRNA sense strand
gaaaacgauucccucuaag

SEQ ID NO: 326878 - RNA, 19 nt, Homo sapiens
  misc_RNA (1)...(19): siRNA sense strand
uaucaucucuacaaauccu

SEQ ID NO: 326879 - RNA, 19 nt, Homo sapiens
  misc_RNA (1)...(19): siRNA sense strand
ccucuaaguguuuccaaug

SEQ ID NO: 326880 - RNA, 19 nt, Homo sapiens
  misc_RNA (1)...(19): siRNA sense strand
ugaugaggaggaagaagaa

SEQ ID NO: 326881 - RNA, 19 nt, Homo sapiens
  misc_RNA (1)...(19): siRNA sense strand
gagcagagaucauaaccaa

SEQ ID NO: 326882 - RNA, 19 nt, Homo sapiens
  misc_RNA (1)...(19): siRNA sense strand
gaagaacucaccaagauuu

SEQ ID NO: 326883 - RNA, 19 nt, Homo sapiens
  misc_RNA (1)...(19): siRNA sense strand
ccuaaagacugacacauuu

SEQ ID NO: 326884 - RNA, 19 nt, Homo sapiens
  misc_RNA (1)...(19): siRNA sense strand
ggagagcccugucaaguca

SEQ ID NO: 326885 - RNA, 19 nt, Homo sapiens
  misc_RNA (1)...(19): siRNA sense strand
gggagaaucuagcaucuga

SEQ ID NO: 326886 - RNA, 19 nt, Homo sapiens
  misc_RNA (1)...(19): siRNA sense strand
gaagagguguugaagagau

SEQ ID NO: 326887 - RNA, 19 nt, Homo sapiens
  misc_RNA (1)...(19): siRNA sense strand
ccacugaggaguuggauua

SEQ ID NO: 326888 - RNA, 19 nt, Homo sapiens
  misc_RNA (1)...(19): siRNA sense strand
aagcaggccuuguaccuua

SEQ ID NO: 326889 - RNA, 19 nt, Homo sapiens
  misc_RNA (1)...(19): siRNA sense strand
uagaagaacucaccaagau

SEQ ID NO: 326890 - RNA, 19 nt, Homo sapiens
  misc_RNA (1)...(19): siRNA sense strand
gaagauaugagaagaugaa

SEQ ID NO: 326891 - RNA, 19 nt, Homo sapiens
  misc_RNA (1)...(19): siRNA sense strand
cagaaacuccuaugaaauu

SEQ ID NO: 326892 - RNA, 19 nt, Homo sapiens
  misc_RNA (1)...(19): siRNA sense strand
uacagaaacuccuaugaaa

SEQ ID NO: 326893 - RNA, 19 nt, Homo sapiens
  misc_RNA (1)...(19): siRNA sense strand
cgaagaagcaggccuugua

SEQ ID NO: 326894 - RNA, 19 nt, Homo sapiens
  misc_RNA (1)...(19): siRNA sense strand
guacuuacaccuuugauau

SEQ ID NO: 326895 - RNA, 19 nt, Homo sapiens
  misc_RNA (1)...(19): siRNA sense strand
gaaacagaccaccaagaaa

SEQ ID NO: 326896 - RNA, 19 nt, Homo sapiens
  misc_RNA (1)...(19): siRNA sense strand
aaaggacgcuggagcagaa

SEQ ID NO: 326897 - RNA, 19 nt, Homo sapiens
  misc_RNA (1)...(19): siRNA sense strand
ccaacaaucauacaacuuu

SEQ ID NO: 326898 - RNA, 19 nt, Homo sapiens
  misc_RNA (1)...(19): siRNA sense strand
caacaaucauacaacuuug

SEQ ID NO: 326899 - RNA, 19 nt, Homo sapiens
  misc_RNA (1)...(19): siRNA sense strand
gauaugagaagaugaagga

SEQ ID NO: 326900 - RNA, 19 nt, Homo sapiens
  misc_RNA (1)...(19): siRNA sense strand
ggaguuggauuacagaaac

SEQ ID NO: 326901 - RNA, 19 nt, Homo sapiens
  misc_RNA (1)...(19): siRNA sense strand
cagaagcgauugaaauuac

SEQ ID NO: 326902 - RNA, 19 nt, Homo sapiens
  misc_RNA (1)...(19): siRNA sense strand
ggaccuagaggcugacaaa

SEQ ID NO: 326903 - RNA, 19 nt, Homo sapiens
  misc_RNA (1)...(19): siRNA sense strand
gagcagaagaauaaagaaa

SEQ ID NO: 326904 - RNA, 19 nt, Homo sapiens
  misc_RNA (1)...(19): siRNA sense strand
gaaagcaggcgggaaguga

SEQ ID NO: 326905 - RNA, 19 nt, Homo sapiens
  misc_RNA (1)...(19): siRNA sense strand
gaaaauuggcuccuccuua

SEQ ID NO: 326906 - RNA, 19 nt, Homo sapiens
  misc_RNA (1)...(19): siRNA sense strand
cagaagauaugagaagaug

SEQ ID NO: 326907 - RNA, 19 nt, Homo sapiens
  misc_RNA (1)...(19): siRNA sense strand
uuuaagacauccucuaaga

SEQ ID NO: 326908 - RNA, 19 nt, Homo sapiens
  misc_RNA (1)...(19): siRNA sense strand
ccuuguaccuuauguuuga

SEQ ID NO: 326909 - RNA, 19 nt, Homo sapiens
  misc_RNA (1)...(19): siRNA sense strand
gcaaugaguuccgauucug

SEQ ID NO: 326910 - RNA, 19 nt, Homo sapiens
  misc_RNA (1)...(19): siRNA sense strand
gcagugggacuuacaacuu

SEQ ID NO: 326911 - RNA, 19 nt, Homo sapiens
  misc_RNA (1)...(19): siRNA sense strand
gauagaggacgaacagaga

SEQ ID NO: 326912 - RNA, 19 nt, Homo sapiens
  misc_RNA (1)...(19): siRNA sense strand
ccagaaacaccaccaguga

SEQ ID NO: 326913 - RNA, 19 nt, Homo sapiens
  misc_RNA (1)...(19): siRNA sense strand
ccguaaggcuggaguuuga

SEQ ID NO: 326914 - RNA, 19 nt, Homo sapiens
  misc_RNA (1)...(19): siRNA sense strand
agaaacagaccaccaagaa

SEQ ID NO: 326915 - RNA, 19 nt, Homo sapiens
  misc_RNA (1)...(19): siRNA sense strand
gaucauaaccaaggagaga

SEQ ID NO: 326916 - RNA, 19 nt, Homo sapiens
  misc_RNA (1)...(19): siRNA sense strand
gcaagccagugacuuugau

SEQ ID NO: 326917 - RNA, 19 nt, Homo sapiens
  misc_RNA (1)...(19): siRNA sense strand
ccaccaggaugccaagaga

SEQ ID NO: 326918 - RNA, 19 nt, Homo sapiens
  misc_RNA (1)...(19): siRNA sense strand
ggacuuacaacuuggacuu

SEQ ID NO: 326919 - RNA, 19 nt, Homo sapiens
  misc_RNA (1)...(19): siRNA sense strand
ggaaaacgcugccucuuac

SEQ ID NO: 326920 - RNA, 19 nt, Homo sapiens
  misc_RNA (1)...(19): siRNA sense strand
acauugagcuuguggauac

SEQ ID NO: 326921 - RNA, 19 nt, Homo sapiens
  misc_RNA (1)...(19): siRNA sense strand
caagauuugugacgaacug

SEQ ID NO: 326922 - RNA, 19 nt, Homo sapiens
  misc_RNA (1)...(19): siRNA sense strand
gaacucaccaagauuugug

SEQ ID NO: 326923 - RNA, 19 nt, Homo sapiens
  misc_RNA (1)...(19): siRNA sense strand
ggaaaauaguggccgagua

SEQ ID NO: 326924 - RNA, 19 nt, Homo sapiens
  misc_RNA (1)...(19): siRNA sense strand
gaaacuccuaugaaauuga

SEQ ID NO: 326925 - RNA, 19 nt, Homo sapiens
  misc_RNA (1)...(19): siRNA sense strand
ggaggaaguccacggauuc

SEQ ID NO: 326926 - RNA, 19 nt, Homo sapiens
  misc_RNA (1)...(19): siRNA sense strand
cagugggacuuacaacuug

SEQ ID NO: 326927 - RNA, 19 nt, Homo sapiens
  misc_RNA (1)...(19): siRNA sense strand
gagaagaccaucgcucaga

SEQ ID NO: 326928 - RNA, 19 nt, Homo sapiens
  misc_RNA (1)...(19): siRNA sense strand
gaaaauaguggccgaguau

SEQ ID NO: 326929 - RNA, 19 nt, Homo sapiens
  misc_RNA (1)...(19): siRNA sense strand
ucagaagcgauugaaauua

SEQ ID NO: 326930 - RNA, 19 nt, Homo sapiens
  misc_RNA (1)...(19): siRNA sense strand
uuacagaaacuccuaugaa

SEQ ID NO: 326931 - RNA, 19 nt, Homo sapiens
  misc_RNA (1)...(19): siRNA sense strand
gagaaucuagcaucugaga

SEQ ID NO: 326932 - RNA, 19 nt, Homo sapiens
  misc_RNA (1)...(19): siRNA sense strand
gaaguggacgugcaugaca

SEQ ID NO: 326933 - RNA, 19 nt, Homo sapiens
  misc_RNA (1)...(19): siRNA sense strand
gcaugacaguggaccuaga

SEQ ID NO: 326934 - RNA, 19 nt, Homo sapiens
  misc_RNA (1)...(19): siRNA sense strand
ugugaacacugcugcgaaa

SEQ ID NO: 326935 - RNA, 19 nt, Homo sapiens
  misc_RNA (1)...(19): siRNA sense strand
ccaggaggaguuagaguuu

SEQ ID NO: 326936 - RNA, 19 nt, Homo sapiens
  misc_RNA (1)...(19): siRNA sense strand
ccucagacgcuaagaauca

SEQ ID NO: 326937 - RNA, 19 nt, Homo sapiens
  misc_RNA (1)...(19): siRNA sense strand
agaaggaggagcagaggua

SEQ ID NO: 326938 - RNA, 19 nt, Homo sapiens
  misc_RNA (1)...(19): siRNA sense strand
gagcccgacuuagcagaaa

SEQ ID NO: 326939 - RNA, 19 nt, Homo sapiens
  misc_RNA (1)...(19): siRNA sense strand
cggaggaaguccacggauu

SEQ ID NO: 326940 - RNA, 19 nt, Homo sapiens
  misc_RNA (1)...(19): siRNA sense strand
ggcuggaguuugacuauuc

SEQ ID NO: 326941 - RNA, 19 nt, Homo sapiens
  misc_RNA (1)...(19): siRNA sense strand
gggaagugauggaaaugag

SEQ ID NO: 326942 - RNA, 19 nt, Homo sapiens
  misc_RNA (1)...(19): siRNA sense strand
gggaugaccccaauuuuaa

SEQ ID NO: 326943 - RNA, 19 nt, Homo sapiens
  misc_RNA (1)...(19): siRNA sense strand
cgagaaacuugacaacacu

SEQ ID NO: 326944 - RNA, 19 nt, Homo sapiens
  misc_RNA (1)...(19): siRNA sense strand
caacuuggacuuugacaac

SEQ ID NO: 326945 - RNA, 19 nt, Homo sapiens
  misc_RNA (1)...(19): siRNA sense strand
ggccuuguaccuuauguuu

SEQ ID NO: 326946 - RNA, 19 nt, Homo sapiens
  misc_RNA (1)...(19): siRNA sense strand
ccagacaccugugaugagu

SEQ ID NO: 326947 - RNA, 19 nt, Homo sapiens
  misc_RNA (1)...(19): siRNA sense strand
gcaacaggagccagaugaa

SEQ ID NO: 326948 - RNA, 19 nt, Homo sapiens
  misc_RNA (1)...(19): siRNA sense strand
gaagaagcaggccuuguac

SEQ ID NO: 326949 - RNA, 19 nt, Homo sapiens
  misc_RNA (1)...(19): siRNA sense strand
caccaagauuugugacgaa

SEQ ID NO: 326950 - RNA, 19 nt, Homo sapiens
  misc_RNA (1)...(19): siRNA sense strand
gcaagaaugaagagguguu

SEQ ID NO: 326951 - RNA, 19 nt, Homo sapiens
  misc_RNA (1)...(19): siRNA sense strand
guggugcacuugacuaucu

SEQ ID NO: 326952 - RNA, 19 nt, Homo sapiens
  misc_RNA (1)...(19): siRNA sense strand
aaacagaccaccaagaaac

SEQ ID NO: 326953 - RNA, 19 nt, Homo sapiens
  misc_RNA (1)...(19): siRNA sense strand
ggcgggaagugauggaaau

SEQ ID NO: 326954 - RNA, 19 nt, Homo sapiens
  misc_RNA (1)...(19): siRNA sense strand
cgccagagcagagaucaua

SEQ ID NO: 326955 - RNA, 19 nt, Homo sapiens
  misc_RNA (1)...(19): siRNA sense strand
gaagcuggccaggcagauu

SEQ ID NO: 326956 - RNA, 19 nt, Homo sapiens
  misc_RNA (1)...(19): siRNA sense strand
gaagcaggccuuguaccuu

SEQ ID NO: 326957 - RNA, 19 nt, Homo sapiens
  misc_RNA (1)...(19): siRNA sense strand
agaaacuccuaugaaauug

SEQ ID NO: 326958 - RNA, 19 nt, Homo sapiens
  misc_RNA (1)...(19): siRNA sense strand
ggcaaugaguuccgauucu

SEQ ID NO: 326959 - RNA, 19 nt, Homo sapiens
  misc_RNA (1)...(19): siRNA sense strand
ccuagaggcugacaaacag

SEQ ID NO: 326960 - RNA, 19 nt, Homo sapiens
  misc_RNA (1)...(19): siRNA sense strand
cagcucaccuucuaaaucc

SEQ ID NO: 326961 - RNA, 19 nt, Homo sapiens
  misc_RNA (1)...(19): siRNA sense strand
gguacuuacaccuuugaua

SEQ ID NO: 326962 - RNA, 19 nt, Homo sapiens
  misc_RNA (1)...(19): siRNA sense strand
ugacacauuuagggugaaa

SEQ ID NO: 326963 - RNA, 19 nt, Homo sapiens
  misc_RNA (1)...(19): siRNA sense strand
ucucugccgucuucgauga

SEQ ID NO: 326964 - RNA, 19 nt, Homo sapiens
  misc_RNA (1)...(19): siRNA sense strand
gaugauagaggacgaacag

SEQ ID NO: 326965 - RNA, 19 nt, Homo sapiens
  misc_RNA (1)...(19): siRNA sense strand
aaauaguggccgaguauga

SEQ ID NO: 326966 - RNA, 19 nt, Homo sapiens
  misc_RNA (1)...(19): siRNA sense strand
ucucagaauggaaagauaa

SEQ ID NO: 326967 - RNA, 19 nt, Homo sapiens
  misc_RNA (1)...(19): siRNA sense strand
guuagaguuugccaucaug

SEQ ID NO: 326968 - RNA, 19 nt, Homo sapiens
  misc_RNA (1)...(19): siRNA sense strand
gaccuguccaccuuuguaa

SEQ ID NO: 326969 - RNA, 19 nt, Homo sapiens
  misc_RNA (1)...(19): siRNA sense strand
ccuuugauauugacaagug

SEQ ID NO: 326970 - RNA, 19 nt, Homo sapiens
  misc_RNA (1)...(19): siRNA sense strand
caacauugagcuuguggau

SEQ ID NO: 326971 - RNA, 19 nt, Homo sapiens
  misc_RNA (1)...(19): siRNA sense strand
agagaaauccucccagaag

SEQ ID NO: 326972 - RNA, 19 nt, Homo sapiens
  misc_RNA (1)...(19): siRNA sense strand
ccgagaaacuugacaacac

SEQ ID NO: 326973 - RNA, 19 nt, Homo sapiens
  misc_RNA (1)...(19): siRNA sense strand
acuuacaccuuugauauug

SEQ ID NO: 326974 - RNA, 19 nt, Homo sapiens
  misc_RNA (1)...(19): siRNA sense strand
augaagagguguugaagag

SEQ ID NO: 326975 - RNA, 19 nt, Homo sapiens
  misc_RNA (1)...(19): siRNA sense strand
guaaacgagaccaaauuca

SEQ ID NO: 326976 - RNA, 19 nt, Homo sapiens
  misc_RNA (1)...(19): siRNA sense strand
gagguaaccccaucggaua

SEQ ID NO: 326977 - RNA, 19 nt, Homo sapiens
  misc_RNA (1)...(19): siRNA sense strand
gauuugugacgaacugauu

SEQ ID NO: 326978 - RNA, 19 nt, Homo sapiens
  misc_RNA (1)...(19): siRNA sense strand
agaagaccaucgcucagau

SEQ ID NO: 326979 - RNA, 19 nt, Homo sapiens
  misc_RNA (1)...(19): siRNA sense strand
agagaugugcgcaggagua

SEQ ID NO: 326980 - RNA, 19 nt, Homo sapiens
  misc_RNA (1)...(19): siRNA sense strand
cgcuggagcagaagaauaa

SEQ ID NO: 326981 - RNA, 19 nt, Homo sapiens
  misc_RNA (1)...(19): siRNA sense strand
gaacauauaugaccaaauc

SEQ ID NO: 326982 - RNA, 19 nt, Homo sapiens
  misc_RNA (1)...(19): siRNA sense strand
gcaagugaguugaagauuu

SEQ ID NO: 326983 - RNA, 19 nt, Homo sapiens
  misc_RNA (1)...(19): siRNA sense strand
gcaaacaaaucaaagguau

SEQ ID NO: 326984 - RNA, 19 nt, Homo sapiens
  misc_RNA (1)...(19): siRNA sense strand
aaacaagcaucagaucuua

SEQ ID NO: 326985 - RNA, 19 nt, Homo sapiens
  misc_RNA (1)...(19): siRNA sense strand
ccacugggcauauaaauuu

SEQ ID NO: 326986 - RNA, 19 nt, Homo sapiens
  misc_RNA (1)...(19): siRNA sense strand
cgaguauuaucuagucuua

SEQ ID NO: 326987 - RNA, 19 nt, Homo sapiens
  misc_RNA (1)...(19): siRNA sense strand
uaguagagauggugaaauu

SEQ ID NO: 326988 - RNA, 19 nt, Homo sapiens
  misc_RNA (1)...(19): siRNA sense strand
gaaagaaaccaccaaacga

SEQ ID NO: 326989 - RNA, 19 nt, Homo sapiens
  misc_RNA (1)...(19): siRNA sense strand
gagcuuauaguccacaaua

SEQ ID NO: 326990 - RNA, 19 nt, Homo sapiens
  misc_RNA (1)...(19): siRNA sense strand
gaaacagaacaaucagaua

SEQ ID NO: 326991 - RNA, 19 nt, Homo sapiens
  misc_RNA (1)...(19): siRNA sense strand
caucagaucuuagucuuau

SEQ ID NO: 326992 - RNA, 19 nt, Homo sapiens
  misc_RNA (1)...(19): siRNA sense strand
gaaagauucagauaaguug

SEQ ID NO: 326993 - RNA, 19 nt, Homo sapiens
  misc_RNA (1)...(19): siRNA sense strand
ggaaugagaccauguugga

SEQ ID NO: 326994 - RNA, 19 nt, Homo sapiens
  misc_RNA (1)...(19): siRNA sense strand
ucacuuagguuuaguagag

SEQ ID NO: 326995 - RNA, 19 nt, Homo sapiens
  misc_RNA (1)...(19): siRNA sense strand
acaaggagaucccacaaug

SEQ ID NO: 326996 - RNA, 19 nt, Homo sapiens
  misc_RNA (1)...(19): siRNA sense strand
gaucuucacuggacacaag

SEQ ID NO: 326997 - RNA, 19 nt, Homo sapiens
  misc_RNA (1)...(19): siRNA sense strand
guaaauuuguucugcguau

SEQ ID NO: 326998 - RNA, 19 nt, Homo sapiens
  misc_RNA (1)...(19): siRNA sense strand
ucagauaaguuggauaaga

SEQ ID NO: 326999 - RNA, 19 nt, Homo sapiens
  misc_RNA (1)...(19): siRNA sense strand
cagauaaguuggauaagau

SEQ ID NO: 327000 - RNA, 19 nt, Homo sapiens
  misc_RNA (1)...(19): siRNA sense strand
uuugaugguuggagaauua

SEQ ID NO: 327001 - RNA, 19 nt, Homo sapiens
  misc_RNA (1)...(19): siRNA sense strand
gagaucaggaauguuauua

SEQ ID NO: 327002 - RNA, 19 nt, Homo sapiens
  misc_RNA (1)...(19): siRNA sense strand
gcaucagguucaauggaua

SEQ ID NO: 327003 - RNA, 19 nt, Homo sapiens
  misc_RNA (1)...(19): siRNA sense strand
caagugaguugaagauuuu

SEQ ID NO: 327004 - RNA, 19 nt, Homo sapiens
  misc_RNA (1)...(19): siRNA sense strand
ggaauguuauuaccaggau

SEQ ID NO: 327005 - RNA, 19 nt, Homo sapiens
  misc_RNA (1)...(19): siRNA sense strand
ggacacaagggaccaauuc

SEQ ID NO: 327006 - RNA, 19 nt, Homo sapiens
  misc_RNA (1)...(19): siRNA sense strand
gaugggaugccgcguagua

SEQ ID NO: 327007 - RNA, 19 nt, Homo sapiens
  misc_RNA (1)...(19): siRNA sense strand
ggaugucacugaugauucu

SEQ ID NO: 327008 - RNA, 19 nt, Homo sapiens
  misc_RNA (1)...(19): siRNA sense strand
cuaucagccuuuaagaaua

SEQ ID NO: 327009 - RNA, 19 nt, Homo sapiens
  misc_RNA (1)...(19): siRNA sense strand
caaacaagcaucagaucuu

SEQ ID NO: 327010 - RNA, 19 nt, Homo sapiens
  misc_RNA (1)...(19): siRNA sense strand
gagcaccucuacauugaca

SEQ ID NO: 327011 - RNA, 19 nt, Homo sapiens
  misc_RNA (1)...(19): siRNA sense strand
cagaugaugucuuagaaag

SEQ ID NO: 327012 - RNA, 19 nt, Homo sapiens
  misc_RNA (1)...(19): siRNA sense strand
gaaucccucuuccugaguu

SEQ ID NO: 327013 - RNA, 19 nt, Homo sapiens
  misc_RNA (1)...(19): siRNA sense strand
uaaacgagaggcaaacaaa

SEQ ID NO: 327014 - RNA, 19 nt, Homo sapiens
  misc_RNA (1)...(19): siRNA sense strand
ggagguggcggucaagcua

SEQ ID NO: 327015 - RNA, 19 nt, Homo sapiens
  misc_RNA (1)...(19): siRNA sense strand
ccacaauguaugaagaaua

SEQ ID NO: 327016 - RNA, 19 nt, Homo sapiens
  misc_RNA (1)...(19): siRNA sense strand
gaugugaauuguaccagau

SEQ ID NO: 327017 - RNA, 19 nt, Homo sapiens
  misc_RNA (1)...(19): siRNA sense strand
guaguaagcaacagauaga

SEQ ID NO: 327018 - RNA, 19 nt, Homo sapiens
  misc_RNA (1)...(19): siRNA sense strand
gcacauguacuuggagcua

SEQ ID NO: 327019 - RNA, 19 nt, Homo sapiens
  misc_RNA (1)...(19): siRNA sense strand
acaaucaacaugagaauga

SEQ ID NO: 327020 - RNA, 19 nt, Homo sapiens
  misc_RNA (1)...(19): siRNA sense strand
ggguaaaguuggaaguguu

SEQ ID NO: 327021 - RNA, 19 nt, Homo sapiens
  misc_RNA (1)...(19): siRNA sense strand
gaaaacagcaagugaguug

SEQ ID NO: 327022 - RNA, 19 nt, Homo sapiens
  misc_RNA (1)...(19): siRNA sense strand
ggaugaccuacgaguauua

SEQ ID NO: 327023 - RNA, 19 nt, Homo sapiens
  misc_RNA (1)...(19): siRNA sense strand
aaggagaucccacaaugua

SEQ ID NO: 327024 - RNA, 19 nt, Homo sapiens
  misc_RNA (1)...(19): siRNA sense strand
gauggcagagugcuucuuu

SEQ ID NO: 327025 - RNA, 19 nt, Homo sapiens
  misc_RNA (1)...(19): siRNA sense strand
ccucuacauugacaucuuu

SEQ ID NO: 327026 - RNA, 19 nt, Homo sapiens
  misc_RNA (1)...(19): siRNA sense strand
gagcuagucuacaaucaac

SEQ ID NO: 327027 - RNA, 19 nt, Homo sapiens
  misc_RNA (1)...(19): siRNA sense strand
ggagaucccacaauguaug

SEQ ID NO: 327028 - RNA, 19 nt, Homo sapiens
  misc_RNA (1)...(19): siRNA sense strand
gggacguccugaaugguaa

SEQ ID NO: 327029 - RNA, 19 nt, Homo sapiens
  misc_RNA (1)...(19): siRNA sense strand
agaggcaucuucaggagaa

SEQ ID NO: 327030 - RNA, 19 nt, Homo sapiens
  misc_RNA (1)...(19): siRNA sense strand
gaaguuccauggagaucag

SEQ ID NO: 327031 - RNA, 19 nt, Homo sapiens
  misc_RNA (1)...(19): siRNA sense strand
ccauggagaucaggaaugu

SEQ ID NO: 327032 - RNA, 19 nt, Homo sapiens
  misc_RNA (1)...(19): siRNA sense strand
gagaggcaaacaaaucaaa

SEQ ID NO: 327033 - RNA, 19 nt, Homo sapiens
  misc_RNA (1)...(19): siRNA sense strand
ggagaucaggaauguuauu

SEQ ID NO: 327034 - RNA, 19 nt, Homo sapiens
  misc_RNA (1)...(19): siRNA sense strand
gaccaaaucaacaccaguu

SEQ ID NO: 327035 - RNA, 19 nt, Homo sapiens
  misc_RNA (1)...(19): siRNA sense strand
guaccagauuccauccaaa

SEQ ID NO: 327036 - RNA, 19 nt, Homo sapiens
  misc_RNA (1)...(19): siRNA sense strand
gcaucagaucuuagucuua

SEQ ID NO: 327037 - RNA, 19 nt, Homo sapiens
  misc_RNA (1)...(19): siRNA sense strand
gaaauugagguaccuuugg

SEQ ID NO: 327038 - RNA, 19 nt, Homo sapiens
  misc_RNA (1)...(19): siRNA sense strand
cuacgaguauuaucuaguc

SEQ ID NO: 327039 - RNA, 19 nt, Homo sapiens
  misc_RNA (1)...(19): siRNA sense strand
gggaacauauaugaccaaa

SEQ ID NO: 327040 - RNA, 19 nt, Homo sapiens
  misc_RNA (1)...(19): siRNA sense strand
aggagcaccucuacauuga

SEQ ID NO: 327041 - RNA, 19 nt, Homo sapiens
  misc_RNA (1)...(19): siRNA sense strand
cacaagggaccaauucauu

SEQ ID NO: 327042 - RNA, 19 nt, Homo sapiens
  misc_RNA (1)...(19): siRNA sense strand
gaucaggaauguuauuacc

SEQ ID NO: 327043 - RNA, 19 nt, Homo sapiens
  misc_RNA (1)...(19): siRNA sense strand
ggcaucagguucaauggau

SEQ ID NO: 327044 - RNA, 19 nt, Homo sapiens
  misc_RNA (1)...(19): siRNA sense strand
gaagaaggaaaaccuaaaa

SEQ ID NO: 327045 - RNA, 19 nt, Homo sapiens
  misc_RNA (1)...(19): siRNA sense strand
aaauugagguaccuuugga

SEQ ID NO: 327046 - RNA, 19 nt, Homo sapiens
  misc_RNA (1)...(19): siRNA sense strand
caggagcaccucuacauug

SEQ ID NO: 327047 - RNA, 19 nt, Homo sapiens
  misc_RNA (1)...(19): siRNA sense strand
gaccuacgaguauuaucua

SEQ ID NO: 327048 - RNA, 19 nt, Homo sapiens
  misc_RNA (1)...(19): siRNA sense strand
caaucaacaugagaaugaa

SEQ ID NO: 327049 - RNA, 19 nt, Homo sapiens
  misc_RNA (1)...(19): siRNA sense strand
gaaguguugcuguggaaga

SEQ ID NO: 327050 - RNA, 19 nt, Homo sapiens
  misc_RNA (1)...(19): siRNA sense strand
caggaugaccuacgaguau

SEQ ID NO: 327051 - RNA, 19 nt, Homo sapiens
  misc_RNA (1)...(19): siRNA sense strand
ggagcuagucuacaaucaa

SEQ ID NO: 327052 - RNA, 19 nt, Homo sapiens
  misc_RNA (1)...(19): siRNA sense strand
agacggagguggcggucaa

SEQ ID NO: 327053 - RNA, 19 nt, Homo sapiens
  misc_RNA (1)...(19): siRNA sense strand
agaauucacaggaguuauu

SEQ ID NO: 327054 - RNA, 19 nt, Homo sapiens
  misc_RNA (1)...(19): siRNA sense strand
cacugggcauauaaauuua

SEQ ID NO: 327055 - RNA, 19 nt, Homo sapiens
  misc_RNA (1)...(19): siRNA sense strand
cagguucaauggauaauac

SEQ ID NO: 327056 - RNA, 19 nt, Homo sapiens
  misc_RNA (1)...(19): siRNA sense strand
gauauuggacaugguuuga

SEQ ID NO: 327057 - RNA, 19 nt, Homo sapiens
  misc_RNA (1)...(19): siRNA sense strand
ggcaaacaaaucaaaggua

SEQ ID NO: 327058 - RNA, 19 nt, Homo sapiens
  misc_RNA (1)...(19): siRNA sense strand
gagaucccacaauguauga

SEQ ID NO: 327059 - RNA, 19 nt, Homo sapiens
  misc_RNA (1)...(19): siRNA sense strand
gaauucacaggaguuauug

SEQ ID NO: 327060 - RNA, 19 nt, Homo sapiens
  misc_RNA (1)...(19): siRNA sense strand
auuaugggaugcuaucaaa

SEQ ID NO: 327061 - RNA, 19 nt, Homo sapiens
  misc_RNA (1)...(19): siRNA sense strand
aaugguaacuguguaagga

SEQ ID NO: 327062 - RNA, 19 nt, Homo sapiens
  misc_RNA (1)...(19): siRNA sense strand
cagauuccauccaaauucu

SEQ ID NO: 327063 - RNA, 19 nt, Homo sapiens
  misc_RNA (1)...(19): siRNA sense strand
agaccacuaucagccuuua

SEQ ID NO: 327064 - RNA, 19 nt, Homo sapiens
  misc_RNA (1)...(19): siRNA sense strand
caacaaggagaucccacaa

SEQ ID NO: 327065 - RNA, 19 nt, Homo sapiens
  misc_RNA (1)...(19): siRNA sense strand
gauuccauccaaauucuaa

SEQ ID NO: 327066 - RNA, 19 nt, Homo sapiens
  misc_RNA (1)...(19): siRNA sense strand
aaacagcaagugaguugaa

SEQ ID NO: 327067 - RNA, 19 nt, Homo sapiens
  misc_RNA (1)...(19): siRNA sense strand
gagaaacagaacaaucaga

SEQ ID NO: 327068 - RNA, 19 nt, Homo sapiens
  misc_RNA (1)...(19): siRNA sense strand
gaacacaugaaagggaaug

SEQ ID NO: 327069 - RNA, 19 nt, Homo sapiens
  misc_RNA (1)...(19): siRNA sense strand
auggagaucaggaauguua

SEQ ID NO: 327070 - RNA, 19 nt, Homo sapiens
  misc_RNA (1)...(19): siRNA sense strand
uauuggacaugguuugaug

SEQ ID NO: 327071 - RNA, 19 nt, Homo sapiens
  misc_RNA (1)...(19): siRNA sense strand
ggaccaauucauuccuuga

SEQ ID NO: 327072 - RNA, 19 nt, Homo sapiens
  misc_RNA (1)...(19): siRNA sense strand
gucagaguguggucgguaa

SEQ ID NO: 327073 - RNA, 19 nt, Homo sapiens
  misc_RNA (1)...(19): siRNA sense strand
gggagaaaaugaagaagga

SEQ ID NO: 327074 - RNA, 19 nt, Homo sapiens
  misc_RNA (1)...(19): siRNA sense strand
guauuucccgugacucgua

SEQ ID NO: 327075 - RNA, 19 nt, Homo sapiens
  misc_RNA (1)...(19): siRNA sense strand
gaacagaaucccucuuccu

SEQ ID NO: 327076 - RNA, 19 nt, Homo sapiens
  misc_RNA (1)...(19): siRNA sense strand
ugagaauucacaggaguua

SEQ ID NO: 327077 - RNA, 19 nt, Homo sapiens
  misc_RNA (1)...(19): siRNA sense strand
caucagguucaauggauaa

SEQ ID NO: 327078 - RNA, 19 nt, Homo sapiens
  misc_RNA (1)...(19): siRNA sense strand
auacuauaguggacugaaa

SEQ ID NO: 327079 - RNA, 19 nt, Homo sapiens
  misc_RNA (1)...(19): siRNA sense strand
ccaauucauuccuugacau

SEQ ID NO: 327080 - RNA, 19 nt, Homo sapiens
  misc_RNA (1)...(19): siRNA sense strand
ccagauuccauccaaauuc

SEQ ID NO: 327081 - RNA, 19 nt, Homo sapiens
  misc_RNA (1)...(19): siRNA sense strand
gaacauauaugaccaaauc

SEQ ID NO: 327082 - RNA, 19 nt, Homo sapiens
  misc_RNA (1)...(19): siRNA sense strand
gcaagugaguugaagauuu

SEQ ID NO: 327083 - RNA, 19 nt, Homo sapiens
  misc_RNA (1)...(19): siRNA sense strand
gcaaacaaaucaaagguau

SEQ ID NO: 327084 - RNA, 19 nt, Homo sapiens
  misc_RNA (1)...(19): siRNA sense strand
aaacaagcaucagaucuua

SEQ ID NO: 327085 - RNA, 19 nt, Homo sapiens
  misc_RNA (1)...(19): siRNA sense strand
ccacugggcauauaaauuu

SEQ ID NO: 327086 - RNA, 19 nt, Homo sapiens
  misc_RNA (1)...(19): siRNA sense strand
cgaguauuaucuagucuua

SEQ ID NO: 327087 - RNA, 19 nt, Homo sapiens
  misc_RNA (1)...(19): siRNA sense strand
uaguagagauggugaaauu

SEQ ID NO: 327088 - RNA, 19 nt, Homo sapiens
  misc_RNA (1)...(19): siRNA sense strand
gaaagaaaccaccaaacga

SEQ ID NO: 327089 - RNA, 19 nt, Homo sapiens
  misc_RNA (1)...(19): siRNA sense strand
gagcuuauaguccacaaua

SEQ ID NO: 327090 - RNA, 19 nt, Homo sapiens
  misc_RNA (1)...(19): siRNA sense strand
gaaacagaacaaucagaua

SEQ ID NO: 327091 - RNA, 19 nt, Homo sapiens
  misc_RNA (1)...(19): siRNA sense strand
caucagaucuuagucuuau

SEQ ID NO: 327092 - RNA, 19 nt, Homo sapiens
  misc_RNA (1)...(19): siRNA sense strand
gaaagauucagauaaguug

SEQ ID NO: 327093 - RNA, 19 nt, Homo sapiens
  misc_RNA (1)...(19): siRNA sense strand
ggaaugagaccauguugga

SEQ ID NO: 327094 - RNA, 19 nt, Homo sapiens
  misc_RNA (1)...(19): siRNA sense strand
ucacuuagguuuaguagag

SEQ ID NO: 327095 - RNA, 19 nt, Homo sapiens
  misc_RNA (1)...(19): siRNA sense strand
acaaggagaucccacaaug

SEQ ID NO: 327096 - RNA, 19 nt, Homo sapiens
  misc_RNA (1)...(19): siRNA sense strand
gaucuucacuggacacaag

SEQ ID NO: 327097 - RNA, 19 nt, Homo sapiens
  misc_RNA (1)...(19): siRNA sense strand
guaaauuuguucugcguau

SEQ ID NO: 327098 - RNA, 19 nt, Homo sapiens
  misc_RNA (1)...(19): siRNA sense strand
ucagauaaguuggauaaga

SEQ ID NO: 327099 - RNA, 19 nt, Homo sapiens
  misc_RNA (1)...(19): siRNA sense strand
cagauaaguuggauaagau

SEQ ID NO: 327100 - RNA, 19 nt, Homo sapiens
  misc_RNA (1)...(19): siRNA sense strand
uuugaugguuggagaauua

SEQ ID NO: 327101 - RNA, 19 nt, Homo sapiens
  misc_RNA (1)...(19): siRNA sense strand
gagaucaggaauguuauua

SEQ ID NO: 327102 - RNA, 19 nt, Homo sapiens
  misc_RNA (1)...(19): siRNA sense strand
gcaucagguucaauggaua

SEQ ID NO: 327103 - RNA, 19 nt, Homo sapiens
  misc_RNA (1)...(19): siRNA sense strand
caagugaguugaagauuuu

SEQ ID NO: 327104 - RNA, 19 nt, Homo sapiens
  misc_RNA (1)...(19): siRNA sense strand
ggaauguuauuaccaggau

SEQ ID NO: 327105 - RNA, 19 nt, Homo sapiens
  misc_RNA (1)...(19): siRNA sense strand
ggacacaagggaccaauuc

SEQ ID NO: 327106 - RNA, 19 nt, Homo sapiens
  misc_RNA (1)...(19): siRNA sense strand
gaugggaugccgcguagua

SEQ ID NO: 327107 - RNA, 19 nt, Homo sapiens
  misc_RNA (1)...(19): siRNA sense strand
ggaugucacugaugauucu

SEQ ID NO: 327108 - RNA, 19 nt, Homo sapiens
  misc_RNA (1)...(19): siRNA sense strand
cuaucagccuuuaagaaua

SEQ ID NO: 327109 - RNA, 19 nt, Homo sapiens
  misc_RNA (1)...(19): siRNA sense strand
caaacaagcaucagaucuu

SEQ ID NO: 327110 - RNA, 19 nt, Homo sapiens
  misc_RNA (1)...(19): siRNA sense strand
gagcaccucuacauugaca

SEQ ID NO: 327111 - RNA, 19 nt, Homo sapiens
  misc_RNA (1)...(19): siRNA sense strand
cagaugaugucuuagaaag

SEQ ID NO: 327112 - RNA, 19 nt, Homo sapiens
  misc_RNA (1)...(19): siRNA sense strand
gaaucccucuuccugaguu

SEQ ID NO: 327113 - RNA, 19 nt, Homo sapiens
  misc_RNA (1)...(19): siRNA sense strand
uaaacgagaggcaaacaaa

SEQ ID NO: 327114 - RNA, 19 nt, Homo sapiens
  misc_RNA (1)...(19): siRNA sense strand
ggagguggcggucaagcua

SEQ ID NO: 327115 - RNA, 19 nt, Homo sapiens
  misc_RNA (1)...(19): siRNA sense strand
ccacaauguaugaagaaua

SEQ ID NO: 327116 - RNA, 19 nt, Homo sapiens
  misc_RNA (1)...(19): siRNA sense strand
gaugugaauuguaccagau

SEQ ID NO: 327117 - RNA, 19 nt, Homo sapiens
  misc_RNA (1)...(19): siRNA sense strand
guaguaagcaacagauaga

SEQ ID NO: 327118 - RNA, 19 nt, Homo sapiens
  misc_RNA (1)...(19): siRNA sense strand
gcacauguacuuggagcua

SEQ ID NO: 327119 - RNA, 19 nt, Homo sapiens
  misc_RNA (1)...(19): siRNA sense strand
acaaucaacaugagaauga

SEQ ID NO: 327120 - RNA, 19 nt, Homo sapiens
  misc_RNA (1)...(19): siRNA sense strand
ggguaaaguuggaaguguu

SEQ ID NO: 327121 - RNA, 19 nt, Homo sapiens
  misc_RNA (1)...(19): siRNA sense strand
gaaaacagcaagugaguug

SEQ ID NO: 327122 - RNA, 19 nt, Homo sapiens
  misc_RNA (1)...(19): siRNA sense strand
ggaugaccuacgaguauua

SEQ ID NO: 327123 - RNA, 19 nt, Homo sapiens
  misc_RNA (1)...(19): siRNA sense strand
aaggagaucccacaaugua

SEQ ID NO: 327124 - RNA, 19 nt, Homo sapiens
  misc_RNA (1)...(19): siRNA sense strand
gauggcagagugcuucuuu

SEQ ID NO: 327125 - RNA, 19 nt, Homo sapiens
  misc_RNA (1)...(19): siRNA sense strand
ccucuacauugacaucuuu

SEQ ID NO: 327126 - RNA, 19 nt, Homo sapiens
  misc_RNA (1)...(19): siRNA sense strand
gagcuagucuacaaucaac

SEQ ID NO: 327127 - RNA, 19 nt, Homo sapiens
  misc_RNA (1)...(19): siRNA sense strand
ggagaucccacaauguaug

SEQ ID NO: 327128 - RNA, 19 nt, Homo sapiens
  misc_RNA (1)...(19): siRNA sense strand
gggacguccugaaugguaa

SEQ ID NO: 327129 - RNA, 19 nt, Homo sapiens
  misc_RNA (1)...(19): siRNA sense strand
agaggcaucuucaggagaa

SEQ ID NO: 327130 - RNA, 19 nt, Homo sapiens
  misc_RNA (1)...(19): siRNA sense strand
gaaguuccauggagaucag

SEQ ID NO: 327131 - RNA, 19 nt, Homo sapiens
  misc_RNA (1)...(19): siRNA sense strand
ccauggagaucaggaaugu

SEQ ID NO: 327132 - RNA, 19 nt, Homo sapiens
  misc_RNA (1)...(19): siRNA sense strand
gagaggcaaacaaaucaaa

SEQ ID NO: 327133 - RNA, 19 nt, Homo sapiens
  misc_RNA (1)...(19): siRNA sense strand
ggagaucaggaauguuauu

SEQ ID NO: 327134 - RNA, 19 nt, Homo sapiens
  misc_RNA (1)...(19): siRNA sense strand
gaccaaaucaacaccaguu

SEQ ID NO: 327135 - RNA, 19 nt, Homo sapiens
  misc_RNA (1)...(19): siRNA sense strand
guaccagauuccauccaaa

SEQ ID NO: 327136 - RNA, 19 nt, Homo sapiens
  misc_RNA (1)...(19): siRNA sense strand
gcaucagaucuuagucuua

SEQ ID NO: 327137 - RNA, 19 nt, Homo sapiens
  misc_RNA (1)...(19): siRNA sense strand
gaaauugagguaccuuugg

SEQ ID NO: 327138 - RNA, 19 nt, Homo sapiens
  misc_RNA (1)...(19): siRNA sense strand
cuacgaguauuaucuaguc

SEQ ID NO: 327139 - RNA, 19 nt, Homo sapiens
  misc_RNA (1)...(19): siRNA sense strand
gggaacauauaugaccaaa

SEQ ID NO: 327140 - RNA, 19 nt, Homo sapiens
  misc_RNA (1)...(19): siRNA sense strand
aggagcaccucuacauuga

SEQ ID NO: 327141 - RNA, 19 nt, Homo sapiens
  misc_RNA (1)...(19): siRNA sense strand
cacaagggaccaauucauu

SEQ ID NO: 327142 - RNA, 19 nt, Homo sapiens
  misc_RNA (1)...(19): siRNA sense strand
gaucaggaauguuauuacc

SEQ ID NO: 327143 - RNA, 19 nt, Homo sapiens
  misc_RNA (1)...(19): siRNA sense strand
ggcaucagguucaauggau

SEQ ID NO: 327144 - RNA, 19 nt, Homo sapiens
  misc_RNA (1)...(19): siRNA sense strand
gaagaaggaaaaccuaaaa

SEQ ID NO: 327145 - RNA, 19 nt, Homo sapiens
  misc_RNA (1)...(19): siRNA sense strand
aaauugagguaccuuugga

SEQ ID NO: 327146 - RNA, 19 nt, Homo sapiens
  misc_RNA (1)...(19): siRNA sense strand
caggagcaccucuacauug

SEQ ID NO: 327147 - RNA, 19 nt, Homo sapiens
  misc_RNA (1)...(19): siRNA sense strand
gaccuacgaguauuaucua

SEQ ID NO: 327148 - RNA, 19 nt, Homo sapiens
  misc_RNA (1)...(19): siRNA sense strand
caaucaacaugagaaugaa

SEQ ID NO: 327149 - RNA, 19 nt, Homo sapiens
  misc_RNA (1)...(19): siRNA sense strand
gaaguguugcuguggaaga

SEQ ID NO: 327150 - RNA, 19 nt, Homo sapiens
  misc_RNA (1)...(19): siRNA sense strand
caggaugaccuacgaguau

SEQ ID NO: 327151 - RNA, 19 nt, Homo sapiens
  misc_RNA (1)...(19): siRNA sense strand
ggagcuagucuacaaucaa

SEQ ID NO: 327152 - RNA, 19 nt, Homo sapiens
  misc_RNA (1)...(19): siRNA sense strand
agacggagguggcggucaa

SEQ ID NO: 327153 - RNA, 19 nt, Homo sapiens
  misc_RNA (1)...(19): siRNA sense strand
agaauucacaggaguuauu

SEQ ID NO: 327154 - RNA, 19 nt, Homo sapiens
  misc_RNA (1)...(19): siRNA sense strand
cacugggcauauaaauuua

SEQ ID NO: 327155 - RNA, 19 nt, Homo sapiens
  misc_RNA (1)...(19): siRNA sense strand
cagguucaauggauaauac

SEQ ID NO: 327156 - RNA, 19 nt, Homo sapiens
  misc_RNA (1)...(19): siRNA sense strand
gauauuggacaugguuuga

SEQ ID NO: 327157 - RNA, 19 nt, Homo sapiens
  misc_RNA (1)...(19): siRNA sense strand
ggcaaacaaaucaaaggua

SEQ ID NO: 327158 - RNA, 19 nt, Homo sapiens
  misc_RNA (1)...(19): siRNA sense strand
gagaucccacaauguauga

SEQ ID NO: 327159 - RNA, 19 nt, Homo sapiens
  misc_RNA (1)...(19): siRNA sense strand
gaauucacaggaguuauug

SEQ ID NO: 327160 - RNA, 19 nt, Homo sapiens
  misc_RNA (1)...(19): siRNA sense strand
auuaugggaugcuaucaaa

SEQ ID NO: 327161 - RNA, 19 nt, Homo sapiens
  misc_RNA (1)...(19): siRNA sense strand
aaugguaacuguguaagga

SEQ ID NO: 327162 - RNA, 19 nt, Homo sapiens
  misc_RNA (1)...(19): siRNA sense strand
cagauuccauccaaauucu

SEQ ID NO: 327163 - RNA, 19 nt, Homo sapiens
  misc_RNA (1)...(19): siRNA sense strand
agaccacuaucagccuuua

SEQ ID NO: 327164 - RNA, 19 nt, Homo sapiens
  misc_RNA (1)...(19): siRNA sense strand
caacaaggagaucccacaa

SEQ ID NO: 327165 - RNA, 19 nt, Homo sapiens
  misc_RNA (1)...(19): siRNA sense strand
gauuccauccaaauucuaa

SEQ ID NO: 327166 - RNA, 19 nt, Homo sapiens
  misc_RNA (1)...(19): siRNA sense strand
aaacagcaagugaguugaa

SEQ ID NO: 327167 - RNA, 19 nt, Homo sapiens
  misc_RNA (1)...(19): siRNA sense strand
gagaaacagaacaaucaga

SEQ ID NO: 327168 - RNA, 19 nt, Homo sapiens
  misc_RNA (1)...(19): siRNA sense strand
gaacacaugaaagggaaug

SEQ ID NO: 327169 - RNA, 19 nt, Homo sapiens
  misc_RNA (1)...(19): siRNA sense strand
auggagaucaggaauguua

SEQ ID NO: 327170 - RNA, 19 nt, Homo sapiens
  misc_RNA (1)...(19): siRNA sense strand
uauuggacaugguuugaug

SEQ ID NO: 327171 - RNA, 19 nt, Homo sapiens
  misc_RNA (1)...(19): siRNA sense strand
ggaccaauucauuccuuga

SEQ ID NO: 327172 - RNA, 19 nt, Homo sapiens
  misc_RNA (1)...(19): siRNA sense strand
gucagaguguggucgguaa

SEQ ID NO: 327173 - RNA, 19 nt, Homo sapiens
  misc_RNA (1)...(19): siRNA sense strand
gggagaaaaugaagaagga

SEQ ID NO: 327174 - RNA, 19 nt, Homo sapiens
  misc_RNA (1)...(19): siRNA sense strand
guauuucccgugacucgua

SEQ ID NO: 327175 - RNA, 19 nt, Homo sapiens
  misc_RNA (1)...(19): siRNA sense strand
gaacagaaucccucuuccu

SEQ ID NO: 327176 - RNA, 19 nt, Homo sapiens
  misc_RNA (1)...(19): siRNA sense strand
ugagaauucacaggaguua

SEQ ID NO: 327177 - RNA, 19 nt, Homo sapiens
  misc_RNA (1)...(19): siRNA sense strand
caucagguucaauggauaa

SEQ ID NO: 327178 - RNA, 19 nt, Homo sapiens
  misc_RNA (1)...(19): siRNA sense strand
auacuauaguggacugaaa

SEQ ID NO: 327179 - RNA, 19 nt, Homo sapiens
  misc_RNA (1)...(19): siRNA sense strand
ccaauucauuccuugacau

SEQ ID NO: 327180 - RNA, 19 nt, Homo sapiens
  misc_RNA (1)...(19): siRNA sense strand
ccagauuccauccaaauuc

SEQ ID NO: 327181 - RNA, 19 nt, Homo sapiens
  misc_RNA (1)...(19): siRNA sense strand
gcaaauagcucucgaaaug

SEQ ID NO: 327182 - RNA, 19 nt, Homo sapiens
  misc_RNA (1)...(19): siRNA sense strand
gggaagaaguucauaaaua

SEQ ID NO: 327183 - RNA, 19 nt, Homo sapiens
  misc_RNA (1)...(19): siRNA sense strand
cagaauacauugcugauua

SEQ ID NO: 327184 - RNA, 19 nt, Homo sapiens
  misc_RNA (1)...(19): siRNA sense strand
gcagaacuguugcggauua

SEQ ID NO: 327185 - RNA, 19 nt, Homo sapiens
  misc_RNA (1)...(19): siRNA sense strand
gagcaaguguucaagaaua

SEQ ID NO: 327186 - RNA, 19 nt, Homo sapiens
  misc_RNA (1)...(19): siRNA sense strand
ggaaucaccuccucaugua

SEQ ID NO: 327187 - RNA, 19 nt, Homo sapiens
  misc_RNA (1)...(19): siRNA sense strand
ucaagcaccugaagauuua

SEQ ID NO: 327188 - RNA, 19 nt, Homo sapiens
  misc_RNA (1)...(19): siRNA sense strand
acaaauacauggcugguua

SEQ ID NO: 327189 - RNA, 19 nt, Homo sapiens
  misc_RNA (1)...(19): siRNA sense strand
ggagacucaugaagaauua

SEQ ID NO: 327190 - RNA, 19 nt, Homo sapiens
  misc_RNA (1)...(19): siRNA sense strand
gcagaaagcuagauaaacu

SEQ ID NO: 327191 - RNA, 19 nt, Homo sapiens
  misc_RNA (1)...(19): siRNA sense strand
gcaaagaaguggaauuuac

SEQ ID NO: 327192 - RNA, 19 nt, Homo sapiens
  misc_RNA (1)...(19): siRNA sense strand
ggauauaucuuugcgguuu

SEQ ID NO: 327193 - RNA, 19 nt, Homo sapiens
  misc_RNA (1)...(19): siRNA sense strand
guaaacaucuuccugaauc

SEQ ID NO: 327194 - RNA, 19 nt, Homo sapiens
  misc_RNA (1)...(19): siRNA sense strand
gcagaggacuucccuuuca

SEQ ID NO: 327195 - RNA, 19 nt, Homo sapiens
  misc_RNA (1)...(19): siRNA sense strand
guaauucacuuaacagcaa

SEQ ID NO: 327196 - RNA, 19 nt, Homo sapiens
  misc_RNA (1)...(19): siRNA sense strand
guacucaucuuauacugaa

SEQ ID NO: 327197 - RNA, 19 nt, Homo sapiens
  misc_RNA (1)...(19): siRNA sense strand
caaaagaguuuccuuguuu

SEQ ID NO: 327198 - RNA, 19 nt, Homo sapiens
  misc_RNA (1)...(19): siRNA sense strand
gaucugcucucucaauaug

SEQ ID NO: 327199 - RNA, 19 nt, Homo sapiens
  misc_RNA (1)...(19): siRNA sense strand
gauaaacugagaagacuua

SEQ ID NO: 327200 - RNA, 19 nt, Homo sapiens
  misc_RNA (1)...(19): siRNA sense strand
caaagacuaugcccaauuc

SEQ ID NO: 327201 - RNA, 19 nt, Homo sapiens
  misc_RNA (1)...(19): siRNA sense strand
gcacacgccugcaaacuca

SEQ ID NO: 327202 - RNA, 19 nt, Homo sapiens
  misc_RNA (1)...(19): siRNA sense strand
uaacaucgcaaacaucaua

SEQ ID NO: 327203 - RNA, 19 nt, Homo sapiens
  misc_RNA (1)...(19): siRNA sense strand
gauuucaaguguccuauuu

SEQ ID NO: 327204 - RNA, 19 nt, Homo sapiens
  misc_RNA (1)...(19): siRNA sense strand
ggaagaagacuaugaaugg

SEQ ID NO: 327205 - RNA, 19 nt, Homo sapiens
  misc_RNA (1)...(19): siRNA sense strand
gaaagaggaguacacauug

SEQ ID NO: 327206 - RNA, 19 nt, Homo sapiens
  misc_RNA (1)...(19): siRNA sense strand
gcugagcccuugaaugauu

SEQ ID NO: 327207 - RNA, 19 nt, Homo sapiens
  misc_RNA (1)...(19): siRNA sense strand
caaauccaaugcaaagaaa

SEQ ID NO: 327208 - RNA, 19 nt, Homo sapiens
  misc_RNA (1)...(19): siRNA sense strand
auacauggcugguuacuug

SEQ ID NO: 327209 - RNA, 19 nt, Homo sapiens
  misc_RNA (1)...(19): siRNA sense strand
ccacaggccucauguagug

SEQ ID NO: 327210 - RNA, 19 nt, Homo sapiens
  misc_RNA (1)...(19): siRNA sense strand
acacagaccuuagagauga

SEQ ID NO: 327211 - RNA, 19 nt, Homo sapiens
  misc_RNA (1)...(19): siRNA sense strand
gaagcagagugaacuaaau

SEQ ID NO: 327212 - RNA, 19 nt, Homo sapiens
  misc_RNA (1)...(19): siRNA sense strand
ccugauguuucuacaauua

SEQ ID NO: 327213 - RNA, 19 nt, Homo sapiens
  misc_RNA (1)...(19): siRNA sense strand
gaacuggaaacucccauaa

SEQ ID NO: 327214 - RNA, 19 nt, Homo sapiens
  misc_RNA (1)...(19): siRNA sense strand
gaagaacgaaguuuggaaa

SEQ ID NO: 327215 - RNA, 19 nt, Homo sapiens
  misc_RNA (1)...(19): siRNA sense strand
gauguaaccauaucuugua

SEQ ID NO: 327216 - RNA, 19 nt, Homo sapiens
  misc_RNA (1)...(19): siRNA sense strand
gaauuuaccugccguuacu

SEQ ID NO: 327217 - RNA, 19 nt, Homo sapiens
  misc_RNA (1)...(19): siRNA sense strand
ggagaagucacaagagaaa

SEQ ID NO: 327218 - RNA, 19 nt, Homo sapiens
  misc_RNA (1)...(19): siRNA sense strand
gcaaauccaaugcaaagaa

SEQ ID NO: 327219 - RNA, 19 nt, Homo sapiens
  misc_RNA (1)...(19): siRNA sense strand
ccagcuaaaugaagaugua

SEQ ID NO: 327220 - RNA, 19 nt, Homo sapiens
  misc_RNA (1)...(19): siRNA sense strand
gacagaaccuagaccagaa

SEQ ID NO: 327221 - RNA, 19 nt, Homo sapiens
  misc_RNA (1)...(19): siRNA sense strand
acacuaaucgggaguauaa

SEQ ID NO: 327222 - RNA, 19 nt, Homo sapiens
  misc_RNA (1)...(19): siRNA sense strand
gaagaaaccuauuuugcuu

SEQ ID NO: 327223 - RNA, 19 nt, Homo sapiens
  misc_RNA (1)...(19): siRNA sense strand
gggacuggauuaucacaaa

SEQ ID NO: 327224 - RNA, 19 nt, Homo sapiens
  misc_RNA (1)...(19): siRNA sense strand
gacaauauggccaccaaua

SEQ ID NO: 327225 - RNA, 19 nt, Homo sapiens
  misc_RNA (1)...(19): siRNA sense strand
gagauggaauguacacugu

SEQ ID NO: 327226 - RNA, 19 nt, Homo sapiens
  misc_RNA (1)...(19): siRNA sense strand
gaacguguacugcuugaga

SEQ ID NO: 327227 - RNA, 19 nt, Homo sapiens
  misc_RNA (1)...(19): siRNA sense strand
guagugguauguguuagua

SEQ ID NO: 327228 - RNA, 19 nt, Homo sapiens
  misc_RNA (1)...(19): siRNA sense strand
gagccgaacauccaguuua

SEQ ID NO: 327229 - RNA, 19 nt, Homo sapiens
  misc_RNA (1)...(19): siRNA sense strand
gcaaagacuaugcccaauu

SEQ ID NO: 327230 - RNA, 19 nt, Homo sapiens
  misc_RNA (1)...(19): siRNA sense strand
cauggaagauuucaagugu

SEQ ID NO: 327231 - RNA, 19 nt, Homo sapiens
  misc_RNA (1)...(19): siRNA sense strand
gccaggcccuuuaaugauu

SEQ ID NO: 327232 - RNA, 19 nt, Homo sapiens
  misc_RNA (1)...(19): siRNA sense strand
ccacaguaguugaggcuaa

SEQ ID NO: 327233 - RNA, 19 nt, Homo sapiens
  misc_RNA (1)...(19): siRNA sense strand
ugagcaagcugaugaagau

SEQ ID NO: 327234 - RNA, 19 nt, Homo sapiens
  misc_RNA (1)...(19): siRNA sense strand
guuauaugcuuucugaaga

SEQ ID NO: 327235 - RNA, 19 nt, Homo sapiens
  misc_RNA (1)...(19): siRNA sense strand
ucagaugucagcaauauuu

SEQ ID NO: 327236 - RNA, 19 nt, Homo sapiens
  misc_RNA (1)...(19): siRNA sense strand
gccaagagauggaauguac

SEQ ID NO: 327237 - RNA, 19 nt, Homo sapiens
  misc_RNA (1)...(19): siRNA sense strand
cagcaauauuuccaacaua

SEQ ID NO: 327238 - RNA, 19 nt, Homo sapiens
  misc_RNA (1)...(19): siRNA sense strand
guaaccauaucuuguacaa

SEQ ID NO: 327239 - RNA, 19 nt, Homo sapiens
  misc_RNA (1)...(19): siRNA sense strand
gaagaucugcucucucaau

SEQ ID NO: 327240 - RNA, 19 nt, Homo sapiens
  misc_RNA (1)...(19): siRNA sense strand
gcuagaguguuucaguaaa

SEQ ID NO: 327241 - RNA, 19 nt, Homo sapiens
  misc_RNA (1)...(19): siRNA sense strand
gagaagacuuauuaacagu

SEQ ID NO: 327242 - RNA, 19 nt, Homo sapiens
  misc_RNA (1)...(19): siRNA sense strand
aaccauauauccaugcuaa

SEQ ID NO: 327243 - RNA, 19 nt, Homo sapiens
  misc_RNA (1)...(19): siRNA sense strand
gaaucucuuuauccacaua

SEQ ID NO: 327244 - RNA, 19 nt, Homo sapiens
  misc_RNA (1)...(19): siRNA sense strand
ggaaagagagcagacgaaa

SEQ ID NO: 327245 - RNA, 19 nt, Homo sapiens
  misc_RNA (1)...(19): siRNA sense strand
caguaaagguuauaugcuu

SEQ ID NO: 327246 - RNA, 19 nt, Homo sapiens
  misc_RNA (1)...(19): siRNA sense strand
accagaagcuauuucauuu

SEQ ID NO: 327247 - RNA, 19 nt, Homo sapiens
  misc_RNA (1)...(19): siRNA sense strand
caacgaagacuagcacuug

SEQ ID NO: 327248 - RNA, 19 nt, Homo sapiens
  misc_RNA (1)...(19): siRNA sense strand
gcaggaagaagacuaugaa

SEQ ID NO: 327249 - RNA, 19 nt, Homo sapiens
  misc_RNA (1)...(19): siRNA sense strand
gagagaacuuucagaagca

SEQ ID NO: 327250 - RNA, 19 nt, Homo sapiens
  misc_RNA (1)...(19): siRNA sense strand
gaaagaaugacucuaaagg

SEQ ID NO: 327251 - RNA, 19 nt, Homo sapiens
  misc_RNA (1)...(19): siRNA sense strand
gaucgcagccucucuagga

SEQ ID NO: 327252 - RNA, 19 nt, Homo sapiens
  misc_RNA (1)...(19): siRNA sense strand
uaaagaagaacgaaguuug

SEQ ID NO: 327253 - RNA, 19 nt, Homo sapiens
  misc_RNA (1)...(19): siRNA sense strand
acagagaccuuaauguauc

SEQ ID NO: 327254 - RNA, 19 nt, Homo sapiens
  misc_RNA (1)...(19): siRNA sense strand
agaggagacucaugaagaa

SEQ ID NO: 327255 - RNA, 19 nt, Homo sapiens
  misc_RNA (1)...(19): siRNA sense strand
uugcguaagugaaucaaua

SEQ ID NO: 327256 - RNA, 19 nt, Homo sapiens
  misc_RNA (1)...(19): siRNA sense strand
ugaaagaggcccagucaga

SEQ ID NO: 327257 - RNA, 19 nt, Homo sapiens
  misc_RNA (1)...(19): siRNA sense strand
aaacauacgugugacugaa

SEQ ID NO: 327258 - RNA, 19 nt, Homo sapiens
  misc_RNA (1)...(19): siRNA sense strand
ccgaacauccaguuuauaa

SEQ ID NO: 327259 - RNA, 19 nt, Homo sapiens
  misc_RNA (1)...(19): siRNA sense strand
ccaaacacccaaucucuga

SEQ ID NO: 327260 - RNA, 19 nt, Homo sapiens
  misc_RNA (1)...(19): siRNA sense strand
agaaagaggaguacacauu

SEQ ID NO: 327261 - RNA, 19 nt, Homo sapiens
  misc_RNA (1)...(19): siRNA sense strand
ugacucauuucaucuauca

SEQ ID NO: 327262 - RNA, 19 nt, Homo sapiens
  misc_RNA (1)...(19): siRNA sense strand
gaacgugguggcucuaaau

SEQ ID NO: 327263 - RNA, 19 nt, Homo sapiens
  misc_RNA (1)...(19): siRNA sense strand
gaagccaggcccuuuaaug

SEQ ID NO: 327264 - RNA, 19 nt, Homo sapiens
  misc_RNA (1)...(19): siRNA sense strand
aagaucugcucucucaaua

SEQ ID NO: 327265 - RNA, 19 nt, Homo sapiens
  misc_RNA (1)...(19): siRNA sense strand
aacagcagcuucucuaaga

SEQ ID NO: 327266 - RNA, 19 nt, Homo sapiens
  misc_RNA (1)...(19): siRNA sense strand
aagaacguauugacuauug

SEQ ID NO: 327267 - RNA, 19 nt, Homo sapiens
  misc_RNA (1)...(19): siRNA sense strand
gggcagaggacuucccuuu

SEQ ID NO: 327268 - RNA, 19 nt, Homo sapiens
  misc_RNA (1)...(19): siRNA sense strand
guggaaagaaugacucuaa

SEQ ID NO: 327269 - RNA, 19 nt, Homo sapiens
  misc_RNA (1)...(19): siRNA sense strand
aaagcuagauaaacugaga

SEQ ID NO: 327270 - RNA, 19 nt, Homo sapiens
  misc_RNA (1)...(19): siRNA sense strand
gaaacauacgugugacuga

SEQ ID NO: 327271 - RNA, 19 nt, Homo sapiens
  misc_RNA (1)...(19): siRNA sense strand
aaugguagcuccacaguag

SEQ ID NO: 327272 - RNA, 19 nt, Homo sapiens
  misc_RNA (1)...(19): siRNA sense strand
aagguuauaugcuuucuga

SEQ ID NO: 327273 - RNA, 19 nt, Homo sapiens
  misc_RNA (1)...(19): siRNA sense strand
ugagaagacuuauuaacag

SEQ ID NO: 327274 - RNA, 19 nt, Homo sapiens
  misc_RNA (1)...(19): siRNA sense strand
gaacagcagcuucucuaag

SEQ ID NO: 327275 - RNA, 19 nt, Homo sapiens
  misc_RNA (1)...(19): siRNA sense strand
ggaaagcuccuacagaaaa

SEQ ID NO: 327276 - RNA, 19 nt, Homo sapiens
  misc_RNA (1)...(19): siRNA sense strand
gaacuugggacuggauuau

SEQ ID NO: 327277 - RNA, 19 nt, Homo sapiens
  misc_RNA (1)...(19): siRNA sense strand
ccagaagcuauuucauuua

SEQ ID NO: 327278 - RNA, 19 nt, Homo sapiens
  misc_RNA (1)...(19): siRNA sense strand
gaucccaccuguacacaca

SEQ ID NO: 327279 - RNA, 19 nt, Homo sapiens
  misc_RNA (1)...(19): siRNA sense strand
aaaaugagcuuggauauca

SEQ ID NO: 327280 - RNA, 19 nt, Homo sapiens
  misc_RNA (1)...(19): siRNA sense strand
uuuaguggguggaagguua

SEQ ID NO: 327281 - RNA, 19 nt, Homo sapiens
  misc_RNA (1)...(19): siRNA sense strand
gagaagagauggcaagaaa

SEQ ID NO: 327282 - RNA, 19 nt, Homo sapiens
  misc_RNA (1)...(19): siRNA sense strand
caacaaaggugucauagga

SEQ ID NO: 327283 - RNA, 19 nt, Homo sapiens
  misc_RNA (1)...(19): siRNA sense strand
gaucaaagcuuaccgagau

SEQ ID NO: 327284 - RNA, 19 nt, Homo sapiens
  misc_RNA (1)...(19): siRNA sense strand
gggcaaugcuggcacgaua

SEQ ID NO: 327285 - RNA, 19 nt, Homo sapiens
  misc_RNA (1)...(19): siRNA sense strand
gaccaaggaggacaaauua

SEQ ID NO: 327286 - RNA, 19 nt, Homo sapiens
  misc_RNA (1)...(19): siRNA sense strand
gaagagauggcaagaaaga

SEQ ID NO: 327287 - RNA, 19 nt, Homo sapiens
  misc_RNA (1)...(19): siRNA sense strand
gagagggacuucagagaug

SEQ ID NO: 327288 - RNA, 19 nt, Homo sapiens
  misc_RNA (1)...(19): siRNA sense strand
ccaaggaggacaaauuaaa

SEQ ID NO: 327289 - RNA, 19 nt, Homo sapiens
  misc_RNA (1)...(19): siRNA sense strand
gcuacgccuucaucgaaua

SEQ ID NO: 327290 - RNA, 19 nt, Homo sapiens
  misc_RNA (1)...(19): siRNA sense strand
gcugauggccugguuauug

SEQ ID NO: 327291 - RNA, 19 nt, Homo sapiens
  misc_RNA (1)...(19): siRNA sense strand
gaaggaaagaggcaaguag

SEQ ID NO: 327292 - RNA, 19 nt, Homo sapiens
  misc_RNA (1)...(19): siRNA sense strand
ugaccagcaugagauauuu

SEQ ID NO: 327293 - RNA, 19 nt, Homo sapiens
  misc_RNA (1)...(19): siRNA sense strand
gggcuacgccuucaucgaa

SEQ ID NO: 327294 - RNA, 19 nt, Homo sapiens
  misc_RNA (1)...(19): siRNA sense strand
gacaagggaucgagaccau

SEQ ID NO: 327295 - RNA, 19 nt, Homo sapiens
  misc_RNA (1)...(19): siRNA sense strand
gugccgugaucaaagcuua

SEQ ID NO: 327296 - RNA, 19 nt, Homo sapiens
  misc_RNA (1)...(19): siRNA sense strand
cugauggccugguuauuga

SEQ ID NO: 327297 - RNA, 19 nt, Homo sapiens
  misc_RNA (1)...(19): siRNA sense strand
caagggaucgagaccauga

SEQ ID NO: 327298 - RNA, 19 nt, Homo sapiens
  misc_RNA (1)...(19): siRNA sense strand
gggacuuggucacagguuu

SEQ ID NO: 327299 - RNA, 19 nt, Homo sapiens
  misc_RNA (1)...(19): siRNA sense strand
ggaggacaaauuaaaggaa

SEQ ID NO: 327300 - RNA, 19 nt, Homo sapiens
  misc_RNA (1)...(19): siRNA sense strand
gcauugauggcaccgauga

SEQ ID NO: 327301 - RNA, 19 nt, Homo sapiens
  misc_RNA (1)...(19): siRNA sense strand
ggagggagaagaaggaaag

SEQ ID NO: 327302 - RNA, 19 nt, Homo sapiens
  misc_RNA (1)...(19): siRNA sense strand
ggguguggcccgacaauga

SEQ ID NO: 327303 - RNA, 19 nt, Homo sapiens
  misc_RNA (1)...(19): siRNA sense strand
gcaaugcuggcacgauaug

SEQ ID NO: 327304 - RNA, 19 nt, Homo sapiens
  misc_RNA (1)...(19): siRNA sense strand
gagagagggacuucagaga

SEQ ID NO: 327305 - RNA, 19 nt, Homo sapiens
  misc_RNA (1)...(19): siRNA sense strand
gacuaaacuugcagaccaa

SEQ ID NO: 327306 - RNA, 19 nt, Homo sapiens
  misc_RNA (1)...(19): siRNA sense strand
agaccaaggaggacaaauu

SEQ ID NO: 327307 - RNA, 19 nt, Homo sapiens
  misc_RNA (1)...(19): siRNA sense strand
caaggaggacaaauuaaag

SEQ ID NO: 327308 - RNA, 19 nt, Homo sapiens
  misc_RNA (1)...(19): siRNA sense strand
ucgaaaaccuauuaacuug

SEQ ID NO: 327309 - RNA, 19 nt, Homo sapiens
  misc_RNA (1)...(19): siRNA sense strand
ggagaagagauggcaagaa

SEQ ID NO: 327310 - RNA, 19 nt, Homo sapiens
  misc_RNA (1)...(19): siRNA sense strand
ggagagagagagggacuuc

SEQ ID NO: 327311 - RNA, 19 nt, Homo sapiens
  misc_RNA (1)...(19): siRNA sense strand
acucaaagcgggcagcauu

SEQ ID NO: 327312 - RNA, 19 nt, Homo sapiens
  misc_RNA (1)...(19): siRNA sense strand
ugagauauuuguggacuac

SEQ ID NO: 327313 - RNA, 19 nt, Homo sapiens
  misc_RNA (1)...(19): siRNA sense strand
gagagagagggacuucaga

SEQ ID NO: 327314 - RNA, 19 nt, Homo sapiens
  misc_RNA (1)...(19): siRNA sense strand
aaaggagucugggcaacug

SEQ ID NO: 327315 - RNA, 19 nt, Homo sapiens
  misc_RNA (1)...(19): siRNA sense strand
agagggacuucagagauga

SEQ ID NO: 327316 - RNA, 19 nt, Homo sapiens
  misc_RNA (1)...(19): siRNA sense strand
ggagcgugccgugaucaaa

SEQ ID NO: 327317 - RNA, 19 nt, Homo sapiens
  misc_RNA (1)...(19): siRNA sense strand
agagauggcaagaaagaga

SEQ ID NO: 327318 - RNA, 19 nt, Homo sapiens
  misc_RNA (1)...(19): siRNA sense strand
gagcuggaaaggacucuca

SEQ ID NO: 327319 - RNA, 19 nt, Homo sapiens
  misc_RNA (1)...(19): siRNA sense strand
gagcgugccgugaucaaag

SEQ ID NO: 327320 - RNA, 19 nt, Homo sapiens
  misc_RNA (1)...(19): siRNA sense strand
guuauugaccagcaugaga

SEQ ID NO: 327321 - RNA, 19 nt, Homo sapiens
  misc_RNA (1)...(19): siRNA sense strand
ggacaaauuaaaggaaguc

SEQ ID NO: 327322 - RNA, 19 nt, Homo sapiens
  misc_RNA (1)...(19): siRNA sense strand
cgacaaugacugggagaga

SEQ ID NO: 327323 - RNA, 19 nt, Homo sapiens
  misc_RNA (1)...(19): siRNA sense strand
gcccaucgccaaggaguau

SEQ ID NO: 327324 - RNA, 19 nt, Homo sapiens
  misc_RNA (1)...(19): siRNA sense strand
gcuggaaaggacucucaaa

SEQ ID NO: 327325 - RNA, 19 nt, Homo sapiens
  misc_RNA (1)...(19): siRNA sense strand
gcagaccaaggaggacaaa

SEQ ID NO: 327326 - RNA, 19 nt, Homo sapiens
  misc_RNA (1)...(19): siRNA sense strand
ggucagggacuuggucaca

SEQ ID NO: 327327 - RNA, 19 nt, Homo sapiens
  misc_RNA (1)...(19): siRNA sense strand
agagagggacuucagagau

SEQ ID NO: 327328 - RNA, 19 nt, Homo sapiens
  misc_RNA (1)...(19): siRNA sense strand
guggaucccucggcgacuu

SEQ ID NO: 327329 - RNA, 19 nt, Homo sapiens
  misc_RNA (1)...(19): siRNA sense strand
ggacuacgagcuggaaagg

SEQ ID NO: 327330 - RNA, 19 nt, Homo sapiens
  misc_RNA (1)...(19): siRNA sense strand
aaagcgggcagcauugaug

SEQ ID NO: 327331 - RNA, 19 nt, Homo sapiens
  misc_RNA (1)...(19): siRNA sense strand
agaaggaaagaggcaagua

SEQ ID NO: 327332 - RNA, 19 nt, Homo sapiens
  misc_RNA (1)...(19): siRNA sense strand
cgacuuggaggcggucuug

SEQ ID NO: 327333 - RNA, 19 nt, Homo sapiens
  misc_RNA (1)...(19): siRNA sense strand
gaccagcaugagauauuug

SEQ ID NO: 327334 - RNA, 19 nt, Homo sapiens
  misc_RNA (1)...(19): siRNA sense strand
gaugcugauggccugguua

SEQ ID NO: 327335 - RNA, 19 nt, Homo sapiens
  misc_RNA (1)...(19): siRNA sense strand
ggcuacgccuucaucgaau

SEQ ID NO: 327336 - RNA, 19 nt, Homo sapiens
  misc_RNA (1)...(19): siRNA sense strand
gaaaggcgggagcgaucuc

SEQ ID NO: 327337 - RNA, 19 nt, Homo sapiens
  misc_RNA (1)...(19): siRNA sense strand
agauauuuguggacuacga

SEQ ID NO: 327338 - RNA, 19 nt, Homo sapiens
  misc_RNA (1)...(19): siRNA sense strand
caaagcgggcagcauugau

SEQ ID NO: 327339 - RNA, 19 nt, Homo sapiens
  misc_RNA (1)...(19): siRNA sense strand
gagaagagauggcaagaaa

SEQ ID NO: 327340 - RNA, 19 nt, Homo sapiens
  misc_RNA (1)...(19): siRNA sense strand
caacaaaggugucauagga

SEQ ID NO: 327341 - RNA, 19 nt, Homo sapiens
  misc_RNA (1)...(19): siRNA sense strand
gaucaaagcuuaccgagau

SEQ ID NO: 327342 - RNA, 19 nt, Homo sapiens
  misc_RNA (1)...(19): siRNA sense strand
gggcaaugcuggcacgaua

SEQ ID NO: 327343 - RNA, 19 nt, Homo sapiens
  misc_RNA (1)...(19): siRNA sense strand
gaccaaggaggacaaauua

SEQ ID NO: 327344 - RNA, 19 nt, Homo sapiens
  misc_RNA (1)...(19): siRNA sense strand
gaagagauggcaagaaaga

SEQ ID NO: 327345 - RNA, 19 nt, Homo sapiens
  misc_RNA (1)...(19): siRNA sense strand
gagagggacuucagagaug

SEQ ID NO: 327346 - RNA, 19 nt, Homo sapiens
  misc_RNA (1)...(19): siRNA sense strand
ccaaggaggacaaauuaaa

SEQ ID NO: 327347 - RNA, 19 nt, Homo sapiens
  misc_RNA (1)...(19): siRNA sense strand
gcuacgccuucaucgaaua

SEQ ID NO: 327348 - RNA, 19 nt, Homo sapiens
  misc_RNA (1)...(19): siRNA sense strand
gcugauggccugguuauug

SEQ ID NO: 327349 - RNA, 19 nt, Homo sapiens
  misc_RNA (1)...(19): siRNA sense strand
gaaggaaagaggcaaguag

SEQ ID NO: 327350 - RNA, 19 nt, Homo sapiens
  misc_RNA (1)...(19): siRNA sense strand
ugaccagcaugagauauuu

SEQ ID NO: 327351 - RNA, 19 nt, Homo sapiens
  misc_RNA (1)...(19): siRNA sense strand
gggcuacgccuucaucgaa

SEQ ID NO: 327352 - RNA, 19 nt, Homo sapiens
  misc_RNA (1)...(19): siRNA sense strand
gacaagggaucgagaccau

SEQ ID NO: 327353 - RNA, 19 nt, Homo sapiens
  misc_RNA (1)...(19): siRNA sense strand
gugccgugaucaaagcuua

SEQ ID NO: 327354 - RNA, 19 nt, Homo sapiens
  misc_RNA (1)...(19): siRNA sense strand
cugauggccugguuauuga

SEQ ID NO: 327355 - RNA, 19 nt, Homo sapiens
  misc_RNA (1)...(19): siRNA sense strand
caagggaucgagaccauga

SEQ ID NO: 327356 - RNA, 19 nt, Homo sapiens
  misc_RNA (1)...(19): siRNA sense strand
gggacuuggucacagguuu

SEQ ID NO: 327357 - RNA, 19 nt, Homo sapiens
  misc_RNA (1)...(19): siRNA sense strand
ggaggacaaauuaaaggaa

SEQ ID NO: 327358 - RNA, 19 nt, Homo sapiens
  misc_RNA (1)...(19): siRNA sense strand
gcauugauggcaccgauga

SEQ ID NO: 327359 - RNA, 19 nt, Homo sapiens
  misc_RNA (1)...(19): siRNA sense strand
ggagggagaagaaggaaag

SEQ ID NO: 327360 - RNA, 19 nt, Homo sapiens
  misc_RNA (1)...(19): siRNA sense strand
ggguguggcccgacaauga

SEQ ID NO: 327361 - RNA, 19 nt, Homo sapiens
  misc_RNA (1)...(19): siRNA sense strand
gcaaugcuggcacgauaug

SEQ ID NO: 327362 - RNA, 19 nt, Homo sapiens
  misc_RNA (1)...(19): siRNA sense strand
gagagagggacuucagaga

SEQ ID NO: 327363 - RNA, 19 nt, Homo sapiens
  misc_RNA (1)...(19): siRNA sense strand
gacuaaacuugcagaccaa

SEQ ID NO: 327364 - RNA, 19 nt, Homo sapiens
  misc_RNA (1)...(19): siRNA sense strand
agaccaaggaggacaaauu

SEQ ID NO: 327365 - RNA, 19 nt, Homo sapiens
  misc_RNA (1)...(19): siRNA sense strand
caaggaggacaaauuaaag

SEQ ID NO: 327366 - RNA, 19 nt, Homo sapiens
  misc_RNA (1)...(19): siRNA sense strand
ucgaaaaccuauuaacuug

SEQ ID NO: 327367 - RNA, 19 nt, Homo sapiens
  misc_RNA (1)...(19): siRNA sense strand
ggagaagagauggcaagaa

SEQ ID NO: 327368 - RNA, 19 nt, Homo sapiens
  misc_RNA (1)...(19): siRNA sense strand
ggagagagagagggacuuc

SEQ ID NO: 327369 - RNA, 19 nt, Homo sapiens
  misc_RNA (1)...(19): siRNA sense strand
acucaaagcgggcagcauu

SEQ ID NO: 327370 - RNA, 19 nt, Homo sapiens
  misc_RNA (1)...(19): siRNA sense strand
ugagauauuuguggacuac

SEQ ID NO: 327371 - RNA, 19 nt, Homo sapiens
  misc_RNA (1)...(19): siRNA sense strand
gagagagagggacuucaga

SEQ ID NO: 327372 - RNA, 19 nt, Homo sapiens
  misc_RNA (1)...(19): siRNA sense strand
aaaggagucugggcaacug

SEQ ID NO: 327373 - RNA, 19 nt, Homo sapiens
  misc_RNA (1)...(19): siRNA sense strand
agagggacuucagagauga

SEQ ID NO: 327374 - RNA, 19 nt, Homo sapiens
  misc_RNA (1)...(19): siRNA sense strand
ggagcgugccgugaucaaa

SEQ ID NO: 327375 - RNA, 19 nt, Homo sapiens
  misc_RNA (1)...(19): siRNA sense strand
agagauggcaagaaagaga

SEQ ID NO: 327376 - RNA, 19 nt, Homo sapiens
  misc_RNA (1)...(19): siRNA sense strand
gagcuggaaaggacucuca

SEQ ID NO: 327377 - RNA, 19 nt, Homo sapiens
  misc_RNA (1)...(19): siRNA sense strand
gagcgugccgugaucaaag

SEQ ID NO: 327378 - RNA, 19 nt, Homo sapiens
  misc_RNA (1)...(19): siRNA sense strand
guuauugaccagcaugaga

SEQ ID NO: 327379 - RNA, 19 nt, Homo sapiens
  misc_RNA (1)...(19): siRNA sense strand
ggacaaauuaaaggaaguc

SEQ ID NO: 327380 - RNA, 19 nt, Homo sapiens
  misc_RNA (1)...(19): siRNA sense strand
cgacaaugacugggagaga

SEQ ID NO: 327381 - RNA, 19 nt, Homo sapiens
  misc_RNA (1)...(19): siRNA sense strand
gcccaucgccaaggaguau

SEQ ID NO: 327382 - RNA, 19 nt, Homo sapiens
  misc_RNA (1)...(19): siRNA sense strand
gcuggaaaggacucucaaa

SEQ ID NO: 327383 - RNA, 19 nt, Homo sapiens
  misc_RNA (1)...(19): siRNA sense strand
gcagaccaaggaggacaaa

SEQ ID NO: 327384 - RNA, 19 nt, Homo sapiens
  misc_RNA (1)...(19): siRNA sense strand
ggucagggacuuggucaca

SEQ ID NO: 327385 - RNA, 19 nt, Homo sapiens
  misc_RNA (1)...(19): siRNA sense strand
agagagggacuucagagau

SEQ ID NO: 327386 - RNA, 19 nt, Homo sapiens
  misc_RNA (1)...(19): siRNA sense strand
guggaucccucggcgacuu

SEQ ID NO: 327387 - RNA, 19 nt, Homo sapiens
  misc_RNA (1)...(19): siRNA sense strand
ggacuacgagcuggaaagg

SEQ ID NO: 327388 - RNA, 19 nt, Homo sapiens
  misc_RNA (1)...(19): siRNA sense strand
aaagcgggcagcauugaug

SEQ ID NO: 327389 - RNA, 19 nt, Homo sapiens
  misc_RNA (1)...(19): siRNA sense strand
agaaggaaagaggcaagua

SEQ ID NO: 327390 - RNA, 19 nt, Homo sapiens
  misc_RNA (1)...(19): siRNA sense strand
cgacuuggaggcggucuug

SEQ ID NO: 327391 - RNA, 19 nt, Homo sapiens
  misc_RNA (1)...(19): siRNA sense strand
gaccagcaugagauauuug

SEQ ID NO: 327392 - RNA, 19 nt, Homo sapiens
  misc_RNA (1)...(19): siRNA sense strand
gaugcugauggccugguua

SEQ ID NO: 327393 - RNA, 19 nt, Homo sapiens
  misc_RNA (1)...(19): siRNA sense strand
ggcuacgccuucaucgaau

SEQ ID NO: 327394 - RNA, 19 nt, Homo sapiens
  misc_RNA (1)...(19): siRNA sense strand
gaaaggcgggagcgaucuc

SEQ ID NO: 327395 - RNA, 19 nt, Homo sapiens
  misc_RNA (1)...(19): siRNA sense strand
agauauuuguggacuacga

SEQ ID NO: 327396 - RNA, 19 nt, Homo sapiens
  misc_RNA (1)...(19): siRNA sense strand
caaagcgggcagcauugau

SEQ ID NO: 327397 - RNA, 19 nt, Homo sapiens
  misc_RNA (1)...(19): siRNA sense strand
gagaagagauggcaagaaa

SEQ ID NO: 327398 - RNA, 19 nt, Homo sapiens
  misc_RNA (1)...(19): siRNA sense strand
caacaaaggugucauagga

SEQ ID NO: 327399 - RNA, 19 nt, Homo sapiens
  misc_RNA (1)...(19): siRNA sense strand
gaucaaagcuuaccgagau

SEQ ID NO: 327400 - RNA, 19 nt, Homo sapiens
  misc_RNA (1)...(19): siRNA sense strand
gggcaaugcuggcacgaua

SEQ ID NO: 327401 - RNA, 19 nt, Homo sapiens
  misc_RNA (1)...(19): siRNA sense strand
gaccaaggaggacaaauua

SEQ ID NO: 327402 - RNA, 19 nt, Homo sapiens
  misc_RNA (1)...(19): siRNA sense strand
gaagagauggcaagaaaga

SEQ ID NO: 327403 - RNA, 19 nt, Homo sapiens
  misc_RNA (1)...(19): siRNA sense strand
gagagggacuucagagaug

SEQ ID NO: 327404 - RNA, 19 nt, Homo sapiens
  misc_RNA (1)...(19): siRNA sense strand
ccaaggaggacaaauuaaa

SEQ ID NO: 327405 - RNA, 19 nt, Homo sapiens
  misc_RNA (1)...(19): siRNA sense strand
gcuacgccuucaucgaaua

SEQ ID NO: 327406 - RNA, 19 nt, Homo sapiens
  misc_RNA (1)...(19): siRNA sense strand
gcugauggccugguuauug

SEQ ID NO: 327407 - RNA, 19 nt, Homo sapiens
  misc_RNA (1)...(19): siRNA sense strand
gaaggaaagaggcaaguag

SEQ ID NO: 327408 - RNA, 19 nt, Homo sapiens
  misc_RNA (1)...(19): siRNA sense strand
ugaccagcaugagauauuu

SEQ ID NO: 327409 - RNA, 19 nt, Homo sapiens
  misc_RNA (1)...(19): siRNA sense strand
gggcuacgccuucaucgaa

SEQ ID NO: 327410 - RNA, 19 nt, Homo sapiens
  misc_RNA (1)...(19): siRNA sense strand
gacaagggaucgagaccau

SEQ ID NO: 327411 - RNA, 19 nt, Homo sapiens
  misc_RNA (1)...(19): siRNA sense strand
gugccgugaucaaagcuua

SEQ ID NO: 327412 - RNA, 19 nt, Homo sapiens
  misc_RNA (1)...(19): siRNA sense strand
cugauggccugguuauuga

SEQ ID NO: 327413 - RNA, 19 nt, Homo sapiens
  misc_RNA (1)...(19): siRNA sense strand
caagggaucgagaccauga

SEQ ID NO: 327414 - RNA, 19 nt, Homo sapiens
  misc_RNA (1)...(19): siRNA sense strand
gggacuuggucacagguuu

SEQ ID NO: 327415 - RNA, 19 nt, Homo sapiens
  misc_RNA (1)...(19): siRNA sense strand
ggaggacaaauuaaaggaa

SEQ ID NO: 327416 - RNA, 19 nt, Homo sapiens
  misc_RNA (1)...(19): siRNA sense strand
gcauugauggcaccgauga

SEQ ID NO: 327417 - RNA, 19 nt, Homo sapiens
  misc_RNA (1)...(19): siRNA sense strand
ggagggagaagaaggaaag

SEQ ID NO: 327418 - RNA, 19 nt, Homo sapiens
  misc_RNA (1)...(19): siRNA sense strand
ggguguggcccgacaauga

SEQ ID NO: 327419 - RNA, 19 nt, Homo sapiens
  misc_RNA (1)...(19): siRNA sense strand
gcaaugcuggcacgauaug

SEQ ID NO: 327420 - RNA, 19 nt, Homo sapiens
  misc_RNA (1)...(19): siRNA sense strand
gagagagggacuucagaga

SEQ ID NO: 327421 - RNA, 19 nt, Homo sapiens
  misc_RNA (1)...(19): siRNA sense strand
gacuaaacuugcagaccaa

SEQ ID NO: 327422 - RNA, 19 nt, Homo sapiens
  misc_RNA (1)...(19): siRNA sense strand
agaccaaggaggacaaauu

SEQ ID NO: 327423 - RNA, 19 nt, Homo sapiens
  misc_RNA (1)...(19): siRNA sense strand
caaggaggacaaauuaaag

SEQ ID NO: 327424 - RNA, 19 nt, Homo sapiens
  misc_RNA (1)...(19): siRNA sense strand
ucgaaaaccuauuaacuug

SEQ ID NO: 327425 - RNA, 19 nt, Homo sapiens
  misc_RNA (1)...(19): siRNA sense strand
ggagaagagauggcaagaa

SEQ ID NO: 327426 - RNA, 19 nt, Homo sapiens
  misc_RNA (1)...(19): siRNA sense strand
ggagagagagagggacuuc

SEQ ID NO: 327427 - RNA, 19 nt, Homo sapiens
  misc_RNA (1)...(19): siRNA sense strand
acucaaagcgggcagcauu

SEQ ID NO: 327428 - RNA, 19 nt, Homo sapiens
  misc_RNA (1)...(19): siRNA sense strand
ugagauauuuguggacuac

SEQ ID NO: 327429 - RNA, 19 nt, Homo sapiens
  misc_RNA (1)...(19): siRNA sense strand
gagagagagggacuucaga

SEQ ID NO: 327430 - RNA, 19 nt, Homo sapiens
  misc_RNA (1)...(19): siRNA sense strand
aaaggagucugggcaacug

SEQ ID NO: 327431 - RNA, 19 nt, Homo sapiens
  misc_RNA (1)...(19): siRNA sense strand
agagggacuucagagauga

SEQ ID NO: 327432 - RNA, 19 nt, Homo sapiens
  misc_RNA (1)...(19): siRNA sense strand
ggagcgugccgugaucaaa

SEQ ID NO: 327433 - RNA, 19 nt, Homo sapiens
  misc_RNA (1)...(19): siRNA sense strand
agagauggcaagaaagaga

SEQ ID NO: 327434 - RNA, 19 nt, Homo sapiens
  misc_RNA (1)...(19): siRNA sense strand
gagcuggaaaggacucuca

SEQ ID NO: 327435 - RNA, 19 nt, Homo sapiens
  misc_RNA (1)...(19): siRNA sense strand
gagcgugccgugaucaaag

SEQ ID NO: 327436 - RNA, 19 nt, Homo sapiens
  misc_RNA (1)...(19): siRNA sense strand
guuauugaccagcaugaga

SEQ ID NO: 327437 - RNA, 19 nt, Homo sapiens
  misc_RNA (1)...(19): siRNA sense strand
ggacaaauuaaaggaaguc

SEQ ID NO: 327438 - RNA, 19 nt, Homo sapiens
  misc_RNA (1)...(19): siRNA sense strand
cgacaaugacugggagaga

SEQ ID NO: 327439 - RNA, 19 nt, Homo sapiens
  misc_RNA (1)...(19): siRNA sense strand
gcccaucgccaaggaguau

SEQ ID NO: 327440 - RNA, 19 nt, Homo sapiens
  misc_RNA (1)...(19): siRNA sense strand
gcuggaaaggacucucaaa

SEQ ID NO: 327441 - RNA, 19 nt, Homo sapiens
  misc_RNA (1)...(19): siRNA sense strand
gcagaccaaggaggacaaa

SEQ ID NO: 327442 - RNA, 19 nt, Homo sapiens
  misc_RNA (1)...(19): siRNA sense strand
ggucagggacuuggucaca

SEQ ID NO: 327443 - RNA, 19 nt, Homo sapiens
  misc_RNA (1)...(19): siRNA sense strand
agagagggacuucagagau

SEQ ID NO: 327444 - RNA, 19 nt, Homo sapiens
  misc_RNA (1)...(19): siRNA sense strand
guggaucccucggcgacuu

SEQ ID NO: 327445 - RNA, 19 nt, Homo sapiens
  misc_RNA (1)...(19): siRNA sense strand
ggacuacgagcuggaaagg

SEQ ID NO: 327446 - RNA, 19 nt, Homo sapiens
  misc_RNA (1)...(19): siRNA sense strand
aaagcgggcagcauugaug

SEQ ID NO: 327447 - RNA, 19 nt, Homo sapiens
  misc_RNA (1)...(19): siRNA sense strand
agaaggaaagaggcaagua

SEQ ID NO: 327448 - RNA, 19 nt, Homo sapiens
  misc_RNA (1)...(19): siRNA sense strand
cgacuuggaggcggucuug

SEQ ID NO: 327449 - RNA, 19 nt, Homo sapiens
  misc_RNA (1)...(19): siRNA sense strand
gaccagcaugagauauuug

SEQ ID NO: 327450 - RNA, 19 nt, Homo sapiens
  misc_RNA (1)...(19): siRNA sense strand
gaugcugauggccugguua

SEQ ID NO: 327451 - RNA, 19 nt, Homo sapiens
  misc_RNA (1)...(19): siRNA sense strand
ggcuacgccuucaucgaau

SEQ ID NO: 327452 - RNA, 19 nt, Homo sapiens
  misc_RNA (1)...(19): siRNA sense strand
gaaaggcgggagcgaucuc

SEQ ID NO: 327453 - RNA, 19 nt, Homo sapiens
  misc_RNA (1)...(19): siRNA sense strand
agauauuuguggacuacga

SEQ ID NO: 327454 - RNA, 19 nt, Homo sapiens
  misc_RNA (1)...(19): siRNA sense strand
caaagcgggcagcauugau

SEQ ID NO: 327455 - RNA, 19 nt, Homo sapiens
  misc_RNA (1)...(19): siRNA sense strand
gagaagagauggcaagaaa

SEQ ID NO: 327456 - RNA, 19 nt, Homo sapiens
  misc_RNA (1)...(19): siRNA sense strand
caacaaaggugucauagga

SEQ ID NO: 327457 - RNA, 19 nt, Homo sapiens
  misc_RNA (1)...(19): siRNA sense strand
gaucaaagcuuaccgagau

SEQ ID NO: 327458 - RNA, 19 nt, Homo sapiens
  misc_RNA (1)...(19): siRNA sense strand
gggcaaugcuggcacgaua

SEQ ID NO: 327459 - RNA, 19 nt, Homo sapiens
  misc_RNA (1)...(19): siRNA sense strand
gaccaaggaggacaaauua

SEQ ID NO: 327460 - RNA, 19 nt, Homo sapiens
  misc_RNA (1)...(19): siRNA sense strand
gaagagauggcaagaaaga

SEQ ID NO: 327461 - RNA, 19 nt, Homo sapiens
  misc_RNA (1)...(19): siRNA sense strand
gagagggacuucagagaug

SEQ ID NO: 327462 - RNA, 19 nt, Homo sapiens
  misc_RNA (1)...(19): siRNA sense strand
ccaaggaggacaaauuaaa

SEQ ID NO: 327463 - RNA, 19 nt, Homo sapiens
  misc_RNA (1)...(19): siRNA sense strand
gcuacgccuucaucgaaua

SEQ ID NO: 327464 - RNA, 19 nt, Homo sapiens
  misc_RNA (1)...(19): siRNA sense strand
gcugauggccugguuauug

SEQ ID NO: 327465 - RNA, 19 nt, Homo sapiens
  misc_RNA (1)...(19): siRNA sense strand
gaaggaaagaggcaaguag

SEQ ID NO: 327466 - RNA, 19 nt, Homo sapiens
  misc_RNA (1)...(19): siRNA sense strand
ugaccagcaugagauauuu

SEQ ID NO: 327467 - RNA, 19 nt, Homo sapiens
  misc_RNA (1)...(19): siRNA sense strand
gggcuacgccuucaucgaa

SEQ ID NO: 327468 - RNA, 19 nt, Homo sapiens
  misc_RNA (1)...(19): siRNA sense strand
gacaagggaucgagaccau

SEQ ID NO: 327469 - RNA, 19 nt, Homo sapiens
  misc_RNA (1)...(19): siRNA sense strand
gugccgugaucaaagcuua

SEQ ID NO: 327470 - RNA, 19 nt, Homo sapiens
  misc_RNA (1)...(19): siRNA sense strand
cugauggccugguuauuga

SEQ ID NO: 327471 - RNA, 19 nt, Homo sapiens
  misc_RNA (1)...(19): siRNA sense strand
caagggaucgagaccauga

SEQ ID NO: 327472 - RNA, 19 nt, Homo sapiens
  misc_RNA (1)...(19): siRNA sense strand
gggacuuggucacagguuu

SEQ ID NO: 327473 - RNA, 19 nt, Homo sapiens
  misc_RNA (1)...(19): siRNA sense strand
ggaggacaaauuaaaggaa

SEQ ID NO: 327474 - RNA, 19 nt, Homo sapiens
  misc_RNA (1)...(19): siRNA sense strand
gcauugauggcaccgauga

SEQ ID NO: 327475 - RNA, 19 nt, Homo sapiens
  misc_RNA (1)...(19): siRNA sense strand
ggagggagaagaaggaaag

SEQ ID NO: 327476 - RNA, 19 nt, Homo sapiens
  misc_RNA (1)...(19): siRNA sense strand
ggguguggcccgacaauga

SEQ ID NO: 327477 - RNA, 19 nt, Homo sapiens
  misc_RNA (1)...(19): siRNA sense strand
gcaaugcuggcacgauaug

SEQ ID NO: 327478 - RNA, 19 nt, Homo sapiens
  misc_RNA (1)...(19): siRNA sense strand
gagagagggacuucagaga

SEQ ID NO: 327479 - RNA, 19 nt, Homo sapiens
  misc_RNA (1)...(19): siRNA sense strand
gacuaaacuugcagaccaa

SEQ ID NO: 327480 - RNA, 19 nt, Homo sapiens
  misc_RNA (1)...(19): siRNA sense strand
agaccaaggaggacaaauu

SEQ ID NO: 327481 - RNA, 19 nt, Homo sapiens
  misc_RNA (1)...(19): siRNA sense strand
caaggaggacaaauuaaag

SEQ ID NO: 327482 - RNA, 19 nt, Homo sapiens
  misc_RNA (1)...(19): siRNA sense strand
ucgaaaaccuauuaacuug

SEQ ID NO: 327483 - RNA, 19 nt, Homo sapiens
  misc_RNA (1)...(19): siRNA sense strand
ggagaagagauggcaagaa

SEQ ID NO: 327484 - RNA, 19 nt, Homo sapiens
  misc_RNA (1)...(19): siRNA sense strand
ggagagagagagggacuuc

SEQ ID NO: 327485 - RNA, 19 nt, Homo sapiens
  misc_RNA (1)...(19): siRNA sense strand
acucaaagcgggcagcauu

SEQ ID NO: 327486 - RNA, 19 nt, Homo sapiens
  misc_RNA (1)...(19): siRNA sense strand
ugagauauuuguggacuac

SEQ ID NO: 327487 - RNA, 19 nt, Homo sapiens
  misc_RNA (1)...(19): siRNA sense strand
gagagagagggacuucaga

SEQ ID NO: 327488 - RNA, 19 nt, Homo sapiens
  misc_RNA (1)...(19): siRNA sense strand
aaaggagucugggcaacug

SEQ ID NO: 327489 - RNA, 19 nt, Homo sapiens
  misc_RNA (1)...(19): siRNA sense strand
agagggacuucagagauga

SEQ ID NO: 327490 - RNA, 19 nt, Homo sapiens
  misc_RNA (1)...(19): siRNA sense strand
ggagcgugccgugaucaaa

SEQ ID NO: 327491 - RNA, 19 nt, Homo sapiens
  misc_RNA (1)...(19): siRNA sense strand
agagauggcaagaaagaga

SEQ ID NO: 327492 - RNA, 19 nt, Homo sapiens
  misc_RNA (1)...(19): siRNA sense strand
gagcuggaaaggacucuca

SEQ ID NO: 327493 - RNA, 19 nt, Homo sapiens
  misc_RNA (1)...(19): siRNA sense strand
gagcgugccgugaucaaag

SEQ ID NO: 327494 - RNA, 19 nt, Homo sapiens
  misc_RNA (1)...(19): siRNA sense strand
guuauugaccagcaugaga

SEQ ID NO: 327495 - RNA, 19 nt, Homo sapiens
  misc_RNA (1)...(19): siRNA sense strand
ggacaaauuaaaggaaguc

SEQ ID NO: 327496 - RNA, 19 nt, Homo sapiens
  misc_RNA (1)...(19): siRNA sense strand
cgacaaugacugggagaga

SEQ ID NO: 327497 - RNA, 19 nt, Homo sapiens
  misc_RNA (1)...(19): siRNA sense strand
gcccaucgccaaggaguau

SEQ ID NO: 327498 - RNA, 19 nt, Homo sapiens
  misc_RNA (1)...(19): siRNA sense strand
gcuggaaaggacucucaaa

SEQ ID NO: 327499 - RNA, 19 nt, Homo sapiens
  misc_RNA (1)...(19): siRNA sense strand
gcagaccaaggaggacaaa

SEQ ID NO: 327500 - RNA, 19 nt, Homo sapiens
  misc_RNA (1)...(19): siRNA sense strand
ggucagggacuuggucaca

SEQ ID NO: 327501 - RNA, 19 nt, Homo sapiens
  misc_RNA (1)...(19): siRNA sense strand
agagagggacuucagagau

SEQ ID NO: 327502 - RNA, 19 nt, Homo sapiens
  misc_RNA (1)...(19): siRNA sense strand
guggaucccucggcgacuu

SEQ ID NO: 327503 - RNA, 19 nt, Homo sapiens
  misc_RNA (1)...(19): siRNA sense strand
ggacuacgagcuggaaagg

SEQ ID NO: 327504 - RNA, 19 nt, Homo sapiens
  misc_RNA (1)...(19): siRNA sense strand
aaagcgggcagcauugaug

SEQ ID NO: 327505 - RNA, 19 nt, Homo sapiens
  misc_RNA (1)...(19): siRNA sense strand
agaaggaaagaggcaagua

SEQ ID NO: 327506 - RNA, 19 nt, Homo sapiens
  misc_RNA (1)...(19): siRNA sense strand
cgacuuggaggcggucuug

SEQ ID NO: 327507 - RNA, 19 nt, Homo sapiens
  misc_RNA (1)...(19): siRNA sense strand
gaccagcaugagauauuug

SEQ ID NO: 327508 - RNA, 19 nt, Homo sapiens
  misc_RNA (1)...(19): siRNA sense strand
gaugcugauggccugguua

SEQ ID NO: 327509 - RNA, 19 nt, Homo sapiens
  misc_RNA (1)...(19): siRNA sense strand
ggcuacgccuucaucgaau

SEQ ID NO: 327510 - RNA, 19 nt, Homo sapiens
  misc_RNA (1)...(19): siRNA sense strand
gaaaggcgggagcgaucuc

SEQ ID NO: 327511 - RNA, 19 nt, Homo sapiens
  misc_RNA (1)...(19): siRNA sense strand
agauauuuguggacuacga

SEQ ID NO: 327512 - RNA, 19 nt, Homo sapiens
  misc_RNA (1)...(19): siRNA sense strand
caaagcgggcagcauugau

SEQ ID NO: 327513 - RNA, 19 nt, Homo sapiens
  misc_RNA (1)...(19): siRNA sense strand
gcaagaaaccuacucaaag

SEQ ID NO: 327514 - RNA, 19 nt, Homo sapiens
  misc_RNA (1)...(19): siRNA sense strand
caagaaaccuacucaaagc

SEQ ID NO: 327515 - RNA, 19 nt, Homo sapiens
  misc_RNA (1)...(19): siRNA sense strand
agaaguaccugcaagaaac

SEQ ID NO: 327516 - RNA, 19 nt, Homo sapiens
  misc_RNA (1)...(19): siRNA sense strand
ccacagcuuuuaagaagua

SEQ ID NO: 327517 - RNA, 19 nt, Homo sapiens
  misc_RNA (1)...(19): siRNA sense strand
uaagaaguaccugcaagaa

SEQ ID NO: 327518 - RNA, 19 nt, Homo sapiens
  misc_RNA (1)...(19): siRNA sense strand
aagaaguaccugcaagaaa

SEQ ID NO: 327519 - RNA, 19 nt, Homo sapiens
  misc_RNA (1)...(19): siRNA sense strand
gaacccaacauugauaguc

SEQ ID NO: 327520 - RNA, 19 nt, Homo sapiens
  misc_RNA (1)...(19): siRNA sense strand
ugcaagaaaccuacucaaa

SEQ ID NO: 327521 - RNA, 19 nt, Homo sapiens
  misc_RNA (1)...(19): siRNA sense strand
uuaagaaguaccugcaaga

SEQ ID NO: 327522 - RNA, 19 nt, Homo sapiens
  misc_RNA (1)...(19): siRNA sense strand
gcaagaaaccuacucaaag

SEQ ID NO: 327523 - RNA, 19 nt, Homo sapiens
  misc_RNA (1)...(19): siRNA sense strand
caagaaaccuacucaaagc

SEQ ID NO: 327524 - RNA, 19 nt, Homo sapiens
  misc_RNA (1)...(19): siRNA sense strand
agaaguaccugcaagaaac

SEQ ID NO: 327525 - RNA, 19 nt, Homo sapiens
  misc_RNA (1)...(19): siRNA sense strand
ccacagcuuuuaagaagua

SEQ ID NO: 327526 - RNA, 19 nt, Homo sapiens
  misc_RNA (1)...(19): siRNA sense strand
uaagaaguaccugcaagaa

SEQ ID NO: 327527 - RNA, 19 nt, Homo sapiens
  misc_RNA (1)...(19): siRNA sense strand
aagaaguaccugcaagaaa

SEQ ID NO: 327528 - RNA, 19 nt, Homo sapiens
  misc_RNA (1)...(19): siRNA sense strand
gaacccaacauugauaguc

SEQ ID NO: 327529 - RNA, 19 nt, Homo sapiens
  misc_RNA (1)...(19): siRNA sense strand
ugcaagaaaccuacucaaa

SEQ ID NO: 327530 - RNA, 19 nt, Homo sapiens
  misc_RNA (1)...(19): siRNA sense strand
uuaagaaguaccugcaaga

SEQ ID NO: 327531 - RNA, 19 nt, Homo sapiens
  misc_RNA (1)...(19): siRNA sense strand
gcaagaaaccuacucaaag

SEQ ID NO: 327532 - RNA, 19 nt, Homo sapiens
  misc_RNA (1)...(19): siRNA sense strand
caagaaaccuacucaaagc

SEQ ID NO: 327533 - RNA, 19 nt, Homo sapiens
  misc_RNA (1)...(19): siRNA sense strand
agaaguaccugcaagaaac

SEQ ID NO: 327534 - RNA, 19 nt, Homo sapiens
  misc_RNA (1)...(19): siRNA sense strand
ccacagcuuuuaagaagua

SEQ ID NO: 327535 - RNA, 19 nt, Homo sapiens
  misc_RNA (1)...(19): siRNA sense strand
uaagaaguaccugcaagaa

SEQ ID NO: 327536 - RNA, 19 nt, Homo sapiens
  misc_RNA (1)...(19): siRNA sense strand
aagaaguaccugcaagaaa

SEQ ID NO: 327537 - RNA, 19 nt, Homo sapiens
  misc_RNA (1)...(19): siRNA sense strand
gaacccaacauugauaguc

SEQ ID NO: 327538 - RNA, 19 nt, Homo sapiens
  misc_RNA (1)...(19): siRNA sense strand
ugcaagaaaccuacucaaa

SEQ ID NO: 327539 - RNA, 19 nt, Homo sapiens
  misc_RNA (1)...(19): siRNA sense strand
uuaagaaguaccugcaaga

SEQ ID NO: 327540 - RNA, 19 nt, Homo sapiens
  misc_RNA (1)...(19): siRNA sense strand
gcaagaaaccuacucaaag

SEQ ID NO: 327541 - RNA, 19 nt, Homo sapiens
  misc_RNA (1)...(19): siRNA sense strand
caagaaaccuacucaaagc

SEQ ID NO: 327542 - RNA, 19 nt, Homo sapiens
  misc_RNA (1)...(19): siRNA sense strand
agaaguaccugcaagaaac

SEQ ID NO: 327543 - RNA, 19 nt, Homo sapiens
  misc_RNA (1)...(19): siRNA sense strand
ccacagcuuuuaagaagua

SEQ ID NO: 327544 - RNA, 19 nt, Homo sapiens
  misc_RNA (1)...(19): siRNA sense strand
uaagaaguaccugcaagaa

SEQ ID NO: 327545 - RNA, 19 nt, Homo sapiens
  misc_RNA (1)...(19): siRNA sense strand
aagaaguaccugcaagaaa

SEQ ID NO: 327546 - RNA, 19 nt, Homo sapiens
  misc_RNA (1)...(19): siRNA sense strand
gaacccaacauugauaguc

SEQ ID NO: 327547 - RNA, 19 nt, Homo sapiens
  misc_RNA (1)...(19): siRNA sense strand
ugcaagaaaccuacucaaa

SEQ ID NO: 327548 - RNA, 19 nt, Homo sapiens
  misc_RNA (1)...(19): siRNA sense strand
uuaagaaguaccugcaaga

SEQ ID NO: 327549 - RNA, 19 nt, Homo sapiens
  misc_RNA (1)...(19): siRNA sense strand
gcaagaaaccuacucaaag

SEQ ID NO: 327550 - RNA, 19 nt, Homo sapiens
  misc_RNA (1)...(19): siRNA sense strand
caagaaaccuacucaaagc

SEQ ID NO: 327551 - RNA, 19 nt, Homo sapiens
  misc_RNA (1)...(19): siRNA sense strand
agaaguaccugcaagaaac

SEQ ID NO: 327552 - RNA, 19 nt, Homo sapiens
  misc_RNA (1)...(19): siRNA sense strand
ccacagcuuuuaagaagua

SEQ ID NO: 327553 - RNA, 19 nt, Homo sapiens
  misc_RNA (1)...(19): siRNA sense strand
uaagaaguaccugcaagaa

SEQ ID NO: 327554 - RNA, 19 nt, Homo sapiens
  misc_RNA (1)...(19): siRNA sense strand
aagaaguaccugcaagaaa

SEQ ID NO: 327555 - RNA, 19 nt, Homo sapiens
  misc_RNA (1)...(19): siRNA sense strand
gaacccaacauugauaguc

SEQ ID NO: 327556 - RNA, 19 nt, Homo sapiens
  misc_RNA (1)...(19): siRNA sense strand
ugcaagaaaccuacucaaa

SEQ ID NO: 327557 - RNA, 19 nt, Homo sapiens
  misc_RNA (1)...(19): siRNA sense strand
uuaagaaguaccugcaaga

SEQ ID NO: 327558 - RNA, 19 nt, Homo sapiens
  misc_RNA (1)...(19): siRNA sense strand
gaacccaacauugauaguc

SEQ ID NO: 327559 - RNA, 19 nt, Homo sapiens
  misc_RNA (1)...(19): siRNA sense strand
gaagggaucuccaguugug

SEQ ID NO: 327560 - RNA, 19 nt, Homo sapiens
  misc_RNA (1)...(19): siRNA sense strand
gcacauggacuaccuguuc

SEQ ID NO: 327561 - RNA, 19 nt, Homo sapiens
  misc_RNA (1)...(19): siRNA sense strand
ugauagccauguauuucua

SEQ ID NO: 327562 - RNA, 19 nt, Homo sapiens
  misc_RNA (1)...(19): siRNA sense strand
guugugggcaauaucauua

SEQ ID NO: 327563 - RNA, 19 nt, Homo sapiens
  misc_RNA (1)...(19): siRNA sense strand
gguccaugguccucacgua

SEQ ID NO: 327564 - RNA, 19 nt, Homo sapiens
  misc_RNA (1)...(19): siRNA sense strand
ucacguaccuggugcucau

SEQ ID NO: 327565 - RNA, 19 nt, Homo sapiens
  misc_RNA (1)...(19): siRNA sense strand
gcucaucgucuacaucuuc

SEQ ID NO: 327566 - RNA, 19 nt, Homo sapiens
  misc_RNA (1)...(19): siRNA sense strand
gcugauagccauguauuuc

SEQ ID NO: 327567 - RNA, 19 nt, Homo sapiens
  misc_RNA (1)...(19): siRNA sense strand
gcacaucuggucccaugga

SEQ ID NO: 327568 - RNA, 19 nt, Homo sapiens
  misc_RNA (1)...(19): siRNA sense strand
aggcaaggaugacgucuuc

SEQ ID NO: 327569 - RNA, 19 nt, Homo sapiens
  misc_RNA (1)...(19): siRNA sense strand
gugacuacaugguguccaa

SEQ ID NO: 327570 - RNA, 19 nt, Homo sapiens
  misc_RNA (1)...(19): siRNA sense strand
uggacuaccuguucaccaa

SEQ ID NO: 327571 - RNA, 19 nt, Homo sapiens
  misc_RNA (1)...(19): siRNA sense strand
ccuguuugcugagaccaua

SEQ ID NO: 327572 - RNA, 19 nt, Homo sapiens
  misc_RNA (1)...(19): siRNA sense strand
ggugacagccgaccaguac

SEQ ID NO: 327573 - RNA, 19 nt, Homo sapiens
  misc_RNA (1)...(19): siRNA sense strand
gagugcgccuccugcauca

SEQ ID NO: 327574 - RNA, 19 nt, Homo sapiens
  misc_RNA (1)...(19): siRNA sense strand
gggaccgcgucaugauuga

SEQ ID NO: 327575 - RNA, 19 nt, Homo sapiens
  misc_RNA (1)...(19): siRNA sense strand
cgucaugauugagcaagaa

SEQ ID NO: 327576 - RNA, 19 nt, Homo sapiens
  misc_RNA (1)...(19): siRNA sense strand
guggugggccugcuaguug

SEQ ID NO: 327577 - RNA, 19 nt, Homo sapiens
  misc_RNA (1)...(19): siRNA sense strand
gugccuggauugccaucuu

SEQ ID NO: 327578 - RNA, 19 nt, Homo sapiens
  misc_RNA (1)...(19): siRNA sense strand
cacauggacuaccuguuca

SEQ ID NO: 327579 - RNA, 19 nt, Homo sapiens
  misc_RNA (1)...(19): siRNA sense strand
caccaagggcugcuucgaa

SEQ ID NO: 327580 - RNA, 19 nt, Homo sapiens
  misc_RNA (1)...(19): siRNA sense strand
gccacgccaucgacagcua

SEQ ID NO: 327581 - RNA, 19 nt, Homo sapiens
  misc_RNA (1)...(19): siRNA sense strand
uaccguguauacccacuga

SEQ ID NO: 327582 - RNA, 19 nt, Homo sapiens
  misc_RNA (1)...(19): siRNA sense strand
cggcuucuccuucuucaug

SEQ ID NO: 327583 - RNA, 19 nt, Homo sapiens
  misc_RNA (1)...(19): siRNA sense strand
ccuccugcaucacguccua

SEQ ID NO: 327584 - RNA, 19 nt, Homo sapiens
  misc_RNA (1)...(19): siRNA sense strand
acccaucccugaucaccaa

SEQ ID NO: 327585 - RNA, 19 nt, Homo sapiens
  misc_RNA (1)...(19): siRNA sense strand
gcgucaugauugagcaaga

SEQ ID NO: 327586 - RNA, 19 nt, Homo sapiens
  misc_RNA (1)...(19): siRNA sense strand
gccgaccaguaccguguau

SEQ ID NO: 327587 - RNA, 19 nt, Homo sapiens
  misc_RNA (1)...(19): siRNA sense strand
cacccaccgugacuacaug

SEQ ID NO: 327588 - RNA, 19 nt, Homo sapiens
  misc_RNA (1)...(19): siRNA sense strand
uaucauuauucugcuguca

SEQ ID NO: 327589 - RNA, 19 nt, Homo sapiens
  misc_RNA (1)...(19): siRNA sense strand
gggagucucaggcaaggau

SEQ ID NO: 327590 - RNA, 19 nt, Homo sapiens
  misc_RNA (1)...(19): siRNA sense strand
cgaccaguaccguguauac

SEQ ID NO: 327591 - RNA, 19 nt, Homo sapiens
  misc_RNA (1)...(19): siRNA sense strand
gcaauuacaucgagaucau

SEQ ID NO: 327592 - RNA, 19 nt, Homo sapiens
  misc_RNA (1)...(19): siRNA sense strand
gaacugcaccaccauagau

SEQ ID NO: 327593 - RNA, 19 nt, Homo sapiens
  misc_RNA (1)...(19): siRNA sense strand
ggaccggacuugcaauguc

SEQ ID NO: 327594 - RNA, 19 nt, Homo sapiens
  misc_RNA (1)...(19): siRNA sense strand
ggcugugacucgcaucaua

SEQ ID NO: 327595 - RNA, 19 nt, Homo sapiens
  misc_RNA (1)...(19): siRNA sense strand
ccucggagaugguaguaga

SEQ ID NO: 327596 - RNA, 19 nt, Homo sapiens
  misc_RNA (1)...(19): siRNA sense strand
gaccggacuugcaauguca

SEQ ID NO: 327597 - RNA, 19 nt, Homo sapiens
  misc_RNA (1)...(19): siRNA sense strand
gcugugacucgcaucauaa

SEQ ID NO: 327598 - RNA, 19 nt, Homo sapiens
  misc_RNA (1)...(19): siRNA sense strand
ggacggagaagcggaagga

SEQ ID NO: 327599 - RNA, 19 nt, Homo sapiens
  misc_RNA (1)...(19): siRNA sense strand
ggaacugcaccaccauaga

SEQ ID NO: 327600 - RNA, 19 nt, Homo sapiens
  misc_RNA (1)...(19): siRNA sense strand
gccaaguacucgcucuuca

SEQ ID NO: 327601 - RNA, 19 nt, Homo sapiens
  misc_RNA (1)...(19): siRNA sense strand
gcucggccaugaacaagca

SEQ ID NO: 327602 - RNA, 19 nt, Homo sapiens
  misc_RNA (1)...(19): siRNA sense strand
ugaacaagcacaacaacga

SEQ ID NO: 327603 - RNA, 19 nt, Homo sapiens
  misc_RNA (1)...(19): siRNA sense strand
acacaucucugggcucaca

SEQ ID NO: 327604 - RNA, 19 nt, Homo sapiens
  misc_RNA (1)...(19): siRNA sense strand
cgacuauccuggaccacau

SEQ ID NO: 327605 - RNA, 19 nt, Homo sapiens
  misc_RNA (1)...(19): siRNA sense strand
ugacagcgccucggagaug

SEQ ID NO: 327606 - RNA, 19 nt, Homo sapiens
  misc_RNA (1)...(19): siRNA sense strand
ggagaugguaguagagaag

SEQ ID NO: 327607 - RNA, 19 nt, Homo sapiens
  misc_RNA (1)...(19): siRNA sense strand
ccagagacggguuccuuug

SEQ ID NO: 327608 - RNA, 19 nt, Homo sapiens
  misc_RNA (1)...(19): siRNA sense strand
ccacaugcaccucaaaugc

SEQ ID NO: 327609 - RNA, 19 nt, Homo sapiens
  misc_RNA (1)...(19): siRNA sense strand
ggaguguauucgcaucuac

SEQ ID NO: 327610 - RNA, 19 nt, Homo sapiens
  misc_RNA (1)...(19): siRNA sense strand
ugacagccuggccaucuuu

SEQ ID NO: 327611 - RNA, 19 nt, Homo sapiens
  misc_RNA (1)...(19): siRNA sense strand
ccaaguacucgcucuucaa

SEQ ID NO: 327612 - RNA, 19 nt, Homo sapiens
  misc_RNA (1)...(19): siRNA sense strand
caaguacucgcucuucaag

SEQ ID NO: 327613 - RNA, 19 nt, Homo sapiens
  misc_RNA (1)...(19): siRNA sense strand
ggaccacaugcaccucaaa

SEQ ID NO: 327614 - RNA, 19 nt, Homo sapiens
  misc_RNA (1)...(19): siRNA sense strand
gggcagcugugaggugaag

SEQ ID NO: 327615 - RNA, 19 nt, Homo sapiens
  misc_RNA (1)...(19): siRNA sense strand
guagagaagcaccgugagu

SEQ ID NO: 327616 - RNA, 19 nt, Homo sapiens
  misc_RNA (1)...(19): siRNA sense strand
gcgagucggccuucguuca

SEQ ID NO: 327617 - RNA, 19 nt, Homo sapiens
  misc_RNA (1)...(19): siRNA sense strand
cggagaugguaguagagaa

SEQ ID NO: 327618 - RNA, 19 nt, Homo sapiens
  misc_RNA (1)...(19): siRNA sense strand
gaccacaugcaccucaaau

SEQ ID NO: 327619 - RNA, 19 nt, Homo sapiens
  misc_RNA (1)...(19): siRNA sense strand
cucgcuggcuacccaauuu

SEQ ID NO: 327620 - RNA, 19 nt, Homo sapiens
  misc_RNA (1)...(19): siRNA sense strand
ccaugaacaagcacaacaa

SEQ ID NO: 327621 - RNA, 19 nt, Homo sapiens
  misc_RNA (1)...(19): siRNA sense strand
ugacuucggcguguuagug

SEQ ID NO: 327622 - RNA, 19 nt, Homo sapiens
  misc_RNA (1)...(19): siRNA sense strand
gcgugaagcugggcaucca

SEQ ID NO: 327623 - RNA, 19 nt, Homo sapiens
  misc_RNA (1)...(19): siRNA sense strand
ggacgugucuauuauguug

SEQ ID NO: 327624 - RNA, 19 nt, Homo sapiens
  misc_RNA (1)...(19): siRNA sense strand
caacggacgugucuauuau

SEQ ID NO: 327625 - RNA, 19 nt, Homo sapiens
  misc_RNA (1)...(19): siRNA sense strand
gagagaagcugcuguaugc

SEQ ID NO: 327626 - RNA, 19 nt, Homo sapiens
  misc_RNA (1)...(19): siRNA sense strand
gcaagcagauccagugguu

SEQ ID NO: 327627 - RNA, 19 nt, Homo sapiens
  misc_RNA (1)...(19): siRNA sense strand
gcacagagucauuuagauu

SEQ ID NO: 327628 - RNA, 19 nt, Homo sapiens
  misc_RNA (1)...(19): siRNA sense strand
ugacaaaguuggcaaggaa

SEQ ID NO: 327629 - RNA, 19 nt, Homo sapiens
  misc_RNA (1)...(19): siRNA sense strand
acaagcggaugcucaauaa

SEQ ID NO: 327630 - RNA, 19 nt, Homo sapiens
  misc_RNA (1)...(19): siRNA sense strand
uguauuacgugaaccauaa

SEQ ID NO: 327631 - RNA, 19 nt, Homo sapiens
  misc_RNA (1)...(19): siRNA sense strand
ugaaggagauggacaacga

SEQ ID NO: 327632 - RNA, 19 nt, Homo sapiens
  misc_RNA (1)...(19): siRNA sense strand
ccaacggacgugucuauua

SEQ ID NO: 327633 - RNA, 19 nt, Homo sapiens
  misc_RNA (1)...(19): siRNA sense strand
acaauggacggguguauua

SEQ ID NO: 327634 - RNA, 19 nt, Homo sapiens
  misc_RNA (1)...(19): siRNA sense strand
ugccauaccuugagaaaug

SEQ ID NO: 327635 - RNA, 19 nt, Homo sapiens
  misc_RNA (1)...(19): siRNA sense strand
agaacaaccuggaagaaug

SEQ ID NO: 327636 - RNA, 19 nt, Homo sapiens
  misc_RNA (1)...(19): siRNA sense strand
gaccaaagccuuccuggau

SEQ ID NO: 327637 - RNA, 19 nt, Homo sapiens
  misc_RNA (1)...(19): siRNA sense strand
gaacaaccuggaagaaugu

SEQ ID NO: 327638 - RNA, 19 nt, Homo sapiens
  misc_RNA (1)...(19): siRNA sense strand
caacggaccacagaaguuu

SEQ ID NO: 327639 - RNA, 19 nt, Homo sapiens
  misc_RNA (1)...(19): siRNA sense strand
ugaaagugguguccgcaaa

SEQ ID NO: 327640 - RNA, 19 nt, Homo sapiens
  misc_RNA (1)...(19): siRNA sense strand
ccacagaaguuuugcauug

SEQ ID NO: 327641 - RNA, 19 nt, Homo sapiens
  misc_RNA (1)...(19): siRNA sense strand
caggaugggagaugaaaua

SEQ ID NO: 327642 - RNA, 19 nt, Homo sapiens
  misc_RNA (1)...(19): siRNA sense strand
gcacuucagccaaagauuc

SEQ ID NO: 327643 - RNA, 19 nt, Homo sapiens
  misc_RNA (1)...(19): siRNA sense strand
gaugggagaugaaauacac

SEQ ID NO: 327644 - RNA, 19 nt, Homo sapiens
  misc_RNA (1)...(19): siRNA sense strand
gcgcuacuuugacgagaaa

SEQ ID NO: 327645 - RNA, 19 nt, Homo sapiens
  misc_RNA (1)...(19): siRNA sense strand
caaggaagaguacaucaug

SEQ ID NO: 327646 - RNA, 19 nt, Homo sapiens
  misc_RNA (1)...(19): siRNA sense strand
ucaacccuauguauuguuu

SEQ ID NO: 327647 - RNA, 19 nt, Homo sapiens
  misc_RNA (1)...(19): siRNA sense strand
aaucgucaaccucgaauua

SEQ ID NO: 327648 - RNA, 19 nt, Homo sapiens
  misc_RNA (1)...(19): siRNA sense strand
gaacaaggaagaguacauc

SEQ ID NO: 327649 - RNA, 19 nt, Homo sapiens
  misc_RNA (1)...(19): siRNA sense strand
uaagagaccaacccugaaa

SEQ ID NO: 327650 - RNA, 19 nt, Homo sapiens
  misc_RNA (1)...(19): siRNA sense strand
gagcugccauaccuugaga

SEQ ID NO: 327651 - RNA, 19 nt, Homo sapiens
  misc_RNA (1)...(19): siRNA sense strand
caccuacuuucgcuuuaua

SEQ ID NO: 327652 - RNA, 19 nt, Homo sapiens
  misc_RNA (1)...(19): siRNA sense strand
aaagauuccuauaccaguu

SEQ ID NO: 327653 - RNA, 19 nt, Homo sapiens
  misc_RNA (1)...(19): siRNA sense strand
gcugcacccuugaguguga

SEQ ID NO: 327654 - RNA, 19 nt, Homo sapiens
  misc_RNA (1)...(19): siRNA sense strand
gaauaugccggaaagaaca

SEQ ID NO: 327655 - RNA, 19 nt, Homo sapiens
  misc_RNA (1)...(19): siRNA sense strand
agucucagcucacuuugaa

SEQ ID NO: 327656 - RNA, 19 nt, Homo sapiens
  misc_RNA (1)...(19): siRNA sense strand
cuugagaaaugaacugcua

SEQ ID NO: 327657 - RNA, 19 nt, Homo sapiens
  misc_RNA (1)...(19): siRNA sense strand
gcucaacccuauguauugu

SEQ ID NO: 327658 - RNA, 19 nt, Homo sapiens
  misc_RNA (1)...(19): siRNA sense strand
aaacugcuuugguggaaga

SEQ ID NO: 327659 - RNA, 19 nt, Homo sapiens
  misc_RNA (1)...(19): siRNA sense strand
gcaaagcccaaggugcaua

SEQ ID NO: 327660 - RNA, 19 nt, Homo sapiens
  misc_RNA (1)...(19): siRNA sense strand
gcaacggaccacagaaguu

SEQ ID NO: 327661 - RNA, 19 nt, Homo sapiens
  misc_RNA (1)...(19): siRNA sense strand
gagaacaaccuggaagaau

SEQ ID NO: 327662 - RNA, 19 nt, Homo sapiens
  misc_RNA (1)...(19): siRNA sense strand
gcuguaccauggaaaguuc

SEQ ID NO: 327663 - RNA, 19 nt, Homo sapiens
  misc_RNA (1)...(19): siRNA sense strand
ucuauuauguugaccacaa

SEQ ID NO: 327664 - RNA, 19 nt, Homo sapiens
  misc_RNA (1)...(19): siRNA sense strand
ugagagagaagcugcugua

SEQ ID NO: 327665 - RNA, 19 nt, Homo sapiens
  misc_RNA (1)...(19): siRNA sense strand
gagaggaacccagcacuuc

SEQ ID NO: 327666 - RNA, 19 nt, Homo sapiens
  misc_RNA (1)...(19): siRNA sense strand
ccauugacccugaguucua

SEQ ID NO: 327667 - RNA, 19 nt, Homo sapiens
  misc_RNA (1)...(19): siRNA sense strand
guggaaguaucaccaguuc

SEQ ID NO: 327668 - RNA, 19 nt, Homo sapiens
  misc_RNA (1)...(19): siRNA sense strand
cacagagucauuuagauuu

SEQ ID NO: 327669 - RNA, 19 nt, Homo sapiens
  misc_RNA (1)...(19): siRNA sense strand
ccaauggcacagugaauga

SEQ ID NO: 327670 - RNA, 19 nt, Homo sapiens
  misc_RNA (1)...(19): siRNA sense strand
caaaggcagcguugucuca

SEQ ID NO: 327671 - RNA, 19 nt, Homo sapiens
  misc_RNA (1)...(19): siRNA sense strand
caaccucuccaacgucuug

SEQ ID NO: 327672 - RNA, 19 nt, Homo sapiens
  misc_RNA (1)...(19): siRNA sense strand
acgaacagcugagagagaa

SEQ ID NO: 327673 - RNA, 19 nt, Homo sapiens
  misc_RNA (1)...(19): siRNA sense strand
caaagcccaaggugcauaa

SEQ ID NO: 327674 - RNA, 19 nt, Homo sapiens
  misc_RNA (1)...(19): siRNA sense strand
ggagaggaacccagcacuu

SEQ ID NO: 327675 - RNA, 19 nt, Homo sapiens
  misc_RNA (1)...(19): siRNA sense strand
gaaagugguguccgcaaag

SEQ ID NO: 327676 - RNA, 19 nt, Homo sapiens
  misc_RNA (1)...(19): siRNA sense strand
caaagagaacaaccuggaa

SEQ ID NO: 327677 - RNA, 19 nt, Homo sapiens
  misc_RNA (1)...(19): siRNA sense strand
ugggaaaugugccuaaugg

SEQ ID NO: 327678 - RNA, 19 nt, Homo sapiens
  misc_RNA (1)...(19): siRNA sense strand
ggagauggacaacgagaag

SEQ ID NO: 327679 - RNA, 19 nt, Homo sapiens
  misc_RNA (1)...(19): siRNA sense strand
ucacggaggagaacaagga

SEQ ID NO: 327680 - RNA, 19 nt, Homo sapiens
  misc_RNA (1)...(19): siRNA sense strand
uacaagcggaugcucaaua

SEQ ID NO: 327681 - RNA, 19 nt, Homo sapiens
  misc_RNA (1)...(19): siRNA sense strand
gaacaugaaacccuaugac

SEQ ID NO: 327682 - RNA, 19 nt, Homo sapiens
  misc_RNA (1)...(19): siRNA sense strand
cggaguacgugcgcaacua

SEQ ID NO: 327683 - RNA, 19 nt, Homo sapiens
  misc_RNA (1)...(19): siRNA sense strand
gccauaccuugagaaauga

SEQ ID NO: 327684 - RNA, 19 nt, Homo sapiens
  misc_RNA (1)...(19): siRNA sense strand
aauguggccuggagcugua

SEQ ID NO: 327685 - RNA, 19 nt, Homo sapiens
  misc_RNA (1)...(19): siRNA sense strand
gaaaagacaggacaaugga

SEQ ID NO: 327686 - RNA, 19 nt, Homo sapiens
  misc_RNA (1)...(19): siRNA sense strand
gugcuucgacugaccauga

SEQ ID NO: 327687 - RNA, 19 nt, Homo sapiens
  misc_RNA (1)...(19): siRNA sense strand
acaugcagcugacccugaa

SEQ ID NO: 327688 - RNA, 19 nt, Homo sapiens
  misc_RNA (1)...(19): siRNA sense strand
gcuucacccucccuuucua

SEQ ID NO: 327689 - RNA, 19 nt, Homo sapiens
  misc_RNA (1)...(19): siRNA sense strand
gugcucaacccuauguauu

SEQ ID NO: 327690 - RNA, 19 nt, Homo sapiens
  misc_RNA (1)...(19): siRNA sense strand
caaggugcauaaucgucaa

SEQ ID NO: 327691 - RNA, 19 nt, Homo sapiens
  misc_RNA (1)...(19): siRNA sense strand
ggaguacgugcgcaacuau

SEQ ID NO: 327692 - RNA, 19 nt, Homo sapiens
  misc_RNA (1)...(19): siRNA sense strand
ggcagaagagcaccaucua

SEQ ID NO: 327693 - RNA, 19 nt, Homo sapiens
  misc_RNA (1)...(19): siRNA sense strand
caagaacucaggccacagu

SEQ ID NO: 327694 - RNA, 19 nt, Homo sapiens
  misc_RNA (1)...(19): siRNA sense strand
gcuacgaacagcugagaga

SEQ ID NO: 327695 - RNA, 19 nt, Homo sapiens
  misc_RNA (1)...(19): siRNA sense strand
ggaguggcugcgcuacuuu

SEQ ID NO: 327696 - RNA, 19 nt, Homo sapiens
  misc_RNA (1)...(19): siRNA sense strand
ggagaacaaggaagaguac

SEQ ID NO: 327697 - RNA, 19 nt, Homo sapiens
  misc_RNA (1)...(19): siRNA sense strand
gccuggagcuguacuucau

SEQ ID NO: 327698 - RNA, 19 nt, Homo sapiens
  misc_RNA (1)...(19): siRNA sense strand
aagcggaugcucaauaaga

SEQ ID NO: 327699 - RNA, 19 nt, Homo sapiens
  misc_RNA (1)...(19): siRNA sense strand
ucaccuacuuucgcuuuau

SEQ ID NO: 327700 - RNA, 19 nt, Homo sapiens
  misc_RNA (1)...(19): siRNA sense strand
gacaauggacggguguauu

SEQ ID NO: 327701 - RNA, 19 nt, Homo sapiens
  misc_RNA (1)...(19): siRNA sense strand
ggacaauggacggguguau

SEQ ID NO: 327702 - RNA, 19 nt, Homo sapiens
  misc_RNA (1)...(19): siRNA sense strand
augcagcacuucagccaaa

SEQ ID NO: 327703 - RNA, 19 nt, Homo sapiens
  misc_RNA (1)...(19): siRNA sense strand
uccaacagaucaugaacau

SEQ ID NO: 327704 - RNA, 19 nt, Homo sapiens
  misc_RNA (1)...(19): siRNA sense strand
ggaccaccucaccuacuuu

SEQ ID NO: 327705 - RNA, 19 nt, Homo sapiens
  misc_RNA (1)...(19): siRNA sense strand
ggcacagagucauuuagau

SEQ ID NO: 327706 - RNA, 19 nt, Homo sapiens
  misc_RNA (1)...(19): siRNA sense strand
gguagcaacggaccacaga

SEQ ID NO: 327707 - RNA, 19 nt, Homo sapiens
  misc_RNA (1)...(19): siRNA sense strand
gggauuugccgaacucauc

SEQ ID NO: 327708 - RNA, 19 nt, Homo sapiens
  misc_RNA (1)...(19): siRNA sense strand
gaaugucacggcacagagu

SEQ ID NO: 327709 - RNA, 19 nt, Homo sapiens
  misc_RNA (1)...(19): siRNA sense strand
cggaccaccucaccuacuu

SEQ ID NO: 327710 - RNA, 19 nt, Homo sapiens
  misc_RNA (1)...(19): siRNA sense strand
gaggagggccuggacuaug

SEQ ID NO: 327711 - RNA, 19 nt, Homo sapiens
  misc_RNA (1)...(19): siRNA sense strand
ucacggcacagagucauuu

SEQ ID NO: 327712 - RNA, 19 nt, Homo sapiens
  misc_RNA (1)...(19): siRNA sense strand
acaucaugcugcugacuga

SEQ ID NO: 327713 - RNA, 19 nt, Homo sapiens
  misc_RNA (1)...(19): siRNA sense strand
ggcagacgcuuuucgaaga

SEQ ID NO: 327714 - RNA, 19 nt, Homo sapiens
  misc_RNA (1)...(19): siRNA sense strand
gccaaagauuccuauacca

SEQ ID NO: 327715 - RNA, 19 nt, Homo sapiens
  misc_RNA (1)...(19): siRNA sense strand
uggaguggcugcgcuacuu

SEQ ID NO: 327716 - RNA, 19 nt, Homo sapiens
  misc_RNA (1)...(19): siRNA sense strand
gcccaacggacgugucuau

SEQ ID NO: 327717 - RNA, 19 nt, Homo sapiens
  misc_RNA (1)...(19): siRNA sense strand
ccaagaacagcaagcagau

SEQ ID NO: 327718 - RNA, 19 nt, Homo sapiens
  misc_RNA (1)...(19): siRNA sense strand
gcagaagagcaccaucuac

SEQ ID NO: 327719 - RNA, 19 nt, Homo sapiens
  misc_RNA (1)...(19): siRNA sense strand
cauaaucgucaaccucgaa

SEQ ID NO: 327720 - RNA, 19 nt, Homo sapiens
  misc_RNA (1)...(19): siRNA sense strand
gggcuucacccucccuuuc

SEQ ID NO: 327721 - RNA, 19 nt, Homo sapiens
  misc_RNA (1)...(19): siRNA sense strand
gauccaggaaccagcuuug

SEQ ID NO: 327722 - RNA, 19 nt, Homo sapiens
  misc_RNA (1)...(19): siRNA sense strand
ggagaccgagggcuuugga

SEQ ID NO: 327723 - RNA, 19 nt, Homo sapiens
  misc_RNA (1)...(19): siRNA sense strand
gggacaagcugcagaggua

SEQ ID NO: 327724 - RNA, 19 nt, Homo sapiens
  misc_RNA (1)...(19): siRNA sense strand
gcacguagaggccaucaaa

SEQ ID NO: 327725 - RNA, 19 nt, Homo sapiens
  misc_RNA (1)...(19): siRNA sense strand
ggacucagcaggagcuuga

SEQ ID NO: 327726 - RNA, 19 nt, Homo sapiens
  misc_RNA (1)...(19): siRNA sense strand
ccaagauccugguugaguu

SEQ ID NO: 327727 - RNA, 19 nt, Homo sapiens
  misc_RNA (1)...(19): siRNA sense strand
ggaggaagcccagaggaaa

SEQ ID NO: 327728 - RNA, 19 nt, Homo sapiens
  misc_RNA (1)...(19): siRNA sense strand
agaaggcaauugcagcuaa

SEQ ID NO: 327729 - RNA, 19 nt, Homo sapiens
  misc_RNA (1)...(19): siRNA sense strand
cagccaagauccugguuga

SEQ ID NO: 327730 - RNA, 19 nt, Homo sapiens
  misc_RNA (1)...(19): siRNA sense strand
cuucaaggcuguuggucua

SEQ ID NO: 327731 - RNA, 19 nt, Homo sapiens
  misc_RNA (1)...(19): siRNA sense strand
gcagagcaguccagaacca

SEQ ID NO: 327732 - RNA, 19 nt, Homo sapiens
  misc_RNA (1)...(19): siRNA sense strand
gguggacucucagaagaaa

SEQ ID NO: 327733 - RNA, 19 nt, Homo sapiens
  misc_RNA (1)...(19): siRNA sense strand
agaaacaaauggccaugga

SEQ ID NO: 327734 - RNA, 19 nt, Homo sapiens
  misc_RNA (1)...(19): siRNA sense strand
gaagacacgagccgacaga

SEQ ID NO: 327735 - RNA, 19 nt, Homo sapiens
  misc_RNA (1)...(19): siRNA sense strand
gaaggcaauugcagcuaag

SEQ ID NO: 327736 - RNA, 19 nt, Homo sapiens
  misc_RNA (1)...(19): siRNA sense strand
caagauccugguugaguuu

SEQ ID NO: 327737 - RNA, 19 nt, Homo sapiens
  misc_RNA (1)...(19): siRNA sense strand
gugguggacucucagaaga

SEQ ID NO: 327738 - RNA, 19 nt, Homo sapiens
  misc_RNA (1)...(19): siRNA sense strand
agaagcaucugcagcaucu

SEQ ID NO: 327739 - RNA, 19 nt, Homo sapiens
  misc_RNA (1)...(19): siRNA sense strand
uagcggauuuccugcagaa

SEQ ID NO: 327740 - RNA, 19 nt, Homo sapiens
  misc_RNA (1)...(19): siRNA sense strand
acaaccugcuggagaugua

SEQ ID NO: 327741 - RNA, 19 nt, Homo sapiens
  misc_RNA (1)...(19): siRNA sense strand
acaaauggccauggagaaa

SEQ ID NO: 327742 - RNA, 19 nt, Homo sapiens
  misc_RNA (1)...(19): siRNA sense strand
agauguaaauuugccauga

SEQ ID NO: 327743 - RNA, 19 nt, Homo sapiens
  misc_RNA (1)...(19): siRNA sense strand
ggagaagcaucugcagcau

SEQ ID NO: 327744 - RNA, 19 nt, Homo sapiens
  misc_RNA (1)...(19): siRNA sense strand
gaggugagggagcguaaga

SEQ ID NO: 327745 - RNA, 19 nt, Homo sapiens
  misc_RNA (1)...(19): siRNA sense strand
ugagguggcaggcaucuug

SEQ ID NO: 327746 - RNA, 19 nt, Homo sapiens
  misc_RNA (1)...(19): siRNA sense strand
ugcuggagauguaaauuug

SEQ ID NO: 327747 - RNA, 19 nt, Homo sapiens
  misc_RNA (1)...(19): siRNA sense strand
caaggcuguuggucuacaa

SEQ ID NO: 327748 - RNA, 19 nt, Homo sapiens
  misc_RNA (1)...(19): siRNA sense strand
ggcaauugcagcuaaggaa

SEQ ID NO: 327749 - RNA, 19 nt, Homo sapiens
  misc_RNA (1)...(19): siRNA sense strand
ucuacaaccugcuggagau

SEQ ID NO: 327750 - RNA, 19 nt, Homo sapiens
  misc_RNA (1)...(19): siRNA sense strand
ucaccaaggcccugacuca

SEQ ID NO: 327751 - RNA, 19 nt, Homo sapiens
  misc_RNA (1)...(19): siRNA sense strand
cagcuaaggaacaauggaa

SEQ ID NO: 327752 - RNA, 19 nt, Homo sapiens
  misc_RNA (1)...(19): siRNA sense strand
ugaagcagcaggcagaaca

SEQ ID NO: 327753 - RNA, 19 nt, Homo sapiens
  misc_RNA (1)...(19): siRNA sense strand
gauccugguugaguuugug

SEQ ID NO: 327754 - RNA, 19 nt, Homo sapiens
  misc_RNA (1)...(19): siRNA sense strand
gcaggaggaggcagaacug

SEQ ID NO: 327755 - RNA, 19 nt, Homo sapiens
  misc_RNA (1)...(19): siRNA sense strand
guagaggccaucaaaauug

SEQ ID NO: 327756 - RNA, 19 nt, Homo sapiens
  misc_RNA (1)...(19): siRNA sense strand
cuaaggaacaauggaaaga

SEQ ID NO: 327757 - RNA, 19 nt, Homo sapiens
  misc_RNA (1)...(19): siRNA sense strand
gcagcuccaggccaagaaa

SEQ ID NO: 327758 - RNA, 19 nt, Homo sapiens
  misc_RNA (1)...(19): siRNA sense strand
cggauuuccugcagaacau

SEQ ID NO: 327759 - RNA, 19 nt, Homo sapiens
  misc_RNA (1)...(19): siRNA sense strand
gccaagauccugguugagu

SEQ ID NO: 327760 - RNA, 19 nt, Homo sapiens
  misc_RNA (1)...(19): siRNA sense strand
gagcagaguacaggagaca

SEQ ID NO: 327761 - RNA, 19 nt, Homo sapiens
  misc_RNA (1)...(19): siRNA sense strand
gcuaaggaacaauggaaag

SEQ ID NO: 327762 - RNA, 19 nt, Homo sapiens
  misc_RNA (1)...(19): siRNA sense strand
gaaccaguggcagcuacaa

SEQ ID NO: 327763 - RNA, 19 nt, Homo sapiens
  misc_RNA (1)...(19): siRNA sense strand
cugcuggagauguaaauuu

SEQ ID NO: 327764 - RNA, 19 nt, Homo sapiens
  misc_RNA (1)...(19): siRNA sense strand
gagcugaaggccaccuaca

SEQ ID NO: 327765 - RNA, 19 nt, Homo sapiens
  misc_RNA (1)...(19): siRNA sense strand
ggacaagcugcagagguau

SEQ ID NO: 327766 - RNA, 19 nt, Homo sapiens
  misc_RNA (1)...(19): siRNA sense strand
uugacaggguguuucagaa

SEQ ID NO: 327767 - RNA, 19 nt, Homo sapiens
  misc_RNA (1)...(19): siRNA sense strand
gcggauuuccugcagaaca

SEQ ID NO: 327768 - RNA, 19 nt, Homo sapiens
  misc_RNA (1)...(19): siRNA sense strand
ggaagcugcagcccuagag

SEQ ID NO: 327769 - RNA, 19 nt, Homo sapiens
  misc_RNA (1)...(19): siRNA sense strand
caauugcagcuaaggaaca

SEQ ID NO: 327770 - RNA, 19 nt, Homo sapiens
  misc_RNA (1)...(19): siRNA sense strand
gcucaggaggacacugcua

SEQ ID NO: 327771 - RNA, 19 nt, Homo sapiens
  misc_RNA (1)...(19): siRNA sense strand
ggugagggagcguaagaca

SEQ ID NO: 327772 - RNA, 19 nt, Homo sapiens
  misc_RNA (1)...(19): siRNA sense strand
gaaacuuggaaaccugaag

SEQ ID NO: 327773 - RNA, 19 nt, Homo sapiens
  misc_RNA (1)...(19): siRNA sense strand
gcagcuaaggaacaaugga

SEQ ID NO: 327774 - RNA, 19 nt, Homo sapiens
  misc_RNA (1)...(19): siRNA sense strand
ucaaggcuguuggucuaca

SEQ ID NO: 327775 - RNA, 19 nt, Homo sapiens
  misc_RNA (1)...(19): siRNA sense strand
gguggcaggcaucuuggaa

SEQ ID NO: 327776 - RNA, 19 nt, Homo sapiens
  misc_RNA (1)...(19): siRNA sense strand
gagcuugacaggguguuuc

SEQ ID NO: 327777 - RNA, 19 nt, Homo sapiens
  misc_RNA (1)...(19): siRNA sense strand
gaggaagcccagaggaaac

SEQ ID NO: 327778 - RNA, 19 nt, Homo sapiens
  misc_RNA (1)...(19): siRNA sense strand
gggacaagcugcagaggua

SEQ ID NO: 327779 - RNA, 19 nt, Homo sapiens
  misc_RNA (1)...(19): siRNA sense strand
gcacguagaggccaucaaa

SEQ ID NO: 327780 - RNA, 19 nt, Homo sapiens
  misc_RNA (1)...(19): siRNA sense strand
ggacucagcaggagcuuga

SEQ ID NO: 327781 - RNA, 19 nt, Homo sapiens
  misc_RNA (1)...(19): siRNA sense strand
ccaagauccugguugaguu

SEQ ID NO: 327782 - RNA, 19 nt, Homo sapiens
  misc_RNA (1)...(19): siRNA sense strand
ggaggaagcccagaggaaa

SEQ ID NO: 327783 - RNA, 19 nt, Homo sapiens
  misc_RNA (1)...(19): siRNA sense strand
agaaggcaauugcagcuaa

SEQ ID NO: 327784 - RNA, 19 nt, Homo sapiens
  misc_RNA (1)...(19): siRNA sense strand
cagccaagauccugguuga

SEQ ID NO: 327785 - RNA, 19 nt, Homo sapiens
  misc_RNA (1)...(19): siRNA sense strand
cuucaaggcuguuggucua

SEQ ID NO: 327786 - RNA, 19 nt, Homo sapiens
  misc_RNA (1)...(19): siRNA sense strand
gcagagcaguccagaacca

SEQ ID NO: 327787 - RNA, 19 nt, Homo sapiens
  misc_RNA (1)...(19): siRNA sense strand
gguggacucucagaagaaa

SEQ ID NO: 327788 - RNA, 19 nt, Homo sapiens
  misc_RNA (1)...(19): siRNA sense strand
agaaacaaauggccaugga

SEQ ID NO: 327789 - RNA, 19 nt, Homo sapiens
  misc_RNA (1)...(19): siRNA sense strand
gaagacacgagccgacaga

SEQ ID NO: 327790 - RNA, 19 nt, Homo sapiens
  misc_RNA (1)...(19): siRNA sense strand
gaaggcaauugcagcuaag

SEQ ID NO: 327791 - RNA, 19 nt, Homo sapiens
  misc_RNA (1)...(19): siRNA sense strand
caagauccugguugaguuu

SEQ ID NO: 327792 - RNA, 19 nt, Homo sapiens
  misc_RNA (1)...(19): siRNA sense strand
gugguggacucucagaaga

SEQ ID NO: 327793 - RNA, 19 nt, Homo sapiens
  misc_RNA (1)...(19): siRNA sense strand
agaagcaucugcagcaucu

SEQ ID NO: 327794 - RNA, 19 nt, Homo sapiens
  misc_RNA (1)...(19): siRNA sense strand
uagcggauuuccugcagaa

SEQ ID NO: 327795 - RNA, 19 nt, Homo sapiens
  misc_RNA (1)...(19): siRNA sense strand
acaaccugcuggagaugua

SEQ ID NO: 327796 - RNA, 19 nt, Homo sapiens
  misc_RNA (1)...(19): siRNA sense strand
acaaauggccauggagaaa

SEQ ID NO: 327797 - RNA, 19 nt, Homo sapiens
  misc_RNA (1)...(19): siRNA sense strand
agauguaaauuugccauga

SEQ ID NO: 327798 - RNA, 19 nt, Homo sapiens
  misc_RNA (1)...(19): siRNA sense strand
ggagaagcaucugcagcau

SEQ ID NO: 327799 - RNA, 19 nt, Homo sapiens
  misc_RNA (1)...(19): siRNA sense strand
gaggugagggagcguaaga

SEQ ID NO: 327800 - RNA, 19 nt, Homo sapiens
  misc_RNA (1)...(19): siRNA sense strand
ugagguggcaggcaucuug

SEQ ID NO: 327801 - RNA, 19 nt, Homo sapiens
  misc_RNA (1)...(19): siRNA sense strand
ugcuggagauguaaauuug

SEQ ID NO: 327802 - RNA, 19 nt, Homo sapiens
  misc_RNA (1)...(19): siRNA sense strand
caaggcuguuggucuacaa

SEQ ID NO: 327803 - RNA, 19 nt, Homo sapiens
  misc_RNA (1)...(19): siRNA sense strand
ggcaauugcagcuaaggaa

SEQ ID NO: 327804 - RNA, 19 nt, Homo sapiens
  misc_RNA (1)...(19): siRNA sense strand
ucuacaaccugcuggagau

SEQ ID NO: 327805 - RNA, 19 nt, Homo sapiens
  misc_RNA (1)...(19): siRNA sense strand
ucaccaaggcccugacuca

SEQ ID NO: 327806 - RNA, 19 nt, Homo sapiens
  misc_RNA (1)...(19): siRNA sense strand
cagcuaaggaacaauggaa

SEQ ID NO: 327807 - RNA, 19 nt, Homo sapiens
  misc_RNA (1)...(19): siRNA sense strand
ugaagcagcaggcagaaca

SEQ ID NO: 327808 - RNA, 19 nt, Homo sapiens
  misc_RNA (1)...(19): siRNA sense strand
gauccugguugaguuugug

SEQ ID NO: 327809 - RNA, 19 nt, Homo sapiens
  misc_RNA (1)...(19): siRNA sense strand
gcaggaggaggcagaacug

SEQ ID NO: 327810 - RNA, 19 nt, Homo sapiens
  misc_RNA (1)...(19): siRNA sense strand
guagaggccaucaaaauug

SEQ ID NO: 327811 - RNA, 19 nt, Homo sapiens
  misc_RNA (1)...(19): siRNA sense strand
cuaaggaacaauggaaaga

SEQ ID NO: 327812 - RNA, 19 nt, Homo sapiens
  misc_RNA (1)...(19): siRNA sense strand
gcagcuccaggccaagaaa

SEQ ID NO: 327813 - RNA, 19 nt, Homo sapiens
  misc_RNA (1)...(19): siRNA sense strand
cggauuuccugcagaacau

SEQ ID NO: 327814 - RNA, 19 nt, Homo sapiens
  misc_RNA (1)...(19): siRNA sense strand
gccaagauccugguugagu

SEQ ID NO: 327815 - RNA, 19 nt, Homo sapiens
  misc_RNA (1)...(19): siRNA sense strand
gagcagaguacaggagaca

SEQ ID NO: 327816 - RNA, 19 nt, Homo sapiens
  misc_RNA (1)...(19): siRNA sense strand
gcuaaggaacaauggaaag

SEQ ID NO: 327817 - RNA, 19 nt, Homo sapiens
  misc_RNA (1)...(19): siRNA sense strand
gaaccaguggcagcuacaa

SEQ ID NO: 327818 - RNA, 19 nt, Homo sapiens
  misc_RNA (1)...(19): siRNA sense strand
cugcuggagauguaaauuu

SEQ ID NO: 327819 - RNA, 19 nt, Homo sapiens
  misc_RNA (1)...(19): siRNA sense strand
gagcugaaggccaccuaca

SEQ ID NO: 327820 - RNA, 19 nt, Homo sapiens
  misc_RNA (1)...(19): siRNA sense strand
ggacaagcugcagagguau

SEQ ID NO: 327821 - RNA, 19 nt, Homo sapiens
  misc_RNA (1)...(19): siRNA sense strand
uugacaggguguuucagaa

SEQ ID NO: 327822 - RNA, 19 nt, Homo sapiens
  misc_RNA (1)...(19): siRNA sense strand
gcggauuuccugcagaaca

SEQ ID NO: 327823 - RNA, 19 nt, Homo sapiens
  misc_RNA (1)...(19): siRNA sense strand
ggaagcugcagcccuagag

SEQ ID NO: 327824 - RNA, 19 nt, Homo sapiens
  misc_RNA (1)...(19): siRNA sense strand
caauugcagcuaaggaaca

SEQ ID NO: 327825 - RNA, 19 nt, Homo sapiens
  misc_RNA (1)...(19): siRNA sense strand
gcucaggaggacacugcua

SEQ ID NO: 327826 - RNA, 19 nt, Homo sapiens
  misc_RNA (1)...(19): siRNA sense strand
ggugagggagcguaagaca

SEQ ID NO: 327827 - RNA, 19 nt, Homo sapiens
  misc_RNA (1)...(19): siRNA sense strand
gaaacuuggaaaccugaag

SEQ ID NO: 327828 - RNA, 19 nt, Homo sapiens
  misc_RNA (1)...(19): siRNA sense strand
gcagcuaaggaacaaugga

SEQ ID NO: 327829 - RNA, 19 nt, Homo sapiens
  misc_RNA (1)...(19): siRNA sense strand
ucaaggcuguuggucuaca

SEQ ID NO: 327830 - RNA, 19 nt, Homo sapiens
  misc_RNA (1)...(19): siRNA sense strand
gguggcaggcaucuuggaa

SEQ ID NO: 327831 - RNA, 19 nt, Homo sapiens
  misc_RNA (1)...(19): siRNA sense strand
gagcuugacaggguguuuc

SEQ ID NO: 327832 - RNA, 19 nt, Homo sapiens
  misc_RNA (1)...(19): siRNA sense strand
gaggaagcccagaggaaac

SEQ ID NO: 327833 - RNA, 19 nt, Homo sapiens
  misc_RNA (1)...(19): siRNA sense strand
ggaaguagcuccucuguuu

SEQ ID NO: 327834 - RNA, 19 nt, Homo sapiens
  misc_RNA (1)...(19): siRNA sense strand
ggagaaaccuuauaaaugu

SEQ ID NO: 327835 - RNA, 19 nt, Homo sapiens
  misc_RNA (1)...(19): siRNA sense strand
ggaagaaccuuauaaaugu

SEQ ID NO: 327836 - RNA, 19 nt, Homo sapiens
  misc_RNA (1)...(19): siRNA sense strand
ggagaaaccuuauaagugu

SEQ ID NO: 327837 - RNA, 19 nt, Homo sapiens
  misc_RNA (1)...(19): siRNA sense strand
ggaaauccuuuacuucuaa

SEQ ID NO: 327838 - RNA, 19 nt, Homo sapiens
  misc_RNA (1)...(19): siRNA sense strand
ggagagaccuuauaagugu

SEQ ID NO: 327839 - RNA, 19 nt, Homo sapiens
  misc_RNA (1)...(19): siRNA sense strand
gaagagaacccaagaaauc

SEQ ID NO: 327840 - RNA, 19 nt, Homo sapiens
  misc_RNA (1)...(19): siRNA sense strand
ccacauagcagcugaaauu

SEQ ID NO: 327841 - RNA, 19 nt, Homo sapiens
  misc_RNA (1)...(19): siRNA sense strand
gcucagaccacuuaucuua

SEQ ID NO: 327842 - RNA, 19 nt, Homo sapiens
  misc_RNA (1)...(19): siRNA sense strand
gcacucaggccuaauuaua

SEQ ID NO: 327843 - RNA, 19 nt, Homo sapiens
  misc_RNA (1)...(19): siRNA sense strand
gagagaaaccuuauaaaug

SEQ ID NO: 327844 - RNA, 19 nt, Homo sapiens
  misc_RNA (1)...(19): siRNA sense strand
uagaggagcugcagaaaga

SEQ ID NO: 327845 - RNA, 19 nt, Homo sapiens
  misc_RNA (1)...(19): siRNA sense strand
gggaagaaccuuauaaaug

SEQ ID NO: 327846 - RNA, 19 nt, Homo sapiens
  misc_RNA (1)...(19): siRNA sense strand
guagaaaucuuaugguaca

SEQ ID NO: 327847 - RNA, 19 nt, Homo sapiens
  misc_RNA (1)...(19): siRNA sense strand
ggaaaguccuuaccucuag

SEQ ID NO: 327848 - RNA, 19 nt, Homo sapiens
  misc_RNA (1)...(19): siRNA sense strand
gggaaaaccuuuauuauga

SEQ ID NO: 327849 - RNA, 19 nt, Homo sapiens
  misc_RNA (1)...(19): siRNA sense strand
gagagaaaccuuacaaaug

SEQ ID NO: 327850 - RNA, 19 nt, Homo sapiens
  misc_RNA (1)...(19): siRNA sense strand
ucaaagugcuuaccuucua

SEQ ID NO: 327851 - RNA, 19 nt, Homo sapiens
  misc_RNA (1)...(19): siRNA sense strand
gggaaagucuucucucaga

SEQ ID NO: 327852 - RNA, 19 nt, Homo sapiens
  misc_RNA (1)...(19): siRNA sense strand
ggagagaaaccuuauaaau

SEQ ID NO: 327853 - RNA, 19 nt, Homo sapiens
  misc_RNA (1)...(19): siRNA sense strand
ggaauucucuuggcuacaa

SEQ ID NO: 327854 - RNA, 19 nt, Homo sapiens
  misc_RNA (1)...(19): siRNA sense strand
gaacccaagaaaucaauua

SEQ ID NO: 327855 - RNA, 19 nt, Homo sapiens
  misc_RNA (1)...(19): siRNA sense strand
ggagacagcuugacuuucg

SEQ ID NO: 327856 - RNA, 19 nt, Homo sapiens
  misc_RNA (1)...(19): siRNA sense strand
gaagagcuuucaguucaaa

SEQ ID NO: 327857 - RNA, 19 nt, Homo sapiens
  misc_RNA (1)...(19): siRNA sense strand
gagaagcccuaugaaugua

SEQ ID NO: 327858 - RNA, 19 nt, Homo sapiens
  misc_RNA (1)...(19): siRNA sense strand
gggagaaaccuuauaaaug

SEQ ID NO: 327859 - RNA, 19 nt, Homo sapiens
  misc_RNA (1)...(19): siRNA sense strand
ggagaagcccuaugaaugu

SEQ ID NO: 327860 - RNA, 19 nt, Homo sapiens
  misc_RNA (1)...(19): siRNA sense strand
gagaaagccuacaaaugug

SEQ ID NO: 327861 - RNA, 19 nt, Homo sapiens
  misc_RNA (1)...(19): siRNA sense strand
gcagaaagaccuugaugga

SEQ ID NO: 327862 - RNA, 19 nt, Homo sapiens
  misc_RNA (1)...(19): siRNA sense strand
gaaaucuuaugguacauca

SEQ ID NO: 327863 - RNA, 19 nt, Homo sapiens
  misc_RNA (1)...(19): siRNA sense strand
caaacuucauugaccauaa

SEQ ID NO: 327864 - RNA, 19 nt, Homo sapiens
  misc_RNA (1)...(19): siRNA sense strand
caaagugcuuaccuucuaa

SEQ ID NO: 327865 - RNA, 19 nt, Homo sapiens
  misc_RNA (1)...(19): siRNA sense strand
ucagaccacuuaucuuauu

SEQ ID NO: 327866 - RNA, 19 nt, Homo sapiens
  misc_RNA (1)...(19): siRNA sense strand
cuacgaaugucauguaugu

SEQ ID NO: 327867 - RNA, 19 nt, Homo sapiens
  misc_RNA (1)...(19): siRNA sense strand
uggaagagcuuucaguuca

SEQ ID NO: 327868 - RNA, 19 nt, Homo sapiens
  misc_RNA (1)...(19): siRNA sense strand
gagaaaccuuauaagugua

SEQ ID NO: 327869 - RNA, 19 nt, Homo sapiens
  misc_RNA (1)...(19): siRNA sense strand
agagaaagccuacaaaugu

SEQ ID NO: 327870 - RNA, 19 nt, Homo sapiens
  misc_RNA (1)...(19): siRNA sense strand
ggucuucgguucaaacaga

SEQ ID NO: 327871 - RNA, 19 nt, Homo sapiens
  misc_RNA (1)...(19): siRNA sense strand
gcagagaacccuuacaagu

SEQ ID NO: 327872 - RNA, 19 nt, Homo sapiens
  misc_RNA (1)...(19): siRNA sense strand
acagaaaccugauugaaca

SEQ ID NO: 327873 - RNA, 19 nt, Homo sapiens
  misc_RNA (1)...(19): siRNA sense strand
gaaggaugauaccuggaaa

SEQ ID NO: 327874 - RNA, 19 nt, Homo sapiens
  misc_RNA (1)...(19): siRNA sense strand
cccaagaaaucaauuaaug

SEQ ID NO: 327875 - RNA, 19 nt, Homo sapiens
  misc_RNA (1)...(19): siRNA sense strand
gggagaagcccuaugaaug

SEQ ID NO: 327876 - RNA, 19 nt, Homo sapiens
  misc_RNA (1)...(19): siRNA sense strand
agagaaaccuuacaaaugc

SEQ ID NO: 327877 - RNA, 19 nt, Homo sapiens
  misc_RNA (1)...(19): siRNA sense strand
guacaucaaagaauccaua

SEQ ID NO: 327878 - RNA, 19 nt, Homo sapiens
  misc_RNA (1)...(19): siRNA sense strand
gaacaucaaagaauucaca

SEQ ID NO: 327879 - RNA, 19 nt, Homo sapiens
  misc_RNA (1)...(19): siRNA sense strand
ggagaagccauaugaaugu

SEQ ID NO: 327880 - RNA, 19 nt, Homo sapiens
  misc_RNA (1)...(19): siRNA sense strand
ccaaguaguucucaaagag

SEQ ID NO: 327881 - RNA, 19 nt, Homo sapiens
  misc_RNA (1)...(19): siRNA sense strand
gaagaagagccucauuuua

SEQ ID NO: 327882 - RNA, 19 nt, Homo sapiens
  misc_RNA (1)...(19): siRNA sense strand
gaaaugaaacagaugaaag

SEQ ID NO: 327883 - RNA, 19 nt, Homo sapiens
  misc_RNA (1)...(19): siRNA sense strand
gagugugaauggcaaguuu

SEQ ID NO: 327884 - RNA, 19 nt, Homo sapiens
  misc_RNA (1)...(19): siRNA sense strand
ggagaauuauggaaaugug

SEQ ID NO: 327885 - RNA, 19 nt, Homo sapiens
  misc_RNA (1)...(19): siRNA sense strand
ggaagagcuuucaguucaa

SEQ ID NO: 327886 - RNA, 19 nt, Homo sapiens
  misc_RNA (1)...(19): siRNA sense strand
gugggaaggcuuucaguua

SEQ ID NO: 327887 - RNA, 19 nt, Homo sapiens
  misc_RNA (1)...(19): siRNA sense strand
gggagaaaccuuauaagug

SEQ ID NO: 327888 - RNA, 19 nt, Homo sapiens
  misc_RNA (1)...(19): siRNA sense strand
gagaagcccuaugcgugua

SEQ ID NO: 327889 - RNA, 19 nt, Homo sapiens
  misc_RNA (1)...(19): siRNA sense strand
cuacugaccuaguggcauu

SEQ ID NO: 327890 - RNA, 19 nt, Homo sapiens
  misc_RNA (1)...(19): siRNA sense strand
ccucauaaauguaaggaau

SEQ ID NO: 327891 - RNA, 19 nt, Homo sapiens
  misc_RNA (1)...(19): siRNA sense strand
caacagaaaccugauugaa

SEQ ID NO: 327892 - RNA, 19 nt, Homo sapiens
  misc_RNA (1)...(19): siRNA sense strand
gcagagagaaaccuuacaa

SEQ ID NO: 327893 - RNA, 19 nt, Homo sapiens
  misc_RNA (1)...(19): siRNA sense strand
ggaaggaugauaccuggaa

SEQ ID NO: 327894 - RNA, 19 nt, Homo sapiens
  misc_RNA (1)...(19): siRNA sense strand
gggagaagccauaugaaug

SEQ ID NO: 327895 - RNA, 19 nt, Homo sapiens
  misc_RNA (1)...(19): siRNA sense strand
gaauguaaagauuguggua

SEQ ID NO: 327896 - RNA, 19 nt, Homo sapiens
  misc_RNA (1)...(19): siRNA sense strand
agagaacccuuacaagugu

SEQ ID NO: 327897 - RNA, 19 nt, Homo sapiens
  misc_RNA (1)...(19): siRNA sense strand
ggaaaugaaacagaugaaa

SEQ ID NO: 327898 - RNA, 19 nt, Homo sapiens
  misc_RNA (1)...(19): siRNA sense strand
ccacaaugcucugagacaa

SEQ ID NO: 327899 - RNA, 19 nt, Homo sapiens
  misc_RNA (1)...(19): siRNA sense strand
aaagaauucucucagacuu

SEQ ID NO: 327900 - RNA, 19 nt, Homo sapiens
  misc_RNA (1)...(19): siRNA sense strand
gaaacuccauacacaagag

SEQ ID NO: 327901 - RNA, 19 nt, Homo sapiens
  misc_RNA (1)...(19): siRNA sense strand
gagagaccuuauaagugua

SEQ ID NO: 327902 - RNA, 19 nt, Homo sapiens
  misc_RNA (1)...(19): siRNA sense strand
cauagcagcugaaauuugc

SEQ ID NO: 327903 - RNA, 19 nt, Homo sapiens
  misc_RNA (1)...(19): siRNA sense strand
ggaagagaacccaagaaau

SEQ ID NO: 327904 - RNA, 19 nt, Homo sapiens
  misc_RNA (1)...(19): siRNA sense strand
ugagaaacccuaugagugu

SEQ ID NO: 327905 - RNA, 19 nt, Homo sapiens
  misc_RNA (1)...(19): siRNA sense strand
ggaaggcuuucaguuacaa

SEQ ID NO: 327906 - RNA, 19 nt, Homo sapiens
  misc_RNA (1)...(19): siRNA sense strand
gguaaggucuucgguucaa

SEQ ID NO: 327907 - RNA, 19 nt, Homo sapiens
  misc_RNA (1)...(19): siRNA sense strand
gcaaaagccuccucuuaca

SEQ ID NO: 327908 - RNA, 19 nt, Homo sapiens
  misc_RNA (1)...(19): siRNA sense strand
gugcuuaccuucuaaacca

SEQ ID NO: 327909 - RNA, 19 nt, Homo sapiens
  misc_RNA (1)...(19): siRNA sense strand
gaaaugugaccucccuaga

SEQ ID NO: 327910 - RNA, 19 nt, Homo sapiens
  misc_RNA (1)...(19): siRNA sense strand
gaaagggcagauacaguga

SEQ ID NO: 327911 - RNA, 19 nt, Homo sapiens
  misc_RNA (1)...(19): siRNA sense strand
uaaugaaugugggaaaguu

SEQ ID NO: 327912 - RNA, 19 nt, Homo sapiens
  misc_RNA (1)...(19): siRNA sense strand
gagaaaccucauaaaugua

SEQ ID NO: 327913 - RNA, 19 nt, Homo sapiens
  misc_RNA (1)...(19): siRNA sense strand
gccaaguaguucucaaaga

SEQ ID NO: 327914 - RNA, 19 nt, Homo sapiens
  misc_RNA (1)...(19): siRNA sense strand
caagagaaagccuacaaau

SEQ ID NO: 327915 - RNA, 19 nt, Homo sapiens
  misc_RNA (1)...(19): siRNA sense strand
caccuacacuuuagacaau

SEQ ID NO: 327916 - RNA, 19 nt, Homo sapiens
  misc_RNA (1)...(19): siRNA sense strand
cagcuugacuuucgguuca

SEQ ID NO: 327917 - RNA, 19 nt, Homo sapiens
  misc_RNA (1)...(19): siRNA sense strand
gggcagauacagugaagaa

SEQ ID NO: 327918 - RNA, 19 nt, Homo sapiens
  misc_RNA (1)...(19): siRNA sense strand
gggaugugaugcuggagaa

SEQ ID NO: 327919 - RNA, 19 nt, Homo sapiens
  misc_RNA (1)...(19): siRNA sense strand
cagagaacccuuacaagug

SEQ ID NO: 327920 - RNA, 19 nt, Homo sapiens
  misc_RNA (1)...(19): siRNA sense strand
uguaauaagugucagaaag

SEQ ID NO: 327921 - RNA, 19 nt, Homo sapiens
  misc_RNA (1)...(19): siRNA sense strand
ccuacacuuuagacaauua

SEQ ID NO: 327922 - RNA, 19 nt, Homo sapiens
  misc_RNA (1)...(19): siRNA sense strand
cagauacagugaagaaagu

SEQ ID NO: 327923 - RNA, 19 nt, Homo sapiens
  misc_RNA (1)...(19): siRNA sense strand
gggagaccaugaccgagaa

SEQ ID NO: 327924 - RNA, 19 nt, Homo sapiens
  misc_RNA (1)...(19): siRNA sense strand
gcuggagaauuauggaaau

SEQ ID NO: 327925 - RNA, 19 nt, Homo sapiens
  misc_RNA (1)...(19): siRNA sense strand
uuuaauagguacugaagga

SEQ ID NO: 327926 - RNA, 19 nt, Homo sapiens
  misc_RNA (1)...(19): siRNA sense strand
gcagauacagugaagaaag

SEQ ID NO: 327927 - RNA, 19 nt, Homo sapiens
  misc_RNA (1)...(19): siRNA sense strand
gaagcccuaugaauguaau

SEQ ID NO: 327928 - RNA, 19 nt, Homo sapiens
  misc_RNA (1)...(19): siRNA sense strand
gaaaguccuuaccucuagu

SEQ ID NO: 327929 - RNA, 19 nt, Homo sapiens
  misc_RNA (1)...(19): siRNA sense strand
aguuaccgcucaaaccuua

SEQ ID NO: 327930 - RNA, 19 nt, Homo sapiens
  misc_RNA (1)...(19): siRNA sense strand
ggacaucagagaauucaca

SEQ ID NO: 327931 - RNA, 19 nt, Homo sapiens
  misc_RNA (1)...(19): siRNA sense strand
caugagagacuccacaaug

SEQ ID NO: 327932 - RNA, 19 nt, Homo sapiens
  misc_RNA (1)...(19): siRNA sense strand
gacaauuacguuaccauga

SEQ ID NO: 327933 - RNA, 19 nt, Homo sapiens
  misc_RNA (1)...(19): siRNA sense strand
ugacaugacuggaaucaaa

SEQ ID NO: 327934 - RNA, 19 nt, Homo sapiens
  misc_RNA (1)...(19): siRNA sense strand
gaagucagguugcuuggaa

SEQ ID NO: 327935 - RNA, 19 nt, Homo sapiens
  misc_RNA (1)...(19): siRNA sense strand
gggagaagcugcagguauu

SEQ ID NO: 327936 - RNA, 19 nt, Homo sapiens
  misc_RNA (1)...(19): siRNA sense strand
gaacaaugcuucuuauucc

SEQ ID NO: 327937 - RNA, 19 nt, Homo sapiens
  misc_RNA (1)...(19): siRNA sense strand
gcacagaacaucauuaagu

SEQ ID NO: 327938 - RNA, 19 nt, Homo sapiens
  misc_RNA (1)...(19): siRNA sense strand
gcaguuagcaccagggaua

SEQ ID NO: 327939 - RNA, 19 nt, Homo sapiens
  misc_RNA (1)...(19): siRNA sense strand
ccacaccuaugaagaaauu

SEQ ID NO: 327940 - RNA, 19 nt, Homo sapiens
  misc_RNA (1)...(19): siRNA sense strand
gaucaaauucuacuucuga

SEQ ID NO: 327941 - RNA, 19 nt, Homo sapiens
  misc_RNA (1)...(19): siRNA sense strand
ucaaacagauaaagcaaga

SEQ ID NO: 327942 - RNA, 19 nt, Homo sapiens
  misc_RNA (1)...(19): siRNA sense strand
gcaaauguucaaagccuua

SEQ ID NO: 327943 - RNA, 19 nt, Homo sapiens
  misc_RNA (1)...(19): siRNA sense strand
caagagaugcugugaaguu

SEQ ID NO: 327944 - RNA, 19 nt, Homo sapiens
  misc_RNA (1)...(19): siRNA sense strand
gaugagaccuuggcaaagu

SEQ ID NO: 327945 - RNA, 19 nt, Homo sapiens
  misc_RNA (1)...(19): siRNA sense strand
ggauaaccaugacugaaau

SEQ ID NO: 327946 - RNA, 19 nt, Homo sapiens
  misc_RNA (1)...(19): siRNA sense strand
gcaagaaccuaucuaugac

SEQ ID NO: 327947 - RNA, 19 nt, Homo sapiens
  misc_RNA (1)...(19): siRNA sense strand
gagcacaaauugaagugau

SEQ ID NO: 327948 - RNA, 19 nt, Homo sapiens
  misc_RNA (1)...(19): siRNA sense strand
gaagcacuguggcaacaau

SEQ ID NO: 327949 - RNA, 19 nt, Homo sapiens
  misc_RNA (1)...(19): siRNA sense strand
acaaggagcucuuuaaucc

SEQ ID NO: 327950 - RNA, 19 nt, Homo sapiens
  misc_RNA (1)...(19): siRNA sense strand
gggauaaccaugacugaaa

SEQ ID NO: 327951 - RNA, 19 nt, Homo sapiens
  misc_RNA (1)...(19): siRNA sense strand
ggacuugacaugacuggaa

SEQ ID NO: 327952 - RNA, 19 nt, Homo sapiens
  misc_RNA (1)...(19): siRNA sense strand
cugaugaccuagugaauga

SEQ ID NO: 327953 - RNA, 19 nt, Homo sapiens
  misc_RNA (1)...(19): siRNA sense strand
ugacugaaaucgaccgaau

SEQ ID NO: 327954 - RNA, 19 nt, Homo sapiens
  misc_RNA (1)...(19): siRNA sense strand
gagaagcugcagguauuua

SEQ ID NO: 327955 - RNA, 19 nt, Homo sapiens
  misc_RNA (1)...(19): siRNA sense strand
gagaugcugugaaguuugg

SEQ ID NO: 327956 - RNA, 19 nt, Homo sapiens
  misc_RNA (1)...(19): siRNA sense strand
caacaugugauucagaaga

SEQ ID NO: 327957 - RNA, 19 nt, Homo sapiens
  misc_RNA (1)...(19): siRNA sense strand
cuauagcucuuucaacaau

SEQ ID NO: 327958 - RNA, 19 nt, Homo sapiens
  misc_RNA (1)...(19): siRNA sense strand
cuaggaaugucaagagaug

SEQ ID NO: 327959 - RNA, 19 nt, Homo sapiens
  misc_RNA (1)...(19): siRNA sense strand
gaaugcaaauguucaaagc

SEQ ID NO: 327960 - RNA, 19 nt, Homo sapiens
  misc_RNA (1)...(19): siRNA sense strand
gucaagagaugcugugaag

SEQ ID NO: 327961 - RNA, 19 nt, Homo sapiens
  misc_RNA (1)...(19): siRNA sense strand
gaagugucuugcccuagga

SEQ ID NO: 327962 - RNA, 19 nt, Homo sapiens
  misc_RNA (1)...(19): siRNA sense strand
gaccuuggcaaaguuaaua

SEQ ID NO: 327963 - RNA, 19 nt, Homo sapiens
  misc_RNA (1)...(19): siRNA sense strand
guguacagcagcagcauua

SEQ ID NO: 327964 - RNA, 19 nt, Homo sapiens
  misc_RNA (1)...(19): siRNA sense strand
ccaagucugaggguuauua

SEQ ID NO: 327965 - RNA, 19 nt, Homo sapiens
  misc_RNA (1)...(19): siRNA sense strand
caaaguuaauagccaagau

SEQ ID NO: 327966 - RNA, 19 nt, Homo sapiens
  misc_RNA (1)...(19): siRNA sense strand
agaagaaucaccuggauga

SEQ ID NO: 327967 - RNA, 19 nt, Homo sapiens
  misc_RNA (1)...(19): siRNA sense strand
caaggaaaguccagaagcu

SEQ ID NO: 327968 - RNA, 19 nt, Homo sapiens
  misc_RNA (1)...(19): siRNA sense strand
ucacucacgccauccaaua

SEQ ID NO: 327969 - RNA, 19 nt, Homo sapiens
  misc_RNA (1)...(19): siRNA sense strand
gcaccagggauaaccauga

SEQ ID NO: 327970 - RNA, 19 nt, Homo sapiens
  misc_RNA (1)...(19): siRNA sense strand
aagagaugcugugaaguuu

SEQ ID NO: 327971 - RNA, 19 nt, Homo sapiens
  misc_RNA (1)...(19): siRNA sense strand
ucacauccguacccaacuu

SEQ ID NO: 327972 - RNA, 19 nt, Homo sapiens
  misc_RNA (1)...(19): siRNA sense strand
ugagcaaccugaacaacga

SEQ ID NO: 327973 - RNA, 19 nt, Homo sapiens
  misc_RNA (1)...(19): siRNA sense strand
gaagugauaccaugcaaaa

SEQ ID NO: 327974 - RNA, 19 nt, Homo sapiens
  misc_RNA (1)...(19): siRNA sense strand
guucaaagccuuagguucu

SEQ ID NO: 327975 - RNA, 19 nt, Homo sapiens
  misc_RNA (1)...(19): siRNA sense strand
ggaagugguuuuagugaga

SEQ ID NO: 327976 - RNA, 19 nt, Homo sapiens
  misc_RNA (1)...(19): siRNA sense strand
cacagaacaucauuaaguc

SEQ ID NO: 327977 - RNA, 19 nt, Homo sapiens
  misc_RNA (1)...(19): siRNA sense strand
agcaagaaccuaucuauga

SEQ ID NO: 327978 - RNA, 19 nt, Homo sapiens
  misc_RNA (1)...(19): siRNA sense strand
gaaucaaacagauaaagca

SEQ ID NO: 327979 - RNA, 19 nt, Homo sapiens
  misc_RNA (1)...(19): siRNA sense strand
ugacuggaaucaaacagau

SEQ ID NO: 327980 - RNA, 19 nt, Homo sapiens
  misc_RNA (1)...(19): siRNA sense strand
uuucaacaaugggcaguua

SEQ ID NO: 327981 - RNA, 19 nt, Homo sapiens
  misc_RNA (1)...(19): siRNA sense strand
gggaagcacuguggcaaca

SEQ ID NO: 327982 - RNA, 19 nt, Homo sapiens
  misc_RNA (1)...(19): siRNA sense strand
ccaacuuguuuaccuauag

SEQ ID NO: 327983 - RNA, 19 nt, Homo sapiens
  misc_RNA (1)...(19): siRNA sense strand
aggaggagaucgcuuuguu

SEQ ID NO: 327984 - RNA, 19 nt, Homo sapiens
  misc_RNA (1)...(19): siRNA sense strand
gcggauaacaggcuucaug

SEQ ID NO: 327985 - RNA, 19 nt, Homo sapiens
  misc_RNA (1)...(19): siRNA sense strand
ugcaagggauucuuuagga

SEQ ID NO: 327986 - RNA, 19 nt, Homo sapiens
  misc_RNA (1)...(19): siRNA sense strand
uauacaaggagcucuuuaa

SEQ ID NO: 327987 - RNA, 19 nt, Homo sapiens
  misc_RNA (1)...(19): siRNA sense strand
ucagaagaaucaccuggau

SEQ ID NO: 327988 - RNA, 19 nt, Homo sapiens
  misc_RNA (1)...(19): siRNA sense strand
ggaaaguccagaagcuuca

SEQ ID NO: 327989 - RNA, 19 nt, Homo sapiens
  misc_RNA (1)...(19): siRNA sense strand
ucauugaccugcccaaguc

SEQ ID NO: 327990 - RNA, 19 nt, Homo sapiens
  misc_RNA (1)...(19): siRNA sense strand
gcccaagucugaggguuau

SEQ ID NO: 327991 - RNA, 19 nt, Homo sapiens
  misc_RNA (1)...(19): siRNA sense strand
gcucuuuaauccugacugu

SEQ ID NO: 327992 - RNA, 19 nt, Homo sapiens
  misc_RNA (1)...(19): siRNA sense strand
gccaagauaccaaccauca

SEQ ID NO: 327993 - RNA, 19 nt, Homo sapiens
  misc_RNA (1)...(19): siRNA sense strand
gcuuauagaaccaaggaaa

SEQ ID NO: 327994 - RNA, 19 nt, Homo sapiens
  misc_RNA (1)...(19): siRNA sense strand
caucugcuguucugauauc

SEQ ID NO: 327995 - RNA, 19 nt, Homo sapiens
  misc_RNA (1)...(19): siRNA sense strand
ggaggagccagcagaacaa

SEQ ID NO: 327996 - RNA, 19 nt, Homo sapiens
  misc_RNA (1)...(19): siRNA sense strand
gcagguauuuaagcaaucu

SEQ ID NO: 327997 - RNA, 19 nt, Homo sapiens
  misc_RNA (1)...(19): siRNA sense strand
ggagaagcugcagguauuu

SEQ ID NO: 327998 - RNA, 19 nt, Homo sapiens
  misc_RNA (1)...(19): siRNA sense strand
gugauaccaugcaaaauuu

SEQ ID NO: 327999 - RNA, 19 nt, Homo sapiens
  misc_RNA (1)...(19): siRNA sense strand
gacccacaccuaugaagaa

SEQ ID NO: 328000 - RNA, 19 nt, Homo sapiens
  misc_RNA (1)...(19): siRNA sense strand
ccaacgggcacgucauuga

SEQ ID NO: 328001 - RNA, 19 nt, Homo sapiens
  misc_RNA (1)...(19): siRNA sense strand
guucucaucugcuguucug

SEQ ID NO: 328002 - RNA, 19 nt, Homo sapiens
  misc_RNA (1)...(19): siRNA sense strand
ggaaugcaaauguucaaag

SEQ ID NO: 328003 - RNA, 19 nt, Homo sapiens
  misc_RNA (1)...(19): siRNA sense strand
ggaggaaugcaaauguuca

SEQ ID NO: 328004 - RNA, 19 nt, Homo sapiens
  misc_RNA (1)...(19): siRNA sense strand
guacccaacuuguuuaccu

SEQ ID NO: 328005 - RNA, 19 nt, Homo sapiens
  misc_RNA (1)...(19): siRNA sense strand
gagaccagcggcacuuaug

SEQ ID NO: 328006 - RNA, 19 nt, Homo sapiens
  misc_RNA (1)...(19): siRNA sense strand
gacuugacaugacuggaau

SEQ ID NO: 328007 - RNA, 19 nt, Homo sapiens
  misc_RNA (1)...(19): siRNA sense strand
aacaugugauucagaagaa

SEQ ID NO: 328008 - RNA, 19 nt, Homo sapiens
  misc_RNA (1)...(19): siRNA sense strand
gaggagaucgcuuuguucu

SEQ ID NO: 328009 - RNA, 19 nt, Homo sapiens
  misc_RNA (1)...(19): siRNA sense strand
aaagcaagaaccuaucuau

SEQ ID NO: 328010 - RNA, 19 nt, Homo sapiens
  misc_RNA (1)...(19): siRNA sense strand
ugaaaucgaccgaauugca

SEQ ID NO: 328011 - RNA, 19 nt, Homo sapiens
  misc_RNA (1)...(19): siRNA sense strand
cucaucugcuguucugaua

SEQ ID NO: 328012 - RNA, 19 nt, Homo sapiens
  misc_RNA (1)...(19): siRNA sense strand
ucaaagccuuagguucuga

SEQ ID NO: 328013 - RNA, 19 nt, Homo sapiens
  misc_RNA (1)...(19): siRNA sense strand
gaaugugccgugccuucaa

SEQ ID NO: 328014 - RNA, 19 nt, Homo sapiens
  misc_RNA (1)...(19): siRNA sense strand
gucaauacaccauggaaga

SEQ ID NO: 328015 - RNA, 19 nt, Homo sapiens
  misc_RNA (1)...(19): siRNA sense strand
ggcagacccacaccuauga

SEQ ID NO: 328016 - RNA, 19 nt, Homo sapiens
  misc_RNA (1)...(19): siRNA sense strand
gaaggaaaauauggaggaa

SEQ ID NO: 328017 - RNA, 19 nt, Homo sapiens
  misc_RNA (1)...(19): siRNA sense strand
accuauagcucuuucaaca

SEQ ID NO: 328018 - RNA, 19 nt, Homo sapiens
  misc_RNA (1)...(19): siRNA sense strand
aaauauggaggaaugcaaa

SEQ ID NO: 328019 - RNA, 19 nt, Homo sapiens
  misc_RNA (1)...(19): siRNA sense strand
gaauugcacagaacaucau

SEQ ID NO: 328020 - RNA, 19 nt, Homo sapiens
  misc_RNA (1)...(19): siRNA sense strand
agaagcugcagguauuuaa

SEQ ID NO: 328021 - RNA, 19 nt, Homo sapiens
  misc_RNA (1)...(19): siRNA sense strand
gcaaaguuaauagccaaga

SEQ ID NO: 328022 - RNA, 19 nt, Homo sapiens
  misc_RNA (1)...(19): siRNA sense strand
guccagaagcuucaggaaa

SEQ ID NO: 328023 - RNA, 19 nt, Homo sapiens
  misc_RNA (1)...(19): siRNA sense strand
ggaggagaucgcuuuguuc

SEQ ID NO: 328024 - RNA, 19 nt, Homo sapiens
  misc_RNA (1)...(19): siRNA sense strand
agcacaaauugaagugaua

SEQ ID NO: 328025 - RNA, 19 nt, Homo sapiens
  misc_RNA (1)...(19): siRNA sense strand
agauaaagcaagaaccuau

SEQ ID NO: 328026 - RNA, 19 nt, Homo sapiens
  misc_RNA (1)...(19): siRNA sense strand
uacacuguuuccuccguua

SEQ ID NO: 328027 - RNA, 19 nt, Homo sapiens
  misc_RNA (1)...(19): siRNA sense strand
cugcagguauuuaagcaau

SEQ ID NO: 328028 - RNA, 19 nt, Homo sapiens
  misc_RNA (1)...(19): siRNA sense strand
gcacuucaacaugugauuc

SEQ ID NO: 328029 - RNA, 19 nt, Homo sapiens
  misc_RNA (1)...(19): siRNA sense strand
uccagaagcuucaggaaaa

SEQ ID NO: 328030 - RNA, 19 nt, Homo sapiens
  misc_RNA (1)...(19): siRNA sense strand
ugaagcauuugacuuugca

SEQ ID NO: 328031 - RNA, 19 nt, Homo sapiens
  misc_RNA (1)...(19): siRNA sense strand
uugcacagaacaucauuaa

SEQ ID NO: 328032 - RNA, 19 nt, Homo sapiens
  misc_RNA (1)...(19): siRNA sense strand
uaaagcaagaaccuaucua

SEQ ID NO: 328033 - RNA, 19 nt, Homo sapiens
  misc_RNA (1)...(19): siRNA sense strand
gaagggaucacaucauuga

SEQ ID NO: 328034 - RNA, 19 nt, Homo sapiens
  misc_RNA (1)...(19): siRNA sense strand
aaagauccauggagaaauu

SEQ ID NO: 328035 - RNA, 19 nt, Homo sapiens
  misc_RNA (1)...(19): siRNA sense strand
acaaacagcucaucguaga

SEQ ID NO: 328036 - RNA, 19 nt, Homo sapiens
  misc_RNA (1)...(19): siRNA sense strand
acagaagaauucccucuaa

SEQ ID NO: 328037 - RNA, 19 nt, Homo sapiens
  misc_RNA (1)...(19): siRNA sense strand
ccaccaggaugaagacaaa

SEQ ID NO: 328038 - RNA, 19 nt, Homo sapiens
  misc_RNA (1)...(19): siRNA sense strand
cggaagggaucacaucauu

SEQ ID NO: 328039 - RNA, 19 nt, Homo sapiens
  misc_RNA (1)...(19): siRNA sense strand
cuucaucgaugccaaauau

SEQ ID NO: 328040 - RNA, 19 nt, Homo sapiens
  misc_RNA (1)...(19): siRNA sense strand
ggacaucugcgcaguggaa

SEQ ID NO: 328041 - RNA, 19 nt, Homo sapiens
  misc_RNA (1)...(19): siRNA sense strand
cgaauucucugaucucaac

SEQ ID NO: 328042 - RNA, 19 nt, Homo sapiens
  misc_RNA (1)...(19): siRNA sense strand
ggacacgugcucagagauu

SEQ ID NO: 328043 - RNA, 19 nt, Homo sapiens
  misc_RNA (1)...(19): siRNA sense strand
gaacuacaaggccuacaug

SEQ ID NO: 328044 - RNA, 19 nt, Homo sapiens
  misc_RNA (1)...(19): siRNA sense strand
gacaagcccuggguguuug

SEQ ID NO: 328045 - RNA, 19 nt, Homo sapiens
  misc_RNA (1)...(19): siRNA sense strand
cagaagaauucccucuaau

SEQ ID NO: 328046 - RNA, 19 nt, Homo sapiens
  misc_RNA (1)...(19): siRNA sense strand
gacacgugcucagagauuu

SEQ ID NO: 328047 - RNA, 19 nt, Homo sapiens
  misc_RNA (1)...(19): siRNA sense strand
agacaaacagcucaucgua

SEQ ID NO: 328048 - RNA, 19 nt, Homo sapiens
  misc_RNA (1)...(19): siRNA sense strand
gcaacuuuauggccaaucu

SEQ ID NO: 328049 - RNA, 19 nt, Homo sapiens
  misc_RNA (1)...(19): siRNA sense strand
ucucugaucucaaccuugu

SEQ ID NO: 328050 - RNA, 19 nt, Homo sapiens
  misc_RNA (1)...(19): siRNA sense strand
ugacaagcccuggguguuu

SEQ ID NO: 328051 - RNA, 19 nt, Homo sapiens
  misc_RNA (1)...(19): siRNA sense strand
aguguuaacuccuugcauu

SEQ ID NO: 328052 - RNA, 19 nt, Homo sapiens
  misc_RNA (1)...(19): siRNA sense strand
gcacugaccaagacguaug

SEQ ID NO: 328053 - RNA, 19 nt, Homo sapiens
  misc_RNA (1)...(19): siRNA sense strand
uaauugaucagaccuucua

SEQ ID NO: 328054 - RNA, 19 nt, Homo sapiens
  misc_RNA (1)...(19): siRNA sense strand
gacagaagaauucccucua

SEQ ID NO: 328055 - RNA, 19 nt, Homo sapiens
  misc_RNA (1)...(19): siRNA sense strand
gguggauucucuguggaua

SEQ ID NO: 328056 - RNA, 19 nt, Homo sapiens
  misc_RNA (1)...(19): siRNA sense strand
ggacggaagggaucacauc

SEQ ID NO: 328057 - RNA, 19 nt, Homo sapiens
  misc_RNA (1)...(19): siRNA sense strand
ggagaaauugacauuaaag

SEQ ID NO: 328058 - RNA, 19 nt, Homo sapiens
  misc_RNA (1)...(19): siRNA sense strand
ggaagggaucacaucauug

SEQ ID NO: 328059 - RNA, 19 nt, Homo sapiens
  misc_RNA (1)...(19): siRNA sense strand
caaauggguacaugacaga

SEQ ID NO: 328060 - RNA, 19 nt, Homo sapiens
  misc_RNA (1)...(19): siRNA sense strand
ucauugggcugcaguaugc

SEQ ID NO: 328061 - RNA, 19 nt, Homo sapiens
  misc_RNA (1)...(19): siRNA sense strand
ggaacuggaagaccaauac

SEQ ID NO: 328062 - RNA, 19 nt, Homo sapiens
  misc_RNA (1)...(19): siRNA sense strand
guggacacgugcucagaga

SEQ ID NO: 328063 - RNA, 19 nt, Homo sapiens
  misc_RNA (1)...(19): siRNA sense strand
ccagaugguucgacugcau

SEQ ID NO: 328064 - RNA, 19 nt, Homo sapiens
  misc_RNA (1)...(19): siRNA sense strand
ucguagagcucguggucaa

SEQ ID NO: 328065 - RNA, 19 nt, Homo sapiens
  misc_RNA (1)...(19): siRNA sense strand
ugacgugcguguccagaag

SEQ ID NO: 328066 - RNA, 19 nt, Homo sapiens
  misc_RNA (1)...(19): siRNA sense strand
ccauggagaaauugacauu

SEQ ID NO: 328067 - RNA, 19 nt, Homo sapiens
  misc_RNA (1)...(19): siRNA sense strand
uggauucucuguggauaug

SEQ ID NO: 328068 - RNA, 19 nt, Homo sapiens
  misc_RNA (1)...(19): siRNA sense strand
gcaguggaagcgcuacaug

SEQ ID NO: 328069 - RNA, 19 nt, Homo sapiens
  misc_RNA (1)...(19): siRNA sense strand
ugacaaccagcaugacuuc

SEQ ID NO: 328070 - RNA, 19 nt, Homo sapiens
  misc_RNA (1)...(19): siRNA sense strand
gauucucuguggauaugga

SEQ ID NO: 328071 - RNA, 19 nt, Homo sapiens
  misc_RNA (1)...(19): siRNA sense strand
cauggagaaauugacauua

SEQ ID NO: 328072 - RNA, 19 nt, Homo sapiens
  misc_RNA (1)...(19): siRNA sense strand
cagaugguucgacugcaua

SEQ ID NO: 328073 - RNA, 19 nt, Homo sapiens
  misc_RNA (1)...(19): siRNA sense strand
guuaacuccuugcauucug

SEQ ID NO: 328074 - RNA, 19 nt, Homo sapiens
  misc_RNA (1)...(19): siRNA sense strand
gugcguguccagaagauug

SEQ ID NO: 328075 - RNA, 19 nt, Homo sapiens
  misc_RNA (1)...(19): siRNA sense strand
gucuacaacuucugugaca

SEQ ID NO: 328076 - RNA, 19 nt, Homo sapiens
  misc_RNA (1)...(19): siRNA sense strand
gccgaauucucugaucuca

SEQ ID NO: 328077 - RNA, 19 nt, Homo sapiens
  misc_RNA (1)...(19): siRNA sense strand
gggaacuggaagaccaaua

SEQ ID NO: 328078 - RNA, 19 nt, Homo sapiens
  misc_RNA (1)...(19): siRNA sense strand
uccagaagauugggcagaa

SEQ ID NO: 328079 - RNA, 19 nt, Homo sapiens
  misc_RNA (1)...(19): siRNA sense strand
cuaccgcaguuuggucauu

SEQ ID NO: 328080 - RNA, 19 nt, Homo sapiens
  misc_RNA (1)...(19): siRNA sense strand
ugcauucugucuacaacuu

SEQ ID NO: 328081 - RNA, 19 nt, Homo sapiens
  misc_RNA (1)...(19): siRNA sense strand
caugaggacgucaguguca

SEQ ID NO: 328082 - RNA, 19 nt, Homo sapiens
  misc_RNA (1)...(19): siRNA sense strand
ggagacuaccgcaguuugg

SEQ ID NO: 328083 - RNA, 19 nt, Homo sapiens
  misc_RNA (1)...(19): siRNA sense strand
gaacuggaagaccaauacu

SEQ ID NO: 328084 - RNA, 19 nt, Homo sapiens
  misc_RNA (1)...(19): siRNA sense strand
gaagauugggcagaacuac

SEQ ID NO: 328085 - RNA, 19 nt, Homo sapiens
  misc_RNA (1)...(19): siRNA sense strand
uccaggacaucgcaagugu

SEQ ID NO: 328086 - RNA, 19 nt, Homo sapiens
  misc_RNA (1)...(19): siRNA sense strand
gcugcaguaugcuggaauc

SEQ ID NO: 328087 - RNA, 19 nt, Homo sapiens
  misc_RNA (1)...(19): siRNA sense strand
gggcugcaguaugcuggaa

SEQ ID NO: 328088 - RNA, 19 nt, Homo sapiens
  misc_RNA (1)...(19): siRNA sense strand
ugguucgacugcauaagaa

SEQ ID NO: 328089 - RNA, 19 nt, Homo sapiens
  misc_RNA (1)...(19): siRNA sense strand
gaugggcaaggucaagguu

SEQ ID NO: 328090 - RNA, 19 nt, Homo sapiens
  misc_RNA (1)...(19): siRNA sense strand
gcaaggacggaagggauca

SEQ ID NO: 328091 - RNA, 19 nt, Homo sapiens
  misc_RNA (1)...(19): siRNA sense strand
ggucucugaagccggauuu

SEQ ID NO: 328092 - RNA, 19 nt, Homo sapiens
  misc_RNA (1)...(19): siRNA sense strand
gagcucguggucaacaaga

SEQ ID NO: 328093 - RNA, 19 nt, Homo sapiens
  misc_RNA (1)...(19): siRNA sense strand
uuaacuccuugcauucugu

SEQ ID NO: 328094 - RNA, 19 nt, Homo sapiens
  misc_RNA (1)...(19): siRNA sense strand
uaccgcaguuuggucauug

SEQ ID NO: 328095 - RNA, 19 nt, Homo sapiens
  misc_RNA (1)...(19): siRNA sense strand
gacggaagggaucacauca

SEQ ID NO: 328096 - RNA, 19 nt, Homo sapiens
  misc_RNA (1)...(19): siRNA sense strand
gcucguggucaacaagaug

SEQ ID NO: 328097 - RNA, 19 nt, Homo sapiens
  misc_RNA (1)...(19): siRNA sense strand
agauugggcagaacuacaa

SEQ ID NO: 328098 - RNA, 19 nt, Homo sapiens
  misc_RNA (1)...(19): siRNA sense strand
gcaccuuucaggccuugga

SEQ ID NO: 328099 - RNA, 19 nt, Homo sapiens
  misc_RNA (1)...(19): siRNA sense strand
gaagggaucacaucauuga

SEQ ID NO: 328100 - RNA, 19 nt, Homo sapiens
  misc_RNA (1)...(19): siRNA sense strand
aaagauccauggagaaauu

SEQ ID NO: 328101 - RNA, 19 nt, Homo sapiens
  misc_RNA (1)...(19): siRNA sense strand
acaaacagcucaucguaga

SEQ ID NO: 328102 - RNA, 19 nt, Homo sapiens
  misc_RNA (1)...(19): siRNA sense strand
acagaagaauucccucuaa

SEQ ID NO: 328103 - RNA, 19 nt, Homo sapiens
  misc_RNA (1)...(19): siRNA sense strand
ccaccaggaugaagacaaa

SEQ ID NO: 328104 - RNA, 19 nt, Homo sapiens
  misc_RNA (1)...(19): siRNA sense strand
cggaagggaucacaucauu

SEQ ID NO: 328105 - RNA, 19 nt, Homo sapiens
  misc_RNA (1)...(19): siRNA sense strand
cuucaucgaugccaaauau

SEQ ID NO: 328106 - RNA, 19 nt, Homo sapiens
  misc_RNA (1)...(19): siRNA sense strand
ggacaucugcgcaguggaa

SEQ ID NO: 328107 - RNA, 19 nt, Homo sapiens
  misc_RNA (1)...(19): siRNA sense strand
cgaauucucugaucucaac

SEQ ID NO: 328108 - RNA, 19 nt, Homo sapiens
  misc_RNA (1)...(19): siRNA sense strand
ggacacgugcucagagauu

SEQ ID NO: 328109 - RNA, 19 nt, Homo sapiens
  misc_RNA (1)...(19): siRNA sense strand
gaacuacaaggccuacaug

SEQ ID NO: 328110 - RNA, 19 nt, Homo sapiens
  misc_RNA (1)...(19): siRNA sense strand
gacaagcccuggguguuug

SEQ ID NO: 328111 - RNA, 19 nt, Homo sapiens
  misc_RNA (1)...(19): siRNA sense strand
cagaagaauucccucuaau

SEQ ID NO: 328112 - RNA, 19 nt, Homo sapiens
  misc_RNA (1)...(19): siRNA sense strand
gacacgugcucagagauuu

SEQ ID NO: 328113 - RNA, 19 nt, Homo sapiens
  misc_RNA (1)...(19): siRNA sense strand
agacaaacagcucaucgua

SEQ ID NO: 328114 - RNA, 19 nt, Homo sapiens
  misc_RNA (1)...(19): siRNA sense strand
gcaacuuuauggccaaucu

SEQ ID NO: 328115 - RNA, 19 nt, Homo sapiens
  misc_RNA (1)...(19): siRNA sense strand
ucucugaucucaaccuugu

SEQ ID NO: 328116 - RNA, 19 nt, Homo sapiens
  misc_RNA (1)...(19): siRNA sense strand
ugacaagcccuggguguuu

SEQ ID NO: 328117 - RNA, 19 nt, Homo sapiens
  misc_RNA (1)...(19): siRNA sense strand
aguguuaacuccuugcauu

SEQ ID NO: 328118 - RNA, 19 nt, Homo sapiens
  misc_RNA (1)...(19): siRNA sense strand
gcacugaccaagacguaug

SEQ ID NO: 328119 - RNA, 19 nt, Homo sapiens
  misc_RNA (1)...(19): siRNA sense strand
uaauugaucagaccuucua

SEQ ID NO: 328120 - RNA, 19 nt, Homo sapiens
  misc_RNA (1)...(19): siRNA sense strand
gacagaagaauucccucua

SEQ ID NO: 328121 - RNA, 19 nt, Homo sapiens
  misc_RNA (1)...(19): siRNA sense strand
gguggauucucuguggaua

SEQ ID NO: 328122 - RNA, 19 nt, Homo sapiens
  misc_RNA (1)...(19): siRNA sense strand
ggacggaagggaucacauc

SEQ ID NO: 328123 - RNA, 19 nt, Homo sapiens
  misc_RNA (1)...(19): siRNA sense strand
ggagaaauugacauuaaag

SEQ ID NO: 328124 - RNA, 19 nt, Homo sapiens
  misc_RNA (1)...(19): siRNA sense strand
ggaagggaucacaucauug

SEQ ID NO: 328125 - RNA, 19 nt, Homo sapiens
  misc_RNA (1)...(19): siRNA sense strand
caaauggguacaugacaga

SEQ ID NO: 328126 - RNA, 19 nt, Homo sapiens
  misc_RNA (1)...(19): siRNA sense strand
ucauugggcugcaguaugc

SEQ ID NO: 328127 - RNA, 19 nt, Homo sapiens
  misc_RNA (1)...(19): siRNA sense strand
ggaacuggaagaccaauac

SEQ ID NO: 328128 - RNA, 19 nt, Homo sapiens
  misc_RNA (1)...(19): siRNA sense strand
guggacacgugcucagaga

SEQ ID NO: 328129 - RNA, 19 nt, Homo sapiens
  misc_RNA (1)...(19): siRNA sense strand
ccagaugguucgacugcau

SEQ ID NO: 328130 - RNA, 19 nt, Homo sapiens
  misc_RNA (1)...(19): siRNA sense strand
ucguagagcucguggucaa

SEQ ID NO: 328131 - RNA, 19 nt, Homo sapiens
  misc_RNA (1)...(19): siRNA sense strand
ugacgugcguguccagaag

SEQ ID NO: 328132 - RNA, 19 nt, Homo sapiens
  misc_RNA (1)...(19): siRNA sense strand
ccauggagaaauugacauu

SEQ ID NO: 328133 - RNA, 19 nt, Homo sapiens
  misc_RNA (1)...(19): siRNA sense strand
uggauucucuguggauaug

SEQ ID NO: 328134 - RNA, 19 nt, Homo sapiens
  misc_RNA (1)...(19): siRNA sense strand
gcaguggaagcgcuacaug

SEQ ID NO: 328135 - RNA, 19 nt, Homo sapiens
  misc_RNA (1)...(19): siRNA sense strand
ugacaaccagcaugacuuc

SEQ ID NO: 328136 - RNA, 19 nt, Homo sapiens
  misc_RNA (1)...(19): siRNA sense strand
gauucucuguggauaugga

SEQ ID NO: 328137 - RNA, 19 nt, Homo sapiens
  misc_RNA (1)...(19): siRNA sense strand
cauggagaaauugacauua

SEQ ID NO: 328138 - RNA, 19 nt, Homo sapiens
  misc_RNA (1)...(19): siRNA sense strand
cagaugguucgacugcaua

SEQ ID NO: 328139 - RNA, 19 nt, Homo sapiens
  misc_RNA (1)...(19): siRNA sense strand
guuaacuccuugcauucug

SEQ ID NO: 328140 - RNA, 19 nt, Homo sapiens
  misc_RNA (1)...(19): siRNA sense strand
gugcguguccagaagauug

SEQ ID NO: 328141 - RNA, 19 nt, Homo sapiens
  misc_RNA (1)...(19): siRNA sense strand
gucuacaacuucugugaca

SEQ ID NO: 328142 - RNA, 19 nt, Homo sapiens
  misc_RNA (1)...(19): siRNA sense strand
gccgaauucucugaucuca

SEQ ID NO: 328143 - RNA, 19 nt, Homo sapiens
  misc_RNA (1)...(19): siRNA sense strand
gggaacuggaagaccaaua

SEQ ID NO: 328144 - RNA, 19 nt, Homo sapiens
  misc_RNA (1)...(19): siRNA sense strand
uccagaagauugggcagaa

SEQ ID NO: 328145 - RNA, 19 nt, Homo sapiens
  misc_RNA (1)...(19): siRNA sense strand
cuaccgcaguuuggucauu

SEQ ID NO: 328146 - RNA, 19 nt, Homo sapiens
  misc_RNA (1)...(19): siRNA sense strand
ugcauucugucuacaacuu

SEQ ID NO: 328147 - RNA, 19 nt, Homo sapiens
  misc_RNA (1)...(19): siRNA sense strand
caugaggacgucaguguca

SEQ ID NO: 328148 - RNA, 19 nt, Homo sapiens
  misc_RNA (1)...(19): siRNA sense strand
ggagacuaccgcaguuugg

SEQ ID NO: 328149 - RNA, 19 nt, Homo sapiens
  misc_RNA (1)...(19): siRNA sense strand
gaacuggaagaccaauacu

SEQ ID NO: 328150 - RNA, 19 nt, Homo sapiens
  misc_RNA (1)...(19): siRNA sense strand
gaagauugggcagaacuac

SEQ ID NO: 328151 - RNA, 19 nt, Homo sapiens
  misc_RNA (1)...(19): siRNA sense strand
uccaggacaucgcaagugu

SEQ ID NO: 328152 - RNA, 19 nt, Homo sapiens
  misc_RNA (1)...(19): siRNA sense strand
gcugcaguaugcuggaauc

SEQ ID NO: 328153 - RNA, 19 nt, Homo sapiens
  misc_RNA (1)...(19): siRNA sense strand
gggcugcaguaugcuggaa

SEQ ID NO: 328154 - RNA, 19 nt, Homo sapiens
  misc_RNA (1)...(19): siRNA sense strand
ugguucgacugcauaagaa

SEQ ID NO: 328155 - RNA, 19 nt, Homo sapiens
  misc_RNA (1)...(19): siRNA sense strand
gaugggcaaggucaagguu

SEQ ID NO: 328156 - RNA, 19 nt, Homo sapiens
  misc_RNA (1)...(19): siRNA sense strand
gcaaggacggaagggauca

SEQ ID NO: 328157 - RNA, 19 nt, Homo sapiens
  misc_RNA (1)...(19): siRNA sense strand
ggucucugaagccggauuu

SEQ ID NO: 328158 - RNA, 19 nt, Homo sapiens
  misc_RNA (1)...(19): siRNA sense strand
gagcucguggucaacaaga

SEQ ID NO: 328159 - RNA, 19 nt, Homo sapiens
  misc_RNA (1)...(19): siRNA sense strand
uuaacuccuugcauucugu

SEQ ID NO: 328160 - RNA, 19 nt, Homo sapiens
  misc_RNA (1)...(19): siRNA sense strand
uaccgcaguuuggucauug

SEQ ID NO: 328161 - RNA, 19 nt, Homo sapiens
  misc_RNA (1)...(19): siRNA sense strand
gacggaagggaucacauca

SEQ ID NO: 328162 - RNA, 19 nt, Homo sapiens
  misc_RNA (1)...(19): siRNA sense strand
gcucguggucaacaagaug

SEQ ID NO: 328163 - RNA, 19 nt, Homo sapiens
  misc_RNA (1)...(19): siRNA sense strand
agauugggcagaacuacaa

SEQ ID NO: 328164 - RNA, 19 nt, Homo sapiens
  misc_RNA (1)...(19): siRNA sense strand
gcaccuuucaggccuugga

SEQ ID NO: 328165 - RNA, 19 nt, Homo sapiens
  misc_RNA (1)...(19): siRNA sense strand
gaaaggcucuggcaugaug

SEQ ID NO: 328166 - RNA, 19 nt, Homo sapiens
  misc_RNA (1)...(19): siRNA sense strand
ccaaugagcucaagggauu

SEQ ID NO: 328167 - RNA, 19 nt, Homo sapiens
  misc_RNA (1)...(19): siRNA sense strand
gcaaggaccuggagauugu

SEQ ID NO: 328168 - RNA, 19 nt, Homo sapiens
  misc_RNA (1)...(19): siRNA sense strand
ggaauacacccaaaccaua

SEQ ID NO: 328169 - RNA, 19 nt, Homo sapiens
  misc_RNA (1)...(19): siRNA sense strand
ggaaauggguauauugaag

SEQ ID NO: 328170 - RNA, 19 nt, Homo sapiens
  misc_RNA (1)...(19): siRNA sense strand
ugaaggaucuguacgagaa

SEQ ID NO: 328171 - RNA, 19 nt, Homo sapiens
  misc_RNA (1)...(19): siRNA sense strand
gaaagagcgucauguccuu

SEQ ID NO: 328172 - RNA, 19 nt, Homo sapiens
  misc_RNA (1)...(19): siRNA sense strand
gauagaagcggcuacauug

SEQ ID NO: 328173 - RNA, 19 nt, Homo sapiens
  misc_RNA (1)...(19): siRNA sense strand
gaacggggauggcaaauug

SEQ ID NO: 328174 - RNA, 19 nt, Homo sapiens
  misc_RNA (1)...(19): siRNA sense strand
guaaagagcuagaaaacuu

SEQ ID NO: 328175 - RNA, 19 nt, Homo sapiens
  misc_RNA (1)...(19): siRNA sense strand
gagaaaagaugaaggaguu

SEQ ID NO: 328176 - RNA, 19 nt, Homo sapiens
  misc_RNA (1)...(19): siRNA sense strand
ggaaaucaauauucaacag

SEQ ID NO: 328177 - RNA, 19 nt, Homo sapiens
  misc_RNA (1)...(19): siRNA sense strand
gcucuggcaugaugucaaa

SEQ ID NO: 328178 - RNA, 19 nt, Homo sapiens
  misc_RNA (1)...(19): siRNA sense strand
ggauagaagcggcuacauu

SEQ ID NO: 328179 - RNA, 19 nt, Homo sapiens
  misc_RNA (1)...(19): siRNA sense strand
gaagguaaagagcuagaaa

SEQ ID NO: 328180 - RNA, 19 nt, Homo sapiens
  misc_RNA (1)...(19): siRNA sense strand
ggaaauauggaagcacuuu

SEQ ID NO: 328181 - RNA, 19 nt, Homo sapiens
  misc_RNA (1)...(19): siRNA sense strand
uucaacagcucaccaacua

SEQ ID NO: 328182 - RNA, 19 nt, Homo sapiens
  misc_RNA (1)...(19): siRNA sense strand
uggcagagcuggcgcagau

SEQ ID NO: 328183 - RNA, 19 nt, Homo sapiens
  misc_RNA (1)...(19): siRNA sense strand
agacggaaauggguauauu

SEQ ID NO: 328184 - RNA, 19 nt, Homo sapiens
  misc_RNA (1)...(19): siRNA sense strand
agcccaagcuccaggaaua

SEQ ID NO: 328185 - RNA, 19 nt, Homo sapiens
  misc_RNA (1)...(19): siRNA sense strand
gcaaauugggccucucaga

SEQ ID NO: 328186 - RNA, 19 nt, Homo sapiens
  misc_RNA (1)...(19): siRNA sense strand
cuacggauguuugacuuga

SEQ ID NO: 328187 - RNA, 19 nt, Homo sapiens
  misc_RNA (1)...(19): siRNA sense strand
aggaaaggcucuggcauga

SEQ ID NO: 328188 - RNA, 19 nt, Homo sapiens
  misc_RNA (1)...(19): siRNA sense strand
gaauacacccaaaccauac

SEQ ID NO: 328189 - RNA, 19 nt, Homo sapiens
  misc_RNA (1)...(19): siRNA sense strand
gaaauauggaagcacuuug

SEQ ID NO: 328190 - RNA, 19 nt, Homo sapiens
  misc_RNA (1)...(19): siRNA sense strand
uauugaagguaaagagcua

SEQ ID NO: 328191 - RNA, 19 nt, Homo sapiens
  misc_RNA (1)...(19): siRNA sense strand
agacaggaguggcuacauc

SEQ ID NO: 328192 - RNA, 19 nt, Homo sapiens
  misc_RNA (1)...(19): siRNA sense strand
ucaagggauuccugucaga

SEQ ID NO: 328193 - RNA, 19 nt, Homo sapiens
  misc_RNA (1)...(19): siRNA sense strand
caacagcucaccaacuaca

SEQ ID NO: 328194 - RNA, 19 nt, Homo sapiens
  misc_RNA (1)...(19): siRNA sense strand
gcucaagggauuccuguca

SEQ ID NO: 328195 - RNA, 19 nt, Homo sapiens
  misc_RNA (1)...(19): siRNA sense strand
aaauauggaagcacuuuga

SEQ ID NO: 328196 - RNA, 19 nt, Homo sapiens
  misc_RNA (1)...(19): siRNA sense strand
agugacaacuuuggagaaa

SEQ ID NO: 328197 - RNA, 19 nt, Homo sapiens
  misc_RNA (1)...(19): siRNA sense strand
caaaccauacuacggaugu

SEQ ID NO: 328198 - RNA, 19 nt, Homo sapiens
  misc_RNA (1)...(19): siRNA sense strand
aggaguucaugcagaagua

SEQ ID NO: 328199 - RNA, 19 nt, Homo sapiens
  misc_RNA (1)...(19): siRNA sense strand
gacggaaauggguauauug

SEQ ID NO: 328200 - RNA, 19 nt, Homo sapiens
  misc_RNA (1)...(19): siRNA sense strand
gaaggaucuguacgagaaa

SEQ ID NO: 328201 - RNA, 19 nt, Homo sapiens
  misc_RNA (1)...(19): siRNA sense strand
auggguauauugaagguaa

SEQ ID NO: 328202 - RNA, 19 nt, Homo sapiens
  misc_RNA (1)...(19): siRNA sense strand
gagugacaacuuuggagaa

SEQ ID NO: 328203 - RNA, 19 nt, Homo sapiens
  misc_RNA (1)...(19): siRNA sense strand
gcagacggaaauggguaua

SEQ ID NO: 328204 - RNA, 19 nt, Homo sapiens
  misc_RNA (1)...(19): siRNA sense strand
cuacagaaagagcgucaug

SEQ ID NO: 328205 - RNA, 19 nt, Homo sapiens
  misc_RNA (1)...(19): siRNA sense strand
gcaugaugucaaagaguga

SEQ ID NO: 328206 - RNA, 19 nt, Homo sapiens
  misc_RNA (1)...(19): siRNA sense strand
ggaaaggcucuggcaugau

SEQ ID NO: 328207 - RNA, 19 nt, Homo sapiens
  misc_RNA (1)...(19): siRNA sense strand
aaauggguauauugaaggu

SEQ ID NO: 328208 - RNA, 19 nt, Homo sapiens
  misc_RNA (1)...(19): siRNA sense strand
ccgcaaggaccuggagauu

SEQ ID NO: 328209 - RNA, 19 nt, Homo sapiens
  misc_RNA (1)...(19): siRNA sense strand
gcucaccaacuacagaaag

SEQ ID NO: 328210 - RNA, 19 nt, Homo sapiens
  misc_RNA (1)...(19): siRNA sense strand
cggaaauggguauauugaa

SEQ ID NO: 328211 - RNA, 19 nt, Homo sapiens
  misc_RNA (1)...(19): siRNA sense strand
ugacgagcaugagcuggau

SEQ ID NO: 328212 - RNA, 19 nt, Homo sapiens
  misc_RNA (1)...(19): siRNA sense strand
caggaguggcuacaucgaa

SEQ ID NO: 328213 - RNA, 19 nt, Homo sapiens
  misc_RNA (1)...(19): siRNA sense strand
aaacucagaugggaaaauc

SEQ ID NO: 328214 - RNA, 19 nt, Homo sapiens
  misc_RNA (1)...(19): siRNA sense strand
acagaaagagcgucauguc

SEQ ID NO: 328215 - RNA, 19 nt, Homo sapiens
  misc_RNA (1)...(19): siRNA sense strand
acggaaauggguauauuga

SEQ ID NO: 328216 - RNA, 19 nt, Homo sapiens
  misc_RNA (1)...(19): siRNA sense strand
aaaccauacuacggauguu

SEQ ID NO: 328217 - RNA, 19 nt, Homo sapiens
  misc_RNA (1)...(19): siRNA sense strand
gcuccagcgccgaguuuau

SEQ ID NO: 328218 - RNA, 19 nt, Homo sapiens
  misc_RNA (1)...(19): siRNA sense strand
cagcucaccaacuacagaa

SEQ ID NO: 328219 - RNA, 19 nt, Homo sapiens
  misc_RNA (1)...(19): siRNA sense strand
gaaaggcucuggcaugaug

SEQ ID NO: 328220 - RNA, 19 nt, Homo sapiens
  misc_RNA (1)...(19): siRNA sense strand
ccaaugagcucaagggauu

SEQ ID NO: 328221 - RNA, 19 nt, Homo sapiens
  misc_RNA (1)...(19): siRNA sense strand
ggaauacacccaaaccaua

SEQ ID NO: 328222 - RNA, 19 nt, Homo sapiens
  misc_RNA (1)...(19): siRNA sense strand
ggaaauggguauauugaag

SEQ ID NO: 328223 - RNA, 19 nt, Homo sapiens
  misc_RNA (1)...(19): siRNA sense strand
gaacggggauggcaaauug

SEQ ID NO: 328224 - RNA, 19 nt, Homo sapiens
  misc_RNA (1)...(19): siRNA sense strand
guaaagagcuagaaaacuu

SEQ ID NO: 328225 - RNA, 19 nt, Homo sapiens
  misc_RNA (1)...(19): siRNA sense strand
gagaaaagaugaaggaguu

SEQ ID NO: 328226 - RNA, 19 nt, Homo sapiens
  misc_RNA (1)...(19): siRNA sense strand
gcucuggcaugaugucaaa

SEQ ID NO: 328227 - RNA, 19 nt, Homo sapiens
  misc_RNA (1)...(19): siRNA sense strand
gaagguaaagagcuagaaa

SEQ ID NO: 328228 - RNA, 19 nt, Homo sapiens
  misc_RNA (1)...(19): siRNA sense strand
ggaaauauggaagcacuuu

SEQ ID NO: 328229 - RNA, 19 nt, Homo sapiens
  misc_RNA (1)...(19): siRNA sense strand
agacggaaauggguauauu

SEQ ID NO: 328230 - RNA, 19 nt, Homo sapiens
  misc_RNA (1)...(19): siRNA sense strand
uggcagagcuggcgcagau

SEQ ID NO: 328231 - RNA, 19 nt, Homo sapiens
  misc_RNA (1)...(19): siRNA sense strand
agcccaagcuccaggaaua

SEQ ID NO: 328232 - RNA, 19 nt, Homo sapiens
  misc_RNA (1)...(19): siRNA sense strand
gcaaauugggccucucaga

SEQ ID NO: 328233 - RNA, 19 nt, Homo sapiens
  misc_RNA (1)...(19): siRNA sense strand
cuacggauguuugacuuga

SEQ ID NO: 328234 - RNA, 19 nt, Homo sapiens
  misc_RNA (1)...(19): siRNA sense strand
gaaauauggaagcacuuug

SEQ ID NO: 328235 - RNA, 19 nt, Homo sapiens
  misc_RNA (1)...(19): siRNA sense strand
gaauacacccaaaccauac

SEQ ID NO: 328236 - RNA, 19 nt, Homo sapiens
  misc_RNA (1)...(19): siRNA sense strand
aggaaaggcucuggcauga

SEQ ID NO: 328237 - RNA, 19 nt, Homo sapiens
  misc_RNA (1)...(19): siRNA sense strand
uauugaagguaaagagcua

SEQ ID NO: 328238 - RNA, 19 nt, Homo sapiens
  misc_RNA (1)...(19): siRNA sense strand
agacaggaguggcuacauc

SEQ ID NO: 328239 - RNA, 19 nt, Homo sapiens
  misc_RNA (1)...(19): siRNA sense strand
ucaagggauuccugucaga

SEQ ID NO: 328240 - RNA, 19 nt, Homo sapiens
  misc_RNA (1)...(19): siRNA sense strand
gcucaagggauuccuguca

SEQ ID NO: 328241 - RNA, 19 nt, Homo sapiens
  misc_RNA (1)...(19): siRNA sense strand
aaauauggaagcacuuuga

SEQ ID NO: 328242 - RNA, 19 nt, Homo sapiens
  misc_RNA (1)...(19): siRNA sense strand
agugacaacuuuggagaaa

SEQ ID NO: 328243 - RNA, 19 nt, Homo sapiens
  misc_RNA (1)...(19): siRNA sense strand
caaaccauacuacggaugu

SEQ ID NO: 328244 - RNA, 19 nt, Homo sapiens
  misc_RNA (1)...(19): siRNA sense strand
aggaguucaugcagaagua

SEQ ID NO: 328245 - RNA, 19 nt, Homo sapiens
  misc_RNA (1)...(19): siRNA sense strand
gacggaaauggguauauug

SEQ ID NO: 328246 - RNA, 19 nt, Homo sapiens
  misc_RNA (1)...(19): siRNA sense strand
auggguauauugaagguaa

SEQ ID NO: 328247 - RNA, 19 nt, Homo sapiens
  misc_RNA (1)...(19): siRNA sense strand
gagugacaacuuuggagaa

SEQ ID NO: 328248 - RNA, 19 nt, Homo sapiens
  misc_RNA (1)...(19): siRNA sense strand
gcagacggaaauggguaua

SEQ ID NO: 328249 - RNA, 19 nt, Homo sapiens
  misc_RNA (1)...(19): siRNA sense strand
ggaaaggcucuggcaugau

SEQ ID NO: 328250 - RNA, 19 nt, Homo sapiens
  misc_RNA (1)...(19): siRNA sense strand
gcaugaugucaaagaguga

SEQ ID NO: 328251 - RNA, 19 nt, Homo sapiens
  misc_RNA (1)...(19): siRNA sense strand
cggaaauggguauauugaa

SEQ ID NO: 328252 - RNA, 19 nt, Homo sapiens
  misc_RNA (1)...(19): siRNA sense strand
aaauggguauauugaaggu

SEQ ID NO: 328253 - RNA, 19 nt, Homo sapiens
  misc_RNA (1)...(19): siRNA sense strand
caggaguggcuacaucgaa

SEQ ID NO: 328254 - RNA, 19 nt, Homo sapiens
  misc_RNA (1)...(19): siRNA sense strand
aaacucagaugggaaaauc

SEQ ID NO: 328255 - RNA, 19 nt, Homo sapiens
  misc_RNA (1)...(19): siRNA sense strand
aaaccauacuacggauguu

SEQ ID NO: 328256 - RNA, 19 nt, Homo sapiens
  misc_RNA (1)...(19): siRNA sense strand
acggaaauggguauauuga

SEQ ID NO: 328257 - RNA, 19 nt, Homo sapiens
  misc_RNA (1)...(19): siRNA sense strand
gcuccagcgccgaguuuau

SEQ ID NO: 328258 - RNA, 19 nt, Homo sapiens
  misc_RNA (1)...(19): siRNA sense strand
gaaaggcucuggcaugaug

SEQ ID NO: 328259 - RNA, 19 nt, Homo sapiens
  misc_RNA (1)...(19): siRNA sense strand
ccaaugagcucaagggauu

SEQ ID NO: 328260 - RNA, 19 nt, Homo sapiens
  misc_RNA (1)...(19): siRNA sense strand
ggaauacacccaaaccaua

SEQ ID NO: 328261 - RNA, 19 nt, Homo sapiens
  misc_RNA (1)...(19): siRNA sense strand
ggaaauggguauauugaag

SEQ ID NO: 328262 - RNA, 19 nt, Homo sapiens
  misc_RNA (1)...(19): siRNA sense strand
gauagaagcggcuacauug

SEQ ID NO: 328263 - RNA, 19 nt, Homo sapiens
  misc_RNA (1)...(19): siRNA sense strand
gaacggggauggcaaauug

SEQ ID NO: 328264 - RNA, 19 nt, Homo sapiens
  misc_RNA (1)...(19): siRNA sense strand
guaaagagcuagaaaacuu

SEQ ID NO: 328265 - RNA, 19 nt, Homo sapiens
  misc_RNA (1)...(19): siRNA sense strand
gagaaaagaugaaggaguu

SEQ ID NO: 328266 - RNA, 19 nt, Homo sapiens
  misc_RNA (1)...(19): siRNA sense strand
gcucuggcaugaugucaaa

SEQ ID NO: 328267 - RNA, 19 nt, Homo sapiens
  misc_RNA (1)...(19): siRNA sense strand
ggauagaagcggcuacauu

SEQ ID NO: 328268 - RNA, 19 nt, Homo sapiens
  misc_RNA (1)...(19): siRNA sense strand
gaagguaaagagcuagaaa

SEQ ID NO: 328269 - RNA, 19 nt, Homo sapiens
  misc_RNA (1)...(19): siRNA sense strand
ggaaauauggaagcacuuu

SEQ ID NO: 328270 - RNA, 19 nt, Homo sapiens
  misc_RNA (1)...(19): siRNA sense strand
agacggaaauggguauauu

SEQ ID NO: 328271 - RNA, 19 nt, Homo sapiens
  misc_RNA (1)...(19): siRNA sense strand
uggcagagcuggcgcagau

SEQ ID NO: 328272 - RNA, 19 nt, Homo sapiens
  misc_RNA (1)...(19): siRNA sense strand
agcccaagcuccaggaaua

SEQ ID NO: 328273 - RNA, 19 nt, Homo sapiens
  misc_RNA (1)...(19): siRNA sense strand
gcaaauugggccucucaga

SEQ ID NO: 328274 - RNA, 19 nt, Homo sapiens
  misc_RNA (1)...(19): siRNA sense strand
cuacggauguuugacuuga

SEQ ID NO: 328275 - RNA, 19 nt, Homo sapiens
  misc_RNA (1)...(19): siRNA sense strand
aggaaaggcucuggcauga

SEQ ID NO: 328276 - RNA, 19 nt, Homo sapiens
  misc_RNA (1)...(19): siRNA sense strand
gaauacacccaaaccauac

SEQ ID NO: 328277 - RNA, 19 nt, Homo sapiens
  misc_RNA (1)...(19): siRNA sense strand
gaaauauggaagcacuuug

SEQ ID NO: 328278 - RNA, 19 nt, Homo sapiens
  misc_RNA (1)...(19): siRNA sense strand
uauugaagguaaagagcua

SEQ ID NO: 328279 - RNA, 19 nt, Homo sapiens
  misc_RNA (1)...(19): siRNA sense strand
agacaggaguggcuacauc

SEQ ID NO: 328280 - RNA, 19 nt, Homo sapiens
  misc_RNA (1)...(19): siRNA sense strand
ucaagggauuccugucaga

SEQ ID NO: 328281 - RNA, 19 nt, Homo sapiens
  misc_RNA (1)...(19): siRNA sense strand
gcucaagggauuccuguca

SEQ ID NO: 328282 - RNA, 19 nt, Homo sapiens
  misc_RNA (1)...(19): siRNA sense strand
aaauauggaagcacuuuga

SEQ ID NO: 328283 - RNA, 19 nt, Homo sapiens
  misc_RNA (1)...(19): siRNA sense strand
agugacaacuuuggagaaa

SEQ ID NO: 328284 - RNA, 19 nt, Homo sapiens
  misc_RNA (1)...(19): siRNA sense strand
caaaccauacuacggaugu

SEQ ID NO: 328285 - RNA, 19 nt, Homo sapiens
  misc_RNA (1)...(19): siRNA sense strand
aggaguucaugcagaagua

SEQ ID NO: 328286 - RNA, 19 nt, Homo sapiens
  misc_RNA (1)...(19): siRNA sense strand
auggguauauugaagguaa

SEQ ID NO: 328287 - RNA, 19 nt, Homo sapiens
  misc_RNA (1)...(19): siRNA sense strand
gacggaaauggguauauug

SEQ ID NO: 328288 - RNA, 19 nt, Homo sapiens
  misc_RNA (1)...(19): siRNA sense strand
gagugacaacuuuggagaa

SEQ ID NO: 328289 - RNA, 19 nt, Homo sapiens
  misc_RNA (1)...(19): siRNA sense strand
gcagacggaaauggguaua

SEQ ID NO: 328290 - RNA, 19 nt, Homo sapiens
  misc_RNA (1)...(19): siRNA sense strand
ggaaaggcucuggcaugau

SEQ ID NO: 328291 - RNA, 19 nt, Homo sapiens
  misc_RNA (1)...(19): siRNA sense strand
gcaugaugucaaagaguga

SEQ ID NO: 328292 - RNA, 19 nt, Homo sapiens
  misc_RNA (1)...(19): siRNA sense strand
caggaguggcuacaucgaa

SEQ ID NO: 328293 - RNA, 19 nt, Homo sapiens
  misc_RNA (1)...(19): siRNA sense strand
ugacgagcaugagcuggau

SEQ ID NO: 328294 - RNA, 19 nt, Homo sapiens
  misc_RNA (1)...(19): siRNA sense strand
cggaaauggguauauugaa

SEQ ID NO: 328295 - RNA, 19 nt, Homo sapiens
  misc_RNA (1)...(19): siRNA sense strand
aaauggguauauugaaggu

SEQ ID NO: 328296 - RNA, 19 nt, Homo sapiens
  misc_RNA (1)...(19): siRNA sense strand
aaacucagaugggaaaauc

SEQ ID NO: 328297 - RNA, 19 nt, Homo sapiens
  misc_RNA (1)...(19): siRNA sense strand
acggaaauggguauauuga

SEQ ID NO: 328298 - RNA, 19 nt, Homo sapiens
  misc_RNA (1)...(19): siRNA sense strand
aaaccauacuacggauguu

SEQ ID NO: 328299 - RNA, 19 nt, Homo sapiens
  misc_RNA (1)...(19): siRNA sense strand
gcuccagcgccgaguuuau

SEQ ID NO: 328300 - RNA, 19 nt, Homo sapiens
  misc_RNA (1)...(19): siRNA sense strand
gaaaggcucuggcaugaug

SEQ ID NO: 328301 - RNA, 19 nt, Homo sapiens
  misc_RNA (1)...(19): siRNA sense strand
ccaaugagcucaagggauu

SEQ ID NO: 328302 - RNA, 19 nt, Homo sapiens
  misc_RNA (1)...(19): siRNA sense strand
gcaaggaccuggagauugu

SEQ ID NO: 328303 - RNA, 19 nt, Homo sapiens
  misc_RNA (1)...(19): siRNA sense strand
ggaauacacccaaaccaua

SEQ ID NO: 328304 - RNA, 19 nt, Homo sapiens
  misc_RNA (1)...(19): siRNA sense strand
ggaaauggguauauugaag

SEQ ID NO: 328305 - RNA, 19 nt, Homo sapiens
  misc_RNA (1)...(19): siRNA sense strand
ugaaggaucuguacgagaa

SEQ ID NO: 328306 - RNA, 19 nt, Homo sapiens
  misc_RNA (1)...(19): siRNA sense strand
gaaagagcgucauguccuu

SEQ ID NO: 328307 - RNA, 19 nt, Homo sapiens
  misc_RNA (1)...(19): siRNA sense strand
gauagaagcggcuacauug

SEQ ID NO: 328308 - RNA, 19 nt, Homo sapiens
  misc_RNA (1)...(19): siRNA sense strand
gaacggggauggcaaauug

SEQ ID NO: 328309 - RNA, 19 nt, Homo sapiens
  misc_RNA (1)...(19): siRNA sense strand
guaaagagcuagaaaacuu

SEQ ID NO: 328310 - RNA, 19 nt, Homo sapiens
  misc_RNA (1)...(19): siRNA sense strand
gagaaaagaugaaggaguu

SEQ ID NO: 328311 - RNA, 19 nt, Homo sapiens
  misc_RNA (1)...(19): siRNA sense strand
ggaaaucaauauucaacag

SEQ ID NO: 328312 - RNA, 19 nt, Homo sapiens
  misc_RNA (1)...(19): siRNA sense strand
gcucuggcaugaugucaaa

SEQ ID NO: 328313 - RNA, 19 nt, Homo sapiens
  misc_RNA (1)...(19): siRNA sense strand
ggauagaagcggcuacauu

SEQ ID NO: 328314 - RNA, 19 nt, Homo sapiens
  misc_RNA (1)...(19): siRNA sense strand
gaagguaaagagcuagaaa

SEQ ID NO: 328315 - RNA, 19 nt, Homo sapiens
  misc_RNA (1)...(19): siRNA sense strand
ggaaauauggaagcacuuu

SEQ ID NO: 328316 - RNA, 19 nt, Homo sapiens
  misc_RNA (1)...(19): siRNA sense strand
uucaacagcucaccaacua

SEQ ID NO: 328317 - RNA, 19 nt, Homo sapiens
  misc_RNA (1)...(19): siRNA sense strand
uggcagagcuggcgcagau

SEQ ID NO: 328318 - RNA, 19 nt, Homo sapiens
  misc_RNA (1)...(19): siRNA sense strand
agacggaaauggguauauu

SEQ ID NO: 328319 - RNA, 19 nt, Homo sapiens
  misc_RNA (1)...(19): siRNA sense strand
agcccaagcuccaggaaua

SEQ ID NO: 328320 - RNA, 19 nt, Homo sapiens
  misc_RNA (1)...(19): siRNA sense strand
gcaaauugggccucucaga

SEQ ID NO: 328321 - RNA, 19 nt, Homo sapiens
  misc_RNA (1)...(19): siRNA sense strand
cuacggauguuugacuuga

SEQ ID NO: 328322 - RNA, 19 nt, Homo sapiens
  misc_RNA (1)...(19): siRNA sense strand
aggaaaggcucuggcauga

SEQ ID NO: 328323 - RNA, 19 nt, Homo sapiens
  misc_RNA (1)...(19): siRNA sense strand
gaauacacccaaaccauac

SEQ ID NO: 328324 - RNA, 19 nt, Homo sapiens
  misc_RNA (1)...(19): siRNA sense strand
gaaauauggaagcacuuug

SEQ ID NO: 328325 - RNA, 19 nt, Homo sapiens
  misc_RNA (1)...(19): siRNA sense strand
uauugaagguaaagagcua

SEQ ID NO: 328326 - RNA, 19 nt, Homo sapiens
  misc_RNA (1)...(19): siRNA sense strand
agacaggaguggcuacauc

SEQ ID NO: 328327 - RNA, 19 nt, Homo sapiens
  misc_RNA (1)...(19): siRNA sense strand
ucaagggauuccugucaga

SEQ ID NO: 328328 - RNA, 19 nt, Homo sapiens
  misc_RNA (1)...(19): siRNA sense strand
caacagcucaccaacuaca

SEQ ID NO: 328329 - RNA, 19 nt, Homo sapiens
  misc_RNA (1)...(19): siRNA sense strand
gcucaagggauuccuguca

SEQ ID NO: 328330 - RNA, 19 nt, Homo sapiens
  misc_RNA (1)...(19): siRNA sense strand
aaauauggaagcacuuuga

SEQ ID NO: 328331 - RNA, 19 nt, Homo sapiens
  misc_RNA (1)...(19): siRNA sense strand
agugacaacuuuggagaaa

SEQ ID NO: 328332 - RNA, 19 nt, Homo sapiens
  misc_RNA (1)...(19): siRNA sense strand
caaaccauacuacggaugu

SEQ ID NO: 328333 - RNA, 19 nt, Homo sapiens
  misc_RNA (1)...(19): siRNA sense strand
aggaguucaugcagaagua

SEQ ID NO: 328334 - RNA, 19 nt, Homo sapiens
  misc_RNA (1)...(19): siRNA sense strand
gacggaaauggguauauug

SEQ ID NO: 328335 - RNA, 19 nt, Homo sapiens
  misc_RNA (1)...(19): siRNA sense strand
gaaggaucuguacgagaaa

SEQ ID NO: 328336 - RNA, 19 nt, Homo sapiens
  misc_RNA (1)...(19): siRNA sense strand
auggguauauugaagguaa

SEQ ID NO: 328337 - RNA, 19 nt, Homo sapiens
  misc_RNA (1)...(19): siRNA sense strand
gagugacaacuuuggagaa

SEQ ID NO: 328338 - RNA, 19 nt, Homo sapiens
  misc_RNA (1)...(19): siRNA sense strand
gcagacggaaauggguaua

SEQ ID NO: 328339 - RNA, 19 nt, Homo sapiens
  misc_RNA (1)...(19): siRNA sense strand
cuacagaaagagcgucaug

SEQ ID NO: 328340 - RNA, 19 nt, Homo sapiens
  misc_RNA (1)...(19): siRNA sense strand
gcaugaugucaaagaguga

SEQ ID NO: 328341 - RNA, 19 nt, Homo sapiens
  misc_RNA (1)...(19): siRNA sense strand
ggaaaggcucuggcaugau

SEQ ID NO: 328342 - RNA, 19 nt, Homo sapiens
  misc_RNA (1)...(19): siRNA sense strand
aaauggguauauugaaggu

SEQ ID NO: 328343 - RNA, 19 nt, Homo sapiens
  misc_RNA (1)...(19): siRNA sense strand
ccgcaaggaccuggagauu

SEQ ID NO: 328344 - RNA, 19 nt, Homo sapiens
  misc_RNA (1)...(19): siRNA sense strand
gcucaccaacuacagaaag

SEQ ID NO: 328345 - RNA, 19 nt, Homo sapiens
  misc_RNA (1)...(19): siRNA sense strand
cggaaauggguauauugaa

SEQ ID NO: 328346 - RNA, 19 nt, Homo sapiens
  misc_RNA (1)...(19): siRNA sense strand
ugacgagcaugagcuggau

SEQ ID NO: 328347 - RNA, 19 nt, Homo sapiens
  misc_RNA (1)...(19): siRNA sense strand
caggaguggcuacaucgaa

SEQ ID NO: 328348 - RNA, 19 nt, Homo sapiens
  misc_RNA (1)...(19): siRNA sense strand
aaacucagaugggaaaauc

SEQ ID NO: 328349 - RNA, 19 nt, Homo sapiens
  misc_RNA (1)...(19): siRNA sense strand
acagaaagagcgucauguc

SEQ ID NO: 328350 - RNA, 19 nt, Homo sapiens
  misc_RNA (1)...(19): siRNA sense strand
acggaaauggguauauuga

SEQ ID NO: 328351 - RNA, 19 nt, Homo sapiens
  misc_RNA (1)...(19): siRNA sense strand
aaaccauacuacggauguu

SEQ ID NO: 328352 - RNA, 19 nt, Homo sapiens
  misc_RNA (1)...(19): siRNA sense strand
gcuccagcgccgaguuuau

SEQ ID NO: 328353 - RNA, 19 nt, Homo sapiens
  misc_RNA (1)...(19): siRNA sense strand
cagcucaccaacuacagaa

SEQ ID NO: 328354 - RNA, 19 nt, Homo sapiens
  misc_RNA (1)...(19): siRNA sense strand
gaaaggcucuggcaugaug

SEQ ID NO: 328355 - RNA, 19 nt, Homo sapiens
  misc_RNA (1)...(19): siRNA sense strand
ccaaugagcucaagggauu

SEQ ID NO: 328356 - RNA, 19 nt, Homo sapiens
  misc_RNA (1)...(19): siRNA sense strand
ggaauacacccaaaccaua

SEQ ID NO: 328357 - RNA, 19 nt, Homo sapiens
  misc_RNA (1)...(19): siRNA sense strand
ggaaauggguauauugaag

SEQ ID NO: 328358 - RNA, 19 nt, Homo sapiens
  misc_RNA (1)...(19): siRNA sense strand
gaacggggauggcaaauug

SEQ ID NO: 328359 - RNA, 19 nt, Homo sapiens
  misc_RNA (1)...(19): siRNA sense strand
guaaagagcuagaaaacuu

SEQ ID NO: 328360 - RNA, 19 nt, Homo sapiens
  misc_RNA (1)...(19): siRNA sense strand
gagaaaagaugaaggaguu

SEQ ID NO: 328361 - RNA, 19 nt, Homo sapiens
  misc_RNA (1)...(19): siRNA sense strand
gcucuggcaugaugucaaa

SEQ ID NO: 328362 - RNA, 19 nt, Homo sapiens
  misc_RNA (1)...(19): siRNA sense strand
gaagguaaagagcuagaaa

SEQ ID NO: 328363 - RNA, 19 nt, Homo sapiens
  misc_RNA (1)...(19): siRNA sense strand
ggaaauauggaagcacuuu

SEQ ID NO: 328364 - RNA, 19 nt, Homo sapiens
  misc_RNA (1)...(19): siRNA sense strand
agacggaaauggguauauu

SEQ ID NO: 328365 - RNA, 19 nt, Homo sapiens
  misc_RNA (1)...(19): siRNA sense strand
uggcagagcuggcgcagau

SEQ ID NO: 328366 - RNA, 19 nt, Homo sapiens
  misc_RNA (1)...(19): siRNA sense strand
agcccaagcuccaggaaua

SEQ ID NO: 328367 - RNA, 19 nt, Homo sapiens
  misc_RNA (1)...(19): siRNA sense strand
gcaaauugggccucucaga

SEQ ID NO: 328368 - RNA, 19 nt, Homo sapiens
  misc_RNA (1)...(19): siRNA sense strand
cuacggauguuugacuuga

SEQ ID NO: 328369 - RNA, 19 nt, Homo sapiens
  misc_RNA (1)...(19): siRNA sense strand
gaaauauggaagcacuuug

SEQ ID NO: 328370 - RNA, 19 nt, Homo sapiens
  misc_RNA (1)...(19): siRNA sense strand
gaauacacccaaaccauac

SEQ ID NO: 328371 - RNA, 19 nt, Homo sapiens
  misc_RNA (1)...(19): siRNA sense strand
aggaaaggcucuggcauga

SEQ ID NO: 328372 - RNA, 19 nt, Homo sapiens
  misc_RNA (1)...(19): siRNA sense strand
uauugaagguaaagagcua

SEQ ID NO: 328373 - RNA, 19 nt, Homo sapiens
  misc_RNA (1)...(19): siRNA sense strand
agacaggaguggcuacauc

SEQ ID NO: 328374 - RNA, 19 nt, Homo sapiens
  misc_RNA (1)...(19): siRNA sense strand
ucaagggauuccugucaga

SEQ ID NO: 328375 - RNA, 19 nt, Homo sapiens
  misc_RNA (1)...(19): siRNA sense strand
gcucaagggauuccuguca

SEQ ID NO: 328376 - RNA, 19 nt, Homo sapiens
  misc_RNA (1)...(19): siRNA sense strand
aaauauggaagcacuuuga

SEQ ID NO: 328377 - RNA, 19 nt, Homo sapiens
  misc_RNA (1)...(19): siRNA sense strand
agugacaacuuuggagaaa

SEQ ID NO: 328378 - RNA, 19 nt, Homo sapiens
  misc_RNA (1)...(19): siRNA sense strand
caaaccauacuacggaugu

SEQ ID NO: 328379 - RNA, 19 nt, Homo sapiens
  misc_RNA (1)...(19): siRNA sense strand
aggaguucaugcagaagua

SEQ ID NO: 328380 - RNA, 19 nt, Homo sapiens
  misc_RNA (1)...(19): siRNA sense strand
gacggaaauggguauauug

SEQ ID NO: 328381 - RNA, 19 nt, Homo sapiens
  misc_RNA (1)...(19): siRNA sense strand
auggguauauugaagguaa

SEQ ID NO: 328382 - RNA, 19 nt, Homo sapiens
  misc_RNA (1)...(19): siRNA sense strand
gagugacaacuuuggagaa

SEQ ID NO: 328383 - RNA, 19 nt, Homo sapiens
  misc_RNA (1)...(19): siRNA sense strand
gcagacggaaauggguaua

SEQ ID NO: 328384 - RNA, 19 nt, Homo sapiens
  misc_RNA (1)...(19): siRNA sense strand
ggaaaggcucuggcaugau

SEQ ID NO: 328385 - RNA, 19 nt, Homo sapiens
  misc_RNA (1)...(19): siRNA sense strand
gcaugaugucaaagaguga

SEQ ID NO: 328386 - RNA, 19 nt, Homo sapiens
  misc_RNA (1)...(19): siRNA sense strand
cggaaauggguauauugaa

SEQ ID NO: 328387 - RNA, 19 nt, Homo sapiens
  misc_RNA (1)...(19): siRNA sense strand
aaauggguauauugaaggu

SEQ ID NO: 328388 - RNA, 19 nt, Homo sapiens
  misc_RNA (1)...(19): siRNA sense strand
caggaguggcuacaucgaa

SEQ ID NO: 328389 - RNA, 19 nt, Homo sapiens
  misc_RNA (1)...(19): siRNA sense strand
aaacucagaugggaaaauc

SEQ ID NO: 328390 - RNA, 19 nt, Homo sapiens
  misc_RNA (1)...(19): siRNA sense strand
aaaccauacuacggauguu

SEQ ID NO: 328391 - RNA, 19 nt, Homo sapiens
  misc_RNA (1)...(19): siRNA sense strand
acggaaauggguauauuga

SEQ ID NO: 328392 - RNA, 19 nt, Homo sapiens
  misc_RNA (1)...(19): siRNA sense strand
gcuccagcgccgaguuuau

SEQ ID NO: 328393 - RNA, 19 nt, Homo sapiens
  misc_RNA (1)...(19): siRNA sense strand
gaaaggcucuggcaugaug

SEQ ID NO: 328394 - RNA, 19 nt, Homo sapiens
  misc_RNA (1)...(19): siRNA sense strand
ccaaugagcucaagggauu

SEQ ID NO: 328395 - RNA, 19 nt, Homo sapiens
  misc_RNA (1)...(19): siRNA sense strand
ggaauacacccaaaccaua

SEQ ID NO: 328396 - RNA, 19 nt, Homo sapiens
  misc_RNA (1)...(19): siRNA sense strand
ggaaauggguauauugaag

SEQ ID NO: 328397 - RNA, 19 nt, Homo sapiens
  misc_RNA (1)...(19): siRNA sense strand
gauagaagcggcuacauug

SEQ ID NO: 328398 - RNA, 19 nt, Homo sapiens
  misc_RNA (1)...(19): siRNA sense strand
gaacggggauggcaaauug

SEQ ID NO: 328399 - RNA, 19 nt, Homo sapiens
  misc_RNA (1)...(19): siRNA sense strand
guaaagagcuagaaaacuu

SEQ ID NO: 328400 - RNA, 19 nt, Homo sapiens
  misc_RNA (1)...(19): siRNA sense strand
gagaaaagaugaaggaguu

SEQ ID NO: 328401 - RNA, 19 nt, Homo sapiens
  misc_RNA (1)...(19): siRNA sense strand
gcucuggcaugaugucaaa

SEQ ID NO: 328402 - RNA, 19 nt, Homo sapiens
  misc_RNA (1)...(19): siRNA sense strand
ggauagaagcggcuacauu

SEQ ID NO: 328403 - RNA, 19 nt, Homo sapiens
  misc_RNA (1)...(19): siRNA sense strand
gaagguaaagagcuagaaa

SEQ ID NO: 328404 - RNA, 19 nt, Homo sapiens
  misc_RNA (1)...(19): siRNA sense strand
ggaaauauggaagcacuuu

SEQ ID NO: 328405 - RNA, 19 nt, Homo sapiens
  misc_RNA (1)...(19): siRNA sense strand
agacggaaauggguauauu

SEQ ID NO: 328406 - RNA, 19 nt, Homo sapiens
  misc_RNA (1)...(19): siRNA sense strand
uggcagagcuggcgcagau

SEQ ID NO: 328407 - RNA, 19 nt, Homo sapiens
  misc_RNA (1)...(19): siRNA sense strand
agcccaagcuccaggaaua

SEQ ID NO: 328408 - RNA, 19 nt, Homo sapiens
  misc_RNA (1)...(19): siRNA sense strand
gcaaauugggccucucaga

SEQ ID NO: 328409 - RNA, 19 nt, Homo sapiens
  misc_RNA (1)...(19): siRNA sense strand
cuacggauguuugacuuga

SEQ ID NO: 328410 - RNA, 19 nt, Homo sapiens
  misc_RNA (1)...(19): siRNA sense strand
aggaaaggcucuggcauga

SEQ ID NO: 328411 - RNA, 19 nt, Homo sapiens
  misc_RNA (1)...(19): siRNA sense strand
gaauacacccaaaccauac

SEQ ID NO: 328412 - RNA, 19 nt, Homo sapiens
  misc_RNA (1)...(19): siRNA sense strand
gaaauauggaagcacuuug

SEQ ID NO: 328413 - RNA, 19 nt, Homo sapiens
  misc_RNA (1)...(19): siRNA sense strand
uauugaagguaaagagcua

SEQ ID NO: 328414 - RNA, 19 nt, Homo sapiens
  misc_RNA (1)...(19): siRNA sense strand
agacaggaguggcuacauc

SEQ ID NO: 328415 - RNA, 19 nt, Homo sapiens
  misc_RNA (1)...(19): siRNA sense strand
ucaagggauuccugucaga

SEQ ID NO: 328416 - RNA, 19 nt, Homo sapiens
  misc_RNA (1)...(19): siRNA sense strand
gcucaagggauuccuguca

SEQ ID NO: 328417 - RNA, 19 nt, Homo sapiens
  misc_RNA (1)...(19): siRNA sense strand
aaauauggaagcacuuuga

SEQ ID NO: 328418 - RNA, 19 nt, Homo sapiens
  misc_RNA (1)...(19): siRNA sense strand
agugacaacuuuggagaaa

SEQ ID NO: 328419 - RNA, 19 nt, Homo sapiens
  misc_RNA (1)...(19): siRNA sense strand
caaaccauacuacggaugu

SEQ ID NO: 328420 - RNA, 19 nt, Homo sapiens
  misc_RNA (1)...(19): siRNA sense strand
aggaguucaugcagaagua

SEQ ID NO: 328421 - RNA, 19 nt, Homo sapiens
  misc_RNA (1)...(19): siRNA sense strand
auggguauauugaagguaa

SEQ ID NO: 328422 - RNA, 19 nt, Homo sapiens
  misc_RNA (1)...(19): siRNA sense strand
gacggaaauggguauauug

SEQ ID NO: 328423 - RNA, 19 nt, Homo sapiens
  misc_RNA (1)...(19): siRNA sense strand
gagugacaacuuuggagaa

SEQ ID NO: 328424 - RNA, 19 nt, Homo sapiens
  misc_RNA (1)...(19): siRNA sense strand
gcagacggaaauggguaua

SEQ ID NO: 328425 - RNA, 19 nt, Homo sapiens
  misc_RNA (1)...(19): siRNA sense strand
ggaaaggcucuggcaugau

SEQ ID NO: 328426 - RNA, 19 nt, Homo sapiens
  misc_RNA (1)...(19): siRNA sense strand
gcaugaugucaaagaguga

SEQ ID NO: 328427 - RNA, 19 nt, Homo sapiens
  misc_RNA (1)...(19): siRNA sense strand
caggaguggcuacaucgaa

SEQ ID NO: 328428 - RNA, 19 nt, Homo sapiens
  misc_RNA (1)...(19): siRNA sense strand
ugacgagcaugagcuggau

SEQ ID NO: 328429 - RNA, 19 nt, Homo sapiens
  misc_RNA (1)...(19): siRNA sense strand
cggaaauggguauauugaa

SEQ ID NO: 328430 - RNA, 19 nt, Homo sapiens
  misc_RNA (1)...(19): siRNA sense strand
aaauggguauauugaaggu

SEQ ID NO: 328431 - RNA, 19 nt, Homo sapiens
  misc_RNA (1)...(19): siRNA sense strand
aaacucagaugggaaaauc

SEQ ID NO: 328432 - RNA, 19 nt, Homo sapiens
  misc_RNA (1)...(19): siRNA sense strand
acggaaauggguauauuga

SEQ ID NO: 328433 - RNA, 19 nt, Homo sapiens
  misc_RNA (1)...(19): siRNA sense strand
aaaccauacuacggauguu

SEQ ID NO: 328434 - RNA, 19 nt, Homo sapiens
  misc_RNA (1)...(19): siRNA sense strand
gcuccagcgccgaguuuau

SEQ ID NO: 328435 - RNA, 19 nt, Homo sapiens
  misc_RNA (1)...(19): siRNA sense strand
gaagaagccuuuguaaaug

SEQ ID NO: 328436 - RNA, 19 nt, Homo sapiens
  misc_RNA (1)...(19): siRNA sense strand
uaaaggagcuagaagaaug

SEQ ID NO: 328437 - RNA, 19 nt, Homo sapiens
  misc_RNA (1)...(19): siRNA sense strand
gaaaguauccguaaaugga

SEQ ID NO: 328438 - RNA, 19 nt, Homo sapiens
  misc_RNA (1)...(19): siRNA sense strand
agaagaagccuuuguaaau

SEQ ID NO: 328439 - RNA, 19 nt, Homo sapiens
  misc_RNA (1)...(19): siRNA sense strand
ggaaaguaaugguccaaca

SEQ ID NO: 328440 - RNA, 19 nt, Homo sapiens
  misc_RNA (1)...(19): siRNA sense strand
gcagaagaagccuuuguaa

SEQ ID NO: 328441 - RNA, 19 nt, Homo sapiens
  misc_RNA (1)...(19): siRNA sense strand
gagagaagaacaaauggaa

SEQ ID NO: 328442 - RNA, 19 nt, Homo sapiens
  misc_RNA (1)...(19): siRNA sense strand
aagaagccuuuguaaauga

SEQ ID NO: 328443 - RNA, 19 nt, Homo sapiens
  misc_RNA (1)...(19): siRNA sense strand
gcaagcaggccaaagaugu

SEQ ID NO: 328444 - RNA, 19 nt, Homo sapiens
  misc_RNA (1)...(19): siRNA sense strand
caauaaaggagcuagaaga

SEQ ID NO: 328445 - RNA, 19 nt, Homo sapiens
  misc_RNA (1)...(19): siRNA sense strand
cagaagaagccuuuguaaa

SEQ ID NO: 328446 - RNA, 19 nt, Homo sapiens
  misc_RNA (1)...(19): siRNA sense strand
ggacgagcagcuacagaaa

SEQ ID NO: 328447 - RNA, 19 nt, Homo sapiens
  misc_RNA (1)...(19): siRNA sense strand
ggugaauacuaccaggaaa

SEQ ID NO: 328448 - RNA, 19 nt, Homo sapiens
  misc_RNA (1)...(19): siRNA sense strand
ggaaagaaaaggcaauaaa

SEQ ID NO: 328449 - RNA, 19 nt, Homo sapiens
  misc_RNA (1)...(19): siRNA sense strand
cuagaagaaugguaugcaa

SEQ ID NO: 328450 - RNA, 19 nt, Homo sapiens
  misc_RNA (1)...(19): siRNA sense strand
agacaguuaugcagcuauu

SEQ ID NO: 328451 - RNA, 19 nt, Homo sapiens
  misc_RNA (1)...(19): siRNA sense strand
ggagcuagaagaaugguau

SEQ ID NO: 328452 - RNA, 19 nt, Homo sapiens
  misc_RNA (1)...(19): siRNA sense strand
ggaugcuguugauggagua

SEQ ID NO: 328453 - RNA, 19 nt, Homo sapiens
  misc_RNA (1)...(19): siRNA sense strand
ccaauucucggaagcaaga

SEQ ID NO: 328454 - RNA, 19 nt, Homo sapiens
  misc_RNA (1)...(19): siRNA sense strand
ggagagaagaacaaaugga

SEQ ID NO: 328455 - RNA, 19 nt, Homo sapiens
  misc_RNA (1)...(19): siRNA sense strand
gaaaguaaugguccaacag

SEQ ID NO: 328456 - RNA, 19 nt, Homo sapiens
  misc_RNA (1)...(19): siRNA sense strand
aauaaaggagcuagaagaa

SEQ ID NO: 328457 - RNA, 19 nt, Homo sapiens
  misc_RNA (1)...(19): siRNA sense strand
ggaagcccuugaugccaau

SEQ ID NO: 328458 - RNA, 19 nt, Homo sapiens
  misc_RNA (1)...(19): siRNA sense strand
aguaaugaauggugaauac

SEQ ID NO: 328459 - RNA, 19 nt, Homo sapiens
  misc_RNA (1)...(19): siRNA sense strand
gaagaaugguaugcaagac

SEQ ID NO: 328460 - RNA, 19 nt, Homo sapiens
  misc_RNA (1)...(19): siRNA sense strand
uaaauggagagaagaacaa

SEQ ID NO: 328461 - RNA, 19 nt, Homo sapiens
  misc_RNA (1)...(19): siRNA sense strand
guaaauggagagaagaaca

SEQ ID NO: 328462 - RNA, 19 nt, Homo sapiens
  misc_RNA (1)...(19): siRNA sense strand
gcagcaagagagcgagauu

SEQ ID NO: 328463 - RNA, 19 nt, Homo sapiens
  misc_RNA (1)...(19): siRNA sense strand
gaaagaaaaggcaauaaag

SEQ ID NO: 328464 - RNA, 19 nt, Homo sapiens
  misc_RNA (1)...(19): siRNA sense strand
gcaauaaaggagcuagaag

SEQ ID NO: 328465 - RNA, 19 nt, Homo sapiens
  misc_RNA (1)...(19): siRNA sense strand
acaaauggaacgcuuggaa

SEQ ID NO: 328466 - RNA, 19 nt, Homo sapiens
  misc_RNA (1)...(19): siRNA sense strand
uuucacaaguggaucgauu

SEQ ID NO: 328467 - RNA, 19 nt, Homo sapiens
  misc_RNA (1)...(19): siRNA sense strand
aaaguaaugguccaacaga

SEQ ID NO: 328468 - RNA, 19 nt, Homo sapiens
  misc_RNA (1)...(19): siRNA sense strand
cuagcaagcaggccaaaga

SEQ ID NO: 328469 - RNA, 19 nt, Homo sapiens
  misc_RNA (1)...(19): siRNA sense strand
agaagaaugguaugcaaga

SEQ ID NO: 328470 - RNA, 19 nt, Homo sapiens
  misc_RNA (1)...(19): siRNA sense strand
cugaaaguauccguaaaug

SEQ ID NO: 328471 - RNA, 19 nt, Homo sapiens
  misc_RNA (1)...(19): siRNA sense strand
uuaugcagcuauuucacaa

SEQ ID NO: 328472 - RNA, 19 nt, Homo sapiens
  misc_RNA (1)...(19): siRNA sense strand
gaguaaugaauggugaaua

SEQ ID NO: 328473 - RNA, 19 nt, Homo sapiens
  misc_RNA (1)...(19): siRNA sense strand
ggcaauaaaggagcuagaa

SEQ ID NO: 328474 - RNA, 19 nt, Homo sapiens
  misc_RNA (1)...(19): siRNA sense strand
guugauggaguaaugaaug

SEQ ID NO: 328475 - RNA, 19 nt, Homo sapiens
  misc_RNA (1)...(19): siRNA sense strand
aaugaauggugaauacuac

SEQ ID NO: 328476 - RNA, 19 nt, Homo sapiens
  misc_RNA (1)...(19): siRNA sense strand
gccugaaaguauccguaaa

SEQ ID NO: 328477 - RNA, 19 nt, Homo sapiens
  misc_RNA (1)...(19): siRNA sense strand
ggcagcagaagaagccuuu

SEQ ID NO: 328478 - RNA, 19 nt, Homo sapiens
  misc_RNA (1)...(19): siRNA sense strand
ccugaaaguauccguaaau

SEQ ID NO: 328479 - RNA, 19 nt, Homo sapiens
  misc_RNA (1)...(19): siRNA sense strand
acagacaguuaugcagcua

SEQ ID NO: 328480 - RNA, 19 nt, Homo sapiens
  misc_RNA (1)...(19): siRNA sense strand
ggaguaaugaauggugaau

SEQ ID NO: 328481 - RNA, 19 nt, Homo sapiens
  misc_RNA (1)...(19): siRNA sense strand
cagcagaagaagccuuugu

SEQ ID NO: 328482 - RNA, 19 nt, Homo sapiens
  misc_RNA (1)...(19): siRNA sense strand
acaguuaugcagcuauuuc

SEQ ID NO: 328483 - RNA, 19 nt, Homo sapiens
  misc_RNA (1)...(19): siRNA sense strand
gaaaacaaaagcaaacaac

SEQ ID NO: 328484 - RNA, 19 nt, Homo sapiens
  misc_RNA (1)...(19): siRNA sense strand
guuaugcagcuauuucaca

SEQ ID NO: 328485 - RNA, 19 nt, Homo sapiens
  misc_RNA (1)...(19): siRNA sense strand
ugaaaguauccguaaaugg

SEQ ID NO: 328486 - RNA, 19 nt, Homo sapiens
  misc_RNA (1)...(19): siRNA sense strand
caagcaggccaaagauguc

SEQ ID NO: 328487 - RNA, 19 nt, Homo sapiens
  misc_RNA (1)...(19): siRNA sense strand
gagcuagaagaaugguaug

SEQ ID NO: 328488 - RNA, 19 nt, Homo sapiens
  misc_RNA (1)...(19): siRNA sense strand
gaagaagccuuuguaaaug

SEQ ID NO: 328489 - RNA, 19 nt, Homo sapiens
  misc_RNA (1)...(19): siRNA sense strand
uaaaggagcuagaagaaug

SEQ ID NO: 328490 - RNA, 19 nt, Homo sapiens
  misc_RNA (1)...(19): siRNA sense strand
gaaaguauccguaaaugga

SEQ ID NO: 328491 - RNA, 19 nt, Homo sapiens
  misc_RNA (1)...(19): siRNA sense strand
agaagaagccuuuguaaau

SEQ ID NO: 328492 - RNA, 19 nt, Homo sapiens
  misc_RNA (1)...(19): siRNA sense strand
ggaaaguaaugguccaaca

SEQ ID NO: 328493 - RNA, 19 nt, Homo sapiens
  misc_RNA (1)...(19): siRNA sense strand
gcagaagaagccuuuguaa

SEQ ID NO: 328494 - RNA, 19 nt, Homo sapiens
  misc_RNA (1)...(19): siRNA sense strand
gagagaagaacaaauggaa

SEQ ID NO: 328495 - RNA, 19 nt, Homo sapiens
  misc_RNA (1)...(19): siRNA sense strand
aagaagccuuuguaaauga

SEQ ID NO: 328496 - RNA, 19 nt, Homo sapiens
  misc_RNA (1)...(19): siRNA sense strand
gcaagcaggccaaagaugu

SEQ ID NO: 328497 - RNA, 19 nt, Homo sapiens
  misc_RNA (1)...(19): siRNA sense strand
caauaaaggagcuagaaga

SEQ ID NO: 328498 - RNA, 19 nt, Homo sapiens
  misc_RNA (1)...(19): siRNA sense strand
cagaagaagccuuuguaaa

SEQ ID NO: 328499 - RNA, 19 nt, Homo sapiens
  misc_RNA (1)...(19): siRNA sense strand
ggacgagcagcuacagaaa

SEQ ID NO: 328500 - RNA, 19 nt, Homo sapiens
  misc_RNA (1)...(19): siRNA sense strand
ggugaauacuaccaggaaa

SEQ ID NO: 328501 - RNA, 19 nt, Homo sapiens
  misc_RNA (1)...(19): siRNA sense strand
ggaaagaaaaggcaauaaa

SEQ ID NO: 328502 - RNA, 19 nt, Homo sapiens
  misc_RNA (1)...(19): siRNA sense strand
cuagaagaaugguaugcaa

SEQ ID NO: 328503 - RNA, 19 nt, Homo sapiens
  misc_RNA (1)...(19): siRNA sense strand
agacaguuaugcagcuauu

SEQ ID NO: 328504 - RNA, 19 nt, Homo sapiens
  misc_RNA (1)...(19): siRNA sense strand
ggagcuagaagaaugguau

SEQ ID NO: 328505 - RNA, 19 nt, Homo sapiens
  misc_RNA (1)...(19): siRNA sense strand
ggaugcuguugauggagua

SEQ ID NO: 328506 - RNA, 19 nt, Homo sapiens
  misc_RNA (1)...(19): siRNA sense strand
ccaauucucggaagcaaga

SEQ ID NO: 328507 - RNA, 19 nt, Homo sapiens
  misc_RNA (1)...(19): siRNA sense strand
ggagagaagaacaaaugga

SEQ ID NO: 328508 - RNA, 19 nt, Homo sapiens
  misc_RNA (1)...(19): siRNA sense strand
gaaaguaaugguccaacag

SEQ ID NO: 328509 - RNA, 19 nt, Homo sapiens
  misc_RNA (1)...(19): siRNA sense strand
aauaaaggagcuagaagaa

SEQ ID NO: 328510 - RNA, 19 nt, Homo sapiens
  misc_RNA (1)...(19): siRNA sense strand
ggaagcccuugaugccaau

SEQ ID NO: 328511 - RNA, 19 nt, Homo sapiens
  misc_RNA (1)...(19): siRNA sense strand
aguaaugaauggugaauac

SEQ ID NO: 328512 - RNA, 19 nt, Homo sapiens
  misc_RNA (1)...(19): siRNA sense strand
gaagaaugguaugcaagac

SEQ ID NO: 328513 - RNA, 19 nt, Homo sapiens
  misc_RNA (1)...(19): siRNA sense strand
uaaauggagagaagaacaa

SEQ ID NO: 328514 - RNA, 19 nt, Homo sapiens
  misc_RNA (1)...(19): siRNA sense strand
guaaauggagagaagaaca

SEQ ID NO: 328515 - RNA, 19 nt, Homo sapiens
  misc_RNA (1)...(19): siRNA sense strand
gcagcaagagagcgagauu

SEQ ID NO: 328516 - RNA, 19 nt, Homo sapiens
  misc_RNA (1)...(19): siRNA sense strand
gaaagaaaaggcaauaaag

SEQ ID NO: 328517 - RNA, 19 nt, Homo sapiens
  misc_RNA (1)...(19): siRNA sense strand
gcaauaaaggagcuagaag

SEQ ID NO: 328518 - RNA, 19 nt, Homo sapiens
  misc_RNA (1)...(19): siRNA sense strand
acaaauggaacgcuuggaa

SEQ ID NO: 328519 - RNA, 19 nt, Homo sapiens
  misc_RNA (1)...(19): siRNA sense strand
uuucacaaguggaucgauu

SEQ ID NO: 328520 - RNA, 19 nt, Homo sapiens
  misc_RNA (1)...(19): siRNA sense strand
aaaguaaugguccaacaga

SEQ ID NO: 328521 - RNA, 19 nt, Homo sapiens
  misc_RNA (1)...(19): siRNA sense strand
cuagcaagcaggccaaaga

SEQ ID NO: 328522 - RNA, 19 nt, Homo sapiens
  misc_RNA (1)...(19): siRNA sense strand
agaagaaugguaugcaaga

SEQ ID NO: 328523 - RNA, 19 nt, Homo sapiens
  misc_RNA (1)...(19): siRNA sense strand
cugaaaguauccguaaaug

SEQ ID NO: 328524 - RNA, 19 nt, Homo sapiens
  misc_RNA (1)...(19): siRNA sense strand
uuaugcagcuauuucacaa

SEQ ID NO: 328525 - RNA, 19 nt, Homo sapiens
  misc_RNA (1)...(19): siRNA sense strand
gaguaaugaauggugaaua

SEQ ID NO: 328526 - RNA, 19 nt, Homo sapiens
  misc_RNA (1)...(19): siRNA sense strand
ggcaauaaaggagcuagaa

SEQ ID NO: 328527 - RNA, 19 nt, Homo sapiens
  misc_RNA (1)...(19): siRNA sense strand
guugauggaguaaugaaug

SEQ ID NO: 328528 - RNA, 19 nt, Homo sapiens
  misc_RNA (1)...(19): siRNA sense strand
aaugaauggugaauacuac

SEQ ID NO: 328529 - RNA, 19 nt, Homo sapiens
  misc_RNA (1)...(19): siRNA sense strand
gccugaaaguauccguaaa

SEQ ID NO: 328530 - RNA, 19 nt, Homo sapiens
  misc_RNA (1)...(19): siRNA sense strand
ggcagcagaagaagccuuu

SEQ ID NO: 328531 - RNA, 19 nt, Homo sapiens
  misc_RNA (1)...(19): siRNA sense strand
ccugaaaguauccguaaau

SEQ ID NO: 328532 - RNA, 19 nt, Homo sapiens
  misc_RNA (1)...(19): siRNA sense strand
acagacaguuaugcagcua

SEQ ID NO: 328533 - RNA, 19 nt, Homo sapiens
  misc_RNA (1)...(19): siRNA sense strand
ggaguaaugaauggugaau

SEQ ID NO: 328534 - RNA, 19 nt, Homo sapiens
  misc_RNA (1)...(19): siRNA sense strand
cagcagaagaagccuuugu

SEQ ID NO: 328535 - RNA, 19 nt, Homo sapiens
  misc_RNA (1)...(19): siRNA sense strand
acaguuaugcagcuauuuc

SEQ ID NO: 328536 - RNA, 19 nt, Homo sapiens
  misc_RNA (1)...(19): siRNA sense strand
gaaaacaaaagcaaacaac

SEQ ID NO: 328537 - RNA, 19 nt, Homo sapiens
  misc_RNA (1)...(19): siRNA sense strand
guuaugcagcuauuucaca

SEQ ID NO: 328538 - RNA, 19 nt, Homo sapiens
  misc_RNA (1)...(19): siRNA sense strand
ugaaaguauccguaaaugg

SEQ ID NO: 328539 - RNA, 19 nt, Homo sapiens
  misc_RNA (1)...(19): siRNA sense strand
caagcaggccaaagauguc

SEQ ID NO: 328540 - RNA, 19 nt, Homo sapiens
  misc_RNA (1)...(19): siRNA sense strand
gagcuagaagaaugguaug

SEQ ID NO: 328541 - RNA, 19 nt, Homo sapiens
  misc_RNA (1)...(19): siRNA sense strand
gagcgagauugcaggcaua

SEQ ID NO: 328542 - RNA, 19 nt, Homo sapiens
  misc_RNA (1)...(19): siRNA sense strand
caucuaaggucacggaaca

SEQ ID NO: 328543 - RNA, 19 nt, Homo sapiens
  misc_RNA (1)...(19): siRNA sense strand
gcgccagagugaacaagua

SEQ ID NO: 328544 - RNA, 19 nt, Homo sapiens
  misc_RNA (1)...(19): siRNA sense strand
gaagguggcccagcuaugu

SEQ ID NO: 328545 - RNA, 19 nt, Homo sapiens
  misc_RNA (1)...(19): siRNA sense strand
ggaaccagcgccagaguga

SEQ ID NO: 328546 - RNA, 19 nt, Homo sapiens
  misc_RNA (1)...(19): siRNA sense strand
gugaacaaguagagaagaa

SEQ ID NO: 328547 - RNA, 19 nt, Homo sapiens
  misc_RNA (1)...(19): siRNA sense strand
cgaggaggcuuucgugaag

SEQ ID NO: 328548 - RNA, 19 nt, Homo sapiens
  misc_RNA (1)...(19): siRNA sense strand
gagaagaacaagaucaaca

SEQ ID NO: 328549 - RNA, 19 nt, Homo sapiens
  misc_RNA (1)...(19): siRNA sense strand
gggagaaggccaagaagga

SEQ ID NO: 328550 - RNA, 19 nt, Homo sapiens
  misc_RNA (1)...(19): siRNA sense strand
gaacaaguagagaagaaca

SEQ ID NO: 328551 - RNA, 19 nt, Homo sapiens
  misc_RNA (1)...(19): siRNA sense strand
gcacagagugggagaaggu

SEQ ID NO: 328552 - RNA, 19 nt, Homo sapiens
  misc_RNA (1)...(19): siRNA sense strand
gcagcaagcagugcaaaga

SEQ ID NO: 328553 - RNA, 19 nt, Homo sapiens
  misc_RNA (1)...(19): siRNA sense strand
gcaagcagugcaaagaugu

SEQ ID NO: 328554 - RNA, 19 nt, Homo sapiens
  misc_RNA (1)...(19): siRNA sense strand
ggagaagguggcccagcua

SEQ ID NO: 328555 - RNA, 19 nt, Homo sapiens
  misc_RNA (1)...(19): siRNA sense strand
guagagaagaacaagauca

SEQ ID NO: 328556 - RNA, 19 nt, Homo sapiens
  misc_RNA (1)...(19): siRNA sense strand
gagauugcaggcauagaga

SEQ ID NO: 328557 - RNA, 19 nt, Homo sapiens
  misc_RNA (1)...(19): siRNA sense strand
ggccaacgguccugcugau

SEQ ID NO: 328558 - RNA, 19 nt, Homo sapiens
  misc_RNA (1)...(19): siRNA sense strand
agaagaacaagaucaacaa

SEQ ID NO: 328559 - RNA, 19 nt, Homo sapiens
  misc_RNA (1)...(19): siRNA sense strand
uaaggucacggaacaggaa

SEQ ID NO: 328560 - RNA, 19 nt, Homo sapiens
  misc_RNA (1)...(19): siRNA sense strand
gagaagguggcccagcuau

SEQ ID NO: 328561 - RNA, 19 nt, Homo sapiens
  misc_RNA (1)...(19): siRNA sense strand
uagagaagaacaagaucaa

SEQ ID NO: 328562 - RNA, 19 nt, Homo sapiens
  misc_RNA (1)...(19): siRNA sense strand
gaagaacaagaucaacaac

SEQ ID NO: 328563 - RNA, 19 nt, Homo sapiens
  misc_RNA (1)...(19): siRNA sense strand
ccagcuaugugacuucaac

SEQ ID NO: 328564 - RNA, 19 nt, Homo sapiens
  misc_RNA (1)...(19): siRNA sense strand
gcugaugacuuuggcuucu

SEQ ID NO: 328565 - RNA, 19 nt, Homo sapiens
  misc_RNA (1)...(19): siRNA sense strand
caauggagauguguuucag

SEQ ID NO: 328566 - RNA, 19 nt, Homo sapiens
  misc_RNA (1)...(19): siRNA sense strand
agaggaaacggcugcaaga

SEQ ID NO: 328567 - RNA, 19 nt, Homo sapiens
  misc_RNA (1)...(19): siRNA sense strand
ggcgagaggagcagaggaa

SEQ ID NO: 328568 - RNA, 19 nt, Homo sapiens
  misc_RNA (1)...(19): siRNA sense strand
gagcagcaagcagugcaaa

SEQ ID NO: 328569 - RNA, 19 nt, Homo sapiens
  misc_RNA (1)...(19): siRNA sense strand
gcccagcuaugugacuuca

SEQ ID NO: 328570 - RNA, 19 nt, Homo sapiens
  misc_RNA (1)...(19): siRNA sense strand
ccgaggaggcuuucgugaa

SEQ ID NO: 328571 - RNA, 19 nt, Homo sapiens
  misc_RNA (1)...(19): siRNA sense strand
ucaauggagauguguuuca

SEQ ID NO: 328572 - RNA, 19 nt, Homo sapiens
  misc_RNA (1)...(19): siRNA sense strand
caaguagagaagaacaaga

SEQ ID NO: 328573 - RNA, 19 nt, Homo sapiens
  misc_RNA (1)...(19): siRNA sense strand
agagugaacaaguagagaa

SEQ ID NO: 328574 - RNA, 19 nt, Homo sapiens
  misc_RNA (1)...(19): siRNA sense strand
ugaugacuuuggcuucuuc

SEQ ID NO: 328575 - RNA, 19 nt, Homo sapiens
  misc_RNA (1)...(19): siRNA sense strand
ccugagagcauccgcaagu

SEQ ID NO: 328576 - RNA, 19 nt, Homo sapiens
  misc_RNA (1)...(19): siRNA sense strand
gaaccagcgccagagugaa

SEQ ID NO: 328577 - RNA, 19 nt, Homo sapiens
  misc_RNA (1)...(19): siRNA sense strand
ggcgggagaaggccaagaa

SEQ ID NO: 328578 - RNA, 19 nt, Homo sapiens
  misc_RNA (1)...(19): siRNA sense strand
gagaggagcagaggaaacg

SEQ ID NO: 328579 - RNA, 19 nt, Homo sapiens
  misc_RNA (1)...(19): siRNA sense strand
cgagauugcaggcauagag

SEQ ID NO: 328580 - RNA, 19 nt, Homo sapiens
  misc_RNA (1)...(19): siRNA sense strand
agcaagcagugcaaagaug

SEQ ID NO: 328581 - RNA, 19 nt, Homo sapiens
  misc_RNA (1)...(19): siRNA sense strand
cagcaagcagugcaaagau

SEQ ID NO: 328582 - RNA, 19 nt, Homo sapiens
  misc_RNA (1)...(19): siRNA sense strand
agucaauggagauguguuu

SEQ ID NO: 328583 - RNA, 19 nt, Homo sapiens
  misc_RNA (1)...(19): siRNA sense strand
gaccacagucaauggagau

SEQ ID NO: 328584 - RNA, 19 nt, Homo sapiens
  misc_RNA (1)...(19): siRNA sense strand
gagcgagauugcaggcaua

SEQ ID NO: 328585 - RNA, 19 nt, Homo sapiens
  misc_RNA (1)...(19): siRNA sense strand
caucuaaggucacggaaca

SEQ ID NO: 328586 - RNA, 19 nt, Homo sapiens
  misc_RNA (1)...(19): siRNA sense strand
gcgccagagugaacaagua

SEQ ID NO: 328587 - RNA, 19 nt, Homo sapiens
  misc_RNA (1)...(19): siRNA sense strand
gaagguggcccagcuaugu

SEQ ID NO: 328588 - RNA, 19 nt, Homo sapiens
  misc_RNA (1)...(19): siRNA sense strand
ggaaccagcgccagaguga

SEQ ID NO: 328589 - RNA, 19 nt, Homo sapiens
  misc_RNA (1)...(19): siRNA sense strand
gugaacaaguagagaagaa

SEQ ID NO: 328590 - RNA, 19 nt, Homo sapiens
  misc_RNA (1)...(19): siRNA sense strand
cgaggaggcuuucgugaag

SEQ ID NO: 328591 - RNA, 19 nt, Homo sapiens
  misc_RNA (1)...(19): siRNA sense strand
gagaagaacaagaucaaca

SEQ ID NO: 328592 - RNA, 19 nt, Homo sapiens
  misc_RNA (1)...(19): siRNA sense strand
gggagaaggccaagaagga

SEQ ID NO: 328593 - RNA, 19 nt, Homo sapiens
  misc_RNA (1)...(19): siRNA sense strand
gaacaaguagagaagaaca

SEQ ID NO: 328594 - RNA, 19 nt, Homo sapiens
  misc_RNA (1)...(19): siRNA sense strand
gcacagagugggagaaggu

SEQ ID NO: 328595 - RNA, 19 nt, Homo sapiens
  misc_RNA (1)...(19): siRNA sense strand
gcagcaagcagugcaaaga

SEQ ID NO: 328596 - RNA, 19 nt, Homo sapiens
  misc_RNA (1)...(19): siRNA sense strand
gcaagcagugcaaagaugu

SEQ ID NO: 328597 - RNA, 19 nt, Homo sapiens
  misc_RNA (1)...(19): siRNA sense strand
ggagaagguggcccagcua

SEQ ID NO: 328598 - RNA, 19 nt, Homo sapiens
  misc_RNA (1)...(19): siRNA sense strand
guagagaagaacaagauca

SEQ ID NO: 328599 - RNA, 19 nt, Homo sapiens
  misc_RNA (1)...(19): siRNA sense strand
gagauugcaggcauagaga

SEQ ID NO: 328600 - RNA, 19 nt, Homo sapiens
  misc_RNA (1)...(19): siRNA sense strand
ggccaacgguccugcugau

SEQ ID NO: 328601 - RNA, 19 nt, Homo sapiens
  misc_RNA (1)...(19): siRNA sense strand
agaagaacaagaucaacaa

SEQ ID NO: 328602 - RNA, 19 nt, Homo sapiens
  misc_RNA (1)...(19): siRNA sense strand
uaaggucacggaacaggaa

SEQ ID NO: 328603 - RNA, 19 nt, Homo sapiens
  misc_RNA (1)...(19): siRNA sense strand
gagaagguggcccagcuau

SEQ ID NO: 328604 - RNA, 19 nt, Homo sapiens
  misc_RNA (1)...(19): siRNA sense strand
uagagaagaacaagaucaa

SEQ ID NO: 328605 - RNA, 19 nt, Homo sapiens
  misc_RNA (1)...(19): siRNA sense strand
gaagaacaagaucaacaac

SEQ ID NO: 328606 - RNA, 19 nt, Homo sapiens
  misc_RNA (1)...(19): siRNA sense strand
ccagcuaugugacuucaac

SEQ ID NO: 328607 - RNA, 19 nt, Homo sapiens
  misc_RNA (1)...(19): siRNA sense strand
gcugaugacuuuggcuucu

SEQ ID NO: 328608 - RNA, 19 nt, Homo sapiens
  misc_RNA (1)...(19): siRNA sense strand
caauggagauguguuucag

SEQ ID NO: 328609 - RNA, 19 nt, Homo sapiens
  misc_RNA (1)...(19): siRNA sense strand
agaggaaacggcugcaaga

SEQ ID NO: 328610 - RNA, 19 nt, Homo sapiens
  misc_RNA (1)...(19): siRNA sense strand
ggcgagaggagcagaggaa

SEQ ID NO: 328611 - RNA, 19 nt, Homo sapiens
  misc_RNA (1)...(19): siRNA sense strand
gagcagcaagcagugcaaa

SEQ ID NO: 328612 - RNA, 19 nt, Homo sapiens
  misc_RNA (1)...(19): siRNA sense strand
gcccagcuaugugacuuca

SEQ ID NO: 328613 - RNA, 19 nt, Homo sapiens
  misc_RNA (1)...(19): siRNA sense strand
ccgaggaggcuuucgugaa

SEQ ID NO: 328614 - RNA, 19 nt, Homo sapiens
  misc_RNA (1)...(19): siRNA sense strand
ucaauggagauguguuuca

SEQ ID NO: 328615 - RNA, 19 nt, Homo sapiens
  misc_RNA (1)...(19): siRNA sense strand
caaguagagaagaacaaga

SEQ ID NO: 328616 - RNA, 19 nt, Homo sapiens
  misc_RNA (1)...(19): siRNA sense strand
agagugaacaaguagagaa

SEQ ID NO: 328617 - RNA, 19 nt, Homo sapiens
  misc_RNA (1)...(19): siRNA sense strand
ugaugacuuuggcuucuuc

SEQ ID NO: 328618 - RNA, 19 nt, Homo sapiens
  misc_RNA (1)...(19): siRNA sense strand
ccugagagcauccgcaagu

SEQ ID NO: 328619 - RNA, 19 nt, Homo sapiens
  misc_RNA (1)...(19): siRNA sense strand
gaaccagcgccagagugaa

SEQ ID NO: 328620 - RNA, 19 nt, Homo sapiens
  misc_RNA (1)...(19): siRNA sense strand
ggcgggagaaggccaagaa

SEQ ID NO: 328621 - RNA, 19 nt, Homo sapiens
  misc_RNA (1)...(19): siRNA sense strand
gagaggagcagaggaaacg

SEQ ID NO: 328622 - RNA, 19 nt, Homo sapiens
  misc_RNA (1)...(19): siRNA sense strand
cgagauugcaggcauagag

SEQ ID NO: 328623 - RNA, 19 nt, Homo sapiens
  misc_RNA (1)...(19): siRNA sense strand
agcaagcagugcaaagaug

SEQ ID NO: 328624 - RNA, 19 nt, Homo sapiens
  misc_RNA (1)...(19): siRNA sense strand
cagcaagcagugcaaagau

SEQ ID NO: 328625 - RNA, 19 nt, Homo sapiens
  misc_RNA (1)...(19): siRNA sense strand
agucaauggagauguguuu

SEQ ID NO: 328626 - RNA, 19 nt, Homo sapiens
  misc_RNA (1)...(19): siRNA sense strand
gaccacagucaauggagau

SEQ ID NO: 328627 - RNA, 19 nt, Homo sapiens
  misc_RNA (1)...(19): siRNA sense strand
gaacauagcuuuagaagug

SEQ ID NO: 328628 - RNA, 19 nt, Homo sapiens
  misc_RNA (1)...(19): siRNA sense strand
ggaaagaaaucaaugagaa

SEQ ID NO: 328629 - RNA, 19 nt, Homo sapiens
  misc_RNA (1)...(19): siRNA sense strand
gcaaaugccuugaauucua

SEQ ID NO: 328630 - RNA, 19 nt, Homo sapiens
  misc_RNA (1)...(19): siRNA sense strand
ugaaagaucugguauuuga

SEQ ID NO: 328631 - RNA, 19 nt, Homo sapiens
  misc_RNA (1)...(19): siRNA sense strand
gcacugcuauuaauucuaa

SEQ ID NO: 328632 - RNA, 19 nt, Homo sapiens
  misc_RNA (1)...(19): siRNA sense strand
gaaagguacuccucucuga

SEQ ID NO: 328633 - RNA, 19 nt, Homo sapiens
  misc_RNA (1)...(19): siRNA sense strand
guacauauccgaacugaaa

SEQ ID NO: 328634 - RNA, 19 nt, Homo sapiens
  misc_RNA (1)...(19): siRNA sense strand
agaaauggcugaccuagaa

SEQ ID NO: 328635 - RNA, 19 nt, Homo sapiens
  misc_RNA (1)...(19): siRNA sense strand
uauaagaucuacccaguuu

SEQ ID NO: 328636 - RNA, 19 nt, Homo sapiens
  misc_RNA (1)...(19): siRNA sense strand
ccaaaucacugcaauacuu

SEQ ID NO: 328637 - RNA, 19 nt, Homo sapiens
  misc_RNA (1)...(19): siRNA sense strand
agagucaccuuuacuaaua

SEQ ID NO: 328638 - RNA, 19 nt, Homo sapiens
  misc_RNA (1)...(19): siRNA sense strand
ugaaauauguguugaggaa

SEQ ID NO: 328639 - RNA, 19 nt, Homo sapiens
  misc_RNA (1)...(19): siRNA sense strand
gcagagauccugaggcuuu

SEQ ID NO: 328640 - RNA, 19 nt, Homo sapiens
  misc_RNA (1)...(19): siRNA sense strand
gaaagaagccaucagaauc

SEQ ID NO: 328641 - RNA, 19 nt, Homo sapiens
  misc_RNA (1)...(19): siRNA sense strand
cagcaaaucugcgcaauug

SEQ ID NO: 328642 - RNA, 19 nt, Homo sapiens
  misc_RNA (1)...(19): siRNA sense strand
cgaaagugauauuccauuu

SEQ ID NO: 328643 - RNA, 19 nt, Homo sapiens
  misc_RNA (1)...(19): siRNA sense strand
caacacgacccaacagaua

SEQ ID NO: 328644 - RNA, 19 nt, Homo sapiens
  misc_RNA (1)...(19): siRNA sense strand
gaagaaauaguaagaguca

SEQ ID NO: 328645 - RNA, 19 nt, Homo sapiens
  misc_RNA (1)...(19): siRNA sense strand
gaauggaaguuuggaaaga

SEQ ID NO: 328646 - RNA, 19 nt, Homo sapiens
  misc_RNA (1)...(19): siRNA sense strand
ggaaagaagccaucagaau

SEQ ID NO: 328647 - RNA, 19 nt, Homo sapiens
  misc_RNA (1)...(19): siRNA sense strand
ggaacuuucuccucauuug

SEQ ID NO: 328648 - RNA, 19 nt, Homo sapiens
  misc_RNA (1)...(19): siRNA sense strand
gaucugguauuugacauuu

SEQ ID NO: 328649 - RNA, 19 nt, Homo sapiens
  misc_RNA (1)...(19): siRNA sense strand
ccauacagcucauuguuau

SEQ ID NO: 328650 - RNA, 19 nt, Homo sapiens
  misc_RNA (1)...(19): siRNA sense strand
guacagccauuucugguau

SEQ ID NO: 328651 - RNA, 19 nt, Homo sapiens
  misc_RNA (1)...(19): siRNA sense strand
cacaagaaguggauaaaga

SEQ ID NO: 328652 - RNA, 19 nt, Homo sapiens
  misc_RNA (1)...(19): siRNA sense strand
ucaacaaacuugggccuua

SEQ ID NO: 328653 - RNA, 19 nt, Homo sapiens
  misc_RNA (1)...(19): siRNA sense strand
gaagacaugcuacuuacaa

SEQ ID NO: 328654 - RNA, 19 nt, Homo sapiens
  misc_RNA (1)...(19): siRNA sense strand
ggugauaacuggagacaca

SEQ ID NO: 328655 - RNA, 19 nt, Homo sapiens
  misc_RNA (1)...(19): siRNA sense strand
ugacauacgugauuuccuu

SEQ ID NO: 328656 - RNA, 19 nt, Homo sapiens
  misc_RNA (1)...(19): siRNA sense strand
uauggaaccuucugaaaga

SEQ ID NO: 328657 - RNA, 19 nt, Homo sapiens
  misc_RNA (1)...(19): siRNA sense strand
gcacauccauuaaggugau

SEQ ID NO: 328658 - RNA, 19 nt, Homo sapiens
  misc_RNA (1)...(19): siRNA sense strand
gggauuggauaucacuuaa

SEQ ID NO: 328659 - RNA, 19 nt, Homo sapiens
  misc_RNA (1)...(19): siRNA sense strand
cccaacagauaaugaauaa

SEQ ID NO: 328660 - RNA, 19 nt, Homo sapiens
  misc_RNA (1)...(19): siRNA sense strand
guucuuaucuucucaucuu

SEQ ID NO: 328661 - RNA, 19 nt, Homo sapiens
  misc_RNA (1)...(19): siRNA sense strand
ucacaucacuguacagaca

SEQ ID NO: 328662 - RNA, 19 nt, Homo sapiens
  misc_RNA (1)...(19): siRNA sense strand
gguaaaagcacauccauua

SEQ ID NO: 328663 - RNA, 19 nt, Homo sapiens
  misc_RNA (1)...(19): siRNA sense strand
guaaugggcuacuuggaau

SEQ ID NO: 328664 - RNA, 19 nt, Homo sapiens
  misc_RNA (1)...(19): siRNA sense strand
guuaaaccaucaguacaua

SEQ ID NO: 328665 - RNA, 19 nt, Homo sapiens
  misc_RNA (1)...(19): siRNA sense strand
gaacagcaaaugccuugaa

SEQ ID NO: 328666 - RNA, 19 nt, Homo sapiens
  misc_RNA (1)...(19): siRNA sense strand
caaauuucauguuggcauu

SEQ ID NO: 328667 - RNA, 19 nt, Homo sapiens
  misc_RNA (1)...(19): siRNA sense strand
gacaugcuacuuacaauaa

SEQ ID NO: 328668 - RNA, 19 nt, Homo sapiens
  misc_RNA (1)...(19): siRNA sense strand
gaaaagagaguccuuaaug

SEQ ID NO: 328669 - RNA, 19 nt, Homo sapiens
  misc_RNA (1)...(19): siRNA sense strand
gaacaagcgccuccagaau

SEQ ID NO: 328670 - RNA, 19 nt, Homo sapiens
  misc_RNA (1)...(19): siRNA sense strand
ggacggguagauacauuua

SEQ ID NO: 328671 - RNA, 19 nt, Homo sapiens
  misc_RNA (1)...(19): siRNA sense strand
ugaagaaccuggcacaagu

SEQ ID NO: 328672 - RNA, 19 nt, Homo sapiens
  misc_RNA (1)...(19): siRNA sense strand
cuugaaagaucugguauuu

SEQ ID NO: 328673 - RNA, 19 nt, Homo sapiens
  misc_RNA (1)...(19): siRNA sense strand
gauguuuacugugaaguuu

SEQ ID NO: 328674 - RNA, 19 nt, Homo sapiens
  misc_RNA (1)...(19): siRNA sense strand
gauuggcuguuuguucuua

SEQ ID NO: 328675 - RNA, 19 nt, Homo sapiens
  misc_RNA (1)...(19): siRNA sense strand
uggaagaugugcaaccuuu

SEQ ID NO: 328676 - RNA, 19 nt, Homo sapiens
  misc_RNA (1)...(19): siRNA sense strand
gauuaucuuugguagcuuu

SEQ ID NO: 328677 - RNA, 19 nt, Homo sapiens
  misc_RNA (1)...(19): siRNA sense strand
caacaaacuugggccuuau

SEQ ID NO: 328678 - RNA, 19 nt, Homo sapiens
  misc_RNA (1)...(19): siRNA sense strand
gagcuacauuucaaacuuc

SEQ ID NO: 328679 - RNA, 19 nt, Homo sapiens
  misc_RNA (1)...(19): siRNA sense strand
cagcaucgaugauuauaag

SEQ ID NO: 328680 - RNA, 19 nt, Homo sapiens
  misc_RNA (1)...(19): siRNA sense strand
ugagcagcaucgaugauua

SEQ ID NO: 328681 - RNA, 19 nt, Homo sapiens
  misc_RNA (1)...(19): siRNA sense strand
ggcaagcauugaugacuuu

SEQ ID NO: 328682 - RNA, 19 nt, Homo sapiens
  misc_RNA (1)...(19): siRNA sense strand
uuaaugagcaucuugguaa

SEQ ID NO: 328683 - RNA, 19 nt, Homo sapiens
  misc_RNA (1)...(19): siRNA sense strand
gcuuugaccuagaggagua

SEQ ID NO: 328684 - RNA, 19 nt, Homo sapiens
  misc_RNA (1)...(19): siRNA sense strand
ugaaccaacugcuggauug

SEQ ID NO: 328685 - RNA, 19 nt, Homo sapiens
  misc_RNA (1)...(19): siRNA sense strand
agaaguggauaaagagauu

SEQ ID NO: 328686 - RNA, 19 nt, Homo sapiens
  misc_RNA (1)...(19): siRNA sense strand
caaagaaggagcacaagga

SEQ ID NO: 328687 - RNA, 19 nt, Homo sapiens
  misc_RNA (1)...(19): siRNA sense strand
ucacuuaagcuugcaguua

SEQ ID NO: 328688 - RNA, 19 nt, Homo sapiens
  misc_RNA (1)...(19): siRNA sense strand
gaaagucaacacugcuaaa

SEQ ID NO: 328689 - RNA, 19 nt, Homo sapiens
  misc_RNA (1)...(19): siRNA sense strand
gaagauguuuacugugaag

SEQ ID NO: 328690 - RNA, 19 nt, Homo sapiens
  misc_RNA (1)...(19): siRNA sense strand
ccagaugaggaaaguauua

SEQ ID NO: 328691 - RNA, 19 nt, Homo sapiens
  misc_RNA (1)...(19): siRNA sense strand
gaaaggggaugcugagguu

SEQ ID NO: 328692 - RNA, 19 nt, Homo sapiens
  misc_RNA (1)...(19): siRNA sense strand
uaaaggaaagccugauaaa

SEQ ID NO: 328693 - RNA, 19 nt, Homo sapiens
  misc_RNA (1)...(19): siRNA sense strand
gcucuaugcugguuucauc

SEQ ID NO: 328694 - RNA, 19 nt, Homo sapiens
  misc_RNA (1)...(19): siRNA sense strand
cagcaaaugccuugaauuc

SEQ ID NO: 328695 - RNA, 19 nt, Homo sapiens
  misc_RNA (1)...(19): siRNA sense strand
gggcaagcauugaugacuu

SEQ ID NO: 328696 - RNA, 19 nt, Homo sapiens
  misc_RNA (1)...(19): siRNA sense strand
caguggagcuggaaaguca

SEQ ID NO: 328697 - RNA, 19 nt, Homo sapiens
  misc_RNA (1)...(19): siRNA sense strand
uuaauggaauggcugaauu

SEQ ID NO: 328698 - RNA, 19 nt, Homo sapiens
  misc_RNA (1)...(19): siRNA sense strand
caagaggaagaauaagaua

SEQ ID NO: 328699 - RNA, 19 nt, Homo sapiens
  misc_RNA (1)...(19): siRNA sense strand
gaacugaaagaaguacauu

SEQ ID NO: 328700 - RNA, 19 nt, Homo sapiens
  misc_RNA (1)...(19): siRNA sense strand
gcucuucuuuguuucuaaa

SEQ ID NO: 328701 - RNA, 19 nt, Homo sapiens
  misc_RNA (1)...(19): siRNA sense strand
caacacugcuaaacauucu

SEQ ID NO: 328702 - RNA, 19 nt, Homo sapiens
  misc_RNA (1)...(19): siRNA sense strand
gacauggaaugccagcaaa

SEQ ID NO: 328703 - RNA, 19 nt, Homo sapiens
  misc_RNA (1)...(19): siRNA sense strand
ggaagaugugcaaccuuua

SEQ ID NO: 328704 - RNA, 19 nt, Homo sapiens
  misc_RNA (1)...(19): siRNA sense strand
ucugggagguugagaugua

SEQ ID NO: 328705 - RNA, 19 nt, Homo sapiens
  misc_RNA (1)...(19): siRNA sense strand
gcaccagaacauagcuuua

SEQ ID NO: 328706 - RNA, 19 nt, Homo sapiens
  misc_RNA (1)...(19): siRNA sense strand
caugacaacuuugaaugaa

SEQ ID NO: 328707 - RNA, 19 nt, Homo sapiens
  misc_RNA (1)...(19): siRNA sense strand
ggacauggaaugccagcaa

SEQ ID NO: 328708 - RNA, 19 nt, Homo sapiens
  misc_RNA (1)...(19): siRNA sense strand
ccucucugaugguuuauaa

SEQ ID NO: 328709 - RNA, 19 nt, Homo sapiens
  misc_RNA (1)...(19): siRNA sense strand
caaaugccuugaauucuac

SEQ ID NO: 328710 - RNA, 19 nt, Homo sapiens
  misc_RNA (1)...(19): siRNA sense strand
cuaauuccuuuccuucauu

SEQ ID NO: 328711 - RNA, 19 nt, Homo sapiens
  misc_RNA (1)...(19): siRNA sense strand
ugaaaggcuuguugagaug

SEQ ID NO: 328712 - RNA, 19 nt, Homo sapiens
  misc_RNA (1)...(19): siRNA sense strand
cggcucaaaucucauugua

SEQ ID NO: 328713 - RNA, 19 nt, Homo sapiens
  misc_RNA (1)...(19): siRNA sense strand
ggacuaugauuugaauucu

SEQ ID NO: 328714 - RNA, 19 nt, Homo sapiens
  misc_RNA (1)...(19): siRNA sense strand
caagcuuucuucaaauuag

SEQ ID NO: 328715 - RNA, 19 nt, Homo sapiens
  misc_RNA (1)...(19): siRNA sense strand
ugaaagggcugaggaaagg

SEQ ID NO: 328716 - RNA, 19 nt, Homo sapiens
  misc_RNA (1)...(19): siRNA sense strand
ggacaagugcuacugaaag

SEQ ID NO: 328717 - RNA, 19 nt, Homo sapiens
  misc_RNA (1)...(19): siRNA sense strand
ggauuugcguucaguaucu

SEQ ID NO: 328718 - RNA, 19 nt, Homo sapiens
  misc_RNA (1)...(19): siRNA sense strand
ggaaagucaacacugcuaa

SEQ ID NO: 328719 - RNA, 19 nt, Homo sapiens
  misc_RNA (1)...(19): siRNA sense strand
cauuggcgauuuacuuuga

SEQ ID NO: 328720 - RNA, 19 nt, Homo sapiens
  misc_RNA (1)...(19): siRNA sense strand
ggacggcucaaaucucauu

SEQ ID NO: 328721 - RNA, 19 nt, Homo sapiens
  misc_RNA (1)...(19): siRNA sense strand
aauccaaugugcaauuuga

SEQ ID NO: 328722 - RNA, 19 nt, Homo sapiens
  misc_RNA (1)...(19): siRNA sense strand
gaagaugugcaaccuuuag

SEQ ID NO: 328723 - RNA, 19 nt, Homo sapiens
  misc_RNA (1)...(19): siRNA sense strand
cagagggaauaaagagaaa

SEQ ID NO: 328724 - RNA, 19 nt, Homo sapiens
  misc_RNA (1)...(19): siRNA sense strand
gagaagccagucaucauug

SEQ ID NO: 328725 - RNA, 19 nt, Homo sapiens
  misc_RNA (1)...(19): siRNA sense strand
ugagcuacauuucaaacuu

SEQ ID NO: 328726 - RNA, 19 nt, Homo sapiens
  misc_RNA (1)...(19): siRNA sense strand
agaaguggaugcauuugga

SEQ ID NO: 328727 - RNA, 19 nt, Homo sapiens
  misc_RNA (1)...(19): siRNA sense strand
aaugugagcuucaaguaua

SEQ ID NO: 328728 - RNA, 19 nt, Homo sapiens
  misc_RNA (1)...(19): siRNA sense strand
acaccaaacuggaauuaaa

SEQ ID NO: 328729 - RNA, 19 nt, Homo sapiens
  misc_RNA (1)...(19): siRNA sense strand
gaaggaggcugccaaagcu

SEQ ID NO: 328730 - RNA, 19 nt, Homo sapiens
  misc_RNA (1)...(19): siRNA sense strand
gaagaaaugaggaagauca

SEQ ID NO: 328731 - RNA, 19 nt, Homo sapiens
  misc_RNA (1)...(19): siRNA sense strand
ggccuugcaucuacaauaa

SEQ ID NO: 328732 - RNA, 19 nt, Homo sapiens
  misc_RNA (1)...(19): siRNA sense strand
gaacuacauugcgagguuu

SEQ ID NO: 328733 - RNA, 19 nt, Homo sapiens
  misc_RNA (1)...(19): siRNA sense strand
ccaaggagcuagaggacuu

SEQ ID NO: 328734 - RNA, 19 nt, Homo sapiens
  misc_RNA (1)...(19): siRNA sense strand
guuauggccucauugguuu

SEQ ID NO: 328735 - RNA, 19 nt, Homo sapiens
  misc_RNA (1)...(19): siRNA sense strand
ggagaagacgcuacagaaa

SEQ ID NO: 328736 - RNA, 19 nt, Homo sapiens
  misc_RNA (1)...(19): siRNA sense strand
gcaagaagcuaaaagacuu

SEQ ID NO: 328737 - RNA, 19 nt, Homo sapiens
  misc_RNA (1)...(19): siRNA sense strand
gcagagagaccacagaagu

SEQ ID NO: 328738 - RNA, 19 nt, Homo sapiens
  misc_RNA (1)...(19): siRNA sense strand
ggcuagagcuggaggagaa

SEQ ID NO: 328739 - RNA, 19 nt, Homo sapiens
  misc_RNA (1)...(19): siRNA sense strand
gcugcuaacuggagagcua

SEQ ID NO: 328740 - RNA, 19 nt, Homo sapiens
  misc_RNA (1)...(19): siRNA sense strand
gaaaaggacaugaagaaaa

SEQ ID NO: 328741 - RNA, 19 nt, Homo sapiens
  misc_RNA (1)...(19): siRNA sense strand
ggaagaucauugggcgaua

SEQ ID NO: 328742 - RNA, 19 nt, Homo sapiens
  misc_RNA (1)...(19): siRNA sense strand
gaggagaaccagaugaaga

SEQ ID NO: 328743 - RNA, 19 nt, Homo sapiens
  misc_RNA (1)...(19): siRNA sense strand
caaguggccuggagacauc

SEQ ID NO: 328744 - RNA, 19 nt, Homo sapiens
  misc_RNA (1)...(19): siRNA sense strand
ccaaucaccuggauaucga

SEQ ID NO: 328745 - RNA, 19 nt, Homo sapiens
  misc_RNA (1)...(19): siRNA sense strand
gaucagauugcacacauga

SEQ ID NO: 328746 - RNA, 19 nt, Homo sapiens
  misc_RNA (1)...(19): siRNA sense strand
cuagaggacuuugagauga

SEQ ID NO: 328747 - RNA, 19 nt, Homo sapiens
  misc_RNA (1)...(19): siRNA sense strand
gaaauuugggucugugaga

SEQ ID NO: 328748 - RNA, 19 nt, Homo sapiens
  misc_RNA (1)...(19): siRNA sense strand
aagagcagcuggacuuaga

SEQ ID NO: 328749 - RNA, 19 nt, Homo sapiens
  misc_RNA (1)...(19): siRNA sense strand
gggccaugcuggagaaaga

SEQ ID NO: 328750 - RNA, 19 nt, Homo sapiens
  misc_RNA (1)...(19): siRNA sense strand
cuggagacauccuggcuua

SEQ ID NO: 328751 - RNA, 19 nt, Homo sapiens
  misc_RNA (1)...(19): siRNA sense strand
guaccaauaucauucacau

SEQ ID NO: 328752 - RNA, 19 nt, Homo sapiens
  misc_RNA (1)...(19): siRNA sense strand
uagauuugcugaccaagga

SEQ ID NO: 328753 - RNA, 19 nt, Homo sapiens
  misc_RNA (1)...(19): siRNA sense strand
aaauggagauguugucaca

SEQ ID NO: 328754 - RNA, 19 nt, Homo sapiens
  misc_RNA (1)...(19): siRNA sense strand
gagacauccuggcuuacaa

SEQ ID NO: 328755 - RNA, 19 nt, Homo sapiens
  misc_RNA (1)...(19): siRNA sense strand
gagagggucgugagcgaua

SEQ ID NO: 328756 - RNA, 19 nt, Homo sapiens
  misc_RNA (1)...(19): siRNA sense strand
gaccacagaaguagauuug

SEQ ID NO: 328757 - RNA, 19 nt, Homo sapiens
  misc_RNA (1)...(19): siRNA sense strand
acuuagaucucucaccuuu

SEQ ID NO: 328758 - RNA, 19 nt, Homo sapiens
  misc_RNA (1)...(19): siRNA sense strand
caaccucucacuuaccuuu

SEQ ID NO: 328759 - RNA, 19 nt, Homo sapiens
  misc_RNA (1)...(19): siRNA sense strand
gcguuaccaucagcauuua

SEQ ID NO: 328760 - RNA, 19 nt, Homo sapiens
  misc_RNA (1)...(19): siRNA sense strand
cgaaaacacucucauguca

SEQ ID NO: 328761 - RNA, 19 nt, Homo sapiens
  misc_RNA (1)...(19): siRNA sense strand
cagauggcaugauccgaaa

SEQ ID NO: 328762 - RNA, 19 nt, Homo sapiens
  misc_RNA (1)...(19): siRNA sense strand
ccuccgaccuggccaagaa

SEQ ID NO: 328763 - RNA, 19 nt, Homo sapiens
  misc_RNA (1)...(19): siRNA sense strand
uagaggacuuugagaugaa

SEQ ID NO: 328764 - RNA, 19 nt, Homo sapiens
  misc_RNA (1)...(19): siRNA sense strand
gaagaucauugggcgauac

SEQ ID NO: 328765 - RNA, 19 nt, Homo sapiens
  misc_RNA (1)...(19): siRNA sense strand
agaacuacauugcgagguu

SEQ ID NO: 328766 - RNA, 19 nt, Homo sapiens
  misc_RNA (1)...(19): siRNA sense strand
cagagagaccacagaagua

SEQ ID NO: 328767 - RNA, 19 nt, Homo sapiens
  misc_RNA (1)...(19): siRNA sense strand
ccaaccaccuggaccuaga

SEQ ID NO: 328768 - RNA, 19 nt, Homo sapiens
  misc_RNA (1)...(19): siRNA sense strand
uaaauggaauuggaaaguc

SEQ ID NO: 328769 - RNA, 19 nt, Homo sapiens
  misc_RNA (1)...(19): siRNA sense strand
uugcacacaugaagaacua

SEQ ID NO: 328770 - RNA, 19 nt, Homo sapiens
  misc_RNA (1)...(19): siRNA sense strand
uggaguacaugaugaagug

SEQ ID NO: 328771 - RNA, 19 nt, Homo sapiens
  misc_RNA (1)...(19): siRNA sense strand
acacucucaugucaagaua

SEQ ID NO: 328772 - RNA, 19 nt, Homo sapiens
  misc_RNA (1)...(19): siRNA sense strand
gcaaggagaagacgcuaca

SEQ ID NO: 328773 - RNA, 19 nt, Homo sapiens
  misc_RNA (1)...(19): siRNA sense strand
gcuagaggacuuugagaug

SEQ ID NO: 328774 - RNA, 19 nt, Homo sapiens
  misc_RNA (1)...(19): siRNA sense strand
gcagaagugccgagugugu

SEQ ID NO: 328775 - RNA, 19 nt, Homo sapiens
  misc_RNA (1)...(19): siRNA sense strand
acccagagaucaaggagaa

SEQ ID NO: 328776 - RNA, 19 nt, Homo sapiens
  misc_RNA (1)...(19): siRNA sense strand
ggagcuggaugccgacaag

SEQ ID NO: 328777 - RNA, 19 nt, Homo sapiens
  misc_RNA (1)...(19): siRNA sense strand
caaacuggaauuaaacuca

SEQ ID NO: 328778 - RNA, 19 nt, Homo sapiens
  misc_RNA (1)...(19): siRNA sense strand
gcacaucgacaucuaccau

SEQ ID NO: 328779 - RNA, 19 nt, Homo sapiens
  misc_RNA (1)...(19): siRNA sense strand
ccaccaaucaccuggauau

SEQ ID NO: 328780 - RNA, 19 nt, Homo sapiens
  misc_RNA (1)...(19): siRNA sense strand
ucaaggagaaggaagaaau

SEQ ID NO: 328781 - RNA, 19 nt, Homo sapiens
  misc_RNA (1)...(19): siRNA sense strand
gaagugcuacccagagauc

SEQ ID NO: 328782 - RNA, 19 nt, Homo sapiens
  misc_RNA (1)...(19): siRNA sense strand
uuagaucucucaccuuugg

SEQ ID NO: 328783 - RNA, 19 nt, Homo sapiens
  misc_RNA (1)...(19): siRNA sense strand
caacaagaaacugaaguau

SEQ ID NO: 328784 - RNA, 19 nt, Homo sapiens
  misc_RNA (1)...(19): siRNA sense strand
ugauggaagucgacacaga

SEQ ID NO: 328785 - RNA, 19 nt, Homo sapiens
  misc_RNA (1)...(19): siRNA sense strand
ugacaccaaacuggaauua

SEQ ID NO: 328786 - RNA, 19 nt, Homo sapiens
  misc_RNA (1)...(19): siRNA sense strand
gcagguugcacaggaaauu

SEQ ID NO: 328787 - RNA, 19 nt, Homo sapiens
  misc_RNA (1)...(19): siRNA sense strand
ggcguuaccaucagcauuu

SEQ ID NO: 328788 - RNA, 19 nt, Homo sapiens
  misc_RNA (1)...(19): siRNA sense strand
ccacagaaguagauuugcu

SEQ ID NO: 328789 - RNA, 19 nt, Homo sapiens
  misc_RNA (1)...(19): siRNA sense strand
ucacaugcacaacaagaaa

SEQ ID NO: 328790 - RNA, 19 nt, Homo sapiens
  misc_RNA (1)...(19): siRNA sense strand
acaacaagaaacugaagua

SEQ ID NO: 328791 - RNA, 19 nt, Homo sapiens
  misc_RNA (1)...(19): siRNA sense strand
gggccuugcaucuacaaua

SEQ ID NO: 328792 - RNA, 19 nt, Homo sapiens
  misc_RNA (1)...(19): siRNA sense strand
gagaagacgcuacagaaaa

SEQ ID NO: 328793 - RNA, 19 nt, Homo sapiens
  misc_RNA (1)...(19): siRNA sense strand
gagcuacuacccacagaug

SEQ ID NO: 328794 - RNA, 19 nt, Homo sapiens
  misc_RNA (1)...(19): siRNA sense strand
caagauagggcguuaccau

SEQ ID NO: 328795 - RNA, 19 nt, Homo sapiens
  misc_RNA (1)...(19): siRNA sense strand
caagaagaaggcagccaaa

SEQ ID NO: 328796 - RNA, 19 nt, Homo sapiens
  misc_RNA (1)...(19): siRNA sense strand
uggaugaacccaccaauca

SEQ ID NO: 328797 - RNA, 19 nt, Homo sapiens
  misc_RNA (1)...(19): siRNA sense strand
caaggagaaggaagaaaug

SEQ ID NO: 328798 - RNA, 19 nt, Homo sapiens
  misc_RNA (1)...(19): siRNA sense strand
gagagcuacuacccacaga

SEQ ID NO: 328799 - RNA, 19 nt, Homo sapiens
  misc_RNA (1)...(19): siRNA sense strand
aaacucaggccgucguuau

SEQ ID NO: 328800 - RNA, 19 nt, Homo sapiens
  misc_RNA (1)...(19): siRNA sense strand
ggagacauccuggcuuaca

SEQ ID NO: 328801 - RNA, 19 nt, Homo sapiens
  misc_RNA (1)...(19): siRNA sense strand
gaucaaggagaaggaagaa

SEQ ID NO: 328802 - RNA, 19 nt, Homo sapiens
  misc_RNA (1)...(19): siRNA sense strand
ucauucacaugcacaacaa

SEQ ID NO: 328803 - RNA, 19 nt, Homo sapiens
  misc_RNA (1)...(19): siRNA sense strand
ugaagaaaauggagauguu

SEQ ID NO: 328804 - RNA, 19 nt, Homo sapiens
  misc_RNA (1)...(19): siRNA sense strand
gcggcuggcucaugaggau

SEQ ID NO: 328805 - RNA, 19 nt, Homo sapiens
  misc_RNA (1)...(19): siRNA sense strand
ccaauaucauucacaugca

SEQ ID NO: 328806 - RNA, 19 nt, Homo sapiens
  misc_RNA (1)...(19): siRNA sense strand
acaaggagcaccucaaguc

SEQ ID NO: 328807 - RNA, 19 nt, Homo sapiens
  misc_RNA (1)...(19): siRNA sense strand
aaauuugggucugugagaa

SEQ ID NO: 328808 - RNA, 19 nt, Homo sapiens
  misc_RNA (1)...(19): siRNA sense strand
gagcagggaagucaacucu

SEQ ID NO: 328809 - RNA, 19 nt, Homo sapiens
  misc_RNA (1)...(19): siRNA sense strand
gcacaacaagaaacugaag

SEQ ID NO: 328810 - RNA, 19 nt, Homo sapiens
  misc_RNA (1)...(19): siRNA sense strand
aaagaaggaggcugccaaa

SEQ ID NO: 328811 - RNA, 19 nt, Homo sapiens
  misc_RNA (1)...(19): siRNA sense strand
gauagggcguuaccaucag

SEQ ID NO: 328812 - RNA, 19 nt, Homo sapiens
  misc_RNA (1)...(19): siRNA sense strand
guaauuaugaucaguacgu

SEQ ID NO: 328813 - RNA, 19 nt, Homo sapiens
  misc_RNA (1)...(19): siRNA sense strand
gcugcucagugacaccaaa

SEQ ID NO: 328814 - RNA, 19 nt, Homo sapiens
  misc_RNA (1)...(19): siRNA sense strand
agccaugacuucagacuca

SEQ ID NO: 328815 - RNA, 19 nt, Homo sapiens
  misc_RNA (1)...(19): siRNA sense strand
guuugagggugguaugaug

SEQ ID NO: 328816 - RNA, 19 nt, Homo sapiens
  misc_RNA (1)...(19): siRNA sense strand
gcgugugguuggaagaaga

SEQ ID NO: 328817 - RNA, 19 nt, Homo sapiens
  misc_RNA (1)...(19): siRNA sense strand
gcccaucccugagcacauc

SEQ ID NO: 328818 - RNA, 19 nt, Homo sapiens
  misc_RNA (1)...(19): siRNA sense strand
uacaagagcagcuggacuu

SEQ ID NO: 328819 - RNA, 19 nt, Homo sapiens
  misc_RNA (1)...(19): siRNA sense strand
aagaucagauugcacacau

SEQ ID NO: 328820 - RNA, 19 nt, Homo sapiens
  misc_RNA (1)...(19): siRNA sense strand
aggaagaaaugaggaagau

SEQ ID NO: 328821 - RNA, 19 nt, Homo sapiens
  misc_RNA (1)...(19): siRNA sense strand
cagcuggacuuagaucucu

SEQ ID NO: 328822 - RNA, 19 nt, Homo sapiens
  misc_RNA (1)...(19): siRNA sense strand
caucaucaaccucucacuu

SEQ ID NO: 328823 - RNA, 19 nt, Homo sapiens
  misc_RNA (1)...(19): siRNA sense strand
agaagacgcuacagaaaau

SEQ ID NO: 328824 - RNA, 19 nt, Homo sapiens
  misc_RNA (1)...(19): siRNA sense strand
cugagcacaucgacaucua

SEQ ID NO: 328825 - RNA, 19 nt, Homo sapiens
  misc_RNA (1)...(19): siRNA sense strand
caauggagcagggaaguca

SEQ ID NO: 328826 - RNA, 19 nt, Homo sapiens
  misc_RNA (1)...(19): siRNA sense strand
ggacuuugagaugaagaaa

SEQ ID NO: 328827 - RNA, 19 nt, Homo sapiens
  misc_RNA (1)...(19): siRNA sense strand
aaugugagcuucaaguaua

SEQ ID NO: 328828 - RNA, 19 nt, Homo sapiens
  misc_RNA (1)...(19): siRNA sense strand
acaccaaacuggaauuaaa

SEQ ID NO: 328829 - RNA, 19 nt, Homo sapiens
  misc_RNA (1)...(19): siRNA sense strand
gaaggaggcugccaaagcu

SEQ ID NO: 328830 - RNA, 19 nt, Homo sapiens
  misc_RNA (1)...(19): siRNA sense strand
gaagaaaugaggaagauca

SEQ ID NO: 328831 - RNA, 19 nt, Homo sapiens
  misc_RNA (1)...(19): siRNA sense strand
ggccuugcaucuacaauaa

SEQ ID NO: 328832 - RNA, 19 nt, Homo sapiens
  misc_RNA (1)...(19): siRNA sense strand
gaacuacauugcgagguuu

SEQ ID NO: 328833 - RNA, 19 nt, Homo sapiens
  misc_RNA (1)...(19): siRNA sense strand
ccaaggagcuagaggacuu

SEQ ID NO: 328834 - RNA, 19 nt, Homo sapiens
  misc_RNA (1)...(19): siRNA sense strand
guuauggccucauugguuu

SEQ ID NO: 328835 - RNA, 19 nt, Homo sapiens
  misc_RNA (1)...(19): siRNA sense strand
ggagaagacgcuacagaaa

SEQ ID NO: 328836 - RNA, 19 nt, Homo sapiens
  misc_RNA (1)...(19): siRNA sense strand
gcaagaagcuaaaagacuu

SEQ ID NO: 328837 - RNA, 19 nt, Homo sapiens
  misc_RNA (1)...(19): siRNA sense strand
gcagagagaccacagaagu

SEQ ID NO: 328838 - RNA, 19 nt, Homo sapiens
  misc_RNA (1)...(19): siRNA sense strand
ggcuagagcuggaggagaa

SEQ ID NO: 328839 - RNA, 19 nt, Homo sapiens
  misc_RNA (1)...(19): siRNA sense strand
gcugcuaacuggagagcua

SEQ ID NO: 328840 - RNA, 19 nt, Homo sapiens
  misc_RNA (1)...(19): siRNA sense strand
gaaaaggacaugaagaaaa

SEQ ID NO: 328841 - RNA, 19 nt, Homo sapiens
  misc_RNA (1)...(19): siRNA sense strand
ggaagaucauugggcgaua

SEQ ID NO: 328842 - RNA, 19 nt, Homo sapiens
  misc_RNA (1)...(19): siRNA sense strand
gaggagaaccagaugaaga

SEQ ID NO: 328843 - RNA, 19 nt, Homo sapiens
  misc_RNA (1)...(19): siRNA sense strand
caaguggccuggagacauc

SEQ ID NO: 328844 - RNA, 19 nt, Homo sapiens
  misc_RNA (1)...(19): siRNA sense strand
ccaaucaccuggauaucga

SEQ ID NO: 328845 - RNA, 19 nt, Homo sapiens
  misc_RNA (1)...(19): siRNA sense strand
gaucagauugcacacauga

SEQ ID NO: 328846 - RNA, 19 nt, Homo sapiens
  misc_RNA (1)...(19): siRNA sense strand
cuagaggacuuugagauga

SEQ ID NO: 328847 - RNA, 19 nt, Homo sapiens
  misc_RNA (1)...(19): siRNA sense strand
gaaauuugggucugugaga

SEQ ID NO: 328848 - RNA, 19 nt, Homo sapiens
  misc_RNA (1)...(19): siRNA sense strand
aagagcagcuggacuuaga

SEQ ID NO: 328849 - RNA, 19 nt, Homo sapiens
  misc_RNA (1)...(19): siRNA sense strand
gggccaugcuggagaaaga

SEQ ID NO: 328850 - RNA, 19 nt, Homo sapiens
  misc_RNA (1)...(19): siRNA sense strand
cuggagacauccuggcuua

SEQ ID NO: 328851 - RNA, 19 nt, Homo sapiens
  misc_RNA (1)...(19): siRNA sense strand
guaccaauaucauucacau

SEQ ID NO: 328852 - RNA, 19 nt, Homo sapiens
  misc_RNA (1)...(19): siRNA sense strand
uagauuugcugaccaagga

SEQ ID NO: 328853 - RNA, 19 nt, Homo sapiens
  misc_RNA (1)...(19): siRNA sense strand
aaauggagauguugucaca

SEQ ID NO: 328854 - RNA, 19 nt, Homo sapiens
  misc_RNA (1)...(19): siRNA sense strand
gagacauccuggcuuacaa

SEQ ID NO: 328855 - RNA, 19 nt, Homo sapiens
  misc_RNA (1)...(19): siRNA sense strand
gagagggucgugagcgaua

SEQ ID NO: 328856 - RNA, 19 nt, Homo sapiens
  misc_RNA (1)...(19): siRNA sense strand
gaccacagaaguagauuug

SEQ ID NO: 328857 - RNA, 19 nt, Homo sapiens
  misc_RNA (1)...(19): siRNA sense strand
acuuagaucucucaccuuu

SEQ ID NO: 328858 - RNA, 19 nt, Homo sapiens
  misc_RNA (1)...(19): siRNA sense strand
caaccucucacuuaccuuu

SEQ ID NO: 328859 - RNA, 19 nt, Homo sapiens
  misc_RNA (1)...(19): siRNA sense strand
gcguuaccaucagcauuua

SEQ ID NO: 328860 - RNA, 19 nt, Homo sapiens
  misc_RNA (1)...(19): siRNA sense strand
cgaaaacacucucauguca

SEQ ID NO: 328861 - RNA, 19 nt, Homo sapiens
  misc_RNA (1)...(19): siRNA sense strand
cagauggcaugauccgaaa

SEQ ID NO: 328862 - RNA, 19 nt, Homo sapiens
  misc_RNA (1)...(19): siRNA sense strand
ccuccgaccuggccaagaa

SEQ ID NO: 328863 - RNA, 19 nt, Homo sapiens
  misc_RNA (1)...(19): siRNA sense strand
uagaggacuuugagaugaa

SEQ ID NO: 328864 - RNA, 19 nt, Homo sapiens
  misc_RNA (1)...(19): siRNA sense strand
gaagaucauugggcgauac

SEQ ID NO: 328865 - RNA, 19 nt, Homo sapiens
  misc_RNA (1)...(19): siRNA sense strand
agaacuacauugcgagguu

SEQ ID NO: 328866 - RNA, 19 nt, Homo sapiens
  misc_RNA (1)...(19): siRNA sense strand
cagagagaccacagaagua

SEQ ID NO: 328867 - RNA, 19 nt, Homo sapiens
  misc_RNA (1)...(19): siRNA sense strand
ccaaccaccuggaccuaga

SEQ ID NO: 328868 - RNA, 19 nt, Homo sapiens
  misc_RNA (1)...(19): siRNA sense strand
uaaauggaauuggaaaguc

SEQ ID NO: 328869 - RNA, 19 nt, Homo sapiens
  misc_RNA (1)...(19): siRNA sense strand
uugcacacaugaagaacua

SEQ ID NO: 328870 - RNA, 19 nt, Homo sapiens
  misc_RNA (1)...(19): siRNA sense strand
uggaguacaugaugaagug

SEQ ID NO: 328871 - RNA, 19 nt, Homo sapiens
  misc_RNA (1)...(19): siRNA sense strand
acacucucaugucaagaua

SEQ ID NO: 328872 - RNA, 19 nt, Homo sapiens
  misc_RNA (1)...(19): siRNA sense strand
gcaaggagaagacgcuaca

SEQ ID NO: 328873 - RNA, 19 nt, Homo sapiens
  misc_RNA (1)...(19): siRNA sense strand
gcuagaggacuuugagaug

SEQ ID NO: 328874 - RNA, 19 nt, Homo sapiens
  misc_RNA (1)...(19): siRNA sense strand
gcagaagugccgagugugu

SEQ ID NO: 328875 - RNA, 19 nt, Homo sapiens
  misc_RNA (1)...(19): siRNA sense strand
acccagagaucaaggagaa

SEQ ID NO: 328876 - RNA, 19 nt, Homo sapiens
  misc_RNA (1)...(19): siRNA sense strand
ggagcuggaugccgacaag

SEQ ID NO: 328877 - RNA, 19 nt, Homo sapiens
  misc_RNA (1)...(19): siRNA sense strand
caaacuggaauuaaacuca

SEQ ID NO: 328878 - RNA, 19 nt, Homo sapiens
  misc_RNA (1)...(19): siRNA sense strand
gcacaucgacaucuaccau

SEQ ID NO: 328879 - RNA, 19 nt, Homo sapiens
  misc_RNA (1)...(19): siRNA sense strand
ccaccaaucaccuggauau

SEQ ID NO: 328880 - RNA, 19 nt, Homo sapiens
  misc_RNA (1)...(19): siRNA sense strand
ucaaggagaaggaagaaau

SEQ ID NO: 328881 - RNA, 19 nt, Homo sapiens
  misc_RNA (1)...(19): siRNA sense strand
gaagugcuacccagagauc

SEQ ID NO: 328882 - RNA, 19 nt, Homo sapiens
  misc_RNA (1)...(19): siRNA sense strand
uuagaucucucaccuuugg

SEQ ID NO: 328883 - RNA, 19 nt, Homo sapiens
  misc_RNA (1)...(19): siRNA sense strand
caacaagaaacugaaguau

SEQ ID NO: 328884 - RNA, 19 nt, Homo sapiens
  misc_RNA (1)...(19): siRNA sense strand
ugauggaagucgacacaga

SEQ ID NO: 328885 - RNA, 19 nt, Homo sapiens
  misc_RNA (1)...(19): siRNA sense strand
ugacaccaaacuggaauua

SEQ ID NO: 328886 - RNA, 19 nt, Homo sapiens
  misc_RNA (1)...(19): siRNA sense strand
gcagguugcacaggaaauu

SEQ ID NO: 328887 - RNA, 19 nt, Homo sapiens
  misc_RNA (1)...(19): siRNA sense strand
ggcguuaccaucagcauuu

SEQ ID NO: 328888 - RNA, 19 nt, Homo sapiens
  misc_RNA (1)...(19): siRNA sense strand
ccacagaaguagauuugcu

SEQ ID NO: 328889 - RNA, 19 nt, Homo sapiens
  misc_RNA (1)...(19): siRNA sense strand
ucacaugcacaacaagaaa

SEQ ID NO: 328890 - RNA, 19 nt, Homo sapiens
  misc_RNA (1)...(19): siRNA sense strand
acaacaagaaacugaagua

SEQ ID NO: 328891 - RNA, 19 nt, Homo sapiens
  misc_RNA (1)...(19): siRNA sense strand
gggccuugcaucuacaaua

SEQ ID NO: 328892 - RNA, 19 nt, Homo sapiens
  misc_RNA (1)...(19): siRNA sense strand
gagaagacgcuacagaaaa

SEQ ID NO: 328893 - RNA, 19 nt, Homo sapiens
  misc_RNA (1)...(19): siRNA sense strand
gagcuacuacccacagaug

SEQ ID NO: 328894 - RNA, 19 nt, Homo sapiens
  misc_RNA (1)...(19): siRNA sense strand
caagauagggcguuaccau

SEQ ID NO: 328895 - RNA, 19 nt, Homo sapiens
  misc_RNA (1)...(19): siRNA sense strand
caagaagaaggcagccaaa

SEQ ID NO: 328896 - RNA, 19 nt, Homo sapiens
  misc_RNA (1)...(19): siRNA sense strand
uggaugaacccaccaauca

SEQ ID NO: 328897 - RNA, 19 nt, Homo sapiens
  misc_RNA (1)...(19): siRNA sense strand
caaggagaaggaagaaaug

SEQ ID NO: 328898 - RNA, 19 nt, Homo sapiens
  misc_RNA (1)...(19): siRNA sense strand
gagagcuacuacccacaga

SEQ ID NO: 328899 - RNA, 19 nt, Homo sapiens
  misc_RNA (1)...(19): siRNA sense strand
aaacucaggccgucguuau

SEQ ID NO: 328900 - RNA, 19 nt, Homo sapiens
  misc_RNA (1)...(19): siRNA sense strand
ggagacauccuggcuuaca

SEQ ID NO: 328901 - RNA, 19 nt, Homo sapiens
  misc_RNA (1)...(19): siRNA sense strand
gaucaaggagaaggaagaa

SEQ ID NO: 328902 - RNA, 19 nt, Homo sapiens
  misc_RNA (1)...(19): siRNA sense strand
ucauucacaugcacaacaa

SEQ ID NO: 328903 - RNA, 19 nt, Homo sapiens
  misc_RNA (1)...(19): siRNA sense strand
ugaagaaaauggagauguu

SEQ ID NO: 328904 - RNA, 19 nt, Homo sapiens
  misc_RNA (1)...(19): siRNA sense strand
gcggcuggcucaugaggau

SEQ ID NO: 328905 - RNA, 19 nt, Homo sapiens
  misc_RNA (1)...(19): siRNA sense strand
ccaauaucauucacaugca

SEQ ID NO: 328906 - RNA, 19 nt, Homo sapiens
  misc_RNA (1)...(19): siRNA sense strand
acaaggagcaccucaaguc

SEQ ID NO: 328907 - RNA, 19 nt, Homo sapiens
  misc_RNA (1)...(19): siRNA sense strand
aaauuugggucugugagaa

SEQ ID NO: 328908 - RNA, 19 nt, Homo sapiens
  misc_RNA (1)...(19): siRNA sense strand
gagcagggaagucaacucu

SEQ ID NO: 328909 - RNA, 19 nt, Homo sapiens
  misc_RNA (1)...(19): siRNA sense strand
gcacaacaagaaacugaag

SEQ ID NO: 328910 - RNA, 19 nt, Homo sapiens
  misc_RNA (1)...(19): siRNA sense strand
aaagaaggaggcugccaaa

SEQ ID NO: 328911 - RNA, 19 nt, Homo sapiens
  misc_RNA (1)...(19): siRNA sense strand
gauagggcguuaccaucag

SEQ ID NO: 328912 - RNA, 19 nt, Homo sapiens
  misc_RNA (1)...(19): siRNA sense strand
guaauuaugaucaguacgu

SEQ ID NO: 328913 - RNA, 19 nt, Homo sapiens
  misc_RNA (1)...(19): siRNA sense strand
gcugcucagugacaccaaa

SEQ ID NO: 328914 - RNA, 19 nt, Homo sapiens
  misc_RNA (1)...(19): siRNA sense strand
agccaugacuucagacuca

SEQ ID NO: 328915 - RNA, 19 nt, Homo sapiens
  misc_RNA (1)...(19): siRNA sense strand
guuugagggugguaugaug

SEQ ID NO: 328916 - RNA, 19 nt, Homo sapiens
  misc_RNA (1)...(19): siRNA sense strand
gcgugugguuggaagaaga

SEQ ID NO: 328917 - RNA, 19 nt, Homo sapiens
  misc_RNA (1)...(19): siRNA sense strand
gcccaucccugagcacauc

SEQ ID NO: 328918 - RNA, 19 nt, Homo sapiens
  misc_RNA (1)...(19): siRNA sense strand
uacaagagcagcuggacuu

SEQ ID NO: 328919 - RNA, 19 nt, Homo sapiens
  misc_RNA (1)...(19): siRNA sense strand
aagaucagauugcacacau

SEQ ID NO: 328920 - RNA, 19 nt, Homo sapiens
  misc_RNA (1)...(19): siRNA sense strand
aggaagaaaugaggaagau

SEQ ID NO: 328921 - RNA, 19 nt, Homo sapiens
  misc_RNA (1)...(19): siRNA sense strand
cagcuggacuuagaucucu

SEQ ID NO: 328922 - RNA, 19 nt, Homo sapiens
  misc_RNA (1)...(19): siRNA sense strand
caucaucaaccucucacuu

SEQ ID NO: 328923 - RNA, 19 nt, Homo sapiens
  misc_RNA (1)...(19): siRNA sense strand
agaagacgcuacagaaaau

SEQ ID NO: 328924 - RNA, 19 nt, Homo sapiens
  misc_RNA (1)...(19): siRNA sense strand
cugagcacaucgacaucua

SEQ ID NO: 328925 - RNA, 19 nt, Homo sapiens
  misc_RNA (1)...(19): siRNA sense strand
caauggagcagggaaguca

SEQ ID NO: 328926 - RNA, 19 nt, Homo sapiens
  misc_RNA (1)...(19): siRNA sense strand
ggacuuugagaugaagaaa

SEQ ID NO: 328927 - RNA, 19 nt, Homo sapiens
  misc_RNA (1)...(19): siRNA sense strand
gcacaccauuugcuuccaa

SEQ ID NO: 328928 - RNA, 19 nt, Homo sapiens
  misc_RNA (1)...(19): siRNA sense strand
gcacaugcgccuccucuuc

SEQ ID NO: 328929 - RNA, 19 nt, Homo sapiens
  misc_RNA (1)...(19): siRNA sense strand
gggcagggcugaugaaccu

SEQ ID NO: 328930 - RNA, 19 nt, Homo sapiens
  misc_RNA (1)...(19): siRNA sense strand
ccgcuucacucacuacuuc

SEQ ID NO: 328931 - RNA, 19 nt, Homo sapiens
  misc_RNA (1)...(19): siRNA sense strand
ccagugaccuuggagagau

SEQ ID NO: 328932 - RNA, 19 nt, Homo sapiens
  misc_RNA (1)...(19): siRNA sense strand
gagaaccuccuggugauau

SEQ ID NO: 328933 - RNA, 19 nt, Homo sapiens
  misc_RNA (1)...(19): siRNA sense strand
gcccuucccucucaucaca

SEQ ID NO: 328934 - RNA, 19 nt, Homo sapiens
  misc_RNA (1)...(19): siRNA sense strand
gagcccaugugccucuuca

SEQ ID NO: 328935 - RNA, 19 nt, Homo sapiens
  misc_RNA (1)...(19): siRNA sense strand
uggcugcccuaucauguga

SEQ ID NO: 328936 - RNA, 19 nt, Homo sapiens
  misc_RNA (1)...(19): siRNA sense strand
ccgcagugccuaccaguga

SEQ ID NO: 328937 - RNA, 19 nt, Homo sapiens
  misc_RNA (1)...(19): siRNA sense strand
gcuccugaaugcuguaguc

SEQ ID NO: 328938 - RNA, 19 nt, Homo sapiens
  misc_RNA (1)...(19): siRNA sense strand
ugugcuggcugcccuauca

SEQ ID NO: 328939 - RNA, 19 nt, Homo sapiens
  misc_RNA (1)...(19): siRNA sense strand
ucaaccacacuuugucuga

SEQ ID NO: 328940 - RNA, 19 nt, Homo sapiens
  misc_RNA (1)...(19): siRNA sense strand
ucaucacagucuucaaugu

SEQ ID NO: 328941 - RNA, 19 nt, Homo sapiens
  misc_RNA (1)...(19): siRNA sense strand
guaguccauuaccuuccua

SEQ ID NO: 328942 - RNA, 19 nt, Homo sapiens
  misc_RNA (1)...(19): siRNA sense strand
caacuggaccgagcugcuu

SEQ ID NO: 328943 - RNA, 19 nt, Homo sapiens
  misc_RNA (1)...(19): siRNA sense strand
ccugaaugcuguaguccau

SEQ ID NO: 328944 - RNA, 19 nt, Homo sapiens
  misc_RNA (1)...(19): siRNA sense strand
ugguugggcugguggagaa

SEQ ID NO: 328945 - RNA, 19 nt, Homo sapiens
  misc_RNA (1)...(19): siRNA sense strand
gcuuucaggcacaccauuu

SEQ ID NO: 328946 - RNA, 19 nt, Homo sapiens
  misc_RNA (1)...(19): siRNA sense strand
cugcugcccuucccucuca

SEQ ID NO: 328947 - RNA, 19 nt, Homo sapiens
  misc_RNA (1)...(19): siRNA sense strand
ucuacuuugucaacaugua

SEQ ID NO: 328948 - RNA, 19 nt, Homo sapiens
  misc_RNA (1)...(19): siRNA sense strand
acucacuacuucuacuuug

SEQ ID NO: 328949 - RNA, 19 nt, Homo sapiens
  misc_RNA (1)...(19): siRNA sense strand
cagcauuccaucaucauca

SEQ ID NO: 328950 - RNA, 19 nt, Homo sapiens
  misc_RNA (1)...(19): siRNA sense strand
caagcgcgugguccucuuu

SEQ ID NO: 328951 - RNA, 19 nt, Homo sapiens
  misc_RNA (1)...(19): siRNA sense strand
cuacguggccgucuuuguc

SEQ ID NO: 328952 - RNA, 19 nt, Homo sapiens
  misc_RNA (1)...(19): siRNA sense strand
ucgcggaccugggcauugu

SEQ ID NO: 328953 - RNA, 19 nt, Homo sapiens
  misc_RNA (1)...(19): siRNA sense strand
cuucuacuuugucaacaug

SEQ ID NO: 328954 - RNA, 19 nt, Homo sapiens
  misc_RNA (1)...(19): siRNA sense strand
ucucaucacagucuucaau

SEQ ID NO: 328955 - RNA, 19 nt, Homo sapiens
  misc_RNA (1)...(19): siRNA sense strand
guauagcagcaucuucuuc

SEQ ID NO: 328956 - RNA, 19 nt, Homo sapiens
  misc_RNA (1)...(19): siRNA sense strand
gaaccucuacauccucaac

SEQ ID NO: 328957 - RNA, 19 nt, Homo sapiens
  misc_RNA (1)...(19): siRNA sense strand
ccaagcgcgugguccucuu

SEQ ID NO: 328958 - RNA, 19 nt, Homo sapiens
  misc_RNA (1)...(19): siRNA sense strand
ucuccaugcugcacugugu

SEQ ID NO: 328959 - RNA, 19 nt, Homo sapiens
  misc_RNA (1)...(19): siRNA sense strand
cgagcugcuugaccucuuc

SEQ ID NO: 328960 - RNA, 19 nt, Homo sapiens
  misc_RNA (1)...(19): siRNA sense strand
agaaccuccuggugauaug

SEQ ID NO: 328961 - RNA, 19 nt, Homo sapiens
  misc_RNA (1)...(19): siRNA sense strand
gcucuacuucuucuaugau

SEQ ID NO: 328962 - RNA, 19 nt, Homo sapiens
  misc_RNA (1)...(19): siRNA sense strand
gcacaaaggaugaugauug

SEQ ID NO: 328963 - RNA, 19 nt, Homo sapiens
  misc_RNA (1)...(19): siRNA sense strand
cauaauggaugcccaaaug

SEQ ID NO: 328964 - RNA, 19 nt, Homo sapiens
  misc_RNA (1)...(19): siRNA sense strand
gagaauugccucauugaaa

SEQ ID NO: 328965 - RNA, 19 nt, Homo sapiens
  misc_RNA (1)...(19): siRNA sense strand
gaaauacuagcuucaagaa

SEQ ID NO: 328966 - RNA, 19 nt, Homo sapiens
  misc_RNA (1)...(19): siRNA sense strand
gggagcagcuuucggauca

SEQ ID NO: 328967 - RNA, 19 nt, Homo sapiens
  misc_RNA (1)...(19): siRNA sense strand
gagacaaaccagccuauuu

SEQ ID NO: 328968 - RNA, 19 nt, Homo sapiens
  misc_RNA (1)...(19): siRNA sense strand
gacuuugguuuccauaaua

SEQ ID NO: 328969 - RNA, 19 nt, Homo sapiens
  misc_RNA (1)...(19): siRNA sense strand
caauuucaaucccauaaug

SEQ ID NO: 328970 - RNA, 19 nt, Homo sapiens
  misc_RNA (1)...(19): siRNA sense strand
caaaugauccucugcaaca

SEQ ID NO: 328971 - RNA, 19 nt, Homo sapiens
  misc_RNA (1)...(19): siRNA sense strand
acaaagacaugcugaucaa

SEQ ID NO: 328972 - RNA, 19 nt, Homo sapiens
  misc_RNA (1)...(19): siRNA sense strand
agaauugccucauugaaau

SEQ ID NO: 328973 - RNA, 19 nt, Homo sapiens
  misc_RNA (1)...(19): siRNA sense strand
gaauugccucauugaaaua

SEQ ID NO: 328974 - RNA, 19 nt, Homo sapiens
  misc_RNA (1)...(19): siRNA sense strand
aauacuagcuucaagaaca

SEQ ID NO: 328975 - RNA, 19 nt, Homo sapiens
  misc_RNA (1)...(19): siRNA sense strand
gaccagagaggaaggauau

SEQ ID NO: 328976 - RNA, 19 nt, Homo sapiens
  misc_RNA (1)...(19): siRNA sense strand
aagaggacauuuauucaga

SEQ ID NO: 328977 - RNA, 19 nt, Homo sapiens
  misc_RNA (1)...(19): siRNA sense strand
ucgggacacuucagagaua

SEQ ID NO: 328978 - RNA, 19 nt, Homo sapiens
  misc_RNA (1)...(19): siRNA sense strand
acaaagagcgauauggaaa

SEQ ID NO: 328979 - RNA, 19 nt, Homo sapiens
  misc_RNA (1)...(19): siRNA sense strand
ugacuuugguuuccauaau

SEQ ID NO: 328980 - RNA, 19 nt, Homo sapiens
  misc_RNA (1)...(19): siRNA sense strand
gaggacauuuauucagaga

SEQ ID NO: 328981 - RNA, 19 nt, Homo sapiens
  misc_RNA (1)...(19): siRNA sense strand
uaaggaaacgauacaaaga

SEQ ID NO: 328982 - RNA, 19 nt, Homo sapiens
  misc_RNA (1)...(19): siRNA sense strand
guagaugccauuaaugaau

SEQ ID NO: 328983 - RNA, 19 nt, Homo sapiens
  misc_RNA (1)...(19): siRNA sense strand
aaauagaccugcugaccau

SEQ ID NO: 328984 - RNA, 19 nt, Homo sapiens
  misc_RNA (1)...(19): siRNA sense strand
gaucugagggagcagcuuu

SEQ ID NO: 328985 - RNA, 19 nt, Homo sapiens
  misc_RNA (1)...(19): siRNA sense strand
gcaauuguucucuguguuc

SEQ ID NO: 328986 - RNA, 19 nt, Homo sapiens
  misc_RNA (1)...(19): siRNA sense strand
ucggaucacuucaaagaug

SEQ ID NO: 328987 - RNA, 19 nt, Homo sapiens
  misc_RNA (1)...(19): siRNA sense strand
ugugauggcuggccucaug

SEQ ID NO: 328988 - RNA, 19 nt, Homo sapiens
  misc_RNA (1)...(19): siRNA sense strand
gacaaagacaugcugauca

SEQ ID NO: 328989 - RNA, 19 nt, Homo sapiens
  misc_RNA (1)...(19): siRNA sense strand
aaaccaugcugcaaaugau

SEQ ID NO: 328990 - RNA, 19 nt, Homo sapiens
  misc_RNA (1)...(19): siRNA sense strand
gcuuucggaucacuucaaa

SEQ ID NO: 328991 - RNA, 19 nt, Homo sapiens
  misc_RNA (1)...(19): siRNA sense strand
cauaaggaaacgauacaaa

SEQ ID NO: 328992 - RNA, 19 nt, Homo sapiens
  misc_RNA (1)...(19): siRNA sense strand
ggaccagagaggaaggaua

SEQ ID NO: 328993 - RNA, 19 nt, Homo sapiens
  misc_RNA (1)...(19): siRNA sense strand
ccaagaggacauuuauuca

SEQ ID NO: 328994 - RNA, 19 nt, Homo sapiens
  misc_RNA (1)...(19): siRNA sense strand
cuucagggcauuauaagaa

SEQ ID NO: 328995 - RNA, 19 nt, Homo sapiens
  misc_RNA (1)...(19): siRNA sense strand
cacaaaggaugaugauugc

SEQ ID NO: 328996 - RNA, 19 nt, Homo sapiens
  misc_RNA (1)...(19): siRNA sense strand
ggaguaggcacugaugaga

SEQ ID NO: 328997 - RNA, 19 nt, Homo sapiens
  misc_RNA (1)...(19): siRNA sense strand
gagaggaaggauauucaga

SEQ ID NO: 328998 - RNA, 19 nt, Homo sapiens
  misc_RNA (1)...(19): siRNA sense strand
gguagaugccauuaaugaa

SEQ ID NO: 328999 - RNA, 19 nt, Homo sapiens
  misc_RNA (1)...(19): siRNA sense strand
ugaucaacauucugacuca

SEQ ID NO: 329000 - RNA, 19 nt, Homo sapiens
  misc_RNA (1)...(19): siRNA sense strand
ccuauuucaugauaucaga

SEQ ID NO: 329001 - RNA, 19 nt, Homo sapiens
  misc_RNA (1)...(19): siRNA sense strand
ugaauguuaugauggauac

SEQ ID NO: 329002 - RNA, 19 nt, Homo sapiens
  misc_RNA (1)...(19): siRNA sense strand
aguaggcacugaugagaau

SEQ ID NO: 329003 - RNA, 19 nt, Homo sapiens
  misc_RNA (1)...(19): siRNA sense strand
gcugcugguugcaauuguu

SEQ ID NO: 329004 - RNA, 19 nt, Homo sapiens
  misc_RNA (1)...(19): siRNA sense strand
caauucaugacuuugguuu

SEQ ID NO: 329005 - RNA, 19 nt, Homo sapiens
  misc_RNA (1)...(19): siRNA sense strand
uagugcaauucaugacuuu

SEQ ID NO: 329006 - RNA, 19 nt, Homo sapiens
  misc_RNA (1)...(19): siRNA sense strand
guacccaccaccacuguau

SEQ ID NO: 329007 - RNA, 19 nt, Homo sapiens
  misc_RNA (1)...(19): siRNA sense strand
cuucccagcucccaauuuc

SEQ ID NO: 329008 - RNA, 19 nt, Homo sapiens
  misc_RNA (1)...(19): siRNA sense strand
gaguaggcacugaugagaa

SEQ ID NO: 329009 - RNA, 19 nt, Homo sapiens
  misc_RNA (1)...(19): siRNA sense strand
gaagggaguaggcacugau

SEQ ID NO: 329010 - RNA, 19 nt, Homo sapiens
  misc_RNA (1)...(19): siRNA sense strand
auacuagcuucaagaacaa

SEQ ID NO: 329011 - RNA, 19 nt, Homo sapiens
  misc_RNA (1)...(19): siRNA sense strand
auacaaagagcgauaugga

SEQ ID NO: 329012 - RNA, 19 nt, Homo sapiens
  misc_RNA (1)...(19): siRNA sense strand
agacaaaccagccuauuuu

SEQ ID NO: 329013 - RNA, 19 nt, Homo sapiens
  misc_RNA (1)...(19): siRNA sense strand
ugguagaugccauuaauga

SEQ ID NO: 329014 - RNA, 19 nt, Homo sapiens
  misc_RNA (1)...(19): siRNA sense strand
uccaagaggacauuuauuc

SEQ ID NO: 329015 - RNA, 19 nt, Homo sapiens
  misc_RNA (1)...(19): siRNA sense strand
ucagagaccucgggacacu

SEQ ID NO: 329016 - RNA, 19 nt, Homo sapiens
  misc_RNA (1)...(19): siRNA sense strand
uccaaggauuugacuguga

SEQ ID NO: 329017 - RNA, 19 nt, Homo sapiens
  misc_RNA (1)...(19): siRNA sense strand
gcaauucaugacuuugguu

SEQ ID NO: 329018 - RNA, 19 nt, Homo sapiens
  misc_RNA (1)...(19): siRNA sense strand
ggaagccugucagcagaag

SEQ ID NO: 329019 - RNA, 19 nt, Homo sapiens
  misc_RNA (1)...(19): siRNA sense strand
ugaagggaguaggcacuga

SEQ ID NO: 329020 - RNA, 19 nt, Homo sapiens
  misc_RNA (1)...(19): siRNA sense strand
aaagacaugcugaucaaca

SEQ ID NO: 329021 - RNA, 19 nt, Homo sapiens
  misc_RNA (1)...(19): siRNA sense strand
gagcugcugguugcaauug

SEQ ID NO: 329022 - RNA, 19 nt, Homo sapiens
  misc_RNA (1)...(19): siRNA sense strand
auacagcaauaaccuccaa

SEQ ID NO: 329023 - RNA, 19 nt, Homo sapiens
  misc_RNA (1)...(19): siRNA sense strand
cggaucacuucaaagaugu

SEQ ID NO: 329024 - RNA, 19 nt, Homo sapiens
  misc_RNA (1)...(19): siRNA sense strand
ugacaaagacaugcugauc

SEQ ID NO: 329025 - RNA, 19 nt, Homo sapiens
  misc_RNA (1)...(19): siRNA sense strand
ccagagaggaaggauauuc

SEQ ID NO: 329026 - RNA, 19 nt, Homo sapiens
  misc_RNA (1)...(19): siRNA sense strand
caagaggacauuuauucag

SEQ ID NO: 329027 - RNA, 19 nt, Homo sapiens
  misc_RNA (1)...(19): siRNA sense strand
cagagaggaaggauauuca

SEQ ID NO: 329028 - RNA, 19 nt, Homo sapiens
  misc_RNA (1)...(19): siRNA sense strand
caagaacaaauggagaaau

SEQ ID NO: 329029 - RNA, 19 nt, Homo sapiens
  misc_RNA (1)...(19): siRNA sense strand
uuucggaucacuucaaaga

SEQ ID NO: 329030 - RNA, 19 nt, Homo sapiens
  misc_RNA (1)...(19): siRNA sense strand
uucagggcauuauaagaaa

SEQ ID NO: 329031 - RNA, 19 nt, Homo sapiens
  misc_RNA (1)...(19): siRNA sense strand
auagugcaauucaugacuu

SEQ ID NO: 329032 - RNA, 19 nt, Homo sapiens
  misc_RNA (1)...(19): siRNA sense strand
gguugcaauuguucucugu

SEQ ID NO: 329033 - RNA, 19 nt, Homo sapiens
  misc_RNA (1)...(19): siRNA sense strand
aagacaugcugaucaacau

SEQ ID NO: 329034 - RNA, 19 nt, Homo sapiens
  misc_RNA (1)...(19): siRNA sense strand
gacaugcugaucaacauuc

SEQ ID NO: 329035 - RNA, 19 nt, Homo sapiens
  misc_RNA (1)...(19): siRNA sense strand
ugcgauggcugcucaggau

SEQ ID NO: 329036 - RNA, 19 nt, Homo sapiens
  misc_RNA (1)...(19): siRNA sense strand
uacaaagagcgauauggaa

SEQ ID NO: 329037 - RNA, 19 nt, Homo sapiens
  misc_RNA (1)...(19): siRNA sense strand
gaccauaaggaaacgauac

SEQ ID NO: 329038 - RNA, 19 nt, Homo sapiens
  misc_RNA (1)...(19): siRNA sense strand
ugccagaagugaaauagac

SEQ ID NO: 329039 - RNA, 19 nt, Homo sapiens
  misc_RNA (1)...(19): siRNA sense strand
ccaccaccacuguaugaug

SEQ ID NO: 329040 - RNA, 19 nt, Homo sapiens
  misc_RNA (1)...(19): siRNA sense strand
gugaugcugaggacuacua

SEQ ID NO: 329041 - RNA, 19 nt, Homo sapiens
  misc_RNA (1)...(19): siRNA sense strand
aaaugauccucugcaacaa

SEQ ID NO: 329042 - RNA, 19 nt, Homo sapiens
  misc_RNA (1)...(19): siRNA sense strand
gagcagcuuucggaucacu

SEQ ID NO: 329043 - RNA, 19 nt, Homo sapiens
  misc_RNA (1)...(19): siRNA sense strand
ucaagaacaaauggagaaa

SEQ ID NO: 329044 - RNA, 19 nt, Homo sapiens
  misc_RNA (1)...(19): siRNA sense strand
acaaaaccaugcugcaaau

SEQ ID NO: 329045 - RNA, 19 nt, Homo sapiens
  misc_RNA (1)...(19): siRNA sense strand
gcaaugcacaaaggaugau

SEQ ID NO: 329046 - RNA, 19 nt, Homo sapiens
  misc_RNA (1)...(19): siRNA sense strand
auaaggaaacgauacaaag

SEQ ID NO: 329047 - RNA, 19 nt, Homo sapiens
  misc_RNA (1)...(19): siRNA sense strand
cgagacaaaccagccuauu

SEQ ID NO: 329048 - RNA, 19 nt, Homo sapiens
  misc_RNA (1)...(19): siRNA sense strand
guuaugauggauacuuuca

SEQ ID NO: 329049 - RNA, 19 nt, Homo sapiens
  misc_RNA (1)...(19): siRNA sense strand
aaauauuucugggcaggau

SEQ ID NO: 329050 - RNA, 19 nt, Homo sapiens
  misc_RNA (1)...(19): siRNA sense strand
gcagcuuucggaucacuuc

SEQ ID NO: 329051 - RNA, 19 nt, Homo sapiens
  misc_RNA (1)...(19): siRNA sense strand
gccuacugcuugcaauaca

SEQ ID NO: 329052 - RNA, 19 nt, Homo sapiens
  misc_RNA (1)...(19): siRNA sense strand
aggcauaccagagcaugua

SEQ ID NO: 329053 - RNA, 19 nt, Homo sapiens
  misc_RNA (1)...(19): siRNA sense strand
aauggaugcccaaaugcua

SEQ ID NO: 329054 - RNA, 19 nt, Homo sapiens
  misc_RNA (1)...(19): siRNA sense strand
gaccugcugaccauaagga

SEQ ID NO: 329055 - RNA, 19 nt, Homo sapiens
  misc_RNA (1)...(19): siRNA sense strand
gggaguaggcacugaugag

SEQ ID NO: 329056 - RNA, 19 nt, Homo sapiens
  misc_RNA (1)...(19): siRNA sense strand
auagaccugcugaccauaa

SEQ ID NO: 329057 - RNA, 19 nt, Homo sapiens
  misc_RNA (1)...(19): siRNA sense strand
ccaauuucaaucccauaau

SEQ ID NO: 329058 - RNA, 19 nt, Homo sapiens
  misc_RNA (1)...(19): siRNA sense strand
ggagcugcugguugcaauu

SEQ ID NO: 329059 - RNA, 19 nt, Homo sapiens
  misc_RNA (1)...(19): siRNA sense strand
ugacugugacaaagacaug

SEQ ID NO: 329060 - RNA, 19 nt, Homo sapiens
  misc_RNA (1)...(19): siRNA sense strand
gggaagccugucagcagaa

SEQ ID NO: 329061 - RNA, 19 nt, Homo sapiens
  misc_RNA (1)...(19): siRNA sense strand
uugccucauugaaauacua

SEQ ID NO: 329062 - RNA, 19 nt, Homo sapiens
  misc_RNA (1)...(19): siRNA sense strand
ggacgaggcuggcaucaag

SEQ ID NO: 329063 - RNA, 19 nt, Homo sapiens
  misc_RNA (1)...(19): siRNA sense strand
gauggcagcugugaaggaa

SEQ ID NO: 329064 - RNA, 19 nt, Homo sapiens
  misc_RNA (1)...(19): siRNA sense strand
gugaaggaauuucuugaga

SEQ ID NO: 329065 - RNA, 19 nt, Homo sapiens
  misc_RNA (1)...(19): siRNA sense strand
gcugcugccuccugucuaa

SEQ ID NO: 329066 - RNA, 19 nt, Homo sapiens
  misc_RNA (1)...(19): siRNA sense strand
ccaaggaccuggccauacu

SEQ ID NO: 329067 - RNA, 19 nt, Homo sapiens
  misc_RNA (1)...(19): siRNA sense strand
gugaugcccuccugguuug

SEQ ID NO: 329068 - RNA, 19 nt, Homo sapiens
  misc_RNA (1)...(19): siRNA sense strand
ggagauggcagcugugaag

SEQ ID NO: 329069 - RNA, 19 nt, Homo sapiens
  misc_RNA (1)...(19): siRNA sense strand
ggugaugcccuccugguuu

SEQ ID NO: 329070 - RNA, 19 nt, Homo sapiens
  misc_RNA (1)...(19): siRNA sense strand
uggcagcugugaaggaauu

SEQ ID NO: 329071 - RNA, 19 nt, Homo sapiens
  misc_RNA (1)...(19): siRNA sense strand
ugauugagcaugaaaugaa

SEQ ID NO: 329072 - RNA, 19 nt, Homo sapiens
  misc_RNA (1)...(19): siRNA sense strand
ggguccaguucaagacaua

SEQ ID NO: 329073 - RNA, 19 nt, Homo sapiens
  misc_RNA (1)...(19): siRNA sense strand
ucaagaaggcagcagagaa

SEQ ID NO: 329074 - RNA, 19 nt, Homo sapiens
  misc_RNA (1)...(19): siRNA sense strand
gaaggcagcagagaacauc

SEQ ID NO: 329075 - RNA, 19 nt, Homo sapiens
  misc_RNA (1)...(19): siRNA sense strand
gauugagcaugaaaugaag

SEQ ID NO: 329076 - RNA, 19 nt, Homo sapiens
  misc_RNA (1)...(19): siRNA sense strand
ccugugacccucaacauga

SEQ ID NO: 329077 - RNA, 19 nt, Homo sapiens
  misc_RNA (1)...(19): siRNA sense strand
caagaaggcagcagagaac

SEQ ID NO: 329078 - RNA, 19 nt, Homo sapiens
  misc_RNA (1)...(19): siRNA sense strand
gaacgggaucccugccaau

SEQ ID NO: 329079 - RNA, 19 nt, Homo sapiens
  misc_RNA (1)...(19): siRNA sense strand
gcgccuaggaucccuguga

SEQ ID NO: 329080 - RNA, 19 nt, Homo sapiens
  misc_RNA (1)...(19): siRNA sense strand
cauggugcccguacgguuu

SEQ ID NO: 329081 - RNA, 19 nt, Homo sapiens
  misc_RNA (1)...(19): siRNA sense strand
gcugugaaggaauuucuug

SEQ ID NO: 329082 - RNA, 19 nt, Homo sapiens
  misc_RNA (1)...(19): siRNA sense strand
cgggaucccugccaaucga

SEQ ID NO: 329083 - RNA, 19 nt, Homo sapiens
  misc_RNA (1)...(19): siRNA sense strand
caacaugaagauggugaug

SEQ ID NO: 329084 - RNA, 19 nt, Homo sapiens
  misc_RNA (1)...(19): siRNA sense strand
ucacgucaaguacaucugu

SEQ ID NO: 329085 - RNA, 19 nt, Homo sapiens
  misc_RNA (1)...(19): siRNA sense strand
aggccuugauugagcauga

SEQ ID NO: 329086 - RNA, 19 nt, Homo sapiens
  misc_RNA (1)...(19): siRNA sense strand
gccaggguccaguucaaga

SEQ ID NO: 329087 - RNA, 19 nt, Homo sapiens
  misc_RNA (1)...(19): siRNA sense strand
ggccuugauugagcaugaa

SEQ ID NO: 329088 - RNA, 19 nt, Homo sapiens
  misc_RNA (1)...(19): siRNA sense strand
cugugacccucaacaugaa

SEQ ID NO: 329089 - RNA, 19 nt, Homo sapiens
  misc_RNA (1)...(19): siRNA sense strand
gcaagcagcugucguagaa

SEQ ID NO: 329090 - RNA, 19 nt, Homo sapiens
  misc_RNA (1)...(19): siRNA sense strand
gaagaaagaccaaaugauu

SEQ ID NO: 329091 - RNA, 19 nt, Homo sapiens
  misc_RNA (1)...(19): siRNA sense strand
gaacaugaagcaucucuua

SEQ ID NO: 329092 - RNA, 19 nt, Homo sapiens
  misc_RNA (1)...(19): siRNA sense strand
ggaccucgcugaacaacua

SEQ ID NO: 329093 - RNA, 19 nt, Homo sapiens
  misc_RNA (1)...(19): siRNA sense strand
caacggaucuggaagaaug

SEQ ID NO: 329094 - RNA, 19 nt, Homo sapiens
  misc_RNA (1)...(19): siRNA sense strand
gaacucagaugccaagugu

SEQ ID NO: 329095 - RNA, 19 nt, Homo sapiens
  misc_RNA (1)...(19): siRNA sense strand
gaagagcgucuaacugaua

SEQ ID NO: 329096 - RNA, 19 nt, Homo sapiens
  misc_RNA (1)...(19): siRNA sense strand
acaagaagcugacucuauu

SEQ ID NO: 329097 - RNA, 19 nt, Homo sapiens
  misc_RNA (1)...(19): siRNA sense strand
ucagagagcucgagaagga

SEQ ID NO: 329098 - RNA, 19 nt, Homo sapiens
  misc_RNA (1)...(19): siRNA sense strand
gaaggcagcccaugagaaa

SEQ ID NO: 329099 - RNA, 19 nt, Homo sapiens
  misc_RNA (1)...(19): siRNA sense strand
gagcagagcuacagcgaau

SEQ ID NO: 329100 - RNA, 19 nt, Homo sapiens
  misc_RNA (1)...(19): siRNA sense strand
ggagacaaaucacacagaa

SEQ ID NO: 329101 - RNA, 19 nt, Homo sapiens
  misc_RNA (1)...(19): siRNA sense strand
gggaugagcuaaugaggaa

SEQ ID NO: 329102 - RNA, 19 nt, Homo sapiens
  misc_RNA (1)...(19): siRNA sense strand
ggaggaggcucugaggaua

SEQ ID NO: 329103 - RNA, 19 nt, Homo sapiens
  misc_RNA (1)...(19): siRNA sense strand
gaaaggagccaggaguuaa

SEQ ID NO: 329104 - RNA, 19 nt, Homo sapiens
  misc_RNA (1)...(19): siRNA sense strand
uaauacagcugaagaguca

SEQ ID NO: 329105 - RNA, 19 nt, Homo sapiens
  misc_RNA (1)...(19): siRNA sense strand
gacccuagcugaaagagaa

SEQ ID NO: 329106 - RNA, 19 nt, Homo sapiens
  misc_RNA (1)...(19): siRNA sense strand
gaauuggacucuaguaucu

SEQ ID NO: 329107 - RNA, 19 nt, Homo sapiens
  misc_RNA (1)...(19): siRNA sense strand
gaaaugaagucagcuacug

SEQ ID NO: 329108 - RNA, 19 nt, Homo sapiens
  misc_RNA (1)...(19): siRNA sense strand
gaagaggaaccaagaggua

SEQ ID NO: 329109 - RNA, 19 nt, Homo sapiens
  misc_RNA (1)...(19): siRNA sense strand
agaaggagcuggagagaga

SEQ ID NO: 329110 - RNA, 19 nt, Homo sapiens
  misc_RNA (1)...(19): siRNA sense strand
ggaacuacaugaaacuaug

SEQ ID NO: 329111 - RNA, 19 nt, Homo sapiens
  misc_RNA (1)...(19): siRNA sense strand
gaaggaagcccaugaaagg

SEQ ID NO: 329112 - RNA, 19 nt, Homo sapiens
  misc_RNA (1)...(19): siRNA sense strand
gaacaaccuggaagccuua

SEQ ID NO: 329113 - RNA, 19 nt, Homo sapiens
  misc_RNA (1)...(19): siRNA sense strand
gcacagagaugaccuugcu

SEQ ID NO: 329114 - RNA, 19 nt, Homo sapiens
  misc_RNA (1)...(19): siRNA sense strand
caugaagcaucucuuagua

SEQ ID NO: 329115 - RNA, 19 nt, Homo sapiens
  misc_RNA (1)...(19): siRNA sense strand
gaaggcugcuuuggaauug

SEQ ID NO: 329116 - RNA, 19 nt, Homo sapiens
  misc_RNA (1)...(19): siRNA sense strand
aagcugacguggugaauaa

SEQ ID NO: 329117 - RNA, 19 nt, Homo sapiens
  misc_RNA (1)...(19): siRNA sense strand
ugagaacucuuuggaauug

SEQ ID NO: 329118 - RNA, 19 nt, Homo sapiens
  misc_RNA (1)...(19): siRNA sense strand
gaagggaagggcccaagua

SEQ ID NO: 329119 - RNA, 19 nt, Homo sapiens
  misc_RNA (1)...(19): siRNA sense strand
ggagaccacugggauacua

SEQ ID NO: 329120 - RNA, 19 nt, Homo sapiens
  misc_RNA (1)...(19): siRNA sense strand
ggagaaggaggcccuagua

SEQ ID NO: 329121 - RNA, 19 nt, Homo sapiens
  misc_RNA (1)...(19): siRNA sense strand
gagagacccaggaguauaa

SEQ ID NO: 329122 - RNA, 19 nt, Homo sapiens
  misc_RNA (1)...(19): siRNA sense strand
gaggagaaguugucuuuac

SEQ ID NO: 329123 - RNA, 19 nt, Homo sapiens
  misc_RNA (1)...(19): siRNA sense strand
caugagaacucuuuggaau

SEQ ID NO: 329124 - RNA, 19 nt, Homo sapiens
  misc_RNA (1)...(19): siRNA sense strand
caugaaaguccagaaauua

SEQ ID NO: 329125 - RNA, 19 nt, Homo sapiens
  misc_RNA (1)...(19): siRNA sense strand
gagaagaaagaccaaauga

SEQ ID NO: 329126 - RNA, 19 nt, Homo sapiens
  misc_RNA (1)...(19): siRNA sense strand
ggagucaagucaccuggaa

SEQ ID NO: 329127 - RNA, 19 nt, Homo sapiens
  misc_RNA (1)...(19): siRNA sense strand
agaaggagguggaauguca

SEQ ID NO: 329128 - RNA, 19 nt, Homo sapiens
  misc_RNA (1)...(19): siRNA sense strand
aagcagaacucccuagaau

SEQ ID NO: 329129 - RNA, 19 nt, Homo sapiens
  misc_RNA (1)...(19): siRNA sense strand
aaaugaggcuuuggcguua

SEQ ID NO: 329130 - RNA, 19 nt, Homo sapiens
  misc_RNA (1)...(19): siRNA sense strand
ggaacaaucucuaaaacuu

SEQ ID NO: 329131 - RNA, 19 nt, Homo sapiens
  misc_RNA (1)...(19): siRNA sense strand
gaguauaaccgaauucaga

SEQ ID NO: 329132 - RNA, 19 nt, Homo sapiens
  misc_RNA (1)...(19): siRNA sense strand
uaaaggagcagcagacaga

SEQ ID NO: 329133 - RNA, 19 nt, Homo sapiens
  misc_RNA (1)...(19): siRNA sense strand
gaaggaggcccuaguacga

SEQ ID NO: 329134 - RNA, 19 nt, Homo sapiens
  misc_RNA (1)...(19): siRNA sense strand
agacaaaucacacagaauu

SEQ ID NO: 329135 - RNA, 19 nt, Homo sapiens
  misc_RNA (1)...(19): siRNA sense strand
uggcugaacugcagaaaga

SEQ ID NO: 329136 - RNA, 19 nt, Homo sapiens
  misc_RNA (1)...(19): siRNA sense strand
gcacagagagccagcuaga

SEQ ID NO: 329137 - RNA, 19 nt, Homo sapiens
  misc_RNA (1)...(19): siRNA sense strand
cagaauuaauggaacauga

SEQ ID NO: 329138 - RNA, 19 nt, Homo sapiens
  misc_RNA (1)...(19): siRNA sense strand
ggagcuaggagccucuuua

SEQ ID NO: 329139 - RNA, 19 nt, Homo sapiens
  misc_RNA (1)...(19): siRNA sense strand
gaacggaggaagcugaaga

SEQ ID NO: 329140 - RNA, 19 nt, Homo sapiens
  misc_RNA (1)...(19): siRNA sense strand
gagaauaugauccaagaga

SEQ ID NO: 329141 - RNA, 19 nt, Homo sapiens
  misc_RNA (1)...(19): siRNA sense strand
gacaaaucacacagaauua

SEQ ID NO: 329142 - RNA, 19 nt, Homo sapiens
  misc_RNA (1)...(19): siRNA sense strand
gcagaacucccuagaaucu

SEQ ID NO: 329143 - RNA, 19 nt, Homo sapiens
  misc_RNA (1)...(19): siRNA sense strand
ugagagagacccaggagua

SEQ ID NO: 329144 - RNA, 19 nt, Homo sapiens
  misc_RNA (1)...(19): siRNA sense strand
ggagagcagucuguuugaa

SEQ ID NO: 329145 - RNA, 19 nt, Homo sapiens
  misc_RNA (1)...(19): siRNA sense strand
acaugaaaguccagaaauu

SEQ ID NO: 329146 - RNA, 19 nt, Homo sapiens
  misc_RNA (1)...(19): siRNA sense strand
ggagaaggcccaggacuug

SEQ ID NO: 329147 - RNA, 19 nt, Homo sapiens
  misc_RNA (1)...(19): siRNA sense strand
gagagaagaggaggagaua

SEQ ID NO: 329148 - RNA, 19 nt, Homo sapiens
  misc_RNA (1)...(19): siRNA sense strand
gagcuaggagccucuuuaa

SEQ ID NO: 329149 - RNA, 19 nt, Homo sapiens
  misc_RNA (1)...(19): siRNA sense strand
uugcagagcugucgaguuc

SEQ ID NO: 329150 - RNA, 19 nt, Homo sapiens
  misc_RNA (1)...(19): siRNA sense strand
agaaagagcaucugacuca

SEQ ID NO: 329151 - RNA, 19 nt, Homo sapiens
  misc_RNA (1)...(19): siRNA sense strand
gcaccguucuggcaagaga

SEQ ID NO: 329152 - RNA, 19 nt, Homo sapiens
  misc_RNA (1)...(19): siRNA sense strand
ggcgggagguugugacauu

SEQ ID NO: 329153 - RNA, 19 nt, Homo sapiens
  misc_RNA (1)...(19): siRNA sense strand
ggaccaggaucuccgauac

SEQ ID NO: 329154 - RNA, 19 nt, Homo sapiens
  misc_RNA (1)...(19): siRNA sense strand
gcaguugguuacucuggaa

SEQ ID NO: 329155 - RNA, 19 nt, Homo sapiens
  misc_RNA (1)...(19): siRNA sense strand
gaaagcagaacucccuaga

SEQ ID NO: 329156 - RNA, 19 nt, Homo sapiens
  misc_RNA (1)...(19): siRNA sense strand
ggaagagcgucuaacugau

SEQ ID NO: 329157 - RNA, 19 nt, Homo sapiens
  misc_RNA (1)...(19): siRNA sense strand
gcucagauggaauuacuaa

SEQ ID NO: 329158 - RNA, 19 nt, Homo sapiens
  misc_RNA (1)...(19): siRNA sense strand
gggaagcccuggagucaag

SEQ ID NO: 329159 - RNA, 19 nt, Homo sapiens
  misc_RNA (1)...(19): siRNA sense strand
ggaagcagaagcaggacua

SEQ ID NO: 329160 - RNA, 19 nt, Homo sapiens
  misc_RNA (1)...(19): siRNA sense strand
aagagaauaugauccaaga

SEQ ID NO: 329161 - RNA, 19 nt, Homo sapiens
  misc_RNA (1)...(19): siRNA sense strand
ggagcaagcccauaugaca

SEQ ID NO: 329162 - RNA, 19 nt, Homo sapiens
  misc_RNA (1)...(19): siRNA sense strand
gcaggagcauauccaugaa

SEQ ID NO: 329163 - RNA, 19 nt, Homo sapiens
  misc_RNA (1)...(19): siRNA sense strand
gcucagugcucagauggaa

SEQ ID NO: 329164 - RNA, 19 nt, Homo sapiens
  misc_RNA (1)...(19): siRNA sense strand
aagcaacccuugugaggaa

SEQ ID NO: 329165 - RNA, 19 nt, Homo sapiens
  misc_RNA (1)...(19): siRNA sense strand
ggaagaaggggacaauaua

SEQ ID NO: 329166 - RNA, 19 nt, Homo sapiens
  misc_RNA (1)...(19): siRNA sense strand
gaauggagaagcagucaug

SEQ ID NO: 329167 - RNA, 19 nt, Homo sapiens
  misc_RNA (1)...(19): siRNA sense strand
aagcugauccugcgugaua

SEQ ID NO: 329168 - RNA, 19 nt, Homo sapiens
  misc_RNA (1)...(19): siRNA sense strand
gggaagggcccaaguaaag

SEQ ID NO: 329169 - RNA, 19 nt, Homo sapiens
  misc_RNA (1)...(19): siRNA sense strand
agacagcucucccagaauc

SEQ ID NO: 329170 - RNA, 19 nt, Homo sapiens
  misc_RNA (1)...(19): siRNA sense strand
ucagggacauccaagaaga

SEQ ID NO: 329171 - RNA, 19 nt, Homo sapiens
  misc_RNA (1)...(19): siRNA sense strand
gagaucugauggagcuaaa

SEQ ID NO: 329172 - RNA, 19 nt, Homo sapiens
  misc_RNA (1)...(19): siRNA sense strand
ggacagaagaacucagaug

SEQ ID NO: 329173 - RNA, 19 nt, Homo sapiens
  misc_RNA (1)...(19): siRNA sense strand
ggagguagccauguuccua

SEQ ID NO: 329174 - RNA, 19 nt, Homo sapiens
  misc_RNA (1)...(19): siRNA sense strand
gcaaaggaacaaccuggaa

SEQ ID NO: 329175 - RNA, 19 nt, Homo sapiens
  misc_RNA (1)...(19): siRNA sense strand
cacgaaggcuggaggaaga

SEQ ID NO: 329176 - RNA, 19 nt, Homo sapiens
  misc_RNA (1)...(19): siRNA sense strand
gaggagagggugaaggaaa

SEQ ID NO: 329177 - RNA, 19 nt, Homo sapiens
  misc_RNA (1)...(19): siRNA sense strand
caagcucagugccuuaaau

SEQ ID NO: 329178 - RNA, 19 nt, Homo sapiens
  misc_RNA (1)...(19): siRNA sense strand
ggaaugcgcaagaggagaa

SEQ ID NO: 329179 - RNA, 19 nt, Homo sapiens
  misc_RNA (1)...(19): siRNA sense strand
gaacccaacggaucuggaa

SEQ ID NO: 329180 - RNA, 19 nt, Homo sapiens
  misc_RNA (1)...(19): siRNA sense strand
ggaauuggacucuaguauc

SEQ ID NO: 329181 - RNA, 19 nt, Homo sapiens
  misc_RNA (1)...(19): siRNA sense strand
agaauaugauccaagagaa

SEQ ID NO: 329182 - RNA, 19 nt, Homo sapiens
  misc_RNA (1)...(19): siRNA sense strand
agaaagaccaaaugauuga

SEQ ID NO: 329183 - RNA, 19 nt, Homo sapiens
  misc_RNA (1)...(19): siRNA sense strand
uggaagagcgucuaacuga

SEQ ID NO: 329184 - RNA, 19 nt, Homo sapiens
  misc_RNA (1)...(19): siRNA sense strand
gcaggagaccacugggaua

SEQ ID NO: 329185 - RNA, 19 nt, Homo sapiens
  misc_RNA (1)...(19): siRNA sense strand
gaagagaaggaagaaauuc

SEQ ID NO: 329186 - RNA, 19 nt, Homo sapiens
  misc_RNA (1)...(19): siRNA sense strand
ccagcagcuucuccaguua

SEQ ID NO: 329187 - RNA, 19 nt, Homo sapiens
  misc_RNA (1)...(19): siRNA sense strand
acacagaguugcaggaucu

SEQ ID NO: 329188 - RNA, 19 nt, Homo sapiens
  misc_RNA (1)...(19): siRNA sense strand
gagaagaggaggagauaag

SEQ ID NO: 329189 - RNA, 19 nt, Homo sapiens
  misc_RNA (1)...(19): siRNA sense strand
guaaagaguugucagauga

SEQ ID NO: 329190 - RNA, 19 nt, Homo sapiens
  misc_RNA (1)...(19): siRNA sense strand
gagcagaagcugacacuuu

SEQ ID NO: 329191 - RNA, 19 nt, Homo sapiens
  misc_RNA (1)...(19): siRNA sense strand
gagcacaucagccuuauga

SEQ ID NO: 329192 - RNA, 19 nt, Homo sapiens
  misc_RNA (1)...(19): siRNA sense strand
gaugggcucuuguuaagug

SEQ ID NO: 329193 - RNA, 19 nt, Homo sapiens
  misc_RNA (1)...(19): siRNA sense strand
gguaaagaguugucagaug

SEQ ID NO: 329194 - RNA, 19 nt, Homo sapiens
  misc_RNA (1)...(19): siRNA sense strand
gaaaugcaucuucagcuuu

SEQ ID NO: 329195 - RNA, 19 nt, Homo sapiens
  misc_RNA (1)...(19): siRNA sense strand
ggacauagucuucuacaag

SEQ ID NO: 329196 - RNA, 19 nt, Homo sapiens
  misc_RNA (1)...(19): siRNA sense strand
gcaccugucuggauguguu

SEQ ID NO: 329197 - RNA, 19 nt, Homo sapiens
  misc_RNA (1)...(19): siRNA sense strand
ccaaagggaaugucuguaa

SEQ ID NO: 329198 - RNA, 19 nt, Homo sapiens
  misc_RNA (1)...(19): siRNA sense strand
gaaacggaauaaccaguuc

SEQ ID NO: 329199 - RNA, 19 nt, Homo sapiens
  misc_RNA (1)...(19): siRNA sense strand
gaagcccagugaauauauu

SEQ ID NO: 329200 - RNA, 19 nt, Homo sapiens
  misc_RNA (1)...(19): siRNA sense strand
ggagaagcccagugaauau

SEQ ID NO: 329201 - RNA, 19 nt, Homo sapiens
  misc_RNA (1)...(19): siRNA sense strand
gggaugggcucuuguuaag

SEQ ID NO: 329202 - RNA, 19 nt, Homo sapiens
  misc_RNA (1)...(19): siRNA sense strand
ggaccuaugccuucuauca

SEQ ID NO: 329203 - RNA, 19 nt, Homo sapiens
  misc_RNA (1)...(19): siRNA sense strand
ggagcucagugcccuugua

SEQ ID NO: 329204 - RNA, 19 nt, Homo sapiens
  misc_RNA (1)...(19): siRNA sense strand
gagaagcccagugaauaua

SEQ ID NO: 329205 - RNA, 19 nt, Homo sapiens
  misc_RNA (1)...(19): siRNA sense strand
gaagcccuauauaaagauu

SEQ ID NO: 329206 - RNA, 19 nt, Homo sapiens
  misc_RNA (1)...(19): siRNA sense strand
gaaggaccgugagccuaaa

SEQ ID NO: 329207 - RNA, 19 nt, Homo sapiens
  misc_RNA (1)...(19): siRNA sense strand
acaaggacauagucuucua

SEQ ID NO: 329208 - RNA, 19 nt, Homo sapiens
  misc_RNA (1)...(19): siRNA sense strand
gcaggacgccggagauugu

SEQ ID NO: 329209 - RNA, 19 nt, Homo sapiens
  misc_RNA (1)...(19): siRNA sense strand
agaaaugcaucuucagcuu

SEQ ID NO: 329210 - RNA, 19 nt, Homo sapiens
  misc_RNA (1)...(19): siRNA sense strand
aaaugcaucuucagcuuug

SEQ ID NO: 329211 - RNA, 19 nt, Homo sapiens
  misc_RNA (1)...(19): siRNA sense strand
cugaagcccuauauaaaga

SEQ ID NO: 329212 - RNA, 19 nt, Homo sapiens
  misc_RNA (1)...(19): siRNA sense strand
gcacccagaauaccaagaa

SEQ ID NO: 329213 - RNA, 19 nt, Homo sapiens
  misc_RNA (1)...(19): siRNA sense strand
gugcacgacuucacagaug

SEQ ID NO: 329214 - RNA, 19 nt, Homo sapiens
  misc_RNA (1)...(19): siRNA sense strand
ugaaggaccgugagccuaa

SEQ ID NO: 329215 - RNA, 19 nt, Homo sapiens
  misc_RNA (1)...(19): siRNA sense strand
cagcaagagugcaaacauc

SEQ ID NO: 329216 - RNA, 19 nt, Homo sapiens
  misc_RNA (1)...(19): siRNA sense strand
gcugacacuuucauguuug

SEQ ID NO: 329217 - RNA, 19 nt, Homo sapiens
  misc_RNA (1)...(19): siRNA sense strand
ucagugcccuuguagugaa

SEQ ID NO: 329218 - RNA, 19 nt, Homo sapiens
  misc_RNA (1)...(19): siRNA sense strand
cguccgaucugucaucaau

SEQ ID NO: 329219 - RNA, 19 nt, Homo sapiens
  misc_RNA (1)...(19): siRNA sense strand
gcagacuggugcacgacuu

SEQ ID NO: 329220 - RNA, 19 nt, Homo sapiens
  misc_RNA (1)...(19): siRNA sense strand
gcucagugcccuuguagug

SEQ ID NO: 329221 - RNA, 19 nt, Homo sapiens
  misc_RNA (1)...(19): siRNA sense strand
gaagcugacacuuucaugu

SEQ ID NO: 329222 - RNA, 19 nt, Homo sapiens
  misc_RNA (1)...(19): siRNA sense strand
cagaugccauuacagacaa

SEQ ID NO: 329223 - RNA, 19 nt, Homo sapiens
  misc_RNA (1)...(19): siRNA sense strand
caaagggaaugucuguaac

SEQ ID NO: 329224 - RNA, 19 nt, Homo sapiens
  misc_RNA (1)...(19): siRNA sense strand
ggacauaagagcagaagcu

SEQ ID NO: 329225 - RNA, 19 nt, Homo sapiens
  misc_RNA (1)...(19): siRNA sense strand
ucacucccaucaucaacuu

SEQ ID NO: 329226 - RNA, 19 nt, Homo sapiens
  misc_RNA (1)...(19): siRNA sense strand
ggacuuuggcugcgaguag

SEQ ID NO: 329227 - RNA, 19 nt, Homo sapiens
  misc_RNA (1)...(19): siRNA sense strand
aggagaagcccagugaaua

SEQ ID NO: 329228 - RNA, 19 nt, Homo sapiens
  misc_RNA (1)...(19): siRNA sense strand
ccucagaugccauuacaga

SEQ ID NO: 329229 - RNA, 19 nt, Homo sapiens
  misc_RNA (1)...(19): siRNA sense strand
agcagaagcugacacuuuc

SEQ ID NO: 329230 - RNA, 19 nt, Homo sapiens
  misc_RNA (1)...(19): siRNA sense strand
uggacagucugcagaaaug

SEQ ID NO: 329231 - RNA, 19 nt, Homo sapiens
  misc_RNA (1)...(19): siRNA sense strand
gggcucuuguuaaguguug

SEQ ID NO: 329232 - RNA, 19 nt, Homo sapiens
  misc_RNA (1)...(19): siRNA sense strand
caagagugcaaacaucaug

SEQ ID NO: 329233 - RNA, 19 nt, Homo sapiens
  misc_RNA (1)...(19): siRNA sense strand
gaauauauuacugcgauca

SEQ ID NO: 329234 - RNA, 19 nt, Homo sapiens
  misc_RNA (1)...(19): siRNA sense strand
gggcagcaccugucuggau

SEQ ID NO: 329235 - RNA, 19 nt, Homo sapiens
  misc_RNA (1)...(19): siRNA sense strand
ucuguaacaucaacaucuu

SEQ ID NO: 329236 - RNA, 19 nt, Homo sapiens
  misc_RNA (1)...(19): siRNA sense strand
ucgcgaggcacccagaaua

SEQ ID NO: 329237 - RNA, 19 nt, Homo sapiens
  misc_RNA (1)...(19): siRNA sense strand
ugaaacggaauaaccaguu

SEQ ID NO: 329238 - RNA, 19 nt, Homo sapiens
  misc_RNA (1)...(19): siRNA sense strand
gccaggguguugaugacuu

SEQ ID NO: 329239 - RNA, 19 nt, Homo sapiens
  misc_RNA (1)...(19): siRNA sense strand
ccaggguguugaugacuuc

SEQ ID NO: 329240 - RNA, 19 nt, Homo sapiens
  misc_RNA (1)...(19): siRNA sense strand
uaccucagaugccauuaca

SEQ ID NO: 329241 - RNA, 19 nt, Homo sapiens
  misc_RNA (1)...(19): siRNA sense strand
guuaaguguuggugacaag

SEQ ID NO: 329242 - RNA, 19 nt, Homo sapiens
  misc_RNA (1)...(19): siRNA sense strand
ugacgccugccuuccauuu

SEQ ID NO: 329243 - RNA, 19 nt, Homo sapiens
  misc_RNA (1)...(19): siRNA sense strand
gacuuuggcugcgaguaga

SEQ ID NO: 329244 - RNA, 19 nt, Homo sapiens
  misc_RNA (1)...(19): siRNA sense strand
caacaucuucgcaauccau

SEQ ID NO: 329245 - RNA, 19 nt, Homo sapiens
  misc_RNA (1)...(19): siRNA sense strand
caauaccucagaugccauu

SEQ ID NO: 329246 - RNA, 19 nt, Homo sapiens
  misc_RNA (1)...(19): siRNA sense strand
gaccgugagccuaaagaga

SEQ ID NO: 329247 - RNA, 19 nt, Homo sapiens
  misc_RNA (1)...(19): siRNA sense strand
ucuccugggucuuguacaa

SEQ ID NO: 329248 - RNA, 19 nt, Homo sapiens
  misc_RNA (1)...(19): siRNA sense strand
caggagaagcccagugaau

SEQ ID NO: 329249 - RNA, 19 nt, Homo sapiens
  misc_RNA (1)...(19): siRNA sense strand
ccugaagcccuauauaaag

SEQ ID NO: 329250 - RNA, 19 nt, Homo sapiens
  misc_RNA (1)...(19): siRNA sense strand
aagcugacacuuucauguu

SEQ ID NO: 329251 - RNA, 19 nt, Homo sapiens
  misc_RNA (1)...(19): siRNA sense strand
gcugacgccugccuuccau

SEQ ID NO: 329252 - RNA, 19 nt, Homo sapiens
  misc_RNA (1)...(19): siRNA sense strand
agacuuuggacuuuauuga

SEQ ID NO: 329253 - RNA, 19 nt, Homo sapiens
  misc_RNA (1)...(19): siRNA sense strand
cauccugaagcccuauaua

SEQ ID NO: 329254 - RNA, 19 nt, Homo sapiens
  misc_RNA (1)...(19): siRNA sense strand
gcaagagugcaaacaucau

SEQ ID NO: 329255 - RNA, 19 nt, Homo sapiens
  misc_RNA (1)...(19): siRNA sense strand
ccgugagccuaaagagauu

SEQ ID NO: 329256 - RNA, 19 nt, Homo sapiens
  misc_RNA (1)...(19): siRNA sense strand
agcugacacuuucauguuu

SEQ ID NO: 329257 - RNA, 19 nt, Homo sapiens
  misc_RNA (1)...(19): siRNA sense strand
acuuuggacuuuauugaug

SEQ ID NO: 329258 - RNA, 19 nt, Homo sapiens
  misc_RNA (1)...(19): siRNA sense strand
ucagaugccauuacagaca

SEQ ID NO: 329259 - RNA, 19 nt, Homo sapiens
  misc_RNA (1)...(19): siRNA sense strand
uccugaagcccuauauaaa

SEQ ID NO: 329260 - RNA, 19 nt, Homo sapiens
  misc_RNA (1)...(19): siRNA sense strand
ggucaccuauggcuuuuau

SEQ ID NO: 329261 - RNA, 19 nt, Homo sapiens
  misc_RNA (1)...(19): siRNA sense strand
gagccuaaagagauugaau

SEQ ID NO: 329262 - RNA, 19 nt, Homo sapiens
  misc_RNA (1)...(19): siRNA sense strand
ccuaugccuucuaucacaa

SEQ ID NO: 329263 - RNA, 19 nt, Homo sapiens
  misc_RNA (1)...(19): siRNA sense strand
gucaggagaagcccaguga

SEQ ID NO: 329264 - RNA, 19 nt, Homo sapiens
  misc_RNA (1)...(19): siRNA sense strand
cauuacagacaaggacaua

SEQ ID NO: 329265 - RNA, 19 nt, Homo sapiens
  misc_RNA (1)...(19): siRNA sense strand
gagcucagugcccuuguag

SEQ ID NO: 329266 - RNA, 19 nt, Homo sapiens
  misc_RNA (1)...(19): siRNA sense strand
ugucaucaauaccucagau

SEQ ID NO: 329267 - RNA, 19 nt, Homo sapiens
  misc_RNA (1)...(19): siRNA sense strand
aagcccagugaauauauua

SEQ ID NO: 329268 - RNA, 19 nt, Homo sapiens
  misc_RNA (1)...(19): siRNA sense strand
uuugagcacaucagccuua

SEQ ID NO: 329269 - RNA, 19 nt, Homo sapiens
  misc_RNA (1)...(19): siRNA sense strand
uuacagacaaggacauagu

SEQ ID NO: 329270 - RNA, 19 nt, Homo sapiens
  misc_RNA (1)...(19): siRNA sense strand
gcaggaggugcaagagcuu

SEQ ID NO: 329271 - RNA, 19 nt, Homo sapiens
  misc_RNA (1)...(19): siRNA sense strand
gcagaagcugacacuuuca

SEQ ID NO: 329272 - RNA, 19 nt, Homo sapiens
  misc_RNA (1)...(19): siRNA sense strand
caucaacaucuucgcaauc

SEQ ID NO: 329273 - RNA, 19 nt, Homo sapiens
  misc_RNA (1)...(19): siRNA sense strand
auccugaagcccuauauaa

SEQ ID NO: 329274 - RNA, 19 nt, Homo sapiens
  misc_RNA (1)...(19): siRNA sense strand
acaucaacaucuucgcaau

SEQ ID NO: 329275 - RNA, 19 nt, Homo sapiens
  misc_RNA (1)...(19): siRNA sense strand
aaagggaaugucuguaaca

SEQ ID NO: 329276 - RNA, 19 nt, Homo sapiens
  misc_RNA (1)...(19): siRNA sense strand
gaggugcaagagcuucuga

SEQ ID NO: 329277 - RNA, 19 nt, Homo sapiens
  misc_RNA (1)...(19): siRNA sense strand
acgccugccuuccauuuca

SEQ ID NO: 329278 - RNA, 19 nt, Homo sapiens
  misc_RNA (1)...(19): siRNA sense strand
gacuuuggacuuuauugau

SEQ ID NO: 329279 - RNA, 19 nt, Homo sapiens
  misc_RNA (1)...(19): siRNA sense strand
agaagcccagugaauauau

SEQ ID NO: 329280 - RNA, 19 nt, Homo sapiens
  misc_RNA (1)...(19): siRNA sense strand
ccuggacagucugcagaaa

SEQ ID NO: 329281 - RNA, 19 nt, Homo sapiens
  misc_RNA (1)...(19): siRNA sense strand
caagacuuuggacuuuauu

SEQ ID NO: 329282 - RNA, 19 nt, Homo sapiens
  misc_RNA (1)...(19): siRNA sense strand
guagugaaacggaauaacc

SEQ ID NO: 329283 - RNA, 19 nt, Homo sapiens
  misc_RNA (1)...(19): siRNA sense strand
cuggaccuaugccuucuau

SEQ ID NO: 329284 - RNA, 19 nt, Homo sapiens
  misc_RNA (1)...(19): siRNA sense strand
uccgaucugucaucaauac

SEQ ID NO: 329285 - RNA, 19 nt, Homo sapiens
  misc_RNA (1)...(19): siRNA sense strand
ggacagugcucacaucaaa

SEQ ID NO: 329286 - RNA, 19 nt, Homo sapiens
  misc_RNA (1)...(19): siRNA sense strand
caacaagacuacaaugcuu

SEQ ID NO: 329287 - RNA, 19 nt, Homo sapiens
  misc_RNA (1)...(19): siRNA sense strand
gggugaagauucucuacaa

SEQ ID NO: 329288 - RNA, 19 nt, Homo sapiens
  misc_RNA (1)...(19): siRNA sense strand
ggugaagauucucuacaaa

SEQ ID NO: 329289 - RNA, 19 nt, Homo sapiens
  misc_RNA (1)...(19): siRNA sense strand
gcagugggaugagcuacuu

SEQ ID NO: 329290 - RNA, 19 nt, Homo sapiens
  misc_RNA (1)...(19): siRNA sense strand
ccucuaagcugcaauucau

SEQ ID NO: 329291 - RNA, 19 nt, Homo sapiens
  misc_RNA (1)...(19): siRNA sense strand
gaauacaacaagacuacaa

SEQ ID NO: 329292 - RNA, 19 nt, Homo sapiens
  misc_RNA (1)...(19): siRNA sense strand
gggagagggugaagauucu

SEQ ID NO: 329293 - RNA, 19 nt, Homo sapiens
  misc_RNA (1)...(19): siRNA sense strand
uagcagaggagcaguuuau

SEQ ID NO: 329294 - RNA, 19 nt, Homo sapiens
  misc_RNA (1)...(19): siRNA sense strand
ggaccaguguguggaaauc

SEQ ID NO: 329295 - RNA, 19 nt, Homo sapiens
  misc_RNA (1)...(19): siRNA sense strand
gaagccagcagaggaguga

SEQ ID NO: 329296 - RNA, 19 nt, Homo sapiens
  misc_RNA (1)...(19): siRNA sense strand
gcuacaggcccgaguggaa

SEQ ID NO: 329297 - RNA, 19 nt, Homo sapiens
  misc_RNA (1)...(19): siRNA sense strand
caaagccguuccugagcau

SEQ ID NO: 329298 - RNA, 19 nt, Homo sapiens
  misc_RNA (1)...(19): siRNA sense strand
ucaaggugcagguggcuuu

SEQ ID NO: 329299 - RNA, 19 nt, Homo sapiens
  misc_RNA (1)...(19): siRNA sense strand
gcuggacagugcucacauc

SEQ ID NO: 329300 - RNA, 19 nt, Homo sapiens
  misc_RNA (1)...(19): siRNA sense strand
gaggaauacaacaagacua

SEQ ID NO: 329301 - RNA, 19 nt, Homo sapiens
  misc_RNA (1)...(19): siRNA sense strand
gaguacaucgaccgcauug

SEQ ID NO: 329302 - RNA, 19 nt, Homo sapiens
  misc_RNA (1)...(19): siRNA sense strand
ggaggaauacaacaagacu

SEQ ID NO: 329303 - RNA, 19 nt, Homo sapiens
  misc_RNA (1)...(19): siRNA sense strand
gcaagagggagagggugaa

SEQ ID NO: 329304 - RNA, 19 nt, Homo sapiens
  misc_RNA (1)...(19): siRNA sense strand
guuuauccuuucccagguu

SEQ ID NO: 329305 - RNA, 19 nt, Homo sapiens
  misc_RNA (1)...(19): siRNA sense strand
caucgaccgcauugccaua

SEQ ID NO: 329306 - RNA, 19 nt, Homo sapiens
  misc_RNA (1)...(19): siRNA sense strand
uggcccagauccacauuca

SEQ ID NO: 329307 - RNA, 19 nt, Homo sapiens
  misc_RNA (1)...(19): siRNA sense strand
ccauaccugaugccucuaa

SEQ ID NO: 329308 - RNA, 19 nt, Homo sapiens
  misc_RNA (1)...(19): siRNA sense strand
uaagcugcaauucauccua

SEQ ID NO: 329309 - RNA, 19 nt, Homo sapiens
  misc_RNA (1)...(19): siRNA sense strand
cuggaggaauacaacaaga

SEQ ID NO: 329310 - RNA, 19 nt, Homo sapiens
  misc_RNA (1)...(19): siRNA sense strand
agagggagagggugaagau

SEQ ID NO: 329311 - RNA, 19 nt, Homo sapiens
  misc_RNA (1)...(19): siRNA sense strand
caggaccaguguguggaaa

SEQ ID NO: 329312 - RNA, 19 nt, Homo sapiens
  misc_RNA (1)...(19): siRNA sense strand
gcagaggagcaguuuaucc

SEQ ID NO: 329313 - RNA, 19 nt, Homo sapiens
  misc_RNA (1)...(19): siRNA sense strand
ggacagugcucacaucaaa

SEQ ID NO: 329314 - RNA, 19 nt, Homo sapiens
  misc_RNA (1)...(19): siRNA sense strand
gggugaagauucucuacaa

SEQ ID NO: 329315 - RNA, 19 nt, Homo sapiens
  misc_RNA (1)...(19): siRNA sense strand
ggugaagauucucuacaaa

SEQ ID NO: 329316 - RNA, 19 nt, Homo sapiens
  misc_RNA (1)...(19): siRNA sense strand
ccucuaagcugcaauucau

SEQ ID NO: 329317 - RNA, 19 nt, Homo sapiens
  misc_RNA (1)...(19): siRNA sense strand
gggagagggugaagauucu

SEQ ID NO: 329318 - RNA, 19 nt, Homo sapiens
  misc_RNA (1)...(19): siRNA sense strand
uagcagaggagcaguuuau

SEQ ID NO: 329319 - RNA, 19 nt, Homo sapiens
  misc_RNA (1)...(19): siRNA sense strand
ggaccaguguguggaaauc

SEQ ID NO: 329320 - RNA, 19 nt, Homo sapiens
  misc_RNA (1)...(19): siRNA sense strand
gcuacaggcccgaguggaa

SEQ ID NO: 329321 - RNA, 19 nt, Homo sapiens
  misc_RNA (1)...(19): siRNA sense strand
caaagccguuccugagcau

SEQ ID NO: 329322 - RNA, 19 nt, Homo sapiens
  misc_RNA (1)...(19): siRNA sense strand
ucaaggugcagguggcuuu

SEQ ID NO: 329323 - RNA, 19 nt, Homo sapiens
  misc_RNA (1)...(19): siRNA sense strand
gcuggacagugcucacauc

SEQ ID NO: 329324 - RNA, 19 nt, Homo sapiens
  misc_RNA (1)...(19): siRNA sense strand
gaguacaucgaccgcauug

SEQ ID NO: 329325 - RNA, 19 nt, Homo sapiens
  misc_RNA (1)...(19): siRNA sense strand
gcaagagggagagggugaa

SEQ ID NO: 329326 - RNA, 19 nt, Homo sapiens
  misc_RNA (1)...(19): siRNA sense strand
guuuauccuuucccagguu

SEQ ID NO: 329327 - RNA, 19 nt, Homo sapiens
  misc_RNA (1)...(19): siRNA sense strand
caucgaccgcauugccaua

SEQ ID NO: 329328 - RNA, 19 nt, Homo sapiens
  misc_RNA (1)...(19): siRNA sense strand
uggcccagauccacauuca

SEQ ID NO: 329329 - RNA, 19 nt, Homo sapiens
  misc_RNA (1)...(19): siRNA sense strand
ccauaccugaugccucuaa

SEQ ID NO: 329330 - RNA, 19 nt, Homo sapiens
  misc_RNA (1)...(19): siRNA sense strand
uaagcugcaauucauccua

SEQ ID NO: 329331 - RNA, 19 nt, Homo sapiens
  misc_RNA (1)...(19): siRNA sense strand
agagggagagggugaagau

SEQ ID NO: 329332 - RNA, 19 nt, Homo sapiens
  misc_RNA (1)...(19): siRNA sense strand
caggaccaguguguggaaa

SEQ ID NO: 329333 - RNA, 19 nt, Homo sapiens
  misc_RNA (1)...(19): siRNA sense strand
gcagaggagcaguuuaucc

SEQ ID NO: 329334 - RNA, 19 nt, Homo sapiens
  misc_RNA (1)...(19): siRNA sense strand
gaagauaugugacguguau

SEQ ID NO: 329335 - RNA, 19 nt, Homo sapiens
  misc_RNA (1)...(19): siRNA sense strand
gaacaaagucgaaguauga

SEQ ID NO: 329336 - RNA, 19 nt, Homo sapiens
  misc_RNA (1)...(19): siRNA sense strand
agacauggcucuuugguua

SEQ ID NO: 329337 - RNA, 19 nt, Homo sapiens
  misc_RNA (1)...(19): siRNA sense strand
gaagaacuuugauauggua

SEQ ID NO: 329338 - RNA, 19 nt, Homo sapiens
  misc_RNA (1)...(19): siRNA sense strand
ggacaaagacgcuuauuau

SEQ ID NO: 329339 - RNA, 19 nt, Homo sapiens
  misc_RNA (1)...(19): siRNA sense strand
ggaaauaguugaugcagau

SEQ ID NO: 329340 - RNA, 19 nt, Homo sapiens
  misc_RNA (1)...(19): siRNA sense strand
ggacagugaugaagauuau

SEQ ID NO: 329341 - RNA, 19 nt, Homo sapiens
  misc_RNA (1)...(19): siRNA sense strand
cagaaugcuuuccgaauua

SEQ ID NO: 329342 - RNA, 19 nt, Homo sapiens
  misc_RNA (1)...(19): siRNA sense strand
gaaaugaggcacaaacuga

SEQ ID NO: 329343 - RNA, 19 nt, Homo sapiens
  misc_RNA (1)...(19): siRNA sense strand
gaaaggagaagaugaguau

SEQ ID NO: 329344 - RNA, 19 nt, Homo sapiens
  misc_RNA (1)...(19): siRNA sense strand
gaaauacacagaaggagua

SEQ ID NO: 329345 - RNA, 19 nt, Homo sapiens
  misc_RNA (1)...(19): siRNA sense strand
ggaaggagauuauacuuac

SEQ ID NO: 329346 - RNA, 19 nt, Homo sapiens
  misc_RNA (1)...(19): siRNA sense strand
gaaugaagaugaggaagaa

SEQ ID NO: 329347 - RNA, 19 nt, Homo sapiens
  misc_RNA (1)...(19): siRNA sense strand
caaauucccuggagaguuc

SEQ ID NO: 329348 - RNA, 19 nt, Homo sapiens
  misc_RNA (1)...(19): siRNA sense strand
ggaaagagucauggaaaua

SEQ ID NO: 329349 - RNA, 19 nt, Homo sapiens
  misc_RNA (1)...(19): siRNA sense strand
gaagaacaaagucgaagua

SEQ ID NO: 329350 - RNA, 19 nt, Homo sapiens
  misc_RNA (1)...(19): siRNA sense strand
gcaagaaagugaccaugau

SEQ ID NO: 329351 - RNA, 19 nt, Homo sapiens
  misc_RNA (1)...(19): siRNA sense strand
gcaagaagauuggaguguu

SEQ ID NO: 329352 - RNA, 19 nt, Homo sapiens
  misc_RNA (1)...(19): siRNA sense strand
gggaugaacuggaggaaga

SEQ ID NO: 329353 - RNA, 19 nt, Homo sapiens
  misc_RNA (1)...(19): siRNA sense strand
gaagagcacaucagaaaga

SEQ ID NO: 329354 - RNA, 19 nt, Homo sapiens
  misc_RNA (1)...(19): siRNA sense strand
ucgagaagcugaagagaaa

SEQ ID NO: 329355 - RNA, 19 nt, Homo sapiens
  misc_RNA (1)...(19): siRNA sense strand
gcgaagagcacaucagaaa

SEQ ID NO: 329356 - RNA, 19 nt, Homo sapiens
  misc_RNA (1)...(19): siRNA sense strand
gaaugaaggcaacaucuuu

SEQ ID NO: 329357 - RNA, 19 nt, Homo sapiens
  misc_RNA (1)...(19): siRNA sense strand
cgugaaggcucccuaguaa

SEQ ID NO: 329358 - RNA, 19 nt, Homo sapiens
  misc_RNA (1)...(19): siRNA sense strand
ucagaaugcuuuccgaauu

SEQ ID NO: 329359 - RNA, 19 nt, Homo sapiens
  misc_RNA (1)...(19): siRNA sense strand
gcaacaccguuucacauug

SEQ ID NO: 329360 - RNA, 19 nt, Homo sapiens
  misc_RNA (1)...(19): siRNA sense strand
uaccgagcaucaaauauua

SEQ ID NO: 329361 - RNA, 19 nt, Homo sapiens
  misc_RNA (1)...(19): siRNA sense strand
gaaauuacauaccgagcau

SEQ ID NO: 329362 - RNA, 19 nt, Homo sapiens
  misc_RNA (1)...(19): siRNA sense strand
ucagaaagcucgcaagucu

SEQ ID NO: 329363 - RNA, 19 nt, Homo sapiens
  misc_RNA (1)...(19): siRNA sense strand
uaacggagcucccuauagg

SEQ ID NO: 329364 - RNA, 19 nt, Homo sapiens
  misc_RNA (1)...(19): siRNA sense strand
gcucuuugguuaugaacua

SEQ ID NO: 329365 - RNA, 19 nt, Homo sapiens
  misc_RNA (1)...(19): siRNA sense strand
agaagaaagugaagaaugu

SEQ ID NO: 329366 - RNA, 19 nt, Homo sapiens
  misc_RNA (1)...(19): siRNA sense strand
gaagagaguggaaaggauu

SEQ ID NO: 329367 - RNA, 19 nt, Homo sapiens
  misc_RNA (1)...(19): siRNA sense strand
gagaacagcagauucagaa

SEQ ID NO: 329368 - RNA, 19 nt, Homo sapiens
  misc_RNA (1)...(19): siRNA sense strand
caacaaauucuucaaggaa

SEQ ID NO: 329369 - RNA, 19 nt, Homo sapiens
  misc_RNA (1)...(19): siRNA sense strand
ggaagaagaagaacaaagu

SEQ ID NO: 329370 - RNA, 19 nt, Homo sapiens
  misc_RNA (1)...(19): siRNA sense strand
gaucaacgccauuccugua

SEQ ID NO: 329371 - RNA, 19 nt, Homo sapiens
  misc_RNA (1)...(19): siRNA sense strand
agucuaauguguccuauaa

SEQ ID NO: 329372 - RNA, 19 nt, Homo sapiens
  misc_RNA (1)...(19): siRNA sense strand
gaaauguguuacccuccua

SEQ ID NO: 329373 - RNA, 19 nt, Homo sapiens
  misc_RNA (1)...(19): siRNA sense strand
caacguugaugccauuguu

SEQ ID NO: 329374 - RNA, 19 nt, Homo sapiens
  misc_RNA (1)...(19): siRNA sense strand
ugaagaccauuguugauga

SEQ ID NO: 329375 - RNA, 19 nt, Homo sapiens
  misc_RNA (1)...(19): siRNA sense strand
gcaaugagaaugcuaaugg

SEQ ID NO: 329376 - RNA, 19 nt, Homo sapiens
  misc_RNA (1)...(19): siRNA sense strand
caagaaugccaucauguuu

SEQ ID NO: 329377 - RNA, 19 nt, Homo sapiens
  misc_RNA (1)...(19): siRNA sense strand
ggaguaauccgaaacugaa

SEQ ID NO: 329378 - RNA, 19 nt, Homo sapiens
  misc_RNA (1)...(19): siRNA sense strand
gguauucgcuucaagucuu

SEQ ID NO: 329379 - RNA, 19 nt, Homo sapiens
  misc_RNA (1)...(19): siRNA sense strand
caaaucaacugccuuacag

SEQ ID NO: 329380 - RNA, 19 nt, Homo sapiens
  misc_RNA (1)...(19): siRNA sense strand
ugaccgagaugaccucuau

SEQ ID NO: 329381 - RNA, 19 nt, Homo sapiens
  misc_RNA (1)...(19): siRNA sense strand
gaaggcaacaucuuuccua

SEQ ID NO: 329382 - RNA, 19 nt, Homo sapiens
  misc_RNA (1)...(19): siRNA sense strand
ugaaaugacugcagaagag

SEQ ID NO: 329383 - RNA, 19 nt, Homo sapiens
  misc_RNA (1)...(19): siRNA sense strand
aagaggagcugcugaagga

SEQ ID NO: 329384 - RNA, 19 nt, Homo sapiens
  misc_RNA (1)...(19): siRNA sense strand
gauugaagccauuaaagaa

SEQ ID NO: 329385 - RNA, 19 nt, Homo sapiens
  misc_RNA (1)...(19): siRNA sense strand
gaacuuugauaugguaauc

SEQ ID NO: 329386 - RNA, 19 nt, Homo sapiens
  misc_RNA (1)...(19): siRNA sense strand
cagcaucaauuuaggauuc

SEQ ID NO: 329387 - RNA, 19 nt, Homo sapiens
  misc_RNA (1)...(19): siRNA sense strand
uuacagacauggcucuuug

SEQ ID NO: 329388 - RNA, 19 nt, Homo sapiens
  misc_RNA (1)...(19): siRNA sense strand
ggaggacagugaugaagau

SEQ ID NO: 329389 - RNA, 19 nt, Homo sapiens
  misc_RNA (1)...(19): siRNA sense strand
guagugcgcugguaaaugc

SEQ ID NO: 329390 - RNA, 19 nt, Homo sapiens
  misc_RNA (1)...(19): siRNA sense strand
caagaagauuggaguguuc

SEQ ID NO: 329391 - RNA, 19 nt, Homo sapiens
  misc_RNA (1)...(19): siRNA sense strand
gcagauggaacgagaaaug

SEQ ID NO: 329392 - RNA, 19 nt, Homo sapiens
  misc_RNA (1)...(19): siRNA sense strand
ugaaagaucuauacauucg

SEQ ID NO: 329393 - RNA, 19 nt, Homo sapiens
  misc_RNA (1)...(19): siRNA sense strand
gaaguacagaaacguuaua

SEQ ID NO: 329394 - RNA, 19 nt, Homo sapiens
  misc_RNA (1)...(19): siRNA sense strand
gcauauaccaucgcuguaa

SEQ ID NO: 329395 - RNA, 19 nt, Homo sapiens
  misc_RNA (1)...(19): siRNA sense strand
gaagaagaacaaagucgaa

SEQ ID NO: 329396 - RNA, 19 nt, Homo sapiens
  misc_RNA (1)...(19): siRNA sense strand
gaagauuauucaucagaag

SEQ ID NO: 329397 - RNA, 19 nt, Homo sapiens
  misc_RNA (1)...(19): siRNA sense strand
ugaagagacuguacagcaa

SEQ ID NO: 329398 - RNA, 19 nt, Homo sapiens
  misc_RNA (1)...(19): siRNA sense strand
gaaagagucauggaaauag

SEQ ID NO: 329399 - RNA, 19 nt, Homo sapiens
  misc_RNA (1)...(19): siRNA sense strand
gagcucaaccuaaugaaga

SEQ ID NO: 329400 - RNA, 19 nt, Homo sapiens
  misc_RNA (1)...(19): siRNA sense strand
acacggaugugcaguucua

SEQ ID NO: 329401 - RNA, 19 nt, Homo sapiens
  misc_RNA (1)...(19): siRNA sense strand
aggaggaacuggaauuuga

SEQ ID NO: 329402 - RNA, 19 nt, Homo sapiens
  misc_RNA (1)...(19): siRNA sense strand
ggaaaggagaagaugagua

SEQ ID NO: 329403 - RNA, 19 nt, Homo sapiens
  misc_RNA (1)...(19): siRNA sense strand
guacagcaauuggcggaaa

SEQ ID NO: 329404 - RNA, 19 nt, Homo sapiens
  misc_RNA (1)...(19): siRNA sense strand
ggagacaaaguggauauuu

SEQ ID NO: 329405 - RNA, 19 nt, Homo sapiens
  misc_RNA (1)...(19): siRNA sense strand
caaagaggcgauugacuga

SEQ ID NO: 329406 - RNA, 19 nt, Homo sapiens
  misc_RNA (1)...(19): siRNA sense strand
guaauaagaguagcuuuga

SEQ ID NO: 329407 - RNA, 19 nt, Homo sapiens
  misc_RNA (1)...(19): siRNA sense strand
gggcagacccuucuacugu

SEQ ID NO: 329408 - RNA, 19 nt, Homo sapiens
  misc_RNA (1)...(19): siRNA sense strand
gcaagaauggcaagaagau

SEQ ID NO: 329409 - RNA, 19 nt, Homo sapiens
  misc_RNA (1)...(19): siRNA sense strand
gacauggugugaagauaug

SEQ ID NO: 329410 - RNA, 19 nt, Homo sapiens
  misc_RNA (1)...(19): siRNA sense strand
guauucgcuucaagucuua

SEQ ID NO: 329411 - RNA, 19 nt, Homo sapiens
  misc_RNA (1)...(19): siRNA sense strand
gaaugacugccucaacaaa

SEQ ID NO: 329412 - RNA, 19 nt, Homo sapiens
  misc_RNA (1)...(19): siRNA sense strand
agucugaaauugaagauga

SEQ ID NO: 329413 - RNA, 19 nt, Homo sapiens
  misc_RNA (1)...(19): siRNA sense strand
gagacaaaguggauauuuu

SEQ ID NO: 329414 - RNA, 19 nt, Homo sapiens
  misc_RNA (1)...(19): siRNA sense strand
gcagugcucugggcaggaa

SEQ ID NO: 329415 - RNA, 19 nt, Homo sapiens
  misc_RNA (1)...(19): siRNA sense strand
agaaagcucgcaagucuaa

SEQ ID NO: 329416 - RNA, 19 nt, Homo sapiens
  misc_RNA (1)...(19): siRNA sense strand
gaacagcagauucagaaag

SEQ ID NO: 329417 - RNA, 19 nt, Homo sapiens
  misc_RNA (1)...(19): siRNA sense strand
cauauaccaucgcuguaaa

SEQ ID NO: 329418 - RNA, 19 nt, Homo sapiens
  misc_RNA (1)...(19): siRNA sense strand
ucagugcaguuguggcaua

SEQ ID NO: 329419 - RNA, 19 nt, Homo sapiens
  misc_RNA (1)...(19): siRNA sense strand
gaauuaagacaugguguga

SEQ ID NO: 329420 - RNA, 19 nt, Homo sapiens
  misc_RNA (1)...(19): siRNA sense strand
gcauaugcaugaccgagau

SEQ ID NO: 329421 - RNA, 19 nt, Homo sapiens
  misc_RNA (1)...(19): siRNA sense strand
ucaacaaauucuucaagga

SEQ ID NO: 329422 - RNA, 19 nt, Homo sapiens
  misc_RNA (1)...(19): siRNA sense strand
ggguguugaugaagaaauu

SEQ ID NO: 329423 - RNA, 19 nt, Homo sapiens
  misc_RNA (1)...(19): siRNA sense strand
ggaaacaucagcauaugca

SEQ ID NO: 329424 - RNA, 19 nt, Homo sapiens
  misc_RNA (1)...(19): siRNA sense strand
ggagaaaugauuauugucu

SEQ ID NO: 329425 - RNA, 19 nt, Homo sapiens
  misc_RNA (1)...(19): siRNA sense strand
gcaagucuaauguguccua

SEQ ID NO: 329426 - RNA, 19 nt, Homo sapiens
  misc_RNA (1)...(19): siRNA sense strand
gcucgcaagucuaaugugu

SEQ ID NO: 329427 - RNA, 19 nt, Homo sapiens
  misc_RNA (1)...(19): siRNA sense strand
gaagcaaagaggcgauuga

SEQ ID NO: 329428 - RNA, 19 nt, Homo sapiens
  misc_RNA (1)...(19): siRNA sense strand
cggcucaacucaaugaaga

SEQ ID NO: 329429 - RNA, 19 nt, Homo sapiens
  misc_RNA (1)...(19): siRNA sense strand
gaacugcugaacaaaauua

SEQ ID NO: 329430 - RNA, 19 nt, Homo sapiens
  misc_RNA (1)...(19): siRNA sense strand
caagaaucauaugcacuuu

SEQ ID NO: 329431 - RNA, 19 nt, Homo sapiens
  misc_RNA (1)...(19): siRNA sense strand
uacauucgcccaaauauug

SEQ ID NO: 329432 - RNA, 19 nt, Homo sapiens
  misc_RNA (1)...(19): siRNA sense strand
gagcagauggaacgagaaa

SEQ ID NO: 329433 - RNA, 19 nt, Homo sapiens
  misc_RNA (1)...(19): siRNA sense strand
gucaauggcuuccgcuuca

SEQ ID NO: 329434 - RNA, 19 nt, Homo sapiens
  misc_RNA (1)...(19): siRNA sense strand
ggacaucggcuacaacaug

SEQ ID NO: 329435 - RNA, 19 nt, Homo sapiens
  misc_RNA (1)...(19): siRNA sense strand
gcaaggacaucggcuacaa

SEQ ID NO: 329436 - RNA, 19 nt, Homo sapiens
  misc_RNA (1)...(19): siRNA sense strand
gacaucggcuacaacauga

SEQ ID NO: 329437 - RNA, 19 nt, Homo sapiens
  misc_RNA (1)...(19): siRNA sense strand
gcuacaacaugacucguau

SEQ ID NO: 329438 - RNA, 19 nt, Homo sapiens
  misc_RNA (1)...(19): siRNA sense strand
ggacagcggccagcucuau

SEQ ID NO: 329439 - RNA, 19 nt, Homo sapiens
  misc_RNA (1)...(19): siRNA sense strand
guaucgggcucuucucugu

SEQ ID NO: 329440 - RNA, 19 nt, Homo sapiens
  misc_RNA (1)...(19): siRNA sense strand
aaacucaccacgggaaaua

SEQ ID NO: 329441 - RNA, 19 nt, Homo sapiens
  misc_RNA (1)...(19): siRNA sense strand
ugugaucgccugcuacuuu

SEQ ID NO: 329442 - RNA, 19 nt, Homo sapiens
  misc_RNA (1)...(19): siRNA sense strand
gcaccgagcaggucucuac

SEQ ID NO: 329443 - RNA, 19 nt, Homo sapiens
  misc_RNA (1)...(19): siRNA sense strand
ccaacuaccugugcaugga

SEQ ID NO: 329444 - RNA, 19 nt, Homo sapiens
  misc_RNA (1)...(19): siRNA sense strand
gcaaaugccagcccaucga

SEQ ID NO: 329445 - RNA, 19 nt, Homo sapiens
  misc_RNA (1)...(19): siRNA sense strand
gaacgccucaacauggauu

SEQ ID NO: 329446 - RNA, 19 nt, Homo sapiens
  misc_RNA (1)...(19): siRNA sense strand
aaaugaacaaccagacuaa

SEQ ID NO: 329447 - RNA, 19 nt, Homo sapiens
  misc_RNA (1)...(19): siRNA sense strand
agccguagguuaaagaaga

SEQ ID NO: 329448 - RNA, 19 nt, Homo sapiens
  misc_RNA (1)...(19): siRNA sense strand
ggugugcagccguagguua

SEQ ID NO: 329449 - RNA, 19 nt, Homo sapiens
  misc_RNA (1)...(19): siRNA sense strand
cgaggcagccauccaguug

SEQ ID NO: 329450 - RNA, 19 nt, Homo sapiens
  misc_RNA (1)...(19): siRNA sense strand
gcucuucucugugcuguac

SEQ ID NO: 329451 - RNA, 19 nt, Homo sapiens
  misc_RNA (1)...(19): siRNA sense strand
gccguagguuaaagaagaa

SEQ ID NO: 329452 - RNA, 19 nt, Homo sapiens
  misc_RNA (1)...(19): siRNA sense strand
ccagcgggauguggauuug

SEQ ID NO: 329453 - RNA, 19 nt, Homo sapiens
  misc_RNA (1)...(19): siRNA sense strand
gggcggugcugugcuucuu

SEQ ID NO: 329454 - RNA, 19 nt, Homo sapiens
  misc_RNA (1)...(19): siRNA sense strand
uuacgaacgccucaacaug

SEQ ID NO: 329455 - RNA, 19 nt, Homo sapiens
  misc_RNA (1)...(19): siRNA sense strand
gugugcagccguagguuaa

SEQ ID NO: 329456 - RNA, 19 nt, Homo sapiens
  misc_RNA (1)...(19): siRNA sense strand
agaagaagagccggagaaa

SEQ ID NO: 329457 - RNA, 19 nt, Homo sapiens
  misc_RNA (1)...(19): siRNA sense strand
ggcuacaacaugacucgua

SEQ ID NO: 329458 - RNA, 19 nt, Homo sapiens
  misc_RNA (1)...(19): siRNA sense strand
ggaaacuccccaacaagaa

SEQ ID NO: 329459 - RNA, 19 nt, Homo sapiens
  misc_RNA (1)...(19): siRNA sense strand
ccauccaguugcacgaguu

SEQ ID NO: 329460 - RNA, 19 nt, Homo sapiens
  misc_RNA (1)...(19): siRNA sense strand
acgaacgccucaacaugga

SEQ ID NO: 329461 - RNA, 19 nt, Homo sapiens
  misc_RNA (1)...(19): siRNA sense strand
ccugugugaucgccugcua

SEQ ID NO: 329462 - RNA, 19 nt, Homo sapiens
  misc_RNA (1)...(19): siRNA sense strand
gcgaggcagccauccaguu

SEQ ID NO: 329463 - RNA, 19 nt, Homo sapiens
  misc_RNA (1)...(19): siRNA sense strand
ggugaagaccauccugauc

SEQ ID NO: 329464 - RNA, 19 nt, Homo sapiens
  misc_RNA (1)...(19): siRNA sense strand
gcggccagcucuaugucau

SEQ ID NO: 329465 - RNA, 19 nt, Homo sapiens
  misc_RNA (1)...(19): siRNA sense strand
cucaagugcuccccgauua

SEQ ID NO: 329466 - RNA, 19 nt, Homo sapiens
  misc_RNA (1)...(19): siRNA sense strand
aagaagaagagccggagaa

SEQ ID NO: 329467 - RNA, 19 nt, Homo sapiens
  misc_RNA (1)...(19): siRNA sense strand
acacggacaagcuggagaa

SEQ ID NO: 329468 - RNA, 19 nt, Homo sapiens
  misc_RNA (1)...(19): siRNA sense strand
gaagaagagccggagaaaa

SEQ ID NO: 329469 - RNA, 19 nt, Homo sapiens
  misc_RNA (1)...(19): siRNA sense strand
gcagccguagguuaaagaa

SEQ ID NO: 329470 - RNA, 19 nt, Homo sapiens
  misc_RNA (1)...(19): siRNA sense strand
ccacgggaaauaugagauc

SEQ ID NO: 329471 - RNA, 19 nt, Homo sapiens
  misc_RNA (1)...(19): siRNA sense strand
gccggaaacuccccaacaa

SEQ ID NO: 329472 - RNA, 19 nt, Homo sapiens
  misc_RNA (1)...(19): siRNA sense strand
gcggugcugugcuucuucu

SEQ ID NO: 329473 - RNA, 19 nt, Homo sapiens
  misc_RNA (1)...(19): siRNA sense strand
gaaucugccucucaacaua

SEQ ID NO: 329474 - RNA, 19 nt, Homo sapiens
  misc_RNA (1)...(19): siRNA sense strand
cacagaaagugccuuauua

SEQ ID NO: 329475 - RNA, 19 nt, Homo sapiens
  misc_RNA (1)...(19): siRNA sense strand
gcucggauuucccacauua

SEQ ID NO: 329476 - RNA, 19 nt, Homo sapiens
  misc_RNA (1)...(19): siRNA sense strand
gggcagagaacauuguaua

SEQ ID NO: 329477 - RNA, 19 nt, Homo sapiens
  misc_RNA (1)...(19): siRNA sense strand
gaauuuacaugagcucugu

SEQ ID NO: 329478 - RNA, 19 nt, Homo sapiens
  misc_RNA (1)...(19): siRNA sense strand
ccacagaaagugccuuauu

SEQ ID NO: 329479 - RNA, 19 nt, Homo sapiens
  misc_RNA (1)...(19): siRNA sense strand
ucaagcacacaaagaauuu

SEQ ID NO: 329480 - RNA, 19 nt, Homo sapiens
  misc_RNA (1)...(19): siRNA sense strand
acagaaagugccuuauuaa

SEQ ID NO: 329481 - RNA, 19 nt, Homo sapiens
  misc_RNA (1)...(19): siRNA sense strand
guacugcuauauuugucuu

SEQ ID NO: 329482 - RNA, 19 nt, Homo sapiens
  misc_RNA (1)...(19): siRNA sense strand
uuaguuuacucuucuguug

SEQ ID NO: 329483 - RNA, 19 nt, Homo sapiens
  misc_RNA (1)...(19): siRNA sense strand
caggaugccuaauauugga

SEQ ID NO: 329484 - RNA, 19 nt, Homo sapiens
  misc_RNA (1)...(19): siRNA sense strand
ccucucaacauauauauug

SEQ ID NO: 329485 - RNA, 19 nt, Homo sapiens
  misc_RNA (1)...(19): siRNA sense strand
gcuggagguucguaaagug

SEQ ID NO: 329486 - RNA, 19 nt, Homo sapiens
  misc_RNA (1)...(19): siRNA sense strand
aagcacgccuuccacagaa

SEQ ID NO: 329487 - RNA, 19 nt, Homo sapiens
  misc_RNA (1)...(19): siRNA sense strand
gagcucggauuucccacau

SEQ ID NO: 329488 - RNA, 19 nt, Homo sapiens
  misc_RNA (1)...(19): siRNA sense strand
uaagcacgccuuccacaga

SEQ ID NO: 329489 - RNA, 19 nt, Homo sapiens
  misc_RNA (1)...(19): siRNA sense strand
caacaugccaguucuacag

SEQ ID NO: 329490 - RNA, 19 nt, Homo sapiens
  misc_RNA (1)...(19): siRNA sense strand
ggagguucguaaagugugu

SEQ ID NO: 329491 - RNA, 19 nt, Homo sapiens
  misc_RNA (1)...(19): siRNA sense strand
caugagcucugugcagugu

SEQ ID NO: 329492 - RNA, 19 nt, Homo sapiens
  misc_RNA (1)...(19): siRNA sense strand
acucuucuguugcuacuug

SEQ ID NO: 329493 - RNA, 19 nt, Homo sapiens
  misc_RNA (1)...(19): siRNA sense strand
ccuacaaacagguuauauu

SEQ ID NO: 329494 - RNA, 19 nt, Homo sapiens
  misc_RNA (1)...(19): siRNA sense strand
gagaugaguuggggauuug

SEQ ID NO: 329495 - RNA, 19 nt, Homo sapiens
  misc_RNA (1)...(19): siRNA sense strand
gacaucaagcacacaaaga

SEQ ID NO: 329496 - RNA, 19 nt, Homo sapiens
  misc_RNA (1)...(19): siRNA sense strand
uggcccaguugcacaguaa

SEQ ID NO: 329497 - RNA, 19 nt, Homo sapiens
  misc_RNA (1)...(19): siRNA sense strand
cauccuuaguuuacucuuc

SEQ ID NO: 329498 - RNA, 19 nt, Homo sapiens
  misc_RNA (1)...(19): siRNA sense strand
acaucaagcacacaaagaa

SEQ ID NO: 329499 - RNA, 19 nt, Homo sapiens
  misc_RNA (1)...(19): siRNA sense strand
uaagacaucaagcacacaa

SEQ ID NO: 329500 - RNA, 19 nt, Homo sapiens
  misc_RNA (1)...(19): siRNA sense strand
ugucuucauccuuaguuua

SEQ ID NO: 329501 - RNA, 19 nt, Homo sapiens
  misc_RNA (1)...(19): siRNA sense strand
caucaagcacacaaagaau

SEQ ID NO: 329502 - RNA, 19 nt, Homo sapiens
  misc_RNA (1)...(19): siRNA sense strand
cuucaagccucgagaugag

SEQ ID NO: 329503 - RNA, 19 nt, Homo sapiens
  misc_RNA (1)...(19): siRNA sense strand
cgagaugaguuggggauuu

SEQ ID NO: 329504 - RNA, 19 nt, Homo sapiens
  misc_RNA (1)...(19): siRNA sense strand
gcaacaugccaguucuaca

SEQ ID NO: 329505 - RNA, 19 nt, Homo sapiens
  misc_RNA (1)...(19): siRNA sense strand
uucuguugcuacuugauua

SEQ ID NO: 329506 - RNA, 19 nt, Homo sapiens
  misc_RNA (1)...(19): siRNA sense strand
ggcuggagguucguaaagu

SEQ ID NO: 329507 - RNA, 19 nt, Homo sapiens
  misc_RNA (1)...(19): siRNA sense strand
ucaggaugccuaauauugg

SEQ ID NO: 329508 - RNA, 19 nt, Homo sapiens
  misc_RNA (1)...(19): siRNA sense strand
cagugugccuagaagacuu

SEQ ID NO: 329509 - RNA, 19 nt, Homo sapiens
  misc_RNA (1)...(19): siRNA sense strand
ggauuucccacauuacaac

SEQ ID NO: 329510 - RNA, 19 nt, Homo sapiens
  misc_RNA (1)...(19): siRNA sense strand
gggauuugcccauguaagc

SEQ ID NO: 329511 - RNA, 19 nt, Homo sapiens
  misc_RNA (1)...(19): siRNA sense strand
acuucaggaugccuaauau

SEQ ID NO: 329512 - RNA, 19 nt, Homo sapiens
  misc_RNA (1)...(19): siRNA sense strand
ggaugccuaauauuggauu

SEQ ID NO: 329513 - RNA, 19 nt, Homo sapiens
  misc_RNA (1)...(19): siRNA sense strand
gcacacaaagaauuuuaug

SEQ ID NO: 329514 - RNA, 19 nt, Homo sapiens
  misc_RNA (1)...(19): siRNA sense strand
ggcagagaacauuguauag

SEQ ID NO: 329515 - RNA, 19 nt, Homo sapiens
  misc_RNA (1)...(19): siRNA sense strand
uucaggaugccuaauauug

SEQ ID NO: 329516 - RNA, 19 nt, Homo sapiens
  misc_RNA (1)...(19): siRNA sense strand
gaacaaccuuagagauuca

SEQ ID NO: 329517 - RNA, 19 nt, Homo sapiens
  misc_RNA (1)...(19): siRNA sense strand
cagcaaagauggcccaaga

SEQ ID NO: 329518 - RNA, 19 nt, Homo sapiens
  misc_RNA (1)...(19): siRNA sense strand
ccaucgaccuuaauacuuu

SEQ ID NO: 329519 - RNA, 19 nt, Homo sapiens
  misc_RNA (1)...(19): siRNA sense strand
gggaacaacugcacuguca

SEQ ID NO: 329520 - RNA, 19 nt, Homo sapiens
  misc_RNA (1)...(19): siRNA sense strand
gcacagaggagcaccuaaa

SEQ ID NO: 329521 - RNA, 19 nt, Homo sapiens
  misc_RNA (1)...(19): siRNA sense strand
gcacaucgguaccuaugau

SEQ ID NO: 329522 - RNA, 19 nt, Homo sapiens
  misc_RNA (1)...(19): siRNA sense strand
ggaagaaggcuauaagaag

SEQ ID NO: 329523 - RNA, 19 nt, Homo sapiens
  misc_RNA (1)...(19): siRNA sense strand
gcuauaagaagcacuguuu

SEQ ID NO: 329524 - RNA, 19 nt, Homo sapiens
  misc_RNA (1)...(19): siRNA sense strand
caagggcacuagugucauu

SEQ ID NO: 329525 - RNA, 19 nt, Homo sapiens
  misc_RNA (1)...(19): siRNA sense strand
aggagaagcuggagcagua

SEQ ID NO: 329526 - RNA, 19 nt, Homo sapiens
  misc_RNA (1)...(19): siRNA sense strand
aaagauggcccaagagaaa

SEQ ID NO: 329527 - RNA, 19 nt, Homo sapiens
  misc_RNA (1)...(19): siRNA sense strand
gcgcaaggaugaaacauac

SEQ ID NO: 329528 - RNA, 19 nt, Homo sapiens
  misc_RNA (1)...(19): siRNA sense strand
gcaaagauggcccaagaga

SEQ ID NO: 329529 - RNA, 19 nt, Homo sapiens
  misc_RNA (1)...(19): siRNA sense strand
ucacuucacuggcaagaau

SEQ ID NO: 329530 - RNA, 19 nt, Homo sapiens
  misc_RNA (1)...(19): siRNA sense strand
aagaagcacuguuucaaug

SEQ ID NO: 329531 - RNA, 19 nt, Homo sapiens
  misc_RNA (1)...(19): siRNA sense strand
gagaggaggccacagagaa

SEQ ID NO: 329532 - RNA, 19 nt, Homo sapiens
  misc_RNA (1)...(19): siRNA sense strand
caacugcacugucacaacu

SEQ ID NO: 329533 - RNA, 19 nt, Homo sapiens
  misc_RNA (1)...(19): siRNA sense strand
caaagcagcugugucuaca

SEQ ID NO: 329534 - RNA, 19 nt, Homo sapiens
  misc_RNA (1)...(19): siRNA sense strand
gcagagaggaggccacaga

SEQ ID NO: 329535 - RNA, 19 nt, Homo sapiens
  misc_RNA (1)...(19): siRNA sense strand
ugaacaaccuuagagauuc

SEQ ID NO: 329536 - RNA, 19 nt, Homo sapiens
  misc_RNA (1)...(19): siRNA sense strand
ccugguaccugcacaaugu

SEQ ID NO: 329537 - RNA, 19 nt, Homo sapiens
  misc_RNA (1)...(19): siRNA sense strand
gaaauccuucggugacauu

SEQ ID NO: 329538 - RNA, 19 nt, Homo sapiens
  misc_RNA (1)...(19): siRNA sense strand
gaacaacugcacugucaca

SEQ ID NO: 329539 - RNA, 19 nt, Homo sapiens
  misc_RNA (1)...(19): siRNA sense strand
ggaagccccucaucaugua

SEQ ID NO: 329540 - RNA, 19 nt, Homo sapiens
  misc_RNA (1)...(19): siRNA sense strand
ggacgaggaaugggaauug

SEQ ID NO: 329541 - RNA, 19 nt, Homo sapiens
  misc_RNA (1)...(19): siRNA sense strand
ucaagaaccucggcaccaa

SEQ ID NO: 329542 - RNA, 19 nt, Homo sapiens
  misc_RNA (1)...(19): siRNA sense strand
gcaaagcagcugugucuac

SEQ ID NO: 329543 - RNA, 19 nt, Homo sapiens
  misc_RNA (1)...(19): siRNA sense strand
cagaggagcaccuaaagga

SEQ ID NO: 329544 - RNA, 19 nt, Homo sapiens
  misc_RNA (1)...(19): siRNA sense strand
aggaucagcucaucaggaa

SEQ ID NO: 329545 - RNA, 19 nt, Homo sapiens
  misc_RNA (1)...(19): siRNA sense strand
cacaaugucuacccagaga

SEQ ID NO: 329546 - RNA, 19 nt, Homo sapiens
  misc_RNA (1)...(19): siRNA sense strand
gagaaauccuucggugaca

SEQ ID NO: 329547 - RNA, 19 nt, Homo sapiens
  misc_RNA (1)...(19): siRNA sense strand
gggagaacguggaaauguc

SEQ ID NO: 329548 - RNA, 19 nt, Homo sapiens
  misc_RNA (1)...(19): siRNA sense strand
ggacagcuacaagaagauu

SEQ ID NO: 329549 - RNA, 19 nt, Homo sapiens
  misc_RNA (1)...(19): siRNA sense strand
uaagaagcacuguuucaau

SEQ ID NO: 329550 - RNA, 19 nt, Homo sapiens
  misc_RNA (1)...(19): siRNA sense strand
caaagauggcccaagagaa

SEQ ID NO: 329551 - RNA, 19 nt, Homo sapiens
  misc_RNA (1)...(19): siRNA sense strand
ggauggacagcuacaagaa

SEQ ID NO: 329552 - RNA, 19 nt, Homo sapiens
  misc_RNA (1)...(19): siRNA sense strand
gagcacaucgguaccuaug

SEQ ID NO: 329553 - RNA, 19 nt, Homo sapiens
  misc_RNA (1)...(19): siRNA sense strand
gagauucaaugcccaagcu

SEQ ID NO: 329554 - RNA, 19 nt, Homo sapiens
  misc_RNA (1)...(19): siRNA sense strand
caucaguuguggcucuuug

SEQ ID NO: 329555 - RNA, 19 nt, Homo sapiens
  misc_RNA (1)...(19): siRNA sense strand
gaaacacuuccuccacaug

SEQ ID NO: 329556 - RNA, 19 nt, Homo sapiens
  misc_RNA (1)...(19): siRNA sense strand
aagcagcugugucuacaug

SEQ ID NO: 329557 - RNA, 19 nt, Homo sapiens
  misc_RNA (1)...(19): siRNA sense strand
aaacacuuccuccacauga

SEQ ID NO: 329558 - RNA, 19 nt, Homo sapiens
  misc_RNA (1)...(19): siRNA sense strand
ccaccagcgugaucauugu

SEQ ID NO: 329559 - RNA, 19 nt, Homo sapiens
  misc_RNA (1)...(19): siRNA sense strand
gcccagacaucgucaccau

SEQ ID NO: 329560 - RNA, 19 nt, Homo sapiens
  misc_RNA (1)...(19): siRNA sense strand
cuugggagcugucacuuca

SEQ ID NO: 329561 - RNA, 19 nt, Homo sapiens
  misc_RNA (1)...(19): siRNA sense strand
gaaccucggcaccaaccaa

SEQ ID NO: 329562 - RNA, 19 nt, Homo sapiens
  misc_RNA (1)...(19): siRNA sense strand
aaacauaccccaucaaauc

SEQ ID NO: 329563 - RNA, 19 nt, Homo sapiens
  misc_RNA (1)...(19): siRNA sense strand
gcagcugugucuacauguc

SEQ ID NO: 329564 - RNA, 19 nt, Homo sapiens
  misc_RNA (1)...(19): siRNA sense strand
ccaaaucagggcuccagaa

SEQ ID NO: 329565 - RNA, 19 nt, Homo sapiens
  misc_RNA (1)...(19): siRNA sense strand
aggcggaggugcucacguu

SEQ ID NO: 329566 - RNA, 19 nt, Homo sapiens
  misc_RNA (1)...(19): siRNA sense strand
uauaagaagcacuguuuca

SEQ ID NO: 329567 - RNA, 19 nt, Homo sapiens
  misc_RNA (1)...(19): siRNA sense strand
agacucuguucuccauaaa

SEQ ID NO: 329568 - RNA, 19 nt, Homo sapiens
  misc_RNA (1)...(19): siRNA sense strand
gaucagcucaucaggaacu

SEQ ID NO: 329569 - RNA, 19 nt, Homo sapiens
  misc_RNA (1)...(19): siRNA sense strand
ggcgcaaggaugaaacaua

SEQ ID NO: 329570 - RNA, 19 nt, Homo sapiens
  misc_RNA (1)...(19): siRNA sense strand
caaaucagggcuccagaag

SEQ ID NO: 329571 - RNA, 19 nt, Homo sapiens
  misc_RNA (1)...(19): siRNA sense strand
guuccuggaugcccacugu

SEQ ID NO: 329572 - RNA, 19 nt, Homo sapiens
  misc_RNA (1)...(19): siRNA sense strand
gggaauuggcccaggauca

SEQ ID NO: 329573 - RNA, 19 nt, Homo sapiens
  misc_RNA (1)...(19): siRNA sense strand
gccacaacaucgcaaagca

SEQ ID NO: 329574 - RNA, 19 nt, Homo sapiens
  misc_RNA (1)...(19): siRNA sense strand
gcggcaaccaguacuuuga

SEQ ID NO: 329575 - RNA, 19 nt, Homo sapiens
  misc_RNA (1)...(19): siRNA sense strand
ucgaaucgcugaggacaag

SEQ ID NO: 329576 - RNA, 19 nt, Homo sapiens
  misc_RNA (1)...(19): siRNA sense strand
gcacuguuucaaugccuuu

SEQ ID NO: 329577 - RNA, 19 nt, Homo sapiens
  misc_RNA (1)...(19): siRNA sense strand
ggaaaaggaagaaggcuau

SEQ ID NO: 329578 - RNA, 19 nt, Homo sapiens
  misc_RNA (1)...(19): siRNA sense strand
agagggaccuucgccacaa

SEQ ID NO: 329579 - RNA, 19 nt, Homo sapiens
  misc_RNA (1)...(19): siRNA sense strand
aaaggaagaaggcuauaag

SEQ ID NO: 329580 - RNA, 19 nt, Homo sapiens
  misc_RNA (1)...(19): siRNA sense strand
augaacaaccuuagagauu

SEQ ID NO: 329581 - RNA, 19 nt, Homo sapiens
  misc_RNA (1)...(19): siRNA sense strand
aggaagaaggcuauaagaa

SEQ ID NO: 329582 - RNA, 19 nt, Homo sapiens
  misc_RNA (1)...(19): siRNA sense strand
ccagcgugaucauuguguu

SEQ ID NO: 329583 - RNA, 19 nt, Homo sapiens
  misc_RNA (1)...(19): siRNA sense strand
ggaauuggcccaggaucag

SEQ ID NO: 329584 - RNA, 19 nt, Homo sapiens
  misc_RNA (1)...(19): siRNA sense strand
ggaugugggugagaacaac

SEQ ID NO: 329585 - RNA, 19 nt, Homo sapiens
  misc_RNA (1)...(19): siRNA sense strand
auggacagcuacaagaaga

SEQ ID NO: 329586 - RNA, 19 nt, Homo sapiens
  misc_RNA (1)...(19): siRNA sense strand
ugucguaggccauguguuc

SEQ ID NO: 329587 - RNA, 19 nt, Homo sapiens
  misc_RNA (1)...(19): siRNA sense strand
ccauagccgaggcaacuuu

SEQ ID NO: 329588 - RNA, 19 nt, Homo sapiens
  misc_RNA (1)...(19): siRNA sense strand
aggagcaccuaaaggagaa

SEQ ID NO: 329589 - RNA, 19 nt, Homo sapiens
  misc_RNA (1)...(19): siRNA sense strand
aguuguggcucuuugucua

SEQ ID NO: 329590 - RNA, 19 nt, Homo sapiens
  misc_RNA (1)...(19): siRNA sense strand
caaugucuacccagagaug

SEQ ID NO: 329591 - RNA, 19 nt, Homo sapiens
  misc_RNA (1)...(19): siRNA sense strand
caucgguaccuaugauaau

SEQ ID NO: 329592 - RNA, 19 nt, Homo sapiens
  misc_RNA (1)...(19): siRNA sense strand
gcucaaggagaucauacug

SEQ ID NO: 329593 - RNA, 19 nt, Homo sapiens
  misc_RNA (1)...(19): siRNA sense strand
ucgcaaagcagcugugucu

SEQ ID NO: 329594 - RNA, 19 nt, Homo sapiens
  misc_RNA (1)...(19): siRNA sense strand
cauggugggcugcgccuuu

SEQ ID NO: 329595 - RNA, 19 nt, Homo sapiens
  misc_RNA (1)...(19): siRNA sense strand
cugaguguguggaccagaa

SEQ ID NO: 329596 - RNA, 19 nt, Homo sapiens
  misc_RNA (1)...(19): siRNA sense strand
gacugcagcugagggaaca

SEQ ID NO: 329597 - RNA, 19 nt, Homo sapiens
  misc_RNA (1)...(19): siRNA sense strand
gauggacagcuacaagaag

SEQ ID NO: 329598 - RNA, 19 nt, Homo sapiens
  misc_RNA (1)...(19): siRNA sense strand
ucugguaccugccugacau

SEQ ID NO: 329599 - RNA, 19 nt, Homo sapiens
  misc_RNA (1)...(19): siRNA sense strand
gacgaggaaugggaauugg

SEQ ID NO: 329600 - RNA, 19 nt, Homo sapiens
  misc_RNA (1)...(19): siRNA sense strand
ccaugaacaaccuuagaga

SEQ ID NO: 329601 - RNA, 19 nt, Homo sapiens
  misc_RNA (1)...(19): siRNA sense strand
ucaaugcccaagcuccaaa

SEQ ID NO: 329602 - RNA, 19 nt, Homo sapiens
  misc_RNA (1)...(19): siRNA sense strand
caucaggaacucaggaucu

SEQ ID NO: 329603 - RNA, 19 nt, Homo sapiens
  misc_RNA (1)...(19): siRNA sense strand
acugcacugucacaacuuu

SEQ ID NO: 329604 - RNA, 19 nt, Homo sapiens
  misc_RNA (1)...(19): siRNA sense strand
gaggccaugaacaaccuua

SEQ ID NO: 329605 - RNA, 19 nt, Homo sapiens
  misc_RNA (1)...(19): siRNA sense strand
caugaacaaccuuagagau

SEQ ID NO: 329606 - RNA, 19 nt, Homo sapiens
  misc_RNA (1)...(19): siRNA sense strand
auaagaagcacuguuucaa

SEQ ID NO: 329607 - RNA, 19 nt, Homo sapiens
  misc_RNA (1)...(19): siRNA sense strand
gcagaggcgcaaggaugaa

SEQ ID NO: 329608 - RNA, 19 nt, Homo sapiens
  misc_RNA (1)...(19): siRNA sense strand
gucaccaucgaccuuaaua

SEQ ID NO: 329609 - RNA, 19 nt, Homo sapiens
  misc_RNA (1)...(19): siRNA sense strand
gaaaaggaagaaggcuaua

SEQ ID NO: 329610 - RNA, 19 nt, Homo sapiens
  misc_RNA (1)...(19): siRNA sense strand
ggccaugaacaaccuuaga

SEQ ID NO: 329611 - RNA, 19 nt, Homo sapiens
  misc_RNA (1)...(19): siRNA sense strand
gaaacauaccccaucaaau

SEQ ID NO: 329612 - RNA, 19 nt, Homo sapiens
  misc_RNA (1)...(19): siRNA sense strand
ggcaaccaguacuuugagu

SEQ ID NO: 329613 - RNA, 19 nt, Homo sapiens
  misc_RNA (1)...(19): siRNA sense strand
caaccaaugccuggaugug

SEQ ID NO: 329614 - RNA, 19 nt, Homo sapiens
  misc_RNA (1)...(19): siRNA sense strand
gacagcuacaagaagauuu

SEQ ID NO: 329615 - RNA, 19 nt, Homo sapiens
  misc_RNA (1)...(19): siRNA sense strand
cccaagggcacuaguguca

SEQ ID NO: 329616 - RNA, 19 nt, Homo sapiens
  misc_RNA (1)...(19): siRNA sense strand
gaagaagcgcuuugaggaa

SEQ ID NO: 329617 - RNA, 19 nt, Homo sapiens
  misc_RNA (1)...(19): siRNA sense strand
gcaauaaguccauggagau

SEQ ID NO: 329618 - RNA, 19 nt, Homo sapiens
  misc_RNA (1)...(19): siRNA sense strand
ugaagaauguggacaaggu

SEQ ID NO: 329619 - RNA, 19 nt, Homo sapiens
  misc_RNA (1)...(19): siRNA sense strand
ggcgguaccugcagaugaa

SEQ ID NO: 329620 - RNA, 19 nt, Homo sapiens
  misc_RNA (1)...(19): siRNA sense strand
ccauggagaucgagguguu

SEQ ID NO: 329621 - RNA, 19 nt, Homo sapiens
  misc_RNA (1)...(19): siRNA sense strand
ccagugccuucuucaccua

SEQ ID NO: 329622 - RNA, 19 nt, Homo sapiens
  misc_RNA (1)...(19): siRNA sense strand
gcgcggagaucaccuacac

SEQ ID NO: 329623 - RNA, 19 nt, Homo sapiens
  misc_RNA (1)...(19): siRNA sense strand
gcaugaccuucacgagcaa

SEQ ID NO: 329624 - RNA, 19 nt, Homo sapiens
  misc_RNA (1)...(19): siRNA sense strand
gggcgguaccugcagauga

SEQ ID NO: 329625 - RNA, 19 nt, Homo sapiens
  misc_RNA (1)...(19): siRNA sense strand
ucggugagguggcgcaugu

SEQ ID NO: 329626 - RNA, 19 nt, Homo sapiens
  misc_RNA (1)...(19): siRNA sense strand
cccugucgcugaagaaugu

SEQ ID NO: 329627 - RNA, 19 nt, Homo sapiens
  misc_RNA (1)...(19): siRNA sense strand
gcugaagaauguggacaag

SEQ ID NO: 329628 - RNA, 19 nt, Homo sapiens
  misc_RNA (1)...(19): siRNA sense strand
agaccgaggacgagaagaa

SEQ ID NO: 329629 - RNA, 19 nt, Homo sapiens
  misc_RNA (1)...(19): siRNA sense strand
gaggcaggcgccaucauca

SEQ ID NO: 329630 - RNA, 19 nt, Homo sapiens
  misc_RNA (1)...(19): siRNA sense strand
acccagagccgaacacugu

SEQ ID NO: 329631 - RNA, 19 nt, Homo sapiens
  misc_RNA (1)...(19): siRNA sense strand
ggugccuccuguuguguau

SEQ ID NO: 329632 - RNA, 19 nt, Homo sapiens
  misc_RNA (1)...(19): siRNA sense strand
ggacgagaagaagcgcuuu

SEQ ID NO: 329633 - RNA, 19 nt, Homo sapiens
  misc_RNA (1)...(19): siRNA sense strand
gguaugaagcccagaagcu

SEQ ID NO: 329634 - RNA, 19 nt, Homo sapiens
  misc_RNA (1)...(19): siRNA sense strand
auaaguccauggagaucga

SEQ ID NO: 329635 - RNA, 19 nt, Homo sapiens
  misc_RNA (1)...(19): siRNA sense strand
acggaggugugaccaugaa

SEQ ID NO: 329636 - RNA, 19 nt, Homo sapiens
  misc_RNA (1)...(19): siRNA sense strand
gcgcaccgacuuccugucu

SEQ ID NO: 329637 - RNA, 19 nt, Homo sapiens
  misc_RNA (1)...(19): siRNA sense strand
gacgagaagaagcgcuuug

SEQ ID NO: 329638 - RNA, 19 nt, Homo sapiens
  misc_RNA (1)...(19): siRNA sense strand
ugaagaauguggacaaggu

SEQ ID NO: 329639 - RNA, 19 nt, Homo sapiens
  misc_RNA (1)...(19): siRNA sense strand
gcgcggagaucaccuacac

SEQ ID NO: 329640 - RNA, 19 nt, Homo sapiens
  misc_RNA (1)...(19): siRNA sense strand
ucggugagguggcgcaugu

SEQ ID NO: 329641 - RNA, 19 nt, Homo sapiens
  misc_RNA (1)...(19): siRNA sense strand
cccugucgcugaagaaugu

SEQ ID NO: 329642 - RNA, 19 nt, Homo sapiens
  misc_RNA (1)...(19): siRNA sense strand
gcugaagaauguggacaag

SEQ ID NO: 329643 - RNA, 19 nt, Homo sapiens
  misc_RNA (1)...(19): siRNA sense strand
gaggcaggcgccaucauca

SEQ ID NO: 329644 - RNA, 19 nt, Homo sapiens
  misc_RNA (1)...(19): siRNA sense strand
acccagagccgaacacugu

SEQ ID NO: 329645 - RNA, 19 nt, Homo sapiens
  misc_RNA (1)...(19): siRNA sense strand
ggugccuccuguuguguau

SEQ ID NO: 329646 - RNA, 19 nt, Homo sapiens
  misc_RNA (1)...(19): siRNA sense strand
gguaugaagcccagaagcu

SEQ ID NO: 329647 - RNA, 19 nt, Homo sapiens
  misc_RNA (1)...(19): siRNA sense strand
acggaggugugaccaugaa

SEQ ID NO: 329648 - RNA, 19 nt, Homo sapiens
  misc_RNA (1)...(19): siRNA sense strand
gcgcaccgacuuccugucu

SEQ ID NO: 329649 - RNA, 19 nt, Homo sapiens
  misc_RNA (1)...(19): siRNA sense strand
ugaagaauguggacaaggu

SEQ ID NO: 329650 - RNA, 19 nt, Homo sapiens
  misc_RNA (1)...(19): siRNA sense strand
gcgcggagaucaccuacac

SEQ ID NO: 329651 - RNA, 19 nt, Homo sapiens
  misc_RNA (1)...(19): siRNA sense strand
gcaugaccuucacgagcaa

SEQ ID NO: 329652 - RNA, 19 nt, Homo sapiens
  misc_RNA (1)...(19): siRNA sense strand
ucggugagguggcgcaugu

SEQ ID NO: 329653 - RNA, 19 nt, Homo sapiens
  misc_RNA (1)...(19): siRNA sense strand
cccugucgcugaagaaugu

SEQ ID NO: 329654 - RNA, 19 nt, Homo sapiens
  misc_RNA (1)...(19): siRNA sense strand
gcugaagaauguggacaag

SEQ ID NO: 329655 - RNA, 19 nt, Homo sapiens
  misc_RNA (1)...(19): siRNA sense strand
gaggcaggcgccaucauca

SEQ ID NO: 329656 - RNA, 19 nt, Homo sapiens
  misc_RNA (1)...(19): siRNA sense strand
acccagagccgaacacugu

SEQ ID NO: 329657 - RNA, 19 nt, Homo sapiens
  misc_RNA (1)...(19): siRNA sense strand
ggugccuccuguuguguau

SEQ ID NO: 329658 - RNA, 19 nt, Homo sapiens
  misc_RNA (1)...(19): siRNA sense strand
gguaugaagcccagaagcu

SEQ ID NO: 329659 - RNA, 19 nt, Homo sapiens
  misc_RNA (1)...(19): siRNA sense strand
acggaggugugaccaugaa

SEQ ID NO: 329660 - RNA, 19 nt, Homo sapiens
  misc_RNA (1)...(19): siRNA sense strand
gcgcaccgacuuccugucu

SEQ ID NO: 329661 - RNA, 19 nt, Homo sapiens
  misc_RNA (1)...(19): siRNA sense strand
gaagaagcgcuuugaggaa

SEQ ID NO: 329662 - RNA, 19 nt, Homo sapiens
  misc_RNA (1)...(19): siRNA sense strand
gcaauaaguccauggagau

SEQ ID NO: 329663 - RNA, 19 nt, Homo sapiens
  misc_RNA (1)...(19): siRNA sense strand
ugaagaauguggacaaggu

SEQ ID NO: 329664 - RNA, 19 nt, Homo sapiens
  misc_RNA (1)...(19): siRNA sense strand
ggcgguaccugcagaugaa

SEQ ID NO: 329665 - RNA, 19 nt, Homo sapiens
  misc_RNA (1)...(19): siRNA sense strand
ccauggagaucgagguguu

SEQ ID NO: 329666 - RNA, 19 nt, Homo sapiens
  misc_RNA (1)...(19): siRNA sense strand
ccagugccuucuucaccua

SEQ ID NO: 329667 - RNA, 19 nt, Homo sapiens
  misc_RNA (1)...(19): siRNA sense strand
gcgcggagaucaccuacac

SEQ ID NO: 329668 - RNA, 19 nt, Homo sapiens
  misc_RNA (1)...(19): siRNA sense strand
gcaugaccuucacgagcaa

SEQ ID NO: 329669 - RNA, 19 nt, Homo sapiens
  misc_RNA (1)...(19): siRNA sense strand
gggcgguaccugcagauga

SEQ ID NO: 329670 - RNA, 19 nt, Homo sapiens
  misc_RNA (1)...(19): siRNA sense strand
ucggugagguggcgcaugu

SEQ ID NO: 329671 - RNA, 19 nt, Homo sapiens
  misc_RNA (1)...(19): siRNA sense strand
cccugucgcugaagaaugu

SEQ ID NO: 329672 - RNA, 19 nt, Homo sapiens
  misc_RNA (1)...(19): siRNA sense strand
gcugaagaauguggacaag

SEQ ID NO: 329673 - RNA, 19 nt, Homo sapiens
  misc_RNA (1)...(19): siRNA sense strand
agaccgaggacgagaagaa

SEQ ID NO: 329674 - RNA, 19 nt, Homo sapiens
  misc_RNA (1)...(19): siRNA sense strand
gaggcaggcgccaucauca

SEQ ID NO: 329675 - RNA, 19 nt, Homo sapiens
  misc_RNA (1)...(19): siRNA sense strand
acccagagccgaacacugu

SEQ ID NO: 329676 - RNA, 19 nt, Homo sapiens
  misc_RNA (1)...(19): siRNA sense strand
ggugccuccuguuguguau

SEQ ID NO: 329677 - RNA, 19 nt, Homo sapiens
  misc_RNA (1)...(19): siRNA sense strand
ggacgagaagaagcgcuuu

SEQ ID NO: 329678 - RNA, 19 nt, Homo sapiens
  misc_RNA (1)...(19): siRNA sense strand
gguaugaagcccagaagcu

SEQ ID NO: 329679 - RNA, 19 nt, Homo sapiens
  misc_RNA (1)...(19): siRNA sense strand
auaaguccauggagaucga

SEQ ID NO: 329680 - RNA, 19 nt, Homo sapiens
  misc_RNA (1)...(19): siRNA sense strand
acggaggugugaccaugaa

SEQ ID NO: 329681 - RNA, 19 nt, Homo sapiens
  misc_RNA (1)...(19): siRNA sense strand
gcgcaccgacuuccugucu

SEQ ID NO: 329682 - RNA, 19 nt, Homo sapiens
  misc_RNA (1)...(19): siRNA sense strand
gacgagaagaagcgcuuug

SEQ ID NO: 329683 - RNA, 19 nt, Homo sapiens
  misc_RNA (1)...(19): siRNA sense strand
gaagaagcgcuuugaggaa

SEQ ID NO: 329684 - RNA, 19 nt, Homo sapiens
  misc_RNA (1)...(19): siRNA sense strand
gcaauaaguccauggagau

SEQ ID NO: 329685 - RNA, 19 nt, Homo sapiens
  misc_RNA (1)...(19): siRNA sense strand
ugaagaauguggacaaggu

SEQ ID NO: 329686 - RNA, 19 nt, Homo sapiens
  misc_RNA (1)...(19): siRNA sense strand
ggcgguaccugcagaugaa

SEQ ID NO: 329687 - RNA, 19 nt, Homo sapiens
  misc_RNA (1)...(19): siRNA sense strand
ccauggagaucgagguguu

SEQ ID NO: 329688 - RNA, 19 nt, Homo sapiens
  misc_RNA (1)...(19): siRNA sense strand
ccagugccuucuucaccua

SEQ ID NO: 329689 - RNA, 19 nt, Homo sapiens
  misc_RNA (1)...(19): siRNA sense strand
gcgcggagaucaccuacac

SEQ ID NO: 329690 - RNA, 19 nt, Homo sapiens
  misc_RNA (1)...(19): siRNA sense strand
gcaugaccuucacgagcaa

SEQ ID NO: 329691 - RNA, 19 nt, Homo sapiens
  misc_RNA (1)...(19): siRNA sense strand
gggcgguaccugcagauga

SEQ ID NO: 329692 - RNA, 19 nt, Homo sapiens
  misc_RNA (1)...(19): siRNA sense strand
ucggugagguggcgcaugu

SEQ ID NO: 329693 - RNA, 19 nt, Homo sapiens
  misc_RNA (1)...(19): siRNA sense strand
cccugucgcugaagaaugu

SEQ ID NO: 329694 - RNA, 19 nt, Homo sapiens
  misc_RNA (1)...(19): siRNA sense strand
gcugaagaauguggacaag

SEQ ID NO: 329695 - RNA, 19 nt, Homo sapiens
  misc_RNA (1)...(19): siRNA sense strand
agaccgaggacgagaagaa

SEQ ID NO: 329696 - RNA, 19 nt, Homo sapiens
  misc_RNA (1)...(19): siRNA sense strand
gaggcaggcgccaucauca

SEQ ID NO: 329697 - RNA, 19 nt, Homo sapiens
  misc_RNA (1)...(19): siRNA sense strand
acccagagccgaacacugu

SEQ ID NO: 329698 - RNA, 19 nt, Homo sapiens
  misc_RNA (1)...(19): siRNA sense strand
ggugccuccuguuguguau

SEQ ID NO: 329699 - RNA, 19 nt, Homo sapiens
  misc_RNA (1)...(19): siRNA sense strand
ggacgagaagaagcgcuuu

SEQ ID NO: 329700 - RNA, 19 nt, Homo sapiens
  misc_RNA (1)...(19): siRNA sense strand
gguaugaagcccagaagcu

SEQ ID NO: 329701 - RNA, 19 nt, Homo sapiens
  misc_RNA (1)...(19): siRNA sense strand
auaaguccauggagaucga

SEQ ID NO: 329702 - RNA, 19 nt, Homo sapiens
  misc_RNA (1)...(19): siRNA sense strand
acggaggugugaccaugaa

SEQ ID NO: 329703 - RNA, 19 nt, Homo sapiens
  misc_RNA (1)...(19): siRNA sense strand
gcgcaccgacuuccugucu

SEQ ID NO: 329704 - RNA, 19 nt, Homo sapiens
  misc_RNA (1)...(19): siRNA sense strand
gacgagaagaagcgcuuug

SEQ ID NO: 329705 - RNA, 19 nt, Homo sapiens
  misc_RNA (1)...(19): siRNA sense strand
gaagaagcgcuuugaggaa

SEQ ID NO: 329706 - RNA, 19 nt, Homo sapiens
  misc_RNA (1)...(19): siRNA sense strand
gcaauaaguccauggagau

SEQ ID NO: 329707 - RNA, 19 nt, Homo sapiens
  misc_RNA (1)...(19): siRNA sense strand
ugaagaauguggacaaggu

SEQ ID NO: 329708 - RNA, 19 nt, Homo sapiens
  misc_RNA (1)...(19): siRNA sense strand
ggcgguaccugcagaugaa

SEQ ID NO: 329709 - RNA, 19 nt, Homo sapiens
  misc_RNA (1)...(19): siRNA sense strand
ccauggagaucgagguguu

SEQ ID NO: 329710 - RNA, 19 nt, Homo sapiens
  misc_RNA (1)...(19): siRNA sense strand
ccagugccuucuucaccua

SEQ ID NO: 329711 - RNA, 19 nt, Homo sapiens
  misc_RNA (1)...(19): siRNA sense strand
gcgcggagaucaccuacac

SEQ ID NO: 329712 - RNA, 19 nt, Homo sapiens
  misc_RNA (1)...(19): siRNA sense strand
gcaugaccuucacgagcaa

SEQ ID NO: 329713 - RNA, 19 nt, Homo sapiens
  misc_RNA (1)...(19): siRNA sense strand
gggcgguaccugcagauga

SEQ ID NO: 329714 - RNA, 19 nt, Homo sapiens
  misc_RNA (1)...(19): siRNA sense strand
ucggugagguggcgcaugu

SEQ ID NO: 329715 - RNA, 19 nt, Homo sapiens
  misc_RNA (1)...(19): siRNA sense strand
cccugucgcugaagaaugu

SEQ ID NO: 329716 - RNA, 19 nt, Homo sapiens
  misc_RNA (1)...(19): siRNA sense strand
gcugaagaauguggacaag

SEQ ID NO: 329717 - RNA, 19 nt, Homo sapiens
  misc_RNA (1)...(19): siRNA sense strand
agaccgaggacgagaagaa

SEQ ID NO: 329718 - RNA, 19 nt, Homo sapiens
  misc_RNA (1)...(19): siRNA sense strand
gaggcaggcgccaucauca

SEQ ID NO: 329719 - RNA, 19 nt, Homo sapiens
  misc_RNA (1)...(19): siRNA sense strand
acccagagccgaacacugu

SEQ ID NO: 329720 - RNA, 19 nt, Homo sapiens
  misc_RNA (1)...(19): siRNA sense strand
ggugccuccuguuguguau

SEQ ID NO: 329721 - RNA, 19 nt, Homo sapiens
  misc_RNA (1)...(19): siRNA sense strand
ggacgagaagaagcgcuuu

SEQ ID NO: 329722 - RNA, 19 nt, Homo sapiens
  misc_RNA (1)...(19): siRNA sense strand
gguaugaagcccagaagcu

SEQ ID NO: 329723 - RNA, 19 nt, Homo sapiens
  misc_RNA (1)...(19): siRNA sense strand
auaaguccauggagaucga

SEQ ID NO: 329724 - RNA, 19 nt, Homo sapiens
  misc_RNA (1)...(19): siRNA sense strand
acggaggugugaccaugaa

SEQ ID NO: 329725 - RNA, 19 nt, Homo sapiens
  misc_RNA (1)...(19): siRNA sense strand
gcgcaccgacuuccugucu

SEQ ID NO: 329726 - RNA, 19 nt, Homo sapiens
  misc_RNA (1)...(19): siRNA sense strand
gacgagaagaagcgcuuug

SEQ ID NO: 329727 - RNA, 19 nt, Homo sapiens
  misc_RNA (1)...(19): siRNA sense strand
ccacugcuaugccgaguuc

SEQ ID NO: 329728 - RNA, 19 nt, Homo sapiens
  misc_RNA (1)...(19): siRNA sense strand
ccaugccgcugcacaggua

SEQ ID NO: 329729 - RNA, 19 nt, Homo sapiens
  misc_RNA (1)...(19): siRNA sense strand
gcaacgcgcuggucaugcu

SEQ ID NO: 329730 - RNA, 19 nt, Homo sapiens
  misc_RNA (1)...(19): siRNA sense strand
cauacacgcugcugaugau

SEQ ID NO: 329731 - RNA, 19 nt, Homo sapiens
  misc_RNA (1)...(19): siRNA sense strand
ccaagucgcuggccgucau

SEQ ID NO: 329732 - RNA, 19 nt, Homo sapiens
  misc_RNA (1)...(19): siRNA sense strand
gcaucuaccugaacaucca

SEQ ID NO: 329733 - RNA, 19 nt, Homo sapiens
  misc_RNA (1)...(19): siRNA sense strand
gagcuucacccagcgcuuu

SEQ ID NO: 329734 - RNA, 19 nt, Homo sapiens
  misc_RNA (1)...(19): siRNA sense strand
caacugguacuuccucauc

SEQ ID NO: 329735 - RNA, 19 nt, Homo sapiens
  misc_RNA (1)...(19): siRNA sense strand
ugucaacccuguccucuac

SEQ ID NO: 329736 - RNA, 19 nt, Homo sapiens
  misc_RNA (1)...(19): siRNA sense strand
acaggaaaguggccaaguc

SEQ ID NO: 329737 - RNA, 19 nt, Homo sapiens
  misc_RNA (1)...(19): siRNA sense strand
ccauacacgcugcugauga

SEQ ID NO: 329738 - RNA, 19 nt, Homo sapiens
  misc_RNA (1)...(19): siRNA sense strand
uggagaagcgcaugaagau

SEQ ID NO: 329739 - RNA, 19 nt, Homo sapiens
  misc_RNA (1)...(19): siRNA sense strand
ucuuuaaccucagcaucua

SEQ ID NO: 329740 - RNA, 19 nt, Homo sapiens
  misc_RNA (1)...(19): siRNA sense strand
gcuaugccgaguucuucua

SEQ ID NO: 329741 - RNA, 19 nt, Homo sapiens
  misc_RNA (1)...(19): siRNA sense strand
ccugacuacugguacgaaa

SEQ ID NO: 329742 - RNA, 19 nt, Homo sapiens
  misc_RNA (1)...(19): siRNA sense strand
gccacugcgucccugacua

SEQ ID NO: 329743 - RNA, 19 nt, Homo sapiens
  misc_RNA (1)...(19): siRNA sense strand
acaucgugcucaucagcua

SEQ ID NO: 329744 - RNA, 19 nt, Homo sapiens
  misc_RNA (1)...(19): siRNA sense strand
ccucagcgucaccuucuuu

SEQ ID NO: 329745 - RNA, 19 nt, Homo sapiens
  misc_RNA (1)...(19): siRNA sense strand
ggagaagcgcaugaagaug

SEQ ID NO: 329746 - RNA, 19 nt, Homo sapiens
  misc_RNA (1)...(19): siRNA sense strand
gcucauggcgcugcucauc

SEQ ID NO: 329747 - RNA, 19 nt, Homo sapiens
  misc_RNA (1)...(19): siRNA sense strand
cgucaucgugagcaucuuu

SEQ ID NO: 329748 - RNA, 19 nt, Homo sapiens
  misc_RNA (1)...(19): siRNA sense strand
ucacccgagcggucucaua

SEQ ID NO: 329749 - RNA, 19 nt, Homo sapiens
  misc_RNA (1)...(19): siRNA sense strand
ucauggcgcugcucaucgu

SEQ ID NO: 329750 - RNA, 19 nt, Homo sapiens
  misc_RNA (1)...(19): siRNA sense strand
gcaccuccucugccuucaa

SEQ ID NO: 329751 - RNA, 19 nt, Homo sapiens
  misc_RNA (1)...(19): siRNA sense strand
cagcgucaccuucuuuaac

SEQ ID NO: 329752 - RNA, 19 nt, Homo sapiens
  misc_RNA (1)...(19): siRNA sense strand
ccagagaccuccuccugaa

SEQ ID NO: 329753 - RNA, 19 nt, Homo sapiens
  misc_RNA (1)...(19): siRNA sense strand
gcaggaagcaucaucauuc

SEQ ID NO: 329754 - RNA, 19 nt, Homo sapiens
  misc_RNA (1)...(19): siRNA sense strand
agacuuuacuuucaccaua

SEQ ID NO: 329755 - RNA, 19 nt, Homo sapiens
  misc_RNA (1)...(19): siRNA sense strand
ugugaacuaugaagacuuu

SEQ ID NO: 329756 - RNA, 19 nt, Homo sapiens
  misc_RNA (1)...(19): siRNA sense strand
ggacagaccagcaagacau

SEQ ID NO: 329757 - RNA, 19 nt, Homo sapiens
  misc_RNA (1)...(19): siRNA sense strand
cagauaaugaugugaacua

SEQ ID NO: 329758 - RNA, 19 nt, Homo sapiens
  misc_RNA (1)...(19): siRNA sense strand
gaugugaacuaugaagacu

SEQ ID NO: 329759 - RNA, 19 nt, Homo sapiens
  misc_RNA (1)...(19): siRNA sense strand
gaacuaugaagacuuuacu

SEQ ID NO: 329760 - RNA, 19 nt, Homo sapiens
  misc_RNA (1)...(19): siRNA sense strand
caggaagcaucaucauucu

SEQ ID NO: 329761 - RNA, 19 nt, Homo sapiens
  misc_RNA (1)...(19): siRNA sense strand
gauaaugaugugaacuaug

SEQ ID NO: 329762 - RNA, 19 nt, Homo sapiens
  misc_RNA (1)...(19): siRNA sense strand
gacuuuacuuucaccauac

SEQ ID NO: 329763 - RNA, 19 nt, Homo sapiens
  misc_RNA (1)...(19): siRNA sense strand
cuaugaagacuuuacuuuc

SEQ ID NO: 329764 - RNA, 19 nt, Homo sapiens
  misc_RNA (1)...(19): siRNA sense strand
ucagagcacagauaaugau

SEQ ID NO: 329765 - RNA, 19 nt, Homo sapiens
  misc_RNA (1)...(19): siRNA sense strand
caagucagagaccagauca

SEQ ID NO: 329766 - RNA, 19 nt, Homo sapiens
  misc_RNA (1)...(19): siRNA sense strand
caccauaccagauguagag

SEQ ID NO: 329767 - RNA, 19 nt, Homo sapiens
  misc_RNA (1)...(19): siRNA sense strand
cgaggacaccgucaacucu

SEQ ID NO: 329768 - RNA, 19 nt, Homo sapiens
  misc_RNA (1)...(19): siRNA sense strand
caacgaggacaccgucaac

SEQ ID NO: 329769 - RNA, 19 nt, Homo sapiens
  misc_RNA (1)...(19): siRNA sense strand
gagggacagaccagcaaga

SEQ ID NO: 329770 - RNA, 19 nt, Homo sapiens
  misc_RNA (1)...(19): siRNA sense strand
caacugacgugcaggaauu

SEQ ID NO: 329771 - RNA, 19 nt, Homo sapiens
  misc_RNA (1)...(19): siRNA sense strand
caaccucucuguccuguuu

SEQ ID NO: 329772 - RNA, 19 nt, Homo sapiens
  misc_RNA (1)...(19): siRNA sense strand
gaauuuaagucauccuuca

SEQ ID NO: 329773 - RNA, 19 nt, Homo sapiens
  misc_RNA (1)...(19): siRNA sense strand
ggucuuggguacccuauuu

SEQ ID NO: 329774 - RNA, 19 nt, Homo sapiens
  misc_RNA (1)...(19): siRNA sense strand
uaaaggucguggccaagua

SEQ ID NO: 329775 - RNA, 19 nt, Homo sapiens
  misc_RNA (1)...(19): siRNA sense strand
augaagagcuccugaagaa

SEQ ID NO: 329776 - RNA, 19 nt, Homo sapiens
  misc_RNA (1)...(19): siRNA sense strand
gaagagcuccugaagaaag

SEQ ID NO: 329777 - RNA, 19 nt, Homo sapiens
  misc_RNA (1)...(19): siRNA sense strand
guacacaagggaccacgua

SEQ ID NO: 329778 - RNA, 19 nt, Homo sapiens
  misc_RNA (1)...(19): siRNA sense strand
gcuucgaggugcugaaaga

SEQ ID NO: 329779 - RNA, 19 nt, Homo sapiens
  misc_RNA (1)...(19): siRNA sense strand
ccacugcauugucgucaug

SEQ ID NO: 329780 - RNA, 19 nt, Homo sapiens
  misc_RNA (1)...(19): siRNA sense strand
uaagucauccuucaagcuu

SEQ ID NO: 329781 - RNA, 19 nt, Homo sapiens
  misc_RNA (1)...(19): siRNA sense strand
gugagccgcuugacaacug

SEQ ID NO: 329782 - RNA, 19 nt, Homo sapiens
  misc_RNA (1)...(19): siRNA sense strand
uccaagggcuuuccaacau

SEQ ID NO: 329783 - RNA, 19 nt, Homo sapiens
  misc_RNA (1)...(19): siRNA sense strand
gacaaaacaucaccuucuu

SEQ ID NO: 329784 - RNA, 19 nt, Homo sapiens
  misc_RNA (1)...(19): siRNA sense strand
gcguggcuccguuacauuu

SEQ ID NO: 329785 - RNA, 19 nt, Homo sapiens
  misc_RNA (1)...(19): siRNA sense strand
ccaagggcuuuccaacauc

SEQ ID NO: 329786 - RNA, 19 nt, Homo sapiens
  misc_RNA (1)...(19): siRNA sense strand
gcucaggccuccgaaaauu

SEQ ID NO: 329787 - RNA, 19 nt, Homo sapiens
  misc_RNA (1)...(19): siRNA sense strand
ggucucgcuuuaacuggaa

SEQ ID NO: 329788 - RNA, 19 nt, Homo sapiens
  misc_RNA (1)...(19): siRNA sense strand
ccacguagggaguuucaug

SEQ ID NO: 329789 - RNA, 19 nt, Homo sapiens
  misc_RNA (1)...(19): siRNA sense strand
uagggaguuucaugacuga

SEQ ID NO: 329790 - RNA, 19 nt, Homo sapiens
  misc_RNA (1)...(19): siRNA sense strand
uuggguacccuauuuauug

SEQ ID NO: 329791 - RNA, 19 nt, Homo sapiens
  misc_RNA (1)...(19): siRNA sense strand
aaacaucaccuucuuugac

SEQ ID NO: 329792 - RNA, 19 nt, Homo sapiens
  misc_RNA (1)...(19): siRNA sense strand
gcacccaccugcuuauccu

SEQ ID NO: 329793 - RNA, 19 nt, Homo sapiens
  misc_RNA (1)...(19): siRNA sense strand
gugcaggaauuuaagucau

SEQ ID NO: 329794 - RNA, 19 nt, Homo sapiens
  misc_RNA (1)...(19): siRNA sense strand
ucgaggugcugaaagacuu

SEQ ID NO: 329795 - RNA, 19 nt, Homo sapiens
  misc_RNA (1)...(19): siRNA sense strand
aaaauugucucgccagugu

SEQ ID NO: 329796 - RNA, 19 nt, Homo sapiens
  misc_RNA (1)...(19): siRNA sense strand
ggggagaccucauguccuu

SEQ ID NO: 329797 - RNA, 19 nt, Homo sapiens
  misc_RNA (1)...(19): siRNA sense strand
caacacggucgucggugaa

SEQ ID NO: 329798 - RNA, 19 nt, Homo sapiens
  misc_RNA (1)...(19): siRNA sense strand
ccaccugcuuauccucuau

SEQ ID NO: 329799 - RNA, 19 nt, Homo sapiens
  misc_RNA (1)...(19): siRNA sense strand
cagcugcguggcuccguua

SEQ ID NO: 329800 - RNA, 19 nt, Homo sapiens
  misc_RNA (1)...(19): siRNA sense strand
caugaagagcuccugaaga

SEQ ID NO: 329801 - RNA, 19 nt, Homo sapiens
  misc_RNA (1)...(19): siRNA sense strand
gcuauacgccgagcucauc

SEQ ID NO: 329802 - RNA, 19 nt, Homo sapiens
  misc_RNA (1)...(19): siRNA sense strand
gggaccacguagggaguuu

SEQ ID NO: 329803 - RNA, 19 nt, Homo sapiens
  misc_RNA (1)...(19): siRNA sense strand
gggaagaggagcgcuaugg

SEQ ID NO: 329804 - RNA, 19 nt, Homo sapiens
  misc_RNA (1)...(19): siRNA sense strand
guaaaggucguggccaagu

SEQ ID NO: 329805 - RNA, 19 nt, Homo sapiens
  misc_RNA (1)...(19): siRNA sense strand
gggaggcugggacacauga

SEQ ID NO: 329806 - RNA, 19 nt, Homo sapiens
  misc_RNA (1)...(19): siRNA sense strand
cccgagcccuuaucaagca

SEQ ID NO: 329807 - RNA, 19 nt, Homo sapiens
  misc_RNA (1)...(19): siRNA sense strand
ucacgcugcugcugauggu

SEQ ID NO: 329808 - RNA, 19 nt, Homo sapiens
  misc_RNA (1)...(19): siRNA sense strand
aagcgaaugcucacgaguu

SEQ ID NO: 329809 - RNA, 19 nt, Homo sapiens
  misc_RNA (1)...(19): siRNA sense strand
uugaguacauggcccugaa

SEQ ID NO: 329810 - RNA, 19 nt, Homo sapiens
  misc_RNA (1)...(19): siRNA sense strand
guggcuccguuacauuuca

SEQ ID NO: 329811 - RNA, 19 nt, Homo sapiens
  misc_RNA (1)...(19): siRNA sense strand
acucgugaauguacagauc

SEQ ID NO: 329812 - RNA, 19 nt, Homo sapiens
  misc_RNA (1)...(19): siRNA sense strand
cgaaugcucacgaguucau

SEQ ID NO: 329813 - RNA, 19 nt, Homo sapiens
  misc_RNA (1)...(19): siRNA sense strand
cggcaucgccuuguuccaa

SEQ ID NO: 329814 - RNA, 19 nt, Homo sapiens
  misc_RNA (1)...(19): siRNA sense strand
ugcaggaauuuaagucauc

SEQ ID NO: 329815 - RNA, 19 nt, Homo sapiens
  misc_RNA (1)...(19): siRNA sense strand
agcgaaugcucacgaguuc

SEQ ID NO: 329816 - RNA, 19 nt, Homo sapiens
  misc_RNA (1)...(19): siRNA sense strand
ggagccaccagcacaaguc

SEQ ID NO: 329817 - RNA, 19 nt, Homo sapiens
  misc_RNA (1)...(19): siRNA sense strand
agaaaggccuguucaacua

SEQ ID NO: 329818 - RNA, 19 nt, Homo sapiens
  misc_RNA (1)...(19): siRNA sense strand
gaccaugacugaugcuuau

SEQ ID NO: 329819 - RNA, 19 nt, Homo sapiens
  misc_RNA (1)...(19): siRNA sense strand
gaacaucggcuacgucauc

SEQ ID NO: 329820 - RNA, 19 nt, Homo sapiens
  misc_RNA (1)...(19): siRNA sense strand
aaaggcaaacgaccaauua

SEQ ID NO: 329821 - RNA, 19 nt, Homo sapiens
  misc_RNA (1)...(19): siRNA sense strand
cgagaauccuuacaccaaa

SEQ ID NO: 329822 - RNA, 19 nt, Homo sapiens
  misc_RNA (1)...(19): siRNA sense strand
gagaaaggccuguucaacu

SEQ ID NO: 329823 - RNA, 19 nt, Homo sapiens
  misc_RNA (1)...(19): siRNA sense strand
ccaccaucgucaucgcuua

SEQ ID NO: 329824 - RNA, 19 nt, Homo sapiens
  misc_RNA (1)...(19): siRNA sense strand
caugacugaugcuuauaaa

SEQ ID NO: 329825 - RNA, 19 nt, Homo sapiens
  misc_RNA (1)...(19): siRNA sense strand
caaaggcaaacgaccaauu

SEQ ID NO: 329826 - RNA, 19 nt, Homo sapiens
  misc_RNA (1)...(19): siRNA sense strand
gagaauccuuacaccaaag

SEQ ID NO: 329827 - RNA, 19 nt, Homo sapiens
  misc_RNA (1)...(19): siRNA sense strand
ugaagaggcuuuugaguuc

SEQ ID NO: 329828 - RNA, 19 nt, Homo sapiens
  misc_RNA (1)...(19): siRNA sense strand
caacgucaccacucaucuu

SEQ ID NO: 329829 - RNA, 19 nt, Homo sapiens
  misc_RNA (1)...(19): siRNA sense strand
ggcaaacgaccaauuaucu

SEQ ID NO: 329830 - RNA, 19 nt, Homo sapiens
  misc_RNA (1)...(19): siRNA sense strand
ugaccaugacugaugcuua

SEQ ID NO: 329831 - RNA, 19 nt, Homo sapiens
  misc_RNA (1)...(19): siRNA sense strand
ccaugacugaugcuuauaa

SEQ ID NO: 329832 - RNA, 19 nt, Homo sapiens
  misc_RNA (1)...(19): siRNA sense strand
caucuugcccuuccuguuc

SEQ ID NO: 329833 - RNA, 19 nt, Homo sapiens
  misc_RNA (1)...(19): siRNA sense strand
ccgagaauccuuacaccaa

SEQ ID NO: 329834 - RNA, 19 nt, Homo sapiens
  misc_RNA (1)...(19): siRNA sense strand
gaaaggccuguucaacuac

SEQ ID NO: 329835 - RNA, 19 nt, Homo sapiens
  misc_RNA (1)...(19): siRNA sense strand
gcaaacgaccaauuaucuc

SEQ ID NO: 329836 - RNA, 19 nt, Homo sapiens
  misc_RNA (1)...(19): siRNA sense strand
ccacucaucuuccccucua

SEQ ID NO: 329837 - RNA, 19 nt, Homo sapiens
  misc_RNA (1)...(19): siRNA sense strand
cgaggaagaccuaaacaac

SEQ ID NO: 329838 - RNA, 19 nt, Homo sapiens
  misc_RNA (1)...(19): siRNA sense strand
ucaucaacgucaccacuca

SEQ ID NO: 329839 - RNA, 19 nt, Homo sapiens
  misc_RNA (1)...(19): siRNA sense strand
ccucuaccacuaugagaaa

SEQ ID NO: 329840 - RNA, 19 nt, Homo sapiens
  misc_RNA (1)...(19): siRNA sense strand
ccacugacagcaacaagca

SEQ ID NO: 329841 - RNA, 19 nt, Homo sapiens
  misc_RNA (1)...(19): siRNA sense strand
gaaaaccucugugacaacu

SEQ ID NO: 329842 - RNA, 19 nt, Homo sapiens
  misc_RNA (1)...(19): siRNA sense strand
gaccuaaacaacgguguga

SEQ ID NO: 329843 - RNA, 19 nt, Homo sapiens
  misc_RNA (1)...(19): siRNA sense strand
cggaugaccaugacugaug

SEQ ID NO: 329844 - RNA, 19 nt, Homo sapiens
  misc_RNA (1)...(19): siRNA sense strand
caucgucaucgcuuacuug

SEQ ID NO: 329845 - RNA, 19 nt, Homo sapiens
  misc_RNA (1)...(19): siRNA sense strand
ggcaguugcuagaguucga

SEQ ID NO: 329846 - RNA, 19 nt, Homo sapiens
  misc_RNA (1)...(19): siRNA sense strand
ugcuagaguucgaggaaga

SEQ ID NO: 329847 - RNA, 19 nt, Homo sapiens
  misc_RNA (1)...(19): siRNA sense strand
gugacaccgagaauccuua

SEQ ID NO: 329848 - RNA, 19 nt, Homo sapiens
  misc_RNA (1)...(19): siRNA sense strand
aaaggccuguucaacuaca

SEQ ID NO: 329849 - RNA, 19 nt, Homo sapiens
  misc_RNA (1)...(19): siRNA sense strand
agaguucgaggaagaccua

SEQ ID NO: 329850 - RNA, 19 nt, Homo sapiens
  misc_RNA (1)...(19): siRNA sense strand
ccaauuaucuccccaaacc

SEQ ID NO: 329851 - RNA, 19 nt, Homo sapiens
  misc_RNA (1)...(19): siRNA sense strand
gaccaauuaucuccccaaa

SEQ ID NO: 329852 - RNA, 19 nt, Homo sapiens
  misc_RNA (1)...(19): siRNA sense strand
gaagaggcuuuugaguuca

SEQ ID NO: 329853 - RNA, 19 nt, Homo sapiens
  misc_RNA (1)...(19): siRNA sense strand
cccaaaccuuaacuucaug

SEQ ID NO: 329854 - RNA, 19 nt, Homo sapiens
  misc_RNA (1)...(19): siRNA sense strand
agaaaggccuguucaacua

SEQ ID NO: 329855 - RNA, 19 nt, Homo sapiens
  misc_RNA (1)...(19): siRNA sense strand
gaccaugacugaugcuuau

SEQ ID NO: 329856 - RNA, 19 nt, Homo sapiens
  misc_RNA (1)...(19): siRNA sense strand
gaacaucggcuacgucauc

SEQ ID NO: 329857 - RNA, 19 nt, Homo sapiens
  misc_RNA (1)...(19): siRNA sense strand
aaaggcaaacgaccaauua

SEQ ID NO: 329858 - RNA, 19 nt, Homo sapiens
  misc_RNA (1)...(19): siRNA sense strand
cgagaauccuuacaccaaa

SEQ ID NO: 329859 - RNA, 19 nt, Homo sapiens
  misc_RNA (1)...(19): siRNA sense strand
gagaaaggccuguucaacu

SEQ ID NO: 329860 - RNA, 19 nt, Homo sapiens
  misc_RNA (1)...(19): siRNA sense strand
ccaccaucgucaucgcuua

SEQ ID NO: 329861 - RNA, 19 nt, Homo sapiens
  misc_RNA (1)...(19): siRNA sense strand
caugacugaugcuuauaaa

SEQ ID NO: 329862 - RNA, 19 nt, Homo sapiens
  misc_RNA (1)...(19): siRNA sense strand
caaaggcaaacgaccaauu

SEQ ID NO: 329863 - RNA, 19 nt, Homo sapiens
  misc_RNA (1)...(19): siRNA sense strand
gagaauccuuacaccaaag

SEQ ID NO: 329864 - RNA, 19 nt, Homo sapiens
  misc_RNA (1)...(19): siRNA sense strand
ugaagaggcuuuugaguuc

SEQ ID NO: 329865 - RNA, 19 nt, Homo sapiens
  misc_RNA (1)...(19): siRNA sense strand
caacgucaccacucaucuu

SEQ ID NO: 329866 - RNA, 19 nt, Homo sapiens
  misc_RNA (1)...(19): siRNA sense strand
ggcaaacgaccaauuaucu

SEQ ID NO: 329867 - RNA, 19 nt, Homo sapiens
  misc_RNA (1)...(19): siRNA sense strand
ugaccaugacugaugcuua

SEQ ID NO: 329868 - RNA, 19 nt, Homo sapiens
  misc_RNA (1)...(19): siRNA sense strand
ccaugacugaugcuuauaa

SEQ ID NO: 329869 - RNA, 19 nt, Homo sapiens
  misc_RNA (1)...(19): siRNA sense strand
ccgagaauccuuacaccaa

SEQ ID NO: 329870 - RNA, 19 nt, Homo sapiens
  misc_RNA (1)...(19): siRNA sense strand
gaaaggccuguucaacuac

SEQ ID NO: 329871 - RNA, 19 nt, Homo sapiens
  misc_RNA (1)...(19): siRNA sense strand
gcaaacgaccaauuaucuc

SEQ ID NO: 329872 - RNA, 19 nt, Homo sapiens
  misc_RNA (1)...(19): siRNA sense strand
ccacucaucuuccccucua

SEQ ID NO: 329873 - RNA, 19 nt, Homo sapiens
  misc_RNA (1)...(19): siRNA sense strand
cgaggaagaccuaaacaac

SEQ ID NO: 329874 - RNA, 19 nt, Homo sapiens
  misc_RNA (1)...(19): siRNA sense strand
ucaucaacgucaccacuca

SEQ ID NO: 329875 - RNA, 19 nt, Homo sapiens
  misc_RNA (1)...(19): siRNA sense strand
ccucuaccacuaugagaaa

SEQ ID NO: 329876 - RNA, 19 nt, Homo sapiens
  misc_RNA (1)...(19): siRNA sense strand
ccacugacagcaacaagca

SEQ ID NO: 329877 - RNA, 19 nt, Homo sapiens
  misc_RNA (1)...(19): siRNA sense strand
gaccuaaacaacgguguga

SEQ ID NO: 329878 - RNA, 19 nt, Homo sapiens
  misc_RNA (1)...(19): siRNA sense strand
cggaugaccaugacugaug

SEQ ID NO: 329879 - RNA, 19 nt, Homo sapiens
  misc_RNA (1)...(19): siRNA sense strand
caucgucaucgcuuacuug

SEQ ID NO: 329880 - RNA, 19 nt, Homo sapiens
  misc_RNA (1)...(19): siRNA sense strand
ggcaguugcuagaguucga

SEQ ID NO: 329881 - RNA, 19 nt, Homo sapiens
  misc_RNA (1)...(19): siRNA sense strand
ugcuagaguucgaggaaga

SEQ ID NO: 329882 - RNA, 19 nt, Homo sapiens
  misc_RNA (1)...(19): siRNA sense strand
gugacaccgagaauccuua

SEQ ID NO: 329883 - RNA, 19 nt, Homo sapiens
  misc_RNA (1)...(19): siRNA sense strand
aaaggccuguucaacuaca

SEQ ID NO: 329884 - RNA, 19 nt, Homo sapiens
  misc_RNA (1)...(19): siRNA sense strand
agaguucgaggaagaccua

SEQ ID NO: 329885 - RNA, 19 nt, Homo sapiens
  misc_RNA (1)...(19): siRNA sense strand
ccaauuaucuccccaaacc

SEQ ID NO: 329886 - RNA, 19 nt, Homo sapiens
  misc_RNA (1)...(19): siRNA sense strand
gaccaauuaucuccccaaa

SEQ ID NO: 329887 - RNA, 19 nt, Homo sapiens
  misc_RNA (1)...(19): siRNA sense strand
gaagaggcuuuugaguuca

SEQ ID NO: 329888 - RNA, 19 nt, Homo sapiens
  misc_RNA (1)...(19): siRNA sense strand
cccaaaccuuaacuucaug

SEQ ID NO: 329889 - RNA, 19 nt, Homo sapiens
  misc_RNA (1)...(19): siRNA sense strand
agaaaggccuguucaacua

SEQ ID NO: 329890 - RNA, 19 nt, Homo sapiens
  misc_RNA (1)...(19): siRNA sense strand
gaccaugacugaugcuuau

SEQ ID NO: 329891 - RNA, 19 nt, Homo sapiens
  misc_RNA (1)...(19): siRNA sense strand
gaacaucggcuacgucauc

SEQ ID NO: 329892 - RNA, 19 nt, Homo sapiens
  misc_RNA (1)...(19): siRNA sense strand
aaaggcaaacgaccaauua

SEQ ID NO: 329893 - RNA, 19 nt, Homo sapiens
  misc_RNA (1)...(19): siRNA sense strand
cgagaauccuuacaccaaa

SEQ ID NO: 329894 - RNA, 19 nt, Homo sapiens
  misc_RNA (1)...(19): siRNA sense strand
gagaaaggccuguucaacu

SEQ ID NO: 329895 - RNA, 19 nt, Homo sapiens
  misc_RNA (1)...(19): siRNA sense strand
ccaccaucgucaucgcuua

SEQ ID NO: 329896 - RNA, 19 nt, Homo sapiens
  misc_RNA (1)...(19): siRNA sense strand
caugacugaugcuuauaaa

SEQ ID NO: 329897 - RNA, 19 nt, Homo sapiens
  misc_RNA (1)...(19): siRNA sense strand
caaaggcaaacgaccaauu

SEQ ID NO: 329898 - RNA, 19 nt, Homo sapiens
  misc_RNA (1)...(19): siRNA sense strand
gagaauccuuacaccaaag

SEQ ID NO: 329899 - RNA, 19 nt, Homo sapiens
  misc_RNA (1)...(19): siRNA sense strand
ugaagaggcuuuugaguuc

SEQ ID NO: 329900 - RNA, 19 nt, Homo sapiens
  misc_RNA (1)...(19): siRNA sense strand
caacgucaccacucaucuu

SEQ ID NO: 329901 - RNA, 19 nt, Homo sapiens
  misc_RNA (1)...(19): siRNA sense strand
ggcaaacgaccaauuaucu

SEQ ID NO: 329902 - RNA, 19 nt, Homo sapiens
  misc_RNA (1)...(19): siRNA sense strand
ugaccaugacugaugcuua

SEQ ID NO: 329903 - RNA, 19 nt, Homo sapiens
  misc_RNA (1)...(19): siRNA sense strand
ccaugacugaugcuuauaa

SEQ ID NO: 329904 - RNA, 19 nt, Homo sapiens
  misc_RNA (1)...(19): siRNA sense strand
ccgagaauccuuacaccaa

SEQ ID NO: 329905 - RNA, 19 nt, Homo sapiens
  misc_RNA (1)...(19): siRNA sense strand
gaaaggccuguucaacuac

SEQ ID NO: 329906 - RNA, 19 nt, Homo sapiens
  misc_RNA (1)...(19): siRNA sense strand
gcaaacgaccaauuaucuc

SEQ ID NO: 329907 - RNA, 19 nt, Homo sapiens
  misc_RNA (1)...(19): siRNA sense strand
ccacucaucuuccccucua

SEQ ID NO: 329908 - RNA, 19 nt, Homo sapiens
  misc_RNA (1)...(19): siRNA sense strand
cgaggaagaccuaaacaac

SEQ ID NO: 329909 - RNA, 19 nt, Homo sapiens
  misc_RNA (1)...(19): siRNA sense strand
ucaucaacgucaccacuca

SEQ ID NO: 329910 - RNA, 19 nt, Homo sapiens
  misc_RNA (1)...(19): siRNA sense strand
ccucuaccacuaugagaaa

SEQ ID NO: 329911 - RNA, 19 nt, Homo sapiens
  misc_RNA (1)...(19): siRNA sense strand
ccacugacagcaacaagca

SEQ ID NO: 329912 - RNA, 19 nt, Homo sapiens
  misc_RNA (1)...(19): siRNA sense strand
gaccuaaacaacgguguga

SEQ ID NO: 329913 - RNA, 19 nt, Homo sapiens
  misc_RNA (1)...(19): siRNA sense strand
cggaugaccaugacugaug

SEQ ID NO: 329914 - RNA, 19 nt, Homo sapiens
  misc_RNA (1)...(19): siRNA sense strand
caucgucaucgcuuacuug

SEQ ID NO: 329915 - RNA, 19 nt, Homo sapiens
  misc_RNA (1)...(19): siRNA sense strand
ggcaguugcuagaguucga

SEQ ID NO: 329916 - RNA, 19 nt, Homo sapiens
  misc_RNA (1)...(19): siRNA sense strand
ugcuagaguucgaggaaga

SEQ ID NO: 329917 - RNA, 19 nt, Homo sapiens
  misc_RNA (1)...(19): siRNA sense strand
gugacaccgagaauccuua

SEQ ID NO: 329918 - RNA, 19 nt, Homo sapiens
  misc_RNA (1)...(19): siRNA sense strand
aaaggccuguucaacuaca

SEQ ID NO: 329919 - RNA, 19 nt, Homo sapiens
  misc_RNA (1)...(19): siRNA sense strand
agaguucgaggaagaccua

SEQ ID NO: 329920 - RNA, 19 nt, Homo sapiens
  misc_RNA (1)...(19): siRNA sense strand
ccaauuaucuccccaaacc

SEQ ID NO: 329921 - RNA, 19 nt, Homo sapiens
  misc_RNA (1)...(19): siRNA sense strand
gaccaauuaucuccccaaa

SEQ ID NO: 329922 - RNA, 19 nt, Homo sapiens
  misc_RNA (1)...(19): siRNA sense strand
gaagaggcuuuugaguuca

SEQ ID NO: 329923 - RNA, 19 nt, Homo sapiens
  misc_RNA (1)...(19): siRNA sense strand
cccaaaccuuaacuucaug

SEQ ID NO: 329924 - RNA, 19 nt, Homo sapiens
  misc_RNA (1)...(19): siRNA sense strand
gagaagauccgaaagaaau

SEQ ID NO: 329925 - RNA, 19 nt, Homo sapiens
  misc_RNA (1)...(19): siRNA sense strand
gcgagaagauccgaaagaa

SEQ ID NO: 329926 - RNA, 19 nt, Homo sapiens
  misc_RNA (1)...(19): siRNA sense strand
gaaagugucuacggucugu

SEQ ID NO: 329927 - RNA, 19 nt, Homo sapiens
  misc_RNA (1)...(19): siRNA sense strand
gaaguucguguacaaagaa

SEQ ID NO: 329928 - RNA, 19 nt, Homo sapiens
  misc_RNA (1)...(19): siRNA sense strand
gauaggagaccuggacaaa

SEQ ID NO: 329929 - RNA, 19 nt, Homo sapiens
  misc_RNA (1)...(19): siRNA sense strand
ggucaguucuacuucuuga

SEQ ID NO: 329930 - RNA, 19 nt, Homo sapiens
  misc_RNA (1)...(19): siRNA sense strand
agacuucuuucucuacauu

SEQ ID NO: 329931 - RNA, 19 nt, Homo sapiens
  misc_RNA (1)...(19): siRNA sense strand
gagcugaggaugccuuguu

SEQ ID NO: 329932 - RNA, 19 nt, Homo sapiens
  misc_RNA (1)...(19): siRNA sense strand
ccaggaacaccaugaagaa

SEQ ID NO: 329933 - RNA, 19 nt, Homo sapiens
  misc_RNA (1)...(19): siRNA sense strand
ggaacaccaugaagaagac

SEQ ID NO: 329934 - RNA, 19 nt, Homo sapiens
  misc_RNA (1)...(19): siRNA sense strand
ucccaaagcucggauagga

SEQ ID NO: 329935 - RNA, 19 nt, Homo sapiens
  misc_RNA (1)...(19): siRNA sense strand
ucucacaguuggucaguuc

SEQ ID NO: 329936 - RNA, 19 nt, Homo sapiens
  misc_RNA (1)...(19): siRNA sense strand
cgagaagauccgaaagaaa

SEQ ID NO: 329937 - RNA, 19 nt, Homo sapiens
  misc_RNA (1)...(19): siRNA sense strand
agaagauccgaaagaaaua

SEQ ID NO: 329938 - RNA, 19 nt, Homo sapiens
  misc_RNA (1)...(19): siRNA sense strand
ccacaaugggucagcugua

SEQ ID NO: 329939 - RNA, 19 nt, Homo sapiens
  misc_RNA (1)...(19): siRNA sense strand
gcucugagggcgagaagau

SEQ ID NO: 329940 - RNA, 19 nt, Homo sapiens
  misc_RNA (1)...(19): siRNA sense strand
guaccaggaacaccaugaa

SEQ ID NO: 329941 - RNA, 19 nt, Homo sapiens
  misc_RNA (1)...(19): siRNA sense strand
aagaagagcauccguucga

SEQ ID NO: 329942 - RNA, 19 nt, Homo sapiens
  misc_RNA (1)...(19): siRNA sense strand
gaagauccgaaagaaauac

SEQ ID NO: 329943 - RNA, 19 nt, Homo sapiens
  misc_RNA (1)...(19): siRNA sense strand
ggcgagaagauccgaaaga

SEQ ID NO: 329944 - RNA, 19 nt, Homo sapiens
  misc_RNA (1)...(19): siRNA sense strand
cacaaugggucagcuguac

SEQ ID NO: 329945 - RNA, 19 nt, Homo sapiens
  misc_RNA (1)...(19): siRNA sense strand
aagagcauccguucgagaa

SEQ ID NO: 329946 - RNA, 19 nt, Homo sapiens
  misc_RNA (1)...(19): siRNA sense strand
ggauaggagaccuggacaa

SEQ ID NO: 329947 - RNA, 19 nt, Homo sapiens
  misc_RNA (1)...(19): siRNA sense strand
ucacaguuggucaguucua

SEQ ID NO: 329948 - RNA, 19 nt, Homo sapiens
  misc_RNA (1)...(19): siRNA sense strand
agaaaaggcucccaaagcu

SEQ ID NO: 329949 - RNA, 19 nt, Homo sapiens
  misc_RNA (1)...(19): siRNA sense strand
gggugccggugauaguaga

SEQ ID NO: 329950 - RNA, 19 nt, Homo sapiens
  misc_RNA (1)...(19): siRNA sense strand
ucaguucuacuucuugauc

SEQ ID NO: 329951 - RNA, 19 nt, Homo sapiens
  misc_RNA (1)...(19): siRNA sense strand
aggaacaccaugaagaaga

SEQ ID NO: 329952 - RNA, 19 nt, Homo sapiens
  misc_RNA (1)...(19): siRNA sense strand
gaauagagccauaaagaaa

SEQ ID NO: 329953 - RNA, 19 nt, Homo sapiens
  misc_RNA (1)...(19): siRNA sense strand
gcaaagcgcagaaauguug

SEQ ID NO: 329954 - RNA, 19 nt, Homo sapiens
  misc_RNA (1)...(19): siRNA sense strand
gaaagugaaucuaacaaag

SEQ ID NO: 329955 - RNA, 19 nt, Homo sapiens
  misc_RNA (1)...(19): siRNA sense strand
caagaaagacaaugaguuu

SEQ ID NO: 329956 - RNA, 19 nt, Homo sapiens
  misc_RNA (1)...(19): siRNA sense strand
gaucugacaccuaucuuua

SEQ ID NO: 329957 - RNA, 19 nt, Homo sapiens
  misc_RNA (1)...(19): siRNA sense strand
acaagugccucauuuaauu

SEQ ID NO: 329958 - RNA, 19 nt, Homo sapiens
  misc_RNA (1)...(19): siRNA sense strand
gaauugggaucaagaagau

SEQ ID NO: 329959 - RNA, 19 nt, Homo sapiens
  misc_RNA (1)...(19): siRNA sense strand
gaaggacugucgaauggaa

SEQ ID NO: 329960 - RNA, 19 nt, Homo sapiens
  misc_RNA (1)...(19): siRNA sense strand
gagaaggaacugacagaua

SEQ ID NO: 329961 - RNA, 19 nt, Homo sapiens
  misc_RNA (1)...(19): siRNA sense strand
gacaaugaguuuaaagaga

SEQ ID NO: 329962 - RNA, 19 nt, Homo sapiens
  misc_RNA (1)...(19): siRNA sense strand
ucaagaagaugaagcugaa

SEQ ID NO: 329963 - RNA, 19 nt, Homo sapiens
  misc_RNA (1)...(19): siRNA sense strand
gaaaguugauagcucuguu

SEQ ID NO: 329964 - RNA, 19 nt, Homo sapiens
  misc_RNA (1)...(19): siRNA sense strand
gaacugacagauaggaauu

SEQ ID NO: 329965 - RNA, 19 nt, Homo sapiens
  misc_RNA (1)...(19): siRNA sense strand
agaaggaacugacagauag

SEQ ID NO: 329966 - RNA, 19 nt, Homo sapiens
  misc_RNA (1)...(19): siRNA sense strand
caacaaaacugaagauaca

SEQ ID NO: 329967 - RNA, 19 nt, Homo sapiens
  misc_RNA (1)...(19): siRNA sense strand
ugaagcacgugaauacaaa

SEQ ID NO: 329968 - RNA, 19 nt, Homo sapiens
  misc_RNA (1)...(19): siRNA sense strand
cgacaagugccucauuuaa

SEQ ID NO: 329969 - RNA, 19 nt, Homo sapiens
  misc_RNA (1)...(19): siRNA sense strand
gaagauacaccugacaaga

SEQ ID NO: 329970 - RNA, 19 nt, Homo sapiens
  misc_RNA (1)...(19): siRNA sense strand
cauagguacucugcauuua

SEQ ID NO: 329971 - RNA, 19 nt, Homo sapiens
  misc_RNA (1)...(19): siRNA sense strand
ugacaguggugaaugcaaa

SEQ ID NO: 329972 - RNA, 19 nt, Homo sapiens
  misc_RNA (1)...(19): siRNA sense strand
gcauagguacucugcauuu

SEQ ID NO: 329973 - RNA, 19 nt, Homo sapiens
  misc_RNA (1)...(19): siRNA sense strand
uagguacucugcauuuaaa

SEQ ID NO: 329974 - RNA, 19 nt, Homo sapiens
  misc_RNA (1)...(19): siRNA sense strand
ggaauugggaucaagaaga

SEQ ID NO: 329975 - RNA, 19 nt, Homo sapiens
  misc_RNA (1)...(19): siRNA sense strand
gcaggaauucugaaaguga

SEQ ID NO: 329976 - RNA, 19 nt, Homo sapiens
  misc_RNA (1)...(19): siRNA sense strand
caaaguggcagcugaaaca

SEQ ID NO: 329977 - RNA, 19 nt, Homo sapiens
  misc_RNA (1)...(19): siRNA sense strand
gaacagggaagaauaacgu

SEQ ID NO: 329978 - RNA, 19 nt, Homo sapiens
  misc_RNA (1)...(19): siRNA sense strand
gagaugaagaagagaauga

SEQ ID NO: 329979 - RNA, 19 nt, Homo sapiens
  misc_RNA (1)...(19): siRNA sense strand
gaaagcaaagcgcagaaau

SEQ ID NO: 329980 - RNA, 19 nt, Homo sapiens
  misc_RNA (1)...(19): siRNA sense strand
aaagagaaaggcauaggua

SEQ ID NO: 329981 - RNA, 19 nt, Homo sapiens
  misc_RNA (1)...(19): siRNA sense strand
aagaauagagccauaaaga

SEQ ID NO: 329982 - RNA, 19 nt, Homo sapiens
  misc_RNA (1)...(19): siRNA sense strand
gacaagugccucauuuaau

SEQ ID NO: 329983 - RNA, 19 nt, Homo sapiens
  misc_RNA (1)...(19): siRNA sense strand
gcgacaagugccucauuua

SEQ ID NO: 329984 - RNA, 19 nt, Homo sapiens
  misc_RNA (1)...(19): siRNA sense strand
caccuugguugauaaaguu

SEQ ID NO: 329985 - RNA, 19 nt, Homo sapiens
  misc_RNA (1)...(19): siRNA sense strand
aguaguaguuaccgaagua

SEQ ID NO: 329986 - RNA, 19 nt, Homo sapiens
  misc_RNA (1)...(19): siRNA sense strand
ucugacaccuaucuuuaaa

SEQ ID NO: 329987 - RNA, 19 nt, Homo sapiens
  misc_RNA (1)...(19): siRNA sense strand
aaagaaaugccgagaagga

SEQ ID NO: 329988 - RNA, 19 nt, Homo sapiens
  misc_RNA (1)...(19): siRNA sense strand
caaagauacuacccagagu

SEQ ID NO: 329989 - RNA, 19 nt, Homo sapiens
  misc_RNA (1)...(19): siRNA sense strand
caagugccucauuuaauuu

SEQ ID NO: 329990 - RNA, 19 nt, Homo sapiens
  misc_RNA (1)...(19): siRNA sense strand
caaauggcccuaccaccuu

SEQ ID NO: 329991 - RNA, 19 nt, Homo sapiens
  misc_RNA (1)...(19): siRNA sense strand
caggaauucugaaagugaa

SEQ ID NO: 329992 - RNA, 19 nt, Homo sapiens
  misc_RNA (1)...(19): siRNA sense strand
gcgggcagacaccaauuua

SEQ ID NO: 329993 - RNA, 19 nt, Homo sapiens
  misc_RNA (1)...(19): siRNA sense strand
uaacaaaguggcagcugaa

SEQ ID NO: 329994 - RNA, 19 nt, Homo sapiens
  misc_RNA (1)...(19): siRNA sense strand
caaaagaaaugccgagaag

SEQ ID NO: 329995 - RNA, 19 nt, Homo sapiens
  misc_RNA (1)...(19): siRNA sense strand
uggaaggacugucgaaugg

SEQ ID NO: 329996 - RNA, 19 nt, Homo sapiens
  misc_RNA (1)...(19): siRNA sense strand
guucugauuccacccaaua

SEQ ID NO: 329997 - RNA, 19 nt, Homo sapiens
  misc_RNA (1)...(19): siRNA sense strand
augcaaagguggagaugaa

SEQ ID NO: 329998 - RNA, 19 nt, Homo sapiens
  misc_RNA (1)...(19): siRNA sense strand
ucugugaucugacaccuau

SEQ ID NO: 329999 - RNA, 19 nt, Homo sapiens
  misc_RNA (1)...(19): siRNA sense strand
gggauuggauagugaagca

SEQ ID NO: 330000 - RNA, 19 nt, Homo sapiens
  misc_RNA (1)...(19): siRNA sense strand
caacaaaauuacagcaaga

SEQ ID NO: 330001 - RNA, 19 nt, Homo sapiens
  misc_RNA (1)...(19): siRNA sense strand
caaagguggagaugaagaa

SEQ ID NO: 330002 - RNA, 19 nt, Homo sapiens
  misc_RNA (1)...(19): siRNA sense strand
gcaaagguggagaugaaga

SEQ ID NO: 330003 - RNA, 19 nt, Homo sapiens
  misc_RNA (1)...(19): siRNA sense strand
ccaccuugguugauaaagu

SEQ ID NO: 330004 - RNA, 19 nt, Homo sapiens
  misc_RNA (1)...(19): siRNA sense strand
cagcaaaucagaagacaca

SEQ ID NO: 330005 - RNA, 19 nt, Homo sapiens
  misc_RNA (1)...(19): siRNA sense strand
accagucucuucaccauuu

SEQ ID NO: 330006 - RNA, 19 nt, Homo sapiens
  misc_RNA (1)...(19): siRNA sense strand
gaagaauagagccauaaag

SEQ ID NO: 330007 - RNA, 19 nt, Homo sapiens
  misc_RNA (1)...(19): siRNA sense strand
uaucgucuguguuccaaau

SEQ ID NO: 330008 - RNA, 19 nt, Homo sapiens
  misc_RNA (1)...(19): siRNA sense strand
gauaggaauugggaucaag

SEQ ID NO: 330009 - RNA, 19 nt, Homo sapiens
  misc_RNA (1)...(19): siRNA sense strand
ggaggacgcuuuucuggau

SEQ ID NO: 330010 - RNA, 19 nt, Homo sapiens
  misc_RNA (1)...(19): siRNA sense strand
agaauagagccauaaagaa

SEQ ID NO: 330011 - RNA, 19 nt, Homo sapiens
  misc_RNA (1)...(19): siRNA sense strand
gaguaaaccagucucuuca

SEQ ID NO: 330012 - RNA, 19 nt, Homo sapiens
  misc_RNA (1)...(19): siRNA sense strand
guucuuaucgucuguguuc

SEQ ID NO: 330013 - RNA, 19 nt, Homo sapiens
  misc_RNA (1)...(19): siRNA sense strand
gugcgggauuggauaguga

SEQ ID NO: 330014 - RNA, 19 nt, Homo sapiens
  misc_RNA (1)...(19): siRNA sense strand
gcagacgaguugcacaaaa

SEQ ID NO: 330015 - RNA, 19 nt, Homo sapiens
  misc_RNA (1)...(19): siRNA sense strand
caacauauugcugaacguu

SEQ ID NO: 330016 - RNA, 19 nt, Homo sapiens
  misc_RNA (1)...(19): siRNA sense strand
aaaccagucucuucaccau

SEQ ID NO: 330017 - RNA, 19 nt, Homo sapiens
  misc_RNA (1)...(19): siRNA sense strand
aagauacaccugacaagaa

SEQ ID NO: 330018 - RNA, 19 nt, Homo sapiens
  misc_RNA (1)...(19): siRNA sense strand
uggcaggaauucugaaagu

SEQ ID NO: 330019 - RNA, 19 nt, Homo sapiens
  misc_RNA (1)...(19): siRNA sense strand
uaaagcuugugucggaaau

SEQ ID NO: 330020 - RNA, 19 nt, Homo sapiens
  misc_RNA (1)...(19): siRNA sense strand
ugaagaauagagccauaaa

SEQ ID NO: 330021 - RNA, 19 nt, Homo sapiens
  misc_RNA (1)...(19): siRNA sense strand
gagcgacaagugccucauu

SEQ ID NO: 330022 - RNA, 19 nt, Homo sapiens
  misc_RNA (1)...(19): siRNA sense strand
agauacaccugacaagaag

SEQ ID NO: 330023 - RNA, 19 nt, Homo sapiens
  misc_RNA (1)...(19): siRNA sense strand
gggaacaguggcaggaauu

SEQ ID NO: 330024 - RNA, 19 nt, Homo sapiens
  misc_RNA (1)...(19): siRNA sense strand
ggaacugacagauaggaau

SEQ ID NO: 330025 - RNA, 19 nt, Homo sapiens
  misc_RNA (1)...(19): siRNA sense strand
gugaagcacgugaauacaa

SEQ ID NO: 330026 - RNA, 19 nt, Homo sapiens
  misc_RNA (1)...(19): siRNA sense strand
gaaaugccuaucacaagca

SEQ ID NO: 330027 - RNA, 19 nt, Homo sapiens
  misc_RNA (1)...(19): siRNA sense strand
guaaagcuugugucggaaa

SEQ ID NO: 330028 - RNA, 19 nt, Homo sapiens
  misc_RNA (1)...(19): siRNA sense strand
aaucagaagacacagcuuu

SEQ ID NO: 330029 - RNA, 19 nt, Homo sapiens
  misc_RNA (1)...(19): siRNA sense strand
gaugagccacccaaaguag

SEQ ID NO: 330030 - RNA, 19 nt, Homo sapiens
  misc_RNA (1)...(19): siRNA sense strand
gaaggugacaguggugaau

SEQ ID NO: 330031 - RNA, 19 nt, Homo sapiens
  misc_RNA (1)...(19): siRNA sense strand
gguggcaucugaaaagaaa

SEQ ID NO: 330032 - RNA, 19 nt, Homo sapiens
  misc_RNA (1)...(19): siRNA sense strand
aagcaaagcgcagaaaugu

SEQ ID NO: 330033 - RNA, 19 nt, Homo sapiens
  misc_RNA (1)...(19): siRNA sense strand
aagugaaucuaacaaagug

SEQ ID NO: 330034 - RNA, 19 nt, Homo sapiens
  misc_RNA (1)...(19): siRNA sense strand
cuugaagaauagagccaua

SEQ ID NO: 330035 - RNA, 19 nt, Homo sapiens
  misc_RNA (1)...(19): siRNA sense strand
guuuaaagagaaaggcaua

SEQ ID NO: 330036 - RNA, 19 nt, Homo sapiens
  misc_RNA (1)...(19): siRNA sense strand
acaagaaagacaaugaguu

SEQ ID NO: 330037 - RNA, 19 nt, Homo sapiens
  misc_RNA (1)...(19): siRNA sense strand
ucgaauggaaacaacauaa

SEQ ID NO: 330038 - RNA, 19 nt, Homo sapiens
  misc_RNA (1)...(19): siRNA sense strand
ccaauugacgagaagaaug

SEQ ID NO: 330039 - RNA, 19 nt, Homo sapiens
  misc_RNA (1)...(19): siRNA sense strand
gagaaaggcauagguacuc

SEQ ID NO: 330040 - RNA, 19 nt, Homo sapiens
  misc_RNA (1)...(19): siRNA sense strand
cuucaccauuucccacuaa

SEQ ID NO: 330041 - RNA, 19 nt, Homo sapiens
  misc_RNA (1)...(19): siRNA sense strand
aaagcaaagcgcagaaaug

SEQ ID NO: 330042 - RNA, 19 nt, Homo sapiens
  misc_RNA (1)...(19): siRNA sense strand
cagcaagagucaacguuuu

SEQ ID NO: 330043 - RNA, 19 nt, Homo sapiens
  misc_RNA (1)...(19): siRNA sense strand
gaacagcaacacgggaaca

SEQ ID NO: 330044 - RNA, 19 nt, Homo sapiens
  misc_RNA (1)...(19): siRNA sense strand
gauagugaagcacgugaau

SEQ ID NO: 330045 - RNA, 19 nt, Homo sapiens
  misc_RNA (1)...(19): siRNA sense strand
gaaaugccgagaaggaacu

SEQ ID NO: 330046 - RNA, 19 nt, Homo sapiens
  misc_RNA (1)...(19): siRNA sense strand
gggcagacaccaauuuagg

SEQ ID NO: 330047 - RNA, 19 nt, Homo sapiens
  misc_RNA (1)...(19): siRNA sense strand
ccacccaaaguaguaguua

SEQ ID NO: 330048 - RNA, 19 nt, Homo sapiens
  misc_RNA (1)...(19): siRNA sense strand
gaaugaugagccacccaaa

SEQ ID NO: 330049 - RNA, 19 nt, Homo sapiens
  misc_RNA (1)...(19): siRNA sense strand
aaaccuacagcaaaucaga

SEQ ID NO: 330050 - RNA, 19 nt, Homo sapiens
  misc_RNA (1)...(19): siRNA sense strand
ccagucaccauguugauuc

SEQ ID NO: 330051 - RNA, 19 nt, Homo sapiens
  misc_RNA (1)...(19): siRNA sense strand
ccaauuuaggcaacauauu

SEQ ID NO: 330052 - RNA, 19 nt, Homo sapiens
  misc_RNA (1)...(19): siRNA sense strand
gaauagagccauaaagaaa

SEQ ID NO: 330053 - RNA, 19 nt, Homo sapiens
  misc_RNA (1)...(19): siRNA sense strand
gcaaagcgcagaaauguug

SEQ ID NO: 330054 - RNA, 19 nt, Homo sapiens
  misc_RNA (1)...(19): siRNA sense strand
gaaagugaaucuaacaaag

SEQ ID NO: 330055 - RNA, 19 nt, Homo sapiens
  misc_RNA (1)...(19): siRNA sense strand
caagaaagacaaugaguuu

SEQ ID NO: 330056 - RNA, 19 nt, Homo sapiens
  misc_RNA (1)...(19): siRNA sense strand
gaucugacaccuaucuuua

SEQ ID NO: 330057 - RNA, 19 nt, Homo sapiens
  misc_RNA (1)...(19): siRNA sense strand
acaagugccucauuuaauu

SEQ ID NO: 330058 - RNA, 19 nt, Homo sapiens
  misc_RNA (1)...(19): siRNA sense strand
gaaggacugucgaauggaa

SEQ ID NO: 330059 - RNA, 19 nt, Homo sapiens
  misc_RNA (1)...(19): siRNA sense strand
gacaaugaguuuaaagaga

SEQ ID NO: 330060 - RNA, 19 nt, Homo sapiens
  misc_RNA (1)...(19): siRNA sense strand
gaaaguugauagcucuguu

SEQ ID NO: 330061 - RNA, 19 nt, Homo sapiens
  misc_RNA (1)...(19): siRNA sense strand
caacaaaacugaagauaca

SEQ ID NO: 330062 - RNA, 19 nt, Homo sapiens
  misc_RNA (1)...(19): siRNA sense strand
ugaagcacgugaauacaaa

SEQ ID NO: 330063 - RNA, 19 nt, Homo sapiens
  misc_RNA (1)...(19): siRNA sense strand
cgacaagugccucauuuaa

SEQ ID NO: 330064 - RNA, 19 nt, Homo sapiens
  misc_RNA (1)...(19): siRNA sense strand
gaagauacaccugacaaga

SEQ ID NO: 330065 - RNA, 19 nt, Homo sapiens
  misc_RNA (1)...(19): siRNA sense strand
cauagguacucugcauuua

SEQ ID NO: 330066 - RNA, 19 nt, Homo sapiens
  misc_RNA (1)...(19): siRNA sense strand
ugacaguggugaaugcaaa

SEQ ID NO: 330067 - RNA, 19 nt, Homo sapiens
  misc_RNA (1)...(19): siRNA sense strand
gcauagguacucugcauuu

SEQ ID NO: 330068 - RNA, 19 nt, Homo sapiens
  misc_RNA (1)...(19): siRNA sense strand
uagguacucugcauuuaaa

SEQ ID NO: 330069 - RNA, 19 nt, Homo sapiens
  misc_RNA (1)...(19): siRNA sense strand
gcaggaauucugaaaguga

SEQ ID NO: 330070 - RNA, 19 nt, Homo sapiens
  misc_RNA (1)...(19): siRNA sense strand
caaaguggcagcugaaaca

SEQ ID NO: 330071 - RNA, 19 nt, Homo sapiens
  misc_RNA (1)...(19): siRNA sense strand
gaacagggaagaauaacgu

SEQ ID NO: 330072 - RNA, 19 nt, Homo sapiens
  misc_RNA (1)...(19): siRNA sense strand
gagaugaagaagagaauga

SEQ ID NO: 330073 - RNA, 19 nt, Homo sapiens
  misc_RNA (1)...(19): siRNA sense strand
gaaagcaaagcgcagaaau

SEQ ID NO: 330074 - RNA, 19 nt, Homo sapiens
  misc_RNA (1)...(19): siRNA sense strand
aaagagaaaggcauaggua

SEQ ID NO: 330075 - RNA, 19 nt, Homo sapiens
  misc_RNA (1)...(19): siRNA sense strand
gcgacaagugccucauuua

SEQ ID NO: 330076 - RNA, 19 nt, Homo sapiens
  misc_RNA (1)...(19): siRNA sense strand
aagaauagagccauaaaga

SEQ ID NO: 330077 - RNA, 19 nt, Homo sapiens
  misc_RNA (1)...(19): siRNA sense strand
gacaagugccucauuuaau

SEQ ID NO: 330078 - RNA, 19 nt, Homo sapiens
  misc_RNA (1)...(19): siRNA sense strand
caccuugguugauaaaguu

SEQ ID NO: 330079 - RNA, 19 nt, Homo sapiens
  misc_RNA (1)...(19): siRNA sense strand
aguaguaguuaccgaagua

SEQ ID NO: 330080 - RNA, 19 nt, Homo sapiens
  misc_RNA (1)...(19): siRNA sense strand
ucugacaccuaucuuuaaa

SEQ ID NO: 330081 - RNA, 19 nt, Homo sapiens
  misc_RNA (1)...(19): siRNA sense strand
caaauggcccuaccaccuu

SEQ ID NO: 330082 - RNA, 19 nt, Homo sapiens
  misc_RNA (1)...(19): siRNA sense strand
caaagauacuacccagagu

SEQ ID NO: 330083 - RNA, 19 nt, Homo sapiens
  misc_RNA (1)...(19): siRNA sense strand
caagugccucauuuaauuu

SEQ ID NO: 330084 - RNA, 19 nt, Homo sapiens
  misc_RNA (1)...(19): siRNA sense strand
caggaauucugaaagugaa

SEQ ID NO: 330085 - RNA, 19 nt, Homo sapiens
  misc_RNA (1)...(19): siRNA sense strand
gcgggcagacaccaauuua

SEQ ID NO: 330086 - RNA, 19 nt, Homo sapiens
  misc_RNA (1)...(19): siRNA sense strand
uaacaaaguggcagcugaa

SEQ ID NO: 330087 - RNA, 19 nt, Homo sapiens
  misc_RNA (1)...(19): siRNA sense strand
uggaaggacugucgaaugg

SEQ ID NO: 330088 - RNA, 19 nt, Homo sapiens
  misc_RNA (1)...(19): siRNA sense strand
guucugauuccacccaaua

SEQ ID NO: 330089 - RNA, 19 nt, Homo sapiens
  misc_RNA (1)...(19): siRNA sense strand
augcaaagguggagaugaa

SEQ ID NO: 330090 - RNA, 19 nt, Homo sapiens
  misc_RNA (1)...(19): siRNA sense strand
ucugugaucugacaccuau

SEQ ID NO: 330091 - RNA, 19 nt, Homo sapiens
  misc_RNA (1)...(19): siRNA sense strand
gggauuggauagugaagca

SEQ ID NO: 330092 - RNA, 19 nt, Homo sapiens
  misc_RNA (1)...(19): siRNA sense strand
caacaaaauuacagcaaga

SEQ ID NO: 330093 - RNA, 19 nt, Homo sapiens
  misc_RNA (1)...(19): siRNA sense strand
caaagguggagaugaagaa

SEQ ID NO: 330094 - RNA, 19 nt, Homo sapiens
  misc_RNA (1)...(19): siRNA sense strand
gcaaagguggagaugaaga

SEQ ID NO: 330095 - RNA, 19 nt, Homo sapiens
  misc_RNA (1)...(19): siRNA sense strand
ccaccuugguugauaaagu

SEQ ID NO: 330096 - RNA, 19 nt, Homo sapiens
  misc_RNA (1)...(19): siRNA sense strand
cagcaaaucagaagacaca

SEQ ID NO: 330097 - RNA, 19 nt, Homo sapiens
  misc_RNA (1)...(19): siRNA sense strand
accagucucuucaccauuu

SEQ ID NO: 330098 - RNA, 19 nt, Homo sapiens
  misc_RNA (1)...(19): siRNA sense strand
gaagaauagagccauaaag

SEQ ID NO: 330099 - RNA, 19 nt, Homo sapiens
  misc_RNA (1)...(19): siRNA sense strand
uaucgucuguguuccaaau

SEQ ID NO: 330100 - RNA, 19 nt, Homo sapiens
  misc_RNA (1)...(19): siRNA sense strand
ggaggacgcuuuucuggau

SEQ ID NO: 330101 - RNA, 19 nt, Homo sapiens
  misc_RNA (1)...(19): siRNA sense strand
agaauagagccauaaagaa

SEQ ID NO: 330102 - RNA, 19 nt, Homo sapiens
  misc_RNA (1)...(19): siRNA sense strand
gaguaaaccagucucuuca

SEQ ID NO: 330103 - RNA, 19 nt, Homo sapiens
  misc_RNA (1)...(19): siRNA sense strand
guucuuaucgucuguguuc

SEQ ID NO: 330104 - RNA, 19 nt, Homo sapiens
  misc_RNA (1)...(19): siRNA sense strand
gugcgggauuggauaguga

SEQ ID NO: 330105 - RNA, 19 nt, Homo sapiens
  misc_RNA (1)...(19): siRNA sense strand
gcagacgaguugcacaaaa

SEQ ID NO: 330106 - RNA, 19 nt, Homo sapiens
  misc_RNA (1)...(19): siRNA sense strand
caacauauugcugaacguu

SEQ ID NO: 330107 - RNA, 19 nt, Homo sapiens
  misc_RNA (1)...(19): siRNA sense strand
aaaccagucucuucaccau

SEQ ID NO: 330108 - RNA, 19 nt, Homo sapiens
  misc_RNA (1)...(19): siRNA sense strand
aagauacaccugacaagaa

SEQ ID NO: 330109 - RNA, 19 nt, Homo sapiens
  misc_RNA (1)...(19): siRNA sense strand
uggcaggaauucugaaagu

SEQ ID NO: 330110 - RNA, 19 nt, Homo sapiens
  misc_RNA (1)...(19): siRNA sense strand
uaaagcuugugucggaaau

SEQ ID NO: 330111 - RNA, 19 nt, Homo sapiens
  misc_RNA (1)...(19): siRNA sense strand
gagcgacaagugccucauu

SEQ ID NO: 330112 - RNA, 19 nt, Homo sapiens
  misc_RNA (1)...(19): siRNA sense strand
agauacaccugacaagaag

SEQ ID NO: 330113 - RNA, 19 nt, Homo sapiens
  misc_RNA (1)...(19): siRNA sense strand
ugaagaauagagccauaaa

SEQ ID NO: 330114 - RNA, 19 nt, Homo sapiens
  misc_RNA (1)...(19): siRNA sense strand
gggaacaguggcaggaauu

SEQ ID NO: 330115 - RNA, 19 nt, Homo sapiens
  misc_RNA (1)...(19): siRNA sense strand
gugaagcacgugaauacaa

SEQ ID NO: 330116 - RNA, 19 nt, Homo sapiens
  misc_RNA (1)...(19): siRNA sense strand
gaaaugccuaucacaagca

SEQ ID NO: 330117 - RNA, 19 nt, Homo sapiens
  misc_RNA (1)...(19): siRNA sense strand
guaaagcuugugucggaaa

SEQ ID NO: 330118 - RNA, 19 nt, Homo sapiens
  misc_RNA (1)...(19): siRNA sense strand
aaucagaagacacagcuuu

SEQ ID NO: 330119 - RNA, 19 nt, Homo sapiens
  misc_RNA (1)...(19): siRNA sense strand
gaugagccacccaaaguag

SEQ ID NO: 330120 - RNA, 19 nt, Homo sapiens
  misc_RNA (1)...(19): siRNA sense strand
aagcaaagcgcagaaaugu

SEQ ID NO: 330121 - RNA, 19 nt, Homo sapiens
  misc_RNA (1)...(19): siRNA sense strand
gaaggugacaguggugaau

SEQ ID NO: 330122 - RNA, 19 nt, Homo sapiens
  misc_RNA (1)...(19): siRNA sense strand
gguggcaucugaaaagaaa

SEQ ID NO: 330123 - RNA, 19 nt, Homo sapiens
  misc_RNA (1)...(19): siRNA sense strand
aagugaaucuaacaaagug

SEQ ID NO: 330124 - RNA, 19 nt, Homo sapiens
  misc_RNA (1)...(19): siRNA sense strand
cuugaagaauagagccaua

SEQ ID NO: 330125 - RNA, 19 nt, Homo sapiens
  misc_RNA (1)...(19): siRNA sense strand
guuuaaagagaaaggcaua

SEQ ID NO: 330126 - RNA, 19 nt, Homo sapiens
  misc_RNA (1)...(19): siRNA sense strand
acaagaaagacaaugaguu

SEQ ID NO: 330127 - RNA, 19 nt, Homo sapiens
  misc_RNA (1)...(19): siRNA sense strand
gauagugaagcacgugaau

SEQ ID NO: 330128 - RNA, 19 nt, Homo sapiens
  misc_RNA (1)...(19): siRNA sense strand
ccaauugacgagaagaaug

SEQ ID NO: 330129 - RNA, 19 nt, Homo sapiens
  misc_RNA (1)...(19): siRNA sense strand
gagaaaggcauagguacuc

SEQ ID NO: 330130 - RNA, 19 nt, Homo sapiens
  misc_RNA (1)...(19): siRNA sense strand
aaagcaaagcgcagaaaug

SEQ ID NO: 330131 - RNA, 19 nt, Homo sapiens
  misc_RNA (1)...(19): siRNA sense strand
ucgaauggaaacaacauaa

SEQ ID NO: 330132 - RNA, 19 nt, Homo sapiens
  misc_RNA (1)...(19): siRNA sense strand
cuucaccauuucccacuaa

SEQ ID NO: 330133 - RNA, 19 nt, Homo sapiens
  misc_RNA (1)...(19): siRNA sense strand
cagcaagagucaacguuuu

SEQ ID NO: 330134 - RNA, 19 nt, Homo sapiens
  misc_RNA (1)...(19): siRNA sense strand
gaacagcaacacgggaaca

SEQ ID NO: 330135 - RNA, 19 nt, Homo sapiens
  misc_RNA (1)...(19): siRNA sense strand
gaaugaugagccacccaaa

SEQ ID NO: 330136 - RNA, 19 nt, Homo sapiens
  misc_RNA (1)...(19): siRNA sense strand
gggcagacaccaauuuagg

SEQ ID NO: 330137 - RNA, 19 nt, Homo sapiens
  misc_RNA (1)...(19): siRNA sense strand
ccacccaaaguaguaguua

SEQ ID NO: 330138 - RNA, 19 nt, Homo sapiens
  misc_RNA (1)...(19): siRNA sense strand
cauuuaauuucggcaagaa

SEQ ID NO: 330139 - RNA, 19 nt, Homo sapiens
  misc_RNA (1)...(19): siRNA sense strand
ccagucaccauguugauuc

SEQ ID NO: 330140 - RNA, 19 nt, Homo sapiens
  misc_RNA (1)...(19): siRNA sense strand
ccaauuuaggcaacauauu

SEQ ID NO: 330141 - RNA, 19 nt, Homo sapiens
  misc_RNA (1)...(19): siRNA sense strand
aaaccuacagcaaaucaga

SEQ ID NO: 330142 - RNA, 19 nt, Homo sapiens
  misc_RNA (1)...(19): siRNA sense strand
ugaugagccacccaaagua

SEQ ID NO: 330143 - RNA, 19 nt, Homo sapiens
  misc_RNA (1)...(19): siRNA sense strand
ggcaggaauucugaaagug

SEQ ID NO: 330144 - RNA, 19 nt, Homo sapiens
  misc_RNA (1)...(19): siRNA sense strand
guuccaaauccaccaauug

SEQ ID NO: 330145 - RNA, 19 nt, Homo sapiens
  misc_RNA (1)...(19): siRNA sense strand
ugagccacccaaaguagua

SEQ ID NO: 330146 - RNA, 19 nt, Homo sapiens
  misc_RNA (1)...(19): siRNA sense strand
gaugaagaagagaaugaug

SEQ ID NO: 330147 - RNA, 19 nt, Homo sapiens
  misc_RNA (1)...(19): siRNA sense strand
uggccuugcuuccaguaaa

SEQ ID NO: 330148 - RNA, 19 nt, Homo sapiens
  misc_RNA (1)...(19): siRNA sense strand
cgaggaugcagacgaguug

SEQ ID NO: 330149 - RNA, 19 nt, Homo sapiens
  misc_RNA (1)...(19): siRNA sense strand
uaacguucuuaucgucugu

SEQ ID NO: 330150 - RNA, 19 nt, Homo sapiens
  misc_RNA (1)...(19): siRNA sense strand
ccagugaggaagucuugaa

SEQ ID NO: 330151 - RNA, 19 nt, Homo sapiens
  misc_RNA (1)...(19): siRNA sense strand
gcgaggaugcagacgaguu

SEQ ID NO: 330152 - RNA, 19 nt, Homo sapiens
  misc_RNA (1)...(19): siRNA sense strand
gaauagagccauaaagaaa

SEQ ID NO: 330153 - RNA, 19 nt, Homo sapiens
  misc_RNA (1)...(19): siRNA sense strand
gcaaagcgcagaaauguug

SEQ ID NO: 330154 - RNA, 19 nt, Homo sapiens
  misc_RNA (1)...(19): siRNA sense strand
gaaagugaaucuaacaaag

SEQ ID NO: 330155 - RNA, 19 nt, Homo sapiens
  misc_RNA (1)...(19): siRNA sense strand
caagaaagacaaugaguuu

SEQ ID NO: 330156 - RNA, 19 nt, Homo sapiens
  misc_RNA (1)...(19): siRNA sense strand
gaucugacaccuaucuuua

SEQ ID NO: 330157 - RNA, 19 nt, Homo sapiens
  misc_RNA (1)...(19): siRNA sense strand
acaagugccucauuuaauu

SEQ ID NO: 330158 - RNA, 19 nt, Homo sapiens
  misc_RNA (1)...(19): siRNA sense strand
gaaggacugucgaauggaa

SEQ ID NO: 330159 - RNA, 19 nt, Homo sapiens
  misc_RNA (1)...(19): siRNA sense strand
gacaaugaguuuaaagaga

SEQ ID NO: 330160 - RNA, 19 nt, Homo sapiens
  misc_RNA (1)...(19): siRNA sense strand
gaaaguugauagcucuguu

SEQ ID NO: 330161 - RNA, 19 nt, Homo sapiens
  misc_RNA (1)...(19): siRNA sense strand
caacaaaacugaagauaca

SEQ ID NO: 330162 - RNA, 19 nt, Homo sapiens
  misc_RNA (1)...(19): siRNA sense strand
ugaagcacgugaauacaaa

SEQ ID NO: 330163 - RNA, 19 nt, Homo sapiens
  misc_RNA (1)...(19): siRNA sense strand
cgacaagugccucauuuaa

SEQ ID NO: 330164 - RNA, 19 nt, Homo sapiens
  misc_RNA (1)...(19): siRNA sense strand
gaagauacaccugacaaga

SEQ ID NO: 330165 - RNA, 19 nt, Homo sapiens
  misc_RNA (1)...(19): siRNA sense strand
cauagguacucugcauuua

SEQ ID NO: 330166 - RNA, 19 nt, Homo sapiens
  misc_RNA (1)...(19): siRNA sense strand
ugacaguggugaaugcaaa

SEQ ID NO: 330167 - RNA, 19 nt, Homo sapiens
  misc_RNA (1)...(19): siRNA sense strand
gcauagguacucugcauuu

SEQ ID NO: 330168 - RNA, 19 nt, Homo sapiens
  misc_RNA (1)...(19): siRNA sense strand
uagguacucugcauuuaaa

SEQ ID NO: 330169 - RNA, 19 nt, Homo sapiens
  misc_RNA (1)...(19): siRNA sense strand
gcaggaauucugaaaguga

SEQ ID NO: 330170 - RNA, 19 nt, Homo sapiens
  misc_RNA (1)...(19): siRNA sense strand
caaaguggcagcugaaaca

SEQ ID NO: 330171 - RNA, 19 nt, Homo sapiens
  misc_RNA (1)...(19): siRNA sense strand
gaacagggaagaauaacgu

SEQ ID NO: 330172 - RNA, 19 nt, Homo sapiens
  misc_RNA (1)...(19): siRNA sense strand
gagaugaagaagagaauga

SEQ ID NO: 330173 - RNA, 19 nt, Homo sapiens
  misc_RNA (1)...(19): siRNA sense strand
gaaagcaaagcgcagaaau

SEQ ID NO: 330174 - RNA, 19 nt, Homo sapiens
  misc_RNA (1)...(19): siRNA sense strand
aaagagaaaggcauaggua

SEQ ID NO: 330175 - RNA, 19 nt, Homo sapiens
  misc_RNA (1)...(19): siRNA sense strand
gcgacaagugccucauuua

SEQ ID NO: 330176 - RNA, 19 nt, Homo sapiens
  misc_RNA (1)...(19): siRNA sense strand
aagaauagagccauaaaga

SEQ ID NO: 330177 - RNA, 19 nt, Homo sapiens
  misc_RNA (1)...(19): siRNA sense strand
gacaagugccucauuuaau

SEQ ID NO: 330178 - RNA, 19 nt, Homo sapiens
  misc_RNA (1)...(19): siRNA sense strand
caccuugguugauaaaguu

SEQ ID NO: 330179 - RNA, 19 nt, Homo sapiens
  misc_RNA (1)...(19): siRNA sense strand
aguaguaguuaccgaagua

SEQ ID NO: 330180 - RNA, 19 nt, Homo sapiens
  misc_RNA (1)...(19): siRNA sense strand
ucugacaccuaucuuuaaa

SEQ ID NO: 330181 - RNA, 19 nt, Homo sapiens
  misc_RNA (1)...(19): siRNA sense strand
caaauggcccuaccaccuu

SEQ ID NO: 330182 - RNA, 19 nt, Homo sapiens
  misc_RNA (1)...(19): siRNA sense strand
caaagauacuacccagagu

SEQ ID NO: 330183 - RNA, 19 nt, Homo sapiens
  misc_RNA (1)...(19): siRNA sense strand
caagugccucauuuaauuu

SEQ ID NO: 330184 - RNA, 19 nt, Homo sapiens
  misc_RNA (1)...(19): siRNA sense strand
caggaauucugaaagugaa

SEQ ID NO: 330185 - RNA, 19 nt, Homo sapiens
  misc_RNA (1)...(19): siRNA sense strand
gcgggcagacaccaauuua

SEQ ID NO: 330186 - RNA, 19 nt, Homo sapiens
  misc_RNA (1)...(19): siRNA sense strand
uaacaaaguggcagcugaa

SEQ ID NO: 330187 - RNA, 19 nt, Homo sapiens
  misc_RNA (1)...(19): siRNA sense strand
uggaaggacugucgaaugg

SEQ ID NO: 330188 - RNA, 19 nt, Homo sapiens
  misc_RNA (1)...(19): siRNA sense strand
guucugauuccacccaaua

SEQ ID NO: 330189 - RNA, 19 nt, Homo sapiens
  misc_RNA (1)...(19): siRNA sense strand
augcaaagguggagaugaa

SEQ ID NO: 330190 - RNA, 19 nt, Homo sapiens
  misc_RNA (1)...(19): siRNA sense strand
ucugugaucugacaccuau

SEQ ID NO: 330191 - RNA, 19 nt, Homo sapiens
  misc_RNA (1)...(19): siRNA sense strand
gggauuggauagugaagca

SEQ ID NO: 330192 - RNA, 19 nt, Homo sapiens
  misc_RNA (1)...(19): siRNA sense strand
caacaaaauuacagcaaga

SEQ ID NO: 330193 - RNA, 19 nt, Homo sapiens
  misc_RNA (1)...(19): siRNA sense strand
caaagguggagaugaagaa

SEQ ID NO: 330194 - RNA, 19 nt, Homo sapiens
  misc_RNA (1)...(19): siRNA sense strand
gcaaagguggagaugaaga

SEQ ID NO: 330195 - RNA, 19 nt, Homo sapiens
  misc_RNA (1)...(19): siRNA sense strand
ccaccuugguugauaaagu

SEQ ID NO: 330196 - RNA, 19 nt, Homo sapiens
  misc_RNA (1)...(19): siRNA sense strand
cagcaaaucagaagacaca

SEQ ID NO: 330197 - RNA, 19 nt, Homo sapiens
  misc_RNA (1)...(19): siRNA sense strand
accagucucuucaccauuu

SEQ ID NO: 330198 - RNA, 19 nt, Homo sapiens
  misc_RNA (1)...(19): siRNA sense strand
gaagaauagagccauaaag

SEQ ID NO: 330199 - RNA, 19 nt, Homo sapiens
  misc_RNA (1)...(19): siRNA sense strand
uaucgucuguguuccaaau

SEQ ID NO: 330200 - RNA, 19 nt, Homo sapiens
  misc_RNA (1)...(19): siRNA sense strand
ggaggacgcuuuucuggau

SEQ ID NO: 330201 - RNA, 19 nt, Homo sapiens
  misc_RNA (1)...(19): siRNA sense strand
agaauagagccauaaagaa

SEQ ID NO: 330202 - RNA, 19 nt, Homo sapiens
  misc_RNA (1)...(19): siRNA sense strand
gaguaaaccagucucuuca

SEQ ID NO: 330203 - RNA, 19 nt, Homo sapiens
  misc_RNA (1)...(19): siRNA sense strand
guucuuaucgucuguguuc

SEQ ID NO: 330204 - RNA, 19 nt, Homo sapiens
  misc_RNA (1)...(19): siRNA sense strand
gugcgggauuggauaguga

SEQ ID NO: 330205 - RNA, 19 nt, Homo sapiens
  misc_RNA (1)...(19): siRNA sense strand
gcagacgaguugcacaaaa

SEQ ID NO: 330206 - RNA, 19 nt, Homo sapiens
  misc_RNA (1)...(19): siRNA sense strand
caacauauugcugaacguu

SEQ ID NO: 330207 - RNA, 19 nt, Homo sapiens
  misc_RNA (1)...(19): siRNA sense strand
aaaccagucucuucaccau

SEQ ID NO: 330208 - RNA, 19 nt, Homo sapiens
  misc_RNA (1)...(19): siRNA sense strand
aagauacaccugacaagaa

SEQ ID NO: 330209 - RNA, 19 nt, Homo sapiens
  misc_RNA (1)...(19): siRNA sense strand
uggcaggaauucugaaagu

SEQ ID NO: 330210 - RNA, 19 nt, Homo sapiens
  misc_RNA (1)...(19): siRNA sense strand
uaaagcuugugucggaaau

SEQ ID NO: 330211 - RNA, 19 nt, Homo sapiens
  misc_RNA (1)...(19): siRNA sense strand
gagcgacaagugccucauu

SEQ ID NO: 330212 - RNA, 19 nt, Homo sapiens
  misc_RNA (1)...(19): siRNA sense strand
agauacaccugacaagaag

SEQ ID NO: 330213 - RNA, 19 nt, Homo sapiens
  misc_RNA (1)...(19): siRNA sense strand
ugaagaauagagccauaaa

SEQ ID NO: 330214 - RNA, 19 nt, Homo sapiens
  misc_RNA (1)...(19): siRNA sense strand
gggaacaguggcaggaauu

SEQ ID NO: 330215 - RNA, 19 nt, Homo sapiens
  misc_RNA (1)...(19): siRNA sense strand
gugaagcacgugaauacaa

SEQ ID NO: 330216 - RNA, 19 nt, Homo sapiens
  misc_RNA (1)...(19): siRNA sense strand
gaaaugccuaucacaagca

SEQ ID NO: 330217 - RNA, 19 nt, Homo sapiens
  misc_RNA (1)...(19): siRNA sense strand
guaaagcuugugucggaaa

SEQ ID NO: 330218 - RNA, 19 nt, Homo sapiens
  misc_RNA (1)...(19): siRNA sense strand
aaucagaagacacagcuuu

SEQ ID NO: 330219 - RNA, 19 nt, Homo sapiens
  misc_RNA (1)...(19): siRNA sense strand
gaugagccacccaaaguag

SEQ ID NO: 330220 - RNA, 19 nt, Homo sapiens
  misc_RNA (1)...(19): siRNA sense strand
aagcaaagcgcagaaaugu

SEQ ID NO: 330221 - RNA, 19 nt, Homo sapiens
  misc_RNA (1)...(19): siRNA sense strand
gaaggugacaguggugaau

SEQ ID NO: 330222 - RNA, 19 nt, Homo sapiens
  misc_RNA (1)...(19): siRNA sense strand
gguggcaucugaaaagaaa

SEQ ID NO: 330223 - RNA, 19 nt, Homo sapiens
  misc_RNA (1)...(19): siRNA sense strand
aagugaaucuaacaaagug

SEQ ID NO: 330224 - RNA, 19 nt, Homo sapiens
  misc_RNA (1)...(19): siRNA sense strand
cuugaagaauagagccaua

SEQ ID NO: 330225 - RNA, 19 nt, Homo sapiens
  misc_RNA (1)...(19): siRNA sense strand
guuuaaagagaaaggcaua

SEQ ID NO: 330226 - RNA, 19 nt, Homo sapiens
  misc_RNA (1)...(19): siRNA sense strand
acaagaaagacaaugaguu

SEQ ID NO: 330227 - RNA, 19 nt, Homo sapiens
  misc_RNA (1)...(19): siRNA sense strand
gauagugaagcacgugaau

SEQ ID NO: 330228 - RNA, 19 nt, Homo sapiens
  misc_RNA (1)...(19): siRNA sense strand
ccaauugacgagaagaaug

SEQ ID NO: 330229 - RNA, 19 nt, Homo sapiens
  misc_RNA (1)...(19): siRNA sense strand
gagaaaggcauagguacuc

SEQ ID NO: 330230 - RNA, 19 nt, Homo sapiens
  misc_RNA (1)...(19): siRNA sense strand
aaagcaaagcgcagaaaug

SEQ ID NO: 330231 - RNA, 19 nt, Homo sapiens
  misc_RNA (1)...(19): siRNA sense strand
ucgaauggaaacaacauaa

SEQ ID NO: 330232 - RNA, 19 nt, Homo sapiens
  misc_RNA (1)...(19): siRNA sense strand
cuucaccauuucccacuaa

SEQ ID NO: 330233 - RNA, 19 nt, Homo sapiens
  misc_RNA (1)...(19): siRNA sense strand
cagcaagagucaacguuuu

SEQ ID NO: 330234 - RNA, 19 nt, Homo sapiens
  misc_RNA (1)...(19): siRNA sense strand
gaacagcaacacgggaaca

SEQ ID NO: 330235 - RNA, 19 nt, Homo sapiens
  misc_RNA (1)...(19): siRNA sense strand
gaaugaugagccacccaaa

SEQ ID NO: 330236 - RNA, 19 nt, Homo sapiens
  misc_RNA (1)...(19): siRNA sense strand
gggcagacaccaauuuagg

SEQ ID NO: 330237 - RNA, 19 nt, Homo sapiens
  misc_RNA (1)...(19): siRNA sense strand
ccacccaaaguaguaguua

SEQ ID NO: 330238 - RNA, 19 nt, Homo sapiens
  misc_RNA (1)...(19): siRNA sense strand
cauuuaauuucggcaagaa

SEQ ID NO: 330239 - RNA, 19 nt, Homo sapiens
  misc_RNA (1)...(19): siRNA sense strand
ccagucaccauguugauuc

SEQ ID NO: 330240 - RNA, 19 nt, Homo sapiens
  misc_RNA (1)...(19): siRNA sense strand
ccaauuuaggcaacauauu

SEQ ID NO: 330241 - RNA, 19 nt, Homo sapiens
  misc_RNA (1)...(19): siRNA sense strand
aaaccuacagcaaaucaga

SEQ ID NO: 330242 - RNA, 19 nt, Homo sapiens
  misc_RNA (1)...(19): siRNA sense strand
ugaugagccacccaaagua

SEQ ID NO: 330243 - RNA, 19 nt, Homo sapiens
  misc_RNA (1)...(19): siRNA sense strand
ggcaggaauucugaaagug

SEQ ID NO: 330244 - RNA, 19 nt, Homo sapiens
  misc_RNA (1)...(19): siRNA sense strand
guuccaaauccaccaauug

SEQ ID NO: 330245 - RNA, 19 nt, Homo sapiens
  misc_RNA (1)...(19): siRNA sense strand
ugagccacccaaaguagua

SEQ ID NO: 330246 - RNA, 19 nt, Homo sapiens
  misc_RNA (1)...(19): siRNA sense strand
gaugaagaagagaaugaug

SEQ ID NO: 330247 - RNA, 19 nt, Homo sapiens
  misc_RNA (1)...(19): siRNA sense strand
uggccuugcuuccaguaaa

SEQ ID NO: 330248 - RNA, 19 nt, Homo sapiens
  misc_RNA (1)...(19): siRNA sense strand
cgaggaugcagacgaguug

SEQ ID NO: 330249 - RNA, 19 nt, Homo sapiens
  misc_RNA (1)...(19): siRNA sense strand
uaacguucuuaucgucugu

SEQ ID NO: 330250 - RNA, 19 nt, Homo sapiens
  misc_RNA (1)...(19): siRNA sense strand
ccagugaggaagucuugaa

SEQ ID NO: 330251 - RNA, 19 nt, Homo sapiens
  misc_RNA (1)...(19): siRNA sense strand
gcgaggaugcagacgaguu

SEQ ID NO: 330252 - RNA, 19 nt, Homo sapiens
  misc_RNA (1)...(19): siRNA sense strand
gaagauagcuaacuuugua

SEQ ID NO: 330253 - RNA, 19 nt, Homo sapiens
  misc_RNA (1)...(19): siRNA sense strand
gaaagaagauagcuaacuu

SEQ ID NO: 330254 - RNA, 19 nt, Homo sapiens
  misc_RNA (1)...(19): siRNA sense strand
ggacacagauagucgauuu

SEQ ID NO: 330255 - RNA, 19 nt, Homo sapiens
  misc_RNA (1)...(19): siRNA sense strand
guaaaggguucuucaauau

SEQ ID NO: 330256 - RNA, 19 nt, Homo sapiens
  misc_RNA (1)...(19): siRNA sense strand
ggacaggaauauuaagaaa

SEQ ID NO: 330257 - RNA, 19 nt, Homo sapiens
  misc_RNA (1)...(19): siRNA sense strand
gcaaguaguugaagcagaa

SEQ ID NO: 330258 - RNA, 19 nt, Homo sapiens
  misc_RNA (1)...(19): siRNA sense strand
gcaaggagguagaauacaa

SEQ ID NO: 330259 - RNA, 19 nt, Homo sapiens
  misc_RNA (1)...(19): siRNA sense strand
gauauggagucccugcuua

SEQ ID NO: 330260 - RNA, 19 nt, Homo sapiens
  misc_RNA (1)...(19): siRNA sense strand
gcauauagauuagaaccua

SEQ ID NO: 330261 - RNA, 19 nt, Homo sapiens
  misc_RNA (1)...(19): siRNA sense strand
gcacuuagccucucugaau

SEQ ID NO: 330262 - RNA, 19 nt, Homo sapiens
  misc_RNA (1)...(19): siRNA sense strand
ugaagauacugcucuguua

SEQ ID NO: 330263 - RNA, 19 nt, Homo sapiens
  misc_RNA (1)...(19): siRNA sense strand
caaaggaggugucucuguu

SEQ ID NO: 330264 - RNA, 19 nt, Homo sapiens
  misc_RNA (1)...(19): siRNA sense strand
gaucaaagaagaagaagaa

SEQ ID NO: 330265 - RNA, 19 nt, Homo sapiens
  misc_RNA (1)...(19): siRNA sense strand
uguaaaggguucuucaaua

SEQ ID NO: 330266 - RNA, 19 nt, Homo sapiens
  misc_RNA (1)...(19): siRNA sense strand
ccaaucagaucaaagaaga

SEQ ID NO: 330267 - RNA, 19 nt, Homo sapiens
  misc_RNA (1)...(19): siRNA sense strand
gcaagaaacucuggaagca

SEQ ID NO: 330268 - RNA, 19 nt, Homo sapiens
  misc_RNA (1)...(19): siRNA sense strand
gcuuacaacucauuagauu

SEQ ID NO: 330269 - RNA, 19 nt, Homo sapiens
  misc_RNA (1)...(19): siRNA sense strand
ggagggcgcuacgauguuu

SEQ ID NO: 330270 - RNA, 19 nt, Homo sapiens
  misc_RNA (1)...(19): siRNA sense strand
gaugaggacuacuuaggaa

SEQ ID NO: 330271 - RNA, 19 nt, Homo sapiens
  misc_RNA (1)...(19): siRNA sense strand
gaugauaaccuugaugaaa

SEQ ID NO: 330272 - RNA, 19 nt, Homo sapiens
  misc_RNA (1)...(19): siRNA sense strand
cguaugaccuuguuguuga

SEQ ID NO: 330273 - RNA, 19 nt, Homo sapiens
  misc_RNA (1)...(19): siRNA sense strand
aggaaagguuggaauguua

SEQ ID NO: 330274 - RNA, 19 nt, Homo sapiens
  misc_RNA (1)...(19): siRNA sense strand
cagagucacuuaugcuauu

SEQ ID NO: 330275 - RNA, 19 nt, Homo sapiens
  misc_RNA (1)...(19): siRNA sense strand
caagaugucucgaaugcau

SEQ ID NO: 330276 - RNA, 19 nt, Homo sapiens
  misc_RNA (1)...(19): siRNA sense strand
gaacauuaguccagaacag

SEQ ID NO: 330277 - RNA, 19 nt, Homo sapiens
  misc_RNA (1)...(19): siRNA sense strand
uaaagcagccaaacugaaa

SEQ ID NO: 330278 - RNA, 19 nt, Homo sapiens
  misc_RNA (1)...(19): siRNA sense strand
ccagaaagaagauagcuaa

SEQ ID NO: 330279 - RNA, 19 nt, Homo sapiens
  misc_RNA (1)...(19): siRNA sense strand
gguguggacaggaauauua

SEQ ID NO: 330280 - RNA, 19 nt, Homo sapiens
  misc_RNA (1)...(19): siRNA sense strand
caaagguuauuguucaguu

SEQ ID NO: 330281 - RNA, 19 nt, Homo sapiens
  misc_RNA (1)...(19): siRNA sense strand
ccacagacauuuaguuacu

SEQ ID NO: 330282 - RNA, 19 nt, Homo sapiens
  misc_RNA (1)...(19): siRNA sense strand
ccagaagacuaaagacaug

SEQ ID NO: 330283 - RNA, 19 nt, Homo sapiens
  misc_RNA (1)...(19): siRNA sense strand
gaacccagacuucaaagga

SEQ ID NO: 330284 - RNA, 19 nt, Homo sapiens
  misc_RNA (1)...(19): siRNA sense strand
ggugguuucucucaaauug

SEQ ID NO: 330285 - RNA, 19 nt, Homo sapiens
  misc_RNA (1)...(19): siRNA sense strand
acuagaggcugaauauaaa

SEQ ID NO: 330286 - RNA, 19 nt, Homo sapiens
  misc_RNA (1)...(19): siRNA sense strand
ggagguagaauacaaacaa

SEQ ID NO: 330287 - RNA, 19 nt, Homo sapiens
  misc_RNA (1)...(19): siRNA sense strand
ggagaggauuccacagaug

SEQ ID NO: 330288 - RNA, 19 nt, Homo sapiens
  misc_RNA (1)...(19): siRNA sense strand
gcaccgaagauuagaguuu

SEQ ID NO: 330289 - RNA, 19 nt, Homo sapiens
  misc_RNA (1)...(19): siRNA sense strand
gcagcagggcuaauccuua

SEQ ID NO: 330290 - RNA, 19 nt, Homo sapiens
  misc_RNA (1)...(19): siRNA sense strand
ccuaaaagcuguucucauu

SEQ ID NO: 330291 - RNA, 19 nt, Homo sapiens
  misc_RNA (1)...(19): siRNA sense strand
gauuagaaccuaugauugu

SEQ ID NO: 330292 - RNA, 19 nt, Homo sapiens
  misc_RNA (1)...(19): siRNA sense strand
ccaaugagccaaagaggaa

SEQ ID NO: 330293 - RNA, 19 nt, Homo sapiens
  misc_RNA (1)...(19): siRNA sense strand
caaugaaacuuugcuagau

SEQ ID NO: 330294 - RNA, 19 nt, Homo sapiens
  misc_RNA (1)...(19): siRNA sense strand
ggucagacuucuauucaca

SEQ ID NO: 330295 - RNA, 19 nt, Homo sapiens
  misc_RNA (1)...(19): siRNA sense strand
ggaaagguuggaauguuaa

SEQ ID NO: 330296 - RNA, 19 nt, Homo sapiens
  misc_RNA (1)...(19): siRNA sense strand
gugugugacuuacgcuuua

SEQ ID NO: 330297 - RNA, 19 nt, Homo sapiens
  misc_RNA (1)...(19): siRNA sense strand
ucgaggaguugauaggaua

SEQ ID NO: 330298 - RNA, 19 nt, Homo sapiens
  misc_RNA (1)...(19): siRNA sense strand
ucacugaugggaauaaauu

SEQ ID NO: 330299 - RNA, 19 nt, Homo sapiens
  misc_RNA (1)...(19): siRNA sense strand
caaggaugaggacuacuua

SEQ ID NO: 330300 - RNA, 19 nt, Homo sapiens
  misc_RNA (1)...(19): siRNA sense strand
gaauugaugauaaccuuga

SEQ ID NO: 330301 - RNA, 19 nt, Homo sapiens
  misc_RNA (1)...(19): siRNA sense strand
gcuacgauguuuaccucua

SEQ ID NO: 330302 - RNA, 19 nt, Homo sapiens
  misc_RNA (1)...(19): siRNA sense strand
gagagacaauuguuaugca

SEQ ID NO: 330303 - RNA, 19 nt, Homo sapiens
  misc_RNA (1)...(19): siRNA sense strand
gaagguggccaaucagauc

SEQ ID NO: 330304 - RNA, 19 nt, Homo sapiens
  misc_RNA (1)...(19): siRNA sense strand
uggagaagguggccaauca

SEQ ID NO: 330305 - RNA, 19 nt, Homo sapiens
  misc_RNA (1)...(19): siRNA sense strand
ggacagucaccauuaacaa

SEQ ID NO: 330306 - RNA, 19 nt, Homo sapiens
  misc_RNA (1)...(19): siRNA sense strand
uuaccucuaugaccgaaua

SEQ ID NO: 330307 - RNA, 19 nt, Homo sapiens
  misc_RNA (1)...(19): siRNA sense strand
gcauuggaccuguguguga

SEQ ID NO: 330308 - RNA, 19 nt, Homo sapiens
  misc_RNA (1)...(19): siRNA sense strand
caaagugcccagaagacua

SEQ ID NO: 330309 - RNA, 19 nt, Homo sapiens
  misc_RNA (1)...(19): siRNA sense strand
gagcaaagugcccagaaga

SEQ ID NO: 330310 - RNA, 19 nt, Homo sapiens
  misc_RNA (1)...(19): siRNA sense strand
acagauagucgauuuauuc

SEQ ID NO: 330311 - RNA, 19 nt, Homo sapiens
  misc_RNA (1)...(19): siRNA sense strand
uaggaaagguuggaauguu

SEQ ID NO: 330312 - RNA, 19 nt, Homo sapiens
  misc_RNA (1)...(19): siRNA sense strand
cacuuagccucucugaaua

SEQ ID NO: 330313 - RNA, 19 nt, Homo sapiens
  misc_RNA (1)...(19): siRNA sense strand
gggagaggauuccacagau

SEQ ID NO: 330314 - RNA, 19 nt, Homo sapiens
  misc_RNA (1)...(19): siRNA sense strand
gagacgcuguacuugguuu

SEQ ID NO: 330315 - RNA, 19 nt, Homo sapiens
  misc_RNA (1)...(19): siRNA sense strand
uaugggaucugauuugaag

SEQ ID NO: 330316 - RNA, 19 nt, Homo sapiens
  misc_RNA (1)...(19): siRNA sense strand
ccaguucauuggcauaguu

SEQ ID NO: 330317 - RNA, 19 nt, Homo sapiens
  misc_RNA (1)...(19): siRNA sense strand
gaaccaaccccaaggaauu

SEQ ID NO: 330318 - RNA, 19 nt, Homo sapiens
  misc_RNA (1)...(19): siRNA sense strand
gagaauuacagccuuccua

SEQ ID NO: 330319 - RNA, 19 nt, Homo sapiens
  misc_RNA (1)...(19): siRNA sense strand
gaaccagagauauucuuug

SEQ ID NO: 330320 - RNA, 19 nt, Homo sapiens
  misc_RNA (1)...(19): siRNA sense strand
cugcuuauguguacaguug

SEQ ID NO: 330321 - RNA, 19 nt, Homo sapiens
  misc_RNA (1)...(19): siRNA sense strand
ccaaugaaacuuugcuaga

SEQ ID NO: 330322 - RNA, 19 nt, Homo sapiens
  misc_RNA (1)...(19): siRNA sense strand
uuacuucucucagguauca

SEQ ID NO: 330323 - RNA, 19 nt, Homo sapiens
  misc_RNA (1)...(19): siRNA sense strand
guccuaacuuugcaagaaa

SEQ ID NO: 330324 - RNA, 19 nt, Homo sapiens
  misc_RNA (1)...(19): siRNA sense strand
ucaguggcaccgaagauua

SEQ ID NO: 330325 - RNA, 19 nt, Homo sapiens
  misc_RNA (1)...(19): siRNA sense strand
ggagccagccgaagugaga

SEQ ID NO: 330326 - RNA, 19 nt, Homo sapiens
  misc_RNA (1)...(19): siRNA sense strand
gaaacucuggaagcacuua

SEQ ID NO: 330327 - RNA, 19 nt, Homo sapiens
  misc_RNA (1)...(19): siRNA sense strand
gaaagguuggaauguuaaa

SEQ ID NO: 330328 - RNA, 19 nt, Homo sapiens
  misc_RNA (1)...(19): siRNA sense strand
ggucuccaauugcuauguu

SEQ ID NO: 330329 - RNA, 19 nt, Homo sapiens
  misc_RNA (1)...(19): siRNA sense strand
uacaauccauaucgccaua

SEQ ID NO: 330330 - RNA, 19 nt, Homo sapiens
  misc_RNA (1)...(19): siRNA sense strand
ggaugaggacuacuuagga

SEQ ID NO: 330331 - RNA, 19 nt, Homo sapiens
  misc_RNA (1)...(19): siRNA sense strand
guaaagcguggaauugaug

SEQ ID NO: 330332 - RNA, 19 nt, Homo sapiens
  misc_RNA (1)...(19): siRNA sense strand
cagcagggcuaauccuuac

SEQ ID NO: 330333 - RNA, 19 nt, Homo sapiens
  misc_RNA (1)...(19): siRNA sense strand
ucaaauugcugcggacaca

SEQ ID NO: 330334 - RNA, 19 nt, Homo sapiens
  misc_RNA (1)...(19): siRNA sense strand
gugcuuggcagacauuaaa

SEQ ID NO: 330335 - RNA, 19 nt, Homo sapiens
  misc_RNA (1)...(19): siRNA sense strand
cguaugggaucugauuuga

SEQ ID NO: 330336 - RNA, 19 nt, Homo sapiens
  misc_RNA (1)...(19): siRNA sense strand
uccaguggcauauagauua

SEQ ID NO: 330337 - RNA, 19 nt, Homo sapiens
  misc_RNA (1)...(19): siRNA sense strand
aaagugcccagaagacuaa

SEQ ID NO: 330338 - RNA, 19 nt, Homo sapiens
  misc_RNA (1)...(19): siRNA sense strand
uugaugaccugaaggaaau

SEQ ID NO: 330339 - RNA, 19 nt, Homo sapiens
  misc_RNA (1)...(19): siRNA sense strand
gauaaaccaucugcaugca

SEQ ID NO: 330340 - RNA, 19 nt, Homo sapiens
  misc_RNA (1)...(19): siRNA sense strand
acaacuggaucccaagaug

SEQ ID NO: 330341 - RNA, 19 nt, Homo sapiens
  misc_RNA (1)...(19): siRNA sense strand
uaugauuguuccagauuug

SEQ ID NO: 330342 - RNA, 19 nt, Homo sapiens
  misc_RNA (1)...(19): siRNA sense strand
uaggauagaugagaauuac

SEQ ID NO: 330343 - RNA, 19 nt, Homo sapiens
  misc_RNA (1)...(19): siRNA sense strand
agacuucuauucacacauc

SEQ ID NO: 330344 - RNA, 19 nt, Homo sapiens
  misc_RNA (1)...(19): siRNA sense strand
gaacauaaagcagccaaac

SEQ ID NO: 330345 - RNA, 19 nt, Homo sapiens
  misc_RNA (1)...(19): siRNA sense strand
ccacggaguucagcuucaa

SEQ ID NO: 330346 - RNA, 19 nt, Homo sapiens
  misc_RNA (1)...(19): siRNA sense strand
ggucacaguuuagguucuu

SEQ ID NO: 330347 - RNA, 19 nt, Homo sapiens
  misc_RNA (1)...(19): siRNA sense strand
uuagaugacgggaaaguaa

SEQ ID NO: 330348 - RNA, 19 nt, Homo sapiens
  misc_RNA (1)...(19): siRNA sense strand
aacuagaggcugaauauaa

SEQ ID NO: 330349 - RNA, 19 nt, Homo sapiens
  misc_RNA (1)...(19): siRNA sense strand
gugagacgcuguacuuggu

SEQ ID NO: 330350 - RNA, 19 nt, Homo sapiens
  misc_RNA (1)...(19): siRNA sense strand
cuacgauguuuaccucuau

SEQ ID NO: 330351 - RNA, 19 nt, Homo sapiens
  misc_RNA (1)...(19): siRNA sense strand
gcaagaagaauuggagaag

SEQ ID NO: 330352 - RNA, 19 nt, Homo sapiens
  misc_RNA (1)...(19): siRNA sense strand
gaacuuuccuaggugauua

SEQ ID NO: 330353 - RNA, 19 nt, Homo sapiens
  misc_RNA (1)...(19): siRNA sense strand
ucaauccgcucuacuggaa

SEQ ID NO: 330354 - RNA, 19 nt, Homo sapiens
  misc_RNA (1)...(19): siRNA sense strand
uuuccuaggugauuacuuc

SEQ ID NO: 330355 - RNA, 19 nt, Homo sapiens
  misc_RNA (1)...(19): siRNA sense strand
gcacgaugggaacacaaga

SEQ ID NO: 330356 - RNA, 19 nt, Homo sapiens
  misc_RNA (1)...(19): siRNA sense strand
ucaccauccugcuccugaa

SEQ ID NO: 330357 - RNA, 19 nt, Homo sapiens
  misc_RNA (1)...(19): siRNA sense strand
gcacugggguucgcuggaa

SEQ ID NO: 330358 - RNA, 19 nt, Homo sapiens
  misc_RNA (1)...(19): siRNA sense strand
gggaagcacagccaacuac

SEQ ID NO: 330359 - RNA, 19 nt, Homo sapiens
  misc_RNA (1)...(19): siRNA sense strand
uaccugggcugggccauca

SEQ ID NO: 330360 - RNA, 19 nt, Homo sapiens
  misc_RNA (1)...(19): siRNA sense strand
aauccgcucuacuggaaug

SEQ ID NO: 330361 - RNA, 19 nt, Homo sapiens
  misc_RNA (1)...(19): siRNA sense strand
ugagaucuaccggcagaaa

SEQ ID NO: 330362 - RNA, 19 nt, Homo sapiens
  misc_RNA (1)...(19): siRNA sense strand
ccauccugcuccugaacuu

SEQ ID NO: 330363 - RNA, 19 nt, Homo sapiens
  misc_RNA (1)...(19): siRNA sense strand
gaacuuuccuaggugauua

SEQ ID NO: 330364 - RNA, 19 nt, Homo sapiens
  misc_RNA (1)...(19): siRNA sense strand
ucaauccgcucuacuggaa

SEQ ID NO: 330365 - RNA, 19 nt, Homo sapiens
  misc_RNA (1)...(19): siRNA sense strand
uuuccuaggugauuacuuc

SEQ ID NO: 330366 - RNA, 19 nt, Homo sapiens
  misc_RNA (1)...(19): siRNA sense strand
gcacgaugggaacacaaga

SEQ ID NO: 330367 - RNA, 19 nt, Homo sapiens
  misc_RNA (1)...(19): siRNA sense strand
ucaccauccugcuccugaa

SEQ ID NO: 330368 - RNA, 19 nt, Homo sapiens
  misc_RNA (1)...(19): siRNA sense strand
gcacugggguucgcuggaa

SEQ ID NO: 330369 - RNA, 19 nt, Homo sapiens
  misc_RNA (1)...(19): siRNA sense strand
gggaagcacagccaacuac

SEQ ID NO: 330370 - RNA, 19 nt, Homo sapiens
  misc_RNA (1)...(19): siRNA sense strand
uaccugggcugggccauca

SEQ ID NO: 330371 - RNA, 19 nt, Homo sapiens
  misc_RNA (1)...(19): siRNA sense strand
aauccgcucuacuggaaug

SEQ ID NO: 330372 - RNA, 19 nt, Homo sapiens
  misc_RNA (1)...(19): siRNA sense strand
ugagaucuaccggcagaaa

SEQ ID NO: 330373 - RNA, 19 nt, Homo sapiens
  misc_RNA (1)...(19): siRNA sense strand
ccauccugcuccugaacuu

SEQ ID NO: 330374 - RNA, 19 nt, Homo sapiens
  misc_RNA (1)...(19): siRNA sense strand
gaacuuuccuaggugauua

SEQ ID NO: 330375 - RNA, 19 nt, Homo sapiens
  misc_RNA (1)...(19): siRNA sense strand
ucaauccgcucuacuggaa

SEQ ID NO: 330376 - RNA, 19 nt, Homo sapiens
  misc_RNA (1)...(19): siRNA sense strand
uuuccuaggugauuacuuc

SEQ ID NO: 330377 - RNA, 19 nt, Homo sapiens
  misc_RNA (1)...(19): siRNA sense strand
gcacgaugggaacacaaga

SEQ ID NO: 330378 - RNA, 19 nt, Homo sapiens
  misc_RNA (1)...(19): siRNA sense strand
ucaccauccugcuccugaa

SEQ ID NO: 330379 - RNA, 19 nt, Homo sapiens
  misc_RNA (1)...(19): siRNA sense strand
gcacugggguucgcuggaa

SEQ ID NO: 330380 - RNA, 19 nt, Homo sapiens
  misc_RNA (1)...(19): siRNA sense strand
gggaagcacagccaacuac

SEQ ID NO: 330381 - RNA, 19 nt, Homo sapiens
  misc_RNA (1)...(19): siRNA sense strand
uaccugggcugggccauca

SEQ ID NO: 330382 - RNA, 19 nt, Homo sapiens
  misc_RNA (1)...(19): siRNA sense strand
aauccgcucuacuggaaug

SEQ ID NO: 330383 - RNA, 19 nt, Homo sapiens
  misc_RNA (1)...(19): siRNA sense strand
ugagaucuaccggcagaaa

SEQ ID NO: 330384 - RNA, 19 nt, Homo sapiens
  misc_RNA (1)...(19): siRNA sense strand
ccauccugcuccugaacuu

SEQ ID NO: 330385 - RNA, 19 nt, Homo sapiens
  misc_RNA (1)...(19): siRNA sense strand
cgacaaaccuggcgucuau

SEQ ID NO: 330386 - RNA, 19 nt, Homo sapiens
  misc_RNA (1)...(19): siRNA sense strand
uaccuggacuggaucaaga

SEQ ID NO: 330387 - RNA, 19 nt, Homo sapiens
  misc_RNA (1)...(19): siRNA sense strand
uggacuggaucaagaagau

SEQ ID NO: 330388 - RNA, 19 nt, Homo sapiens
  misc_RNA (1)...(19): siRNA sense strand
gccgcuaccuggacuggau

SEQ ID NO: 330389 - RNA, 19 nt, Homo sapiens
  misc_RNA (1)...(19): siRNA sense strand
ggauguuccugcucuugcu

SEQ ID NO: 330390 - RNA, 19 nt, Homo sapiens
  misc_RNA (1)...(19): siRNA sense strand
cgacaaaccuggcgucuau

SEQ ID NO: 330391 - RNA, 19 nt, Homo sapiens
  misc_RNA (1)...(19): siRNA sense strand
uaccuggacuggaucaaga

SEQ ID NO: 330392 - RNA, 19 nt, Homo sapiens
  misc_RNA (1)...(19): siRNA sense strand
uggacuggaucaagaagau

SEQ ID NO: 330393 - RNA, 19 nt, Homo sapiens
  misc_RNA (1)...(19): siRNA sense strand
gccgcuaccuggacuggau

SEQ ID NO: 330394 - RNA, 19 nt, Homo sapiens
  misc_RNA (1)...(19): siRNA sense strand
ggauguuccugcucuugcu

SEQ ID NO: 330395 - RNA, 19 nt, Homo sapiens
  misc_RNA (1)...(19): siRNA sense strand
cgacaaaccuggcgucuau

SEQ ID NO: 330396 - RNA, 19 nt, Homo sapiens
  misc_RNA (1)...(19): siRNA sense strand
uaccuggacuggaucaaga

SEQ ID NO: 330397 - RNA, 19 nt, Homo sapiens
  misc_RNA (1)...(19): siRNA sense strand
uggacuggaucaagaagau

SEQ ID NO: 330398 - RNA, 19 nt, Homo sapiens
  misc_RNA (1)...(19): siRNA sense strand
gccgcuaccuggacuggau

SEQ ID NO: 330399 - RNA, 19 nt, Homo sapiens
  misc_RNA (1)...(19): siRNA sense strand
ggauguuccugcucuugcu

SEQ ID NO: 330400 - RNA, 19 nt, Homo sapiens
  misc_RNA (1)...(19): siRNA sense strand
ggauguuccugcucuugcu

SEQ ID NO: 330401 - RNA, 19 nt, Homo sapiens
  misc_RNA (1)...(19): siRNA sense strand
gaaauugcacugucacuaa

SEQ ID NO: 330402 - RNA, 19 nt, Homo sapiens
  misc_RNA (1)...(19): siRNA sense strand
gaaaguagccauaaagauc

SEQ ID NO: 330403 - RNA, 19 nt, Homo sapiens
  misc_RNA (1)...(19): siRNA sense strand
guaagaaaguagccauaaa

SEQ ID NO: 330404 - RNA, 19 nt, Homo sapiens
  misc_RNA (1)...(19): siRNA sense strand
ggaauaaacgccugaaaga

SEQ ID NO: 330405 - RNA, 19 nt, Homo sapiens
  misc_RNA (1)...(19): siRNA sense strand
acacugagcuccuuagaga

SEQ ID NO: 330406 - RNA, 19 nt, Homo sapiens
  misc_RNA (1)...(19): siRNA sense strand
gaacauacagcaagaaaca

SEQ ID NO: 330407 - RNA, 19 nt, Homo sapiens
  misc_RNA (1)...(19): siRNA sense strand
gcauaggacucaaguguca

SEQ ID NO: 330408 - RNA, 19 nt, Homo sapiens
  misc_RNA (1)...(19): siRNA sense strand
gaaguuugcuauugguuca

SEQ ID NO: 330409 - RNA, 19 nt, Homo sapiens
  misc_RNA (1)...(19): siRNA sense strand
ccauaaagaucaucagcaa

SEQ ID NO: 330410 - RNA, 19 nt, Homo sapiens
  misc_RNA (1)...(19): siRNA sense strand
caggaacucuauucuauuc

SEQ ID NO: 330411 - RNA, 19 nt, Homo sapiens
  misc_RNA (1)...(19): siRNA sense strand
gaauaaacgccugaaagaa

SEQ ID NO: 330412 - RNA, 19 nt, Homo sapiens
  misc_RNA (1)...(19): siRNA sense strand
caauggaaccuuuguaaau

SEQ ID NO: 330413 - RNA, 19 nt, Homo sapiens
  misc_RNA (1)...(19): siRNA sense strand
gacaaaagcugugaauauu

SEQ ID NO: 330414 - RNA, 19 nt, Homo sapiens
  misc_RNA (1)...(19): siRNA sense strand
gcaauggaaccuuuguaaa

SEQ ID NO: 330415 - RNA, 19 nt, Homo sapiens
  misc_RNA (1)...(19): siRNA sense strand
uagaugaucagucaguuua

SEQ ID NO: 330416 - RNA, 19 nt, Homo sapiens
  misc_RNA (1)...(19): siRNA sense strand
gagcauaggacucaagugu

SEQ ID NO: 330417 - RNA, 19 nt, Homo sapiens
  misc_RNA (1)...(19): siRNA sense strand
ucacuaagcagaaauaaag

SEQ ID NO: 330418 - RNA, 19 nt, Homo sapiens
  misc_RNA (1)...(19): siRNA sense strand
gaaugacaacuacugguuu

SEQ ID NO: 330419 - RNA, 19 nt, Homo sapiens
  misc_RNA (1)...(19): siRNA sense strand
gaauauugcuuugaugaac

SEQ ID NO: 330420 - RNA, 19 nt, Homo sapiens
  misc_RNA (1)...(19): siRNA sense strand
ggacaaaagcugugaauau

SEQ ID NO: 330421 - RNA, 19 nt, Homo sapiens
  misc_RNA (1)...(19): siRNA sense strand
ccaagaaccugaggaccaa

SEQ ID NO: 330422 - RNA, 19 nt, Homo sapiens
  misc_RNA (1)...(19): siRNA sense strand
ggaaaacgccguccuuuga

SEQ ID NO: 330423 - RNA, 19 nt, Homo sapiens
  misc_RNA (1)...(19): siRNA sense strand
uucaagaucuucugucuga

SEQ ID NO: 330424 - RNA, 19 nt, Homo sapiens
  misc_RNA (1)...(19): siRNA sense strand
agacccagcucucaauguu

SEQ ID NO: 330425 - RNA, 19 nt, Homo sapiens
  misc_RNA (1)...(19): siRNA sense strand
gacagaagaagccuuaaga

SEQ ID NO: 330426 - RNA, 19 nt, Homo sapiens
  misc_RNA (1)...(19): siRNA sense strand
agaaagcucuggaccuugu

SEQ ID NO: 330427 - RNA, 19 nt, Homo sapiens
  misc_RNA (1)...(19): siRNA sense strand
gaugaagacaugaagagaa

SEQ ID NO: 330428 - RNA, 19 nt, Homo sapiens
  misc_RNA (1)...(19): siRNA sense strand
gaucuucugucugaggaaa

SEQ ID NO: 330429 - RNA, 19 nt, Homo sapiens
  misc_RNA (1)...(19): siRNA sense strand
gcuguggacugcuggaguu

SEQ ID NO: 330430 - RNA, 19 nt, Homo sapiens
  misc_RNA (1)...(19): siRNA sense strand
gauaaauaccgaacauaca

SEQ ID NO: 330431 - RNA, 19 nt, Homo sapiens
  misc_RNA (1)...(19): siRNA sense strand
aaaggaaguuugcuauugg

SEQ ID NO: 330432 - RNA, 19 nt, Homo sapiens
  misc_RNA (1)...(19): siRNA sense strand
ccuaaggcauuaagagaug

SEQ ID NO: 330433 - RNA, 19 nt, Homo sapiens
  misc_RNA (1)...(19): siRNA sense strand
ggcaauggaaccuuuguaa

SEQ ID NO: 330434 - RNA, 19 nt, Homo sapiens
  misc_RNA (1)...(19): siRNA sense strand
gaagaucacaguggcaaug

SEQ ID NO: 330435 - RNA, 19 nt, Homo sapiens
  misc_RNA (1)...(19): siRNA sense strand
augaagacaugaagagaaa

SEQ ID NO: 330436 - RNA, 19 nt, Homo sapiens
  misc_RNA (1)...(19): siRNA sense strand
ucaagaaguuguugguagu

SEQ ID NO: 330437 - RNA, 19 nt, Homo sapiens
  misc_RNA (1)...(19): siRNA sense strand
gaaguucuuguuucuguug

SEQ ID NO: 330438 - RNA, 19 nt, Homo sapiens
  misc_RNA (1)...(19): siRNA sense strand
cucaggaacucuauucuau

SEQ ID NO: 330439 - RNA, 19 nt, Homo sapiens
  misc_RNA (1)...(19): siRNA sense strand
gaugaucagucaguuuauc

SEQ ID NO: 330440 - RNA, 19 nt, Homo sapiens
  misc_RNA (1)...(19): siRNA sense strand
ugaaagaagcuaccugcaa

SEQ ID NO: 330441 - RNA, 19 nt, Homo sapiens
  misc_RNA (1)...(19): siRNA sense strand
uaagaaaguagccauaaag

SEQ ID NO: 330442 - RNA, 19 nt, Homo sapiens
  misc_RNA (1)...(19): siRNA sense strand
ggggagagcuguuugacaa

SEQ ID NO: 330443 - RNA, 19 nt, Homo sapiens
  misc_RNA (1)...(19): siRNA sense strand
gaucacaguggcaauggaa

SEQ ID NO: 330444 - RNA, 19 nt, Homo sapiens
  misc_RNA (1)...(19): siRNA sense strand
gaagacaugaagagaaagu

SEQ ID NO: 330445 - RNA, 19 nt, Homo sapiens
  misc_RNA (1)...(19): siRNA sense strand
gguauccaccuuucucuga

SEQ ID NO: 330446 - RNA, 19 nt, Homo sapiens
  misc_RNA (1)...(19): siRNA sense strand
ucagggaaguggguccuaa

SEQ ID NO: 330447 - RNA, 19 nt, Homo sapiens
  misc_RNA (1)...(19): siRNA sense strand
ccaccuuucucugagcaua

SEQ ID NO: 330448 - RNA, 19 nt, Homo sapiens
  misc_RNA (1)...(19): siRNA sense strand
augagaaccuuauguggaa

SEQ ID NO: 330449 - RNA, 19 nt, Homo sapiens
  misc_RNA (1)...(19): siRNA sense strand
gggaauaaacgccugaaag

SEQ ID NO: 330450 - RNA, 19 nt, Homo sapiens
  misc_RNA (1)...(19): siRNA sense strand
aaacgccguccuuugaaua

SEQ ID NO: 330451 - RNA, 19 nt, Homo sapiens
  misc_RNA (1)...(19): siRNA sense strand
gugaauauugcuuugauga

SEQ ID NO: 330452 - RNA, 19 nt, Homo sapiens
  misc_RNA (1)...(19): siRNA sense strand
guagaugaucagucaguuu

SEQ ID NO: 330453 - RNA, 19 nt, Homo sapiens
  misc_RNA (1)...(19): siRNA sense strand
gcacugucacuaagcagaa

SEQ ID NO: 330454 - RNA, 19 nt, Homo sapiens
  misc_RNA (1)...(19): siRNA sense strand
acagauaaauaccgaacau

SEQ ID NO: 330455 - RNA, 19 nt, Homo sapiens
  misc_RNA (1)...(19): siRNA sense strand
aaugacaacuacugguuug

SEQ ID NO: 330456 - RNA, 19 nt, Homo sapiens
  misc_RNA (1)...(19): siRNA sense strand
cagaagaagccuuaagaca

SEQ ID NO: 330457 - RNA, 19 nt, Homo sapiens
  misc_RNA (1)...(19): siRNA sense strand
gaggaaaacauguaagaaa

SEQ ID NO: 330458 - RNA, 19 nt, Homo sapiens
  misc_RNA (1)...(19): siRNA sense strand
gaucagucaguuuauccua

SEQ ID NO: 330459 - RNA, 19 nt, Homo sapiens
  misc_RNA (1)...(19): siRNA sense strand
aaaaggaaguuugcuauug

SEQ ID NO: 330460 - RNA, 19 nt, Homo sapiens
  misc_RNA (1)...(19): siRNA sense strand
aauaaacgccugaaagaag

SEQ ID NO: 330461 - RNA, 19 nt, Homo sapiens
  misc_RNA (1)...(19): siRNA sense strand
ugaaugacaacuacugguu

SEQ ID NO: 330462 - RNA, 19 nt, Homo sapiens
  misc_RNA (1)...(19): siRNA sense strand
acccguggcuucaggauga

SEQ ID NO: 330463 - RNA, 19 nt, Homo sapiens
  misc_RNA (1)...(19): siRNA sense strand
cugaaguucuuguuucugu

SEQ ID NO: 330464 - RNA, 19 nt, Homo sapiens
  misc_RNA (1)...(19): siRNA sense strand
aaucauccuugcaucauca

SEQ ID NO: 330465 - RNA, 19 nt, Homo sapiens
  misc_RNA (1)...(19): siRNA sense strand
uugcauacauagaagauca

SEQ ID NO: 330466 - RNA, 19 nt, Homo sapiens
  misc_RNA (1)...(19): siRNA sense strand
agacaugaagagaaaguuu

SEQ ID NO: 330467 - RNA, 19 nt, Homo sapiens
  misc_RNA (1)...(19): siRNA sense strand
ggacacugagcuccuuaga

SEQ ID NO: 330468 - RNA, 19 nt, Homo sapiens
  misc_RNA (1)...(19): siRNA sense strand
caguuuauccuaaggcauu

SEQ ID NO: 330469 - RNA, 19 nt, Homo sapiens
  misc_RNA (1)...(19): siRNA sense strand
caguggcaauggaaccuuu

SEQ ID NO: 330470 - RNA, 19 nt, Homo sapiens
  misc_RNA (1)...(19): siRNA sense strand
ugugugugcugcuguguug

SEQ ID NO: 330471 - RNA, 19 nt, Homo sapiens
  misc_RNA (1)...(19): siRNA sense strand
gaguuuaggaguuauucuu

SEQ ID NO: 330472 - RNA, 19 nt, Homo sapiens
  misc_RNA (1)...(19): siRNA sense strand
gagcuuguagggaaaggaa

SEQ ID NO: 330473 - RNA, 19 nt, Homo sapiens
  misc_RNA (1)...(19): siRNA sense strand
aaaguagccauaaagauca

SEQ ID NO: 330474 - RNA, 19 nt, Homo sapiens
  misc_RNA (1)...(19): siRNA sense strand
uugccaaucuugaaugugu

SEQ ID NO: 330475 - RNA, 19 nt, Homo sapiens
  misc_RNA (1)...(19): siRNA sense strand
uaccgaacauacagcaaga

SEQ ID NO: 330476 - RNA, 19 nt, Homo sapiens
  misc_RNA (1)...(19): siRNA sense strand
ggaugaagacaugaagaga

SEQ ID NO: 330477 - RNA, 19 nt, Homo sapiens
  misc_RNA (1)...(19): siRNA sense strand
guggacugcuggaguuuag

SEQ ID NO: 330478 - RNA, 19 nt, Homo sapiens
  misc_RNA (1)...(19): siRNA sense strand
ccacucaggaacucuauuc

SEQ ID NO: 330479 - RNA, 19 nt, Homo sapiens
  misc_RNA (1)...(19): siRNA sense strand
aaauugcacugucacuaag

SEQ ID NO: 330480 - RNA, 19 nt, Homo sapiens
  misc_RNA (1)...(19): siRNA sense strand
ugaaauugcacugucacua

SEQ ID NO: 330481 - RNA, 19 nt, Homo sapiens
  misc_RNA (1)...(19): siRNA sense strand
acucuuacauugcauacau

SEQ ID NO: 330482 - RNA, 19 nt, Homo sapiens
  misc_RNA (1)...(19): siRNA sense strand
ggacugcuggaguuuagga

SEQ ID NO: 330483 - RNA, 19 nt, Homo sapiens
  misc_RNA (1)...(19): siRNA sense strand
caaaagcugugaauauugc

SEQ ID NO: 330484 - RNA, 19 nt, Homo sapiens
  misc_RNA (1)...(19): siRNA sense strand
ucaggaacucuauucuauu

SEQ ID NO: 330485 - RNA, 19 nt, Homo sapiens
  misc_RNA (1)...(19): siRNA sense strand
uacgacagaagaagccuua

SEQ ID NO: 330486 - RNA, 19 nt, Homo sapiens
  misc_RNA (1)...(19): siRNA sense strand
cgccugaaguucuuguuuc

SEQ ID NO: 330487 - RNA, 19 nt, Homo sapiens
  misc_RNA (1)...(19): siRNA sense strand
uguaagaaaguagccauaa

SEQ ID NO: 330488 - RNA, 19 nt, Homo sapiens
  misc_RNA (1)...(19): siRNA sense strand
gaaaacgccguccuuugaa

SEQ ID NO: 330489 - RNA, 19 nt, Homo sapiens
  misc_RNA (1)...(19): siRNA sense strand
uugaaugugugaaugacaa

SEQ ID NO: 330490 - RNA, 19 nt, Homo sapiens
  misc_RNA (1)...(19): siRNA sense strand
cagauaaauaccgaacaua

SEQ ID NO: 330491 - RNA, 19 nt, Homo sapiens
  misc_RNA (1)...(19): siRNA sense strand
gaaccacugcugaaaagaa

SEQ ID NO: 330492 - RNA, 19 nt, Homo sapiens
  misc_RNA (1)...(19): siRNA sense strand
gauccaaaggcacguuuua

SEQ ID NO: 330493 - RNA, 19 nt, Homo sapiens
  misc_RNA (1)...(19): siRNA sense strand
ugaaguucuuguuucuguu

SEQ ID NO: 330494 - RNA, 19 nt, Homo sapiens
  misc_RNA (1)...(19): siRNA sense strand
cuaaaucauccuugcauca

SEQ ID NO: 330495 - RNA, 19 nt, Homo sapiens
  misc_RNA (1)...(19): siRNA sense strand
aagaaaguagccauaaaga

SEQ ID NO: 330496 - RNA, 19 nt, Homo sapiens
  misc_RNA (1)...(19): siRNA sense strand
ucagucaguuuauccuaag

SEQ ID NO: 330497 - RNA, 19 nt, Homo sapiens
  misc_RNA (1)...(19): siRNA sense strand
auacauagaagaucacagu

SEQ ID NO: 330498 - RNA, 19 nt, Homo sapiens
  misc_RNA (1)...(19): siRNA sense strand
gcgccugaaguucuuguuu

SEQ ID NO: 330499 - RNA, 19 nt, Homo sapiens
  misc_RNA (1)...(19): siRNA sense strand
acaaagcgcccagcugugu

SEQ ID NO: 330500 - RNA, 19 nt, Homo sapiens
  misc_RNA (1)...(19): siRNA sense strand
gcccagccuucuacuaguc

SEQ ID NO: 330501 - RNA, 19 nt, Homo sapiens
  misc_RNA (1)...(19): siRNA sense strand
gaaauugcacugucacuaa

SEQ ID NO: 330502 - RNA, 19 nt, Homo sapiens
  misc_RNA (1)...(19): siRNA sense strand
gaaaguagccauaaagauc

SEQ ID NO: 330503 - RNA, 19 nt, Homo sapiens
  misc_RNA (1)...(19): siRNA sense strand
guaagaaaguagccauaaa

SEQ ID NO: 330504 - RNA, 19 nt, Homo sapiens
  misc_RNA (1)...(19): siRNA sense strand
ggaauaaacgccugaaaga

SEQ ID NO: 330505 - RNA, 19 nt, Homo sapiens
  misc_RNA (1)...(19): siRNA sense strand
acacugagcuccuuagaga

SEQ ID NO: 330506 - RNA, 19 nt, Homo sapiens
  misc_RNA (1)...(19): siRNA sense strand
gaacauacagcaagaaaca

SEQ ID NO: 330507 - RNA, 19 nt, Homo sapiens
  misc_RNA (1)...(19): siRNA sense strand
gcauaggacucaaguguca

SEQ ID NO: 330508 - RNA, 19 nt, Homo sapiens
  misc_RNA (1)...(19): siRNA sense strand
gaaguuugcuauugguuca

SEQ ID NO: 330509 - RNA, 19 nt, Homo sapiens
  misc_RNA (1)...(19): siRNA sense strand
ccauaaagaucaucagcaa

SEQ ID NO: 330510 - RNA, 19 nt, Homo sapiens
  misc_RNA (1)...(19): siRNA sense strand
caggaacucuauucuauuc

SEQ ID NO: 330511 - RNA, 19 nt, Homo sapiens
  misc_RNA (1)...(19): siRNA sense strand
gaauaaacgccugaaagaa

SEQ ID NO: 330512 - RNA, 19 nt, Homo sapiens
  misc_RNA (1)...(19): siRNA sense strand
caauggaaccuuuguaaau

SEQ ID NO: 330513 - RNA, 19 nt, Homo sapiens
  misc_RNA (1)...(19): siRNA sense strand
gacaaaagcugugaauauu

SEQ ID NO: 330514 - RNA, 19 nt, Homo sapiens
  misc_RNA (1)...(19): siRNA sense strand
gcaauggaaccuuuguaaa

SEQ ID NO: 330515 - RNA, 19 nt, Homo sapiens
  misc_RNA (1)...(19): siRNA sense strand
uagaugaucagucaguuua

SEQ ID NO: 330516 - RNA, 19 nt, Homo sapiens
  misc_RNA (1)...(19): siRNA sense strand
gagcauaggacucaagugu

SEQ ID NO: 330517 - RNA, 19 nt, Homo sapiens
  misc_RNA (1)...(19): siRNA sense strand
ucacuaagcagaaauaaag

SEQ ID NO: 330518 - RNA, 19 nt, Homo sapiens
  misc_RNA (1)...(19): siRNA sense strand
gaaugacaacuacugguuu

SEQ ID NO: 330519 - RNA, 19 nt, Homo sapiens
  misc_RNA (1)...(19): siRNA sense strand
gaauauugcuuugaugaac

SEQ ID NO: 330520 - RNA, 19 nt, Homo sapiens
  misc_RNA (1)...(19): siRNA sense strand
ggacaaaagcugugaauau

SEQ ID NO: 330521 - RNA, 19 nt, Homo sapiens
  misc_RNA (1)...(19): siRNA sense strand
ccaagaaccugaggaccaa

SEQ ID NO: 330522 - RNA, 19 nt, Homo sapiens
  misc_RNA (1)...(19): siRNA sense strand
ggaaaacgccguccuuuga

SEQ ID NO: 330523 - RNA, 19 nt, Homo sapiens
  misc_RNA (1)...(19): siRNA sense strand
uucaagaucuucugucuga

SEQ ID NO: 330524 - RNA, 19 nt, Homo sapiens
  misc_RNA (1)...(19): siRNA sense strand
agacccagcucucaauguu

SEQ ID NO: 330525 - RNA, 19 nt, Homo sapiens
  misc_RNA (1)...(19): siRNA sense strand
gacagaagaagccuuaaga

SEQ ID NO: 330526 - RNA, 19 nt, Homo sapiens
  misc_RNA (1)...(19): siRNA sense strand
agaaagcucuggaccuugu

SEQ ID NO: 330527 - RNA, 19 nt, Homo sapiens
  misc_RNA (1)...(19): siRNA sense strand
gaugaagacaugaagagaa

SEQ ID NO: 330528 - RNA, 19 nt, Homo sapiens
  misc_RNA (1)...(19): siRNA sense strand
gaucuucugucugaggaaa

SEQ ID NO: 330529 - RNA, 19 nt, Homo sapiens
  misc_RNA (1)...(19): siRNA sense strand
gcuguggacugcuggaguu

SEQ ID NO: 330530 - RNA, 19 nt, Homo sapiens
  misc_RNA (1)...(19): siRNA sense strand
gauaaauaccgaacauaca

SEQ ID NO: 330531 - RNA, 19 nt, Homo sapiens
  misc_RNA (1)...(19): siRNA sense strand
aaaggaaguuugcuauugg

SEQ ID NO: 330532 - RNA, 19 nt, Homo sapiens
  misc_RNA (1)...(19): siRNA sense strand
ccuaaggcauuaagagaug

SEQ ID NO: 330533 - RNA, 19 nt, Homo sapiens
  misc_RNA (1)...(19): siRNA sense strand
ggcaauggaaccuuuguaa

SEQ ID NO: 330534 - RNA, 19 nt, Homo sapiens
  misc_RNA (1)...(19): siRNA sense strand
gaagaucacaguggcaaug

SEQ ID NO: 330535 - RNA, 19 nt, Homo sapiens
  misc_RNA (1)...(19): siRNA sense strand
augaagacaugaagagaaa

SEQ ID NO: 330536 - RNA, 19 nt, Homo sapiens
  misc_RNA (1)...(19): siRNA sense strand
ucaagaaguuguugguagu

SEQ ID NO: 330537 - RNA, 19 nt, Homo sapiens
  misc_RNA (1)...(19): siRNA sense strand
gaaguucuuguuucuguug

SEQ ID NO: 330538 - RNA, 19 nt, Homo sapiens
  misc_RNA (1)...(19): siRNA sense strand
cucaggaacucuauucuau

SEQ ID NO: 330539 - RNA, 19 nt, Homo sapiens
  misc_RNA (1)...(19): siRNA sense strand
gaugaucagucaguuuauc

SEQ ID NO: 330540 - RNA, 19 nt, Homo sapiens
  misc_RNA (1)...(19): siRNA sense strand
ugaaagaagcuaccugcaa

SEQ ID NO: 330541 - RNA, 19 nt, Homo sapiens
  misc_RNA (1)...(19): siRNA sense strand
uaagaaaguagccauaaag

SEQ ID NO: 330542 - RNA, 19 nt, Homo sapiens
  misc_RNA (1)...(19): siRNA sense strand
ggggagagcuguuugacaa

SEQ ID NO: 330543 - RNA, 19 nt, Homo sapiens
  misc_RNA (1)...(19): siRNA sense strand
gaucacaguggcaauggaa

SEQ ID NO: 330544 - RNA, 19 nt, Homo sapiens
  misc_RNA (1)...(19): siRNA sense strand
gaagacaugaagagaaagu

SEQ ID NO: 330545 - RNA, 19 nt, Homo sapiens
  misc_RNA (1)...(19): siRNA sense strand
gguauccaccuuucucuga

SEQ ID NO: 330546 - RNA, 19 nt, Homo sapiens
  misc_RNA (1)...(19): siRNA sense strand
ucagggaaguggguccuaa

SEQ ID NO: 330547 - RNA, 19 nt, Homo sapiens
  misc_RNA (1)...(19): siRNA sense strand
ccaccuuucucugagcaua

SEQ ID NO: 330548 - RNA, 19 nt, Homo sapiens
  misc_RNA (1)...(19): siRNA sense strand
augagaaccuuauguggaa

SEQ ID NO: 330549 - RNA, 19 nt, Homo sapiens
  misc_RNA (1)...(19): siRNA sense strand
gggaauaaacgccugaaag

SEQ ID NO: 330550 - RNA, 19 nt, Homo sapiens
  misc_RNA (1)...(19): siRNA sense strand
aaacgccguccuuugaaua

SEQ ID NO: 330551 - RNA, 19 nt, Homo sapiens
  misc_RNA (1)...(19): siRNA sense strand
gugaauauugcuuugauga

SEQ ID NO: 330552 - RNA, 19 nt, Homo sapiens
  misc_RNA (1)...(19): siRNA sense strand
guagaugaucagucaguuu

SEQ ID NO: 330553 - RNA, 19 nt, Homo sapiens
  misc_RNA (1)...(19): siRNA sense strand
gcacugucacuaagcagaa

SEQ ID NO: 330554 - RNA, 19 nt, Homo sapiens
  misc_RNA (1)...(19): siRNA sense strand
acagauaaauaccgaacau

SEQ ID NO: 330555 - RNA, 19 nt, Homo sapiens
  misc_RNA (1)...(19): siRNA sense strand
aaugacaacuacugguuug

SEQ ID NO: 330556 - RNA, 19 nt, Homo sapiens
  misc_RNA (1)...(19): siRNA sense strand
cagaagaagccuuaagaca

SEQ ID NO: 330557 - RNA, 19 nt, Homo sapiens
  misc_RNA (1)...(19): siRNA sense strand
gaggaaaacauguaagaaa

SEQ ID NO: 330558 - RNA, 19 nt, Homo sapiens
  misc_RNA (1)...(19): siRNA sense strand
gaucagucaguuuauccua

SEQ ID NO: 330559 - RNA, 19 nt, Homo sapiens
  misc_RNA (1)...(19): siRNA sense strand
aaaaggaaguuugcuauug

SEQ ID NO: 330560 - RNA, 19 nt, Homo sapiens
  misc_RNA (1)...(19): siRNA sense strand
aauaaacgccugaaagaag

SEQ ID NO: 330561 - RNA, 19 nt, Homo sapiens
  misc_RNA (1)...(19): siRNA sense strand
ugaaugacaacuacugguu

SEQ ID NO: 330562 - RNA, 19 nt, Homo sapiens
  misc_RNA (1)...(19): siRNA sense strand
acccguggcuucaggauga

SEQ ID NO: 330563 - RNA, 19 nt, Homo sapiens
  misc_RNA (1)...(19): siRNA sense strand
cugaaguucuuguuucugu

SEQ ID NO: 330564 - RNA, 19 nt, Homo sapiens
  misc_RNA (1)...(19): siRNA sense strand
aaucauccuugcaucauca

SEQ ID NO: 330565 - RNA, 19 nt, Homo sapiens
  misc_RNA (1)...(19): siRNA sense strand
uugcauacauagaagauca

SEQ ID NO: 330566 - RNA, 19 nt, Homo sapiens
  misc_RNA (1)...(19): siRNA sense strand
agacaugaagagaaaguuu

SEQ ID NO: 330567 - RNA, 19 nt, Homo sapiens
  misc_RNA (1)...(19): siRNA sense strand
ggacacugagcuccuuaga

SEQ ID NO: 330568 - RNA, 19 nt, Homo sapiens
  misc_RNA (1)...(19): siRNA sense strand
caguuuauccuaaggcauu

SEQ ID NO: 330569 - RNA, 19 nt, Homo sapiens
  misc_RNA (1)...(19): siRNA sense strand
caguggcaauggaaccuuu

SEQ ID NO: 330570 - RNA, 19 nt, Homo sapiens
  misc_RNA (1)...(19): siRNA sense strand
ugugugugcugcuguguug

SEQ ID NO: 330571 - RNA, 19 nt, Homo sapiens
  misc_RNA (1)...(19): siRNA sense strand
gaguuuaggaguuauucuu

SEQ ID NO: 330572 - RNA, 19 nt, Homo sapiens
  misc_RNA (1)...(19): siRNA sense strand
gagcuuguagggaaaggaa

SEQ ID NO: 330573 - RNA, 19 nt, Homo sapiens
  misc_RNA (1)...(19): siRNA sense strand
aaaguagccauaaagauca

SEQ ID NO: 330574 - RNA, 19 nt, Homo sapiens
  misc_RNA (1)...(19): siRNA sense strand
uugccaaucuugaaugugu

SEQ ID NO: 330575 - RNA, 19 nt, Homo sapiens
  misc_RNA (1)...(19): siRNA sense strand
uaccgaacauacagcaaga

SEQ ID NO: 330576 - RNA, 19 nt, Homo sapiens
  misc_RNA (1)...(19): siRNA sense strand
ggaugaagacaugaagaga

SEQ ID NO: 330577 - RNA, 19 nt, Homo sapiens
  misc_RNA (1)...(19): siRNA sense strand
guggacugcuggaguuuag

SEQ ID NO: 330578 - RNA, 19 nt, Homo sapiens
  misc_RNA (1)...(19): siRNA sense strand
ccacucaggaacucuauuc

SEQ ID NO: 330579 - RNA, 19 nt, Homo sapiens
  misc_RNA (1)...(19): siRNA sense strand
aaauugcacugucacuaag

SEQ ID NO: 330580 - RNA, 19 nt, Homo sapiens
  misc_RNA (1)...(19): siRNA sense strand
ugaaauugcacugucacua

SEQ ID NO: 330581 - RNA, 19 nt, Homo sapiens
  misc_RNA (1)...(19): siRNA sense strand
acucuuacauugcauacau

SEQ ID NO: 330582 - RNA, 19 nt, Homo sapiens
  misc_RNA (1)...(19): siRNA sense strand
ggacugcuggaguuuagga

SEQ ID NO: 330583 - RNA, 19 nt, Homo sapiens
  misc_RNA (1)...(19): siRNA sense strand
caaaagcugugaauauugc

SEQ ID NO: 330584 - RNA, 19 nt, Homo sapiens
  misc_RNA (1)...(19): siRNA sense strand
ucaggaacucuauucuauu

SEQ ID NO: 330585 - RNA, 19 nt, Homo sapiens
  misc_RNA (1)...(19): siRNA sense strand
uacgacagaagaagccuua

SEQ ID NO: 330586 - RNA, 19 nt, Homo sapiens
  misc_RNA (1)...(19): siRNA sense strand
cgccugaaguucuuguuuc

SEQ ID NO: 330587 - RNA, 19 nt, Homo sapiens
  misc_RNA (1)...(19): siRNA sense strand
uguaagaaaguagccauaa

SEQ ID NO: 330588 - RNA, 19 nt, Homo sapiens
  misc_RNA (1)...(19): siRNA sense strand
gaaaacgccguccuuugaa

SEQ ID NO: 330589 - RNA, 19 nt, Homo sapiens
  misc_RNA (1)...(19): siRNA sense strand
uugaaugugugaaugacaa

SEQ ID NO: 330590 - RNA, 19 nt, Homo sapiens
  misc_RNA (1)...(19): siRNA sense strand
cagauaaauaccgaacaua

SEQ ID NO: 330591 - RNA, 19 nt, Homo sapiens
  misc_RNA (1)...(19): siRNA sense strand
gaaccacugcugaaaagaa

SEQ ID NO: 330592 - RNA, 19 nt, Homo sapiens
  misc_RNA (1)...(19): siRNA sense strand
gauccaaaggcacguuuua

SEQ ID NO: 330593 - RNA, 19 nt, Homo sapiens
  misc_RNA (1)...(19): siRNA sense strand
ugaaguucuuguuucuguu

SEQ ID NO: 330594 - RNA, 19 nt, Homo sapiens
  misc_RNA (1)...(19): siRNA sense strand
cuaaaucauccuugcauca

SEQ ID NO: 330595 - RNA, 19 nt, Homo sapiens
  misc_RNA (1)...(19): siRNA sense strand
aagaaaguagccauaaaga

SEQ ID NO: 330596 - RNA, 19 nt, Homo sapiens
  misc_RNA (1)...(19): siRNA sense strand
ucagucaguuuauccuaag

SEQ ID NO: 330597 - RNA, 19 nt, Homo sapiens
  misc_RNA (1)...(19): siRNA sense strand
auacauagaagaucacagu

SEQ ID NO: 330598 - RNA, 19 nt, Homo sapiens
  misc_RNA (1)...(19): siRNA sense strand
gcgccugaaguucuuguuu

SEQ ID NO: 330599 - RNA, 19 nt, Homo sapiens
  misc_RNA (1)...(19): siRNA sense strand
acaaagcgcccagcugugu

SEQ ID NO: 330600 - RNA, 19 nt, Homo sapiens
  misc_RNA (1)...(19): siRNA sense strand
gcccagccuucuacuaguc

SEQ ID NO: 330601 - RNA, 19 nt, Homo sapiens
  misc_RNA (1)...(19): siRNA sense strand
uaaccagacucagaaagaa

SEQ ID NO: 330602 - RNA, 19 nt, Homo sapiens
  misc_RNA (1)...(19): siRNA sense strand
aggaggagcugcugaaaca

SEQ ID NO: 330603 - RNA, 19 nt, Homo sapiens
  misc_RNA (1)...(19): siRNA sense strand
gaaagaaaaccucaggaaa

SEQ ID NO: 330604 - RNA, 19 nt, Homo sapiens
  misc_RNA (1)...(19): siRNA sense strand
gaaggaggagcugcugaaa

SEQ ID NO: 330605 - RNA, 19 nt, Homo sapiens
  misc_RNA (1)...(19): siRNA sense strand
ucaacaagcacgaggagaa

SEQ ID NO: 330606 - RNA, 19 nt, Homo sapiens
  misc_RNA (1)...(19): siRNA sense strand
aggagaaccugaagaccaa

SEQ ID NO: 330607 - RNA, 19 nt, Homo sapiens
  misc_RNA (1)...(19): siRNA sense strand
gaccugcggccuaagaaga

SEQ ID NO: 330608 - RNA, 19 nt, Homo sapiens
  misc_RNA (1)...(19): siRNA sense strand
uuaaccagacucagaaaga

SEQ ID NO: 330609 - RNA, 19 nt, Homo sapiens
  misc_RNA (1)...(19): siRNA sense strand
aaagaaaaccucaggaaau

SEQ ID NO: 330610 - RNA, 19 nt, Homo sapiens
  misc_RNA (1)...(19): siRNA sense strand
gcacgaggagaaccugaag

SEQ ID NO: 330611 - RNA, 19 nt, Homo sapiens
  misc_RNA (1)...(19): siRNA sense strand
agaaggaggagcugcugaa

SEQ ID NO: 330612 - RNA, 19 nt, Homo sapiens
  misc_RNA (1)...(19): siRNA sense strand
uuauuaaccagacucagaa

SEQ ID NO: 330613 - RNA, 19 nt, Homo sapiens
  misc_RNA (1)...(19): siRNA sense strand
gagaaccugaagaccaaga

SEQ ID NO: 330614 - RNA, 19 nt, Homo sapiens
  misc_RNA (1)...(19): siRNA sense strand
gaaccugaagaccaagaag

SEQ ID NO: 330615 - RNA, 19 nt, Homo sapiens
  misc_RNA (1)...(19): siRNA sense strand
ggucaaagauucuaaacug

SEQ ID NO: 330616 - RNA, 19 nt, Homo sapiens
  misc_RNA (1)...(19): siRNA sense strand
gacagaauauggacugaaa

SEQ ID NO: 330617 - RNA, 19 nt, Homo sapiens
  misc_RNA (1)...(19): siRNA sense strand
cagaagauuuguaugauga

SEQ ID NO: 330618 - RNA, 19 nt, Homo sapiens
  misc_RNA (1)...(19): siRNA sense strand
gaacuaaaaugccuggaaa

SEQ ID NO: 330619 - RNA, 19 nt, Homo sapiens
  misc_RNA (1)...(19): siRNA sense strand
gaagauaaagcccaauuag

SEQ ID NO: 330620 - RNA, 19 nt, Homo sapiens
  misc_RNA (1)...(19): siRNA sense strand
gaauauggacugaaagugu

SEQ ID NO: 330621 - RNA, 19 nt, Homo sapiens
  misc_RNA (1)...(19): siRNA sense strand
cugaaaguguggagaauaa

SEQ ID NO: 330622 - RNA, 19 nt, Homo sapiens
  misc_RNA (1)...(19): siRNA sense strand
uaaacuguguccucugaaa

SEQ ID NO: 330623 - RNA, 19 nt, Homo sapiens
  misc_RNA (1)...(19): siRNA sense strand
ucguaaagcuacauccaua

SEQ ID NO: 330624 - RNA, 19 nt, Homo sapiens
  misc_RNA (1)...(19): siRNA sense strand
cuaaacugccugcauauaa

SEQ ID NO: 330625 - RNA, 19 nt, Homo sapiens
  misc_RNA (1)...(19): siRNA sense strand
aaacacaaagcacaacaua

SEQ ID NO: 330626 - RNA, 19 nt, Homo sapiens
  misc_RNA (1)...(19): siRNA sense strand
gaugaaccauggccuauac

SEQ ID NO: 330627 - RNA, 19 nt, Homo sapiens
  misc_RNA (1)...(19): siRNA sense strand
uaguaaaggucaaagauuc

SEQ ID NO: 330628 - RNA, 19 nt, Homo sapiens
  misc_RNA (1)...(19): siRNA sense strand
acacaaagcacaacauaau

SEQ ID NO: 330629 - RNA, 19 nt, Homo sapiens
  misc_RNA (1)...(19): siRNA sense strand
uuagaggucuucauggaaa

SEQ ID NO: 330630 - RNA, 19 nt, Homo sapiens
  misc_RNA (1)...(19): siRNA sense strand
ggaaaacuguaauggaaaa

SEQ ID NO: 330631 - RNA, 19 nt, Homo sapiens
  misc_RNA (1)...(19): siRNA sense strand
aagaggaacugccagaaga

SEQ ID NO: 330632 - RNA, 19 nt, Homo sapiens
  misc_RNA (1)...(19): siRNA sense strand
ggacugaaaguguggagaa

SEQ ID NO: 330633 - RNA, 19 nt, Homo sapiens
  misc_RNA (1)...(19): siRNA sense strand
gaaaagauggggauuuaaa

SEQ ID NO: 330634 - RNA, 19 nt, Homo sapiens
  misc_RNA (1)...(19): siRNA sense strand
ccagguuccuuuagaguug

SEQ ID NO: 330635 - RNA, 19 nt, Homo sapiens
  misc_RNA (1)...(19): siRNA sense strand
ugauggagaugaagaggaa

SEQ ID NO: 330636 - RNA, 19 nt, Homo sapiens
  misc_RNA (1)...(19): siRNA sense strand
guaaagcuacauccauauu

SEQ ID NO: 330637 - RNA, 19 nt, Homo sapiens
  misc_RNA (1)...(19): siRNA sense strand
ccagaagauuuguaugaug

SEQ ID NO: 330638 - RNA, 19 nt, Homo sapiens
  misc_RNA (1)...(19): siRNA sense strand
uaaacugccugcauauaag

SEQ ID NO: 330639 - RNA, 19 nt, Homo sapiens
  misc_RNA (1)...(19): siRNA sense strand
gaauaaacacaaagcacaa

SEQ ID NO: 330640 - RNA, 19 nt, Homo sapiens
  misc_RNA (1)...(19): siRNA sense strand
ggucucugaugaagauaaa

SEQ ID NO: 330641 - RNA, 19 nt, Homo sapiens
  misc_RNA (1)...(19): siRNA sense strand
auucuaaacugccugcaua

SEQ ID NO: 330642 - RNA, 19 nt, Homo sapiens
  misc_RNA (1)...(19): siRNA sense strand
gaacacacaucuggcuuuu

SEQ ID NO: 330643 - RNA, 19 nt, Homo sapiens
  misc_RNA (1)...(19): siRNA sense strand
gauaaagcccaauuagcaa

SEQ ID NO: 330644 - RNA, 19 nt, Homo sapiens
  misc_RNA (1)...(19): siRNA sense strand
cauauaaggaucucgguaa

SEQ ID NO: 330645 - RNA, 19 nt, Homo sapiens
  misc_RNA (1)...(19): siRNA sense strand
ggaacugccagaagauuug

SEQ ID NO: 330646 - RNA, 19 nt, Homo sapiens
  misc_RNA (1)...(19): siRNA sense strand
uuaagcaguuggucucuga

SEQ ID NO: 330647 - RNA, 19 nt, Homo sapiens
  misc_RNA (1)...(19): siRNA sense strand
ugaagauaaagcccaauua

SEQ ID NO: 330648 - RNA, 19 nt, Homo sapiens
  misc_RNA (1)...(19): siRNA sense strand
caaagcacaacauaaucua

SEQ ID NO: 330649 - RNA, 19 nt, Homo sapiens
  misc_RNA (1)...(19): siRNA sense strand
ccaauuagcaaguaaacug

SEQ ID NO: 330650 - RNA, 19 nt, Homo sapiens
  misc_RNA (1)...(19): siRNA sense strand
gaagaggaacugccagaag

SEQ ID NO: 330651 - RNA, 19 nt, Homo sapiens
  misc_RNA (1)...(19): siRNA sense strand
cuauguaaauggcucugua

SEQ ID NO: 330652 - RNA, 19 nt, Homo sapiens
  misc_RNA (1)...(19): siRNA sense strand
ucacauuacuucagguaca

SEQ ID NO: 330653 - RNA, 19 nt, Homo sapiens
  misc_RNA (1)...(19): siRNA sense strand
uaacagauaaugcugcaau

SEQ ID NO: 330654 - RNA, 19 nt, Homo sapiens
  misc_RNA (1)...(19): siRNA sense strand
aaaccaggcacuccucuuu

SEQ ID NO: 330655 - RNA, 19 nt, Homo sapiens
  misc_RNA (1)...(19): siRNA sense strand
ggaaagagugguacauggu

SEQ ID NO: 330656 - RNA, 19 nt, Homo sapiens
  misc_RNA (1)...(19): siRNA sense strand
uaccauucccuacauauuu

SEQ ID NO: 330657 - RNA, 19 nt, Homo sapiens
  misc_RNA (1)...(19): siRNA sense strand
gcaguuggucucugaugaa

SEQ ID NO: 330658 - RNA, 19 nt, Homo sapiens
  misc_RNA (1)...(19): siRNA sense strand
guuggucucugaugaagau

SEQ ID NO: 330659 - RNA, 19 nt, Homo sapiens
  misc_RNA (1)...(19): siRNA sense strand
aguaaacuguguccucuga

SEQ ID NO: 330660 - RNA, 19 nt, Homo sapiens
  misc_RNA (1)...(19): siRNA sense strand
gccagaagauuuguaugau

SEQ ID NO: 330661 - RNA, 19 nt, Homo sapiens
  misc_RNA (1)...(19): siRNA sense strand
agauaaagcccaauuagca

SEQ ID NO: 330662 - RNA, 19 nt, Homo sapiens
  misc_RNA (1)...(19): siRNA sense strand
acauauacaggacagaaua

SEQ ID NO: 330663 - RNA, 19 nt, Homo sapiens
  misc_RNA (1)...(19): siRNA sense strand
cuuuagaguuggucuuauu

SEQ ID NO: 330664 - RNA, 19 nt, Homo sapiens
  misc_RNA (1)...(19): siRNA sense strand
gaaccauggccuauacauc

SEQ ID NO: 330665 - RNA, 19 nt, Homo sapiens
  misc_RNA (1)...(19): siRNA sense strand
auauaaggaucucgguaaa

SEQ ID NO: 330666 - RNA, 19 nt, Homo sapiens
  misc_RNA (1)...(19): siRNA sense strand
ucuuuaugcugcucacuuu

SEQ ID NO: 330667 - RNA, 19 nt, Homo sapiens
  misc_RNA (1)...(19): siRNA sense strand
uaaagcuacauccauauug

SEQ ID NO: 330668 - RNA, 19 nt, Homo sapiens
  misc_RNA (1)...(19): siRNA sense strand
aaagcuacauccauauugg

SEQ ID NO: 330669 - RNA, 19 nt, Homo sapiens
  misc_RNA (1)...(19): siRNA sense strand
guaaaggucaaagauucua

SEQ ID NO: 330670 - RNA, 19 nt, Homo sapiens
  misc_RNA (1)...(19): siRNA sense strand
ggucacauuacuucaggua

SEQ ID NO: 330671 - RNA, 19 nt, Homo sapiens
  misc_RNA (1)...(19): siRNA sense strand
gaaaguguggagaauaaac

SEQ ID NO: 330672 - RNA, 19 nt, Homo sapiens
  misc_RNA (1)...(19): siRNA sense strand
uguuagaggucuucaugga

SEQ ID NO: 330673 - RNA, 19 nt, Homo sapiens
  misc_RNA (1)...(19): siRNA sense strand
agucuggccuggaacuaaa

SEQ ID NO: 330674 - RNA, 19 nt, Homo sapiens
  misc_RNA (1)...(19): siRNA sense strand
aaacauauacaggacagaa

SEQ ID NO: 330675 - RNA, 19 nt, Homo sapiens
  misc_RNA (1)...(19): siRNA sense strand
uguguccucugaaagauga

SEQ ID NO: 330676 - RNA, 19 nt, Homo sapiens
  misc_RNA (1)...(19): siRNA sense strand
ggacagaauauggacugaa

SEQ ID NO: 330677 - RNA, 19 nt, Homo sapiens
  misc_RNA (1)...(19): siRNA sense strand
uguugcaacuggugauauu

SEQ ID NO: 330678 - RNA, 19 nt, Homo sapiens
  misc_RNA (1)...(19): siRNA sense strand
aaggaaaacuguaauggaa

SEQ ID NO: 330679 - RNA, 19 nt, Homo sapiens
  misc_RNA (1)...(19): siRNA sense strand
gaggaacugccagaagauu

SEQ ID NO: 330680 - RNA, 19 nt, Homo sapiens
  misc_RNA (1)...(19): siRNA sense strand
gcucuguaccuggacauaa

SEQ ID NO: 330681 - RNA, 19 nt, Homo sapiens
  misc_RNA (1)...(19): siRNA sense strand
aaagcccaauuagcaagua

SEQ ID NO: 330682 - RNA, 19 nt, Homo sapiens
  misc_RNA (1)...(19): siRNA sense strand
gagucuggccuggaacuaa

SEQ ID NO: 330683 - RNA, 19 nt, Homo sapiens
  misc_RNA (1)...(19): siRNA sense strand
ugccagaagauuuguauga

SEQ ID NO: 330684 - RNA, 19 nt, Homo sapiens
  misc_RNA (1)...(19): siRNA sense strand
ccgccgaaacagacaguua

SEQ ID NO: 330685 - RNA, 19 nt, Homo sapiens
  misc_RNA (1)...(19): siRNA sense strand
gggaacagaacacacaucu

SEQ ID NO: 330686 - RNA, 19 nt, Homo sapiens
  misc_RNA (1)...(19): siRNA sense strand
gaaacagacaguuaaaauc

SEQ ID NO: 330687 - RNA, 19 nt, Homo sapiens
  misc_RNA (1)...(19): siRNA sense strand
cacauuacuucagguacaa

SEQ ID NO: 330688 - RNA, 19 nt, Homo sapiens
  misc_RNA (1)...(19): siRNA sense strand
cucuguaccuggacauaaa

SEQ ID NO: 330689 - RNA, 19 nt, Homo sapiens
  misc_RNA (1)...(19): siRNA sense strand
ggagaauaaacacaaagca

SEQ ID NO: 330690 - RNA, 19 nt, Homo sapiens
  misc_RNA (1)...(19): siRNA sense strand
cagaauauggacugaaagu

SEQ ID NO: 330691 - RNA, 19 nt, Homo sapiens
  misc_RNA (1)...(19): siRNA sense strand
augaaaagauggggauuua

SEQ ID NO: 330692 - RNA, 19 nt, Homo sapiens
  misc_RNA (1)...(19): siRNA sense strand
aaccaggcacuccucuuua

SEQ ID NO: 330693 - RNA, 19 nt, Homo sapiens
  misc_RNA (1)...(19): siRNA sense strand
gguacaagacugucauguc

SEQ ID NO: 330694 - RNA, 19 nt, Homo sapiens
  misc_RNA (1)...(19): siRNA sense strand
cgccgaaacagacaguuaa

SEQ ID NO: 330695 - RNA, 19 nt, Homo sapiens
  misc_RNA (1)...(19): siRNA sense strand
aaucuaccauucccuacau

SEQ ID NO: 330696 - RNA, 19 nt, Homo sapiens
  misc_RNA (1)...(19): siRNA sense strand
ucuaaacugccugcauaua

SEQ ID NO: 330697 - RNA, 19 nt, Homo sapiens
  misc_RNA (1)...(19): siRNA sense strand
gacugaaaguguggagaau

SEQ ID NO: 330698 - RNA, 19 nt, Homo sapiens
  misc_RNA (1)...(19): siRNA sense strand
accaggcacuccucuuuau

SEQ ID NO: 330699 - RNA, 19 nt, Homo sapiens
  misc_RNA (1)...(19): siRNA sense strand
guuagaggucuucauggaa

SEQ ID NO: 330700 - RNA, 19 nt, Homo sapiens
  misc_RNA (1)...(19): siRNA sense strand
gaacugccagaagauuugu

SEQ ID NO: 330701 - RNA, 19 nt, Homo sapiens
  misc_RNA (1)...(19): siRNA sense strand
acaaagcacaacauaaucu

SEQ ID NO: 330702 - RNA, 19 nt, Homo sapiens
  misc_RNA (1)...(19): siRNA sense strand
aacagauaaugcugcaauu

SEQ ID NO: 330703 - RNA, 19 nt, Homo sapiens
  misc_RNA (1)...(19): siRNA sense strand
cuaccauucccuacauauu

SEQ ID NO: 330704 - RNA, 19 nt, Homo sapiens
  misc_RNA (1)...(19): siRNA sense strand
agaacacacaucuggcuuu

SEQ ID NO: 330705 - RNA, 19 nt, Homo sapiens
  misc_RNA (1)...(19): siRNA sense strand
gccgaaacagacaguuaaa

SEQ ID NO: 330706 - RNA, 19 nt, Homo sapiens
  misc_RNA (1)...(19): siRNA sense strand
cccggugcgccuucuauua

SEQ ID NO: 330707 - RNA, 19 nt, Homo sapiens
  misc_RNA (1)...(19): siRNA sense strand
cgaaacagacaguuaaaau

SEQ ID NO: 330708 - RNA, 19 nt, Homo sapiens
  misc_RNA (1)...(19): siRNA sense strand
aagcccaauuagcaaguaa

SEQ ID NO: 330709 - RNA, 19 nt, Homo sapiens
  misc_RNA (1)...(19): siRNA sense strand
caauuagcaaguaaacugu

SEQ ID NO: 330710 - RNA, 19 nt, Homo sapiens
  misc_RNA (1)...(19): siRNA sense strand
auacaggacagaauaugga

SEQ ID NO: 330711 - RNA, 19 nt, Homo sapiens
  misc_RNA (1)...(19): siRNA sense strand
ucccauucauuaagcaguu

SEQ ID NO: 330712 - RNA, 19 nt, Homo sapiens
  misc_RNA (1)...(19): siRNA sense strand
ccuugaagcugggcaugau

SEQ ID NO: 330713 - RNA, 19 nt, Homo sapiens
  misc_RNA (1)...(19): siRNA sense strand
cacaaagcacaacauaauc

SEQ ID NO: 330714 - RNA, 19 nt, Homo sapiens
  misc_RNA (1)...(19): siRNA sense strand
agcaguuggucucugauga

SEQ ID NO: 330715 - RNA, 19 nt, Homo sapiens
  misc_RNA (1)...(19): siRNA sense strand
caaaucgccucucuugcua

SEQ ID NO: 330716 - RNA, 19 nt, Homo sapiens
  misc_RNA (1)...(19): siRNA sense strand
gggaagggaugugagauga

SEQ ID NO: 330717 - RNA, 19 nt, Homo sapiens
  misc_RNA (1)...(19): siRNA sense strand
gaagggaugugagaugauc

SEQ ID NO: 330718 - RNA, 19 nt, Homo sapiens
  misc_RNA (1)...(19): siRNA sense strand
ucacaacugucacaaccuu

SEQ ID NO: 330719 - RNA, 19 nt, Homo sapiens
  misc_RNA (1)...(19): siRNA sense strand
uagcugaccugacacagau

SEQ ID NO: 330720 - RNA, 19 nt, Homo sapiens
  misc_RNA (1)...(19): siRNA sense strand
aggaguagcugaccugaca

SEQ ID NO: 330721 - RNA, 19 nt, Homo sapiens
  misc_RNA (1)...(19): siRNA sense strand
gaaacugaugguacuuguu

SEQ ID NO: 330722 - RNA, 19 nt, Homo sapiens
  misc_RNA (1)...(19): siRNA sense strand
uaaaagaucacaacuguca

SEQ ID NO: 330723 - RNA, 19 nt, Homo sapiens
  misc_RNA (1)...(19): siRNA sense strand
cgugauuccuugcaacaau

SEQ ID NO: 330724 - RNA, 19 nt, Homo sapiens
  misc_RNA (1)...(19): siRNA sense strand
guacuuguuuucaccauug

SEQ ID NO: 330725 - RNA, 19 nt, Homo sapiens
  misc_RNA (1)...(19): siRNA sense strand
gaugggaagggaugugaga

SEQ ID NO: 330726 - RNA, 19 nt, Homo sapiens
  misc_RNA (1)...(19): siRNA sense strand
cugcaaaucgccucucuug

SEQ ID NO: 330727 - RNA, 19 nt, Homo sapiens
  misc_RNA (1)...(19): siRNA sense strand
gaucuguuacugcaacuuc

SEQ ID NO: 330728 - RNA, 19 nt, Homo sapiens
  misc_RNA (1)...(19): siRNA sense strand
guagcugaccugacacaga

SEQ ID NO: 330729 - RNA, 19 nt, Homo sapiens
  misc_RNA (1)...(19): siRNA sense strand
gaccugacacagauugaug

SEQ ID NO: 330730 - RNA, 19 nt, Homo sapiens
  misc_RNA (1)...(19): siRNA sense strand
ucgccucucuugcuacaga

SEQ ID NO: 330731 - RNA, 19 nt, Homo sapiens
  misc_RNA (1)...(19): siRNA sense strand
acuaaaagaucacaacugu

SEQ ID NO: 330732 - RNA, 19 nt, Homo sapiens
  misc_RNA (1)...(19): siRNA sense strand
guucaagccaugccugcaa

SEQ ID NO: 330733 - RNA, 19 nt, Homo sapiens
  misc_RNA (1)...(19): siRNA sense strand
ggaagggaugugagaugau

SEQ ID NO: 330734 - RNA, 19 nt, Homo sapiens
  misc_RNA (1)...(19): siRNA sense strand
ugaugucaauguccaggau

SEQ ID NO: 330735 - RNA, 19 nt, Homo sapiens
  misc_RNA (1)...(19): siRNA sense strand
ugggcuaacuuugcugcua

SEQ ID NO: 330736 - RNA, 19 nt, Homo sapiens
  misc_RNA (1)...(19): siRNA sense strand
gcuacagaaagauacuaaa

SEQ ID NO: 330737 - RNA, 19 nt, Homo sapiens
  misc_RNA (1)...(19): siRNA sense strand
ccauugggcuaacuuugcu

SEQ ID NO: 330738 - RNA, 19 nt, Homo sapiens
  misc_RNA (1)...(19): siRNA sense strand
gggaugggaagggauguga

SEQ ID NO: 330739 - RNA, 19 nt, Homo sapiens
  misc_RNA (1)...(19): siRNA sense strand
aaagaucacaacugucaca

SEQ ID NO: 330740 - RNA, 19 nt, Homo sapiens
  misc_RNA (1)...(19): siRNA sense strand
ccacuuaccugcccauaua

SEQ ID NO: 330741 - RNA, 19 nt, Homo sapiens
  misc_RNA (1)...(19): siRNA sense strand
gaaugaagcugcaguaaag

SEQ ID NO: 330742 - RNA, 19 nt, Homo sapiens
  misc_RNA (1)...(19): siRNA sense strand
agaagaagaugaugacuaa

SEQ ID NO: 330743 - RNA, 19 nt, Homo sapiens
  misc_RNA (1)...(19): siRNA sense strand
uaaaggaggugaugagguu

SEQ ID NO: 330744 - RNA, 19 nt, Homo sapiens
  misc_RNA (1)...(19): siRNA sense strand
aaacaaagaugaugaagca

SEQ ID NO: 330745 - RNA, 19 nt, Homo sapiens
  misc_RNA (1)...(19): siRNA sense strand
aacaauggcugaaguauuu

SEQ ID NO: 330746 - RNA, 19 nt, Homo sapiens
  misc_RNA (1)...(19): siRNA sense strand
aaaggaagaugaagaagaa

SEQ ID NO: 330747 - RNA, 19 nt, Homo sapiens
  misc_RNA (1)...(19): siRNA sense strand
gaagaagaaguuucagaua

SEQ ID NO: 330748 - RNA, 19 nt, Homo sapiens
  misc_RNA (1)...(19): siRNA sense strand
guauauggauuggcauuua

SEQ ID NO: 330749 - RNA, 19 nt, Homo sapiens
  misc_RNA (1)...(19): siRNA sense strand
gaagaaaccaauagagauu

SEQ ID NO: 330750 - RNA, 19 nt, Homo sapiens
  misc_RNA (1)...(19): siRNA sense strand
ggauuggcauuuaugguua

SEQ ID NO: 330751 - RNA, 19 nt, Homo sapiens
  misc_RNA (1)...(19): siRNA sense strand
gcaugaagcuuucucagau

SEQ ID NO: 330752 - RNA, 19 nt, Homo sapiens
  misc_RNA (1)...(19): siRNA sense strand
gaagauagcaacaacauca

SEQ ID NO: 330753 - RNA, 19 nt, Homo sapiens
  misc_RNA (1)...(19): siRNA sense strand
caauagagauucccaaagu

SEQ ID NO: 330754 - RNA, 19 nt, Homo sapiens
  misc_RNA (1)...(19): siRNA sense strand
ggcuggagcuucugaauuu

SEQ ID NO: 330755 - RNA, 19 nt, Homo sapiens
  misc_RNA (1)...(19): siRNA sense strand
acaguaggauccuuaguua

SEQ ID NO: 330756 - RNA, 19 nt, Homo sapiens
  misc_RNA (1)...(19): siRNA sense strand
ggaaggagcagacauuaau

SEQ ID NO: 330757 - RNA, 19 nt, Homo sapiens
  misc_RNA (1)...(19): siRNA sense strand
aauguaaucugccaacuaa

SEQ ID NO: 330758 - RNA, 19 nt, Homo sapiens
  misc_RNA (1)...(19): siRNA sense strand
caagaaaacugcuaaauca

SEQ ID NO: 330759 - RNA, 19 nt, Homo sapiens
  misc_RNA (1)...(19): siRNA sense strand
gaagaagaagaaaccaaua

SEQ ID NO: 330760 - RNA, 19 nt, Homo sapiens
  misc_RNA (1)...(19): siRNA sense strand
caagaauggugguggcuuu

SEQ ID NO: 330761 - RNA, 19 nt, Homo sapiens
  misc_RNA (1)...(19): siRNA sense strand
gagcaaauucgauuaaaga

SEQ ID NO: 330762 - RNA, 19 nt, Homo sapiens
  misc_RNA (1)...(19): siRNA sense strand
ugaagaagaucagcaauuc

SEQ ID NO: 330763 - RNA, 19 nt, Homo sapiens
  misc_RNA (1)...(19): siRNA sense strand
gguguuagaugaugaagau

SEQ ID NO: 330764 - RNA, 19 nt, Homo sapiens
  misc_RNA (1)...(19): siRNA sense strand
ggaaugaagcugcaguaaa

SEQ ID NO: 330765 - RNA, 19 nt, Homo sapiens
  misc_RNA (1)...(19): siRNA sense strand
gcacaacacagauuuauac

SEQ ID NO: 330766 - RNA, 19 nt, Homo sapiens
  misc_RNA (1)...(19): siRNA sense strand
aaucacagguguuagauga

SEQ ID NO: 330767 - RNA, 19 nt, Homo sapiens
  misc_RNA (1)...(19): siRNA sense strand
gcagcucccucauauugaa

SEQ ID NO: 330768 - RNA, 19 nt, Homo sapiens
  misc_RNA (1)...(19): siRNA sense strand
gcaaacaauggcugaagua

SEQ ID NO: 330769 - RNA, 19 nt, Homo sapiens
  misc_RNA (1)...(19): siRNA sense strand
gagcagacauuaauaucca

SEQ ID NO: 330770 - RNA, 19 nt, Homo sapiens
  misc_RNA (1)...(19): siRNA sense strand
gaaggagcagacauuaaua

SEQ ID NO: 330771 - RNA, 19 nt, Homo sapiens
  misc_RNA (1)...(19): siRNA sense strand
gccacaagcuuuggaauug

SEQ ID NO: 330772 - RNA, 19 nt, Homo sapiens
  misc_RNA (1)...(19): siRNA sense strand
gagaauaccaagaauacaa

SEQ ID NO: 330773 - RNA, 19 nt, Homo sapiens
  misc_RNA (1)...(19): siRNA sense strand
gcaggcaaauggagucguu

SEQ ID NO: 330774 - RNA, 19 nt, Homo sapiens
  misc_RNA (1)...(19): siRNA sense strand
ugaauuugauccucaguau

SEQ ID NO: 330775 - RNA, 19 nt, Homo sapiens
  misc_RNA (1)...(19): siRNA sense strand
agacggguuucuaaucaua

SEQ ID NO: 330776 - RNA, 19 nt, Homo sapiens
  misc_RNA (1)...(19): siRNA sense strand
gaagcagaguggcaagaau

SEQ ID NO: 330777 - RNA, 19 nt, Homo sapiens
  misc_RNA (1)...(19): siRNA sense strand
ugagaaagaugaugguagu

SEQ ID NO: 330778 - RNA, 19 nt, Homo sapiens
  misc_RNA (1)...(19): siRNA sense strand
ggaagaagaggaggaagaa

SEQ ID NO: 330779 - RNA, 19 nt, Homo sapiens
  misc_RNA (1)...(19): siRNA sense strand
gaugggcauuguucuuauu

SEQ ID NO: 330780 - RNA, 19 nt, Homo sapiens
  misc_RNA (1)...(19): siRNA sense strand
uggcaagaauuacaacaaa

SEQ ID NO: 330781 - RNA, 19 nt, Homo sapiens
  misc_RNA (1)...(19): siRNA sense strand
gcagaccaacggauaauau

SEQ ID NO: 330782 - RNA, 19 nt, Homo sapiens
  misc_RNA (1)...(19): siRNA sense strand
acagugggauacagcaaua

SEQ ID NO: 330783 - RNA, 19 nt, Homo sapiens
  misc_RNA (1)...(19): siRNA sense strand
ggagguagagcugaaguuu

SEQ ID NO: 330784 - RNA, 19 nt, Homo sapiens
  misc_RNA (1)...(19): siRNA sense strand
ggaacaccuucuucuacuu

SEQ ID NO: 330785 - RNA, 19 nt, Homo sapiens
  misc_RNA (1)...(19): siRNA sense strand
cacaguagcagaaauuaaa

SEQ ID NO: 330786 - RNA, 19 nt, Homo sapiens
  misc_RNA (1)...(19): siRNA sense strand
gagaucagacuccuauaug

SEQ ID NO: 330787 - RNA, 19 nt, Homo sapiens
  misc_RNA (1)...(19): siRNA sense strand
gauggcaacagaagaguaa

SEQ ID NO: 330788 - RNA, 19 nt, Homo sapiens
  misc_RNA (1)...(19): siRNA sense strand
aaaggaggauggcaacaga

SEQ ID NO: 330789 - RNA, 19 nt, Homo sapiens
  misc_RNA (1)...(19): siRNA sense strand
ggaugggcauuguucuuau

SEQ ID NO: 330790 - RNA, 19 nt, Homo sapiens
  misc_RNA (1)...(19): siRNA sense strand
gaacaccuucuucuacuuc

SEQ ID NO: 330791 - RNA, 19 nt, Homo sapiens
  misc_RNA (1)...(19): siRNA sense strand
gaagaaguuucagauaagg

SEQ ID NO: 330792 - RNA, 19 nt, Homo sapiens
  misc_RNA (1)...(19): siRNA sense strand
ggaagaugaagaagaaguu

SEQ ID NO: 330793 - RNA, 19 nt, Homo sapiens
  misc_RNA (1)...(19): siRNA sense strand
gaguaaaggacccaagaaa

SEQ ID NO: 330794 - RNA, 19 nt, Homo sapiens
  misc_RNA (1)...(19): siRNA sense strand
uguaaucugccaacuaaua

SEQ ID NO: 330795 - RNA, 19 nt, Homo sapiens
  misc_RNA (1)...(19): siRNA sense strand
gaauuugauccucaguaua

SEQ ID NO: 330796 - RNA, 19 nt, Homo sapiens
  misc_RNA (1)...(19): siRNA sense strand
uaccacagcuaaucagaga

SEQ ID NO: 330797 - RNA, 19 nt, Homo sapiens
  misc_RNA (1)...(19): siRNA sense strand
agugagggcuuugaagaua

SEQ ID NO: 330798 - RNA, 19 nt, Homo sapiens
  misc_RNA (1)...(19): siRNA sense strand
agaagaaguuucagauaag

SEQ ID NO: 330799 - RNA, 19 nt, Homo sapiens
  misc_RNA (1)...(19): siRNA sense strand
ggaauugcccugccagcuu

SEQ ID NO: 330800 - RNA, 19 nt, Homo sapiens
  misc_RNA (1)...(19): siRNA sense strand
ggaggacagugagggcuuu

SEQ ID NO: 330801 - RNA, 19 nt, Homo sapiens
  misc_RNA (1)...(19): siRNA sense strand
gaaagauacagaggaggua

SEQ ID NO: 330802 - RNA, 19 nt, Homo sapiens
  misc_RNA (1)...(19): siRNA sense strand
gaagaugaagaagaaguuu

SEQ ID NO: 330803 - RNA, 19 nt, Homo sapiens
  misc_RNA (1)...(19): siRNA sense strand
ucagggacuucagcaauuu

SEQ ID NO: 330804 - RNA, 19 nt, Homo sapiens
  misc_RNA (1)...(19): siRNA sense strand
cagagaaauuggcagcauu

SEQ ID NO: 330805 - RNA, 19 nt, Homo sapiens
  misc_RNA (1)...(19): siRNA sense strand
aagaaugagccuccacuua

SEQ ID NO: 330806 - RNA, 19 nt, Homo sapiens
  misc_RNA (1)...(19): siRNA sense strand
uggaucagauuaaaccauu

SEQ ID NO: 330807 - RNA, 19 nt, Homo sapiens
  misc_RNA (1)...(19): siRNA sense strand
gaauggugguggcuuuaca

SEQ ID NO: 330808 - RNA, 19 nt, Homo sapiens
  misc_RNA (1)...(19): siRNA sense strand
uaaaggaagaugaagaaga

SEQ ID NO: 330809 - RNA, 19 nt, Homo sapiens
  misc_RNA (1)...(19): siRNA sense strand
gaagaugggcagggugaaa

SEQ ID NO: 330810 - RNA, 19 nt, Homo sapiens
  misc_RNA (1)...(19): siRNA sense strand
uuacaguguugguuaaguu

SEQ ID NO: 330811 - RNA, 19 nt, Homo sapiens
  misc_RNA (1)...(19): siRNA sense strand
gaucagauuaaaccauuga

SEQ ID NO: 330812 - RNA, 19 nt, Homo sapiens
  misc_RNA (1)...(19): siRNA sense strand
ugaaacgucuuaucauggu

SEQ ID NO: 330813 - RNA, 19 nt, Homo sapiens
  misc_RNA (1)...(19): siRNA sense strand
gaagaagaaaccaauagag

SEQ ID NO: 330814 - RNA, 19 nt, Homo sapiens
  misc_RNA (1)...(19): siRNA sense strand
caucacaguaggauccuua

SEQ ID NO: 330815 - RNA, 19 nt, Homo sapiens
  misc_RNA (1)...(19): siRNA sense strand
agagaaauuggcagcauua

SEQ ID NO: 330816 - RNA, 19 nt, Homo sapiens
  misc_RNA (1)...(19): siRNA sense strand
gauccucaguauaauaaag

SEQ ID NO: 330817 - RNA, 19 nt, Homo sapiens
  misc_RNA (1)...(19): siRNA sense strand
ggaggaagaagaagaugau

SEQ ID NO: 330818 - RNA, 19 nt, Homo sapiens
  misc_RNA (1)...(19): siRNA sense strand
ggacagugagggcuuugaa

SEQ ID NO: 330819 - RNA, 19 nt, Homo sapiens
  misc_RNA (1)...(19): siRNA sense strand
gauuaaaccauugaaguug

SEQ ID NO: 330820 - RNA, 19 nt, Homo sapiens
  misc_RNA (1)...(19): siRNA sense strand
cagaggagguagagcugaa

SEQ ID NO: 330821 - RNA, 19 nt, Homo sapiens
  misc_RNA (1)...(19): siRNA sense strand
uaagggcagugauucugaa

SEQ ID NO: 330822 - RNA, 19 nt, Homo sapiens
  misc_RNA (1)...(19): siRNA sense strand
gggaacaccuucuucuacu

SEQ ID NO: 330823 - RNA, 19 nt, Homo sapiens
  misc_RNA (1)...(19): siRNA sense strand
ucacagguguuagaugaug

SEQ ID NO: 330824 - RNA, 19 nt, Homo sapiens
  misc_RNA (1)...(19): siRNA sense strand
ccacagcuaaucagagaaa

SEQ ID NO: 330825 - RNA, 19 nt, Homo sapiens
  misc_RNA (1)...(19): siRNA sense strand
gaagguguaugugguaucg

SEQ ID NO: 330826 - RNA, 19 nt, Homo sapiens
  misc_RNA (1)...(19): siRNA sense strand
ggugguggcuuuacauugc

SEQ ID NO: 330827 - RNA, 19 nt, Homo sapiens
  misc_RNA (1)...(19): siRNA sense strand
aaacaauggcugaaguauu

SEQ ID NO: 330828 - RNA, 19 nt, Homo sapiens
  misc_RNA (1)...(19): siRNA sense strand
gaagaagaucagcaauuca

SEQ ID NO: 330829 - RNA, 19 nt, Homo sapiens
  misc_RNA (1)...(19): siRNA sense strand
gaaacgucuuaucaugguu

SEQ ID NO: 330830 - RNA, 19 nt, Homo sapiens
  misc_RNA (1)...(19): siRNA sense strand
gccuggaaauuaucaguau

SEQ ID NO: 330831 - RNA, 19 nt, Homo sapiens
  misc_RNA (1)...(19): siRNA sense strand
gaaaauaguucugcuugca

SEQ ID NO: 330832 - RNA, 19 nt, Homo sapiens
  misc_RNA (1)...(19): siRNA sense strand
ucaaagcaacagaaacaaa

SEQ ID NO: 330833 - RNA, 19 nt, Homo sapiens
  misc_RNA (1)...(19): siRNA sense strand
ugucucaucuugcuagaau

SEQ ID NO: 330834 - RNA, 19 nt, Homo sapiens
  misc_RNA (1)...(19): siRNA sense strand
cagcuaaucagagaaauug

SEQ ID NO: 330835 - RNA, 19 nt, Homo sapiens
  misc_RNA (1)...(19): siRNA sense strand
acaagcagaccaacggaua

SEQ ID NO: 330836 - RNA, 19 nt, Homo sapiens
  misc_RNA (1)...(19): siRNA sense strand
ggaugaagagucccggaaa

SEQ ID NO: 330837 - RNA, 19 nt, Homo sapiens
  misc_RNA (1)...(19): siRNA sense strand
gugguaucguuuacgguua

SEQ ID NO: 330838 - RNA, 19 nt, Homo sapiens
  misc_RNA (1)...(19): siRNA sense strand
gaacagccagcagaagaug

SEQ ID NO: 330839 - RNA, 19 nt, Homo sapiens
  misc_RNA (1)...(19): siRNA sense strand
uuggauaguugaccagaaa

SEQ ID NO: 330840 - RNA, 19 nt, Homo sapiens
  misc_RNA (1)...(19): siRNA sense strand
gaacuccacugcccacuua

SEQ ID NO: 330841 - RNA, 19 nt, Homo sapiens
  misc_RNA (1)...(19): siRNA sense strand
gaaggaagcggcagauuua

SEQ ID NO: 330842 - RNA, 19 nt, Homo sapiens
  misc_RNA (1)...(19): siRNA sense strand
cagauuugcuauuggauua

SEQ ID NO: 330843 - RNA, 19 nt, Homo sapiens
  misc_RNA (1)...(19): siRNA sense strand
gaauucacuucucugguua

SEQ ID NO: 330844 - RNA, 19 nt, Homo sapiens
  misc_RNA (1)...(19): siRNA sense strand
cagaaucacuccucucaaa

SEQ ID NO: 330845 - RNA, 19 nt, Homo sapiens
  misc_RNA (1)...(19): siRNA sense strand
caacguggcugucagaauc

SEQ ID NO: 330846 - RNA, 19 nt, Homo sapiens
  misc_RNA (1)...(19): siRNA sense strand
gacagcagguucagcauuu

SEQ ID NO: 330847 - RNA, 19 nt, Homo sapiens
  misc_RNA (1)...(19): siRNA sense strand
gaaucacuccucucaaaua

SEQ ID NO: 330848 - RNA, 19 nt, Homo sapiens
  misc_RNA (1)...(19): siRNA sense strand
gcuauuggauuaaaggaaa

SEQ ID NO: 330849 - RNA, 19 nt, Homo sapiens
  misc_RNA (1)...(19): siRNA sense strand
caacuacccuuucucaaca

SEQ ID NO: 330850 - RNA, 19 nt, Homo sapiens
  misc_RNA (1)...(19): siRNA sense strand
caacaucagugaaguuauc

SEQ ID NO: 330851 - RNA, 19 nt, Homo sapiens
  misc_RNA (1)...(19): siRNA sense strand
agcaauaucugucuuauga

SEQ ID NO: 330852 - RNA, 19 nt, Homo sapiens
  misc_RNA (1)...(19): siRNA sense strand
cggcauggauuaugauuau

SEQ ID NO: 330853 - RNA, 19 nt, Homo sapiens
  misc_RNA (1)...(19): siRNA sense strand
ucucaaauaugcccagauu

SEQ ID NO: 330854 - RNA, 19 nt, Homo sapiens
  misc_RNA (1)...(19): siRNA sense strand
gaaaggaacccagaagcuu

SEQ ID NO: 330855 - RNA, 19 nt, Homo sapiens
  misc_RNA (1)...(19): siRNA sense strand
aaaggaaacuaccuggauu

SEQ ID NO: 330856 - RNA, 19 nt, Homo sapiens
  misc_RNA (1)...(19): siRNA sense strand
gaagccaaauuagaaguau

SEQ ID NO: 330857 - RNA, 19 nt, Homo sapiens
  misc_RNA (1)...(19): siRNA sense strand
cgaaggaagcggcagauuu

SEQ ID NO: 330858 - RNA, 19 nt, Homo sapiens
  misc_RNA (1)...(19): siRNA sense strand
gaaacgcucuaugccaaug

SEQ ID NO: 330859 - RNA, 19 nt, Homo sapiens
  misc_RNA (1)...(19): siRNA sense strand
ucaaagacgagaccuauga

SEQ ID NO: 330860 - RNA, 19 nt, Homo sapiens
  misc_RNA (1)...(19): siRNA sense strand
ucaggaaagucucgaagga

SEQ ID NO: 330861 - RNA, 19 nt, Homo sapiens
  misc_RNA (1)...(19): siRNA sense strand
ggaagagacagcagcagaa

SEQ ID NO: 330862 - RNA, 19 nt, Homo sapiens
  misc_RNA (1)...(19): siRNA sense strand
acgaagaggccaagcaaua

SEQ ID NO: 330863 - RNA, 19 nt, Homo sapiens
  misc_RNA (1)...(19): siRNA sense strand
ccaagcaauaucugucuua

SEQ ID NO: 330864 - RNA, 19 nt, Homo sapiens
  misc_RNA (1)...(19): siRNA sense strand
aaucacuccucucaaauau

SEQ ID NO: 330865 - RNA, 19 nt, Homo sapiens
  misc_RNA (1)...(19): siRNA sense strand
ggaaacuaccuggauugua

SEQ ID NO: 330866 - RNA, 19 nt, Homo sapiens
  misc_RNA (1)...(19): siRNA sense strand
caagcaauaucugucuuau

SEQ ID NO: 330867 - RNA, 19 nt, Homo sapiens
  misc_RNA (1)...(19): siRNA sense strand
ggaagcggcagauuuaugg

SEQ ID NO: 330868 - RNA, 19 nt, Homo sapiens
  misc_RNA (1)...(19): siRNA sense strand
gcccagauuugcuauugga

SEQ ID NO: 330869 - RNA, 19 nt, Homo sapiens
  misc_RNA (1)...(19): siRNA sense strand
ccucuuccuucucuucuuu

SEQ ID NO: 330870 - RNA, 19 nt, Homo sapiens
  misc_RNA (1)...(19): siRNA sense strand
ccagucuacccucaauuua

SEQ ID NO: 330871 - RNA, 19 nt, Homo sapiens
  misc_RNA (1)...(19): siRNA sense strand
uaaaggaaacuaccuggau

SEQ ID NO: 330872 - RNA, 19 nt, Homo sapiens
  misc_RNA (1)...(19): siRNA sense strand
gaagaggccaagcaauauc

SEQ ID NO: 330873 - RNA, 19 nt, Homo sapiens
  misc_RNA (1)...(19): siRNA sense strand
ccaaugacaucggcaugga

SEQ ID NO: 330874 - RNA, 19 nt, Homo sapiens
  misc_RNA (1)...(19): siRNA sense strand
ucacuccucucaaauaugc

SEQ ID NO: 330875 - RNA, 19 nt, Homo sapiens
  misc_RNA (1)...(19): siRNA sense strand
gagccgaagccaaauuaga

SEQ ID NO: 330876 - RNA, 19 nt, Homo sapiens
  misc_RNA (1)...(19): siRNA sense strand
agacgagaccuaugacuug

SEQ ID NO: 330877 - RNA, 19 nt, Homo sapiens
  misc_RNA (1)...(19): siRNA sense strand
cgaagaggccaagcaauau

SEQ ID NO: 330878 - RNA, 19 nt, Homo sapiens
  misc_RNA (1)...(19): siRNA sense strand
cgaagccaaauuagaagua

SEQ ID NO: 330879 - RNA, 19 nt, Homo sapiens
  misc_RNA (1)...(19): siRNA sense strand
gcucaacuacccuuucuca

SEQ ID NO: 330880 - RNA, 19 nt, Homo sapiens
  misc_RNA (1)...(19): siRNA sense strand
gcaagugagcccuuacagu

SEQ ID NO: 330881 - RNA, 19 nt, Homo sapiens
  misc_RNA (1)...(19): siRNA sense strand
ucacuucucugguuaugac

SEQ ID NO: 330882 - RNA, 19 nt, Homo sapiens
  misc_RNA (1)...(19): siRNA sense strand
gcagauuuauggcuaugac

SEQ ID NO: 330883 - RNA, 19 nt, Homo sapiens
  misc_RNA (1)...(19): siRNA sense strand
ucgcuucugugacgucaaa

SEQ ID NO: 330884 - RNA, 19 nt, Homo sapiens
  misc_RNA (1)...(19): siRNA sense strand
ggugagcccuccugcuaag

SEQ ID NO: 330885 - RNA, 19 nt, Homo sapiens
  misc_RNA (1)...(19): siRNA sense strand
gggcuccucuuccuucucu

SEQ ID NO: 330886 - RNA, 19 nt, Homo sapiens
  misc_RNA (1)...(19): siRNA sense strand
agacgcaggugggcaucua

SEQ ID NO: 330887 - RNA, 19 nt, Homo sapiens
  misc_RNA (1)...(19): siRNA sense strand
gaagagacagcagcagaag

SEQ ID NO: 330888 - RNA, 19 nt, Homo sapiens
  misc_RNA (1)...(19): siRNA sense strand
ugaccgaccaggcaauuug

SEQ ID NO: 330889 - RNA, 19 nt, Homo sapiens
  misc_RNA (1)...(19): siRNA sense strand
agagaagcauguccucaca

SEQ ID NO: 330890 - RNA, 19 nt, Homo sapiens
  misc_RNA (1)...(19): siRNA sense strand
gcaauaucugucuuaugaa

SEQ ID NO: 330891 - RNA, 19 nt, Homo sapiens
  misc_RNA (1)...(19): siRNA sense strand
agagacagcagcagaagug

SEQ ID NO: 330892 - RNA, 19 nt, Homo sapiens
  misc_RNA (1)...(19): siRNA sense strand
uggagccgaagccaaauua

SEQ ID NO: 330893 - RNA, 19 nt, Homo sapiens
  misc_RNA (1)...(19): siRNA sense strand
acaucggcauggauuauga

SEQ ID NO: 330894 - RNA, 19 nt, Homo sapiens
  misc_RNA (1)...(19): siRNA sense strand
ccagauuugcuauuggauu

SEQ ID NO: 330895 - RNA, 19 nt, Homo sapiens
  misc_RNA (1)...(19): siRNA sense strand
gccaagcaauaucugucuu

SEQ ID NO: 330896 - RNA, 19 nt, Homo sapiens
  misc_RNA (1)...(19): siRNA sense strand
ugacagcagguucagcauu

SEQ ID NO: 330897 - RNA, 19 nt, Homo sapiens
  misc_RNA (1)...(19): siRNA sense strand
gacucagggucuucaggaa

SEQ ID NO: 330898 - RNA, 19 nt, Homo sapiens
  misc_RNA (1)...(19): siRNA sense strand
gcaggugggcaucuacauc

SEQ ID NO: 330899 - RNA, 19 nt, Homo sapiens
  misc_RNA (1)...(19): siRNA sense strand
ggaacuccacugcccacuu

SEQ ID NO: 330900 - RNA, 19 nt, Homo sapiens
  misc_RNA (1)...(19): siRNA sense strand
aagcccaaguuuaaagaug

SEQ ID NO: 330901 - RNA, 19 nt, Homo sapiens
  misc_RNA (1)...(19): siRNA sense strand
cccagucuacccucaauuu

SEQ ID NO: 330902 - RNA, 19 nt, Homo sapiens
  misc_RNA (1)...(19): siRNA sense strand
ugacaucggcauggauuau

SEQ ID NO: 330903 - RNA, 19 nt, Homo sapiens
  misc_RNA (1)...(19): siRNA sense strand
ucaacuacccuuucucaac

SEQ ID NO: 330904 - RNA, 19 nt, Homo sapiens
  misc_RNA (1)...(19): siRNA sense strand
ggccaacgacuccacuuca

SEQ ID NO: 330905 - RNA, 19 nt, Homo sapiens
  misc_RNA (1)...(19): siRNA sense strand
agccgaagccaaauuagaa

SEQ ID NO: 330906 - RNA, 19 nt, Homo sapiens
  misc_RNA (1)...(19): siRNA sense strand
aauaugcccagauuugcua

SEQ ID NO: 330907 - RNA, 19 nt, Homo sapiens
  misc_RNA (1)...(19): siRNA sense strand
uaugugaggauguggaaga

SEQ ID NO: 330908 - RNA, 19 nt, Homo sapiens
  misc_RNA (1)...(19): siRNA sense strand
gggugagcccuccugcuaa

SEQ ID NO: 330909 - RNA, 19 nt, Homo sapiens
  misc_RNA (1)...(19): siRNA sense strand
ugcccgagcagaugaaauu

SEQ ID NO: 330910 - RNA, 19 nt, Homo sapiens
  misc_RNA (1)...(19): siRNA sense strand
caggaaagucucgaaggaa

SEQ ID NO: 330911 - RNA, 19 nt, Homo sapiens
  misc_RNA (1)...(19): siRNA sense strand
gucagaaucacuccucuca

SEQ ID NO: 330912 - RNA, 19 nt, Homo sapiens
  misc_RNA (1)...(19): siRNA sense strand
ccuaugacuugcucuacca

SEQ ID NO: 330913 - RNA, 19 nt, Homo sapiens
  misc_RNA (1)...(19): siRNA sense strand
uuacgaagaggccaagcaa

SEQ ID NO: 330914 - RNA, 19 nt, Homo sapiens
  misc_RNA (1)...(19): siRNA sense strand
cucaacaucagugaaguua

SEQ ID NO: 330915 - RNA, 19 nt, Homo sapiens
  misc_RNA (1)...(19): siRNA sense strand
uuucugcucugugcuguug

SEQ ID NO: 330916 - RNA, 19 nt, Homo sapiens
  misc_RNA (1)...(19): siRNA sense strand
ccucagcaguaguggagau

SEQ ID NO: 330917 - RNA, 19 nt, Homo sapiens
  misc_RNA (1)...(19): siRNA sense strand
gcggcagauuuauggcuau

SEQ ID NO: 330918 - RNA, 19 nt, Homo sapiens
  misc_RNA (1)...(19): siRNA sense strand
ggacuuccugcucaacuac

SEQ ID NO: 330919 - RNA, 19 nt, Homo sapiens
  misc_RNA (1)...(19): siRNA sense strand
gccaacgacuccacuucag

SEQ ID NO: 330920 - RNA, 19 nt, Homo sapiens
  misc_RNA (1)...(19): siRNA sense strand
aauggcagccgcacagaga

SEQ ID NO: 330921 - RNA, 19 nt, Homo sapiens
  misc_RNA (1)...(19): siRNA sense strand
accaguggguggacaugaa

SEQ ID NO: 330922 - RNA, 19 nt, Homo sapiens
  misc_RNA (1)...(19): siRNA sense strand
ugauuaugcccuccuggaa

SEQ ID NO: 330923 - RNA, 19 nt, Homo sapiens
  misc_RNA (1)...(19): siRNA sense strand
cacagcugcccacugcaua

SEQ ID NO: 330924 - RNA, 19 nt, Homo sapiens
  misc_RNA (1)...(19): siRNA sense strand
aaugacaucggcauggauu

SEQ ID NO: 330925 - RNA, 19 nt, Homo sapiens
  misc_RNA (1)...(19): siRNA sense strand
ggagaaagaugaaagaauc

SEQ ID NO: 330926 - RNA, 19 nt, Homo sapiens
  misc_RNA (1)...(19): siRNA sense strand
agaaugaaguugcugauua

SEQ ID NO: 330927 - RNA, 19 nt, Homo sapiens
  misc_RNA (1)...(19): siRNA sense strand
gaaugaaguugcugauuau

SEQ ID NO: 330928 - RNA, 19 nt, Homo sapiens
  misc_RNA (1)...(19): siRNA sense strand
ccaaagaagugacucgaaa

SEQ ID NO: 330929 - RNA, 19 nt, Homo sapiens
  misc_RNA (1)...(19): siRNA sense strand
ugaaguugcugauuaugaa

SEQ ID NO: 330930 - RNA, 19 nt, Homo sapiens
  misc_RNA (1)...(19): siRNA sense strand
gaagaagaaugaaguugcu

SEQ ID NO: 330931 - RNA, 19 nt, Homo sapiens
  misc_RNA (1)...(19): siRNA sense strand
gaaggagaaagaugaaaga

SEQ ID NO: 330932 - RNA, 19 nt, Homo sapiens
  misc_RNA (1)...(19): siRNA sense strand
gcauauggaucuuauucag

SEQ ID NO: 330933 - RNA, 19 nt, Homo sapiens
  misc_RNA (1)...(19): siRNA sense strand
guccauaagugcuucauca

SEQ ID NO: 330934 - RNA, 19 nt, Homo sapiens
  misc_RNA (1)...(19): siRNA sense strand
gcacaaaguagcacagaag

SEQ ID NO: 330935 - RNA, 19 nt, Homo sapiens
  misc_RNA (1)...(19): siRNA sense strand
acagugaacuacauauugu

SEQ ID NO: 330936 - RNA, 19 nt, Homo sapiens
  misc_RNA (1)...(19): siRNA sense strand
gaacuacauauuguccaua

SEQ ID NO: 330937 - RNA, 19 nt, Homo sapiens
  misc_RNA (1)...(19): siRNA sense strand
ugaaauuuguucucaagca

SEQ ID NO: 330938 - RNA, 19 nt, Homo sapiens
  misc_RNA (1)...(19): siRNA sense strand
ggaaggagaaagaugaaag

SEQ ID NO: 330939 - RNA, 19 nt, Homo sapiens
  misc_RNA (1)...(19): siRNA sense strand
ccacagugaacuacauauu

SEQ ID NO: 330940 - RNA, 19 nt, Homo sapiens
  misc_RNA (1)...(19): siRNA sense strand
gcuccaaacagcagucuga

SEQ ID NO: 330941 - RNA, 19 nt, Homo sapiens
  misc_RNA (1)...(19): siRNA sense strand
cauuguugcuuccuucuuc

SEQ ID NO: 330942 - RNA, 19 nt, Homo sapiens
  misc_RNA (1)...(19): siRNA sense strand
gaagaaugaaguugcugau

SEQ ID NO: 330943 - RNA, 19 nt, Homo sapiens
  misc_RNA (1)...(19): siRNA sense strand
aguaagcacauauuuggua

SEQ ID NO: 330944 - RNA, 19 nt, Homo sapiens
  misc_RNA (1)...(19): siRNA sense strand
cacagugaacuacauauug

SEQ ID NO: 330945 - RNA, 19 nt, Homo sapiens
  misc_RNA (1)...(19): siRNA sense strand
cuaguaagcacauauuugg

SEQ ID NO: 330946 - RNA, 19 nt, Homo sapiens
  misc_RNA (1)...(19): siRNA sense strand
gaaagaugucucggaagga

SEQ ID NO: 330947 - RNA, 19 nt, Homo sapiens
  misc_RNA (1)...(19): siRNA sense strand
cuuauucagucugcuguuu

SEQ ID NO: 330948 - RNA, 19 nt, Homo sapiens
  misc_RNA (1)...(19): siRNA sense strand
cuacauauuguccauaagu

SEQ ID NO: 330949 - RNA, 19 nt, Homo sapiens
  misc_RNA (1)...(19): siRNA sense strand
guugcuuccuucuucauau

SEQ ID NO: 330950 - RNA, 19 nt, Homo sapiens
  misc_RNA (1)...(19): siRNA sense strand
gcugauaauagaaagaugu

SEQ ID NO: 330951 - RNA, 19 nt, Homo sapiens
  misc_RNA (1)...(19): siRNA sense strand
ccuaguaagcacauauuug

SEQ ID NO: 330952 - RNA, 19 nt, Homo sapiens
  misc_RNA (1)...(19): siRNA sense strand
ugaacuacauauuguccau

SEQ ID NO: 330953 - RNA, 19 nt, Homo sapiens
  misc_RNA (1)...(19): siRNA sense strand
uucugaagcugauaauaga

SEQ ID NO: 330954 - RNA, 19 nt, Homo sapiens
  misc_RNA (1)...(19): siRNA sense strand
ugugaaauuuguucucaag

SEQ ID NO: 330955 - RNA, 19 nt, Homo sapiens
  misc_RNA (1)...(19): siRNA sense strand
gaagcugauaauagaaaga

SEQ ID NO: 330956 - RNA, 19 nt, Homo sapiens
  misc_RNA (1)...(19): siRNA sense strand
ugucuacuggcuccaaaua

SEQ ID NO: 330957 - RNA, 19 nt, Homo sapiens
  misc_RNA (1)...(19): siRNA sense strand
ugguuauacuggcgaauau

SEQ ID NO: 330958 - RNA, 19 nt, Homo sapiens
  misc_RNA (1)...(19): siRNA sense strand
gcuuccuucuucauauuga

SEQ ID NO: 330959 - RNA, 19 nt, Homo sapiens
  misc_RNA (1)...(19): siRNA sense strand
gaugcuguuuccaaagaag

SEQ ID NO: 330960 - RNA, 19 nt, Homo sapiens
  misc_RNA (1)...(19): siRNA sense strand
caucuucuauaacaacacu

SEQ ID NO: 330961 - RNA, 19 nt, Homo sapiens
  misc_RNA (1)...(19): siRNA sense strand
uacauauuguccauaagug

SEQ ID NO: 330962 - RNA, 19 nt, Homo sapiens
  misc_RNA (1)...(19): siRNA sense strand
ugaagcugauaauagaaag

SEQ ID NO: 330963 - RNA, 19 nt, Homo sapiens
  misc_RNA (1)...(19): siRNA sense strand
uugcuuccuucuucauauu

SEQ ID NO: 330964 - RNA, 19 nt, Homo sapiens
  misc_RNA (1)...(19): siRNA sense strand
gguagccuuugcauacaag

SEQ ID NO: 330965 - RNA, 19 nt, Homo sapiens
  misc_RNA (1)...(19): siRNA sense strand
uggcauauggaucuuauuc

SEQ ID NO: 330966 - RNA, 19 nt, Homo sapiens
  misc_RNA (1)...(19): siRNA sense strand
cuaaaggcagcuccaaaca

SEQ ID NO: 330967 - RNA, 19 nt, Homo sapiens
  misc_RNA (1)...(19): siRNA sense strand
uuucugaagcugauaauag

SEQ ID NO: 330968 - RNA, 19 nt, Homo sapiens
  misc_RNA (1)...(19): siRNA sense strand
cugaagcugauaauagaaa

SEQ ID NO: 330969 - RNA, 19 nt, Homo sapiens
  misc_RNA (1)...(19): siRNA sense strand
gugaugacccuaguaagca

SEQ ID NO: 330970 - RNA, 19 nt, Homo sapiens
  misc_RNA (1)...(19): siRNA sense strand
gauuaugaagcuacaacau

SEQ ID NO: 330971 - RNA, 19 nt, Homo sapiens
  misc_RNA (1)...(19): siRNA sense strand
gaaugugaaauuuguucuc

SEQ ID NO: 330972 - RNA, 19 nt, Homo sapiens
  misc_RNA (1)...(19): siRNA sense strand
gaaguugcugauuaugaag

SEQ ID NO: 330973 - RNA, 19 nt, Homo sapiens
  misc_RNA (1)...(19): siRNA sense strand
uaaaggcagcuccaaacag

SEQ ID NO: 330974 - RNA, 19 nt, Homo sapiens
  misc_RNA (1)...(19): siRNA sense strand
cacaaaguagcacagaaga

SEQ ID NO: 330975 - RNA, 19 nt, Homo sapiens
  misc_RNA (1)...(19): siRNA sense strand
caaagaagugacucgaaaa

SEQ ID NO: 330976 - RNA, 19 nt, Homo sapiens
  misc_RNA (1)...(19): siRNA sense strand
ggacaaauaugcuguguuu

SEQ ID NO: 330977 - RNA, 19 nt, Homo sapiens
  misc_RNA (1)...(19): siRNA sense strand
cagcaaauuugacuucuua

SEQ ID NO: 330978 - RNA, 19 nt, Homo sapiens
  misc_RNA (1)...(19): siRNA sense strand
ggagaaagcuuugcagaau

SEQ ID NO: 330979 - RNA, 19 nt, Homo sapiens
  misc_RNA (1)...(19): siRNA sense strand
uaagaaguaucccaguuua

SEQ ID NO: 330980 - RNA, 19 nt, Homo sapiens
  misc_RNA (1)...(19): siRNA sense strand
gaggagaucuuaagcaugu

SEQ ID NO: 330981 - RNA, 19 nt, Homo sapiens
  misc_RNA (1)...(19): siRNA sense strand
gaaauccagugaagaaaug

SEQ ID NO: 330982 - RNA, 19 nt, Homo sapiens
  misc_RNA (1)...(19): siRNA sense strand
gaacuuagcagaccuagau

SEQ ID NO: 330983 - RNA, 19 nt, Homo sapiens
  misc_RNA (1)...(19): siRNA sense strand
ggacaucgauaaaguaugg

SEQ ID NO: 330984 - RNA, 19 nt, Homo sapiens
  misc_RNA (1)...(19): siRNA sense strand
gaacagacagcagagaaua

SEQ ID NO: 330985 - RNA, 19 nt, Homo sapiens
  misc_RNA (1)...(19): siRNA sense strand
caaauaugaugcccuuaaa

SEQ ID NO: 330986 - RNA, 19 nt, Homo sapiens
  misc_RNA (1)...(19): siRNA sense strand
ccaauacucugaaugagaa

SEQ ID NO: 330987 - RNA, 19 nt, Homo sapiens
  misc_RNA (1)...(19): siRNA sense strand
gaguagagaugaugcuuug

SEQ ID NO: 330988 - RNA, 19 nt, Homo sapiens
  misc_RNA (1)...(19): siRNA sense strand
gagaaagcuuugcagaauu

SEQ ID NO: 330989 - RNA, 19 nt, Homo sapiens
  misc_RNA (1)...(19): siRNA sense strand
gaaauaagccguucuucuc

SEQ ID NO: 330990 - RNA, 19 nt, Homo sapiens
  misc_RNA (1)...(19): siRNA sense strand
uugaagaccugaaagauaa

SEQ ID NO: 330991 - RNA, 19 nt, Homo sapiens
  misc_RNA (1)...(19): siRNA sense strand
gggaaugccuuaccuagga

SEQ ID NO: 330992 - RNA, 19 nt, Homo sapiens
  misc_RNA (1)...(19): siRNA sense strand
caaguacgaugucuucaga

SEQ ID NO: 330993 - RNA, 19 nt, Homo sapiens
  misc_RNA (1)...(19): siRNA sense strand
ggaaacucuuggacagaua

SEQ ID NO: 330994 - RNA, 19 nt, Homo sapiens
  misc_RNA (1)...(19): siRNA sense strand
ugauagcucuuuggauuua

SEQ ID NO: 330995 - RNA, 19 nt, Homo sapiens
  misc_RNA (1)...(19): siRNA sense strand
ucugauagcucuuuggauu

SEQ ID NO: 330996 - RNA, 19 nt, Homo sapiens
  misc_RNA (1)...(19): siRNA sense strand
ugacaucucucuccaaagu

SEQ ID NO: 330997 - RNA, 19 nt, Homo sapiens
  misc_RNA (1)...(19): siRNA sense strand
ggaagggucuggacuaggu

SEQ ID NO: 330998 - RNA, 19 nt, Homo sapiens
  misc_RNA (1)...(19): siRNA sense strand
gaaggacaucgauaaagua

SEQ ID NO: 330999 - RNA, 19 nt, Homo sapiens
  misc_RNA (1)...(19): siRNA sense strand
aaagugagcuggcaaccuu

SEQ ID NO: 331000 - RNA, 19 nt, Homo sapiens
  misc_RNA (1)...(19): siRNA sense strand
caaagaagacucugcauca

SEQ ID NO: 331001 - RNA, 19 nt, Homo sapiens
  misc_RNA (1)...(19): siRNA sense strand
cagaaugccuccuuggauu

SEQ ID NO: 331002 - RNA, 19 nt, Homo sapiens
  misc_RNA (1)...(19): siRNA sense strand
gcagaaaacucucuccauu

SEQ ID NO: 331003 - RNA, 19 nt, Homo sapiens
  misc_RNA (1)...(19): siRNA sense strand
ggaauauucuggucuagca

SEQ ID NO: 331004 - RNA, 19 nt, Homo sapiens
  misc_RNA (1)...(19): siRNA sense strand
gaugaugguuucaccgauu

SEQ ID NO: 331005 - RNA, 19 nt, Homo sapiens
  misc_RNA (1)...(19): siRNA sense strand
uagcagaccuagauauguu

SEQ ID NO: 331006 - RNA, 19 nt, Homo sapiens
  misc_RNA (1)...(19): siRNA sense strand
guucaaggaucacacaaga

SEQ ID NO: 331007 - RNA, 19 nt, Homo sapiens
  misc_RNA (1)...(19): siRNA sense strand
ggacagauaugggccuuag

SEQ ID NO: 331008 - RNA, 19 nt, Homo sapiens
  misc_RNA (1)...(19): siRNA sense strand
uaacgaccuuuguaaguga

SEQ ID NO: 331009 - RNA, 19 nt, Homo sapiens
  misc_RNA (1)...(19): siRNA sense strand
ucaagaugcuucuaaguca

SEQ ID NO: 331010 - RNA, 19 nt, Homo sapiens
  misc_RNA (1)...(19): siRNA sense strand
guaagaaguaucccaguuu

SEQ ID NO: 331011 - RNA, 19 nt, Homo sapiens
  misc_RNA (1)...(19): siRNA sense strand
ugaaggacaucgauaaagu

SEQ ID NO: 331012 - RNA, 19 nt, Homo sapiens
  misc_RNA (1)...(19): siRNA sense strand
caaaugauaccuuaaaugg

SEQ ID NO: 331013 - RNA, 19 nt, Homo sapiens
  misc_RNA (1)...(19): siRNA sense strand
caugacaucucucuccaaa

SEQ ID NO: 331014 - RNA, 19 nt, Homo sapiens
  misc_RNA (1)...(19): siRNA sense strand
gcgagaaaccauugucuuu

SEQ ID NO: 331015 - RNA, 19 nt, Homo sapiens
  misc_RNA (1)...(19): siRNA sense strand
caaccuacccugcaaauca

SEQ ID NO: 331016 - RNA, 19 nt, Homo sapiens
  misc_RNA (1)...(19): siRNA sense strand
gaucaaaaccugucaauug

SEQ ID NO: 331017 - RNA, 19 nt, Homo sapiens
  misc_RNA (1)...(19): siRNA sense strand
ggaugacuuuggagaguuu

SEQ ID NO: 331018 - RNA, 19 nt, Homo sapiens
  misc_RNA (1)...(19): siRNA sense strand
guaacgaccuuuguaagug

SEQ ID NO: 331019 - RNA, 19 nt, Homo sapiens
  misc_RNA (1)...(19): siRNA sense strand
gaagaugcacucucuguuc

SEQ ID NO: 331020 - RNA, 19 nt, Homo sapiens
  misc_RNA (1)...(19): siRNA sense strand
gcaaggaggacucugaaga

SEQ ID NO: 331021 - RNA, 19 nt, Homo sapiens
  misc_RNA (1)...(19): siRNA sense strand
gaauucagaucugcaggaa

SEQ ID NO: 331022 - RNA, 19 nt, Homo sapiens
  misc_RNA (1)...(19): siRNA sense strand
ggaggcggcuucauguuuc

SEQ ID NO: 331023 - RNA, 19 nt, Homo sapiens
  misc_RNA (1)...(19): siRNA sense strand
gcugacaaguccucugaaa

SEQ ID NO: 331024 - RNA, 19 nt, Homo sapiens
  misc_RNA (1)...(19): siRNA sense strand
ccaaggaccuauugcuaug

SEQ ID NO: 331025 - RNA, 19 nt, Homo sapiens
  misc_RNA (1)...(19): siRNA sense strand
guagauggauguguaagug

SEQ ID NO: 331026 - RNA, 19 nt, Homo sapiens
  misc_RNA (1)...(19): siRNA sense strand
gagccuuggugauaaagaa

SEQ ID NO: 331027 - RNA, 19 nt, Homo sapiens
  misc_RNA (1)...(19): siRNA sense strand
cagcagagaauaaaccuuu

SEQ ID NO: 331028 - RNA, 19 nt, Homo sapiens
  misc_RNA (1)...(19): siRNA sense strand
ggauuuacaaugagaguuu

SEQ ID NO: 331029 - RNA, 19 nt, Homo sapiens
  misc_RNA (1)...(19): siRNA sense strand
gagugugccucuugaaugu

SEQ ID NO: 331030 - RNA, 19 nt, Homo sapiens
  misc_RNA (1)...(19): siRNA sense strand
gcaaaugauaccuuaaaug

SEQ ID NO: 331031 - RNA, 19 nt, Homo sapiens
  misc_RNA (1)...(19): siRNA sense strand
guugaagaccugaaagaua

SEQ ID NO: 331032 - RNA, 19 nt, Homo sapiens
  misc_RNA (1)...(19): siRNA sense strand
ggaggacucugaagaugca

SEQ ID NO: 331033 - RNA, 19 nt, Homo sapiens
  misc_RNA (1)...(19): siRNA sense strand
gaaugccuccuuggauuua

SEQ ID NO: 331034 - RNA, 19 nt, Homo sapiens
  misc_RNA (1)...(19): siRNA sense strand
gaugaaaacucgcuggauu

SEQ ID NO: 331035 - RNA, 19 nt, Homo sapiens
  misc_RNA (1)...(19): siRNA sense strand
gggaggagaucuuaagcau

SEQ ID NO: 331036 - RNA, 19 nt, Homo sapiens
  misc_RNA (1)...(19): siRNA sense strand
ggugauaaauauagugcuu

SEQ ID NO: 331037 - RNA, 19 nt, Homo sapiens
  misc_RNA (1)...(19): siRNA sense strand
aaugaguccugaugcuuua

SEQ ID NO: 331038 - RNA, 19 nt, Homo sapiens
  misc_RNA (1)...(19): siRNA sense strand
uggaauagauacugccaaa

SEQ ID NO: 331039 - RNA, 19 nt, Homo sapiens
  misc_RNA (1)...(19): siRNA sense strand
gauaugggccuuagcuaau

SEQ ID NO: 331040 - RNA, 19 nt, Homo sapiens
  misc_RNA (1)...(19): siRNA sense strand
gaucaacugugucgaacca

SEQ ID NO: 331041 - RNA, 19 nt, Homo sapiens
  misc_RNA (1)...(19): siRNA sense strand
gcauaugaauggcagagau

SEQ ID NO: 331042 - RNA, 19 nt, Homo sapiens
  misc_RNA (1)...(19): siRNA sense strand
agaaagcuuugcagaauuc

SEQ ID NO: 331043 - RNA, 19 nt, Homo sapiens
  misc_RNA (1)...(19): siRNA sense strand
ggagagaagaguagagaug

SEQ ID NO: 331044 - RNA, 19 nt, Homo sapiens
  misc_RNA (1)...(19): siRNA sense strand
gagauccuggugauaaaua

SEQ ID NO: 331045 - RNA, 19 nt, Homo sapiens
  misc_RNA (1)...(19): siRNA sense strand
aagaugacuuccaggauuu

SEQ ID NO: 331046 - RNA, 19 nt, Homo sapiens
  misc_RNA (1)...(19): siRNA sense strand
gaauagauacugccaaacu

SEQ ID NO: 331047 - RNA, 19 nt, Homo sapiens
  misc_RNA (1)...(19): siRNA sense strand
ccaguuuaauggccaguaa

SEQ ID NO: 331048 - RNA, 19 nt, Homo sapiens
  misc_RNA (1)...(19): siRNA sense strand
gaaguaucccaguuuaaug

SEQ ID NO: 331049 - RNA, 19 nt, Homo sapiens
  misc_RNA (1)...(19): siRNA sense strand
cagcuccuauuccaacuuu

SEQ ID NO: 331050 - RNA, 19 nt, Homo sapiens
  misc_RNA (1)...(19): siRNA sense strand
gauaaaguauggaauaacc

SEQ ID NO: 331051 - RNA, 19 nt, Homo sapiens
  misc_RNA (1)...(19): siRNA sense strand
caggaugacuuugcagauu

SEQ ID NO: 331052 - RNA, 19 nt, Homo sapiens
  misc_RNA (1)...(19): siRNA sense strand
uuaaguggcuuuucuauga

SEQ ID NO: 331053 - RNA, 19 nt, Homo sapiens
  misc_RNA (1)...(19): siRNA sense strand
gagagaagaguagagauga

SEQ ID NO: 331054 - RNA, 19 nt, Homo sapiens
  misc_RNA (1)...(19): siRNA sense strand
cucaaggcauggaauauuu

SEQ ID NO: 331055 - RNA, 19 nt, Homo sapiens
  misc_RNA (1)...(19): siRNA sense strand
gggaggcggcuucauguuu

SEQ ID NO: 331056 - RNA, 19 nt, Homo sapiens
  misc_RNA (1)...(19): siRNA sense strand
ucccagcucuugccaguuu

SEQ ID NO: 331057 - RNA, 19 nt, Homo sapiens
  misc_RNA (1)...(19): siRNA sense strand
gagcacacuuacaagcuau

SEQ ID NO: 331058 - RNA, 19 nt, Homo sapiens
  misc_RNA (1)...(19): siRNA sense strand
gacaugaaauuggcugaug

SEQ ID NO: 331059 - RNA, 19 nt, Homo sapiens
  misc_RNA (1)...(19): siRNA sense strand
ugccuucaauggacaaaua

SEQ ID NO: 331060 - RNA, 19 nt, Homo sapiens
  misc_RNA (1)...(19): siRNA sense strand
acaaauaugaugcccuuaa

SEQ ID NO: 331061 - RNA, 19 nt, Homo sapiens
  misc_RNA (1)...(19): siRNA sense strand
ggagugugccucuugaaug

SEQ ID NO: 331062 - RNA, 19 nt, Homo sapiens
  misc_RNA (1)...(19): siRNA sense strand
gagcuugccuguggagugu

SEQ ID NO: 331063 - RNA, 19 nt, Homo sapiens
  misc_RNA (1)...(19): siRNA sense strand
uaaauggaaucaguaguag

SEQ ID NO: 331064 - RNA, 19 nt, Homo sapiens
  misc_RNA (1)...(19): siRNA sense strand
ggcaaaugauaccuuaaau

SEQ ID NO: 331065 - RNA, 19 nt, Homo sapiens
  misc_RNA (1)...(19): siRNA sense strand
ugagcacacuuacaagcua

SEQ ID NO: 331066 - RNA, 19 nt, Homo sapiens
  misc_RNA (1)...(19): siRNA sense strand
gggaaacucuuggacagau

SEQ ID NO: 331067 - RNA, 19 nt, Homo sapiens
  misc_RNA (1)...(19): siRNA sense strand
aaacaacaaacacaaguga

SEQ ID NO: 331068 - RNA, 19 nt, Homo sapiens
  misc_RNA (1)...(19): siRNA sense strand
ucagugauuuccaagaguu

SEQ ID NO: 331069 - RNA, 19 nt, Homo sapiens
  misc_RNA (1)...(19): siRNA sense strand
caaugaguccugaugcuuu

SEQ ID NO: 331070 - RNA, 19 nt, Homo sapiens
  misc_RNA (1)...(19): siRNA sense strand
gaaacaacaaacacaagug

SEQ ID NO: 331071 - RNA, 19 nt, Homo sapiens
  misc_RNA (1)...(19): siRNA sense strand
gcucaaggcauggaauauu

SEQ ID NO: 331072 - RNA, 19 nt, Homo sapiens
  misc_RNA (1)...(19): siRNA sense strand
ggagugcccugaaugucau

SEQ ID NO: 331073 - RNA, 19 nt, Homo sapiens
  misc_RNA (1)...(19): siRNA sense strand
agaaagagacuucauuugg

SEQ ID NO: 331074 - RNA, 19 nt, Homo sapiens
  misc_RNA (1)...(19): siRNA sense strand
ucagugaaguccuuagauc

SEQ ID NO: 331075 - RNA, 19 nt, Homo sapiens
  misc_RNA (1)...(19): siRNA sense strand
aaagccggaugacaaauau

SEQ ID NO: 331076 - RNA, 19 nt, Homo sapiens
  misc_RNA (1)...(19): siRNA sense strand
ggacaaauaugcuguguuu

SEQ ID NO: 331077 - RNA, 19 nt, Homo sapiens
  misc_RNA (1)...(19): siRNA sense strand
cagcaaauuugacuucuua

SEQ ID NO: 331078 - RNA, 19 nt, Homo sapiens
  misc_RNA (1)...(19): siRNA sense strand
ggagaaagcuuugcagaau

SEQ ID NO: 331079 - RNA, 19 nt, Homo sapiens
  misc_RNA (1)...(19): siRNA sense strand
uaagaaguaucccaguuua

SEQ ID NO: 331080 - RNA, 19 nt, Homo sapiens
  misc_RNA (1)...(19): siRNA sense strand
gaggagaucuuaagcaugu

SEQ ID NO: 331081 - RNA, 19 nt, Homo sapiens
  misc_RNA (1)...(19): siRNA sense strand
gaaauccagugaagaaaug

SEQ ID NO: 331082 - RNA, 19 nt, Homo sapiens
  misc_RNA (1)...(19): siRNA sense strand
gaacuuagcagaccuagau

SEQ ID NO: 331083 - RNA, 19 nt, Homo sapiens
  misc_RNA (1)...(19): siRNA sense strand
ggacaucgauaaaguaugg

SEQ ID NO: 331084 - RNA, 19 nt, Homo sapiens
  misc_RNA (1)...(19): siRNA sense strand
gaacagacagcagagaaua

SEQ ID NO: 331085 - RNA, 19 nt, Homo sapiens
  misc_RNA (1)...(19): siRNA sense strand
caaauaugaugcccuuaaa

SEQ ID NO: 331086 - RNA, 19 nt, Homo sapiens
  misc_RNA (1)...(19): siRNA sense strand
ccaauacucugaaugagaa

SEQ ID NO: 331087 - RNA, 19 nt, Homo sapiens
  misc_RNA (1)...(19): siRNA sense strand
gaguagagaugaugcuuug

SEQ ID NO: 331088 - RNA, 19 nt, Homo sapiens
  misc_RNA (1)...(19): siRNA sense strand
gagaaagcuuugcagaauu

SEQ ID NO: 331089 - RNA, 19 nt, Homo sapiens
  misc_RNA (1)...(19): siRNA sense strand
gaaauaagccguucuucuc

SEQ ID NO: 331090 - RNA, 19 nt, Homo sapiens
  misc_RNA (1)...(19): siRNA sense strand
uugaagaccugaaagauaa

SEQ ID NO: 331091 - RNA, 19 nt, Homo sapiens
  misc_RNA (1)...(19): siRNA sense strand
gggaaugccuuaccuagga

SEQ ID NO: 331092 - RNA, 19 nt, Homo sapiens
  misc_RNA (1)...(19): siRNA sense strand
caaguacgaugucuucaga

SEQ ID NO: 331093 - RNA, 19 nt, Homo sapiens
  misc_RNA (1)...(19): siRNA sense strand
ggaaacucuuggacagaua

SEQ ID NO: 331094 - RNA, 19 nt, Homo sapiens
  misc_RNA (1)...(19): siRNA sense strand
ugauagcucuuuggauuua

SEQ ID NO: 331095 - RNA, 19 nt, Homo sapiens
  misc_RNA (1)...(19): siRNA sense strand
ucugauagcucuuuggauu

SEQ ID NO: 331096 - RNA, 19 nt, Homo sapiens
  misc_RNA (1)...(19): siRNA sense strand
ugacaucucucuccaaagu

SEQ ID NO: 331097 - RNA, 19 nt, Homo sapiens
  misc_RNA (1)...(19): siRNA sense strand
ggaagggucuggacuaggu

SEQ ID NO: 331098 - RNA, 19 nt, Homo sapiens
  misc_RNA (1)...(19): siRNA sense strand
gaaggacaucgauaaagua

SEQ ID NO: 331099 - RNA, 19 nt, Homo sapiens
  misc_RNA (1)...(19): siRNA sense strand
aaagugagcuggcaaccuu

SEQ ID NO: 331100 - RNA, 19 nt, Homo sapiens
  misc_RNA (1)...(19): siRNA sense strand
caaagaagacucugcauca

SEQ ID NO: 331101 - RNA, 19 nt, Homo sapiens
  misc_RNA (1)...(19): siRNA sense strand
cagaaugccuccuuggauu

SEQ ID NO: 331102 - RNA, 19 nt, Homo sapiens
  misc_RNA (1)...(19): siRNA sense strand
gcagaaaacucucuccauu

SEQ ID NO: 331103 - RNA, 19 nt, Homo sapiens
  misc_RNA (1)...(19): siRNA sense strand
ggaauauucuggucuagca

SEQ ID NO: 331104 - RNA, 19 nt, Homo sapiens
  misc_RNA (1)...(19): siRNA sense strand
gaugaugguuucaccgauu

SEQ ID NO: 331105 - RNA, 19 nt, Homo sapiens
  misc_RNA (1)...(19): siRNA sense strand
uagcagaccuagauauguu

SEQ ID NO: 331106 - RNA, 19 nt, Homo sapiens
  misc_RNA (1)...(19): siRNA sense strand
guucaaggaucacacaaga

SEQ ID NO: 331107 - RNA, 19 nt, Homo sapiens
  misc_RNA (1)...(19): siRNA sense strand
ggacagauaugggccuuag

SEQ ID NO: 331108 - RNA, 19 nt, Homo sapiens
  misc_RNA (1)...(19): siRNA sense strand
uaacgaccuuuguaaguga

SEQ ID NO: 331109 - RNA, 19 nt, Homo sapiens
  misc_RNA (1)...(19): siRNA sense strand
ucaagaugcuucuaaguca

SEQ ID NO: 331110 - RNA, 19 nt, Homo sapiens
  misc_RNA (1)...(19): siRNA sense strand
guaagaaguaucccaguuu

SEQ ID NO: 331111 - RNA, 19 nt, Homo sapiens
  misc_RNA (1)...(19): siRNA sense strand
ugaaggacaucgauaaagu

SEQ ID NO: 331112 - RNA, 19 nt, Homo sapiens
  misc_RNA (1)...(19): siRNA sense strand
caaaugauaccuuaaaugg

SEQ ID NO: 331113 - RNA, 19 nt, Homo sapiens
  misc_RNA (1)...(19): siRNA sense strand
caugacaucucucuccaaa

SEQ ID NO: 331114 - RNA, 19 nt, Homo sapiens
  misc_RNA (1)...(19): siRNA sense strand
gcgagaaaccauugucuuu

SEQ ID NO: 331115 - RNA, 19 nt, Homo sapiens
  misc_RNA (1)...(19): siRNA sense strand
caaccuacccugcaaauca

SEQ ID NO: 331116 - RNA, 19 nt, Homo sapiens
  misc_RNA (1)...(19): siRNA sense strand
gaucaaaaccugucaauug

SEQ ID NO: 331117 - RNA, 19 nt, Homo sapiens
  misc_RNA (1)...(19): siRNA sense strand
ggaugacuuuggagaguuu

SEQ ID NO: 331118 - RNA, 19 nt, Homo sapiens
  misc_RNA (1)...(19): siRNA sense strand
guaacgaccuuuguaagug

SEQ ID NO: 331119 - RNA, 19 nt, Homo sapiens
  misc_RNA (1)...(19): siRNA sense strand
gaagaugcacucucuguuc

SEQ ID NO: 331120 - RNA, 19 nt, Homo sapiens
  misc_RNA (1)...(19): siRNA sense strand
gcaaggaggacucugaaga

SEQ ID NO: 331121 - RNA, 19 nt, Homo sapiens
  misc_RNA (1)...(19): siRNA sense strand
gaauucagaucugcaggaa

SEQ ID NO: 331122 - RNA, 19 nt, Homo sapiens
  misc_RNA (1)...(19): siRNA sense strand
ggaggcggcuucauguuuc

SEQ ID NO: 331123 - RNA, 19 nt, Homo sapiens
  misc_RNA (1)...(19): siRNA sense strand
gcugacaaguccucugaaa

SEQ ID NO: 331124 - RNA, 19 nt, Homo sapiens
  misc_RNA (1)...(19): siRNA sense strand
ccaaggaccuauugcuaug

SEQ ID NO: 331125 - RNA, 19 nt, Homo sapiens
  misc_RNA (1)...(19): siRNA sense strand
guagauggauguguaagug

SEQ ID NO: 331126 - RNA, 19 nt, Homo sapiens
  misc_RNA (1)...(19): siRNA sense strand
gagccuuggugauaaagaa

SEQ ID NO: 331127 - RNA, 19 nt, Homo sapiens
  misc_RNA (1)...(19): siRNA sense strand
cagcagagaauaaaccuuu

SEQ ID NO: 331128 - RNA, 19 nt, Homo sapiens
  misc_RNA (1)...(19): siRNA sense strand
ggauuuacaaugagaguuu

SEQ ID NO: 331129 - RNA, 19 nt, Homo sapiens
  misc_RNA (1)...(19): siRNA sense strand
gagugugccucuugaaugu

SEQ ID NO: 331130 - RNA, 19 nt, Homo sapiens
  misc_RNA (1)...(19): siRNA sense strand
gcaaaugauaccuuaaaug

SEQ ID NO: 331131 - RNA, 19 nt, Homo sapiens
  misc_RNA (1)...(19): siRNA sense strand
guugaagaccugaaagaua

SEQ ID NO: 331132 - RNA, 19 nt, Homo sapiens
  misc_RNA (1)...(19): siRNA sense strand
ggaggacucugaagaugca

SEQ ID NO: 331133 - RNA, 19 nt, Homo sapiens
  misc_RNA (1)...(19): siRNA sense strand
gaaugccuccuuggauuua

SEQ ID NO: 331134 - RNA, 19 nt, Homo sapiens
  misc_RNA (1)...(19): siRNA sense strand
gaugaaaacucgcuggauu

SEQ ID NO: 331135 - RNA, 19 nt, Homo sapiens
  misc_RNA (1)...(19): siRNA sense strand
gggaggagaucuuaagcau

SEQ ID NO: 331136 - RNA, 19 nt, Homo sapiens
  misc_RNA (1)...(19): siRNA sense strand
ggugauaaauauagugcuu

SEQ ID NO: 331137 - RNA, 19 nt, Homo sapiens
  misc_RNA (1)...(19): siRNA sense strand
aaugaguccugaugcuuua

SEQ ID NO: 331138 - RNA, 19 nt, Homo sapiens
  misc_RNA (1)...(19): siRNA sense strand
uggaauagauacugccaaa

SEQ ID NO: 331139 - RNA, 19 nt, Homo sapiens
  misc_RNA (1)...(19): siRNA sense strand
gauaugggccuuagcuaau

SEQ ID NO: 331140 - RNA, 19 nt, Homo sapiens
  misc_RNA (1)...(19): siRNA sense strand
gaucaacugugucgaacca

SEQ ID NO: 331141 - RNA, 19 nt, Homo sapiens
  misc_RNA (1)...(19): siRNA sense strand
gcauaugaauggcagagau

SEQ ID NO: 331142 - RNA, 19 nt, Homo sapiens
  misc_RNA (1)...(19): siRNA sense strand
agaaagcuuugcagaauuc

SEQ ID NO: 331143 - RNA, 19 nt, Homo sapiens
  misc_RNA (1)...(19): siRNA sense strand
ggagagaagaguagagaug

SEQ ID NO: 331144 - RNA, 19 nt, Homo sapiens
  misc_RNA (1)...(19): siRNA sense strand
gagauccuggugauaaaua

SEQ ID NO: 331145 - RNA, 19 nt, Homo sapiens
  misc_RNA (1)...(19): siRNA sense strand
aagaugacuuccaggauuu

SEQ ID NO: 331146 - RNA, 19 nt, Homo sapiens
  misc_RNA (1)...(19): siRNA sense strand
gaauagauacugccaaacu

SEQ ID NO: 331147 - RNA, 19 nt, Homo sapiens
  misc_RNA (1)...(19): siRNA sense strand
ccaguuuaauggccaguaa

SEQ ID NO: 331148 - RNA, 19 nt, Homo sapiens
  misc_RNA (1)...(19): siRNA sense strand
gaaguaucccaguuuaaug

SEQ ID NO: 331149 - RNA, 19 nt, Homo sapiens
  misc_RNA (1)...(19): siRNA sense strand
cagcuccuauuccaacuuu

SEQ ID NO: 331150 - RNA, 19 nt, Homo sapiens
  misc_RNA (1)...(19): siRNA sense strand
gauaaaguauggaauaacc

SEQ ID NO: 331151 - RNA, 19 nt, Homo sapiens
  misc_RNA (1)...(19): siRNA sense strand
caggaugacuuugcagauu

SEQ ID NO: 331152 - RNA, 19 nt, Homo sapiens
  misc_RNA (1)...(19): siRNA sense strand
uuaaguggcuuuucuauga

SEQ ID NO: 331153 - RNA, 19 nt, Homo sapiens
  misc_RNA (1)...(19): siRNA sense strand
gagagaagaguagagauga

SEQ ID NO: 331154 - RNA, 19 nt, Homo sapiens
  misc_RNA (1)...(19): siRNA sense strand
cucaaggcauggaauauuu

SEQ ID NO: 331155 - RNA, 19 nt, Homo sapiens
  misc_RNA (1)...(19): siRNA sense strand
gggaggcggcuucauguuu

SEQ ID NO: 331156 - RNA, 19 nt, Homo sapiens
  misc_RNA (1)...(19): siRNA sense strand
ucccagcucuugccaguuu

SEQ ID NO: 331157 - RNA, 19 nt, Homo sapiens
  misc_RNA (1)...(19): siRNA sense strand
gagcacacuuacaagcuau

SEQ ID NO: 331158 - RNA, 19 nt, Homo sapiens
  misc_RNA (1)...(19): siRNA sense strand
gacaugaaauuggcugaug

SEQ ID NO: 331159 - RNA, 19 nt, Homo sapiens
  misc_RNA (1)...(19): siRNA sense strand
ugccuucaauggacaaaua

SEQ ID NO: 331160 - RNA, 19 nt, Homo sapiens
  misc_RNA (1)...(19): siRNA sense strand
acaaauaugaugcccuuaa

SEQ ID NO: 331161 - RNA, 19 nt, Homo sapiens
  misc_RNA (1)...(19): siRNA sense strand
ggagugugccucuugaaug

SEQ ID NO: 331162 - RNA, 19 nt, Homo sapiens
  misc_RNA (1)...(19): siRNA sense strand
gagcuugccuguggagugu

SEQ ID NO: 331163 - RNA, 19 nt, Homo sapiens
  misc_RNA (1)...(19): siRNA sense strand
uaaauggaaucaguaguag

SEQ ID NO: 331164 - RNA, 19 nt, Homo sapiens
  misc_RNA (1)...(19): siRNA sense strand
ggcaaaugauaccuuaaau

SEQ ID NO: 331165 - RNA, 19 nt, Homo sapiens
  misc_RNA (1)...(19): siRNA sense strand
ugagcacacuuacaagcua

SEQ ID NO: 331166 - RNA, 19 nt, Homo sapiens
  misc_RNA (1)...(19): siRNA sense strand
gggaaacucuuggacagau

SEQ ID NO: 331167 - RNA, 19 nt, Homo sapiens
  misc_RNA (1)...(19): siRNA sense strand
aaacaacaaacacaaguga

SEQ ID NO: 331168 - RNA, 19 nt, Homo sapiens
  misc_RNA (1)...(19): siRNA sense strand
ucagugauuuccaagaguu

SEQ ID NO: 331169 - RNA, 19 nt, Homo sapiens
  misc_RNA (1)...(19): siRNA sense strand
caaugaguccugaugcuuu

SEQ ID NO: 331170 - RNA, 19 nt, Homo sapiens
  misc_RNA (1)...(19): siRNA sense strand
gaaacaacaaacacaagug

SEQ ID NO: 331171 - RNA, 19 nt, Homo sapiens
  misc_RNA (1)...(19): siRNA sense strand
gcucaaggcauggaauauu

SEQ ID NO: 331172 - RNA, 19 nt, Homo sapiens
  misc_RNA (1)...(19): siRNA sense strand
ggagugcccugaaugucau

SEQ ID NO: 331173 - RNA, 19 nt, Homo sapiens
  misc_RNA (1)...(19): siRNA sense strand
agaaagagacuucauuugg

SEQ ID NO: 331174 - RNA, 19 nt, Homo sapiens
  misc_RNA (1)...(19): siRNA sense strand
ucagugaaguccuuagauc

SEQ ID NO: 331175 - RNA, 19 nt, Homo sapiens
  misc_RNA (1)...(19): siRNA sense strand
aaagccggaugacaaauau

SEQ ID NO: 331176 - RNA, 19 nt, Homo sapiens
  misc_RNA (1)...(19): siRNA sense strand
guacaaggaugaccaacuc

SEQ ID NO: 331177 - RNA, 19 nt, Homo sapiens
  misc_RNA (1)...(19): siRNA sense strand
gggaagcagugccaaugaa

SEQ ID NO: 331178 - RNA, 19 nt, Homo sapiens
  misc_RNA (1)...(19): siRNA sense strand
gcacgguguucgaacugaa

SEQ ID NO: 331179 - RNA, 19 nt, Homo sapiens
  misc_RNA (1)...(19): siRNA sense strand
gggcagaugacaccuuuga

SEQ ID NO: 331180 - RNA, 19 nt, Homo sapiens
  misc_RNA (1)...(19): siRNA sense strand
ugaacaagccgugcaguga

SEQ ID NO: 331181 - RNA, 19 nt, Homo sapiens
  misc_RNA (1)...(19): siRNA sense strand
ccgggcagaugacaccuuu

SEQ ID NO: 331182 - RNA, 19 nt, Homo sapiens
  misc_RNA (1)...(19): siRNA sense strand
gaagcagugccaaugaaca

SEQ ID NO: 331183 - RNA, 19 nt, Homo sapiens
  misc_RNA (1)...(19): siRNA sense strand
ggacguguuccucaugauc

SEQ ID NO: 331184 - RNA, 19 nt, Homo sapiens
  misc_RNA (1)...(19): siRNA sense strand
ggaagcagugccaaugaac

SEQ ID NO: 331185 - RNA, 19 nt, Homo sapiens
  misc_RNA (1)...(19): siRNA sense strand
gagcugcccgaugugauga

SEQ ID NO: 331186 - RNA, 19 nt, Homo sapiens
  misc_RNA (1)...(19): siRNA sense strand
aagcagugccaaugaacaa

SEQ ID NO: 331187 - RNA, 19 nt, Homo sapiens
  misc_RNA (1)...(19): siRNA sense strand
ccagagcugcccgauguga

SEQ ID NO: 331188 - RNA, 19 nt, Homo sapiens
  misc_RNA (1)...(19): siRNA sense strand
ccagcacgguguucgaacu

SEQ ID NO: 331189 - RNA, 19 nt, Homo sapiens
  misc_RNA (1)...(19): siRNA sense strand
ggacagagauguuaagcua

SEQ ID NO: 331190 - RNA, 19 nt, Homo sapiens
  misc_RNA (1)...(19): siRNA sense strand
ggaaauaccugcugucucu

SEQ ID NO: 331191 - RNA, 19 nt, Homo sapiens
  misc_RNA (1)...(19): siRNA sense strand
gcaauugccugcucucuga

SEQ ID NO: 331192 - RNA, 19 nt, Homo sapiens
  misc_RNA (1)...(19): siRNA sense strand
gagaggagcuggcccugua

SEQ ID NO: 331193 - RNA, 19 nt, Homo sapiens
  misc_RNA (1)...(19): siRNA sense strand
gaugauacacucuuucuua

SEQ ID NO: 331194 - RNA, 19 nt, Homo sapiens
  misc_RNA (1)...(19): siRNA sense strand
gaaauaugauggugagaug

SEQ ID NO: 331195 - RNA, 19 nt, Homo sapiens
  misc_RNA (1)...(19): siRNA sense strand
acacuacgauggcuuaaua

SEQ ID NO: 331196 - RNA, 19 nt, Homo sapiens
  misc_RNA (1)...(19): siRNA sense strand
gauggucccugaauacuuu

SEQ ID NO: 331197 - RNA, 19 nt, Homo sapiens
  misc_RNA (1)...(19): siRNA sense strand
gaagagaggcugaacuuug

SEQ ID NO: 331198 - RNA, 19 nt, Homo sapiens
  misc_RNA (1)...(19): siRNA sense strand
cuacagauaucucacauga

SEQ ID NO: 331199 - RNA, 19 nt, Homo sapiens
  misc_RNA (1)...(19): siRNA sense strand
ggaagcagaugacacaugu

SEQ ID NO: 331200 - RNA, 19 nt, Homo sapiens
  misc_RNA (1)...(19): siRNA sense strand
gaagaaggcauccugaaga

SEQ ID NO: 331201 - RNA, 19 nt, Homo sapiens
  misc_RNA (1)...(19): siRNA sense strand
gaacugaagagcuaccuaa

SEQ ID NO: 331202 - RNA, 19 nt, Homo sapiens
  misc_RNA (1)...(19): siRNA sense strand
gaugggaccuugaaagugu

SEQ ID NO: 331203 - RNA, 19 nt, Homo sapiens
  misc_RNA (1)...(19): siRNA sense strand
ccaaaugccuucuuauagu

SEQ ID NO: 331204 - RNA, 19 nt, Homo sapiens
  misc_RNA (1)...(19): siRNA sense strand
gcaugcggguugccaguua

SEQ ID NO: 331205 - RNA, 19 nt, Homo sapiens
  misc_RNA (1)...(19): siRNA sense strand
gaacuuggcaggaggagaa

SEQ ID NO: 331206 - RNA, 19 nt, Homo sapiens
  misc_RNA (1)...(19): siRNA sense strand
gauggauggucccugaaua

SEQ ID NO: 331207 - RNA, 19 nt, Homo sapiens
  misc_RNA (1)...(19): siRNA sense strand
gagaauggaccacagguaa

SEQ ID NO: 331208 - RNA, 19 nt, Homo sapiens
  misc_RNA (1)...(19): siRNA sense strand
gauauccucuccuugaaga

SEQ ID NO: 331209 - RNA, 19 nt, Homo sapiens
  misc_RNA (1)...(19): siRNA sense strand
caggauguauggaauauga

SEQ ID NO: 331210 - RNA, 19 nt, Homo sapiens
  misc_RNA (1)...(19): siRNA sense strand
gagaagagcagagaaaguu

SEQ ID NO: 331211 - RNA, 19 nt, Homo sapiens
  misc_RNA (1)...(19): siRNA sense strand
guacauaggguuucucaga

SEQ ID NO: 331212 - RNA, 19 nt, Homo sapiens
  misc_RNA (1)...(19): siRNA sense strand
gaccaaagauaaccuacug

SEQ ID NO: 331213 - RNA, 19 nt, Homo sapiens
  misc_RNA (1)...(19): siRNA sense strand
gcauguaucuacccacuca

SEQ ID NO: 331214 - RNA, 19 nt, Homo sapiens
  misc_RNA (1)...(19): siRNA sense strand
aagagaggcugaacuuuga

SEQ ID NO: 331215 - RNA, 19 nt, Homo sapiens
  misc_RNA (1)...(19): siRNA sense strand
ccugugagcugcuguaguu

SEQ ID NO: 331216 - RNA, 19 nt, Homo sapiens
  misc_RNA (1)...(19): siRNA sense strand
ggccauugcugcuuucuug

SEQ ID NO: 331217 - RNA, 19 nt, Homo sapiens
  misc_RNA (1)...(19): siRNA sense strand
ugaaaucugucgugaacuu

SEQ ID NO: 331218 - RNA, 19 nt, Homo sapiens
  misc_RNA (1)...(19): siRNA sense strand
gcagggcaauguguacuuu

SEQ ID NO: 331219 - RNA, 19 nt, Homo sapiens
  misc_RNA (1)...(19): siRNA sense strand
gauggaaucucugcuuguu

SEQ ID NO: 331220 - RNA, 19 nt, Homo sapiens
  misc_RNA (1)...(19): siRNA sense strand
gaagacaugugacgcugau

SEQ ID NO: 331221 - RNA, 19 nt, Homo sapiens
  misc_RNA (1)...(19): siRNA sense strand
gugagaugcugaacaggua

SEQ ID NO: 331222 - RNA, 19 nt, Homo sapiens
  misc_RNA (1)...(19): siRNA sense strand
aggcugaacuuugauauaa

SEQ ID NO: 331223 - RNA, 19 nt, Homo sapiens
  misc_RNA (1)...(19): siRNA sense strand
ggaguucuuucuuucuuga

SEQ ID NO: 331224 - RNA, 19 nt, Homo sapiens
  misc_RNA (1)...(19): siRNA sense strand
gaugacacauguauaccaa

SEQ ID NO: 331225 - RNA, 19 nt, Homo sapiens
  misc_RNA (1)...(19): siRNA sense strand
ccaagucccugaacugugu

SEQ ID NO: 331226 - RNA, 19 nt, Homo sapiens
  misc_RNA (1)...(19): siRNA sense strand
gauacacucuuucuuacug

SEQ ID NO: 331227 - RNA, 19 nt, Homo sapiens
  misc_RNA (1)...(19): siRNA sense strand
agacccaaaugccuucuua

SEQ ID NO: 331228 - RNA, 19 nt, Homo sapiens
  misc_RNA (1)...(19): siRNA sense strand
ggcaguaucuggaaaucaa

SEQ ID NO: 331229 - RNA, 19 nt, Homo sapiens
  misc_RNA (1)...(19): siRNA sense strand
gggcucagcauuucucuaa

SEQ ID NO: 331230 - RNA, 19 nt, Homo sapiens
  misc_RNA (1)...(19): siRNA sense strand
caaagauaaccuacugaua

SEQ ID NO: 331231 - RNA, 19 nt, Homo sapiens
  misc_RNA (1)...(19): siRNA sense strand
acacaaggcagaagacuuu

SEQ ID NO: 331232 - RNA, 19 nt, Homo sapiens
  misc_RNA (1)...(19): siRNA sense strand
ugacagagauggaggugau

SEQ ID NO: 331233 - RNA, 19 nt, Homo sapiens
  misc_RNA (1)...(19): siRNA sense strand
ggagaacgcacagcuguuu

SEQ ID NO: 331234 - RNA, 19 nt, Homo sapiens
  misc_RNA (1)...(19): siRNA sense strand
gcaaugaggauaccugugu

SEQ ID NO: 331235 - RNA, 19 nt, Homo sapiens
  misc_RNA (1)...(19): siRNA sense strand
cauggaugauggaaugaua

SEQ ID NO: 331236 - RNA, 19 nt, Homo sapiens
  misc_RNA (1)...(19): siRNA sense strand
uauggaaccuggccaaaug

SEQ ID NO: 331237 - RNA, 19 nt, Homo sapiens
  misc_RNA (1)...(19): siRNA sense strand
gaugauggaaugauaaaug

SEQ ID NO: 331238 - RNA, 19 nt, Homo sapiens
  misc_RNA (1)...(19): siRNA sense strand
acucagaaaucaagcauug

SEQ ID NO: 331239 - RNA, 19 nt, Homo sapiens
  misc_RNA (1)...(19): siRNA sense strand
gagccaacaccacaucuaa

SEQ ID NO: 331240 - RNA, 19 nt, Homo sapiens
  misc_RNA (1)...(19): siRNA sense strand
gaacagacaacuggaagug

SEQ ID NO: 331241 - RNA, 19 nt, Homo sapiens
  misc_RNA (1)...(19): siRNA sense strand
ucagauauccucuccuuga

SEQ ID NO: 331242 - RNA, 19 nt, Homo sapiens
  misc_RNA (1)...(19): siRNA sense strand
aaaggaaucaggagaguuu

SEQ ID NO: 331243 - RNA, 19 nt, Homo sapiens
  misc_RNA (1)...(19): siRNA sense strand
ggagaagucuguggugagu

SEQ ID NO: 331244 - RNA, 19 nt, Homo sapiens
  misc_RNA (1)...(19): siRNA sense strand
ggccuugacugcccuagaa

SEQ ID NO: 331245 - RNA, 19 nt, Homo sapiens
  misc_RNA (1)...(19): siRNA sense strand
caaaugccuucuuauaguc

SEQ ID NO: 331246 - RNA, 19 nt, Homo sapiens
  misc_RNA (1)...(19): siRNA sense strand
gcccaaggauccuggaguu

SEQ ID NO: 331247 - RNA, 19 nt, Homo sapiens
  misc_RNA (1)...(19): siRNA sense strand
agacuaaggcucaccagua

SEQ ID NO: 331248 - RNA, 19 nt, Homo sapiens
  misc_RNA (1)...(19): siRNA sense strand
gaacaugugggccaaaugg

SEQ ID NO: 331249 - RNA, 19 nt, Homo sapiens
  misc_RNA (1)...(19): siRNA sense strand
gggaggaacucauugaaaa

SEQ ID NO: 331250 - RNA, 19 nt, Homo sapiens
  misc_RNA (1)...(19): siRNA sense strand
gagcagagaaaguuugaga

SEQ ID NO: 331251 - RNA, 19 nt, Homo sapiens
  misc_RNA (1)...(19): siRNA sense strand
gaagagcagagaaaguuug

SEQ ID NO: 331252 - RNA, 19 nt, Homo sapiens
  misc_RNA (1)...(19): siRNA sense strand
gacgcaagcugauuuguac

SEQ ID NO: 331253 - RNA, 19 nt, Homo sapiens
  misc_RNA (1)...(19): siRNA sense strand
gcagaugacacauguauac

SEQ ID NO: 331254 - RNA, 19 nt, Homo sapiens
  misc_RNA (1)...(19): siRNA sense strand
uggaaucucugcuuguuug

SEQ ID NO: 331255 - RNA, 19 nt, Homo sapiens
  misc_RNA (1)...(19): siRNA sense strand
cuggaaaucugacuuuguu

SEQ ID NO: 331256 - RNA, 19 nt, Homo sapiens
  misc_RNA (1)...(19): siRNA sense strand
ugauaaauguggccaaaca

SEQ ID NO: 331257 - RNA, 19 nt, Homo sapiens
  misc_RNA (1)...(19): siRNA sense strand
aagcauggaugauggaaug

SEQ ID NO: 331258 - RNA, 19 nt, Homo sapiens
  misc_RNA (1)...(19): siRNA sense strand
ccucgaggcucaacucaga

SEQ ID NO: 331259 - RNA, 19 nt, Homo sapiens
  misc_RNA (1)...(19): siRNA sense strand
gcaguuuccauucagauuu

SEQ ID NO: 331260 - RNA, 19 nt, Homo sapiens
  misc_RNA (1)...(19): siRNA sense strand
guuccagagucuacagaua

SEQ ID NO: 331261 - RNA, 19 nt, Homo sapiens
  misc_RNA (1)...(19): siRNA sense strand
ggcaauguguacuuucuga

SEQ ID NO: 331262 - RNA, 19 nt, Homo sapiens
  misc_RNA (1)...(19): siRNA sense strand
acagagauguuaagcuaug

SEQ ID NO: 331263 - RNA, 19 nt, Homo sapiens
  misc_RNA (1)...(19): siRNA sense strand
gcucagcucuggaagacau

SEQ ID NO: 331264 - RNA, 19 nt, Homo sapiens
  misc_RNA (1)...(19): siRNA sense strand
cagacuggaucccaaagaa

SEQ ID NO: 331265 - RNA, 19 nt, Homo sapiens
  misc_RNA (1)...(19): siRNA sense strand
ggaauaugauccagaagcu

SEQ ID NO: 331266 - RNA, 19 nt, Homo sapiens
  misc_RNA (1)...(19): siRNA sense strand
gaacuaugcacugcuguug

SEQ ID NO: 331267 - RNA, 19 nt, Homo sapiens
  misc_RNA (1)...(19): siRNA sense strand
gcugugaaccucucuguga

SEQ ID NO: 331268 - RNA, 19 nt, Homo sapiens
  misc_RNA (1)...(19): siRNA sense strand
aguaccagcuggcuaagua

SEQ ID NO: 331269 - RNA, 19 nt, Homo sapiens
  misc_RNA (1)...(19): siRNA sense strand
aauaacaucuuggccauug

SEQ ID NO: 331270 - RNA, 19 nt, Homo sapiens
  misc_RNA (1)...(19): siRNA sense strand
uggagcagcuauacagaaa

SEQ ID NO: 331271 - RNA, 19 nt, Homo sapiens
  misc_RNA (1)...(19): siRNA sense strand
gaaaucuggagcagcuaua

SEQ ID NO: 331272 - RNA, 19 nt, Homo sapiens
  misc_RNA (1)...(19): siRNA sense strand
ccacauuggugcucugauc

SEQ ID NO: 331273 - RNA, 19 nt, Homo sapiens
  misc_RNA (1)...(19): siRNA sense strand
ggacaugagggcccuguga

SEQ ID NO: 331274 - RNA, 19 nt, Homo sapiens
  misc_RNA (1)...(19): siRNA sense strand
gcaccuggguucccuuucu

SEQ ID NO: 331275 - RNA, 19 nt, Homo sapiens
  misc_RNA (1)...(19): siRNA sense strand
ggaauugggucuggucucu

SEQ ID NO: 331276 - RNA, 19 nt, Homo sapiens
  misc_RNA (1)...(19): siRNA sense strand
aaucugacuuuguuucuga

SEQ ID NO: 331277 - RNA, 19 nt, Homo sapiens
  misc_RNA (1)...(19): siRNA sense strand
gggagaagcugagaguaca

SEQ ID NO: 331278 - RNA, 19 nt, Homo sapiens
  misc_RNA (1)...(19): siRNA sense strand
cuggaggagucaccauuua

SEQ ID NO: 331279 - RNA, 19 nt, Homo sapiens
  misc_RNA (1)...(19): siRNA sense strand
ggauugggcuccugauggu

SEQ ID NO: 331280 - RNA, 19 nt, Homo sapiens
  misc_RNA (1)...(19): siRNA sense strand
gcugggcacucaaggaaug

SEQ ID NO: 331281 - RNA, 19 nt, Homo sapiens
  misc_RNA (1)...(19): siRNA sense strand
gaggagacccguaggaaca

SEQ ID NO: 331282 - RNA, 19 nt, Homo sapiens
  misc_RNA (1)...(19): siRNA sense strand
guuauggcauccacucuug

SEQ ID NO: 331283 - RNA, 19 nt, Homo sapiens
  misc_RNA (1)...(19): siRNA sense strand
gaagucacacggagugguu

SEQ ID NO: 331284 - RNA, 19 nt, Homo sapiens
  misc_RNA (1)...(19): siRNA sense strand
gaaguucauugcagagcau

SEQ ID NO: 331285 - RNA, 19 nt, Homo sapiens
  misc_RNA (1)...(19): siRNA sense strand
ggagaauggaccacaggua

SEQ ID NO: 331286 - RNA, 19 nt, Homo sapiens
  misc_RNA (1)...(19): siRNA sense strand
cagauauccucuccuugaa

SEQ ID NO: 331287 - RNA, 19 nt, Homo sapiens
  misc_RNA (1)...(19): siRNA sense strand
ccagaagccugugcuagga

SEQ ID NO: 331288 - RNA, 19 nt, Homo sapiens
  misc_RNA (1)...(19): siRNA sense strand
gacuaaggcucaccaguac

SEQ ID NO: 331289 - RNA, 19 nt, Homo sapiens
  misc_RNA (1)...(19): siRNA sense strand
gagaugagcccuauaauga

SEQ ID NO: 331290 - RNA, 19 nt, Homo sapiens
  misc_RNA (1)...(19): siRNA sense strand
ucuaagaacugccugauaa

SEQ ID NO: 331291 - RNA, 19 nt, Homo sapiens
  misc_RNA (1)...(19): siRNA sense strand
gggcaaacaugcugaaaga

SEQ ID NO: 331292 - RNA, 19 nt, Homo sapiens
  misc_RNA (1)...(19): siRNA sense strand
gaaguacagcucaugaaua

SEQ ID NO: 331293 - RNA, 19 nt, Homo sapiens
  misc_RNA (1)...(19): siRNA sense strand
ggaagacccuggaggaaau

SEQ ID NO: 331294 - RNA, 19 nt, Homo sapiens
  misc_RNA (1)...(19): siRNA sense strand
gaugagcccuauaaugaaa

SEQ ID NO: 331295 - RNA, 19 nt, Homo sapiens
  misc_RNA (1)...(19): siRNA sense strand
ggugauggcucuuaagaug

SEQ ID NO: 331296 - RNA, 19 nt, Homo sapiens
  misc_RNA (1)...(19): siRNA sense strand
gcagauguguucucuuaug

SEQ ID NO: 331297 - RNA, 19 nt, Homo sapiens
  misc_RNA (1)...(19): siRNA sense strand
uuaaagagaucccaccauu

SEQ ID NO: 331298 - RNA, 19 nt, Homo sapiens
  misc_RNA (1)...(19): siRNA sense strand
aggcagauguguucucuua

SEQ ID NO: 331299 - RNA, 19 nt, Homo sapiens
  misc_RNA (1)...(19): siRNA sense strand
uaacauggaucccaaacug

SEQ ID NO: 331300 - RNA, 19 nt, Homo sapiens
  misc_RNA (1)...(19): siRNA sense strand
gauguguucucuuauggua

SEQ ID NO: 331301 - RNA, 19 nt, Homo sapiens
  misc_RNA (1)...(19): siRNA sense strand
guacagaguuaaagagauc

SEQ ID NO: 331302 - RNA, 19 nt, Homo sapiens
  misc_RNA (1)...(19): siRNA sense strand
guaucgagcucuuauaagu

SEQ ID NO: 331303 - RNA, 19 nt, Homo sapiens
  misc_RNA (1)...(19): siRNA sense strand
ugucaucucucugguauuu

SEQ ID NO: 331304 - RNA, 19 nt, Homo sapiens
  misc_RNA (1)...(19): siRNA sense strand
aauagggucuggcuucuuu

SEQ ID NO: 331305 - RNA, 19 nt, Homo sapiens
  misc_RNA (1)...(19): siRNA sense strand
ggagauggagguagaagaa

SEQ ID NO: 331306 - RNA, 19 nt, Homo sapiens
  misc_RNA (1)...(19): siRNA sense strand
gaucggagcaaacggaauu

SEQ ID NO: 331307 - RNA, 19 nt, Homo sapiens
  misc_RNA (1)...(19): siRNA sense strand
gcaagucugucaucucucu

SEQ ID NO: 331308 - RNA, 19 nt, Homo sapiens
  misc_RNA (1)...(19): siRNA sense strand
caaacaugcugaaagaagu

SEQ ID NO: 331309 - RNA, 19 nt, Homo sapiens
  misc_RNA (1)...(19): siRNA sense strand
gaacaguugcuagacagua

SEQ ID NO: 331310 - RNA, 19 nt, Homo sapiens
  misc_RNA (1)...(19): siRNA sense strand
gcaaacaugcugaaagaag

SEQ ID NO: 331311 - RNA, 19 nt, Homo sapiens
  misc_RNA (1)...(19): siRNA sense strand
cagcaagucugucaucucu

SEQ ID NO: 331312 - RNA, 19 nt, Homo sapiens
  misc_RNA (1)...(19): siRNA sense strand
aaguacagcucaugaauag

SEQ ID NO: 331313 - RNA, 19 nt, Homo sapiens
  misc_RNA (1)...(19): siRNA sense strand
gggaagaaucgcuaucuga

SEQ ID NO: 331314 - RNA, 19 nt, Homo sapiens
  misc_RNA (1)...(19): siRNA sense strand
gaagaaucgcuaucugaug

SEQ ID NO: 331315 - RNA, 19 nt, Homo sapiens
  misc_RNA (1)...(19): siRNA sense strand
ggaagaaucgcuaucugau

SEQ ID NO: 331316 - RNA, 19 nt, Homo sapiens
  misc_RNA (1)...(19): siRNA sense strand
gaaagaaguacagcucaug

SEQ ID NO: 331317 - RNA, 19 nt, Homo sapiens
  misc_RNA (1)...(19): siRNA sense strand
gaagagcaggagagggaua

SEQ ID NO: 331318 - RNA, 19 nt, Homo sapiens
  misc_RNA (1)...(19): siRNA sense strand
ucucgaagccagucagaua

SEQ ID NO: 331319 - RNA, 19 nt, Homo sapiens
  misc_RNA (1)...(19): siRNA sense strand
uaaguagucucaaguacag

SEQ ID NO: 331320 - RNA, 19 nt, Homo sapiens
  misc_RNA (1)...(19): siRNA sense strand
ugauggcucuuaagaugaa

SEQ ID NO: 331321 - RNA, 19 nt, Homo sapiens
  misc_RNA (1)...(19): siRNA sense strand
ucagcuaccuucacuucaa

SEQ ID NO: 331322 - RNA, 19 nt, Homo sapiens
  misc_RNA (1)...(19): siRNA sense strand
ggguaaaacuggccuauga

SEQ ID NO: 331323 - RNA, 19 nt, Homo sapiens
  misc_RNA (1)...(19): siRNA sense strand
cagcuaccuucacuucaaa

SEQ ID NO: 331324 - RNA, 19 nt, Homo sapiens
  misc_RNA (1)...(19): siRNA sense strand
uaagcucacuggaugacaa

SEQ ID NO: 331325 - RNA, 19 nt, Homo sapiens
  misc_RNA (1)...(19): siRNA sense strand
caacugcuguaacauggau

SEQ ID NO: 331326 - RNA, 19 nt, Homo sapiens
  misc_RNA (1)...(19): siRNA sense strand
ugacgcguuuggaugauuu

SEQ ID NO: 331327 - RNA, 19 nt, Homo sapiens
  misc_RNA (1)...(19): siRNA sense strand
ccaacauccuuagguauau

SEQ ID NO: 331328 - RNA, 19 nt, Homo sapiens
  misc_RNA (1)...(19): siRNA sense strand
ggagcaaacggaauucaau

SEQ ID NO: 331329 - RNA, 19 nt, Homo sapiens
  misc_RNA (1)...(19): siRNA sense strand
ccgggaaccuggaacaguu

SEQ ID NO: 331330 - RNA, 19 nt, Homo sapiens
  misc_RNA (1)...(19): siRNA sense strand
agucucaaguacagaguua

SEQ ID NO: 331331 - RNA, 19 nt, Homo sapiens
  misc_RNA (1)...(19): siRNA sense strand
gaguuuggccaucuucgua

SEQ ID NO: 331332 - RNA, 19 nt, Homo sapiens
  misc_RNA (1)...(19): siRNA sense strand
ucaucucucugguauuuga

SEQ ID NO: 331333 - RNA, 19 nt, Homo sapiens
  misc_RNA (1)...(19): siRNA sense strand
ccaaacugcgcccaucuuu

SEQ ID NO: 331334 - RNA, 19 nt, Homo sapiens
  misc_RNA (1)...(19): siRNA sense strand
ggaggagaaggaaauguga

SEQ ID NO: 331335 - RNA, 19 nt, Homo sapiens
  misc_RNA (1)...(19): siRNA sense strand
gggaagacccuggaggaaa

SEQ ID NO: 331336 - RNA, 19 nt, Homo sapiens
  misc_RNA (1)...(19): siRNA sense strand
ggaugagaaugguuacucu

SEQ ID NO: 331337 - RNA, 19 nt, Homo sapiens
  misc_RNA (1)...(19): siRNA sense strand
gauaaagagggaugagaau

SEQ ID NO: 331338 - RNA, 19 nt, Homo sapiens
  misc_RNA (1)...(19): siRNA sense strand
gcaguaaccgggcaaacau

SEQ ID NO: 331339 - RNA, 19 nt, Homo sapiens
  misc_RNA (1)...(19): siRNA sense strand
gcacauggugggagacugu

SEQ ID NO: 331340 - RNA, 19 nt, Homo sapiens
  misc_RNA (1)...(19): siRNA sense strand
cgagaugagcccuauaaug

SEQ ID NO: 331341 - RNA, 19 nt, Homo sapiens
  misc_RNA (1)...(19): siRNA sense strand
gggaagaguuuggccaucu

SEQ ID NO: 331342 - RNA, 19 nt, Homo sapiens
  misc_RNA (1)...(19): siRNA sense strand
cccaacauccuuagguaua

SEQ ID NO: 331343 - RNA, 19 nt, Homo sapiens
  misc_RNA (1)...(19): siRNA sense strand
aacaguugcuagacaguaa

SEQ ID NO: 331344 - RNA, 19 nt, Homo sapiens
  misc_RNA (1)...(19): siRNA sense strand
ggucaggugauggcucuua

SEQ ID NO: 331345 - RNA, 19 nt, Homo sapiens
  misc_RNA (1)...(19): siRNA sense strand
gcuccauucuccaggaaga

SEQ ID NO: 331346 - RNA, 19 nt, Homo sapiens
  misc_RNA (1)...(19): siRNA sense strand
gaaccuggaacaguugcua

SEQ ID NO: 331347 - RNA, 19 nt, Homo sapiens
  misc_RNA (1)...(19): siRNA sense strand
augaacacauugagcagua

SEQ ID NO: 331348 - RNA, 19 nt, Homo sapiens
  misc_RNA (1)...(19): siRNA sense strand
ugaaagaaguacagcucau

SEQ ID NO: 331349 - RNA, 19 nt, Homo sapiens
  misc_RNA (1)...(19): siRNA sense strand
aaacaugcugaaagaagua

SEQ ID NO: 331350 - RNA, 19 nt, Homo sapiens
  misc_RNA (1)...(19): siRNA sense strand
caucgggaccucacaucua

SEQ ID NO: 331351 - RNA, 19 nt, Homo sapiens
  misc_RNA (1)...(19): siRNA sense strand
ucaaguacagaguuaaaga

SEQ ID NO: 331352 - RNA, 19 nt, Homo sapiens
  misc_RNA (1)...(19): siRNA sense strand
gcuggacuaugaugcuuuc

SEQ ID NO: 331353 - RNA, 19 nt, Homo sapiens
  misc_RNA (1)...(19): siRNA sense strand
agagggaugagaaugguua

SEQ ID NO: 331354 - RNA, 19 nt, Homo sapiens
  misc_RNA (1)...(19): siRNA sense strand
uaaagagggaugagaaugg

SEQ ID NO: 331355 - RNA, 19 nt, Homo sapiens
  misc_RNA (1)...(19): siRNA sense strand
ugauaaagagggaugagaa

SEQ ID NO: 331356 - RNA, 19 nt, Homo sapiens
  misc_RNA (1)...(19): siRNA sense strand
guacagcucaugaauagac

SEQ ID NO: 331357 - RNA, 19 nt, Homo sapiens
  misc_RNA (1)...(19): siRNA sense strand
cugaggagauggagguaga

SEQ ID NO: 331358 - RNA, 19 nt, Homo sapiens
  misc_RNA (1)...(19): siRNA sense strand
caagucaccaugcccaaga

SEQ ID NO: 331359 - RNA, 19 nt, Homo sapiens
  misc_RNA (1)...(19): siRNA sense strand
agaacugccugauaaagag

SEQ ID NO: 331360 - RNA, 19 nt, Homo sapiens
  misc_RNA (1)...(19): siRNA sense strand
caacauccuuagguauauc

SEQ ID NO: 331361 - RNA, 19 nt, Homo sapiens
  misc_RNA (1)...(19): siRNA sense strand
gucaggugauggcucuuaa

SEQ ID NO: 331362 - RNA, 19 nt, Homo sapiens
  misc_RNA (1)...(19): siRNA sense strand
ucaccaugcccaagacgua

SEQ ID NO: 331363 - RNA, 19 nt, Homo sapiens
  misc_RNA (1)...(19): siRNA sense strand
gacaguaaccugcauuugc

SEQ ID NO: 331364 - RNA, 19 nt, Homo sapiens
  misc_RNA (1)...(19): siRNA sense strand
aaagaaguacagcucauga

SEQ ID NO: 331365 - RNA, 19 nt, Homo sapiens
  misc_RNA (1)...(19): siRNA sense strand
ugaacacauugagcaguaa

SEQ ID NO: 331366 - RNA, 19 nt, Homo sapiens
  misc_RNA (1)...(19): siRNA sense strand
gaccucacaucuaagaacu

SEQ ID NO: 331367 - RNA, 19 nt, Homo sapiens
  misc_RNA (1)...(19): siRNA sense strand
ugguuacucugcaguggua

SEQ ID NO: 331368 - RNA, 19 nt, Homo sapiens
  misc_RNA (1)...(19): siRNA sense strand
cagauguguucucuuaugg

SEQ ID NO: 331369 - RNA, 19 nt, Homo sapiens
  misc_RNA (1)...(19): siRNA sense strand
ccaccacgccuaaguaguc

SEQ ID NO: 331370 - RNA, 19 nt, Homo sapiens
  misc_RNA (1)...(19): siRNA sense strand
cgccugaguucuugcauca

SEQ ID NO: 331371 - RNA, 19 nt, Homo sapiens
  misc_RNA (1)...(19): siRNA sense strand
ucugucaucucucugguau

SEQ ID NO: 331372 - RNA, 19 nt, Homo sapiens
  misc_RNA (1)...(19): siRNA sense strand
cucuuaagaugaacacauu

SEQ ID NO: 331373 - RNA, 19 nt, Homo sapiens
  misc_RNA (1)...(19): siRNA sense strand
aagaacugccugauaaaga

SEQ ID NO: 331374 - RNA, 19 nt, Homo sapiens
  misc_RNA (1)...(19): siRNA sense strand
aaagagggaugagaauggu

SEQ ID NO: 331375 - RNA, 19 nt, Homo sapiens
  misc_RNA (1)...(19): siRNA sense strand
uaaagagaucccaccauuc

SEQ ID NO: 331376 - RNA, 19 nt, Homo sapiens
  misc_RNA (1)...(19): siRNA sense strand
guacagugagugucuugga

SEQ ID NO: 331377 - RNA, 19 nt, Homo sapiens
  misc_RNA (1)...(19): siRNA sense strand
gaauuucgggcuggacuau

SEQ ID NO: 331378 - RNA, 19 nt, Homo sapiens
  misc_RNA (1)...(19): siRNA sense strand
gacugacgcguuuggauga

SEQ ID NO: 331379 - RNA, 19 nt, Homo sapiens
  misc_RNA (1)...(19): siRNA sense strand
ugagugucuuggacccaua

SEQ ID NO: 331380 - RNA, 19 nt, Homo sapiens
  misc_RNA (1)...(19): siRNA sense strand
gaagacccuggaggaaauu

SEQ ID NO: 331381 - RNA, 19 nt, Homo sapiens
  misc_RNA (1)...(19): siRNA sense strand
cuaagaacugccugauaaa

SEQ ID NO: 331382 - RNA, 19 nt, Homo sapiens
  misc_RNA (1)...(19): siRNA sense strand
aucgggaccucacaucuaa

SEQ ID NO: 331383 - RNA, 19 nt, Homo sapiens
  misc_RNA (1)...(19): siRNA sense strand
gggcuggacuaugaugcuu

SEQ ID NO: 331384 - RNA, 19 nt, Homo sapiens
  misc_RNA (1)...(19): siRNA sense strand
gcucaacuccagccaccuu

SEQ ID NO: 331385 - RNA, 19 nt, Homo sapiens
  misc_RNA (1)...(19): siRNA sense strand
gagauggagguagaagaaa

SEQ ID NO: 331386 - RNA, 19 nt, Homo sapiens
  misc_RNA (1)...(19): siRNA sense strand
ucguaucgagcucuuauaa

SEQ ID NO: 331387 - RNA, 19 nt, Homo sapiens
  misc_RNA (1)...(19): siRNA sense strand
aaaggcagauguguucucu

SEQ ID NO: 331388 - RNA, 19 nt, Homo sapiens
  misc_RNA (1)...(19): siRNA sense strand
caggugauggcucuuaaga

SEQ ID NO: 331389 - RNA, 19 nt, Homo sapiens
  misc_RNA (1)...(19): siRNA sense strand
gaacagaaguuaccaagaa

SEQ ID NO: 331390 - RNA, 19 nt, Homo sapiens
  misc_RNA (1)...(19): siRNA sense strand
gaaauuggaugcaguguaa

SEQ ID NO: 331391 - RNA, 19 nt, Homo sapiens
  misc_RNA (1)...(19): siRNA sense strand
gaaaguugccuaucaauug

SEQ ID NO: 331392 - RNA, 19 nt, Homo sapiens
  misc_RNA (1)...(19): siRNA sense strand
caaagaagauguucgaugu

SEQ ID NO: 331393 - RNA, 19 nt, Homo sapiens
  misc_RNA (1)...(19): siRNA sense strand
gaaaggauguugauguugu

SEQ ID NO: 331394 - RNA, 19 nt, Homo sapiens
  misc_RNA (1)...(19): siRNA sense strand
gcugaaagcugucuauguu

SEQ ID NO: 331395 - RNA, 19 nt, Homo sapiens
  misc_RNA (1)...(19): siRNA sense strand
guacaaagaagaagucuaa

SEQ ID NO: 331396 - RNA, 19 nt, Homo sapiens
  misc_RNA (1)...(19): siRNA sense strand
ggaagcagguguuacaguu

SEQ ID NO: 331397 - RNA, 19 nt, Homo sapiens
  misc_RNA (1)...(19): siRNA sense strand
caucuuacguucaaacuaa

SEQ ID NO: 331398 - RNA, 19 nt, Homo sapiens
  misc_RNA (1)...(19): siRNA sense strand
ggaaagaccucagaaacau

SEQ ID NO: 331399 - RNA, 19 nt, Homo sapiens
  misc_RNA (1)...(19): siRNA sense strand
gagauacucguuuagauua

SEQ ID NO: 331400 - RNA, 19 nt, Homo sapiens
  misc_RNA (1)...(19): siRNA sense strand
gaaugaacagucucaaaua

SEQ ID NO: 331401 - RNA, 19 nt, Homo sapiens
  misc_RNA (1)...(19): siRNA sense strand
gcaagaggcgccaagguua

SEQ ID NO: 331402 - RNA, 19 nt, Homo sapiens
  misc_RNA (1)...(19): siRNA sense strand
cagaagcccugcacaguaa

SEQ ID NO: 331403 - RNA, 19 nt, Homo sapiens
  misc_RNA (1)...(19): siRNA sense strand
gagcauagaacagaaguua

SEQ ID NO: 331404 - RNA, 19 nt, Homo sapiens
  misc_RNA (1)...(19): siRNA sense strand
gagaagauauagugcuuug

SEQ ID NO: 331405 - RNA, 19 nt, Homo sapiens
  misc_RNA (1)...(19): siRNA sense strand
gggcauaucuuggguagaa

SEQ ID NO: 331406 - RNA, 19 nt, Homo sapiens
  misc_RNA (1)...(19): siRNA sense strand
ggacugauaugcaggaauc

SEQ ID NO: 331407 - RNA, 19 nt, Homo sapiens
  misc_RNA (1)...(19): siRNA sense strand
aaaggaagcuuacgucugu

SEQ ID NO: 331408 - RNA, 19 nt, Homo sapiens
  misc_RNA (1)...(19): siRNA sense strand
ggaagaaggugugaaaucu

SEQ ID NO: 331409 - RNA, 19 nt, Homo sapiens
  misc_RNA (1)...(19): siRNA sense strand
gaaauagacugggaagauc

SEQ ID NO: 331410 - RNA, 19 nt, Homo sapiens
  misc_RNA (1)...(19): siRNA sense strand
caaagaagaagucuaagaa

SEQ ID NO: 331411 - RNA, 19 nt, Homo sapiens
  misc_RNA (1)...(19): siRNA sense strand
aaucaaggcugucgaagaa

SEQ ID NO: 331412 - RNA, 19 nt, Homo sapiens
  misc_RNA (1)...(19): siRNA sense strand
gaucagcagucaaagaaau

SEQ ID NO: 331413 - RNA, 19 nt, Homo sapiens
  misc_RNA (1)...(19): siRNA sense strand
ccuggaaacuuauauacua

SEQ ID NO: 331414 - RNA, 19 nt, Homo sapiens
  misc_RNA (1)...(19): siRNA sense strand
guuagaaccugcaaaugaa

SEQ ID NO: 331415 - RNA, 19 nt, Homo sapiens
  misc_RNA (1)...(19): siRNA sense strand
ugaugaaacuccacaacua

SEQ ID NO: 331416 - RNA, 19 nt, Homo sapiens
  misc_RNA (1)...(19): siRNA sense strand
gaaauccacacuccaguuu

SEQ ID NO: 331417 - RNA, 19 nt, Homo sapiens
  misc_RNA (1)...(19): siRNA sense strand
gcacaaggugucgcuauua

SEQ ID NO: 331418 - RNA, 19 nt, Homo sapiens
  misc_RNA (1)...(19): siRNA sense strand
gaaacauucccacgaaauu

SEQ ID NO: 331419 - RNA, 19 nt, Homo sapiens
  misc_RNA (1)...(19): siRNA sense strand
gaucaucgacuaccuuuau

SEQ ID NO: 331420 - RNA, 19 nt, Homo sapiens
  misc_RNA (1)...(19): siRNA sense strand
ggagauacucguuuagauu

SEQ ID NO: 331421 - RNA, 19 nt, Homo sapiens
  misc_RNA (1)...(19): siRNA sense strand
ucaaauaacuaggaggaaa

SEQ ID NO: 331422 - RNA, 19 nt, Homo sapiens
  misc_RNA (1)...(19): siRNA sense strand
uaagucacaugcacauaaa

SEQ ID NO: 331423 - RNA, 19 nt, Homo sapiens
  misc_RNA (1)...(19): siRNA sense strand
gaaggagaaucaagcagau

SEQ ID NO: 331424 - RNA, 19 nt, Homo sapiens
  misc_RNA (1)...(19): siRNA sense strand
uagaaaggauguugauguu

SEQ ID NO: 331425 - RNA, 19 nt, Homo sapiens
  misc_RNA (1)...(19): siRNA sense strand
ucagaaacauucccacgaa

SEQ ID NO: 331426 - RNA, 19 nt, Homo sapiens
  misc_RNA (1)...(19): siRNA sense strand
gaagauauagugcuuugga

SEQ ID NO: 331427 - RNA, 19 nt, Homo sapiens
  misc_RNA (1)...(19): siRNA sense strand
ccaagaggaugacuaaugg

SEQ ID NO: 331428 - RNA, 19 nt, Homo sapiens
  misc_RNA (1)...(19): siRNA sense strand
gaagaaggugugaaaucua

SEQ ID NO: 331429 - RNA, 19 nt, Homo sapiens
  misc_RNA (1)...(19): siRNA sense strand
cacaaggugucgcuauuaa

SEQ ID NO: 331430 - RNA, 19 nt, Homo sapiens
  misc_RNA (1)...(19): siRNA sense strand
ucacagaucagcagucaaa

SEQ ID NO: 331431 - RNA, 19 nt, Homo sapiens
  misc_RNA (1)...(19): siRNA sense strand
gaagacgauuggugagaug

SEQ ID NO: 331432 - RNA, 19 nt, Homo sapiens
  misc_RNA (1)...(19): siRNA sense strand
uaaccaagaggaugacuaa

SEQ ID NO: 331433 - RNA, 19 nt, Homo sapiens
  misc_RNA (1)...(19): siRNA sense strand
gaacagucucaaauaacua

SEQ ID NO: 331434 - RNA, 19 nt, Homo sapiens
  misc_RNA (1)...(19): siRNA sense strand
ggaagacgauuggugagau

SEQ ID NO: 331435 - RNA, 19 nt, Homo sapiens
  misc_RNA (1)...(19): siRNA sense strand
aaaaggagauacucguuua

SEQ ID NO: 331436 - RNA, 19 nt, Homo sapiens
  misc_RNA (1)...(19): siRNA sense strand
gcugaagauuccgaaauaa

SEQ ID NO: 331437 - RNA, 19 nt, Homo sapiens
  misc_RNA (1)...(19): siRNA sense strand
ccaguaaccgggaauauga

SEQ ID NO: 331438 - RNA, 19 nt, Homo sapiens
  misc_RNA (1)...(19): siRNA sense strand
gauguuguuuguguugaua

SEQ ID NO: 331439 - RNA, 19 nt, Homo sapiens
  misc_RNA (1)...(19): siRNA sense strand
ggccaugccugaaggauca

SEQ ID NO: 331440 - RNA, 19 nt, Homo sapiens
  misc_RNA (1)...(19): siRNA sense strand
cgaaggagauacugagaag

SEQ ID NO: 331441 - RNA, 19 nt, Homo sapiens
  misc_RNA (1)...(19): siRNA sense strand
uggugaaacugcaggaaua

SEQ ID NO: 331442 - RNA, 19 nt, Homo sapiens
  misc_RNA (1)...(19): siRNA sense strand
ggguagaaguagaagcuaa

SEQ ID NO: 331443 - RNA, 19 nt, Homo sapiens
  misc_RNA (1)...(19): siRNA sense strand
gauggaagaaggugugaaa

SEQ ID NO: 331444 - RNA, 19 nt, Homo sapiens
  misc_RNA (1)...(19): siRNA sense strand
gggcugauaugcaggaauc

SEQ ID NO: 331445 - RNA, 19 nt, Homo sapiens
  misc_RNA (1)...(19): siRNA sense strand
gaaagaccucagaaacauu

SEQ ID NO: 331446 - RNA, 19 nt, Homo sapiens
  misc_RNA (1)...(19): siRNA sense strand
ggaacgguuuaaggaauuu

SEQ ID NO: 331447 - RNA, 19 nt, Homo sapiens
  misc_RNA (1)...(19): siRNA sense strand
gaaggcaguacagcucuua

SEQ ID NO: 331448 - RNA, 19 nt, Homo sapiens
  misc_RNA (1)...(19): siRNA sense strand
ggauguugauguuguuugu

SEQ ID NO: 331449 - RNA, 19 nt, Homo sapiens
  misc_RNA (1)...(19): siRNA sense strand
ugaagacgauagugaagga

SEQ ID NO: 331450 - RNA, 19 nt, Homo sapiens
  misc_RNA (1)...(19): siRNA sense strand
caagaaagccuaaaacaga

SEQ ID NO: 331451 - RNA, 19 nt, Homo sapiens
  misc_RNA (1)...(19): siRNA sense strand
ugaaggagaggacauagaa

SEQ ID NO: 331452 - RNA, 19 nt, Homo sapiens
  misc_RNA (1)...(19): siRNA sense strand
gcccugcacaguaaaguua

SEQ ID NO: 331453 - RNA, 19 nt, Homo sapiens
  misc_RNA (1)...(19): siRNA sense strand
ugagacgacucuaccuuug

SEQ ID NO: 331454 - RNA, 19 nt, Homo sapiens
  misc_RNA (1)...(19): siRNA sense strand
ucugaaacccggaaacuaa

SEQ ID NO: 331455 - RNA, 19 nt, Homo sapiens
  misc_RNA (1)...(19): siRNA sense strand
gagcaaagaagauguucga

SEQ ID NO: 331456 - RNA, 19 nt, Homo sapiens
  misc_RNA (1)...(19): siRNA sense strand
ggaguucauuccuaacauc

SEQ ID NO: 331457 - RNA, 19 nt, Homo sapiens
  misc_RNA (1)...(19): siRNA sense strand
ucagaagcccugcacagua

SEQ ID NO: 331458 - RNA, 19 nt, Homo sapiens
  misc_RNA (1)...(19): siRNA sense strand
aaaguugccuaucaauugu

SEQ ID NO: 331459 - RNA, 19 nt, Homo sapiens
  misc_RNA (1)...(19): siRNA sense strand
cagaaacauucccacgaaa

SEQ ID NO: 331460 - RNA, 19 nt, Homo sapiens
  misc_RNA (1)...(19): siRNA sense strand
gauguaccauucucuccuu

SEQ ID NO: 331461 - RNA, 19 nt, Homo sapiens
  misc_RNA (1)...(19): siRNA sense strand
ccaaucaccaggaauuuga

SEQ ID NO: 331462 - RNA, 19 nt, Homo sapiens
  misc_RNA (1)...(19): siRNA sense strand
ccaaucaccaggaauuuga

SEQ ID NO: 331463 - RNA, 19 nt, Homo sapiens
  misc_RNA (1)...(19): siRNA sense strand
gggcuuggaugaugaaacu

SEQ ID NO: 331464 - RNA, 19 nt, Homo sapiens
  misc_RNA (1)...(19): siRNA sense strand
cuaagucacaugcacauaa

SEQ ID NO: 331465 - RNA, 19 nt, Homo sapiens
  misc_RNA (1)...(19): siRNA sense strand
cagaucagcagucaaagaa

SEQ ID NO: 331466 - RNA, 19 nt, Homo sapiens
  misc_RNA (1)...(19): siRNA sense strand
gagauacugagaaguuaaa

SEQ ID NO: 331467 - RNA, 19 nt, Homo sapiens
  misc_RNA (1)...(19): siRNA sense strand
ggagauacugagaaguuaa

SEQ ID NO: 331468 - RNA, 19 nt, Homo sapiens
  misc_RNA (1)...(19): siRNA sense strand
ucguuuagauuacacauug

SEQ ID NO: 331469 - RNA, 19 nt, Homo sapiens
  misc_RNA (1)...(19): siRNA sense strand
gaaaauaagcaguuagaga

SEQ ID NO: 331470 - RNA, 19 nt, Homo sapiens
  misc_RNA (1)...(19): siRNA sense strand
gcuauuaaauuuggcaagu

SEQ ID NO: 331471 - RNA, 19 nt, Homo sapiens
  misc_RNA (1)...(19): siRNA sense strand
caaggugucgcuauuaaau

SEQ ID NO: 331472 - RNA, 19 nt, Homo sapiens
  misc_RNA (1)...(19): siRNA sense strand
caaaugaagaacacaaugu

SEQ ID NO: 331473 - RNA, 19 nt, Homo sapiens
  misc_RNA (1)...(19): siRNA sense strand
gcaaaugaagaacacaaug

SEQ ID NO: 331474 - RNA, 19 nt, Homo sapiens
  misc_RNA (1)...(19): siRNA sense strand
gaauccaacaguacaaaga

SEQ ID NO: 331475 - RNA, 19 nt, Homo sapiens
  misc_RNA (1)...(19): siRNA sense strand
aaaaguaaguggacagaaa

SEQ ID NO: 331476 - RNA, 19 nt, Homo sapiens
  misc_RNA (1)...(19): siRNA sense strand
ugaaugaacagucucaaau

SEQ ID NO: 331477 - RNA, 19 nt, Homo sapiens
  misc_RNA (1)...(19): siRNA sense strand
agacaaauuucagguacuu

SEQ ID NO: 331478 - RNA, 19 nt, Homo sapiens
  misc_RNA (1)...(19): siRNA sense strand
cugagaaguuaaagaugua

SEQ ID NO: 331479 - RNA, 19 nt, Homo sapiens
  misc_RNA (1)...(19): siRNA sense strand
gaaacagcuucaggaguuc

SEQ ID NO: 331480 - RNA, 19 nt, Homo sapiens
  misc_RNA (1)...(19): siRNA sense strand
gaagauuccgaaauaagau

SEQ ID NO: 331481 - RNA, 19 nt, Homo sapiens
  misc_RNA (1)...(19): siRNA sense strand
caagcaagcacgugcaaga

SEQ ID NO: 331482 - RNA, 19 nt, Homo sapiens
  misc_RNA (1)...(19): siRNA sense strand
ugaacagucucaaauaacu

SEQ ID NO: 331483 - RNA, 19 nt, Homo sapiens
  misc_RNA (1)...(19): siRNA sense strand
gagaugguggcccgaagua

SEQ ID NO: 331484 - RNA, 19 nt, Homo sapiens
  misc_RNA (1)...(19): siRNA sense strand
cgagacaucuuuuauuaug

SEQ ID NO: 331485 - RNA, 19 nt, Homo sapiens
  misc_RNA (1)...(19): siRNA sense strand
caagcaaguuuucccauuu

SEQ ID NO: 331486 - RNA, 19 nt, Homo sapiens
  misc_RNA (1)...(19): siRNA sense strand
gagaucaucgacuaccuuu

SEQ ID NO: 331487 - RNA, 19 nt, Homo sapiens
  misc_RNA (1)...(19): siRNA sense strand
ugaaauagacugggaagau

SEQ ID NO: 331488 - RNA, 19 nt, Homo sapiens
  misc_RNA (1)...(19): siRNA sense strand
aguagaagcuaaagugcaa

SEQ ID NO: 331489 - RNA, 19 nt, Homo sapiens
  misc_RNA (1)...(19): siRNA sense strand
gagaugagcuuccagauga

SEQ ID NO: 331490 - RNA, 19 nt, Homo sapiens
  misc_RNA (1)...(19): siRNA sense strand
guacgaagauaaccaaauc

SEQ ID NO: 331491 - RNA, 19 nt, Homo sapiens
  misc_RNA (1)...(19): siRNA sense strand
gaaaugucaugaccuugaa

SEQ ID NO: 331492 - RNA, 19 nt, Homo sapiens
  misc_RNA (1)...(19): siRNA sense strand
ucaaauauguugcaaugga

SEQ ID NO: 331493 - RNA, 19 nt, Homo sapiens
  misc_RNA (1)...(19): siRNA sense strand
caaaugaguacgaagauaa

SEQ ID NO: 331494 - RNA, 19 nt, Homo sapiens
  misc_RNA (1)...(19): siRNA sense strand
gcaaauacaagcucaccua

SEQ ID NO: 331495 - RNA, 19 nt, Homo sapiens
  misc_RNA (1)...(19): siRNA sense strand
ggagugugguggcgucuuu

SEQ ID NO: 331496 - RNA, 19 nt, Homo sapiens
  misc_RNA (1)...(19): siRNA sense strand
ggaaaugucaugaccuuga

SEQ ID NO: 331497 - RNA, 19 nt, Homo sapiens
  misc_RNA (1)...(19): siRNA sense strand
gaagauuuagccacuuaua

SEQ ID NO: 331498 - RNA, 19 nt, Homo sapiens
  misc_RNA (1)...(19): siRNA sense strand
gcggccaucucgcaacuua

SEQ ID NO: 331499 - RNA, 19 nt, Homo sapiens
  misc_RNA (1)...(19): siRNA sense strand
ccaaaugaguacgaagaua

SEQ ID NO: 331500 - RNA, 19 nt, Homo sapiens
  misc_RNA (1)...(19): siRNA sense strand
uggaagauuuagccacuua

SEQ ID NO: 331501 - RNA, 19 nt, Homo sapiens
  misc_RNA (1)...(19): siRNA sense strand
uauggaauccgucucaaua

SEQ ID NO: 331502 - RNA, 19 nt, Homo sapiens
  misc_RNA (1)...(19): siRNA sense strand
ggaagauacuguggagaug

SEQ ID NO: 331503 - RNA, 19 nt, Homo sapiens
  misc_RNA (1)...(19): siRNA sense strand
cagguugcuuggcugauua

SEQ ID NO: 331504 - RNA, 19 nt, Homo sapiens
  misc_RNA (1)...(19): siRNA sense strand
caggaaaugucaugaccuu

SEQ ID NO: 331505 - RNA, 19 nt, Homo sapiens
  misc_RNA (1)...(19): siRNA sense strand
caaauauguugcaauggau

SEQ ID NO: 331506 - RNA, 19 nt, Homo sapiens
  misc_RNA (1)...(19): siRNA sense strand
gaagauacuguggagauga

SEQ ID NO: 331507 - RNA, 19 nt, Homo sapiens
  misc_RNA (1)...(19): siRNA sense strand
gaagcacggucuggcaaau

SEQ ID NO: 331508 - RNA, 19 nt, Homo sapiens
  misc_RNA (1)...(19): siRNA sense strand
gucaugaccuugaaguuuc

SEQ ID NO: 331509 - RNA, 19 nt, Homo sapiens
  misc_RNA (1)...(19): siRNA sense strand
ggagaugagcuuccagaug

SEQ ID NO: 331510 - RNA, 19 nt, Homo sapiens
  misc_RNA (1)...(19): siRNA sense strand
aaagaugggaugccuauug

SEQ ID NO: 331511 - RNA, 19 nt, Homo sapiens
  misc_RNA (1)...(19): siRNA sense strand
gcacauuagacucaaguau

SEQ ID NO: 331512 - RNA, 19 nt, Homo sapiens
  misc_RNA (1)...(19): siRNA sense strand
gaugggaugccuauugcua

SEQ ID NO: 331513 - RNA, 19 nt, Homo sapiens
  misc_RNA (1)...(19): siRNA sense strand
cuaaggcggugugugaauu

SEQ ID NO: 331514 - RNA, 19 nt, Homo sapiens
  misc_RNA (1)...(19): siRNA sense strand
gagguuuccaaaucaaaua

SEQ ID NO: 331515 - RNA, 19 nt, Homo sapiens
  misc_RNA (1)...(19): siRNA sense strand
caucaucaguacaggaaau

SEQ ID NO: 331516 - RNA, 19 nt, Homo sapiens
  misc_RNA (1)...(19): siRNA sense strand
ccagguugcuuggcugauu

SEQ ID NO: 331517 - RNA, 19 nt, Homo sapiens
  misc_RNA (1)...(19): siRNA sense strand
ggcugauuauguugaaaua

SEQ ID NO: 331518 - RNA, 19 nt, Homo sapiens
  misc_RNA (1)...(19): siRNA sense strand
uugcuuggcugauuauguu

SEQ ID NO: 331519 - RNA, 19 nt, Homo sapiens
  misc_RNA (1)...(19): siRNA sense strand
ucuccaggcuucccaaaug

SEQ ID NO: 331520 - RNA, 19 nt, Homo sapiens
  misc_RNA (1)...(19): siRNA sense strand
ccuugaaguuucuaaguga

SEQ ID NO: 331521 - RNA, 19 nt, Homo sapiens
  misc_RNA (1)...(19): siRNA sense strand
caacuuacaagcagcuaga

SEQ ID NO: 331522 - RNA, 19 nt, Homo sapiens
  misc_RNA (1)...(19): siRNA sense strand
uuacagauccaaagcaaau

SEQ ID NO: 331523 - RNA, 19 nt, Homo sapiens
  misc_RNA (1)...(19): siRNA sense strand
ggaauccgucucaauagga

SEQ ID NO: 331524 - RNA, 19 nt, Homo sapiens
  misc_RNA (1)...(19): siRNA sense strand
gggaagauacuguggagau

SEQ ID NO: 331525 - RNA, 19 nt, Homo sapiens
  misc_RNA (1)...(19): siRNA sense strand
caaguauggucagcguauu

SEQ ID NO: 331526 - RNA, 19 nt, Homo sapiens
  misc_RNA (1)...(19): siRNA sense strand
cuacuucuacuggaaauaa

SEQ ID NO: 331527 - RNA, 19 nt, Homo sapiens
  misc_RNA (1)...(19): siRNA sense strand
ccaaauccagucaaggaaa

SEQ ID NO: 331528 - RNA, 19 nt, Homo sapiens
  misc_RNA (1)...(19): siRNA sense strand
gggcccaacuguggauuug

SEQ ID NO: 331529 - RNA, 19 nt, Homo sapiens
  misc_RNA (1)...(19): siRNA sense strand
ugaaagaugggaugccuau

SEQ ID NO: 331530 - RNA, 19 nt, Homo sapiens
  misc_RNA (1)...(19): siRNA sense strand
acauuagacucaaguaugg

SEQ ID NO: 331531 - RNA, 19 nt, Homo sapiens
  misc_RNA (1)...(19): siRNA sense strand
guacuacuucuacuggaaa

SEQ ID NO: 331532 - RNA, 19 nt, Homo sapiens
  misc_RNA (1)...(19): siRNA sense strand
uauaugacaguuacgauga

SEQ ID NO: 331533 - RNA, 19 nt, Homo sapiens
  misc_RNA (1)...(19): siRNA sense strand
aagcuaaggcgguguguga

SEQ ID NO: 331534 - RNA, 19 nt, Homo sapiens
  misc_RNA (1)...(19): siRNA sense strand
gacaucaucaguacaggaa

SEQ ID NO: 331535 - RNA, 19 nt, Homo sapiens
  misc_RNA (1)...(19): siRNA sense strand
ucaauaggagugaaagaug

SEQ ID NO: 331536 - RNA, 19 nt, Homo sapiens
  misc_RNA (1)...(19): siRNA sense strand
caaauccagucaaggaaaa

SEQ ID NO: 331537 - RNA, 19 nt, Homo sapiens
  misc_RNA (1)...(19): siRNA sense strand
caagcucaccuacgcagaa

SEQ ID NO: 331538 - RNA, 19 nt, Homo sapiens
  misc_RNA (1)...(19): siRNA sense strand
ugucaugaccuugaaguuu

SEQ ID NO: 331539 - RNA, 19 nt, Homo sapiens
  misc_RNA (1)...(19): siRNA sense strand
gguggcgucuuuacagauc

SEQ ID NO: 331540 - RNA, 19 nt, Homo sapiens
  misc_RNA (1)...(19): siRNA sense strand
ggcggugugugaauuugaa

SEQ ID NO: 331541 - RNA, 19 nt, Homo sapiens
  misc_RNA (1)...(19): siRNA sense strand
ggagguuuccaaaucaaau

SEQ ID NO: 331542 - RNA, 19 nt, Homo sapiens
  misc_RNA (1)...(19): siRNA sense strand
agugacagcuggagguuuc

SEQ ID NO: 331543 - RNA, 19 nt, Homo sapiens
  misc_RNA (1)...(19): siRNA sense strand
cacauuagacucaaguaug

SEQ ID NO: 331544 - RNA, 19 nt, Homo sapiens
  misc_RNA (1)...(19): siRNA sense strand
uaaggcggugugugaauuu

SEQ ID NO: 331545 - RNA, 19 nt, Homo sapiens
  misc_RNA (1)...(19): siRNA sense strand
gcuacaacccacacgcaaa

SEQ ID NO: 331546 - RNA, 19 nt, Homo sapiens
  misc_RNA (1)...(19): siRNA sense strand
acagauccaaagcaaauuu

SEQ ID NO: 331547 - RNA, 19 nt, Homo sapiens
  misc_RNA (1)...(19): siRNA sense strand
gugguggcgucuuuacaga

SEQ ID NO: 331548 - RNA, 19 nt, Homo sapiens
  misc_RNA (1)...(19): siRNA sense strand
gauccuguauccaaaucca

SEQ ID NO: 331549 - RNA, 19 nt, Homo sapiens
  misc_RNA (1)...(19): siRNA sense strand
ucaaguauggucagcguau

SEQ ID NO: 331550 - RNA, 19 nt, Homo sapiens
  misc_RNA (1)...(19): siRNA sense strand
gaagccagggcccaacugu

SEQ ID NO: 331551 - RNA, 19 nt, Homo sapiens
  misc_RNA (1)...(19): siRNA sense strand
ccaaaucaaauauguugca

SEQ ID NO: 331552 - RNA, 19 nt, Homo sapiens
  misc_RNA (1)...(19): siRNA sense strand
gaugauguccauggcuuug

SEQ ID NO: 331553 - RNA, 19 nt, Homo sapiens
  misc_RNA (1)...(19): siRNA sense strand
ucaccuacgcagaagcuaa

SEQ ID NO: 331554 - RNA, 19 nt, Homo sapiens
  misc_RNA (1)...(19): siRNA sense strand
gaagaugacccagguugcu

SEQ ID NO: 331555 - RNA, 19 nt, Homo sapiens
  misc_RNA (1)...(19): siRNA sense strand
gaaagaugggaugccuauu

SEQ ID NO: 331556 - RNA, 19 nt, Homo sapiens
  misc_RNA (1)...(19): siRNA sense strand
gcuaaggcggugugugaau

SEQ ID NO: 331557 - RNA, 19 nt, Homo sapiens
  misc_RNA (1)...(19): siRNA sense strand
cuccaggcuucccaaauga

SEQ ID NO: 331558 - RNA, 19 nt, Homo sapiens
  misc_RNA (1)...(19): siRNA sense strand
gcuaagggcagaguuggau

SEQ ID NO: 331559 - RNA, 19 nt, Homo sapiens
  misc_RNA (1)...(19): siRNA sense strand
gaccuugaaguuucuaagu

SEQ ID NO: 331560 - RNA, 19 nt, Homo sapiens
  misc_RNA (1)...(19): siRNA sense strand
gaacgagcagccggugugu

SEQ ID NO: 331561 - RNA, 19 nt, Homo sapiens
  misc_RNA (1)...(19): siRNA sense strand
ggaugccuauugcuacaac

SEQ ID NO: 331562 - RNA, 19 nt, Homo sapiens
  misc_RNA (1)...(19): siRNA sense strand
aagaugggaugccuauugc

SEQ ID NO: 331563 - RNA, 19 nt, Homo sapiens
  misc_RNA (1)...(19): siRNA sense strand
guauccaaauccagucaag

SEQ ID NO: 331564 - RNA, 19 nt, Homo sapiens
  misc_RNA (1)...(19): siRNA sense strand
ugauguccauggcuuugug

SEQ ID NO: 331565 - RNA, 19 nt, Homo sapiens
  misc_RNA (1)...(19): siRNA sense strand
ggaagauuuagccacuuau

SEQ ID NO: 331566 - RNA, 19 nt, Homo sapiens
  misc_RNA (1)...(19): siRNA sense strand
cuacaacccacacgcaaag

SEQ ID NO: 331567 - RNA, 19 nt, Homo sapiens
  misc_RNA (1)...(19): siRNA sense strand
caguuacgaugauguccau

SEQ ID NO: 331568 - RNA, 19 nt, Homo sapiens
  misc_RNA (1)...(19): siRNA sense strand
ggccaucucgcaacuuaca

SEQ ID NO: 331569 - RNA, 19 nt, Homo sapiens
  misc_RNA (1)...(19): siRNA sense strand
uggaauccgucucaauagg

SEQ ID NO: 331570 - RNA, 19 nt, Homo sapiens
  misc_RNA (1)...(19): siRNA sense strand
guuucuaagugaugcuuca

SEQ ID NO: 331571 - RNA, 19 nt, Homo sapiens
  misc_RNA (1)...(19): siRNA sense strand
aauuggauuucaugucugu

SEQ ID NO: 331572 - RNA, 19 nt, Homo sapiens
  misc_RNA (1)...(19): siRNA sense strand
ugaguacgaagauaaccaa

SEQ ID NO: 331573 - RNA, 19 nt, Homo sapiens
  misc_RNA (1)...(19): siRNA sense strand
uggcauuauugauuaugga

SEQ ID NO: 331574 - RNA, 19 nt, Homo sapiens
  misc_RNA (1)...(19): siRNA sense strand
uaugacaguuacgaugaug

SEQ ID NO: 331575 - RNA, 19 nt, Homo sapiens
  misc_RNA (1)...(19): siRNA sense strand
aagcacggucuggcaaaua

SEQ ID NO: 331576 - RNA, 19 nt, Homo sapiens
  misc_RNA (1)...(19): siRNA sense strand
gcuaugggaagacacucaa

SEQ ID NO: 331577 - RNA, 19 nt, Homo sapiens
  misc_RNA (1)...(19): siRNA sense strand
cuaagugaugcuucaguga

SEQ ID NO: 331578 - RNA, 19 nt, Homo sapiens
  misc_RNA (1)...(19): siRNA sense strand
ucaaagagcugcugacauc

SEQ ID NO: 331579 - RNA, 19 nt, Homo sapiens
  misc_RNA (1)...(19): siRNA sense strand
agaagaagguccguaaaua

SEQ ID NO: 331580 - RNA, 19 nt, Homo sapiens
  misc_RNA (1)...(19): siRNA sense strand
ccaacuaccugaacgauga

SEQ ID NO: 331581 - RNA, 19 nt, Homo sapiens
  misc_RNA (1)...(19): siRNA sense strand
ggaguucaccucuguguuu

SEQ ID NO: 331582 - RNA, 19 nt, Homo sapiens
  misc_RNA (1)...(19): siRNA sense strand
ggagcacgguggacugauu

SEQ ID NO: 331583 - RNA, 19 nt, Homo sapiens
  misc_RNA (1)...(19): siRNA sense strand
ggacaagaauuuugccuuu

SEQ ID NO: 331584 - RNA, 19 nt, Homo sapiens
  misc_RNA (1)...(19): siRNA sense strand
gaagaagguccguaaauac

SEQ ID NO: 331585 - RNA, 19 nt, Homo sapiens
  misc_RNA (1)...(19): siRNA sense strand
gaagaagaagguccguaaa

SEQ ID NO: 331586 - RNA, 19 nt, Homo sapiens
  misc_RNA (1)...(19): siRNA sense strand
caacgagaauaaacaagag

SEQ ID NO: 331587 - RNA, 19 nt, Homo sapiens
  misc_RNA (1)...(19): siRNA sense strand
ggagccagaugaccagaca

SEQ ID NO: 331588 - RNA, 19 nt, Homo sapiens
  misc_RNA (1)...(19): siRNA sense strand
agaagaagaagguccguaa

SEQ ID NO: 331589 - RNA, 19 nt, Homo sapiens
  misc_RNA (1)...(19): siRNA sense strand
gugaguacguggacaucaa

SEQ ID NO: 331590 - RNA, 19 nt, Homo sapiens
  misc_RNA (1)...(19): siRNA sense strand
caugauggauuucuucaac

SEQ ID NO: 331591 - RNA, 19 nt, Homo sapiens
  misc_RNA (1)...(19): siRNA sense strand
gaccagaggcgcuaaagag

SEQ ID NO: 331592 - RNA, 19 nt, Homo sapiens
  misc_RNA (1)...(19): siRNA sense strand
gcaagcugcgggucagauu

SEQ ID NO: 331593 - RNA, 19 nt, Homo sapiens
  misc_RNA (1)...(19): siRNA sense strand
ucaacgagaauaaacaaga

SEQ ID NO: 331594 - RNA, 19 nt, Homo sapiens
  misc_RNA (1)...(19): siRNA sense strand
gaguucaccucuguguuug

SEQ ID NO: 331595 - RNA, 19 nt, Homo sapiens
  misc_RNA (1)...(19): siRNA sense strand
gcucaacgagaauaaacaa

SEQ ID NO: 331596 - RNA, 19 nt, Homo sapiens
  misc_RNA (1)...(19): siRNA sense strand
uuaaccaggacaagaauuu

SEQ ID NO: 331597 - RNA, 19 nt, Homo sapiens
  misc_RNA (1)...(19): siRNA sense strand
cgacgacgcagcaaaccuu

SEQ ID NO: 331598 - RNA, 19 nt, Homo sapiens
  misc_RNA (1)...(19): siRNA sense strand
aacaagagcgggacaagga

SEQ ID NO: 331599 - RNA, 19 nt, Homo sapiens
  misc_RNA (1)...(19): siRNA sense strand
cagggccagucacuaaaga

SEQ ID NO: 331600 - RNA, 19 nt, Homo sapiens
  misc_RNA (1)...(19): siRNA sense strand
aagaagaagguccguaaau

SEQ ID NO: 331601 - RNA, 19 nt, Homo sapiens
  misc_RNA (1)...(19): siRNA sense strand
gccacgagaagaagaagaa

SEQ ID NO: 331602 - RNA, 19 nt, Homo sapiens
  misc_RNA (1)...(19): siRNA sense strand
gacaagaauuuugccuuuu

SEQ ID NO: 331603 - RNA, 19 nt, Homo sapiens
  misc_RNA (1)...(19): siRNA sense strand
agauuaaccaggacaagaa

SEQ ID NO: 331604 - RNA, 19 nt, Homo sapiens
  misc_RNA (1)...(19): siRNA sense strand
gaggagcacgguggacuga

SEQ ID NO: 331605 - RNA, 19 nt, Homo sapiens
  misc_RNA (1)...(19): siRNA sense strand
gagcugcugacauccuuug

SEQ ID NO: 331606 - RNA, 19 nt, Homo sapiens
  misc_RNA (1)...(19): siRNA sense strand
aguguuggcugugcagauu

SEQ ID NO: 331607 - RNA, 19 nt, Homo sapiens
  misc_RNA (1)...(19): siRNA sense strand
gcagcucaacgagaauaaa

SEQ ID NO: 331608 - RNA, 19 nt, Homo sapiens
  misc_RNA (1)...(19): siRNA sense strand
uguuggcugugcagauuaa

SEQ ID NO: 331609 - RNA, 19 nt, Homo sapiens
  misc_RNA (1)...(19): siRNA sense strand
cagauuaaccaggacaaga

SEQ ID NO: 331610 - RNA, 19 nt, Homo sapiens
  misc_RNA (1)...(19): siRNA sense strand
gcuacgccuucugugagua

SEQ ID NO: 331611 - RNA, 19 nt, Homo sapiens
  misc_RNA (1)...(19): siRNA sense strand
gcaguacaaggccaugcaa

SEQ ID NO: 331612 - RNA, 19 nt, Homo sapiens
  misc_RNA (1)...(19): siRNA sense strand
gcaaguucgccaacagagu

SEQ ID NO: 331613 - RNA, 19 nt, Homo sapiens
  misc_RNA (1)...(19): siRNA sense strand
ucacugaggaggccaugau

SEQ ID NO: 331614 - RNA, 19 nt, Homo sapiens
  misc_RNA (1)...(19): siRNA sense strand
ggacgagugcagcaaguac

SEQ ID NO: 331615 - RNA, 19 nt, Homo sapiens
  misc_RNA (1)...(19): siRNA sense strand
gauuaaccaggacaagaau

SEQ ID NO: 331616 - RNA, 19 nt, Homo sapiens
  misc_RNA (1)...(19): siRNA sense strand
gagcacgguggacugauuc

SEQ ID NO: 331617 - RNA, 19 nt, Homo sapiens
  misc_RNA (1)...(19): siRNA sense strand
cgucacggaucaggccauu

SEQ ID NO: 331618 - RNA, 19 nt, Homo sapiens
  misc_RNA (1)...(19): siRNA sense strand
guguuugacugccagaaag

SEQ ID NO: 331619 - RNA, 19 nt, Homo sapiens
  misc_RNA (1)...(19): siRNA sense strand
aagagcugcugacauccuu

SEQ ID NO: 331620 - RNA, 19 nt, Homo sapiens
  misc_RNA (1)...(19): siRNA sense strand
cgaggaguaugaggagauc

SEQ ID NO: 331621 - RNA, 19 nt, Homo sapiens
  misc_RNA (1)...(19): siRNA sense strand
acaucaacgucacggauca

SEQ ID NO: 331622 - RNA, 19 nt, Homo sapiens
  misc_RNA (1)...(19): siRNA sense strand
guacaaggccaugcaagcu

SEQ ID NO: 331623 - RNA, 19 nt, Homo sapiens
  misc_RNA (1)...(19): siRNA sense strand
gggacgagugcagcaagua

SEQ ID NO: 331624 - RNA, 19 nt, Homo sapiens
  misc_RNA (1)...(19): siRNA sense strand
agcggcagcucaacgagaa

SEQ ID NO: 331625 - RNA, 19 nt, Homo sapiens
  misc_RNA (1)...(19): siRNA sense strand
gagacuacccaggcuaugg

SEQ ID NO: 331626 - RNA, 19 nt, Homo sapiens
  misc_RNA (1)...(19): siRNA sense strand
uuccagggccagucacuaa

SEQ ID NO: 331627 - RNA, 19 nt, Homo sapiens
  misc_RNA (1)...(19): siRNA sense strand
ggacaacacucucaaauca

SEQ ID NO: 331628 - RNA, 19 nt, Homo sapiens
  misc_RNA (1)...(19): siRNA sense strand
ggacagaguuuaaaugguu

SEQ ID NO: 331629 - RNA, 19 nt, Homo sapiens
  misc_RNA (1)...(19): siRNA sense strand
gagggaaacuugacuuuaa

SEQ ID NO: 331630 - RNA, 19 nt, Homo sapiens
  misc_RNA (1)...(19): siRNA sense strand
uuacacagcuugcccauua

SEQ ID NO: 331631 - RNA, 19 nt, Homo sapiens
  misc_RNA (1)...(19): siRNA sense strand
gcacaacaauccaucuuaa

SEQ ID NO: 331632 - RNA, 19 nt, Homo sapiens
  misc_RNA (1)...(19): siRNA sense strand
gauauuaccugucaccaaa

SEQ ID NO: 331633 - RNA, 19 nt, Homo sapiens
  misc_RNA (1)...(19): siRNA sense strand
ggaaauggguauuguaaau

SEQ ID NO: 331634 - RNA, 19 nt, Homo sapiens
  misc_RNA (1)...(19): siRNA sense strand
ccaaaggacuucaguguga

SEQ ID NO: 331635 - RNA, 19 nt, Homo sapiens
  misc_RNA (1)...(19): siRNA sense strand
ggaagaagguguaaucagu

SEQ ID NO: 331636 - RNA, 19 nt, Homo sapiens
  misc_RNA (1)...(19): siRNA sense strand
acaauguccuugcaaauua

SEQ ID NO: 331637 - RNA, 19 nt, Homo sapiens
  misc_RNA (1)...(19): siRNA sense strand
gcaacaagguguaaugugu

SEQ ID NO: 331638 - RNA, 19 nt, Homo sapiens
  misc_RNA (1)...(19): siRNA sense strand
gaaauaaggauucaaagga

SEQ ID NO: 331639 - RNA, 19 nt, Homo sapiens
  misc_RNA (1)...(19): siRNA sense strand
cagauuguguucaaacuua

SEQ ID NO: 331640 - RNA, 19 nt, Homo sapiens
  misc_RNA (1)...(19): siRNA sense strand
gaagaugucagccuuguaa

SEQ ID NO: 331641 - RNA, 19 nt, Homo sapiens
  misc_RNA (1)...(19): siRNA sense strand
gcaaauaggacagaguuua

SEQ ID NO: 331642 - RNA, 19 nt, Homo sapiens
  misc_RNA (1)...(19): siRNA sense strand
agaaugaucugcauccuaa

SEQ ID NO: 331643 - RNA, 19 nt, Homo sapiens
  misc_RNA (1)...(19): siRNA sense strand
gaagggagacagugcaaua

SEQ ID NO: 331644 - RNA, 19 nt, Homo sapiens
  misc_RNA (1)...(19): siRNA sense strand
agacacagcugauaauaga

SEQ ID NO: 331645 - RNA, 19 nt, Homo sapiens
  misc_RNA (1)...(19): siRNA sense strand
ggaggacaguguaauugua

SEQ ID NO: 331646 - RNA, 19 nt, Homo sapiens
  misc_RNA (1)...(19): siRNA sense strand
gcucaguccucauucauuu

SEQ ID NO: 331647 - RNA, 19 nt, Homo sapiens
  misc_RNA (1)...(19): siRNA sense strand
caacugagacugcuguuaa

SEQ ID NO: 331648 - RNA, 19 nt, Homo sapiens
  misc_RNA (1)...(19): siRNA sense strand
ggccauagauguuugcaaa

SEQ ID NO: 331649 - RNA, 19 nt, Homo sapiens
  misc_RNA (1)...(19): siRNA sense strand
gaaugaaaccugucacuug

SEQ ID NO: 331650 - RNA, 19 nt, Homo sapiens
  misc_RNA (1)...(19): siRNA sense strand
gaauggacccucuccuaua

SEQ ID NO: 331651 - RNA, 19 nt, Homo sapiens
  misc_RNA (1)...(19): siRNA sense strand
gcacagcgguacugcauuc

SEQ ID NO: 331652 - RNA, 19 nt, Homo sapiens
  misc_RNA (1)...(19): siRNA sense strand
guucaaaguucuucugcua

SEQ ID NO: 331653 - RNA, 19 nt, Homo sapiens
  misc_RNA (1)...(19): siRNA sense strand
gaucgcugcuugccucuuu

SEQ ID NO: 331654 - RNA, 19 nt, Homo sapiens
  misc_RNA (1)...(19): siRNA sense strand
gauaagacugggacaauaa

SEQ ID NO: 331655 - RNA, 19 nt, Homo sapiens
  misc_RNA (1)...(19): siRNA sense strand
gguuagaugucaccaauug

SEQ ID NO: 331656 - RNA, 19 nt, Homo sapiens
  misc_RNA (1)...(19): siRNA sense strand
gaaauggauucaucuuagu

SEQ ID NO: 331657 - RNA, 19 nt, Homo sapiens
  misc_RNA (1)...(19): siRNA sense strand
gacaguggauggagauauu

SEQ ID NO: 331658 - RNA, 19 nt, Homo sapiens
  misc_RNA (1)...(19): siRNA sense strand
gaucauacaccuuucaaug

SEQ ID NO: 331659 - RNA, 19 nt, Homo sapiens
  misc_RNA (1)...(19): siRNA sense strand
acugaaaccuuauaggaua

SEQ ID NO: 331660 - RNA, 19 nt, Homo sapiens
  misc_RNA (1)...(19): siRNA sense strand
ggacugaaaccuuauagga

SEQ ID NO: 331661 - RNA, 19 nt, Homo sapiens
  misc_RNA (1)...(19): siRNA sense strand
gaucaauacccauacagua

SEQ ID NO: 331662 - RNA, 19 nt, Homo sapiens
  misc_RNA (1)...(19): siRNA sense strand
gagcauaacacuacaggaa

SEQ ID NO: 331663 - RNA, 19 nt, Homo sapiens
  misc_RNA (1)...(19): siRNA sense strand
caaauaggacagaguuuaa

SEQ ID NO: 331664 - RNA, 19 nt, Homo sapiens
  misc_RNA (1)...(19): siRNA sense strand
gggagaagccagcagauaa

SEQ ID NO: 331665 - RNA, 19 nt, Homo sapiens
  misc_RNA (1)...(19): siRNA sense strand
ggaauccguuucauaggaa

SEQ ID NO: 331666 - RNA, 19 nt, Homo sapiens
  misc_RNA (1)...(19): siRNA sense strand
gaaaguauucaguucugua

SEQ ID NO: 331667 - RNA, 19 nt, Homo sapiens
  misc_RNA (1)...(19): siRNA sense strand
agacugagaucuacuaaag

SEQ ID NO: 331668 - RNA, 19 nt, Homo sapiens
  misc_RNA (1)...(19): siRNA sense strand
gauaugaacuauacaugag

SEQ ID NO: 331669 - RNA, 19 nt, Homo sapiens
  misc_RNA (1)...(19): siRNA sense strand
gaggacaaguucaaaguuc

SEQ ID NO: 331670 - RNA, 19 nt, Homo sapiens
  misc_RNA (1)...(19): siRNA sense strand
ccacuuggaugucaacaau

SEQ ID NO: 331671 - RNA, 19 nt, Homo sapiens
  misc_RNA (1)...(19): siRNA sense strand
gggcuuaggugugaucauu

SEQ ID NO: 331672 - RNA, 19 nt, Homo sapiens
  misc_RNA (1)...(19): siRNA sense strand
ggucuucgcuguaaucagu

SEQ ID NO: 331673 - RNA, 19 nt, Homo sapiens
  misc_RNA (1)...(19): siRNA sense strand
gacaguagaugggcagauu

SEQ ID NO: 331674 - RNA, 19 nt, Homo sapiens
  misc_RNA (1)...(19): siRNA sense strand
ucaggagccuugaaugaaa

SEQ ID NO: 331675 - RNA, 19 nt, Homo sapiens
  misc_RNA (1)...(19): siRNA sense strand
ccaaaugcccacuggcuua

SEQ ID NO: 331676 - RNA, 19 nt, Homo sapiens
  misc_RNA (1)...(19): siRNA sense strand
aaaucaaucuggucccaua

SEQ ID NO: 331677 - RNA, 19 nt, Homo sapiens
  misc_RNA (1)...(19): siRNA sense strand
gcugaaaccugagcaacaa

SEQ ID NO: 331678 - RNA, 19 nt, Homo sapiens
  misc_RNA (1)...(19): siRNA sense strand
agaaauggauucaucuuag

SEQ ID NO: 331679 - RNA, 19 nt, Homo sapiens
  misc_RNA (1)...(19): siRNA sense strand
gaaaccacaucugaggaaa

SEQ ID NO: 331680 - RNA, 19 nt, Homo sapiens
  misc_RNA (1)...(19): siRNA sense strand
ugauaagacugggacaaua

SEQ ID NO: 331681 - RNA, 19 nt, Homo sapiens
  misc_RNA (1)...(19): siRNA sense strand
gucuucagcuuuccaauuu

SEQ ID NO: 331682 - RNA, 19 nt, Homo sapiens
  misc_RNA (1)...(19): siRNA sense strand
caagguguaauguguguua

SEQ ID NO: 331683 - RNA, 19 nt, Homo sapiens
  misc_RNA (1)...(19): siRNA sense strand
ucaauaugcuuucugaaca

SEQ ID NO: 331684 - RNA, 19 nt, Homo sapiens
  misc_RNA (1)...(19): siRNA sense strand
cuaaagaaaccacaucuga

SEQ ID NO: 331685 - RNA, 19 nt, Homo sapiens
  misc_RNA (1)...(19): siRNA sense strand
gacauuaccugggaccauu

SEQ ID NO: 331686 - RNA, 19 nt, Homo sapiens
  misc_RNA (1)...(19): siRNA sense strand
ggagggaaacuucuaccua

SEQ ID NO: 331687 - RNA, 19 nt, Homo sapiens
  misc_RNA (1)...(19): siRNA sense strand
gggagacagugcaauaaau

SEQ ID NO: 331688 - RNA, 19 nt, Homo sapiens
  misc_RNA (1)...(19): siRNA sense strand
gggacugucuguaaugcua

SEQ ID NO: 331689 - RNA, 19 nt, Homo sapiens
  misc_RNA (1)...(19): siRNA sense strand
caacaagccagccauauag

SEQ ID NO: 331690 - RNA, 19 nt, Homo sapiens
  misc_RNA (1)...(19): siRNA sense strand
gcaauucaguugguugugu

SEQ ID NO: 331691 - RNA, 19 nt, Homo sapiens
  misc_RNA (1)...(19): siRNA sense strand
ggaaucaacagcacaacaa

SEQ ID NO: 331692 - RNA, 19 nt, Homo sapiens
  misc_RNA (1)...(19): siRNA sense strand
gcaagaacucuaagugguu

SEQ ID NO: 331693 - RNA, 19 nt, Homo sapiens
  misc_RNA (1)...(19): siRNA sense strand
gaugucagccuuguaauug

SEQ ID NO: 331694 - RNA, 19 nt, Homo sapiens
  misc_RNA (1)...(19): siRNA sense strand
gaccauuacuuuggauuug

SEQ ID NO: 331695 - RNA, 19 nt, Homo sapiens
  misc_RNA (1)...(19): siRNA sense strand
caaaucaacaggacaaugu

SEQ ID NO: 331696 - RNA, 19 nt, Homo sapiens
  misc_RNA (1)...(19): siRNA sense strand
gcuugccucuuuauaauga

SEQ ID NO: 331697 - RNA, 19 nt, Homo sapiens
  misc_RNA (1)...(19): siRNA sense strand
ggagacacagcugauaaua

SEQ ID NO: 331698 - RNA, 19 nt, Homo sapiens
  misc_RNA (1)...(19): siRNA sense strand
gugguucaauuacagauuu

SEQ ID NO: 331699 - RNA, 19 nt, Homo sapiens
  misc_RNA (1)...(19): siRNA sense strand
gugaucaaguuuacgcuuu

SEQ ID NO: 331700 - RNA, 19 nt, Homo sapiens
  misc_RNA (1)...(19): siRNA sense strand
auacagacuucacugguaa

SEQ ID NO: 331701 - RNA, 19 nt, Homo sapiens
  misc_RNA (1)...(19): siRNA sense strand
gaagccagcagauaauguu

SEQ ID NO: 331702 - RNA, 19 nt, Homo sapiens
  misc_RNA (1)...(19): siRNA sense strand
ccucacagguacaauuuga

SEQ ID NO: 331703 - RNA, 19 nt, Homo sapiens
  misc_RNA (1)...(19): siRNA sense strand
gaggaggaguuugugauga

SEQ ID NO: 331704 - RNA, 19 nt, Homo sapiens
  misc_RNA (1)...(19): siRNA sense strand
caacggaaauaaggauuca

SEQ ID NO: 331705 - RNA, 19 nt, Homo sapiens
  misc_RNA (1)...(19): siRNA sense strand
caauaugcuuucugaacaa

SEQ ID NO: 331706 - RNA, 19 nt, Homo sapiens
  misc_RNA (1)...(19): siRNA sense strand
gaggacaguguaauuguaa

SEQ ID NO: 331707 - RNA, 19 nt, Homo sapiens
  misc_RNA (1)...(19): siRNA sense strand
agaaagagaccauguuuua

SEQ ID NO: 331708 - RNA, 19 nt, Homo sapiens
  misc_RNA (1)...(19): siRNA sense strand
caauccaucuuaagugguu

SEQ ID NO: 331709 - RNA, 19 nt, Homo sapiens
  misc_RNA (1)...(19): siRNA sense strand
gaucccuccuucagucuuu

SEQ ID NO: 331710 - RNA, 19 nt, Homo sapiens
  misc_RNA (1)...(19): siRNA sense strand
agaaagaacgggagaauca

SEQ ID NO: 331711 - RNA, 19 nt, Homo sapiens
  misc_RNA (1)...(19): siRNA sense strand
ggagacagugcaauaaaug

SEQ ID NO: 331712 - RNA, 19 nt, Homo sapiens
  misc_RNA (1)...(19): siRNA sense strand
gugcaaagcaaacguuauu

SEQ ID NO: 331713 - RNA, 19 nt, Homo sapiens
  misc_RNA (1)...(19): siRNA sense strand
acaacaagccagccauaua

SEQ ID NO: 331714 - RNA, 19 nt, Homo sapiens
  misc_RNA (1)...(19): siRNA sense strand
cuucauggguuucaaaugu

SEQ ID NO: 331715 - RNA, 19 nt, Homo sapiens
  misc_RNA (1)...(19): siRNA sense strand
acugagaucuacuaaagaa

SEQ ID NO: 331716 - RNA, 19 nt, Homo sapiens
  misc_RNA (1)...(19): siRNA sense strand
aaucaaggagugacuauuu

SEQ ID NO: 331717 - RNA, 19 nt, Homo sapiens
  misc_RNA (1)...(19): siRNA sense strand
aauacagacuucacuggua

SEQ ID NO: 331718 - RNA, 19 nt, Homo sapiens
  misc_RNA (1)...(19): siRNA sense strand
gggagcaggacaaacuuua

SEQ ID NO: 331719 - RNA, 19 nt, Homo sapiens
  misc_RNA (1)...(19): siRNA sense strand
gugcaugguucaacaagga

SEQ ID NO: 331720 - RNA, 19 nt, Homo sapiens
  misc_RNA (1)...(19): siRNA sense strand
uaacaaaucaacaggacaa

SEQ ID NO: 331721 - RNA, 19 nt, Homo sapiens
  misc_RNA (1)...(19): siRNA sense strand
uuaaugauguuggauguga

SEQ ID NO: 331722 - RNA, 19 nt, Homo sapiens
  misc_RNA (1)...(19): siRNA sense strand
aaauuucuccgaagcuuua

SEQ ID NO: 331723 - RNA, 19 nt, Homo sapiens
  misc_RNA (1)...(19): siRNA sense strand
gagugacuauuucaguuga

SEQ ID NO: 331724 - RNA, 19 nt, Homo sapiens
  misc_RNA (1)...(19): siRNA sense strand
cagcggaacuaaauggaau

SEQ ID NO: 331725 - RNA, 19 nt, Homo sapiens
  misc_RNA (1)...(19): siRNA sense strand
cuccgaagcuuuaaugaug

SEQ ID NO: 331726 - RNA, 19 nt, Homo sapiens
  misc_RNA (1)...(19): siRNA sense strand
ccgccaaggugaucaaguu

SEQ ID NO: 331727 - RNA, 19 nt, Homo sapiens
  misc_RNA (1)...(19): siRNA sense strand
gaagaaaccuacaaucaaa

SEQ ID NO: 331728 - RNA, 19 nt, Homo sapiens
  misc_RNA (1)...(19): siRNA sense strand
gaacaucacugccaaagga

SEQ ID NO: 331729 - RNA, 19 nt, Homo sapiens
  misc_RNA (1)...(19): siRNA sense strand
ggaauuagaucaucacuuc

SEQ ID NO: 331730 - RNA, 19 nt, Homo sapiens
  misc_RNA (1)...(19): siRNA sense strand
gaacguggcucacauaagu

SEQ ID NO: 331731 - RNA, 19 nt, Homo sapiens
  misc_RNA (1)...(19): siRNA sense strand
gaaacuaccugguuaaaca

SEQ ID NO: 331732 - RNA, 19 nt, Homo sapiens
  misc_RNA (1)...(19): siRNA sense strand
acaaacagcucaccacaua

SEQ ID NO: 331733 - RNA, 19 nt, Homo sapiens
  misc_RNA (1)...(19): siRNA sense strand
ugaaagaugugcuaaauga

SEQ ID NO: 331734 - RNA, 19 nt, Homo sapiens
  misc_RNA (1)...(19): siRNA sense strand
gaagaacgcuggaauaggu

SEQ ID NO: 331735 - RNA, 19 nt, Homo sapiens
  misc_RNA (1)...(19): siRNA sense strand
guaagcaggugaugaagua

SEQ ID NO: 331736 - RNA, 19 nt, Homo sapiens
  misc_RNA (1)...(19): siRNA sense strand
gcaagacacuuccgaaaug

SEQ ID NO: 331737 - RNA, 19 nt, Homo sapiens
  misc_RNA (1)...(19): siRNA sense strand
ggaaagagcaucacaguug

SEQ ID NO: 331738 - RNA, 19 nt, Homo sapiens
  misc_RNA (1)...(19): siRNA sense strand
gcaaggagaucgcuacuca

SEQ ID NO: 331739 - RNA, 19 nt, Homo sapiens
  misc_RNA (1)...(19): siRNA sense strand
ucaaauggcugaauaugaa

SEQ ID NO: 331740 - RNA, 19 nt, Homo sapiens
  misc_RNA (1)...(19): siRNA sense strand
gaagaagaggcaauuaaua

SEQ ID NO: 331741 - RNA, 19 nt, Homo sapiens
  misc_RNA (1)...(19): siRNA sense strand
ggaauaagauuugcagaga

SEQ ID NO: 331742 - RNA, 19 nt, Homo sapiens
  misc_RNA (1)...(19): siRNA sense strand
uagaagaacugaucaaaug

SEQ ID NO: 331743 - RNA, 19 nt, Homo sapiens
  misc_RNA (1)...(19): siRNA sense strand
gaaggaagcuauuggaucu

SEQ ID NO: 331744 - RNA, 19 nt, Homo sapiens
  misc_RNA (1)...(19): siRNA sense strand
ucacaaagguacuuaagaa

SEQ ID NO: 331745 - RNA, 19 nt, Homo sapiens
  misc_RNA (1)...(19): siRNA sense strand
gcagaugaauuaaaccaaa

SEQ ID NO: 331746 - RNA, 19 nt, Homo sapiens
  misc_RNA (1)...(19): siRNA sense strand
gauagaugcuuuccaaguu

SEQ ID NO: 331747 - RNA, 19 nt, Homo sapiens
  misc_RNA (1)...(19): siRNA sense strand
gaaaaggugucucaacaua

SEQ ID NO: 331748 - RNA, 19 nt, Homo sapiens
  misc_RNA (1)...(19): siRNA sense strand
gauguugaauuaucgcuua

SEQ ID NO: 331749 - RNA, 19 nt, Homo sapiens
  misc_RNA (1)...(19): siRNA sense strand
ggacagaauuaauagaaug

SEQ ID NO: 331750 - RNA, 19 nt, Homo sapiens
  misc_RNA (1)...(19): siRNA sense strand
agacuuaacucaagaaaug

SEQ ID NO: 331751 - RNA, 19 nt, Homo sapiens
  misc_RNA (1)...(19): siRNA sense strand
aacagaggcugaagaauua

SEQ ID NO: 331752 - RNA, 19 nt, Homo sapiens
  misc_RNA (1)...(19): siRNA sense strand
ggagacaguuccauuguga

SEQ ID NO: 331753 - RNA, 19 nt, Homo sapiens
  misc_RNA (1)...(19): siRNA sense strand
cuaagaagaucaacaguga

SEQ ID NO: 331754 - RNA, 19 nt, Homo sapiens
  misc_RNA (1)...(19): siRNA sense strand
ggucaccacugaaacauuu

SEQ ID NO: 331755 - RNA, 19 nt, Homo sapiens
  misc_RNA (1)...(19): siRNA sense strand
gcaagcagauuucuuugga

SEQ ID NO: 331756 - RNA, 19 nt, Homo sapiens
  misc_RNA (1)...(19): siRNA sense strand
gauaugagaacagcaauua

SEQ ID NO: 331757 - RNA, 19 nt, Homo sapiens
  misc_RNA (1)...(19): siRNA sense strand
aaacucaaauggcugaaua

SEQ ID NO: 331758 - RNA, 19 nt, Homo sapiens
  misc_RNA (1)...(19): siRNA sense strand
uaacagaggcugaagaauu

SEQ ID NO: 331759 - RNA, 19 nt, Homo sapiens
  misc_RNA (1)...(19): siRNA sense strand
caacuugcuucuggaauua

SEQ ID NO: 331760 - RNA, 19 nt, Homo sapiens
  misc_RNA (1)...(19): siRNA sense strand
gcagagagcaagcagauuu

SEQ ID NO: 331761 - RNA, 19 nt, Homo sapiens
  misc_RNA (1)...(19): siRNA sense strand
gauggaagcuucuugaaag

SEQ ID NO: 331762 - RNA, 19 nt, Homo sapiens
  misc_RNA (1)...(19): siRNA sense strand
aaagauccguuugcaauua

SEQ ID NO: 331763 - RNA, 19 nt, Homo sapiens
  misc_RNA (1)...(19): siRNA sense strand
ggaaaccacccaucaauga

SEQ ID NO: 331764 - RNA, 19 nt, Homo sapiens
  misc_RNA (1)...(19): siRNA sense strand
ggagaagguuucaucagaa

SEQ ID NO: 331765 - RNA, 19 nt, Homo sapiens
  misc_RNA (1)...(19): siRNA sense strand
gcuauuggaucuucuagaa

SEQ ID NO: 331766 - RNA, 19 nt, Homo sapiens
  misc_RNA (1)...(19): siRNA sense strand
ucagaacaauguggaauua

SEQ ID NO: 331767 - RNA, 19 nt, Homo sapiens
  misc_RNA (1)...(19): siRNA sense strand
acagauaucucuuuaagga

SEQ ID NO: 331768 - RNA, 19 nt, Homo sapiens
  misc_RNA (1)...(19): siRNA sense strand
ggagaugcuuucagauaaa

SEQ ID NO: 331769 - RNA, 19 nt, Homo sapiens
  misc_RNA (1)...(19): siRNA sense strand
cauggaugauguugaauua

SEQ ID NO: 331770 - RNA, 19 nt, Homo sapiens
  misc_RNA (1)...(19): siRNA sense strand
gaaaagaaaccaacaagua

SEQ ID NO: 331771 - RNA, 19 nt, Homo sapiens
  misc_RNA (1)...(19): siRNA sense strand
uggaauagguuacaagaaa

SEQ ID NO: 331772 - RNA, 19 nt, Homo sapiens
  misc_RNA (1)...(19): siRNA sense strand
ugaaagaugucaugaagga

SEQ ID NO: 331773 - RNA, 19 nt, Homo sapiens
  misc_RNA (1)...(19): siRNA sense strand
cagcaaggcucaaacuuau

SEQ ID NO: 331774 - RNA, 19 nt, Homo sapiens
  misc_RNA (1)...(19): siRNA sense strand
gaacagcaauuacagaaaa

SEQ ID NO: 331775 - RNA, 19 nt, Homo sapiens
  misc_RNA (1)...(19): siRNA sense strand
ggacaugcauaucuggaaa

SEQ ID NO: 331776 - RNA, 19 nt, Homo sapiens
  misc_RNA (1)...(19): siRNA sense strand
ugaaggaaauagagacuaa

SEQ ID NO: 331777 - RNA, 19 nt, Homo sapiens
  misc_RNA (1)...(19): siRNA sense strand
caaagguacuuaagaacaa

SEQ ID NO: 331778 - RNA, 19 nt, Homo sapiens
  misc_RNA (1)...(19): siRNA sense strand
aaauaaagcuuccaguuca

SEQ ID NO: 331779 - RNA, 19 nt, Homo sapiens
  misc_RNA (1)...(19): siRNA sense strand
gagaaaaccugcaagaauu

SEQ ID NO: 331780 - RNA, 19 nt, Homo sapiens
  misc_RNA (1)...(19): siRNA sense strand
cgaauucagugauaucauu

SEQ ID NO: 331781 - RNA, 19 nt, Homo sapiens
  misc_RNA (1)...(19): siRNA sense strand
ggaagaacguggagaacug

SEQ ID NO: 331782 - RNA, 19 nt, Homo sapiens
  misc_RNA (1)...(19): siRNA sense strand
ugaagguucuuuacaauga

SEQ ID NO: 331783 - RNA, 19 nt, Homo sapiens
  misc_RNA (1)...(19): siRNA sense strand
gcaagaauuugaugaugug

SEQ ID NO: 331784 - RNA, 19 nt, Homo sapiens
  misc_RNA (1)...(19): siRNA sense strand
cagauggacucgccuuuaa

SEQ ID NO: 331785 - RNA, 19 nt, Homo sapiens
  misc_RNA (1)...(19): siRNA sense strand
gacaacaacuuaugaugga

SEQ ID NO: 331786 - RNA, 19 nt, Homo sapiens
  misc_RNA (1)...(19): siRNA sense strand
uacaaaggcugacuuagaa

SEQ ID NO: 331787 - RNA, 19 nt, Homo sapiens
  misc_RNA (1)...(19): siRNA sense strand
gugagaaacuggaggcuuu

SEQ ID NO: 331788 - RNA, 19 nt, Homo sapiens
  misc_RNA (1)...(19): siRNA sense strand
ggaacaagcuaaaggucuu

SEQ ID NO: 331789 - RNA, 19 nt, Homo sapiens
  misc_RNA (1)...(19): siRNA sense strand
gugcagagcuguugaacug

SEQ ID NO: 331790 - RNA, 19 nt, Homo sapiens
  misc_RNA (1)...(19): siRNA sense strand
ucaaugauauguucacaga

SEQ ID NO: 331791 - RNA, 19 nt, Homo sapiens
  misc_RNA (1)...(19): siRNA sense strand
ggagaaugcucuucaggau

SEQ ID NO: 331792 - RNA, 19 nt, Homo sapiens
  misc_RNA (1)...(19): siRNA sense strand
cugaagaacugaugagaaa

SEQ ID NO: 331793 - RNA, 19 nt, Homo sapiens
  misc_RNA (1)...(19): siRNA sense strand
ugacuuggauacagaaauu

SEQ ID NO: 331794 - RNA, 19 nt, Homo sapiens
  misc_RNA (1)...(19): siRNA sense strand
ggaagaauguaucucaaca

SEQ ID NO: 331795 - RNA, 19 nt, Homo sapiens
  misc_RNA (1)...(19): siRNA sense strand
gcaaggcucaaacuuauuu

SEQ ID NO: 331796 - RNA, 19 nt, Homo sapiens
  misc_RNA (1)...(19): siRNA sense strand
gaggaggucuggucuuguu

SEQ ID NO: 331797 - RNA, 19 nt, Homo sapiens
  misc_RNA (1)...(19): siRNA sense strand
gugcugaccugguugcuuu

SEQ ID NO: 331798 - RNA, 19 nt, Homo sapiens
  misc_RNA (1)...(19): siRNA sense strand
ccaaagauggaaugacuua

SEQ ID NO: 331799 - RNA, 19 nt, Homo sapiens
  misc_RNA (1)...(19): siRNA sense strand
cagaacgaauucagugaua

SEQ ID NO: 331800 - RNA, 19 nt, Homo sapiens
  misc_RNA (1)...(19): siRNA sense strand
ggaagacucucugaagaau

SEQ ID NO: 331801 - RNA, 19 nt, Homo sapiens
  misc_RNA (1)...(19): siRNA sense strand
caacacugcuauuuacgaa

SEQ ID NO: 331802 - RNA, 19 nt, Homo sapiens
  misc_RNA (1)...(19): siRNA sense strand
aaaccaaacuggacaaauc

SEQ ID NO: 331803 - RNA, 19 nt, Homo sapiens
  misc_RNA (1)...(19): siRNA sense strand
ggaacuaagugucaguguu

SEQ ID NO: 331804 - RNA, 19 nt, Homo sapiens
  misc_RNA (1)...(19): siRNA sense strand
gcaaccaacugauaacaca

SEQ ID NO: 331805 - RNA, 19 nt, Homo sapiens
  misc_RNA (1)...(19): siRNA sense strand
guacaugccuuaaauaacg

SEQ ID NO: 331806 - RNA, 19 nt, Homo sapiens
  misc_RNA (1)...(19): siRNA sense strand
aaagaugucucgccagcua

SEQ ID NO: 331807 - RNA, 19 nt, Homo sapiens
  misc_RNA (1)...(19): siRNA sense strand
ucaaauggcugaauagaac

SEQ ID NO: 331808 - RNA, 19 nt, Homo sapiens
  misc_RNA (1)...(19): siRNA sense strand
ggacaacaucaaguuauua

SEQ ID NO: 331809 - RNA, 19 nt, Homo sapiens
  misc_RNA (1)...(19): siRNA sense strand
gagugaagauucucaagga

SEQ ID NO: 331810 - RNA, 19 nt, Homo sapiens
  misc_RNA (1)...(19): siRNA sense strand
gaaaguggaacaagcuaaa

SEQ ID NO: 331811 - RNA, 19 nt, Homo sapiens
  misc_RNA (1)...(19): siRNA sense strand
uggaagaucuagaaagaaa

SEQ ID NO: 331812 - RNA, 19 nt, Homo sapiens
  misc_RNA (1)...(19): siRNA sense strand
uaaauaaaguccagacaag

SEQ ID NO: 331813 - RNA, 19 nt, Homo sapiens
  misc_RNA (1)...(19): siRNA sense strand
ggaauagguuacaagaaau

SEQ ID NO: 331814 - RNA, 19 nt, Homo sapiens
  misc_RNA (1)...(19): siRNA sense strand
uaaauaacgucaacagagu

SEQ ID NO: 331815 - RNA, 19 nt, Homo sapiens
  misc_RNA (1)...(19): siRNA sense strand
ggugaaagaugucaugaag

SEQ ID NO: 331816 - RNA, 19 nt, Homo sapiens
  misc_RNA (1)...(19): siRNA sense strand
auagaagccuuaagcauuu

SEQ ID NO: 331817 - RNA, 19 nt, Homo sapiens
  misc_RNA (1)...(19): siRNA sense strand
ugaaagaaaccacagagua

SEQ ID NO: 331818 - RNA, 19 nt, Homo sapiens
  misc_RNA (1)...(19): siRNA sense strand
uuacucagcugaaugcaaa

SEQ ID NO: 331819 - RNA, 19 nt, Homo sapiens
  misc_RNA (1)...(19): siRNA sense strand
ucagaaaccugcauuacau

SEQ ID NO: 331820 - RNA, 19 nt, Homo sapiens
  misc_RNA (1)...(19): siRNA sense strand
gagaaggcccugcaagaaa

SEQ ID NO: 331821 - RNA, 19 nt, Homo sapiens
  misc_RNA (1)...(19): siRNA sense strand
gaaaugaagcgucaaacau

SEQ ID NO: 331822 - RNA, 19 nt, Homo sapiens
  misc_RNA (1)...(19): siRNA sense strand
ggaggagacugaagaacug

SEQ ID NO: 331823 - RNA, 19 nt, Homo sapiens
  misc_RNA (1)...(19): siRNA sense strand
aauaugcgauggaaacuuu

SEQ ID NO: 331824 - RNA, 19 nt, Homo sapiens
  misc_RNA (1)...(19): siRNA sense strand
ggacaaggcauuggagaaa

SEQ ID NO: 331825 - RNA, 19 nt, Homo sapiens
  misc_RNA (1)...(19): siRNA sense strand
ggacauccaggcagaaauu

SEQ ID NO: 331826 - RNA, 19 nt, Homo sapiens
  misc_RNA (1)...(19): siRNA sense strand
gaaagaaaccacagaguac

SEQ ID NO: 331827 - RNA, 19 nt, Homo sapiens
  misc_RNA (1)...(19): siRNA sense strand
ggagguagauauuggaauu

SEQ ID NO: 331828 - RNA, 19 nt, Homo sapiens
  misc_RNA (1)...(19): siRNA sense strand
gcaugugggugcugacuua

SEQ ID NO: 331829 - RNA, 19 nt, Homo sapiens
  misc_RNA (1)...(19): siRNA sense strand
gcagcuagcucagaucaaa

SEQ ID NO: 331830 - RNA, 19 nt, Homo sapiens
  misc_RNA (1)...(19): siRNA sense strand
gaauagaguuguucggaau

SEQ ID NO: 331831 - RNA, 19 nt, Homo sapiens
  misc_RNA (1)...(19): siRNA sense strand
gaugagaagucccguguug

SEQ ID NO: 331832 - RNA, 19 nt, Homo sapiens
  misc_RNA (1)...(19): siRNA sense strand
caacagccauucucaaaca

SEQ ID NO: 331833 - RNA, 19 nt, Homo sapiens
  misc_RNA (1)...(19): siRNA sense strand
caaauuggcuggugagucu

SEQ ID NO: 331834 - RNA, 19 nt, Homo sapiens
  misc_RNA (1)...(19): siRNA sense strand
gaagaguccuugaaugaag

SEQ ID NO: 331835 - RNA, 19 nt, Homo sapiens
  misc_RNA (1)...(19): siRNA sense strand
gagcugaccugacagagau

SEQ ID NO: 331836 - RNA, 19 nt, Homo sapiens
  misc_RNA (1)...(19): siRNA sense strand
gaugauacuuguucugaug

SEQ ID NO: 331837 - RNA, 19 nt, Homo sapiens
  misc_RNA (1)...(19): siRNA sense strand
caaccggccugacaucauu

SEQ ID NO: 331838 - RNA, 19 nt, Homo sapiens
  misc_RNA (1)...(19): siRNA sense strand
ggaagcagcuagcucagau

SEQ ID NO: 331839 - RNA, 19 nt, Homo sapiens
  misc_RNA (1)...(19): siRNA sense strand
aaacagauccuagcccuua

SEQ ID NO: 331840 - RNA, 19 nt, Homo sapiens
  misc_RNA (1)...(19): siRNA sense strand
gcagagggcacaugugauu

SEQ ID NO: 331841 - RNA, 19 nt, Homo sapiens
  misc_RNA (1)...(19): siRNA sense strand
caacagacccaacagcauu

SEQ ID NO: 331842 - RNA, 19 nt, Homo sapiens
  misc_RNA (1)...(19): siRNA sense strand
acaugaagcuggcagauga

SEQ ID NO: 331843 - RNA, 19 nt, Homo sapiens
  misc_RNA (1)...(19): siRNA sense strand
ucagagaaaucuuugacaa

SEQ ID NO: 331844 - RNA, 19 nt, Homo sapiens
  misc_RNA (1)...(19): siRNA sense strand
gaacagguagccaaugaga

SEQ ID NO: 331845 - RNA, 19 nt, Homo sapiens
  misc_RNA (1)...(19): siRNA sense strand
ucaaagagaugguggaacu

SEQ ID NO: 331846 - RNA, 19 nt, Homo sapiens
  misc_RNA (1)...(19): siRNA sense strand
gggcacaugugauuguuau

SEQ ID NO: 331847 - RNA, 19 nt, Homo sapiens
  misc_RNA (1)...(19): siRNA sense strand
gagacauccugcccucuuu

SEQ ID NO: 331848 - RNA, 19 nt, Homo sapiens
  misc_RNA (1)...(19): siRNA sense strand
ccaagggaguucuguucua

SEQ ID NO: 331849 - RNA, 19 nt, Homo sapiens
  misc_RNA (1)...(19): siRNA sense strand
gguaaucucuucgagguau

SEQ ID NO: 331850 - RNA, 19 nt, Homo sapiens
  misc_RNA (1)...(19): siRNA sense strand
gugaauccaucgagaguga

SEQ ID NO: 331851 - RNA, 19 nt, Homo sapiens
  misc_RNA (1)...(19): siRNA sense strand
caagggaguucuguucuau

SEQ ID NO: 331852 - RNA, 19 nt, Homo sapiens
  misc_RNA (1)...(19): siRNA sense strand
gcuuagagauucuucagau

SEQ ID NO: 331853 - RNA, 19 nt, Homo sapiens
  misc_RNA (1)...(19): siRNA sense strand
ucaaagugguggaaacaga

SEQ ID NO: 331854 - RNA, 19 nt, Homo sapiens
  misc_RNA (1)...(19): siRNA sense strand
ugaaugaaguaggguauga

SEQ ID NO: 331855 - RNA, 19 nt, Homo sapiens
  misc_RNA (1)...(19): siRNA sense strand
gaagagacgagaagcuguu

SEQ ID NO: 331856 - RNA, 19 nt, Homo sapiens
  misc_RNA (1)...(19): siRNA sense strand
gaugagaagauucggauga

SEQ ID NO: 331857 - RNA, 19 nt, Homo sapiens
  misc_RNA (1)...(19): siRNA sense strand
ggaagaguccuugaaugaa

SEQ ID NO: 331858 - RNA, 19 nt, Homo sapiens
  misc_RNA (1)...(19): siRNA sense strand
caaugaugaugaccuguau

SEQ ID NO: 331859 - RNA, 19 nt, Homo sapiens
  misc_RNA (1)...(19): siRNA sense strand
uggaacagguagccaauga

SEQ ID NO: 331860 - RNA, 19 nt, Homo sapiens
  misc_RNA (1)...(19): siRNA sense strand
ggaaagaagagacgagaag

SEQ ID NO: 331861 - RNA, 19 nt, Homo sapiens
  misc_RNA (1)...(19): siRNA sense strand
gaaguaggguaugaugaca

SEQ ID NO: 331862 - RNA, 19 nt, Homo sapiens
  misc_RNA (1)...(19): siRNA sense strand
cggcacagguggcagugua

SEQ ID NO: 331863 - RNA, 19 nt, Homo sapiens
  misc_RNA (1)...(19): siRNA sense strand
cagaagacaaugaugauga

SEQ ID NO: 331864 - RNA, 19 nt, Homo sapiens
  misc_RNA (1)...(19): siRNA sense strand
gagagcaaccuucguaaag

SEQ ID NO: 331865 - RNA, 19 nt, Homo sapiens
  misc_RNA (1)...(19): siRNA sense strand
ucaaccagauccugacaga

SEQ ID NO: 331866 - RNA, 19 nt, Homo sapiens
  misc_RNA (1)...(19): siRNA sense strand
cagacaaauuccugaaguu

SEQ ID NO: 331867 - RNA, 19 nt, Homo sapiens
  misc_RNA (1)...(19): siRNA sense strand
ccagacaaauuccugaagu

SEQ ID NO: 331868 - RNA, 19 nt, Homo sapiens
  misc_RNA (1)...(19): siRNA sense strand
uuacggaccuccuggaaca

SEQ ID NO: 331869 - RNA, 19 nt, Homo sapiens
  misc_RNA (1)...(19): siRNA sense strand
gauauuggaauuccugaug

SEQ ID NO: 331870 - RNA, 19 nt, Homo sapiens
  misc_RNA (1)...(19): siRNA sense strand
ccucauggauggccuaaag

SEQ ID NO: 331871 - RNA, 19 nt, Homo sapiens
  misc_RNA (1)...(19): siRNA sense strand
gauccuagcccuuauugca

SEQ ID NO: 331872 - RNA, 19 nt, Homo sapiens
  misc_RNA (1)...(19): siRNA sense strand
acacagaagacaaugauga

SEQ ID NO: 331873 - RNA, 19 nt, Homo sapiens
  misc_RNA (1)...(19): siRNA sense strand
ugacagggagguagauauu

SEQ ID NO: 331874 - RNA, 19 nt, Homo sapiens
  misc_RNA (1)...(19): siRNA sense strand
ccugauugcucgagcugua

SEQ ID NO: 331875 - RNA, 19 nt, Homo sapiens
  misc_RNA (1)...(19): siRNA sense strand
caaacgagaggaugaggaa

SEQ ID NO: 331876 - RNA, 19 nt, Homo sapiens
  misc_RNA (1)...(19): siRNA sense strand
guagaggugccacagguaa

SEQ ID NO: 331877 - RNA, 19 nt, Homo sapiens
  misc_RNA (1)...(19): siRNA sense strand
cgagaucacuuugaagaag

SEQ ID NO: 331878 - RNA, 19 nt, Homo sapiens
  misc_RNA (1)...(19): siRNA sense strand
cagaagaaccgucccaauc

SEQ ID NO: 331879 - RNA, 19 nt, Homo sapiens
  misc_RNA (1)...(19): siRNA sense strand
guggaaggcauuacuggua

SEQ ID NO: 331880 - RNA, 19 nt, Homo sapiens
  misc_RNA (1)...(19): siRNA sense strand
gcacagguggcaguguaua

SEQ ID NO: 331881 - RNA, 19 nt, Homo sapiens
  misc_RNA (1)...(19): siRNA sense strand
caucagccauggagguaga

SEQ ID NO: 331882 - RNA, 19 nt, Homo sapiens
  misc_RNA (1)...(19): siRNA sense strand
guccugagaucaugagcaa

SEQ ID NO: 331883 - RNA, 19 nt, Homo sapiens
  misc_RNA (1)...(19): siRNA sense strand
guaaucucuucgagguaua

SEQ ID NO: 331884 - RNA, 19 nt, Homo sapiens
  misc_RNA (1)...(19): siRNA sense strand
uagcucagaucaaagagau

SEQ ID NO: 331885 - RNA, 19 nt, Homo sapiens
  misc_RNA (1)...(19): siRNA sense strand
ggagccuucuucuucuuga

SEQ ID NO: 331886 - RNA, 19 nt, Homo sapiens
  misc_RNA (1)...(19): siRNA sense strand
aaccagauccugacagaaa

SEQ ID NO: 331887 - RNA, 19 nt, Homo sapiens
  misc_RNA (1)...(19): siRNA sense strand
uugaugagcuggauucgau

SEQ ID NO: 331888 - RNA, 19 nt, Homo sapiens
  misc_RNA (1)...(19): siRNA sense strand
gaagcuggcagaugaugug

SEQ ID NO: 331889 - RNA, 19 nt, Homo sapiens
  misc_RNA (1)...(19): siRNA sense strand
ugaggaggcugagaagaau

SEQ ID NO: 331890 - RNA, 19 nt, Homo sapiens
  misc_RNA (1)...(19): siRNA sense strand
ggagguaacauuggagaug

SEQ ID NO: 331891 - RNA, 19 nt, Homo sapiens
  misc_RNA (1)...(19): siRNA sense strand
gaacgagagaggcagacaa

SEQ ID NO: 331892 - RNA, 19 nt, Homo sapiens
  misc_RNA (1)...(19): siRNA sense strand
gaucaaagagaugguggaa

SEQ ID NO: 331893 - RNA, 19 nt, Homo sapiens
  misc_RNA (1)...(19): siRNA sense strand
ggccaaagccauugcuaau

SEQ ID NO: 331894 - RNA, 19 nt, Homo sapiens
  misc_RNA (1)...(19): siRNA sense strand
agacaaauuccugaaguuu

SEQ ID NO: 331895 - RNA, 19 nt, Homo sapiens
  misc_RNA (1)...(19): siRNA sense strand
acaggacgcuuagagauuc

SEQ ID NO: 331896 - RNA, 19 nt, Homo sapiens
  misc_RNA (1)...(19): siRNA sense strand
gacuggagccuucuucuuc

SEQ ID NO: 331897 - RNA, 19 nt, Homo sapiens
  misc_RNA (1)...(19): siRNA sense strand
caguguugcugaaaggaaa

SEQ ID NO: 331898 - RNA, 19 nt, Homo sapiens
  misc_RNA (1)...(19): siRNA sense strand
ggagcugaccugacagaga

SEQ ID NO: 331899 - RNA, 19 nt, Homo sapiens
  misc_RNA (1)...(19): siRNA sense strand
caaugucagagaaaucuuu

SEQ ID NO: 331900 - RNA, 19 nt, Homo sapiens
  misc_RNA (1)...(19): siRNA sense strand
ucaaugaggacaacagugu

SEQ ID NO: 331901 - RNA, 19 nt, Homo sapiens
  misc_RNA (1)...(19): siRNA sense strand
gagauucuucagauccaua

SEQ ID NO: 331902 - RNA, 19 nt, Homo sapiens
  misc_RNA (1)...(19): siRNA sense strand
gaaugcuccugccaucauc

SEQ ID NO: 331903 - RNA, 19 nt, Homo sapiens
  misc_RNA (1)...(19): siRNA sense strand
gggccuagaggaugucaaa

SEQ ID NO: 331904 - RNA, 19 nt, Homo sapiens
  misc_RNA (1)...(19): siRNA sense strand
ggaaguaugagauguuugc

SEQ ID NO: 331905 - RNA, 19 nt, Homo sapiens
  misc_RNA (1)...(19): siRNA sense strand
gcucguggagguaacauug

SEQ ID NO: 331906 - RNA, 19 nt, Homo sapiens
  misc_RNA (1)...(19): siRNA sense strand
ggagcacccagacaaauuc

SEQ ID NO: 331907 - RNA, 19 nt, Homo sapiens
  misc_RNA (1)...(19): siRNA sense strand
cggaauaaccuucguguac

SEQ ID NO: 331908 - RNA, 19 nt, Homo sapiens
  misc_RNA (1)...(19): siRNA sense strand
ccugugugcuauucuuuga

SEQ ID NO: 331909 - RNA, 19 nt, Homo sapiens
  misc_RNA (1)...(19): siRNA sense strand
gagggcacaugugauuguu

SEQ ID NO: 331910 - RNA, 19 nt, Homo sapiens
  misc_RNA (1)...(19): siRNA sense strand
aagcagagggcacauguga

SEQ ID NO: 331911 - RNA, 19 nt, Homo sapiens
  misc_RNA (1)...(19): siRNA sense strand
gccaugcccugaugugaag

SEQ ID NO: 331912 - RNA, 19 nt, Homo sapiens
  misc_RNA (1)...(19): siRNA sense strand
aguaggguaugaugacauu

SEQ ID NO: 331913 - RNA, 19 nt, Homo sapiens
  misc_RNA (1)...(19): siRNA sense strand
uggaugaauugcaguuguu

SEQ ID NO: 331914 - RNA, 19 nt, Homo sapiens
  misc_RNA (1)...(19): siRNA sense strand
gagccagaguaacccauca

SEQ ID NO: 331915 - RNA, 19 nt, Homo sapiens
  misc_RNA (1)...(19): siRNA sense strand
gcacaugugauuguuaugg

SEQ ID NO: 331916 - RNA, 19 nt, Homo sapiens
  misc_RNA (1)...(19): siRNA sense strand
cggcaaacguauccaugug

SEQ ID NO: 331917 - RNA, 19 nt, Homo sapiens
  misc_RNA (1)...(19): siRNA sense strand
ucggaaguaugagauguuu

SEQ ID NO: 331918 - RNA, 19 nt, Homo sapiens
  misc_RNA (1)...(19): siRNA sense strand
caagccauccgcaagaaga

SEQ ID NO: 331919 - RNA, 19 nt, Homo sapiens
  misc_RNA (1)...(19): siRNA sense strand
gaacaugaagcuggcagau

SEQ ID NO: 331920 - RNA, 19 nt, Homo sapiens
  misc_RNA (1)...(19): siRNA sense strand
uaaagcagagggcacaugu

SEQ ID NO: 331921 - RNA, 19 nt, Homo sapiens
  misc_RNA (1)...(19): siRNA sense strand
auagaguuguucggaauaa

SEQ ID NO: 331922 - RNA, 19 nt, Homo sapiens
  misc_RNA (1)...(19): siRNA sense strand
acaaugaugaugaccugua

SEQ ID NO: 331923 - RNA, 19 nt, Homo sapiens
  misc_RNA (1)...(19): siRNA sense strand
uugaucagcucaucuacau

SEQ ID NO: 331924 - RNA, 19 nt, Homo sapiens
  misc_RNA (1)...(19): siRNA sense strand
gacauccugcccucuuuaa

SEQ ID NO: 331925 - RNA, 19 nt, Homo sapiens
  misc_RNA (1)...(19): siRNA sense strand
acagggagguagauauugg

SEQ ID NO: 331926 - RNA, 19 nt, Homo sapiens
  misc_RNA (1)...(19): siRNA sense strand
ggucaugaacucucuagca

SEQ ID NO: 331927 - RNA, 19 nt, Homo sapiens
  misc_RNA (1)...(19): siRNA sense strand
ggaagaggaugauguguuc

SEQ ID NO: 331928 - RNA, 19 nt, Homo sapiens
  misc_RNA (1)...(19): siRNA sense strand
ccacagagaucccugacuu

SEQ ID NO: 331929 - RNA, 19 nt, Homo sapiens
  misc_RNA (1)...(19): siRNA sense strand
guagagauguccuggaaga

SEQ ID NO: 331930 - RNA, 19 nt, Homo sapiens
  misc_RNA (1)...(19): siRNA sense strand
gcacaggaauaccucaaga

SEQ ID NO: 331931 - RNA, 19 nt, Homo sapiens
  misc_RNA (1)...(19): siRNA sense strand
caaaggcucucucaacauc

SEQ ID NO: 331932 - RNA, 19 nt, Homo sapiens
  misc_RNA (1)...(19): siRNA sense strand
gaacaccuguccauugaag

SEQ ID NO: 331933 - RNA, 19 nt, Homo sapiens
  misc_RNA (1)...(19): siRNA sense strand
ccacacagauggaugacuu

SEQ ID NO: 331934 - RNA, 19 nt, Homo sapiens
  misc_RNA (1)...(19): siRNA sense strand
ggacggagagaaugaauug

SEQ ID NO: 331935 - RNA, 19 nt, Homo sapiens
  misc_RNA (1)...(19): siRNA sense strand
cgugguagcuggagaggua

SEQ ID NO: 331936 - RNA, 19 nt, Homo sapiens
  misc_RNA (1)...(19): siRNA sense strand
ccaaugagcaggagaagaa

SEQ ID NO: 331937 - RNA, 19 nt, Homo sapiens
  misc_RNA (1)...(19): siRNA sense strand
gaaauuacagcaucagcuu

SEQ ID NO: 331938 - RNA, 19 nt, Homo sapiens
  misc_RNA (1)...(19): siRNA sense strand
ggaguaacaccaaauccua

SEQ ID NO: 331939 - RNA, 19 nt, Homo sapiens
  misc_RNA (1)...(19): siRNA sense strand
gaugauguguuccuacuag

SEQ ID NO: 331940 - RNA, 19 nt, Homo sapiens
  misc_RNA (1)...(19): siRNA sense strand
gagauguccuggaagaguu

SEQ ID NO: 331941 - RNA, 19 nt, Homo sapiens
  misc_RNA (1)...(19): siRNA sense strand
ggagccaccucaucuuaug

SEQ ID NO: 331942 - RNA, 19 nt, Homo sapiens
  misc_RNA (1)...(19): siRNA sense strand
acucaaggcugcacucaaa

SEQ ID NO: 331943 - RNA, 19 nt, Homo sapiens
  misc_RNA (1)...(19): siRNA sense strand
gcaugacucuggccaagga

SEQ ID NO: 331944 - RNA, 19 nt, Homo sapiens
  misc_RNA (1)...(19): siRNA sense strand
caauuccaaugaugucuuu

SEQ ID NO: 331945 - RNA, 19 nt, Homo sapiens
  misc_RNA (1)...(19): siRNA sense strand
ccaagagacuacaggaaga

SEQ ID NO: 331946 - RNA, 19 nt, Homo sapiens
  misc_RNA (1)...(19): siRNA sense strand
ccagcagccuguccuauga

SEQ ID NO: 331947 - RNA, 19 nt, Homo sapiens
  misc_RNA (1)...(19): siRNA sense strand
gaggaacaccuguccauug

SEQ ID NO: 331948 - RNA, 19 nt, Homo sapiens
  misc_RNA (1)...(19): siRNA sense strand
gcugagcgcccaagucaaa

SEQ ID NO: 331949 - RNA, 19 nt, Homo sapiens
  misc_RNA (1)...(19): siRNA sense strand
gcaaggagccaccucaucu

SEQ ID NO: 331950 - RNA, 19 nt, Homo sapiens
  misc_RNA (1)...(19): siRNA sense strand
caucuuauguccaucuuca

SEQ ID NO: 331951 - RNA, 19 nt, Homo sapiens
  misc_RNA (1)...(19): siRNA sense strand
agagaucccugacuucaau

SEQ ID NO: 331952 - RNA, 19 nt, Homo sapiens
  misc_RNA (1)...(19): siRNA sense strand
cagccaagaugaaauuaca

SEQ ID NO: 331953 - RNA, 19 nt, Homo sapiens
  misc_RNA (1)...(19): siRNA sense strand
gucaaaggcucucucaaca

SEQ ID NO: 331954 - RNA, 19 nt, Homo sapiens
  misc_RNA (1)...(19): siRNA sense strand
aggaacaccuguccauuga

SEQ ID NO: 331955 - RNA, 19 nt, Homo sapiens
  misc_RNA (1)...(19): siRNA sense strand
gaagaucuacguguggaaa

SEQ ID NO: 331956 - RNA, 19 nt, Homo sapiens
  misc_RNA (1)...(19): siRNA sense strand
caaguggaguaacaccaaa

SEQ ID NO: 331957 - RNA, 19 nt, Homo sapiens
  misc_RNA (1)...(19): siRNA sense strand
caaucaggaugacuuggaa

SEQ ID NO: 331958 - RNA, 19 nt, Homo sapiens
  misc_RNA (1)...(19): siRNA sense strand
gugcagguguggcgcauug

SEQ ID NO: 331959 - RNA, 19 nt, Homo sapiens
  misc_RNA (1)...(19): siRNA sense strand
caacaacaccaaggccuuu

SEQ ID NO: 331960 - RNA, 19 nt, Homo sapiens
  misc_RNA (1)...(19): siRNA sense strand
gacccagucuugcugcuau

SEQ ID NO: 331961 - RNA, 19 nt, Homo sapiens
  misc_RNA (1)...(19): siRNA sense strand
agcagaagaugguagauga

SEQ ID NO: 331962 - RNA, 19 nt, Homo sapiens
  misc_RNA (1)...(19): siRNA sense strand
ggagauggccaagaugguu

SEQ ID NO: 331963 - RNA, 19 nt, Homo sapiens
  misc_RNA (1)...(19): siRNA sense strand
ggagggcgcaccuauguag

SEQ ID NO: 331964 - RNA, 19 nt, Homo sapiens
  misc_RNA (1)...(19): siRNA sense strand
gcuaacagcaaccucaguu

SEQ ID NO: 331965 - RNA, 19 nt, Homo sapiens
  misc_RNA (1)...(19): siRNA sense strand
gagaagaagggagccauga

SEQ ID NO: 331966 - RNA, 19 nt, Homo sapiens
  misc_RNA (1)...(19): siRNA sense strand
caaccacugcacaggaaua

SEQ ID NO: 331967 - RNA, 19 nt, Homo sapiens
  misc_RNA (1)...(19): siRNA sense strand
gaucacugcugaggucaca

SEQ ID NO: 331968 - RNA, 19 nt, Homo sapiens
  misc_RNA (1)...(19): siRNA sense strand
ccuaugacauccacuacug

SEQ ID NO: 331969 - RNA, 19 nt, Homo sapiens
  misc_RNA (1)...(19): siRNA sense strand
uggagcagcuagugaacaa

SEQ ID NO: 331970 - RNA, 19 nt, Homo sapiens
  misc_RNA (1)...(19): siRNA sense strand
ccaacgaggaggagaagaa

SEQ ID NO: 331971 - RNA, 19 nt, Homo sapiens
  misc_RNA (1)...(19): siRNA sense strand
ugaagcacguggagaccaa

SEQ ID NO: 331972 - RNA, 19 nt, Homo sapiens
  misc_RNA (1)...(19): siRNA sense strand
caacaaaaccucaagaaag

SEQ ID NO: 331973 - RNA, 19 nt, Homo sapiens
  misc_RNA (1)...(19): siRNA sense strand
ggaacuggcgccaacaaca

SEQ ID NO: 331974 - RNA, 19 nt, Homo sapiens
  misc_RNA (1)...(19): siRNA sense strand
aggcugcacucaaacugua

SEQ ID NO: 331975 - RNA, 19 nt, Homo sapiens
  misc_RNA (1)...(19): siRNA sense strand
gaagaaaaccuggucauca

SEQ ID NO: 331976 - RNA, 19 nt, Homo sapiens
  misc_RNA (1)...(19): siRNA sense strand
caaaguggacguguucaau

SEQ ID NO: 331977 - RNA, 19 nt, Homo sapiens
  misc_RNA (1)...(19): siRNA sense strand
aaggagccaccucaucuua

SEQ ID NO: 331978 - RNA, 19 nt, Homo sapiens
  misc_RNA (1)...(19): siRNA sense strand
aacaaaaccucaagaaaga

SEQ ID NO: 331979 - RNA, 19 nt, Homo sapiens
  misc_RNA (1)...(19): siRNA sense strand
agguggaggugcagaauga

SEQ ID NO: 331980 - RNA, 19 nt, Homo sapiens
  misc_RNA (1)...(19): siRNA sense strand
ggaggaacaccuguccauu

SEQ ID NO: 331981 - RNA, 19 nt, Homo sapiens
  misc_RNA (1)...(19): siRNA sense strand
gcaggagccagccaacuuc

SEQ ID NO: 331982 - RNA, 19 nt, Homo sapiens
  misc_RNA (1)...(19): siRNA sense strand
gaccucaggccuaggcaaa

SEQ ID NO: 331983 - RNA, 19 nt, Homo sapiens
  misc_RNA (1)...(19): siRNA sense strand
guggacguguucaaugcua

SEQ ID NO: 331984 - RNA, 19 nt, Homo sapiens
  misc_RNA (1)...(19): siRNA sense strand
gaguaacaccaaauccuau

SEQ ID NO: 331985 - RNA, 19 nt, Homo sapiens
  misc_RNA (1)...(19): siRNA sense strand
gauguguuccuacuagaug

SEQ ID NO: 331986 - RNA, 19 nt, Homo sapiens
  misc_RNA (1)...(19): siRNA sense strand
agguagagauguccuggaa

SEQ ID NO: 331987 - RNA, 19 nt, Homo sapiens
  misc_RNA (1)...(19): siRNA sense strand
gcaacaaaaccucaagaaa

SEQ ID NO: 331988 - RNA, 19 nt, Homo sapiens
  misc_RNA (1)...(19): siRNA sense strand
acucaggccuuugggauga

SEQ ID NO: 331989 - RNA, 19 nt, Homo sapiens
  misc_RNA (1)...(19): siRNA sense strand
ggccagccaagaugaaauu

SEQ ID NO: 331990 - RNA, 19 nt, Homo sapiens
  misc_RNA (1)...(19): siRNA sense strand
gcucuacaccuaccucauc

SEQ ID NO: 331991 - RNA, 19 nt, Homo sapiens
  misc_RNA (1)...(19): siRNA sense strand
gaaagggaagaaagccaau

SEQ ID NO: 331992 - RNA, 19 nt, Homo sapiens
  misc_RNA (1)...(19): siRNA sense strand
ugauggaggugaugaacca

SEQ ID NO: 331993 - RNA, 19 nt, Homo sapiens
  misc_RNA (1)...(19): siRNA sense strand
ggcaggagccagccaacuu

SEQ ID NO: 331994 - RNA, 19 nt, Homo sapiens
  misc_RNA (1)...(19): siRNA sense strand
caggucuucuucuggauug

SEQ ID NO: 331995 - RNA, 19 nt, Homo sapiens
  misc_RNA (1)...(19): siRNA sense strand
caccucaucuuauguccau

SEQ ID NO: 331996 - RNA, 19 nt, Homo sapiens
  misc_RNA (1)...(19): siRNA sense strand
caagagacuacaggaagaa

SEQ ID NO: 331997 - RNA, 19 nt, Homo sapiens
  misc_RNA (1)...(19): siRNA sense strand
cauccuggcuauccacaag

SEQ ID NO: 331998 - RNA, 19 nt, Homo sapiens
  misc_RNA (1)...(19): siRNA sense strand
uccagaggcugcugcaugu

SEQ ID NO: 331999 - RNA, 19 nt, Homo sapiens
  misc_RNA (1)...(19): siRNA sense strand
agauuucacucaggccuuu

SEQ ID NO: 332000 - RNA, 19 nt, Homo sapiens
  misc_RNA (1)...(19): siRNA sense strand
gaucgaggccaugcagaug

SEQ ID NO: 332001 - RNA, 19 nt, Homo sapiens
  misc_RNA (1)...(19): siRNA sense strand
guaacaccaaauccuauga

SEQ ID NO: 332002 - RNA, 19 nt, Homo sapiens
  misc_RNA (1)...(19): siRNA sense strand
cagucuugcugcuaucuau

SEQ ID NO: 332003 - RNA, 19 nt, Homo sapiens
  misc_RNA (1)...(19): siRNA sense strand
gcaccucccgaacuaacaa

SEQ ID NO: 332004 - RNA, 19 nt, Homo sapiens
  misc_RNA (1)...(19): siRNA sense strand
ucacgaggacuguuacauc

SEQ ID NO: 332005 - RNA, 19 nt, Homo sapiens
  misc_RNA (1)...(19): siRNA sense strand
caucaaagccaagcaguac

SEQ ID NO: 332006 - RNA, 19 nt, Homo sapiens
  misc_RNA (1)...(19): siRNA sense strand
aaauuacagcaucagcuua

SEQ ID NO: 332007 - RNA, 19 nt, Homo sapiens
  misc_RNA (1)...(19): siRNA sense strand
uucagcagcucuuccagaa

SEQ ID NO: 332008 - RNA, 19 nt, Homo sapiens
  misc_RNA (1)...(19): siRNA sense strand
gaacuggcgccaacaacac

SEQ ID NO: 332009 - RNA, 19 nt, Homo sapiens
  misc_RNA (1)...(19): siRNA sense strand
uaacagcaaccucaguucu

SEQ ID NO: 332010 - RNA, 19 nt, Homo sapiens
  misc_RNA (1)...(19): siRNA sense strand
aaaguggacguguucaaug

SEQ ID NO: 332011 - RNA, 19 nt, Homo sapiens
  misc_RNA (1)...(19): siRNA sense strand
ggcggagucuggcaaccuu

SEQ ID NO: 332012 - RNA, 19 nt, Homo sapiens
  misc_RNA (1)...(19): siRNA sense strand
gggcaagaggaacguggua

SEQ ID NO: 332013 - RNA, 19 nt, Homo sapiens
  misc_RNA (1)...(19): siRNA sense strand
gccaagcaguacccaccaa

SEQ ID NO: 332014 - RNA, 19 nt, Homo sapiens
  misc_RNA (1)...(19): siRNA sense strand
cacucaaacuguaccaugu

SEQ ID NO: 332015 - RNA, 19 nt, Homo sapiens
  misc_RNA (1)...(19): siRNA sense strand
aagcugagcgcccaaguca

SEQ ID NO: 332016 - RNA, 19 nt, Homo sapiens
  misc_RNA (1)...(19): siRNA sense strand
ccggaaagcacccguaugg

SEQ ID NO: 332017 - RNA, 19 nt, Homo sapiens
  misc_RNA (1)...(19): siRNA sense strand
ucaaguggaguaacaccaa

SEQ ID NO: 332018 - RNA, 19 nt, Homo sapiens
  misc_RNA (1)...(19): siRNA sense strand
gcuacaucauccuggcuau

SEQ ID NO: 332019 - RNA, 19 nt, Homo sapiens
  misc_RNA (1)...(19): siRNA sense strand
gaagcaaguggugguggaa

SEQ ID NO: 332020 - RNA, 19 nt, Homo sapiens
  misc_RNA (1)...(19): siRNA sense strand
gccagcagccuguccuaug

SEQ ID NO: 332021 - RNA, 19 nt, Homo sapiens
  misc_RNA (1)...(19): siRNA sense strand
caaggagccaccucaucuu

SEQ ID NO: 332022 - RNA, 19 nt, Homo sapiens
  misc_RNA (1)...(19): siRNA sense strand
caagaugaaauuacagcau

SEQ ID NO: 332023 - RNA, 19 nt, Homo sapiens
  misc_RNA (1)...(19): siRNA sense strand
caagucaaaggcucucuca

SEQ ID NO: 332024 - RNA, 19 nt, Homo sapiens
  misc_RNA (1)...(19): siRNA sense strand
ccacacggccacugacaca

SEQ ID NO: 332025 - RNA, 19 nt, Homo sapiens
  misc_RNA (1)...(19): siRNA sense strand
ggaugauguguuccuacua

SEQ ID NO: 332026 - RNA, 19 nt, Homo sapiens
  misc_RNA (1)...(19): siRNA sense strand
ggaucgaggccaugcagau

SEQ ID NO: 332027 - RNA, 19 nt, Homo sapiens
  misc_RNA (1)...(19): siRNA sense strand
ccaaagauguggccaggaa

SEQ ID NO: 332028 - RNA, 19 nt, Homo sapiens
  misc_RNA (1)...(19): siRNA sense strand
ggacgaggcuauguauuac

SEQ ID NO: 332029 - RNA, 19 nt, Homo sapiens
  misc_RNA (1)...(19): siRNA sense strand
aggacgaggcuauguauua

SEQ ID NO: 332030 - RNA, 19 nt, Homo sapiens
  misc_RNA (1)...(19): siRNA sense strand
ucgcuucucuggauccaaa

SEQ ID NO: 332031 - RNA, 19 nt, Homo sapiens
  misc_RNA (1)...(19): siRNA sense strand
gaggaacgaccaugacauc

SEQ ID NO: 332032 - RNA, 19 nt, Homo sapiens
  misc_RNA (1)...(19): siRNA sense strand
gguauuugagcaucucuga

SEQ ID NO: 332033 - RNA, 19 nt, Homo sapiens
  misc_RNA (1)...(19): siRNA sense strand
uguacagcgucuacuggua

SEQ ID NO: 332034 - RNA, 19 nt, Homo sapiens
  misc_RNA (1)...(19): siRNA sense strand
gcuauguauuacugugcua

SEQ ID NO: 332035 - RNA, 19 nt, Homo sapiens
  misc_RNA (1)...(19): siRNA sense strand
gguuccugcugagauauuu

SEQ ID NO: 332036 - RNA, 19 nt, Homo sapiens
  misc_RNA (1)...(19): siRNA sense strand
ugaggacgaggcuauguau

SEQ ID NO: 332037 - RNA, 19 nt, Homo sapiens
  misc_RNA (1)...(19): siRNA sense strand
gaggacgaggcuauguauu

SEQ ID NO: 332038 - RNA, 19 nt, Homo sapiens
  misc_RNA (1)...(19): siRNA sense strand
gaccaugacaucggugugu

SEQ ID NO: 332039 - RNA, 19 nt, Homo sapiens
  misc_RNA (1)...(19): siRNA sense strand
acgaggcuauguauuacug

SEQ ID NO: 332040 - RNA, 19 nt, Homo sapiens
  misc_RNA (1)...(19): siRNA sense strand
ggagaaaccugaaggauuu

SEQ ID NO: 332041 - RNA, 19 nt, Homo sapiens
  misc_RNA (1)...(19): siRNA sense strand
gaaagaggaaagaaucaua

SEQ ID NO: 332042 - RNA, 19 nt, Homo sapiens
  misc_RNA (1)...(19): siRNA sense strand
gagaauggcaagaaauuaa

SEQ ID NO: 332043 - RNA, 19 nt, Homo sapiens
  misc_RNA (1)...(19): siRNA sense strand
gguagaagguuuaagugaa

SEQ ID NO: 332044 - RNA, 19 nt, Homo sapiens
  misc_RNA (1)...(19): siRNA sense strand
gggagaaaccugaugauuu

SEQ ID NO: 332045 - RNA, 19 nt, Homo sapiens
  misc_RNA (1)...(19): siRNA sense strand
ggcaagaaauuaaacaaga

SEQ ID NO: 332046 - RNA, 19 nt, Homo sapiens
  misc_RNA (1)...(19): siRNA sense strand
ucagugagauuaaacagaa

SEQ ID NO: 332047 - RNA, 19 nt, Homo sapiens
  misc_RNA (1)...(19): siRNA sense strand
ggagguagauuuggaacuu

SEQ ID NO: 332048 - RNA, 19 nt, Homo sapiens
  misc_RNA (1)...(19): siRNA sense strand
gaaacagaauucauuaggu

SEQ ID NO: 332049 - RNA, 19 nt, Homo sapiens
  misc_RNA (1)...(19): siRNA sense strand
gacaucaaaucaacagaaa

SEQ ID NO: 332050 - RNA, 19 nt, Homo sapiens
  misc_RNA (1)...(19): siRNA sense strand
ccaaagugguauuuaaaga

SEQ ID NO: 332051 - RNA, 19 nt, Homo sapiens
  misc_RNA (1)...(19): siRNA sense strand
gacaauaggccuaguguug

SEQ ID NO: 332052 - RNA, 19 nt, Homo sapiens
  misc_RNA (1)...(19): siRNA sense strand
cagcugcccugaaagcaua

SEQ ID NO: 332053 - RNA, 19 nt, Homo sapiens
  misc_RNA (1)...(19): siRNA sense strand
gaagaccguuuggguagaa

SEQ ID NO: 332054 - RNA, 19 nt, Homo sapiens
  misc_RNA (1)...(19): siRNA sense strand
ggaaagaaucauaaggaaa

SEQ ID NO: 332055 - RNA, 19 nt, Homo sapiens
  misc_RNA (1)...(19): siRNA sense strand
gaacuuccaagcacugaaa

SEQ ID NO: 332056 - RNA, 19 nt, Homo sapiens
  misc_RNA (1)...(19): siRNA sense strand
gcaagaaauuaaacaagag

SEQ ID NO: 332057 - RNA, 19 nt, Homo sapiens
  misc_RNA (1)...(19): siRNA sense strand
ggagaauggcaagaaauua

SEQ ID NO: 332058 - RNA, 19 nt, Homo sapiens
  misc_RNA (1)...(19): siRNA sense strand
ggaagucacagccaaagaa

SEQ ID NO: 332059 - RNA, 19 nt, Homo sapiens
  misc_RNA (1)...(19): siRNA sense strand
gaaaucaaacccauaugga

SEQ ID NO: 332060 - RNA, 19 nt, Homo sapiens
  misc_RNA (1)...(19): siRNA sense strand
gagaagaacugaaaaugga

SEQ ID NO: 332061 - RNA, 19 nt, Homo sapiens
  misc_RNA (1)...(19): siRNA sense strand
gaggaaagaaucauaagga

SEQ ID NO: 332062 - RNA, 19 nt, Homo sapiens
  misc_RNA (1)...(19): siRNA sense strand
caauaggccuaguguugaa

SEQ ID NO: 332063 - RNA, 19 nt, Homo sapiens
  misc_RNA (1)...(19): siRNA sense strand
ccaccuaccucgacaucaa

SEQ ID NO: 332064 - RNA, 19 nt, Homo sapiens
  misc_RNA (1)...(19): siRNA sense strand
gaacccaaagugguauuua

SEQ ID NO: 332065 - RNA, 19 nt, Homo sapiens
  misc_RNA (1)...(19): siRNA sense strand
gaagaugguuuuaccuauu

SEQ ID NO: 332066 - RNA, 19 nt, Homo sapiens
  misc_RNA (1)...(19): siRNA sense strand
guagaagguuuaagugaag

SEQ ID NO: 332067 - RNA, 19 nt, Homo sapiens
  misc_RNA (1)...(19): siRNA sense strand
gggagaaaccugaaggauu

SEQ ID NO: 332068 - RNA, 19 nt, Homo sapiens
  misc_RNA (1)...(19): siRNA sense strand
gaagugacccagaaacaca

SEQ ID NO: 332069 - RNA, 19 nt, Homo sapiens
  misc_RNA (1)...(19): siRNA sense strand
gaucuuaucucaggagcau

SEQ ID NO: 332070 - RNA, 19 nt, Homo sapiens
  misc_RNA (1)...(19): siRNA sense strand
gaagucacagccaaagaaa

SEQ ID NO: 332071 - RNA, 19 nt, Homo sapiens
  misc_RNA (1)...(19): siRNA sense strand
gaaagcauaccaagaggau

SEQ ID NO: 332072 - RNA, 19 nt, Homo sapiens
  misc_RNA (1)...(19): siRNA sense strand
cgaaaacucuuaagaaauc

SEQ ID NO: 332073 - RNA, 19 nt, Homo sapiens
  misc_RNA (1)...(19): siRNA sense strand
caucaaaucaacagaaaga

SEQ ID NO: 332074 - RNA, 19 nt, Homo sapiens
  misc_RNA (1)...(19): siRNA sense strand
gaaaagacuuggcuuagag

SEQ ID NO: 332075 - RNA, 19 nt, Homo sapiens
  misc_RNA (1)...(19): siRNA sense strand
ccagaaacacagaaagaaa

SEQ ID NO: 332076 - RNA, 19 nt, Homo sapiens
  misc_RNA (1)...(19): siRNA sense strand
aggguuaccauuacuauua

SEQ ID NO: 332077 - RNA, 19 nt, Homo sapiens
  misc_RNA (1)...(19): siRNA sense strand
ggaacaggaagcagaagaa

SEQ ID NO: 332078 - RNA, 19 nt, Homo sapiens
  misc_RNA (1)...(19): siRNA sense strand
cacccuagaugaauccaaa

SEQ ID NO: 332079 - RNA, 19 nt, Homo sapiens
  misc_RNA (1)...(19): siRNA sense strand
uagaaggcauaaccucuga

SEQ ID NO: 332080 - RNA, 19 nt, Homo sapiens
  misc_RNA (1)...(19): siRNA sense strand
ucacuucucuuggaguuau

SEQ ID NO: 332081 - RNA, 19 nt, Homo sapiens
  misc_RNA (1)...(19): siRNA sense strand
caucagauucgcauaguga

SEQ ID NO: 332082 - RNA, 19 nt, Homo sapiens
  misc_RNA (1)...(19): siRNA sense strand
ggguuaccauuacuauuau

SEQ ID NO: 332083 - RNA, 19 nt, Homo sapiens
  misc_RNA (1)...(19): siRNA sense strand
ccaagcauaacaccaguaa

SEQ ID NO: 332084 - RNA, 19 nt, Homo sapiens
  misc_RNA (1)...(19): siRNA sense strand
aacccaaagugguauuuaa

SEQ ID NO: 332085 - RNA, 19 nt, Homo sapiens
  misc_RNA (1)...(19): siRNA sense strand
uauggagaauggcaagaaa

SEQ ID NO: 332086 - RNA, 19 nt, Homo sapiens
  misc_RNA (1)...(19): siRNA sense strand
aagcauaccaagaggauuu

SEQ ID NO: 332087 - RNA, 19 nt, Homo sapiens
  misc_RNA (1)...(19): siRNA sense strand
aggaaagaaucauaaggaa

SEQ ID NO: 332088 - RNA, 19 nt, Homo sapiens
  misc_RNA (1)...(19): siRNA sense strand
cgacaucaaaucaacagaa

SEQ ID NO: 332089 - RNA, 19 nt, Homo sapiens
  misc_RNA (1)...(19): siRNA sense strand
gaugggagaaaccugauga

SEQ ID NO: 332090 - RNA, 19 nt, Homo sapiens
  misc_RNA (1)...(19): siRNA sense strand
agucacagccaaagaaauu

SEQ ID NO: 332091 - RNA, 19 nt, Homo sapiens
  misc_RNA (1)...(19): siRNA sense strand
cuaguaaggucaaugaaaa

SEQ ID NO: 332092 - RNA, 19 nt, Homo sapiens
  misc_RNA (1)...(19): siRNA sense strand
uggcuuagagucagaaauu

SEQ ID NO: 332093 - RNA, 19 nt, Homo sapiens
  misc_RNA (1)...(19): siRNA sense strand
ggaggaagugacccagaaa

SEQ ID NO: 332094 - RNA, 19 nt, Homo sapiens
  misc_RNA (1)...(19): siRNA sense strand
ggauaaggcaaaggaagaa

SEQ ID NO: 332095 - RNA, 19 nt, Homo sapiens
  misc_RNA (1)...(19): siRNA sense strand
uggaggaagugacccagaa

SEQ ID NO: 332096 - RNA, 19 nt, Homo sapiens
  misc_RNA (1)...(19): siRNA sense strand
gugaucugccuucuaguaa

SEQ ID NO: 332097 - RNA, 19 nt, Homo sapiens
  misc_RNA (1)...(19): siRNA sense strand
cggagaacccaaaguggua

SEQ ID NO: 332098 - RNA, 19 nt, Homo sapiens
  misc_RNA (1)...(19): siRNA sense strand
acaggaagcagaagaagga

SEQ ID NO: 332099 - RNA, 19 nt, Homo sapiens
  misc_RNA (1)...(19): siRNA sense strand
ucacuuggcacccuagaug

SEQ ID NO: 332100 - RNA, 19 nt, Homo sapiens
  misc_RNA (1)...(19): siRNA sense strand
caugaaagaggaaagaauc

SEQ ID NO: 332101 - RNA, 19 nt, Homo sapiens
  misc_RNA (1)...(19): siRNA sense strand
ggguagaagguuuaaguga

SEQ ID NO: 332102 - RNA, 19 nt, Homo sapiens
  misc_RNA (1)...(19): siRNA sense strand
ggcuuagagucagaaauuu

SEQ ID NO: 332103 - RNA, 19 nt, Homo sapiens
  misc_RNA (1)...(19): siRNA sense strand
gaacaggaagcagaagaag

SEQ ID NO: 332104 - RNA, 19 nt, Homo sapiens
  misc_RNA (1)...(19): siRNA sense strand
uaaggcaaaggaagaagaa

SEQ ID NO: 332105 - RNA, 19 nt, Homo sapiens
  misc_RNA (1)...(19): siRNA sense strand
guauguaucaacuucagaa

SEQ ID NO: 332106 - RNA, 19 nt, Homo sapiens
  misc_RNA (1)...(19): siRNA sense strand
ccaagaggauuugaaaaga

SEQ ID NO: 332107 - RNA, 19 nt, Homo sapiens
  misc_RNA (1)...(19): siRNA sense strand
acaauaggccuaguguuga

SEQ ID NO: 332108 - RNA, 19 nt, Homo sapiens
  misc_RNA (1)...(19): siRNA sense strand
aaauagugauggaggaagu

SEQ ID NO: 332109 - RNA, 19 nt, Homo sapiens
  misc_RNA (1)...(19): siRNA sense strand
gaaacaggagaauccagau

SEQ ID NO: 332110 - RNA, 19 nt, Homo sapiens
  misc_RNA (1)...(19): siRNA sense strand
aaggaucagugagauuaaa

SEQ ID NO: 332111 - RNA, 19 nt, Homo sapiens
  misc_RNA (1)...(19): siRNA sense strand
aaaaggaucagugagauua

SEQ ID NO: 332112 - RNA, 19 nt, Homo sapiens
  misc_RNA (1)...(19): siRNA sense strand
gaguauguaucaacuucag

SEQ ID NO: 332113 - RNA, 19 nt, Homo sapiens
  misc_RNA (1)...(19): siRNA sense strand
gagguagauuuggaacuuc

SEQ ID NO: 332114 - RNA, 19 nt, Homo sapiens
  misc_RNA (1)...(19): siRNA sense strand
uaaacaagagguugagucu

SEQ ID NO: 332115 - RNA, 19 nt, Homo sapiens
  misc_RNA (1)...(19): siRNA sense strand
uggagaauggcaagaaauu

SEQ ID NO: 332116 - RNA, 19 nt, Homo sapiens
  misc_RNA (1)...(19): siRNA sense strand
gcacugaaaaugaguaugu

SEQ ID NO: 332117 - RNA, 19 nt, Homo sapiens
  misc_RNA (1)...(19): siRNA sense strand
gcagacaauaggccuagug

SEQ ID NO: 332118 - RNA, 19 nt, Homo sapiens
  misc_RNA (1)...(19): siRNA sense strand
aacagucacuucucuugga

SEQ ID NO: 332119 - RNA, 19 nt, Homo sapiens
  misc_RNA (1)...(19): siRNA sense strand
uaaggaaaauguggcaaaa

SEQ ID NO: 332120 - RNA, 19 nt, Homo sapiens
  misc_RNA (1)...(19): siRNA sense strand
auaccaagaggauuugaaa

SEQ ID NO: 332121 - RNA, 19 nt, Homo sapiens
  misc_RNA (1)...(19): siRNA sense strand
cagaauucauuagguucaa

SEQ ID NO: 332122 - RNA, 19 nt, Homo sapiens
  misc_RNA (1)...(19): siRNA sense strand
gggaacaggaagcagaaga

SEQ ID NO: 332123 - RNA, 19 nt, Homo sapiens
  misc_RNA (1)...(19): siRNA sense strand
ucuaguaaggucaaugaaa

SEQ ID NO: 332124 - RNA, 19 nt, Homo sapiens
  misc_RNA (1)...(19): siRNA sense strand
ugaaaagacuuggcuuaga

SEQ ID NO: 332125 - RNA, 19 nt, Homo sapiens
  misc_RNA (1)...(19): siRNA sense strand
ccugaaagcauaccaagag

SEQ ID NO: 332126 - RNA, 19 nt, Homo sapiens
  misc_RNA (1)...(19): siRNA sense strand
cagauggguagaaggcaua

SEQ ID NO: 332127 - RNA, 19 nt, Homo sapiens
  misc_RNA (1)...(19): siRNA sense strand
gaauccagaugggagaaac

SEQ ID NO: 332128 - RNA, 19 nt, Homo sapiens
  misc_RNA (1)...(19): siRNA sense strand
ugaagaccguuuggguaga

SEQ ID NO: 332129 - RNA, 19 nt, Homo sapiens
  misc_RNA (1)...(19): siRNA sense strand
gaggguuaccauuacuauu

SEQ ID NO: 332130 - RNA, 19 nt, Homo sapiens
  misc_RNA (1)...(19): siRNA sense strand
aaacagaaaagccuggaua

SEQ ID NO: 332131 - RNA, 19 nt, Homo sapiens
  misc_RNA (1)...(19): siRNA sense strand
uaauacagaaacaggagaa

SEQ ID NO: 332132 - RNA, 19 nt, Homo sapiens
  misc_RNA (1)...(19): siRNA sense strand
cagauucgcauagugauuc

SEQ ID NO: 332133 - RNA, 19 nt, Homo sapiens
  misc_RNA (1)...(19): siRNA sense strand
ggagaacccaaagugguau

SEQ ID NO: 332134 - RNA, 19 nt, Homo sapiens
  misc_RNA (1)...(19): siRNA sense strand
ccguuuggguagaagguuu

SEQ ID NO: 332135 - RNA, 19 nt, Homo sapiens
  misc_RNA (1)...(19): siRNA sense strand
aaaggaucagugagauuaa

SEQ ID NO: 332136 - RNA, 19 nt, Homo sapiens
  misc_RNA (1)...(19): siRNA sense strand
agaaaucaaacccauaugg

SEQ ID NO: 332137 - RNA, 19 nt, Homo sapiens
  misc_RNA (1)...(19): siRNA sense strand
agugaucugccuucuagua

SEQ ID NO: 332138 - RNA, 19 nt, Homo sapiens
  misc_RNA (1)...(19): siRNA sense strand
agucacuucucuuggaguu

SEQ ID NO: 332139 - RNA, 19 nt, Homo sapiens
  misc_RNA (1)...(19): siRNA sense strand
gaacugaaaauggaaaauc

SEQ ID NO: 332140 - RNA, 19 nt, Homo sapiens
  misc_RNA (1)...(19): siRNA sense strand
gaagauauccugauuguuu

SEQ ID NO: 332141 - RNA, 19 nt, Homo sapiens
  misc_RNA (1)...(19): siRNA sense strand
ggagguaaaugcauuggua

SEQ ID NO: 332142 - RNA, 19 nt, Homo sapiens
  misc_RNA (1)...(19): siRNA sense strand
gcacacgccuucacuuaaa

SEQ ID NO: 332143 - RNA, 19 nt, Homo sapiens
  misc_RNA (1)...(19): siRNA sense strand
ccacaacccugucgaaaug

SEQ ID NO: 332144 - RNA, 19 nt, Homo sapiens
  misc_RNA (1)...(19): siRNA sense strand
guacgaagccagccucaua

SEQ ID NO: 332145 - RNA, 19 nt, Homo sapiens
  misc_RNA (1)...(19): siRNA sense strand
ugaagaagauauccugauu

SEQ ID NO: 332146 - RNA, 19 nt, Homo sapiens
  misc_RNA (1)...(19): siRNA sense strand
ggaagacacugcaauaaaa

SEQ ID NO: 332147 - RNA, 19 nt, Homo sapiens
  misc_RNA (1)...(19): siRNA sense strand
caagaguacucauaggauu

SEQ ID NO: 332148 - RNA, 19 nt, Homo sapiens
  misc_RNA (1)...(19): siRNA sense strand
caacagagaaugccagcua

SEQ ID NO: 332149 - RNA, 19 nt, Homo sapiens
  misc_RNA (1)...(19): siRNA sense strand
gaggagagccuguaccuau

SEQ ID NO: 332150 - RNA, 19 nt, Homo sapiens
  misc_RNA (1)...(19): siRNA sense strand
gaaguggaugugauuguua

SEQ ID NO: 332151 - RNA, 19 nt, Homo sapiens
  misc_RNA (1)...(19): siRNA sense strand
caagaagguuggcauggaa

SEQ ID NO: 332152 - RNA, 19 nt, Homo sapiens
  misc_RNA (1)...(19): siRNA sense strand
ggagagcagugugaaauca

SEQ ID NO: 332153 - RNA, 19 nt, Homo sapiens
  misc_RNA (1)...(19): siRNA sense strand
ggagugaacugugacaaag

SEQ ID NO: 332154 - RNA, 19 nt, Homo sapiens
  misc_RNA (1)...(19): siRNA sense strand
ucaaccaccugcuuuaaug

SEQ ID NO: 332155 - RNA, 19 nt, Homo sapiens
  misc_RNA (1)...(19): siRNA sense strand
gaagccagccucauacaug

SEQ ID NO: 332156 - RNA, 19 nt, Homo sapiens
  misc_RNA (1)...(19): siRNA sense strand
aagaagauauccugauugu

SEQ ID NO: 332157 - RNA, 19 nt, Homo sapiens
  misc_RNA (1)...(19): siRNA sense strand
cagcacacgccuucacuua

SEQ ID NO: 332158 - RNA, 19 nt, Homo sapiens
  misc_RNA (1)...(19): siRNA sense strand
caacaaaugccaaugucaa

SEQ ID NO: 332159 - RNA, 19 nt, Homo sapiens
  misc_RNA (1)...(19): siRNA sense strand
guaaguguuccaaagguua

SEQ ID NO: 332160 - RNA, 19 nt, Homo sapiens
  misc_RNA (1)...(19): siRNA sense strand
gaagaagauauccugauug

SEQ ID NO: 332161 - RNA, 19 nt, Homo sapiens
  misc_RNA (1)...(19): siRNA sense strand
caacaccauucuccaaaca

SEQ ID NO: 332162 - RNA, 19 nt, Homo sapiens
  misc_RNA (1)...(19): siRNA sense strand
cauaggauuugaagaagau

SEQ ID NO: 332163 - RNA, 19 nt, Homo sapiens
  misc_RNA (1)...(19): siRNA sense strand
ggagaccucuguucaaagc

SEQ ID NO: 332164 - RNA, 19 nt, Homo sapiens
  misc_RNA (1)...(19): siRNA sense strand
ggcaucaguuguucaaguu

SEQ ID NO: 332165 - RNA, 19 nt, Homo sapiens
  misc_RNA (1)...(19): siRNA sense strand
gccaugaacccaacaaaug

SEQ ID NO: 332166 - RNA, 19 nt, Homo sapiens
  misc_RNA (1)...(19): siRNA sense strand
ugaaguggaugugauuguu

SEQ ID NO: 332167 - RNA, 19 nt, Homo sapiens
  misc_RNA (1)...(19): siRNA sense strand
caaaugccaaugucaagaa

SEQ ID NO: 332168 - RNA, 19 nt, Homo sapiens
  misc_RNA (1)...(19): siRNA sense strand
ggaugugauuguuaugaau

SEQ ID NO: 332169 - RNA, 19 nt, Homo sapiens
  misc_RNA (1)...(19): siRNA sense strand
ucaagaagguuggcaugga

SEQ ID NO: 332170 - RNA, 19 nt, Homo sapiens
  misc_RNA (1)...(19): siRNA sense strand
cauggaagacacugcaaua

SEQ ID NO: 332171 - RNA, 19 nt, Homo sapiens
  misc_RNA (1)...(19): siRNA sense strand
gucaauauccauuccauga

SEQ ID NO: 332172 - RNA, 19 nt, Homo sapiens
  misc_RNA (1)...(19): siRNA sense strand
gugccgaaauggaggcuuu

SEQ ID NO: 332173 - RNA, 19 nt, Homo sapiens
  misc_RNA (1)...(19): siRNA sense strand
ucaaguugguuucccaugu

SEQ ID NO: 332174 - RNA, 19 nt, Homo sapiens
  misc_RNA (1)...(19): siRNA sense strand
gcaagaguacucauaggau

SEQ ID NO: 332175 - RNA, 19 nt, Homo sapiens
  misc_RNA (1)...(19): siRNA sense strand
gcaacaccauucuccaaac

SEQ ID NO: 332176 - RNA, 19 nt, Homo sapiens
  misc_RNA (1)...(19): siRNA sense strand
caaguugguuucccauguc

SEQ ID NO: 332177 - RNA, 19 nt, Homo sapiens
  misc_RNA (1)...(19): siRNA sense strand
uggaagacacugcaauaaa

SEQ ID NO: 332178 - RNA, 19 nt, Homo sapiens
  misc_RNA (1)...(19): siRNA sense strand
aaauguaaguguuccaaag

SEQ ID NO: 332179 - RNA, 19 nt, Homo sapiens
  misc_RNA (1)...(19): siRNA sense strand
ucuauggagugaacuguga

SEQ ID NO: 332180 - RNA, 19 nt, Homo sapiens
  misc_RNA (1)...(19): siRNA sense strand
gaaauggaggcuuuuguaa

SEQ ID NO: 332181 - RNA, 19 nt, Homo sapiens
  misc_RNA (1)...(19): siRNA sense strand
gcucaaccaccugcuuuaa

SEQ ID NO: 332182 - RNA, 19 nt, Homo sapiens
  misc_RNA (1)...(19): siRNA sense strand
gagguaaaugcauugguaa

SEQ ID NO: 332183 - RNA, 19 nt, Homo sapiens
  misc_RNA (1)...(19): siRNA sense strand
gaaauggagguaaaugcau

SEQ ID NO: 332184 - RNA, 19 nt, Homo sapiens
  misc_RNA (1)...(19): siRNA sense strand
ucauaggauuugaagaaga

SEQ ID NO: 332185 - RNA, 19 nt, Homo sapiens
  misc_RNA (1)...(19): siRNA sense strand
ccaccugaauccaauuaca

SEQ ID NO: 332186 - RNA, 19 nt, Homo sapiens
  misc_RNA (1)...(19): siRNA sense strand
acucauaggauuugaagaa

SEQ ID NO: 332187 - RNA, 19 nt, Homo sapiens
  misc_RNA (1)...(19): siRNA sense strand
agggagaccucuguucaaa

SEQ ID NO: 332188 - RNA, 19 nt, Homo sapiens
  misc_RNA (1)...(19): siRNA sense strand
gaaaagcgcaacagagaau

SEQ ID NO: 332189 - RNA, 19 nt, Homo sapiens
  misc_RNA (1)...(19): siRNA sense strand
uaugaaugguggacuuugu

SEQ ID NO: 332190 - RNA, 19 nt, Homo sapiens
  misc_RNA (1)...(19): siRNA sense strand
ccaggcaagaguacucaua

SEQ ID NO: 332191 - RNA, 19 nt, Homo sapiens
  misc_RNA (1)...(19): siRNA sense strand
gcaaauguaaguguuccaa

SEQ ID NO: 332192 - RNA, 19 nt, Homo sapiens
  misc_RNA (1)...(19): siRNA sense strand
uggaugugauuguuaugaa

SEQ ID NO: 332193 - RNA, 19 nt, Homo sapiens
  misc_RNA (1)...(19): siRNA sense strand
uauuugcccuccaggacua

SEQ ID NO: 332194 - RNA, 19 nt, Homo sapiens
  misc_RNA (1)...(19): siRNA sense strand
caaggcaucaguuguucaa

SEQ ID NO: 332195 - RNA, 19 nt, Homo sapiens
  misc_RNA (1)...(19): siRNA sense strand
gaacccaacaaaugccaau

SEQ ID NO: 332196 - RNA, 19 nt, Homo sapiens
  misc_RNA (1)...(19): siRNA sense strand
caaauguaaguguuccaaa

SEQ ID NO: 332197 - RNA, 19 nt, Homo sapiens
  misc_RNA (1)...(19): siRNA sense strand
ggcaacaccauucuccaaa

SEQ ID NO: 332198 - RNA, 19 nt, Homo sapiens
  misc_RNA (1)...(19): siRNA sense strand
gguggcagcauuugaagug

SEQ ID NO: 332199 - RNA, 19 nt, Homo sapiens
  misc_RNA (1)...(19): siRNA sense strand
ggcaagaguacucauagga

SEQ ID NO: 332200 - RNA, 19 nt, Homo sapiens
  misc_RNA (1)...(19): siRNA sense strand
ccagggagaccucuguuca

SEQ ID NO: 332201 - RNA, 19 nt, Homo sapiens
  misc_RNA (1)...(19): siRNA sense strand
cgaaauggagguaaaugca

SEQ ID NO: 332202 - RNA, 19 nt, Homo sapiens
  misc_RNA (1)...(19): siRNA sense strand
aagauauccugauuguuuc

SEQ ID NO: 332203 - RNA, 19 nt, Homo sapiens
  misc_RNA (1)...(19): siRNA sense strand
gaacugugacaaagcaaac

SEQ ID NO: 332204 - RNA, 19 nt, Homo sapiens
  misc_RNA (1)...(19): siRNA sense strand
uguaaguguuccaaagguu

SEQ ID NO: 332205 - RNA, 19 nt, Homo sapiens
  misc_RNA (1)...(19): siRNA sense strand
gagagccuguaccuaugga

SEQ ID NO: 332206 - RNA, 19 nt, Homo sapiens
  misc_RNA (1)...(19): siRNA sense strand
ucuaugaauuccuguccuu

SEQ ID NO: 332207 - RNA, 19 nt, Homo sapiens
  misc_RNA (1)...(19): siRNA sense strand
aaguggaugugauuguuau

SEQ ID NO: 332208 - RNA, 19 nt, Homo sapiens
  misc_RNA (1)...(19): siRNA sense strand
ucaauauccauuccaugaa

SEQ ID NO: 332209 - RNA, 19 nt, Homo sapiens
  misc_RNA (1)...(19): siRNA sense strand
guacucauaggauuugaag

SEQ ID NO: 332210 - RNA, 19 nt, Homo sapiens
  misc_RNA (1)...(19): siRNA sense strand
guaaaugcauugguaaaag

SEQ ID NO: 332211 - RNA, 19 nt, Homo sapiens
  misc_RNA (1)...(19): siRNA sense strand
cgaaauggaggcuuuugua

SEQ ID NO: 332212 - RNA, 19 nt, Homo sapiens
  misc_RNA (1)...(19): siRNA sense strand
uccuugcgcucccuggaua

SEQ ID NO: 332213 - RNA, 19 nt, Homo sapiens
  misc_RNA (1)...(19): siRNA sense strand
cagaaaagcgcaacagaga

SEQ ID NO: 332214 - RNA, 19 nt, Homo sapiens
  misc_RNA (1)...(19): siRNA sense strand
gguaaaagcaaauguaagu

SEQ ID NO: 332215 - RNA, 19 nt, Homo sapiens
  misc_RNA (1)...(19): siRNA sense strand
ggaggagagccuguaccua

SEQ ID NO: 332216 - RNA, 19 nt, Homo sapiens
  misc_RNA (1)...(19): siRNA sense strand
gagggagagcagugugaaa

SEQ ID NO: 332217 - RNA, 19 nt, Homo sapiens
  misc_RNA (1)...(19): siRNA sense strand
cugcccaccuggauucuau

SEQ ID NO: 332218 - RNA, 19 nt, Homo sapiens
  misc_RNA (1)...(19): siRNA sense strand
cauuugaaguggaugugau

SEQ ID NO: 332219 - RNA, 19 nt, Homo sapiens
  misc_RNA (1)...(19): siRNA sense strand
aagaguacucauaggauuu

SEQ ID NO: 332220 - RNA, 19 nt, Homo sapiens
  misc_RNA (1)...(19): siRNA sense strand
uuaauggagggaccuguuu

SEQ ID NO: 332221 - RNA, 19 nt, Homo sapiens
  misc_RNA (1)...(19): siRNA sense strand
aauggaggcuuuuguaaug

SEQ ID NO: 332222 - RNA, 19 nt, Homo sapiens
  misc_RNA (1)...(19): siRNA sense strand
gcagauccaaccgucaaug

SEQ ID NO: 332223 - RNA, 19 nt, Homo sapiens
  misc_RNA (1)...(19): siRNA sense strand
ggagagccuguaccuaugg

SEQ ID NO: 332224 - RNA, 19 nt, Homo sapiens
  misc_RNA (1)...(19): siRNA sense strand
aggagagccuguaccuaug

SEQ ID NO: 332225 - RNA, 19 nt, Homo sapiens
  misc_RNA (1)...(19): siRNA sense strand
gcagugugaaaucagcaaa

SEQ ID NO: 332226 - RNA, 19 nt, Homo sapiens
  misc_RNA (1)...(19): siRNA sense strand
aaugguggacuuuguguga

SEQ ID NO: 332227 - RNA, 19 nt, Homo sapiens
  misc_RNA (1)...(19): siRNA sense strand
aggcaucaguuguucaagu

SEQ ID NO: 332228 - RNA, 19 nt, Homo sapiens
  misc_RNA (1)...(19): siRNA sense strand
uaaaacaugucuacaagcu

SEQ ID NO: 332229 - RNA, 19 nt, Homo sapiens
  misc_RNA (1)...(19): siRNA sense strand
gcauggaagacacugcaau

SEQ ID NO: 332230 - RNA, 19 nt, Homo sapiens
  misc_RNA (1)...(19): siRNA sense strand
agugugaaaucagcaaaug

SEQ ID NO: 332231 - RNA, 19 nt, Homo sapiens
  misc_RNA (1)...(19): siRNA sense strand
ggcagcauuugaaguggau

SEQ ID NO: 332232 - RNA, 19 nt, Homo sapiens
  misc_RNA (1)...(19): siRNA sense strand
gcagcacacgccuucacuu

SEQ ID NO: 332233 - RNA, 19 nt, Homo sapiens
  misc_RNA (1)...(19): siRNA sense strand
gcccacaacccugucgaaa

SEQ ID NO: 332234 - RNA, 19 nt, Homo sapiens
  misc_RNA (1)...(19): siRNA sense strand
ccucacaaggcaucaguug

SEQ ID NO: 332235 - RNA, 19 nt, Homo sapiens
  misc_RNA (1)...(19): siRNA sense strand
aacagagaaugccagcuau

SEQ ID NO: 332236 - RNA, 19 nt, Homo sapiens
  misc_RNA (1)...(19): siRNA sense strand
caucugcccaccuggauuc

SEQ ID NO: 332237 - RNA, 19 nt, Homo sapiens
  misc_RNA (1)...(19): siRNA sense strand
gcauuugaaguggauguga

SEQ ID NO: 332238 - RNA, 19 nt, Homo sapiens
  misc_RNA (1)...(19): siRNA sense strand
cccaacaaaugccaauguc

SEQ ID NO: 332239 - RNA, 19 nt, Homo sapiens
  misc_RNA (1)...(19): siRNA sense strand
ccaacaaaugccaauguca

SEQ ID NO: 332240 - RNA, 19 nt, Homo sapiens
  misc_RNA (1)...(19): siRNA sense strand
caacagcacggacuacauu

SEQ ID NO: 332241 - RNA, 19 nt, Homo sapiens
  misc_RNA (1)...(19): siRNA sense strand
gggcagcgcucaucaacgu

SEQ ID NO: 332242 - RNA, 19 nt, Homo sapiens
  misc_RNA (1)...(19): siRNA sense strand
gcacuguccucaacaucau

SEQ ID NO: 332243 - RNA, 19 nt, Homo sapiens
  misc_RNA (1)...(19): siRNA sense strand
ggagcuggacuauggcuuu

SEQ ID NO: 332244 - RNA, 19 nt, Homo sapiens
  misc_RNA (1)...(19): siRNA sense strand
acgaggagcuggacuaugg

SEQ ID NO: 332245 - RNA, 19 nt, Homo sapiens
  misc_RNA (1)...(19): siRNA sense strand
caacuggguacaagacauu

SEQ ID NO: 332246 - RNA, 19 nt, Homo sapiens
  misc_RNA (1)...(19): siRNA sense strand
gaagauccggcaccacauc

SEQ ID NO: 332247 - RNA, 19 nt, Homo sapiens
  misc_RNA (1)...(19): siRNA sense strand
gagcuggacuauggcuuuc

SEQ ID NO: 332248 - RNA, 19 nt, Homo sapiens
  misc_RNA (1)...(19): siRNA sense strand
gcagcaacagcacggacua

SEQ ID NO: 332249 - RNA, 19 nt, Homo sapiens
  misc_RNA (1)...(19): siRNA sense strand
gccugaacacugugaagua

SEQ ID NO: 332250 - RNA, 19 nt, Homo sapiens
  misc_RNA (1)...(19): siRNA sense strand
caacgaggagcuggacuau

SEQ ID NO: 332251 - RNA, 19 nt, Homo sapiens
  misc_RNA (1)...(19): siRNA sense strand
gcgaggacgacgaguucua

SEQ ID NO: 332252 - RNA, 19 nt, Homo sapiens
  misc_RNA (1)...(19): siRNA sense strand
ucaacgaggagcuggacua

SEQ ID NO: 332253 - RNA, 19 nt, Homo sapiens
  misc_RNA (1)...(19): siRNA sense strand
aaucacaacuggguacaag

SEQ ID NO: 332254 - RNA, 19 nt, Homo sapiens
  misc_RNA (1)...(19): siRNA sense strand
gcauccugcugcucuccaa

SEQ ID NO: 332255 - RNA, 19 nt, Homo sapiens
  misc_RNA (1)...(19): siRNA sense strand
gcaacagcacggacuacau

SEQ ID NO: 332256 - RNA, 19 nt, Homo sapiens
  misc_RNA (1)...(19): siRNA sense strand
agggaggccugaacacugu

SEQ ID NO: 332257 - RNA, 19 nt, Homo sapiens
  misc_RNA (1)...(19): siRNA sense strand
ugaacacugugaaguacca

SEQ ID NO: 332258 - RNA, 19 nt, Homo sapiens
  misc_RNA (1)...(19): siRNA sense strand
ccugaacacugugaaguac

SEQ ID NO: 332259 - RNA, 19 nt, Homo sapiens
  misc_RNA (1)...(19): siRNA sense strand
gaaucacaacuggguacaa

SEQ ID NO: 332260 - RNA, 19 nt, Homo sapiens
  misc_RNA (1)...(19): siRNA sense strand
ggagggaggccugaacacu

SEQ ID NO: 332261 - RNA, 19 nt, Homo sapiens
  misc_RNA (1)...(19): siRNA sense strand
cggacuacauugccaugca

SEQ ID NO: 332262 - RNA, 19 nt, Homo sapiens
  misc_RNA (1)...(19): siRNA sense strand
gaacagugcucuuguggua

SEQ ID NO: 332263 - RNA, 19 nt, Homo sapiens
  misc_RNA (1)...(19): siRNA sense strand
gauggaaucugcuuuguug

SEQ ID NO: 332264 - RNA, 19 nt, Homo sapiens
  misc_RNA (1)...(19): siRNA sense strand
gaauuuaccucaagaacuc

SEQ ID NO: 332265 - RNA, 19 nt, Homo sapiens
  misc_RNA (1)...(19): siRNA sense strand
ucacaaggauugaaagaug

SEQ ID NO: 332266 - RNA, 19 nt, Homo sapiens
  misc_RNA (1)...(19): siRNA sense strand
ugaaggaaguggaccuaua

SEQ ID NO: 332267 - RNA, 19 nt, Homo sapiens
  misc_RNA (1)...(19): siRNA sense strand
gaauagaguggaugaaaug

SEQ ID NO: 332268 - RNA, 19 nt, Homo sapiens
  misc_RNA (1)...(19): siRNA sense strand
uagaguggaugaaaugaaa

SEQ ID NO: 332269 - RNA, 19 nt, Homo sapiens
  misc_RNA (1)...(19): siRNA sense strand
gaaauuauaccaggcaaug

SEQ ID NO: 332270 - RNA, 19 nt, Homo sapiens
  misc_RNA (1)...(19): siRNA sense strand
agagaaguauccagaauug

SEQ ID NO: 332271 - RNA, 19 nt, Homo sapiens
  misc_RNA (1)...(19): siRNA sense strand
ggauaccucuagugcaauu

SEQ ID NO: 332272 - RNA, 19 nt, Homo sapiens
  misc_RNA (1)...(19): siRNA sense strand
caugaagacugaccaacuu

SEQ ID NO: 332273 - RNA, 19 nt, Homo sapiens
  misc_RNA (1)...(19): siRNA sense strand
aagaugagguucucuacaa

SEQ ID NO: 332274 - RNA, 19 nt, Homo sapiens
  misc_RNA (1)...(19): siRNA sense strand
gaggcaagcucaauguaca

SEQ ID NO: 332275 - RNA, 19 nt, Homo sapiens
  misc_RNA (1)...(19): siRNA sense strand
guggauaccucuagugcaa

SEQ ID NO: 332276 - RNA, 19 nt, Homo sapiens
  misc_RNA (1)...(19): siRNA sense strand
gaaggaaguggaccuauag

SEQ ID NO: 332277 - RNA, 19 nt, Homo sapiens
  misc_RNA (1)...(19): siRNA sense strand
aguggcaacugaaauuaua

SEQ ID NO: 332278 - RNA, 19 nt, Homo sapiens
  misc_RNA (1)...(19): siRNA sense strand
cgaaguguggccauaauaa

SEQ ID NO: 332279 - RNA, 19 nt, Homo sapiens
  misc_RNA (1)...(19): siRNA sense strand
cacaaggauugaaagauga

SEQ ID NO: 332280 - RNA, 19 nt, Homo sapiens
  misc_RNA (1)...(19): siRNA sense strand
gauaacaccugcuuuucaa

SEQ ID NO: 332281 - RNA, 19 nt, Homo sapiens
  misc_RNA (1)...(19): siRNA sense strand
agaauagaguggaugaaau

SEQ ID NO: 332282 - RNA, 19 nt, Homo sapiens
  misc_RNA (1)...(19): siRNA sense strand
guucuaguauucuggauca

SEQ ID NO: 332283 - RNA, 19 nt, Homo sapiens
  misc_RNA (1)...(19): siRNA sense strand
caacugguauggugaacag

SEQ ID NO: 332284 - RNA, 19 nt, Homo sapiens
  misc_RNA (1)...(19): siRNA sense strand
acagagaaguauccagaau

SEQ ID NO: 332285 - RNA, 19 nt, Homo sapiens
  misc_RNA (1)...(19): siRNA sense strand
gacaccaucuuccaugcuu

SEQ ID NO: 332286 - RNA, 19 nt, Homo sapiens
  misc_RNA (1)...(19): siRNA sense strand
ggaagugcagccaggauug

SEQ ID NO: 332287 - RNA, 19 nt, Homo sapiens
  misc_RNA (1)...(19): siRNA sense strand
uuucgaaguucuaguauuc

SEQ ID NO: 332288 - RNA, 19 nt, Homo sapiens
  misc_RNA (1)...(19): siRNA sense strand
gaaagugcaggcgaucauu

SEQ ID NO: 332289 - RNA, 19 nt, Homo sapiens
  misc_RNA (1)...(19): siRNA sense strand
caagcucaauguacaucuu

SEQ ID NO: 332290 - RNA, 19 nt, Homo sapiens
  misc_RNA (1)...(19): siRNA sense strand
gugcaggcgaucauuauuu

SEQ ID NO: 332291 - RNA, 19 nt, Homo sapiens
  misc_RNA (1)...(19): siRNA sense strand
ugaccaacuucccuuugaa

SEQ ID NO: 332292 - RNA, 19 nt, Homo sapiens
  misc_RNA (1)...(19): siRNA sense strand
ggugaacagugcucuugug

SEQ ID NO: 332293 - RNA, 19 nt, Homo sapiens
  misc_RNA (1)...(19): siRNA sense strand
gaucauuauuucgaaguuc

SEQ ID NO: 332294 - RNA, 19 nt, Homo sapiens
  misc_RNA (1)...(19): siRNA sense strand
aaagugcaggcgaucauua

SEQ ID NO: 332295 - RNA, 19 nt, Homo sapiens
  misc_RNA (1)...(19): siRNA sense strand
ugaaagaugagguucucua

SEQ ID NO: 332296 - RNA, 19 nt, Homo sapiens
  misc_RNA (1)...(19): siRNA sense strand
gaaagaugagguucucuac

SEQ ID NO: 332297 - RNA, 19 nt, Homo sapiens
  misc_RNA (1)...(19): siRNA sense strand
gaccaacuucccuuugaaa

SEQ ID NO: 332298 - RNA, 19 nt, Homo sapiens
  misc_RNA (1)...(19): siRNA sense strand
gaaaagcuccagauucuca

SEQ ID NO: 332299 - RNA, 19 nt, Homo sapiens
  misc_RNA (1)...(19): siRNA sense strand
gcaggagucagucgaagug

SEQ ID NO: 332300 - RNA, 19 nt, Homo sapiens
  misc_RNA (1)...(19): siRNA sense strand
cagagaaguauccagaauu

SEQ ID NO: 332301 - RNA, 19 nt, Homo sapiens
  misc_RNA (1)...(19): siRNA sense strand
ggguuugaguggcaacuga

SEQ ID NO: 332302 - RNA, 19 nt, Homo sapiens
  misc_RNA (1)...(19): siRNA sense strand
ccucuagugcaauuuauaa

SEQ ID NO: 332303 - RNA, 19 nt, Homo sapiens
  misc_RNA (1)...(19): siRNA sense strand
cuagugcaauuuauaagca

SEQ ID NO: 332304 - RNA, 19 nt, Homo sapiens
  misc_RNA (1)...(19): siRNA sense strand
ggauggaaucugcuuuguu

SEQ ID NO: 332305 - RNA, 19 nt, Homo sapiens
  misc_RNA (1)...(19): siRNA sense strand
caaaccagaggcuaagaug

SEQ ID NO: 332306 - RNA, 19 nt, Homo sapiens
  misc_RNA (1)...(19): siRNA sense strand
aaguggaccuauagccuuu

SEQ ID NO: 332307 - RNA, 19 nt, Homo sapiens
  misc_RNA (1)...(19): siRNA sense strand
uacaaaagguuacagagaa

SEQ ID NO: 332308 - RNA, 19 nt, Homo sapiens
  misc_RNA (1)...(19): siRNA sense strand
cugaccaacuucccuuuga

SEQ ID NO: 332309 - RNA, 19 nt, Homo sapiens
  misc_RNA (1)...(19): siRNA sense strand
aagaauagaguggaugaaa

SEQ ID NO: 332310 - RNA, 19 nt, Homo sapiens
  misc_RNA (1)...(19): siRNA sense strand
gcucaauguacaucuuauu

SEQ ID NO: 332311 - RNA, 19 nt, Homo sapiens
  misc_RNA (1)...(19): siRNA sense strand
gcagaauuuaccucaagaa

SEQ ID NO: 332312 - RNA, 19 nt, Homo sapiens
  misc_RNA (1)...(19): siRNA sense strand
ugaguggcaacugaaauua

SEQ ID NO: 332313 - RNA, 19 nt, Homo sapiens
  misc_RNA (1)...(19): siRNA sense strand
cagaggcuaagaugaauga

SEQ ID NO: 332314 - RNA, 19 nt, Homo sapiens
  misc_RNA (1)...(19): siRNA sense strand
aaccagaggcuaagaugaa

SEQ ID NO: 332315 - RNA, 19 nt, Homo sapiens
  misc_RNA (1)...(19): siRNA sense strand
gaaguguggccauaauaac

SEQ ID NO: 332316 - RNA, 19 nt, Homo sapiens
  misc_RNA (1)...(19): siRNA sense strand
gcaauaucguuuacaaaag

SEQ ID NO: 332317 - RNA, 19 nt, Homo sapiens
  misc_RNA (1)...(19): siRNA sense strand
gaaguggauaccucuagug

SEQ ID NO: 332318 - RNA, 19 nt, Homo sapiens
  misc_RNA (1)...(19): siRNA sense strand
cauaauaacugcuuuucuc

SEQ ID NO: 332319 - RNA, 19 nt, Homo sapiens
  misc_RNA (1)...(19): siRNA sense strand
gggaggcaagcucaaugua

SEQ ID NO: 332320 - RNA, 19 nt, Homo sapiens
  misc_RNA (1)...(19): siRNA sense strand
acaccaucuuccaugcuua

SEQ ID NO: 332321 - RNA, 19 nt, Homo sapiens
  misc_RNA (1)...(19): siRNA sense strand
gaguggcaacugaaauuau

SEQ ID NO: 332322 - RNA, 19 nt, Homo sapiens
  misc_RNA (1)...(19): siRNA sense strand
ugcaggcgaucauuauuuc

SEQ ID NO: 332323 - RNA, 19 nt, Homo sapiens
  misc_RNA (1)...(19): siRNA sense strand
gaagugcagccaggauugu

SEQ ID NO: 332324 - RNA, 19 nt, Homo sapiens
  misc_RNA (1)...(19): siRNA sense strand
aaaaugcagugccaaguug

SEQ ID NO: 332325 - RNA, 19 nt, Homo sapiens
  misc_RNA (1)...(19): siRNA sense strand
ggaggcaagcucaauguac

SEQ ID NO: 332326 - RNA, 19 nt, Homo sapiens
  misc_RNA (1)...(19): siRNA sense strand
cgaucauuauuucgaaguu

SEQ ID NO: 332327 - RNA, 19 nt, Homo sapiens
  misc_RNA (1)...(19): siRNA sense strand
aagcucaauguacaucuua

SEQ ID NO: 332328 - RNA, 19 nt, Homo sapiens
  misc_RNA (1)...(19): siRNA sense strand
gaaugacaccaucuuccau

SEQ ID NO: 332329 - RNA, 19 nt, Homo sapiens
  misc_RNA (1)...(19): siRNA sense strand
auaccucuagugcaauuua

SEQ ID NO: 332330 - RNA, 19 nt, Homo sapiens
  misc_RNA (1)...(19): siRNA sense strand
agugauggauggacagcuu

SEQ ID NO: 332331 - RNA, 19 nt, Homo sapiens
  misc_RNA (1)...(19): siRNA sense strand
uaacugcuuuucucaugaa

SEQ ID NO: 332332 - RNA, 19 nt, Homo sapiens
  misc_RNA (1)...(19): siRNA sense strand
gucgaaguguggccauaau

SEQ ID NO: 332333 - RNA, 19 nt, Homo sapiens
  misc_RNA (1)...(19): siRNA sense strand
ggaggagcccagcuucaag

SEQ ID NO: 332334 - RNA, 19 nt, Homo sapiens
  misc_RNA (1)...(19): siRNA sense strand
cagccaggauuguauuucg

SEQ ID NO: 332335 - RNA, 19 nt, Homo sapiens
  misc_RNA (1)...(19): siRNA sense strand
gaugagguucucuacaagu

SEQ ID NO: 332336 - RNA, 19 nt, Homo sapiens
  misc_RNA (1)...(19): siRNA sense strand
agaaguauccagaauugca

SEQ ID NO: 332337 - RNA, 19 nt, Homo sapiens
  misc_RNA (1)...(19): siRNA sense strand
ucgaaguguggccauaaua

SEQ ID NO: 332338 - RNA, 19 nt, Homo sapiens
  misc_RNA (1)...(19): siRNA sense strand
uaagaugaaugagggguuu

SEQ ID NO: 332339 - RNA, 19 nt, Homo sapiens
  misc_RNA (1)...(19): siRNA sense strand
aaaccagaggcuaagauga

SEQ ID NO: 332340 - RNA, 19 nt, Homo sapiens
  misc_RNA (1)...(19): siRNA sense strand
uggguuccuucaacuggua

SEQ ID NO: 332341 - RNA, 19 nt, Homo sapiens
  misc_RNA (1)...(19): siRNA sense strand
uugcagaauuuaccucaag

SEQ ID NO: 332342 - RNA, 19 nt, Homo sapiens
  misc_RNA (1)...(19): siRNA sense strand
caaaaugcagugccaaguu

SEQ ID NO: 332343 - RNA, 19 nt, Homo sapiens
  misc_RNA (1)...(19): siRNA sense strand
ggauaacaccugcuuuuca

SEQ ID NO: 332344 - RNA, 19 nt, Homo sapiens
  misc_RNA (1)...(19): siRNA sense strand
uauaccaggcaaugggaua

SEQ ID NO: 332345 - RNA, 19 nt, Homo sapiens
  misc_RNA (1)...(19): siRNA sense strand
guggauggaaucugcuuug

SEQ ID NO: 332346 - RNA, 19 nt, Homo sapiens
  misc_RNA (1)...(19): siRNA sense strand
caauaucguuuacaaaagg

SEQ ID NO: 332347 - RNA, 19 nt, Homo sapiens
  misc_RNA (1)...(19): siRNA sense strand
cagucgaaguguggccaua

SEQ ID NO: 332348 - RNA, 19 nt, Homo sapiens
  misc_RNA (1)...(19): siRNA sense strand
auaagaauagaguggauga

SEQ ID NO: 332349 - RNA, 19 nt, Homo sapiens
  misc_RNA (1)...(19): siRNA sense strand
acauaagaauagaguggau

SEQ ID NO: 332350 - RNA, 19 nt, Homo sapiens
  misc_RNA (1)...(19): siRNA sense strand
gugcagccaggauuguauu

SEQ ID NO: 332351 - RNA, 19 nt, Homo sapiens
  misc_RNA (1)...(19): siRNA sense strand
cacaagagaaugacaccau

SEQ ID NO: 332352 - RNA, 19 nt, Homo sapiens
  misc_RNA (1)...(19): siRNA sense strand
uugaguggcaacugaaauu

SEQ ID NO: 332353 - RNA, 19 nt, Homo sapiens
  misc_RNA (1)...(19): siRNA sense strand
ccgggcagaugcuggaagu

SEQ ID NO: 332354 - RNA, 19 nt, Homo sapiens
  misc_RNA (1)...(19): siRNA sense strand
ccuguacaguggauggaau

SEQ ID NO: 332355 - RNA, 19 nt, Homo sapiens
  misc_RNA (1)...(19): siRNA sense strand
ggaucuauggcgccucuuc

SEQ ID NO: 332356 - RNA, 19 nt, Homo sapiens
  misc_RNA (1)...(19): siRNA sense strand
cuauagccuuugcccacaa

SEQ ID NO: 332357 - RNA, 19 nt, Homo sapiens
  misc_RNA (1)...(19): siRNA sense strand
ucgaaguucuaguauucug

SEQ ID NO: 332358 - RNA, 19 nt, Homo sapiens
  misc_RNA (1)...(19): siRNA sense strand
aggcgaucauuauuucgaa

SEQ ID NO: 332359 - RNA, 19 nt, Homo sapiens
  misc_RNA (1)...(19): siRNA sense strand
ggaagaagguggcgguguu

SEQ ID NO: 332360 - RNA, 19 nt, Homo sapiens
  misc_RNA (1)...(19): siRNA sense strand
ggaaacagcggcaacaguu

SEQ ID NO: 332361 - RNA, 19 nt, Homo sapiens
  misc_RNA (1)...(19): siRNA sense strand
ugacacagaugaugacuuc

SEQ ID NO: 332362 - RNA, 19 nt, Homo sapiens
  misc_RNA (1)...(19): siRNA sense strand
gcagcuagcucaggaaauc

SEQ ID NO: 332363 - RNA, 19 nt, Homo sapiens
  misc_RNA (1)...(19): siRNA sense strand
auacagaccuggacuaucu

SEQ ID NO: 332364 - RNA, 19 nt, Homo sapiens
  misc_RNA (1)...(19): siRNA sense strand
ggagagaucagaccuugga

SEQ ID NO: 332365 - RNA, 19 nt, Homo sapiens
  misc_RNA (1)...(19): siRNA sense strand
agagggaguucgaggagua

SEQ ID NO: 332366 - RNA, 19 nt, Homo sapiens
  misc_RNA (1)...(19): siRNA sense strand
ggaaagaagggaagaaggu

SEQ ID NO: 332367 - RNA, 19 nt, Homo sapiens
  misc_RNA (1)...(19): siRNA sense strand
gagcagcacucagggaagu

SEQ ID NO: 332368 - RNA, 19 nt, Homo sapiens
  misc_RNA (1)...(19): siRNA sense strand
ccacgaugcugagcuccua

SEQ ID NO: 332369 - RNA, 19 nt, Homo sapiens
  misc_RNA (1)...(19): siRNA sense strand
gcgcuucuguggccaccua

SEQ ID NO: 332370 - RNA, 19 nt, Homo sapiens
  misc_RNA (1)...(19): siRNA sense strand
ccucuuaguucgugacuca

SEQ ID NO: 332371 - RNA, 19 nt, Homo sapiens
  misc_RNA (1)...(19): siRNA sense strand
gagcugagcagggaaacaa

SEQ ID NO: 332372 - RNA, 19 nt, Homo sapiens
  misc_RNA (1)...(19): siRNA sense strand
gggccuacgucucagaugu

SEQ ID NO: 332373 - RNA, 19 nt, Homo sapiens
  misc_RNA (1)...(19): siRNA sense strand
ggaaaucaagaaccucuca

SEQ ID NO: 332374 - RNA, 19 nt, Homo sapiens
  misc_RNA (1)...(19): siRNA sense strand
cccaggagcugaaggauac

SEQ ID NO: 332375 - RNA, 19 nt, Homo sapiens
  misc_RNA (1)...(19): siRNA sense strand
ggacuguggccacgacuuc

SEQ ID NO: 332376 - RNA, 19 nt, Homo sapiens
  misc_RNA (1)...(19): siRNA sense strand
ggauacagaccuggacuau

SEQ ID NO: 332377 - RNA, 19 nt, Homo sapiens
  misc_RNA (1)...(19): siRNA sense strand
gaagauaugcaagcagaag

SEQ ID NO: 332378 - RNA, 19 nt, Homo sapiens
  misc_RNA (1)...(19): siRNA sense strand
gcaucuggaccucuuaguu

SEQ ID NO: 332379 - RNA, 19 nt, Homo sapiens
  misc_RNA (1)...(19): siRNA sense strand
caucuggaccucuuaguuc

SEQ ID NO: 332380 - RNA, 19 nt, Homo sapiens
  misc_RNA (1)...(19): siRNA sense strand
ggccacgacuucugcauac

SEQ ID NO: 332381 - RNA, 19 nt, Homo sapiens
  misc_RNA (1)...(19): siRNA sense strand
ccaucugccuggagagguu

SEQ ID NO: 332382 - RNA, 19 nt, Homo sapiens
  misc_RNA (1)...(19): siRNA sense strand
gaggugaugggcaagcauu

SEQ ID NO: 332383 - RNA, 19 nt, Homo sapiens
  misc_RNA (1)...(19): siRNA sense strand
gaagaagguggcgguguuc

SEQ ID NO: 332384 - RNA, 19 nt, Homo sapiens
  misc_RNA (1)...(19): siRNA sense strand
gcugagcuccuaccagauc

SEQ ID NO: 332385 - RNA, 19 nt, Homo sapiens
  misc_RNA (1)...(19): siRNA sense strand
gcugcugguucgcaucaau

SEQ ID NO: 332386 - RNA, 19 nt, Homo sapiens
  misc_RNA (1)...(19): siRNA sense strand
gaccuuggaggcacuggaa

SEQ ID NO: 332387 - RNA, 19 nt, Homo sapiens
  misc_RNA (1)...(19): siRNA sense strand
ccugagugccggaagauau

SEQ ID NO: 332388 - RNA, 19 nt, Homo sapiens
  misc_RNA (1)...(19): siRNA sense strand
uggagaaggaggaggauga

SEQ ID NO: 332389 - RNA, 19 nt, Homo sapiens
  misc_RNA (1)...(19): siRNA sense strand
ggaagauaugcaagcagaa

SEQ ID NO: 332390 - RNA, 19 nt, Homo sapiens
  misc_RNA (1)...(19): siRNA sense strand
gggaaacagcggcaacagu

SEQ ID NO: 332391 - RNA, 19 nt, Homo sapiens
  misc_RNA (1)...(19): siRNA sense strand
cagcagcuagcucaggaaa

SEQ ID NO: 332392 - RNA, 19 nt, Homo sapiens
  misc_RNA (1)...(19): siRNA sense strand
ccaccaagcgcauauucuc

SEQ ID NO: 332393 - RNA, 19 nt, Homo sapiens
  misc_RNA (1)...(19): siRNA sense strand
guuggucccauacaccuuu

SEQ ID NO: 332394 - RNA, 19 nt, Homo sapiens
  misc_RNA (1)...(19): siRNA sense strand
ggaugagaggcuucuggaa

SEQ ID NO: 332395 - RNA, 19 nt, Homo sapiens
  misc_RNA (1)...(19): siRNA sense strand
gcagggaaacaaggaucaa

SEQ ID NO: 332396 - RNA, 19 nt, Homo sapiens
  misc_RNA (1)...(19): siRNA sense strand
uagcucaggaaaucaagaa

SEQ ID NO: 332397 - RNA, 19 nt, Homo sapiens
  misc_RNA (1)...(19): siRNA sense strand
guggugacacagaugauga

SEQ ID NO: 332398 - RNA, 19 nt, Homo sapiens
  misc_RNA (1)...(19): siRNA sense strand
gugaugggcaagcauuaug

SEQ ID NO: 332399 - RNA, 19 nt, Homo sapiens
  misc_RNA (1)...(19): siRNA sense strand
aagaaccucucaggaugga

SEQ ID NO: 332400 - RNA, 19 nt, Homo sapiens
  misc_RNA (1)...(19): siRNA sense strand
ucugugcucucaccacgau

SEQ ID NO: 332401 - RNA, 19 nt, Homo sapiens
  misc_RNA (1)...(19): siRNA sense strand
ggaguucgaggaguaugug

SEQ ID NO: 332402 - RNA, 19 nt, Homo sapiens
  misc_RNA (1)...(19): siRNA sense strand
ggugaugggcaagcauuau

SEQ ID NO: 332403 - RNA, 19 nt, Homo sapiens
  misc_RNA (1)...(19): siRNA sense strand
gaagaacuguggcaagaua

SEQ ID NO: 332404 - RNA, 19 nt, Homo sapiens
  misc_RNA (1)...(19): siRNA sense strand
gaucaaaucucauaacaca

SEQ ID NO: 332405 - RNA, 19 nt, Homo sapiens
  misc_RNA (1)...(19): siRNA sense strand
gagaaacccuauauaugua

SEQ ID NO: 332406 - RNA, 19 nt, Homo sapiens
  misc_RNA (1)...(19): siRNA sense strand
gaucgaaucucauuaaaca

SEQ ID NO: 332407 - RNA, 19 nt, Homo sapiens
  misc_RNA (1)...(19): siRNA sense strand
ggacaaaccucaccacaca

SEQ ID NO: 332408 - RNA, 19 nt, Homo sapiens
  misc_RNA (1)...(19): siRNA sense strand
caucagaaaucucauauug

SEQ ID NO: 332409 - RNA, 19 nt, Homo sapiens
  misc_RNA (1)...(19): siRNA sense strand
gaucagaccucuuuagaca

SEQ ID NO: 332410 - RNA, 19 nt, Homo sapiens
  misc_RNA (1)...(19): siRNA sense strand
gaaagacacuaugaaugua

SEQ ID NO: 332411 - RNA, 19 nt, Homo sapiens
  misc_RNA (1)...(19): siRNA sense strand
ggaaauccuucacuaagaa

SEQ ID NO: 332412 - RNA, 19 nt, Homo sapiens
  misc_RNA (1)...(19): siRNA sense strand
ggaaaugcuucacuaagaa

SEQ ID NO: 332413 - RNA, 19 nt, Homo sapiens
  misc_RNA (1)...(19): siRNA sense strand
gaacaugaccacuaugaaa

SEQ ID NO: 332414 - RNA, 19 nt, Homo sapiens
  misc_RNA (1)...(19): siRNA sense strand
ggaaaggucuucacucaca

SEQ ID NO: 332415 - RNA, 19 nt, Homo sapiens
  misc_RNA (1)...(19): siRNA sense strand
gaacucagaccucaguaua

SEQ ID NO: 332416 - RNA, 19 nt, Homo sapiens
  misc_RNA (1)...(19): siRNA sense strand
guaaugggcuucacucaga

SEQ ID NO: 332417 - RNA, 19 nt, Homo sapiens
  misc_RNA (1)...(19): siRNA sense strand
gggaaaugcuucacuaaga

SEQ ID NO: 332418 - RNA, 19 nt, Homo sapiens
  misc_RNA (1)...(19): siRNA sense strand
ggagaaacccuaugaaugu

SEQ ID NO: 332419 - RNA, 19 nt, Homo sapiens
  misc_RNA (1)...(19): siRNA sense strand
ggagagaaacccuauauau

SEQ ID NO: 332420 - RNA, 19 nt, Homo sapiens
  misc_RNA (1)...(19): siRNA sense strand
caauauaugugcugaaugu

SEQ ID NO: 332421 - RNA, 19 nt, Homo sapiens
  misc_RNA (1)...(19): siRNA sense strand
gagauuugaucaacccaua

SEQ ID NO: 332422 - RNA, 19 nt, Homo sapiens
  misc_RNA (1)...(19): siRNA sense strand
gagagaagccuuaugaaug

SEQ ID NO: 332423 - RNA, 19 nt, Homo sapiens
  misc_RNA (1)...(19): siRNA sense strand
ucagaaaucucauauugga

SEQ ID NO: 332424 - RNA, 19 nt, Homo sapiens
  misc_RNA (1)...(19): siRNA sense strand
ggagagaaaccuuauguau

SEQ ID NO: 332425 - RNA, 19 nt, Homo sapiens
  misc_RNA (1)...(19): siRNA sense strand
aaagaaaccuuaugcuugu

SEQ ID NO: 332426 - RNA, 19 nt, Homo sapiens
  misc_RNA (1)...(19): siRNA sense strand
gaagucacgccucaauaua

SEQ ID NO: 332427 - RNA, 19 nt, Homo sapiens
  misc_RNA (1)...(19): siRNA sense strand
ggaaagccuucauccagaa

SEQ ID NO: 332428 - RNA, 19 nt, Homo sapiens
  misc_RNA (1)...(19): siRNA sense strand
cauaggagaagauucauua

SEQ ID NO: 332429 - RNA, 19 nt, Homo sapiens
  misc_RNA (1)...(19): siRNA sense strand
gggaaauccuucacuaaga

SEQ ID NO: 332430 - RNA, 19 nt, Homo sapiens
  misc_RNA (1)...(19): siRNA sense strand
caacacacaucagagaauu

SEQ ID NO: 332431 - RNA, 19 nt, Homo sapiens
  misc_RNA (1)...(19): siRNA sense strand
ggagaagauucauuauguu

SEQ ID NO: 332432 - RNA, 19 nt, Homo sapiens
  misc_RNA (1)...(19): siRNA sense strand
ggaaagaaaccuuaugcuu

SEQ ID NO: 332433 - RNA, 19 nt, Homo sapiens
  misc_RNA (1)...(19): siRNA sense strand
gaagcauacuuuaaacuca

SEQ ID NO: 332434 - RNA, 19 nt, Homo sapiens
  misc_RNA (1)...(19): siRNA sense strand
gagagaaacccuauauaug

SEQ ID NO: 332435 - RNA, 19 nt, Homo sapiens
  misc_RNA (1)...(19): siRNA sense strand
gaaacacuaugaaugcaau

SEQ ID NO: 332436 - RNA, 19 nt, Homo sapiens
  misc_RNA (1)...(19): siRNA sense strand
gcaaauuccugugaacaug

SEQ ID NO: 332437 - RNA, 19 nt, Homo sapiens
  misc_RNA (1)...(19): siRNA sense strand
gcaagauaaugaccagcua

SEQ ID NO: 332438 - RNA, 19 nt, Homo sapiens
  misc_RNA (1)...(19): siRNA sense strand
gagagaaacccuauaagug

SEQ ID NO: 332439 - RNA, 19 nt, Homo sapiens
  misc_RNA (1)...(19): siRNA sense strand
ggaagucacgccucaauau

SEQ ID NO: 332440 - RNA, 19 nt, Homo sapiens
  misc_RNA (1)...(19): siRNA sense strand
aaucaaaccucauuacaca

SEQ ID NO: 332441 - RNA, 19 nt, Homo sapiens
  misc_RNA (1)...(19): siRNA sense strand
ggagaaagacacuaugaau

SEQ ID NO: 332442 - RNA, 19 nt, Homo sapiens
  misc_RNA (1)...(19): siRNA sense strand
ggaaggccuuuauccagaa

SEQ ID NO: 332443 - RNA, 19 nt, Homo sapiens
  misc_RNA (1)...(19): siRNA sense strand
ccagucaaaucucauuaaa

SEQ ID NO: 332444 - RNA, 19 nt, Homo sapiens
  misc_RNA (1)...(19): siRNA sense strand
gcagaaacccuacaaaugc

SEQ ID NO: 332445 - RNA, 19 nt, Homo sapiens
  misc_RNA (1)...(19): siRNA sense strand
ggagaagcuuuaugugugu

SEQ ID NO: 332446 - RNA, 19 nt, Homo sapiens
  misc_RNA (1)...(19): siRNA sense strand
ggacgugacuguggacuuc

SEQ ID NO: 332447 - RNA, 19 nt, Homo sapiens
  misc_RNA (1)...(19): siRNA sense strand
gagagaaaccuuauguaug

SEQ ID NO: 332448 - RNA, 19 nt, Homo sapiens
  misc_RNA (1)...(19): siRNA sense strand
gagaauucaugcuggagaa

SEQ ID NO: 332449 - RNA, 19 nt, Homo sapiens
  misc_RNA (1)...(19): siRNA sense strand
ggagagaagccuuaugaau

SEQ ID NO: 332450 - RNA, 19 nt, Homo sapiens
  misc_RNA (1)...(19): siRNA sense strand
ggagagaaacccuauaagu

SEQ ID NO: 332451 - RNA, 19 nt, Homo sapiens
  misc_RNA (1)...(19): siRNA sense strand
gagagaaacacuaugaaug

SEQ ID NO: 332452 - RNA, 19 nt, Homo sapiens
  misc_RNA (1)...(19): siRNA sense strand
caucagaagucucauacug

SEQ ID NO: 332453 - RNA, 19 nt, Homo sapiens
  misc_RNA (1)...(19): siRNA sense strand
ggagagagacacuaugaau

SEQ ID NO: 332454 - RNA, 19 nt, Homo sapiens
  misc_RNA (1)...(19): siRNA sense strand
guggaaaggucuucacuca

SEQ ID NO: 332455 - RNA, 19 nt, Homo sapiens
  misc_RNA (1)...(19): siRNA sense strand
agagaaaccuuauguaugc

SEQ ID NO: 332456 - RNA, 19 nt, Homo sapiens
  misc_RNA (1)...(19): siRNA sense strand
guacugggaugugacacua

SEQ ID NO: 332457 - RNA, 19 nt, Homo sapiens
  misc_RNA (1)...(19): siRNA sense strand
ccagaaaucgcacuucauu

SEQ ID NO: 332458 - RNA, 19 nt, Homo sapiens
  misc_RNA (1)...(19): siRNA sense strand
gggaaggcuuucacaagaa

SEQ ID NO: 332459 - RNA, 19 nt, Homo sapiens
  misc_RNA (1)...(19): siRNA sense strand
uagaagaacuguggcaaga

SEQ ID NO: 332460 - RNA, 19 nt, Homo sapiens
  misc_RNA (1)...(19): siRNA sense strand
gagaaagacacuaugaaug

SEQ ID NO: 332461 - RNA, 19 nt, Homo sapiens
  misc_RNA (1)...(19): siRNA sense strand
agagaaacccuauauaugu

SEQ ID NO: 332462 - RNA, 19 nt, Homo sapiens
  misc_RNA (1)...(19): siRNA sense strand
cagaaggccuuuacugaca

SEQ ID NO: 332463 - RNA, 19 nt, Homo sapiens
  misc_RNA (1)...(19): siRNA sense strand
cagaaagccacacuaagua

SEQ ID NO: 332464 - RNA, 19 nt, Homo sapiens
  misc_RNA (1)...(19): siRNA sense strand
ggaaaagccuucauaugga

SEQ ID NO: 332465 - RNA, 19 nt, Homo sapiens
  misc_RNA (1)...(19): siRNA sense strand
aggagaagauucauuaugu

SEQ ID NO: 332466 - RNA, 19 nt, Homo sapiens
  misc_RNA (1)...(19): siRNA sense strand
ggugagaagcccaauauau

SEQ ID NO: 332467 - RNA, 19 nt, Homo sapiens
  misc_RNA (1)...(19): siRNA sense strand
gaaaagccuucauauggaa

SEQ ID NO: 332468 - RNA, 19 nt, Homo sapiens
  misc_RNA (1)...(19): siRNA sense strand
gggagaaacccuaugaaug

SEQ ID NO: 332469 - RNA, 19 nt, Homo sapiens
  misc_RNA (1)...(19): siRNA sense strand
gugagaagcccaauauaug

SEQ ID NO: 332470 - RNA, 19 nt, Homo sapiens
  misc_RNA (1)...(19): siRNA sense strand
gagaucagaccucuuuaga

SEQ ID NO: 332471 - RNA, 19 nt, Homo sapiens
  misc_RNA (1)...(19): siRNA sense strand
gaaaaugcauaguggagaa

SEQ ID NO: 332472 - RNA, 19 nt, Homo sapiens
  misc_RNA (1)...(19): siRNA sense strand
guaaaugugggaaagcuuu

SEQ ID NO: 332473 - RNA, 19 nt, Homo sapiens
  misc_RNA (1)...(19): siRNA sense strand
agaaagacacuaugaaugu

SEQ ID NO: 332474 - RNA, 19 nt, Homo sapiens
  misc_RNA (1)...(19): siRNA sense strand
gagaauucauacuggagaa

SEQ ID NO: 332475 - RNA, 19 nt, Homo sapiens
  misc_RNA (1)...(19): siRNA sense strand
ggagagaaacacuaugaau

SEQ ID NO: 332476 - RNA, 19 nt, Homo sapiens
  misc_RNA (1)...(19): siRNA sense strand
gagaauucauacaggagaa

SEQ ID NO: 332477 - RNA, 19 nt, Homo sapiens
  misc_RNA (1)...(19): siRNA sense strand
gaaacagugcaacaaagaa

SEQ ID NO: 332478 - RNA, 19 nt, Homo sapiens
  misc_RNA (1)...(19): siRNA sense strand
ccagaaagccacacuaagu

SEQ ID NO: 332479 - RNA, 19 nt, Homo sapiens
  misc_RNA (1)...(19): siRNA sense strand
gagaaaagccguaugaaug

SEQ ID NO: 332480 - RNA, 19 nt, Homo sapiens
  misc_RNA (1)...(19): siRNA sense strand
guaccaaauucccaaguca

SEQ ID NO: 332481 - RNA, 19 nt, Homo sapiens
  misc_RNA (1)...(19): siRNA sense strand
gaggagaagcuuuaugugu

SEQ ID NO: 332482 - RNA, 19 nt, Homo sapiens
  misc_RNA (1)...(19): siRNA sense strand
gagaaacccuaugaaugug

SEQ ID NO: 332483 - RNA, 19 nt, Homo sapiens
  misc_RNA (1)...(19): siRNA sense strand
gaaggccuuuauccagaaa

SEQ ID NO: 332484 - RNA, 19 nt, Homo sapiens
  misc_RNA (1)...(19): siRNA sense strand
ugggaaggcuuucacaaga

SEQ ID NO: 332485 - RNA, 19 nt, Homo sapiens
  misc_RNA (1)...(19): siRNA sense strand
guacauccaaguguuuaua

SEQ ID NO: 332486 - RNA, 19 nt, Homo sapiens
  misc_RNA (1)...(19): siRNA sense strand
ggcagaaacccuacaaaug

SEQ ID NO: 332487 - RNA, 19 nt, Homo sapiens
  misc_RNA (1)...(19): siRNA sense strand
gagaagauucauuauguuc

SEQ ID NO: 332488 - RNA, 19 nt, Homo sapiens
  misc_RNA (1)...(19): siRNA sense strand
ccaugugcaucaaagaauu

SEQ ID NO: 332489 - RNA, 19 nt, Homo sapiens
  misc_RNA (1)...(19): siRNA sense strand
gcacucaggaugcaucaga

SEQ ID NO: 332490 - RNA, 19 nt, Homo sapiens
  misc_RNA (1)...(19): siRNA sense strand
gugaaaguauugauuaagg

SEQ ID NO: 332491 - RNA, 19 nt, Homo sapiens
  misc_RNA (1)...(19): siRNA sense strand
cuaaguaugcaucagauaa

SEQ ID NO: 332492 - RNA, 19 nt, Homo sapiens
  misc_RNA (1)...(19): siRNA sense strand
acacaucagagaauucaua

SEQ ID NO: 332493 - RNA, 19 nt, Homo sapiens
  misc_RNA (1)...(19): siRNA sense strand
agacaucugagaauucaua

SEQ ID NO: 332494 - RNA, 19 nt, Homo sapiens
  misc_RNA (1)...(19): siRNA sense strand
gcuuguuccuucaauuaaa

SEQ ID NO: 332495 - RNA, 19 nt, Homo sapiens
  misc_RNA (1)...(19): siRNA sense strand
gggcagaaacccuacaaau

SEQ ID NO: 332496 - RNA, 19 nt, Homo sapiens
  misc_RNA (1)...(19): siRNA sense strand
gaaagccacacuaaguaug

SEQ ID NO: 332497 - RNA, 19 nt, Homo sapiens
  misc_RNA (1)...(19): siRNA sense strand
ucucauaacacaucagaaa

SEQ ID NO: 332498 - RNA, 19 nt, Homo sapiens
  misc_RNA (1)...(19): siRNA sense strand
acacuaagcgugcaucaga

SEQ ID NO: 332499 - RNA, 19 nt, Homo sapiens
  misc_RNA (1)...(19): siRNA sense strand
caauauacaucagaagucu

SEQ ID NO: 332500 - RNA, 19 nt, Homo sapiens
  misc_RNA (1)...(19): siRNA sense strand
ggccuucacugaccgauca

SEQ ID NO: 332501 - RNA, 19 nt, Homo sapiens
  misc_RNA (1)...(19): siRNA sense strand
guggaaaggccuucacuga

SEQ ID NO: 332502 - RNA, 19 nt, Homo sapiens
  misc_RNA (1)...(19): siRNA sense strand
agagaagccuuaugaaugc

SEQ ID NO: 332503 - RNA, 19 nt, Homo sapiens
  misc_RNA (1)...(19): siRNA sense strand
gaagaacuguggcaagaua

SEQ ID NO: 332504 - RNA, 19 nt, Homo sapiens
  misc_RNA (1)...(19): siRNA sense strand
gaucaaaucucauaacaca

SEQ ID NO: 332505 - RNA, 19 nt, Homo sapiens
  misc_RNA (1)...(19): siRNA sense strand
gagaaacccuauauaugua

SEQ ID NO: 332506 - RNA, 19 nt, Homo sapiens
  misc_RNA (1)...(19): siRNA sense strand
gaucgaaucucauuaaaca

SEQ ID NO: 332507 - RNA, 19 nt, Homo sapiens
  misc_RNA (1)...(19): siRNA sense strand
ggacaaaccucaccacaca

SEQ ID NO: 332508 - RNA, 19 nt, Homo sapiens
  misc_RNA (1)...(19): siRNA sense strand
caucagaaaucucauauug

SEQ ID NO: 332509 - RNA, 19 nt, Homo sapiens
  misc_RNA (1)...(19): siRNA sense strand
gaucagaccucuuuagaca

SEQ ID NO: 332510 - RNA, 19 nt, Homo sapiens
  misc_RNA (1)...(19): siRNA sense strand
gaaagacacuaugaaugua

SEQ ID NO: 332511 - RNA, 19 nt, Homo sapiens
  misc_RNA (1)...(19): siRNA sense strand
ggaaauccuucacuaagaa

SEQ ID NO: 332512 - RNA, 19 nt, Homo sapiens
  misc_RNA (1)...(19): siRNA sense strand
ggaaaugcuucacuaagaa

SEQ ID NO: 332513 - RNA, 19 nt, Homo sapiens
  misc_RNA (1)...(19): siRNA sense strand
gaacaugaccacuaugaaa

SEQ ID NO: 332514 - RNA, 19 nt, Homo sapiens
  misc_RNA (1)...(19): siRNA sense strand
ggaaaggucuucacucaca

SEQ ID NO: 332515 - RNA, 19 nt, Homo sapiens
  misc_RNA (1)...(19): siRNA sense strand
gaacucagaccucaguaua

SEQ ID NO: 332516 - RNA, 19 nt, Homo sapiens
  misc_RNA (1)...(19): siRNA sense strand
guaaugggcuucacucaga

SEQ ID NO: 332517 - RNA, 19 nt, Homo sapiens
  misc_RNA (1)...(19): siRNA sense strand
gggaaaugcuucacuaaga

SEQ ID NO: 332518 - RNA, 19 nt, Homo sapiens
  misc_RNA (1)...(19): siRNA sense strand
ggagaaacccuaugaaugu

SEQ ID NO: 332519 - RNA, 19 nt, Homo sapiens
  misc_RNA (1)...(19): siRNA sense strand
ggagagaaacccuauauau

SEQ ID NO: 332520 - RNA, 19 nt, Homo sapiens
  misc_RNA (1)...(19): siRNA sense strand
caauauaugugcugaaugu

SEQ ID NO: 332521 - RNA, 19 nt, Homo sapiens
  misc_RNA (1)...(19): siRNA sense strand
gagauuugaucaacccaua

SEQ ID NO: 332522 - RNA, 19 nt, Homo sapiens
  misc_RNA (1)...(19): siRNA sense strand
gagagaagccuuaugaaug

SEQ ID NO: 332523 - RNA, 19 nt, Homo sapiens
  misc_RNA (1)...(19): siRNA sense strand
ucagaaaucucauauugga

SEQ ID NO: 332524 - RNA, 19 nt, Homo sapiens
  misc_RNA (1)...(19): siRNA sense strand
ggagagaaaccuuauguau

SEQ ID NO: 332525 - RNA, 19 nt, Homo sapiens
  misc_RNA (1)...(19): siRNA sense strand
aaagaaaccuuaugcuugu

SEQ ID NO: 332526 - RNA, 19 nt, Homo sapiens
  misc_RNA (1)...(19): siRNA sense strand
gaagucacgccucaauaua

SEQ ID NO: 332527 - RNA, 19 nt, Homo sapiens
  misc_RNA (1)...(19): siRNA sense strand
ggaaagccuucauccagaa

SEQ ID NO: 332528 - RNA, 19 nt, Homo sapiens
  misc_RNA (1)...(19): siRNA sense strand
cauaggagaagauucauua

SEQ ID NO: 332529 - RNA, 19 nt, Homo sapiens
  misc_RNA (1)...(19): siRNA sense strand
gggaaauccuucacuaaga

SEQ ID NO: 332530 - RNA, 19 nt, Homo sapiens
  misc_RNA (1)...(19): siRNA sense strand
caacacacaucagagaauu

SEQ ID NO: 332531 - RNA, 19 nt, Homo sapiens
  misc_RNA (1)...(19): siRNA sense strand
ggagaagauucauuauguu

SEQ ID NO: 332532 - RNA, 19 nt, Homo sapiens
  misc_RNA (1)...(19): siRNA sense strand
ggaaagaaaccuuaugcuu

SEQ ID NO: 332533 - RNA, 19 nt, Homo sapiens
  misc_RNA (1)...(19): siRNA sense strand
gaagcauacuuuaaacuca

SEQ ID NO: 332534 - RNA, 19 nt, Homo sapiens
  misc_RNA (1)...(19): siRNA sense strand
gagagaaacccuauauaug

SEQ ID NO: 332535 - RNA, 19 nt, Homo sapiens
  misc_RNA (1)...(19): siRNA sense strand
gaaacacuaugaaugcaau

SEQ ID NO: 332536 - RNA, 19 nt, Homo sapiens
  misc_RNA (1)...(19): siRNA sense strand
gcaaauuccugugaacaug

SEQ ID NO: 332537 - RNA, 19 nt, Homo sapiens
  misc_RNA (1)...(19): siRNA sense strand
gcaagauaaugaccagcua

SEQ ID NO: 332538 - RNA, 19 nt, Homo sapiens
  misc_RNA (1)...(19): siRNA sense strand
gagagaaacccuauaagug

SEQ ID NO: 332539 - RNA, 19 nt, Homo sapiens
  misc_RNA (1)...(19): siRNA sense strand
ggaagucacgccucaauau

SEQ ID NO: 332540 - RNA, 19 nt, Homo sapiens
  misc_RNA (1)...(19): siRNA sense strand
aaucaaaccucauuacaca

SEQ ID NO: 332541 - RNA, 19 nt, Homo sapiens
  misc_RNA (1)...(19): siRNA sense strand
ggagaaagacacuaugaau

SEQ ID NO: 332542 - RNA, 19 nt, Homo sapiens
  misc_RNA (1)...(19): siRNA sense strand
ggaaggccuuuauccagaa

SEQ ID NO: 332543 - RNA, 19 nt, Homo sapiens
  misc_RNA (1)...(19): siRNA sense strand
ccagucaaaucucauuaaa

SEQ ID NO: 332544 - RNA, 19 nt, Homo sapiens
  misc_RNA (1)...(19): siRNA sense strand
gcagaaacccuacaaaugc

SEQ ID NO: 332545 - RNA, 19 nt, Homo sapiens
  misc_RNA (1)...(19): siRNA sense strand
ggagaagcuuuaugugugu

SEQ ID NO: 332546 - RNA, 19 nt, Homo sapiens
  misc_RNA (1)...(19): siRNA sense strand
ggacgugacuguggacuuc

SEQ ID NO: 332547 - RNA, 19 nt, Homo sapiens
  misc_RNA (1)...(19): siRNA sense strand
gagagaaaccuuauguaug

SEQ ID NO: 332548 - RNA, 19 nt, Homo sapiens
  misc_RNA (1)...(19): siRNA sense strand
gagaauucaugcuggagaa

SEQ ID NO: 332549 - RNA, 19 nt, Homo sapiens
  misc_RNA (1)...(19): siRNA sense strand
ggagagaagccuuaugaau

SEQ ID NO: 332550 - RNA, 19 nt, Homo sapiens
  misc_RNA (1)...(19): siRNA sense strand
ggagagaaacccuauaagu

SEQ ID NO: 332551 - RNA, 19 nt, Homo sapiens
  misc_RNA (1)...(19): siRNA sense strand
gagagaaacacuaugaaug

SEQ ID NO: 332552 - RNA, 19 nt, Homo sapiens
  misc_RNA (1)...(19): siRNA sense strand
caucagaagucucauacug

SEQ ID NO: 332553 - RNA, 19 nt, Homo sapiens
  misc_RNA (1)...(19): siRNA sense strand
ggagagagacacuaugaau

SEQ ID NO: 332554 - RNA, 19 nt, Homo sapiens
  misc_RNA (1)...(19): siRNA sense strand
guggaaaggucuucacuca

SEQ ID NO: 332555 - RNA, 19 nt, Homo sapiens
  misc_RNA (1)...(19): siRNA sense strand
agagaaaccuuauguaugc

SEQ ID NO: 332556 - RNA, 19 nt, Homo sapiens
  misc_RNA (1)...(19): siRNA sense strand
guacugggaugugacacua

SEQ ID NO: 332557 - RNA, 19 nt, Homo sapiens
  misc_RNA (1)...(19): siRNA sense strand
ccagaaaucgcacuucauu

SEQ ID NO: 332558 - RNA, 19 nt, Homo sapiens
  misc_RNA (1)...(19): siRNA sense strand
gggaaggcuuucacaagaa

SEQ ID NO: 332559 - RNA, 19 nt, Homo sapiens
  misc_RNA (1)...(19): siRNA sense strand
uagaagaacuguggcaaga

SEQ ID NO: 332560 - RNA, 19 nt, Homo sapiens
  misc_RNA (1)...(19): siRNA sense strand
gagaaagacacuaugaaug

SEQ ID NO: 332561 - RNA, 19 nt, Homo sapiens
  misc_RNA (1)...(19): siRNA sense strand
agagaaacccuauauaugu

SEQ ID NO: 332562 - RNA, 19 nt, Homo sapiens
  misc_RNA (1)...(19): siRNA sense strand
cagaaggccuuuacugaca

SEQ ID NO: 332563 - RNA, 19 nt, Homo sapiens
  misc_RNA (1)...(19): siRNA sense strand
cagaaagccacacuaagua

SEQ ID NO: 332564 - RNA, 19 nt, Homo sapiens
  misc_RNA (1)...(19): siRNA sense strand
ggaaaagccuucauaugga

SEQ ID NO: 332565 - RNA, 19 nt, Homo sapiens
  misc_RNA (1)...(19): siRNA sense strand
aggagaagauucauuaugu

SEQ ID NO: 332566 - RNA, 19 nt, Homo sapiens
  misc_RNA (1)...(19): siRNA sense strand
ggugagaagcccaauauau

SEQ ID NO: 332567 - RNA, 19 nt, Homo sapiens
  misc_RNA (1)...(19): siRNA sense strand
gaaaagccuucauauggaa

SEQ ID NO: 332568 - RNA, 19 nt, Homo sapiens
  misc_RNA (1)...(19): siRNA sense strand
gggagaaacccuaugaaug

SEQ ID NO: 332569 - RNA, 19 nt, Homo sapiens
  misc_RNA (1)...(19): siRNA sense strand
gugagaagcccaauauaug

SEQ ID NO: 332570 - RNA, 19 nt, Homo sapiens
  misc_RNA (1)...(19): siRNA sense strand
gagaucagaccucuuuaga

SEQ ID NO: 332571 - RNA, 19 nt, Homo sapiens
  misc_RNA (1)...(19): siRNA sense strand
gaaaaugcauaguggagaa

SEQ ID NO: 332572 - RNA, 19 nt, Homo sapiens
  misc_RNA (1)...(19): siRNA sense strand
guaaaugugggaaagcuuu

SEQ ID NO: 332573 - RNA, 19 nt, Homo sapiens
  misc_RNA (1)...(19): siRNA sense strand
agaaagacacuaugaaugu

SEQ ID NO: 332574 - RNA, 19 nt, Homo sapiens
  misc_RNA (1)...(19): siRNA sense strand
gagaauucauacuggagaa

SEQ ID NO: 332575 - RNA, 19 nt, Homo sapiens
  misc_RNA (1)...(19): siRNA sense strand
ggagagaaacacuaugaau

SEQ ID NO: 332576 - RNA, 19 nt, Homo sapiens
  misc_RNA (1)...(19): siRNA sense strand
gagaauucauacaggagaa

SEQ ID NO: 332577 - RNA, 19 nt, Homo sapiens
  misc_RNA (1)...(19): siRNA sense strand
gaaacagugcaacaaagaa

SEQ ID NO: 332578 - RNA, 19 nt, Homo sapiens
  misc_RNA (1)...(19): siRNA sense strand
ccagaaagccacacuaagu

SEQ ID NO: 332579 - RNA, 19 nt, Homo sapiens
  misc_RNA (1)...(19): siRNA sense strand
gagaaaagccguaugaaug

SEQ ID NO: 332580 - RNA, 19 nt, Homo sapiens
  misc_RNA (1)...(19): siRNA sense strand
guaccaaauucccaaguca

SEQ ID NO: 332581 - RNA, 19 nt, Homo sapiens
  misc_RNA (1)...(19): siRNA sense strand
gaggagaagcuuuaugugu

SEQ ID NO: 332582 - RNA, 19 nt, Homo sapiens
  misc_RNA (1)...(19): siRNA sense strand
gagaaacccuaugaaugug

SEQ ID NO: 332583 - RNA, 19 nt, Homo sapiens
  misc_RNA (1)...(19): siRNA sense strand
gaaggccuuuauccagaaa

SEQ ID NO: 332584 - RNA, 19 nt, Homo sapiens
  misc_RNA (1)...(19): siRNA sense strand
ugggaaggcuuucacaaga

SEQ ID NO: 332585 - RNA, 19 nt, Homo sapiens
  misc_RNA (1)...(19): siRNA sense strand
guacauccaaguguuuaua

SEQ ID NO: 332586 - RNA, 19 nt, Homo sapiens
  misc_RNA (1)...(19): siRNA sense strand
ggcagaaacccuacaaaug

SEQ ID NO: 332587 - RNA, 19 nt, Homo sapiens
  misc_RNA (1)...(19): siRNA sense strand
gagaagauucauuauguuc

SEQ ID NO: 332588 - RNA, 19 nt, Homo sapiens
  misc_RNA (1)...(19): siRNA sense strand
ccaugugcaucaaagaauu

SEQ ID NO: 332589 - RNA, 19 nt, Homo sapiens
  misc_RNA (1)...(19): siRNA sense strand
gcacucaggaugcaucaga

SEQ ID NO: 332590 - RNA, 19 nt, Homo sapiens
  misc_RNA (1)...(19): siRNA sense strand
gugaaaguauugauuaagg

SEQ ID NO: 332591 - RNA, 19 nt, Homo sapiens
  misc_RNA (1)...(19): siRNA sense strand
cuaaguaugcaucagauaa

SEQ ID NO: 332592 - RNA, 19 nt, Homo sapiens
  misc_RNA (1)...(19): siRNA sense strand
acacaucagagaauucaua

SEQ ID NO: 332593 - RNA, 19 nt, Homo sapiens
  misc_RNA (1)...(19): siRNA sense strand
agacaucugagaauucaua

SEQ ID NO: 332594 - RNA, 19 nt, Homo sapiens
  misc_RNA (1)...(19): siRNA sense strand
gcuuguuccuucaauuaaa

SEQ ID NO: 332595 - RNA, 19 nt, Homo sapiens
  misc_RNA (1)...(19): siRNA sense strand
gggcagaaacccuacaaau

SEQ ID NO: 332596 - RNA, 19 nt, Homo sapiens
  misc_RNA (1)...(19): siRNA sense strand
gaaagccacacuaaguaug

SEQ ID NO: 332597 - RNA, 19 nt, Homo sapiens
  misc_RNA (1)...(19): siRNA sense strand
ucucauaacacaucagaaa

SEQ ID NO: 332598 - RNA, 19 nt, Homo sapiens
  misc_RNA (1)...(19): siRNA sense strand
acacuaagcgugcaucaga

SEQ ID NO: 332599 - RNA, 19 nt, Homo sapiens
  misc_RNA (1)...(19): siRNA sense strand
caauauacaucagaagucu

SEQ ID NO: 332600 - RNA, 19 nt, Homo sapiens
  misc_RNA (1)...(19): siRNA sense strand
ggccuucacugaccgauca

SEQ ID NO: 332601 - RNA, 19 nt, Homo sapiens
  misc_RNA (1)...(19): siRNA sense strand
guggaaaggccuucacuga

SEQ ID NO: 332602 - RNA, 19 nt, Homo sapiens
  misc_RNA (1)...(19): siRNA sense strand
agagaagccuuaugaaugc

SEQ ID NO: 332603 - RNA, 19 nt, Homo sapiens
  misc_RNA (1)...(19): siRNA sense strand
gcagagaaguuguuuguga

SEQ ID NO: 332604 - RNA, 19 nt, Homo sapiens
  misc_RNA (1)...(19): siRNA sense strand
gcaaagugauccaguguuu

SEQ ID NO: 332605 - RNA, 19 nt, Homo sapiens
  misc_RNA (1)...(19): siRNA sense strand
gcaguguacuuccuucuua

SEQ ID NO: 332606 - RNA, 19 nt, Homo sapiens
  misc_RNA (1)...(19): siRNA sense strand
aaaccaaccucuggaauua

SEQ ID NO: 332607 - RNA, 19 nt, Homo sapiens
  misc_RNA (1)...(19): siRNA sense strand
gcacacgggucauggagua

SEQ ID NO: 332608 - RNA, 19 nt, Homo sapiens
  misc_RNA (1)...(19): siRNA sense strand
gagagacgguccagaaauu

SEQ ID NO: 332609 - RNA, 19 nt, Homo sapiens
  misc_RNA (1)...(19): siRNA sense strand
gggaggaucuaguuaaauu

SEQ ID NO: 332610 - RNA, 19 nt, Homo sapiens
  misc_RNA (1)...(19): siRNA sense strand
gcacaggaaucuacagaau

SEQ ID NO: 332611 - RNA, 19 nt, Homo sapiens
  misc_RNA (1)...(19): siRNA sense strand
ccgaguggcuugucaauuu

SEQ ID NO: 332612 - RNA, 19 nt, Homo sapiens
  misc_RNA (1)...(19): siRNA sense strand
guaagcaacuccuagagaa

SEQ ID NO: 332613 - RNA, 19 nt, Homo sapiens
  misc_RNA (1)...(19): siRNA sense strand
gaggaggccuucaccguuu

SEQ ID NO: 332614 - RNA, 19 nt, Homo sapiens
  misc_RNA (1)...(19): siRNA sense strand
gaaagcaguagauguguuu

SEQ ID NO: 332615 - RNA, 19 nt, Homo sapiens
  misc_RNA (1)...(19): siRNA sense strand
gagaggauaugccgagaga

SEQ ID NO: 332616 - RNA, 19 nt, Homo sapiens
  misc_RNA (1)...(19): siRNA sense strand
gagagaaugccuacuauga

SEQ ID NO: 332617 - RNA, 19 nt, Homo sapiens
  misc_RNA (1)...(19): siRNA sense strand
gcacaucauugaaguugga

SEQ ID NO: 332618 - RNA, 19 nt, Homo sapiens
  misc_RNA (1)...(19): siRNA sense strand
gagagagaaugccuacuau

SEQ ID NO: 332619 - RNA, 19 nt, Homo sapiens
  misc_RNA (1)...(19): siRNA sense strand
agaaguggcugaaagaaga

SEQ ID NO: 332620 - RNA, 19 nt, Homo sapiens
  misc_RNA (1)...(19): siRNA sense strand
gcacaggucacgaucauug

SEQ ID NO: 332621 - RNA, 19 nt, Homo sapiens
  misc_RNA (1)...(19): siRNA sense strand
gauccucccuguucgcuuu

SEQ ID NO: 332622 - RNA, 19 nt, Homo sapiens
  misc_RNA (1)...(19): siRNA sense strand
caaccaacgugcuucagaa

SEQ ID NO: 332623 - RNA, 19 nt, Homo sapiens
  misc_RNA (1)...(19): siRNA sense strand
cagccgaccugccuaauga

SEQ ID NO: 332624 - RNA, 19 nt, Homo sapiens
  misc_RNA (1)...(19): siRNA sense strand
gagaaugccuacuaugaca

SEQ ID NO: 332625 - RNA, 19 nt, Homo sapiens
  misc_RNA (1)...(19): siRNA sense strand
guccagaaauuccagagua

SEQ ID NO: 332626 - RNA, 19 nt, Homo sapiens
  misc_RNA (1)...(19): siRNA sense strand
acaaaggccucuucuacuu

SEQ ID NO: 332627 - RNA, 19 nt, Homo sapiens
  misc_RNA (1)...(19): siRNA sense strand
caaugcagcucuacucugu

SEQ ID NO: 332628 - RNA, 19 nt, Homo sapiens
  misc_RNA (1)...(19): siRNA sense strand
gaccacaccuggacaguca

SEQ ID NO: 332629 - RNA, 19 nt, Homo sapiens
  misc_RNA (1)...(19): siRNA sense strand
ggacaucauuaccaagguu

SEQ ID NO: 332630 - RNA, 19 nt, Homo sapiens
  misc_RNA (1)...(19): siRNA sense strand
gggacgacccuuccucuua

SEQ ID NO: 332631 - RNA, 19 nt, Homo sapiens
  misc_RNA (1)...(19): siRNA sense strand
ggaccgggcauaugaguuu

SEQ ID NO: 332632 - RNA, 19 nt, Homo sapiens
  misc_RNA (1)...(19): siRNA sense strand
gaagauaguucuggauaac

SEQ ID NO: 332633 - RNA, 19 nt, Homo sapiens
  misc_RNA (1)...(19): siRNA sense strand
gcacuacaccgaccucuau

SEQ ID NO: 332634 - RNA, 19 nt, Homo sapiens
  misc_RNA (1)...(19): siRNA sense strand
cauggaaucugacaaguuc

SEQ ID NO: 332635 - RNA, 19 nt, Homo sapiens
  misc_RNA (1)...(19): siRNA sense strand
uggaggagcugaugugcua

SEQ ID NO: 332636 - RNA, 19 nt, Homo sapiens
  misc_RNA (1)...(19): siRNA sense strand
gccaucaacuccuauauca

SEQ ID NO: 332637 - RNA, 19 nt, Homo sapiens
  misc_RNA (1)...(19): siRNA sense strand
agacauggcuguuggagau

SEQ ID NO: 332638 - RNA, 19 nt, Homo sapiens
  misc_RNA (1)...(19): siRNA sense strand
guugguggcugaaguagaa

SEQ ID NO: 332639 - RNA, 19 nt, Homo sapiens
  misc_RNA (1)...(19): siRNA sense strand
caauuucuuuggcuccuua

SEQ ID NO: 332640 - RNA, 19 nt, Homo sapiens
  misc_RNA (1)...(19): siRNA sense strand
ccaugaagauguuugauag

SEQ ID NO: 332641 - RNA, 19 nt, Homo sapiens
  misc_RNA (1)...(19): siRNA sense strand
ccacaaguuugauaugaau

SEQ ID NO: 332642 - RNA, 19 nt, Homo sapiens
  misc_RNA (1)...(19): siRNA sense strand
gcagagagugccaucauga

SEQ ID NO: 332643 - RNA, 19 nt, Homo sapiens
  misc_RNA (1)...(19): siRNA sense strand
ucaaggacaucauuaccaa

SEQ ID NO: 332644 - RNA, 19 nt, Homo sapiens
  misc_RNA (1)...(19): siRNA sense strand
ggacgacccuuccucuuac

SEQ ID NO: 332645 - RNA, 19 nt, Homo sapiens
  misc_RNA (1)...(19): siRNA sense strand
agaaagauuuggugaagga

SEQ ID NO: 332646 - RNA, 19 nt, Homo sapiens
  misc_RNA (1)...(19): siRNA sense strand
ugacaugagugacccaaug

SEQ ID NO: 332647 - RNA, 19 nt, Homo sapiens
  misc_RNA (1)...(19): siRNA sense strand
gcucugggcucacguccuu

SEQ ID NO: 332648 - RNA, 19 nt, Homo sapiens
  misc_RNA (1)...(19): siRNA sense strand
cuaaugaacugauugaacu

SEQ ID NO: 332649 - RNA, 19 nt, Homo sapiens
  misc_RNA (1)...(19): siRNA sense strand
gcccagacauggugcuuga

SEQ ID NO: 332650 - RNA, 19 nt, Homo sapiens
  misc_RNA (1)...(19): siRNA sense strand
ugauugaacugcuggagaa

SEQ ID NO: 332651 - RNA, 19 nt, Homo sapiens
  misc_RNA (1)...(19): siRNA sense strand
caaaccaaccucuggaauu

SEQ ID NO: 332652 - RNA, 19 nt, Homo sapiens
  misc_RNA (1)...(19): siRNA sense strand
uccaugaccuuguccuaua

SEQ ID NO: 332653 - RNA, 19 nt, Homo sapiens
  misc_RNA (1)...(19): siRNA sense strand
ucaaggagguggagaggau

SEQ ID NO: 332654 - RNA, 19 nt, Homo sapiens
  misc_RNA (1)...(19): siRNA sense strand
ggacugaugaguaccagaa

SEQ ID NO: 332655 - RNA, 19 nt, Homo sapiens
  misc_RNA (1)...(19): siRNA sense strand
acagagcccugcaguucua

SEQ ID NO: 332656 - RNA, 19 nt, Homo sapiens
  misc_RNA (1)...(19): siRNA sense strand
ccagaaagauuuggugaag

SEQ ID NO: 332657 - RNA, 19 nt, Homo sapiens
  misc_RNA (1)...(19): siRNA sense strand
agagguacauugagaucua

SEQ ID NO: 332658 - RNA, 19 nt, Homo sapiens
  misc_RNA (1)...(19): siRNA sense strand
gaccuuguccuauauuuau

SEQ ID NO: 332659 - RNA, 19 nt, Homo sapiens
  misc_RNA (1)...(19): siRNA sense strand
uuggaugccuugaagaaua

SEQ ID NO: 332660 - RNA, 19 nt, Homo sapiens
  misc_RNA (1)...(19): siRNA sense strand
gcgcagauccucccuguuc

SEQ ID NO: 332661 - RNA, 19 nt, Homo sapiens
  misc_RNA (1)...(19): siRNA sense strand
ugagagagaaugccuacua

SEQ ID NO: 332662 - RNA, 19 nt, Homo sapiens
  misc_RNA (1)...(19): siRNA sense strand
gaaggagggucaguucaag

SEQ ID NO: 332663 - RNA, 19 nt, Homo sapiens
  misc_RNA (1)...(19): siRNA sense strand
ggaaggagggucaguucaa

SEQ ID NO: 332664 - RNA, 19 nt, Homo sapiens
  misc_RNA (1)...(19): siRNA sense strand
ggaaggaggugugcuuugc

SEQ ID NO: 332665 - RNA, 19 nt, Homo sapiens
  misc_RNA (1)...(19): siRNA sense strand
caucaacuccuauaucaga

SEQ ID NO: 332666 - RNA, 19 nt, Homo sapiens
  misc_RNA (1)...(19): siRNA sense strand
aaagaaagcaguagaugug

SEQ ID NO: 332667 - RNA, 19 nt, Homo sapiens
  misc_RNA (1)...(19): siRNA sense strand
ugacagagaaggaggacua

SEQ ID NO: 332668 - RNA, 19 nt, Homo sapiens
  misc_RNA (1)...(19): siRNA sense strand
ccagagagacgguccagaa

SEQ ID NO: 332669 - RNA, 19 nt, Homo sapiens
  misc_RNA (1)...(19): siRNA sense strand
agaaguugcugcagugguu

SEQ ID NO: 332670 - RNA, 19 nt, Homo sapiens
  misc_RNA (1)...(19): siRNA sense strand
gagcugguguuccucuaug

SEQ ID NO: 332671 - RNA, 19 nt, Homo sapiens
  misc_RNA (1)...(19): siRNA sense strand
guacuuccuucuuauugga

SEQ ID NO: 332672 - RNA, 19 nt, Homo sapiens
  misc_RNA (1)...(19): siRNA sense strand
gaauuaauccagcuaacau

SEQ ID NO: 332673 - RNA, 19 nt, Homo sapiens
  misc_RNA (1)...(19): siRNA sense strand
gagaaguuguuugugagaa

SEQ ID NO: 332674 - RNA, 19 nt, Homo sapiens
  misc_RNA (1)...(19): siRNA sense strand
ucugacaaguucauaugua

SEQ ID NO: 332675 - RNA, 19 nt, Homo sapiens
  misc_RNA (1)...(19): siRNA sense strand
gcaaaugugccaagcaaag

SEQ ID NO: 332676 - RNA, 19 nt, Homo sapiens
  misc_RNA (1)...(19): siRNA sense strand
gauuggagcuaaacauggu

SEQ ID NO: 332677 - RNA, 19 nt, Homo sapiens
  misc_RNA (1)...(19): siRNA sense strand
ccucuuaccuggaaguugu

SEQ ID NO: 332678 - RNA, 19 nt, Homo sapiens
  misc_RNA (1)...(19): siRNA sense strand
gauccugacugccaucaag

SEQ ID NO: 332679 - RNA, 19 nt, Homo sapiens
  misc_RNA (1)...(19): siRNA sense strand
cagaggagcucggagacuu

SEQ ID NO: 332680 - RNA, 19 nt, Homo sapiens
  misc_RNA (1)...(19): siRNA sense strand
ugaggaagauaacauugug

SEQ ID NO: 332681 - RNA, 19 nt, Homo sapiens
  misc_RNA (1)...(19): siRNA sense strand
gggcagagaaguuguuugu

SEQ ID NO: 332682 - RNA, 19 nt, Homo sapiens
  misc_RNA (1)...(19): siRNA sense strand
ucaaccaccugcugacaga

SEQ ID NO: 332683 - RNA, 19 nt, Homo sapiens
  misc_RNA (1)...(19): siRNA sense strand
acaaaccacugcucaucaa

SEQ ID NO: 332684 - RNA, 19 nt, Homo sapiens
  misc_RNA (1)...(19): siRNA sense strand
gcagguggccucuaaguac

SEQ ID NO: 332685 - RNA, 19 nt, Homo sapiens
  misc_RNA (1)...(19): siRNA sense strand
uggaugccuugaagaauaa

SEQ ID NO: 332686 - RNA, 19 nt, Homo sapiens
  misc_RNA (1)...(19): siRNA sense strand
agaaguuguuugugagaaa

SEQ ID NO: 332687 - RNA, 19 nt, Homo sapiens
  misc_RNA (1)...(19): siRNA sense strand
cugccaagcugcucuauag

SEQ ID NO: 332688 - RNA, 19 nt, Homo sapiens
  misc_RNA (1)...(19): siRNA sense strand
gaagccaucaacuccuaua

SEQ ID NO: 332689 - RNA, 19 nt, Homo sapiens
  misc_RNA (1)...(19): siRNA sense strand
aagcccagcuccagaaaga

SEQ ID NO: 332690 - RNA, 19 nt, Homo sapiens
  misc_RNA (1)...(19): siRNA sense strand
acaggaaucuacagaaucu

SEQ ID NO: 332691 - RNA, 19 nt, Homo sapiens
  misc_RNA (1)...(19): siRNA sense strand
ccaggaucguggcuacuuu

SEQ ID NO: 332692 - RNA, 19 nt, Homo sapiens
  misc_RNA (1)...(19): siRNA sense strand
gaugugcuauuaccaggau

SEQ ID NO: 332693 - RNA, 19 nt, Homo sapiens
  misc_RNA (1)...(19): siRNA sense strand
cagaggcacagaaugauuu

SEQ ID NO: 332694 - RNA, 19 nt, Homo sapiens
  misc_RNA (1)...(19): siRNA sense strand
acaacaagagugugaauga

SEQ ID NO: 332695 - RNA, 19 nt, Homo sapiens
  misc_RNA (1)...(19): siRNA sense strand
cugcagagguacauugaga

SEQ ID NO: 332696 - RNA, 19 nt, Homo sapiens
  misc_RNA (1)...(19): siRNA sense strand
gaagaucaguccggaacag

SEQ ID NO: 332697 - RNA, 19 nt, Homo sapiens
  misc_RNA (1)...(19): siRNA sense strand
cuagagaaguggcugaaag

SEQ ID NO: 332698 - RNA, 19 nt, Homo sapiens
  misc_RNA (1)...(19): siRNA sense strand
caaaguauggcuaucuuca

SEQ ID NO: 332699 - RNA, 19 nt, Homo sapiens
  misc_RNA (1)...(19): siRNA sense strand
gaucacaaaguauggcuau

SEQ ID NO: 332700 - RNA, 19 nt, Homo sapiens
  misc_RNA (1)...(19): siRNA sense strand
gcaguucuauuuggauuac

SEQ ID NO: 332701 - RNA, 19 nt, Homo sapiens
  misc_RNA (1)...(19): siRNA sense strand
cuucgcagcuugucucuuc

SEQ ID NO: 332702 - RNA, 19 nt, Homo sapiens
  misc_RNA (1)...(19): siRNA sense strand
caacaagagugugaaugag

SEQ ID NO: 332703 - RNA, 19 nt, Homo sapiens
  misc_RNA (1)...(19): siRNA sense strand
gcagagaaguuguuuguga

SEQ ID NO: 332704 - RNA, 19 nt, Homo sapiens
  misc_RNA (1)...(19): siRNA sense strand
gcaaagugauccaguguuu

SEQ ID NO: 332705 - RNA, 19 nt, Homo sapiens
  misc_RNA (1)...(19): siRNA sense strand
gcaguguacuuccuucuua

SEQ ID NO: 332706 - RNA, 19 nt, Homo sapiens
  misc_RNA (1)...(19): siRNA sense strand
aaaccaaccucuggaauua

SEQ ID NO: 332707 - RNA, 19 nt, Homo sapiens
  misc_RNA (1)...(19): siRNA sense strand
gcacacgggucauggagua

SEQ ID NO: 332708 - RNA, 19 nt, Homo sapiens
  misc_RNA (1)...(19): siRNA sense strand
gagagacgguccagaaauu

SEQ ID NO: 332709 - RNA, 19 nt, Homo sapiens
  misc_RNA (1)...(19): siRNA sense strand
gggaggaucuaguuaaauu

SEQ ID NO: 332710 - RNA, 19 nt, Homo sapiens
  misc_RNA (1)...(19): siRNA sense strand
gcacaggaaucuacagaau

SEQ ID NO: 332711 - RNA, 19 nt, Homo sapiens
  misc_RNA (1)...(19): siRNA sense strand
ccgaguggcuugucaauuu

SEQ ID NO: 332712 - RNA, 19 nt, Homo sapiens
  misc_RNA (1)...(19): siRNA sense strand
guaagcaacuccuagagaa

SEQ ID NO: 332713 - RNA, 19 nt, Homo sapiens
  misc_RNA (1)...(19): siRNA sense strand
gaggaggccuucaccguuu

SEQ ID NO: 332714 - RNA, 19 nt, Homo sapiens
  misc_RNA (1)...(19): siRNA sense strand
gaaagcaguagauguguuu

SEQ ID NO: 332715 - RNA, 19 nt, Homo sapiens
  misc_RNA (1)...(19): siRNA sense strand
gagaggauaugccgagaga

SEQ ID NO: 332716 - RNA, 19 nt, Homo sapiens
  misc_RNA (1)...(19): siRNA sense strand
gagagaaugccuacuauga

SEQ ID NO: 332717 - RNA, 19 nt, Homo sapiens
  misc_RNA (1)...(19): siRNA sense strand
gcacaucauugaaguugga

SEQ ID NO: 332718 - RNA, 19 nt, Homo sapiens
  misc_RNA (1)...(19): siRNA sense strand
gagagagaaugccuacuau

SEQ ID NO: 332719 - RNA, 19 nt, Homo sapiens
  misc_RNA (1)...(19): siRNA sense strand
agaaguggcugaaagaaga

SEQ ID NO: 332720 - RNA, 19 nt, Homo sapiens
  misc_RNA (1)...(19): siRNA sense strand
gcacaggucacgaucauug

SEQ ID NO: 332721 - RNA, 19 nt, Homo sapiens
  misc_RNA (1)...(19): siRNA sense strand
gauccucccuguucgcuuu

SEQ ID NO: 332722 - RNA, 19 nt, Homo sapiens
  misc_RNA (1)...(19): siRNA sense strand
caaccaacgugcuucagaa

SEQ ID NO: 332723 - RNA, 19 nt, Homo sapiens
  misc_RNA (1)...(19): siRNA sense strand
cagccgaccugccuaauga

SEQ ID NO: 332724 - RNA, 19 nt, Homo sapiens
  misc_RNA (1)...(19): siRNA sense strand
gagaaugccuacuaugaca

SEQ ID NO: 332725 - RNA, 19 nt, Homo sapiens
  misc_RNA (1)...(19): siRNA sense strand
guccagaaauuccagagua

SEQ ID NO: 332726 - RNA, 19 nt, Homo sapiens
  misc_RNA (1)...(19): siRNA sense strand
acaaaggccucuucuacuu

SEQ ID NO: 332727 - RNA, 19 nt, Homo sapiens
  misc_RNA (1)...(19): siRNA sense strand
caaugcagcucuacucugu

SEQ ID NO: 332728 - RNA, 19 nt, Homo sapiens
  misc_RNA (1)...(19): siRNA sense strand
gaccacaccuggacaguca

SEQ ID NO: 332729 - RNA, 19 nt, Homo sapiens
  misc_RNA (1)...(19): siRNA sense strand
ggacaucauuaccaagguu

SEQ ID NO: 332730 - RNA, 19 nt, Homo sapiens
  misc_RNA (1)...(19): siRNA sense strand
gggacgacccuuccucuua

SEQ ID NO: 332731 - RNA, 19 nt, Homo sapiens
  misc_RNA (1)...(19): siRNA sense strand
ggaccgggcauaugaguuu

SEQ ID NO: 332732 - RNA, 19 nt, Homo sapiens
  misc_RNA (1)...(19): siRNA sense strand
gaagauaguucuggauaac

SEQ ID NO: 332733 - RNA, 19 nt, Homo sapiens
  misc_RNA (1)...(19): siRNA sense strand
gcacuacaccgaccucuau

SEQ ID NO: 332734 - RNA, 19 nt, Homo sapiens
  misc_RNA (1)...(19): siRNA sense strand
cauggaaucugacaaguuc

SEQ ID NO: 332735 - RNA, 19 nt, Homo sapiens
  misc_RNA (1)...(19): siRNA sense strand
uggaggagcugaugugcua

SEQ ID NO: 332736 - RNA, 19 nt, Homo sapiens
  misc_RNA (1)...(19): siRNA sense strand
gccaucaacuccuauauca

SEQ ID NO: 332737 - RNA, 19 nt, Homo sapiens
  misc_RNA (1)...(19): siRNA sense strand
agacauggcuguuggagau

SEQ ID NO: 332738 - RNA, 19 nt, Homo sapiens
  misc_RNA (1)...(19): siRNA sense strand
guugguggcugaaguagaa

SEQ ID NO: 332739 - RNA, 19 nt, Homo sapiens
  misc_RNA (1)...(19): siRNA sense strand
caauuucuuuggcuccuua

SEQ ID NO: 332740 - RNA, 19 nt, Homo sapiens
  misc_RNA (1)...(19): siRNA sense strand
ccaugaagauguuugauag

SEQ ID NO: 332741 - RNA, 19 nt, Homo sapiens
  misc_RNA (1)...(19): siRNA sense strand
ccacaaguuugauaugaau

SEQ ID NO: 332742 - RNA, 19 nt, Homo sapiens
  misc_RNA (1)...(19): siRNA sense strand
gcagagagugccaucauga

SEQ ID NO: 332743 - RNA, 19 nt, Homo sapiens
  misc_RNA (1)...(19): siRNA sense strand
ucaaggacaucauuaccaa

SEQ ID NO: 332744 - RNA, 19 nt, Homo sapiens
  misc_RNA (1)...(19): siRNA sense strand
ggacgacccuuccucuuac

SEQ ID NO: 332745 - RNA, 19 nt, Homo sapiens
  misc_RNA (1)...(19): siRNA sense strand
agaaagauuuggugaagga

SEQ ID NO: 332746 - RNA, 19 nt, Homo sapiens
  misc_RNA (1)...(19): siRNA sense strand
ugacaugagugacccaaug

SEQ ID NO: 332747 - RNA, 19 nt, Homo sapiens
  misc_RNA (1)...(19): siRNA sense strand
gcucugggcucacguccuu

SEQ ID NO: 332748 - RNA, 19 nt, Homo sapiens
  misc_RNA (1)...(19): siRNA sense strand
cuaaugaacugauugaacu

SEQ ID NO: 332749 - RNA, 19 nt, Homo sapiens
  misc_RNA (1)...(19): siRNA sense strand
gcccagacauggugcuuga

SEQ ID NO: 332750 - RNA, 19 nt, Homo sapiens
  misc_RNA (1)...(19): siRNA sense strand
ugauugaacugcuggagaa

SEQ ID NO: 332751 - RNA, 19 nt, Homo sapiens
  misc_RNA (1)...(19): siRNA sense strand
caaaccaaccucuggaauu

SEQ ID NO: 332752 - RNA, 19 nt, Homo sapiens
  misc_RNA (1)...(19): siRNA sense strand
uccaugaccuuguccuaua

SEQ ID NO: 332753 - RNA, 19 nt, Homo sapiens
  misc_RNA (1)...(19): siRNA sense strand
ucaaggagguggagaggau

SEQ ID NO: 332754 - RNA, 19 nt, Homo sapiens
  misc_RNA (1)...(19): siRNA sense strand
ggacugaugaguaccagaa

SEQ ID NO: 332755 - RNA, 19 nt, Homo sapiens
  misc_RNA (1)...(19): siRNA sense strand
acagagcccugcaguucua

SEQ ID NO: 332756 - RNA, 19 nt, Homo sapiens
  misc_RNA (1)...(19): siRNA sense strand
ccagaaagauuuggugaag

SEQ ID NO: 332757 - RNA, 19 nt, Homo sapiens
  misc_RNA (1)...(19): siRNA sense strand
agagguacauugagaucua

SEQ ID NO: 332758 - RNA, 19 nt, Homo sapiens
  misc_RNA (1)...(19): siRNA sense strand
gaccuuguccuauauuuau

SEQ ID NO: 332759 - RNA, 19 nt, Homo sapiens
  misc_RNA (1)...(19): siRNA sense strand
uuggaugccuugaagaaua

SEQ ID NO: 332760 - RNA, 19 nt, Homo sapiens
  misc_RNA (1)...(19): siRNA sense strand
gcgcagauccucccuguuc

SEQ ID NO: 332761 - RNA, 19 nt, Homo sapiens
  misc_RNA (1)...(19): siRNA sense strand
ugagagagaaugccuacua

SEQ ID NO: 332762 - RNA, 19 nt, Homo sapiens
  misc_RNA (1)...(19): siRNA sense strand
gaaggagggucaguucaag

SEQ ID NO: 332763 - RNA, 19 nt, Homo sapiens
  misc_RNA (1)...(19): siRNA sense strand
ggaaggagggucaguucaa

SEQ ID NO: 332764 - RNA, 19 nt, Homo sapiens
  misc_RNA (1)...(19): siRNA sense strand
ggaaggaggugugcuuugc

SEQ ID NO: 332765 - RNA, 19 nt, Homo sapiens
  misc_RNA (1)...(19): siRNA sense strand
caucaacuccuauaucaga

SEQ ID NO: 332766 - RNA, 19 nt, Homo sapiens
  misc_RNA (1)...(19): siRNA sense strand
aaagaaagcaguagaugug

SEQ ID NO: 332767 - RNA, 19 nt, Homo sapiens
  misc_RNA (1)...(19): siRNA sense strand
ccagagagacgguccagaa

SEQ ID NO: 332768 - RNA, 19 nt, Homo sapiens
  misc_RNA (1)...(19): siRNA sense strand
agaaguugcugcagugguu

SEQ ID NO: 332769 - RNA, 19 nt, Homo sapiens
  misc_RNA (1)...(19): siRNA sense strand
gagcugguguuccucuaug

SEQ ID NO: 332770 - RNA, 19 nt, Homo sapiens
  misc_RNA (1)...(19): siRNA sense strand
guacuuccuucuuauugga

SEQ ID NO: 332771 - RNA, 19 nt, Homo sapiens
  misc_RNA (1)...(19): siRNA sense strand
gaauuaauccagcuaacau

SEQ ID NO: 332772 - RNA, 19 nt, Homo sapiens
  misc_RNA (1)...(19): siRNA sense strand
gagaaguuguuugugagaa

SEQ ID NO: 332773 - RNA, 19 nt, Homo sapiens
  misc_RNA (1)...(19): siRNA sense strand
ucugacaaguucauaugua

SEQ ID NO: 332774 - RNA, 19 nt, Homo sapiens
  misc_RNA (1)...(19): siRNA sense strand
gcaaaugugccaagcaaag

SEQ ID NO: 332775 - RNA, 19 nt, Homo sapiens
  misc_RNA (1)...(19): siRNA sense strand
gauuggagcuaaacauggu

SEQ ID NO: 332776 - RNA, 19 nt, Homo sapiens
  misc_RNA (1)...(19): siRNA sense strand
ccucuuaccuggaaguugu

SEQ ID NO: 332777 - RNA, 19 nt, Homo sapiens
  misc_RNA (1)...(19): siRNA sense strand
gauccugacugccaucaag

SEQ ID NO: 332778 - RNA, 19 nt, Homo sapiens
  misc_RNA (1)...(19): siRNA sense strand
cagaggagcucggagacuu

SEQ ID NO: 332779 - RNA, 19 nt, Homo sapiens
  misc_RNA (1)...(19): siRNA sense strand
ugaggaagauaacauugug

SEQ ID NO: 332780 - RNA, 19 nt, Homo sapiens
  misc_RNA (1)...(19): siRNA sense strand
gggcagagaaguuguuugu

SEQ ID NO: 332781 - RNA, 19 nt, Homo sapiens
  misc_RNA (1)...(19): siRNA sense strand
ucaaccaccugcugacaga

SEQ ID NO: 332782 - RNA, 19 nt, Homo sapiens
  misc_RNA (1)...(19): siRNA sense strand
acaaaccacugcucaucaa

SEQ ID NO: 332783 - RNA, 19 nt, Homo sapiens
  misc_RNA (1)...(19): siRNA sense strand
gcagguggccucuaaguac

SEQ ID NO: 332784 - RNA, 19 nt, Homo sapiens
  misc_RNA (1)...(19): siRNA sense strand
uggaugccuugaagaauaa

SEQ ID NO: 332785 - RNA, 19 nt, Homo sapiens
  misc_RNA (1)...(19): siRNA sense strand
agaaguuguuugugagaaa

SEQ ID NO: 332786 - RNA, 19 nt, Homo sapiens
  misc_RNA (1)...(19): siRNA sense strand
cugccaagcugcucuauag

SEQ ID NO: 332787 - RNA, 19 nt, Homo sapiens
  misc_RNA (1)...(19): siRNA sense strand
gaagccaucaacuccuaua

SEQ ID NO: 332788 - RNA, 19 nt, Homo sapiens
  misc_RNA (1)...(19): siRNA sense strand
aagcccagcuccagaaaga

SEQ ID NO: 332789 - RNA, 19 nt, Homo sapiens
  misc_RNA (1)...(19): siRNA sense strand
acaggaaucuacagaaucu

SEQ ID NO: 332790 - RNA, 19 nt, Homo sapiens
  misc_RNA (1)...(19): siRNA sense strand
ccaggaucguggcuacuuu

SEQ ID NO: 332791 - RNA, 19 nt, Homo sapiens
  misc_RNA (1)...(19): siRNA sense strand
gaugugcuauuaccaggau

SEQ ID NO: 332792 - RNA, 19 nt, Homo sapiens
  misc_RNA (1)...(19): siRNA sense strand
cagaggcacagaaugauuu

SEQ ID NO: 332793 - RNA, 19 nt, Homo sapiens
  misc_RNA (1)...(19): siRNA sense strand
acaacaagagugugaauga

SEQ ID NO: 332794 - RNA, 19 nt, Homo sapiens
  misc_RNA (1)...(19): siRNA sense strand
cugcagagguacauugaga

SEQ ID NO: 332795 - RNA, 19 nt, Homo sapiens
  misc_RNA (1)...(19): siRNA sense strand
gaagaucaguccggaacag

SEQ ID NO: 332796 - RNA, 19 nt, Homo sapiens
  misc_RNA (1)...(19): siRNA sense strand
cuagagaaguggcugaaag

SEQ ID NO: 332797 - RNA, 19 nt, Homo sapiens
  misc_RNA (1)...(19): siRNA sense strand
caaaguauggcuaucuuca

SEQ ID NO: 332798 - RNA, 19 nt, Homo sapiens
  misc_RNA (1)...(19): siRNA sense strand
gaucacaaaguauggcuau

SEQ ID NO: 332799 - RNA, 19 nt, Homo sapiens
  misc_RNA (1)...(19): siRNA sense strand
ggucagcucaauaaacuug

SEQ ID NO: 332800 - RNA, 19 nt, Homo sapiens
  misc_RNA (1)...(19): siRNA sense strand
cuucgcagcuugucucuuc

SEQ ID NO: 332801 - RNA, 19 nt, Homo sapiens
  misc_RNA (1)...(19): siRNA sense strand
caacaagagugugaaugag

SEQ ID NO: 332802 - RNA, 19 nt, Homo sapiens
  misc_RNA (1)...(19): siRNA sense strand
gcaguucuauuuggauuac

SEQ ID NO: 332803 - RNA, 19 nt, Homo sapiens
  misc_RNA (1)...(19): siRNA sense strand
gaaugggacuggaggagua

SEQ ID NO: 332804 - RNA, 19 nt, Homo sapiens
  misc_RNA (1)...(19): siRNA sense strand
ggacuugccugugaagaug

SEQ ID NO: 332805 - RNA, 19 nt, Homo sapiens
  misc_RNA (1)...(19): siRNA sense strand
ggacauaugagucaaagga

SEQ ID NO: 332806 - RNA, 19 nt, Homo sapiens
  misc_RNA (1)...(19): siRNA sense strand
gcucagccaugauuucuuc

SEQ ID NO: 332807 - RNA, 19 nt, Homo sapiens
  misc_RNA (1)...(19): siRNA sense strand
gaggaggaguuccgcacua

SEQ ID NO: 332808 - RNA, 19 nt, Homo sapiens
  misc_RNA (1)...(19): siRNA sense strand
gccaaggucuacaucaaug

SEQ ID NO: 332809 - RNA, 19 nt, Homo sapiens
  misc_RNA (1)...(19): siRNA sense strand
ugagaaggguuacuacuac

SEQ ID NO: 332810 - RNA, 19 nt, Homo sapiens
  misc_RNA (1)...(19): siRNA sense strand
gaaggguuacuacuacuug

SEQ ID NO: 332811 - RNA, 19 nt, Homo sapiens
  misc_RNA (1)...(19): siRNA sense strand
ccuauaaccggacauauga

SEQ ID NO: 332812 - RNA, 19 nt, Homo sapiens
  misc_RNA (1)...(19): siRNA sense strand
cgcacuaucuaccugaaua

SEQ ID NO: 332813 - RNA, 19 nt, Homo sapiens
  misc_RNA (1)...(19): siRNA sense strand
ucaagaacuuugucauuac

SEQ ID NO: 332814 - RNA, 19 nt, Homo sapiens
  misc_RNA (1)...(19): siRNA sense strand
gugagaaggguuacuacua

SEQ ID NO: 332815 - RNA, 19 nt, Homo sapiens
  misc_RNA (1)...(19): siRNA sense strand
gccaugauuucuucucugu

SEQ ID NO: 332816 - RNA, 19 nt, Homo sapiens
  misc_RNA (1)...(19): siRNA sense strand
gaacuuugucauuaccuau

SEQ ID NO: 332817 - RNA, 19 nt, Homo sapiens
  misc_RNA (1)...(19): siRNA sense strand
ugggagggcuggagacaga

SEQ ID NO: 332818 - RNA, 19 nt, Homo sapiens
  misc_RNA (1)...(19): siRNA sense strand
gcucagucauuucccuguu

SEQ ID NO: 332819 - RNA, 19 nt, Homo sapiens
  misc_RNA (1)...(19): siRNA sense strand
acucggccauaaagaauuu

SEQ ID NO: 332820 - RNA, 19 nt, Homo sapiens
  misc_RNA (1)...(19): siRNA sense strand
cagagaaggccaaggucua

SEQ ID NO: 332821 - RNA, 19 nt, Homo sapiens
  misc_RNA (1)...(19): siRNA sense strand
ggagacagaggaugacuac

SEQ ID NO: 332822 - RNA, 19 nt, Homo sapiens
  misc_RNA (1)...(19): siRNA sense strand
gcuucgcgcuggagauguu

SEQ ID NO: 332823 - RNA, 19 nt, Homo sapiens
  misc_RNA (1)...(19): siRNA sense strand
gagccuggcaacaagauga

SEQ ID NO: 332824 - RNA, 19 nt, Homo sapiens
  misc_RNA (1)...(19): siRNA sense strand
ucagucauuucccuguuga

SEQ ID NO: 332825 - RNA, 19 nt, Homo sapiens
  misc_RNA (1)...(19): siRNA sense strand
gagaaggguuacuacuacu

SEQ ID NO: 332826 - RNA, 19 nt, Homo sapiens
  misc_RNA (1)...(19): siRNA sense strand
gcucugacguucccuuuug

SEQ ID NO: 332827 - RNA, 19 nt, Homo sapiens
  misc_RNA (1)...(19): siRNA sense strand
uggaugagcucggaagaca

SEQ ID NO: 332828 - RNA, 19 nt, Homo sapiens
  misc_RNA (1)...(19): siRNA sense strand
gagggccagugguuucuca

SEQ ID NO: 332829 - RNA, 19 nt, Homo sapiens
  misc_RNA (1)...(19): siRNA sense strand
uggcacagcucaguaugga

SEQ ID NO: 332830 - RNA, 19 nt, Homo sapiens
  misc_RNA (1)...(19): siRNA sense strand
agaacuuugucauuaccua

SEQ ID NO: 332831 - RNA, 19 nt, Homo sapiens
  misc_RNA (1)...(19): siRNA sense strand
aguauggagucaccaaguu

SEQ ID NO: 332832 - RNA, 19 nt, Homo sapiens
  misc_RNA (1)...(19): siRNA sense strand
cauaugagucaaaggaaga

SEQ ID NO: 332833 - RNA, 19 nt, Homo sapiens
  misc_RNA (1)...(19): siRNA sense strand
ccaagucagccuucacuca

SEQ ID NO: 332834 - RNA, 19 nt, Homo sapiens
  misc_RNA (1)...(19): siRNA sense strand
acuuucagcucagucauuu

SEQ ID NO: 332835 - RNA, 19 nt, Homo sapiens
  misc_RNA (1)...(19): siRNA sense strand
cagaggaugacuacagcua

SEQ ID NO: 332836 - RNA, 19 nt, Homo sapiens
  misc_RNA (1)...(19): siRNA sense strand
cuaucuaccugaauacucu

SEQ ID NO: 332837 - RNA, 19 nt, Homo sapiens
  misc_RNA (1)...(19): siRNA sense strand
gaggaguuccgcacuaucu

SEQ ID NO: 332838 - RNA, 19 nt, Homo sapiens
  misc_RNA (1)...(19): siRNA sense strand
uaaccggacauaugaguca

SEQ ID NO: 332839 - RNA, 19 nt, Homo sapiens
  misc_RNA (1)...(19): siRNA sense strand
cuucaagaacuuugucauu

SEQ ID NO: 332840 - RNA, 19 nt, Homo sapiens
  misc_RNA (1)...(19): siRNA sense strand
gccaagagaggcccaaucu

SEQ ID NO: 332841 - RNA, 19 nt, Homo sapiens
  misc_RNA (1)...(19): siRNA sense strand
caaagaccagggcaugugu

SEQ ID NO: 332842 - RNA, 19 nt, Homo sapiens
  misc_RNA (1)...(19): siRNA sense strand
cagcagagaaggccaaggu

SEQ ID NO: 332843 - RNA, 19 nt, Homo sapiens
  misc_RNA (1)...(19): siRNA sense strand
caagaacuuugucauuacc

SEQ ID NO: 332844 - RNA, 19 nt, Homo sapiens
  misc_RNA (1)...(19): siRNA sense strand
ccguggagcugagccagaa

SEQ ID NO: 332845 - RNA, 19 nt, Homo sapiens
  misc_RNA (1)...(19): siRNA sense strand
ggccaaggucuacaucaau

SEQ ID NO: 332846 - RNA, 19 nt, Homo sapiens
  misc_RNA (1)...(19): siRNA sense strand
gacauaugagucaaaggaa

SEQ ID NO: 332847 - RNA, 19 nt, Homo sapiens
  misc_RNA (1)...(19): siRNA sense strand
ugaagcaagccaagucugu

SEQ ID NO: 332848 - RNA, 19 nt, Homo sapiens
  misc_RNA (1)...(19): siRNA sense strand
aggccaaggucuacaucaa

SEQ ID NO: 332849 - RNA, 19 nt, Homo sapiens
  misc_RNA (1)...(19): siRNA sense strand
uguccgucuuugucaauaa

SEQ ID NO: 332850 - RNA, 19 nt, Homo sapiens
  misc_RNA (1)...(19): siRNA sense strand
caaucuccguggccaucaa

SEQ ID NO: 332851 - RNA, 19 nt, Homo sapiens
  misc_RNA (1)...(19): siRNA sense strand
ucaaagaccagggcaugug

SEQ ID NO: 332852 - RNA, 19 nt, Homo sapiens
  misc_RNA (1)...(19): siRNA sense strand
ccuacucggccauaaagaa

SEQ ID NO: 332853 - RNA, 19 nt, Homo sapiens
  misc_RNA (1)...(19): siRNA sense strand
agacagaggaugacuacag

SEQ ID NO: 332854 - RNA, 19 nt, Homo sapiens
  misc_RNA (1)...(19): siRNA sense strand
cuacucggccauaaagaau

SEQ ID NO: 332855 - RNA, 19 nt, Homo sapiens
  misc_RNA (1)...(19): siRNA sense strand
cagccaugauuucuucucu

SEQ ID NO: 332856 - RNA, 19 nt, Homo sapiens
  misc_RNA (1)...(19): siRNA sense strand
ccaaggucuacaucaauga

SEQ ID NO: 332857 - RNA, 19 nt, Homo sapiens
  misc_RNA (1)...(19): siRNA sense strand
gaaggccaaggucuacauc

SEQ ID NO: 332858 - RNA, 19 nt, Homo sapiens
  misc_RNA (1)...(19): siRNA sense strand
acaacagaaacgagacuuu

SEQ ID NO: 332859 - RNA, 19 nt, Homo sapiens
  misc_RNA (1)...(19): siRNA sense strand
guauggagucaccaaguuc

SEQ ID NO: 332860 - RNA, 19 nt, Homo sapiens
  misc_RNA (1)...(19): siRNA sense strand
gagcccaagucagccuuca

SEQ ID NO: 332861 - RNA, 19 nt, Homo sapiens
  misc_RNA (1)...(19): siRNA sense strand
aggaggaguuccgcacuau

SEQ ID NO: 332862 - RNA, 19 nt, Homo sapiens
  misc_RNA (1)...(19): siRNA sense strand
gaugaagcaagccaagucu

SEQ ID NO: 332863 - RNA, 19 nt, Homo sapiens
  misc_RNA (1)...(19): siRNA sense strand
gcucugcagcuuccaaguc

SEQ ID NO: 332864 - RNA, 19 nt, Homo sapiens
  misc_RNA (1)...(19): siRNA sense strand
gcacuaucuaccugaauac

SEQ ID NO: 332865 - RNA, 19 nt, Homo sapiens
  misc_RNA (1)...(19): siRNA sense strand
ggaguuccgcacuaucuac

SEQ ID NO: 332866 - RNA, 19 nt, Homo sapiens
  misc_RNA (1)...(19): siRNA sense strand
gaacgugggcgacaagaaa

SEQ ID NO: 332867 - RNA, 19 nt, Homo sapiens
  misc_RNA (1)...(19): siRNA sense strand
gaucguggacgccgugauu

SEQ ID NO: 332868 - RNA, 19 nt, Homo sapiens
  misc_RNA (1)...(19): siRNA sense strand
gaagaagaaguaugaugug

SEQ ID NO: 332869 - RNA, 19 nt, Homo sapiens
  misc_RNA (1)...(19): siRNA sense strand
ggagaaggccaucuacaag

SEQ ID NO: 332870 - RNA, 19 nt, Homo sapiens
  misc_RNA (1)...(19): siRNA sense strand
ugaagaagaaguaugaugu

SEQ ID NO: 332871 - RNA, 19 nt, Homo sapiens
  misc_RNA (1)...(19): siRNA sense strand
cagaaggagugggccauga

SEQ ID NO: 332872 - RNA, 19 nt, Homo sapiens
  misc_RNA (1)...(19): siRNA sense strand
gcacacacuaccaaucguu

SEQ ID NO: 332873 - RNA, 19 nt, Homo sapiens
  misc_RNA (1)...(19): siRNA sense strand
ggccuacuguggcuacuca

SEQ ID NO: 332874 - RNA, 19 nt, Homo sapiens
  misc_RNA (1)...(19): siRNA sense strand
cccagcggaugguggauuu

SEQ ID NO: 332875 - RNA, 19 nt, Homo sapiens
  misc_RNA (1)...(19): siRNA sense strand
uggaggccauugacaccua

SEQ ID NO: 332876 - RNA, 19 nt, Homo sapiens
  misc_RNA (1)...(19): siRNA sense strand
uggagaaggccaucuacaa

SEQ ID NO: 332877 - RNA, 19 nt, Homo sapiens
  misc_RNA (1)...(19): siRNA sense strand
cgacaagaaaggcaagauc

SEQ ID NO: 332878 - RNA, 19 nt, Homo sapiens
  misc_RNA (1)...(19): siRNA sense strand
gugcugcugcugcuucuga

SEQ ID NO: 332879 - RNA, 19 nt, Homo sapiens
  misc_RNA (1)...(19): siRNA sense strand
agaaggagugggccaugaa

SEQ ID NO: 332880 - RNA, 19 nt, Homo sapiens
  misc_RNA (1)...(19): siRNA sense strand
ccaugaacgugggcgacaa

SEQ ID NO: 332881 - RNA, 19 nt, Homo sapiens
  misc_RNA (1)...(19): siRNA sense strand
gaaggagugggccaugaac

SEQ ID NO: 332882 - RNA, 19 nt, Homo sapiens
  misc_RNA (1)...(19): siRNA sense strand
gaacgugggcgacaagaaa

SEQ ID NO: 332883 - RNA, 19 nt, Homo sapiens
  misc_RNA (1)...(19): siRNA sense strand
gaucguggacgccgugauu

SEQ ID NO: 332884 - RNA, 19 nt, Homo sapiens
  misc_RNA (1)...(19): siRNA sense strand
gaagaagaaguaugaugug

SEQ ID NO: 332885 - RNA, 19 nt, Homo sapiens
  misc_RNA (1)...(19): siRNA sense strand
ggagaaggccaucuacaag

SEQ ID NO: 332886 - RNA, 19 nt, Homo sapiens
  misc_RNA (1)...(19): siRNA sense strand
ugaagaagaaguaugaugu

SEQ ID NO: 332887 - RNA, 19 nt, Homo sapiens
  misc_RNA (1)...(19): siRNA sense strand
cagaaggagugggccauga

SEQ ID NO: 332888 - RNA, 19 nt, Homo sapiens
  misc_RNA (1)...(19): siRNA sense strand
gcacacacuaccaaucguu

SEQ ID NO: 332889 - RNA, 19 nt, Homo sapiens
  misc_RNA (1)...(19): siRNA sense strand
ggccuacuguggcuacuca

SEQ ID NO: 332890 - RNA, 19 nt, Homo sapiens
  misc_RNA (1)...(19): siRNA sense strand
cccagcggaugguggauuu

SEQ ID NO: 332891 - RNA, 19 nt, Homo sapiens
  misc_RNA (1)...(19): siRNA sense strand
uggaggccauugacaccua

SEQ ID NO: 332892 - RNA, 19 nt, Homo sapiens
  misc_RNA (1)...(19): siRNA sense strand
uggagaaggccaucuacaa

SEQ ID NO: 332893 - RNA, 19 nt, Homo sapiens
  misc_RNA (1)...(19): siRNA sense strand
cgacaagaaaggcaagauc

SEQ ID NO: 332894 - RNA, 19 nt, Homo sapiens
  misc_RNA (1)...(19): siRNA sense strand
agaaggagugggccaugaa

SEQ ID NO: 332895 - RNA, 19 nt, Homo sapiens
  misc_RNA (1)...(19): siRNA sense strand
ccaugaacgugggcgacaa

SEQ ID NO: 332896 - RNA, 19 nt, Homo sapiens
  misc_RNA (1)...(19): siRNA sense strand
gaaggagugggccaugaac

SEQ ID NO: 332897 - RNA, 19 nt, Homo sapiens
  misc_RNA (1)...(19): siRNA sense strand
ggaaagacuucaaaucaug

SEQ ID NO: 332898 - RNA, 19 nt, Homo sapiens
  misc_RNA (1)...(19): siRNA sense strand
gcaguggucuuccaaauau

SEQ ID NO: 332899 - RNA, 19 nt, Homo sapiens
  misc_RNA (1)...(19): siRNA sense strand
gaaaugcuauggauuacau

SEQ ID NO: 332900 - RNA, 19 nt, Homo sapiens
  misc_RNA (1)...(19): siRNA sense strand
gggcauggcuauucucauu

SEQ ID NO: 332901 - RNA, 19 nt, Homo sapiens
  misc_RNA (1)...(19): siRNA sense strand
gaaccuaacuucuguugac

SEQ ID NO: 332902 - RNA, 19 nt, Homo sapiens
  misc_RNA (1)...(19): siRNA sense strand
gaaccagaaccacagauuu

SEQ ID NO: 332903 - RNA, 19 nt, Homo sapiens
  misc_RNA (1)...(19): siRNA sense strand
caaguaaaccagcguguaa

SEQ ID NO: 332904 - RNA, 19 nt, Homo sapiens
  misc_RNA (1)...(19): siRNA sense strand
caagcugucuuaaggaguu

SEQ ID NO: 332905 - RNA, 19 nt, Homo sapiens
  misc_RNA (1)...(19): siRNA sense strand
ugagguggcugucaggaaa

SEQ ID NO: 332906 - RNA, 19 nt, Homo sapiens
  misc_RNA (1)...(19): siRNA sense strand
gcucagaugcuguugcuuu

SEQ ID NO: 332907 - RNA, 19 nt, Homo sapiens
  misc_RNA (1)...(19): siRNA sense strand
gacuucaaaucaugcaaua

SEQ ID NO: 332908 - RNA, 19 nt, Homo sapiens
  misc_RNA (1)...(19): siRNA sense strand
ggagaccuaucaccggauu

SEQ ID NO: 332909 - RNA, 19 nt, Homo sapiens
  misc_RNA (1)...(19): siRNA sense strand
gcagccagauuaguagaaa

SEQ ID NO: 332910 - RNA, 19 nt, Homo sapiens
  misc_RNA (1)...(19): siRNA sense strand
ugaagaagaugagggaguu

SEQ ID NO: 332911 - RNA, 19 nt, Homo sapiens
  misc_RNA (1)...(19): siRNA sense strand
gcuaagaacuccccacuga

SEQ ID NO: 332912 - RNA, 19 nt, Homo sapiens
  misc_RNA (1)...(19): siRNA sense strand
ugacagagccucagauuac

SEQ ID NO: 332913 - RNA, 19 nt, Homo sapiens
  misc_RNA (1)...(19): siRNA sense strand
ugaaaccgcugaguaacaa

SEQ ID NO: 332914 - RNA, 19 nt, Homo sapiens
  misc_RNA (1)...(19): siRNA sense strand
gagaaaacaugcugaugaa

SEQ ID NO: 332915 - RNA, 19 nt, Homo sapiens
  misc_RNA (1)...(19): siRNA sense strand
guuuaugucugcuguauuc

SEQ ID NO: 332916 - RNA, 19 nt, Homo sapiens
  misc_RNA (1)...(19): siRNA sense strand
ugaagucacugcaguccaa

SEQ ID NO: 332917 - RNA, 19 nt, Homo sapiens
  misc_RNA (1)...(19): siRNA sense strand
caaauuugguuaugaugag

SEQ ID NO: 332918 - RNA, 19 nt, Homo sapiens
  misc_RNA (1)...(19): siRNA sense strand
uaacuucuguugaccuugu

SEQ ID NO: 332919 - RNA, 19 nt, Homo sapiens
  misc_RNA (1)...(19): siRNA sense strand
ugaacgaccugcccaguca

SEQ ID NO: 332920 - RNA, 19 nt, Homo sapiens
  misc_RNA (1)...(19): siRNA sense strand
ugaguaacaagcugacuua

SEQ ID NO: 332921 - RNA, 19 nt, Homo sapiens
  misc_RNA (1)...(19): siRNA sense strand
ggccaaccaugguggauau

SEQ ID NO: 332922 - RNA, 19 nt, Homo sapiens
  misc_RNA (1)...(19): siRNA sense strand
uaucguaccuauucgugaa

SEQ ID NO: 332923 - RNA, 19 nt, Homo sapiens
  misc_RNA (1)...(19): siRNA sense strand
aagcagagguccacgaauc

SEQ ID NO: 332924 - RNA, 19 nt, Homo sapiens
  misc_RNA (1)...(19): siRNA sense strand
ggcaugguguccuauuuga

SEQ ID NO: 332925 - RNA, 19 nt, Homo sapiens
  misc_RNA (1)...(19): siRNA sense strand
ccgcuggacugaaggcuuu

SEQ ID NO: 332926 - RNA, 19 nt, Homo sapiens
  misc_RNA (1)...(19): siRNA sense strand
gacaauggcuaccucaaaa

SEQ ID NO: 332927 - RNA, 19 nt, Homo sapiens
  misc_RNA (1)...(19): siRNA sense strand
gaguuuaugucugcuguau

SEQ ID NO: 332928 - RNA, 19 nt, Homo sapiens
  misc_RNA (1)...(19): siRNA sense strand
cgagagaucgagaacauga

SEQ ID NO: 332929 - RNA, 19 nt, Homo sapiens
  misc_RNA (1)...(19): siRNA sense strand
gccgagagaucgagaacau

SEQ ID NO: 332930 - RNA, 19 nt, Homo sapiens
  misc_RNA (1)...(19): siRNA sense strand
ggaguucauucucaacagu

SEQ ID NO: 332931 - RNA, 19 nt, Homo sapiens
  misc_RNA (1)...(19): siRNA sense strand
gaauguguaugaaaacuug

SEQ ID NO: 332932 - RNA, 19 nt, Homo sapiens
  misc_RNA (1)...(19): siRNA sense strand
caaccaugguggauaucaa

SEQ ID NO: 332933 - RNA, 19 nt, Homo sapiens
  misc_RNA (1)...(19): siRNA sense strand
ccagcaguauaaacucuuu

SEQ ID NO: 332934 - RNA, 19 nt, Homo sapiens
  misc_RNA (1)...(19): siRNA sense strand
cugaugaaauuaugugguu

SEQ ID NO: 332935 - RNA, 19 nt, Homo sapiens
  misc_RNA (1)...(19): siRNA sense strand
cauaagccuuugccaggaa

SEQ ID NO: 332936 - RNA, 19 nt, Homo sapiens
  misc_RNA (1)...(19): siRNA sense strand
acugugaccuccauuaaau

SEQ ID NO: 332937 - RNA, 19 nt, Homo sapiens
  misc_RNA (1)...(19): siRNA sense strand
ggaaaccacagccacguau

SEQ ID NO: 332938 - RNA, 19 nt, Homo sapiens
  misc_RNA (1)...(19): siRNA sense strand
aaaacaugcugaugaagua

SEQ ID NO: 332939 - RNA, 19 nt, Homo sapiens
  misc_RNA (1)...(19): siRNA sense strand
gagcaagugaggcacauug

SEQ ID NO: 332940 - RNA, 19 nt, Homo sapiens
  misc_RNA (1)...(19): siRNA sense strand
uugcccagcucaucacuaa

SEQ ID NO: 332941 - RNA, 19 nt, Homo sapiens
  misc_RNA (1)...(19): siRNA sense strand
caaagcagagguccacgaa

SEQ ID NO: 332942 - RNA, 19 nt, Homo sapiens
  misc_RNA (1)...(19): siRNA sense strand
uaaaccagcguguaaagga

SEQ ID NO: 332943 - RNA, 19 nt, Homo sapiens
  misc_RNA (1)...(19): siRNA sense strand
ggaauuaccguuggugaca

SEQ ID NO: 332944 - RNA, 19 nt, Homo sapiens
  misc_RNA (1)...(19): siRNA sense strand
gcuaugaugggaaugugua

SEQ ID NO: 332945 - RNA, 19 nt, Homo sapiens
  misc_RNA (1)...(19): siRNA sense strand
caagauaaagccauucaag

SEQ ID NO: 332946 - RNA, 19 nt, Homo sapiens
  misc_RNA (1)...(19): siRNA sense strand
ugcaaacacuggcauugaa

SEQ ID NO: 332947 - RNA, 19 nt, Homo sapiens
  misc_RNA (1)...(19): siRNA sense strand
ucuaaggcgugcaccauug

SEQ ID NO: 332948 - RNA, 19 nt, Homo sapiens
  misc_RNA (1)...(19): siRNA sense strand
uggaaagacuucaaaucau

SEQ ID NO: 332949 - RNA, 19 nt, Homo sapiens
  misc_RNA (1)...(19): siRNA sense strand
cagagguccacgaaucuua

SEQ ID NO: 332950 - RNA, 19 nt, Homo sapiens
  misc_RNA (1)...(19): siRNA sense strand
cauucaagcugucuuaagg

SEQ ID NO: 332951 - RNA, 19 nt, Homo sapiens
  misc_RNA (1)...(19): siRNA sense strand
gccuaugccuuccaguuug

SEQ ID NO: 332952 - RNA, 19 nt, Homo sapiens
  misc_RNA (1)...(19): siRNA sense strand
ggggaaaugcuauggauua

SEQ ID NO: 332953 - RNA, 19 nt, Homo sapiens
  misc_RNA (1)...(19): siRNA sense strand
cgugaaaucgggacccaua

SEQ ID NO: 332954 - RNA, 19 nt, Homo sapiens
  misc_RNA (1)...(19): siRNA sense strand
gaugggaauguguaugaaa

SEQ ID NO: 332955 - RNA, 19 nt, Homo sapiens
  misc_RNA (1)...(19): siRNA sense strand
guggcaugguguccuauuu

SEQ ID NO: 332956 - RNA, 19 nt, Homo sapiens
  misc_RNA (1)...(19): siRNA sense strand
cuacugugaccuccauuaa

SEQ ID NO: 332957 - RNA, 19 nt, Homo sapiens
  misc_RNA (1)...(19): siRNA sense strand
gacagagccucagauuaca

SEQ ID NO: 332958 - RNA, 19 nt, Homo sapiens
  misc_RNA (1)...(19): siRNA sense strand
agacaauggcuaccucaaa

SEQ ID NO: 332959 - RNA, 19 nt, Homo sapiens
  misc_RNA (1)...(19): siRNA sense strand
uggauuacaugccuuuauc

SEQ ID NO: 332960 - RNA, 19 nt, Homo sapiens
  misc_RNA (1)...(19): siRNA sense strand
caucguauucccagagaaa

SEQ ID NO: 332961 - RNA, 19 nt, Homo sapiens
  misc_RNA (1)...(19): siRNA sense strand
ucgagaacaugauccugaa

SEQ ID NO: 332962 - RNA, 19 nt, Homo sapiens
  misc_RNA (1)...(19): siRNA sense strand
gaucaggugcacucaggaa

SEQ ID NO: 332963 - RNA, 19 nt, Homo sapiens
  misc_RNA (1)...(19): siRNA sense strand
agaaaacacugucaugaug

SEQ ID NO: 332964 - RNA, 19 nt, Homo sapiens
  misc_RNA (1)...(19): siRNA sense strand
gcaccauugccauccgaua

SEQ ID NO: 332965 - RNA, 19 nt, Homo sapiens
  misc_RNA (1)...(19): siRNA sense strand
gggaaaugcuauggauuac

SEQ ID NO: 332966 - RNA, 19 nt, Homo sapiens
  misc_RNA (1)...(19): siRNA sense strand
gugcuuggccgcuaugaug

SEQ ID NO: 332967 - RNA, 19 nt, Homo sapiens
  misc_RNA (1)...(19): siRNA sense strand
ccucaccgcuggacugaag

SEQ ID NO: 332968 - RNA, 19 nt, Homo sapiens
  misc_RNA (1)...(19): siRNA sense strand
uaacgaaggcauuggucaa

SEQ ID NO: 332969 - RNA, 19 nt, Homo sapiens
  misc_RNA (1)...(19): siRNA sense strand
aaaccacagccacguauga

SEQ ID NO: 332970 - RNA, 19 nt, Homo sapiens
  misc_RNA (1)...(19): siRNA sense strand
uggcaucgcugacccugau

SEQ ID NO: 332971 - RNA, 19 nt, Homo sapiens
  misc_RNA (1)...(19): siRNA sense strand
gcauggcuauucucauugc

SEQ ID NO: 332972 - RNA, 19 nt, Homo sapiens
  misc_RNA (1)...(19): siRNA sense strand
uuucaaacccagcaguaua

SEQ ID NO: 332973 - RNA, 19 nt, Homo sapiens
  misc_RNA (1)...(19): siRNA sense strand
gaagccugauggcacauac

SEQ ID NO: 332974 - RNA, 19 nt, Homo sapiens
  misc_RNA (1)...(19): siRNA sense strand
acaagcaccugaagucacu

SEQ ID NO: 332975 - RNA, 19 nt, Homo sapiens
  misc_RNA (1)...(19): siRNA sense strand
gaagaagaugagggaguuu

SEQ ID NO: 332976 - RNA, 19 nt, Homo sapiens
  misc_RNA (1)...(19): siRNA sense strand
cggcuagguuccugaugaa

SEQ ID NO: 332977 - RNA, 19 nt, Homo sapiens
  misc_RNA (1)...(19): siRNA sense strand
uuggaaagacuucaaauca

SEQ ID NO: 332978 - RNA, 19 nt, Homo sapiens
  misc_RNA (1)...(19): siRNA sense strand
caugacagagccucagauu

SEQ ID NO: 332979 - RNA, 19 nt, Homo sapiens
  misc_RNA (1)...(19): siRNA sense strand
ugaaguaugcccaggugaa

SEQ ID NO: 332980 - RNA, 19 nt, Homo sapiens
  misc_RNA (1)...(19): siRNA sense strand
gaaaacaugcugaugaagu

SEQ ID NO: 332981 - RNA, 19 nt, Homo sapiens
  misc_RNA (1)...(19): siRNA sense strand
cgcugacccugaugaaauu

SEQ ID NO: 332982 - RNA, 19 nt, Homo sapiens
  misc_RNA (1)...(19): siRNA sense strand
ggacuugaacuuccucacu

SEQ ID NO: 332983 - RNA, 19 nt, Homo sapiens
  misc_RNA (1)...(19): siRNA sense strand
gcaaacacuggcauugaag

SEQ ID NO: 332984 - RNA, 19 nt, Homo sapiens
  misc_RNA (1)...(19): siRNA sense strand
gaaguaugcccaggugaag

SEQ ID NO: 332985 - RNA, 19 nt, Homo sapiens
  misc_RNA (1)...(19): siRNA sense strand
gaauuaccguuggugacau

SEQ ID NO: 332986 - RNA, 19 nt, Homo sapiens
  misc_RNA (1)...(19): siRNA sense strand
aaccacagauuuuggauuu

SEQ ID NO: 332987 - RNA, 19 nt, Homo sapiens
  misc_RNA (1)...(19): siRNA sense strand
gaaaccacagccacguaug

SEQ ID NO: 332988 - RNA, 19 nt, Homo sapiens
  misc_RNA (1)...(19): siRNA sense strand
guagcagucuggccaacca

SEQ ID NO: 332989 - RNA, 19 nt, Homo sapiens
  misc_RNA (1)...(19): siRNA sense strand
ggagaaaacacugucauga

SEQ ID NO: 332990 - RNA, 19 nt, Homo sapiens
  misc_RNA (1)...(19): siRNA sense strand
acccggagcugcuuacaca

SEQ ID NO: 332991 - RNA, 19 nt, Homo sapiens
  misc_RNA (1)...(19): siRNA sense strand
uaguuaagcucuuuucaga

SEQ ID NO: 332992 - RNA, 19 nt, Homo sapiens
  misc_RNA (1)...(19): siRNA sense strand
ccuaacuucuguugaccuu

SEQ ID NO: 332993 - RNA, 19 nt, Homo sapiens
  misc_RNA (1)...(19): siRNA sense strand
aagccuaaccgaagcauau

SEQ ID NO: 332994 - RNA, 19 nt, Homo sapiens
  misc_RNA (1)...(19): siRNA sense strand
acggcuagguuccugauga

SEQ ID NO: 332995 - RNA, 19 nt, Homo sapiens
  misc_RNA (1)...(19): siRNA sense strand
ugacccugaugaaauuaug

SEQ ID NO: 332996 - RNA, 19 nt, Homo sapiens
  misc_RNA (1)...(19): siRNA sense strand
cuuggaaccuaacuucugu

SEQ ID NO: 332997 - RNA, 19 nt, Homo sapiens
  misc_RNA (1)...(19): siRNA sense strand
ggaaagacuucaaaucaug

SEQ ID NO: 332998 - RNA, 19 nt, Homo sapiens
  misc_RNA (1)...(19): siRNA sense strand
gcaguggucuuccaaauau

SEQ ID NO: 332999 - RNA, 19 nt, Homo sapiens
  misc_RNA (1)...(19): siRNA sense strand
gaaaugcuauggauuacau

SEQ ID NO: 333000 - RNA, 19 nt, Homo sapiens
  misc_RNA (1)...(19): siRNA sense strand
gggcauggcuauucucauu

SEQ ID NO: 333001 - RNA, 19 nt, Homo sapiens
  misc_RNA (1)...(19): siRNA sense strand
gaaccuaacuucuguugac

SEQ ID NO: 333002 - RNA, 19 nt, Homo sapiens
  misc_RNA (1)...(19): siRNA sense strand
gaaccagaaccacagauuu

SEQ ID NO: 333003 - RNA, 19 nt, Homo sapiens
  misc_RNA (1)...(19): siRNA sense strand
caaguaaaccagcguguaa

SEQ ID NO: 333004 - RNA, 19 nt, Homo sapiens
  misc_RNA (1)...(19): siRNA sense strand
caagcugucuuaaggaguu

SEQ ID NO: 333005 - RNA, 19 nt, Homo sapiens
  misc_RNA (1)...(19): siRNA sense strand
ugagguggcugucaggaaa

SEQ ID NO: 333006 - RNA, 19 nt, Homo sapiens
  misc_RNA (1)...(19): siRNA sense strand
gcucagaugcuguugcuuu

SEQ ID NO: 333007 - RNA, 19 nt, Homo sapiens
  misc_RNA (1)...(19): siRNA sense strand
gacuucaaaucaugcaaua

SEQ ID NO: 333008 - RNA, 19 nt, Homo sapiens
  misc_RNA (1)...(19): siRNA sense strand
ggagaccuaucaccggauu

SEQ ID NO: 333009 - RNA, 19 nt, Homo sapiens
  misc_RNA (1)...(19): siRNA sense strand
gcagccagauuaguagaaa

SEQ ID NO: 333010 - RNA, 19 nt, Homo sapiens
  misc_RNA (1)...(19): siRNA sense strand
ugaagaagaugagggaguu

SEQ ID NO: 333011 - RNA, 19 nt, Homo sapiens
  misc_RNA (1)...(19): siRNA sense strand
gcuaagaacuccccacuga

SEQ ID NO: 333012 - RNA, 19 nt, Homo sapiens
  misc_RNA (1)...(19): siRNA sense strand
ugacagagccucagauuac

SEQ ID NO: 333013 - RNA, 19 nt, Homo sapiens
  misc_RNA (1)...(19): siRNA sense strand
ugaaaccgcugaguaacaa

SEQ ID NO: 333014 - RNA, 19 nt, Homo sapiens
  misc_RNA (1)...(19): siRNA sense strand
gagaaaacaugcugaugaa

SEQ ID NO: 333015 - RNA, 19 nt, Homo sapiens
  misc_RNA (1)...(19): siRNA sense strand
guuuaugucugcuguauuc

SEQ ID NO: 333016 - RNA, 19 nt, Homo sapiens
  misc_RNA (1)...(19): siRNA sense strand
ugaagucacugcaguccaa

SEQ ID NO: 333017 - RNA, 19 nt, Homo sapiens
  misc_RNA (1)...(19): siRNA sense strand
caaauuugguuaugaugag

SEQ ID NO: 333018 - RNA, 19 nt, Homo sapiens
  misc_RNA (1)...(19): siRNA sense strand
uaacuucuguugaccuugu

SEQ ID NO: 333019 - RNA, 19 nt, Homo sapiens
  misc_RNA (1)...(19): siRNA sense strand
ugaacgaccugcccaguca

SEQ ID NO: 333020 - RNA, 19 nt, Homo sapiens
  misc_RNA (1)...(19): siRNA sense strand
ugaguaacaagcugacuua

SEQ ID NO: 333021 - RNA, 19 nt, Homo sapiens
  misc_RNA (1)...(19): siRNA sense strand
ggccaaccaugguggauau

SEQ ID NO: 333022 - RNA, 19 nt, Homo sapiens
  misc_RNA (1)...(19): siRNA sense strand
uaucguaccuauucgugaa

SEQ ID NO: 333023 - RNA, 19 nt, Homo sapiens
  misc_RNA (1)...(19): siRNA sense strand
aagcagagguccacgaauc

SEQ ID NO: 333024 - RNA, 19 nt, Homo sapiens
  misc_RNA (1)...(19): siRNA sense strand
ggcaugguguccuauuuga

SEQ ID NO: 333025 - RNA, 19 nt, Homo sapiens
  misc_RNA (1)...(19): siRNA sense strand
ccgcuggacugaaggcuuu

SEQ ID NO: 333026 - RNA, 19 nt, Homo sapiens
  misc_RNA (1)...(19): siRNA sense strand
gacaauggcuaccucaaaa

SEQ ID NO: 333027 - RNA, 19 nt, Homo sapiens
  misc_RNA (1)...(19): siRNA sense strand
gaguuuaugucugcuguau

SEQ ID NO: 333028 - RNA, 19 nt, Homo sapiens
  misc_RNA (1)...(19): siRNA sense strand
cgagagaucgagaacauga

SEQ ID NO: 333029 - RNA, 19 nt, Homo sapiens
  misc_RNA (1)...(19): siRNA sense strand
gccgagagaucgagaacau

SEQ ID NO: 333030 - RNA, 19 nt, Homo sapiens
  misc_RNA (1)...(19): siRNA sense strand
ggaguucauucucaacagu

SEQ ID NO: 333031 - RNA, 19 nt, Homo sapiens
  misc_RNA (1)...(19): siRNA sense strand
gaauguguaugaaaacuug

SEQ ID NO: 333032 - RNA, 19 nt, Homo sapiens
  misc_RNA (1)...(19): siRNA sense strand
caaccaugguggauaucaa

SEQ ID NO: 333033 - RNA, 19 nt, Homo sapiens
  misc_RNA (1)...(19): siRNA sense strand
ccagcaguauaaacucuuu

SEQ ID NO: 333034 - RNA, 19 nt, Homo sapiens
  misc_RNA (1)...(19): siRNA sense strand
cugaugaaauuaugugguu

SEQ ID NO: 333035 - RNA, 19 nt, Homo sapiens
  misc_RNA (1)...(19): siRNA sense strand
cauaagccuuugccaggaa

SEQ ID NO: 333036 - RNA, 19 nt, Homo sapiens
  misc_RNA (1)...(19): siRNA sense strand
acugugaccuccauuaaau

SEQ ID NO: 333037 - RNA, 19 nt, Homo sapiens
  misc_RNA (1)...(19): siRNA sense strand
ggaaaccacagccacguau

SEQ ID NO: 333038 - RNA, 19 nt, Homo sapiens
  misc_RNA (1)...(19): siRNA sense strand
aaaacaugcugaugaagua

SEQ ID NO: 333039 - RNA, 19 nt, Homo sapiens
  misc_RNA (1)...(19): siRNA sense strand
gagcaagugaggcacauug

SEQ ID NO: 333040 - RNA, 19 nt, Homo sapiens
  misc_RNA (1)...(19): siRNA sense strand
uugcccagcucaucacuaa

SEQ ID NO: 333041 - RNA, 19 nt, Homo sapiens
  misc_RNA (1)...(19): siRNA sense strand
caaagcagagguccacgaa

SEQ ID NO: 333042 - RNA, 19 nt, Homo sapiens
  misc_RNA (1)...(19): siRNA sense strand
uaaaccagcguguaaagga

SEQ ID NO: 333043 - RNA, 19 nt, Homo sapiens
  misc_RNA (1)...(19): siRNA sense strand
ggaauuaccguuggugaca

SEQ ID NO: 333044 - RNA, 19 nt, Homo sapiens
  misc_RNA (1)...(19): siRNA sense strand
gcuaugaugggaaugugua

SEQ ID NO: 333045 - RNA, 19 nt, Homo sapiens
  misc_RNA (1)...(19): siRNA sense strand
caagauaaagccauucaag

SEQ ID NO: 333046 - RNA, 19 nt, Homo sapiens
  misc_RNA (1)...(19): siRNA sense strand
ugcaaacacuggcauugaa

SEQ ID NO: 333047 - RNA, 19 nt, Homo sapiens
  misc_RNA (1)...(19): siRNA sense strand
ucuaaggcgugcaccauug

SEQ ID NO: 333048 - RNA, 19 nt, Homo sapiens
  misc_RNA (1)...(19): siRNA sense strand
uggaaagacuucaaaucau

SEQ ID NO: 333049 - RNA, 19 nt, Homo sapiens
  misc_RNA (1)...(19): siRNA sense strand
cagagguccacgaaucuua

SEQ ID NO: 333050 - RNA, 19 nt, Homo sapiens
  misc_RNA (1)...(19): siRNA sense strand
cauucaagcugucuuaagg

SEQ ID NO: 333051 - RNA, 19 nt, Homo sapiens
  misc_RNA (1)...(19): siRNA sense strand
gccuaugccuuccaguuug

SEQ ID NO: 333052 - RNA, 19 nt, Homo sapiens
  misc_RNA (1)...(19): siRNA sense strand
ggggaaaugcuauggauua

SEQ ID NO: 333053 - RNA, 19 nt, Homo sapiens
  misc_RNA (1)...(19): siRNA sense strand
cgugaaaucgggacccaua

SEQ ID NO: 333054 - RNA, 19 nt, Homo sapiens
  misc_RNA (1)...(19): siRNA sense strand
gaugggaauguguaugaaa

SEQ ID NO: 333055 - RNA, 19 nt, Homo sapiens
  misc_RNA (1)...(19): siRNA sense strand
guggcaugguguccuauuu

SEQ ID NO: 333056 - RNA, 19 nt, Homo sapiens
  misc_RNA (1)...(19): siRNA sense strand
cuacugugaccuccauuaa

SEQ ID NO: 333057 - RNA, 19 nt, Homo sapiens
  misc_RNA (1)...(19): siRNA sense strand
gacagagccucagauuaca

SEQ ID NO: 333058 - RNA, 19 nt, Homo sapiens
  misc_RNA (1)...(19): siRNA sense strand
agacaauggcuaccucaaa

SEQ ID NO: 333059 - RNA, 19 nt, Homo sapiens
  misc_RNA (1)...(19): siRNA sense strand
uggauuacaugccuuuauc

SEQ ID NO: 333060 - RNA, 19 nt, Homo sapiens
  misc_RNA (1)...(19): siRNA sense strand
caucguauucccagagaaa

SEQ ID NO: 333061 - RNA, 19 nt, Homo sapiens
  misc_RNA (1)...(19): siRNA sense strand
ucgagaacaugauccugaa

SEQ ID NO: 333062 - RNA, 19 nt, Homo sapiens
  misc_RNA (1)...(19): siRNA sense strand
gaucaggugcacucaggaa

SEQ ID NO: 333063 - RNA, 19 nt, Homo sapiens
  misc_RNA (1)...(19): siRNA sense strand
agaaaacacugucaugaug

SEQ ID NO: 333064 - RNA, 19 nt, Homo sapiens
  misc_RNA (1)...(19): siRNA sense strand
gcaccauugccauccgaua

SEQ ID NO: 333065 - RNA, 19 nt, Homo sapiens
  misc_RNA (1)...(19): siRNA sense strand
gggaaaugcuauggauuac

SEQ ID NO: 333066 - RNA, 19 nt, Homo sapiens
  misc_RNA (1)...(19): siRNA sense strand
gugcuuggccgcuaugaug

SEQ ID NO: 333067 - RNA, 19 nt, Homo sapiens
  misc_RNA (1)...(19): siRNA sense strand
ccucaccgcuggacugaag

SEQ ID NO: 333068 - RNA, 19 nt, Homo sapiens
  misc_RNA (1)...(19): siRNA sense strand
uaacgaaggcauuggucaa

SEQ ID NO: 333069 - RNA, 19 nt, Homo sapiens
  misc_RNA (1)...(19): siRNA sense strand
aaaccacagccacguauga

SEQ ID NO: 333070 - RNA, 19 nt, Homo sapiens
  misc_RNA (1)...(19): siRNA sense strand
uggcaucgcugacccugau

SEQ ID NO: 333071 - RNA, 19 nt, Homo sapiens
  misc_RNA (1)...(19): siRNA sense strand
gcauggcuauucucauugc

SEQ ID NO: 333072 - RNA, 19 nt, Homo sapiens
  misc_RNA (1)...(19): siRNA sense strand
uuucaaacccagcaguaua

SEQ ID NO: 333073 - RNA, 19 nt, Homo sapiens
  misc_RNA (1)...(19): siRNA sense strand
gaagccugauggcacauac

SEQ ID NO: 333074 - RNA, 19 nt, Homo sapiens
  misc_RNA (1)...(19): siRNA sense strand
acaagcaccugaagucacu

SEQ ID NO: 333075 - RNA, 19 nt, Homo sapiens
  misc_RNA (1)...(19): siRNA sense strand
gaagaagaugagggaguuu

SEQ ID NO: 333076 - RNA, 19 nt, Homo sapiens
  misc_RNA (1)...(19): siRNA sense strand
cggcuagguuccugaugaa

SEQ ID NO: 333077 - RNA, 19 nt, Homo sapiens
  misc_RNA (1)...(19): siRNA sense strand
uuggaaagacuucaaauca

SEQ ID NO: 333078 - RNA, 19 nt, Homo sapiens
  misc_RNA (1)...(19): siRNA sense strand
caugacagagccucagauu

SEQ ID NO: 333079 - RNA, 19 nt, Homo sapiens
  misc_RNA (1)...(19): siRNA sense strand
ugaaguaugcccaggugaa

SEQ ID NO: 333080 - RNA, 19 nt, Homo sapiens
  misc_RNA (1)...(19): siRNA sense strand
gaaaacaugcugaugaagu

SEQ ID NO: 333081 - RNA, 19 nt, Homo sapiens
  misc_RNA (1)...(19): siRNA sense strand
cgcugacccugaugaaauu

SEQ ID NO: 333082 - RNA, 19 nt, Homo sapiens
  misc_RNA (1)...(19): siRNA sense strand
ggacuugaacuuccucacu

SEQ ID NO: 333083 - RNA, 19 nt, Homo sapiens
  misc_RNA (1)...(19): siRNA sense strand
gcaaacacuggcauugaag

SEQ ID NO: 333084 - RNA, 19 nt, Homo sapiens
  misc_RNA (1)...(19): siRNA sense strand
gaaguaugcccaggugaag

SEQ ID NO: 333085 - RNA, 19 nt, Homo sapiens
  misc_RNA (1)...(19): siRNA sense strand
gaauuaccguuggugacau

SEQ ID NO: 333086 - RNA, 19 nt, Homo sapiens
  misc_RNA (1)...(19): siRNA sense strand
aaccacagauuuuggauuu

SEQ ID NO: 333087 - RNA, 19 nt, Homo sapiens
  misc_RNA (1)...(19): siRNA sense strand
gaaaccacagccacguaug

SEQ ID NO: 333088 - RNA, 19 nt, Homo sapiens
  misc_RNA (1)...(19): siRNA sense strand
guagcagucuggccaacca

SEQ ID NO: 333089 - RNA, 19 nt, Homo sapiens
  misc_RNA (1)...(19): siRNA sense strand
ggagaaaacacugucauga

SEQ ID NO: 333090 - RNA, 19 nt, Homo sapiens
  misc_RNA (1)...(19): siRNA sense strand
acccggagcugcuuacaca

SEQ ID NO: 333091 - RNA, 19 nt, Homo sapiens
  misc_RNA (1)...(19): siRNA sense strand
uaguuaagcucuuuucaga

SEQ ID NO: 333092 - RNA, 19 nt, Homo sapiens
  misc_RNA (1)...(19): siRNA sense strand
ccuaacuucuguugaccuu

SEQ ID NO: 333093 - RNA, 19 nt, Homo sapiens
  misc_RNA (1)...(19): siRNA sense strand
aagccuaaccgaagcauau

SEQ ID NO: 333094 - RNA, 19 nt, Homo sapiens
  misc_RNA (1)...(19): siRNA sense strand
acggcuagguuccugauga

SEQ ID NO: 333095 - RNA, 19 nt, Homo sapiens
  misc_RNA (1)...(19): siRNA sense strand
ugacccugaugaaauuaug

SEQ ID NO: 333096 - RNA, 19 nt, Homo sapiens
  misc_RNA (1)...(19): siRNA sense strand
cuuggaaccuaacuucugu

SEQ ID NO: 333097 - RNA, 19 nt, Homo sapiens
  misc_RNA (1)...(19): siRNA sense strand
gaacugcacuucuccaaca

SEQ ID NO: 333098 - RNA, 19 nt, Homo sapiens
  misc_RNA (1)...(19): siRNA sense strand
gcaaggagaucgacuuucg

SEQ ID NO: 333099 - RNA, 19 nt, Homo sapiens
  misc_RNA (1)...(19): siRNA sense strand
gaggaagggcugcugcuua

SEQ ID NO: 333100 - RNA, 19 nt, Homo sapiens
  misc_RNA (1)...(19): siRNA sense strand
ggaggaugcuggagaguag

SEQ ID NO: 333101 - RNA, 19 nt, Homo sapiens
  misc_RNA (1)...(19): siRNA sense strand
gcaagggcaaguacaugua

SEQ ID NO: 333102 - RNA, 19 nt, Homo sapiens
  misc_RNA (1)...(19): siRNA sense strand
ucaaggaacugcacuucuc

SEQ ID NO: 333103 - RNA, 19 nt, Homo sapiens
  misc_RNA (1)...(19): siRNA sense strand
gagaguagcggcugcaaag

SEQ ID NO: 333104 - RNA, 19 nt, Homo sapiens
  misc_RNA (1)...(19): siRNA sense strand
aggaagggcugcugcuuau

SEQ ID NO: 333105 - RNA, 19 nt, Homo sapiens
  misc_RNA (1)...(19): siRNA sense strand
ugaagaccguggacugugu

SEQ ID NO: 333106 - RNA, 19 nt, Homo sapiens
  misc_RNA (1)...(19): siRNA sense strand
gggcaaggagaucgacuuu

SEQ ID NO: 333107 - RNA, 19 nt, Homo sapiens
  misc_RNA (1)...(19): siRNA sense strand
ggccagugcccuucaguga

SEQ ID NO: 333108 - RNA, 19 nt, Homo sapiens
  misc_RNA (1)...(19): siRNA sense strand
ucagugagcgcucgcaaga

SEQ ID NO: 333109 - RNA, 19 nt, Homo sapiens
  misc_RNA (1)...(19): siRNA sense strand
gggaggaugcuggagagua

SEQ ID NO: 333110 - RNA, 19 nt, Homo sapiens
  misc_RNA (1)...(19): siRNA sense strand
ggagaguagcggcugcaaa

SEQ ID NO: 333111 - RNA, 19 nt, Homo sapiens
  misc_RNA (1)...(19): siRNA sense strand
cugcacuucuccaacauga

SEQ ID NO: 333112 - RNA, 19 nt, Homo sapiens
  misc_RNA (1)...(19): siRNA sense strand
gaagggcugcugcuuaucc

SEQ ID NO: 333113 - RNA, 19 nt, Homo sapiens
  misc_RNA (1)...(19): siRNA sense strand
uguugcagcucuggaagaa

SEQ ID NO: 333114 - RNA, 19 nt, Homo sapiens
  misc_RNA (1)...(19): siRNA sense strand
gcucaaggaacugcacuuc

SEQ ID NO: 333115 - RNA, 19 nt, Homo sapiens
  misc_RNA (1)...(19): siRNA sense strand
ccacauccacacucucauc

SEQ ID NO: 333116 - RNA, 19 nt, Homo sapiens
  misc_RNA (1)...(19): siRNA sense strand
gauggugcaguacaagaau

SEQ ID NO: 333117 - RNA, 19 nt, Homo sapiens
  misc_RNA (1)...(19): siRNA sense strand
ucaaauccacgcggcagaa

SEQ ID NO: 333118 - RNA, 19 nt, Homo sapiens
  misc_RNA (1)...(19): siRNA sense strand
gcugcaaagcgcugaagga

SEQ ID NO: 333119 - RNA, 19 nt, Homo sapiens
  misc_RNA (1)...(19): siRNA sense strand
gcgcaagggcaaguacaug

SEQ ID NO: 333120 - RNA, 19 nt, Homo sapiens
  misc_RNA (1)...(19): siRNA sense strand
cgagaucacgcugcagaug

SEQ ID NO: 333121 - RNA, 19 nt, Homo sapiens
  misc_RNA (1)...(19): siRNA sense strand
gcaauaaugucacugagua

SEQ ID NO: 333122 - RNA, 19 nt, Homo sapiens
  misc_RNA (1)...(19): siRNA sense strand
gaagauggccucaauaaga

SEQ ID NO: 333123 - RNA, 19 nt, Homo sapiens
  misc_RNA (1)...(19): siRNA sense strand
gaagagaauuuacaugugu

SEQ ID NO: 333124 - RNA, 19 nt, Homo sapiens
  misc_RNA (1)...(19): siRNA sense strand
gaaagcaccaggcaaauaa

SEQ ID NO: 333125 - RNA, 19 nt, Homo sapiens
  misc_RNA (1)...(19): siRNA sense strand
gaagacauguuauccaaau

SEQ ID NO: 333126 - RNA, 19 nt, Homo sapiens
  misc_RNA (1)...(19): siRNA sense strand
gacauugagucuaaaguua

SEQ ID NO: 333127 - RNA, 19 nt, Homo sapiens
  misc_RNA (1)...(19): siRNA sense strand
gaagcauucuguauuauga

SEQ ID NO: 333128 - RNA, 19 nt, Homo sapiens
  misc_RNA (1)...(19): siRNA sense strand
ccaaagaacugacuaccaa

SEQ ID NO: 333129 - RNA, 19 nt, Homo sapiens
  misc_RNA (1)...(19): siRNA sense strand
gaaguucucuuuccaaugg

SEQ ID NO: 333130 - RNA, 19 nt, Homo sapiens
  misc_RNA (1)...(19): siRNA sense strand
gaacaagcaacuucucuaa

SEQ ID NO: 333131 - RNA, 19 nt, Homo sapiens
  misc_RNA (1)...(19): siRNA sense strand
agacacaacuuacuuagaa

SEQ ID NO: 333132 - RNA, 19 nt, Homo sapiens
  misc_RNA (1)...(19): siRNA sense strand
gaauuggugugcuuaugua

SEQ ID NO: 333133 - RNA, 19 nt, Homo sapiens
  misc_RNA (1)...(19): siRNA sense strand
ggaaagaauuggugugcuu

SEQ ID NO: 333134 - RNA, 19 nt, Homo sapiens
  misc_RNA (1)...(19): siRNA sense strand
gaugggaacucucagaaga

SEQ ID NO: 333135 - RNA, 19 nt, Homo sapiens
  misc_RNA (1)...(19): siRNA sense strand
ucagaaaggucuaacagaa

SEQ ID NO: 333136 - RNA, 19 nt, Homo sapiens
  misc_RNA (1)...(19): siRNA sense strand
caagauaacuaugcccuaa

SEQ ID NO: 333137 - RNA, 19 nt, Homo sapiens
  misc_RNA (1)...(19): siRNA sense strand
ggacacagaagagaauuua

SEQ ID NO: 333138 - RNA, 19 nt, Homo sapiens
  misc_RNA (1)...(19): siRNA sense strand
gauaagagacauaguaaga

SEQ ID NO: 333139 - RNA, 19 nt, Homo sapiens
  misc_RNA (1)...(19): siRNA sense strand
gguccuauccuguuuaaua

SEQ ID NO: 333140 - RNA, 19 nt, Homo sapiens
  misc_RNA (1)...(19): siRNA sense strand
gaacuaaggaaucacauug

SEQ ID NO: 333141 - RNA, 19 nt, Homo sapiens
  misc_RNA (1)...(19): siRNA sense strand
caaugaauaugccuuagaa

SEQ ID NO: 333142 - RNA, 19 nt, Homo sapiens
  misc_RNA (1)...(19): siRNA sense strand
uagacaagcuugcauuuga

SEQ ID NO: 333143 - RNA, 19 nt, Homo sapiens
  misc_RNA (1)...(19): siRNA sense strand
gacagacaaugacauauga

SEQ ID NO: 333144 - RNA, 19 nt, Homo sapiens
  misc_RNA (1)...(19): siRNA sense strand
gaauaugccuuagaaaugg

SEQ ID NO: 333145 - RNA, 19 nt, Homo sapiens
  misc_RNA (1)...(19): siRNA sense strand
ggugacaacugcacuauca

SEQ ID NO: 333146 - RNA, 19 nt, Homo sapiens
  misc_RNA (1)...(19): siRNA sense strand
agaaaugacucuuacaugu

SEQ ID NO: 333147 - RNA, 19 nt, Homo sapiens
  misc_RNA (1)...(19): siRNA sense strand
gaacaggaacacucaagaa

SEQ ID NO: 333148 - RNA, 19 nt, Homo sapiens
  misc_RNA (1)...(19): siRNA sense strand
gggccgaaaugucaacuaa

SEQ ID NO: 333149 - RNA, 19 nt, Homo sapiens
  misc_RNA (1)...(19): siRNA sense strand
agaaaggucuaacagaauu

SEQ ID NO: 333150 - RNA, 19 nt, Homo sapiens
  misc_RNA (1)...(19): siRNA sense strand
uaagagacauaguaagaga

SEQ ID NO: 333151 - RNA, 19 nt, Homo sapiens
  misc_RNA (1)...(19): siRNA sense strand
ccucagagaucucagaaga

SEQ ID NO: 333152 - RNA, 19 nt, Homo sapiens
  misc_RNA (1)...(19): siRNA sense strand
gaacaauuccagccaaguu

SEQ ID NO: 333153 - RNA, 19 nt, Homo sapiens
  misc_RNA (1)...(19): siRNA sense strand
auagugagauccaucauaa

SEQ ID NO: 333154 - RNA, 19 nt, Homo sapiens
  misc_RNA (1)...(19): siRNA sense strand
ugagaagccuauuaaagaa

SEQ ID NO: 333155 - RNA, 19 nt, Homo sapiens
  misc_RNA (1)...(19): siRNA sense strand
gugagaagccuauuaaaga

SEQ ID NO: 333156 - RNA, 19 nt, Homo sapiens
  misc_RNA (1)...(19): siRNA sense strand
gcaaugaaacugacucuuc

SEQ ID NO: 333157 - RNA, 19 nt, Homo sapiens
  misc_RNA (1)...(19): siRNA sense strand
gaaguaaagcagacucauu

SEQ ID NO: 333158 - RNA, 19 nt, Homo sapiens
  misc_RNA (1)...(19): siRNA sense strand
gaaagaauuggugugcuua

SEQ ID NO: 333159 - RNA, 19 nt, Homo sapiens
  misc_RNA (1)...(19): siRNA sense strand
uaacaaaacucuccacgaa

SEQ ID NO: 333160 - RNA, 19 nt, Homo sapiens
  misc_RNA (1)...(19): siRNA sense strand
cccagacgcucauaccuua

SEQ ID NO: 333161 - RNA, 19 nt, Homo sapiens
  misc_RNA (1)...(19): siRNA sense strand
caagaaagcaagauuaaca

SEQ ID NO: 333162 - RNA, 19 nt, Homo sapiens
  misc_RNA (1)...(19): siRNA sense strand
gagaaucggcccacuuuga

SEQ ID NO: 333163 - RNA, 19 nt, Homo sapiens
  misc_RNA (1)...(19): siRNA sense strand
gccgaaaugucaacuaaga

SEQ ID NO: 333164 - RNA, 19 nt, Homo sapiens
  misc_RNA (1)...(19): siRNA sense strand
ucuauaggaugcaacauaa

SEQ ID NO: 333165 - RNA, 19 nt, Homo sapiens
  misc_RNA (1)...(19): siRNA sense strand
gaacuaccaggcaaugaaa

SEQ ID NO: 333166 - RNA, 19 nt, Homo sapiens
  misc_RNA (1)...(19): siRNA sense strand
caacuucucuaaacacagu

SEQ ID NO: 333167 - RNA, 19 nt, Homo sapiens
  misc_RNA (1)...(19): siRNA sense strand
caacugcacuaucaagcuu

SEQ ID NO: 333168 - RNA, 19 nt, Homo sapiens
  misc_RNA (1)...(19): siRNA sense strand
aaacacggacaacauaaua

SEQ ID NO: 333169 - RNA, 19 nt, Homo sapiens
  misc_RNA (1)...(19): siRNA sense strand
ucacaaugcuucuacaagu

SEQ ID NO: 333170 - RNA, 19 nt, Homo sapiens
  misc_RNA (1)...(19): siRNA sense strand
ugagauccaucauaaaugu

SEQ ID NO: 333171 - RNA, 19 nt, Homo sapiens
  misc_RNA (1)...(19): siRNA sense strand
aaaggaagcaauagugaua

SEQ ID NO: 333172 - RNA, 19 nt, Homo sapiens
  misc_RNA (1)...(19): siRNA sense strand
aaaugacucuuacauguga

SEQ ID NO: 333173 - RNA, 19 nt, Homo sapiens
  misc_RNA (1)...(19): siRNA sense strand
cagaaggaguggucaaguu

SEQ ID NO: 333174 - RNA, 19 nt, Homo sapiens
  misc_RNA (1)...(19): siRNA sense strand
guccuauccuguuuaauaa

SEQ ID NO: 333175 - RNA, 19 nt, Homo sapiens
  misc_RNA (1)...(19): siRNA sense strand
agaaagacguaucaaugaa

SEQ ID NO: 333176 - RNA, 19 nt, Homo sapiens
  misc_RNA (1)...(19): siRNA sense strand
gcagggagcaucacucaga

SEQ ID NO: 333177 - RNA, 19 nt, Homo sapiens
  misc_RNA (1)...(19): siRNA sense strand
gugaagacauguuauccaa

SEQ ID NO: 333178 - RNA, 19 nt, Homo sapiens
  misc_RNA (1)...(19): siRNA sense strand
ggaaguacaugagcagcuu

SEQ ID NO: 333179 - RNA, 19 nt, Homo sapiens
  misc_RNA (1)...(19): siRNA sense strand
aaagcagacucauuuagaa

SEQ ID NO: 333180 - RNA, 19 nt, Homo sapiens
  misc_RNA (1)...(19): siRNA sense strand
gaaaugacucuuacaugug

SEQ ID NO: 333181 - RNA, 19 nt, Homo sapiens
  misc_RNA (1)...(19): siRNA sense strand
gauauccaauccugucuau

SEQ ID NO: 333182 - RNA, 19 nt, Homo sapiens
  misc_RNA (1)...(19): siRNA sense strand
gaaauuucuucagagcuuu

SEQ ID NO: 333183 - RNA, 19 nt, Homo sapiens
  misc_RNA (1)...(19): siRNA sense strand
gaaaucaaacucucacauc

SEQ ID NO: 333184 - RNA, 19 nt, Homo sapiens
  misc_RNA (1)...(19): siRNA sense strand
aaacauucccugccagaua

SEQ ID NO: 333185 - RNA, 19 nt, Homo sapiens
  misc_RNA (1)...(19): siRNA sense strand
cgaaacaacuagaggaaag

SEQ ID NO: 333186 - RNA, 19 nt, Homo sapiens
  misc_RNA (1)...(19): siRNA sense strand
ucaaugacaaucagagaua

SEQ ID NO: 333187 - RNA, 19 nt, Homo sapiens
  misc_RNA (1)...(19): siRNA sense strand
gaauagacaagcuugcauu

SEQ ID NO: 333188 - RNA, 19 nt, Homo sapiens
  misc_RNA (1)...(19): siRNA sense strand
aaaccaacgguaaaucuua

SEQ ID NO: 333189 - RNA, 19 nt, Homo sapiens
  misc_RNA (1)...(19): siRNA sense strand
caaauguugucaagucuca

SEQ ID NO: 333190 - RNA, 19 nt, Homo sapiens
  misc_RNA (1)...(19): siRNA sense strand
gaucgaucguugccuggua

SEQ ID NO: 333191 - RNA, 19 nt, Homo sapiens
  misc_RNA (1)...(19): siRNA sense strand
gaauguaaggcaagaaaug

SEQ ID NO: 333192 - RNA, 19 nt, Homo sapiens
  misc_RNA (1)...(19): siRNA sense strand
aaacuacucuuaacuacca

SEQ ID NO: 333193 - RNA, 19 nt, Homo sapiens
  misc_RNA (1)...(19): siRNA sense strand
gagaugagaaacuaaauca

SEQ ID NO: 333194 - RNA, 19 nt, Homo sapiens
  misc_RNA (1)...(19): siRNA sense strand
gaaagacguaucaaugaau

SEQ ID NO: 333195 - RNA, 19 nt, Homo sapiens
  misc_RNA (1)...(19): siRNA sense strand
gcauugggcuuaacaacag

SEQ ID NO: 333196 - RNA, 19 nt, Homo sapiens
  misc_RNA (1)...(19): siRNA sense strand
ugacugaucaggugaacua

SEQ ID NO: 333197 - RNA, 19 nt, Homo sapiens
  misc_RNA (1)...(19): siRNA sense strand
ucucagaggugaaugugaa

SEQ ID NO: 333198 - RNA, 19 nt, Homo sapiens
  misc_RNA (1)...(19): siRNA sense strand
cgaaagcaccaggcaaaua

SEQ ID NO: 333199 - RNA, 19 nt, Homo sapiens
  misc_RNA (1)...(19): siRNA sense strand
caaugaaacugacucuucu

SEQ ID NO: 333200 - RNA, 19 nt, Homo sapiens
  misc_RNA (1)...(19): siRNA sense strand
ugacauuuauuccucaguu

SEQ ID NO: 333201 - RNA, 19 nt, Homo sapiens
  misc_RNA (1)...(19): siRNA sense strand
uagaaagacguaucaauga

SEQ ID NO: 333202 - RNA, 19 nt, Homo sapiens
  misc_RNA (1)...(19): siRNA sense strand
agaaggaguggucaaguua

SEQ ID NO: 333203 - RNA, 19 nt, Homo sapiens
  misc_RNA (1)...(19): siRNA sense strand
caagcugcccuaucuaauu

SEQ ID NO: 333204 - RNA, 19 nt, Homo sapiens
  misc_RNA (1)...(19): siRNA sense strand
gaauuuguggaaccaauaa

SEQ ID NO: 333205 - RNA, 19 nt, Homo sapiens
  misc_RNA (1)...(19): siRNA sense strand
ugaauaugccuuagaaaug

SEQ ID NO: 333206 - RNA, 19 nt, Homo sapiens
  misc_RNA (1)...(19): siRNA sense strand
ugagugagcaacuaaauga

SEQ ID NO: 333207 - RNA, 19 nt, Homo sapiens
  misc_RNA (1)...(19): siRNA sense strand
caaaugaacaagcaacuuc

SEQ ID NO: 333208 - RNA, 19 nt, Homo sapiens
  misc_RNA (1)...(19): siRNA sense strand
cuucagagcuuugccagaa

SEQ ID NO: 333209 - RNA, 19 nt, Homo sapiens
  misc_RNA (1)...(19): siRNA sense strand
cccaagaacuggaaaauuu

SEQ ID NO: 333210 - RNA, 19 nt, Homo sapiens
  misc_RNA (1)...(19): siRNA sense strand
gauauucaacuucuucaga

SEQ ID NO: 333211 - RNA, 19 nt, Homo sapiens
  misc_RNA (1)...(19): siRNA sense strand
ucagacagacaaugacaua

SEQ ID NO: 333212 - RNA, 19 nt, Homo sapiens
  misc_RNA (1)...(19): siRNA sense strand
guuaaugaaucugugguuu

SEQ ID NO: 333213 - RNA, 19 nt, Homo sapiens
  misc_RNA (1)...(19): siRNA sense strand
uuuaucaacugaacaggua

SEQ ID NO: 333214 - RNA, 19 nt, Homo sapiens
  misc_RNA (1)...(19): siRNA sense strand
cuaucaagcuuguggaaga

SEQ ID NO: 333215 - RNA, 19 nt, Homo sapiens
  misc_RNA (1)...(19): siRNA sense strand
gaaacacggacaacauaau

SEQ ID NO: 333216 - RNA, 19 nt, Homo sapiens
  misc_RNA (1)...(19): siRNA sense strand
gaaaccaacgguaaaucuu

SEQ ID NO: 333217 - RNA, 19 nt, Homo sapiens
  misc_RNA (1)...(19): siRNA sense strand
gaugagaaacuaaaucagu

SEQ ID NO: 333218 - RNA, 19 nt, Homo sapiens
  misc_RNA (1)...(19): siRNA sense strand
gaagcaauagugauaagga

SEQ ID NO: 333219 - RNA, 19 nt, Homo sapiens
  misc_RNA (1)...(19): siRNA sense strand
gacaaugacauaugaacaa

SEQ ID NO: 333220 - RNA, 19 nt, Homo sapiens
  misc_RNA (1)...(19): siRNA sense strand
cagaagagaauuuacaugu

SEQ ID NO: 333221 - RNA, 19 nt, Homo sapiens
  misc_RNA (1)...(19): siRNA sense strand
ggaauccguuucauuauua

SEQ ID NO: 333222 - RNA, 19 nt, Homo sapiens
  misc_RNA (1)...(19): siRNA sense strand
gcaaagaggaccaggauuu

SEQ ID NO: 333223 - RNA, 19 nt, Homo sapiens
  misc_RNA (1)...(19): siRNA sense strand
gcaaagauguccaguaguc

SEQ ID NO: 333224 - RNA, 19 nt, Homo sapiens
  misc_RNA (1)...(19): siRNA sense strand
caaauucccuugaccgaaa

SEQ ID NO: 333225 - RNA, 19 nt, Homo sapiens
  misc_RNA (1)...(19): siRNA sense strand
cgacacagcugggagauga

SEQ ID NO: 333226 - RNA, 19 nt, Homo sapiens
  misc_RNA (1)...(19): siRNA sense strand
gggaauccguuucauuauu

SEQ ID NO: 333227 - RNA, 19 nt, Homo sapiens
  misc_RNA (1)...(19): siRNA sense strand
caaccaagaaguucaaauu

SEQ ID NO: 333228 - RNA, 19 nt, Homo sapiens
  misc_RNA (1)...(19): siRNA sense strand
caaagaggaccaggauuua

SEQ ID NO: 333229 - RNA, 19 nt, Homo sapiens
  misc_RNA (1)...(19): siRNA sense strand
aagcaaagauguccaguag

SEQ ID NO: 333230 - RNA, 19 nt, Homo sapiens
  misc_RNA (1)...(19): siRNA sense strand
uuaaacuggugaagucaua

SEQ ID NO: 333231 - RNA, 19 nt, Homo sapiens
  misc_RNA (1)...(19): siRNA sense strand
gcugggagaugagugaauu

SEQ ID NO: 333232 - RNA, 19 nt, Homo sapiens
  misc_RNA (1)...(19): siRNA sense strand
gaaaguauacagcaaagag

SEQ ID NO: 333233 - RNA, 19 nt, Homo sapiens
  misc_RNA (1)...(19): siRNA sense strand
ggagugcuguauuccuaaa

SEQ ID NO: 333234 - RNA, 19 nt, Homo sapiens
  misc_RNA (1)...(19): siRNA sense strand
gggagacugugcacucuau

SEQ ID NO: 333235 - RNA, 19 nt, Homo sapiens
  misc_RNA (1)...(19): siRNA sense strand
uaacuuggaucugaagaag

SEQ ID NO: 333236 - RNA, 19 nt, Homo sapiens
  misc_RNA (1)...(19): siRNA sense strand
gagcuuuaaaggcuauaua

SEQ ID NO: 333237 - RNA, 19 nt, Homo sapiens
  misc_RNA (1)...(19): siRNA sense strand
gaucugaagaagagugauu

SEQ ID NO: 333238 - RNA, 19 nt, Homo sapiens
  misc_RNA (1)...(19): siRNA sense strand
uaguacacauuccaacaaa

SEQ ID NO: 333239 - RNA, 19 nt, Homo sapiens
  misc_RNA (1)...(19): siRNA sense strand
gaggaccaggauuuacuua

SEQ ID NO: 333240 - RNA, 19 nt, Homo sapiens
  misc_RNA (1)...(19): siRNA sense strand
cuggugaagucauaucauu

SEQ ID NO: 333241 - RNA, 19 nt, Homo sapiens
  misc_RNA (1)...(19): siRNA sense strand
ccagccuucugaaaguaua

SEQ ID NO: 333242 - RNA, 19 nt, Homo sapiens
  misc_RNA (1)...(19): siRNA sense strand
ggacuaguacacauuccaa

SEQ ID NO: 333243 - RNA, 19 nt, Homo sapiens
  misc_RNA (1)...(19): siRNA sense strand
augggaauccguuucauua

SEQ ID NO: 333244 - RNA, 19 nt, Homo sapiens
  misc_RNA (1)...(19): siRNA sense strand
ggaugggacuaguacacau

SEQ ID NO: 333245 - RNA, 19 nt, Homo sapiens
  misc_RNA (1)...(19): siRNA sense strand
cacccaaccuacuaacaau

SEQ ID NO: 333246 - RNA, 19 nt, Homo sapiens
  misc_RNA (1)...(19): siRNA sense strand
gaugggacuaguacacauu

SEQ ID NO: 333247 - RNA, 19 nt, Homo sapiens
  misc_RNA (1)...(19): siRNA sense strand
gaaaacuguucaacuccaa

SEQ ID NO: 333248 - RNA, 19 nt, Homo sapiens
  misc_RNA (1)...(19): siRNA sense strand
cucuaugccucgagcuuua

SEQ ID NO: 333249 - RNA, 19 nt, Homo sapiens
  misc_RNA (1)...(19): siRNA sense strand
ucacccaaccuacuaacaa

SEQ ID NO: 333250 - RNA, 19 nt, Homo sapiens
  misc_RNA (1)...(19): siRNA sense strand
caaaaugccagccuucuga

SEQ ID NO: 333251 - RNA, 19 nt, Homo sapiens
  misc_RNA (1)...(19): siRNA sense strand
cccaaccuacuaacaauaa

SEQ ID NO: 333252 - RNA, 19 nt, Homo sapiens
  misc_RNA (1)...(19): siRNA sense strand
cagcaaagaggaccaggau

SEQ ID NO: 333253 - RNA, 19 nt, Homo sapiens
  misc_RNA (1)...(19): siRNA sense strand
aaagcaaagauguccagua

SEQ ID NO: 333254 - RNA, 19 nt, Homo sapiens
  misc_RNA (1)...(19): siRNA sense strand
gcaauauggagugcuguau

SEQ ID NO: 333255 - RNA, 19 nt, Homo sapiens
  misc_RNA (1)...(19): siRNA sense strand
gcaugcaaaggacugugua

SEQ ID NO: 333256 - RNA, 19 nt, Homo sapiens
  misc_RNA (1)...(19): siRNA sense strand
caugggaauccguuucauu

SEQ ID NO: 333257 - RNA, 19 nt, Homo sapiens
  misc_RNA (1)...(19): siRNA sense strand
ccaaccuacuaacaauaau

SEQ ID NO: 333258 - RNA, 19 nt, Homo sapiens
  misc_RNA (1)...(19): siRNA sense strand
ggugaagucauaucauugg

SEQ ID NO: 333259 - RNA, 19 nt, Homo sapiens
  misc_RNA (1)...(19): siRNA sense strand
auggagugcuguauuccua

SEQ ID NO: 333260 - RNA, 19 nt, Homo sapiens
  misc_RNA (1)...(19): siRNA sense strand
gugaagucauaucauugga

SEQ ID NO: 333261 - RNA, 19 nt, Homo sapiens
  misc_RNA (1)...(19): siRNA sense strand
gcuuuaaaggcuauauaga

SEQ ID NO: 333262 - RNA, 19 nt, Homo sapiens
  misc_RNA (1)...(19): siRNA sense strand
aaagauguccaguagucaa

SEQ ID NO: 333263 - RNA, 19 nt, Homo sapiens
  misc_RNA (1)...(19): siRNA sense strand
cuaguacacauuccaacaa

SEQ ID NO: 333264 - RNA, 19 nt, Homo sapiens
  misc_RNA (1)...(19): siRNA sense strand
ccaggcuucuuguaugucu

SEQ ID NO: 333265 - RNA, 19 nt, Homo sapiens
  misc_RNA (1)...(19): siRNA sense strand
caaaagcaaauguagagaa

SEQ ID NO: 333266 - RNA, 19 nt, Homo sapiens
  misc_RNA (1)...(19): siRNA sense strand
ugccagccuucugaaagua

SEQ ID NO: 333267 - RNA, 19 nt, Homo sapiens
  misc_RNA (1)...(19): siRNA sense strand
ucucucacccaaccuacua

SEQ ID NO: 333268 - RNA, 19 nt, Homo sapiens
  misc_RNA (1)...(19): siRNA sense strand
ucugaaaguauacagcaaa

SEQ ID NO: 333269 - RNA, 19 nt, Homo sapiens
  misc_RNA (1)...(19): siRNA sense strand
acucauuauucaaccaaga

SEQ ID NO: 333270 - RNA, 19 nt, Homo sapiens
  misc_RNA (1)...(19): siRNA sense strand
ccguuucauuauuauggua

SEQ ID NO: 333271 - RNA, 19 nt, Homo sapiens
  misc_RNA (1)...(19): siRNA sense strand
caaagauguccaguaguca

SEQ ID NO: 333272 - RNA, 19 nt, Homo sapiens
  misc_RNA (1)...(19): siRNA sense strand
acuuggaucugaagaagag

SEQ ID NO: 333273 - RNA, 19 nt, Homo sapiens
  misc_RNA (1)...(19): siRNA sense strand
cugaaaguauacagcaaag

SEQ ID NO: 333274 - RNA, 19 nt, Homo sapiens
  misc_RNA (1)...(19): siRNA sense strand
ccuaaacucauuauucaac

SEQ ID NO: 333275 - RNA, 19 nt, Homo sapiens
  misc_RNA (1)...(19): siRNA sense strand
cuguauuccuaaacucauu

SEQ ID NO: 333276 - RNA, 19 nt, Homo sapiens
  misc_RNA (1)...(19): siRNA sense strand
acacagcucuggugaagaa

SEQ ID NO: 333277 - RNA, 19 nt, Homo sapiens
  misc_RNA (1)...(19): siRNA sense strand
cagccaagaucaaguuaaa

SEQ ID NO: 333278 - RNA, 19 nt, Homo sapiens
  misc_RNA (1)...(19): siRNA sense strand
caacacagcucuggugaag

SEQ ID NO: 333279 - RNA, 19 nt, Homo sapiens
  misc_RNA (1)...(19): siRNA sense strand
ugacacagaucaaguccaa

SEQ ID NO: 333280 - RNA, 19 nt, Homo sapiens
  misc_RNA (1)...(19): siRNA sense strand
agacggagcugacacagau

SEQ ID NO: 333281 - RNA, 19 nt, Homo sapiens
  misc_RNA (1)...(19): siRNA sense strand
gcuaugccuuuguucagua

SEQ ID NO: 333282 - RNA, 19 nt, Homo sapiens
  misc_RNA (1)...(19): siRNA sense strand
acacagaucaaguccaaua

SEQ ID NO: 333283 - RNA, 19 nt, Homo sapiens
  misc_RNA (1)...(19): siRNA sense strand
gcaauguaaccaacaagaa

SEQ ID NO: 333284 - RNA, 19 nt, Homo sapiens
  misc_RNA (1)...(19): siRNA sense strand
caagcaauguaaccaacaa

SEQ ID NO: 333285 - RNA, 19 nt, Homo sapiens
  misc_RNA (1)...(19): siRNA sense strand
gaagggcuccugacacaca

SEQ ID NO: 333286 - RNA, 19 nt, Homo sapiens
  misc_RNA (1)...(19): siRNA sense strand
gccaagaucaaguuaaaga

SEQ ID NO: 333287 - RNA, 19 nt, Homo sapiens
  misc_RNA (1)...(19): siRNA sense strand
gaucaaguccaauaucgau

SEQ ID NO: 333288 - RNA, 19 nt, Homo sapiens
  misc_RNA (1)...(19): siRNA sense strand
ucucgagucuucauuggaa

SEQ ID NO: 333289 - RNA, 19 nt, Homo sapiens
  misc_RNA (1)...(19): siRNA sense strand
aaacuaacguaccugucaa

SEQ ID NO: 333290 - RNA, 19 nt, Homo sapiens
  misc_RNA (1)...(19): siRNA sense strand
caauguaaccaacaagaau

SEQ ID NO: 333291 - RNA, 19 nt, Homo sapiens
  misc_RNA (1)...(19): siRNA sense strand
ggcagacccuggacaucaa

SEQ ID NO: 333292 - RNA, 19 nt, Homo sapiens
  misc_RNA (1)...(19): siRNA sense strand
gaccaucuucucuaaguau

SEQ ID NO: 333293 - RNA, 19 nt, Homo sapiens
  misc_RNA (1)...(19): siRNA sense strand
gggcagacccuggacauca

SEQ ID NO: 333294 - RNA, 19 nt, Homo sapiens
  misc_RNA (1)...(19): siRNA sense strand
gcucagccaagaucaaguu

SEQ ID NO: 333295 - RNA, 19 nt, Homo sapiens
  misc_RNA (1)...(19): siRNA sense strand
ggacacagacgcggaugau

SEQ ID NO: 333296 - RNA, 19 nt, Homo sapiens
  misc_RNA (1)...(19): siRNA sense strand
aaucagauguggagaccau

SEQ ID NO: 333297 - RNA, 19 nt, Homo sapiens
  misc_RNA (1)...(19): siRNA sense strand
cagaucaaguccaauaucg

SEQ ID NO: 333298 - RNA, 19 nt, Homo sapiens
  misc_RNA (1)...(19): siRNA sense strand
agaccaucuucucuaagua

SEQ ID NO: 333299 - RNA, 19 nt, Homo sapiens
  misc_RNA (1)...(19): siRNA sense strand
caauccagauggcaagaag

SEQ ID NO: 333300 - RNA, 19 nt, Homo sapiens
  misc_RNA (1)...(19): siRNA sense strand
cagcucuggugaagaaauc

SEQ ID NO: 333301 - RNA, 19 nt, Homo sapiens
  misc_RNA (1)...(19): siRNA sense strand
gagcugacacagaucaagu

SEQ ID NO: 333302 - RNA, 19 nt, Homo sapiens
  misc_RNA (1)...(19): siRNA sense strand
caagaagaagggugaugga

SEQ ID NO: 333303 - RNA, 19 nt, Homo sapiens
  misc_RNA (1)...(19): siRNA sense strand
gcaagcaauguaaccaaca

SEQ ID NO: 333304 - RNA, 19 nt, Homo sapiens
  misc_RNA (1)...(19): siRNA sense strand
gcaaaaggccaauccagau

SEQ ID NO: 333305 - RNA, 19 nt, Homo sapiens
  misc_RNA (1)...(19): siRNA sense strand
gagcugcaggccaucaaga

SEQ ID NO: 333306 - RNA, 19 nt, Homo sapiens
  misc_RNA (1)...(19): siRNA sense strand
agacgacggcgaugaggaa

SEQ ID NO: 333307 - RNA, 19 nt, Homo sapiens
  misc_RNA (1)...(19): siRNA sense strand
ugacacacagcgaggaaga

SEQ ID NO: 333308 - RNA, 19 nt, Homo sapiens
  misc_RNA (1)...(19): siRNA sense strand
cccaagagaacacaacuuc

SEQ ID NO: 333309 - RNA, 19 nt, Homo sapiens
  misc_RNA (1)...(19): siRNA sense strand
cuucaggcaagcaauguaa

SEQ ID NO: 333310 - RNA, 19 nt, Homo sapiens
  misc_RNA (1)...(19): siRNA sense strand
guaccugucaagcucuuug

SEQ ID NO: 333311 - RNA, 19 nt, Homo sapiens
  misc_RNA (1)...(19): siRNA sense strand
ggugaagaaaucagaugug

SEQ ID NO: 333312 - RNA, 19 nt, Homo sapiens
  misc_RNA (1)...(19): siRNA sense strand
gcgaggaagagcuggaaca

SEQ ID NO: 333313 - RNA, 19 nt, Homo sapiens
  misc_RNA (1)...(19): siRNA sense strand
gcuaaagagagcagcaucu

SEQ ID NO: 333314 - RNA, 19 nt, Homo sapiens
  misc_RNA (1)...(19): siRNA sense strand
ggcuaugccuuuguucagu

SEQ ID NO: 333315 - RNA, 19 nt, Homo sapiens
  misc_RNA (1)...(19): siRNA sense strand
acacagcucuggugaagaa

SEQ ID NO: 333316 - RNA, 19 nt, Homo sapiens
  misc_RNA (1)...(19): siRNA sense strand
cagccaagaucaaguuaaa

SEQ ID NO: 333317 - RNA, 19 nt, Homo sapiens
  misc_RNA (1)...(19): siRNA sense strand
caacacagcucuggugaag

SEQ ID NO: 333318 - RNA, 19 nt, Homo sapiens
  misc_RNA (1)...(19): siRNA sense strand
ugacacagaucaaguccaa

SEQ ID NO: 333319 - RNA, 19 nt, Homo sapiens
  misc_RNA (1)...(19): siRNA sense strand
agacggagcugacacagau

SEQ ID NO: 333320 - RNA, 19 nt, Homo sapiens
  misc_RNA (1)...(19): siRNA sense strand
gcuaugccuuuguucagua

SEQ ID NO: 333321 - RNA, 19 nt, Homo sapiens
  misc_RNA (1)...(19): siRNA sense strand
acacagaucaaguccaaua

SEQ ID NO: 333322 - RNA, 19 nt, Homo sapiens
  misc_RNA (1)...(19): siRNA sense strand
gcaauguaaccaacaagaa

SEQ ID NO: 333323 - RNA, 19 nt, Homo sapiens
  misc_RNA (1)...(19): siRNA sense strand
caagcaauguaaccaacaa

SEQ ID NO: 333324 - RNA, 19 nt, Homo sapiens
  misc_RNA (1)...(19): siRNA sense strand
gaagggcuccugacacaca

SEQ ID NO: 333325 - RNA, 19 nt, Homo sapiens
  misc_RNA (1)...(19): siRNA sense strand
gccaagaucaaguuaaaga

SEQ ID NO: 333326 - RNA, 19 nt, Homo sapiens
  misc_RNA (1)...(19): siRNA sense strand
gaucaaguccaauaucgau

SEQ ID NO: 333327 - RNA, 19 nt, Homo sapiens
  misc_RNA (1)...(19): siRNA sense strand
ucucgagucuucauuggaa

SEQ ID NO: 333328 - RNA, 19 nt, Homo sapiens
  misc_RNA (1)...(19): siRNA sense strand
aaacuaacguaccugucaa

SEQ ID NO: 333329 - RNA, 19 nt, Homo sapiens
  misc_RNA (1)...(19): siRNA sense strand
caauguaaccaacaagaau

SEQ ID NO: 333330 - RNA, 19 nt, Homo sapiens
  misc_RNA (1)...(19): siRNA sense strand
ggcagacccuggacaucaa

SEQ ID NO: 333331 - RNA, 19 nt, Homo sapiens
  misc_RNA (1)...(19): siRNA sense strand
gaccaucuucucuaaguau

SEQ ID NO: 333332 - RNA, 19 nt, Homo sapiens
  misc_RNA (1)...(19): siRNA sense strand
gggcagacccuggacauca

SEQ ID NO: 333333 - RNA, 19 nt, Homo sapiens
  misc_RNA (1)...(19): siRNA sense strand
gcucagccaagaucaaguu

SEQ ID NO: 333334 - RNA, 19 nt, Homo sapiens
  misc_RNA (1)...(19): siRNA sense strand
ggacacagacgcggaugau

SEQ ID NO: 333335 - RNA, 19 nt, Homo sapiens
  misc_RNA (1)...(19): siRNA sense strand
aaucagauguggagaccau

SEQ ID NO: 333336 - RNA, 19 nt, Homo sapiens
  misc_RNA (1)...(19): siRNA sense strand
cagaucaaguccaauaucg

SEQ ID NO: 333337 - RNA, 19 nt, Homo sapiens
  misc_RNA (1)...(19): siRNA sense strand
agaccaucuucucuaagua

SEQ ID NO: 333338 - RNA, 19 nt, Homo sapiens
  misc_RNA (1)...(19): siRNA sense strand
caauccagauggcaagaag

SEQ ID NO: 333339 - RNA, 19 nt, Homo sapiens
  misc_RNA (1)...(19): siRNA sense strand
cagcucuggugaagaaauc

SEQ ID NO: 333340 - RNA, 19 nt, Homo sapiens
  misc_RNA (1)...(19): siRNA sense strand
gagcugacacagaucaagu

SEQ ID NO: 333341 - RNA, 19 nt, Homo sapiens
  misc_RNA (1)...(19): siRNA sense strand
caagaagaagggugaugga

SEQ ID NO: 333342 - RNA, 19 nt, Homo sapiens
  misc_RNA (1)...(19): siRNA sense strand
gcaagcaauguaaccaaca

SEQ ID NO: 333343 - RNA, 19 nt, Homo sapiens
  misc_RNA (1)...(19): siRNA sense strand
gcaaaaggccaauccagau

SEQ ID NO: 333344 - RNA, 19 nt, Homo sapiens
  misc_RNA (1)...(19): siRNA sense strand
gagcugcaggccaucaaga

SEQ ID NO: 333345 - RNA, 19 nt, Homo sapiens
  misc_RNA (1)...(19): siRNA sense strand
agacgacggcgaugaggaa

SEQ ID NO: 333346 - RNA, 19 nt, Homo sapiens
  misc_RNA (1)...(19): siRNA sense strand
ugacacacagcgaggaaga

SEQ ID NO: 333347 - RNA, 19 nt, Homo sapiens
  misc_RNA (1)...(19): siRNA sense strand
cccaagagaacacaacuuc

SEQ ID NO: 333348 - RNA, 19 nt, Homo sapiens
  misc_RNA (1)...(19): siRNA sense strand
cuucaggcaagcaauguaa

SEQ ID NO: 333349 - RNA, 19 nt, Homo sapiens
  misc_RNA (1)...(19): siRNA sense strand
guaccugucaagcucuuug

SEQ ID NO: 333350 - RNA, 19 nt, Homo sapiens
  misc_RNA (1)...(19): siRNA sense strand
ggugaagaaaucagaugug

SEQ ID NO: 333351 - RNA, 19 nt, Homo sapiens
  misc_RNA (1)...(19): siRNA sense strand
gcgaggaagagcuggaaca

SEQ ID NO: 333352 - RNA, 19 nt, Homo sapiens
  misc_RNA (1)...(19): siRNA sense strand
gcuaaagagagcagcaucu

SEQ ID NO: 333353 - RNA, 19 nt, Homo sapiens
  misc_RNA (1)...(19): siRNA sense strand
ggcuaugccuuuguucagu

SEQ ID NO: 333354 - RNA, 19 nt, Homo sapiens
  misc_RNA (1)...(19): siRNA sense strand
caagaucggugaagccaaa

SEQ ID NO: 333355 - RNA, 19 nt, Homo sapiens
  misc_RNA (1)...(19): siRNA sense strand
ccaguucgaugaaguguuu

SEQ ID NO: 333356 - RNA, 19 nt, Homo sapiens
  misc_RNA (1)...(19): siRNA sense strand
gcaaagaagacgaaaguga

SEQ ID NO: 333357 - RNA, 19 nt, Homo sapiens
  misc_RNA (1)...(19): siRNA sense strand
gaacuaaggaucccguuga

SEQ ID NO: 333358 - RNA, 19 nt, Homo sapiens
  misc_RNA (1)...(19): siRNA sense strand
gaaacucacuggcguccaa

SEQ ID NO: 333359 - RNA, 19 nt, Homo sapiens
  misc_RNA (1)...(19): siRNA sense strand
gacaagagcuuccagaacu

SEQ ID NO: 333360 - RNA, 19 nt, Homo sapiens
  misc_RNA (1)...(19): siRNA sense strand
gagaaaaccuugaaaacaa

SEQ ID NO: 333361 - RNA, 19 nt, Homo sapiens
  misc_RNA (1)...(19): siRNA sense strand
gcuuugggaugaagaauuu

SEQ ID NO: 333362 - RNA, 19 nt, Homo sapiens
  misc_RNA (1)...(19): siRNA sense strand
aaagaaggguucaugauca

SEQ ID NO: 333363 - RNA, 19 nt, Homo sapiens
  misc_RNA (1)...(19): siRNA sense strand
caaagaagacgaaagugaa

SEQ ID NO: 333364 - RNA, 19 nt, Homo sapiens
  misc_RNA (1)...(19): siRNA sense strand
ccggagggauuccaucaua

SEQ ID NO: 333365 - RNA, 19 nt, Homo sapiens
  misc_RNA (1)...(19): siRNA sense strand
ccaguaaccugaaguuugg

SEQ ID NO: 333366 - RNA, 19 nt, Homo sapiens
  misc_RNA (1)...(19): siRNA sense strand
gaauuuaccuaccacaaaa

SEQ ID NO: 333367 - RNA, 19 nt, Homo sapiens
  misc_RNA (1)...(19): siRNA sense strand
agacgaaagugaagaggaa

SEQ ID NO: 333368 - RNA, 19 nt, Homo sapiens
  misc_RNA (1)...(19): siRNA sense strand
ugagcaagcuggagaagau

SEQ ID NO: 333369 - RNA, 19 nt, Homo sapiens
  misc_RNA (1)...(19): siRNA sense strand
gaucgacauucucaccaaa

SEQ ID NO: 333370 - RNA, 19 nt, Homo sapiens
  misc_RNA (1)...(19): siRNA sense strand
gaacuucuuggaucugauu

SEQ ID NO: 333371 - RNA, 19 nt, Homo sapiens
  misc_RNA (1)...(19): siRNA sense strand
gagcaaaucuguguaugac

SEQ ID NO: 333372 - RNA, 19 nt, Homo sapiens
  misc_RNA (1)...(19): siRNA sense strand
ggaccaaaauuguggaaaa

SEQ ID NO: 333373 - RNA, 19 nt, Homo sapiens
  misc_RNA (1)...(19): siRNA sense strand
cggaagcgcuuugggauga

SEQ ID NO: 333374 - RNA, 19 nt, Homo sapiens
  misc_RNA (1)...(19): siRNA sense strand
ccaggacgcugacauugau

SEQ ID NO: 333375 - RNA, 19 nt, Homo sapiens
  misc_RNA (1)...(19): siRNA sense strand
gagaagacuuuuacuguga

SEQ ID NO: 333376 - RNA, 19 nt, Homo sapiens
  misc_RNA (1)...(19): siRNA sense strand
ggaggagucuuucaaaaug

SEQ ID NO: 333377 - RNA, 19 nt, Homo sapiens
  misc_RNA (1)...(19): siRNA sense strand
ugaaauuccucggagcuuu

SEQ ID NO: 333378 - RNA, 19 nt, Homo sapiens
  misc_RNA (1)...(19): siRNA sense strand
gaccuccacucauuccauu

SEQ ID NO: 333379 - RNA, 19 nt, Homo sapiens
  misc_RNA (1)...(19): siRNA sense strand
ucaagaagacgaaauaugg

SEQ ID NO: 333380 - RNA, 19 nt, Homo sapiens
  misc_RNA (1)...(19): siRNA sense strand
ggagcaaaucuguguauga

SEQ ID NO: 333381 - RNA, 19 nt, Homo sapiens
  misc_RNA (1)...(19): siRNA sense strand
ggaggaggagucuuucaaa

SEQ ID NO: 333382 - RNA, 19 nt, Homo sapiens
  misc_RNA (1)...(19): siRNA sense strand
gaaguuuggagaugaauuc

SEQ ID NO: 333383 - RNA, 19 nt, Homo sapiens
  misc_RNA (1)...(19): siRNA sense strand
ggacaagcucgaaaucaga

SEQ ID NO: 333384 - RNA, 19 nt, Homo sapiens
  misc_RNA (1)...(19): siRNA sense strand
caccuguccuucuacauuu

SEQ ID NO: 333385 - RNA, 19 nt, Homo sapiens
  misc_RNA (1)...(19): siRNA sense strand
gcagugagcagcuucaucu

SEQ ID NO: 333386 - RNA, 19 nt, Homo sapiens
  misc_RNA (1)...(19): siRNA sense strand
ugagcgaggucaucacaga

SEQ ID NO: 333387 - RNA, 19 nt, Homo sapiens
  misc_RNA (1)...(19): siRNA sense strand
uaaagaaggguucaugauc

SEQ ID NO: 333388 - RNA, 19 nt, Homo sapiens
  misc_RNA (1)...(19): siRNA sense strand
cgagcaagaugagggauug

SEQ ID NO: 333389 - RNA, 19 nt, Homo sapiens
  misc_RNA (1)...(19): siRNA sense strand
acaagagcuuccagaacua

SEQ ID NO: 333390 - RNA, 19 nt, Homo sapiens
  misc_RNA (1)...(19): siRNA sense strand
ggaucgacauucucaccaa

SEQ ID NO: 333391 - RNA, 19 nt, Homo sapiens
  misc_RNA (1)...(19): siRNA sense strand
ucaaugagcagaaauaugc

SEQ ID NO: 333392 - RNA, 19 nt, Homo sapiens
  misc_RNA (1)...(19): siRNA sense strand
gaaguugaaagacggagaa

SEQ ID NO: 333393 - RNA, 19 nt, Homo sapiens
  misc_RNA (1)...(19): siRNA sense strand
gaagguggccauccagaag

SEQ ID NO: 333394 - RNA, 19 nt, Homo sapiens
  misc_RNA (1)...(19): siRNA sense strand
acaagacgcuaaagcaagu

SEQ ID NO: 333395 - RNA, 19 nt, Homo sapiens
  misc_RNA (1)...(19): siRNA sense strand
gaaggguucaugaucaaga

SEQ ID NO: 333396 - RNA, 19 nt, Homo sapiens
  misc_RNA (1)...(19): siRNA sense strand
gccaguaaccugaaguuug

SEQ ID NO: 333397 - RNA, 19 nt, Homo sapiens
  misc_RNA (1)...(19): siRNA sense strand
uccgagaccuccacucauu

SEQ ID NO: 333398 - RNA, 19 nt, Homo sapiens
  misc_RNA (1)...(19): siRNA sense strand
gagcacgcccaguauaaga

SEQ ID NO: 333399 - RNA, 19 nt, Homo sapiens
  misc_RNA (1)...(19): siRNA sense strand
ugaauuuaccuaccacaaa

SEQ ID NO: 333400 - RNA, 19 nt, Homo sapiens
  misc_RNA (1)...(19): siRNA sense strand
gaagagaccccaagagugu

SEQ ID NO: 333401 - RNA, 19 nt, Homo sapiens
  misc_RNA (1)...(19): siRNA sense strand
ggaagguggccauccagaa

SEQ ID NO: 333402 - RNA, 19 nt, Homo sapiens
  misc_RNA (1)...(19): siRNA sense strand
gagacaagagcuuccagaa

SEQ ID NO: 333403 - RNA, 19 nt, Homo sapiens
  misc_RNA (1)...(19): siRNA sense strand
cuacauggcuacauuuuau

SEQ ID NO: 333404 - RNA, 19 nt, Homo sapiens
  misc_RNA (1)...(19): siRNA sense strand
gcaggacccuucagaucag

SEQ ID NO: 333405 - RNA, 19 nt, Homo sapiens
  misc_RNA (1)...(19): siRNA sense strand
gcccgaccgucauguguga

SEQ ID NO: 333406 - RNA, 19 nt, Homo sapiens
  misc_RNA (1)...(19): siRNA sense strand
gaagaggaagaccaacaau

SEQ ID NO: 333407 - RNA, 19 nt, Homo sapiens
  misc_RNA (1)...(19): siRNA sense strand
gaggaggagucuuucaaaa

SEQ ID NO: 333408 - RNA, 19 nt, Homo sapiens
  misc_RNA (1)...(19): siRNA sense strand
ucaccuguccuucuacauu

SEQ ID NO: 333409 - RNA, 19 nt, Homo sapiens
  misc_RNA (1)...(19): siRNA sense strand
aagaaggguucaugaucaa

SEQ ID NO: 333410 - RNA, 19 nt, Homo sapiens
  misc_RNA (1)...(19): siRNA sense strand
ugacauugaucuccaagac

SEQ ID NO: 333411 - RNA, 19 nt, Homo sapiens
  misc_RNA (1)...(19): siRNA sense strand
ccaagcgcuuccaggauga

SEQ ID NO: 333412 - RNA, 19 nt, Homo sapiens
  misc_RNA (1)...(19): siRNA sense strand
ggaagugcagggcaaagug

SEQ ID NO: 333413 - RNA, 19 nt, Homo sapiens
  misc_RNA (1)...(19): siRNA sense strand
caagaagacgaaauaugga

SEQ ID NO: 333414 - RNA, 19 nt, Homo sapiens
  misc_RNA (1)...(19): siRNA sense strand
gcaggagcacgcccaguau

SEQ ID NO: 333415 - RNA, 19 nt, Homo sapiens
  misc_RNA (1)...(19): siRNA sense strand
ggaaugccaguaaccugaa

SEQ ID NO: 333416 - RNA, 19 nt, Homo sapiens
  misc_RNA (1)...(19): siRNA sense strand
ggcaggacccuucagauca

SEQ ID NO: 333417 - RNA, 19 nt, Homo sapiens
  misc_RNA (1)...(19): siRNA sense strand
gaguugaccucuggaaugc

SEQ ID NO: 333418 - RNA, 19 nt, Homo sapiens
  misc_RNA (1)...(19): siRNA sense strand
ccuccacucauuccauuua

SEQ ID NO: 333419 - RNA, 19 nt, Homo sapiens
  misc_RNA (1)...(19): siRNA sense strand
gaucaagagggcccaagga

SEQ ID NO: 333420 - RNA, 19 nt, Homo sapiens
  misc_RNA (1)...(19): siRNA sense strand
aaucgacccugugaaguug

SEQ ID NO: 333421 - RNA, 19 nt, Homo sapiens
  misc_RNA (1)...(19): siRNA sense strand
gaaaucgacccugugaagu

SEQ ID NO: 333422 - RNA, 19 nt, Homo sapiens
  misc_RNA (1)...(19): siRNA sense strand
ugaaaucgacccugugaag

SEQ ID NO: 333423 - RNA, 19 nt, Homo sapiens
  misc_RNA (1)...(19): siRNA sense strand
cuaaggaucccguugaaag

SEQ ID NO: 333424 - RNA, 19 nt, Homo sapiens
  misc_RNA (1)...(19): siRNA sense strand
gaucagaagcaaagaagac

SEQ ID NO: 333425 - RNA, 19 nt, Homo sapiens
  misc_RNA (1)...(19): siRNA sense strand
gggacaaguucaagaagac

SEQ ID NO: 333426 - RNA, 19 nt, Homo sapiens
  misc_RNA (1)...(19): siRNA sense strand
uggagaaccuacggcagua

SEQ ID NO: 333427 - RNA, 19 nt, Homo sapiens
  misc_RNA (1)...(19): siRNA sense strand
gcaggguggugccauucau

SEQ ID NO: 333428 - RNA, 19 nt, Homo sapiens
  misc_RNA (1)...(19): siRNA sense strand
agaaggaggacuugcagaa

SEQ ID NO: 333429 - RNA, 19 nt, Homo sapiens
  misc_RNA (1)...(19): siRNA sense strand
agaagcgccucaccgucua

SEQ ID NO: 333430 - RNA, 19 nt, Homo sapiens
  misc_RNA (1)...(19): siRNA sense strand
ggaagcgcuuugggaugaa

SEQ ID NO: 333431 - RNA, 19 nt, Homo sapiens
  misc_RNA (1)...(19): siRNA sense strand
cugaugcggugaagaacuu

SEQ ID NO: 333432 - RNA, 19 nt, Homo sapiens
  misc_RNA (1)...(19): siRNA sense strand
caucgugaaugggcaaugu

SEQ ID NO: 333433 - RNA, 19 nt, Homo sapiens
  misc_RNA (1)...(19): siRNA sense strand
gaaggaggacuugcagaag

SEQ ID NO: 333434 - RNA, 19 nt, Homo sapiens
  misc_RNA (1)...(19): siRNA sense strand
caggagcacgcccaguaua

SEQ ID NO: 333435 - RNA, 19 nt, Homo sapiens
  misc_RNA (1)...(19): siRNA sense strand
cuacaagacgcuaaagcaa

SEQ ID NO: 333436 - RNA, 19 nt, Homo sapiens
  misc_RNA (1)...(19): siRNA sense strand
ucuacucccucuucaacuu

SEQ ID NO: 333437 - RNA, 19 nt, Homo sapiens
  misc_RNA (1)...(19): siRNA sense strand
cagccucucuacagcauuc

SEQ ID NO: 333438 - RNA, 19 nt, Homo sapiens
  misc_RNA (1)...(19): siRNA sense strand
aagagaugguuucgcuuga

SEQ ID NO: 333439 - RNA, 19 nt, Homo sapiens
  misc_RNA (1)...(19): siRNA sense strand
aguccuacauggcuacauu

SEQ ID NO: 333440 - RNA, 19 nt, Homo sapiens
  misc_RNA (1)...(19): siRNA sense strand
aaaucgacccugugaaguu

SEQ ID NO: 333441 - RNA, 19 nt, Homo sapiens
  misc_RNA (1)...(19): siRNA sense strand
aagcaaagaagacgaaagu

SEQ ID NO: 333442 - RNA, 19 nt, Homo sapiens
  misc_RNA (1)...(19): siRNA sense strand
ugaagaggaagaccaacaa

SEQ ID NO: 333443 - RNA, 19 nt, Homo sapiens
  misc_RNA (1)...(19): siRNA sense strand
ggagaaaaccuugaaaaca

SEQ ID NO: 333444 - RNA, 19 nt, Homo sapiens
  misc_RNA (1)...(19): siRNA sense strand
ggaggaagacguggacaag

SEQ ID NO: 333445 - RNA, 19 nt, Homo sapiens
  misc_RNA (1)...(19): siRNA sense strand
ccugaaguuuggagaugaa

SEQ ID NO: 333446 - RNA, 19 nt, Homo sapiens
  misc_RNA (1)...(19): siRNA sense strand
gggagcaaaucuguguaug

SEQ ID NO: 333447 - RNA, 19 nt, Homo sapiens
  misc_RNA (1)...(19): siRNA sense strand
gcauucccaucgagaacau

SEQ ID NO: 333448 - RNA, 19 nt, Homo sapiens
  misc_RNA (1)...(19): siRNA sense strand
gaaugccaguaaccugaag

SEQ ID NO: 333449 - RNA, 19 nt, Homo sapiens
  misc_RNA (1)...(19): siRNA sense strand
ggaggccugugggagcaaa

SEQ ID NO: 333450 - RNA, 19 nt, Homo sapiens
  misc_RNA (1)...(19): siRNA sense strand
gcccaucgugcuuaaagaa

SEQ ID NO: 333451 - RNA, 19 nt, Homo sapiens
  misc_RNA (1)...(19): siRNA sense strand
gauaugccagagccacaaa

SEQ ID NO: 333452 - RNA, 19 nt, Homo sapiens
  misc_RNA (1)...(19): siRNA sense strand
gagaaccuacggcaguaug

SEQ ID NO: 333453 - RNA, 19 nt, Homo sapiens
  misc_RNA (1)...(19): siRNA sense strand
gaggagucuuucaaaauga

SEQ ID NO: 333454 - RNA, 19 nt, Homo sapiens
  misc_RNA (1)...(19): siRNA sense strand
gcuaauggcccaagcuuua

SEQ ID NO: 333455 - RNA, 19 nt, Homo sapiens
  misc_RNA (1)...(19): siRNA sense strand
gcagacagcugaagaaagg

SEQ ID NO: 333456 - RNA, 19 nt, Homo sapiens
  misc_RNA (1)...(19): siRNA sense strand
ccaagaggaaguugaauua

SEQ ID NO: 333457 - RNA, 19 nt, Homo sapiens
  misc_RNA (1)...(19): siRNA sense strand
ggagagauaugucaagucu

SEQ ID NO: 333458 - RNA, 19 nt, Homo sapiens
  misc_RNA (1)...(19): siRNA sense strand
ggcccaagcuuuagagaaa

SEQ ID NO: 333459 - RNA, 19 nt, Homo sapiens
  misc_RNA (1)...(19): siRNA sense strand
gagaugagguuugccaaga

SEQ ID NO: 333460 - RNA, 19 nt, Homo sapiens
  misc_RNA (1)...(19): siRNA sense strand
aauugaaccugccggauua

SEQ ID NO: 333461 - RNA, 19 nt, Homo sapiens
  misc_RNA (1)...(19): siRNA sense strand
caaagaagaagaaggagaa

SEQ ID NO: 333462 - RNA, 19 nt, Homo sapiens
  misc_RNA (1)...(19): siRNA sense strand
ggagagcucuucggacuca

SEQ ID NO: 333463 - RNA, 19 nt, Homo sapiens
  misc_RNA (1)...(19): siRNA sense strand
guaaacaaaccaaagaaga

SEQ ID NO: 333464 - RNA, 19 nt, Homo sapiens
  misc_RNA (1)...(19): siRNA sense strand
gggagaugcuauccaagaa

SEQ ID NO: 333465 - RNA, 19 nt, Homo sapiens
  misc_RNA (1)...(19): siRNA sense strand
ugacagcagugacucagaa

SEQ ID NO: 333466 - RNA, 19 nt, Homo sapiens
  misc_RNA (1)...(19): siRNA sense strand
gcccacagaugacauagug

SEQ ID NO: 333467 - RNA, 19 nt, Homo sapiens
  misc_RNA (1)...(19): siRNA sense strand
gcgaauguaugcaggacuu

SEQ ID NO: 333468 - RNA, 19 nt, Homo sapiens
  misc_RNA (1)...(19): siRNA sense strand
gauagaaauugacuuugag

SEQ ID NO: 333469 - RNA, 19 nt, Homo sapiens
  misc_RNA (1)...(19): siRNA sense strand
cggcugauguucucgaauu

SEQ ID NO: 333470 - RNA, 19 nt, Homo sapiens
  misc_RNA (1)...(19): siRNA sense strand
ucagggagaugcuauccaa

SEQ ID NO: 333471 - RNA, 19 nt, Homo sapiens
  misc_RNA (1)...(19): siRNA sense strand
ugaagacgcucuggaaaca

SEQ ID NO: 333472 - RNA, 19 nt, Homo sapiens
  misc_RNA (1)...(19): siRNA sense strand
gaacuggagagauauguca

SEQ ID NO: 333473 - RNA, 19 nt, Homo sapiens
  misc_RNA (1)...(19): siRNA sense strand
ccaaccagcugcaguacau

SEQ ID NO: 333474 - RNA, 19 nt, Homo sapiens
  misc_RNA (1)...(19): siRNA sense strand
gaugagguuugccaagaug

SEQ ID NO: 333475 - RNA, 19 nt, Homo sapiens
  misc_RNA (1)...(19): siRNA sense strand
caucaagccucccaagaag

SEQ ID NO: 333476 - RNA, 19 nt, Homo sapiens
  misc_RNA (1)...(19): siRNA sense strand
gagcgcagguacacagcaa

SEQ ID NO: 333477 - RNA, 19 nt, Homo sapiens
  misc_RNA (1)...(19): siRNA sense strand
ugcgggaacuggagagaua

SEQ ID NO: 333478 - RNA, 19 nt, Homo sapiens
  misc_RNA (1)...(19): siRNA sense strand
agaagaagaaggagaagaa

SEQ ID NO: 333479 - RNA, 19 nt, Homo sapiens
  misc_RNA (1)...(19): siRNA sense strand
agaaggagaagaagaagaa

SEQ ID NO: 333480 - RNA, 19 nt, Homo sapiens
  misc_RNA (1)...(19): siRNA sense strand
cagcagugacucagaauga

SEQ ID NO: 333481 - RNA, 19 nt, Homo sapiens
  misc_RNA (1)...(19): siRNA sense strand
guucucgaauugcuacaaa

SEQ ID NO: 333482 - RNA, 19 nt, Homo sapiens
  misc_RNA (1)...(19): siRNA sense strand
auaacaagcccacagauga

SEQ ID NO: 333483 - RNA, 19 nt, Homo sapiens
  misc_RNA (1)...(19): siRNA sense strand
gaaggcuccugccaagaag

SEQ ID NO: 333484 - RNA, 19 nt, Homo sapiens
  misc_RNA (1)...(19): siRNA sense strand
gaaggagaagcacaaagug

SEQ ID NO: 333485 - RNA, 19 nt, Homo sapiens
  misc_RNA (1)...(19): siRNA sense strand
agaaggagaaggagaagaa

SEQ ID NO: 333486 - RNA, 19 nt, Homo sapiens
  misc_RNA (1)...(19): siRNA sense strand
ccaguaaacaaaccaaaga

SEQ ID NO: 333487 - RNA, 19 nt, Homo sapiens
  misc_RNA (1)...(19): siRNA sense strand
gaagcuccaggacguguuu

SEQ ID NO: 333488 - RNA, 19 nt, Homo sapiens
  misc_RNA (1)...(19): siRNA sense strand
acaccauguuuacaaauug

SEQ ID NO: 333489 - RNA, 19 nt, Homo sapiens
  misc_RNA (1)...(19): siRNA sense strand
ccaucaagccucccaagaa

SEQ ID NO: 333490 - RNA, 19 nt, Homo sapiens
  misc_RNA (1)...(19): siRNA sense strand
cagaugacauagugcuaau

SEQ ID NO: 333491 - RNA, 19 nt, Homo sapiens
  misc_RNA (1)...(19): siRNA sense strand
cccaugagcuacgaugaaa

SEQ ID NO: 333492 - RNA, 19 nt, Homo sapiens
  misc_RNA (1)...(19): siRNA sense strand
ccaagcaggcucagcagaa

SEQ ID NO: 333493 - RNA, 19 nt, Homo sapiens
  misc_RNA (1)...(19): siRNA sense strand
gggcuuugcugcugauguc

SEQ ID NO: 333494 - RNA, 19 nt, Homo sapiens
  misc_RNA (1)...(19): siRNA sense strand
uaccaaccaucacugcaaa

SEQ ID NO: 333495 - RNA, 19 nt, Homo sapiens
  misc_RNA (1)...(19): siRNA sense strand
ggagugcaagcgaauguau

SEQ ID NO: 333496 - RNA, 19 nt, Homo sapiens
  misc_RNA (1)...(19): siRNA sense strand
cagcuuagccuggacauca

SEQ ID NO: 333497 - RNA, 19 nt, Homo sapiens
  misc_RNA (1)...(19): siRNA sense strand
agaaggcuccugccaagaa

SEQ ID NO: 333498 - RNA, 19 nt, Homo sapiens
  misc_RNA (1)...(19): siRNA sense strand
gcacgacuaccacgacauc

SEQ ID NO: 333499 - RNA, 19 nt, Homo sapiens
  misc_RNA (1)...(19): siRNA sense strand
aaauugaaccugccggauu

SEQ ID NO: 333500 - RNA, 19 nt, Homo sapiens
  misc_RNA (1)...(19): siRNA sense strand
agaagaaggacaaggagaa

SEQ ID NO: 333501 - RNA, 19 nt, Homo sapiens
  misc_RNA (1)...(19): siRNA sense strand
agaagaagaaggacaagga

SEQ ID NO: 333502 - RNA, 19 nt, Homo sapiens
  misc_RNA (1)...(19): siRNA sense strand
agaagaaggagaaggagaa

SEQ ID NO: 333503 - RNA, 19 nt, Homo sapiens
  misc_RNA (1)...(19): siRNA sense strand
agaaggagaagaaggagaa

SEQ ID NO: 333504 - RNA, 19 nt, Homo sapiens
  misc_RNA (1)...(19): siRNA sense strand
agaagaaggagaagaagga

SEQ ID NO: 333505 - RNA, 19 nt, Homo sapiens
  misc_RNA (1)...(19): siRNA sense strand
guaccaaccaucacugcaa

SEQ ID NO: 333506 - RNA, 19 nt, Homo sapiens
  misc_RNA (1)...(19): siRNA sense strand
uugccaagaugccagauga

SEQ ID NO: 333507 - RNA, 19 nt, Homo sapiens
  misc_RNA (1)...(19): siRNA sense strand
ucgaauugcuacaaauaca

SEQ ID NO: 333508 - RNA, 19 nt, Homo sapiens
  misc_RNA (1)...(19): siRNA sense strand
ucucgaauugcuacaaaua

SEQ ID NO: 333509 - RNA, 19 nt, Homo sapiens
  misc_RNA (1)...(19): siRNA sense strand
caagcccacagaugacaua

SEQ ID NO: 333510 - RNA, 19 nt, Homo sapiens
  misc_RNA (1)...(19): siRNA sense strand
gcaaaggaaaccguucuca

SEQ ID NO: 333511 - RNA, 19 nt, Homo sapiens
  misc_RNA (1)...(19): siRNA sense strand
caagcaggcucagcagaag

SEQ ID NO: 333512 - RNA, 19 nt, Homo sapiens
  misc_RNA (1)...(19): siRNA sense strand
ggagaaggagaagcacaaa

SEQ ID NO: 333513 - RNA, 19 nt, Homo sapiens
  misc_RNA (1)...(19): siRNA sense strand
gcugauguccggcugaugu

SEQ ID NO: 333514 - RNA, 19 nt, Homo sapiens
  misc_RNA (1)...(19): siRNA sense strand
ggugaagacgcucuggaaa

SEQ ID NO: 333515 - RNA, 19 nt, Homo sapiens
  misc_RNA (1)...(19): siRNA sense strand
caaagugaaggccgaggaa

SEQ ID NO: 333516 - RNA, 19 nt, Homo sapiens
  misc_RNA (1)...(19): siRNA sense strand
acaaggagaaggagaagga

SEQ ID NO: 333517 - RNA, 19 nt, Homo sapiens
  misc_RNA (1)...(19): siRNA sense strand
gaagaaggacaaggagaag

SEQ ID NO: 333518 - RNA, 19 nt, Homo sapiens
  misc_RNA (1)...(19): siRNA sense strand
gagaaggagaagaagaaga

SEQ ID NO: 333519 - RNA, 19 nt, Homo sapiens
  misc_RNA (1)...(19): siRNA sense strand
gaaccugccggauuaucau

SEQ ID NO: 333520 - RNA, 19 nt, Homo sapiens
  misc_RNA (1)...(19): siRNA sense strand
cccuggagcugcacgacua

SEQ ID NO: 333521 - RNA, 19 nt, Homo sapiens
  misc_RNA (1)...(19): siRNA sense strand
gaugacauagugcuaaugg

SEQ ID NO: 333522 - RNA, 19 nt, Homo sapiens
  misc_RNA (1)...(19): siRNA sense strand
gcccguggacgcaaucaaa

SEQ ID NO: 333523 - RNA, 19 nt, Homo sapiens
  misc_RNA (1)...(19): siRNA sense strand
agaccaaccagcugcagua

SEQ ID NO: 333524 - RNA, 19 nt, Homo sapiens
  misc_RNA (1)...(19): siRNA sense strand
agaagaagaagaaggacaa

SEQ ID NO: 333525 - RNA, 19 nt, Homo sapiens
  misc_RNA (1)...(19): siRNA sense strand
gcagugaggagagcucuuc

SEQ ID NO: 333526 - RNA, 19 nt, Homo sapiens
  misc_RNA (1)...(19): siRNA sense strand
caagaggaaguugaauuau

SEQ ID NO: 333527 - RNA, 19 nt, Homo sapiens
  misc_RNA (1)...(19): siRNA sense strand
ggaccucagcaccgugaaa

SEQ ID NO: 333528 - RNA, 19 nt, Homo sapiens
  misc_RNA (1)...(19): siRNA sense strand
agaaggagaagcacaaagu

SEQ ID NO: 333529 - RNA, 19 nt, Homo sapiens
  misc_RNA (1)...(19): siRNA sense strand
ggagaagcacaaagugaag

SEQ ID NO: 333530 - RNA, 19 nt, Homo sapiens
  misc_RNA (1)...(19): siRNA sense strand
gaagaagaaggagaagaag

SEQ ID NO: 333531 - RNA, 19 nt, Homo sapiens
  misc_RNA (1)...(19): siRNA sense strand
uauaacaagcccacagaug

SEQ ID NO: 333532 - RNA, 19 nt, Homo sapiens
  misc_RNA (1)...(19): siRNA sense strand
aaauugacuuugagacucu

SEQ ID NO: 333533 - RNA, 19 nt, Homo sapiens
  misc_RNA (1)...(19): siRNA sense strand
caggacguguuugagauga

SEQ ID NO: 333534 - RNA, 19 nt, Homo sapiens
  misc_RNA (1)...(19): siRNA sense strand
ucaagccucccaagaagga

SEQ ID NO: 333535 - RNA, 19 nt, Homo sapiens
  misc_RNA (1)...(19): siRNA sense strand
gcccaugagcuacgaugaa

SEQ ID NO: 333536 - RNA, 19 nt, Homo sapiens
  misc_RNA (1)...(19): siRNA sense strand
aaccaaagaagaagaagga

SEQ ID NO: 333537 - RNA, 19 nt, Homo sapiens
  misc_RNA (1)...(19): siRNA sense strand
acaaaccaaagaagaagaa

SEQ ID NO: 333538 - RNA, 19 nt, Homo sapiens
  misc_RNA (1)...(19): siRNA sense strand
cgaauugcuacaaauacaa

SEQ ID NO: 333539 - RNA, 19 nt, Homo sapiens
  misc_RNA (1)...(19): siRNA sense strand
gagauagaaauugacuuug

SEQ ID NO: 333540 - RNA, 19 nt, Homo sapiens
  misc_RNA (1)...(19): siRNA sense strand
guagugcacaucauccaau

SEQ ID NO: 333541 - RNA, 19 nt, Homo sapiens
  misc_RNA (1)...(19): siRNA sense strand
cgacuaccacgacaucauc

SEQ ID NO: 333542 - RNA, 19 nt, Homo sapiens
  misc_RNA (1)...(19): siRNA sense strand
aggaaaccguucucagcaa

SEQ ID NO: 333543 - RNA, 19 nt, Homo sapiens
  misc_RNA (1)...(19): siRNA sense strand
gaaggccgaggaagagaag

SEQ ID NO: 333544 - RNA, 19 nt, Homo sapiens
  misc_RNA (1)...(19): siRNA sense strand
gaagaaggagaaggagaag

SEQ ID NO: 333545 - RNA, 19 nt, Homo sapiens
  misc_RNA (1)...(19): siRNA sense strand
aaacaaaccaaagaagaag

SEQ ID NO: 333546 - RNA, 19 nt, Homo sapiens
  misc_RNA (1)...(19): siRNA sense strand
cccaagaggaaguugaauu

SEQ ID NO: 333547 - RNA, 19 nt, Homo sapiens
  misc_RNA (1)...(19): siRNA sense strand
acagaugacauagugcuaa

SEQ ID NO: 333548 - RNA, 19 nt, Homo sapiens
  misc_RNA (1)...(19): siRNA sense strand
agaaggagaaggagaagca

SEQ ID NO: 333549 - RNA, 19 nt, Homo sapiens
  misc_RNA (1)...(19): siRNA sense strand
agaaggacaaggagaagga

SEQ ID NO: 333550 - RNA, 19 nt, Homo sapiens
  misc_RNA (1)...(19): siRNA sense strand
aggagaaggagaagaagaa

SEQ ID NO: 333551 - RNA, 19 nt, Homo sapiens
  misc_RNA (1)...(19): siRNA sense strand
ggcugauguucucgaauug

SEQ ID NO: 333552 - RNA, 19 nt, Homo sapiens
  misc_RNA (1)...(19): siRNA sense strand
cagcagcuccuccgagucu

SEQ ID NO: 333553 - RNA, 19 nt, Homo sapiens
  misc_RNA (1)...(19): siRNA sense strand
ugcagaaugugguggugaa

SEQ ID NO: 333554 - RNA, 19 nt, Homo sapiens
  misc_RNA (1)...(19): siRNA sense strand
ggaaguagcuuugcucauu

SEQ ID NO: 333555 - RNA, 19 nt, Homo sapiens
  misc_RNA (1)...(19): siRNA sense strand
gaacauggaucgaggaaau

SEQ ID NO: 333556 - RNA, 19 nt, Homo sapiens
  misc_RNA (1)...(19): siRNA sense strand
ggaagacaaucuagaauau

SEQ ID NO: 333557 - RNA, 19 nt, Homo sapiens
  misc_RNA (1)...(19): siRNA sense strand
caacacagcuucagggaau

SEQ ID NO: 333558 - RNA, 19 nt, Homo sapiens
  misc_RNA (1)...(19): siRNA sense strand
gaaguagcuuugcucauuu

SEQ ID NO: 333559 - RNA, 19 nt, Homo sapiens
  misc_RNA (1)...(19): siRNA sense strand
cugaagagcuagcgaauaa

SEQ ID NO: 333560 - RNA, 19 nt, Homo sapiens
  misc_RNA (1)...(19): siRNA sense strand
ugaagcagaucgaauguuu

SEQ ID NO: 333561 - RNA, 19 nt, Homo sapiens
  misc_RNA (1)...(19): siRNA sense strand
gcagggagcuugaauucug

SEQ ID NO: 333562 - RNA, 19 nt, Homo sapiens
  misc_RNA (1)...(19): siRNA sense strand
ggaagaagauugaaaaguu

SEQ ID NO: 333563 - RNA, 19 nt, Homo sapiens
  misc_RNA (1)...(19): siRNA sense strand
uaauagaucuccggcauaa

SEQ ID NO: 333564 - RNA, 19 nt, Homo sapiens
  misc_RNA (1)...(19): siRNA sense strand
gcaaguggguggacuagug

SEQ ID NO: 333565 - RNA, 19 nt, Homo sapiens
  misc_RNA (1)...(19): siRNA sense strand
guaccaaguucgauccaua

SEQ ID NO: 333566 - RNA, 19 nt, Homo sapiens
  misc_RNA (1)...(19): siRNA sense strand
gcagauccaugcagaaugu

SEQ ID NO: 333567 - RNA, 19 nt, Homo sapiens
  misc_RNA (1)...(19): siRNA sense strand
guagagacaugauugguau

SEQ ID NO: 333568 - RNA, 19 nt, Homo sapiens
  misc_RNA (1)...(19): siRNA sense strand
ggacauuccuucaauuaag

SEQ ID NO: 333569 - RNA, 19 nt, Homo sapiens
  misc_RNA (1)...(19): siRNA sense strand
ugaauucuguuccaacuaa

SEQ ID NO: 333570 - RNA, 19 nt, Homo sapiens
  misc_RNA (1)...(19): siRNA sense strand
caaugagcaugaagagaua

SEQ ID NO: 333571 - RNA, 19 nt, Homo sapiens
  misc_RNA (1)...(19): siRNA sense strand
caaggucauuucagacuuu

SEQ ID NO: 333572 - RNA, 19 nt, Homo sapiens
  misc_RNA (1)...(19): siRNA sense strand
ucucuuaccuuguguuuga

SEQ ID NO: 333573 - RNA, 19 nt, Homo sapiens
  misc_RNA (1)...(19): siRNA sense strand
agaggaagaugaccaagaa

SEQ ID NO: 333574 - RNA, 19 nt, Homo sapiens
  misc_RNA (1)...(19): siRNA sense strand
gauugacuauccaccauuu

SEQ ID NO: 333575 - RNA, 19 nt, Homo sapiens
  misc_RNA (1)...(19): siRNA sense strand
caaguucgauccauagcaa

SEQ ID NO: 333576 - RNA, 19 nt, Homo sapiens
  misc_RNA (1)...(19): siRNA sense strand
caggcagacucucuuauuu

SEQ ID NO: 333577 - RNA, 19 nt, Homo sapiens
  misc_RNA (1)...(19): siRNA sense strand
ccacagcaguuaauagauc

SEQ ID NO: 333578 - RNA, 19 nt, Homo sapiens
  misc_RNA (1)...(19): siRNA sense strand
ccaaucaacacguuucuaa

SEQ ID NO: 333579 - RNA, 19 nt, Homo sapiens
  misc_RNA (1)...(19): siRNA sense strand
agagagagauauacugaga

SEQ ID NO: 333580 - RNA, 19 nt, Homo sapiens
  misc_RNA (1)...(19): siRNA sense strand
ggaagaggaagacaaucua

SEQ ID NO: 333581 - RNA, 19 nt, Homo sapiens
  misc_RNA (1)...(19): siRNA sense strand
gacauuccuucaauuaaga

SEQ ID NO: 333582 - RNA, 19 nt, Homo sapiens
  misc_RNA (1)...(19): siRNA sense strand
uaaaggguauucgagauga

SEQ ID NO: 333583 - RNA, 19 nt, Homo sapiens
  misc_RNA (1)...(19): siRNA sense strand
gaauguaagcgguuuggaa

SEQ ID NO: 333584 - RNA, 19 nt, Homo sapiens
  misc_RNA (1)...(19): siRNA sense strand
gcaauuaugaggccuacaa

SEQ ID NO: 333585 - RNA, 19 nt, Homo sapiens
  misc_RNA (1)...(19): siRNA sense strand
gaagaagauugaaaaguug

SEQ ID NO: 333586 - RNA, 19 nt, Homo sapiens
  misc_RNA (1)...(19): siRNA sense strand
gcagccaguuuaaguaauc

SEQ ID NO: 333587 - RNA, 19 nt, Homo sapiens
  misc_RNA (1)...(19): siRNA sense strand
ggcagacucucuuauuuag

SEQ ID NO: 333588 - RNA, 19 nt, Homo sapiens
  misc_RNA (1)...(19): siRNA sense strand
cagacucucuuauuuagug

SEQ ID NO: 333589 - RNA, 19 nt, Homo sapiens
  misc_RNA (1)...(19): siRNA sense strand
cauauaaucuucgaucagu

SEQ ID NO: 333590 - RNA, 19 nt, Homo sapiens
  misc_RNA (1)...(19): siRNA sense strand
ugaagaggcuugaagaaaa

SEQ ID NO: 333591 - RNA, 19 nt, Homo sapiens
  misc_RNA (1)...(19): siRNA sense strand
ggaggaagaggaagacaau

SEQ ID NO: 333592 - RNA, 19 nt, Homo sapiens
  misc_RNA (1)...(19): siRNA sense strand
ugagaaagguguggccuau

SEQ ID NO: 333593 - RNA, 19 nt, Homo sapiens
  misc_RNA (1)...(19): siRNA sense strand
ucggaaaucugaauacaca

SEQ ID NO: 333594 - RNA, 19 nt, Homo sapiens
  misc_RNA (1)...(19): siRNA sense strand
aaagagagagauauacuga

SEQ ID NO: 333595 - RNA, 19 nt, Homo sapiens
  misc_RNA (1)...(19): siRNA sense strand
ucgaggaaauaacaaugua

SEQ ID NO: 333596 - RNA, 19 nt, Homo sapiens
  misc_RNA (1)...(19): siRNA sense strand
ccagagacauccugaucga

SEQ ID NO: 333597 - RNA, 19 nt, Homo sapiens
  misc_RNA (1)...(19): siRNA sense strand
gguagagacaugauuggua

SEQ ID NO: 333598 - RNA, 19 nt, Homo sapiens
  misc_RNA (1)...(19): siRNA sense strand
ccaagaagcuuauuuucga

SEQ ID NO: 333599 - RNA, 19 nt, Homo sapiens
  misc_RNA (1)...(19): siRNA sense strand
gagagaaacaaggucauuu

SEQ ID NO: 333600 - RNA, 19 nt, Homo sapiens
  misc_RNA (1)...(19): siRNA sense strand
gagauugacuauccaccau

SEQ ID NO: 333601 - RNA, 19 nt, Homo sapiens
  misc_RNA (1)...(19): siRNA sense strand
ucaggcagcuagagacaug

SEQ ID NO: 333602 - RNA, 19 nt, Homo sapiens
  misc_RNA (1)...(19): siRNA sense strand
ggaaaagcauauaaucuuc

SEQ ID NO: 333603 - RNA, 19 nt, Homo sapiens
  misc_RNA (1)...(19): siRNA sense strand
caacuuaugcaccagauuc

SEQ ID NO: 333604 - RNA, 19 nt, Homo sapiens
  misc_RNA (1)...(19): siRNA sense strand
ugacggaaauccaauugca

SEQ ID NO: 333605 - RNA, 19 nt, Homo sapiens
  misc_RNA (1)...(19): siRNA sense strand
gcacaacagggccauaaca

SEQ ID NO: 333606 - RNA, 19 nt, Homo sapiens
  misc_RNA (1)...(19): siRNA sense strand
agaaagguguggccuauac

SEQ ID NO: 333607 - RNA, 19 nt, Homo sapiens
  misc_RNA (1)...(19): siRNA sense strand
gcagaucgaauguuugaca

SEQ ID NO: 333608 - RNA, 19 nt, Homo sapiens
  misc_RNA (1)...(19): siRNA sense strand
ggauuugaguaccaaguuc

SEQ ID NO: 333609 - RNA, 19 nt, Homo sapiens
  misc_RNA (1)...(19): siRNA sense strand
ucaacacguuucuaaggaa

SEQ ID NO: 333610 - RNA, 19 nt, Homo sapiens
  misc_RNA (1)...(19): siRNA sense strand
gaagacaaucuagaauaug

SEQ ID NO: 333611 - RNA, 19 nt, Homo sapiens
  misc_RNA (1)...(19): siRNA sense strand
ggaaggagccaaucaacac

SEQ ID NO: 333612 - RNA, 19 nt, Homo sapiens
  misc_RNA (1)...(19): siRNA sense strand
gaagagcgggugagaaagg

SEQ ID NO: 333613 - RNA, 19 nt, Homo sapiens
  misc_RNA (1)...(19): siRNA sense strand
gcuagcgaauaaccuuaaa

SEQ ID NO: 333614 - RNA, 19 nt, Homo sapiens
  misc_RNA (1)...(19): siRNA sense strand
caaaacagguagugggaaa

SEQ ID NO: 333615 - RNA, 19 nt, Homo sapiens
  misc_RNA (1)...(19): siRNA sense strand
ggaaauccaauugcaccua

SEQ ID NO: 333616 - RNA, 19 nt, Homo sapiens
  misc_RNA (1)...(19): siRNA sense strand
gagcuagcgaauaaccuua

SEQ ID NO: 333617 - RNA, 19 nt, Homo sapiens
  misc_RNA (1)...(19): siRNA sense strand
aggcagacucucuuauuua

SEQ ID NO: 333618 - RNA, 19 nt, Homo sapiens
  misc_RNA (1)...(19): siRNA sense strand
ugacaggcagacucucuua

SEQ ID NO: 333619 - RNA, 19 nt, Homo sapiens
  misc_RNA (1)...(19): siRNA sense strand
guaaaggguauucgagaug

SEQ ID NO: 333620 - RNA, 19 nt, Homo sapiens
  misc_RNA (1)...(19): siRNA sense strand
gaagaugaccaagaagcuu

SEQ ID NO: 333621 - RNA, 19 nt, Homo sapiens
  misc_RNA (1)...(19): siRNA sense strand
gaucagagugagagaaaca

SEQ ID NO: 333622 - RNA, 19 nt, Homo sapiens
  misc_RNA (1)...(19): siRNA sense strand
gaagaggaagacaaucuag

SEQ ID NO: 333623 - RNA, 19 nt, Homo sapiens
  misc_RNA (1)...(19): siRNA sense strand
gagcuugaauucuguucca

SEQ ID NO: 333624 - RNA, 19 nt, Homo sapiens
  misc_RNA (1)...(19): siRNA sense strand
gagaucgacuaacggcaau

SEQ ID NO: 333625 - RNA, 19 nt, Homo sapiens
  misc_RNA (1)...(19): siRNA sense strand
gauagugacggaaauccaa

SEQ ID NO: 333626 - RNA, 19 nt, Homo sapiens
  misc_RNA (1)...(19): siRNA sense strand
aggaagacaaucuagaaua

SEQ ID NO: 333627 - RNA, 19 nt, Homo sapiens
  misc_RNA (1)...(19): siRNA sense strand
gagacuggcaaucggcaua

SEQ ID NO: 333628 - RNA, 19 nt, Homo sapiens
  misc_RNA (1)...(19): siRNA sense strand
gggaauaacagccgagaag

SEQ ID NO: 333629 - RNA, 19 nt, Homo sapiens
  misc_RNA (1)...(19): siRNA sense strand
gaucaguggccguauaugg

SEQ ID NO: 333630 - RNA, 19 nt, Homo sapiens
  misc_RNA (1)...(19): siRNA sense strand
gcagugauuguguguccua

SEQ ID NO: 333631 - RNA, 19 nt, Homo sapiens
  misc_RNA (1)...(19): siRNA sense strand
uggcccauguugauucaua

SEQ ID NO: 333632 - RNA, 19 nt, Homo sapiens
  misc_RNA (1)...(19): siRNA sense strand
aaacugcagccuucauuug

SEQ ID NO: 333633 - RNA, 19 nt, Homo sapiens
  misc_RNA (1)...(19): siRNA sense strand
ccuguggcauuaaguggua

SEQ ID NO: 333634 - RNA, 19 nt, Homo sapiens
  misc_RNA (1)...(19): siRNA sense strand
acaaugagcaugaagagau

SEQ ID NO: 333635 - RNA, 19 nt, Homo sapiens
  misc_RNA (1)...(19): siRNA sense strand
aagaugaccaagaagcuua

SEQ ID NO: 333636 - RNA, 19 nt, Homo sapiens
  misc_RNA (1)...(19): siRNA sense strand
aggaagagcgggugagaaa

SEQ ID NO: 333637 - RNA, 19 nt, Homo sapiens
  misc_RNA (1)...(19): siRNA sense strand
ggaaaucugaauacacaca

SEQ ID NO: 333638 - RNA, 19 nt, Homo sapiens
  misc_RNA (1)...(19): siRNA sense strand
gcuaugggagaucgacuaa

SEQ ID NO: 333639 - RNA, 19 nt, Homo sapiens
  misc_RNA (1)...(19): siRNA sense strand
gaagaggcuugaagaaaag

SEQ ID NO: 333640 - RNA, 19 nt, Homo sapiens
  misc_RNA (1)...(19): siRNA sense strand
acaggagggucauaaucuu

SEQ ID NO: 333641 - RNA, 19 nt, Homo sapiens
  misc_RNA (1)...(19): siRNA sense strand
uauucgagaugacauugaa

SEQ ID NO: 333642 - RNA, 19 nt, Homo sapiens
  misc_RNA (1)...(19): siRNA sense strand
acacacagcccacuccaau

SEQ ID NO: 333643 - RNA, 19 nt, Homo sapiens
  misc_RNA (1)...(19): siRNA sense strand
gcagagauuguugugugua

SEQ ID NO: 333644 - RNA, 19 nt, Homo sapiens
  misc_RNA (1)...(19): siRNA sense strand
gaucgaggaaauaacaaug

SEQ ID NO: 333645 - RNA, 19 nt, Homo sapiens
  misc_RNA (1)...(19): siRNA sense strand
gagaaagguguggccuaua

SEQ ID NO: 333646 - RNA, 19 nt, Homo sapiens
  misc_RNA (1)...(19): siRNA sense strand
cguaaaggguauucgagau

SEQ ID NO: 333647 - RNA, 19 nt, Homo sapiens
  misc_RNA (1)...(19): siRNA sense strand
aagcagaucgaauguuuga

SEQ ID NO: 333648 - RNA, 19 nt, Homo sapiens
  misc_RNA (1)...(19): siRNA sense strand
gaaagcuaccaaucuucaa

SEQ ID NO: 333649 - RNA, 19 nt, Homo sapiens
  misc_RNA (1)...(19): siRNA sense strand
agaggaagacaaucuagaa

SEQ ID NO: 333650 - RNA, 19 nt, Homo sapiens
  misc_RNA (1)...(19): siRNA sense strand
cggcauaagcucaaucuuc

SEQ ID NO: 333651 - RNA, 19 nt, Homo sapiens
  misc_RNA (1)...(19): siRNA sense strand
gcugaagagcuagcgaaua

SEQ ID NO: 333652 - RNA, 19 nt, Homo sapiens
  misc_RNA (1)...(19): siRNA sense strand
gcagcuagagacaugaaga

SEQ ID NO: 333653 - RNA, 19 nt, Homo sapiens
  misc_RNA (1)...(19): siRNA sense strand
ccaacuaacucagcacaac

SEQ ID NO: 333654 - RNA, 19 nt, Homo sapiens
  misc_RNA (1)...(19): siRNA sense strand
ggagaggacuugaucauua

SEQ ID NO: 333655 - RNA, 19 nt, Homo sapiens
  misc_RNA (1)...(19): siRNA sense strand
agaaagaaguggaagauuu

SEQ ID NO: 333656 - RNA, 19 nt, Homo sapiens
  misc_RNA (1)...(19): siRNA sense strand
gagaggacuugaucauuaa

SEQ ID NO: 333657 - RNA, 19 nt, Homo sapiens
  misc_RNA (1)...(19): siRNA sense strand
ggaaucagcguucauauau

SEQ ID NO: 333658 - RNA, 19 nt, Homo sapiens
  misc_RNA (1)...(19): siRNA sense strand
gcucaagcauggauucuaa

SEQ ID NO: 333659 - RNA, 19 nt, Homo sapiens
  misc_RNA (1)...(19): siRNA sense strand
caauagcaauagacaguua

SEQ ID NO: 333660 - RNA, 19 nt, Homo sapiens
  misc_RNA (1)...(19): siRNA sense strand
gaaagaaguggaagauuug

SEQ ID NO: 333661 - RNA, 19 nt, Homo sapiens
  misc_RNA (1)...(19): siRNA sense strand
gcaaacuuccuaauucuaa

SEQ ID NO: 333662 - RNA, 19 nt, Homo sapiens
  misc_RNA (1)...(19): siRNA sense strand
gaaaagagcaguccagaaa

SEQ ID NO: 333663 - RNA, 19 nt, Homo sapiens
  misc_RNA (1)...(19): siRNA sense strand
guacagaggacaugacuga

SEQ ID NO: 333664 - RNA, 19 nt, Homo sapiens
  misc_RNA (1)...(19): siRNA sense strand
gugcugcucuccacgguua

SEQ ID NO: 333665 - RNA, 19 nt, Homo sapiens
  misc_RNA (1)...(19): siRNA sense strand
gaaacacaagugaaaguaa

SEQ ID NO: 333666 - RNA, 19 nt, Homo sapiens
  misc_RNA (1)...(19): siRNA sense strand
ggaaaucugguguauguug

SEQ ID NO: 333667 - RNA, 19 nt, Homo sapiens
  misc_RNA (1)...(19): siRNA sense strand
gaaaucugguguauguugu

SEQ ID NO: 333668 - RNA, 19 nt, Homo sapiens
  misc_RNA (1)...(19): siRNA sense strand
gaaacaaucaagguaguaa

SEQ ID NO: 333669 - RNA, 19 nt, Homo sapiens
  misc_RNA (1)...(19): siRNA sense strand
caggguggauuugguaaua

SEQ ID NO: 333670 - RNA, 19 nt, Homo sapiens
  misc_RNA (1)...(19): siRNA sense strand
gaauaugaaacacaaguga

SEQ ID NO: 333671 - RNA, 19 nt, Homo sapiens
  misc_RNA (1)...(19): siRNA sense strand
ggacaugacugaggaugag

SEQ ID NO: 333672 - RNA, 19 nt, Homo sapiens
  misc_RNA (1)...(19): siRNA sense strand
caauagacaguuagaaaga

SEQ ID NO: 333673 - RNA, 19 nt, Homo sapiens
  misc_RNA (1)...(19): siRNA sense strand
caaucaagguaguaauaug

SEQ ID NO: 333674 - RNA, 19 nt, Homo sapiens
  misc_RNA (1)...(19): siRNA sense strand
caucagcagugaaagugaa

SEQ ID NO: 333675 - RNA, 19 nt, Homo sapiens
  misc_RNA (1)...(19): siRNA sense strand
uauaguggcucuaauucug

SEQ ID NO: 333676 - RNA, 19 nt, Homo sapiens
  misc_RNA (1)...(19): siRNA sense strand
gggcuucgcuacaggaauc

SEQ ID NO: 333677 - RNA, 19 nt, Homo sapiens
  misc_RNA (1)...(19): siRNA sense strand
ggaaacaaucaagguagua

SEQ ID NO: 333678 - RNA, 19 nt, Homo sapiens
  misc_RNA (1)...(19): siRNA sense strand
gcaauagacaguuagaaag

SEQ ID NO: 333679 - RNA, 19 nt, Homo sapiens
  misc_RNA (1)...(19): siRNA sense strand
gaacgaugagcccauugaa

SEQ ID NO: 333680 - RNA, 19 nt, Homo sapiens
  misc_RNA (1)...(19): siRNA sense strand
gaaucagcguucauauauc

SEQ ID NO: 333681 - RNA, 19 nt, Homo sapiens
  misc_RNA (1)...(19): siRNA sense strand
caagaugagccuuugagaa

SEQ ID NO: 333682 - RNA, 19 nt, Homo sapiens
  misc_RNA (1)...(19): siRNA sense strand
ccagaaaacauccgauuua

SEQ ID NO: 333683 - RNA, 19 nt, Homo sapiens
  misc_RNA (1)...(19): siRNA sense strand
ggggaaaucugguguaugu

SEQ ID NO: 333684 - RNA, 19 nt, Homo sapiens
  misc_RNA (1)...(19): siRNA sense strand
guucuggaaauaacucuua

SEQ ID NO: 333685 - RNA, 19 nt, Homo sapiens
  misc_RNA (1)...(19): siRNA sense strand
gggaaacaaucaagguagu

SEQ ID NO: 333686 - RNA, 19 nt, Homo sapiens
  misc_RNA (1)...(19): siRNA sense strand
cgaugagcccauugaaaua

SEQ ID NO: 333687 - RNA, 19 nt, Homo sapiens
  misc_RNA (1)...(19): siRNA sense strand
aaaggaaucagcguucaua

SEQ ID NO: 333688 - RNA, 19 nt, Homo sapiens
  misc_RNA (1)...(19): siRNA sense strand
ggccuucgguucuggaaau

SEQ ID NO: 333689 - RNA, 19 nt, Homo sapiens
  misc_RNA (1)...(19): siRNA sense strand
gaaccuaagcacaauagca

SEQ ID NO: 333690 - RNA, 19 nt, Homo sapiens
  misc_RNA (1)...(19): siRNA sense strand
ugagaacgaugagcccauu

SEQ ID NO: 333691 - RNA, 19 nt, Homo sapiens
  misc_RNA (1)...(19): siRNA sense strand
aagcauggauucuaagucu

SEQ ID NO: 333692 - RNA, 19 nt, Homo sapiens
  misc_RNA (1)...(19): siRNA sense strand
gaugagccuuugagaagca

SEQ ID NO: 333693 - RNA, 19 nt, Homo sapiens
  misc_RNA (1)...(19): siRNA sense strand
gggaguucuucucucagua

SEQ ID NO: 333694 - RNA, 19 nt, Homo sapiens
  misc_RNA (1)...(19): siRNA sense strand
cagaaaacauccgauuuaa

SEQ ID NO: 333695 - RNA, 19 nt, Homo sapiens
  misc_RNA (1)...(19): siRNA sense strand
ccuaagcacaauagcaaua

SEQ ID NO: 333696 - RNA, 19 nt, Homo sapiens
  misc_RNA (1)...(19): siRNA sense strand
gaucuuaagacuggucauu

SEQ ID NO: 333697 - RNA, 19 nt, Homo sapiens
  misc_RNA (1)...(19): siRNA sense strand
ccagguggcuuugggaauc

SEQ ID NO: 333698 - RNA, 19 nt, Homo sapiens
  misc_RNA (1)...(19): siRNA sense strand
cuacaggaauccagugucu

SEQ ID NO: 333699 - RNA, 19 nt, Homo sapiens
  misc_RNA (1)...(19): siRNA sense strand
ugaaacacaagugaaagua

SEQ ID NO: 333700 - RNA, 19 nt, Homo sapiens
  misc_RNA (1)...(19): siRNA sense strand
ggguuuggcuuuguucguu

SEQ ID NO: 333701 - RNA, 19 nt, Homo sapiens
  misc_RNA (1)...(19): siRNA sense strand
uaagacuggucauucaaag

SEQ ID NO: 333702 - RNA, 19 nt, Homo sapiens
  misc_RNA (1)...(19): siRNA sense strand
ggacuugaucauuaaagga

SEQ ID NO: 333703 - RNA, 19 nt, Homo sapiens
  misc_RNA (1)...(19): siRNA sense strand
acugcaaacuuccuaauuc

SEQ ID NO: 333704 - RNA, 19 nt, Homo sapiens
  misc_RNA (1)...(19): siRNA sense strand
gauggacgauggugugacu

SEQ ID NO: 333705 - RNA, 19 nt, Homo sapiens
  misc_RNA (1)...(19): siRNA sense strand
uuuggugcguucagcauua

SEQ ID NO: 333706 - RNA, 19 nt, Homo sapiens
  misc_RNA (1)...(19): siRNA sense strand
uaagcacaauagcaauaga

SEQ ID NO: 333707 - RNA, 19 nt, Homo sapiens
  misc_RNA (1)...(19): siRNA sense strand
gcauggauucuaagucuuc

SEQ ID NO: 333708 - RNA, 19 nt, Homo sapiens
  misc_RNA (1)...(19): siRNA sense strand
ucacagcgacauaugauag

SEQ ID NO: 333709 - RNA, 19 nt, Homo sapiens
  misc_RNA (1)...(19): siRNA sense strand
ucaggcccaucggguaaua

SEQ ID NO: 333710 - RNA, 19 nt, Homo sapiens
  misc_RNA (1)...(19): siRNA sense strand
gcauuaauccagccaugau

SEQ ID NO: 333711 - RNA, 19 nt, Homo sapiens
  misc_RNA (1)...(19): siRNA sense strand
aagaugagccuuugagaag

SEQ ID NO: 333712 - RNA, 19 nt, Homo sapiens
  misc_RNA (1)...(19): siRNA sense strand
ucuuaagacuggucauuca

SEQ ID NO: 333713 - RNA, 19 nt, Homo sapiens
  misc_RNA (1)...(19): siRNA sense strand
aguggaagauuugguggua

SEQ ID NO: 333714 - RNA, 19 nt, Homo sapiens
  misc_RNA (1)...(19): siRNA sense strand
ccgaagaugagaacgauga

SEQ ID NO: 333715 - RNA, 19 nt, Homo sapiens
  misc_RNA (1)...(19): siRNA sense strand
aggaaucagcguucauaua

SEQ ID NO: 333716 - RNA, 19 nt, Homo sapiens
  misc_RNA (1)...(19): siRNA sense strand
gacuugaucauuaaaggaa

SEQ ID NO: 333717 - RNA, 19 nt, Homo sapiens
  misc_RNA (1)...(19): siRNA sense strand
gggaugugauggaugucuu

SEQ ID NO: 333718 - RNA, 19 nt, Homo sapiens
  misc_RNA (1)...(19): siRNA sense strand
ggaauaugaaacacaagug

SEQ ID NO: 333719 - RNA, 19 nt, Homo sapiens
  misc_RNA (1)...(19): siRNA sense strand
gguuuggcuuuguucguuu

SEQ ID NO: 333720 - RNA, 19 nt, Homo sapiens
  misc_RNA (1)...(19): siRNA sense strand
acgaugagcccauugaaau

SEQ ID NO: 333721 - RNA, 19 nt, Homo sapiens
  misc_RNA (1)...(19): siRNA sense strand
uggaagauuuggugguaau

SEQ ID NO: 333722 - RNA, 19 nt, Homo sapiens
  misc_RNA (1)...(19): siRNA sense strand
aggaugagcugcgggaguu

SEQ ID NO: 333723 - RNA, 19 nt, Homo sapiens
  misc_RNA (1)...(19): siRNA sense strand
caaacuuccuaauucuaag

SEQ ID NO: 333724 - RNA, 19 nt, Homo sapiens
  misc_RNA (1)...(19): siRNA sense strand
uacggaauaugaaacacaa

SEQ ID NO: 333725 - RNA, 19 nt, Homo sapiens
  misc_RNA (1)...(19): siRNA sense strand
gacugcaaacuuccuaauu

SEQ ID NO: 333726 - RNA, 19 nt, Homo sapiens
  misc_RNA (1)...(19): siRNA sense strand
cacaauagcaauagacagu

SEQ ID NO: 333727 - RNA, 19 nt, Homo sapiens
  misc_RNA (1)...(19): siRNA sense strand
aacauccgauuuaauagug

SEQ ID NO: 333728 - RNA, 19 nt, Homo sapiens
  misc_RNA (1)...(19): siRNA sense strand
ggguaugaugggcauguua

SEQ ID NO: 333729 - RNA, 19 nt, Homo sapiens
  misc_RNA (1)...(19): siRNA sense strand
uauccaaugccgaaccuaa

SEQ ID NO: 333730 - RNA, 19 nt, Homo sapiens
  misc_RNA (1)...(19): siRNA sense strand
aauccagugucucagugua

SEQ ID NO: 333731 - RNA, 19 nt, Homo sapiens
  misc_RNA (1)...(19): siRNA sense strand
guggugggaugaacuuugg

SEQ ID NO: 333732 - RNA, 19 nt, Homo sapiens
  misc_RNA (1)...(19): siRNA sense strand
guggaagauuuggugguaa

SEQ ID NO: 333733 - RNA, 19 nt, Homo sapiens
  misc_RNA (1)...(19): siRNA sense strand
uuaaaggaaucagcguuca

SEQ ID NO: 333734 - RNA, 19 nt, Homo sapiens
  misc_RNA (1)...(19): siRNA sense strand
cagauugcgcagucucuuu

SEQ ID NO: 333735 - RNA, 19 nt, Homo sapiens
  misc_RNA (1)...(19): siRNA sense strand
auucagggccuuugccuuu

SEQ ID NO: 333736 - RNA, 19 nt, Homo sapiens
  misc_RNA (1)...(19): siRNA sense strand
cauccgauuuaauaguguu

SEQ ID NO: 333737 - RNA, 19 nt, Homo sapiens
  misc_RNA (1)...(19): siRNA sense strand
gaugagcccauugaaauac

SEQ ID NO: 333738 - RNA, 19 nt, Homo sapiens
  misc_RNA (1)...(19): siRNA sense strand
agcaauagacaguuagaaa

SEQ ID NO: 333739 - RNA, 19 nt, Homo sapiens
  misc_RNA (1)...(19): siRNA sense strand
cuaagcaaagccaagauga

SEQ ID NO: 333740 - RNA, 19 nt, Homo sapiens
  misc_RNA (1)...(19): siRNA sense strand
cugcaaacuuccuaauucu

SEQ ID NO: 333741 - RNA, 19 nt, Homo sapiens
  misc_RNA (1)...(19): siRNA sense strand
uggugcaggucaagaaaga

SEQ ID NO: 333742 - RNA, 19 nt, Homo sapiens
  misc_RNA (1)...(19): siRNA sense strand
cuuccuaauucuaagcaaa

SEQ ID NO: 333743 - RNA, 19 nt, Homo sapiens
  misc_RNA (1)...(19): siRNA sense strand
ggaugagacagaugcuuca

SEQ ID NO: 333744 - RNA, 19 nt, Homo sapiens
  misc_RNA (1)...(19): siRNA sense strand
aaucagcguucauauaucc

SEQ ID NO: 333745 - RNA, 19 nt, Homo sapiens
  misc_RNA (1)...(19): siRNA sense strand
aagccaagaugagccuuug

SEQ ID NO: 333746 - RNA, 19 nt, Homo sapiens
  misc_RNA (1)...(19): siRNA sense strand
uuaagacuggucauucaaa

SEQ ID NO: 333747 - RNA, 19 nt, Homo sapiens
  misc_RNA (1)...(19): siRNA sense strand
ccaagaugagccuuugaga

SEQ ID NO: 333748 - RNA, 19 nt, Homo sapiens
  misc_RNA (1)...(19): siRNA sense strand
gaccugaaagaguauuuua

SEQ ID NO: 333749 - RNA, 19 nt, Homo sapiens
  misc_RNA (1)...(19): siRNA sense strand
gguaugaugggcauguuag

SEQ ID NO: 333750 - RNA, 19 nt, Homo sapiens
  misc_RNA (1)...(19): siRNA sense strand
uaaccgaagaugagaacga

SEQ ID NO: 333751 - RNA, 19 nt, Homo sapiens
  misc_RNA (1)...(19): siRNA sense strand
acaggaauccagugucuca

SEQ ID NO: 333752 - RNA, 19 nt, Homo sapiens
  misc_RNA (1)...(19): siRNA sense strand
acgauggugugacugcaaa

SEQ ID NO: 333753 - RNA, 19 nt, Homo sapiens
  misc_RNA (1)...(19): siRNA sense strand
ucuuauaguggcucuaauu

SEQ ID NO: 333754 - RNA, 19 nt, Homo sapiens
  misc_RNA (1)...(19): siRNA sense strand
ggacgaugcugccacugua

SEQ ID NO: 333755 - RNA, 19 nt, Homo sapiens
  misc_RNA (1)...(19): siRNA sense strand
gcugaugucuuccaaguau

SEQ ID NO: 333756 - RNA, 19 nt, Homo sapiens
  misc_RNA (1)...(19): siRNA sense strand
gccgggaucuuccugauuu

SEQ ID NO: 333757 - RNA, 19 nt, Homo sapiens
  misc_RNA (1)...(19): siRNA sense strand
aagcagagcuccguggaua

SEQ ID NO: 333758 - RNA, 19 nt, Homo sapiens
  misc_RNA (1)...(19): siRNA sense strand
ggagcacgcuggacucguu

SEQ ID NO: 333759 - RNA, 19 nt, Homo sapiens
  misc_RNA (1)...(19): siRNA sense strand
gcacccacgucaucccuaa

SEQ ID NO: 333760 - RNA, 19 nt, Homo sapiens
  misc_RNA (1)...(19): siRNA sense strand
cagagaaggugcugcaguu

SEQ ID NO: 333761 - RNA, 19 nt, Homo sapiens
  misc_RNA (1)...(19): siRNA sense strand
agaaggugcugcaguuuga

SEQ ID NO: 333762 - RNA, 19 nt, Homo sapiens
  misc_RNA (1)...(19): siRNA sense strand
gcaucgaccugcucaucaa

SEQ ID NO: 333763 - RNA, 19 nt, Homo sapiens
  misc_RNA (1)...(19): siRNA sense strand
ccaccagacugaagauugu

SEQ ID NO: 333764 - RNA, 19 nt, Homo sapiens
  misc_RNA (1)...(19): siRNA sense strand
ccacgagaauggcuucaug

SEQ ID NO: 333765 - RNA, 19 nt, Homo sapiens
  misc_RNA (1)...(19): siRNA sense strand
gcaacaagaaggaguggaa

SEQ ID NO: 333766 - RNA, 19 nt, Homo sapiens
  misc_RNA (1)...(19): siRNA sense strand
agagagugcugaugucuuc

SEQ ID NO: 333767 - RNA, 19 nt, Homo sapiens
  misc_RNA (1)...(19): siRNA sense strand
gaacaacagcaacaagaag

SEQ ID NO: 333768 - RNA, 19 nt, Homo sapiens
  misc_RNA (1)...(19): siRNA sense strand
gcacggcuccuggaagauu

SEQ ID NO: 333769 - RNA, 19 nt, Homo sapiens
  misc_RNA (1)...(19): siRNA sense strand
gcaaggaggaguucacagu

SEQ ID NO: 333770 - RNA, 19 nt, Homo sapiens
  misc_RNA (1)...(19): siRNA sense strand
caagugggcaucuacaaug

SEQ ID NO: 333771 - RNA, 19 nt, Homo sapiens
  misc_RNA (1)...(19): siRNA sense strand
gguggcagauggcaaguuc

SEQ ID NO: 333772 - RNA, 19 nt, Homo sapiens
  misc_RNA (1)...(19): siRNA sense strand
ggacaugcaaggaggaguu

SEQ ID NO: 333773 - RNA, 19 nt, Homo sapiens
  misc_RNA (1)...(19): siRNA sense strand
ggucuacgccauccuaguu

SEQ ID NO: 333774 - RNA, 19 nt, Homo sapiens
  misc_RNA (1)...(19): siRNA sense strand
gcaagugggcaucuacaau

SEQ ID NO: 333775 - RNA, 19 nt, Homo sapiens
  misc_RNA (1)...(19): siRNA sense strand
gaacgagucggcccacauc

SEQ ID NO: 333776 - RNA, 19 nt, Homo sapiens
  misc_RNA (1)...(19): siRNA sense strand
gagaaggugcugcaguuug

SEQ ID NO: 333777 - RNA, 19 nt, Homo sapiens
  misc_RNA (1)...(19): siRNA sense strand
ggaguggaaugggaugaug

SEQ ID NO: 333778 - RNA, 19 nt, Homo sapiens
  misc_RNA (1)...(19): siRNA sense strand
ugacggcccugcugaugga

SEQ ID NO: 333779 - RNA, 19 nt, Homo sapiens
  misc_RNA (1)...(19): siRNA sense strand
gacugaagauugugacgau

SEQ ID NO: 333780 - RNA, 19 nt, Homo sapiens
  misc_RNA (1)...(19): siRNA sense strand
ucaucgagauugccuacaa

SEQ ID NO: 333781 - RNA, 19 nt, Homo sapiens
  misc_RNA (1)...(19): siRNA sense strand
cuaguuagccauccaccua

SEQ ID NO: 333782 - RNA, 19 nt, Homo sapiens
  misc_RNA (1)...(19): siRNA sense strand
gugcugaugucuuccaagu

SEQ ID NO: 333783 - RNA, 19 nt, Homo sapiens
  misc_RNA (1)...(19): siRNA sense strand
uuuccaagcccuucaagua

SEQ ID NO: 333784 - RNA, 19 nt, Homo sapiens
  misc_RNA (1)...(19): siRNA sense strand
uggaagaccuggacaagac

SEQ ID NO: 333785 - RNA, 19 nt, Homo sapiens
  misc_RNA (1)...(19): siRNA sense strand
agacguggguucgguauca

SEQ ID NO: 333786 - RNA, 19 nt, Homo sapiens
  misc_RNA (1)...(19): siRNA sense strand
ggaagcacgagcagauguu

SEQ ID NO: 333787 - RNA, 19 nt, Homo sapiens
  misc_RNA (1)...(19): siRNA sense strand
cuacacagccggcuucuac

SEQ ID NO: 333788 - RNA, 19 nt, Homo sapiens
  misc_RNA (1)...(19): siRNA sense strand
guuaacguguggcggaaga

SEQ ID NO: 333789 - RNA, 19 nt, Homo sapiens
  misc_RNA (1)...(19): siRNA sense strand
cccaagaucgucaacauug

SEQ ID NO: 333790 - RNA, 19 nt, Homo sapiens
  misc_RNA (1)...(19): siRNA sense strand
gugaacaacagcaacaaga

SEQ ID NO: 333791 - RNA, 19 nt, Homo sapiens
  misc_RNA (1)...(19): siRNA sense strand
ccuggaagauucagcucaa

SEQ ID NO: 333792 - RNA, 19 nt, Homo sapiens
  misc_RNA (1)...(19): siRNA sense strand
caagcugcaugccuucauc

SEQ ID NO: 333793 - RNA, 19 nt, Homo sapiens
  misc_RNA (1)...(19): siRNA sense strand
ucaagagagugcugauguc

SEQ ID NO: 333794 - RNA, 19 nt, Homo sapiens
  misc_RNA (1)...(19): siRNA sense strand
cgagaauggcuucauggaa

SEQ ID NO: 333795 - RNA, 19 nt, Homo sapiens
  misc_RNA (1)...(19): siRNA sense strand
gcagagcuccguggauauc

SEQ ID NO: 333796 - RNA, 19 nt, Homo sapiens
  misc_RNA (1)...(19): siRNA sense strand
ugaacaacagcaacaagaa

SEQ ID NO: 333797 - RNA, 19 nt, Homo sapiens
  misc_RNA (1)...(19): siRNA sense strand
caacggcgacccagucaag

SEQ ID NO: 333798 - RNA, 19 nt, Homo sapiens
  misc_RNA (1)...(19): siRNA sense strand
gcaacaccaacaucuggaa

SEQ ID NO: 333799 - RNA, 19 nt, Homo sapiens
  misc_RNA (1)...(19): siRNA sense strand
ccacccgcauguccaucua

SEQ ID NO: 333800 - RNA, 19 nt, Homo sapiens
  misc_RNA (1)...(19): siRNA sense strand
cacaggagcgggugaacaa

SEQ ID NO: 333801 - RNA, 19 nt, Homo sapiens
  misc_RNA (1)...(19): siRNA sense strand
ccaacuacagcaucaugaa

SEQ ID NO: 333802 - RNA, 19 nt, Homo sapiens
  misc_RNA (1)...(19): siRNA sense strand
ggaagauucagcucaaugc

SEQ ID NO: 333803 - RNA, 19 nt, Homo sapiens
  misc_RNA (1)...(19): siRNA sense strand
gaagcacaacuacgagagu

SEQ ID NO: 333804 - RNA, 19 nt, Homo sapiens
  misc_RNA (1)...(19): siRNA sense strand
aaggaggaguucacaguca

SEQ ID NO: 333805 - RNA, 19 nt, Homo sapiens
  misc_RNA (1)...(19): siRNA sense strand
ccaccuccgucacgcacaa

SEQ ID NO: 333806 - RNA, 19 nt, Homo sapiens
  misc_RNA (1)...(19): siRNA sense strand
gcagaugcagcuggccuuu

SEQ ID NO: 333807 - RNA, 19 nt, Homo sapiens
  misc_RNA (1)...(19): siRNA sense strand
ccucaagucccacgagaau

SEQ ID NO: 333808 - RNA, 19 nt, Homo sapiens
  misc_RNA (1)...(19): siRNA sense strand
gcacacaggagcgggugaa

SEQ ID NO: 333809 - RNA, 19 nt, Homo sapiens
  misc_RNA (1)...(19): siRNA sense strand
ccuaaugacaggaagauca

SEQ ID NO: 333810 - RNA, 19 nt, Homo sapiens
  misc_RNA (1)...(19): siRNA sense strand
ccucgaggguaccagaugu

SEQ ID NO: 333811 - RNA, 19 nt, Homo sapiens
  misc_RNA (1)...(19): siRNA sense strand
agagcuccguggauaucua

SEQ ID NO: 333812 - RNA, 19 nt, Homo sapiens
  misc_RNA (1)...(19): siRNA sense strand
ugacuggucgcguggaguu

SEQ ID NO: 333813 - RNA, 19 nt, Homo sapiens
  misc_RNA (1)...(19): siRNA sense strand
caucgagauugccuacaag

SEQ ID NO: 333814 - RNA, 19 nt, Homo sapiens
  misc_RNA (1)...(19): siRNA sense strand
gcaaagacagccccuggaa

SEQ ID NO: 333815 - RNA, 19 nt, Homo sapiens
  misc_RNA (1)...(19): siRNA sense strand
uggagaagcacaacuacga

SEQ ID NO: 333816 - RNA, 19 nt, Homo sapiens
  misc_RNA (1)...(19): siRNA sense strand
ccaggucuacgccauccua

SEQ ID NO: 333817 - RNA, 19 nt, Homo sapiens
  misc_RNA (1)...(19): siRNA sense strand
gaagcacgagcagauguuc

SEQ ID NO: 333818 - RNA, 19 nt, Homo sapiens
  misc_RNA (1)...(19): siRNA sense strand
ccuacaagcggcacaagga

SEQ ID NO: 333819 - RNA, 19 nt, Homo sapiens
  misc_RNA (1)...(19): siRNA sense strand
ucaagucccacgagaaugg

SEQ ID NO: 333820 - RNA, 19 nt, Homo sapiens
  misc_RNA (1)...(19): siRNA sense strand
gaagcagagcuccguggau

SEQ ID NO: 333821 - RNA, 19 nt, Homo sapiens
  misc_RNA (1)...(19): siRNA sense strand
ccucggacaaguuuaucua

SEQ ID NO: 333822 - RNA, 19 nt, Homo sapiens
  misc_RNA (1)...(19): siRNA sense strand
caauggcacccacgucauc

SEQ ID NO: 333823 - RNA, 19 nt, Homo sapiens
  misc_RNA (1)...(19): siRNA sense strand
gcgugugguuugagaugau

SEQ ID NO: 333824 - RNA, 19 nt, Homo sapiens
  misc_RNA (1)...(19): siRNA sense strand
caacaagaaggaguggaau

SEQ ID NO: 333825 - RNA, 19 nt, Homo sapiens
  misc_RNA (1)...(19): siRNA sense strand
accaggagcccuucgugua

SEQ ID NO: 333826 - RNA, 19 nt, Homo sapiens
  misc_RNA (1)...(19): siRNA sense strand
gagugcugaugucuuccaa

SEQ ID NO: 333827 - RNA, 19 nt, Homo sapiens
  misc_RNA (1)...(19): siRNA sense strand
gaaccccucggacaaguuu

SEQ ID NO: 333828 - RNA, 19 nt, Homo sapiens
  misc_RNA (1)...(19): siRNA sense strand
gcucaucaacggcaagaac

SEQ ID NO: 333829 - RNA, 19 nt, Homo sapiens
  misc_RNA (1)...(19): siRNA sense strand
agaugcagcuggccuuugc

SEQ ID NO: 333830 - RNA, 19 nt, Homo sapiens
  misc_RNA (1)...(19): siRNA sense strand
aggaggaguucacagucaa

SEQ ID NO: 333831 - RNA, 19 nt, Homo sapiens
  misc_RNA (1)...(19): siRNA sense strand
ucaagcccacgcugaguga

SEQ ID NO: 333832 - RNA, 19 nt, Homo sapiens
  misc_RNA (1)...(19): siRNA sense strand
cagauguccaccagacuga

SEQ ID NO: 333833 - RNA, 19 nt, Homo sapiens
  misc_RNA (1)...(19): siRNA sense strand
caagagagugcugaugucu

SEQ ID NO: 333834 - RNA, 19 nt, Homo sapiens
  misc_RNA (1)...(19): siRNA sense strand
caagacguggguucgguau

SEQ ID NO: 333835 - RNA, 19 nt, Homo sapiens
  misc_RNA (1)...(19): siRNA sense strand
auauggagaagcacaacua

SEQ ID NO: 333836 - RNA, 19 nt, Homo sapiens
  misc_RNA (1)...(19): siRNA sense strand
ccaggagcccuucguguac

SEQ ID NO: 333837 - RNA, 19 nt, Homo sapiens
  misc_RNA (1)...(19): siRNA sense strand
caacuacagcaucaugaac

SEQ ID NO: 333838 - RNA, 19 nt, Homo sapiens
  misc_RNA (1)...(19): siRNA sense strand
gccaacuacagcaucauga

SEQ ID NO: 333839 - RNA, 19 nt, Homo sapiens
  misc_RNA (1)...(19): siRNA sense strand
gagcgcaucacgggcauca

SEQ ID NO: 333840 - RNA, 19 nt, Homo sapiens
  misc_RNA (1)...(19): siRNA sense strand
ggacgaugcugccacugua

SEQ ID NO: 333841 - RNA, 19 nt, Homo sapiens
  misc_RNA (1)...(19): siRNA sense strand
gcugaugucuuccaaguau

SEQ ID NO: 333842 - RNA, 19 nt, Homo sapiens
  misc_RNA (1)...(19): siRNA sense strand
gccgggaucuuccugauuu

SEQ ID NO: 333843 - RNA, 19 nt, Homo sapiens
  misc_RNA (1)...(19): siRNA sense strand
aagcagagcuccguggaua

SEQ ID NO: 333844 - RNA, 19 nt, Homo sapiens
  misc_RNA (1)...(19): siRNA sense strand
ggagcacgcuggacucguu

SEQ ID NO: 333845 - RNA, 19 nt, Homo sapiens
  misc_RNA (1)...(19): siRNA sense strand
gcacccacgucaucccuaa

SEQ ID NO: 333846 - RNA, 19 nt, Homo sapiens
  misc_RNA (1)...(19): siRNA sense strand
cagagaaggugcugcaguu

SEQ ID NO: 333847 - RNA, 19 nt, Homo sapiens
  misc_RNA (1)...(19): siRNA sense strand
agaaggugcugcaguuuga

SEQ ID NO: 333848 - RNA, 19 nt, Homo sapiens
  misc_RNA (1)...(19): siRNA sense strand
gcaucgaccugcucaucaa

SEQ ID NO: 333849 - RNA, 19 nt, Homo sapiens
  misc_RNA (1)...(19): siRNA sense strand
ccaccagacugaagauugu

SEQ ID NO: 333850 - RNA, 19 nt, Homo sapiens
  misc_RNA (1)...(19): siRNA sense strand
ccacgagaauggcuucaug

SEQ ID NO: 333851 - RNA, 19 nt, Homo sapiens
  misc_RNA (1)...(19): siRNA sense strand
gcaacaagaaggaguggaa

SEQ ID NO: 333852 - RNA, 19 nt, Homo sapiens
  misc_RNA (1)...(19): siRNA sense strand
agagagugcugaugucuuc

SEQ ID NO: 333853 - RNA, 19 nt, Homo sapiens
  misc_RNA (1)...(19): siRNA sense strand
gaacaacagcaacaagaag

SEQ ID NO: 333854 - RNA, 19 nt, Homo sapiens
  misc_RNA (1)...(19): siRNA sense strand
gcacggcuccuggaagauu

SEQ ID NO: 333855 - RNA, 19 nt, Homo sapiens
  misc_RNA (1)...(19): siRNA sense strand
gcaaggaggaguucacagu

SEQ ID NO: 333856 - RNA, 19 nt, Homo sapiens
  misc_RNA (1)...(19): siRNA sense strand
caagugggcaucuacaaug

SEQ ID NO: 333857 - RNA, 19 nt, Homo sapiens
  misc_RNA (1)...(19): siRNA sense strand
gguggcagauggcaaguuc

SEQ ID NO: 333858 - RNA, 19 nt, Homo sapiens
  misc_RNA (1)...(19): siRNA sense strand
ggacaugcaaggaggaguu

SEQ ID NO: 333859 - RNA, 19 nt, Homo sapiens
  misc_RNA (1)...(19): siRNA sense strand
ggucuacgccauccuaguu

SEQ ID NO: 333860 - RNA, 19 nt, Homo sapiens
  misc_RNA (1)...(19): siRNA sense strand
gcaagugggcaucuacaau

SEQ ID NO: 333861 - RNA, 19 nt, Homo sapiens
  misc_RNA (1)...(19): siRNA sense strand
gaacgagucggcccacauc

SEQ ID NO: 333862 - RNA, 19 nt, Homo sapiens
  misc_RNA (1)...(19): siRNA sense strand
gagaaggugcugcaguuug

SEQ ID NO: 333863 - RNA, 19 nt, Homo sapiens
  misc_RNA (1)...(19): siRNA sense strand
ggaguggaaugggaugaug

SEQ ID NO: 333864 - RNA, 19 nt, Homo sapiens
  misc_RNA (1)...(19): siRNA sense strand
ugacggcccugcugaugga

SEQ ID NO: 333865 - RNA, 19 nt, Homo sapiens
  misc_RNA (1)...(19): siRNA sense strand
gacugaagauugugacgau

SEQ ID NO: 333866 - RNA, 19 nt, Homo sapiens
  misc_RNA (1)...(19): siRNA sense strand
ucaucgagauugccuacaa

SEQ ID NO: 333867 - RNA, 19 nt, Homo sapiens
  misc_RNA (1)...(19): siRNA sense strand
cuaguuagccauccaccua

SEQ ID NO: 333868 - RNA, 19 nt, Homo sapiens
  misc_RNA (1)...(19): siRNA sense strand
gugcugaugucuuccaagu

SEQ ID NO: 333869 - RNA, 19 nt, Homo sapiens
  misc_RNA (1)...(19): siRNA sense strand
uuuccaagcccuucaagua

SEQ ID NO: 333870 - RNA, 19 nt, Homo sapiens
  misc_RNA (1)...(19): siRNA sense strand
uggaagaccuggacaagac

SEQ ID NO: 333871 - RNA, 19 nt, Homo sapiens
  misc_RNA (1)...(19): siRNA sense strand
agacguggguucgguauca

SEQ ID NO: 333872 - RNA, 19 nt, Homo sapiens
  misc_RNA (1)...(19): siRNA sense strand
ggaagcacgagcagauguu

SEQ ID NO: 333873 - RNA, 19 nt, Homo sapiens
  misc_RNA (1)...(19): siRNA sense strand
cuacacagccggcuucuac

SEQ ID NO: 333874 - RNA, 19 nt, Homo sapiens
  misc_RNA (1)...(19): siRNA sense strand
guuaacguguggcggaaga

SEQ ID NO: 333875 - RNA, 19 nt, Homo sapiens
  misc_RNA (1)...(19): siRNA sense strand
cccaagaucgucaacauug

SEQ ID NO: 333876 - RNA, 19 nt, Homo sapiens
  misc_RNA (1)...(19): siRNA sense strand
gugaacaacagcaacaaga

SEQ ID NO: 333877 - RNA, 19 nt, Homo sapiens
  misc_RNA (1)...(19): siRNA sense strand
ccuggaagauucagcucaa

SEQ ID NO: 333878 - RNA, 19 nt, Homo sapiens
  misc_RNA (1)...(19): siRNA sense strand
caagcugcaugccuucauc

SEQ ID NO: 333879 - RNA, 19 nt, Homo sapiens
  misc_RNA (1)...(19): siRNA sense strand
ucaagagagugcugauguc

SEQ ID NO: 333880 - RNA, 19 nt, Homo sapiens
  misc_RNA (1)...(19): siRNA sense strand
cgagaauggcuucauggaa

SEQ ID NO: 333881 - RNA, 19 nt, Homo sapiens
  misc_RNA (1)...(19): siRNA sense strand
gcagagcuccguggauauc

SEQ ID NO: 333882 - RNA, 19 nt, Homo sapiens
  misc_RNA (1)...(19): siRNA sense strand
ugaacaacagcaacaagaa

SEQ ID NO: 333883 - RNA, 19 nt, Homo sapiens
  misc_RNA (1)...(19): siRNA sense strand
caacggcgacccagucaag

SEQ ID NO: 333884 - RNA, 19 nt, Homo sapiens
  misc_RNA (1)...(19): siRNA sense strand
gcaacaccaacaucuggaa

SEQ ID NO: 333885 - RNA, 19 nt, Homo sapiens
  misc_RNA (1)...(19): siRNA sense strand
ccacccgcauguccaucua

SEQ ID NO: 333886 - RNA, 19 nt, Homo sapiens
  misc_RNA (1)...(19): siRNA sense strand
cacaggagcgggugaacaa

SEQ ID NO: 333887 - RNA, 19 nt, Homo sapiens
  misc_RNA (1)...(19): siRNA sense strand
ccaacuacagcaucaugaa

SEQ ID NO: 333888 - RNA, 19 nt, Homo sapiens
  misc_RNA (1)...(19): siRNA sense strand
ggaagauucagcucaaugc

SEQ ID NO: 333889 - RNA, 19 nt, Homo sapiens
  misc_RNA (1)...(19): siRNA sense strand
gaagcacaacuacgagagu

SEQ ID NO: 333890 - RNA, 19 nt, Homo sapiens
  misc_RNA (1)...(19): siRNA sense strand
aaggaggaguucacaguca

SEQ ID NO: 333891 - RNA, 19 nt, Homo sapiens
  misc_RNA (1)...(19): siRNA sense strand
ccaccuccgucacgcacaa

SEQ ID NO: 333892 - RNA, 19 nt, Homo sapiens
  misc_RNA (1)...(19): siRNA sense strand
gcagaugcagcuggccuuu

SEQ ID NO: 333893 - RNA, 19 nt, Homo sapiens
  misc_RNA (1)...(19): siRNA sense strand
ccucaagucccacgagaau

SEQ ID NO: 333894 - RNA, 19 nt, Homo sapiens
  misc_RNA (1)...(19): siRNA sense strand
gcacacaggagcgggugaa

SEQ ID NO: 333895 - RNA, 19 nt, Homo sapiens
  misc_RNA (1)...(19): siRNA sense strand
ccuaaugacaggaagauca

SEQ ID NO: 333896 - RNA, 19 nt, Homo sapiens
  misc_RNA (1)...(19): siRNA sense strand
ccucgaggguaccagaugu

SEQ ID NO: 333897 - RNA, 19 nt, Homo sapiens
  misc_RNA (1)...(19): siRNA sense strand
agagcuccguggauaucua

SEQ ID NO: 333898 - RNA, 19 nt, Homo sapiens
  misc_RNA (1)...(19): siRNA sense strand
ugacuggucgcguggaguu

SEQ ID NO: 333899 - RNA, 19 nt, Homo sapiens
  misc_RNA (1)...(19): siRNA sense strand
caucgagauugccuacaag

SEQ ID NO: 333900 - RNA, 19 nt, Homo sapiens
  misc_RNA (1)...(19): siRNA sense strand
gcaaagacagccccuggaa

SEQ ID NO: 333901 - RNA, 19 nt, Homo sapiens
  misc_RNA (1)...(19): siRNA sense strand
uggagaagcacaacuacga

SEQ ID NO: 333902 - RNA, 19 nt, Homo sapiens
  misc_RNA (1)...(19): siRNA sense strand
ccaggucuacgccauccua

SEQ ID NO: 333903 - RNA, 19 nt, Homo sapiens
  misc_RNA (1)...(19): siRNA sense strand
gaagcacgagcagauguuc

SEQ ID NO: 333904 - RNA, 19 nt, Homo sapiens
  misc_RNA (1)...(19): siRNA sense strand
ccuacaagcggcacaagga

SEQ ID NO: 333905 - RNA, 19 nt, Homo sapiens
  misc_RNA (1)...(19): siRNA sense strand
ucaagucccacgagaaugg

SEQ ID NO: 333906 - RNA, 19 nt, Homo sapiens
  misc_RNA (1)...(19): siRNA sense strand
gaagcagagcuccguggau

SEQ ID NO: 333907 - RNA, 19 nt, Homo sapiens
  misc_RNA (1)...(19): siRNA sense strand
ccucggacaaguuuaucua

SEQ ID NO: 333908 - RNA, 19 nt, Homo sapiens
  misc_RNA (1)...(19): siRNA sense strand
caauggcacccacgucauc

SEQ ID NO: 333909 - RNA, 19 nt, Homo sapiens
  misc_RNA (1)...(19): siRNA sense strand
gcgugugguuugagaugau

SEQ ID NO: 333910 - RNA, 19 nt, Homo sapiens
  misc_RNA (1)...(19): siRNA sense strand
caacaagaaggaguggaau

SEQ ID NO: 333911 - RNA, 19 nt, Homo sapiens
  misc_RNA (1)...(19): siRNA sense strand
accaggagcccuucgugua

SEQ ID NO: 333912 - RNA, 19 nt, Homo sapiens
  misc_RNA (1)...(19): siRNA sense strand
gagugcugaugucuuccaa

SEQ ID NO: 333913 - RNA, 19 nt, Homo sapiens
  misc_RNA (1)...(19): siRNA sense strand
gaaccccucggacaaguuu

SEQ ID NO: 333914 - RNA, 19 nt, Homo sapiens
  misc_RNA (1)...(19): siRNA sense strand
gcucaucaacggcaagaac

SEQ ID NO: 333915 - RNA, 19 nt, Homo sapiens
  misc_RNA (1)...(19): siRNA sense strand
agaugcagcuggccuuugc

SEQ ID NO: 333916 - RNA, 19 nt, Homo sapiens
  misc_RNA (1)...(19): siRNA sense strand
aggaggaguucacagucaa

SEQ ID NO: 333917 - RNA, 19 nt, Homo sapiens
  misc_RNA (1)...(19): siRNA sense strand
ucaagcccacgcugaguga

SEQ ID NO: 333918 - RNA, 19 nt, Homo sapiens
  misc_RNA (1)...(19): siRNA sense strand
cagauguccaccagacuga

SEQ ID NO: 333919 - RNA, 19 nt, Homo sapiens
  misc_RNA (1)...(19): siRNA sense strand
caagagagugcugaugucu

SEQ ID NO: 333920 - RNA, 19 nt, Homo sapiens
  misc_RNA (1)...(19): siRNA sense strand
caagacguggguucgguau

SEQ ID NO: 333921 - RNA, 19 nt, Homo sapiens
  misc_RNA (1)...(19): siRNA sense strand
auauggagaagcacaacua

SEQ ID NO: 333922 - RNA, 19 nt, Homo sapiens
  misc_RNA (1)...(19): siRNA sense strand
ccaggagcccuucguguac

SEQ ID NO: 333923 - RNA, 19 nt, Homo sapiens
  misc_RNA (1)...(19): siRNA sense strand
caacuacagcaucaugaac

SEQ ID NO: 333924 - RNA, 19 nt, Homo sapiens
  misc_RNA (1)...(19): siRNA sense strand
gccaacuacagcaucauga

SEQ ID NO: 333925 - RNA, 19 nt, Homo sapiens
  misc_RNA (1)...(19): siRNA sense strand
gagcgcaucacgggcauca

SEQ ID NO: 333926 - RNA, 19 nt, Homo sapiens
  misc_RNA (1)...(19): siRNA sense strand
ggacgaugcugccacugua

SEQ ID NO: 333927 - RNA, 19 nt, Homo sapiens
  misc_RNA (1)...(19): siRNA sense strand
gcugaugucuuccaaguau

SEQ ID NO: 333928 - RNA, 19 nt, Homo sapiens
  misc_RNA (1)...(19): siRNA sense strand
gccgggaucuuccugauuu

SEQ ID NO: 333929 - RNA, 19 nt, Homo sapiens
  misc_RNA (1)...(19): siRNA sense strand
aagcagagcuccguggaua

SEQ ID NO: 333930 - RNA, 19 nt, Homo sapiens
  misc_RNA (1)...(19): siRNA sense strand
ggagcacgcuggacucguu

SEQ ID NO: 333931 - RNA, 19 nt, Homo sapiens
  misc_RNA (1)...(19): siRNA sense strand
gcacccacgucaucccuaa

SEQ ID NO: 333932 - RNA, 19 nt, Homo sapiens
  misc_RNA (1)...(19): siRNA sense strand
cagagaaggugcugcaguu

SEQ ID NO: 333933 - RNA, 19 nt, Homo sapiens
  misc_RNA (1)...(19): siRNA sense strand
agaaggugcugcaguuuga

SEQ ID NO: 333934 - RNA, 19 nt, Homo sapiens
  misc_RNA (1)...(19): siRNA sense strand
gcaucgaccugcucaucaa

SEQ ID NO: 333935 - RNA, 19 nt, Homo sapiens
  misc_RNA (1)...(19): siRNA sense strand
ccaccagacugaagauugu

SEQ ID NO: 333936 - RNA, 19 nt, Homo sapiens
  misc_RNA (1)...(19): siRNA sense strand
ccacgagaauggcuucaug

SEQ ID NO: 333937 - RNA, 19 nt, Homo sapiens
  misc_RNA (1)...(19): siRNA sense strand
gcaacaagaaggaguggaa

SEQ ID NO: 333938 - RNA, 19 nt, Homo sapiens
  misc_RNA (1)...(19): siRNA sense strand
agagagugcugaugucuuc

SEQ ID NO: 333939 - RNA, 19 nt, Homo sapiens
  misc_RNA (1)...(19): siRNA sense strand
gaacaacagcaacaagaag

SEQ ID NO: 333940 - RNA, 19 nt, Homo sapiens
  misc_RNA (1)...(19): siRNA sense strand
gcacggcuccuggaagauu

SEQ ID NO: 333941 - RNA, 19 nt, Homo sapiens
  misc_RNA (1)...(19): siRNA sense strand
gcaaggaggaguucacagu

SEQ ID NO: 333942 - RNA, 19 nt, Homo sapiens
  misc_RNA (1)...(19): siRNA sense strand
caagugggcaucuacaaug

SEQ ID NO: 333943 - RNA, 19 nt, Homo sapiens
  misc_RNA (1)...(19): siRNA sense strand
gguggcagauggcaaguuc

SEQ ID NO: 333944 - RNA, 19 nt, Homo sapiens
  misc_RNA (1)...(19): siRNA sense strand
ggacaugcaaggaggaguu

SEQ ID NO: 333945 - RNA, 19 nt, Homo sapiens
  misc_RNA (1)...(19): siRNA sense strand
ggucuacgccauccuaguu

SEQ ID NO: 333946 - RNA, 19 nt, Homo sapiens
  misc_RNA (1)...(19): siRNA sense strand
gcaagugggcaucuacaau

SEQ ID NO: 333947 - RNA, 19 nt, Homo sapiens
  misc_RNA (1)...(19): siRNA sense strand
gaacgagucggcccacauc

SEQ ID NO: 333948 - RNA, 19 nt, Homo sapiens
  misc_RNA (1)...(19): siRNA sense strand
gagaaggugcugcaguuug

SEQ ID NO: 333949 - RNA, 19 nt, Homo sapiens
  misc_RNA (1)...(19): siRNA sense strand
ggaguggaaugggaugaug

SEQ ID NO: 333950 - RNA, 19 nt, Homo sapiens
  misc_RNA (1)...(19): siRNA sense strand
ugacggcccugcugaugga

SEQ ID NO: 333951 - RNA, 19 nt, Homo sapiens
  misc_RNA (1)...(19): siRNA sense strand
gacugaagauugugacgau

SEQ ID NO: 333952 - RNA, 19 nt, Homo sapiens
  misc_RNA (1)...(19): siRNA sense strand
ucaucgagauugccuacaa

SEQ ID NO: 333953 - RNA, 19 nt, Homo sapiens
  misc_RNA (1)...(19): siRNA sense strand
cuaguuagccauccaccua

SEQ ID NO: 333954 - RNA, 19 nt, Homo sapiens
  misc_RNA (1)...(19): siRNA sense strand
gugcugaugucuuccaagu

SEQ ID NO: 333955 - RNA, 19 nt, Homo sapiens
  misc_RNA (1)...(19): siRNA sense strand
uuuccaagcccuucaagua

SEQ ID NO: 333956 - RNA, 19 nt, Homo sapiens
  misc_RNA (1)...(19): siRNA sense strand
uggaagaccuggacaagac

SEQ ID NO: 333957 - RNA, 19 nt, Homo sapiens
  misc_RNA (1)...(19): siRNA sense strand
agacguggguucgguauca

SEQ ID NO: 333958 - RNA, 19 nt, Homo sapiens
  misc_RNA (1)...(19): siRNA sense strand
ggaagcacgagcagauguu

SEQ ID NO: 333959 - RNA, 19 nt, Homo sapiens
  misc_RNA (1)...(19): siRNA sense strand
cuacacagccggcuucuac

SEQ ID NO: 333960 - RNA, 19 nt, Homo sapiens
  misc_RNA (1)...(19): siRNA sense strand
guuaacguguggcggaaga

SEQ ID NO: 333961 - RNA, 19 nt, Homo sapiens
  misc_RNA (1)...(19): siRNA sense strand
cccaagaucgucaacauug

SEQ ID NO: 333962 - RNA, 19 nt, Homo sapiens
  misc_RNA (1)...(19): siRNA sense strand
gugaacaacagcaacaaga

SEQ ID NO: 333963 - RNA, 19 nt, Homo sapiens
  misc_RNA (1)...(19): siRNA sense strand
ccuggaagauucagcucaa

SEQ ID NO: 333964 - RNA, 19 nt, Homo sapiens
  misc_RNA (1)...(19): siRNA sense strand
caagcugcaugccuucauc

SEQ ID NO: 333965 - RNA, 19 nt, Homo sapiens
  misc_RNA (1)...(19): siRNA sense strand
ucaagagagugcugauguc

SEQ ID NO: 333966 - RNA, 19 nt, Homo sapiens
  misc_RNA (1)...(19): siRNA sense strand
cgagaauggcuucauggaa

SEQ ID NO: 333967 - RNA, 19 nt, Homo sapiens
  misc_RNA (1)...(19): siRNA sense strand
gcagagcuccguggauauc

SEQ ID NO: 333968 - RNA, 19 nt, Homo sapiens
  misc_RNA (1)...(19): siRNA sense strand
ugaacaacagcaacaagaa

SEQ ID NO: 333969 - RNA, 19 nt, Homo sapiens
  misc_RNA (1)...(19): siRNA sense strand
caacggcgacccagucaag

SEQ ID NO: 333970 - RNA, 19 nt, Homo sapiens
  misc_RNA (1)...(19): siRNA sense strand
gcaacaccaacaucuggaa

SEQ ID NO: 333971 - RNA, 19 nt, Homo sapiens
  misc_RNA (1)...(19): siRNA sense strand
ccacccgcauguccaucua

SEQ ID NO: 333972 - RNA, 19 nt, Homo sapiens
  misc_RNA (1)...(19): siRNA sense strand
cacaggagcgggugaacaa

SEQ ID NO: 333973 - RNA, 19 nt, Homo sapiens
  misc_RNA (1)...(19): siRNA sense strand
ccaacuacagcaucaugaa

SEQ ID NO: 333974 - RNA, 19 nt, Homo sapiens
  misc_RNA (1)...(19): siRNA sense strand
ggaagauucagcucaaugc

SEQ ID NO: 333975 - RNA, 19 nt, Homo sapiens
  misc_RNA (1)...(19): siRNA sense strand
gaagcacaacuacgagagu

SEQ ID NO: 333976 - RNA, 19 nt, Homo sapiens
  misc_RNA (1)...(19): siRNA sense strand
aaggaggaguucacaguca

SEQ ID NO: 333977 - RNA, 19 nt, Homo sapiens
  misc_RNA (1)...(19): siRNA sense strand
ccaccuccgucacgcacaa

SEQ ID NO: 333978 - RNA, 19 nt, Homo sapiens
  misc_RNA (1)...(19): siRNA sense strand
gcagaugcagcuggccuuu

SEQ ID NO: 333979 - RNA, 19 nt, Homo sapiens
  misc_RNA (1)...(19): siRNA sense strand
ccucaagucccacgagaau

SEQ ID NO: 333980 - RNA, 19 nt, Homo sapiens
  misc_RNA (1)...(19): siRNA sense strand
gcacacaggagcgggugaa

SEQ ID NO: 333981 - RNA, 19 nt, Homo sapiens
  misc_RNA (1)...(19): siRNA sense strand
ccuaaugacaggaagauca

SEQ ID NO: 333982 - RNA, 19 nt, Homo sapiens
  misc_RNA (1)...(19): siRNA sense strand
ccucgaggguaccagaugu

SEQ ID NO: 333983 - RNA, 19 nt, Homo sapiens
  misc_RNA (1)...(19): siRNA sense strand
agagcuccguggauaucua

SEQ ID NO: 333984 - RNA, 19 nt, Homo sapiens
  misc_RNA (1)...(19): siRNA sense strand
ugacuggucgcguggaguu

SEQ ID NO: 333985 - RNA, 19 nt, Homo sapiens
  misc_RNA (1)...(19): siRNA sense strand
caucgagauugccuacaag

SEQ ID NO: 333986 - RNA, 19 nt, Homo sapiens
  misc_RNA (1)...(19): siRNA sense strand
gcaaagacagccccuggaa

SEQ ID NO: 333987 - RNA, 19 nt, Homo sapiens
  misc_RNA (1)...(19): siRNA sense strand
uggagaagcacaacuacga

SEQ ID NO: 333988 - RNA, 19 nt, Homo sapiens
  misc_RNA (1)...(19): siRNA sense strand
ccaggucuacgccauccua

SEQ ID NO: 333989 - RNA, 19 nt, Homo sapiens
  misc_RNA (1)...(19): siRNA sense strand
gaagcacgagcagauguuc

SEQ ID NO: 333990 - RNA, 19 nt, Homo sapiens
  misc_RNA (1)...(19): siRNA sense strand
ccuacaagcggcacaagga

SEQ ID NO: 333991 - RNA, 19 nt, Homo sapiens
  misc_RNA (1)...(19): siRNA sense strand
ucaagucccacgagaaugg

SEQ ID NO: 333992 - RNA, 19 nt, Homo sapiens
  misc_RNA (1)...(19): siRNA sense strand
gaagcagagcuccguggau

SEQ ID NO: 333993 - RNA, 19 nt, Homo sapiens
  misc_RNA (1)...(19): siRNA sense strand
ccucggacaaguuuaucua

SEQ ID NO: 333994 - RNA, 19 nt, Homo sapiens
  misc_RNA (1)...(19): siRNA sense strand
caauggcacccacgucauc

SEQ ID NO: 333995 - RNA, 19 nt, Homo sapiens
  misc_RNA (1)...(19): siRNA sense strand
gcgugugguuugagaugau

SEQ ID NO: 333996 - RNA, 19 nt, Homo sapiens
  misc_RNA (1)...(19): siRNA sense strand
caacaagaaggaguggaau

SEQ ID NO: 333997 - RNA, 19 nt, Homo sapiens
  misc_RNA (1)...(19): siRNA sense strand
accaggagcccuucgugua

SEQ ID NO: 333998 - RNA, 19 nt, Homo sapiens
  misc_RNA (1)...(19): siRNA sense strand
gagugcugaugucuuccaa

SEQ ID NO: 333999 - RNA, 19 nt, Homo sapiens
  misc_RNA (1)...(19): siRNA sense strand
gaaccccucggacaaguuu

SEQ ID NO: 334000 - RNA, 19 nt, Homo sapiens
  misc_RNA (1)...(19): siRNA sense strand
gcucaucaacggcaagaac

SEQ ID NO: 334001 - RNA, 19 nt, Homo sapiens
  misc_RNA (1)...(19): siRNA sense strand
agaugcagcuggccuuugc

SEQ ID NO: 334002 - RNA, 19 nt, Homo sapiens
  misc_RNA (1)...(19): siRNA sense strand
aggaggaguucacagucaa

SEQ ID NO: 334003 - RNA, 19 nt, Homo sapiens
  misc_RNA (1)...(19): siRNA sense strand
ucaagcccacgcugaguga

SEQ ID NO: 334004 - RNA, 19 nt, Homo sapiens
  misc_RNA (1)...(19): siRNA sense strand
cagauguccaccagacuga

SEQ ID NO: 334005 - RNA, 19 nt, Homo sapiens
  misc_RNA (1)...(19): siRNA sense strand
caagagagugcugaugucu

SEQ ID NO: 334006 - RNA, 19 nt, Homo sapiens
  misc_RNA (1)...(19): siRNA sense strand
caagacguggguucgguau

SEQ ID NO: 334007 - RNA, 19 nt, Homo sapiens
  misc_RNA (1)...(19): siRNA sense strand
auauggagaagcacaacua

SEQ ID NO: 334008 - RNA, 19 nt, Homo sapiens
  misc_RNA (1)...(19): siRNA sense strand
ccaggagcccuucguguac

SEQ ID NO: 334009 - RNA, 19 nt, Homo sapiens
  misc_RNA (1)...(19): siRNA sense strand
caacuacagcaucaugaac

SEQ ID NO: 334010 - RNA, 19 nt, Homo sapiens
  misc_RNA (1)...(19): siRNA sense strand
gccaacuacagcaucauga

SEQ ID NO: 334011 - RNA, 19 nt, Homo sapiens
  misc_RNA (1)...(19): siRNA sense strand
gagcgcaucacgggcauca

SEQ ID NO: 334012 - RNA, 19 nt, Homo sapiens
  misc_RNA (1)...(19): siRNA sense strand
ggaaauggcugaacuagaa

SEQ ID NO: 334013 - RNA, 19 nt, Homo sapiens
  misc_RNA (1)...(19): siRNA sense strand
gaacaaagcacaucagaaa

SEQ ID NO: 334014 - RNA, 19 nt, Homo sapiens
  misc_RNA (1)...(19): siRNA sense strand
cagcuacccuuccaucaua

SEQ ID NO: 334015 - RNA, 19 nt, Homo sapiens
  misc_RNA (1)...(19): siRNA sense strand
gggauaccaugcaacauaa

SEQ ID NO: 334016 - RNA, 19 nt, Homo sapiens
  misc_RNA (1)...(19): siRNA sense strand
gaggagauguggucaaugg

SEQ ID NO: 334017 - RNA, 19 nt, Homo sapiens
  misc_RNA (1)...(19): siRNA sense strand
gaaggagcuuucaucauuc

SEQ ID NO: 334018 - RNA, 19 nt, Homo sapiens
  misc_RNA (1)...(19): siRNA sense strand
cuagaaaucuguugcuaug

SEQ ID NO: 334019 - RNA, 19 nt, Homo sapiens
  misc_RNA (1)...(19): siRNA sense strand
gcucagggcuauccucuca

SEQ ID NO: 334020 - RNA, 19 nt, Homo sapiens
  misc_RNA (1)...(19): siRNA sense strand
aaacaagcgucucugaaga

SEQ ID NO: 334021 - RNA, 19 nt, Homo sapiens
  misc_RNA (1)...(19): siRNA sense strand
caacauaaccugauaaagc

SEQ ID NO: 334022 - RNA, 19 nt, Homo sapiens
  misc_RNA (1)...(19): siRNA sense strand
gaaacaagcgucucugaag

SEQ ID NO: 334023 - RNA, 19 nt, Homo sapiens
  misc_RNA (1)...(19): siRNA sense strand
gcagagggauaccaugcaa

SEQ ID NO: 334024 - RNA, 19 nt, Homo sapiens
  misc_RNA (1)...(19): siRNA sense strand
ugaacuagaagcuguguua

SEQ ID NO: 334025 - RNA, 19 nt, Homo sapiens
  misc_RNA (1)...(19): siRNA sense strand
gagaaucccaggacagaaa

SEQ ID NO: 334026 - RNA, 19 nt, Homo sapiens
  misc_RNA (1)...(19): siRNA sense strand
gcccacagaucaacuggaa

SEQ ID NO: 334027 - RNA, 19 nt, Homo sapiens
  misc_RNA (1)...(19): siRNA sense strand
gaagacugcucagggcuau

SEQ ID NO: 334028 - RNA, 19 nt, Homo sapiens
  misc_RNA (1)...(19): siRNA sense strand
gacccagucuauuaaagaa

SEQ ID NO: 334029 - RNA, 19 nt, Homo sapiens
  misc_RNA (1)...(19): siRNA sense strand
acuagaagcuguguuagaa

SEQ ID NO: 334030 - RNA, 19 nt, Homo sapiens
  misc_RNA (1)...(19): siRNA sense strand
caugcaacauaaccugaua

SEQ ID NO: 334031 - RNA, 19 nt, Homo sapiens
  misc_RNA (1)...(19): siRNA sense strand
gcuggacaccuaccugaua

SEQ ID NO: 334032 - RNA, 19 nt, Homo sapiens
  misc_RNA (1)...(19): siRNA sense strand
cagaucaacuggaauggau

SEQ ID NO: 334033 - RNA, 19 nt, Homo sapiens
  misc_RNA (1)...(19): siRNA sense strand
gcaggaaauggcugaacua

SEQ ID NO: 334034 - RNA, 19 nt, Homo sapiens
  misc_RNA (1)...(19): siRNA sense strand
ccacagaucaacuggaaug

SEQ ID NO: 334035 - RNA, 19 nt, Homo sapiens
  misc_RNA (1)...(19): siRNA sense strand
caacaugcccacagaucaa

SEQ ID NO: 334036 - RNA, 19 nt, Homo sapiens
  misc_RNA (1)...(19): siRNA sense strand
ucaccaacaugcccacaga

SEQ ID NO: 334037 - RNA, 19 nt, Homo sapiens
  misc_RNA (1)...(19): siRNA sense strand
cagaggagauguggucaau

SEQ ID NO: 334038 - RNA, 19 nt, Homo sapiens
  misc_RNA (1)...(19): siRNA sense strand
caauugggcagauguguga

SEQ ID NO: 334039 - RNA, 19 nt, Homo sapiens
  misc_RNA (1)...(19): siRNA sense strand
ggagauguggucaauggaa

SEQ ID NO: 334040 - RNA, 19 nt, Homo sapiens
  misc_RNA (1)...(19): siRNA sense strand
guacagcuguguggugcuu

SEQ ID NO: 334041 - RNA, 19 nt, Homo sapiens
  misc_RNA (1)...(19): siRNA sense strand
ccaaagcgagcaagagaau

SEQ ID NO: 334042 - RNA, 19 nt, Homo sapiens
  misc_RNA (1)...(19): siRNA sense strand
gcuaugggcccuucaccaa

SEQ ID NO: 334043 - RNA, 19 nt, Homo sapiens
  misc_RNA (1)...(19): siRNA sense strand
gaaugagcaugauuuugaa

SEQ ID NO: 334044 - RNA, 19 nt, Homo sapiens
  misc_RNA (1)...(19): siRNA sense strand
ucagggcuauccucucaga

SEQ ID NO: 334045 - RNA, 19 nt, Homo sapiens
  misc_RNA (1)...(19): siRNA sense strand
agggauaccaugcaacaua

SEQ ID NO: 334046 - RNA, 19 nt, Homo sapiens
  misc_RNA (1)...(19): siRNA sense strand
gcuagaaaucuguugcuau

SEQ ID NO: 334047 - RNA, 19 nt, Homo sapiens
  misc_RNA (1)...(19): siRNA sense strand
ugaaugagcaugauuuuga

SEQ ID NO: 334048 - RNA, 19 nt, Homo sapiens
  misc_RNA (1)...(19): siRNA sense strand
ggcuagaaaucuguugcua

SEQ ID NO: 334049 - RNA, 19 nt, Homo sapiens
  misc_RNA (1)...(19): siRNA sense strand
ugaaacaagcgucucugaa

SEQ ID NO: 334050 - RNA, 19 nt, Homo sapiens
  misc_RNA (1)...(19): siRNA sense strand
aacauaaccugauaaagcu

SEQ ID NO: 334051 - RNA, 19 nt, Homo sapiens
  misc_RNA (1)...(19): siRNA sense strand
ugacccagucuauuaaaga

SEQ ID NO: 334052 - RNA, 19 nt, Homo sapiens
  misc_RNA (1)...(19): siRNA sense strand
gaacuagaagcuguguuag

SEQ ID NO: 334053 - RNA, 19 nt, Homo sapiens
  misc_RNA (1)...(19): siRNA sense strand
gugaaacaagcgucucuga

SEQ ID NO: 334054 - RNA, 19 nt, Homo sapiens
  misc_RNA (1)...(19): siRNA sense strand
ccaacaugcccacagauca

SEQ ID NO: 334055 - RNA, 19 nt, Homo sapiens
  misc_RNA (1)...(19): siRNA sense strand
uaugggcccuucaccaaca

SEQ ID NO: 334056 - RNA, 19 nt, Homo sapiens
  misc_RNA (1)...(19): siRNA sense strand
guccaaagcgagcaagaga

SEQ ID NO: 334057 - RNA, 19 nt, Homo sapiens
  misc_RNA (1)...(19): siRNA sense strand
cagaacaaagcacaucaga

SEQ ID NO: 334058 - RNA, 19 nt, Homo sapiens
  misc_RNA (1)...(19): siRNA sense strand
ccugcgaaauccagaacaa

SEQ ID NO: 334059 - RNA, 19 nt, Homo sapiens
  misc_RNA (1)...(19): siRNA sense strand
gaaaccaccaagguccaaa

SEQ ID NO: 334060 - RNA, 19 nt, Homo sapiens
  misc_RNA (1)...(19): siRNA sense strand
gauaaagcuccagcaggaa

SEQ ID NO: 334061 - RNA, 19 nt, Homo sapiens
  misc_RNA (1)...(19): siRNA sense strand
aaggagcuuucaucauuca

SEQ ID NO: 334062 - RNA, 19 nt, Homo sapiens
  misc_RNA (1)...(19): siRNA sense strand
ggugugagagugaaacaag

SEQ ID NO: 334063 - RNA, 19 nt, Homo sapiens
  misc_RNA (1)...(19): siRNA sense strand
gaaauggcugaacuagaag

SEQ ID NO: 334064 - RNA, 19 nt, Homo sapiens
  misc_RNA (1)...(19): siRNA sense strand
auaaagcuccagcaggaaa

SEQ ID NO: 334065 - RNA, 19 nt, Homo sapiens
  misc_RNA (1)...(19): siRNA sense strand
acccuuccaucauaaguga

SEQ ID NO: 334066 - RNA, 19 nt, Homo sapiens
  misc_RNA (1)...(19): siRNA sense strand
ggugacccagucuauuaaa

SEQ ID NO: 334067 - RNA, 19 nt, Homo sapiens
  misc_RNA (1)...(19): siRNA sense strand
cccagucuauuaaagaaag

SEQ ID NO: 334068 - RNA, 19 nt, Homo sapiens
  misc_RNA (1)...(19): siRNA sense strand
caucugggugugagaguga

SEQ ID NO: 334069 - RNA, 19 nt, Homo sapiens
  misc_RNA (1)...(19): siRNA sense strand
ccagucuauuaaagaaaga

SEQ ID NO: 334070 - RNA, 19 nt, Homo sapiens
  misc_RNA (1)...(19): siRNA sense strand
cgaaauccagaacaaagca

SEQ ID NO: 334071 - RNA, 19 nt, Homo sapiens
  misc_RNA (1)...(19): siRNA sense strand
aagagaaucccaggacaga

SEQ ID NO: 334072 - RNA, 19 nt, Homo sapiens
  misc_RNA (1)...(19): siRNA sense strand
gauguggucaauggaagaa

SEQ ID NO: 334073 - RNA, 19 nt, Homo sapiens
  misc_RNA (1)...(19): siRNA sense strand
ggaccugcgaaauccagaa

SEQ ID NO: 334074 - RNA, 19 nt, Homo sapiens
  misc_RNA (1)...(19): siRNA sense strand
gagcaugauuuugaaguca

SEQ ID NO: 334075 - RNA, 19 nt, Homo sapiens
  misc_RNA (1)...(19): siRNA sense strand
gugacccagucuauuaaag

SEQ ID NO: 334076 - RNA, 19 nt, Homo sapiens
  misc_RNA (1)...(19): siRNA sense strand
agaacaaagcacaucagaa

SEQ ID NO: 334077 - RNA, 19 nt, Homo sapiens
  misc_RNA (1)...(19): siRNA sense strand
uggaagaaaccaccaaggu

SEQ ID NO: 334078 - RNA, 19 nt, Homo sapiens
  misc_RNA (1)...(19): siRNA sense strand
ucaacuggaauggauggua

SEQ ID NO: 334079 - RNA, 19 nt, Homo sapiens
  misc_RNA (1)...(19): siRNA sense strand
ggaaauggcugaacuagaa

SEQ ID NO: 334080 - RNA, 19 nt, Homo sapiens
  misc_RNA (1)...(19): siRNA sense strand
gaacaaagcacaucagaaa

SEQ ID NO: 334081 - RNA, 19 nt, Homo sapiens
  misc_RNA (1)...(19): siRNA sense strand
cagcuacccuuccaucaua

SEQ ID NO: 334082 - RNA, 19 nt, Homo sapiens
  misc_RNA (1)...(19): siRNA sense strand
gggauaccaugcaacauaa

SEQ ID NO: 334083 - RNA, 19 nt, Homo sapiens
  misc_RNA (1)...(19): siRNA sense strand
gaggagauguggucaaugg

SEQ ID NO: 334084 - RNA, 19 nt, Homo sapiens
  misc_RNA (1)...(19): siRNA sense strand
gaaggagcuuucaucauuc

SEQ ID NO: 334085 - RNA, 19 nt, Homo sapiens
  misc_RNA (1)...(19): siRNA sense strand
cuagaaaucuguugcuaug

SEQ ID NO: 334086 - RNA, 19 nt, Homo sapiens
  misc_RNA (1)...(19): siRNA sense strand
gcucagggcuauccucuca

SEQ ID NO: 334087 - RNA, 19 nt, Homo sapiens
  misc_RNA (1)...(19): siRNA sense strand
aaacaagcgucucugaaga

SEQ ID NO: 334088 - RNA, 19 nt, Homo sapiens
  misc_RNA (1)...(19): siRNA sense strand
caacauaaccugauaaagc

SEQ ID NO: 334089 - RNA, 19 nt, Homo sapiens
  misc_RNA (1)...(19): siRNA sense strand
gaaacaagcgucucugaag

SEQ ID NO: 334090 - RNA, 19 nt, Homo sapiens
  misc_RNA (1)...(19): siRNA sense strand
gcagagggauaccaugcaa

SEQ ID NO: 334091 - RNA, 19 nt, Homo sapiens
  misc_RNA (1)...(19): siRNA sense strand
ugaacuagaagcuguguua

SEQ ID NO: 334092 - RNA, 19 nt, Homo sapiens
  misc_RNA (1)...(19): siRNA sense strand
gagaaucccaggacagaaa

SEQ ID NO: 334093 - RNA, 19 nt, Homo sapiens
  misc_RNA (1)...(19): siRNA sense strand
gcccacagaucaacuggaa

SEQ ID NO: 334094 - RNA, 19 nt, Homo sapiens
  misc_RNA (1)...(19): siRNA sense strand
gaagacugcucagggcuau

SEQ ID NO: 334095 - RNA, 19 nt, Homo sapiens
  misc_RNA (1)...(19): siRNA sense strand
gacccagucuauuaaagaa

SEQ ID NO: 334096 - RNA, 19 nt, Homo sapiens
  misc_RNA (1)...(19): siRNA sense strand
acuagaagcuguguuagaa

SEQ ID NO: 334097 - RNA, 19 nt, Homo sapiens
  misc_RNA (1)...(19): siRNA sense strand
caugcaacauaaccugaua

SEQ ID NO: 334098 - RNA, 19 nt, Homo sapiens
  misc_RNA (1)...(19): siRNA sense strand
gcuggacaccuaccugaua

SEQ ID NO: 334099 - RNA, 19 nt, Homo sapiens
  misc_RNA (1)...(19): siRNA sense strand
cagaucaacuggaauggau

SEQ ID NO: 334100 - RNA, 19 nt, Homo sapiens
  misc_RNA (1)...(19): siRNA sense strand
gcaggaaauggcugaacua

SEQ ID NO: 334101 - RNA, 19 nt, Homo sapiens
  misc_RNA (1)...(19): siRNA sense strand
ccacagaucaacuggaaug

SEQ ID NO: 334102 - RNA, 19 nt, Homo sapiens
  misc_RNA (1)...(19): siRNA sense strand
caacaugcccacagaucaa

SEQ ID NO: 334103 - RNA, 19 nt, Homo sapiens
  misc_RNA (1)...(19): siRNA sense strand
ucaccaacaugcccacaga

SEQ ID NO: 334104 - RNA, 19 nt, Homo sapiens
  misc_RNA (1)...(19): siRNA sense strand
cagaggagauguggucaau

SEQ ID NO: 334105 - RNA, 19 nt, Homo sapiens
  misc_RNA (1)...(19): siRNA sense strand
caauugggcagauguguga

SEQ ID NO: 334106 - RNA, 19 nt, Homo sapiens
  misc_RNA (1)...(19): siRNA sense strand
ggagauguggucaauggaa

SEQ ID NO: 334107 - RNA, 19 nt, Homo sapiens
  misc_RNA (1)...(19): siRNA sense strand
guacagcuguguggugcuu

SEQ ID NO: 334108 - RNA, 19 nt, Homo sapiens
  misc_RNA (1)...(19): siRNA sense strand
ccaaagcgagcaagagaau

SEQ ID NO: 334109 - RNA, 19 nt, Homo sapiens
  misc_RNA (1)...(19): siRNA sense strand
gcuaugggcccuucaccaa

SEQ ID NO: 334110 - RNA, 19 nt, Homo sapiens
  misc_RNA (1)...(19): siRNA sense strand
gaaugagcaugauuuugaa

SEQ ID NO: 334111 - RNA, 19 nt, Homo sapiens
  misc_RNA (1)...(19): siRNA sense strand
ucagggcuauccucucaga

SEQ ID NO: 334112 - RNA, 19 nt, Homo sapiens
  misc_RNA (1)...(19): siRNA sense strand
agggauaccaugcaacaua

SEQ ID NO: 334113 - RNA, 19 nt, Homo sapiens
  misc_RNA (1)...(19): siRNA sense strand
gcuagaaaucuguugcuau

SEQ ID NO: 334114 - RNA, 19 nt, Homo sapiens
  misc_RNA (1)...(19): siRNA sense strand
ugaaugagcaugauuuuga

SEQ ID NO: 334115 - RNA, 19 nt, Homo sapiens
  misc_RNA (1)...(19): siRNA sense strand
ggcuagaaaucuguugcua

SEQ ID NO: 334116 - RNA, 19 nt, Homo sapiens
  misc_RNA (1)...(19): siRNA sense strand
ugaaacaagcgucucugaa

SEQ ID NO: 334117 - RNA, 19 nt, Homo sapiens
  misc_RNA (1)...(19): siRNA sense strand
aacauaaccugauaaagcu

SEQ ID NO: 334118 - RNA, 19 nt, Homo sapiens
  misc_RNA (1)...(19): siRNA sense strand
ugacccagucuauuaaaga

SEQ ID NO: 334119 - RNA, 19 nt, Homo sapiens
  misc_RNA (1)...(19): siRNA sense strand
gaacuagaagcuguguuag

SEQ ID NO: 334120 - RNA, 19 nt, Homo sapiens
  misc_RNA (1)...(19): siRNA sense strand
gugaaacaagcgucucuga

SEQ ID NO: 334121 - RNA, 19 nt, Homo sapiens
  misc_RNA (1)...(19): siRNA sense strand
ccaacaugcccacagauca

SEQ ID NO: 334122 - RNA, 19 nt, Homo sapiens
  misc_RNA (1)...(19): siRNA sense strand
uaugggcccuucaccaaca

SEQ ID NO: 334123 - RNA, 19 nt, Homo sapiens
  misc_RNA (1)...(19): siRNA sense strand
guccaaagcgagcaagaga

SEQ ID NO: 334124 - RNA, 19 nt, Homo sapiens
  misc_RNA (1)...(19): siRNA sense strand
cagaacaaagcacaucaga

SEQ ID NO: 334125 - RNA, 19 nt, Homo sapiens
  misc_RNA (1)...(19): siRNA sense strand
ccugcgaaauccagaacaa

SEQ ID NO: 334126 - RNA, 19 nt, Homo sapiens
  misc_RNA (1)...(19): siRNA sense strand
gaaaccaccaagguccaaa

SEQ ID NO: 334127 - RNA, 19 nt, Homo sapiens
  misc_RNA (1)...(19): siRNA sense strand
gauaaagcuccagcaggaa

SEQ ID NO: 334128 - RNA, 19 nt, Homo sapiens
  misc_RNA (1)...(19): siRNA sense strand
aaggagcuuucaucauuca

SEQ ID NO: 334129 - RNA, 19 nt, Homo sapiens
  misc_RNA (1)...(19): siRNA sense strand
ggugugagagugaaacaag

SEQ ID NO: 334130 - RNA, 19 nt, Homo sapiens
  misc_RNA (1)...(19): siRNA sense strand
gaaauggcugaacuagaag

SEQ ID NO: 334131 - RNA, 19 nt, Homo sapiens
  misc_RNA (1)...(19): siRNA sense strand
auaaagcuccagcaggaaa

SEQ ID NO: 334132 - RNA, 19 nt, Homo sapiens
  misc_RNA (1)...(19): siRNA sense strand
acccuuccaucauaaguga

SEQ ID NO: 334133 - RNA, 19 nt, Homo sapiens
  misc_RNA (1)...(19): siRNA sense strand
ggugacccagucuauuaaa

SEQ ID NO: 334134 - RNA, 19 nt, Homo sapiens
  misc_RNA (1)...(19): siRNA sense strand
cccagucuauuaaagaaag

SEQ ID NO: 334135 - RNA, 19 nt, Homo sapiens
  misc_RNA (1)...(19): siRNA sense strand
caucugggugugagaguga

SEQ ID NO: 334136 - RNA, 19 nt, Homo sapiens
  misc_RNA (1)...(19): siRNA sense strand
ccagucuauuaaagaaaga

SEQ ID NO: 334137 - RNA, 19 nt, Homo sapiens
  misc_RNA (1)...(19): siRNA sense strand
cgaaauccagaacaaagca

SEQ ID NO: 334138 - RNA, 19 nt, Homo sapiens
  misc_RNA (1)...(19): siRNA sense strand
aagagaaucccaggacaga

SEQ ID NO: 334139 - RNA, 19 nt, Homo sapiens
  misc_RNA (1)...(19): siRNA sense strand
gauguggucaauggaagaa

SEQ ID NO: 334140 - RNA, 19 nt, Homo sapiens
  misc_RNA (1)...(19): siRNA sense strand
ggaccugcgaaauccagaa

SEQ ID NO: 334141 - RNA, 19 nt, Homo sapiens
  misc_RNA (1)...(19): siRNA sense strand
gagcaugauuuugaaguca

SEQ ID NO: 334142 - RNA, 19 nt, Homo sapiens
  misc_RNA (1)...(19): siRNA sense strand
gugacccagucuauuaaag

SEQ ID NO: 334143 - RNA, 19 nt, Homo sapiens
  misc_RNA (1)...(19): siRNA sense strand
agaacaaagcacaucagaa

SEQ ID NO: 334144 - RNA, 19 nt, Homo sapiens
  misc_RNA (1)...(19): siRNA sense strand
uggaagaaaccaccaaggu

SEQ ID NO: 334145 - RNA, 19 nt, Homo sapiens
  misc_RNA (1)...(19): siRNA sense strand
ucaacuggaauggauggua

SEQ ID NO: 334146 - RNA, 19 nt, Homo sapiens
  misc_RNA (1)...(19): siRNA sense strand
ggaaauggcugaacuagaa

SEQ ID NO: 334147 - RNA, 19 nt, Homo sapiens
  misc_RNA (1)...(19): siRNA sense strand
gaacaaagcacaucagaaa

SEQ ID NO: 334148 - RNA, 19 nt, Homo sapiens
  misc_RNA (1)...(19): siRNA sense strand
cagcuacccuuccaucaua

SEQ ID NO: 334149 - RNA, 19 nt, Homo sapiens
  misc_RNA (1)...(19): siRNA sense strand
gggauaccaugcaacauaa

SEQ ID NO: 334150 - RNA, 19 nt, Homo sapiens
  misc_RNA (1)...(19): siRNA sense strand
gaggagauguggucaaugg

SEQ ID NO: 334151 - RNA, 19 nt, Homo sapiens
  misc_RNA (1)...(19): siRNA sense strand
gaaggagcuuucaucauuc

SEQ ID NO: 334152 - RNA, 19 nt, Homo sapiens
  misc_RNA (1)...(19): siRNA sense strand
cuagaaaucuguugcuaug

SEQ ID NO: 334153 - RNA, 19 nt, Homo sapiens
  misc_RNA (1)...(19): siRNA sense strand
gcucagggcuauccucuca

SEQ ID NO: 334154 - RNA, 19 nt, Homo sapiens
  misc_RNA (1)...(19): siRNA sense strand
aaacaagcgucucugaaga

SEQ ID NO: 334155 - RNA, 19 nt, Homo sapiens
  misc_RNA (1)...(19): siRNA sense strand
caacauaaccugauaaagc

SEQ ID NO: 334156 - RNA, 19 nt, Homo sapiens
  misc_RNA (1)...(19): siRNA sense strand
gaaacaagcgucucugaag

SEQ ID NO: 334157 - RNA, 19 nt, Homo sapiens
  misc_RNA (1)...(19): siRNA sense strand
gcagagggauaccaugcaa

SEQ ID NO: 334158 - RNA, 19 nt, Homo sapiens
  misc_RNA (1)...(19): siRNA sense strand
ugaacuagaagcuguguua

SEQ ID NO: 334159 - RNA, 19 nt, Homo sapiens
  misc_RNA (1)...(19): siRNA sense strand
gagaaucccaggacagaaa

SEQ ID NO: 334160 - RNA, 19 nt, Homo sapiens
  misc_RNA (1)...(19): siRNA sense strand
gcccacagaucaacuggaa

SEQ ID NO: 334161 - RNA, 19 nt, Homo sapiens
  misc_RNA (1)...(19): siRNA sense strand
gaagacugcucagggcuau

SEQ ID NO: 334162 - RNA, 19 nt, Homo sapiens
  misc_RNA (1)...(19): siRNA sense strand
gacccagucuauuaaagaa

SEQ ID NO: 334163 - RNA, 19 nt, Homo sapiens
  misc_RNA (1)...(19): siRNA sense strand
acuagaagcuguguuagaa

SEQ ID NO: 334164 - RNA, 19 nt, Homo sapiens
  misc_RNA (1)...(19): siRNA sense strand
caugcaacauaaccugaua

SEQ ID NO: 334165 - RNA, 19 nt, Homo sapiens
  misc_RNA (1)...(19): siRNA sense strand
gcuggacaccuaccugaua

SEQ ID NO: 334166 - RNA, 19 nt, Homo sapiens
  misc_RNA (1)...(19): siRNA sense strand
cagaucaacuggaauggau

SEQ ID NO: 334167 - RNA, 19 nt, Homo sapiens
  misc_RNA (1)...(19): siRNA sense strand
gcaggaaauggcugaacua

SEQ ID NO: 334168 - RNA, 19 nt, Homo sapiens
  misc_RNA (1)...(19): siRNA sense strand
ccacagaucaacuggaaug

SEQ ID NO: 334169 - RNA, 19 nt, Homo sapiens
  misc_RNA (1)...(19): siRNA sense strand
caacaugcccacagaucaa

SEQ ID NO: 334170 - RNA, 19 nt, Homo sapiens
  misc_RNA (1)...(19): siRNA sense strand
ucaccaacaugcccacaga

SEQ ID NO: 334171 - RNA, 19 nt, Homo sapiens
  misc_RNA (1)...(19): siRNA sense strand
cagaggagauguggucaau

SEQ ID NO: 334172 - RNA, 19 nt, Homo sapiens
  misc_RNA (1)...(19): siRNA sense strand
caauugggcagauguguga

SEQ ID NO: 334173 - RNA, 19 nt, Homo sapiens
  misc_RNA (1)...(19): siRNA sense strand
ggagauguggucaauggaa

SEQ ID NO: 334174 - RNA, 19 nt, Homo sapiens
  misc_RNA (1)...(19): siRNA sense strand
guacagcuguguggugcuu

SEQ ID NO: 334175 - RNA, 19 nt, Homo sapiens
  misc_RNA (1)...(19): siRNA sense strand
ccaaagcgagcaagagaau

SEQ ID NO: 334176 - RNA, 19 nt, Homo sapiens
  misc_RNA (1)...(19): siRNA sense strand
gcuaugggcccuucaccaa

SEQ ID NO: 334177 - RNA, 19 nt, Homo sapiens
  misc_RNA (1)...(19): siRNA sense strand
gaaugagcaugauuuugaa

SEQ ID NO: 334178 - RNA, 19 nt, Homo sapiens
  misc_RNA (1)...(19): siRNA sense strand
ucagggcuauccucucaga

SEQ ID NO: 334179 - RNA, 19 nt, Homo sapiens
  misc_RNA (1)...(19): siRNA sense strand
agggauaccaugcaacaua

SEQ ID NO: 334180 - RNA, 19 nt, Homo sapiens
  misc_RNA (1)...(19): siRNA sense strand
gcuagaaaucuguugcuau

SEQ ID NO: 334181 - RNA, 19 nt, Homo sapiens
  misc_RNA (1)...(19): siRNA sense strand
ugaaugagcaugauuuuga

SEQ ID NO: 334182 - RNA, 19 nt, Homo sapiens
  misc_RNA (1)...(19): siRNA sense strand
ggcuagaaaucuguugcua

SEQ ID NO: 334183 - RNA, 19 nt, Homo sapiens
  misc_RNA (1)...(19): siRNA sense strand
ugaaacaagcgucucugaa

SEQ ID NO: 334184 - RNA, 19 nt, Homo sapiens
  misc_RNA (1)...(19): siRNA sense strand
aacauaaccugauaaagcu

SEQ ID NO: 334185 - RNA, 19 nt, Homo sapiens
  misc_RNA (1)...(19): siRNA sense strand
ugacccagucuauuaaaga

SEQ ID NO: 334186 - RNA, 19 nt, Homo sapiens
  misc_RNA (1)...(19): siRNA sense strand
gaacuagaagcuguguuag

SEQ ID NO: 334187 - RNA, 19 nt, Homo sapiens
  misc_RNA (1)...(19): siRNA sense strand
gugaaacaagcgucucuga

SEQ ID NO: 334188 - RNA, 19 nt, Homo sapiens
  misc_RNA (1)...(19): siRNA sense strand
ccaacaugcccacagauca

SEQ ID NO: 334189 - RNA, 19 nt, Homo sapiens
  misc_RNA (1)...(19): siRNA sense strand
uaugggcccuucaccaaca

SEQ ID NO: 334190 - RNA, 19 nt, Homo sapiens
  misc_RNA (1)...(19): siRNA sense strand
guccaaagcgagcaagaga

SEQ ID NO: 334191 - RNA, 19 nt, Homo sapiens
  misc_RNA (1)...(19): siRNA sense strand
cagaacaaagcacaucaga

SEQ ID NO: 334192 - RNA, 19 nt, Homo sapiens
  misc_RNA (1)...(19): siRNA sense strand
ccugcgaaauccagaacaa

SEQ ID NO: 334193 - RNA, 19 nt, Homo sapiens
  misc_RNA (1)...(19): siRNA sense strand
gaaaccaccaagguccaaa

SEQ ID NO: 334194 - RNA, 19 nt, Homo sapiens
  misc_RNA (1)...(19): siRNA sense strand
gauaaagcuccagcaggaa

SEQ ID NO: 334195 - RNA, 19 nt, Homo sapiens
  misc_RNA (1)...(19): siRNA sense strand
aaggagcuuucaucauuca

SEQ ID NO: 334196 - RNA, 19 nt, Homo sapiens
  misc_RNA (1)...(19): siRNA sense strand
ggugugagagugaaacaag

SEQ ID NO: 334197 - RNA, 19 nt, Homo sapiens
  misc_RNA (1)...(19): siRNA sense strand
gaaauggcugaacuagaag

SEQ ID NO: 334198 - RNA, 19 nt, Homo sapiens
  misc_RNA (1)...(19): siRNA sense strand
auaaagcuccagcaggaaa

SEQ ID NO: 334199 - RNA, 19 nt, Homo sapiens
  misc_RNA (1)...(19): siRNA sense strand
acccuuccaucauaaguga

SEQ ID NO: 334200 - RNA, 19 nt, Homo sapiens
  misc_RNA (1)...(19): siRNA sense strand
ggugacccagucuauuaaa

SEQ ID NO: 334201 - RNA, 19 nt, Homo sapiens
  misc_RNA (1)...(19): siRNA sense strand
cccagucuauuaaagaaag

SEQ ID NO: 334202 - RNA, 19 nt, Homo sapiens
  misc_RNA (1)...(19): siRNA sense strand
caucugggugugagaguga

SEQ ID NO: 334203 - RNA, 19 nt, Homo sapiens
  misc_RNA (1)...(19): siRNA sense strand
ccagucuauuaaagaaaga

SEQ ID NO: 334204 - RNA, 19 nt, Homo sapiens
  misc_RNA (1)...(19): siRNA sense strand
cgaaauccagaacaaagca

SEQ ID NO: 334205 - RNA, 19 nt, Homo sapiens
  misc_RNA (1)...(19): siRNA sense strand
aagagaaucccaggacaga

SEQ ID NO: 334206 - RNA, 19 nt, Homo sapiens
  misc_RNA (1)...(19): siRNA sense strand
gauguggucaauggaagaa

SEQ ID NO: 334207 - RNA, 19 nt, Homo sapiens
  misc_RNA (1)...(19): siRNA sense strand
ggaccugcgaaauccagaa

SEQ ID NO: 334208 - RNA, 19 nt, Homo sapiens
  misc_RNA (1)...(19): siRNA sense strand
gagcaugauuuugaaguca

SEQ ID NO: 334209 - RNA, 19 nt, Homo sapiens
  misc_RNA (1)...(19): siRNA sense strand
gugacccagucuauuaaag

SEQ ID NO: 334210 - RNA, 19 nt, Homo sapiens
  misc_RNA (1)...(19): siRNA sense strand
agaacaaagcacaucagaa

SEQ ID NO: 334211 - RNA, 19 nt, Homo sapiens
  misc_RNA (1)...(19): siRNA sense strand
uggaagaaaccaccaaggu

SEQ ID NO: 334212 - RNA, 19 nt, Homo sapiens
  misc_RNA (1)...(19): siRNA sense strand
ucaacuggaauggauggua

SEQ ID NO: 334213 - RNA, 19 nt, Homo sapiens
  misc_RNA (1)...(19): siRNA sense strand
ggaaauggcugaacuagaa

SEQ ID NO: 334214 - RNA, 19 nt, Homo sapiens
  misc_RNA (1)...(19): siRNA sense strand
gaacaaagcacaucagaaa

SEQ ID NO: 334215 - RNA, 19 nt, Homo sapiens
  misc_RNA (1)...(19): siRNA sense strand
cagcuacccuuccaucaua

SEQ ID NO: 334216 - RNA, 19 nt, Homo sapiens
  misc_RNA (1)...(19): siRNA sense strand
gggauaccaugcaacauaa

SEQ ID NO: 334217 - RNA, 19 nt, Homo sapiens
  misc_RNA (1)...(19): siRNA sense strand
gaggagauguggucaaugg

SEQ ID NO: 334218 - RNA, 19 nt, Homo sapiens
  misc_RNA (1)...(19): siRNA sense strand
gaaggagcuuucaucauuc

SEQ ID NO: 334219 - RNA, 19 nt, Homo sapiens
  misc_RNA (1)...(19): siRNA sense strand
cuagaaaucuguugcuaug

SEQ ID NO: 334220 - RNA, 19 nt, Homo sapiens
  misc_RNA (1)...(19): siRNA sense strand
gcucagggcuauccucuca

SEQ ID NO: 334221 - RNA, 19 nt, Homo sapiens
  misc_RNA (1)...(19): siRNA sense strand
aaacaagcgucucugaaga

SEQ ID NO: 334222 - RNA, 19 nt, Homo sapiens
  misc_RNA (1)...(19): siRNA sense strand
caacauaaccugauaaagc

SEQ ID NO: 334223 - RNA, 19 nt, Homo sapiens
  misc_RNA (1)...(19): siRNA sense strand
gaaacaagcgucucugaag

SEQ ID NO: 334224 - RNA, 19 nt, Homo sapiens
  misc_RNA (1)...(19): siRNA sense strand
gcagagggauaccaugcaa

SEQ ID NO: 334225 - RNA, 19 nt, Homo sapiens
  misc_RNA (1)...(19): siRNA sense strand
ugaacuagaagcuguguua

SEQ ID NO: 334226 - RNA, 19 nt, Homo sapiens
  misc_RNA (1)...(19): siRNA sense strand
gagaaucccaggacagaaa

SEQ ID NO: 334227 - RNA, 19 nt, Homo sapiens
  misc_RNA (1)...(19): siRNA sense strand
gcccacagaucaacuggaa

SEQ ID NO: 334228 - RNA, 19 nt, Homo sapiens
  misc_RNA (1)...(19): siRNA sense strand
gaagacugcucagggcuau

SEQ ID NO: 334229 - RNA, 19 nt, Homo sapiens
  misc_RNA (1)...(19): siRNA sense strand
gacccagucuauuaaagaa

SEQ ID NO: 334230 - RNA, 19 nt, Homo sapiens
  misc_RNA (1)...(19): siRNA sense strand
acuagaagcuguguuagaa

SEQ ID NO: 334231 - RNA, 19 nt, Homo sapiens
  misc_RNA (1)...(19): siRNA sense strand
caugcaacauaaccugaua

SEQ ID NO: 334232 - RNA, 19 nt, Homo sapiens
  misc_RNA (1)...(19): siRNA sense strand
gcuggacaccuaccugaua

SEQ ID NO: 334233 - RNA, 19 nt, Homo sapiens
  misc_RNA (1)...(19): siRNA sense strand
cagaucaacuggaauggau

SEQ ID NO: 334234 - RNA, 19 nt, Homo sapiens
  misc_RNA (1)...(19): siRNA sense strand
gcaggaaauggcugaacua

SEQ ID NO: 334235 - RNA, 19 nt, Homo sapiens
  misc_RNA (1)...(19): siRNA sense strand
ccacagaucaacuggaaug

SEQ ID NO: 334236 - RNA, 19 nt, Homo sapiens
  misc_RNA (1)...(19): siRNA sense strand
caacaugcccacagaucaa

SEQ ID NO: 334237 - RNA, 19 nt, Homo sapiens
  misc_RNA (1)...(19): siRNA sense strand
ucaccaacaugcccacaga

SEQ ID NO: 334238 - RNA, 19 nt, Homo sapiens
  misc_RNA (1)...(19): siRNA sense strand
cagaggagauguggucaau

SEQ ID NO: 334239 - RNA, 19 nt, Homo sapiens
  misc_RNA (1)...(19): siRNA sense strand
caauugggcagauguguga

SEQ ID NO: 334240 - RNA, 19 nt, Homo sapiens
  misc_RNA (1)...(19): siRNA sense strand
ggagauguggucaauggaa

SEQ ID NO: 334241 - RNA, 19 nt, Homo sapiens
  misc_RNA (1)...(19): siRNA sense strand
guacagcuguguggugcuu

SEQ ID NO: 334242 - RNA, 19 nt, Homo sapiens
  misc_RNA (1)...(19): siRNA sense strand
ccaaagcgagcaagagaau

SEQ ID NO: 334243 - RNA, 19 nt, Homo sapiens
  misc_RNA (1)...(19): siRNA sense strand
gcuaugggcccuucaccaa

SEQ ID NO: 334244 - RNA, 19 nt, Homo sapiens
  misc_RNA (1)...(19): siRNA sense strand
gaaugagcaugauuuugaa

SEQ ID NO: 334245 - RNA, 19 nt, Homo sapiens
  misc_RNA (1)...(19): siRNA sense strand
ucagggcuauccucucaga

SEQ ID NO: 334246 - RNA, 19 nt, Homo sapiens
  misc_RNA (1)...(19): siRNA sense strand
agggauaccaugcaacaua

SEQ ID NO: 334247 - RNA, 19 nt, Homo sapiens
  misc_RNA (1)...(19): siRNA sense strand
gcuagaaaucuguugcuau

SEQ ID NO: 334248 - RNA, 19 nt, Homo sapiens
  misc_RNA (1)...(19): siRNA sense strand
ugaaugagcaugauuuuga

SEQ ID NO: 334249 - RNA, 19 nt, Homo sapiens
  misc_RNA (1)...(19): siRNA sense strand
ggcuagaaaucuguugcua

SEQ ID NO: 334250 - RNA, 19 nt, Homo sapiens
  misc_RNA (1)...(19): siRNA sense strand
ugaaacaagcgucucugaa

SEQ ID NO: 334251 - RNA, 19 nt, Homo sapiens
  misc_RNA (1)...(19): siRNA sense strand
aacauaaccugauaaagcu

SEQ ID NO: 334252 - RNA, 19 nt, Homo sapiens
  misc_RNA (1)...(19): siRNA sense strand
ugacccagucuauuaaaga

SEQ ID NO: 334253 - RNA, 19 nt, Homo sapiens
  misc_RNA (1)...(19): siRNA sense strand
gaacuagaagcuguguuag

SEQ ID NO: 334254 - RNA, 19 nt, Homo sapiens
  misc_RNA (1)...(19): siRNA sense strand
gugaaacaagcgucucuga

SEQ ID NO: 334255 - RNA, 19 nt, Homo sapiens
  misc_RNA (1)...(19): siRNA sense strand
ccaacaugcccacagauca

SEQ ID NO: 334256 - RNA, 19 nt, Homo sapiens
  misc_RNA (1)...(19): siRNA sense strand
uaugggcccuucaccaaca

SEQ ID NO: 334257 - RNA, 19 nt, Homo sapiens
  misc_RNA (1)...(19): siRNA sense strand
guccaaagcgagcaagaga

SEQ ID NO: 334258 - RNA, 19 nt, Homo sapiens
  misc_RNA (1)...(19): siRNA sense strand
cagaacaaagcacaucaga

SEQ ID NO: 334259 - RNA, 19 nt, Homo sapiens
  misc_RNA (1)...(19): siRNA sense strand
ccugcgaaauccagaacaa

SEQ ID NO: 334260 - RNA, 19 nt, Homo sapiens
  misc_RNA (1)...(19): siRNA sense strand
gaaaccaccaagguccaaa

SEQ ID NO: 334261 - RNA, 19 nt, Homo sapiens
  misc_RNA (1)...(19): siRNA sense strand
gauaaagcuccagcaggaa

SEQ ID NO: 334262 - RNA, 19 nt, Homo sapiens
  misc_RNA (1)...(19): siRNA sense strand
aaggagcuuucaucauuca

SEQ ID NO: 334263 - RNA, 19 nt, Homo sapiens
  misc_RNA (1)...(19): siRNA sense strand
ggugugagagugaaacaag

SEQ ID NO: 334264 - RNA, 19 nt, Homo sapiens
  misc_RNA (1)...(19): siRNA sense strand
gaaauggcugaacuagaag

SEQ ID NO: 334265 - RNA, 19 nt, Homo sapiens
  misc_RNA (1)...(19): siRNA sense strand
auaaagcuccagcaggaaa

SEQ ID NO: 334266 - RNA, 19 nt, Homo sapiens
  misc_RNA (1)...(19): siRNA sense strand
acccuuccaucauaaguga

SEQ ID NO: 334267 - RNA, 19 nt, Homo sapiens
  misc_RNA (1)...(19): siRNA sense strand
ggugacccagucuauuaaa

SEQ ID NO: 334268 - RNA, 19 nt, Homo sapiens
  misc_RNA (1)...(19): siRNA sense strand
cccagucuauuaaagaaag

SEQ ID NO: 334269 - RNA, 19 nt, Homo sapiens
  misc_RNA (1)...(19): siRNA sense strand
caucugggugugagaguga

SEQ ID NO: 334270 - RNA, 19 nt, Homo sapiens
  misc_RNA (1)...(19): siRNA sense strand
ccagucuauuaaagaaaga

SEQ ID NO: 334271 - RNA, 19 nt, Homo sapiens
  misc_RNA (1)...(19): siRNA sense strand
cgaaauccagaacaaagca

SEQ ID NO: 334272 - RNA, 19 nt, Homo sapiens
  misc_RNA (1)...(19): siRNA sense strand
aagagaaucccaggacaga

SEQ ID NO: 334273 - RNA, 19 nt, Homo sapiens
  misc_RNA (1)...(19): siRNA sense strand
gauguggucaauggaagaa

SEQ ID NO: 334274 - RNA, 19 nt, Homo sapiens
  misc_RNA (1)...(19): siRNA sense strand
ggaccugcgaaauccagaa

SEQ ID NO: 334275 - RNA, 19 nt, Homo sapiens
  misc_RNA (1)...(19): siRNA sense strand
gagcaugauuuugaaguca

SEQ ID NO: 334276 - RNA, 19 nt, Homo sapiens
  misc_RNA (1)...(19): siRNA sense strand
gugacccagucuauuaaag

SEQ ID NO: 334277 - RNA, 19 nt, Homo sapiens
  misc_RNA (1)...(19): siRNA sense strand
agaacaaagcacaucagaa

SEQ ID NO: 334278 - RNA, 19 nt, Homo sapiens
  misc_RNA (1)...(19): siRNA sense strand
uggaagaaaccaccaaggu

SEQ ID NO: 334279 - RNA, 19 nt, Homo sapiens
  misc_RNA (1)...(19): siRNA sense strand
ucaacuggaauggauggua

SEQ ID NO: 334280 - RNA, 19 nt, Homo sapiens
  misc_RNA (1)...(19): siRNA sense strand
ggaaauggcugaacuagaa

SEQ ID NO: 334281 - RNA, 19 nt, Homo sapiens
  misc_RNA (1)...(19): siRNA sense strand
gaacaaagcacaucagaaa

SEQ ID NO: 334282 - RNA, 19 nt, Homo sapiens
  misc_RNA (1)...(19): siRNA sense strand
cagcuacccuuccaucaua

SEQ ID NO: 334283 - RNA, 19 nt, Homo sapiens
  misc_RNA (1)...(19): siRNA sense strand
gggauaccaugcaacauaa

SEQ ID NO: 334284 - RNA, 19 nt, Homo sapiens
  misc_RNA (1)...(19): siRNA sense strand
gaggagauguggucaaugg

SEQ ID NO: 334285 - RNA, 19 nt, Homo sapiens
  misc_RNA (1)...(19): siRNA sense strand
gaaggagcuuucaucauuc

SEQ ID NO: 334286 - RNA, 19 nt, Homo sapiens
  misc_RNA (1)...(19): siRNA sense strand
cuagaaaucuguugcuaug

SEQ ID NO: 334287 - RNA, 19 nt, Homo sapiens
  misc_RNA (1)...(19): siRNA sense strand
gcucagggcuauccucuca

SEQ ID NO: 334288 - RNA, 19 nt, Homo sapiens
  misc_RNA (1)...(19): siRNA sense strand
aaacaagcgucucugaaga

SEQ ID NO: 334289 - RNA, 19 nt, Homo sapiens
  misc_RNA (1)...(19): siRNA sense strand
caacauaaccugauaaagc

SEQ ID NO: 334290 - RNA, 19 nt, Homo sapiens
  misc_RNA (1)...(19): siRNA sense strand
gaaacaagcgucucugaag

SEQ ID NO: 334291 - RNA, 19 nt, Homo sapiens
  misc_RNA (1)...(19): siRNA sense strand
gcagagggauaccaugcaa

SEQ ID NO: 334292 - RNA, 19 nt, Homo sapiens
  misc_RNA (1)...(19): siRNA sense strand
ugaacuagaagcuguguua

SEQ ID NO: 334293 - RNA, 19 nt, Homo sapiens
  misc_RNA (1)...(19): siRNA sense strand
gagaaucccaggacagaaa

SEQ ID NO: 334294 - RNA, 19 nt, Homo sapiens
  misc_RNA (1)...(19): siRNA sense strand
gcccacagaucaacuggaa

SEQ ID NO: 334295 - RNA, 19 nt, Homo sapiens
  misc_RNA (1)...(19): siRNA sense strand
gaagacugcucagggcuau

SEQ ID NO: 334296 - RNA, 19 nt, Homo sapiens
  misc_RNA (1)...(19): siRNA sense strand
gacccagucuauuaaagaa

SEQ ID NO: 334297 - RNA, 19 nt, Homo sapiens
  misc_RNA (1)...(19): siRNA sense strand
acuagaagcuguguuagaa

SEQ ID NO: 334298 - RNA, 19 nt, Homo sapiens
  misc_RNA (1)...(19): siRNA sense strand
caugcaacauaaccugaua

SEQ ID NO: 334299 - RNA, 19 nt, Homo sapiens
  misc_RNA (1)...(19): siRNA sense strand
gcuggacaccuaccugaua

SEQ ID NO: 334300 - RNA, 19 nt, Homo sapiens
  misc_RNA (1)...(19): siRNA sense strand
cagaucaacuggaauggau

SEQ ID NO: 334301 - RNA, 19 nt, Homo sapiens
  misc_RNA (1)...(19): siRNA sense strand
gcaggaaauggcugaacua

SEQ ID NO: 334302 - RNA, 19 nt, Homo sapiens
  misc_RNA (1)...(19): siRNA sense strand
ccacagaucaacuggaaug

SEQ ID NO: 334303 - RNA, 19 nt, Homo sapiens
  misc_RNA (1)...(19): siRNA sense strand
caacaugcccacagaucaa

SEQ ID NO: 334304 - RNA, 19 nt, Homo sapiens
  misc_RNA (1)...(19): siRNA sense strand
ucaccaacaugcccacaga

SEQ ID NO: 334305 - RNA, 19 nt, Homo sapiens
  misc_RNA (1)...(19): siRNA sense strand
cagaggagauguggucaau

SEQ ID NO: 334306 - RNA, 19 nt, Homo sapiens
  misc_RNA (1)...(19): siRNA sense strand
caauugggcagauguguga

SEQ ID NO: 334307 - RNA, 19 nt, Homo sapiens
  misc_RNA (1)...(19): siRNA sense strand
ggagauguggucaauggaa

SEQ ID NO: 334308 - RNA, 19 nt, Homo sapiens
  misc_RNA (1)...(19): siRNA sense strand
guacagcuguguggugcuu

SEQ ID NO: 334309 - RNA, 19 nt, Homo sapiens
  misc_RNA (1)...(19): siRNA sense strand
ccaaagcgagcaagagaau

SEQ ID NO: 334310 - RNA, 19 nt, Homo sapiens
  misc_RNA (1)...(19): siRNA sense strand
gcuaugggcccuucaccaa

SEQ ID NO: 334311 - RNA, 19 nt, Homo sapiens
  misc_RNA (1)...(19): siRNA sense strand
gaaugagcaugauuuugaa

SEQ ID NO: 334312 - RNA, 19 nt, Homo sapiens
  misc_RNA (1)...(19): siRNA sense strand
ucagggcuauccucucaga

SEQ ID NO: 334313 - RNA, 19 nt, Homo sapiens
  misc_RNA (1)...(19): siRNA sense strand
agggauaccaugcaacaua

SEQ ID NO: 334314 - RNA, 19 nt, Homo sapiens
  misc_RNA (1)...(19): siRNA sense strand
gcuagaaaucuguugcuau

SEQ ID NO: 334315 - RNA, 19 nt, Homo sapiens
  misc_RNA (1)...(19): siRNA sense strand
ugaaugagcaugauuuuga

SEQ ID NO: 334316 - RNA, 19 nt, Homo sapiens
  misc_RNA (1)...(19): siRNA sense strand
ggcuagaaaucuguugcua

SEQ ID NO: 334317 - RNA, 19 nt, Homo sapiens
  misc_RNA (1)...(19): siRNA sense strand
ugaaacaagcgucucugaa

SEQ ID NO: 334318 - RNA, 19 nt, Homo sapiens
  misc_RNA (1)...(19): siRNA sense strand
aacauaaccugauaaagcu

SEQ ID NO: 334319 - RNA, 19 nt, Homo sapiens
  misc_RNA (1)...(19): siRNA sense strand
ugacccagucuauuaaaga

SEQ ID NO: 334320 - RNA, 19 nt, Homo sapiens
  misc_RNA (1)...(19): siRNA sense strand
gaacuagaagcuguguuag

SEQ ID NO: 334321 - RNA, 19 nt, Homo sapiens
  misc_RNA (1)...(19): siRNA sense strand
gugaaacaagcgucucuga

SEQ ID NO: 334322 - RNA, 19 nt, Homo sapiens
  misc_RNA (1)...(19): siRNA sense strand
ccaacaugcccacagauca

SEQ ID NO: 334323 - RNA, 19 nt, Homo sapiens
  misc_RNA (1)...(19): siRNA sense strand
uaugggcccuucaccaaca

SEQ ID NO: 334324 - RNA, 19 nt, Homo sapiens
  misc_RNA (1)...(19): siRNA sense strand
guccaaagcgagcaagaga

SEQ ID NO: 334325 - RNA, 19 nt, Homo sapiens
  misc_RNA (1)...(19): siRNA sense strand
cagaacaaagcacaucaga

SEQ ID NO: 334326 - RNA, 19 nt, Homo sapiens
  misc_RNA (1)...(19): siRNA sense strand
ccugcgaaauccagaacaa

SEQ ID NO: 334327 - RNA, 19 nt, Homo sapiens
  misc_RNA (1)...(19): siRNA sense strand
gaaaccaccaagguccaaa

SEQ ID NO: 334328 - RNA, 19 nt, Homo sapiens
  misc_RNA (1)...(19): siRNA sense strand
gauaaagcuccagcaggaa

SEQ ID NO: 334329 - RNA, 19 nt, Homo sapiens
  misc_RNA (1)...(19): siRNA sense strand
aaggagcuuucaucauuca

SEQ ID NO: 334330 - RNA, 19 nt, Homo sapiens
  misc_RNA (1)...(19): siRNA sense strand
ggugugagagugaaacaag

SEQ ID NO: 334331 - RNA, 19 nt, Homo sapiens
  misc_RNA (1)...(19): siRNA sense strand
gaaauggcugaacuagaag

SEQ ID NO: 334332 - RNA, 19 nt, Homo sapiens
  misc_RNA (1)...(19): siRNA sense strand
auaaagcuccagcaggaaa

SEQ ID NO: 334333 - RNA, 19 nt, Homo sapiens
  misc_RNA (1)...(19): siRNA sense strand
acccuuccaucauaaguga

SEQ ID NO: 334334 - RNA, 19 nt, Homo sapiens
  misc_RNA (1)...(19): siRNA sense strand
ggugacccagucuauuaaa

SEQ ID NO: 334335 - RNA, 19 nt, Homo sapiens
  misc_RNA (1)...(19): siRNA sense strand
cccagucuauuaaagaaag

SEQ ID NO: 334336 - RNA, 19 nt, Homo sapiens
  misc_RNA (1)...(19): siRNA sense strand
caucugggugugagaguga

SEQ ID NO: 334337 - RNA, 19 nt, Homo sapiens
  misc_RNA (1)...(19): siRNA sense strand
ccagucuauuaaagaaaga

SEQ ID NO: 334338 - RNA, 19 nt, Homo sapiens
  misc_RNA (1)...(19): siRNA sense strand
cgaaauccagaacaaagca

SEQ ID NO: 334339 - RNA, 19 nt, Homo sapiens
  misc_RNA (1)...(19): siRNA sense strand
aagagaaucccaggacaga

SEQ ID NO: 334340 - RNA, 19 nt, Homo sapiens
  misc_RNA (1)...(19): siRNA sense strand
gauguggucaauggaagaa

SEQ ID NO: 334341 - RNA, 19 nt, Homo sapiens
  misc_RNA (1)...(19): siRNA sense strand
ggaccugcgaaauccagaa

SEQ ID NO: 334342 - RNA, 19 nt, Homo sapiens
  misc_RNA (1)...(19): siRNA sense strand
gagcaugauuuugaaguca

SEQ ID NO: 334343 - RNA, 19 nt, Homo sapiens
  misc_RNA (1)...(19): siRNA sense strand
gugacccagucuauuaaag

SEQ ID NO: 334344 - RNA, 19 nt, Homo sapiens
  misc_RNA (1)...(19): siRNA sense strand
agaacaaagcacaucagaa

SEQ ID NO: 334345 - RNA, 19 nt, Homo sapiens
  misc_RNA (1)...(19): siRNA sense strand
uggaagaaaccaccaaggu

SEQ ID NO: 334346 - RNA, 19 nt, Homo sapiens
  misc_RNA (1)...(19): siRNA sense strand
ucaacuggaauggauggua

SEQ ID NO: 334347 - RNA, 19 nt, Homo sapiens
  misc_RNA (1)...(19): siRNA sense strand
ggaaauggcugaacuagaa

SEQ ID NO: 334348 - RNA, 19 nt, Homo sapiens
  misc_RNA (1)...(19): siRNA sense strand
gaacaaagcacaucagaaa

SEQ ID NO: 334349 - RNA, 19 nt, Homo sapiens
  misc_RNA (1)...(19): siRNA sense strand
cagcuacccuuccaucaua

SEQ ID NO: 334350 - RNA, 19 nt, Homo sapiens
  misc_RNA (1)...(19): siRNA sense strand
gggauaccaugcaacauaa

SEQ ID NO: 334351 - RNA, 19 nt, Homo sapiens
  misc_RNA (1)...(19): siRNA sense strand
gaggagauguggucaaugg

SEQ ID NO: 334352 - RNA, 19 nt, Homo sapiens
  misc_RNA (1)...(19): siRNA sense strand
gaaggagcuuucaucauuc

SEQ ID NO: 334353 - RNA, 19 nt, Homo sapiens
  misc_RNA (1)...(19): siRNA sense strand
cuagaaaucuguugcuaug

SEQ ID NO: 334354 - RNA, 19 nt, Homo sapiens
  misc_RNA (1)...(19): siRNA sense strand
gcucagggcuauccucuca

SEQ ID NO: 334355 - RNA, 19 nt, Homo sapiens
  misc_RNA (1)...(19): siRNA sense strand
aaacaagcgucucugaaga

SEQ ID NO: 334356 - RNA, 19 nt, Homo sapiens
  misc_RNA (1)...(19): siRNA sense strand
caacauaaccugauaaagc

SEQ ID NO: 334357 - RNA, 19 nt, Homo sapiens
  misc_RNA (1)...(19): siRNA sense strand
gaaacaagcgucucugaag

SEQ ID NO: 334358 - RNA, 19 nt, Homo sapiens
  misc_RNA (1)...(19): siRNA sense strand
gcagagggauaccaugcaa

SEQ ID NO: 334359 - RNA, 19 nt, Homo sapiens
  misc_RNA (1)...(19): siRNA sense strand
ugaacuagaagcuguguua

SEQ ID NO: 334360 - RNA, 19 nt, Homo sapiens
  misc_RNA (1)...(19): siRNA sense strand
gagaaucccaggacagaaa

SEQ ID NO: 334361 - RNA, 19 nt, Homo sapiens
  misc_RNA (1)...(19): siRNA sense strand
gcccacagaucaacuggaa

SEQ ID NO: 334362 - RNA, 19 nt, Homo sapiens
  misc_RNA (1)...(19): siRNA sense strand
gaagacugcucagggcuau

SEQ ID NO: 334363 - RNA, 19 nt, Homo sapiens
  misc_RNA (1)...(19): siRNA sense strand
gacccagucuauuaaagaa

SEQ ID NO: 334364 - RNA, 19 nt, Homo sapiens
  misc_RNA (1)...(19): siRNA sense strand
acuagaagcuguguuagaa

SEQ ID NO: 334365 - RNA, 19 nt, Homo sapiens
  misc_RNA (1)...(19): siRNA sense strand
caugcaacauaaccugaua

SEQ ID NO: 334366 - RNA, 19 nt, Homo sapiens
  misc_RNA (1)...(19): siRNA sense strand
gcuggacaccuaccugaua

SEQ ID NO: 334367 - RNA, 19 nt, Homo sapiens
  misc_RNA (1)...(19): siRNA sense strand
cagaucaacuggaauggau

SEQ ID NO: 334368 - RNA, 19 nt, Homo sapiens
  misc_RNA (1)...(19): siRNA sense strand
gcaggaaauggcugaacua

SEQ ID NO: 334369 - RNA, 19 nt, Homo sapiens
  misc_RNA (1)...(19): siRNA sense strand
ccacagaucaacuggaaug

SEQ ID NO: 334370 - RNA, 19 nt, Homo sapiens
  misc_RNA (1)...(19): siRNA sense strand
caacaugcccacagaucaa

SEQ ID NO: 334371 - RNA, 19 nt, Homo sapiens
  misc_RNA (1)...(19): siRNA sense strand
ucaccaacaugcccacaga

SEQ ID NO: 334372 - RNA, 19 nt, Homo sapiens
  misc_RNA (1)...(19): siRNA sense strand
cagaggagauguggucaau

SEQ ID NO: 334373 - RNA, 19 nt, Homo sapiens
  misc_RNA (1)...(19): siRNA sense strand
caauugggcagauguguga

SEQ ID NO: 334374 - RNA, 19 nt, Homo sapiens
  misc_RNA (1)...(19): siRNA sense strand
ggagauguggucaauggaa

SEQ ID NO: 334375 - RNA, 19 nt, Homo sapiens
  misc_RNA (1)...(19): siRNA sense strand
guacagcuguguggugcuu

SEQ ID NO: 334376 - RNA, 19 nt, Homo sapiens
  misc_RNA (1)...(19): siRNA sense strand
ccaaagcgagcaagagaau

SEQ ID NO: 334377 - RNA, 19 nt, Homo sapiens
  misc_RNA (1)...(19): siRNA sense strand
gcuaugggcccuucaccaa

SEQ ID NO: 334378 - RNA, 19 nt, Homo sapiens
  misc_RNA (1)...(19): siRNA sense strand
gaaugagcaugauuuugaa

SEQ ID NO: 334379 - RNA, 19 nt, Homo sapiens
  misc_RNA (1)...(19): siRNA sense strand
ucagggcuauccucucaga

SEQ ID NO: 334380 - RNA, 19 nt, Homo sapiens
  misc_RNA (1)...(19): siRNA sense strand
agggauaccaugcaacaua

SEQ ID NO: 334381 - RNA, 19 nt, Homo sapiens
  misc_RNA (1)...(19): siRNA sense strand
gcuagaaaucuguugcuau

SEQ ID NO: 334382 - RNA, 19 nt, Homo sapiens
  misc_RNA (1)...(19): siRNA sense strand
ugaaugagcaugauuuuga

SEQ ID NO: 334383 - RNA, 19 nt, Homo sapiens
  misc_RNA (1)...(19): siRNA sense strand
ggcuagaaaucuguugcua

SEQ ID NO: 334384 - RNA, 19 nt, Homo sapiens
  misc_RNA (1)...(19): siRNA sense strand
ugaaacaagcgucucugaa

SEQ ID NO: 334385 - RNA, 19 nt, Homo sapiens
  misc_RNA (1)...(19): siRNA sense strand
aacauaaccugauaaagcu

SEQ ID NO: 334386 - RNA, 19 nt, Homo sapiens
  misc_RNA (1)...(19): siRNA sense strand
ugacccagucuauuaaaga

SEQ ID NO: 334387 - RNA, 19 nt, Homo sapiens
  misc_RNA (1)...(19): siRNA sense strand
gaacuagaagcuguguuag

SEQ ID NO: 334388 - RNA, 19 nt, Homo sapiens
  misc_RNA (1)...(19): siRNA sense strand
gugaaacaagcgucucuga

SEQ ID NO: 334389 - RNA, 19 nt, Homo sapiens
  misc_RNA (1)...(19): siRNA sense strand
ccaacaugcccacagauca

SEQ ID NO: 334390 - RNA, 19 nt, Homo sapiens
  misc_RNA (1)...(19): siRNA sense strand
uaugggcccuucaccaaca

SEQ ID NO: 334391 - RNA, 19 nt, Homo sapiens
  misc_RNA (1)...(19): siRNA sense strand
guccaaagcgagcaagaga

SEQ ID NO: 334392 - RNA, 19 nt, Homo sapiens
  misc_RNA (1)...(19): siRNA sense strand
cagaacaaagcacaucaga

SEQ ID NO: 334393 - RNA, 19 nt, Homo sapiens
  misc_RNA (1)...(19): siRNA sense strand
ccugcgaaauccagaacaa

SEQ ID NO: 334394 - RNA, 19 nt, Homo sapiens
  misc_RNA (1)...(19): siRNA sense strand
gaaaccaccaagguccaaa

SEQ ID NO: 334395 - RNA, 19 nt, Homo sapiens
  misc_RNA (1)...(19): siRNA sense strand
gauaaagcuccagcaggaa

SEQ ID NO: 334396 - RNA, 19 nt, Homo sapiens
  misc_RNA (1)...(19): siRNA sense strand
aaggagcuuucaucauuca

SEQ ID NO: 334397 - RNA, 19 nt, Homo sapiens
  misc_RNA (1)...(19): siRNA sense strand
ggugugagagugaaacaag

SEQ ID NO: 334398 - RNA, 19 nt, Homo sapiens
  misc_RNA (1)...(19): siRNA sense strand
gaaauggcugaacuagaag

SEQ ID NO: 334399 - RNA, 19 nt, Homo sapiens
  misc_RNA (1)...(19): siRNA sense strand
auaaagcuccagcaggaaa

SEQ ID NO: 334400 - RNA, 19 nt, Homo sapiens
  misc_RNA (1)...(19): siRNA sense strand
acccuuccaucauaaguga

SEQ ID NO: 334401 - RNA, 19 nt, Homo sapiens
  misc_RNA (1)...(19): siRNA sense strand
ggugacccagucuauuaaa

SEQ ID NO: 334402 - RNA, 19 nt, Homo sapiens
  misc_RNA (1)...(19): siRNA sense strand
cccagucuauuaaagaaag

SEQ ID NO: 334403 - RNA, 19 nt, Homo sapiens
  misc_RNA (1)...(19): siRNA sense strand
caucugggugugagaguga

SEQ ID NO: 334404 - RNA, 19 nt, Homo sapiens
  misc_RNA (1)...(19): siRNA sense strand
ccagucuauuaaagaaaga

SEQ ID NO: 334405 - RNA, 19 nt, Homo sapiens
  misc_RNA (1)...(19): siRNA sense strand
cgaaauccagaacaaagca

SEQ ID NO: 334406 - RNA, 19 nt, Homo sapiens
  misc_RNA (1)...(19): siRNA sense strand
aagagaaucccaggacaga

SEQ ID NO: 334407 - RNA, 19 nt, Homo sapiens
  misc_RNA (1)...(19): siRNA sense strand
gauguggucaauggaagaa

SEQ ID NO: 334408 - RNA, 19 nt, Homo sapiens
  misc_RNA (1)...(19): siRNA sense strand
ggaccugcgaaauccagaa

SEQ ID NO: 334409 - RNA, 19 nt, Homo sapiens
  misc_RNA (1)...(19): siRNA sense strand
gagcaugauuuugaaguca

SEQ ID NO: 334410 - RNA, 19 nt, Homo sapiens
  misc_RNA (1)...(19): siRNA sense strand
gugacccagucuauuaaag

SEQ ID NO: 334411 - RNA, 19 nt, Homo sapiens
  misc_RNA (1)...(19): siRNA sense strand
agaacaaagcacaucagaa

SEQ ID NO: 334412 - RNA, 19 nt, Homo sapiens
  misc_RNA (1)...(19): siRNA sense strand
uggaagaaaccaccaaggu

SEQ ID NO: 334413 - RNA, 19 nt, Homo sapiens
  misc_RNA (1)...(19): siRNA sense strand
ucaacuggaauggauggua

SEQ ID NO: 334414 - RNA, 19 nt, Homo sapiens
  misc_RNA (1)...(19): siRNA sense strand
ggaaauggcugaacuagaa

SEQ ID NO: 334415 - RNA, 19 nt, Homo sapiens
  misc_RNA (1)...(19): siRNA sense strand
gaacaaagcacaucagaaa

SEQ ID NO: 334416 - RNA, 19 nt, Homo sapiens
  misc_RNA (1)...(19): siRNA sense strand
cagcuacccuuccaucaua

SEQ ID NO: 334417 - RNA, 19 nt, Homo sapiens
  misc_RNA (1)...(19): siRNA sense strand
gggauaccaugcaacauaa

SEQ ID NO: 334418 - RNA, 19 nt, Homo sapiens
  misc_RNA (1)...(19): siRNA sense strand
gaggagauguggucaaugg

SEQ ID NO: 334419 - RNA, 19 nt, Homo sapiens
  misc_RNA (1)...(19): siRNA sense strand
gaaggagcuuucaucauuc

SEQ ID NO: 334420 - RNA, 19 nt, Homo sapiens
  misc_RNA (1)...(19): siRNA sense strand
cuagaaaucuguugcuaug

SEQ ID NO: 334421 - RNA, 19 nt, Homo sapiens
  misc_RNA (1)...(19): siRNA sense strand
gcucagggcuauccucuca

SEQ ID NO: 334422 - RNA, 19 nt, Homo sapiens
  misc_RNA (1)...(19): siRNA sense strand
aaacaagcgucucugaaga

SEQ ID NO: 334423 - RNA, 19 nt, Homo sapiens
  misc_RNA (1)...(19): siRNA sense strand
caacauaaccugauaaagc

SEQ ID NO: 334424 - RNA, 19 nt, Homo sapiens
  misc_RNA (1)...(19): siRNA sense strand
gaaacaagcgucucugaag

SEQ ID NO: 334425 - RNA, 19 nt, Homo sapiens
  misc_RNA (1)...(19): siRNA sense strand
gcagagggauaccaugcaa

SEQ ID NO: 334426 - RNA, 19 nt, Homo sapiens
  misc_RNA (1)...(19): siRNA sense strand
ugaacuagaagcuguguua

SEQ ID NO: 334427 - RNA, 19 nt, Homo sapiens
  misc_RNA (1)...(19): siRNA sense strand
gagaaucccaggacagaaa

SEQ ID NO: 334428 - RNA, 19 nt, Homo sapiens
  misc_RNA (1)...(19): siRNA sense strand
gcccacagaucaacuggaa

SEQ ID NO: 334429 - RNA, 19 nt, Homo sapiens
  misc_RNA (1)...(19): siRNA sense strand
gaagacugcucagggcuau

SEQ ID NO: 334430 - RNA, 19 nt, Homo sapiens
  misc_RNA (1)...(19): siRNA sense strand
gacccagucuauuaaagaa

SEQ ID NO: 334431 - RNA, 19 nt, Homo sapiens
  misc_RNA (1)...(19): siRNA sense strand
acuagaagcuguguuagaa

SEQ ID NO: 334432 - RNA, 19 nt, Homo sapiens
  misc_RNA (1)...(19): siRNA sense strand
caugcaacauaaccugaua

SEQ ID NO: 334433 - RNA, 19 nt, Homo sapiens
  misc_RNA (1)...(19): siRNA sense strand
gcuggacaccuaccugaua

SEQ ID NO: 334434 - RNA, 19 nt, Homo sapiens
  misc_RNA (1)...(19): siRNA sense strand
cagaucaacuggaauggau

SEQ ID NO: 334435 - RNA, 19 nt, Homo sapiens
  misc_RNA (1)...(19): siRNA sense strand
gcaggaaauggcugaacua

SEQ ID NO: 334436 - RNA, 19 nt, Homo sapiens
  misc_RNA (1)...(19): siRNA sense strand
ccacagaucaacuggaaug

SEQ ID NO: 334437 - RNA, 19 nt, Homo sapiens
  misc_RNA (1)...(19): siRNA sense strand
caacaugcccacagaucaa

SEQ ID NO: 334438 - RNA, 19 nt, Homo sapiens
  misc_RNA (1)...(19): siRNA sense strand
ucaccaacaugcccacaga

SEQ ID NO: 334439 - RNA, 19 nt, Homo sapiens
  misc_RNA (1)...(19): siRNA sense strand
cagaggagauguggucaau

SEQ ID NO: 334440 - RNA, 19 nt, Homo sapiens
  misc_RNA (1)...(19): siRNA sense strand
caauugggcagauguguga

SEQ ID NO: 334441 - RNA, 19 nt, Homo sapiens
  misc_RNA (1)...(19): siRNA sense strand
ggagauguggucaauggaa

SEQ ID NO: 334442 - RNA, 19 nt, Homo sapiens
  misc_RNA (1)...(19): siRNA sense strand
guacagcuguguggugcuu

SEQ ID NO: 334443 - RNA, 19 nt, Homo sapiens
  misc_RNA (1)...(19): siRNA sense strand
ccaaagcgagcaagagaau

SEQ ID NO: 334444 - RNA, 19 nt, Homo sapiens
  misc_RNA (1)...(19): siRNA sense strand
gcuaugggcccuucaccaa

SEQ ID NO: 334445 - RNA, 19 nt, Homo sapiens
  misc_RNA (1)...(19): siRNA sense strand
gaaugagcaugauuuugaa

SEQ ID NO: 334446 - RNA, 19 nt, Homo sapiens
  misc_RNA (1)...(19): siRNA sense strand
ucagggcuauccucucaga

SEQ ID NO: 334447 - RNA, 19 nt, Homo sapiens
  misc_RNA (1)...(19): siRNA sense strand
agggauaccaugcaacaua

SEQ ID NO: 334448 - RNA, 19 nt, Homo sapiens
  misc_RNA (1)...(19): siRNA sense strand
gcuagaaaucuguugcuau

SEQ ID NO: 334449 - RNA, 19 nt, Homo sapiens
  misc_RNA (1)...(19): siRNA sense strand
ugaaugagcaugauuuuga

SEQ ID NO: 334450 - RNA, 19 nt, Homo sapiens
  misc_RNA (1)...(19): siRNA sense strand
ggcuagaaaucuguugcua

SEQ ID NO: 334451 - RNA, 19 nt, Homo sapiens
  misc_RNA (1)...(19): siRNA sense strand
ugaaacaagcgucucugaa

SEQ ID NO: 334452 - RNA, 19 nt, Homo sapiens
  misc_RNA (1)...(19): siRNA sense strand
aacauaaccugauaaagcu

SEQ ID NO: 334453 - RNA, 19 nt, Homo sapiens
  misc_RNA (1)...(19): siRNA sense strand
ugacccagucuauuaaaga

SEQ ID NO: 334454 - RNA, 19 nt, Homo sapiens
  misc_RNA (1)...(19): siRNA sense strand
gaacuagaagcuguguuag

SEQ ID NO: 334455 - RNA, 19 nt, Homo sapiens
  misc_RNA (1)...(19): siRNA sense strand
gugaaacaagcgucucuga

SEQ ID NO: 334456 - RNA, 19 nt, Homo sapiens
  misc_RNA (1)...(19): siRNA sense strand
ccaacaugcccacagauca

SEQ ID NO: 334457 - RNA, 19 nt, Homo sapiens
  misc_RNA (1)...(19): siRNA sense strand
uaugggcccuucaccaaca

SEQ ID NO: 334458 - RNA, 19 nt, Homo sapiens
  misc_RNA (1)...(19): siRNA sense strand
guccaaagcgagcaagaga

SEQ ID NO: 334459 - RNA, 19 nt, Homo sapiens
  misc_RNA (1)...(19): siRNA sense strand
cagaacaaagcacaucaga

SEQ ID NO: 334460 - RNA, 19 nt, Homo sapiens
  misc_RNA (1)...(19): siRNA sense strand
ccugcgaaauccagaacaa

SEQ ID NO: 334461 - RNA, 19 nt, Homo sapiens
  misc_RNA (1)...(19): siRNA sense strand
gaaaccaccaagguccaaa

SEQ ID NO: 334462 - RNA, 19 nt, Homo sapiens
  misc_RNA (1)...(19): siRNA sense strand
gauaaagcuccagcaggaa

SEQ ID NO: 334463 - RNA, 19 nt, Homo sapiens
  misc_RNA (1)...(19): siRNA sense strand
aaggagcuuucaucauuca

SEQ ID NO: 334464 - RNA, 19 nt, Homo sapiens
  misc_RNA (1)...(19): siRNA sense strand
ggugugagagugaaacaag

SEQ ID NO: 334465 - RNA, 19 nt, Homo sapiens
  misc_RNA (1)...(19): siRNA sense strand
gaaauggcugaacuagaag

SEQ ID NO: 334466 - RNA, 19 nt, Homo sapiens
  misc_RNA (1)...(19): siRNA sense strand
auaaagcuccagcaggaaa

SEQ ID NO: 334467 - RNA, 19 nt, Homo sapiens
  misc_RNA (1)...(19): siRNA sense strand
acccuuccaucauaaguga

SEQ ID NO: 334468 - RNA, 19 nt, Homo sapiens
  misc_RNA (1)...(19): siRNA sense strand
ggugacccagucuauuaaa

SEQ ID NO: 334469 - RNA, 19 nt, Homo sapiens
  misc_RNA (1)...(19): siRNA sense strand
cccagucuauuaaagaaag

SEQ ID NO: 334470 - RNA, 19 nt, Homo sapiens
  misc_RNA (1)...(19): siRNA sense strand
caucugggugugagaguga

SEQ ID NO: 334471 - RNA, 19 nt, Homo sapiens
  misc_RNA (1)...(19): siRNA sense strand
ccagucuauuaaagaaaga

SEQ ID NO: 334472 - RNA, 19 nt, Homo sapiens
  misc_RNA (1)...(19): siRNA sense strand
cgaaauccagaacaaagca

SEQ ID NO: 334473 - RNA, 19 nt, Homo sapiens
  misc_RNA (1)...(19): siRNA sense strand
aagagaaucccaggacaga

SEQ ID NO: 334474 - RNA, 19 nt, Homo sapiens
  misc_RNA (1)...(19): siRNA sense strand
gauguggucaauggaagaa

SEQ ID NO: 334475 - RNA, 19 nt, Homo sapiens
  misc_RNA (1)...(19): siRNA sense strand
ggaccugcgaaauccagaa

SEQ ID NO: 334476 - RNA, 19 nt, Homo sapiens
  misc_RNA (1)...(19): siRNA sense strand
gagcaugauuuugaaguca

SEQ ID NO: 334477 - RNA, 19 nt, Homo sapiens
  misc_RNA (1)...(19): siRNA sense strand
gugacccagucuauuaaag

SEQ ID NO: 334478 - RNA, 19 nt, Homo sapiens
  misc_RNA (1)...(19): siRNA sense strand
agaacaaagcacaucagaa

SEQ ID NO: 334479 - RNA, 19 nt, Homo sapiens
  misc_RNA (1)...(19): siRNA sense strand
uggaagaaaccaccaaggu

SEQ ID NO: 334480 - RNA, 19 nt, Homo sapiens
  misc_RNA (1)...(19): siRNA sense strand
ucaacuggaauggauggua

SEQ ID NO: 334481 - RNA, 19 nt, Homo sapiens
  misc_RNA (1)...(19): siRNA sense strand
ggaaauggcugaacuagaa

SEQ ID NO: 334482 - RNA, 19 nt, Homo sapiens
  misc_RNA (1)...(19): siRNA sense strand
gaacaaagcacaucagaaa

SEQ ID NO: 334483 - RNA, 19 nt, Homo sapiens
  misc_RNA (1)...(19): siRNA sense strand
cagcuacccuuccaucaua

SEQ ID NO: 334484 - RNA, 19 nt, Homo sapiens
  misc_RNA (1)...(19): siRNA sense strand
gggauaccaugcaacauaa

SEQ ID NO: 334485 - RNA, 19 nt, Homo sapiens
  misc_RNA (1)...(19): siRNA sense strand
gcucagggcuauccucuca

SEQ ID NO: 334486 - RNA, 19 nt, Homo sapiens
  misc_RNA (1)...(19): siRNA sense strand
aaacaagcgucucugaaga

SEQ ID NO: 334487 - RNA, 19 nt, Homo sapiens
  misc_RNA (1)...(19): siRNA sense strand
caacauaaccugauaaagc

SEQ ID NO: 334488 - RNA, 19 nt, Homo sapiens
  misc_RNA (1)...(19): siRNA sense strand
gaaacaagcgucucugaag

SEQ ID NO: 334489 - RNA, 19 nt, Homo sapiens
  misc_RNA (1)...(19): siRNA sense strand
gcagagggauaccaugcaa

SEQ ID NO: 334490 - RNA, 19 nt, Homo sapiens
  misc_RNA (1)...(19): siRNA sense strand
ugaacuagaagcuguguua

SEQ ID NO: 334491 - RNA, 19 nt, Homo sapiens
  misc_RNA (1)...(19): siRNA sense strand
gaagacugcucagggcuau

SEQ ID NO: 334492 - RNA, 19 nt, Homo sapiens
  misc_RNA (1)...(19): siRNA sense strand
acuagaagcuguguuagaa

SEQ ID NO: 334493 - RNA, 19 nt, Homo sapiens
  misc_RNA (1)...(19): siRNA sense strand
caugcaacauaaccugaua

SEQ ID NO: 334494 - RNA, 19 nt, Homo sapiens
  misc_RNA (1)...(19): siRNA sense strand
gcaggaaauggcugaacua

SEQ ID NO: 334495 - RNA, 19 nt, Homo sapiens
  misc_RNA (1)...(19): siRNA sense strand
ucagggcuauccucucaga

SEQ ID NO: 334496 - RNA, 19 nt, Homo sapiens
  misc_RNA (1)...(19): siRNA sense strand
agggauaccaugcaacaua

SEQ ID NO: 334497 - RNA, 19 nt, Homo sapiens
  misc_RNA (1)...(19): siRNA sense strand
ugaaacaagcgucucugaa

SEQ ID NO: 334498 - RNA, 19 nt, Homo sapiens
  misc_RNA (1)...(19): siRNA sense strand
aacauaaccugauaaagcu

SEQ ID NO: 334499 - RNA, 19 nt, Homo sapiens
  misc_RNA (1)...(19): siRNA sense strand
gaacuagaagcuguguuag

SEQ ID NO: 334500 - RNA, 19 nt, Homo sapiens
  misc_RNA (1)...(19): siRNA sense strand
cagaacaaagcacaucaga

SEQ ID NO: 334501 - RNA, 19 nt, Homo sapiens
  misc_RNA (1)...(19): siRNA sense strand
gugaaacaagcgucucuga

SEQ ID NO: 334502 - RNA, 19 nt, Homo sapiens
  misc_RNA (1)...(19): siRNA sense strand
ccugcgaaauccagaacaa

SEQ ID NO: 334503 - RNA, 19 nt, Homo sapiens
  misc_RNA (1)...(19): siRNA sense strand
gauaaagcuccagcaggaa

SEQ ID NO: 334504 - RNA, 19 nt, Homo sapiens
  misc_RNA (1)...(19): siRNA sense strand
ggugugagagugaaacaag

SEQ ID NO: 334505 - RNA, 19 nt, Homo sapiens
  misc_RNA (1)...(19): siRNA sense strand
auaaagcuccagcaggaaa

SEQ ID NO: 334506 - RNA, 19 nt, Homo sapiens
  misc_RNA (1)...(19): siRNA sense strand
acccuuccaucauaaguga

SEQ ID NO: 334507 - RNA, 19 nt, Homo sapiens
  misc_RNA (1)...(19): siRNA sense strand
gaaauggcugaacuagaag

SEQ ID NO: 334508 - RNA, 19 nt, Homo sapiens
  misc_RNA (1)...(19): siRNA sense strand
caucugggugugagaguga

SEQ ID NO: 334509 - RNA, 19 nt, Homo sapiens
  misc_RNA (1)...(19): siRNA sense strand
cgaaauccagaacaaagca

SEQ ID NO: 334510 - RNA, 19 nt, Homo sapiens
  misc_RNA (1)...(19): siRNA sense strand
ggaccugcgaaauccagaa

SEQ ID NO: 334511 - RNA, 19 nt, Homo sapiens
  misc_RNA (1)...(19): siRNA sense strand
agaacaaagcacaucagaa

SEQ ID NO: 334512 - RNA, 19 nt, Homo sapiens
  misc_RNA (1)...(19): siRNA sense strand
ggaaauggcugaacuagaa

SEQ ID NO: 334513 - RNA, 19 nt, Homo sapiens
  misc_RNA (1)...(19): siRNA sense strand
gaacaaagcacaucagaaa

SEQ ID NO: 334514 - RNA, 19 nt, Homo sapiens
  misc_RNA (1)...(19): siRNA sense strand
cagcuacccuuccaucaua

SEQ ID NO: 334515 - RNA, 19 nt, Homo sapiens
  misc_RNA (1)...(19): siRNA sense strand
gggauaccaugcaacauaa

SEQ ID NO: 334516 - RNA, 19 nt, Homo sapiens
  misc_RNA (1)...(19): siRNA sense strand
gaggagauguggucaaugg

SEQ ID NO: 334517 - RNA, 19 nt, Homo sapiens
  misc_RNA (1)...(19): siRNA sense strand
gaaggagcuuucaucauuc

SEQ ID NO: 334518 - RNA, 19 nt, Homo sapiens
  misc_RNA (1)...(19): siRNA sense strand
cuagaaaucuguugcuaug

SEQ ID NO: 334519 - RNA, 19 nt, Homo sapiens
  misc_RNA (1)...(19): siRNA sense strand
gcucagggcuauccucuca

SEQ ID NO: 334520 - RNA, 19 nt, Homo sapiens
  misc_RNA (1)...(19): siRNA sense strand
aaacaagcgucucugaaga

SEQ ID NO: 334521 - RNA, 19 nt, Homo sapiens
  misc_RNA (1)...(19): siRNA sense strand
caacauaaccugauaaagc

SEQ ID NO: 334522 - RNA, 19 nt, Homo sapiens
  misc_RNA (1)...(19): siRNA sense strand
gaaacaagcgucucugaag

SEQ ID NO: 334523 - RNA, 19 nt, Homo sapiens
  misc_RNA (1)...(19): siRNA sense strand
gcagagggauaccaugcaa

SEQ ID NO: 334524 - RNA, 19 nt, Homo sapiens
  misc_RNA (1)...(19): siRNA sense strand
ugaacuagaagcuguguua

SEQ ID NO: 334525 - RNA, 19 nt, Homo sapiens
  misc_RNA (1)...(19): siRNA sense strand
gagaaucccaggacagaaa

SEQ ID NO: 334526 - RNA, 19 nt, Homo sapiens
  misc_RNA (1)...(19): siRNA sense strand
gcccacagaucaacuggaa

SEQ ID NO: 334527 - RNA, 19 nt, Homo sapiens
  misc_RNA (1)...(19): siRNA sense strand
gaagacugcucagggcuau

SEQ ID NO: 334528 - RNA, 19 nt, Homo sapiens
  misc_RNA (1)...(19): siRNA sense strand
gacccagucuauuaaagaa

SEQ ID NO: 334529 - RNA, 19 nt, Homo sapiens
  misc_RNA (1)...(19): siRNA sense strand
acuagaagcuguguuagaa

SEQ ID NO: 334530 - RNA, 19 nt, Homo sapiens
  misc_RNA (1)...(19): siRNA sense strand
caugcaacauaaccugaua

SEQ ID NO: 334531 - RNA, 19 nt, Homo sapiens
  misc_RNA (1)...(19): siRNA sense strand
gcuggacaccuaccugaua

SEQ ID NO: 334532 - RNA, 19 nt, Homo sapiens
  misc_RNA (1)...(19): siRNA sense strand
cagaucaacuggaauggau

SEQ ID NO: 334533 - RNA, 19 nt, Homo sapiens
  misc_RNA (1)...(19): siRNA sense strand
gcaggaaauggcugaacua

SEQ ID NO: 334534 - RNA, 19 nt, Homo sapiens
  misc_RNA (1)...(19): siRNA sense strand
ccacagaucaacuggaaug

SEQ ID NO: 334535 - RNA, 19 nt, Homo sapiens
  misc_RNA (1)...(19): siRNA sense strand
caacaugcccacagaucaa

SEQ ID NO: 334536 - RNA, 19 nt, Homo sapiens
  misc_RNA (1)...(19): siRNA sense strand
ucaccaacaugcccacaga

SEQ ID NO: 334537 - RNA, 19 nt, Homo sapiens
  misc_RNA (1)...(19): siRNA sense strand
cagaggagauguggucaau

SEQ ID NO: 334538 - RNA, 19 nt, Homo sapiens
  misc_RNA (1)...(19): siRNA sense strand
caauugggcagauguguga

SEQ ID NO: 334539 - RNA, 19 nt, Homo sapiens
  misc_RNA (1)...(19): siRNA sense strand
ggagauguggucaauggaa

SEQ ID NO: 334540 - RNA, 19 nt, Homo sapiens
  misc_RNA (1)...(19): siRNA sense strand
guacagcuguguggugcuu

SEQ ID NO: 334541 - RNA, 19 nt, Homo sapiens
  misc_RNA (1)...(19): siRNA sense strand
ccaaagcgagcaagagaau

SEQ ID NO: 334542 - RNA, 19 nt, Homo sapiens
  misc_RNA (1)...(19): siRNA sense strand
gcuaugggcccuucaccaa

SEQ ID NO: 334543 - RNA, 19 nt, Homo sapiens
  misc_RNA (1)...(19): siRNA sense strand
gaaugagcaugauuuugaa

SEQ ID NO: 334544 - RNA, 19 nt, Homo sapiens
  misc_RNA (1)...(19): siRNA sense strand
ucagggcuauccucucaga

SEQ ID NO: 334545 - RNA, 19 nt, Homo sapiens
  misc_RNA (1)...(19): siRNA sense strand
agggauaccaugcaacaua

SEQ ID NO: 334546 - RNA, 19 nt, Homo sapiens
  misc_RNA (1)...(19): siRNA sense strand
gcuagaaaucuguugcuau

SEQ ID NO: 334547 - RNA, 19 nt, Homo sapiens
  misc_RNA (1)...(19): siRNA sense strand
ugaaugagcaugauuuuga

SEQ ID NO: 334548 - RNA, 19 nt, Homo sapiens
  misc_RNA (1)...(19): siRNA sense strand
ggcuagaaaucuguugcua

SEQ ID NO: 334549 - RNA, 19 nt, Homo sapiens
  misc_RNA (1)...(19): siRNA sense strand
ugaaacaagcgucucugaa

SEQ ID NO: 334550 - RNA, 19 nt, Homo sapiens
  misc_RNA (1)...(19): siRNA sense strand
aacauaaccugauaaagcu

SEQ ID NO: 334551 - RNA, 19 nt, Homo sapiens
  misc_RNA (1)...(19): siRNA sense strand
ugacccagucuauuaaaga

SEQ ID NO: 334552 - RNA, 19 nt, Homo sapiens
  misc_RNA (1)...(19): siRNA sense strand
gaacuagaagcuguguuag

SEQ ID NO: 334553 - RNA, 19 nt, Homo sapiens
  misc_RNA (1)...(19): siRNA sense strand
gugaaacaagcgucucuga

SEQ ID NO: 334554 - RNA, 19 nt, Homo sapiens
  misc_RNA (1)...(19): siRNA sense strand
ccaacaugcccacagauca

SEQ ID NO: 334555 - RNA, 19 nt, Homo sapiens
  misc_RNA (1)...(19): siRNA sense strand
uaugggcccuucaccaaca

SEQ ID NO: 334556 - RNA, 19 nt, Homo sapiens
  misc_RNA (1)...(19): siRNA sense strand
guccaaagcgagcaagaga

SEQ ID NO: 334557 - RNA, 19 nt, Homo sapiens
  misc_RNA (1)...(19): siRNA sense strand
cagaacaaagcacaucaga

SEQ ID NO: 334558 - RNA, 19 nt, Homo sapiens
  misc_RNA (1)...(19): siRNA sense strand
ccugcgaaauccagaacaa

SEQ ID NO: 334559 - RNA, 19 nt, Homo sapiens
  misc_RNA (1)...(19): siRNA sense strand
gaaaccaccaagguccaaa

SEQ ID NO: 334560 - RNA, 19 nt, Homo sapiens
  misc_RNA (1)...(19): siRNA sense strand
gauaaagcuccagcaggaa

SEQ ID NO: 334561 - RNA, 19 nt, Homo sapiens
  misc_RNA (1)...(19): siRNA sense strand
aaggagcuuucaucauuca

SEQ ID NO: 334562 - RNA, 19 nt, Homo sapiens
  misc_RNA (1)...(19): siRNA sense strand
ggugugagagugaaacaag

SEQ ID NO: 334563 - RNA, 19 nt, Homo sapiens
  misc_RNA (1)...(19): siRNA sense strand
gaaauggcugaacuagaag

SEQ ID NO: 334564 - RNA, 19 nt, Homo sapiens
  misc_RNA (1)...(19): siRNA sense strand
auaaagcuccagcaggaaa

SEQ ID NO: 334565 - RNA, 19 nt, Homo sapiens
  misc_RNA (1)...(19): siRNA sense strand
acccuuccaucauaaguga

SEQ ID NO: 334566 - RNA, 19 nt, Homo sapiens
  misc_RNA (1)...(19): siRNA sense strand
ggugacccagucuauuaaa

SEQ ID NO: 334567 - RNA, 19 nt, Homo sapiens
  misc_RNA (1)...(19): siRNA sense strand
cccagucuauuaaagaaag

SEQ ID NO: 334568 - RNA, 19 nt, Homo sapiens
  misc_RNA (1)...(19): siRNA sense strand
caucugggugugagaguga

SEQ ID NO: 334569 - RNA, 19 nt, Homo sapiens
  misc_RNA (1)...(19): siRNA sense strand
ccagucuauuaaagaaaga

SEQ ID NO: 334570 - RNA, 19 nt, Homo sapiens
  misc_RNA (1)...(19): siRNA sense strand
cgaaauccagaacaaagca

SEQ ID NO: 334571 - RNA, 19 nt, Homo sapiens
  misc_RNA (1)...(19): siRNA sense strand
aagagaaucccaggacaga

SEQ ID NO: 334572 - RNA, 19 nt, Homo sapiens
  misc_RNA (1)...(19): siRNA sense strand
gauguggucaauggaagaa

SEQ ID NO: 334573 - RNA, 19 nt, Homo sapiens
  misc_RNA (1)...(19): siRNA sense strand
ggaccugcgaaauccagaa

SEQ ID NO: 334574 - RNA, 19 nt, Homo sapiens
  misc_RNA (1)...(19): siRNA sense strand
gagcaugauuuugaaguca

SEQ ID NO: 334575 - RNA, 19 nt, Homo sapiens
  misc_RNA (1)...(19): siRNA sense strand
gugacccagucuauuaaag

SEQ ID NO: 334576 - RNA, 19 nt, Homo sapiens
  misc_RNA (1)...(19): siRNA sense strand
agaacaaagcacaucagaa

SEQ ID NO: 334577 - RNA, 19 nt, Homo sapiens
  misc_RNA (1)...(19): siRNA sense strand
uggaagaaaccaccaaggu

SEQ ID NO: 334578 - RNA, 19 nt, Homo sapiens
  misc_RNA (1)...(19): siRNA sense strand
ucaacuggaauggauggua

SEQ ID NO: 334579 - RNA, 19 nt, Homo sapiens
  misc_RNA (1)...(19): siRNA sense strand
ggaaauggcugaacuagaa

SEQ ID NO: 334580 - RNA, 19 nt, Homo sapiens
  misc_RNA (1)...(19): siRNA sense strand
gaacaaagcacaucagaaa

SEQ ID NO: 334581 - RNA, 19 nt, Homo sapiens
  misc_RNA (1)...(19): siRNA sense strand
cagcuacccuuccaucaua

SEQ ID NO: 334582 - RNA, 19 nt, Homo sapiens
  misc_RNA (1)...(19): siRNA sense strand
gggauaccaugcaacauaa

SEQ ID NO: 334583 - RNA, 19 nt, Homo sapiens
  misc_RNA (1)...(19): siRNA sense strand
gaggagauguggucaaugg

SEQ ID NO: 334584 - RNA, 19 nt, Homo sapiens
  misc_RNA (1)...(19): siRNA sense strand
gaaggagcuuucaucauuc

SEQ ID NO: 334585 - RNA, 19 nt, Homo sapiens
  misc_RNA (1)...(19): siRNA sense strand
cuagaaaucuguugcuaug

SEQ ID NO: 334586 - RNA, 19 nt, Homo sapiens
  misc_RNA (1)...(19): siRNA sense strand
gcucagggcuauccucuca

SEQ ID NO: 334587 - RNA, 19 nt, Homo sapiens
  misc_RNA (1)...(19): siRNA sense strand
aaacaagcgucucugaaga

SEQ ID NO: 334588 - RNA, 19 nt, Homo sapiens
  misc_RNA (1)...(19): siRNA sense strand
caacauaaccugauaaagc

SEQ ID NO: 334589 - RNA, 19 nt, Homo sapiens
  misc_RNA (1)...(19): siRNA sense strand
gaaacaagcgucucugaag

SEQ ID NO: 334590 - RNA, 19 nt, Homo sapiens
  misc_RNA (1)...(19): siRNA sense strand
gcagagggauaccaugcaa

SEQ ID NO: 334591 - RNA, 19 nt, Homo sapiens
  misc_RNA (1)...(19): siRNA sense strand
ugaacuagaagcuguguua

SEQ ID NO: 334592 - RNA, 19 nt, Homo sapiens
  misc_RNA (1)...(19): siRNA sense strand
gagaaucccaggacagaaa

SEQ ID NO: 334593 - RNA, 19 nt, Homo sapiens
  misc_RNA (1)...(19): siRNA sense strand
gcccacagaucaacuggaa

SEQ ID NO: 334594 - RNA, 19 nt, Homo sapiens
  misc_RNA (1)...(19): siRNA sense strand
gaagacugcucagggcuau

SEQ ID NO: 334595 - RNA, 19 nt, Homo sapiens
  misc_RNA (1)...(19): siRNA sense strand
gacccagucuauuaaagaa

SEQ ID NO: 334596 - RNA, 19 nt, Homo sapiens
  misc_RNA (1)...(19): siRNA sense strand
acuagaagcuguguuagaa

SEQ ID NO: 334597 - RNA, 19 nt, Homo sapiens
  misc_RNA (1)...(19): siRNA sense strand
caugcaacauaaccugaua

SEQ ID NO: 334598 - RNA, 19 nt, Homo sapiens
  misc_RNA (1)...(19): siRNA sense strand
gcuggacaccuaccugaua

SEQ ID NO: 334599 - RNA, 19 nt, Homo sapiens
  misc_RNA (1)...(19): siRNA sense strand
cagaucaacuggaauggau

SEQ ID NO: 334600 - RNA, 19 nt, Homo sapiens
  misc_RNA (1)...(19): siRNA sense strand
gcaggaaauggcugaacua

SEQ ID NO: 334601 - RNA, 19 nt, Homo sapiens
  misc_RNA (1)...(19): siRNA sense strand
ccacagaucaacuggaaug

SEQ ID NO: 334602 - RNA, 19 nt, Homo sapiens
  misc_RNA (1)...(19): siRNA sense strand
caacaugcccacagaucaa

SEQ ID NO: 334603 - RNA, 19 nt, Homo sapiens
  misc_RNA (1)...(19): siRNA sense strand
ucaccaacaugcccacaga

SEQ ID NO: 334604 - RNA, 19 nt, Homo sapiens
  misc_RNA (1)...(19): siRNA sense strand
cagaggagauguggucaau

SEQ ID NO: 334605 - RNA, 19 nt, Homo sapiens
  misc_RNA (1)...(19): siRNA sense strand
caauugggcagauguguga

SEQ ID NO: 334606 - RNA, 19 nt, Homo sapiens
  misc_RNA (1)...(19): siRNA sense strand
ggagauguggucaauggaa

SEQ ID NO: 334607 - RNA, 19 nt, Homo sapiens
  misc_RNA (1)...(19): siRNA sense strand
guacagcuguguggugcuu

SEQ ID NO: 334608 - RNA, 19 nt, Homo sapiens
  misc_RNA (1)...(19): siRNA sense strand
ccaaagcgagcaagagaau

SEQ ID NO: 334609 - RNA, 19 nt, Homo sapiens
  misc_RNA (1)...(19): siRNA sense strand
gcuaugggcccuucaccaa

SEQ ID NO: 334610 - RNA, 19 nt, Homo sapiens
  misc_RNA (1)...(19): siRNA sense strand
gaaugagcaugauuuugaa

SEQ ID NO: 334611 - RNA, 19 nt, Homo sapiens
  misc_RNA (1)...(19): siRNA sense strand
ucagggcuauccucucaga

SEQ ID NO: 334612 - RNA, 19 nt, Homo sapiens
  misc_RNA (1)...(19): siRNA sense strand
agggauaccaugcaacaua

SEQ ID NO: 334613 - RNA, 19 nt, Homo sapiens
  misc_RNA (1)...(19): siRNA sense strand
gcuagaaaucuguugcuau

SEQ ID NO: 334614 - RNA, 19 nt, Homo sapiens
  misc_RNA (1)...(19): siRNA sense strand
ugaaugagcaugauuuuga

SEQ ID NO: 334615 - RNA, 19 nt, Homo sapiens
  misc_RNA (1)...(19): siRNA sense strand
ggcuagaaaucuguugcua

SEQ ID NO: 334616 - RNA, 19 nt, Homo sapiens
  misc_RNA (1)...(19): siRNA sense strand
ugaaacaagcgucucugaa

SEQ ID NO: 334617 - RNA, 19 nt, Homo sapiens
  misc_RNA (1)...(19): siRNA sense strand
aacauaaccugauaaagcu

SEQ ID NO: 334618 - RNA, 19 nt, Homo sapiens
  misc_RNA (1)...(19): siRNA sense strand
ugacccagucuauuaaaga

SEQ ID NO: 334619 - RNA, 19 nt, Homo sapiens
  misc_RNA (1)...(19): siRNA sense strand
gaacuagaagcuguguuag

SEQ ID NO: 334620 - RNA, 19 nt, Homo sapiens
  misc_RNA (1)...(19): siRNA sense strand
gugaaacaagcgucucuga

SEQ ID NO: 334621 - RNA, 19 nt, Homo sapiens
  misc_RNA (1)...(19): siRNA sense strand
ccaacaugcccacagauca

SEQ ID NO: 334622 - RNA, 19 nt, Homo sapiens
  misc_RNA (1)...(19): siRNA sense strand
uaugggcccuucaccaaca

SEQ ID NO: 334623 - RNA, 19 nt, Homo sapiens
  misc_RNA (1)...(19): siRNA sense strand
guccaaagcgagcaagaga

SEQ ID NO: 334624 - RNA, 19 nt, Homo sapiens
  misc_RNA (1)...(19): siRNA sense strand
cagaacaaagcacaucaga

SEQ ID NO: 334625 - RNA, 19 nt, Homo sapiens
  misc_RNA (1)...(19): siRNA sense strand
ccugcgaaauccagaacaa

SEQ ID NO: 334626 - RNA, 19 nt, Homo sapiens
  misc_RNA (1)...(19): siRNA sense strand
gaaaccaccaagguccaaa

SEQ ID NO: 334627 - RNA, 19 nt, Homo sapiens
  misc_RNA (1)...(19): siRNA sense strand
gauaaagcuccagcaggaa

SEQ ID NO: 334628 - RNA, 19 nt, Homo sapiens
  misc_RNA (1)...(19): siRNA sense strand
aaggagcuuucaucauuca

SEQ ID NO: 334629 - RNA, 19 nt, Homo sapiens
  misc_RNA (1)...(19): siRNA sense strand
ggugugagagugaaacaag

SEQ ID NO: 334630 - RNA, 19 nt, Homo sapiens
  misc_RNA (1)...(19): siRNA sense strand
gaaauggcugaacuagaag

SEQ ID NO: 334631 - RNA, 19 nt, Homo sapiens
  misc_RNA (1)...(19): siRNA sense strand
auaaagcuccagcaggaaa

SEQ ID NO: 334632 - RNA, 19 nt, Homo sapiens
  misc_RNA (1)...(19): siRNA sense strand
acccuuccaucauaaguga

SEQ ID NO: 334633 - RNA, 19 nt, Homo sapiens
  misc_RNA (1)...(19): siRNA sense strand
ggugacccagucuauuaaa

SEQ ID NO: 334634 - RNA, 19 nt, Homo sapiens
  misc_RNA (1)...(19): siRNA sense strand
cccagucuauuaaagaaag

SEQ ID NO: 334635 - RNA, 19 nt, Homo sapiens
  misc_RNA (1)...(19): siRNA sense strand
caucugggugugagaguga

SEQ ID NO: 334636 - RNA, 19 nt, Homo sapiens
  misc_RNA (1)...(19): siRNA sense strand
ccagucuauuaaagaaaga

SEQ ID NO: 334637 - RNA, 19 nt, Homo sapiens
  misc_RNA (1)...(19): siRNA sense strand
cgaaauccagaacaaagca

SEQ ID NO: 334638 - RNA, 19 nt, Homo sapiens
  misc_RNA (1)...(19): siRNA sense strand
aagagaaucccaggacaga

SEQ ID NO: 334639 - RNA, 19 nt, Homo sapiens
  misc_RNA (1)...(19): siRNA sense strand
gauguggucaauggaagaa

SEQ ID NO: 334640 - RNA, 19 nt, Homo sapiens
  misc_RNA (1)...(19): siRNA sense strand
ggaccugcgaaauccagaa

SEQ ID NO: 334641 - RNA, 19 nt, Homo sapiens
  misc_RNA (1)...(19): siRNA sense strand
gagcaugauuuugaaguca

SEQ ID NO: 334642 - RNA, 19 nt, Homo sapiens
  misc_RNA (1)...(19): siRNA sense strand
gugacccagucuauuaaag

SEQ ID NO: 334643 - RNA, 19 nt, Homo sapiens
  misc_RNA (1)...(19): siRNA sense strand
agaacaaagcacaucagaa

SEQ ID NO: 334644 - RNA, 19 nt, Homo sapiens
  misc_RNA (1)...(19): siRNA sense strand
uggaagaaaccaccaaggu

SEQ ID NO: 334645 - RNA, 19 nt, Homo sapiens
  misc_RNA (1)...(19): siRNA sense strand
ucaacuggaauggauggua

SEQ ID NO: 334646 - RNA, 19 nt, Homo sapiens
  misc_RNA (1)...(19): siRNA sense strand
ggaaauggcugaacuagaa

SEQ ID NO: 334647 - RNA, 19 nt, Homo sapiens
  misc_RNA (1)...(19): siRNA sense strand
gaacaaagcacaucagaaa

SEQ ID NO: 334648 - RNA, 19 nt, Homo sapiens
  misc_RNA (1)...(19): siRNA sense strand
cagcuacccuuccaucaua

SEQ ID NO: 334649 - RNA, 19 nt, Homo sapiens
  misc_RNA (1)...(19): siRNA sense strand
gggauaccaugcaacauaa

SEQ ID NO: 334650 - RNA, 19 nt, Homo sapiens
  misc_RNA (1)...(19): siRNA sense strand
gaggagauguggucaaugg

SEQ ID NO: 334651 - RNA, 19 nt, Homo sapiens
  misc_RNA (1)...(19): siRNA sense strand
gaaggagcuuucaucauuc

SEQ ID NO: 334652 - RNA, 19 nt, Homo sapiens
  misc_RNA (1)...(19): siRNA sense strand
cuagaaaucuguugcuaug

SEQ ID NO: 334653 - RNA, 19 nt, Homo sapiens
  misc_RNA (1)...(19): siRNA sense strand
gcucagggcuauccucuca

SEQ ID NO: 334654 - RNA, 19 nt, Homo sapiens
  misc_RNA (1)...(19): siRNA sense strand
aaacaagcgucucugaaga

SEQ ID NO: 334655 - RNA, 19 nt, Homo sapiens
  misc_RNA (1)...(19): siRNA sense strand
caacauaaccugauaaagc

SEQ ID NO: 334656 - RNA, 19 nt, Homo sapiens
  misc_RNA (1)...(19): siRNA sense strand
gaaacaagcgucucugaag

SEQ ID NO: 334657 - RNA, 19 nt, Homo sapiens
  misc_RNA (1)...(19): siRNA sense strand
gcagagggauaccaugcaa

SEQ ID NO: 334658 - RNA, 19 nt, Homo sapiens
  misc_RNA (1)...(19): siRNA sense strand
ugaacuagaagcuguguua

SEQ ID NO: 334659 - RNA, 19 nt, Homo sapiens
  misc_RNA (1)...(19): siRNA sense strand
gagaaucccaggacagaaa

SEQ ID NO: 334660 - RNA, 19 nt, Homo sapiens
  misc_RNA (1)...(19): siRNA sense strand
gcccacagaucaacuggaa

SEQ ID NO: 334661 - RNA, 19 nt, Homo sapiens
  misc_RNA (1)...(19): siRNA sense strand
gaagacugcucagggcuau

SEQ ID NO: 334662 - RNA, 19 nt, Homo sapiens
  misc_RNA (1)...(19): siRNA sense strand
gacccagucuauuaaagaa

SEQ ID NO: 334663 - RNA, 19 nt, Homo sapiens
  misc_RNA (1)...(19): siRNA sense strand
acuagaagcuguguuagaa

SEQ ID NO: 334664 - RNA, 19 nt, Homo sapiens
  misc_RNA (1)...(19): siRNA sense strand
caugcaacauaaccugaua

SEQ ID NO: 334665 - RNA, 19 nt, Homo sapiens
  misc_RNA (1)...(19): siRNA sense strand
gcuggacaccuaccugaua

SEQ ID NO: 334666 - RNA, 19 nt, Homo sapiens
  misc_RNA (1)...(19): siRNA sense strand
cagaucaacuggaauggau

SEQ ID NO: 334667 - RNA, 19 nt, Homo sapiens
  misc_RNA (1)...(19): siRNA sense strand
gcaggaaauggcugaacua

SEQ ID NO: 334668 - RNA, 19 nt, Homo sapiens
  misc_RNA (1)...(19): siRNA sense strand
ccacagaucaacuggaaug

SEQ ID NO: 334669 - RNA, 19 nt, Homo sapiens
  misc_RNA (1)...(19): siRNA sense strand
caacaugcccacagaucaa

SEQ ID NO: 334670 - RNA, 19 nt, Homo sapiens
  misc_RNA (1)...(19): siRNA sense strand
ucaccaacaugcccacaga

SEQ ID NO: 334671 - RNA, 19 nt, Homo sapiens
  misc_RNA (1)...(19): siRNA sense strand
cagaggagauguggucaau

SEQ ID NO: 334672 - RNA, 19 nt, Homo sapiens
  misc_RNA (1)...(19): siRNA sense strand
caauugggcagauguguga

SEQ ID NO: 334673 - RNA, 19 nt, Homo sapiens
  misc_RNA (1)...(19): siRNA sense strand
ggagauguggucaauggaa

SEQ ID NO: 334674 - RNA, 19 nt, Homo sapiens
  misc_RNA (1)...(19): siRNA sense strand
guacagcuguguggugcuu

SEQ ID NO: 334675 - RNA, 19 nt, Homo sapiens
  misc_RNA (1)...(19): siRNA sense strand
ccaaagcgagcaagagaau

SEQ ID NO: 334676 - RNA, 19 nt, Homo sapiens
  misc_RNA (1)...(19): siRNA sense strand
gcuaugggcccuucaccaa

SEQ ID NO: 334677 - RNA, 19 nt, Homo sapiens
  misc_RNA (1)...(19): siRNA sense strand
gaaugagcaugauuuugaa

SEQ ID NO: 334678 - RNA, 19 nt, Homo sapiens
  misc_RNA (1)...(19): siRNA sense strand
ucagggcuauccucucaga

SEQ ID NO: 334679 - RNA, 19 nt, Homo sapiens
  misc_RNA (1)...(19): siRNA sense strand
agggauaccaugcaacaua

SEQ ID NO: 334680 - RNA, 19 nt, Homo sapiens
  misc_RNA (1)...(19): siRNA sense strand
gcuagaaaucuguugcuau

SEQ ID NO: 334681 - RNA, 19 nt, Homo sapiens
  misc_RNA (1)...(19): siRNA sense strand
ugaaugagcaugauuuuga

SEQ ID NO: 334682 - RNA, 19 nt, Homo sapiens
  misc_RNA (1)...(19): siRNA sense strand
ggcuagaaaucuguugcua

SEQ ID NO: 334683 - RNA, 19 nt, Homo sapiens
  misc_RNA (1)...(19): siRNA sense strand
ugaaacaagcgucucugaa

SEQ ID NO: 334684 - RNA, 19 nt, Homo sapiens
  misc_RNA (1)...(19): siRNA sense strand
aacauaaccugauaaagcu

SEQ ID NO: 334685 - RNA, 19 nt, Homo sapiens
  misc_RNA (1)...(19): siRNA sense strand
ugacccagucuauuaaaga

SEQ ID NO: 334686 - RNA, 19 nt, Homo sapiens
  misc_RNA (1)...(19): siRNA sense strand
gaacuagaagcuguguuag

SEQ ID NO: 334687 - RNA, 19 nt, Homo sapiens
  misc_RNA (1)...(19): siRNA sense strand
gugaaacaagcgucucuga

SEQ ID NO: 334688 - RNA, 19 nt, Homo sapiens
  misc_RNA (1)...(19): siRNA sense strand
ccaacaugcccacagauca

SEQ ID NO: 334689 - RNA, 19 nt, Homo sapiens
  misc_RNA (1)...(19): siRNA sense strand
uaugggcccuucaccaaca

SEQ ID NO: 334690 - RNA, 19 nt, Homo sapiens
  misc_RNA (1)...(19): siRNA sense strand
guccaaagcgagcaagaga

SEQ ID NO: 334691 - RNA, 19 nt, Homo sapiens
  misc_RNA (1)...(19): siRNA sense strand
cagaacaaagcacaucaga

SEQ ID NO: 334692 - RNA, 19 nt, Homo sapiens
  misc_RNA (1)...(19): siRNA sense strand
ccugcgaaauccagaacaa

SEQ ID NO: 334693 - RNA, 19 nt, Homo sapiens
  misc_RNA (1)...(19): siRNA sense strand
gaaaccaccaagguccaaa

SEQ ID NO: 334694 - RNA, 19 nt, Homo sapiens
  misc_RNA (1)...(19): siRNA sense strand
gauaaagcuccagcaggaa

SEQ ID NO: 334695 - RNA, 19 nt, Homo sapiens
  misc_RNA (1)...(19): siRNA sense strand
aaggagcuuucaucauuca

SEQ ID NO: 334696 - RNA, 19 nt, Homo sapiens
  misc_RNA (1)...(19): siRNA sense strand
ggugugagagugaaacaag

SEQ ID NO: 334697 - RNA, 19 nt, Homo sapiens
  misc_RNA (1)...(19): siRNA sense strand
gaaauggcugaacuagaag

SEQ ID NO: 334698 - RNA, 19 nt, Homo sapiens
  misc_RNA (1)...(19): siRNA sense strand
auaaagcuccagcaggaaa

SEQ ID NO: 334699 - RNA, 19 nt, Homo sapiens
  misc_RNA (1)...(19): siRNA sense strand
acccuuccaucauaaguga

SEQ ID NO: 334700 - RNA, 19 nt, Homo sapiens
  misc_RNA (1)...(19): siRNA sense strand
ggugacccagucuauuaaa
